United States Patent Application Publication US 2015/0141320 A1 - sequence listing, part 49

SEQ ID NO: 1936655 - DNA, 15 bp, Homo sapiens
atggttatttcattt

SEQ ID NO: 1936656 - DNA, 15 bp, Homo sapiens
tggttatttcattta

SEQ ID NO: 1936657 - DNA, 15 bp, Homo sapiens
ggttatttcatttat

SEQ ID NO: 1936658 - DNA, 15 bp, Homo sapiens
gttatttcatttatt

SEQ ID NO: 1936659 - DNA, 15 bp, Homo sapiens
ttatttcatttattt

SEQ ID NO: 1936660 - DNA, 15 bp, Homo sapiens
tatttcatttattta

SEQ ID NO: 1936661 - DNA, 15 bp, Homo sapiens
atttcatttatttat

SEQ ID NO: 1936662 - DNA, 15 bp, Homo sapiens
atttatttatttttg

SEQ ID NO: 1936663 - DNA, 15 bp, Homo sapiens
tttatttatttttga

SEQ ID NO: 1936664 - DNA, 15 bp, Homo sapiens
ttatttatttttgag

SEQ ID NO: 1936665 - DNA, 15 bp, Homo sapiens
tatttatttttgagt

SEQ ID NO: 1936666 - DNA, 15 bp, Homo sapiens
atttatttttgagtc

SEQ ID NO: 1936667 - DNA, 15 bp, Homo sapiens
tttatttttgagtct

SEQ ID NO: 1936668 - DNA, 15 bp, Homo sapiens
ttatttttgagtctc

SEQ ID NO: 1936669 - DNA, 15 bp, Homo sapiens
tatttttgagtctca

SEQ ID NO: 1936670 - DNA, 15 bp, Homo sapiens
atttttgagtctcat

SEQ ID NO: 1936671 - DNA, 15 bp, Homo sapiens
tttttgagtctcatt

SEQ ID NO: 1936672 - DNA, 15 bp, Homo sapiens
ttttgagtctcattc

SEQ ID NO: 1936673 - DNA, 15 bp, Homo sapiens
tttgagtctcattct

SEQ ID NO: 1936674 - DNA, 15 bp, Homo sapiens
ttgagtctcattctg

SEQ ID NO: 1936675 - DNA, 15 bp, Homo sapiens
tgagtctcattctgt

SEQ ID NO: 1936676 - DNA, 15 bp, Homo sapiens
gagtctcattctgtt

SEQ ID NO: 1936677 - DNA, 15 bp, Homo sapiens
agtctcattctgttg

SEQ ID NO: 1936678 - DNA, 15 bp, Homo sapiens
gtctcattctgttgt

SEQ ID NO: 1936679 - DNA, 15 bp, Homo sapiens
tctcattctgttgtc

SEQ ID NO: 1936680 - DNA, 15 bp, Homo sapiens
ctcattctgttgtcc

SEQ ID NO: 1936681 - DNA, 15 bp, Homo sapiens
tcattctgttgtcca

SEQ ID NO: 1936682 - DNA, 15 bp, Homo sapiens
cattctgttgtccag

SEQ ID NO: 1936683 - DNA, 15 bp, Homo sapiens
attctgttgtccagg

SEQ ID NO: 1936684 - DNA, 15 bp, Homo sapiens
ttctgttgtccaggc

SEQ ID NO: 1936685 - DNA, 15 bp, Homo sapiens
cagctcactgcaact

SEQ ID NO: 1936686 - DNA, 15 bp, Homo sapiens
agctcactgcaactt

SEQ ID NO: 1936687 - DNA, 15 bp, Homo sapiens
tcactgcaacttccg

SEQ ID NO: 1936688 - DNA, 15 bp, Homo sapiens
cactgcaacttccgc

SEQ ID NO: 1936689 - DNA, 15 bp, Homo sapiens
actgcaacttccgcc

SEQ ID NO: 1936690 - DNA, 15 bp, Homo sapiens
ctgcaacttccgcct

SEQ ID NO: 1936691 - DNA, 15 bp, Homo sapiens
tgcaacttccgcctc

SEQ ID NO: 1936692 - DNA, 15 bp, Homo sapiens
gcaacttccgcctcc

SEQ ID NO: 1936693 - DNA, 15 bp, Homo sapiens
caacttccgcctcct

SEQ ID NO: 1936694 - DNA, 15 bp, Homo sapiens
aacttccgcctcctg

SEQ ID NO: 1936695 - DNA, 15 bp, Homo sapiens
acttccgcctcctgg

SEQ ID NO: 1936696 - DNA, 15 bp, Homo sapiens
cttccgcctcctggg

SEQ ID NO: 1936697 - DNA, 15 bp, Homo sapiens
ggttcaagcaattcc

SEQ ID NO: 1936698 - DNA, 15 bp, Homo sapiens
gttcaagcaattccc

SEQ ID NO: 1936699 - DNA, 15 bp, Homo sapiens
ttcaagcaattcccc

SEQ ID NO: 1936700 - DNA, 15 bp, Homo sapiens
tcaagcaattcccct

SEQ ID NO: 1936701 - DNA, 15 bp, Homo sapiens
caagcaattcccctg

SEQ ID NO: 1936702 - DNA, 15 bp, Homo sapiens
aagcaattcccctgc

SEQ ID NO: 1936703 - DNA, 15 bp, Homo sapiens
agcaattcccctgca

SEQ ID NO: 1936704 - DNA, 15 bp, Homo sapiens
gcaattcccctgcat

SEQ ID NO: 1936705 - DNA, 15 bp, Homo sapiens
caattcccctgcatc

SEQ ID NO: 1936706 - DNA, 15 bp, Homo sapiens
aattcccctgcatca

SEQ ID NO: 1936707 - DNA, 15 bp, Homo sapiens
attcccctgcatcag

SEQ ID NO: 1936708 - DNA, 15 bp, Homo sapiens
ttcccctgcatcagc

SEQ ID NO: 1936709 - DNA, 15 bp, Homo sapiens
tcccctgcatcagcc

SEQ ID NO: 1936710 - DNA, 15 bp, Homo sapiens
cccctgcatcagcca

SEQ ID NO: 1936711 - DNA, 15 bp, Homo sapiens
ccctgcatcagccac

SEQ ID NO: 1936712 - DNA, 15 bp, Homo sapiens
cctgcatcagccacc

SEQ ID NO: 1936713 - DNA, 15 bp, Homo sapiens
ctgcatcagccaccc

SEQ ID NO: 1936714 - DNA, 15 bp, Homo sapiens
tgcatcagccaccca

SEQ ID NO: 1936715 - DNA, 15 bp, Homo sapiens
gcatcagccacccaa

SEQ ID NO: 1936716 - DNA, 15 bp, Homo sapiens
catcagccacccaag

SEQ ID NO: 1936717 - DNA, 15 bp, Homo sapiens
atcagccacccaagt

SEQ ID NO: 1936718 - DNA, 15 bp, Homo sapiens
tcagccacccaagta

SEQ ID NO: 1936719 - DNA, 15 bp, Homo sapiens
cagccacccaagtag

SEQ ID NO: 1936720 - DNA, 15 bp, Homo sapiens
agccacccaagtagc

SEQ ID NO: 1936721 - DNA, 15 bp, Homo sapiens
gccacccaagtagct

SEQ ID NO: 1936722 - DNA, 15 bp, Homo sapiens
ccacccaagtagctg

SEQ ID NO: 1936723 - DNA, 15 bp, Homo sapiens
cacccaagtagctgg

SEQ ID NO: 1936724 - DNA, 15 bp, Homo sapiens
acccaagtagctggg

SEQ ID NO: 1936725 - DNA, 15 bp, Homo sapiens
cccaagtagctgggc

SEQ ID NO: 1936726 - DNA, 15 bp, Homo sapiens
ccaagtagctgggct

SEQ ID NO: 1936727 - DNA, 15 bp, Homo sapiens
caagtagctgggctt

SEQ ID NO: 1936728 - DNA, 15 bp, Homo sapiens
aagtagctgggctta

SEQ ID NO: 1936729 - DNA, 15 bp, Homo sapiens
agtagctgggcttac

SEQ ID NO: 1936730 - DNA, 15 bp, Homo sapiens
gtagctgggcttacg

SEQ ID NO: 1936731 - DNA, 15 bp, Homo sapiens
tagctgggcttacgg

SEQ ID NO: 1936732 - DNA, 15 bp, Homo sapiens
agctgggcttacggg

SEQ ID NO: 1936733 - DNA, 15 bp, Homo sapiens
gctgggcttacgggc

SEQ ID NO: 1936734 - DNA, 15 bp, Homo sapiens
ctgggcttacgggca

SEQ ID NO: 1936735 - DNA, 15 bp, Homo sapiens
tgggcttacgggcat

SEQ ID NO: 1936736 - DNA, 15 bp, Homo sapiens
gggcttacgggcatg

SEQ ID NO: 1936737 - DNA, 15 bp, Homo sapiens
ggcttacgggcatgt

SEQ ID NO: 1936738 - DNA, 15 bp, Homo sapiens
gcttacgggcatgtg

SEQ ID NO: 1936739 - DNA, 15 bp, Homo sapiens
cttacgggcatgtgc

SEQ ID NO: 1936740 - DNA, 15 bp, Homo sapiens
ttacgggcatgtgct

SEQ ID NO: 1936741 - DNA, 15 bp, Homo sapiens
tacgggcatgtgcta

SEQ ID NO: 1936742 - DNA, 15 bp, Homo sapiens
acgggcatgtgctac

SEQ ID NO: 1936743 - DNA, 15 bp, Homo sapiens
cgggcatgtgctacc

SEQ ID NO: 1936744 - DNA, 15 bp, Homo sapiens
gggcatgtgctacca

SEQ ID NO: 1936745 - DNA, 15 bp, Homo sapiens
gctaatttttgtata

SEQ ID NO: 1936746 - DNA, 15 bp, Homo sapiens
ctaatttttgtatat

SEQ ID NO: 1936747 - DNA, 15 bp, Homo sapiens
taatttttgtatatt

SEQ ID NO: 1936748 - DNA, 15 bp, Homo sapiens
aatttttgtatattt

SEQ ID NO: 1936749 - DNA, 15 bp, Homo sapiens
atttttgtatattta

SEQ ID NO: 1936750 - DNA, 15 bp, Homo sapiens
tttttgtatatttag

SEQ ID NO: 1936751 - DNA, 15 bp, Homo sapiens
ttttgtatatttagt

SEQ ID NO: 1936752 - DNA, 15 bp, Homo sapiens
tttgtatatttagta

SEQ ID NO: 1936753 - DNA, 15 bp, Homo sapiens
ttgtatatttagtag

SEQ ID NO: 1936754 - DNA, 15 bp, Homo sapiens
tgtatatttagtaga

SEQ ID NO: 1936755 - DNA, 15 bp, Homo sapiens
gtatatttagtagag

SEQ ID NO: 1936756 - DNA, 15 bp, Homo sapiens
tatatttagtagaga

SEQ ID NO: 1936757 - DNA, 15 bp, Homo sapiens
atatttagtagagac

SEQ ID NO: 1936758 - DNA, 15 bp, Homo sapiens
tatttagtagagaca

SEQ ID NO: 1936759 - DNA, 15 bp, Homo sapiens
atttagtagagacag

SEQ ID NO: 1936760 - DNA, 15 bp, Homo sapiens
gacagggtttcacta

SEQ ID NO: 1936761 - DNA, 15 bp, Homo sapiens
acagggtttcactat

SEQ ID NO: 1936762 - DNA, 15 bp, Homo sapiens
cagggtttcactatg

SEQ ID NO: 1936763 - DNA, 15 bp, Homo sapiens
agggtttcactatgt

SEQ ID NO: 1936764 - DNA, 15 bp, Homo sapiens
gggtttcactatgtt

SEQ ID NO: 1936765 - DNA, 15 bp, Homo sapiens
ggtttcactatgttg

SEQ ID NO: 1936766 - DNA, 15 bp, Homo sapiens
actatgttggccagg

SEQ ID NO: 1936767 - DNA, 15 bp, Homo sapiens
tatgttggccaggcg

SEQ ID NO: 1936768 - DNA, 15 bp, Homo sapiens
ggccaggcgggtctc

SEQ ID NO: 1936769 - DNA, 15 bp, Homo sapiens
gccaggcgggtctcc

SEQ ID NO: 1936770 - DNA, 15 bp, Homo sapiens
ccaggcgggtctcca

SEQ ID NO: 1936771 - DNA, 15 bp, Homo sapiens
caggcgggtctccaa

SEQ ID NO: 1936772 - DNA, 15 bp, Homo sapiens
aggcgggtctccaac

SEQ ID NO: 1936773 - DNA, 15 bp, Homo sapiens
ggcgggtctccaact

SEQ ID NO: 1936774 - DNA, 15 bp, Homo sapiens
gcgggtctccaactc

SEQ ID NO: 1936775 - DNA, 15 bp, Homo sapiens
cgggtctccaactcc

SEQ ID NO: 1936776 - DNA, 15 bp, Homo sapiens
gggtctccaactcct

SEQ ID NO: 1936777 - DNA, 15 bp, Homo sapiens
ggtctccaactcctg

SEQ ID NO: 1936778 - DNA, 15 bp, Homo sapiens
gtctccaactcctgg

SEQ ID NO: 1936779 - DNA, 15 bp, Homo sapiens
tctccaactcctggc

SEQ ID NO: 1936780 - DNA, 15 bp, Homo sapiens
ctccaactcctggcc

SEQ ID NO: 1936781 - DNA, 15 bp, Homo sapiens
tccaactcctggcct

SEQ ID NO: 1936782 - DNA, 15 bp, Homo sapiens
ccaactcctggcctc

SEQ ID NO: 1936783 - DNA, 15 bp, Homo sapiens
caactcctggcctca

SEQ ID NO: 1936784 - DNA, 15 bp, Homo sapiens
cctcaagtgatcccc

SEQ ID NO: 1936785 - DNA, 15 bp, Homo sapiens
tcaagtgatccccct

SEQ ID NO: 1936786 - DNA, 15 bp, Homo sapiens
caagtgatccccctg

SEQ ID NO: 1936787 - DNA, 15 bp, Homo sapiens
aagtgatccccctgc

SEQ ID NO: 1936788 - DNA, 15 bp, Homo sapiens
agtgatccccctgcc

SEQ ID NO: 1936789 - DNA, 15 bp, Homo sapiens
gtgatccccctgcct

SEQ ID NO: 1936790 - DNA, 15 bp, Homo sapiens
tgatccccctgcctc

SEQ ID NO: 1936791 - DNA, 15 bp, Homo sapiens
gatccccctgcctca

SEQ ID NO: 1936792 - DNA, 15 bp, Homo sapiens
atccccctgcctcag

SEQ ID NO: 1936793 - DNA, 15 bp, Homo sapiens
tccccctgcctcagc

SEQ ID NO: 1936794 - DNA, 15 bp, Homo sapiens
ccccctgcctcagcc

SEQ ID NO: 1936795 - DNA, 15 bp, Homo sapiens
cccctgcctcagcct

SEQ ID NO: 1936796 - DNA, 15 bp, Homo sapiens
acaggcgtgagccaa

SEQ ID NO: 1936797 - DNA, 15 bp, Homo sapiens
caggcgtgagccaac

SEQ ID NO: 1936798 - DNA, 15 bp, Homo sapiens
aggcgtgagccaaca

SEQ ID NO: 1936799 - DNA, 15 bp, Homo sapiens
ggcgtgagccaacac

SEQ ID NO: 1936800 - DNA, 15 bp, Homo sapiens
gcgtgagccaacacg

SEQ ID NO: 1936801 - DNA, 15 bp, Homo sapiens
cgtgagccaacacgc

SEQ ID NO: 1936802 - DNA, 15 bp, Homo sapiens
gtgagccaacacgcc

SEQ ID NO: 1936803 - DNA, 15 bp, Homo sapiens
tgagccaacacgccc

SEQ ID NO: 1936804 - DNA, 15 bp, Homo sapiens
gagccaacacgcccg

SEQ ID NO: 1936805 - DNA, 15 bp, Homo sapiens
agccaacacgcccgg

SEQ ID NO: 1936806 - DNA, 15 bp, Homo sapiens
gccaacacgcccggt

SEQ ID NO: 1936807 - DNA, 15 bp, Homo sapiens
ccaacacgcccggtc

SEQ ID NO: 1936808 - DNA, 15 bp, Homo sapiens
caacacgcccggtct

SEQ ID NO: 1936809 - DNA, 15 bp, Homo sapiens
aacacgcccggtcta

SEQ ID NO: 1936810 - DNA, 15 bp, Homo sapiens
acacgcccggtctat

SEQ ID NO: 1936811 - DNA, 15 bp, Homo sapiens
cacgcccggtctata

SEQ ID NO: 1936812 - DNA, 15 bp, Homo sapiens
acgcccggtctatat

SEQ ID NO: 1936813 - DNA, 15 bp, Homo sapiens
cgcccggtctatatg

SEQ ID NO: 1936814 - DNA, 15 bp, Homo sapiens
gcccggtctatatgt

SEQ ID NO: 1936815 - DNA, 15 bp, Homo sapiens
cccggtctatatgtt

SEQ ID NO: 1936816 - DNA, 15 bp, Homo sapiens
ccggtctatatgttt

SEQ ID NO: 1936817 - DNA, 15 bp, Homo sapiens
cggtctatatgttta

SEQ ID NO: 1936818 - DNA, 15 bp, Homo sapiens
ggtctatatgtttat

SEQ ID NO: 1936819 - DNA, 15 bp, Homo sapiens
gtctatatgtttatt

SEQ ID NO: 1936820 - DNA, 15 bp, Homo sapiens
tctatatgtttattt

SEQ ID NO: 1936821 - DNA, 15 bp, Homo sapiens
ctatatgtttatttt

SEQ ID NO: 1936822 - DNA, 15 bp, Homo sapiens
tatatgtttattttt

SEQ ID NO: 1936823 - DNA, 15 bp, Homo sapiens
atatgtttattttta

SEQ ID NO: 1936824 - DNA, 15 bp, Homo sapiens
tatgtttatttttat

SEQ ID NO: 1936825 - DNA, 15 bp, Homo sapiens
gtttatttttatttt

SEQ ID NO: 1936826 - DNA, 15 bp, Homo sapiens
tttatttttattttg

SEQ ID NO: 1936827 - DNA, 15 bp, Homo sapiens
ttatttttattttga

SEQ ID NO: 1936828 - DNA, 15 bp, Homo sapiens
tatttttattttgag

SEQ ID NO: 1936829 - DNA, 15 bp, Homo sapiens
atttttattttgagt

SEQ ID NO: 1936830 - DNA, 15 bp, Homo sapiens
tttttattttgagtt

SEQ ID NO: 1936831 - DNA, 15 bp, Homo sapiens
ttttattttgagttt

SEQ ID NO: 1936832 - DNA, 15 bp, Homo sapiens
tttattttgagtttt

SEQ ID NO: 1936833 - DNA, 15 bp, Homo sapiens
ttattttgagttttt

SEQ ID NO: 1936834 - DNA, 15 bp, Homo sapiens
tattttgagtttttt

SEQ ID NO: 1936835 - DNA, 15 bp, Homo sapiens
attttgagttttttt

SEQ ID NO: 1936836 - DNA, 15 bp, Homo sapiens
ttttgagtttttttt

SEQ ID NO: 1936837 - DNA, 15 bp, Homo sapiens
tttgagttttttttt

SEQ ID NO: 1936838 - DNA, 15 bp, Homo sapiens
ttgagtttttttttc

SEQ ID NO: 1936839 - DNA, 15 bp, Homo sapiens
tgagtttttttttcc

SEQ ID NO: 1936840 - DNA, 15 bp, Homo sapiens
gagtttttttttccc

SEQ ID NO: 1936841 - DNA, 15 bp, Homo sapiens
agtttttttttcccc

SEQ ID NO: 1936842 - DNA, 15 bp, Homo sapiens
gtttttttttcccct

SEQ ID NO: 1936843 - DNA, 15 bp, Homo sapiens
tttttttttcccctt

SEQ ID NO: 1936844 - DNA, 15 bp, Homo sapiens
ttttttttccccttc

SEQ ID NO: 1936845 - DNA, 15 bp, Homo sapiens
tttttttccccttcc

SEQ ID NO: 1936846 - DNA, 15 bp, Homo sapiens
ttttttccccttcct

SEQ ID NO: 1936847 - DNA, 15 bp, Homo sapiens
tttttccccttcctc

SEQ ID NO: 1936848 - DNA, 15 bp, Homo sapiens
ttttccccttcctct

SEQ ID NO: 1936849 - DNA, 15 bp, Homo sapiens
tttccccttcctcta

SEQ ID NO: 1936850 - DNA, 15 bp, Homo sapiens
ttccccttcctctaa

SEQ ID NO: 1936851 - DNA, 15 bp, Homo sapiens
tccccttcctctaat

SEQ ID NO: 1936852 - DNA, 15 bp, Homo sapiens
ccccttcctctaata

SEQ ID NO: 1936853 - DNA, 15 bp, Homo sapiens
cccttcctctaataa

SEQ ID NO: 1936854 - DNA, 15 bp, Homo sapiens
ccttcctctaataat

SEQ ID NO: 1936855 - DNA, 15 bp, Homo sapiens
cttcctctaataata

SEQ ID NO: 1936856 - DNA, 15 bp, Homo sapiens
ttcctctaataataa

SEQ ID NO: 1936857 - DNA, 15 bp, Homo sapiens
tcctctaataataaa

SEQ ID NO: 1936858 - DNA, 15 bp, Homo sapiens
cctctaataataaaa

SEQ ID NO: 1936859 - DNA, 15 bp, Homo sapiens
ctctaataataaaaa

SEQ ID NO: 1936860 - DNA, 15 bp, Homo sapiens
tctaataataaaaac

SEQ ID NO: 1936861 - DNA, 15 bp, Homo sapiens
ctaataataaaaacc

SEQ ID NO: 1936862 - DNA, 15 bp, Homo sapiens
taataataaaaacct

SEQ ID NO: 1936863 - DNA, 15 bp, Homo sapiens
aataataaaaaccta

SEQ ID NO: 1936864 - DNA, 15 bp, Homo sapiens
ataataaaaacctag

SEQ ID NO: 1936865 - DNA, 15 bp, Homo sapiens
taataaaaacctaga

SEQ ID NO: 1936866 - DNA, 15 bp, Homo sapiens
aataaaaacctagaa

SEQ ID NO: 1936867 - DNA, 15 bp, Homo sapiens
ataaaaacctagaaa

SEQ ID NO: 1936868 - DNA, 15 bp, Homo sapiens
taaaaacctagaaac

SEQ ID NO: 1936869 - DNA, 15 bp, Homo sapiens
aaaaacctagaaaca

SEQ ID NO: 1936870 - DNA, 15 bp, Homo sapiens
aaaacctagaaacaa

SEQ ID NO: 1936871 - DNA, 15 bp, Homo sapiens
aaacctagaaacaaa

SEQ ID NO: 1936872 - DNA, 15 bp, Homo sapiens
aacctagaaacaaag

SEQ ID NO: 1936873 - DNA, 15 bp, Homo sapiens
acctagaaacaaagg

SEQ ID NO: 1936874 - DNA, 15 bp, Homo sapiens
cctagaaacaaagga

SEQ ID NO: 1936875 - DNA, 15 bp, Homo sapiens
ctagaaacaaaggat

SEQ ID NO: 1936876 - DNA, 15 bp, Homo sapiens
tagaaacaaaggata

SEQ ID NO: 1936877 - DNA, 15 bp, Homo sapiens
agaaacaaaggataa

SEQ ID NO: 1936878 - DNA, 15 bp, Homo sapiens
gaaacaaaggataaa

SEQ ID NO: 1936879 - DNA, 15 bp, Homo sapiens
aaacaaaggataaaa

SEQ ID NO: 1936880 - DNA, 15 bp, Homo sapiens
aacaaaggataaaag

SEQ ID NO: 1936881 - DNA, 15 bp, Homo sapiens
acaaaggataaaagg

SEQ ID NO: 1936882 - DNA, 15 bp, Homo sapiens
caaaggataaaaggc

SEQ ID NO: 1936883 - DNA, 15 bp, Homo sapiens
aaaggataaaaggct

SEQ ID NO: 1936884 - DNA, 15 bp, Homo sapiens
aaggataaaaggctc

SEQ ID NO: 1936885 - DNA, 15 bp, Homo sapiens
aggataaaaggctcc

SEQ ID NO: 1936886 - DNA, 15 bp, Homo sapiens
ggataaaaggctcct

SEQ ID NO: 1936887 - DNA, 15 bp, Homo sapiens
gataaaaggctcctt

SEQ ID NO: 1936888 - DNA, 15 bp, Homo sapiens
ataaaaggctccttc

SEQ ID NO: 1936889 - DNA, 15 bp, Homo sapiens
taaaaggctccttct

SEQ ID NO: 1936890 - DNA, 15 bp, Homo sapiens
aaaaggctccttcta

SEQ ID NO: 1936891 - DNA, 15 bp, Homo sapiens
aaaggctccttctaa

SEQ ID NO: 1936892 - DNA, 15 bp, Homo sapiens
aaggctccttctaag

SEQ ID NO: 1936893 - DNA, 15 bp, Homo sapiens
aggctccttctaaga

SEQ ID NO: 1936894 - DNA, 15 bp, Homo sapiens
ggctccttctaagaa

SEQ ID NO: 1936895 - DNA, 15 bp, Homo sapiens
gctccttctaagaaa

SEQ ID NO: 1936896 - DNA, 15 bp, Homo sapiens
ctccttctaagaaac

SEQ ID NO: 1936897 - DNA, 15 bp, Homo sapiens
tccttctaagaaacc

SEQ ID NO: 1936898 - DNA, 15 bp, Homo sapiens
ccttctaagaaacca

SEQ ID NO: 1936899 - DNA, 15 bp, Homo sapiens
cttctaagaaaccag

SEQ ID NO: 1936900 - DNA, 15 bp, Homo sapiens
ttctaagaaaccagt

SEQ ID NO: 1936901 - DNA, 15 bp, Homo sapiens
tctaagaaaccagta

SEQ ID NO: 1936902 - DNA, 15 bp, Homo sapiens
ctaagaaaccagtac

SEQ ID NO: 1936903 - DNA, 15 bp, Homo sapiens
taagaaaccagtact

SEQ ID NO: 1936904 - DNA, 15 bp, Homo sapiens
aagaaaccagtactc

SEQ ID NO: 1936905 - DNA, 15 bp, Homo sapiens
agaaaccagtactct

SEQ ID NO: 1936906 - DNA, 15 bp, Homo sapiens
gaaaccagtactcta

SEQ ID NO: 1936907 - DNA, 15 bp, Homo sapiens
aaaccagtactctag

SEQ ID NO: 1936908 - DNA, 15 bp, Homo sapiens
aaccagtactctaga

SEQ ID NO: 1936909 - DNA, 15 bp, Homo sapiens
accagtactctagaa

SEQ ID NO: 1936910 - DNA, 15 bp, Homo sapiens
ccagtactctagaag

SEQ ID NO: 1936911 - DNA, 15 bp, Homo sapiens
cagtactctagaagt

SEQ ID NO: 1936912 - DNA, 15 bp, Homo sapiens
agtactctagaagtg

SEQ ID NO: 1936913 - DNA, 15 bp, Homo sapiens
gtactctagaagtga

SEQ ID NO: 1936914 - DNA, 15 bp, Homo sapiens
tactctagaagtgag

SEQ ID NO: 1936915 - DNA, 15 bp, Homo sapiens
actctagaagtgaga

SEQ ID NO: 1936916 - DNA, 15 bp, Homo sapiens
ctctagaagtgagag

SEQ ID NO: 1936917 - DNA, 15 bp, Homo sapiens
tctagaagtgagaga

SEQ ID NO: 1936918 - DNA, 15 bp, Homo sapiens
ctagaagtgagagaa

SEQ ID NO: 1936919 - DNA, 15 bp, Homo sapiens
tagaagtgagagaaa

SEQ ID NO: 1936920 - DNA, 15 bp, Homo sapiens
agaagtgagagaaat

SEQ ID NO: 1936921 - DNA, 15 bp, Homo sapiens
gaagtgagagaaatg

SEQ ID NO: 1936922 - DNA, 15 bp, Homo sapiens
aagtgagagaaatgc

SEQ ID NO: 1936923 - DNA, 15 bp, Homo sapiens
agtgagagaaatgca

SEQ ID NO: 1936924 - DNA, 15 bp, Homo sapiens
gtgagagaaatgcat

SEQ ID NO: 1936925 - DNA, 15 bp, Homo sapiens
tgagagaaatgcatt

SEQ ID NO: 1936926 - DNA, 15 bp, Homo sapiens
gagagaaatgcatta

SEQ ID NO: 1936927 - DNA, 15 bp, Homo sapiens
agagaaatgcattaa

SEQ ID NO: 1936928 - DNA, 15 bp, Homo sapiens
gagaaatgcattaag

SEQ ID NO: 1936929 - DNA, 15 bp, Homo sapiens
agaaatgcattaagg

SEQ ID NO: 1936930 - DNA, 15 bp, Homo sapiens
gaaatgcattaagga

SEQ ID NO: 1936931 - DNA, 15 bp, Homo sapiens
aaatgcattaaggag

SEQ ID NO: 1936932 - DNA, 15 bp, Homo sapiens
aatgcattaaggaga

SEQ ID NO: 1936933 - DNA, 15 bp, Homo sapiens
atgcattaaggagaa

SEQ ID NO: 1936934 - DNA, 15 bp, Homo sapiens
tgcattaaggagaag

SEQ ID NO: 1936935 - DNA, 15 bp, Homo sapiens
gcattaaggagaaga

SEQ ID NO: 1936936 - DNA, 15 bp, Homo sapiens
cattaaggagaagaa

SEQ ID NO: 1936937 - DNA, 15 bp, Homo sapiens
attaaggagaagaaa

SEQ ID NO: 1936938 - DNA, 15 bp, Homo sapiens
ttaaggagaagaaaa

SEQ ID NO: 1936939 - DNA, 15 bp, Homo sapiens
taaggagaagaaaaa

SEQ ID NO: 1936940 - DNA, 15 bp, Homo sapiens
aaggagaagaaaaac

SEQ ID NO: 1936941 - DNA, 15 bp, Homo sapiens
aggagaagaaaaact

SEQ ID NO: 1936942 - DNA, 15 bp, Homo sapiens
ggagaagaaaaactt

SEQ ID NO: 1936943 - DNA, 15 bp, Homo sapiens
gagaagaaaaactta

SEQ ID NO: 1936944 - DNA, 15 bp, Homo sapiens
agaagaaaaacttag

SEQ ID NO: 1936945 - DNA, 15 bp, Homo sapiens
gaagaaaaacttagg

SEQ ID NO: 1936946 - DNA, 15 bp, Homo sapiens
aagaaaaacttaggt

SEQ ID NO: 1936947 - DNA, 15 bp, Homo sapiens
agaaaaacttaggtg

SEQ ID NO: 1936948 - DNA, 15 bp, Homo sapiens
gaaaaacttaggtgg

SEQ ID NO: 1936949 - DNA, 15 bp, Homo sapiens
aaaaacttaggtggg

SEQ ID NO: 1936950 - DNA, 15 bp, Homo sapiens
aaaacttaggtggga

SEQ ID NO: 1936951 - DNA, 15 bp, Homo sapiens
aaacttaggtgggac

SEQ ID NO: 1936952 - DNA, 15 bp, Homo sapiens
aacttaggtgggact

SEQ ID NO: 1936953 - DNA, 15 bp, Homo sapiens
acttaggtgggactg

SEQ ID NO: 1936954 - DNA, 15 bp, Homo sapiens
cttaggtgggactga

SEQ ID NO: 1936955 - DNA, 15 bp, Homo sapiens
ttaggtgggactgaa

SEQ ID NO: 1936956 - DNA, 15 bp, Homo sapiens
taggtgggactgaat

SEQ ID NO: 1936957 - DNA, 15 bp, Homo sapiens
aggtgggactgaata

SEQ ID NO: 1936958 - DNA, 15 bp, Homo sapiens
ggtgggactgaataa

SEQ ID NO: 1936959 - DNA, 15 bp, Homo sapiens
gtgggactgaataag

SEQ ID NO: 1936960 - DNA, 15 bp, Homo sapiens
tgggactgaataagg

SEQ ID NO: 1936961 - DNA, 15 bp, Homo sapiens
gggactgaataaggc

SEQ ID NO: 1936962 - DNA, 15 bp, Homo sapiens
ggactgaataaggct

SEQ ID NO: 1936963 - DNA, 15 bp, Homo sapiens
gactgaataaggctt

SEQ ID NO: 1936964 - DNA, 15 bp, Homo sapiens
actgaataaggcttc

SEQ ID NO: 1936965 - DNA, 15 bp, Homo sapiens
ctgaataaggcttca

SEQ ID NO: 1936966 - DNA, 15 bp, Homo sapiens
tgaataaggcttcag

SEQ ID NO: 1936967 - DNA, 15 bp, Homo sapiens
gaataaggcttcagg

SEQ ID NO: 1936968 - DNA, 15 bp, Homo sapiens
aataaggcttcaggc

SEQ ID NO: 1936969 - DNA, 15 bp, Homo sapiens
ataaggcttcaggca

SEQ ID NO: 1936970 - DNA, 15 bp, Homo sapiens
taaggcttcaggcat

SEQ ID NO: 1936971 - DNA, 15 bp, Homo sapiens
aaggcttcaggcatt

SEQ ID NO: 1936972 - DNA, 15 bp, Homo sapiens
aggcttcaggcatta

SEQ ID NO: 1936973 - DNA, 15 bp, Homo sapiens
ggcttcaggcattac

SEQ ID NO: 1936974 - DNA, 15 bp, Homo sapiens
gcttcaggcattacg

SEQ ID NO: 1936975 - DNA, 15 bp, Homo sapiens
cttcaggcattacgt

SEQ ID NO: 1936976 - DNA, 15 bp, Homo sapiens
ttcaggcattacgtt

SEQ ID NO: 1936977 - DNA, 15 bp, Homo sapiens
tcaggcattacgttt

SEQ ID NO: 1936978 - DNA, 15 bp, Homo sapiens
caggcattacgtttg

SEQ ID NO: 1936979 - DNA, 15 bp, Homo sapiens
aggcattacgtttgc

SEQ ID NO: 1936980 - DNA, 15 bp, Homo sapiens
ggcattacgtttgct

SEQ ID NO: 1936981 - DNA, 15 bp, Homo sapiens
gcattacgtttgctg

SEQ ID NO: 1936982 - DNA, 15 bp, Homo sapiens
cattacgtttgctga

SEQ ID NO: 1936983 - DNA, 15 bp, Homo sapiens
attacgtttgctgaa

SEQ ID NO: 1936984 - DNA, 15 bp, Homo sapiens
ttacgtttgctgaag

SEQ ID NO: 1936985 - DNA, 15 bp, Homo sapiens
tacgtttgctgaagt

SEQ ID NO: 1936986 - DNA, 15 bp, Homo sapiens
acgtttgctgaagtt

SEQ ID NO: 1936987 - DNA, 15 bp, Homo sapiens
cgtttgctgaagttg

SEQ ID NO: 1936988 - DNA, 15 bp, Homo sapiens
gtttgctgaagttgg

SEQ ID NO: 1936989 - DNA, 15 bp, Homo sapiens
tttgctgaagttgga

SEQ ID NO: 1936990 - DNA, 15 bp, Homo sapiens
ttgctgaagttggat

SEQ ID NO: 1936991 - DNA, 15 bp, Homo sapiens
tgctgaagttggatg

SEQ ID NO: 1936992 - DNA, 15 bp, Homo sapiens
gctgaagttggatgt

SEQ ID NO: 1936993 - DNA, 15 bp, Homo sapiens
ctgaagttggatgta

SEQ ID NO: 1936994 - DNA, 15 bp, Homo sapiens
tgaagttggatgtac

SEQ ID NO: 1936995 - DNA, 15 bp, Homo sapiens
gaagttggatgtacc

SEQ ID NO: 1936996 - DNA, 15 bp, Homo sapiens
aagttggatgtacct

SEQ ID NO: 1936997 - DNA, 15 bp, Homo sapiens
agttggatgtaccta

SEQ ID NO: 1936998 - DNA, 15 bp, Homo sapiens
gttggatgtacctaa

SEQ ID NO: 1936999 - DNA, 15 bp, Homo sapiens
ttggatgtacctaac

SEQ ID NO: 1937000 - DNA, 15 bp, Homo sapiens
tggatgtacctaact

SEQ ID NO: 1937001 - DNA, 15 bp, Homo sapiens
ggatgtacctaacta

SEQ ID NO: 1937002 - DNA, 15 bp, Homo sapiens
gatgtacctaactac

SEQ ID NO: 1937003 - DNA, 15 bp, Homo sapiens
atgtacctaactaca

SEQ ID NO: 1937004 - DNA, 15 bp, Homo sapiens
tgtacctaactacag

SEQ ID NO: 1937005 - DNA, 15 bp, Homo sapiens
gtacctaactacagg

SEQ ID NO: 1937006 - DNA, 15 bp, Homo sapiens
tacctaactacaggg

SEQ ID NO: 1937007 - DNA, 15 bp, Homo sapiens
acctaactacagggc

SEQ ID NO: 1937008 - DNA, 15 bp, Homo sapiens
cctaactacagggcg

SEQ ID NO: 1937009 - DNA, 15 bp, Homo sapiens
ctaactacagggcgt

SEQ ID NO: 1937010 - DNA, 15 bp, Homo sapiens
taactacagggcgtg

SEQ ID NO: 1937011 - DNA, 15 bp, Homo sapiens
aactacagggcgtgg

SEQ ID NO: 1937012 - DNA, 15 bp, Homo sapiens
actacagggcgtggt

SEQ ID NO: 1937013 - DNA, 15 bp, Homo sapiens
ctacagggcgtggtg

SEQ ID NO: 1937014 - DNA, 15 bp, Homo sapiens
tacagggcgtggtgg

SEQ ID NO: 1937015 - DNA, 15 bp, Homo sapiens
acagggcgtggtggc

SEQ ID NO: 1937016 - DNA, 15 bp, Homo sapiens
cagggcgtggtggct

SEQ ID NO: 1937017 - DNA, 15 bp, Homo sapiens
agggcgtggtggctc

SEQ ID NO: 1937018 - DNA, 15 bp, Homo sapiens
gcgtggtggctcaca

SEQ ID NO: 1937019 - DNA, 15 bp, Homo sapiens
cgtggtggctcacag

SEQ ID NO: 1937020 - DNA, 15 bp, Homo sapiens
gtggtggctcacagt

SEQ ID NO: 1937021 - DNA, 15 bp, Homo sapiens
tggtggctcacagtc

SEQ ID NO: 1937022 - DNA, 15 bp, Homo sapiens
ggtggctcacagtca

SEQ ID NO: 1937023 - DNA, 15 bp, Homo sapiens
gtggctcacagtcac

SEQ ID NO: 1937024 - DNA, 15 bp, Homo sapiens
tggctcacagtcacc

SEQ ID NO: 1937025 - DNA, 15 bp, Homo sapiens
ggctcacagtcacct

SEQ ID NO: 1937026 - DNA, 15 bp, Homo sapiens
gctcacagtcaccta

SEQ ID NO: 1937027 - DNA, 15 bp, Homo sapiens
ctcacagtcacctag

SEQ ID NO: 1937028 - DNA, 15 bp, Homo sapiens
tcacagtcacctagg

SEQ ID NO: 1937029 - DNA, 15 bp, Homo sapiens
cacagtcacctaggc

SEQ ID NO: 1937030 - DNA, 15 bp, Homo sapiens
acagtcacctaggcc

SEQ ID NO: 1937031 - DNA, 15 bp, Homo sapiens
cagtcacctaggccc

SEQ ID NO: 1937032 - DNA, 15 bp, Homo sapiens
agtcacctaggccct

SEQ ID NO: 1937033 - DNA, 15 bp, Homo sapiens
gtcacctaggccctc

SEQ ID NO: 1937034 - DNA, 15 bp, Homo sapiens
tcacctaggccctct

SEQ ID NO: 1937035 - DNA, 15 bp, Homo sapiens
cacctaggccctctc

SEQ ID NO: 1937036 - DNA, 15 bp, Homo sapiens
acctaggccctctcc

SEQ ID NO: 1937037 - DNA, 15 bp, Homo sapiens
cctaggccctctcca

SEQ ID NO: 1937038 - DNA, 15 bp, Homo sapiens
ctaggccctctccac

SEQ ID NO: 1937039 - DNA, 15 bp, Homo sapiens
taggccctctccaca

SEQ ID NO: 1937040 - DNA, 15 bp, Homo sapiens
aggccctctccacat

SEQ ID NO: 1937041 - DNA, 15 bp, Homo sapiens
ggccctctccacatc

SEQ ID NO: 1937042 - DNA, 15 bp, Homo sapiens
gccctctccacatcc

SEQ ID NO: 1937043 - DNA, 15 bp, Homo sapiens
ccctctccacatcca

SEQ ID NO: 1937044 - DNA, 15 bp, Homo sapiens
cctctccacatccac

SEQ ID NO: 1937045 - DNA, 15 bp, Homo sapiens
ctctccacatccact

SEQ ID NO: 1937046 - DNA, 15 bp, Homo sapiens
tctccacatccactc

SEQ ID NO: 1937047 - DNA, 15 bp, Homo sapiens
ctccacatccactca

SEQ ID NO: 1937048 - DNA, 15 bp, Homo sapiens
tccacatccactcat

SEQ ID NO: 1937049 - DNA, 15 bp, Homo sapiens
ccacatccactcatg

SEQ ID NO: 1937050 - DNA, 15 bp, Homo sapiens
cacatccactcatgt

SEQ ID NO: 1937051 - DNA, 15 bp, Homo sapiens
acatccactcatgta

SEQ ID NO: 1937052 - DNA, 15 bp, Homo sapiens
catccactcatgtac

SEQ ID NO: 1937053 - DNA, 15 bp, Homo sapiens
atccactcatgtacc

SEQ ID NO: 1937054 - DNA, 15 bp, Homo sapiens
tccactcatgtaccc

SEQ ID NO: 1937055 - DNA, 15 bp, Homo sapiens
ccactcatgtaccct

SEQ ID NO: 1937056 - DNA, 15 bp, Homo sapiens
cactcatgtaccctg

SEQ ID NO: 1937057 - DNA, 15 bp, Homo sapiens
actcatgtaccctgt

SEQ ID NO: 1937058 - DNA, 15 bp, Homo sapiens
ctcatgtaccctgtc

SEQ ID NO: 1937059 - DNA, 15 bp, Homo sapiens
tcatgtaccctgtcc

SEQ ID NO: 1937060 - DNA, 15 bp, Homo sapiens
catgtaccctgtccc

SEQ ID NO: 1937061 - DNA, 15 bp, Homo sapiens
atgtaccctgtccca

SEQ ID NO: 1937062 - DNA, 15 bp, Homo sapiens
tgtaccctgtcccag

SEQ ID NO: 1937063 - DNA, 15 bp, Homo sapiens
gtaccctgtcccagt

SEQ ID NO: 1937064 - DNA, 15 bp, Homo sapiens
taccctgtcccagtg

SEQ ID NO: 1937065 - DNA, 15 bp, Homo sapiens
accctgtcccagtgc

SEQ ID NO: 1937066 - DNA, 15 bp, Homo sapiens
ccctgtcccagtgca

SEQ ID NO: 1937067 - DNA, 15 bp, Homo sapiens
cctgtcccagtgcac

SEQ ID NO: 1937068 - DNA, 15 bp, Homo sapiens
ctgtcccagtgcact

SEQ ID NO: 1937069 - DNA, 15 bp, Homo sapiens
tgtcccagtgcactg

SEQ ID NO: 1937070 - DNA, 15 bp, Homo sapiens
gtcccagtgcactgt

SEQ ID NO: 1937071 - DNA, 15 bp, Homo sapiens
tcccagtgcactgta

SEQ ID NO: 1937072 - DNA, 15 bp, Homo sapiens
cccagtgcactgtag

SEQ ID NO: 1937073 - DNA, 15 bp, Homo sapiens
ccagtgcactgtagg

SEQ ID NO: 1937074 - DNA, 15 bp, Homo sapiens
cagtgcactgtagga

SEQ ID NO: 1937075 - DNA, 15 bp, Homo sapiens
agtgcactgtaggag

SEQ ID NO: 1937076 - DNA, 15 bp, Homo sapiens
gtgcactgtaggaga

SEQ ID NO: 1937077 - DNA, 15 bp, Homo sapiens
tgcactgtaggagag

SEQ ID NO: 1937078 - DNA, 15 bp, Homo sapiens
gcactgtaggagagg

SEQ ID NO: 1937079 - DNA, 15 bp, Homo sapiens
cactgtaggagaggc

SEQ ID NO: 1937080 - DNA, 15 bp, Homo sapiens
actgtaggagaggca

SEQ ID NO: 1937081 - DNA, 15 bp, Homo sapiens
ctgtaggagaggcag

SEQ ID NO: 1937082 - DNA, 15 bp, Homo sapiens
tgtaggagaggcagt

SEQ ID NO: 1937083 - DNA, 15 bp, Homo sapiens
gtaggagaggcagtg

SEQ ID NO: 1937084 - DNA, 15 bp, Homo sapiens
taggagaggcagtgt

SEQ ID NO: 1937085 - DNA, 15 bp, Homo sapiens
aggagaggcagtgtg

SEQ ID NO: 1937086 - DNA, 15 bp, Homo sapiens
ggagaggcagtgtgg

SEQ ID NO: 1937087 - DNA, 15 bp, Homo sapiens
gagaggcagtgtggc

SEQ ID NO: 1937088 - DNA, 15 bp, Homo sapiens
agaggcagtgtggcc

SEQ ID NO: 1937089 - DNA, 15 bp, Homo sapiens
gaggcagtgtggcct

SEQ ID NO: 1937090 - DNA, 15 bp, Homo sapiens
aggcagtgtggcctg

SEQ ID NO: 1937091 - DNA, 15 bp, Homo sapiens
ggcagtgtggcctgc

SEQ ID NO: 1937092 - DNA, 15 bp, Homo sapiens
gcagtgtggcctgcc

SEQ ID NO: 1937093 - DNA, 15 bp, Homo sapiens
cagtgtggcctgcct

SEQ ID NO: 1937094 - DNA, 15 bp, Homo sapiens
agtgtggcctgcctg

SEQ ID NO: 1937095 - DNA, 15 bp, Homo sapiens
gtgtggcctgcctgg

SEQ ID NO: 1937096 - DNA, 15 bp, Homo sapiens
tgtggcctgcctgga

SEQ ID NO: 1937097 - DNA, 15 bp, Homo sapiens
gtggcctgcctggaa

SEQ ID NO: 1937098 - DNA, 15 bp, Homo sapiens
tggcctgcctggaat

SEQ ID NO: 1937099 - DNA, 15 bp, Homo sapiens
ggcctgcctggaatt

SEQ ID NO: 1937100 - DNA, 15 bp, Homo sapiens
gcctgcctggaattg

SEQ ID NO: 1937101 - DNA, 15 bp, Homo sapiens
cctgcctggaattgt

SEQ ID NO: 1937102 - DNA, 15 bp, Homo sapiens
ctgcctggaattgtt

SEQ ID NO: 1937103 - DNA, 15 bp, Homo sapiens
tgcctggaattgttt

SEQ ID NO: 1937104 - DNA, 15 bp, Homo sapiens
gcctggaattgtttc

SEQ ID NO: 1937105 - DNA, 15 bp, Homo sapiens
cctggaattgtttct

SEQ ID NO: 1937106 - DNA, 15 bp, Homo sapiens
ctggaattgtttctg

SEQ ID NO: 1937107 - DNA, 15 bp, Homo sapiens
tggaattgtttctga

SEQ ID NO: 1937108 - DNA, 15 bp, Homo sapiens
ggaattgtttctgaa

SEQ ID NO: 1937109 - DNA, 15 bp, Homo sapiens
gaattgtttctgaac

SEQ ID NO: 1937110 - DNA, 15 bp, Homo sapiens
aattgtttctgaact

SEQ ID NO: 1937111 - DNA, 15 bp, Homo sapiens
attgtttctgaactc

SEQ ID NO: 1937112 - DNA, 15 bp, Homo sapiens
ttgtttctgaactcc

SEQ ID NO: 1937113 - DNA, 15 bp, Homo sapiens
tgtttctgaactcct

SEQ ID NO: 1937114 - DNA, 15 bp, Homo sapiens
gtttctgaactcctt

SEQ ID NO: 1937115 - DNA, 15 bp, Homo sapiens
tttctgaactccttc

SEQ ID NO: 1937116 - DNA, 15 bp, Homo sapiens
ttctgaactccttcc

SEQ ID NO: 1937117 - DNA, 15 bp, Homo sapiens
tctgaactccttcct

SEQ ID NO: 1937118 - DNA, 15 bp, Homo sapiens
ctgaactccttcctg

SEQ ID NO: 1937119 - DNA, 15 bp, Homo sapiens
tgaactccttcctgg

SEQ ID NO: 1937120 - DNA, 15 bp, Homo sapiens
gaactccttcctgga

SEQ ID NO: 1937121 - DNA, 15 bp, Homo sapiens
aactccttcctggaa

SEQ ID NO: 1937122 - DNA, 15 bp, Homo sapiens
actccttcctggaac

SEQ ID NO: 1937123 - DNA, 15 bp, Homo sapiens
ctccttcctggaaca

SEQ ID NO: 1937124 - DNA, 15 bp, Homo sapiens
tccttcctggaacat

SEQ ID NO: 1937125 - DNA, 15 bp, Homo sapiens
ccttcctggaacatt

SEQ ID NO: 1937126 - DNA, 15 bp, Homo sapiens
cttcctggaacattc

SEQ ID NO: 1937127 - DNA, 15 bp, Homo sapiens
ttcctggaacattca

SEQ ID NO: 1937128 - DNA, 15 bp, Homo sapiens
tcctggaacattcag

SEQ ID NO: 1937129 - DNA, 15 bp, Homo sapiens
cctggaacattcagt

SEQ ID NO: 1937130 - DNA, 15 bp, Homo sapiens
ctggaacattcagtt

SEQ ID NO: 1937131 - DNA, 15 bp, Homo sapiens
tggaacattcagttt

SEQ ID NO: 1937132 - DNA, 15 bp, Homo sapiens
ggaacattcagtttg

SEQ ID NO: 1937133 - DNA, 15 bp, Homo sapiens
gaacattcagtttga

SEQ ID NO: 1937134 - DNA, 15 bp, Homo sapiens
aacattcagtttgat

SEQ ID NO: 1937135 - DNA, 15 bp, Homo sapiens
acattcagtttgata

SEQ ID NO: 1937136 - DNA, 15 bp, Homo sapiens
cattcagtttgatac

SEQ ID NO: 1937137 - DNA, 15 bp, Homo sapiens
attcagtttgataca

SEQ ID NO: 1937138 - DNA, 15 bp, Homo sapiens
ttcagtttgatacat

SEQ ID NO: 1937139 - DNA, 15 bp, Homo sapiens
tcagtttgatacatt

SEQ ID NO: 1937140 - DNA, 15 bp, Homo sapiens
cagtttgatacattt

SEQ ID NO: 1937141 - DNA, 15 bp, Homo sapiens
agtttgatacatttt

SEQ ID NO: 1937142 - DNA, 15 bp, Homo sapiens
gtttgatacattttg

SEQ ID NO: 1937143 - DNA, 15 bp, Homo sapiens
tttgatacattttgc

SEQ ID NO: 1937144 - DNA, 15 bp, Homo sapiens
ttgatacattttgcg

SEQ ID NO: 1937145 - DNA, 15 bp, Homo sapiens
tgatacattttgcgc

SEQ ID NO: 1937146 - DNA, 15 bp, Homo sapiens
gatacattttgcgct

SEQ ID NO: 1937147 - DNA, 15 bp, Homo sapiens
atacattttgcgctc

SEQ ID NO: 1937148 - DNA, 15 bp, Homo sapiens
tacattttgcgctct

SEQ ID NO: 1937149 - DNA, 15 bp, Homo sapiens
acattttgcgctcta

SEQ ID NO: 1937150 - DNA, 15 bp, Homo sapiens
cattttgcgctctag

SEQ ID NO: 1937151 - DNA, 15 bp, Homo sapiens
attttgcgctctaga

SEQ ID NO: 1937152 - DNA, 15 bp, Homo sapiens
ttttgcgctctagag

SEQ ID NO: 1937153 - DNA, 15 bp, Homo sapiens
tttgcgctctagaga

SEQ ID NO: 1937154 - DNA, 15 bp, Homo sapiens
ttgcgctctagagac

SEQ ID NO: 1937155 - DNA, 15 bp, Homo sapiens
tgcgctctagagaca

SEQ ID NO: 1937156 - DNA, 15 bp, Homo sapiens
gcgctctagagacat

SEQ ID NO: 1937157 - DNA, 15 bp, Homo sapiens
cgctctagagacatc

SEQ ID NO: 1937158 - DNA, 15 bp, Homo sapiens
gctctagagacatcc

SEQ ID NO: 1937159 - DNA, 15 bp, Homo sapiens
ctctagagacatcca

SEQ ID NO: 1937160 - DNA, 15 bp, Homo sapiens
tctagagacatccat

SEQ ID NO: 1937161 - DNA, 15 bp, Homo sapiens
ctagagacatccatc

SEQ ID NO: 1937162 - DNA, 15 bp, Homo sapiens
tagagacatccatca

SEQ ID NO: 1937163 - DNA, 15 bp, Homo sapiens
agagacatccatcat

SEQ ID NO: 1937164 - DNA, 15 bp, Homo sapiens
gagacatccatcata

SEQ ID NO: 1937165 - DNA, 15 bp, Homo sapiens
agacatccatcatat

SEQ ID NO: 1937166 - DNA, 15 bp, Homo sapiens
gacatccatcatatc

SEQ ID NO: 1937167 - DNA, 15 bp, Homo sapiens
acatccatcatatca

SEQ ID NO: 1937168 - DNA, 15 bp, Homo sapiens
catccatcatatcag

SEQ ID NO: 1937169 - DNA, 15 bp, Homo sapiens
atccatcatatcaga

SEQ ID NO: 1937170 - DNA, 15 bp, Homo sapiens
tccatcatatcagaa

SEQ ID NO: 1937171 - DNA, 15 bp, Homo sapiens
ccatcatatcagaac

SEQ ID NO: 1937172 - DNA, 15 bp, Homo sapiens
catcatatcagaact

SEQ ID NO: 1937173 - DNA, 15 bp, Homo sapiens
atcatatcagaacta

SEQ ID NO: 1937174 - DNA, 15 bp, Homo sapiens
tcatatcagaactac

SEQ ID NO: 1937175 - DNA, 15 bp, Homo sapiens
catatcagaactaca

SEQ ID NO: 1937176 - DNA, 15 bp, Homo sapiens
atatcagaactacat

SEQ ID NO: 1937177 - DNA, 15 bp, Homo sapiens
tatcagaactacatg

SEQ ID NO: 1937178 - DNA, 15 bp, Homo sapiens
atcagaactacatga

SEQ ID NO: 1937179 - DNA, 15 bp, Homo sapiens
tcagaactacatgat

SEQ ID NO: 1937180 - DNA, 15 bp, Homo sapiens
gtaacagacaagaaa

SEQ ID NO: 1937181 - DNA, 15 bp, Homo sapiens
taacagacaagaaat

SEQ ID NO: 1937182 - DNA, 15 bp, Homo sapiens
aacagacaagaaata

SEQ ID NO: 1937183 - DNA, 15 bp, Homo sapiens
acagacaagaaataa

SEQ ID NO: 1937184 - DNA, 15 bp, Homo sapiens
cagacaagaaataaa

SEQ ID NO: 1937185 - DNA, 15 bp, Homo sapiens
agacaagaaataaat

SEQ ID NO: 1937186 - DNA, 15 bp, Homo sapiens
gacaagaaataaatg

SEQ ID NO: 1937187 - DNA, 15 bp, Homo sapiens
acaagaaataaatgt

SEQ ID NO: 1937188 - DNA, 15 bp, Homo sapiens
caagaaataaatgta

SEQ ID NO: 1937189 - DNA, 15 bp, Homo sapiens
aagaaataaatgtat

SEQ ID NO: 1937190 - DNA, 15 bp, Homo sapiens
agaaataaatgtata

SEQ ID NO: 1937191 - DNA, 15 bp, Homo sapiens
gaaataaatgtataa

SEQ ID NO: 1937192 - DNA, 15 bp, Homo sapiens
aaataaatgtataat

SEQ ID NO: 1937193 - DNA, 15 bp, Homo sapiens
aataaatgtataatg

SEQ ID NO: 1937194 - DNA, 15 bp, Homo sapiens
ataaatgtataatgc

SEQ ID NO: 1937195 - DNA, 15 bp, Homo sapiens
taaatgtataatgcc

SEQ ID NO: 1937196 - DNA, 15 bp, Homo sapiens
aaatgtataatgcca

SEQ ID NO: 1937197 - DNA, 15 bp, Homo sapiens
aatgtataatgccat

SEQ ID NO: 1937198 - DNA, 15 bp, Homo sapiens
atgtataatgccatg

SEQ ID NO: 1937199 - DNA, 15 bp, Homo sapiens
tgtataatgccatgt

SEQ ID NO: 1937200 - DNA, 15 bp, Homo sapiens
gtataatgccatgtc

SEQ ID NO: 1937201 - DNA, 15 bp, Homo sapiens
tataatgccatgtca

SEQ ID NO: 1937202 - DNA, 15 bp, Homo sapiens
ataatgccatgtcat

SEQ ID NO: 1937203 - DNA, 15 bp, Homo sapiens
taatgccatgtcatg

SEQ ID NO: 1937204 - DNA, 15 bp, Homo sapiens
aatgccatgtcatgt

SEQ ID NO: 1937205 - DNA, 15 bp, Homo sapiens
atgccatgtcatgta

SEQ ID NO: 1937206 - DNA, 15 bp, Homo sapiens
tgccatgtcatgtaa

SEQ ID NO: 1937207 - DNA, 15 bp, Homo sapiens
gccatgtcatgtaat

SEQ ID NO: 1937208 - DNA, 15 bp, Homo sapiens
ccatgtcatgtaatg

SEQ ID NO: 1937209 - DNA, 15 bp, Homo sapiens
catgtcatgtaatga

SEQ ID NO: 1937210 - DNA, 15 bp, Homo sapiens
atgtcatgtaatgat

SEQ ID NO: 1937211 - DNA, 15 bp, Homo sapiens
tgtcatgtaatgata

SEQ ID NO: 1937212 - DNA, 15 bp, Homo sapiens
gtcatgtaatgatag

SEQ ID NO: 1937213 - DNA, 15 bp, Homo sapiens
tcatgtaatgatagg

SEQ ID NO: 1937214 - DNA, 15 bp, Homo sapiens
catgtaatgataggt

SEQ ID NO: 1937215 - DNA, 15 bp, Homo sapiens
atgtaatgataggtg

SEQ ID NO: 1937216 - DNA, 15 bp, Homo sapiens
tgtaatgataggtgg

SEQ ID NO: 1937217 - DNA, 15 bp, Homo sapiens
gtaatgataggtgga

SEQ ID NO: 1937218 - DNA, 15 bp, Homo sapiens
taatgataggtggat

SEQ ID NO: 1937219 - DNA, 15 bp, Homo sapiens
aatgataggtggata

SEQ ID NO: 1937220 - DNA, 15 bp, Homo sapiens
atgataggtggataa

SEQ ID NO: 1937221 - DNA, 15 bp, Homo sapiens
tgataggtggataaa

SEQ ID NO: 1937222 - DNA, 15 bp, Homo sapiens
gataggtggataaag

SEQ ID NO: 1937223 - DNA, 15 bp, Homo sapiens
ataggtggataaaga

SEQ ID NO: 1937224 - DNA, 15 bp, Homo sapiens
taggtggataaagaa

SEQ ID NO: 1937225 - DNA, 15 bp, Homo sapiens
aggtggataaagaaa

SEQ ID NO: 1937226 - DNA, 15 bp, Homo sapiens
ggtggataaagaaaa

SEQ ID NO: 1937227 - DNA, 15 bp, Homo sapiens
gtggataaagaaaat

SEQ ID NO: 1937228 - DNA, 15 bp, Homo sapiens
tggataaagaaaatt

SEQ ID NO: 1937229 - DNA, 15 bp, Homo sapiens
ggataaagaaaattt

SEQ ID NO: 1937230 - DNA, 15 bp, Homo sapiens
gataaagaaaatttg

SEQ ID NO: 1937231 - DNA, 15 bp, Homo sapiens
ataaagaaaatttgg

SEQ ID NO: 1937232 - DNA, 15 bp, Homo sapiens
taaagaaaatttggg

SEQ ID NO: 1937233 - DNA, 15 bp, Homo sapiens
aaagaaaatttgggc

SEQ ID NO: 1937234 - DNA, 15 bp, Homo sapiens
aagaaaatttgggca

SEQ ID NO: 1937235 - DNA, 15 bp, Homo sapiens
agaaaatttgggcag

SEQ ID NO: 1937236 - DNA, 15 bp, Homo sapiens
gaaaatttgggcagg

SEQ ID NO: 1937237 - DNA, 15 bp, Homo sapiens
aaaatttgggcagga

SEQ ID NO: 1937238 - DNA, 15 bp, Homo sapiens
aaatttgggcaggat

SEQ ID NO: 1937239 - DNA, 15 bp, Homo sapiens
aatttgggcaggata

SEQ ID NO: 1937240 - DNA, 15 bp, Homo sapiens
atttgggcaggataa

SEQ ID NO: 1937241 - DNA, 15 bp, Homo sapiens
tttgggcaggataag

SEQ ID NO: 1937242 - DNA, 15 bp, Homo sapiens
ttgggcaggataaga

SEQ ID NO: 1937243 - DNA, 15 bp, Homo sapiens
tgggcaggataagag

SEQ ID NO: 1937244 - DNA, 15 bp, Homo sapiens
gggcaggataagagt

SEQ ID NO: 1937245 - DNA, 15 bp, Homo sapiens
ggcaggataagagta

SEQ ID NO: 1937246 - DNA, 15 bp, Homo sapiens
gcaggataagagtat

SEQ ID NO: 1937247 - DNA, 15 bp, Homo sapiens
caggataagagtata

SEQ ID NO: 1937248 - DNA, 15 bp, Homo sapiens
aggataagagtatag

SEQ ID NO: 1937249 - DNA, 15 bp, Homo sapiens
ggataagagtataga

SEQ ID NO: 1937250 - DNA, 15 bp, Homo sapiens
gataagagtatagac

SEQ ID NO: 1937251 - DNA, 15 bp, Homo sapiens
ataagagtatagaca

SEQ ID NO: 1937252 - DNA, 15 bp, Homo sapiens
taagagtatagacag

SEQ ID NO: 1937253 - DNA, 15 bp, Homo sapiens
aagagtatagacagt

SEQ ID NO: 1937254 - DNA, 15 bp, Homo sapiens
agagtatagacagtg

SEQ ID NO: 1937255 - DNA, 15 bp, Homo sapiens
gagtatagacagtga

SEQ ID NO: 1937256 - DNA, 15 bp, Homo sapiens
agtatagacagtgac

SEQ ID NO: 1937257 - DNA, 15 bp, Homo sapiens
gtatagacagtgaca

SEQ ID NO: 1937258 - DNA, 15 bp, Homo sapiens
tatagacagtgacaa

SEQ ID NO: 1937259 - DNA, 15 bp, Homo sapiens
atagacagtgacaaa

SEQ ID NO: 1937260 - DNA, 15 bp, Homo sapiens
tagacagtgacaaaa

SEQ ID NO: 1937261 - DNA, 15 bp, Homo sapiens
agacagtgacaaaat

SEQ ID NO: 1937262 - DNA, 15 bp, Homo sapiens
gacagtgacaaaata

SEQ ID NO: 1937263 - DNA, 15 bp, Homo sapiens
acagtgacaaaatac

SEQ ID NO: 1937264 - DNA, 15 bp, Homo sapiens
cagtgacaaaatacg

SEQ ID NO: 1937265 - DNA, 15 bp, Homo sapiens
agtgacaaaatacgt

SEQ ID NO: 1937266 - DNA, 15 bp, Homo sapiens
gtgacaaaatacgtg

SEQ ID NO: 1937267 - DNA, 15 bp, Homo sapiens
tgacaaaatacgtga

SEQ ID NO: 1937268 - DNA, 15 bp, Homo sapiens
gacaaaatacgtgaa

SEQ ID NO: 1937269 - DNA, 15 bp, Homo sapiens
acaaaatacgtgaag

SEQ ID NO: 1937270 - DNA, 15 bp, Homo sapiens
caaaatacgtgaagg

SEQ ID NO: 1937271 - DNA, 15 bp, Homo sapiens
aaaatacgtgaaggg

SEQ ID NO: 1937272 - DNA, 15 bp, Homo sapiens
aaatacgtgaagggc

SEQ ID NO: 1937273 - DNA, 15 bp, Homo sapiens
aatacgtgaagggct

SEQ ID NO: 1937274 - DNA, 15 bp, Homo sapiens
atacgtgaagggctc

SEQ ID NO: 1937275 - DNA, 15 bp, Homo sapiens
tacgtgaagggctct

SEQ ID NO: 1937276 - DNA, 15 bp, Homo sapiens
acgtgaagggctctt

SEQ ID NO: 1937277 - DNA, 15 bp, Homo sapiens
cgtgaagggctcttc

SEQ ID NO: 1937278 - DNA, 15 bp, Homo sapiens
gtgaagggctcttct

SEQ ID NO: 1937279 - DNA, 15 bp, Homo sapiens
tgaagggctcttctt

SEQ ID NO: 1937280 - DNA, 15 bp, Homo sapiens
gaagggctcttcttt

SEQ ID NO: 1937281 - DNA, 15 bp, Homo sapiens
aagggctcttctttt

SEQ ID NO: 1937282 - DNA, 15 bp, Homo sapiens
agggctcttcttttg

SEQ ID NO: 1937283 - DNA, 15 bp, Homo sapiens
gggctcttcttttgg

SEQ ID NO: 1937284 - DNA, 15 bp, Homo sapiens
ggctcttcttttgga

SEQ ID NO: 1937285 - DNA, 15 bp, Homo sapiens
gctcttcttttggac

SEQ ID NO: 1937286 - DNA, 15 bp, Homo sapiens
ctcttcttttggaca

SEQ ID NO: 1937287 - DNA, 15 bp, Homo sapiens
tcttcttttggacag

SEQ ID NO: 1937288 - DNA, 15 bp, Homo sapiens
cttcttttggacagg

SEQ ID NO: 1937289 - DNA, 15 bp, Homo sapiens
ttcttttggacaggg

SEQ ID NO: 1937290 - DNA, 15 bp, Homo sapiens
tcttttggacagggt

SEQ ID NO: 1937291 - DNA, 15 bp, Homo sapiens
cttttggacagggtg

SEQ ID NO: 1937292 - DNA, 15 bp, Homo sapiens
ttttggacagggtgg

SEQ ID NO: 1937293 - DNA, 15 bp, Homo sapiens
tttggacagggtggt

SEQ ID NO: 1937294 - DNA, 15 bp, Homo sapiens
ttggacagggtggtc

SEQ ID NO: 1937295 - DNA, 15 bp, Homo sapiens
tggacagggtggtca

SEQ ID NO: 1937296 - DNA, 15 bp, Homo sapiens
ggacagggtggtcag

SEQ ID NO: 1937297 - DNA, 15 bp, Homo sapiens
gacagggtggtcagg

SEQ ID NO: 1937298 - DNA, 15 bp, Homo sapiens
acagggtggtcaggg

SEQ ID NO: 1937299 - DNA, 15 bp, Homo sapiens
cagggtggtcaggga

SEQ ID NO: 1937300 - DNA, 15 bp, Homo sapiens
agggtggtcagggaa

SEQ ID NO: 1937301 - DNA, 15 bp, Homo sapiens
gggtggtcagggaag

SEQ ID NO: 1937302 - DNA, 15 bp, Homo sapiens
ggtggtcagggaagg

SEQ ID NO: 1937303 - DNA, 15 bp, Homo sapiens
gtggtcagggaaggc

SEQ ID NO: 1937304 - DNA, 15 bp, Homo sapiens
tggtcagggaaggcc

SEQ ID NO: 1937305 - DNA, 15 bp, Homo sapiens
ggtcagggaaggccg

SEQ ID NO: 1937306 - DNA, 15 bp, Homo sapiens
gtcagggaaggccgc

SEQ ID NO: 1937307 - DNA, 15 bp, Homo sapiens
tcagggaaggccgct

SEQ ID NO: 1937308 - DNA, 15 bp, Homo sapiens
cagggaaggccgctc

SEQ ID NO: 1937309 - DNA, 15 bp, Homo sapiens
agggaaggccgctct

SEQ ID NO: 1937310 - DNA, 15 bp, Homo sapiens
gggaaggccgctctg

SEQ ID NO: 1937311 - DNA, 15 bp, Homo sapiens
ggaaggccgctctga

SEQ ID NO: 1937312 - DNA, 15 bp, Homo sapiens
gaaggccgctctgat

SEQ ID NO: 1937313 - DNA, 15 bp, Homo sapiens
aaggccgctctgatg

SEQ ID NO: 1937314 - DNA, 15 bp, Homo sapiens
aggccgctctgatga

SEQ ID NO: 1937315 - DNA, 15 bp, Homo sapiens
ggccgctctgatgaa

SEQ ID NO: 1937316 - DNA, 15 bp, Homo sapiens
gccgctctgatgaag

SEQ ID NO: 1937317 - DNA, 15 bp, Homo sapiens
ccgctctgatgaagt

SEQ ID NO: 1937318 - DNA, 15 bp, Homo sapiens
cgctctgatgaagtg

SEQ ID NO: 1937319 - DNA, 15 bp, Homo sapiens
gctctgatgaagtga

SEQ ID NO: 1937320 - DNA, 15 bp, Homo sapiens
ctctgatgaagtgac

SEQ ID NO: 1937321 - DNA, 15 bp, Homo sapiens
tctgatgaagtgaca

SEQ ID NO: 1937322 - DNA, 15 bp, Homo sapiens
ctgatgaagtgacat

SEQ ID NO: 1937323 - DNA, 15 bp, Homo sapiens
tgatgaagtgacatt

SEQ ID NO: 1937324 - DNA, 15 bp, Homo sapiens
gatgaagtgacattt

SEQ ID NO: 1937325 - DNA, 15 bp, Homo sapiens
atgaagtgacattta

SEQ ID NO: 1937326 - DNA, 15 bp, Homo sapiens
tgaagtgacatttac

SEQ ID NO: 1937327 - DNA, 15 bp, Homo sapiens
gaagtgacatttaca

SEQ ID NO: 1937328 - DNA, 15 bp, Homo sapiens
aagtgacatttacac

SEQ ID NO: 1937329 - DNA, 15 bp, Homo sapiens
agtgacatttacaca

SEQ ID NO: 1937330 - DNA, 15 bp, Homo sapiens
gtgacatttacacag

SEQ ID NO: 1937331 - DNA, 15 bp, Homo sapiens
tgacatttacacaga

SEQ ID NO: 1937332 - DNA, 15 bp, Homo sapiens
gacatttacacagag

SEQ ID NO: 1937333 - DNA, 15 bp, Homo sapiens
acatttacacagaga

SEQ ID NO: 1937334 - DNA, 15 bp, Homo sapiens
catttacacagagac

SEQ ID NO: 1937335 - DNA, 15 bp, Homo sapiens
atttacacagagacc

SEQ ID NO: 1937336 - DNA, 15 bp, Homo sapiens
tttacacagagaccc

SEQ ID NO: 1937337 - DNA, 15 bp, Homo sapiens
ttacacagagaccca

SEQ ID NO: 1937338 - DNA, 15 bp, Homo sapiens
tacacagagacccaa

SEQ ID NO: 1937339 - DNA, 15 bp, Homo sapiens
acacagagacccaaa

SEQ ID NO: 1937340 - DNA, 15 bp, Homo sapiens
cacagagacccaaag

SEQ ID NO: 1937341 - DNA, 15 bp, Homo sapiens
acagagacccaaaga

SEQ ID NO: 1937342 - DNA, 15 bp, Homo sapiens
cagagacccaaagaa

SEQ ID NO: 1937343 - DNA, 15 bp, Homo sapiens
agagacccaaagaac

SEQ ID NO: 1937344 - DNA, 15 bp, Homo sapiens
gagacccaaagaaca

SEQ ID NO: 1937345 - DNA, 15 bp, Homo sapiens
agacccaaagaacat

SEQ ID NO: 1937346 - DNA, 15 bp, Homo sapiens
gacccaaagaacatg

SEQ ID NO: 1937347 - DNA, 15 bp, Homo sapiens
acccaaagaacatga

SEQ ID NO: 1937348 - DNA, 15 bp, Homo sapiens
cccaaagaacatgag

SEQ ID NO: 1937349 - DNA, 15 bp, Homo sapiens
ccaaagaacatgagg

SEQ ID NO: 1937350 - DNA, 15 bp, Homo sapiens
caaagaacatgaggg

SEQ ID NO: 1937351 - DNA, 15 bp, Homo sapiens
aaagaacatgagggg

SEQ ID NO: 1937352 - DNA, 15 bp, Homo sapiens
aagaacatgagggga

SEQ ID NO: 1937353 - DNA, 15 bp, Homo sapiens
agaacatgaggggat

SEQ ID NO: 1937354 - DNA, 15 bp, Homo sapiens
gaacatgaggggatg

SEQ ID NO: 1937355 - DNA, 15 bp, Homo sapiens
aacatgaggggatga

SEQ ID NO: 1937356 - DNA, 15 bp, Homo sapiens
acatgaggggatgag

SEQ ID NO: 1937357 - DNA, 15 bp, Homo sapiens
catgaggggatgagc

SEQ ID NO: 1937358 - DNA, 15 bp, Homo sapiens
atgaggggatgagca

SEQ ID NO: 1937359 - DNA, 15 bp, Homo sapiens
tgaggggatgagcag

SEQ ID NO: 1937360 - DNA, 15 bp, Homo sapiens
gaggggatgagcaga

SEQ ID NO: 1937361 - DNA, 15 bp, Homo sapiens
aggggatgagcagag

SEQ ID NO: 1937362 - DNA, 15 bp, Homo sapiens
ggggatgagcagaga

SEQ ID NO: 1937363 - DNA, 15 bp, Homo sapiens
gggatgagcagagac

SEQ ID NO: 1937364 - DNA, 15 bp, Homo sapiens
ggatgagcagagaca

SEQ ID NO: 1937365 - DNA, 15 bp, Homo sapiens
gatgagcagagacag

SEQ ID NO: 1937366 - DNA, 15 bp, Homo sapiens
atgagcagagacaga

SEQ ID NO: 1937367 - DNA, 15 bp, Homo sapiens
tgagcagagacagaa

SEQ ID NO: 1937368 - DNA, 15 bp, Homo sapiens
gagcagagacagaag

SEQ ID NO: 1937369 - DNA, 15 bp, Homo sapiens
agcagagacagaagg

SEQ ID NO: 1937370 - DNA, 15 bp, Homo sapiens
gcagagacagaaggg

SEQ ID NO: 1937371 - DNA, 15 bp, Homo sapiens
cagagacagaaggga

SEQ ID NO: 1937372 - DNA, 15 bp, Homo sapiens
agagacagaagggat

SEQ ID NO: 1937373 - DNA, 15 bp, Homo sapiens
gagacagaagggatg

SEQ ID NO: 1937374 - DNA, 15 bp, Homo sapiens
agacagaagggatgt

SEQ ID NO: 1937375 - DNA, 15 bp, Homo sapiens
gacagaagggatgta

SEQ ID NO: 1937376 - DNA, 15 bp, Homo sapiens
acagaagggatgtaa

SEQ ID NO: 1937377 - DNA, 15 bp, Homo sapiens
cagaagggatgtaag

SEQ ID NO: 1937378 - DNA, 15 bp, Homo sapiens
agaagggatgtaagt

SEQ ID NO: 1937379 - DNA, 15 bp, Homo sapiens
gaagggatgtaagta

SEQ ID NO: 1937380 - DNA, 15 bp, Homo sapiens
aagggatgtaagtaa

SEQ ID NO: 1937381 - DNA, 15 bp, Homo sapiens
agggatgtaagtaat

SEQ ID NO: 1937382 - DNA, 15 bp, Homo sapiens
gggatgtaagtaatg

SEQ ID NO: 1937383 - DNA, 15 bp, Homo sapiens
ggatgtaagtaatga

SEQ ID NO: 1937384 - DNA, 15 bp, Homo sapiens
gatgtaagtaatgaa

SEQ ID NO: 1937385 - DNA, 15 bp, Homo sapiens
atgtaagtaatgaat

SEQ ID NO: 1937386 - DNA, 15 bp, Homo sapiens
tgtaagtaatgaatc

SEQ ID NO: 1937387 - DNA, 15 bp, Homo sapiens
gtaagtaatgaatca

SEQ ID NO: 1937388 - DNA, 15 bp, Homo sapiens
taagtaatgaatcat

SEQ ID NO: 1937389 - DNA, 15 bp, Homo sapiens
aagtaatgaatcatg

SEQ ID NO: 1937390 - DNA, 15 bp, Homo sapiens
agtaatgaatcatgt

SEQ ID NO: 1937391 - DNA, 15 bp, Homo sapiens
gtaatgaatcatgtg

SEQ ID NO: 1937392 - DNA, 15 bp, Homo sapiens
taatgaatcatgtgg

SEQ ID NO: 1937393 - DNA, 15 bp, Homo sapiens
aatgaatcatgtggc

SEQ ID NO: 1937394 - DNA, 15 bp, Homo sapiens
atgaatcatgtggct

SEQ ID NO: 1937395 - DNA, 15 bp, Homo sapiens
tgaatcatgtggcta

SEQ ID NO: 1937396 - DNA, 15 bp, Homo sapiens
gaatcatgtggctat

SEQ ID NO: 1937397 - DNA, 15 bp, Homo sapiens
aatcatgtggctatc

SEQ ID NO: 1937398 - DNA, 15 bp, Homo sapiens
atcatgtggctatct

SEQ ID NO: 1937399 - DNA, 15 bp, Homo sapiens
tcatgtggctatctg

SEQ ID NO: 1937400 - DNA, 15 bp, Homo sapiens
catgtggctatctgg

SEQ ID NO: 1937401 - DNA, 15 bp, Homo sapiens
atgtggctatctgga

SEQ ID NO: 1937402 - DNA, 15 bp, Homo sapiens
tgtggctatctggag

SEQ ID NO: 1937403 - DNA, 15 bp, Homo sapiens
gtggctatctggaga

SEQ ID NO: 1937404 - DNA, 15 bp, Homo sapiens
tggctatctggagac

SEQ ID NO: 1937405 - DNA, 15 bp, Homo sapiens
ggctatctggagaca

SEQ ID NO: 1937406 - DNA, 15 bp, Homo sapiens
gctatctggagacaa

SEQ ID NO: 1937407 - DNA, 15 bp, Homo sapiens
ctatctggagacaag

SEQ ID NO: 1937408 - DNA, 15 bp, Homo sapiens
tatctggagacaaga

SEQ ID NO: 1937409 - DNA, 15 bp, Homo sapiens
atctggagacaagag

SEQ ID NO: 1937410 - DNA, 15 bp, Homo sapiens
tctggagacaagagt

SEQ ID NO: 1937411 - DNA, 15 bp, Homo sapiens
ctggagacaagagtg

SEQ ID NO: 1937412 - DNA, 15 bp, Homo sapiens
tggagacaagagtgt

SEQ ID NO: 1937413 - DNA, 15 bp, Homo sapiens
ggagacaagagtgtc

SEQ ID NO: 1937414 - DNA, 15 bp, Homo sapiens
gagacaagagtgtcc

SEQ ID NO: 1937415 - DNA, 15 bp, Homo sapiens
agacaagagtgtcca

SEQ ID NO: 1937416 - DNA, 15 bp, Homo sapiens
gacaagagtgtccac

SEQ ID NO: 1937417 - DNA, 15 bp, Homo sapiens
acaagagtgtccacc

SEQ ID NO: 1937418 - DNA, 15 bp, Homo sapiens
caagagtgtccacca

SEQ ID NO: 1937419 - DNA, 15 bp, Homo sapiens
aagagtgtccaccag

SEQ ID NO: 1937420 - DNA, 15 bp, Homo sapiens
agagtgtccaccagc

SEQ ID NO: 1937421 - DNA, 15 bp, Homo sapiens
gagtgtccaccagct

SEQ ID NO: 1937422 - DNA, 15 bp, Homo sapiens
agtgtccaccagctg

SEQ ID NO: 1937423 - DNA, 15 bp, Homo sapiens
gtgtccaccagctga

SEQ ID NO: 1937424 - DNA, 15 bp, Homo sapiens
tgtccaccagctgag

SEQ ID NO: 1937425 - DNA, 15 bp, Homo sapiens
gtccaccagctgagg

SEQ ID NO: 1937426 - DNA, 15 bp, Homo sapiens
tccaccagctgagga

SEQ ID NO: 1937427 - DNA, 15 bp, Homo sapiens
ccaccagctgaggaa

SEQ ID NO: 1937428 - DNA, 15 bp, Homo sapiens
caccagctgaggaaa

SEQ ID NO: 1937429 - DNA, 15 bp, Homo sapiens
accagctgaggaaat

SEQ ID NO: 1937430 - DNA, 15 bp, Homo sapiens
ccagctgaggaaata

SEQ ID NO: 1937431 - DNA, 15 bp, Homo sapiens
cagctgaggaaatag

SEQ ID NO: 1937432 - DNA, 15 bp, Homo sapiens
agctgaggaaatagc

SEQ ID NO: 1937433 - DNA, 15 bp, Homo sapiens
gctgaggaaatagca

SEQ ID NO: 1937434 - DNA, 15 bp, Homo sapiens
ctgaggaaatagcac

SEQ ID NO: 1937435 - DNA, 15 bp, Homo sapiens
tgaggaaatagcaca

SEQ ID NO: 1937436 - DNA, 15 bp, Homo sapiens
gaggaaatagcacat

SEQ ID NO: 1937437 - DNA, 15 bp, Homo sapiens
aggaaatagcacatg

SEQ ID NO: 1937438 - DNA, 15 bp, Homo sapiens
ggaaatagcacatgc

SEQ ID NO: 1937439 - DNA, 15 bp, Homo sapiens
gaaatagcacatgca

SEQ ID NO: 1937440 - DNA, 15 bp, Homo sapiens
aaatagcacatgcaa

SEQ ID NO: 1937441 - DNA, 15 bp, Homo sapiens
aatagcacatgcaaa

SEQ ID NO: 1937442 - DNA, 15 bp, Homo sapiens
atagcacatgcaaag

SEQ ID NO: 1937443 - DNA, 15 bp, Homo sapiens
tagcacatgcaaagg

SEQ ID NO: 1937444 - DNA, 15 bp, Homo sapiens
agcacatgcaaaggc

SEQ ID NO: 1937445 - DNA, 15 bp, Homo sapiens
gcacatgcaaaggcc

SEQ ID NO: 1937446 - DNA, 15 bp, Homo sapiens
acatgcaaaggccct

SEQ ID NO: 1937447 - DNA, 15 bp, Homo sapiens
catgcaaaggccctg

SEQ ID NO: 1937448 - DNA, 15 bp, Homo sapiens
atgcaaaggccctgt

SEQ ID NO: 1937449 - DNA, 15 bp, Homo sapiens
tgcaaaggccctgtg

SEQ ID NO: 1937450 - DNA, 15 bp, Homo sapiens
gcaaaggccctgtga

SEQ ID NO: 1937451 - DNA, 15 bp, Homo sapiens
caaaggccctgtgac

SEQ ID NO: 1937452 - DNA, 15 bp, Homo sapiens
aaaggccctgtgaca

SEQ ID NO: 1937453 - DNA, 15 bp, Homo sapiens
aaggccctgtgacaa

SEQ ID NO: 1937454 - DNA, 15 bp, Homo sapiens
aggccctgtgacaag

SEQ ID NO: 1937455 - DNA, 15 bp, Homo sapiens
ggccctgtgacaagt

SEQ ID NO: 1937456 - DNA, 15 bp, Homo sapiens
gccctgtgacaagtg

SEQ ID NO: 1937457 - DNA, 15 bp, Homo sapiens
ccctgtgacaagtgt

SEQ ID NO: 1937458 - DNA, 15 bp, Homo sapiens
cctgtgacaagtgtc

SEQ ID NO: 1937459 - DNA, 15 bp, Homo sapiens
ctgtgacaagtgtct

SEQ ID NO: 1937460 - DNA, 15 bp, Homo sapiens
tgtgacaagtgtctg

SEQ ID NO: 1937461 - DNA, 15 bp, Homo sapiens
gtgacaagtgtctgt

SEQ ID NO: 1937462 - DNA, 15 bp, Homo sapiens
tgacaagtgtctgtg

SEQ ID NO: 1937463 - DNA, 15 bp, Homo sapiens
gacaagtgtctgtgt

SEQ ID NO: 1937464 - DNA, 15 bp, Homo sapiens
acaagtgtctgtgtg

SEQ ID NO: 1937465 - DNA, 15 bp, Homo sapiens
caagtgtctgtgtga

SEQ ID NO: 1937466 - DNA, 15 bp, Homo sapiens
aagtgtctgtgtgag

SEQ ID NO: 1937467 - DNA, 15 bp, Homo sapiens
agtgtctgtgtgagg

SEQ ID NO: 1937468 - DNA, 15 bp, Homo sapiens
gtgtctgtgtgagga

SEQ ID NO: 1937469 - DNA, 15 bp, Homo sapiens
tgtctgtgtgaggaa

SEQ ID NO: 1937470 - DNA, 15 bp, Homo sapiens
gtctgtgtgaggaac

SEQ ID NO: 1937471 - DNA, 15 bp, Homo sapiens
tctgtgtgaggaact

SEQ ID NO: 1937472 - DNA, 15 bp, Homo sapiens
ctgtgtgaggaacta

SEQ ID NO: 1937473 - DNA, 15 bp, Homo sapiens
tgtgtgaggaactat

SEQ ID NO: 1937474 - DNA, 15 bp, Homo sapiens
gtgtgaggaactatg

SEQ ID NO: 1937475 - DNA, 15 bp, Homo sapiens
tgtgaggaactatga

SEQ ID NO: 1937476 - DNA, 15 bp, Homo sapiens
gtgaggaactatgag

SEQ ID NO: 1937477 - DNA, 15 bp, Homo sapiens
tgaggaactatgagg

SEQ ID NO: 1937478 - DNA, 15 bp, Homo sapiens
gaggaactatgaggg

SEQ ID NO: 1937479 - DNA, 15 bp, Homo sapiens
aggaactatgagggc

SEQ ID NO: 1937480 - DNA, 15 bp, Homo sapiens
ggaactatgagggcg

SEQ ID NO: 1937481 - DNA, 15 bp, Homo sapiens
gaactatgagggcga

SEQ ID NO: 1937482 - DNA, 15 bp, Homo sapiens
aactatgagggcgaa

SEQ ID NO: 1937483 - DNA, 15 bp, Homo sapiens
actatgagggcgaaa

SEQ ID NO: 1937484 - DNA, 15 bp, Homo sapiens
ctatgagggcgaaag

SEQ ID NO: 1937485 - DNA, 15 bp, Homo sapiens
tatgagggcgaaagt

SEQ ID NO: 1937486 - DNA, 15 bp, Homo sapiens
atgagggcgaaagtg

SEQ ID NO: 1937487 - DNA, 15 bp, Homo sapiens
tgagggcgaaagtga

SEQ ID NO: 1937488 - DNA, 15 bp, Homo sapiens
gagggcgaaagtgag

SEQ ID NO: 1937489 - DNA, 15 bp, Homo sapiens
agggcgaaagtgagg

SEQ ID NO: 1937490 - DNA, 15 bp, Homo sapiens
gggcgaaagtgaggt

SEQ ID NO: 1937491 - DNA, 15 bp, Homo sapiens
ggcgaaagtgaggtt

SEQ ID NO: 1937492 - DNA, 15 bp, Homo sapiens
gcgaaagtgaggttg

SEQ ID NO: 1937493 - DNA, 15 bp, Homo sapiens
cgaaagtgaggttgg

SEQ ID NO: 1937494 - DNA, 15 bp, Homo sapiens
gaaagtgaggttgga

SEQ ID NO: 1937495 - DNA, 15 bp, Homo sapiens
aaagtgaggttggac

SEQ ID NO: 1937496 - DNA, 15 bp, Homo sapiens
aagtgaggttggacc

SEQ ID NO: 1937497 - DNA, 15 bp, Homo sapiens
agtgaggttggacca

SEQ ID NO: 1937498 - DNA, 15 bp, Homo sapiens
gtgaggttggaccac

SEQ ID NO: 1937499 - DNA, 15 bp, Homo sapiens
tgaggttggaccaca

SEQ ID NO: 1937500 - DNA, 15 bp, Homo sapiens
gaggttggaccacag

SEQ ID NO: 1937501 - DNA, 15 bp, Homo sapiens
aggttggaccacagt

SEQ ID NO: 1937502 - DNA, 15 bp, Homo sapiens
ggttggaccacagtg

SEQ ID NO: 1937503 - DNA, 15 bp, Homo sapiens
gttggaccacagtga

SEQ ID NO: 1937504 - DNA, 15 bp, Homo sapiens
ttggaccacagtgag

SEQ ID NO: 1937505 - DNA, 15 bp, Homo sapiens
tggaccacagtgagc

SEQ ID NO: 1937506 - DNA, 15 bp, Homo sapiens
ggaccacagtgagca

SEQ ID NO: 1937507 - DNA, 15 bp, Homo sapiens
gaccacagtgagcaa

SEQ ID NO: 1937508 - DNA, 15 bp, Homo sapiens
accacagtgagcaag

SEQ ID NO: 1937509 - DNA, 15 bp, Homo sapiens
ccacagtgagcaagg

SEQ ID NO: 1937510 - DNA, 15 bp, Homo sapiens
cacagtgagcaaggt

SEQ ID NO: 1937511 - DNA, 15 bp, Homo sapiens
acagtgagcaaggtg

SEQ ID NO: 1937512 - DNA, 15 bp, Homo sapiens
cagtgagcaaggtgg

SEQ ID NO: 1937513 - DNA, 15 bp, Homo sapiens
agtgagcaaggtgga

SEQ ID NO: 1937514 - DNA, 15 bp, Homo sapiens
gtgagcaaggtggac

SEQ ID NO: 1937515 - DNA, 15 bp, Homo sapiens
tgagcaaggtggaca

SEQ ID NO: 1937516 - DNA, 15 bp, Homo sapiens
gagcaaggtggacag

SEQ ID NO: 1937517 - DNA, 15 bp, Homo sapiens
agcaaggtggacagt

SEQ ID NO: 1937518 - DNA, 15 bp, Homo sapiens
gcaaggtggacagtg

SEQ ID NO: 1937519 - DNA, 15 bp, Homo sapiens
caaggtggacagtgg

SEQ ID NO: 1937520 - DNA, 15 bp, Homo sapiens
aaggtggacagtggg

SEQ ID NO: 1937521 - DNA, 15 bp, Homo sapiens
aggtggacagtggga

SEQ ID NO: 1937522 - DNA, 15 bp, Homo sapiens
ggtggacagtgggaa

SEQ ID NO: 1937523 - DNA, 15 bp, Homo sapiens
gtggacagtgggaaa

SEQ ID NO: 1937524 - DNA, 15 bp, Homo sapiens
tggacagtgggaaat

SEQ ID NO: 1937525 - DNA, 15 bp, Homo sapiens
ggacagtgggaaatg

SEQ ID NO: 1937526 - DNA, 15 bp, Homo sapiens
gacagtgggaaatga

SEQ ID NO: 1937527 - DNA, 15 bp, Homo sapiens
acagtgggaaatgag

SEQ ID NO: 1937528 - DNA, 15 bp, Homo sapiens
cagtgggaaatgagg

SEQ ID NO: 1937529 - DNA, 15 bp, Homo sapiens
agtgggaaatgaggt

SEQ ID NO: 1937530 - DNA, 15 bp, Homo sapiens
gtgggaaatgaggtt

SEQ ID NO: 1937531 - DNA, 15 bp, Homo sapiens
tgggaaatgaggtta

SEQ ID NO: 1937532 - DNA, 15 bp, Homo sapiens
gggaaatgaggttag

SEQ ID NO: 1937533 - DNA, 15 bp, Homo sapiens
ggaaatgaggttagg

SEQ ID NO: 1937534 - DNA, 15 bp, Homo sapiens
gaaatgaggttaggg

SEQ ID NO: 1937535 - DNA, 15 bp, Homo sapiens
aaatgaggttagggt

SEQ ID NO: 1937536 - DNA, 15 bp, Homo sapiens
aatgaggttagggtc

SEQ ID NO: 1937537 - DNA, 15 bp, Homo sapiens
atgaggttagggtcc

SEQ ID NO: 1937538 - DNA, 15 bp, Homo sapiens
tgaggttagggtcct

SEQ ID NO: 1937539 - DNA, 15 bp, Homo sapiens
gaggttagggtccta

SEQ ID NO: 1937540 - DNA, 15 bp, Homo sapiens
aggttagggtcctaa

SEQ ID NO: 1937541 - DNA, 15 bp, Homo sapiens
ggttagggtcctaaa

SEQ ID NO: 1937542 - DNA, 15 bp, Homo sapiens
gttagggtcctaaag

SEQ ID NO: 1937543 - DNA, 15 bp, Homo sapiens
ttagggtcctaaaga

SEQ ID NO: 1937544 - DNA, 15 bp, Homo sapiens
tagggtcctaaagaa

SEQ ID NO: 1937545 - DNA, 15 bp, Homo sapiens
agggtcctaaagaac

SEQ ID NO: 1937546 - DNA, 15 bp, Homo sapiens
gggtcctaaagaaca

SEQ ID NO: 1937547 - DNA, 15 bp, Homo sapiens
ggtcctaaagaacac

SEQ ID NO: 1937548 - DNA, 15 bp, Homo sapiens
gtcctaaagaacacg

SEQ ID NO: 1937549 - DNA, 15 bp, Homo sapiens
tcctaaagaacacga

SEQ ID NO: 1937550 - DNA, 15 bp, Homo sapiens
cctaaagaacacgat

SEQ ID NO: 1937551 - DNA, 15 bp, Homo sapiens
ctaaagaacacgata

SEQ ID NO: 1937552 - DNA, 15 bp, Homo sapiens
taaagaacacgatac

SEQ ID NO: 1937553 - DNA, 15 bp, Homo sapiens
aaagaacacgatacg

SEQ ID NO: 1937554 - DNA, 15 bp, Homo sapiens
aagaacacgatacgg

SEQ ID NO: 1937555 - DNA, 15 bp, Homo sapiens
agaacacgatacgga

SEQ ID NO: 1937556 - DNA, 15 bp, Homo sapiens
gaacacgatacggac

SEQ ID NO: 1937557 - DNA, 15 bp, Homo sapiens
aacacgatacggact

SEQ ID NO: 1937558 - DNA, 15 bp, Homo sapiens
acacgatacggactt

SEQ ID NO: 1937559 - DNA, 15 bp, Homo sapiens
cacgatacggacttt

SEQ ID NO: 1937560 - DNA, 15 bp, Homo sapiens
acgatacggactttg

SEQ ID NO: 1937561 - DNA, 15 bp, Homo sapiens
cgatacggactttgg

SEQ ID NO: 1937562 - DNA, 15 bp, Homo sapiens
gatacggactttgga

SEQ ID NO: 1937563 - DNA, 15 bp, Homo sapiens
atacggactttggat

SEQ ID NO: 1937564 - DNA, 15 bp, Homo sapiens
tacggactttggatt

SEQ ID NO: 1937565 - DNA, 15 bp, Homo sapiens
acggactttggattt

SEQ ID NO: 1937566 - DNA, 15 bp, Homo sapiens
cggactttggatttt

SEQ ID NO: 1937567 - DNA, 15 bp, Homo sapiens
ggactttggatttta

SEQ ID NO: 1937568 - DNA, 15 bp, Homo sapiens
gactttggattttat

SEQ ID NO: 1937569 - DNA, 15 bp, Homo sapiens
actttggattttatt

SEQ ID NO: 1937570 - DNA, 15 bp, Homo sapiens
ctttggattttattc

SEQ ID NO: 1937571 - DNA, 15 bp, Homo sapiens
tttggattttattcc

SEQ ID NO: 1937572 - DNA, 15 bp, Homo sapiens
ttggattttattcca

SEQ ID NO: 1937573 - DNA, 15 bp, Homo sapiens
tggattttattccaa

SEQ ID NO: 1937574 - DNA, 15 bp, Homo sapiens
ggattttattccaag

SEQ ID NO: 1937575 - DNA, 15 bp, Homo sapiens
gattttattccaagc

SEQ ID NO: 1937576 - DNA, 15 bp, Homo sapiens
attttattccaagca

SEQ ID NO: 1937577 - DNA, 15 bp, Homo sapiens
ttttattccaagcat

SEQ ID NO: 1937578 - DNA, 15 bp, Homo sapiens
tttattccaagcatg

SEQ ID NO: 1937579 - DNA, 15 bp, Homo sapiens
ttattccaagcatga

SEQ ID NO: 1937580 - DNA, 15 bp, Homo sapiens
tattccaagcatgat

SEQ ID NO: 1937581 - DNA, 15 bp, Homo sapiens
attccaagcatgatg

SEQ ID NO: 1937582 - DNA, 15 bp, Homo sapiens
ttccaagcatgatgg

SEQ ID NO: 1937583 - DNA, 15 bp, Homo sapiens
tccaagcatgatggg

SEQ ID NO: 1937584 - DNA, 15 bp, Homo sapiens
ccaagcatgatggga

SEQ ID NO: 1937585 - DNA, 15 bp, Homo sapiens
caagcatgatgggaa

SEQ ID NO: 1937586 - DNA, 15 bp, Homo sapiens
aagcatgatgggaat

SEQ ID NO: 1937587 - DNA, 15 bp, Homo sapiens
agcatgatgggaatc

SEQ ID NO: 1937588 - DNA, 15 bp, Homo sapiens
gcatgatgggaatct

SEQ ID NO: 1937589 - DNA, 15 bp, Homo sapiens
catgatgggaatctg

SEQ ID NO: 1937590 - DNA, 15 bp, Homo sapiens
atgatgggaatctgt

SEQ ID NO: 1937591 - DNA, 15 bp, Homo sapiens
tgatgggaatctgtg

SEQ ID NO: 1937592 - DNA, 15 bp, Homo sapiens
gatgggaatctgtga

SEQ ID NO: 1937593 - DNA, 15 bp, Homo sapiens
atgggaatctgtgac

SEQ ID NO: 1937594 - DNA, 15 bp, Homo sapiens
tgggaatctgtgaca

SEQ ID NO: 1937595 - DNA, 15 bp, Homo sapiens
gggaatctgtgacat

SEQ ID NO: 1937596 - DNA, 15 bp, Homo sapiens
ggaatctgtgacatt

SEQ ID NO: 1937597 - DNA, 15 bp, Homo sapiens
gaatctgtgacatta

SEQ ID NO: 1937598 - DNA, 15 bp, Homo sapiens
aatctgtgacattaa

SEQ ID NO: 1937599 - DNA, 15 bp, Homo sapiens
atctgtgacattaag

SEQ ID NO: 1937600 - DNA, 15 bp, Homo sapiens
tctgtgacattaagc

SEQ ID NO: 1937601 - DNA, 15 bp, Homo sapiens
ctgtgacattaagcg

SEQ ID NO: 1937602 - DNA, 15 bp, Homo sapiens
tgtgacattaagcgg

SEQ ID NO: 1937603 - DNA, 15 bp, Homo sapiens
gtgacattaagcggg

SEQ ID NO: 1937604 - DNA, 15 bp, Homo sapiens
tgacattaagcgggg

SEQ ID NO: 1937605 - DNA, 15 bp, Homo sapiens
gacattaagcggggc

SEQ ID NO: 1937606 - DNA, 15 bp, Homo sapiens
acattaagcggggct

SEQ ID NO: 1937607 - DNA, 15 bp, Homo sapiens
cattaagcggggctg

SEQ ID NO: 1937608 - DNA, 15 bp, Homo sapiens
attaagcggggctga

SEQ ID NO: 1937609 - DNA, 15 bp, Homo sapiens
ttaagcggggctgaa

SEQ ID NO: 1937610 - DNA, 15 bp, Homo sapiens
taagcggggctgaaa

SEQ ID NO: 1937611 - DNA, 15 bp, Homo sapiens
aagcggggctgaaat

SEQ ID NO: 1937612 - DNA, 15 bp, Homo sapiens
agcggggctgaaata

SEQ ID NO: 1937613 - DNA, 15 bp, Homo sapiens
gcggggctgaaatat

SEQ ID NO: 1937614 - DNA, 15 bp, Homo sapiens
cggggctgaaatatc

SEQ ID NO: 1937615 - DNA, 15 bp, Homo sapiens
ggggctgaaatatca

SEQ ID NO: 1937616 - DNA, 15 bp, Homo sapiens
gggctgaaatatcat

SEQ ID NO: 1937617 - DNA, 15 bp, Homo sapiens
ggctgaaatatcatc

SEQ ID NO: 1937618 - DNA, 15 bp, Homo sapiens
gctgaaatatcatca

SEQ ID NO: 1937619 - DNA, 15 bp, Homo sapiens
ctgaaatatcatcag

SEQ ID NO: 1937620 - DNA, 15 bp, Homo sapiens
tgaaatatcatcaga

SEQ ID NO: 1937621 - DNA, 15 bp, Homo sapiens
gaaatatcatcagac

SEQ ID NO: 1937622 - DNA, 15 bp, Homo sapiens
aaatatcatcagact

SEQ ID NO: 1937623 - DNA, 15 bp, Homo sapiens
aatatcatcagactt

SEQ ID NO: 1937624 - DNA, 15 bp, Homo sapiens
atatcatcagactta

SEQ ID NO: 1937625 - DNA, 15 bp, Homo sapiens
tatcatcagacttag

SEQ ID NO: 1937626 - DNA, 15 bp, Homo sapiens
atcatcagacttaga

SEQ ID NO: 1937627 - DNA, 15 bp, Homo sapiens
tcatcagacttagac

SEQ ID NO: 1937628 - DNA, 15 bp, Homo sapiens
catcagacttagact

SEQ ID NO: 1937629 - DNA, 15 bp, Homo sapiens
atcagacttagactt

SEQ ID NO: 1937630 - DNA, 15 bp, Homo sapiens
tcagacttagacttt

SEQ ID NO: 1937631 - DNA, 15 bp, Homo sapiens
cagacttagactttt

SEQ ID NO: 1937632 - DNA, 15 bp, Homo sapiens
agacttagactttta

SEQ ID NO: 1937633 - DNA, 15 bp, Homo sapiens
gacttagacttttaa

SEQ ID NO: 1937634 - DNA, 15 bp, Homo sapiens
acttagacttttaaa

SEQ ID NO: 1937635 - DNA, 15 bp, Homo sapiens
cttagacttttaaaa

SEQ ID NO: 1937636 - DNA, 15 bp, Homo sapiens
ttagacttttaaaaa

SEQ ID NO: 1937637 - DNA, 15 bp, Homo sapiens
agacttttaaaaaat

SEQ ID NO: 1937638 - DNA, 15 bp, Homo sapiens
gacttttaaaaaatg

SEQ ID NO: 1937639 - DNA, 15 bp, Homo sapiens
acttttaaaaaatgc

SEQ ID NO: 1937640 - DNA, 15 bp, Homo sapiens
cttttaaaaaatgca

SEQ ID NO: 1937641 - DNA, 15 bp, Homo sapiens
tttaaaaaatgcaaa

SEQ ID NO: 1937642 - DNA, 15 bp, Homo sapiens
ttaaaaaatgcaaat

SEQ ID NO: 1937643 - DNA, 15 bp, Homo sapiens
taaaaaatgcaaatg

SEQ ID NO: 1937644 - DNA, 15 bp, Homo sapiens
aaaaaatgcaaatga

SEQ ID NO: 1937645 - DNA, 15 bp, Homo sapiens
aaaaatgcaaatgat

SEQ ID NO: 1937646 - DNA, 15 bp, Homo sapiens
aaaatgcaaatgatc

SEQ ID NO: 1937647 - DNA, 15 bp, Homo sapiens
aaatgcaaatgatcc

SEQ ID NO: 1937648 - DNA, 15 bp, Homo sapiens
aatgcaaatgatccc

SEQ ID NO: 1937649 - DNA, 15 bp, Homo sapiens
atgcaaatgatccct

SEQ ID NO: 1937650 - DNA, 15 bp, Homo sapiens
tgcaaatgatccctc

SEQ ID NO: 1937651 - DNA, 15 bp, Homo sapiens
gcaaatgatccctct

SEQ ID NO: 1937652 - DNA, 15 bp, Homo sapiens
caaatgatccctctc

SEQ ID NO: 1937653 - DNA, 15 bp, Homo sapiens
aaatgatccctctcg

SEQ ID NO: 1937654 - DNA, 15 bp, Homo sapiens
aatgatccctctcgc

SEQ ID NO: 1937655 - DNA, 15 bp, Homo sapiens
atgatccctctcgct

SEQ ID NO: 1937656 - DNA, 15 bp, Homo sapiens
tgatccctctcgctg

SEQ ID NO: 1937657 - DNA, 15 bp, Homo sapiens
gatccctctcgctgc

SEQ ID NO: 1937658 - DNA, 15 bp, Homo sapiens
atccctctcgctgct

SEQ ID NO: 1937659 - DNA, 15 bp, Homo sapiens
tccctctcgctgctg

SEQ ID NO: 1937660 - DNA, 15 bp, Homo sapiens
ccctctcgctgctga

SEQ ID NO: 1937661 - DNA, 15 bp, Homo sapiens
cctctcgctgctgag

SEQ ID NO: 1937662 - DNA, 15 bp, Homo sapiens
ctctcgctgctgagt

SEQ ID NO: 1937663 - DNA, 15 bp, Homo sapiens
tctcgctgctgagtt

SEQ ID NO: 1937664 - DNA, 15 bp, Homo sapiens
ctcgctgctgagttg

SEQ ID NO: 1937665 - DNA, 15 bp, Homo sapiens
tcgctgctgagttga

SEQ ID NO: 1937666 - DNA, 15 bp, Homo sapiens
cgctgctgagttgaa

SEQ ID NO: 1937667 - DNA, 15 bp, Homo sapiens
gctgctgagttgaaa

SEQ ID NO: 1937668 - DNA, 15 bp, Homo sapiens
ctgctgagttgaaaa

SEQ ID NO: 1937669 - DNA, 15 bp, Homo sapiens
tgctgagttgaaaac

SEQ ID NO: 1937670 - DNA, 15 bp, Homo sapiens
gctgagttgaaaaca

SEQ ID NO: 1937671 - DNA, 15 bp, Homo sapiens
ctgagttgaaaacag

SEQ ID NO: 1937672 - DNA, 15 bp, Homo sapiens
tgagttgaaaacaga

SEQ ID NO: 1937673 - DNA, 15 bp, Homo sapiens
gagttgaaaacagaa

SEQ ID NO: 1937674 - DNA, 15 bp, Homo sapiens
agttgaaaacagaat

SEQ ID NO: 1937675 - DNA, 15 bp, Homo sapiens
gttgaaaacagaatt

SEQ ID NO: 1937676 - DNA, 15 bp, Homo sapiens
ttgaaaacagaattt

SEQ ID NO: 1937677 - DNA, 15 bp, Homo sapiens
tgaaaacagaattta

SEQ ID NO: 1937678 - DNA, 15 bp, Homo sapiens
gaaaacagaatttat

SEQ ID NO: 1937679 - DNA, 15 bp, Homo sapiens
aaaacagaatttata

SEQ ID NO: 1937680 - DNA, 15 bp, Homo sapiens
aaacagaatttatat

SEQ ID NO: 1937681 - DNA, 15 bp, Homo sapiens
aacagaatttatatg

SEQ ID NO: 1937682 - DNA, 15 bp, Homo sapiens
acagaatttatatgt

SEQ ID NO: 1937683 - DNA, 15 bp, Homo sapiens
cagaatttatatgta

SEQ ID NO: 1937684 - DNA, 15 bp, Homo sapiens
agaatttatatgtat

SEQ ID NO: 1937685 - DNA, 15 bp, Homo sapiens
gaatttatatgtatg

SEQ ID NO: 1937686 - DNA, 15 bp, Homo sapiens
aatttatatgtatgt

SEQ ID NO: 1937687 - DNA, 15 bp, Homo sapiens
atttatatgtatgtt

SEQ ID NO: 1937688 - DNA, 15 bp, Homo sapiens
tttatatgtatgttt

SEQ ID NO: 1937689 - DNA, 15 bp, Homo sapiens
ttatatgtatgttta

SEQ ID NO: 1937690 - DNA, 15 bp, Homo sapiens
tatatgtatgtttac

SEQ ID NO: 1937691 - DNA, 15 bp, Homo sapiens
atatgtatgtttaca

SEQ ID NO: 1937692 - DNA, 15 bp, Homo sapiens
tatgtatgtttacat

SEQ ID NO: 1937693 - DNA, 15 bp, Homo sapiens
atgtatgtttacatg

SEQ ID NO: 1937694 - DNA, 15 bp, Homo sapiens
tgtatgtttacatgc

SEQ ID NO: 1937695 - DNA, 15 bp, Homo sapiens
gtatgtttacatgca

SEQ ID NO: 1937696 - DNA, 15 bp, Homo sapiens
tatgtttacatgcac

SEQ ID NO: 1937697 - DNA, 15 bp, Homo sapiens
atgtttacatgcaca

SEQ ID NO: 1937698 - DNA, 15 bp, Homo sapiens
tgtttacatgcacat

SEQ ID NO: 1937699 - DNA, 15 bp, Homo sapiens
gtttacatgcacatg

SEQ ID NO: 1937700 - DNA, 15 bp, Homo sapiens
tttacatgcacatgc

SEQ ID NO: 1937701 - DNA, 15 bp, Homo sapiens
ttacatgcacatgca

SEQ ID NO: 1937702 - DNA, 15 bp, Homo sapiens
tacatgcacatgcac

SEQ ID NO: 1937703 - DNA, 15 bp, Homo sapiens
acatgcacatgcaca

SEQ ID NO: 1937704 - DNA, 15 bp, Homo sapiens
catgcacatgcacac

SEQ ID NO: 1937705 - DNA, 15 bp, Homo sapiens
atgcacatgcacaca

SEQ ID NO: 1937706 - DNA, 15 bp, Homo sapiens
tgcacatgcacacat

SEQ ID NO: 1937707 - DNA, 15 bp, Homo sapiens
gcacatgcacacatt

SEQ ID NO: 1937708 - DNA, 15 bp, Homo sapiens
cacatgcacacattc

SEQ ID NO: 1937709 - DNA, 15 bp, Homo sapiens
acatgcacacattct

SEQ ID NO: 1937710 - DNA, 15 bp, Homo sapiens
catgcacacattctg

SEQ ID NO: 1937711 - DNA, 15 bp, Homo sapiens
atgcacacattctga

SEQ ID NO: 1937712 - DNA, 15 bp, Homo sapiens
tgcacacattctgac

SEQ ID NO: 1937713 - DNA, 15 bp, Homo sapiens
gcacacattctgact

SEQ ID NO: 1937714 - DNA, 15 bp, Homo sapiens
cacacattctgactt

SEQ ID NO: 1937715 - DNA, 15 bp, Homo sapiens
acacattctgacttg

SEQ ID NO: 1937716 - DNA, 15 bp, Homo sapiens
cacattctgacttgt

SEQ ID NO: 1937717 - DNA, 15 bp, Homo sapiens
acattctgacttgtg

SEQ ID NO: 1937718 - DNA, 15 bp, Homo sapiens
cattctgacttgtgc

SEQ ID NO: 1937719 - DNA, 15 bp, Homo sapiens
attctgacttgtgca

SEQ ID NO: 1937720 - DNA, 15 bp, Homo sapiens
ttctgacttgtgcag

SEQ ID NO: 1937721 - DNA, 15 bp, Homo sapiens
tctgacttgtgcagt

SEQ ID NO: 1937722 - DNA, 15 bp, Homo sapiens
ctgacttgtgcagtg

SEQ ID NO: 1937723 - DNA, 15 bp, Homo sapiens
tgacttgtgcagtga

SEQ ID NO: 1937724 - DNA, 15 bp, Homo sapiens
gacttgtgcagtgag

SEQ ID NO: 1937725 - DNA, 15 bp, Homo sapiens
acttgtgcagtgaga

SEQ ID NO: 1937726 - DNA, 15 bp, Homo sapiens
cttgtgcagtgagag

SEQ ID NO: 1937727 - DNA, 15 bp, Homo sapiens
ttgtgcagtgagagg

SEQ ID NO: 1937728 - DNA, 15 bp, Homo sapiens
tgtgcagtgagaggt

SEQ ID NO: 1937729 - DNA, 15 bp, Homo sapiens
gtgcagtgagaggtg

SEQ ID NO: 1937730 - DNA, 15 bp, Homo sapiens
tgcagtgagaggtgc

SEQ ID NO: 1937731 - DNA, 15 bp, Homo sapiens
gcagtgagaggtgca

SEQ ID NO: 1937732 - DNA, 15 bp, Homo sapiens
cagtgagaggtgcag

SEQ ID NO: 1937733 - DNA, 15 bp, Homo sapiens
agtgagaggtgcaga

SEQ ID NO: 1937734 - DNA, 15 bp, Homo sapiens
gtgagaggtgcagag

SEQ ID NO: 1937735 - DNA, 15 bp, Homo sapiens
tgagaggtgcagagg

SEQ ID NO: 1937736 - DNA, 15 bp, Homo sapiens
gagaggtgcagaggc

SEQ ID NO: 1937737 - DNA, 15 bp, Homo sapiens
agaggtgcagaggca

SEQ ID NO: 1937738 - DNA, 15 bp, Homo sapiens
gaggtgcagaggcaa

SEQ ID NO: 1937739 - DNA, 15 bp, Homo sapiens
aggtgcagaggcaag

SEQ ID NO: 1937740 - DNA, 15 bp, Homo sapiens
ggtgcagaggcaaga

SEQ ID NO: 1937741 - DNA, 15 bp, Homo sapiens
gtgcagaggcaagac

SEQ ID NO: 1937742 - DNA, 15 bp, Homo sapiens
tgcagaggcaagact

SEQ ID NO: 1937743 - DNA, 15 bp, Homo sapiens
gcagaggcaagactt

SEQ ID NO: 1937744 - DNA, 15 bp, Homo sapiens
cagaggcaagacttg

SEQ ID NO: 1937745 - DNA, 15 bp, Homo sapiens
agaggcaagacttga

SEQ ID NO: 1937746 - DNA, 15 bp, Homo sapiens
gaggcaagacttgaa

SEQ ID NO: 1937747 - DNA, 15 bp, Homo sapiens
aggcaagacttgaaa

SEQ ID NO: 1937748 - DNA, 15 bp, Homo sapiens
ggcaagacttgaaac

SEQ ID NO: 1937749 - DNA, 15 bp, Homo sapiens
gcaagacttgaaaca

SEQ ID NO: 1937750 - DNA, 15 bp, Homo sapiens
caagacttgaaacag

SEQ ID NO: 1937751 - DNA, 15 bp, Homo sapiens
aagacttgaaacagg

SEQ ID NO: 1937752 - DNA, 15 bp, Homo sapiens
agacttgaaacagga

SEQ ID NO: 1937753 - DNA, 15 bp, Homo sapiens
gacttgaaacaggaa

SEQ ID NO: 1937754 - DNA, 15 bp, Homo sapiens
acttgaaacaggaag

SEQ ID NO: 1937755 - DNA, 15 bp, Homo sapiens
cttgaaacaggaagt

SEQ ID NO: 1937756 - DNA, 15 bp, Homo sapiens
ttgaaacaggaagtc

SEQ ID NO: 1937757 - DNA, 15 bp, Homo sapiens
tgaaacaggaagtcc

SEQ ID NO: 1937758 - DNA, 15 bp, Homo sapiens
gaaacaggaagtcct

SEQ ID NO: 1937759 - DNA, 15 bp, Homo sapiens
aaacaggaagtcctg

SEQ ID NO: 1937760 - DNA, 15 bp, Homo sapiens
aacaggaagtcctgt

SEQ ID NO: 1937761 - DNA, 15 bp, Homo sapiens
acaggaagtcctgta

SEQ ID NO: 1937762 - DNA, 15 bp, Homo sapiens
caggaagtcctgtag

SEQ ID NO: 1937763 - DNA, 15 bp, Homo sapiens
aggaagtcctgtagg

SEQ ID NO: 1937764 - DNA, 15 bp, Homo sapiens
ggaagtcctgtagga

SEQ ID NO: 1937765 - DNA, 15 bp, Homo sapiens
gaagtcctgtaggac

SEQ ID NO: 1937766 - DNA, 15 bp, Homo sapiens
aagtcctgtaggaca

SEQ ID NO: 1937767 - DNA, 15 bp, Homo sapiens
agtcctgtaggacag

SEQ ID NO: 1937768 - DNA, 15 bp, Homo sapiens
gtcctgtaggacagg

SEQ ID NO: 1937769 - DNA, 15 bp, Homo sapiens
tcctgtaggacaggc

SEQ ID NO: 1937770 - DNA, 15 bp, Homo sapiens
cctgtaggacaggca

SEQ ID NO: 1937771 - DNA, 15 bp, Homo sapiens
ctgtaggacaggcaa

SEQ ID NO: 1937772 - DNA, 15 bp, Homo sapiens
tgtaggacaggcaaa

SEQ ID NO: 1937773 - DNA, 15 bp, Homo sapiens
gtaggacaggcaaaa

SEQ ID NO: 1937774 - DNA, 15 bp, Homo sapiens
taggacaggcaaaag

SEQ ID NO: 1937775 - DNA, 15 bp, Homo sapiens
aggacaggcaaaaga

SEQ ID NO: 1937776 - DNA, 15 bp, Homo sapiens
ggacaggcaaaagat

SEQ ID NO: 1937777 - DNA, 15 bp, Homo sapiens
gacaggcaaaagatg

SEQ ID NO: 1937778 - DNA, 15 bp, Homo sapiens
acaggcaaaagatgg

SEQ ID NO: 1937779 - DNA, 15 bp, Homo sapiens
caggcaaaagatggt

SEQ ID NO: 1937780 - DNA, 15 bp, Homo sapiens
aggcaaaagatggtg

SEQ ID NO: 1937781 - DNA, 15 bp, Homo sapiens
ggcaaaagatggtgg

SEQ ID NO: 1937782 - DNA, 15 bp, Homo sapiens
gcaaaagatggtggt

SEQ ID NO: 1937783 - DNA, 15 bp, Homo sapiens
caaaagatggtggtg

SEQ ID NO: 1937784 - DNA, 15 bp, Homo sapiens
aaaagatggtggtgg

SEQ ID NO: 1937785 - DNA, 15 bp, Homo sapiens
aaagatggtggtggc

SEQ ID NO: 1937786 - DNA, 15 bp, Homo sapiens
aagatggtggtggct

SEQ ID NO: 1937787 - DNA, 15 bp, Homo sapiens
agatggtggtggctt

SEQ ID NO: 1937788 - DNA, 15 bp, Homo sapiens
gatggtggtggctta

SEQ ID NO: 1937789 - DNA, 15 bp, Homo sapiens
atggtggtggcttag

SEQ ID NO: 1937790 - DNA, 15 bp, Homo sapiens
tggtggtggcttaga

SEQ ID NO: 1937791 - DNA, 15 bp, Homo sapiens
ggtggtggcttagat

SEQ ID NO: 1937792 - DNA, 15 bp, Homo sapiens
gtggtggcttagatc

SEQ ID NO: 1937793 - DNA, 15 bp, Homo sapiens
tggtggcttagatca

SEQ ID NO: 1937794 - DNA, 15 bp, Homo sapiens
ggtggcttagatcag

SEQ ID NO: 1937795 - DNA, 15 bp, Homo sapiens
gtggcttagatcagt

SEQ ID NO: 1937796 - DNA, 15 bp, Homo sapiens
tggcttagatcagtg

SEQ ID NO: 1937797 - DNA, 15 bp, Homo sapiens
ggcttagatcagtgg

SEQ ID NO: 1937798 - DNA, 15 bp, Homo sapiens
gcttagatcagtggg

SEQ ID NO: 1937799 - DNA, 15 bp, Homo sapiens
cttagatcagtgggt

SEQ ID NO: 1937800 - DNA, 15 bp, Homo sapiens
ttagatcagtgggta

SEQ ID NO: 1937801 - DNA, 15 bp, Homo sapiens
tagatcagtgggtag

SEQ ID NO: 1937802 - DNA, 15 bp, Homo sapiens
agatcagtgggtagc

SEQ ID NO: 1937803 - DNA, 15 bp, Homo sapiens
gatcagtgggtagca

SEQ ID NO: 1937804 - DNA, 15 bp, Homo sapiens
atcagtgggtagcac

SEQ ID NO: 1937805 - DNA, 15 bp, Homo sapiens
tcagtgggtagcact

SEQ ID NO: 1937806 - DNA, 15 bp, Homo sapiens
cagtgggtagcactg

SEQ ID NO: 1937807 - DNA, 15 bp, Homo sapiens
agtgggtagcactgg

SEQ ID NO: 1937808 - DNA, 15 bp, Homo sapiens
gtgggtagcactggt

SEQ ID NO: 1937809 - DNA, 15 bp, Homo sapiens
tgggtagcactggta

SEQ ID NO: 1937810 - DNA, 15 bp, Homo sapiens
gggtagcactggtaa

SEQ ID NO: 1937811 - DNA, 15 bp, Homo sapiens
ggtagcactggtaaa

SEQ ID NO: 1937812 - DNA, 15 bp, Homo sapiens
gtagcactggtaaaa

SEQ ID NO: 1937813 - DNA, 15 bp, Homo sapiens
tagcactggtaaaat

SEQ ID NO: 1937814 - DNA, 15 bp, Homo sapiens
agcactggtaaaatt

SEQ ID NO: 1937815 - DNA, 15 bp, Homo sapiens
gcactggtaaaattt

SEQ ID NO: 1937816 - DNA, 15 bp, Homo sapiens
cactggtaaaattta

SEQ ID NO: 1937817 - DNA, 15 bp, Homo sapiens
actggtaaaatttac

SEQ ID NO: 1937818 - DNA, 15 bp, Homo sapiens
ctggtaaaatttact

SEQ ID NO: 1937819 - DNA, 15 bp, Homo sapiens
tggtaaaatttacta

SEQ ID NO: 1937820 - DNA, 15 bp, Homo sapiens
ggtaaaatttactaa

SEQ ID NO: 1937821 - DNA, 15 bp, Homo sapiens
gtaaaatttactaat

SEQ ID NO: 1937822 - DNA, 15 bp, Homo sapiens
taaaatttactaatg

SEQ ID NO: 1937823 - DNA, 15 bp, Homo sapiens
aaaatttactaatga

SEQ ID NO: 1937824 - DNA, 15 bp, Homo sapiens
aaatttactaatgaa

SEQ ID NO: 1937825 - DNA, 15 bp, Homo sapiens
aatttactaatgaat

SEQ ID NO: 1937826 - DNA, 15 bp, Homo sapiens
atttactaatgaatt

SEQ ID NO: 1937827 - DNA, 15 bp, Homo sapiens
ttactaatgaattgg

SEQ ID NO: 1937828 - DNA, 15 bp, Homo sapiens
tactaatgaattgga

SEQ ID NO: 1937829 - DNA, 15 bp, Homo sapiens
actaatgaattggat

SEQ ID NO: 1937830 - DNA, 15 bp, Homo sapiens
ctaatgaattggata

SEQ ID NO: 1937831 - DNA, 15 bp, Homo sapiens
taatgaattggatat

SEQ ID NO: 1937832 - DNA, 15 bp, Homo sapiens
aatgaattggatatg

SEQ ID NO: 1937833 - DNA, 15 bp, Homo sapiens
atgaattggatatga

SEQ ID NO: 1937834 - DNA, 15 bp, Homo sapiens
tgaattggatatgag

SEQ ID NO: 1937835 - DNA, 15 bp, Homo sapiens
gaattggatatgagg

SEQ ID NO: 1937836 - DNA, 15 bp, Homo sapiens
aattggatatgagga

SEQ ID NO: 1937837 - DNA, 15 bp, Homo sapiens
attggatatgaggaa

SEQ ID NO: 1937838 - DNA, 15 bp, Homo sapiens
ttggatatgaggaat

SEQ ID NO: 1937839 - DNA, 15 bp, Homo sapiens
tggatatgaggaatg

SEQ ID NO: 1937840 - DNA, 15 bp, Homo sapiens
ggatatgaggaatga

SEQ ID NO: 1937841 - DNA, 15 bp, Homo sapiens
gatatgaggaatgag

SEQ ID NO: 1937842 - DNA, 15 bp, Homo sapiens
atatgaggaatgagg

SEQ ID NO: 1937843 - DNA, 15 bp, Homo sapiens
tatgaggaatgaggg

SEQ ID NO: 1937844 - DNA, 15 bp, Homo sapiens
atgaggaatgaggga

SEQ ID NO: 1937845 - DNA, 15 bp, Homo sapiens
tgaggaatgagggaa

SEQ ID NO: 1937846 - DNA, 15 bp, Homo sapiens
gaggaatgagggaaa

SEQ ID NO: 1937847 - DNA, 15 bp, Homo sapiens
aggaatgagggaaag

SEQ ID NO: 1937848 - DNA, 15 bp, Homo sapiens
ggaatgagggaaaga

SEQ ID NO: 1937849 - DNA, 15 bp, Homo sapiens
gaatgagggaaagag

SEQ ID NO: 1937850 - DNA, 15 bp, Homo sapiens
aatgagggaaagagg

SEQ ID NO: 1937851 - DNA, 15 bp, Homo sapiens
atgagggaaagagga

SEQ ID NO: 1937852 - DNA, 15 bp, Homo sapiens
tgagggaaagaggag

SEQ ID NO: 1937853 - DNA, 15 bp, Homo sapiens
gagggaaagaggagt

SEQ ID NO: 1937854 - DNA, 15 bp, Homo sapiens
agggaaagaggagtt

SEQ ID NO: 1937855 - DNA, 15 bp, Homo sapiens
gggaaagaggagttg

SEQ ID NO: 1937856 - DNA, 15 bp, Homo sapiens
ggaaagaggagttga

SEQ ID NO: 1937857 - DNA, 15 bp, Homo sapiens
gaaagaggagttgag

SEQ ID NO: 1937858 - DNA, 15 bp, Homo sapiens
aaagaggagttgaga

SEQ ID NO: 1937859 - DNA, 15 bp, Homo sapiens
aagaggagttgagaa

SEQ ID NO: 1937860 - DNA, 15 bp, Homo sapiens
agaggagttgagaat

SEQ ID NO: 1937861 - DNA, 15 bp, Homo sapiens
gaggagttgagaatg

SEQ ID NO: 1937862 - DNA, 15 bp, Homo sapiens
aggagttgagaatgg

SEQ ID NO: 1937863 - DNA, 15 bp, Homo sapiens
ggagttgagaatggc

SEQ ID NO: 1937864 - DNA, 15 bp, Homo sapiens
gagttgagaatggct

SEQ ID NO: 1937865 - DNA, 15 bp, Homo sapiens
agttgagaatggctc

SEQ ID NO: 1937866 - DNA, 15 bp, Homo sapiens
gttgagaatggctcc

SEQ ID NO: 1937867 - DNA, 15 bp, Homo sapiens
ttgagaatggctcca

SEQ ID NO: 1937868 - DNA, 15 bp, Homo sapiens
tgagaatggctccaa

SEQ ID NO: 1937869 - DNA, 15 bp, Homo sapiens
gagaatggctccaaa

SEQ ID NO: 1937870 - DNA, 15 bp, Homo sapiens
agaatggctccaaag

SEQ ID NO: 1937871 - DNA, 15 bp, Homo sapiens
gaatggctccaaagt

SEQ ID NO: 1937872 - DNA, 15 bp, Homo sapiens
aatggctccaaagtt

SEQ ID NO: 1937873 - DNA, 15 bp, Homo sapiens
atggctccaaagttt

SEQ ID NO: 1937874 - DNA, 15 bp, Homo sapiens
tggctccaaagtttg

SEQ ID NO: 1937875 - DNA, 15 bp, Homo sapiens
ggctccaaagtttgt

SEQ ID NO: 1937876 - DNA, 15 bp, Homo sapiens
gctccaaagtttgtg

SEQ ID NO: 1937877 - DNA, 15 bp, Homo sapiens
ctccaaagtttgtgt

SEQ ID NO: 1937878 - DNA, 15 bp, Homo sapiens
tccaaagtttgtgtc

SEQ ID NO: 1937879 - DNA, 15 bp, Homo sapiens
ccaaagtttgtgtca

SEQ ID NO: 1937880 - DNA, 15 bp, Homo sapiens
caaagtttgtgtcaa

SEQ ID NO: 1937881 - DNA, 15 bp, Homo sapiens
aaagtttgtgtcaag

SEQ ID NO: 1937882 - DNA, 15 bp, Homo sapiens
aagtttgtgtcaagt

SEQ ID NO: 1937883 - DNA, 15 bp, Homo sapiens
agtttgtgtcaagtg

SEQ ID NO: 1937884 - DNA, 15 bp, Homo sapiens
gtttgtgtcaagtgc

SEQ ID NO: 1937885 - DNA, 15 bp, Homo sapiens
tttgtgtcaagtgca

SEQ ID NO: 1937886 - DNA, 15 bp, Homo sapiens
ttgtgtcaagtgcaa

SEQ ID NO: 1937887 - DNA, 15 bp, Homo sapiens
tgtgtcaagtgcaac

SEQ ID NO: 1937888 - DNA, 15 bp, Homo sapiens
gtgtcaagtgcaact

SEQ ID NO: 1937889 - DNA, 15 bp, Homo sapiens
tgtcaagtgcaactg

SEQ ID NO: 1937890 - DNA, 15 bp, Homo sapiens
gtcaagtgcaactgg

SEQ ID NO: 1937891 - DNA, 15 bp, Homo sapiens
tcaagtgcaactggg

SEQ ID NO: 1937892 - DNA, 15 bp, Homo sapiens
caagtgcaactgggt

SEQ ID NO: 1937893 - DNA, 15 bp, Homo sapiens
aagtgcaactgggtg

SEQ ID NO: 1937894 - DNA, 15 bp, Homo sapiens
agtgcaactgggtga

SEQ ID NO: 1937895 - DNA, 15 bp, Homo sapiens
gtgcaactgggtgaa

SEQ ID NO: 1937896 - DNA, 15 bp, Homo sapiens
tgcaactgggtgaac

SEQ ID NO: 1937897 - DNA, 15 bp, Homo sapiens
gcaactgggtgaacg

SEQ ID NO: 1937898 - DNA, 15 bp, Homo sapiens
caactgggtgaacgg

SEQ ID NO: 1937899 - DNA, 15 bp, Homo sapiens
aactgggtgaacgga

SEQ ID NO: 1937900 - DNA, 15 bp, Homo sapiens
actgggtgaacggag

SEQ ID NO: 1937901 - DNA, 15 bp, Homo sapiens
ctgggtgaacggagg

SEQ ID NO: 1937902 - DNA, 15 bp, Homo sapiens
tgggtgaacggaggt

SEQ ID NO: 1937903 - DNA, 15 bp, Homo sapiens
gggtgaacggaggtg

SEQ ID NO: 1937904 - DNA, 15 bp, Homo sapiens
ggtgaacggaggtgc

SEQ ID NO: 1937905 - DNA, 15 bp, Homo sapiens
gtgaacggaggtgct

SEQ ID NO: 1937906 - DNA, 15 bp, Homo sapiens
tgaacggaggtgctt

SEQ ID NO: 1937907 - DNA, 15 bp, Homo sapiens
gaacggaggtgcttt

SEQ ID NO: 1937908 - DNA, 15 bp, Homo sapiens
aacggaggtgctttt

SEQ ID NO: 1937909 - DNA, 15 bp, Homo sapiens
acggaggtgctttta

SEQ ID NO: 1937910 - DNA, 15 bp, Homo sapiens
cggaggtgcttttag

SEQ ID NO: 1937911 - DNA, 15 bp, Homo sapiens
ggaggtgcttttagt

SEQ ID NO: 1937912 - DNA, 15 bp, Homo sapiens
gaggtgcttttagtg

SEQ ID NO: 1937913 - DNA, 15 bp, Homo sapiens
aggtgcttttagtga

SEQ ID NO: 1937914 - DNA, 15 bp, Homo sapiens
ggtgcttttagtgat

SEQ ID NO: 1937915 - DNA, 15 bp, Homo sapiens
gtgcttttagtgatg

SEQ ID NO: 1937916 - DNA, 15 bp, Homo sapiens
tgcttttagtgatgg

SEQ ID NO: 1937917 - DNA, 15 bp, Homo sapiens
gcttttagtgatggg

SEQ ID NO: 1937918 - DNA, 15 bp, Homo sapiens
cttttagtgatggga

SEQ ID NO: 1937919 - DNA, 15 bp, Homo sapiens
ttttagtgatgggaa

SEQ ID NO: 1937920 - DNA, 15 bp, Homo sapiens
tttagtgatgggaaa

SEQ ID NO: 1937921 - DNA, 15 bp, Homo sapiens
ttagtgatgggaaaa

SEQ ID NO: 1937922 - DNA, 15 bp, Homo sapiens
tagtgatgggaaaaa

SEQ ID NO: 1937923 - DNA, 15 bp, Homo sapiens
agtgatgggaaaaac

SEQ ID NO: 1937924 - DNA, 15 bp, Homo sapiens
gtgatgggaaaaact

SEQ ID NO: 1937925 - DNA, 15 bp, Homo sapiens
tgatgggaaaaacta

SEQ ID NO: 1937926 - DNA, 15 bp, Homo sapiens
gatgggaaaaactaa

SEQ ID NO: 1937927 - DNA, 15 bp, Homo sapiens
atgggaaaaactaaa

SEQ ID NO: 1937928 - DNA, 15 bp, Homo sapiens
tgggaaaaactaaag

SEQ ID NO: 1937929 - DNA, 15 bp, Homo sapiens
gggaaaaactaaagg

SEQ ID NO: 1937930 - DNA, 15 bp, Homo sapiens
ggaaaaactaaagga

SEQ ID NO: 1937931 - DNA, 15 bp, Homo sapiens
gaaaaactaaaggaa

SEQ ID NO: 1937932 - DNA, 15 bp, Homo sapiens
aaaaactaaaggaat

SEQ ID NO: 1937933 - DNA, 15 bp, Homo sapiens
aaaactaaaggaata

SEQ ID NO: 1937934 - DNA, 15 bp, Homo sapiens
aaactaaaggaatag

SEQ ID NO: 1937935 - DNA, 15 bp, Homo sapiens
aactaaaggaatagt

SEQ ID NO: 1937936 - DNA, 15 bp, Homo sapiens
actaaaggaatagta

SEQ ID NO: 1937937 - DNA, 15 bp, Homo sapiens
ctaaaggaatagtag

SEQ ID NO: 1937938 - DNA, 15 bp, Homo sapiens
taaaggaatagtagg

SEQ ID NO: 1937939 - DNA, 15 bp, Homo sapiens
aaaggaatagtaggt

SEQ ID NO: 1937940 - DNA, 15 bp, Homo sapiens
aaggaatagtaggtc

SEQ ID NO: 1937941 - DNA, 15 bp, Homo sapiens
aggaatagtaggtct

SEQ ID NO: 1937942 - DNA, 15 bp, Homo sapiens
ggaatagtaggtctg

SEQ ID NO: 1937943 - DNA, 15 bp, Homo sapiens
gaatagtaggtctgg

SEQ ID NO: 1937944 - DNA, 15 bp, Homo sapiens
aatagtaggtctgga

SEQ ID NO: 1937945 - DNA, 15 bp, Homo sapiens
atagtaggtctggag

SEQ ID NO: 1937946 - DNA, 15 bp, Homo sapiens
tagtaggtctggagg

SEQ ID NO: 1937947 - DNA, 15 bp, Homo sapiens
agtaggtctggagga

SEQ ID NO: 1937948 - DNA, 15 bp, Homo sapiens
gtaggtctggaggag

SEQ ID NO: 1937949 - DNA, 15 bp, Homo sapiens
taggtctggaggagt

SEQ ID NO: 1937950 - DNA, 15 bp, Homo sapiens
aggtctggaggagtg

SEQ ID NO: 1937951 - DNA, 15 bp, Homo sapiens
ggtctggaggagtgt

SEQ ID NO: 1937952 - DNA, 15 bp, Homo sapiens
gtctggaggagtgtg

SEQ ID NO: 1937953 - DNA, 15 bp, Homo sapiens
tctggaggagtgtgg

SEQ ID NO: 1937954 - DNA, 15 bp, Homo sapiens
ctggaggagtgtgga

SEQ ID NO: 1937955 - DNA, 15 bp, Homo sapiens
tggaggagtgtggat

SEQ ID NO: 1937956 - DNA, 15 bp, Homo sapiens
ggaggagtgtggatg

SEQ ID NO: 1937957 - DNA, 15 bp, Homo sapiens
gaggagtgtggatga

SEQ ID NO: 1937958 - DNA, 15 bp, Homo sapiens
aggagtgtggatgaa

SEQ ID NO: 1937959 - DNA, 15 bp, Homo sapiens
ggagtgtggatgaaa

SEQ ID NO: 1937960 - DNA, 15 bp, Homo sapiens
gagtgtggatgaaaa

SEQ ID NO: 1937961 - DNA, 15 bp, Homo sapiens
agtgtggatgaaaat

SEQ ID NO: 1937962 - DNA, 15 bp, Homo sapiens
gtgtggatgaaaatc

SEQ ID NO: 1937963 - DNA, 15 bp, Homo sapiens
tgtggatgaaaatca

SEQ ID NO: 1937964 - DNA, 15 bp, Homo sapiens
gtggatgaaaatcaa

SEQ ID NO: 1937965 - DNA, 15 bp, Homo sapiens
tggatgaaaatcaag

SEQ ID NO: 1937966 - DNA, 15 bp, Homo sapiens
ggatgaaaatcaagg

SEQ ID NO: 1937967 - DNA, 15 bp, Homo sapiens
gatgaaaatcaaggg

SEQ ID NO: 1937968 - DNA, 15 bp, Homo sapiens
atgaaaatcaagggt

SEQ ID NO: 1937969 - DNA, 15 bp, Homo sapiens
tgaaaatcaagggtt

SEQ ID NO: 1937970 - DNA, 15 bp, Homo sapiens
gaaaatcaagggttc

SEQ ID NO: 1937971 - DNA, 15 bp, Homo sapiens
aaaatcaagggttca

SEQ ID NO: 1937972 - DNA, 15 bp, Homo sapiens
aaatcaagggttcag

SEQ ID NO: 1937973 - DNA, 15 bp, Homo sapiens
aatcaagggttcagt

SEQ ID NO: 1937974 - DNA, 15 bp, Homo sapiens
atcaagggttcagtt

SEQ ID NO: 1937975 - DNA, 15 bp, Homo sapiens
tcaagggttcagttt

SEQ ID NO: 1937976 - DNA, 15 bp, Homo sapiens
caagggttcagtttt

SEQ ID NO: 1937977 - DNA, 15 bp, Homo sapiens
aagggttcagttttg

SEQ ID NO: 1937978 - DNA, 15 bp, Homo sapiens
agggttcagttttgc

SEQ ID NO: 1937979 - DNA, 15 bp, Homo sapiens
gggttcagttttgca

SEQ ID NO: 1937980 - DNA, 15 bp, Homo sapiens
ggttcagttttgcat

SEQ ID NO: 1937981 - DNA, 15 bp, Homo sapiens
gttcagttttgcata

SEQ ID NO: 1937982 - DNA, 15 bp, Homo sapiens
ttcagttttgcatat

SEQ ID NO: 1937983 - DNA, 15 bp, Homo sapiens
tcagttttgcatatg

SEQ ID NO: 1937984 - DNA, 15 bp, Homo sapiens
cagttttgcatatgc

SEQ ID NO: 1937985 - DNA, 15 bp, Homo sapiens
agttttgcatatgcc

SEQ ID NO: 1937986 - DNA, 15 bp, Homo sapiens
gttttgcatatgcct

SEQ ID NO: 1937987 - DNA, 15 bp, Homo sapiens
ttttgcatatgccta

SEQ ID NO: 1937988 - DNA, 15 bp, Homo sapiens
tttgcatatgcctaa

SEQ ID NO: 1937989 - DNA, 15 bp, Homo sapiens
ttgcatatgcctaac

SEQ ID NO: 1937990 - DNA, 15 bp, Homo sapiens
tgcatatgcctaaca

SEQ ID NO: 1937991 - DNA, 15 bp, Homo sapiens
gcatatgcctaacag

SEQ ID NO: 1937992 - DNA, 15 bp, Homo sapiens
catatgcctaacaga

SEQ ID NO: 1937993 - DNA, 15 bp, Homo sapiens
atatgcctaacagac

SEQ ID NO: 1937994 - DNA, 15 bp, Homo sapiens
tatgcctaacagaca

SEQ ID NO: 1937995 - DNA, 15 bp, Homo sapiens
atgcctaacagacat

SEQ ID NO: 1937996 - DNA, 15 bp, Homo sapiens
tgcctaacagacatt

SEQ ID NO: 1937997 - DNA, 15 bp, Homo sapiens
gcctaacagacatta

SEQ ID NO: 1937998 - DNA, 15 bp, Homo sapiens
cctaacagacattaa

SEQ ID NO: 1937999 - DNA, 15 bp, Homo sapiens
ctaacagacattaaa

SEQ ID NO: 1938000 - DNA, 15 bp, Homo sapiens
taacagacattaaat

SEQ ID NO: 1938001 - DNA, 15 bp, Homo sapiens
aacagacattaaata

SEQ ID NO: 1938002 - DNA, 15 bp, Homo sapiens
acagacattaaatat

SEQ ID NO: 1938003 - DNA, 15 bp, Homo sapiens
cagacattaaatatg

SEQ ID NO: 1938004 - DNA, 15 bp, Homo sapiens
agacattaaatatga

SEQ ID NO: 1938005 - DNA, 15 bp, Homo sapiens
gacattaaatatgag

SEQ ID NO: 1938006 - DNA, 15 bp, Homo sapiens
acattaaatatgagg

SEQ ID NO: 1938007 - DNA, 15 bp, Homo sapiens
cattaaatatgagga

SEQ ID NO: 1938008 - DNA, 15 bp, Homo sapiens
attaaatatgaggat

SEQ ID NO: 1938009 - DNA, 15 bp, Homo sapiens
ttaaatatgaggatg

SEQ ID NO: 1938010 - DNA, 15 bp, Homo sapiens
taaatatgaggatga

SEQ ID NO: 1938011 - DNA, 15 bp, Homo sapiens
aaatatgaggatgaa

SEQ ID NO: 1938012 - DNA, 15 bp, Homo sapiens
aatatgaggatgaat

SEQ ID NO: 1938013 - DNA, 15 bp, Homo sapiens
atatgaggatgaatc

SEQ ID NO: 1938014 - DNA, 15 bp, Homo sapiens
tatgaggatgaatcc

SEQ ID NO: 1938015 - DNA, 15 bp, Homo sapiens
atgaggatgaatcca

SEQ ID NO: 1938016 - DNA, 15 bp, Homo sapiens
tgaggatgaatccat

SEQ ID NO: 1938017 - DNA, 15 bp, Homo sapiens
gaggatgaatccatg

SEQ ID NO: 1938018 - DNA, 15 bp, Homo sapiens
aggatgaatccatga

SEQ ID NO: 1938019 - DNA, 15 bp, Homo sapiens
ggatgaatccatgag

SEQ ID NO: 1938020 - DNA, 15 bp, Homo sapiens
gatgaatccatgagc

SEQ ID NO: 1938021 - DNA, 15 bp, Homo sapiens
atgaatccatgagcc

SEQ ID NO: 1938022 - DNA, 15 bp, Homo sapiens
tgaatccatgagcct

SEQ ID NO: 1938023 - DNA, 15 bp, Homo sapiens
gaatccatgagcctc

SEQ ID NO: 1938024 - DNA, 15 bp, Homo sapiens
aatccatgagcctct

SEQ ID NO: 1938025 - DNA, 15 bp, Homo sapiens
atccatgagcctctg

SEQ ID NO: 1938026 - DNA, 15 bp, Homo sapiens
tccatgagcctctgt

SEQ ID NO: 1938027 - DNA, 15 bp, Homo sapiens
ccatgagcctctgtc

SEQ ID NO: 1938028 - DNA, 15 bp, Homo sapiens
catgagcctctgtcc

SEQ ID NO: 1938029 - DNA, 15 bp, Homo sapiens
atgagcctctgtcct

SEQ ID NO: 1938030 - DNA, 15 bp, Homo sapiens
tgagcctctgtcctc

SEQ ID NO: 1938031 - DNA, 15 bp, Homo sapiens
gagcctctgtcctca

SEQ ID NO: 1938032 - DNA, 15 bp, Homo sapiens
agcctctgtcctcaa

SEQ ID NO: 1938033 - DNA, 15 bp, Homo sapiens
gcctctgtcctcaag

SEQ ID NO: 1938034 - DNA, 15 bp, Homo sapiens
cctctgtcctcaagg

SEQ ID NO: 1938035 - DNA, 15 bp, Homo sapiens
ctctgtcctcaagga

SEQ ID NO: 1938036 - DNA, 15 bp, Homo sapiens
tctgtcctcaaggaa

SEQ ID NO: 1938037 - DNA, 15 bp, Homo sapiens
ctgtcctcaaggaaa

SEQ ID NO: 1938038 - DNA, 15 bp, Homo sapiens
tgtcctcaaggaaat

SEQ ID NO: 1938039 - DNA, 15 bp, Homo sapiens
gtcctcaaggaaatt

SEQ ID NO: 1938040 - DNA, 15 bp, Homo sapiens
tcctcaaggaaatta

SEQ ID NO: 1938041 - DNA, 15 bp, Homo sapiens
cctcaaggaaattat

SEQ ID NO: 1938042 - DNA, 15 bp, Homo sapiens
ctcaaggaaattatt

SEQ ID NO: 1938043 - DNA, 15 bp, Homo sapiens
tcaaggaaattatta

SEQ ID NO: 1938044 - DNA, 15 bp, Homo sapiens
caaggaaattattac

SEQ ID NO: 1938045 - DNA, 15 bp, Homo sapiens
aaggaaattattacc

SEQ ID NO: 1938046 - DNA, 15 bp, Homo sapiens
aggaaattattacct

SEQ ID NO: 1938047 - DNA, 15 bp, Homo sapiens
ggaaattattaccta

SEQ ID NO: 1938048 - DNA, 15 bp, Homo sapiens
gaaattattacctag

SEQ ID NO: 1938049 - DNA, 15 bp, Homo sapiens
aaattattacctagc

SEQ ID NO: 1938050 - DNA, 15 bp, Homo sapiens
aattattacctagca

SEQ ID NO: 1938051 - DNA, 15 bp, Homo sapiens
attattacctagcag

SEQ ID NO: 1938052 - DNA, 15 bp, Homo sapiens
ttattacctagcaga

SEQ ID NO: 1938053 - DNA, 15 bp, Homo sapiens
tattacctagcagag

SEQ ID NO: 1938054 - DNA, 15 bp, Homo sapiens
attacctagcagagg

SEQ ID NO: 1938055 - DNA, 15 bp, Homo sapiens
ttacctagcagagga

SEQ ID NO: 1938056 - DNA, 15 bp, Homo sapiens
tacctagcagaggag

SEQ ID NO: 1938057 - DNA, 15 bp, Homo sapiens
acctagcagaggaga

SEQ ID NO: 1938058 - DNA, 15 bp, Homo sapiens
cctagcagaggagat

SEQ ID NO: 1938059 - DNA, 15 bp, Homo sapiens
ctagcagaggagata

SEQ ID NO: 1938060 - DNA, 15 bp, Homo sapiens
tagcagaggagataa

SEQ ID NO: 1938061 - DNA, 15 bp, Homo sapiens
agcagaggagataag

SEQ ID NO: 1938062 - DNA, 15 bp, Homo sapiens
gcagaggagataagg

SEQ ID NO: 1938063 - DNA, 15 bp, Homo sapiens
cagaggagataagga

SEQ ID NO: 1938064 - DNA, 15 bp, Homo sapiens
agaggagataaggac

SEQ ID NO: 1938065 - DNA, 15 bp, Homo sapiens
gaggagataaggaca

SEQ ID NO: 1938066 - DNA, 15 bp, Homo sapiens
aggagataaggacac

SEQ ID NO: 1938067 - DNA, 15 bp, Homo sapiens
ggagataaggacaca

SEQ ID NO: 1938068 - DNA, 15 bp, Homo sapiens
gagataaggacacaa

SEQ ID NO: 1938069 - DNA, 15 bp, Homo sapiens
agataaggacacaaa

SEQ ID NO: 1938070 - DNA, 15 bp, Homo sapiens
gataaggacacaaat

SEQ ID NO: 1938071 - DNA, 15 bp, Homo sapiens
ataaggacacaaata

SEQ ID NO: 1938072 - DNA, 15 bp, Homo sapiens
taaggacacaaataa

SEQ ID NO: 1938073 - DNA, 15 bp, Homo sapiens
aaggacacaaataac

SEQ ID NO: 1938074 - DNA, 15 bp, Homo sapiens
aggacacaaataact

SEQ ID NO: 1938075 - DNA, 15 bp, Homo sapiens
ggacacaaataactg

SEQ ID NO: 1938076 - DNA, 15 bp, Homo sapiens
gacacaaataactgt

SEQ ID NO: 1938077 - DNA, 15 bp, Homo sapiens
acacaaataactgtc

SEQ ID NO: 1938078 - DNA, 15 bp, Homo sapiens
cacaaataactgtca

SEQ ID NO: 1938079 - DNA, 15 bp, Homo sapiens
acaaataactgtcaa

SEQ ID NO: 1938080 - DNA, 15 bp, Homo sapiens
caaataactgtcaaa

SEQ ID NO: 1938081 - DNA, 15 bp, Homo sapiens
aaataactgtcaaac

SEQ ID NO: 1938082 - DNA, 15 bp, Homo sapiens
aataactgtcaaaca

SEQ ID NO: 1938083 - DNA, 15 bp, Homo sapiens
ataactgtcaaacaa

SEQ ID NO: 1938084 - DNA, 15 bp, Homo sapiens
taactgtcaaacaag

SEQ ID NO: 1938085 - DNA, 15 bp, Homo sapiens
aactgtcaaacaagg

SEQ ID NO: 1938086 - DNA, 15 bp, Homo sapiens
actgtcaaacaaggc

SEQ ID NO: 1938087 - DNA, 15 bp, Homo sapiens
ctgtcaaacaaggca

SEQ ID NO: 1938088 - DNA, 15 bp, Homo sapiens
tgtcaaacaaggcag

SEQ ID NO: 1938089 - DNA, 15 bp, Homo sapiens
gtcaaacaaggcaga

SEQ ID NO: 1938090 - DNA, 15 bp, Homo sapiens
tcaaacaaggcagaa

SEQ ID NO: 1938091 - DNA, 15 bp, Homo sapiens
caaacaaggcagaat

SEQ ID NO: 1938092 - DNA, 15 bp, Homo sapiens
aaacaaggcagaatg

SEQ ID NO: 1938093 - DNA, 15 bp, Homo sapiens
aacaaggcagaatgt

SEQ ID NO: 1938094 - DNA, 15 bp, Homo sapiens
acaaggcagaatgtc

SEQ ID NO: 1938095 - DNA, 15 bp, Homo sapiens
caaggcagaatgtca

SEQ ID NO: 1938096 - DNA, 15 bp, Homo sapiens
aaggcagaatgtcaa

SEQ ID NO: 1938097 - DNA, 15 bp, Homo sapiens
aggcagaatgtcaag

SEQ ID NO: 1938098 - DNA, 15 bp, Homo sapiens
ggcagaatgtcaagt

SEQ ID NO: 1938099 - DNA, 15 bp, Homo sapiens
gcagaatgtcaagtt

SEQ ID NO: 1938100 - DNA, 15 bp, Homo sapiens
cagaatgtcaagttc

SEQ ID NO: 1938101 - DNA, 15 bp, Homo sapiens
agaatgtcaagttct

SEQ ID NO: 1938102 - DNA, 15 bp, Homo sapiens
gaatgtcaagttcta

SEQ ID NO: 1938103 - DNA, 15 bp, Homo sapiens
aatgtcaagttctac

SEQ ID NO: 1938104 - DNA, 15 bp, Homo sapiens
atgtcaagttctaca

SEQ ID NO: 1938105 - DNA, 15 bp, Homo sapiens
tgtcaagttctacag

SEQ ID NO: 1938106 - DNA, 15 bp, Homo sapiens
gtcaagttctacaga

SEQ ID NO: 1938107 - DNA, 15 bp, Homo sapiens
tcaagttctacagag

SEQ ID NO: 1938108 - DNA, 15 bp, Homo sapiens
caagttctacagaga

SEQ ID NO: 1938109 - DNA, 15 bp, Homo sapiens
aagttctacagagag

SEQ ID NO: 1938110 - DNA, 15 bp, Homo sapiens
agttctacagagagg

SEQ ID NO: 1938111 - DNA, 15 bp, Homo sapiens
gttctacagagaggt

SEQ ID NO: 1938112 - DNA, 15 bp, Homo sapiens
ttctacagagaggta

SEQ ID NO: 1938113 - DNA, 15 bp, Homo sapiens
tctacagagaggtac

SEQ ID NO: 1938114 - DNA, 15 bp, Homo sapiens
ctacagagaggtaca

SEQ ID NO: 1938115 - DNA, 15 bp, Homo sapiens
tacagagaggtacaa

SEQ ID NO: 1938116 - DNA, 15 bp, Homo sapiens
acagagaggtacaaa

SEQ ID NO: 1938117 - DNA, 15 bp, Homo sapiens
cagagaggtacaaac

SEQ ID NO: 1938118 - DNA, 15 bp, Homo sapiens
agagaggtacaaaca

SEQ ID NO: 1938119 - DNA, 15 bp, Homo sapiens
gagaggtacaaacat

SEQ ID NO: 1938120 - DNA, 15 bp, Homo sapiens
agaggtacaaacatt

SEQ ID NO: 1938121 - DNA, 15 bp, Homo sapiens
gaggtacaaacatta

SEQ ID NO: 1938122 - DNA, 15 bp, Homo sapiens
aggtacaaacattat

SEQ ID NO: 1938123 - DNA, 15 bp, Homo sapiens
ggtacaaacattatg

SEQ ID NO: 1938124 - DNA, 15 bp, Homo sapiens
gtacaaacattatga

SEQ ID NO: 1938125 - DNA, 15 bp, Homo sapiens
tacaaacattatgat

SEQ ID NO: 1938126 - DNA, 15 bp, Homo sapiens
acaaacattatgata

SEQ ID NO: 1938127 - DNA, 15 bp, Homo sapiens
caaacattatgatat

SEQ ID NO: 1938128 - DNA, 15 bp, Homo sapiens
aaacattatgatatg

SEQ ID NO: 1938129 - DNA, 15 bp, Homo sapiens
aacattatgatatga

SEQ ID NO: 1938130 - DNA, 15 bp, Homo sapiens
acattatgatatgaa

SEQ ID NO: 1938131 - DNA, 15 bp, Homo sapiens
cattatgatatgaac

SEQ ID NO: 1938132 - DNA, 15 bp, Homo sapiens
attatgatatgaaca

SEQ ID NO: 1938133 - DNA, 15 bp, Homo sapiens
ttatgatatgaacat

SEQ ID NO: 1938134 - DNA, 15 bp, Homo sapiens
tatgatatgaacatc

SEQ ID NO: 1938135 - DNA, 15 bp, Homo sapiens
atgatatgaacatcc

SEQ ID NO: 1938136 - DNA, 15 bp, Homo sapiens
tgatatgaacatcca

SEQ ID NO: 1938137 - DNA, 15 bp, Homo sapiens
gatatgaacatccag

SEQ ID NO: 1938138 - DNA, 15 bp, Homo sapiens
atatgaacatccaga

SEQ ID NO: 1938139 - DNA, 15 bp, Homo sapiens
tatgaacatccagag

SEQ ID NO: 1938140 - DNA, 15 bp, Homo sapiens
atgaacatccagagg

SEQ ID NO: 1938141 - DNA, 15 bp, Homo sapiens
tgaacatccagaggg

SEQ ID NO: 1938142 - DNA, 15 bp, Homo sapiens
gaacatccagaggga

SEQ ID NO: 1938143 - DNA, 15 bp, Homo sapiens
aacatccagagggaa

SEQ ID NO: 1938144 - DNA, 15 bp, Homo sapiens
acatccagagggaaa

SEQ ID NO: 1938145 - DNA, 15 bp, Homo sapiens
catccagagggaaaa

SEQ ID NO: 1938146 - DNA, 15 bp, Homo sapiens
atccagagggaaaaa

SEQ ID NO: 1938147 - DNA, 15 bp, Homo sapiens
tccagagggaaaaag

SEQ ID NO: 1938148 - DNA, 15 bp, Homo sapiens
ccagagggaaaaagt

SEQ ID NO: 1938149 - DNA, 15 bp, Homo sapiens
cagagggaaaaagtt

SEQ ID NO: 1938150 - DNA, 15 bp, Homo sapiens
agagggaaaaagtta

SEQ ID NO: 1938151 - DNA, 15 bp, Homo sapiens
gagggaaaaagttag

SEQ ID NO: 1938152 - DNA, 15 bp, Homo sapiens
agggaaaaagttagg

SEQ ID NO: 1938153 - DNA, 15 bp, Homo sapiens
gggaaaaagttaggg

SEQ ID NO: 1938154 - DNA, 15 bp, Homo sapiens
ggaaaaagttagggg

SEQ ID NO: 1938155 - DNA, 15 bp, Homo sapiens
gaaaaagttaggggg

SEQ ID NO: 1938156 - DNA, 15 bp, Homo sapiens
aaaaagttaggggga

SEQ ID NO: 1938157 - DNA, 15 bp, Homo sapiens
aaaagttagggggaa

SEQ ID NO: 1938158 - DNA, 15 bp, Homo sapiens
aaagttagggggaaa

SEQ ID NO: 1938159 - DNA, 15 bp, Homo sapiens
aagttagggggaaag

SEQ ID NO: 1938160 - DNA, 15 bp, Homo sapiens
agttagggggaaagc

SEQ ID NO: 1938161 - DNA, 15 bp, Homo sapiens
gttagggggaaagct

SEQ ID NO: 1938162 - DNA, 15 bp, Homo sapiens
ttagggggaaagctt

SEQ ID NO: 1938163 - DNA, 15 bp, Homo sapiens
tagggggaaagcttc

SEQ ID NO: 1938164 - DNA, 15 bp, Homo sapiens
agggggaaagcttca

SEQ ID NO: 1938165 - DNA, 15 bp, Homo sapiens
gggggaaagcttcat

SEQ ID NO: 1938166 - DNA, 15 bp, Homo sapiens
ggggaaagcttcatg

SEQ ID NO: 1938167 - DNA, 15 bp, Homo sapiens
gggaaagcttcatgg

SEQ ID NO: 1938168 - DNA, 15 bp, Homo sapiens
ggaaagcttcatgga

SEQ ID NO: 1938169 - DNA, 15 bp, Homo sapiens
gaaagcttcatggag

SEQ ID NO: 1938170 - DNA, 15 bp, Homo sapiens
aaagcttcatggaga

SEQ ID NO: 1938171 - DNA, 15 bp, Homo sapiens
aagcttcatggagaa

SEQ ID NO: 1938172 - DNA, 15 bp, Homo sapiens
agcttcatggagaaa

SEQ ID NO: 1938173 - DNA, 15 bp, Homo sapiens
gcttcatggagaaag

SEQ ID NO: 1938174 - DNA, 15 bp, Homo sapiens
cttcatggagaaaga

SEQ ID NO: 1938175 - DNA, 15 bp, Homo sapiens
ttcatggagaaagaa

SEQ ID NO: 1938176 - DNA, 15 bp, Homo sapiens
tcatggagaaagaag

SEQ ID NO: 1938177 - DNA, 15 bp, Homo sapiens
catggagaaagaagc

SEQ ID NO: 1938178 - DNA, 15 bp, Homo sapiens
atggagaaagaagca

SEQ ID NO: 1938179 - DNA, 15 bp, Homo sapiens
tggagaaagaagcat

SEQ ID NO: 1938180 - DNA, 15 bp, Homo sapiens
ggagaaagaagcatt

SEQ ID NO: 1938181 - DNA, 15 bp, Homo sapiens
gagaaagaagcattt

SEQ ID NO: 1938182 - DNA, 15 bp, Homo sapiens
agaaagaagcatttg

SEQ ID NO: 1938183 - DNA, 15 bp, Homo sapiens
gaaagaagcatttgc

SEQ ID NO: 1938184 - DNA, 15 bp, Homo sapiens
aaagaagcatttgct

SEQ ID NO: 1938185 - DNA, 15 bp, Homo sapiens
aagaagcatttgcta

SEQ ID NO: 1938186 - DNA, 15 bp, Homo sapiens
agaagcatttgctat

SEQ ID NO: 1938187 - DNA, 15 bp, Homo sapiens
gaagcatttgctata

SEQ ID NO: 1938188 - DNA, 15 bp, Homo sapiens
aagcatttgctataa

SEQ ID NO: 1938189 - DNA, 15 bp, Homo sapiens
agcatttgctataag

SEQ ID NO: 1938190 - DNA, 15 bp, Homo sapiens
gcatttgctataagt

SEQ ID NO: 1938191 - DNA, 15 bp, Homo sapiens
catttgctataagtc

SEQ ID NO: 1938192 - DNA, 15 bp, Homo sapiens
atttgctataagtcc

SEQ ID NO: 1938193 - DNA, 15 bp, Homo sapiens
tttgctataagtccg

SEQ ID NO: 1938194 - DNA, 15 bp, Homo sapiens
ttgctataagtccga

SEQ ID NO: 1938195 - DNA, 15 bp, Homo sapiens
tgctataagtccgag

SEQ ID NO: 1938196 - DNA, 15 bp, Homo sapiens
gctataagtccgagg

SEQ ID NO: 1938197 - DNA, 15 bp, Homo sapiens
ctataagtccgagga

SEQ ID NO: 1938198 - DNA, 15 bp, Homo sapiens
tataagtccgaggat

SEQ ID NO: 1938199 - DNA, 15 bp, Homo sapiens
ataagtccgaggatg

SEQ ID NO: 1938200 - DNA, 15 bp, Homo sapiens
taagtccgaggatga

SEQ ID NO: 1938201 - DNA, 15 bp, Homo sapiens
aagtccgaggatgaa

SEQ ID NO: 1938202 - DNA, 15 bp, Homo sapiens
agtccgaggatgaac

SEQ ID NO: 1938203 - DNA, 15 bp, Homo sapiens
gtccgaggatgaaca

SEQ ID NO: 1938204 - DNA, 15 bp, Homo sapiens
tccgaggatgaacag

SEQ ID NO: 1938205 - DNA, 15 bp, Homo sapiens
ccgaggatgaacaga

SEQ ID NO: 1938206 - DNA, 15 bp, Homo sapiens
cgaggatgaacagag

SEQ ID NO: 1938207 - DNA, 15 bp, Homo sapiens
gaggatgaacagagt

SEQ ID NO: 1938208 - DNA, 15 bp, Homo sapiens
aggatgaacagagtt

SEQ ID NO: 1938209 - DNA, 15 bp, Homo sapiens
ggatgaacagagttt

SEQ ID NO: 1938210 - DNA, 15 bp, Homo sapiens
gatgaacagagtttc

SEQ ID NO: 1938211 - DNA, 15 bp, Homo sapiens
atgaacagagtttca

SEQ ID NO: 1938212 - DNA, 15 bp, Homo sapiens
tgaacagagtttcat

SEQ ID NO: 1938213 - DNA, 15 bp, Homo sapiens
gaacagagtttcatc

SEQ ID NO: 1938214 - DNA, 15 bp, Homo sapiens
aacagagtttcatct

SEQ ID NO: 1938215 - DNA, 15 bp, Homo sapiens
acagagtttcatctt

SEQ ID NO: 1938216 - DNA, 15 bp, Homo sapiens
cagagtttcatcttg

SEQ ID NO: 1938217 - DNA, 15 bp, Homo sapiens
agagtttcatcttgg

SEQ ID NO: 1938218 - DNA, 15 bp, Homo sapiens
gagtttcatcttggt

SEQ ID NO: 1938219 - DNA, 15 bp, Homo sapiens
agtttcatcttggtg

SEQ ID NO: 1938220 - DNA, 15 bp, Homo sapiens
gtttcatcttggtgg

SEQ ID NO: 1938221 - DNA, 15 bp, Homo sapiens
tttcatcttggtggt

SEQ ID NO: 1938222 - DNA, 15 bp, Homo sapiens
ttcatcttggtggtg

SEQ ID NO: 1938223 - DNA, 15 bp, Homo sapiens
tcatcttggtggtga

SEQ ID NO: 1938224 - DNA, 15 bp, Homo sapiens
catcttggtggtgag

SEQ ID NO: 1938225 - DNA, 15 bp, Homo sapiens
atcttggtggtgagt

SEQ ID NO: 1938226 - DNA, 15 bp, Homo sapiens
tcttggtggtgagta

SEQ ID NO: 1938227 - DNA, 15 bp, Homo sapiens
cttggtggtgagtaa

SEQ ID NO: 1938228 - DNA, 15 bp, Homo sapiens
ttggtggtgagtaaa

SEQ ID NO: 1938229 - DNA, 15 bp, Homo sapiens
tggtggtgagtaaag

SEQ ID NO: 1938230 - DNA, 15 bp, Homo sapiens
ggtggtgagtaaagg

SEQ ID NO: 1938231 - DNA, 15 bp, Homo sapiens
gtggtgagtaaaggg

SEQ ID NO: 1938232 - DNA, 15 bp, Homo sapiens
tggtgagtaaaggga

SEQ ID NO: 1938233 - DNA, 15 bp, Homo sapiens
ggtgagtaaagggag

SEQ ID NO: 1938234 - DNA, 15 bp, Homo sapiens
gtgagtaaagggagg

SEQ ID NO: 1938235 - DNA, 15 bp, Homo sapiens
tgagtaaagggaggc

SEQ ID NO: 1938236 - DNA, 15 bp, Homo sapiens
gagtaaagggaggca

SEQ ID NO: 1938237 - DNA, 15 bp, Homo sapiens
agtaaagggaggcag

SEQ ID NO: 1938238 - DNA, 15 bp, Homo sapiens
gtaaagggaggcagg

SEQ ID NO: 1938239 - DNA, 15 bp, Homo sapiens
taaagggaggcaggg

SEQ ID NO: 1938240 - DNA, 15 bp, Homo sapiens
aaagggaggcagggt

SEQ ID NO: 1938241 - DNA, 15 bp, Homo sapiens
aagggaggcagggtg

SEQ ID NO: 1938242 - DNA, 15 bp, Homo sapiens
agggaggcagggtgg

SEQ ID NO: 1938243 - DNA, 15 bp, Homo sapiens
gggaggcagggtgga

SEQ ID NO: 1938244 - DNA, 15 bp, Homo sapiens
ggaggcagggtggaa

SEQ ID NO: 1938245 - DNA, 15 bp, Homo sapiens
gaggcagggtggaat

SEQ ID NO: 1938246 - DNA, 15 bp, Homo sapiens
aggcagggtggaatg

SEQ ID NO: 1938247 - DNA, 15 bp, Homo sapiens
ggcagggtggaatga

SEQ ID NO: 1938248 - DNA, 15 bp, Homo sapiens
gcagggtggaatgaa

SEQ ID NO: 1938249 - DNA, 15 bp, Homo sapiens
cagggtggaatgaag

SEQ ID NO: 1938250 - DNA, 15 bp, Homo sapiens
agggtggaatgaaga

SEQ ID NO: 1938251 - DNA, 15 bp, Homo sapiens
gggtggaatgaagag

SEQ ID NO: 1938252 - DNA, 15 bp, Homo sapiens
ggtggaatgaagaga

SEQ ID NO: 1938253 - DNA, 15 bp, Homo sapiens
gtggaatgaagagaa

SEQ ID NO: 1938254 - DNA, 15 bp, Homo sapiens
tggaatgaagagaac

SEQ ID NO: 1938255 - DNA, 15 bp, Homo sapiens
ggaatgaagagaaca

SEQ ID NO: 1938256 - DNA, 15 bp, Homo sapiens
gaatgaagagaacat

SEQ ID NO: 1938257 - DNA, 15 bp, Homo sapiens
aatgaagagaacatc

SEQ ID NO: 1938258 - DNA, 15 bp, Homo sapiens
atgaagagaacatca

SEQ ID NO: 1938259 - DNA, 15 bp, Homo sapiens
tgaagagaacatcaa

SEQ ID NO: 1938260 - DNA, 15 bp, Homo sapiens
gaagagaacatcaaa

SEQ ID NO: 1938261 - DNA, 15 bp, Homo sapiens
aagagaacatcaaag

SEQ ID NO: 1938262 - DNA, 15 bp, Homo sapiens
agagaacatcaaaga

SEQ ID NO: 1938263 - DNA, 15 bp, Homo sapiens
gagaacatcaaagaa

SEQ ID NO: 1938264 - DNA, 15 bp, Homo sapiens
agaacatcaaagaag

SEQ ID NO: 1938265 - DNA, 15 bp, Homo sapiens
gaacatcaaagaaga

SEQ ID NO: 1938266 - DNA, 15 bp, Homo sapiens
aacatcaaagaagat

SEQ ID NO: 1938267 - DNA, 15 bp, Homo sapiens
acatcaaagaagata

SEQ ID NO: 1938268 - DNA, 15 bp, Homo sapiens
catcaaagaagataa

SEQ ID NO: 1938269 - DNA, 15 bp, Homo sapiens
atcaaagaagataaa

SEQ ID NO: 1938270 - DNA, 15 bp, Homo sapiens
tcaaagaagataaaa

SEQ ID NO: 1938271 - DNA, 15 bp, Homo sapiens
caaagaagataaaat

SEQ ID NO: 1938272 - DNA, 15 bp, Homo sapiens
aaagaagataaaatg

SEQ ID NO: 1938273 - DNA, 15 bp, Homo sapiens
aagaagataaaatgc

SEQ ID NO: 1938274 - DNA, 15 bp, Homo sapiens
agaagataaaatgca

SEQ ID NO: 1938275 - DNA, 15 bp, Homo sapiens
gaagataaaatgcaa

SEQ ID NO: 1938276 - DNA, 15 bp, Homo sapiens
aagataaaatgcaag

SEQ ID NO: 1938277 - DNA, 15 bp, Homo sapiens
agataaaatgcaaga

SEQ ID NO: 1938278 - DNA, 15 bp, Homo sapiens
gataaaatgcaagaa

SEQ ID NO: 1938279 - DNA, 15 bp, Homo sapiens
ataaaatgcaagaaa

SEQ ID NO: 1938280 - DNA, 15 bp, Homo sapiens
taaaatgcaagaaac

SEQ ID NO: 1938281 - DNA, 15 bp, Homo sapiens
aaaatgcaagaaaca

SEQ ID NO: 1938282 - DNA, 15 bp, Homo sapiens
aaatgcaagaaacaa

SEQ ID NO: 1938283 - DNA, 15 bp, Homo sapiens
atgcaagaaacaaag

SEQ ID NO: 1938284 - DNA, 15 bp, Homo sapiens
tgcaagaaacaaagc

SEQ ID NO: 1938285 - DNA, 15 bp, Homo sapiens
gcaagaaacaaagct

SEQ ID NO: 1938286 - DNA, 15 bp, Homo sapiens
caagaaacaaagcta

SEQ ID NO: 1938287 - DNA, 15 bp, Homo sapiens
aagaaacaaagctat

SEQ ID NO: 1938288 - DNA, 15 bp, Homo sapiens
agaaacaaagctatg

SEQ ID NO: 1938289 - DNA, 15 bp, Homo sapiens
gaaacaaagctatga

SEQ ID NO: 1938290 - DNA, 15 bp, Homo sapiens
aaacaaagctatgag

SEQ ID NO: 1938291 - DNA, 15 bp, Homo sapiens
aacaaagctatgagc

SEQ ID NO: 1938292 - DNA, 15 bp, Homo sapiens
acaaagctatgagct

SEQ ID NO: 1938293 - DNA, 15 bp, Homo sapiens
caaagctatgagctg

SEQ ID NO: 1938294 - DNA, 15 bp, Homo sapiens
aaagctatgagctgt

SEQ ID NO: 1938295 - DNA, 15 bp, Homo sapiens
agctatgagctgtgt

SEQ ID NO: 1938296 - DNA, 15 bp, Homo sapiens
gctatgagctgtgtg

SEQ ID NO: 1938297 - DNA, 15 bp, Homo sapiens
ctatgagctgtgtga

SEQ ID NO: 1938298 - DNA, 15 bp, Homo sapiens
tatgagctgtgtgag

SEQ ID NO: 1938299 - DNA, 15 bp, Homo sapiens
atgagctgtgtgagt

SEQ ID NO: 1938300 - DNA, 15 bp, Homo sapiens
tgagctgtgtgagtg

SEQ ID NO: 1938301 - DNA, 15 bp, Homo sapiens
gagctgtgtgagtgt

SEQ ID NO: 1938302 - DNA, 15 bp, Homo sapiens
agctgtgtgagtgtg

SEQ ID NO: 1938303 - DNA, 15 bp, Homo sapiens
gctgtgtgagtgtgg

SEQ ID NO: 1938304 - DNA, 15 bp, Homo sapiens
ctgtgtgagtgtggg

SEQ ID NO: 1938305 - DNA, 15 bp, Homo sapiens
tgtgtgagtgtgggg

SEQ ID NO: 1938306 - DNA, 15 bp, Homo sapiens
gtgtgagtgtggggt

SEQ ID NO: 1938307 - DNA, 15 bp, Homo sapiens
tgtgagtgtggggtg

SEQ ID NO: 1938308 - DNA, 15 bp, Homo sapiens
gtgagtgtggggtgt

SEQ ID NO: 1938309 - DNA, 15 bp, Homo sapiens
tgagtgtggggtgtg

SEQ ID NO: 1938310 - DNA, 15 bp, Homo sapiens
gagtgtggggtgtgt

SEQ ID NO: 1938311 - DNA, 15 bp, Homo sapiens
agtgtggggtgtgtt

SEQ ID NO: 1938312 - DNA, 15 bp, Homo sapiens
gtgtggggtgtgttg

SEQ ID NO: 1938313 - DNA, 15 bp, Homo sapiens
tgtggggtgtgttgg

SEQ ID NO: 1938314 - DNA, 15 bp, Homo sapiens
gtggggtgtgttggg

SEQ ID NO: 1938315 - DNA, 15 bp, Homo sapiens
ggggtgtgttggggg

SEQ ID NO: 1938316 - DNA, 15 bp, Homo sapiens
gggtgtgttggggga

SEQ ID NO: 1938317 - DNA, 15 bp, Homo sapiens
ggtgtgttgggggat

SEQ ID NO: 1938318 - DNA, 15 bp, Homo sapiens
gtgtgttgggggatc

SEQ ID NO: 1938319 - DNA, 15 bp, Homo sapiens
tgtgttgggggatct

SEQ ID NO: 1938320 - DNA, 15 bp, Homo sapiens
gtgttgggggatctg

SEQ ID NO: 1938321 - DNA, 15 bp, Homo sapiens
tgttgggggatctgg

SEQ ID NO: 1938322 - DNA, 15 bp, Homo sapiens
gttgggggatctgga

SEQ ID NO: 1938323 - DNA, 15 bp, Homo sapiens
ttgggggatctggat

SEQ ID NO: 1938324 - DNA, 15 bp, Homo sapiens
tgggggatctggatg

SEQ ID NO: 1938325 - DNA, 15 bp, Homo sapiens
gggggatctggatgg

SEQ ID NO: 1938326 - DNA, 15 bp, Homo sapiens
ggggatctggatgga

SEQ ID NO: 1938327 - DNA, 15 bp, Homo sapiens
gggatctggatggac

SEQ ID NO: 1938328 - DNA, 15 bp, Homo sapiens
ggatctggatggact

SEQ ID NO: 1938329 - DNA, 15 bp, Homo sapiens
gatctggatggactg

SEQ ID NO: 1938330 - DNA, 15 bp, Homo sapiens
atctggatggactgg

SEQ ID NO: 1938331 - DNA, 15 bp, Homo sapiens
tctggatggactggt

SEQ ID NO: 1938332 - DNA, 15 bp, Homo sapiens
ctggatggactggtg

SEQ ID NO: 1938333 - DNA, 15 bp, Homo sapiens
tggatggactggtgt

SEQ ID NO: 1938334 - DNA, 15 bp, Homo sapiens
ggatggactggtgtg

SEQ ID NO: 1938335 - DNA, 15 bp, Homo sapiens
gatggactggtgtgt

SEQ ID NO: 1938336 - DNA, 15 bp, Homo sapiens
atggactggtgtgtg

SEQ ID NO: 1938337 - DNA, 15 bp, Homo sapiens
tggactggtgtgtgt

SEQ ID NO: 1938338 - DNA, 15 bp, Homo sapiens
ggactggtgtgtgtg

SEQ ID NO: 1938339 - DNA, 15 bp, Homo sapiens
gactggtgtgtgtgg

SEQ ID NO: 1938340 - DNA, 15 bp, Homo sapiens
actggtgtgtgtgga

SEQ ID NO: 1938341 - DNA, 15 bp, Homo sapiens
ctggtgtgtgtggaa

SEQ ID NO: 1938342 - DNA, 15 bp, Homo sapiens
tggtgtgtgtggaac

SEQ ID NO: 1938343 - DNA, 15 bp, Homo sapiens
ggtgtgtgtggaaca

SEQ ID NO: 1938344 - DNA, 15 bp, Homo sapiens
gtgtgtgtggaacac

SEQ ID NO: 1938345 - DNA, 15 bp, Homo sapiens
tgtgtgtggaacaca

SEQ ID NO: 1938346 - DNA, 15 bp, Homo sapiens
gtgtgtggaacacag

SEQ ID NO: 1938347 - DNA, 15 bp, Homo sapiens
tgtgtggaacacagg

SEQ ID NO: 1938348 - DNA, 15 bp, Homo sapiens
gtgtggaacacaggg

SEQ ID NO: 1938349 - DNA, 15 bp, Homo sapiens
tgtggaacacagggc

SEQ ID NO: 1938350 - DNA, 15 bp, Homo sapiens
gtggaacacagggca

SEQ ID NO: 1938351 - DNA, 15 bp, Homo sapiens
tggaacacagggcac

SEQ ID NO: 1938352 - DNA, 15 bp, Homo sapiens
ggaacacagggcaca

SEQ ID NO: 1938353 - DNA, 15 bp, Homo sapiens
gaacacagggcacat

SEQ ID NO: 1938354 - DNA, 15 bp, Homo sapiens
aacacagggcacata

SEQ ID NO: 1938355 - DNA, 15 bp, Homo sapiens
acacagggcacatag

SEQ ID NO: 1938356 - DNA, 15 bp, Homo sapiens
cacagggcacataga

SEQ ID NO: 1938357 - DNA, 15 bp, Homo sapiens
acagggcacatagaa

SEQ ID NO: 1938358 - DNA, 15 bp, Homo sapiens
cagggcacatagaat

SEQ ID NO: 1938359 - DNA, 15 bp, Homo sapiens
agggcacatagaatg

SEQ ID NO: 1938360 - DNA, 15 bp, Homo sapiens
gggcacatagaatga

SEQ ID NO: 1938361 - DNA, 15 bp, Homo sapiens
ggcacatagaatgag

SEQ ID NO: 1938362 - DNA, 15 bp, Homo sapiens
gcacatagaatgagg

SEQ ID NO: 1938363 - DNA, 15 bp, Homo sapiens
cacatagaatgaggt

SEQ ID NO: 1938364 - DNA, 15 bp, Homo sapiens
acatagaatgaggtc

SEQ ID NO: 1938365 - DNA, 15 bp, Homo sapiens
catagaatgaggtct

SEQ ID NO: 1938366 - DNA, 15 bp, Homo sapiens
atagaatgaggtctt

SEQ ID NO: 1938367 - DNA, 15 bp, Homo sapiens
tagaatgaggtcttg

SEQ ID NO: 1938368 - DNA, 15 bp, Homo sapiens
agaatgaggtcttgg

SEQ ID NO: 1938369 - DNA, 15 bp, Homo sapiens
gaatgaggtcttggg

SEQ ID NO: 1938370 - DNA, 15 bp, Homo sapiens
aatgaggtcttgggg

SEQ ID NO: 1938371 - DNA, 15 bp, Homo sapiens
atgaggtcttggggg

SEQ ID NO: 1938372 - DNA, 15 bp, Homo sapiens
tgaggtcttgggggt

SEQ ID NO: 1938373 - DNA, 15 bp, Homo sapiens
gaggtcttgggggta

SEQ ID NO: 1938374 - DNA, 15 bp, Homo sapiens
aggtcttgggggtaa

SEQ ID NO: 1938375 - DNA, 15 bp, Homo sapiens
ggtcttgggggtaag

SEQ ID NO: 1938376 - DNA, 15 bp, Homo sapiens
gtcttgggggtaagg

SEQ ID NO: 1938377 - DNA, 15 bp, Homo sapiens
tcttgggggtaaggc

SEQ ID NO: 1938378 - DNA, 15 bp, Homo sapiens
cttgggggtaaggct

SEQ ID NO: 1938379 - DNA, 15 bp, Homo sapiens
ttgggggtaaggctg

SEQ ID NO: 1938380 - DNA, 15 bp, Homo sapiens
tgggggtaaggctgg

SEQ ID NO: 1938381 - DNA, 15 bp, Homo sapiens
gggggtaaggctgga

SEQ ID NO: 1938382 - DNA, 15 bp, Homo sapiens
ggggtaaggctggag

SEQ ID NO: 1938383 - DNA, 15 bp, Homo sapiens
gggtaaggctggaga

SEQ ID NO: 1938384 - DNA, 15 bp, Homo sapiens
ggtaaggctggagag

SEQ ID NO: 1938385 - DNA, 15 bp, Homo sapiens
gtaaggctggagagt

SEQ ID NO: 1938386 - DNA, 15 bp, Homo sapiens
taaggctggagagta

SEQ ID NO: 1938387 - DNA, 15 bp, Homo sapiens
aaggctggagagtaa

SEQ ID NO: 1938388 - DNA, 15 bp, Homo sapiens
aggctggagagtaaa

SEQ ID NO: 1938389 - DNA, 15 bp, Homo sapiens
ggctggagagtaaat

SEQ ID NO: 1938390 - DNA, 15 bp, Homo sapiens
gctggagagtaaatt

SEQ ID NO: 1938391 - DNA, 15 bp, Homo sapiens
ctggagagtaaattc

SEQ ID NO: 1938392 - DNA, 15 bp, Homo sapiens
tggagagtaaattcg

SEQ ID NO: 1938393 - DNA, 15 bp, Homo sapiens
ggagagtaaattcga

SEQ ID NO: 1938394 - DNA, 15 bp, Homo sapiens
gagagtaaattcgag

SEQ ID NO: 1938395 - DNA, 15 bp, Homo sapiens
agagtaaattcgagc

SEQ ID NO: 1938396 - DNA, 15 bp, Homo sapiens
gagtaaattcgagcc

SEQ ID NO: 1938397 - DNA, 15 bp, Homo sapiens
agtaaattcgagccc

SEQ ID NO: 1938398 - DNA, 15 bp, Homo sapiens
gtaaattcgagccca

SEQ ID NO: 1938399 - DNA, 15 bp, Homo sapiens
taaattcgagcccac

SEQ ID NO: 1938400 - DNA, 15 bp, Homo sapiens
aaattcgagcccaca

SEQ ID NO: 1938401 - DNA, 15 bp, Homo sapiens
aattcgagcccacag

SEQ ID NO: 1938402 - DNA, 15 bp, Homo sapiens
attcgagcccacagt

SEQ ID NO: 1938403 - DNA, 15 bp, Homo sapiens
ttcgagcccacagtg

SEQ ID NO: 1938404 - DNA, 15 bp, Homo sapiens
tcgagcccacagtgt

SEQ ID NO: 1938405 - DNA, 15 bp, Homo sapiens
cgagcccacagtgta

SEQ ID NO: 1938406 - DNA, 15 bp, Homo sapiens
gagcccacagtgtag

SEQ ID NO: 1938407 - DNA, 15 bp, Homo sapiens
agcccacagtgtaga

SEQ ID NO: 1938408 - DNA, 15 bp, Homo sapiens
gcccacagtgtagaa

SEQ ID NO: 1938409 - DNA, 15 bp, Homo sapiens
cccacagtgtagaag

SEQ ID NO: 1938410 - DNA, 15 bp, Homo sapiens
ccacagtgtagaaga

SEQ ID NO: 1938411 - DNA, 15 bp, Homo sapiens
cacagtgtagaagac

SEQ ID NO: 1938412 - DNA, 15 bp, Homo sapiens
acagtgtagaagacc

SEQ ID NO: 1938413 - DNA, 15 bp, Homo sapiens
cagtgtagaagaccc

SEQ ID NO: 1938414 - DNA, 15 bp, Homo sapiens
agtgtagaagaccca

SEQ ID NO: 1938415 - DNA, 15 bp, Homo sapiens
gtgtagaagacccag

SEQ ID NO: 1938416 - DNA, 15 bp, Homo sapiens
tgtagaagacccagg

SEQ ID NO: 1938417 - DNA, 15 bp, Homo sapiens
gtagaagacccaggc

SEQ ID NO: 1938418 - DNA, 15 bp, Homo sapiens
tagaagacccaggca

SEQ ID NO: 1938419 - DNA, 15 bp, Homo sapiens
agaagacccaggcag

SEQ ID NO: 1938420 - DNA, 15 bp, Homo sapiens
gaagacccaggcagc

SEQ ID NO: 1938421 - DNA, 15 bp, Homo sapiens
aagacccaggcagcc

SEQ ID NO: 1938422 - DNA, 15 bp, Homo sapiens
agacccaggcagcca

SEQ ID NO: 1938423 - DNA, 15 bp, Homo sapiens
gacccaggcagccag

SEQ ID NO: 1938424 - DNA, 15 bp, Homo sapiens
acccaggcagccagg

SEQ ID NO: 1938425 - DNA, 15 bp, Homo sapiens
cccaggcagccagga

SEQ ID NO: 1938426 - DNA, 15 bp, Homo sapiens
ccaggcagccaggat

SEQ ID NO: 1938427 - DNA, 15 bp, Homo sapiens
caggcagccaggatg

SEQ ID NO: 1938428 - DNA, 15 bp, Homo sapiens
aggcagccaggatgg

SEQ ID NO: 1938429 - DNA, 15 bp, Homo sapiens
ggcagccaggatggg

SEQ ID NO: 1938430 - DNA, 15 bp, Homo sapiens
gcagccaggatgggt

SEQ ID NO: 1938431 - DNA, 15 bp, Homo sapiens
cagccaggatgggtt

SEQ ID NO: 1938432 - DNA, 15 bp, Homo sapiens
agccaggatgggttt

SEQ ID NO: 1938433 - DNA, 15 bp, Homo sapiens
gccaggatgggtttg

SEQ ID NO: 1938434 - DNA, 15 bp, Homo sapiens
ccaggatgggtttgc

SEQ ID NO: 1938435 - DNA, 15 bp, Homo sapiens
caggatgggtttgct

SEQ ID NO: 1938436 - DNA, 15 bp, Homo sapiens
aggatgggtttgcta

SEQ ID NO: 1938437 - DNA, 15 bp, Homo sapiens
ggatgggtttgctag

SEQ ID NO: 1938438 - DNA, 15 bp, Homo sapiens
gatgggtttgctaga

SEQ ID NO: 1938439 - DNA, 15 bp, Homo sapiens
atgggtttgctagat

SEQ ID NO: 1938440 - DNA, 15 bp, Homo sapiens
tgggtttgctagata

SEQ ID NO: 1938441 - DNA, 15 bp, Homo sapiens
gggtttgctagatac

SEQ ID NO: 1938442 - DNA, 15 bp, Homo sapiens
ggtttgctagatact

SEQ ID NO: 1938443 - DNA, 15 bp, Homo sapiens
gtttgctagatactg

SEQ ID NO: 1938444 - DNA, 15 bp, Homo sapiens
tttgctagatactgg

SEQ ID NO: 1938445 - DNA, 15 bp, Homo sapiens
ttgctagatactggg

SEQ ID NO: 1938446 - DNA, 15 bp, Homo sapiens
tgctagatactggga

SEQ ID NO: 1938447 - DNA, 15 bp, Homo sapiens
gctagatactgggaa

SEQ ID NO: 1938448 - DNA, 15 bp, Homo sapiens
ctagatactgggaag

SEQ ID NO: 1938449 - DNA, 15 bp, Homo sapiens
tagatactgggaagc

SEQ ID NO: 1938450 - DNA, 15 bp, Homo sapiens
agatactgggaagcc

SEQ ID NO: 1938451 - DNA, 15 bp, Homo sapiens
gatactgggaagcca

SEQ ID NO: 1938452 - DNA, 15 bp, Homo sapiens
atactgggaagccat

SEQ ID NO: 1938453 - DNA, 15 bp, Homo sapiens
tactgggaagccatg

SEQ ID NO: 1938454 - DNA, 15 bp, Homo sapiens
actgggaagccatgg

SEQ ID NO: 1938455 - DNA, 15 bp, Homo sapiens
ctgggaagccatggt

SEQ ID NO: 1938456 - DNA, 15 bp, Homo sapiens
tgggaagccatggta

SEQ ID NO: 1938457 - DNA, 15 bp, Homo sapiens
gggaagccatggtag

SEQ ID NO: 1938458 - DNA, 15 bp, Homo sapiens
ggaagccatggtagg

SEQ ID NO: 1938459 - DNA, 15 bp, Homo sapiens
gaagccatggtagga

SEQ ID NO: 1938460 - DNA, 15 bp, Homo sapiens
aagccatggtaggag

SEQ ID NO: 1938461 - DNA, 15 bp, Homo sapiens
agccatggtaggagg

SEQ ID NO: 1938462 - DNA, 15 bp, Homo sapiens
gccatggtaggagga

SEQ ID NO: 1938463 - DNA, 15 bp, Homo sapiens
ccatggtaggaggaa

SEQ ID NO: 1938464 - DNA, 15 bp, Homo sapiens
catggtaggaggaat

SEQ ID NO: 1938465 - DNA, 15 bp, Homo sapiens
atggtaggaggaata

SEQ ID NO: 1938466 - DNA, 15 bp, Homo sapiens
tggtaggaggaataa

SEQ ID NO: 1938467 - DNA, 15 bp, Homo sapiens
ggtaggaggaataat

SEQ ID NO: 1938468 - DNA, 15 bp, Homo sapiens
gtaggaggaataatg

SEQ ID NO: 1938469 - DNA, 15 bp, Homo sapiens
taggaggaataatgt

SEQ ID NO: 1938470 - DNA, 15 bp, Homo sapiens
aggaggaataatgtc

SEQ ID NO: 1938471 - DNA, 15 bp, Homo sapiens
ggaggaataatgtct

SEQ ID NO: 1938472 - DNA, 15 bp, Homo sapiens
gaggaataatgtctc

SEQ ID NO: 1938473 - DNA, 15 bp, Homo sapiens
aggaataatgtctcc

SEQ ID NO: 1938474 - DNA, 15 bp, Homo sapiens
ggaataatgtctccc

SEQ ID NO: 1938475 - DNA, 15 bp, Homo sapiens
gaataatgtctccct

SEQ ID NO: 1938476 - DNA, 15 bp, Homo sapiens
aataatgtctccctt

SEQ ID NO: 1938477 - DNA, 15 bp, Homo sapiens
ataatgtctcccttc

SEQ ID NO: 1938478 - DNA, 15 bp, Homo sapiens
taatgtctcccttcc

SEQ ID NO: 1938479 - DNA, 15 bp, Homo sapiens
aatgtctcccttcca

SEQ ID NO: 1938480 - DNA, 15 bp, Homo sapiens
atgtctcccttccac

SEQ ID NO: 1938481 - DNA, 15 bp, Homo sapiens
tgtctcccttccacg

SEQ ID NO: 1938482 - DNA, 15 bp, Homo sapiens
gtctcccttccacga

SEQ ID NO: 1938483 - DNA, 15 bp, Homo sapiens
tctcccttccacgat

SEQ ID NO: 1938484 - DNA, 15 bp, Homo sapiens
ctcccttccacgatg

SEQ ID NO: 1938485 - DNA, 15 bp, Homo sapiens
tcccttccacgatgt

SEQ ID NO: 1938486 - DNA, 15 bp, Homo sapiens
cccttccacgatgtc

SEQ ID NO: 1938487 - DNA, 15 bp, Homo sapiens
ccttccacgatgtcc

SEQ ID NO: 1938488 - DNA, 15 bp, Homo sapiens
cttccacgatgtcca

SEQ ID NO: 1938489 - DNA, 15 bp, Homo sapiens
ttccacgatgtccac

SEQ ID NO: 1938490 - DNA, 15 bp, Homo sapiens
tccacgatgtccaca

SEQ ID NO: 1938491 - DNA, 15 bp, Homo sapiens
ccacgatgtccacat

SEQ ID NO: 1938492 - DNA, 15 bp, Homo sapiens
cacgatgtccacatc

SEQ ID NO: 1938493 - DNA, 15 bp, Homo sapiens
acgatgtccacatcc

SEQ ID NO: 1938494 - DNA, 15 bp, Homo sapiens
cgatgtccacatcct

SEQ ID NO: 1938495 - DNA, 15 bp, Homo sapiens
gatgtccacatccta

SEQ ID NO: 1938496 - DNA, 15 bp, Homo sapiens
atgtccacatcctaa

SEQ ID NO: 1938497 - DNA, 15 bp, Homo sapiens
tgtccacatcctaac

SEQ ID NO: 1938498 - DNA, 15 bp, Homo sapiens
gtccacatcctaacc

SEQ ID NO: 1938499 - DNA, 15 bp, Homo sapiens
tccacatcctaaccc

SEQ ID NO: 1938500 - DNA, 15 bp, Homo sapiens
ccacatcctaaccct

SEQ ID NO: 1938501 - DNA, 15 bp, Homo sapiens
cacatcctaaccctc

SEQ ID NO: 1938502 - DNA, 15 bp, Homo sapiens
acatcctaaccctca

SEQ ID NO: 1938503 - DNA, 15 bp, Homo sapiens
catcctaaccctcaa

SEQ ID NO: 1938504 - DNA, 15 bp, Homo sapiens
atcctaaccctcaaa

SEQ ID NO: 1938505 - DNA, 15 bp, Homo sapiens
tcctaaccctcaaaa

SEQ ID NO: 1938506 - DNA, 15 bp, Homo sapiens
cctaaccctcaaaaa

SEQ ID NO: 1938507 - DNA, 15 bp, Homo sapiens
ctaaccctcaaaaac

SEQ ID NO: 1938508 - DNA, 15 bp, Homo sapiens
taaccctcaaaaact

SEQ ID NO: 1938509 - DNA, 15 bp, Homo sapiens
aaccctcaaaaactg

SEQ ID NO: 1938510 - DNA, 15 bp, Homo sapiens
accctcaaaaactgt

SEQ ID NO: 1938511 - DNA, 15 bp, Homo sapiens
ccctcaaaaactgta

SEQ ID NO: 1938512 - DNA, 15 bp, Homo sapiens
cctcaaaaactgtaa

SEQ ID NO: 1938513 - DNA, 15 bp, Homo sapiens
ctcaaaaactgtaag

SEQ ID NO: 1938514 - DNA, 15 bp, Homo sapiens
tcaaaaactgtaagt

SEQ ID NO: 1938515 - DNA, 15 bp, Homo sapiens
caaaaactgtaagtg

SEQ ID NO: 1938516 - DNA, 15 bp, Homo sapiens
aaaaactgtaagtgt

SEQ ID NO: 1938517 - DNA, 15 bp, Homo sapiens
aaaactgtaagtgtc

SEQ ID NO: 1938518 - DNA, 15 bp, Homo sapiens
aaactgtaagtgtct

SEQ ID NO: 1938519 - DNA, 15 bp, Homo sapiens
aactgtaagtgtctt

SEQ ID NO: 1938520 - DNA, 15 bp, Homo sapiens
actgtaagtgtctta

SEQ ID NO: 1938521 - DNA, 15 bp, Homo sapiens
ctgtaagtgtcttat

SEQ ID NO: 1938522 - DNA, 15 bp, Homo sapiens
tgtaagtgtcttatg

SEQ ID NO: 1938523 - DNA, 15 bp, Homo sapiens
gtaagtgtcttatgt

SEQ ID NO: 1938524 - DNA, 15 bp, Homo sapiens
taagtgtcttatgtc

SEQ ID NO: 1938525 - DNA, 15 bp, Homo sapiens
aagtgtcttatgtca

SEQ ID NO: 1938526 - DNA, 15 bp, Homo sapiens
agtgtcttatgtcac

SEQ ID NO: 1938527 - DNA, 15 bp, Homo sapiens
gtgtcttatgtcaca

SEQ ID NO: 1938528 - DNA, 15 bp, Homo sapiens
tgtcttatgtcacat

SEQ ID NO: 1938529 - DNA, 15 bp, Homo sapiens
gtcttatgtcacata

SEQ ID NO: 1938530 - DNA, 15 bp, Homo sapiens
tcttatgtcacatag

SEQ ID NO: 1938531 - DNA, 15 bp, Homo sapiens
cttatgtcacatagc

SEQ ID NO: 1938532 - DNA, 15 bp, Homo sapiens
ttatgtcacatagca

SEQ ID NO: 1938533 - DNA, 15 bp, Homo sapiens
tatgtcacatagcaa

SEQ ID NO: 1938534 - DNA, 15 bp, Homo sapiens
atgtcacatagcaaa

SEQ ID NO: 1938535 - DNA, 15 bp, Homo sapiens
tgtcacatagcaaag

SEQ ID NO: 1938536 - DNA, 15 bp, Homo sapiens
gtcacatagcaaaga

SEQ ID NO: 1938537 - DNA, 15 bp, Homo sapiens
tcacatagcaaagag

SEQ ID NO: 1938538 - DNA, 15 bp, Homo sapiens
cacatagcaaagaga

SEQ ID NO: 1938539 - DNA, 15 bp, Homo sapiens
acatagcaaagagaa

SEQ ID NO: 1938540 - DNA, 15 bp, Homo sapiens
catagcaaagagaaa

SEQ ID NO: 1938541 - DNA, 15 bp, Homo sapiens
atagcaaagagaaat

SEQ ID NO: 1938542 - DNA, 15 bp, Homo sapiens
tagcaaagagaaatt

SEQ ID NO: 1938543 - DNA, 15 bp, Homo sapiens
agcaaagagaaatta

SEQ ID NO: 1938544 - DNA, 15 bp, Homo sapiens
gcaaagagaaattag

SEQ ID NO: 1938545 - DNA, 15 bp, Homo sapiens
caaagagaaattaga

SEQ ID NO: 1938546 - DNA, 15 bp, Homo sapiens
aaagagaaattagag

SEQ ID NO: 1938547 - DNA, 15 bp, Homo sapiens
aagagaaattagagt

SEQ ID NO: 1938548 - DNA, 15 bp, Homo sapiens
agagaaattagagtt

SEQ ID NO: 1938549 - DNA, 15 bp, Homo sapiens
gagaaattagagtta

SEQ ID NO: 1938550 - DNA, 15 bp, Homo sapiens
agaaattagagttaa

SEQ ID NO: 1938551 - DNA, 15 bp, Homo sapiens
gaaattagagttaaa

SEQ ID NO: 1938552 - DNA, 15 bp, Homo sapiens
aaattagagttaaag

SEQ ID NO: 1938553 - DNA, 15 bp, Homo sapiens
aattagagttaaaga

SEQ ID NO: 1938554 - DNA, 15 bp, Homo sapiens
attagagttaaagag

SEQ ID NO: 1938555 - DNA, 15 bp, Homo sapiens
ttagagttaaagagg

SEQ ID NO: 1938556 - DNA, 15 bp, Homo sapiens
tagagttaaagaggg

SEQ ID NO: 1938557 - DNA, 15 bp, Homo sapiens
agagttaaagaggga

SEQ ID NO: 1938558 - DNA, 15 bp, Homo sapiens
gagttaaagagggag

SEQ ID NO: 1938559 - DNA, 15 bp, Homo sapiens
agttaaagagggagt

SEQ ID NO: 1938560 - DNA, 15 bp, Homo sapiens
gttaaagagggagtt

SEQ ID NO: 1938561 - DNA, 15 bp, Homo sapiens
ttaaagagggagtta

SEQ ID NO: 1938562 - DNA, 15 bp, Homo sapiens
taaagagggagttaa

SEQ ID NO: 1938563 - DNA, 15 bp, Homo sapiens
aaagagggagttaag

SEQ ID NO: 1938564 - DNA, 15 bp, Homo sapiens
aagagggagttaagg

SEQ ID NO: 1938565 - DNA, 15 bp, Homo sapiens
agagggagttaaggt

SEQ ID NO: 1938566 - DNA, 15 bp, Homo sapiens
gagggagttaaggtt

SEQ ID NO: 1938567 - DNA, 15 bp, Homo sapiens
agggagttaaggttg

SEQ ID NO: 1938568 - DNA, 15 bp, Homo sapiens
gggagttaaggttgt

SEQ ID NO: 1938569 - DNA, 15 bp, Homo sapiens
ggagttaaggttgtt

SEQ ID NO: 1938570 - DNA, 15 bp, Homo sapiens
gagttaaggttgtta

SEQ ID NO: 1938571 - DNA, 15 bp, Homo sapiens
agttaaggttgttaa

SEQ ID NO: 1938572 - DNA, 15 bp, Homo sapiens
gttaaggttgttaaa

SEQ ID NO: 1938573 - DNA, 15 bp, Homo sapiens
ttaaggttgttaaac

SEQ ID NO: 1938574 - DNA, 15 bp, Homo sapiens
taaggttgttaaaca

SEQ ID NO: 1938575 - DNA, 15 bp, Homo sapiens
aaggttgttaaacag

SEQ ID NO: 1938576 - DNA, 15 bp, Homo sapiens
aggttgttaaacagt

SEQ ID NO: 1938577 - DNA, 15 bp, Homo sapiens
ggttgttaaacagtt

SEQ ID NO: 1938578 - DNA, 15 bp, Homo sapiens
gttgttaaacagttg

SEQ ID NO: 1938579 - DNA, 15 bp, Homo sapiens
ttgttaaacagttga

SEQ ID NO: 1938580 - DNA, 15 bp, Homo sapiens
tgttaaacagttgat

SEQ ID NO: 1938581 - DNA, 15 bp, Homo sapiens
gttaaacagttgatg

SEQ ID NO: 1938582 - DNA, 15 bp, Homo sapiens
ttaaacagttgatgt

SEQ ID NO: 1938583 - DNA, 15 bp, Homo sapiens
taaacagttgatgtt

SEQ ID NO: 1938584 - DNA, 15 bp, Homo sapiens
aaacagttgatgtta

SEQ ID NO: 1938585 - DNA, 15 bp, Homo sapiens
aacagttgatgttaa

SEQ ID NO: 1938586 - DNA, 15 bp, Homo sapiens
acagttgatgttaaa

SEQ ID NO: 1938587 - DNA, 15 bp, Homo sapiens
cagttgatgttaaaa

SEQ ID NO: 1938588 - DNA, 15 bp, Homo sapiens
agttgatgttaaaat

SEQ ID NO: 1938589 - DNA, 15 bp, Homo sapiens
gttgatgttaaaata

SEQ ID NO: 1938590 - DNA, 15 bp, Homo sapiens
ttgatgttaaaataa

SEQ ID NO: 1938591 - DNA, 15 bp, Homo sapiens
tgatgttaaaataag

SEQ ID NO: 1938592 - DNA, 15 bp, Homo sapiens
gatgttaaaataagg

SEQ ID NO: 1938593 - DNA, 15 bp, Homo sapiens
atgttaaaataagga

SEQ ID NO: 1938594 - DNA, 15 bp, Homo sapiens
tgttaaaataaggag

SEQ ID NO: 1938595 - DNA, 15 bp, Homo sapiens
gttaaaataaggaga

SEQ ID NO: 1938596 - DNA, 15 bp, Homo sapiens
ttaaaataaggagat

SEQ ID NO: 1938597 - DNA, 15 bp, Homo sapiens
taaaataaggagatt

SEQ ID NO: 1938598 - DNA, 15 bp, Homo sapiens
aaaataaggagatta

SEQ ID NO: 1938599 - DNA, 15 bp, Homo sapiens
aaataaggagattat

SEQ ID NO: 1938600 - DNA, 15 bp, Homo sapiens
aataaggagattatc

SEQ ID NO: 1938601 - DNA, 15 bp, Homo sapiens
ataaggagattatcc

SEQ ID NO: 1938602 - DNA, 15 bp, Homo sapiens
taaggagattatcct

SEQ ID NO: 1938603 - DNA, 15 bp, Homo sapiens
aaggagattatcctg

SEQ ID NO: 1938604 - DNA, 15 bp, Homo sapiens
aggagattatcctga

SEQ ID NO: 1938605 - DNA, 15 bp, Homo sapiens
ggagattatcctgag

SEQ ID NO: 1938606 - DNA, 15 bp, Homo sapiens
gagattatcctgagt

SEQ ID NO: 1938607 - DNA, 15 bp, Homo sapiens
agattatcctgagtt

SEQ ID NO: 1938608 - DNA, 15 bp, Homo sapiens
gattatcctgagtta

SEQ ID NO: 1938609 - DNA, 15 bp, Homo sapiens
attatcctgagttat

SEQ ID NO: 1938610 - DNA, 15 bp, Homo sapiens
ttatcctgagttatc

SEQ ID NO: 1938611 - DNA, 15 bp, Homo sapiens
tatcctgagttatcc

SEQ ID NO: 1938612 - DNA, 15 bp, Homo sapiens
atcctgagttatcca

SEQ ID NO: 1938613 - DNA, 15 bp, Homo sapiens
tcctgagttatccag

SEQ ID NO: 1938614 - DNA, 15 bp, Homo sapiens
cctgagttatccaga

SEQ ID NO: 1938615 - DNA, 15 bp, Homo sapiens
ctgagttatccagac

SEQ ID NO: 1938616 - DNA, 15 bp, Homo sapiens
tgagttatccagaca

SEQ ID NO: 1938617 - DNA, 15 bp, Homo sapiens
gagttatccagacaa

SEQ ID NO: 1938618 - DNA, 15 bp, Homo sapiens
agttatccagacaat

SEQ ID NO: 1938619 - DNA, 15 bp, Homo sapiens
gttatccagacaatc

SEQ ID NO: 1938620 - DNA, 15 bp, Homo sapiens
ttatccagacaatcc

SEQ ID NO: 1938621 - DNA, 15 bp, Homo sapiens
tatccagacaatccc

SEQ ID NO: 1938622 - DNA, 15 bp, Homo sapiens
atccagacaatccca

SEQ ID NO: 1938623 - DNA, 15 bp, Homo sapiens
tccagacaatcccaa

SEQ ID NO: 1938624 - DNA, 15 bp, Homo sapiens
ccagacaatcccaat

SEQ ID NO: 1938625 - DNA, 15 bp, Homo sapiens
cagacaatcccaatg

SEQ ID NO: 1938626 - DNA, 15 bp, Homo sapiens
agacaatcccaatgg

SEQ ID NO: 1938627 - DNA, 15 bp, Homo sapiens
gacaatcccaatgga

SEQ ID NO: 1938628 - DNA, 15 bp, Homo sapiens
acaatcccaatggaa

SEQ ID NO: 1938629 - DNA, 15 bp, Homo sapiens
caatcccaatggaat

SEQ ID NO: 1938630 - DNA, 15 bp, Homo sapiens
aatcccaatggaatc

SEQ ID NO: 1938631 - DNA, 15 bp, Homo sapiens
atcccaatggaatca

SEQ ID NO: 1938632 - DNA, 15 bp, Homo sapiens
tcccaatggaatcac

SEQ ID NO: 1938633 - DNA, 15 bp, Homo sapiens
cccaatggaatcaca

SEQ ID NO: 1938634 - DNA, 15 bp, Homo sapiens
ccaatggaatcacaa

SEQ ID NO: 1938635 - DNA, 15 bp, Homo sapiens
caatggaatcacaag

SEQ ID NO: 1938636 - DNA, 15 bp, Homo sapiens
aatggaatcacaagg

SEQ ID NO: 1938637 - DNA, 15 bp, Homo sapiens
atggaatcacaaggt

SEQ ID NO: 1938638 - DNA, 15 bp, Homo sapiens
tggaatcacaaggta

SEQ ID NO: 1938639 - DNA, 15 bp, Homo sapiens
ggaatcacaaggtac

SEQ ID NO: 1938640 - DNA, 15 bp, Homo sapiens
gaatcacaaggtact

SEQ ID NO: 1938641 - DNA, 15 bp, Homo sapiens
aatcacaaggtactt

SEQ ID NO: 1938642 - DNA, 15 bp, Homo sapiens
atcacaaggtactta

SEQ ID NO: 1938643 - DNA, 15 bp, Homo sapiens
tcacaaggtacttaa

SEQ ID NO: 1938644 - DNA, 15 bp, Homo sapiens
cacaaggtacttaaa

SEQ ID NO: 1938645 - DNA, 15 bp, Homo sapiens
acaaggtacttaaaa

SEQ ID NO: 1938646 - DNA, 15 bp, Homo sapiens
caaggtacttaaaag

SEQ ID NO: 1938647 - DNA, 15 bp, Homo sapiens
aaggtacttaaaagt

SEQ ID NO: 1938648 - DNA, 15 bp, Homo sapiens
aggtacttaaaagta

SEQ ID NO: 1938649 - DNA, 15 bp, Homo sapiens
ggtacttaaaagtag

SEQ ID NO: 1938650 - DNA, 15 bp, Homo sapiens
gtacttaaaagtaga

SEQ ID NO: 1938651 - DNA, 15 bp, Homo sapiens
tacttaaaagtagaa

SEQ ID NO: 1938652 - DNA, 15 bp, Homo sapiens
acttaaaagtagaag

SEQ ID NO: 1938653 - DNA, 15 bp, Homo sapiens
cttaaaagtagaaga

SEQ ID NO: 1938654 - DNA, 15 bp, Homo sapiens
ttaaaagtagaagac

SEQ ID NO: 1938655 - DNA, 15 bp, Homo sapiens
taaaagtagaagaca

SEQ ID NO: 1938656 - DNA, 15 bp, Homo sapiens
aaaagtagaagacag

SEQ ID NO: 1938657 - DNA, 15 bp, Homo sapiens
aaagtagaagacaga

SEQ ID NO: 1938658 - DNA, 15 bp, Homo sapiens
aagtagaagacagag

SEQ ID NO: 1938659 - DNA, 15 bp, Homo sapiens
agtagaagacagagg

SEQ ID NO: 1938660 - DNA, 15 bp, Homo sapiens
gtagaagacagaggc

SEQ ID NO: 1938661 - DNA, 15 bp, Homo sapiens
tagaagacagaggca

SEQ ID NO: 1938662 - DNA, 15 bp, Homo sapiens
agaagacagaggcag

SEQ ID NO: 1938663 - DNA, 15 bp, Homo sapiens
gaagacagaggcagg

SEQ ID NO: 1938664 - DNA, 15 bp, Homo sapiens
aagacagaggcaggt

SEQ ID NO: 1938665 - DNA, 15 bp, Homo sapiens
agacagaggcaggtc

SEQ ID NO: 1938666 - DNA, 15 bp, Homo sapiens
gacagaggcaggtca

SEQ ID NO: 1938667 - DNA, 15 bp, Homo sapiens
acagaggcaggtcag

SEQ ID NO: 1938668 - DNA, 15 bp, Homo sapiens
cagaggcaggtcaga

SEQ ID NO: 1938669 - DNA, 15 bp, Homo sapiens
agaggcaggtcagag

SEQ ID NO: 1938670 - DNA, 15 bp, Homo sapiens
gaggcaggtcagagt

SEQ ID NO: 1938671 - DNA, 15 bp, Homo sapiens
aggcaggtcagagtg

SEQ ID NO: 1938672 - DNA, 15 bp, Homo sapiens
ggcaggtcagagtga

SEQ ID NO: 1938673 - DNA, 15 bp, Homo sapiens
gcaggtcagagtgat

SEQ ID NO: 1938674 - DNA, 15 bp, Homo sapiens
caggtcagagtgata

SEQ ID NO: 1938675 - DNA, 15 bp, Homo sapiens
aggtcagagtgatag

SEQ ID NO: 1938676 - DNA, 15 bp, Homo sapiens
ggtcagagtgataga

SEQ ID NO: 1938677 - DNA, 15 bp, Homo sapiens
gtcagagtgatagag

SEQ ID NO: 1938678 - DNA, 15 bp, Homo sapiens
tcagagtgatagagt

SEQ ID NO: 1938679 - DNA, 15 bp, Homo sapiens
cagagtgatagagtt

SEQ ID NO: 1938680 - DNA, 15 bp, Homo sapiens
agagtgatagagttt

SEQ ID NO: 1938681 - DNA, 15 bp, Homo sapiens
gagtgatagagtttg

SEQ ID NO: 1938682 - DNA, 15 bp, Homo sapiens
agtgatagagtttga

SEQ ID NO: 1938683 - DNA, 15 bp, Homo sapiens
gtgatagagtttgag

SEQ ID NO: 1938684 - DNA, 15 bp, Homo sapiens
tgatagagtttgaga

SEQ ID NO: 1938685 - DNA, 15 bp, Homo sapiens
gatagagtttgagaa

SEQ ID NO: 1938686 - DNA, 15 bp, Homo sapiens
atagagtttgagaaa

SEQ ID NO: 1938687 - DNA, 15 bp, Homo sapiens
tagagtttgagaaag

SEQ ID NO: 1938688 - DNA, 15 bp, Homo sapiens
agagtttgagaaaga

SEQ ID NO: 1938689 - DNA, 15 bp, Homo sapiens
gagtttgagaaagat

SEQ ID NO: 1938690 - DNA, 15 bp, Homo sapiens
agtttgagaaagatc

SEQ ID NO: 1938691 - DNA, 15 bp, Homo sapiens
gtttgagaaagatcc

SEQ ID NO: 1938692 - DNA, 15 bp, Homo sapiens
tttgagaaagatcca

SEQ ID NO: 1938693 - DNA, 15 bp, Homo sapiens
ttgagaaagatccaa

SEQ ID NO: 1938694 - DNA, 15 bp, Homo sapiens
tgagaaagatccaac

SEQ ID NO: 1938695 - DNA, 15 bp, Homo sapiens
agaaagatccaacca

SEQ ID NO: 1938696 - DNA, 15 bp, Homo sapiens
gaaagatccaaccag

SEQ ID NO: 1938697 - DNA, 15 bp, Homo sapiens
aaagatccaaccagc

SEQ ID NO: 1938698 - DNA, 15 bp, Homo sapiens
aagatccaaccagcc

SEQ ID NO: 1938699 - DNA, 15 bp, Homo sapiens
agatccaaccagcca

SEQ ID NO: 1938700 - DNA, 15 bp, Homo sapiens
gatccaaccagccat

SEQ ID NO: 1938701 - DNA, 15 bp, Homo sapiens
atccaaccagccatt

SEQ ID NO: 1938702 - DNA, 15 bp, Homo sapiens
tccaaccagccattg

SEQ ID NO: 1938703 - DNA, 15 bp, Homo sapiens
ccaaccagccattgc

SEQ ID NO: 1938704 - DNA, 15 bp, Homo sapiens
caaccagccattgct

SEQ ID NO: 1938705 - DNA, 15 bp, Homo sapiens
aaccagccattgcta

SEQ ID NO: 1938706 - DNA, 15 bp, Homo sapiens
accagccattgctag

SEQ ID NO: 1938707 - DNA, 15 bp, Homo sapiens
ccagccattgctagc

SEQ ID NO: 1938708 - DNA, 15 bp, Homo sapiens
cagccattgctagct

SEQ ID NO: 1938709 - DNA, 15 bp, Homo sapiens
agccattgctagctt

SEQ ID NO: 1938710 - DNA, 15 bp, Homo sapiens
gccattgctagcttt

SEQ ID NO: 1938711 - DNA, 15 bp, Homo sapiens
ccattgctagctttg

SEQ ID NO: 1938712 - DNA, 15 bp, Homo sapiens
cattgctagctttga

SEQ ID NO: 1938713 - DNA, 15 bp, Homo sapiens
attgctagctttgaa

SEQ ID NO: 1938714 - DNA, 15 bp, Homo sapiens
ttgctagctttgaat

SEQ ID NO: 1938715 - DNA, 15 bp, Homo sapiens
tgctagctttgaata

SEQ ID NO: 1938716 - DNA, 15 bp, Homo sapiens
gctagctttgaatac

SEQ ID NO: 1938717 - DNA, 15 bp, Homo sapiens
ctagctttgaataca

SEQ ID NO: 1938718 - DNA, 15 bp, Homo sapiens
tagctttgaatacag

SEQ ID NO: 1938719 - DNA, 15 bp, Homo sapiens
agctttgaatacaga

SEQ ID NO: 1938720 - DNA, 15 bp, Homo sapiens
gctttgaatacagaa

SEQ ID NO: 1938721 - DNA, 15 bp, Homo sapiens
ctttgaatacagaag

SEQ ID NO: 1938722 - DNA, 15 bp, Homo sapiens
tttgaatacagaaga

SEQ ID NO: 1938723 - DNA, 15 bp, Homo sapiens
ttgaatacagaagag

SEQ ID NO: 1938724 - DNA, 15 bp, Homo sapiens
tgaatacagaagagg

SEQ ID NO: 1938725 - DNA, 15 bp, Homo sapiens
gaatacagaagaggg

SEQ ID NO: 1938726 - DNA, 15 bp, Homo sapiens
aatacagaagagggc

SEQ ID NO: 1938727 - DNA, 15 bp, Homo sapiens
atacagaagagggcc

SEQ ID NO: 1938728 - DNA, 15 bp, Homo sapiens
tacagaagagggcca

SEQ ID NO: 1938729 - DNA, 15 bp, Homo sapiens
acagaagagggccat

SEQ ID NO: 1938730 - DNA, 15 bp, Homo sapiens
cagaagagggccatg

SEQ ID NO: 1938731 - DNA, 15 bp, Homo sapiens
agaagagggccatgc

SEQ ID NO: 1938732 - DNA, 15 bp, Homo sapiens
gaagagggccatgcg

SEQ ID NO: 1938733 - DNA, 15 bp, Homo sapiens
aagagggccatgcgc

SEQ ID NO: 1938734 - DNA, 15 bp, Homo sapiens
agagggccatgcgcc

SEQ ID NO: 1938735 - DNA, 15 bp, Homo sapiens
gagggccatgcgcca

SEQ ID NO: 1938736 - DNA, 15 bp, Homo sapiens
agggccatgcgccaa

SEQ ID NO: 1938737 - DNA, 15 bp, Homo sapiens
gggccatgcgccaaa

SEQ ID NO: 1938738 - DNA, 15 bp, Homo sapiens
ggccatgcgccaaaa

SEQ ID NO: 1938739 - DNA, 15 bp, Homo sapiens
gccatgcgccaaaaa

SEQ ID NO: 1938740 - DNA, 15 bp, Homo sapiens
ccatgcgccaaaaaa

SEQ ID NO: 1938741 - DNA, 15 bp, Homo sapiens
catgcgccaaaaaaa

SEQ ID NO: 1938742 - DNA, 15 bp, Homo sapiens
atgcgccaaaaaaag

SEQ ID NO: 1938743 - DNA, 15 bp, Homo sapiens
tgcgccaaaaaaagc

SEQ ID NO: 1938744 - DNA, 15 bp, Homo sapiens
gcgccaaaaaaagca

SEQ ID NO: 1938745 - DNA, 15 bp, Homo sapiens
cgccaaaaaaagcat

SEQ ID NO: 1938746 - DNA, 15 bp, Homo sapiens
gccaaaaaaagcatg

SEQ ID NO: 1938747 - DNA, 15 bp, Homo sapiens
ccaaaaaaagcatgt

SEQ ID NO: 1938748 - DNA, 15 bp, Homo sapiens
caaaaaaagcatgta

SEQ ID NO: 1938749 - DNA, 15 bp, Homo sapiens
aaaaaaagcatgtag

SEQ ID NO: 1938750 - DNA, 15 bp, Homo sapiens
aaaaaagcatgtaga

SEQ ID NO: 1938751 - DNA, 15 bp, Homo sapiens
aaaaagcatgtagac

SEQ ID NO: 1938752 - DNA, 15 bp, Homo sapiens
aaaagcatgtagact

SEQ ID NO: 1938753 - DNA, 15 bp, Homo sapiens
aaagcatgtagactc

SEQ ID NO: 1938754 - DNA, 15 bp, Homo sapiens
aagcatgtagactcc

SEQ ID NO: 1938755 - DNA, 15 bp, Homo sapiens
agcatgtagactcct

SEQ ID NO: 1938756 - DNA, 15 bp, Homo sapiens
gcatgtagactcctt

SEQ ID NO: 1938757 - DNA, 15 bp, Homo sapiens
catgtagactccttc

SEQ ID NO: 1938758 - DNA, 15 bp, Homo sapiens
atgtagactccttct

SEQ ID NO: 1938759 - DNA, 15 bp, Homo sapiens
tgtagactccttctc

SEQ ID NO: 1938760 - DNA, 15 bp, Homo sapiens
gtagactccttctcc

SEQ ID NO: 1938761 - DNA, 15 bp, Homo sapiens
tagactccttctcca

SEQ ID NO: 1938762 - DNA, 15 bp, Homo sapiens
agactccttctccaa

SEQ ID NO: 1938763 - DNA, 15 bp, Homo sapiens
gactccttctccaag

SEQ ID NO: 1938764 - DNA, 15 bp, Homo sapiens
actccttctccaagg

SEQ ID NO: 1938765 - DNA, 15 bp, Homo sapiens
ctccttctccaagga

SEQ ID NO: 1938766 - DNA, 15 bp, Homo sapiens
tccttctccaaggaa

SEQ ID NO: 1938767 - DNA, 15 bp, Homo sapiens
ccttctccaaggaag

SEQ ID NO: 1938768 - DNA, 15 bp, Homo sapiens
cttctccaaggaagt

SEQ ID NO: 1938769 - DNA, 15 bp, Homo sapiens
ttctccaaggaagtg

SEQ ID NO: 1938770 - DNA, 15 bp, Homo sapiens
tctccaaggaagtgg

SEQ ID NO: 1938771 - DNA, 15 bp, Homo sapiens
ctccaaggaagtggt

SEQ ID NO: 1938772 - DNA, 15 bp, Homo sapiens
tccaaggaagtggta

SEQ ID NO: 1938773 - DNA, 15 bp, Homo sapiens
ccaaggaagtggtaa

SEQ ID NO: 1938774 - DNA, 15 bp, Homo sapiens
caaggaagtggtaaa

SEQ ID NO: 1938775 - DNA, 15 bp, Homo sapiens
aaggaagtggtaaaa

SEQ ID NO: 1938776 - DNA, 15 bp, Homo sapiens
aggaagtggtaaaag

SEQ ID NO: 1938777 - DNA, 15 bp, Homo sapiens
ggaagtggtaaaagg

SEQ ID NO: 1938778 - DNA, 15 bp, Homo sapiens
gaagtggtaaaaggc

SEQ ID NO: 1938779 - DNA, 15 bp, Homo sapiens
aagtggtaaaaggca

SEQ ID NO: 1938780 - DNA, 15 bp, Homo sapiens
agtggtaaaaggcaa

SEQ ID NO: 1938781 - DNA, 15 bp, Homo sapiens
gtggtaaaaggcaag

SEQ ID NO: 1938782 - DNA, 15 bp, Homo sapiens
tggtaaaaggcaaga

SEQ ID NO: 1938783 - DNA, 15 bp, Homo sapiens
ggtaaaaggcaagaa

SEQ ID NO: 1938784 - DNA, 15 bp, Homo sapiens
gtaaaaggcaagaaa

SEQ ID NO: 1938785 - DNA, 15 bp, Homo sapiens
taaaaggcaagaaaa

SEQ ID NO: 1938786 - DNA, 15 bp, Homo sapiens
aaaaggcaagaaaat

SEQ ID NO: 1938787 - DNA, 15 bp, Homo sapiens
aaaggcaagaaaatg

SEQ ID NO: 1938788 - DNA, 15 bp, Homo sapiens
aaggcaagaaaatga

SEQ ID NO: 1938789 - DNA, 15 bp, Homo sapiens
aggcaagaaaatgaa

SEQ ID NO: 1938790 - DNA, 15 bp, Homo sapiens
ggcaagaaaatgaat

SEQ ID NO: 1938791 - DNA, 15 bp, Homo sapiens
gcaagaaaatgaatt

SEQ ID NO: 1938792 - DNA, 15 bp, Homo sapiens
caagaaaatgaattt

SEQ ID NO: 1938793 - DNA, 15 bp, Homo sapiens
agaaaatgaattttc

SEQ ID NO: 1938794 - DNA, 15 bp, Homo sapiens
gaaaatgaattttcc

SEQ ID NO: 1938795 - DNA, 15 bp, Homo sapiens
aaaatgaattttccg

SEQ ID NO: 1938796 - DNA, 15 bp, Homo sapiens
aaatgaattttccgc

SEQ ID NO: 1938797 - DNA, 15 bp, Homo sapiens
aatgaattttccgct

SEQ ID NO: 1938798 - DNA, 15 bp, Homo sapiens
atgaattttccgcta

SEQ ID NO: 1938799 - DNA, 15 bp, Homo sapiens
tgaattttccgctag

SEQ ID NO: 1938800 - DNA, 15 bp, Homo sapiens
gaattttccgctagg

SEQ ID NO: 1938801 - DNA, 15 bp, Homo sapiens
aattttccgctaggc

SEQ ID NO: 1938802 - DNA, 15 bp, Homo sapiens
attttccgctaggca

SEQ ID NO: 1938803 - DNA, 15 bp, Homo sapiens
ttttccgctaggcat

SEQ ID NO: 1938804 - DNA, 15 bp, Homo sapiens
tttccgctaggcatt

SEQ ID NO: 1938805 - DNA, 15 bp, Homo sapiens
ttccgctaggcattc

SEQ ID NO: 1938806 - DNA, 15 bp, Homo sapiens
tccgctaggcattca

SEQ ID NO: 1938807 - DNA, 15 bp, Homo sapiens
ccgctaggcattcag

SEQ ID NO: 1938808 - DNA, 15 bp, Homo sapiens
cgctaggcattcaga

SEQ ID NO: 1938809 - DNA, 15 bp, Homo sapiens
gctaggcattcagaa

SEQ ID NO: 1938810 - DNA, 15 bp, Homo sapiens
ctaggcattcagaag

SEQ ID NO: 1938811 - DNA, 15 bp, Homo sapiens
taggcattcagaaga

SEQ ID NO: 1938812 - DNA, 15 bp, Homo sapiens
aggcattcagaagag

SEQ ID NO: 1938813 - DNA, 15 bp, Homo sapiens
ggcattcagaagaga

SEQ ID NO: 1938814 - DNA, 15 bp, Homo sapiens
gcattcagaagagaa

SEQ ID NO: 1938815 - DNA, 15 bp, Homo sapiens
cattcagaagagaac

SEQ ID NO: 1938816 - DNA, 15 bp, Homo sapiens
attcagaagagaacg

SEQ ID NO: 1938817 - DNA, 15 bp, Homo sapiens
ttcagaagagaacgc

SEQ ID NO: 1938818 - DNA, 15 bp, Homo sapiens
tcagaagagaacgca

SEQ ID NO: 1938819 - DNA, 15 bp, Homo sapiens
cagaagagaacgcag

SEQ ID NO: 1938820 - DNA, 15 bp, Homo sapiens
agaagagaacgcagc

SEQ ID NO: 1938821 - DNA, 15 bp, Homo sapiens
gaagagaacgcagcc

SEQ ID NO: 1938822 - DNA, 15 bp, Homo sapiens
aagagaacgcagcct

SEQ ID NO: 1938823 - DNA, 15 bp, Homo sapiens
agagaacgcagcctg

SEQ ID NO: 1938824 - DNA, 15 bp, Homo sapiens
gagaacgcagcctgg

SEQ ID NO: 1938825 - DNA, 15 bp, Homo sapiens
agaacgcagcctggc

SEQ ID NO: 1938826 - DNA, 15 bp, Homo sapiens
gaacgcagcctggca

SEQ ID NO: 1938827 - DNA, 15 bp, Homo sapiens
aacgcagcctggcat

SEQ ID NO: 1938828 - DNA, 15 bp, Homo sapiens
acgcagcctggcatc

SEQ ID NO: 1938829 - DNA, 15 bp, Homo sapiens
cgcagcctggcatct

SEQ ID NO: 1938830 - DNA, 15 bp, Homo sapiens
gcagcctggcatctt

SEQ ID NO: 1938831 - DNA, 15 bp, Homo sapiens
cagcctggcatcttg

SEQ ID NO: 1938832 - DNA, 15 bp, Homo sapiens
agcctggcatcttgg

SEQ ID NO: 1938833 - DNA, 15 bp, Homo sapiens
gcctggcatcttggt

SEQ ID NO: 1938834 - DNA, 15 bp, Homo sapiens
cctggcatcttggtt

SEQ ID NO: 1938835 - DNA, 15 bp, Homo sapiens
ctggcatcttggttt

SEQ ID NO: 1938836 - DNA, 15 bp, Homo sapiens
tggcatcttggtttt

SEQ ID NO: 1938837 - DNA, 15 bp, Homo sapiens
ggcatcttggtttta

SEQ ID NO: 1938838 - DNA, 15 bp, Homo sapiens
gcatcttggttttag

SEQ ID NO: 1938839 - DNA, 15 bp, Homo sapiens
catcttggttttagc

SEQ ID NO: 1938840 - DNA, 15 bp, Homo sapiens
atcttggttttagcc

SEQ ID NO: 1938841 - DNA, 15 bp, Homo sapiens
tcttggttttagccc

SEQ ID NO: 1938842 - DNA, 15 bp, Homo sapiens
cttggttttagccca

SEQ ID NO: 1938843 - DNA, 15 bp, Homo sapiens
ttggttttagcccag

SEQ ID NO: 1938844 - DNA, 15 bp, Homo sapiens
tggttttagcccagt

SEQ ID NO: 1938845 - DNA, 15 bp, Homo sapiens
ggttttagcccagtg

SEQ ID NO: 1938846 - DNA, 15 bp, Homo sapiens
gttttagcccagtga

SEQ ID NO: 1938847 - DNA, 15 bp, Homo sapiens
ttttagcccagtgag

SEQ ID NO: 1938848 - DNA, 15 bp, Homo sapiens
tttagcccagtgaga

SEQ ID NO: 1938849 - DNA, 15 bp, Homo sapiens
ttagcccagtgagac

SEQ ID NO: 1938850 - DNA, 15 bp, Homo sapiens
tagcccagtgagaca

SEQ ID NO: 1938851 - DNA, 15 bp, Homo sapiens
agcccagtgagacac

SEQ ID NO: 1938852 - DNA, 15 bp, Homo sapiens
gcccagtgagacaca

SEQ ID NO: 1938853 - DNA, 15 bp, Homo sapiens
cccagtgagacacat

SEQ ID NO: 1938854 - DNA, 15 bp, Homo sapiens
ccagtgagacacatt

SEQ ID NO: 1938855 - DNA, 15 bp, Homo sapiens
cagtgagacacattc

SEQ ID NO: 1938856 - DNA, 15 bp, Homo sapiens
agtgagacacattct

SEQ ID NO: 1938857 - DNA, 15 bp, Homo sapiens
gtgagacacattcta

SEQ ID NO: 1938858 - DNA, 15 bp, Homo sapiens
tgagacacattctag

SEQ ID NO: 1938859 - DNA, 15 bp, Homo sapiens
gagacacattctaga

SEQ ID NO: 1938860 - DNA, 15 bp, Homo sapiens
agacacattctagat

SEQ ID NO: 1938861 - DNA, 15 bp, Homo sapiens
gacacattctagatt

SEQ ID NO: 1938862 - DNA, 15 bp, Homo sapiens
acacattctagattc

SEQ ID NO: 1938863 - DNA, 15 bp, Homo sapiens
cacattctagattct

SEQ ID NO: 1938864 - DNA, 15 bp, Homo sapiens
acattctagattctg

SEQ ID NO: 1938865 - DNA, 15 bp, Homo sapiens
cattctagattctga

SEQ ID NO: 1938866 - DNA, 15 bp, Homo sapiens
attctagattctgac

SEQ ID NO: 1938867 - DNA, 15 bp, Homo sapiens
ttctagattctgacc

SEQ ID NO: 1938868 - DNA, 15 bp, Homo sapiens
tctagattctgacct

SEQ ID NO: 1938869 - DNA, 15 bp, Homo sapiens
ctagattctgacctc

SEQ ID NO: 1938870 - DNA, 15 bp, Homo sapiens
tagattctgacctcc

SEQ ID NO: 1938871 - DNA, 15 bp, Homo sapiens
agattctgacctcca

SEQ ID NO: 1938872 - DNA, 15 bp, Homo sapiens
gattctgacctccag

SEQ ID NO: 1938873 - DNA, 15 bp, Homo sapiens
attctgacctccaga

SEQ ID NO: 1938874 - DNA, 15 bp, Homo sapiens
ttctgacctccagaa

SEQ ID NO: 1938875 - DNA, 15 bp, Homo sapiens
tctgacctccagaat

SEQ ID NO: 1938876 - DNA, 15 bp, Homo sapiens
ctgacctccagaatt

SEQ ID NO: 1938877 - DNA, 15 bp, Homo sapiens
tgacctccagaattg

SEQ ID NO: 1938878 - DNA, 15 bp, Homo sapiens
gacctccagaattgt

SEQ ID NO: 1938879 - DNA, 15 bp, Homo sapiens
acctccagaattgta

SEQ ID NO: 1938880 - DNA, 15 bp, Homo sapiens
cctccagaattgtaa

SEQ ID NO: 1938881 - DNA, 15 bp, Homo sapiens
ctccagaattgtaag

SEQ ID NO: 1938882 - DNA, 15 bp, Homo sapiens
tccagaattgtaaga

SEQ ID NO: 1938883 - DNA, 15 bp, Homo sapiens
ccagaattgtaagat

SEQ ID NO: 1938884 - DNA, 15 bp, Homo sapiens
cagaattgtaagata

SEQ ID NO: 1938885 - DNA, 15 bp, Homo sapiens
agaattgtaagataa

SEQ ID NO: 1938886 - DNA, 15 bp, Homo sapiens
gaattgtaagataat

SEQ ID NO: 1938887 - DNA, 15 bp, Homo sapiens
aattgtaagataata

SEQ ID NO: 1938888 - DNA, 15 bp, Homo sapiens
attgtaagataataa

SEQ ID NO: 1938889 - DNA, 15 bp, Homo sapiens
ttgtaagataataaa

SEQ ID NO: 1938890 - DNA, 15 bp, Homo sapiens
tgtaagataataaat

SEQ ID NO: 1938891 - DNA, 15 bp, Homo sapiens
gtaagataataaatt

SEQ ID NO: 1938892 - DNA, 15 bp, Homo sapiens
ataataaatttgtgc

SEQ ID NO: 1938893 - DNA, 15 bp, Homo sapiens
taataaatttgtgcc

SEQ ID NO: 1938894 - DNA, 15 bp, Homo sapiens
aataaatttgtgcca

SEQ ID NO: 1938895 - DNA, 15 bp, Homo sapiens
ataaatttgtgccat

SEQ ID NO: 1938896 - DNA, 15 bp, Homo sapiens
taaatttgtgccatt

SEQ ID NO: 1938897 - DNA, 15 bp, Homo sapiens
aaatttgtgccattt

SEQ ID NO: 1938898 - DNA, 15 bp, Homo sapiens
aatttgtgccatttt

SEQ ID NO: 1938899 - DNA, 15 bp, Homo sapiens
atttgtgccatttta

SEQ ID NO: 1938900 - DNA, 15 bp, Homo sapiens
tttgtgccattttaa

SEQ ID NO: 1938901 - DNA, 15 bp, Homo sapiens
ttgtgccattttaag

SEQ ID NO: 1938902 - DNA, 15 bp, Homo sapiens
tgtgccattttaagc

SEQ ID NO: 1938903 - DNA, 15 bp, Homo sapiens
gtgccattttaagcc

SEQ ID NO: 1938904 - DNA, 15 bp, Homo sapiens
tgccattttaagcca

SEQ ID NO: 1938905 - DNA, 15 bp, Homo sapiens
gccattttaagccac

SEQ ID NO: 1938906 - DNA, 15 bp, Homo sapiens
ccattttaagccact

SEQ ID NO: 1938907 - DNA, 15 bp, Homo sapiens
cattttaagccacta

SEQ ID NO: 1938908 - DNA, 15 bp, Homo sapiens
attttaagccactaa

SEQ ID NO: 1938909 - DNA, 15 bp, Homo sapiens
ttttaagccactaag

SEQ ID NO: 1938910 - DNA, 15 bp, Homo sapiens
tttaagccactaagt

SEQ ID NO: 1938911 - DNA, 15 bp, Homo sapiens
ttaagccactaagtt

SEQ ID NO: 1938912 - DNA, 15 bp, Homo sapiens
taagccactaagttt

SEQ ID NO: 1938913 - DNA, 15 bp, Homo sapiens
aagccactaagtttg

SEQ ID NO: 1938914 - DNA, 15 bp, Homo sapiens
agccactaagtttgt

SEQ ID NO: 1938915 - DNA, 15 bp, Homo sapiens
gccactaagtttgtg

SEQ ID NO: 1938916 - DNA, 15 bp, Homo sapiens
ccactaagtttgtgt

SEQ ID NO: 1938917 - DNA, 15 bp, Homo sapiens
cactaagtttgtgtt

SEQ ID NO: 1938918 - DNA, 15 bp, Homo sapiens
actaagtttgtgtta

SEQ ID NO: 1938919 - DNA, 15 bp, Homo sapiens
ctaagtttgtgttac

SEQ ID NO: 1938920 - DNA, 15 bp, Homo sapiens
taagtttgtgttaca

SEQ ID NO: 1938921 - DNA, 15 bp, Homo sapiens
aagtttgtgttacag

SEQ ID NO: 1938922 - DNA, 15 bp, Homo sapiens
agtttgtgttacagc

SEQ ID NO: 1938923 - DNA, 15 bp, Homo sapiens
gtttgtgttacagca

SEQ ID NO: 1938924 - DNA, 15 bp, Homo sapiens
tttgtgttacagcag

SEQ ID NO: 1938925 - DNA, 15 bp, Homo sapiens
ttgtgttacagcagc

SEQ ID NO: 1938926 - DNA, 15 bp, Homo sapiens
tgtgttacagcagca

SEQ ID NO: 1938927 - DNA, 15 bp, Homo sapiens
gtgttacagcagcaa

SEQ ID NO: 1938928 - DNA, 15 bp, Homo sapiens
tgttacagcagcaat

SEQ ID NO: 1938929 - DNA, 15 bp, Homo sapiens
gttacagcagcaata

SEQ ID NO: 1938930 - DNA, 15 bp, Homo sapiens
ttacagcagcaatag

SEQ ID NO: 1938931 - DNA, 15 bp, Homo sapiens
tacagcagcaatagg

SEQ ID NO: 1938932 - DNA, 15 bp, Homo sapiens
acagcagcaatagga

SEQ ID NO: 1938933 - DNA, 15 bp, Homo sapiens
cagcagcaataggaa

SEQ ID NO: 1938934 - DNA, 15 bp, Homo sapiens
agcagcaataggaaa

SEQ ID NO: 1938935 - DNA, 15 bp, Homo sapiens
gcagcaataggaaac

SEQ ID NO: 1938936 - DNA, 15 bp, Homo sapiens
cagcaataggaaact

SEQ ID NO: 1938937 - DNA, 15 bp, Homo sapiens
agcaataggaaacta

SEQ ID NO: 1938938 - DNA, 15 bp, Homo sapiens
gcaataggaaactaa

SEQ ID NO: 1938939 - DNA, 15 bp, Homo sapiens
caataggaaactaat

SEQ ID NO: 1938940 - DNA, 15 bp, Homo sapiens
aataggaaactaata

SEQ ID NO: 1938941 - DNA, 15 bp, Homo sapiens
ataggaaactaatac

SEQ ID NO: 1938942 - DNA, 15 bp, Homo sapiens
taggaaactaataca

SEQ ID NO: 1938943 - DNA, 15 bp, Homo sapiens
aggaaactaatacag

SEQ ID NO: 1938944 - DNA, 15 bp, Homo sapiens
ggaaactaatacaga

SEQ ID NO: 1938945 - DNA, 15 bp, Homo sapiens
gaaactaatacagaa

SEQ ID NO: 1938946 - DNA, 15 bp, Homo sapiens
aaactaatacagaag

SEQ ID NO: 1938947 - DNA, 15 bp, Homo sapiens
aactaatacagaagt

SEQ ID NO: 1938948 - DNA, 15 bp, Homo sapiens
actaatacagaagtc

SEQ ID NO: 1938949 - DNA, 15 bp, Homo sapiens
ctaatacagaagtca

SEQ ID NO: 1938950 - DNA, 15 bp, Homo sapiens
taatacagaagtcaa

SEQ ID NO: 1938951 - DNA, 15 bp, Homo sapiens
aatacagaagtcaag

SEQ ID NO: 1938952 - DNA, 15 bp, Homo sapiens
atacagaagtcaagg

SEQ ID NO: 1938953 - DNA, 15 bp, Homo sapiens
tacagaagtcaagga

SEQ ID NO: 1938954 - DNA, 15 bp, Homo sapiens
acagaagtcaaggac

SEQ ID NO: 1938955 - DNA, 15 bp, Homo sapiens
cagaagtcaaggacg

SEQ ID NO: 1938956 - DNA, 15 bp, Homo sapiens
agaagtcaaggacgg

SEQ ID NO: 1938957 - DNA, 15 bp, Homo sapiens
gaagtcaaggacggt

SEQ ID NO: 1938958 - DNA, 15 bp, Homo sapiens
aagtcaaggacggtt

SEQ ID NO: 1938959 - DNA, 15 bp, Homo sapiens
agtcaaggacggttt

SEQ ID NO: 1938960 - DNA, 15 bp, Homo sapiens
gtcaaggacggtttt

SEQ ID NO: 1938961 - DNA, 15 bp, Homo sapiens
tcaaggacggttttt

SEQ ID NO: 1938962 - DNA, 15 bp, Homo sapiens
caaggacggtttttg

SEQ ID NO: 1938963 - DNA, 15 bp, Homo sapiens
aaggacggtttttga

SEQ ID NO: 1938964 - DNA, 15 bp, Homo sapiens
aggacggtttttgag

SEQ ID NO: 1938965 - DNA, 15 bp, Homo sapiens
ggacggtttttgagt

SEQ ID NO: 1938966 - DNA, 15 bp, Homo sapiens
gacggtttttgagta

SEQ ID NO: 1938967 - DNA, 15 bp, Homo sapiens
acggtttttgagtag

SEQ ID NO: 1938968 - DNA, 15 bp, Homo sapiens
cggtttttgagtagg

SEQ ID NO: 1938969 - DNA, 15 bp, Homo sapiens
ggtttttgagtaggt

SEQ ID NO: 1938970 - DNA, 15 bp, Homo sapiens
gtttttgagtaggtg

SEQ ID NO: 1938971 - DNA, 15 bp, Homo sapiens
tttttgagtaggtga

SEQ ID NO: 1938972 - DNA, 15 bp, Homo sapiens
ttttgagtaggtgac

SEQ ID NO: 1938973 - DNA, 15 bp, Homo sapiens
tttgagtaggtgact

SEQ ID NO: 1938974 - DNA, 15 bp, Homo sapiens
ttgagtaggtgactt

SEQ ID NO: 1938975 - DNA, 15 bp, Homo sapiens
tgagtaggtgactta

SEQ ID NO: 1938976 - DNA, 15 bp, Homo sapiens
gagtaggtgacttat

SEQ ID NO: 1938977 - DNA, 15 bp, Homo sapiens
agtaggtgacttatg

SEQ ID NO: 1938978 - DNA, 15 bp, Homo sapiens
gtaggtgacttatga

SEQ ID NO: 1938979 - DNA, 15 bp, Homo sapiens
taggtgacttatgat

SEQ ID NO: 1938980 - DNA, 15 bp, Homo sapiens
aggtgacttatgatt

SEQ ID NO: 1938981 - DNA, 15 bp, Homo sapiens
ggtgacttatgatta

SEQ ID NO: 1938982 - DNA, 15 bp, Homo sapiens
gtgacttatgattag

SEQ ID NO: 1938983 - DNA, 15 bp, Homo sapiens
tgacttatgattaga

SEQ ID NO: 1938984 - DNA, 15 bp, Homo sapiens
gacttatgattagat

SEQ ID NO: 1938985 - DNA, 15 bp, Homo sapiens
acttatgattagata

SEQ ID NO: 1938986 - DNA, 15 bp, Homo sapiens
cttatgattagatat

SEQ ID NO: 1938987 - DNA, 15 bp, Homo sapiens
ttatgattagatatt

SEQ ID NO: 1938988 - DNA, 15 bp, Homo sapiens
tatgattagatattt

SEQ ID NO: 1938989 - DNA, 15 bp, Homo sapiens
atgattagatattta

SEQ ID NO: 1938990 - DNA, 15 bp, Homo sapiens
tgattagatatttaa

SEQ ID NO: 1938991 - DNA, 15 bp, Homo sapiens
gattagatatttaaa

SEQ ID NO: 1938992 - DNA, 15 bp, Homo sapiens
attagatatttaaag

SEQ ID NO: 1938993 - DNA, 15 bp, Homo sapiens
ttagatatttaaagg

SEQ ID NO: 1938994 - DNA, 15 bp, Homo sapiens
tagatatttaaaggc

SEQ ID NO: 1938995 - DNA, 15 bp, Homo sapiens
agatatttaaaggcg

SEQ ID NO: 1938996 - DNA, 15 bp, Homo sapiens
gatatttaaaggcgt

SEQ ID NO: 1938997 - DNA, 15 bp, Homo sapiens
atatttaaaggcgtg

SEQ ID NO: 1938998 - DNA, 15 bp, Homo sapiens
tatttaaaggcgtgg

SEQ ID NO: 1938999 - DNA, 15 bp, Homo sapiens
atttaaaggcgtggt

SEQ ID NO: 1939000 - DNA, 15 bp, Homo sapiens
tttaaaggcgtggtc

SEQ ID NO: 1939001 - DNA, 15 bp, Homo sapiens
ttaaaggcgtggtca

SEQ ID NO: 1939002 - DNA, 15 bp, Homo sapiens
taaaggcgtggtcag

SEQ ID NO: 1939003 - DNA, 15 bp, Homo sapiens
aaaggcgtggtcaga

SEQ ID NO: 1939004 - DNA, 15 bp, Homo sapiens
aaggcgtggtcagaa

SEQ ID NO: 1939005 - DNA, 15 bp, Homo sapiens
aggcgtggtcagaat

SEQ ID NO: 1939006 - DNA, 15 bp, Homo sapiens
ggcgtggtcagaata

SEQ ID NO: 1939007 - DNA, 15 bp, Homo sapiens
gcgtggtcagaatat

SEQ ID NO: 1939008 - DNA, 15 bp, Homo sapiens
cgtggtcagaatatc

SEQ ID NO: 1939009 - DNA, 15 bp, Homo sapiens
gtggtcagaatatct

SEQ ID NO: 1939010 - DNA, 15 bp, Homo sapiens
tggtcagaatatctc

SEQ ID NO: 1939011 - DNA, 15 bp, Homo sapiens
ggtcagaatatctct

SEQ ID NO: 1939012 - DNA, 15 bp, Homo sapiens
gtcagaatatctctt

SEQ ID NO: 1939013 - DNA, 15 bp, Homo sapiens
tcagaatatctcttt

SEQ ID NO: 1939014 - DNA, 15 bp, Homo sapiens
cagaatatctcttta

SEQ ID NO: 1939015 - DNA, 15 bp, Homo sapiens
agaatatctctttag

SEQ ID NO: 1939016 - DNA, 15 bp, Homo sapiens
gaatatctctttaga

SEQ ID NO: 1939017 - DNA, 15 bp, Homo sapiens
aatatctctttagaa

SEQ ID NO: 1939018 - DNA, 15 bp, Homo sapiens
atatctctttagaaa

SEQ ID NO: 1939019 - DNA, 15 bp, Homo sapiens
tatctctttagaaac

SEQ ID NO: 1939020 - DNA, 15 bp, Homo sapiens
atctctttagaaaca

SEQ ID NO: 1939021 - DNA, 15 bp, Homo sapiens
tctctttagaaacaa

SEQ ID NO: 1939022 - DNA, 15 bp, Homo sapiens
ctctttagaaacaat

SEQ ID NO: 1939023 - DNA, 15 bp, Homo sapiens
tctttagaaacaatc

SEQ ID NO: 1939024 - DNA, 15 bp, Homo sapiens
ctttagaaacaatct

SEQ ID NO: 1939025 - DNA, 15 bp, Homo sapiens
tttagaaacaatcta

SEQ ID NO: 1939026 - DNA, 15 bp, Homo sapiens
ttagaaacaatctaa

SEQ ID NO: 1939027 - DNA, 15 bp, Homo sapiens
tagaaacaatctaat

SEQ ID NO: 1939028 - DNA, 15 bp, Homo sapiens
agaaacaatctaatt

SEQ ID NO: 1939029 - DNA, 15 bp, Homo sapiens
gaaacaatctaattt

SEQ ID NO: 1939030 - DNA, 15 bp, Homo sapiens
aaacaatctaatttg

SEQ ID NO: 1939031 - DNA, 15 bp, Homo sapiens
aacaatctaatttgg

SEQ ID NO: 1939032 - DNA, 15 bp, Homo sapiens
acaatctaatttggg

SEQ ID NO: 1939033 - DNA, 15 bp, Homo sapiens
caatctaatttgggc

SEQ ID NO: 1939034 - DNA, 15 bp, Homo sapiens
aatctaatttgggct

SEQ ID NO: 1939035 - DNA, 15 bp, Homo sapiens
atctaatttgggctg

SEQ ID NO: 1939036 - DNA, 15 bp, Homo sapiens
tctaatttgggctgg

SEQ ID NO: 1939037 - DNA, 15 bp, Homo sapiens
ctaatttgggctggg

SEQ ID NO: 1939038 - DNA, 15 bp, Homo sapiens
taatttgggctgggt

SEQ ID NO: 1939039 - DNA, 15 bp, Homo sapiens
aatttgggctgggtg

SEQ ID NO: 1939040 - DNA, 15 bp, Homo sapiens
atttgggctgggtgt

SEQ ID NO: 1939041 - DNA, 15 bp, Homo sapiens
tttgggctgggtgtg

SEQ ID NO: 1939042 - DNA, 15 bp, Homo sapiens
ttgggctgggtgtgg

SEQ ID NO: 1939043 - DNA, 15 bp, Homo sapiens
tgggctgggtgtggt

SEQ ID NO: 1939044 - DNA, 15 bp, Homo sapiens
gggctgggtgtggtg

SEQ ID NO: 1939045 - DNA, 15 bp, Homo sapiens
gggtgtggtggctct

SEQ ID NO: 1939046 - DNA, 15 bp, Homo sapiens
ggtgtggtggctctt

SEQ ID NO: 1939047 - DNA, 15 bp, Homo sapiens
gtgtggtggctctta

SEQ ID NO: 1939048 - DNA, 15 bp, Homo sapiens
tgtggtggctcttac

SEQ ID NO: 1939049 - DNA, 15 bp, Homo sapiens
gtggtggctcttacc

SEQ ID NO: 1939050 - DNA, 15 bp, Homo sapiens
tggtggctcttacct

SEQ ID NO: 1939051 - DNA, 15 bp, Homo sapiens
ggtggctcttaccta

SEQ ID NO: 1939052 - DNA, 15 bp, Homo sapiens
gtggctcttacctat

SEQ ID NO: 1939053 - DNA, 15 bp, Homo sapiens
tggctcttacctata

SEQ ID NO: 1939054 - DNA, 15 bp, Homo sapiens
ggctcttacctataa

SEQ ID NO: 1939055 - DNA, 15 bp, Homo sapiens
gctcttacctataat

SEQ ID NO: 1939056 - DNA, 15 bp, Homo sapiens
ctcttacctataatc

SEQ ID NO: 1939057 - DNA, 15 bp, Homo sapiens
tcttacctataatcc

SEQ ID NO: 1939058 - DNA, 15 bp, Homo sapiens
cttacctataatccc

SEQ ID NO: 1939059 - DNA, 15 bp, Homo sapiens
ttacctataatccca

SEQ ID NO: 1939060 - DNA, 15 bp, Homo sapiens
tacctataatcccag

SEQ ID NO: 1939061 - DNA, 15 bp, Homo sapiens
tgggaggctgaggcc

SEQ ID NO: 1939062 - DNA, 15 bp, Homo sapiens
gggaggctgaggcct

SEQ ID NO: 1939063 - DNA, 15 bp, Homo sapiens
ggaggctgaggcctg

SEQ ID NO: 1939064 - DNA, 15 bp, Homo sapiens
gaggctgaggcctgt

SEQ ID NO: 1939065 - DNA, 15 bp, Homo sapiens
aggctgaggcctgta

SEQ ID NO: 1939066 - DNA, 15 bp, Homo sapiens
ggctgaggcctgtac

SEQ ID NO: 1939067 - DNA, 15 bp, Homo sapiens
gctgaggcctgtacc

SEQ ID NO: 1939068 - DNA, 15 bp, Homo sapiens
ctgaggcctgtacca

SEQ ID NO: 1939069 - DNA, 15 bp, Homo sapiens
tgaggcctgtaccac

SEQ ID NO: 1939070 - DNA, 15 bp, Homo sapiens
gaggcctgtaccacg

SEQ ID NO: 1939071 - DNA, 15 bp, Homo sapiens
aggcctgtaccacgt

SEQ ID NO: 1939072 - DNA, 15 bp, Homo sapiens
ggcctgtaccacgta

SEQ ID NO: 1939073 - DNA, 15 bp, Homo sapiens
gcctgtaccacgtag

SEQ ID NO: 1939074 - DNA, 15 bp, Homo sapiens
cctgtaccacgtagt

SEQ ID NO: 1939075 - DNA, 15 bp, Homo sapiens
ctgtaccacgtagta

SEQ ID NO: 1939076 - DNA, 15 bp, Homo sapiens
tgtaccacgtagtaa

SEQ ID NO: 1939077 - DNA, 15 bp, Homo sapiens
gtaccacgtagtaag

SEQ ID NO: 1939078 - DNA, 15 bp, Homo sapiens
taccacgtagtaaga

SEQ ID NO: 1939079 - DNA, 15 bp, Homo sapiens
accacgtagtaagat

SEQ ID NO: 1939080 - DNA, 15 bp, Homo sapiens
ccacgtagtaagatc

SEQ ID NO: 1939081 - DNA, 15 bp, Homo sapiens
cacgtagtaagatcc

SEQ ID NO: 1939082 - DNA, 15 bp, Homo sapiens
acgtagtaagatccc

SEQ ID NO: 1939083 - DNA, 15 bp, Homo sapiens
cgtagtaagatccca

SEQ ID NO: 1939084 - DNA, 15 bp, Homo sapiens
gtagtaagatcccat

SEQ ID NO: 1939085 - DNA, 15 bp, Homo sapiens
tagtaagatcccatc

SEQ ID NO: 1939086 - DNA, 15 bp, Homo sapiens
agtaagatcccatct

SEQ ID NO: 1939087 - DNA, 15 bp, Homo sapiens
gtaagatcccatctc

SEQ ID NO: 1939088 - DNA, 15 bp, Homo sapiens
taagatcccatctct

SEQ ID NO: 1939089 - DNA, 15 bp, Homo sapiens
aagatcccatctctt

SEQ ID NO: 1939090 - DNA, 15 bp, Homo sapiens
agatcccatctctta

SEQ ID NO: 1939091 - DNA, 15 bp, Homo sapiens
gatcccatctcttaa

SEQ ID NO: 1939092 - DNA, 15 bp, Homo sapiens
atcccatctcttaaa

SEQ ID NO: 1939093 - DNA, 15 bp, Homo sapiens
tcccatctcttaaaa

SEQ ID NO: 1939094 - DNA, 15 bp, Homo sapiens
cccatctcttaaaaa

SEQ ID NO: 1939095 - DNA, 15 bp, Homo sapiens
atctcttaaaaaaat

SEQ ID NO: 1939096 - DNA, 15 bp, Homo sapiens
tctcttaaaaaaata

SEQ ID NO: 1939097 - DNA, 15 bp, Homo sapiens
ctcttaaaaaaatat

SEQ ID NO: 1939098 - DNA, 15 bp, Homo sapiens
tcttaaaaaaatatc

SEQ ID NO: 1939099 - DNA, 15 bp, Homo sapiens
cttaaaaaaatatca

SEQ ID NO: 1939100 - DNA, 15 bp, Homo sapiens
ttaaaaaaatatcaa

SEQ ID NO: 1939101 - DNA, 15 bp, Homo sapiens
taaaaaaatatcaag

SEQ ID NO: 1939102 - DNA, 15 bp, Homo sapiens
aaaaaaatatcaagg

SEQ ID NO: 1939103 - DNA, 15 bp, Homo sapiens
aaaaaatatcaagga

SEQ ID NO: 1939104 - DNA, 15 bp, Homo sapiens
aaaaatatcaaggaa

SEQ ID NO: 1939105 - DNA, 15 bp, Homo sapiens
aaaatatcaaggaaa

SEQ ID NO: 1939106 - DNA, 15 bp, Homo sapiens
aaatatcaaggaaat

SEQ ID NO: 1939107 - DNA, 15 bp, Homo sapiens
aatatcaaggaaatt

SEQ ID NO: 1939108 - DNA, 15 bp, Homo sapiens
atatcaaggaaattg

SEQ ID NO: 1939109 - DNA, 15 bp, Homo sapiens
tatcaaggaaattgg

SEQ ID NO: 1939110 - DNA, 15 bp, Homo sapiens
atcaaggaaattggc

SEQ ID NO: 1939111 - DNA, 15 bp, Homo sapiens
tcaaggaaattggct

SEQ ID NO: 1939112 - DNA, 15 bp, Homo sapiens
caaggaaattggctg

SEQ ID NO: 1939113 - DNA, 15 bp, Homo sapiens
aaggaaattggctgg

SEQ ID NO: 1939114 - DNA, 15 bp, Homo sapiens
aggaaattggctggt

SEQ ID NO: 1939115 - DNA, 15 bp, Homo sapiens
ggaaattggctggtc

SEQ ID NO: 1939116 - DNA, 15 bp, Homo sapiens
gaaattggctggtca

SEQ ID NO: 1939117 - DNA, 15 bp, Homo sapiens
aaattggctggtcat

SEQ ID NO: 1939118 - DNA, 15 bp, Homo sapiens
aattggctggtcatt

SEQ ID NO: 1939119 - DNA, 15 bp, Homo sapiens
attggctggtcattg

SEQ ID NO: 1939120 - DNA, 15 bp, Homo sapiens
ttggctggtcattgt

SEQ ID NO: 1939121 - DNA, 15 bp, Homo sapiens
tggctggtcattgtg

SEQ ID NO: 1939122 - DNA, 15 bp, Homo sapiens
ggctggtcattgtgg

SEQ ID NO: 1939123 - DNA, 15 bp, Homo sapiens
gctggtcattgtggt

SEQ ID NO: 1939124 - DNA, 15 bp, Homo sapiens
ctggtcattgtggtg

SEQ ID NO: 1939125 - DNA, 15 bp, Homo sapiens
tggtcattgtggtgc

SEQ ID NO: 1939126 - DNA, 15 bp, Homo sapiens
ggtcattgtggtgca

SEQ ID NO: 1939127 - DNA, 15 bp, Homo sapiens
gtcattgtggtgcac

SEQ ID NO: 1939128 - DNA, 15 bp, Homo sapiens
tcattgtggtgcaca

SEQ ID NO: 1939129 - DNA, 15 bp, Homo sapiens
cattgtggtgcacac

SEQ ID NO: 1939130 - DNA, 15 bp, Homo sapiens
attgtggtgcacacc

SEQ ID NO: 1939131 - DNA, 15 bp, Homo sapiens
ttgtggtgcacacct

SEQ ID NO: 1939132 - DNA, 15 bp, Homo sapiens
tgtggtgcacacctg

SEQ ID NO: 1939133 - DNA, 15 bp, Homo sapiens
ggtgcacacctgtag

SEQ ID NO: 1939134 - DNA, 15 bp, Homo sapiens
gtgcacacctgtagt

SEQ ID NO: 1939135 - DNA, 15 bp, Homo sapiens
tgcacacctgtagtc

SEQ ID NO: 1939136 - DNA, 15 bp, Homo sapiens
cacacctgtagtccc

SEQ ID NO: 1939137 - DNA, 15 bp, Homo sapiens
agtcccagctactct

SEQ ID NO: 1939138 - DNA, 15 bp, Homo sapiens
gtcccagctactctg

SEQ ID NO: 1939139 - DNA, 15 bp, Homo sapiens
tctggaggctgagga

SEQ ID NO: 1939140 - DNA, 15 bp, Homo sapiens
ctggaggctgaggag

SEQ ID NO: 1939141 - DNA, 15 bp, Homo sapiens
tggaggctgaggagg

SEQ ID NO: 1939142 - DNA, 15 bp, Homo sapiens
ggaggctgaggaggg

SEQ ID NO: 1939143 - DNA, 15 bp, Homo sapiens
gaggctgaggaggga

SEQ ID NO: 1939144 - DNA, 15 bp, Homo sapiens
aggctgaggagggag

SEQ ID NO: 1939145 - DNA, 15 bp, Homo sapiens
ggctgaggagggagg

SEQ ID NO: 1939146 - DNA, 15 bp, Homo sapiens
gctgaggagggagga

SEQ ID NO: 1939147 - DNA, 15 bp, Homo sapiens
ctgaggagggaggat

SEQ ID NO: 1939148 - DNA, 15 bp, Homo sapiens
tgaggagggaggatt

SEQ ID NO: 1939149 - DNA, 15 bp, Homo sapiens
gaggagggaggatta

SEQ ID NO: 1939150 - DNA, 15 bp, Homo sapiens
aggagggaggattac

SEQ ID NO: 1939151 - DNA, 15 bp, Homo sapiens
ggagggaggattact

SEQ ID NO: 1939152 - DNA, 15 bp, Homo sapiens
gagggaggattactt

SEQ ID NO: 1939153 - DNA, 15 bp, Homo sapiens
agggaggattacttg

SEQ ID NO: 1939154 - DNA, 15 bp, Homo sapiens
ggattacttgagcct

SEQ ID NO: 1939155 - DNA, 15 bp, Homo sapiens
gattacttgagccta

SEQ ID NO: 1939156 - DNA, 15 bp, Homo sapiens
attacttgagcctaa

SEQ ID NO: 1939157 - DNA, 15 bp, Homo sapiens
ttacttgagcctaag

SEQ ID NO: 1939158 - DNA, 15 bp, Homo sapiens
tacttgagcctaaga

SEQ ID NO: 1939159 - DNA, 15 bp, Homo sapiens
acttgagcctaagag

SEQ ID NO: 1939160 - DNA, 15 bp, Homo sapiens
cttgagcctaagagt

SEQ ID NO: 1939161 - DNA, 15 bp, Homo sapiens
ttgagcctaagagta

SEQ ID NO: 1939162 - DNA, 15 bp, Homo sapiens
tgagcctaagagtac

SEQ ID NO: 1939163 - DNA, 15 bp, Homo sapiens
gagcctaagagtaca

SEQ ID NO: 1939164 - DNA, 15 bp, Homo sapiens
agcctaagagtacaa

SEQ ID NO: 1939165 - DNA, 15 bp, Homo sapiens
gcctaagagtacaag

SEQ ID NO: 1939166 - DNA, 15 bp, Homo sapiens
cctaagagtacaaga

SEQ ID NO: 1939167 - DNA, 15 bp, Homo sapiens
ctaagagtacaagac

SEQ ID NO: 1939168 - DNA, 15 bp, Homo sapiens
taagagtacaagact

SEQ ID NO: 1939169 - DNA, 15 bp, Homo sapiens
aagagtacaagactg

SEQ ID NO: 1939170 - DNA, 15 bp, Homo sapiens
agagtacaagactgc

SEQ ID NO: 1939171 - DNA, 15 bp, Homo sapiens
gagtacaagactgca

SEQ ID NO: 1939172 - DNA, 15 bp, Homo sapiens
agtacaagactgcag

SEQ ID NO: 1939173 - DNA, 15 bp, Homo sapiens
gtacaagactgcagt

SEQ ID NO: 1939174 - DNA, 15 bp, Homo sapiens
tacaagactgcagtg

SEQ ID NO: 1939175 - DNA, 15 bp, Homo sapiens
acaagactgcagtga

SEQ ID NO: 1939176 - DNA, 15 bp, Homo sapiens
caagactgcagtgag

SEQ ID NO: 1939177 - DNA, 15 bp, Homo sapiens
aagactgcagtgagc

SEQ ID NO: 1939178 - DNA, 15 bp, Homo sapiens
agactgcagtgagct

SEQ ID NO: 1939179 - DNA, 15 bp, Homo sapiens
gactgcagtgagcta

SEQ ID NO: 1939180 - DNA, 15 bp, Homo sapiens
actgcagtgagctaa

SEQ ID NO: 1939181 - DNA, 15 bp, Homo sapiens
ctgcagtgagctaaa

SEQ ID NO: 1939182 - DNA, 15 bp, Homo sapiens
tgcagtgagctaaat

SEQ ID NO: 1939183 - DNA, 15 bp, Homo sapiens
gcagtgagctaaatt

SEQ ID NO: 1939184 - DNA, 15 bp, Homo sapiens
cagtgagctaaattt

SEQ ID NO: 1939185 - DNA, 15 bp, Homo sapiens
agtgagctaaattta

SEQ ID NO: 1939186 - DNA, 15 bp, Homo sapiens
gtgagctaaatttaa

SEQ ID NO: 1939187 - DNA, 15 bp, Homo sapiens
tgagctaaatttaag

SEQ ID NO: 1939188 - DNA, 15 bp, Homo sapiens
gagctaaatttaagt

SEQ ID NO: 1939189 - DNA, 15 bp, Homo sapiens
agctaaatttaagta

SEQ ID NO: 1939190 - DNA, 15 bp, Homo sapiens
gctaaatttaagtat

SEQ ID NO: 1939191 - DNA, 15 bp, Homo sapiens
ctaaatttaagtatg

SEQ ID NO: 1939192 - DNA, 15 bp, Homo sapiens
taaatttaagtatgt

SEQ ID NO: 1939193 - DNA, 15 bp, Homo sapiens
aaatttaagtatgtg

SEQ ID NO: 1939194 - DNA, 15 bp, Homo sapiens
aatttaagtatgtgc

SEQ ID NO: 1939195 - DNA, 15 bp, Homo sapiens
atttaagtatgtgct

SEQ ID NO: 1939196 - DNA, 15 bp, Homo sapiens
tttaagtatgtgctt

SEQ ID NO: 1939197 - DNA, 15 bp, Homo sapiens
ttaagtatgtgcttt

SEQ ID NO: 1939198 - DNA, 15 bp, Homo sapiens
taagtatgtgcttta

SEQ ID NO: 1939199 - DNA, 15 bp, Homo sapiens
aagtatgtgctttag

SEQ ID NO: 1939200 - DNA, 15 bp, Homo sapiens
agtatgtgctttagg

SEQ ID NO: 1939201 - DNA, 15 bp, Homo sapiens
gtatgtgctttagga

SEQ ID NO: 1939202 - DNA, 15 bp, Homo sapiens
tatgtgctttaggac

SEQ ID NO: 1939203 - DNA, 15 bp, Homo sapiens
atgtgctttaggact

SEQ ID NO: 1939204 - DNA, 15 bp, Homo sapiens
tgtgctttaggactt

SEQ ID NO: 1939205 - DNA, 15 bp, Homo sapiens
gtgctttaggacttt

SEQ ID NO: 1939206 - DNA, 15 bp, Homo sapiens
tgctttaggacttta

SEQ ID NO: 1939207 - DNA, 15 bp, Homo sapiens
gctttaggactttag

SEQ ID NO: 1939208 - DNA, 15 bp, Homo sapiens
ctttaggactttagc

SEQ ID NO: 1939209 - DNA, 15 bp, Homo sapiens
tttaggactttagct

SEQ ID NO: 1939210 - DNA, 15 bp, Homo sapiens
ttaggactttagctt

SEQ ID NO: 1939211 - DNA, 15 bp, Homo sapiens
taggactttagcttg

SEQ ID NO: 1939212 - DNA, 15 bp, Homo sapiens
aggactttagcttgg

SEQ ID NO: 1939213 - DNA, 15 bp, Homo sapiens
ggactttagcttggg

SEQ ID NO: 1939214 - DNA, 15 bp, Homo sapiens
gactttagcttgggt

SEQ ID NO: 1939215 - DNA, 15 bp, Homo sapiens
actttagcttgggtg

SEQ ID NO: 1939216 - DNA, 15 bp, Homo sapiens
ctttagcttgggtga

SEQ ID NO: 1939217 - DNA, 15 bp, Homo sapiens
tttagcttgggtgac

SEQ ID NO: 1939218 - DNA, 15 bp, Homo sapiens
ttagcttgggtgaca

SEQ ID NO: 1939219 - DNA, 15 bp, Homo sapiens
tagcttgggtgacag

SEQ ID NO: 1939220 - DNA, 15 bp, Homo sapiens
ttgggtgacagagca

SEQ ID NO: 1939221 - DNA, 15 bp, Homo sapiens
gagcaagactccatt

SEQ ID NO: 1939222 - DNA, 15 bp, Homo sapiens
agcaagactccattt

SEQ ID NO: 1939223 - DNA, 15 bp, Homo sapiens
gcaagactccatttc

SEQ ID NO: 1939224 - DNA, 15 bp, Homo sapiens
caagactccatttct

SEQ ID NO: 1939225 - DNA, 15 bp, Homo sapiens
aagactccatttcta

SEQ ID NO: 1939226 - DNA, 15 bp, Homo sapiens
agactccatttctaa

SEQ ID NO: 1939227 - DNA, 15 bp, Homo sapiens
gactccatttctaaa

SEQ ID NO: 1939228 - DNA, 15 bp, Homo sapiens
actccatttctaaaa

SEQ ID NO: 1939229 - DNA, 15 bp, Homo sapiens
ctccatttctaaaac

SEQ ID NO: 1939230 - DNA, 15 bp, Homo sapiens
tccatttctaaaaca

SEQ ID NO: 1939231 - DNA, 15 bp, Homo sapiens
ccatttctaaaacaa

SEQ ID NO: 1939232 - DNA, 15 bp, Homo sapiens
catttctaaaacaaa

SEQ ID NO: 1939233 - DNA, 15 bp, Homo sapiens
atttctaaaacaaaa

SEQ ID NO: 1939234 - DNA, 15 bp, Homo sapiens
tttctaaaacaaaag

SEQ ID NO: 1939235 - DNA, 15 bp, Homo sapiens
ttctaaaacaaaagc

SEQ ID NO: 1939236 - DNA, 15 bp, Homo sapiens
tctaaaacaaaagca

SEQ ID NO: 1939237 - DNA, 15 bp, Homo sapiens
ctaaaacaaaagcaa

SEQ ID NO: 1939238 - DNA, 15 bp, Homo sapiens
taaaacaaaagcaat

SEQ ID NO: 1939239 - DNA, 15 bp, Homo sapiens
aaaacaaaagcaatc

SEQ ID NO: 1939240 - DNA, 15 bp, Homo sapiens
aaacaaaagcaatct

SEQ ID NO: 1939241 - DNA, 15 bp, Homo sapiens
aacaaaagcaatcta

SEQ ID NO: 1939242 - DNA, 15 bp, Homo sapiens
acaaaagcaatctaa

SEQ ID NO: 1939243 - DNA, 15 bp, Homo sapiens
caaaagcaatctaat

SEQ ID NO: 1939244 - DNA, 15 bp, Homo sapiens
aaaagcaatctaatc

SEQ ID NO: 1939245 - DNA, 15 bp, Homo sapiens
aaagcaatctaatct

SEQ ID NO: 1939246 - DNA, 15 bp, Homo sapiens
aagcaatctaatctg

SEQ ID NO: 1939247 - DNA, 15 bp, Homo sapiens
agcaatctaatctgc

SEQ ID NO: 1939248 - DNA, 15 bp, Homo sapiens
gcaatctaatctgca

SEQ ID NO: 1939249 - DNA, 15 bp, Homo sapiens
caatctaatctgcag

SEQ ID NO: 1939250 - DNA, 15 bp, Homo sapiens
aatctaatctgcagg

SEQ ID NO: 1939251 - DNA, 15 bp, Homo sapiens
atctaatctgcagga

SEQ ID NO: 1939252 - DNA, 15 bp, Homo sapiens
tctaatctgcaggat

SEQ ID NO: 1939253 - DNA, 15 bp, Homo sapiens
ctaatctgcaggatg

SEQ ID NO: 1939254 - DNA, 15 bp, Homo sapiens
taatctgcaggatgc

SEQ ID NO: 1939255 - DNA, 15 bp, Homo sapiens
aatctgcaggatgct

SEQ ID NO: 1939256 - DNA, 15 bp, Homo sapiens
atctgcaggatgcta

SEQ ID NO: 1939257 - DNA, 15 bp, Homo sapiens
tctgcaggatgctat

SEQ ID NO: 1939258 - DNA, 15 bp, Homo sapiens
ctgcaggatgctatg

SEQ ID NO: 1939259 - DNA, 15 bp, Homo sapiens
tgcaggatgctatga

SEQ ID NO: 1939260 - DNA, 15 bp, Homo sapiens
gcaggatgctatgat

SEQ ID NO: 1939261 - DNA, 15 bp, Homo sapiens
caggatgctatgatc

SEQ ID NO: 1939262 - DNA, 15 bp, Homo sapiens
aggatgctatgatct

SEQ ID NO: 1939263 - DNA, 15 bp, Homo sapiens
ggatgctatgatcta

SEQ ID NO: 1939264 - DNA, 15 bp, Homo sapiens
gatgctatgatctat

SEQ ID NO: 1939265 - DNA, 15 bp, Homo sapiens
atgctatgatctatc

SEQ ID NO: 1939266 - DNA, 15 bp, Homo sapiens
tgctatgatctatct

SEQ ID NO: 1939267 - DNA, 15 bp, Homo sapiens
gctatgatctatctg

SEQ ID NO: 1939268 - DNA, 15 bp, Homo sapiens
ctatgatctatctgt

SEQ ID NO: 1939269 - DNA, 15 bp, Homo sapiens
tatgatctatctgtc

SEQ ID NO: 1939270 - DNA, 15 bp, Homo sapiens
atgatctatctgtct

SEQ ID NO: 1939271 - DNA, 15 bp, Homo sapiens
tgatctatctgtctg

SEQ ID NO: 1939272 - DNA, 15 bp, Homo sapiens
gatctatctgtctga

SEQ ID NO: 1939273 - DNA, 15 bp, Homo sapiens
atctatctgtctgag

SEQ ID NO: 1939274 - DNA, 15 bp, Homo sapiens
tctatctgtctgaga

SEQ ID NO: 1939275 - DNA, 15 bp, Homo sapiens
ctatctgtctgagat

SEQ ID NO: 1939276 - DNA, 15 bp, Homo sapiens
tatctgtctgagatt

SEQ ID NO: 1939277 - DNA, 15 bp, Homo sapiens
atctgtctgagatta

SEQ ID NO: 1939278 - DNA, 15 bp, Homo sapiens
tctgtctgagattat

SEQ ID NO: 1939279 - DNA, 15 bp, Homo sapiens
ctgtctgagattatc

SEQ ID NO: 1939280 - DNA, 15 bp, Homo sapiens
tgtctgagattatcg

SEQ ID NO: 1939281 - DNA, 15 bp, Homo sapiens
gtctgagattatcgt

SEQ ID NO: 1939282 - DNA, 15 bp, Homo sapiens
tctgagattatcgta

SEQ ID NO: 1939283 - DNA, 15 bp, Homo sapiens
ctgagattatcgtaa

SEQ ID NO: 1939284 - DNA, 15 bp, Homo sapiens
tgagattatcgtaat

SEQ ID NO: 1939285 - DNA, 15 bp, Homo sapiens
gagattatcgtaatg

SEQ ID NO: 1939286 - DNA, 15 bp, Homo sapiens
agattatcgtaatgt

SEQ ID NO: 1939287 - DNA, 15 bp, Homo sapiens
gattatcgtaatgta

SEQ ID NO: 1939288 - DNA, 15 bp, Homo sapiens
attatcgtaatgtat

SEQ ID NO: 1939289 - DNA, 15 bp, Homo sapiens
ttatcgtaatgtatc

SEQ ID NO: 1939290 - DNA, 15 bp, Homo sapiens
tatcgtaatgtatct

SEQ ID NO: 1939291 - DNA, 15 bp, Homo sapiens
atcgtaatgtatctc

SEQ ID NO: 1939292 - DNA, 15 bp, Homo sapiens
tcgtaatgtatctcc

SEQ ID NO: 1939293 - DNA, 15 bp, Homo sapiens
cgtaatgtatctcca

SEQ ID NO: 1939294 - DNA, 15 bp, Homo sapiens
gtaatgtatctccag

SEQ ID NO: 1939295 - DNA, 15 bp, Homo sapiens
taatgtatctccagc

SEQ ID NO: 1939296 - DNA, 15 bp, Homo sapiens
aatgtatctccagcc

SEQ ID NO: 1939297 - DNA, 15 bp, Homo sapiens
atgtatctccagccc

SEQ ID NO: 1939298 - DNA, 15 bp, Homo sapiens
tgtatctccagcccc

SEQ ID NO: 1939299 - DNA, 15 bp, Homo sapiens
gtatctccagccccc

SEQ ID NO: 1939300 - DNA, 15 bp, Homo sapiens
tatctccagccccca

SEQ ID NO: 1939301 - DNA, 15 bp, Homo sapiens
atctccagcccccat

SEQ ID NO: 1939302 - DNA, 15 bp, Homo sapiens
tctccagcccccatt

SEQ ID NO: 1939303 - DNA, 15 bp, Homo sapiens
ctccagcccccattt

SEQ ID NO: 1939304 - DNA, 15 bp, Homo sapiens
tccagcccccatttg

SEQ ID NO: 1939305 - DNA, 15 bp, Homo sapiens
ccagcccccatttgt

SEQ ID NO: 1939306 - DNA, 15 bp, Homo sapiens
cagcccccatttgtg

SEQ ID NO: 1939307 - DNA, 15 bp, Homo sapiens
agcccccatttgtgg

SEQ ID NO: 1939308 - DNA, 15 bp, Homo sapiens
gcccccatttgtgga

SEQ ID NO: 1939309 - DNA, 15 bp, Homo sapiens
cccccatttgtggat

SEQ ID NO: 1939310 - DNA, 15 bp, Homo sapiens
ccccatttgtggatg

SEQ ID NO: 1939311 - DNA, 15 bp, Homo sapiens
cccatttgtggatgt

SEQ ID NO: 1939312 - DNA, 15 bp, Homo sapiens
ccatttgtggatgtc

SEQ ID NO: 1939313 - DNA, 15 bp, Homo sapiens
catttgtggatgtca

SEQ ID NO: 1939314 - DNA, 15 bp, Homo sapiens
atttgtggatgtcat

SEQ ID NO: 1939315 - DNA, 15 bp, Homo sapiens
tttgtggatgtcatt

SEQ ID NO: 1939316 - DNA, 15 bp, Homo sapiens
ttgtggatgtcattt

SEQ ID NO: 1939317 - DNA, 15 bp, Homo sapiens
tgtggatgtcattta

SEQ ID NO: 1939318 - DNA, 15 bp, Homo sapiens
gtggatgtcatttat

SEQ ID NO: 1939319 - DNA, 15 bp, Homo sapiens
tggatgtcatttatg

SEQ ID NO: 1939320 - DNA, 15 bp, Homo sapiens
ggatgtcatttatga

SEQ ID NO: 1939321 - DNA, 15 bp, Homo sapiens
gatgtcatttatgaa

SEQ ID NO: 1939322 - DNA, 15 bp, Homo sapiens
atgtcatttatgaag

SEQ ID NO: 1939323 - DNA, 15 bp, Homo sapiens
tgtcatttatgaaga

SEQ ID NO: 1939324 - DNA, 15 bp, Homo sapiens
gtcatttatgaagat

SEQ ID NO: 1939325 - DNA, 15 bp, Homo sapiens
tcatttatgaagatc

SEQ ID NO: 1939326 - DNA, 15 bp, Homo sapiens
catttatgaagatct

SEQ ID NO: 1939327 - DNA, 15 bp, Homo sapiens
atttatgaagatctc

SEQ ID NO: 1939328 - DNA, 15 bp, Homo sapiens
tttatgaagatctca

SEQ ID NO: 1939329 - DNA, 15 bp, Homo sapiens
ttatgaagatctcaa

SEQ ID NO: 1939330 - DNA, 15 bp, Homo sapiens
tatgaagatctcaat

SEQ ID NO: 1939331 - DNA, 15 bp, Homo sapiens
atgaagatctcaatt

SEQ ID NO: 1939332 - DNA, 15 bp, Homo sapiens
tgaagatctcaatta

SEQ ID NO: 1939333 - DNA, 15 bp, Homo sapiens
gaagatctcaattat

SEQ ID NO: 1939334 - DNA, 15 bp, Homo sapiens
aagatctcaattata

SEQ ID NO: 1939335 - DNA, 15 bp, Homo sapiens
agatctcaattatat

SEQ ID NO: 1939336 - DNA, 15 bp, Homo sapiens
gatctcaattatatc

SEQ ID NO: 1939337 - DNA, 15 bp, Homo sapiens
atctcaattatatct

SEQ ID NO: 1939338 - DNA, 15 bp, Homo sapiens
tctcaattatatctg

SEQ ID NO: 1939339 - DNA, 15 bp, Homo sapiens
ctcaattatatctgt

SEQ ID NO: 1939340 - DNA, 15 bp, Homo sapiens
tcaattatatctgta

SEQ ID NO: 1939341 - DNA, 15 bp, Homo sapiens
caattatatctgtaa

SEQ ID NO: 1939342 - DNA, 15 bp, Homo sapiens
aattatatctgtaag

SEQ ID NO: 1939343 - DNA, 15 bp, Homo sapiens
attatatctgtaagg

SEQ ID NO: 1939344 - DNA, 15 bp, Homo sapiens
ttatatctgtaaggt

SEQ ID NO: 1939345 - DNA, 15 bp, Homo sapiens
tatatctgtaaggtc

SEQ ID NO: 1939346 - DNA, 15 bp, Homo sapiens
atatctgtaaggtcc

SEQ ID NO: 1939347 - DNA, 15 bp, Homo sapiens
tatctgtaaggtccc

SEQ ID NO: 1939348 - DNA, 15 bp, Homo sapiens
atctgtaaggtcccc

SEQ ID NO: 1939349 - DNA, 15 bp, Homo sapiens
tctgtaaggtcccca

SEQ ID NO: 1939350 - DNA, 15 bp, Homo sapiens
ctgtaaggtccccaa

SEQ ID NO: 1939351 - DNA, 15 bp, Homo sapiens
tgtaaggtccccaaa

SEQ ID NO: 1939352 - DNA, 15 bp, Homo sapiens
gtaaggtccccaaaa

SEQ ID NO: 1939353 - DNA, 15 bp, Homo sapiens
taaggtccccaaaac

SEQ ID NO: 1939354 - DNA, 15 bp, Homo sapiens
aaggtccccaaaact

SEQ ID NO: 1939355 - DNA, 15 bp, Homo sapiens
aggtccccaaaactt

SEQ ID NO: 1939356 - DNA, 15 bp, Homo sapiens
ggtccccaaaactta

SEQ ID NO: 1939357 - DNA, 15 bp, Homo sapiens
gtccccaaaacttat

SEQ ID NO: 1939358 - DNA, 15 bp, Homo sapiens
tccccaaaacttatg

SEQ ID NO: 1939359 - DNA, 15 bp, Homo sapiens
ccccaaaacttatgc

SEQ ID NO: 1939360 - DNA, 15 bp, Homo sapiens
cccaaaacttatgca

SEQ ID NO: 1939361 - DNA, 15 bp, Homo sapiens
ccaaaacttatgcat

SEQ ID NO: 1939362 - DNA, 15 bp, Homo sapiens
caaaacttatgcata

SEQ ID NO: 1939363 - DNA, 15 bp, Homo sapiens
aaaacttatgcataa

SEQ ID NO: 1939364 - DNA, 15 bp, Homo sapiens
aaacttatgcataaa

SEQ ID NO: 1939365 - DNA, 15 bp, Homo sapiens
aacttatgcataaaa

SEQ ID NO: 1939366 - DNA, 15 bp, Homo sapiens
acttatgcataaaaa

SEQ ID NO: 1939367 - DNA, 15 bp, Homo sapiens
cttatgcataaaaaa

SEQ ID NO: 1939368 - DNA, 15 bp, Homo sapiens
ttatgcataaaaaag

SEQ ID NO: 1939369 - DNA, 15 bp, Homo sapiens
tatgcataaaaaaga

SEQ ID NO: 1939370 - DNA, 15 bp, Homo sapiens
atgcataaaaaagaa

SEQ ID NO: 1939371 - DNA, 15 bp, Homo sapiens
tgcataaaaaagaat

SEQ ID NO: 1939372 - DNA, 15 bp, Homo sapiens
gcataaaaaagaatc

SEQ ID NO: 1939373 - DNA, 15 bp, Homo sapiens
cataaaaaagaatca

SEQ ID NO: 1939374 - DNA, 15 bp, Homo sapiens
ataaaaaagaatcag

SEQ ID NO: 1939375 - DNA, 15 bp, Homo sapiens
taaaaaagaatcaga

SEQ ID NO: 1939376 - DNA, 15 bp, Homo sapiens
aaaaaagaatcagaa

SEQ ID NO: 1939377 - DNA, 15 bp, Homo sapiens
aaaaagaatcagaaa

SEQ ID NO: 1939378 - DNA, 15 bp, Homo sapiens
aaaagaatcagaaac

SEQ ID NO: 1939379 - DNA, 15 bp, Homo sapiens
aaagaatcagaaact

SEQ ID NO: 1939380 - DNA, 15 bp, Homo sapiens
aagaatcagaaacta

SEQ ID NO: 1939381 - DNA, 15 bp, Homo sapiens
agaatcagaaactaa

SEQ ID NO: 1939382 - DNA, 15 bp, Homo sapiens
gaatcagaaactaaa

SEQ ID NO: 1939383 - DNA, 15 bp, Homo sapiens
aatcagaaactaaaa

SEQ ID NO: 1939384 - DNA, 15 bp, Homo sapiens
atcagaaactaaaaa

SEQ ID NO: 1939385 - DNA, 15 bp, Homo sapiens
tcagaaactaaaaat

SEQ ID NO: 1939386 - DNA, 15 bp, Homo sapiens
cagaaactaaaaatc

SEQ ID NO: 1939387 - DNA, 15 bp, Homo sapiens
agaaactaaaaatca

SEQ ID NO: 1939388 - DNA, 15 bp, Homo sapiens
gaaactaaaaatcaa

SEQ ID NO: 1939389 - DNA, 15 bp, Homo sapiens
aaactaaaaatcaaa

SEQ ID NO: 1939390 - DNA, 15 bp, Homo sapiens
aactaaaaatcaaaa

SEQ ID NO: 1939391 - DNA, 15 bp, Homo sapiens
actaaaaatcaaaag

SEQ ID NO: 1939392 - DNA, 15 bp, Homo sapiens
ctaaaaatcaaaaga

SEQ ID NO: 1939393 - DNA, 15 bp, Homo sapiens
taaaaatcaaaagag

SEQ ID NO: 1939394 - DNA, 15 bp, Homo sapiens
aaaaatcaaaagaga

SEQ ID NO: 1939395 - DNA, 15 bp, Homo sapiens
aaaatcaaaagagat

SEQ ID NO: 1939396 - DNA, 15 bp, Homo sapiens
aaatcaaaagagatt

SEQ ID NO: 1939397 - DNA, 15 bp, Homo sapiens
aatcaaaagagattt

SEQ ID NO: 1939398 - DNA, 15 bp, Homo sapiens
atcaaaagagatttg

SEQ ID NO: 1939399 - DNA, 15 bp, Homo sapiens
tcaaaagagatttgt

SEQ ID NO: 1939400 - DNA, 15 bp, Homo sapiens
caaaagagatttgtg

SEQ ID NO: 1939401 - DNA, 15 bp, Homo sapiens
aaaagagatttgtga

SEQ ID NO: 1939402 - DNA, 15 bp, Homo sapiens
aaagagatttgtgac

SEQ ID NO: 1939403 - DNA, 15 bp, Homo sapiens
aagagatttgtgaca

SEQ ID NO: 1939404 - DNA, 15 bp, Homo sapiens
agagatttgtgacat

SEQ ID NO: 1939405 - DNA, 15 bp, Homo sapiens
gagatttgtgacatt

SEQ ID NO: 1939406 - DNA, 15 bp, Homo sapiens
agatttgtgacatta

SEQ ID NO: 1939407 - DNA, 15 bp, Homo sapiens
gatttgtgacattac

SEQ ID NO: 1939408 - DNA, 15 bp, Homo sapiens
atttgtgacattaca

SEQ ID NO: 1939409 - DNA, 15 bp, Homo sapiens
tttgtgacattacaa

SEQ ID NO: 1939410 - DNA, 15 bp, Homo sapiens
ttgtgacattacaat

SEQ ID NO: 1939411 - DNA, 15 bp, Homo sapiens
tgtgacattacaata

SEQ ID NO: 1939412 - DNA, 15 bp, Homo sapiens
gtgacattacaatac

SEQ ID NO: 1939413 - DNA, 15 bp, Homo sapiens
tgacattacaataca

SEQ ID NO: 1939414 - DNA, 15 bp, Homo sapiens
gacattacaatacat

SEQ ID NO: 1939415 - DNA, 15 bp, Homo sapiens
acattacaatacata

SEQ ID NO: 1939416 - DNA, 15 bp, Homo sapiens
cattacaatacatat

SEQ ID NO: 1939417 - DNA, 15 bp, Homo sapiens
attacaatacatatc

SEQ ID NO: 1939418 - DNA, 15 bp, Homo sapiens
ttacaatacatatca

SEQ ID NO: 1939419 - DNA, 15 bp, Homo sapiens
tacaatacatatcag

SEQ ID NO: 1939420 - DNA, 15 bp, Homo sapiens
acaatacatatcagt

SEQ ID NO: 1939421 - DNA, 15 bp, Homo sapiens
caatacatatcagtt

SEQ ID NO: 1939422 - DNA, 15 bp, Homo sapiens
aatacatatcagtta

SEQ ID NO: 1939423 - DNA, 15 bp, Homo sapiens
atacatatcagttat

SEQ ID NO: 1939424 - DNA, 15 bp, Homo sapiens
tacatatcagttata

SEQ ID NO: 1939425 - DNA, 15 bp, Homo sapiens
acatatcagttataa

SEQ ID NO: 1939426 - DNA, 15 bp, Homo sapiens
catatcagttataat

SEQ ID NO: 1939427 - DNA, 15 bp, Homo sapiens
atatcagttataatt

SEQ ID NO: 1939428 - DNA, 15 bp, Homo sapiens
tatcagttataattt

SEQ ID NO: 1939429 - DNA, 15 bp, Homo sapiens
atcagttataatttg

SEQ ID NO: 1939430 - DNA, 15 bp, Homo sapiens
tcagttataatttgc

SEQ ID NO: 1939431 - DNA, 15 bp, Homo sapiens
cagttataatttgct

SEQ ID NO: 1939432 - DNA, 15 bp, Homo sapiens
agttataatttgctt

SEQ ID NO: 1939433 - DNA, 15 bp, Homo sapiens
gttataatttgctta

SEQ ID NO: 1939434 - DNA, 15 bp, Homo sapiens
ttataatttgcttac

SEQ ID NO: 1939435 - DNA, 15 bp, Homo sapiens
tataatttgcttaca

SEQ ID NO: 1939436 - DNA, 15 bp, Homo sapiens
ataatttgcttacaa

SEQ ID NO: 1939437 - DNA, 15 bp, Homo sapiens
taatttgcttacaaa

SEQ ID NO: 1939438 - DNA, 15 bp, Homo sapiens
aatttgcttacaaaa

SEQ ID NO: 1939439 - DNA, 15 bp, Homo sapiens
atttgcttacaaaat

SEQ ID NO: 1939440 - DNA, 15 bp, Homo sapiens
tttgcttacaaaata

SEQ ID NO: 1939441 - DNA, 15 bp, Homo sapiens
ttgcttacaaaatac

SEQ ID NO: 1939442 - DNA, 15 bp, Homo sapiens
tgcttacaaaataca

SEQ ID NO: 1939443 - DNA, 15 bp, Homo sapiens
gcttacaaaatacat

SEQ ID NO: 1939444 - DNA, 15 bp, Homo sapiens
cttacaaaatacatt

SEQ ID NO: 1939445 - DNA, 15 bp, Homo sapiens
ttacaaaatacattt

SEQ ID NO: 1939446 - DNA, 15 bp, Homo sapiens
tacaaaatacattta

SEQ ID NO: 1939447 - DNA, 15 bp, Homo sapiens
acaaaatacatttat

SEQ ID NO: 1939448 - DNA, 15 bp, Homo sapiens
caaaatacatttatt

SEQ ID NO: 1939449 - DNA, 15 bp, Homo sapiens
aaaatacatttattt

SEQ ID NO: 1939450 - DNA, 15 bp, Homo sapiens
aaatacatttatttg

SEQ ID NO: 1939451 - DNA, 15 bp, Homo sapiens
aatacatttatttga

SEQ ID NO: 1939452 - DNA, 15 bp, Homo sapiens
atacatttatttgat

SEQ ID NO: 1939453 - DNA, 15 bp, Homo sapiens
tacatttatttgatc

SEQ ID NO: 1939454 - DNA, 15 bp, Homo sapiens
acatttatttgatca

SEQ ID NO: 1939455 - DNA, 15 bp, Homo sapiens
catttatttgatcac

SEQ ID NO: 1939456 - DNA, 15 bp, Homo sapiens
atttatttgatcaca

SEQ ID NO: 1939457 - DNA, 15 bp, Homo sapiens
tttatttgatcacaa

SEQ ID NO: 1939458 - DNA, 15 bp, Homo sapiens
ttatttgatcacaaa

SEQ ID NO: 1939459 - DNA, 15 bp, Homo sapiens
tatttgatcacaaac

SEQ ID NO: 1939460 - DNA, 15 bp, Homo sapiens
atttgatcacaaact

SEQ ID NO: 1939461 - DNA, 15 bp, Homo sapiens
tttgatcacaaactt

SEQ ID NO: 1939462 - DNA, 15 bp, Homo sapiens
ttgatcacaaacttg

SEQ ID NO: 1939463 - DNA, 15 bp, Homo sapiens
tgatcacaaacttgc

SEQ ID NO: 1939464 - DNA, 15 bp, Homo sapiens
gatcacaaacttgcc

SEQ ID NO: 1939465 - DNA, 15 bp, Homo sapiens
atcacaaacttgcct

SEQ ID NO: 1939466 - DNA, 15 bp, Homo sapiens
tcacaaacttgcctc

SEQ ID NO: 1939467 - DNA, 15 bp, Homo sapiens
cacaaacttgcctcg

SEQ ID NO: 1939468 - DNA, 15 bp, Homo sapiens
acaaacttgcctcgt

SEQ ID NO: 1939469 - DNA, 15 bp, Homo sapiens
caaacttgcctcgtt

SEQ ID NO: 1939470 - DNA, 15 bp, Homo sapiens
aaacttgcctcgtta

SEQ ID NO: 1939471 - DNA, 15 bp, Homo sapiens
aacttgcctcgttat

SEQ ID NO: 1939472 - DNA, 15 bp, Homo sapiens
acttgcctcgttata

SEQ ID NO: 1939473 - DNA, 15 bp, Homo sapiens
cttgcctcgttatat

SEQ ID NO: 1939474 - DNA, 15 bp, Homo sapiens
ttgcctcgttatata

SEQ ID NO: 1939475 - DNA, 15 bp, Homo sapiens
tgcctcgttatatag

SEQ ID NO: 1939476 - DNA, 15 bp, Homo sapiens
gcctcgttatatagc

SEQ ID NO: 1939477 - DNA, 15 bp, Homo sapiens
cctcgttatatagct

SEQ ID NO: 1939478 - DNA, 15 bp, Homo sapiens
ctcgttatatagctt

SEQ ID NO: 1939479 - DNA, 15 bp, Homo sapiens
tcgttatatagcttt

SEQ ID NO: 1939480 - DNA, 15 bp, Homo sapiens
cgttatatagctttt

SEQ ID NO: 1939481 - DNA, 15 bp, Homo sapiens
gttatatagcttttt

SEQ ID NO: 1939482 - DNA, 15 bp, Homo sapiens
ttatatagcttttta

SEQ ID NO: 1939483 - DNA, 15 bp, Homo sapiens
tatatagctttttat

SEQ ID NO: 1939484 - DNA, 15 bp, Homo sapiens
atatagctttttata

SEQ ID NO: 1939485 - DNA, 15 bp, Homo sapiens
tatagctttttataa

SEQ ID NO: 1939486 - DNA, 15 bp, Homo sapiens
atagctttttataag

SEQ ID NO: 1939487 - DNA, 15 bp, Homo sapiens
tagctttttataagt

SEQ ID NO: 1939488 - DNA, 15 bp, Homo sapiens
agctttttataagtt

SEQ ID NO: 1939489 - DNA, 15 bp, Homo sapiens
gctttttataagttg

SEQ ID NO: 1939490 - DNA, 15 bp, Homo sapiens
ctttttataagttga

SEQ ID NO: 1939491 - DNA, 15 bp, Homo sapiens
tttttataagttgac

SEQ ID NO: 1939492 - DNA, 15 bp, Homo sapiens
ttttataagttgaca

SEQ ID NO: 1939493 - DNA, 15 bp, Homo sapiens
tttataagttgacac

SEQ ID NO: 1939494 - DNA, 15 bp, Homo sapiens
ttataagttgacaca

SEQ ID NO: 1939495 - DNA, 15 bp, Homo sapiens
tataagttgacacat

SEQ ID NO: 1939496 - DNA, 15 bp, Homo sapiens
ataagttgacacatt

SEQ ID NO: 1939497 - DNA, 15 bp, Homo sapiens
taagttgacacattt

SEQ ID NO: 1939498 - DNA, 15 bp, Homo sapiens
aagttgacacatttt

SEQ ID NO: 1939499 - DNA, 15 bp, Homo sapiens
agttgacacattttg

SEQ ID NO: 1939500 - DNA, 15 bp, Homo sapiens
gttgacacattttgt

SEQ ID NO: 1939501 - DNA, 15 bp, Homo sapiens
ttgacacattttgtt

SEQ ID NO: 1939502 - DNA, 15 bp, Homo sapiens
tgacacattttgttt

SEQ ID NO: 1939503 - DNA, 15 bp, Homo sapiens
gacacattttgttta

SEQ ID NO: 1939504 - DNA, 15 bp, Homo sapiens
cacattttgtttatt

SEQ ID NO: 1939505 - DNA, 15 bp, Homo sapiens
acattttgtttattt

SEQ ID NO: 1939506 - DNA, 15 bp, Homo sapiens
cattttgtttattta

SEQ ID NO: 1939507 - DNA, 15 bp, Homo sapiens
attttgtttatttaa

SEQ ID NO: 1939508 - DNA, 15 bp, Homo sapiens
ttttgtttatttaaa

SEQ ID NO: 1939509 - DNA, 15 bp, Homo sapiens
tttgtttatttaaaa

SEQ ID NO: 1939510 - DNA, 15 bp, Homo sapiens
ttgtttatttaaaat

SEQ ID NO: 1939511 - DNA, 15 bp, Homo sapiens
tgtttatttaaaatg

SEQ ID NO: 1939512 - DNA, 15 bp, Homo sapiens
gtttatttaaaatgt

SEQ ID NO: 1939513 - DNA, 15 bp, Homo sapiens
ttatttaaaatgttt

SEQ ID NO: 1939514 - DNA, 15 bp, Homo sapiens
tatttaaaatgtttt

SEQ ID NO: 1939515 - DNA, 15 bp, Homo sapiens
atttaaaatgttttg

SEQ ID NO: 1939516 - DNA, 15 bp, Homo sapiens
tttaaaatgttttgg

SEQ ID NO: 1939517 - DNA, 15 bp, Homo sapiens
ttaaaatgttttggg

SEQ ID NO: 1939518 - DNA, 15 bp, Homo sapiens
taaaatgttttgggc

SEQ ID NO: 1939519 - DNA, 15 bp, Homo sapiens
aaaatgttttgggca

SEQ ID NO: 1939520 - DNA, 15 bp, Homo sapiens
aaatgttttgggcac

SEQ ID NO: 1939521 - DNA, 15 bp, Homo sapiens
aatgttttgggcact

SEQ ID NO: 1939522 - DNA, 15 bp, Homo sapiens
atgttttgggcactt

SEQ ID NO: 1939523 - DNA, 15 bp, Homo sapiens
tgttttgggcactta

SEQ ID NO: 1939524 - DNA, 15 bp, Homo sapiens
gttttgggcacttat

SEQ ID NO: 1939525 - DNA, 15 bp, Homo sapiens
ttttgggcacttatt

SEQ ID NO: 1939526 - DNA, 15 bp, Homo sapiens
tttgggcacttattt

SEQ ID NO: 1939527 - DNA, 15 bp, Homo sapiens
ttgggcacttattta

SEQ ID NO: 1939528 - DNA, 15 bp, Homo sapiens
tgggcacttatttat

SEQ ID NO: 1939529 - DNA, 15 bp, Homo sapiens
gggcacttatttatg

SEQ ID NO: 1939530 - DNA, 15 bp, Homo sapiens
ggcacttatttatga

SEQ ID NO: 1939531 - DNA, 15 bp, Homo sapiens
gcacttatttatgaa

SEQ ID NO: 1939532 - DNA, 15 bp, Homo sapiens
cacttatttatgaat

SEQ ID NO: 1939533 - DNA, 15 bp, Homo sapiens
acttatttatgaatg

SEQ ID NO: 1939534 - DNA, 15 bp, Homo sapiens
cttatttatgaatga

SEQ ID NO: 1939535 - DNA, 15 bp, Homo sapiens
ttatttatgaatgaa

SEQ ID NO: 1939536 - DNA, 15 bp, Homo sapiens
tatttatgaatgaag

SEQ ID NO: 1939537 - DNA, 15 bp, Homo sapiens
atttatgaatgaaga

SEQ ID NO: 1939538 - DNA, 15 bp, Homo sapiens
tttatgaatgaagat

SEQ ID NO: 1939539 - DNA, 15 bp, Homo sapiens
ttatgaatgaagatg

SEQ ID NO: 1939540 - DNA, 15 bp, Homo sapiens
tatgaatgaagatgt

SEQ ID NO: 1939541 - DNA, 15 bp, Homo sapiens
atgaatgaagatgtc

SEQ ID NO: 1939542 - DNA, 15 bp, Homo sapiens
tgaatgaagatgtca

SEQ ID NO: 1939543 - DNA, 15 bp, Homo sapiens
gaatgaagatgtcaa

SEQ ID NO: 1939544 - DNA, 15 bp, Homo sapiens
aatgaagatgtcaag

SEQ ID NO: 1939545 - DNA, 15 bp, Homo sapiens
atgaagatgtcaagt

SEQ ID NO: 1939546 - DNA, 15 bp, Homo sapiens
tgaagatgtcaagtt

SEQ ID NO: 1939547 - DNA, 15 bp, Homo sapiens
gaagatgtcaagttt

SEQ ID NO: 1939548 - DNA, 15 bp, Homo sapiens
aagatgtcaagtttt

SEQ ID NO: 1939549 - DNA, 15 bp, Homo sapiens
agatgtcaagtttta

SEQ ID NO: 1939550 - DNA, 15 bp, Homo sapiens
gatgtcaagttttat

SEQ ID NO: 1939551 - DNA, 15 bp, Homo sapiens
atgtcaagttttatt

SEQ ID NO: 1939552 - DNA, 15 bp, Homo sapiens
tgtcaagttttattt

SEQ ID NO: 1939553 - DNA, 15 bp, Homo sapiens
gtcaagttttatttc

SEQ ID NO: 1939554 - DNA, 15 bp, Homo sapiens
tcaagttttatttcc

SEQ ID NO: 1939555 - DNA, 15 bp, Homo sapiens
caagttttatttcct

SEQ ID NO: 1939556 - DNA, 15 bp, Homo sapiens
aagttttatttcctt

SEQ ID NO: 1939557 - DNA, 15 bp, Homo sapiens
agttttatttccttt

SEQ ID NO: 1939558 - DNA, 15 bp, Homo sapiens
gttttatttcctttg

SEQ ID NO: 1939559 - DNA, 15 bp, Homo sapiens
ttttatttcctttgg

SEQ ID NO: 1939560 - DNA, 15 bp, Homo sapiens
tttatttcctttggg

SEQ ID NO: 1939561 - DNA, 15 bp, Homo sapiens
ttatttcctttgggt

SEQ ID NO: 1939562 - DNA, 15 bp, Homo sapiens
tatttcctttgggtt

SEQ ID NO: 1939563 - DNA, 15 bp, Homo sapiens
atttcctttgggttt

SEQ ID NO: 1939564 - DNA, 15 bp, Homo sapiens
tttcctttgggttta

SEQ ID NO: 1939565 - DNA, 15 bp, Homo sapiens
ttcctttgggtttaa

SEQ ID NO: 1939566 - DNA, 15 bp, Homo sapiens
tcctttgggtttaaa

SEQ ID NO: 1939567 - DNA, 15 bp, Homo sapiens
cctttgggtttaaat

SEQ ID NO: 1939568 - DNA, 15 bp, Homo sapiens
ctttgggtttaaatt

SEQ ID NO: 1939569 - DNA, 15 bp, Homo sapiens
tttgggtttaaattt

SEQ ID NO: 1939570 - DNA, 15 bp, Homo sapiens
ttgggtttaaatttt

SEQ ID NO: 1939571 - DNA, 15 bp, Homo sapiens
tgggtttaaattttt

SEQ ID NO: 1939572 - DNA, 15 bp, Homo sapiens
gggtttaaatttttt

SEQ ID NO: 1939573 - DNA, 15 bp, Homo sapiens
ggtttaaattttttt

SEQ ID NO: 1939574 - DNA, 15 bp, Homo sapiens
gtttaaatttttttt

SEQ ID NO: 1939575 - DNA, 15 bp, Homo sapiens
tttaaattttttttc

SEQ ID NO: 1939576 - DNA, 15 bp, Homo sapiens
ttaaattttttttca

SEQ ID NO: 1939577 - DNA, 15 bp, Homo sapiens
taaattttttttcag

SEQ ID NO: 1939578 - DNA, 15 bp, Homo sapiens
aaattttttttcagt

SEQ ID NO: 1939579 - DNA, 15 bp, Homo sapiens
aattttttttcagtc

SEQ ID NO: 1939580 - DNA, 15 bp, Homo sapiens
attttttttcagtcc

SEQ ID NO: 1939581 - DNA, 15 bp, Homo sapiens
ttttttttcagtcct

SEQ ID NO: 1939582 - DNA, 15 bp, Homo sapiens
tttttttcagtcctt

SEQ ID NO: 1939583 - DNA, 15 bp, Homo sapiens
ttttttcagtcctta

SEQ ID NO: 1939584 - DNA, 15 bp, Homo sapiens
tttttcagtccttag

SEQ ID NO: 1939585 - DNA, 15 bp, Homo sapiens
ttttcagtccttagc

SEQ ID NO: 1939586 - DNA, 15 bp, Homo sapiens
tttcagtccttagca

SEQ ID NO: 1939587 - DNA, 15 bp, Homo sapiens
ttcagtccttagcag

SEQ ID NO: 1939588 - DNA, 15 bp, Homo sapiens
tcagtccttagcaga

SEQ ID NO: 1939589 - DNA, 15 bp, Homo sapiens
cagtccttagcagaa

SEQ ID NO: 1939590 - DNA, 15 bp, Homo sapiens
agtccttagcagaat

SEQ ID NO: 1939591 - DNA, 15 bp, Homo sapiens
gtccttagcagaatt

SEQ ID NO: 1939592 - DNA, 15 bp, Homo sapiens
tccttagcagaattt

SEQ ID NO: 1939593 - DNA, 15 bp, Homo sapiens
ccttagcagaatttc

SEQ ID NO: 1939594 - DNA, 15 bp, Homo sapiens
cttagcagaatttca

SEQ ID NO: 1939595 - DNA, 15 bp, Homo sapiens
ttagcagaatttcaa

SEQ ID NO: 1939596 - DNA, 15 bp, Homo sapiens
tagcagaatttcaat

SEQ ID NO: 1939597 - DNA, 15 bp, Homo sapiens
agcagaatttcaatt

SEQ ID NO: 1939598 - DNA, 15 bp, Homo sapiens
gcagaatttcaattc

SEQ ID NO: 1939599 - DNA, 15 bp, Homo sapiens
cagaatttcaattca

SEQ ID NO: 1939600 - DNA, 15 bp, Homo sapiens
agaatttcaattcag

SEQ ID NO: 1939601 - DNA, 15 bp, Homo sapiens
gaatttcaattcagt

SEQ ID NO: 1939602 - DNA, 15 bp, Homo sapiens
aatttcaattcagtt

SEQ ID NO: 1939603 - DNA, 15 bp, Homo sapiens
atttcaattcagttt

SEQ ID NO: 1939604 - DNA, 15 bp, Homo sapiens
ttcaattcagtttag

SEQ ID NO: 1939605 - DNA, 15 bp, Homo sapiens
tcaattcagtttagt

SEQ ID NO: 1939606 - DNA, 15 bp, Homo sapiens
caattcagtttagtt

SEQ ID NO: 1939607 - DNA, 15 bp, Homo sapiens
aattcagtttagttc

SEQ ID NO: 1939608 - DNA, 15 bp, Homo sapiens
attcagtttagttcc

SEQ ID NO: 1939609 - DNA, 15 bp, Homo sapiens
ttcagtttagttcct

SEQ ID NO: 1939610 - DNA, 15 bp, Homo sapiens
tcagtttagttccta

SEQ ID NO: 1939611 - DNA, 15 bp, Homo sapiens
cagtttagttcctag

SEQ ID NO: 1939612 - DNA, 15 bp, Homo sapiens
agtttagttcctaga

SEQ ID NO: 1939613 - DNA, 15 bp, Homo sapiens
gtttagttcctagat

SEQ ID NO: 1939614 - DNA, 15 bp, Homo sapiens
tttagttcctagatc

SEQ ID NO: 1939615 - DNA, 15 bp, Homo sapiens
ttagttcctagatca

SEQ ID NO: 1939616 - DNA, 15 bp, Homo sapiens
tagttcctagatcag

SEQ ID NO: 1939617 - DNA, 15 bp, Homo sapiens
agttcctagatcagc

SEQ ID NO: 1939618 - DNA, 15 bp, Homo sapiens
gttcctagatcagca

SEQ ID NO: 1939619 - DNA, 15 bp, Homo sapiens
ttcctagatcagcag

SEQ ID NO: 1939620 - DNA, 15 bp, Homo sapiens
tcctagatcagcagt

SEQ ID NO: 1939621 - DNA, 15 bp, Homo sapiens
cctagatcagcagta

SEQ ID NO: 1939622 - DNA, 15 bp, Homo sapiens
ctagatcagcagtac

SEQ ID NO: 1939623 - DNA, 15 bp, Homo sapiens
tagatcagcagtaca

SEQ ID NO: 1939624 - DNA, 15 bp, Homo sapiens
agatcagcagtacat

SEQ ID NO: 1939625 - DNA, 15 bp, Homo sapiens
gatcagcagtacatt

SEQ ID NO: 1939626 - DNA, 15 bp, Homo sapiens
atcagcagtacattt

SEQ ID NO: 1939627 - DNA, 15 bp, Homo sapiens
tcagcagtacattta

SEQ ID NO: 1939628 - DNA, 15 bp, Homo sapiens
cagcagtacatttat

SEQ ID NO: 1939629 - DNA, 15 bp, Homo sapiens
agcagtacatttata

SEQ ID NO: 1939630 - DNA, 15 bp, Homo sapiens
gcagtacatttatat

SEQ ID NO: 1939631 - DNA, 15 bp, Homo sapiens
cagtacatttatatt

SEQ ID NO: 1939632 - DNA, 15 bp, Homo sapiens
agtacatttatatta

SEQ ID NO: 1939633 - DNA, 15 bp, Homo sapiens
gtacatttatattac

SEQ ID NO: 1939634 - DNA, 15 bp, Homo sapiens
tacatttatattaca

SEQ ID NO: 1939635 - DNA, 15 bp, Homo sapiens
acatttatattacaa

SEQ ID NO: 1939636 - DNA, 15 bp, Homo sapiens
catttatattacaat

SEQ ID NO: 1939637 - DNA, 15 bp, Homo sapiens
atttatattacaatt

SEQ ID NO: 1939638 - DNA, 15 bp, Homo sapiens
tttatattacaatta

SEQ ID NO: 1939639 - DNA, 15 bp, Homo sapiens
ttatattacaattac

SEQ ID NO: 1939640 - DNA, 15 bp, Homo sapiens
tatattacaattacc

SEQ ID NO: 1939641 - DNA, 15 bp, Homo sapiens
atattacaattacca

SEQ ID NO: 1939642 - DNA, 15 bp, Homo sapiens
tattacaattaccat

SEQ ID NO: 1939643 - DNA, 15 bp, Homo sapiens
attacaattaccata

SEQ ID NO: 1939644 - DNA, 15 bp, Homo sapiens
ttacaattaccataa

SEQ ID NO: 1939645 - DNA, 15 bp, Homo sapiens
tacaattaccataat

SEQ ID NO: 1939646 - DNA, 15 bp, Homo sapiens
acaattaccataatt

SEQ ID NO: 1939647 - DNA, 15 bp, Homo sapiens
caattaccataatta

SEQ ID NO: 1939648 - DNA, 15 bp, Homo sapiens
aattaccataattac

SEQ ID NO: 1939649 - DNA, 15 bp, Homo sapiens
attaccataattact

SEQ ID NO: 1939650 - DNA, 15 bp, Homo sapiens
ttaccataattactc

SEQ ID NO: 1939651 - DNA, 15 bp, Homo sapiens
taccataattactca

SEQ ID NO: 1939652 - DNA, 15 bp, Homo sapiens
accataattactcac

SEQ ID NO: 1939653 - DNA, 15 bp, Homo sapiens
ccataattactcaca

SEQ ID NO: 1939654 - DNA, 15 bp, Homo sapiens
cataattactcacag

SEQ ID NO: 1939655 - DNA, 15 bp, Homo sapiens
ataattactcacagt

SEQ ID NO: 1939656 - DNA, 15 bp, Homo sapiens
taattactcacagta

SEQ ID NO: 1939657 - DNA, 15 bp, Homo sapiens
aattactcacagtaa

SEQ ID NO: 1939658 - DNA, 15 bp, Homo sapiens
attactcacagtaaa

SEQ ID NO: 1939659 - DNA, 15 bp, Homo sapiens
ttactcacagtaaaa

SEQ ID NO: 1939660 - DNA, 15 bp, Homo sapiens
tactcacagtaaaat

SEQ ID NO: 1939661 - DNA, 15 bp, Homo sapiens
actcacagtaaaata

SEQ ID NO: 1939662 - DNA, 15 bp, Homo sapiens
ctcacagtaaaatac

SEQ ID NO: 1939663 - DNA, 15 bp, Homo sapiens
tcacagtaaaatact

SEQ ID NO: 1939664 - DNA, 15 bp, Homo sapiens
cacagtaaaatactg

SEQ ID NO: 1939665 - DNA, 15 bp, Homo sapiens
acagtaaaatactga

SEQ ID NO: 1939666 - DNA, 15 bp, Homo sapiens
cagtaaaatactgaa

SEQ ID NO: 1939667 - DNA, 15 bp, Homo sapiens
agtaaaatactgaac

SEQ ID NO: 1939668 - DNA, 15 bp, Homo sapiens
gtaaaatactgaaca

SEQ ID NO: 1939669 - DNA, 15 bp, Homo sapiens
taaaatactgaacag

SEQ ID NO: 1939670 - DNA, 15 bp, Homo sapiens
aaaatactgaacaga

SEQ ID NO: 1939671 - DNA, 15 bp, Homo sapiens
aaatactgaacagaa

SEQ ID NO: 1939672 - DNA, 15 bp, Homo sapiens
aatactgaacagaat

SEQ ID NO: 1939673 - DNA, 15 bp, Homo sapiens
atactgaacagaata

SEQ ID NO: 1939674 - DNA, 15 bp, Homo sapiens
tactgaacagaatag

SEQ ID NO: 1939675 - DNA, 15 bp, Homo sapiens
actgaacagaatagt

SEQ ID NO: 1939676 - DNA, 15 bp, Homo sapiens
ctgaacagaatagtt

SEQ ID NO: 1939677 - DNA, 15 bp, Homo sapiens
tgaacagaatagttt

SEQ ID NO: 1939678 - DNA, 15 bp, Homo sapiens
gaacagaatagtttt

SEQ ID NO: 1939679 - DNA, 15 bp, Homo sapiens
aacagaatagttttt

SEQ ID NO: 1939680 - DNA, 15 bp, Homo sapiens
acagaatagttttta

SEQ ID NO: 1939681 - DNA, 15 bp, Homo sapiens
cagaatagtttttaa

SEQ ID NO: 1939682 - DNA, 15 bp, Homo sapiens
agaatagtttttaac

SEQ ID NO: 1939683 - DNA, 15 bp, Homo sapiens
gaatagtttttaaca

SEQ ID NO: 1939684 - DNA, 15 bp, Homo sapiens
aatagtttttaacat

SEQ ID NO: 1939685 - DNA, 15 bp, Homo sapiens
atagtttttaacatt

SEQ ID NO: 1939686 - DNA, 15 bp, Homo sapiens
tagtttttaacattg

SEQ ID NO: 1939687 - DNA, 15 bp, Homo sapiens
agtttttaacattgc

SEQ ID NO: 1939688 - DNA, 15 bp, Homo sapiens
gtttttaacattgca

SEQ ID NO: 1939689 - DNA, 15 bp, Homo sapiens
tttttaacattgcat

SEQ ID NO: 1939690 - DNA, 15 bp, Homo sapiens
ttttaacattgcata

SEQ ID NO: 1939691 - DNA, 15 bp, Homo sapiens
tttaacattgcatat

SEQ ID NO: 1939692 - DNA, 15 bp, Homo sapiens
ttaacattgcatatg

SEQ ID NO: 1939693 - DNA, 15 bp, Homo sapiens
taacattgcatatgt

SEQ ID NO: 1939694 - DNA, 15 bp, Homo sapiens
aacattgcatatgtt

SEQ ID NO: 1939695 - DNA, 15 bp, Homo sapiens
acattgcatatgttt

SEQ ID NO: 1939696 - DNA, 15 bp, Homo sapiens
cattgcatatgtttc

SEQ ID NO: 1939697 - DNA, 15 bp, Homo sapiens
attgcatatgtttcc

SEQ ID NO: 1939698 - DNA, 15 bp, Homo sapiens
ttgcatatgtttcca

SEQ ID NO: 1939699 - DNA, 15 bp, Homo sapiens
tgcatatgtttccaa

SEQ ID NO: 1939700 - DNA, 15 bp, Homo sapiens
gcatatgtttccaac

SEQ ID NO: 1939701 - DNA, 15 bp, Homo sapiens
catatgtttccaacc

SEQ ID NO: 1939702 - DNA, 15 bp, Homo sapiens
atatgtttccaacca

SEQ ID NO: 1939703 - DNA, 15 bp, Homo sapiens
tatgtttccaaccat

SEQ ID NO: 1939704 - DNA, 15 bp, Homo sapiens
atgtttccaaccatt

SEQ ID NO: 1939705 - DNA, 15 bp, Homo sapiens
tgtttccaaccattc

SEQ ID NO: 1939706 - DNA, 15 bp, Homo sapiens
gtttccaaccattcc

SEQ ID NO: 1939707 - DNA, 15 bp, Homo sapiens
tttccaaccattcct

SEQ ID NO: 1939708 - DNA, 15 bp, Homo sapiens
ttccaaccattcctc

SEQ ID NO: 1939709 - DNA, 15 bp, Homo sapiens
tccaaccattcctca

SEQ ID NO: 1939710 - DNA, 15 bp, Homo sapiens
ccaaccattcctcat

SEQ ID NO: 1939711 - DNA, 15 bp, Homo sapiens
caaccattcctcatg

SEQ ID NO: 1939712 - DNA, 15 bp, Homo sapiens
aaccattcctcatgc

SEQ ID NO: 1939713 - DNA, 15 bp, Homo sapiens
accattcctcatgct

SEQ ID NO: 1939714 - DNA, 15 bp, Homo sapiens
ccattcctcatgctg

SEQ ID NO: 1939715 - DNA, 15 bp, Homo sapiens
cattcctcatgctga

SEQ ID NO: 1939716 - DNA, 15 bp, Homo sapiens
attcctcatgctgag

SEQ ID NO: 1939717 - DNA, 15 bp, Homo sapiens
ttcctcatgctgagc

SEQ ID NO: 1939718 - DNA, 15 bp, Homo sapiens
tcctcatgctgagcc

SEQ ID NO: 1939719 - DNA, 15 bp, Homo sapiens
cctcatgctgagcct

SEQ ID NO: 1939720 - DNA, 15 bp, Homo sapiens
ctcatgctgagcctt

SEQ ID NO: 1939721 - DNA, 15 bp, Homo sapiens
tcatgctgagcctta

SEQ ID NO: 1939722 - DNA, 15 bp, Homo sapiens
catgctgagccttag

SEQ ID NO: 1939723 - DNA, 15 bp, Homo sapiens
atgctgagccttagg

SEQ ID NO: 1939724 - DNA, 15 bp, Homo sapiens
tgctgagccttaggt

SEQ ID NO: 1939725 - DNA, 15 bp, Homo sapiens
gctgagccttaggta

SEQ ID NO: 1939726 - DNA, 15 bp, Homo sapiens
ctgagccttaggtat

SEQ ID NO: 1939727 - DNA, 15 bp, Homo sapiens
tgagccttaggtatt

SEQ ID NO: 1939728 - DNA, 15 bp, Homo sapiens
gagccttaggtattc

SEQ ID NO: 1939729 - DNA, 15 bp, Homo sapiens
agccttaggtattct

SEQ ID NO: 1939730 - DNA, 15 bp, Homo sapiens
gccttaggtattctc

SEQ ID NO: 1939731 - DNA, 15 bp, Homo sapiens
ccttaggtattctct

SEQ ID NO: 1939732 - DNA, 15 bp, Homo sapiens
cttaggtattctcta

SEQ ID NO: 1939733 - DNA, 15 bp, Homo sapiens
ttaggtattctctac

SEQ ID NO: 1939734 - DNA, 15 bp, Homo sapiens
taggtattctctaca

SEQ ID NO: 1939735 - DNA, 15 bp, Homo sapiens
aggtattctctacaa

SEQ ID NO: 1939736 - DNA, 15 bp, Homo sapiens
ggtattctctacaac

SEQ ID NO: 1939737 - DNA, 15 bp, Homo sapiens
gtattctctacaaca

SEQ ID NO: 1939738 - DNA, 15 bp, Homo sapiens
tattctctacaacac

SEQ ID NO: 1939739 - DNA, 15 bp, Homo sapiens
attctctacaacaca

SEQ ID NO: 1939740 - DNA, 15 bp, Homo sapiens
ttctctacaacacat

SEQ ID NO: 1939741 - DNA, 15 bp, Homo sapiens
tctctacaacacata

SEQ ID NO: 1939742 - DNA, 15 bp, Homo sapiens
ctctacaacacataa

SEQ ID NO: 1939743 - DNA, 15 bp, Homo sapiens
tctacaacacataaa

SEQ ID NO: 1939744 - DNA, 15 bp, Homo sapiens
ctacaacacataaat

SEQ ID NO: 1939745 - DNA, 15 bp, Homo sapiens
tacaacacataaatt

SEQ ID NO: 1939746 - DNA, 15 bp, Homo sapiens
acaacacataaatta

SEQ ID NO: 1939747 - DNA, 15 bp, Homo sapiens
caacacataaattaa

SEQ ID NO: 1939748 - DNA, 15 bp, Homo sapiens
aacacataaattaat

SEQ ID NO: 1939749 - DNA, 15 bp, Homo sapiens
acacataaattaatg

SEQ ID NO: 1939750 - DNA, 15 bp, Homo sapiens
cacataaattaatgt

SEQ ID NO: 1939751 - DNA, 15 bp, Homo sapiens
acataaattaatgtg

SEQ ID NO: 1939752 - DNA, 15 bp, Homo sapiens
cataaattaatgtgt

SEQ ID NO: 1939753 - DNA, 15 bp, Homo sapiens
ataaattaatgtgta

SEQ ID NO: 1939754 - DNA, 15 bp, Homo sapiens
taaattaatgtgtaa

SEQ ID NO: 1939755 - DNA, 15 bp, Homo sapiens
aaattaatgtgtaaa

SEQ ID NO: 1939756 - DNA, 15 bp, Homo sapiens
aattaatgtgtaaaa

SEQ ID NO: 1939757 - DNA, 15 bp, Homo sapiens
attaatgtgtaaaaa

SEQ ID NO: 1939758 - DNA, 15 bp, Homo sapiens
ttaatgtgtaaaaaa

SEQ ID NO: 1939759 - DNA, 15 bp, Homo sapiens
taatgtgtaaaaaat

SEQ ID NO: 1939760 - DNA, 15 bp, Homo sapiens
aatgtgtaaaaaatt

SEQ ID NO: 1939761 - DNA, 15 bp, Homo sapiens
atgtgtaaaaaattg

SEQ ID NO: 1939762 - DNA, 15 bp, Homo sapiens
tgtgtaaaaaattgt

SEQ ID NO: 1939763 - DNA, 15 bp, Homo sapiens
gtgtaaaaaattgta

SEQ ID NO: 1939764 - DNA, 15 bp, Homo sapiens
tgtaaaaaattgtac

SEQ ID NO: 1939765 - DNA, 15 bp, Homo sapiens
gtaaaaaattgtact

SEQ ID NO: 1939766 - DNA, 15 bp, Homo sapiens
taaaaaattgtactt

SEQ ID NO: 1939767 - DNA, 15 bp, Homo sapiens
aaaaaattgtacttg

SEQ ID NO: 1939768 - DNA, 15 bp, Homo sapiens
aaaaattgtacttgt

SEQ ID NO: 1939769 - DNA, 15 bp, Homo sapiens
aaaattgtacttgtg

SEQ ID NO: 1939770 - DNA, 15 bp, Homo sapiens
aaattgtacttgtga

SEQ ID NO: 1939771 - DNA, 15 bp, Homo sapiens
aattgtacttgtgag

SEQ ID NO: 1939772 - DNA, 15 bp, Homo sapiens
attgtacttgtgagt

SEQ ID NO: 1939773 - DNA, 15 bp, Homo sapiens
ttgtacttgtgagtt

SEQ ID NO: 1939774 - DNA, 15 bp, Homo sapiens
tgtacttgtgagttg

SEQ ID NO: 1939775 - DNA, 15 bp, Homo sapiens
gtacttgtgagttgt

SEQ ID NO: 1939776 - DNA, 15 bp, Homo sapiens
tacttgtgagttgta

SEQ ID NO: 1939777 - DNA, 15 bp, Homo sapiens
acttgtgagttgtaa

SEQ ID NO: 1939778 - DNA, 15 bp, Homo sapiens
cttgtgagttgtaat

SEQ ID NO: 1939779 - DNA, 15 bp, Homo sapiens
ttgtgagttgtaata

SEQ ID NO: 1939780 - DNA, 15 bp, Homo sapiens
tgtgagttgtaatat

SEQ ID NO: 1939781 - DNA, 15 bp, Homo sapiens
gtgagttgtaatatc

SEQ ID NO: 1939782 - DNA, 15 bp, Homo sapiens
tgagttgtaatatcc

SEQ ID NO: 1939783 - DNA, 15 bp, Homo sapiens
gagttgtaatatcct

SEQ ID NO: 1939784 - DNA, 15 bp, Homo sapiens
agttgtaatatcctc

SEQ ID NO: 1939785 - DNA, 15 bp, Homo sapiens
gttgtaatatcctct

SEQ ID NO: 1939786 - DNA, 15 bp, Homo sapiens
ttgtaatatcctctt

SEQ ID NO: 1939787 - DNA, 15 bp, Homo sapiens
tgtaatatcctcttc

SEQ ID NO: 1939788 - DNA, 15 bp, Homo sapiens
gtaatatcctcttct

SEQ ID NO: 1939789 - DNA, 15 bp, Homo sapiens
taatatcctcttcta

SEQ ID NO: 1939790 - DNA, 15 bp, Homo sapiens
aatatcctcttctat

SEQ ID NO: 1939791 - DNA, 15 bp, Homo sapiens
atatcctcttctatt

SEQ ID NO: 1939792 - DNA, 15 bp, Homo sapiens
tatcctcttctattc

SEQ ID NO: 1939793 - DNA, 15 bp, Homo sapiens
atcctcttctattct

SEQ ID NO: 1939794 - DNA, 15 bp, Homo sapiens
tcctcttctattctt

SEQ ID NO: 1939795 - DNA, 15 bp, Homo sapiens
cctcttctattcttt

SEQ ID NO: 1939796 - DNA, 15 bp, Homo sapiens
ctcttctattctttt

SEQ ID NO: 1939797 - DNA, 15 bp, Homo sapiens
tcttctattctttta

SEQ ID NO: 1939798 - DNA, 15 bp, Homo sapiens
cttctattcttttaa

SEQ ID NO: 1939799 - DNA, 15 bp, Homo sapiens
ttctattcttttaaa

SEQ ID NO: 1939800 - DNA, 15 bp, Homo sapiens
tctattcttttaaaa

SEQ ID NO: 1939801 - DNA, 15 bp, Homo sapiens
ctattcttttaaaat

SEQ ID NO: 1939802 - DNA, 15 bp, Homo sapiens
tattcttttaaaata

SEQ ID NO: 1939803 - DNA, 15 bp, Homo sapiens
attcttttaaaataa

SEQ ID NO: 1939804 - DNA, 15 bp, Homo sapiens
ttcttttaaaataac

SEQ ID NO: 1939805 - DNA, 15 bp, Homo sapiens
tcttttaaaataacc

SEQ ID NO: 1939806 - DNA, 15 bp, Homo sapiens
cttttaaaataacca

SEQ ID NO: 1939807 - DNA, 15 bp, Homo sapiens
ttttaaaataaccaa

SEQ ID NO: 1939808 - DNA, 15 bp, Homo sapiens
tttaaaataaccaat

SEQ ID NO: 1939809 - DNA, 15 bp, Homo sapiens
ttaaaataaccaata

SEQ ID NO: 1939810 - DNA, 15 bp, Homo sapiens
taaaataaccaatat

SEQ ID NO: 1939811 - DNA, 15 bp, Homo sapiens
aaaataaccaatata

SEQ ID NO: 1939812 - DNA, 15 bp, Homo sapiens
aaataaccaatataa

SEQ ID NO: 1939813 - DNA, 15 bp, Homo sapiens
aataaccaatataat

SEQ ID NO: 1939814 - DNA, 15 bp, Homo sapiens
ataaccaatataata

SEQ ID NO: 1939815 - DNA, 15 bp, Homo sapiens
taaccaatataatac

SEQ ID NO: 1939816 - DNA, 15 bp, Homo sapiens
aaccaatataatact

SEQ ID NO: 1939817 - DNA, 15 bp, Homo sapiens
accaatataatactt

SEQ ID NO: 1939818 - DNA, 15 bp, Homo sapiens
ccaatataatacttg

SEQ ID NO: 1939819 - DNA, 15 bp, Homo sapiens
caatataatacttgt

SEQ ID NO: 1939820 - DNA, 15 bp, Homo sapiens
aatataatacttgta

SEQ ID NO: 1939821 - DNA, 15 bp, Homo sapiens
atataatacttgtaa

SEQ ID NO: 1939822 - DNA, 15 bp, Homo sapiens
tataatacttgtaaa

SEQ ID NO: 1939823 - DNA, 15 bp, Homo sapiens
ataatacttgtaaat

SEQ ID NO: 1939824 - DNA, 15 bp, Homo sapiens
taatacttgtaaatc

SEQ ID NO: 1939825 - DNA, 15 bp, Homo sapiens
aatacttgtaaatca

SEQ ID NO: 1939826 - DNA, 15 bp, Homo sapiens
atacttgtaaatcat

SEQ ID NO: 1939827 - DNA, 15 bp, Homo sapiens
tacttgtaaatcatt

SEQ ID NO: 1939828 - DNA, 15 bp, Homo sapiens
acttgtaaatcattg

SEQ ID NO: 1939829 - DNA, 15 bp, Homo sapiens
cttgtaaatcattgt

SEQ ID NO: 1939830 - DNA, 15 bp, Homo sapiens
ttgtaaatcattgtg

SEQ ID NO: 1939831 - DNA, 15 bp, Homo sapiens
tgtaaatcattgtgt

SEQ ID NO: 1939832 - DNA, 15 bp, Homo sapiens
gtaaatcattgtgtt

SEQ ID NO: 1939833 - DNA, 15 bp, Homo sapiens
taaatcattgtgttt

SEQ ID NO: 1939834 - DNA, 15 bp, Homo sapiens
aaatcattgtgttta

SEQ ID NO: 1939835 - DNA, 15 bp, Homo sapiens
aatcattgtgtttat

SEQ ID NO: 1939836 - DNA, 15 bp, Homo sapiens
atcattgtgtttatt

SEQ ID NO: 1939837 - DNA, 15 bp, Homo sapiens
tcattgtgtttatta

SEQ ID NO: 1939838 - DNA, 15 bp, Homo sapiens
cattgtgtttattaa

SEQ ID NO: 1939839 - DNA, 15 bp, Homo sapiens
attgtgtttattaag

SEQ ID NO: 1939840 - DNA, 15 bp, Homo sapiens
ttgtgtttattaagt

SEQ ID NO: 1939841 - DNA, 15 bp, Homo sapiens
tgtgtttattaagtt

SEQ ID NO: 1939842 - DNA, 15 bp, Homo sapiens
gtgtttattaagtta

SEQ ID NO: 1939843 - DNA, 15 bp, Homo sapiens
tgtttattaagttat

SEQ ID NO: 1939844 - DNA, 15 bp, Homo sapiens
gtttattaagttatt

SEQ ID NO: 1939845 - DNA, 15 bp, Homo sapiens
tttattaagttattt

SEQ ID NO: 1939846 - DNA, 15 bp, Homo sapiens
ttattaagttattta

SEQ ID NO: 1939847 - DNA, 15 bp, Homo sapiens
tattaagttatttaa

SEQ ID NO: 1939848 - DNA, 15 bp, Homo sapiens
attaagttatttaat

SEQ ID NO: 1939849 - DNA, 15 bp, Homo sapiens
ttaagttatttaatt

SEQ ID NO: 1939850 - DNA, 15 bp, Homo sapiens
taagttatttaattc

SEQ ID NO: 1939851 - DNA, 15 bp, Homo sapiens
aagttatttaattct

SEQ ID NO: 1939852 - DNA, 15 bp, Homo sapiens
agttatttaattctg

SEQ ID NO: 1939853 - DNA, 15 bp, Homo sapiens
gttatttaattctgt

SEQ ID NO: 1939854 - DNA, 15 bp, Homo sapiens
ttatttaattctgtg

SEQ ID NO: 1939855 - DNA, 15 bp, Homo sapiens
tatttaattctgtgg

SEQ ID NO: 1939856 - DNA, 15 bp, Homo sapiens
atttaattctgtggc

SEQ ID NO: 1939857 - DNA, 15 bp, Homo sapiens
tttaattctgtggcc

SEQ ID NO: 1939858 - DNA, 15 bp, Homo sapiens
ttaattctgtggcca

SEQ ID NO: 1939859 - DNA, 15 bp, Homo sapiens
taattctgtggccat

SEQ ID NO: 1939860 - DNA, 15 bp, Homo sapiens
aattctgtggccatt

SEQ ID NO: 1939861 - DNA, 15 bp, Homo sapiens
attctgtggccattt

SEQ ID NO: 1939862 - DNA, 15 bp, Homo sapiens
ttctgtggccatttt

SEQ ID NO: 1939863 - DNA, 15 bp, Homo sapiens
tctgtggccattttt

SEQ ID NO: 1939864 - DNA, 15 bp, Homo sapiens
ctgtggccattttta

SEQ ID NO: 1939865 - DNA, 15 bp, Homo sapiens
tgtggccatttttat

SEQ ID NO: 1939866 - DNA, 15 bp, Homo sapiens
gtggccatttttata

SEQ ID NO: 1939867 - DNA, 15 bp, Homo sapiens
tggccatttttataa

SEQ ID NO: 1939868 - DNA, 15 bp, Homo sapiens
ggccatttttataaa

SEQ ID NO: 1939869 - DNA, 15 bp, Homo sapiens
gccatttttataaat

SEQ ID NO: 1939870 - DNA, 15 bp, Homo sapiens
ccatttttataaata

SEQ ID NO: 1939871 - DNA, 15 bp, Homo sapiens
catttttataaataa

SEQ ID NO: 1939872 - DNA, 15 bp, Homo sapiens
atttttataaataaa

SEQ ID NO: 1939873 - DNA, 15 bp, Homo sapiens
tttttataaataaac

SEQ ID NO: 1939874 - DNA, 15 bp, Homo sapiens
ttttataaataaact

SEQ ID NO: 1939875 - DNA, 15 bp, Homo sapiens
tttataaataaacta

SEQ ID NO: 1939876 - DNA, 15 bp, Homo sapiens
ttataaataaactag

SEQ ID NO: 1939877 - DNA, 15 bp, Homo sapiens
tataaataaactagg

SEQ ID NO: 1939878 - DNA, 15 bp, Homo sapiens
ataaataaactagga

SEQ ID NO: 1939879 - DNA, 15 bp, Homo sapiens
taaataaactaggat

SEQ ID NO: 1939880 - DNA, 15 bp, Homo sapiens
aaataaactaggata

SEQ ID NO: 1939881 - DNA, 15 bp, Homo sapiens
aataaactaggatac

SEQ ID NO: 1939882 - DNA, 15 bp, Homo sapiens
ataaactaggataca

SEQ ID NO: 1939883 - DNA, 15 bp, Homo sapiens
taaactaggatacat

SEQ ID NO: 1939884 - DNA, 15 bp, Homo sapiens
aaactaggatacatt

SEQ ID NO: 1939885 - DNA, 15 bp, Homo sapiens
aactaggatacattt

SEQ ID NO: 1939886 - DNA, 15 bp, Homo sapiens
actaggatacattta

SEQ ID NO: 1939887 - DNA, 15 bp, Homo sapiens
ctaggatacatttat

SEQ ID NO: 1939888 - DNA, 15 bp, Homo sapiens
taggatacatttatt

SEQ ID NO: 1939889 - DNA, 15 bp, Homo sapiens
aggatacatttattt

SEQ ID NO: 1939890 - DNA, 15 bp, Homo sapiens
ggatacatttatttt

SEQ ID NO: 1939891 - DNA, 15 bp, Homo sapiens
gatacatttatttta

SEQ ID NO: 1939892 - DNA, 15 bp, Homo sapiens
atacatttattttaa

SEQ ID NO: 1939893 - DNA, 15 bp, Homo sapiens
tacatttattttaag

SEQ ID NO: 1939894 - DNA, 15 bp, Homo sapiens
acatttattttaagt

SEQ ID NO: 1939895 - DNA, 15 bp, Homo sapiens
catttattttaagta

SEQ ID NO: 1939896 - DNA, 15 bp, Homo sapiens
atttattttaagtaa

SEQ ID NO: 1939897 - DNA, 15 bp, Homo sapiens
tttattttaagtaag

SEQ ID NO: 1939898 - DNA, 15 bp, Homo sapiens
ttattttaagtaagt

SEQ ID NO: 1939899 - DNA, 15 bp, Homo sapiens
tattttaagtaagtg

SEQ ID NO: 1939900 - DNA, 15 bp, Homo sapiens
attttaagtaagtgc

SEQ ID NO: 1939901 - DNA, 15 bp, Homo sapiens
ttttaagtaagtgct

SEQ ID NO: 1939902 - DNA, 15 bp, Homo sapiens
tttaagtaagtgctt

SEQ ID NO: 1939903 - DNA, 15 bp, Homo sapiens
ttaagtaagtgcttt

SEQ ID NO: 1939904 - DNA, 15 bp, Homo sapiens
taagtaagtgctttc

SEQ ID NO: 1939905 - DNA, 15 bp, Homo sapiens
aagtaagtgctttct

SEQ ID NO: 1939906 - DNA, 15 bp, Homo sapiens
agtaagtgctttctt

SEQ ID NO: 1939907 - DNA, 15 bp, Homo sapiens
gtaagtgctttcttg

SEQ ID NO: 1939908 - DNA, 15 bp, Homo sapiens
taagtgctttcttga

SEQ ID NO: 1939909 - DNA, 15 bp, Homo sapiens
aagtgctttcttgag

SEQ ID NO: 1939910 - DNA, 15 bp, Homo sapiens
agtgctttcttgagt

SEQ ID NO: 1939911 - DNA, 15 bp, Homo sapiens
gtgctttcttgagta

SEQ ID NO: 1939912 - DNA, 15 bp, Homo sapiens
tgctttcttgagtac

SEQ ID NO: 1939913 - DNA, 15 bp, Homo sapiens
gctttcttgagtact

SEQ ID NO: 1939914 - DNA, 15 bp, Homo sapiens
ctttcttgagtactg

SEQ ID NO: 1939915 - DNA, 15 bp, Homo sapiens
tttcttgagtactgt

SEQ ID NO: 1939916 - DNA, 15 bp, Homo sapiens
ttcttgagtactgta

SEQ ID NO: 1939917 - DNA, 15 bp, Homo sapiens
tcttgagtactgtaa

SEQ ID NO: 1939918 - DNA, 15 bp, Homo sapiens
cttgagtactgtaat

SEQ ID NO: 1939919 - DNA, 15 bp, Homo sapiens
ttgagtactgtaatc

SEQ ID NO: 1939920 - DNA, 15 bp, Homo sapiens
tgagtactgtaatcc

SEQ ID NO: 1939921 - DNA, 15 bp, Homo sapiens
gagtactgtaatcca

SEQ ID NO: 1939922 - DNA, 15 bp, Homo sapiens
agtactgtaatccaa

SEQ ID NO: 1939923 - DNA, 15 bp, Homo sapiens
gtactgtaatccaac

SEQ ID NO: 1939924 - DNA, 15 bp, Homo sapiens
tactgtaatccaaca

SEQ ID NO: 1939925 - DNA, 15 bp, Homo sapiens
actgtaatccaacag

SEQ ID NO: 1939926 - DNA, 15 bp, Homo sapiens
ctgtaatccaacaga

SEQ ID NO: 1939927 - DNA, 15 bp, Homo sapiens
tgtaatccaacagat

SEQ ID NO: 1939928 - DNA, 15 bp, Homo sapiens
gtaatccaacagatt

SEQ ID NO: 1939929 - DNA, 15 bp, Homo sapiens
taatccaacagatta

SEQ ID NO: 1939930 - DNA, 15 bp, Homo sapiens
aatccaacagattag

SEQ ID NO: 1939931 - DNA, 15 bp, Homo sapiens
atccaacagattagg

SEQ ID NO: 1939932 - DNA, 15 bp, Homo sapiens
tccaacagattaggt

SEQ ID NO: 1939933 - DNA, 15 bp, Homo sapiens
ccaacagattaggtt

SEQ ID NO: 1939934 - DNA, 15 bp, Homo sapiens
caacagattaggtta

SEQ ID NO: 1939935 - DNA, 15 bp, Homo sapiens
aacagattaggttac

SEQ ID NO: 1939936 - DNA, 15 bp, Homo sapiens
acagattaggttact

SEQ ID NO: 1939937 - DNA, 15 bp, Homo sapiens
cagattaggttacta

SEQ ID NO: 1939938 - DNA, 15 bp, Homo sapiens
agattaggttactag

SEQ ID NO: 1939939 - DNA, 15 bp, Homo sapiens
gattaggttactaga

SEQ ID NO: 1939940 - DNA, 15 bp, Homo sapiens
attaggttactagat

SEQ ID NO: 1939941 - DNA, 15 bp, Homo sapiens
ttaggttactagatg

SEQ ID NO: 1939942 - DNA, 15 bp, Homo sapiens
taggttactagatgg

SEQ ID NO: 1939943 - DNA, 15 bp, Homo sapiens
aggttactagatggt

SEQ ID NO: 1939944 - DNA, 15 bp, Homo sapiens
ggttactagatggtc

SEQ ID NO: 1939945 - DNA, 15 bp, Homo sapiens
gttactagatggtct

SEQ ID NO: 1939946 - DNA, 15 bp, Homo sapiens
ttactagatggtctc

SEQ ID NO: 1939947 - DNA, 15 bp, Homo sapiens
tactagatggtctct

SEQ ID NO: 1939948 - DNA, 15 bp, Homo sapiens
actagatggtctctt

SEQ ID NO: 1939949 - DNA, 15 bp, Homo sapiens
ctagatggtctcttt

SEQ ID NO: 1939950 - DNA, 15 bp, Homo sapiens
tagatggtctcttta

SEQ ID NO: 1939951 - DNA, 15 bp, Homo sapiens
agatggtctctttat

SEQ ID NO: 1939952 - DNA, 15 bp, Homo sapiens
gatggtctctttata

SEQ ID NO: 1939953 - DNA, 15 bp, Homo sapiens
atggtctctttatac

SEQ ID NO: 1939954 - DNA, 15 bp, Homo sapiens
tggtctctttatact

SEQ ID NO: 1939955 - DNA, 15 bp, Homo sapiens
ggtctctttatactg

SEQ ID NO: 1939956 - DNA, 15 bp, Homo sapiens
gtctctttatactga

SEQ ID NO: 1939957 - DNA, 15 bp, Homo sapiens
tctctttatactgaa

SEQ ID NO: 1939958 - DNA, 15 bp, Homo sapiens
ctctttatactgaag

SEQ ID NO: 1939959 - DNA, 15 bp, Homo sapiens
tctttatactgaagc

SEQ ID NO: 1939960 - DNA, 15 bp, Homo sapiens
ctttatactgaagca

SEQ ID NO: 1939961 - DNA, 15 bp, Homo sapiens
tttatactgaagcac

SEQ ID NO: 1939962 - DNA, 15 bp, Homo sapiens
ttatactgaagcaca

SEQ ID NO: 1939963 - DNA, 15 bp, Homo sapiens
tatactgaagcacat

SEQ ID NO: 1939964 - DNA, 15 bp, Homo sapiens
atactgaagcacatg

SEQ ID NO: 1939965 - DNA, 15 bp, Homo sapiens
tactgaagcacatgt

SEQ ID NO: 1939966 - DNA, 15 bp, Homo sapiens
actgaagcacatgtg

SEQ ID NO: 1939967 - DNA, 15 bp, Homo sapiens
ctgaagcacatgtga

SEQ ID NO: 1939968 - DNA, 15 bp, Homo sapiens
tgaagcacatgtgaa

SEQ ID NO: 1939969 - DNA, 15 bp, Homo sapiens
gaagcacatgtgaaa

SEQ ID NO: 1939970 - DNA, 15 bp, Homo sapiens
aagcacatgtgaaaa

SEQ ID NO: 1939971 - DNA, 15 bp, Homo sapiens
agcacatgtgaaaaa

SEQ ID NO: 1939972 - DNA, 15 bp, Homo sapiens
gcacatgtgaaaaaa

SEQ ID NO: 1939973 - DNA, 15 bp, Homo sapiens
cacatgtgaaaaaat

SEQ ID NO: 1939974 - DNA, 15 bp, Homo sapiens
acatgtgaaaaaata

SEQ ID NO: 1939975 - DNA, 15 bp, Homo sapiens
catgtgaaaaaatat

SEQ ID NO: 1939976 - DNA, 15 bp, Homo sapiens
atgtgaaaaaatatc

SEQ ID NO: 1939977 - DNA, 15 bp, Homo sapiens
tgtgaaaaaatatct

SEQ ID NO: 1939978 - DNA, 15 bp, Homo sapiens
gtgaaaaaatatcta

SEQ ID NO: 1939979 - DNA, 15 bp, Homo sapiens
tgaaaaaatatctag

SEQ ID NO: 1939980 - DNA, 15 bp, Homo sapiens
gaaaaaatatctaga

SEQ ID NO: 1939981 - DNA, 15 bp, Homo sapiens
aaaaaatatctagac

SEQ ID NO: 1939982 - DNA, 15 bp, Homo sapiens
aaaaatatctagact

SEQ ID NO: 1939983 - DNA, 15 bp, Homo sapiens
aaaatatctagactt

SEQ ID NO: 1939984 - DNA, 15 bp, Homo sapiens
aaatatctagacttg

SEQ ID NO: 1939985 - DNA, 15 bp, Homo sapiens
aatatctagacttgc

SEQ ID NO: 1939986 - DNA, 15 bp, Homo sapiens
atatctagacttgct

SEQ ID NO: 1939987 - DNA, 15 bp, Homo sapiens
tatctagacttgctt

SEQ ID NO: 1939988 - DNA, 15 bp, Homo sapiens
atctagacttgcttt

SEQ ID NO: 1939989 - DNA, 15 bp, Homo sapiens
tctagacttgctttg

SEQ ID NO: 1939990 - DNA, 15 bp, Homo sapiens
ctagacttgctttgt

SEQ ID NO: 1939991 - DNA, 15 bp, Homo sapiens
tagacttgctttgtc

SEQ ID NO: 1939992 - DNA, 15 bp, Homo sapiens
agacttgctttgtct

SEQ ID NO: 1939993 - DNA, 15 bp, Homo sapiens
gacttgctttgtctt

SEQ ID NO: 1939994 - DNA, 15 bp, Homo sapiens
acttgctttgtcttc

SEQ ID NO: 1939995 - DNA, 15 bp, Homo sapiens
cttgctttgtcttca

SEQ ID NO: 1939996 - DNA, 15 bp, Homo sapiens
ttgctttgtcttcat

SEQ ID NO: 1939997 - DNA, 15 bp, Homo sapiens
tgctttgtcttcatg

SEQ ID NO: 1939998 - DNA, 15 bp, Homo sapiens
gctttgtcttcatgt

SEQ ID NO: 1939999 - DNA, 15 bp, Homo sapiens
ctttgtcttcatgta

SEQ ID NO: 1940000 - DNA, 15 bp, Homo sapiens
tttgtcttcatgtaa

SEQ ID NO: 1940001 - DNA, 15 bp, Homo sapiens
ttgtcttcatgtaat

SEQ ID NO: 1940002 - DNA, 15 bp, Homo sapiens
tgtcttcatgtaatt

SEQ ID NO: 1940003 - DNA, 15 bp, Homo sapiens
gtcttcatgtaattg

SEQ ID NO: 1940004 - DNA, 15 bp, Homo sapiens
tcttcatgtaattga

SEQ ID NO: 1940005 - DNA, 15 bp, Homo sapiens
cttcatgtaattgat

SEQ ID NO: 1940006 - DNA, 15 bp, Homo sapiens
ttcatgtaattgatg

SEQ ID NO: 1940007 - DNA, 15 bp, Homo sapiens
tcatgtaattgatgt

SEQ ID NO: 1940008 - DNA, 15 bp, Homo sapiens
catgtaattgatgta

SEQ ID NO: 1940009 - DNA, 15 bp, Homo sapiens
atgtaattgatgtag

SEQ ID NO: 1940010 - DNA, 15 bp, Homo sapiens
tgtaattgatgtagt

SEQ ID NO: 1940011 - DNA, 15 bp, Homo sapiens
gtaattgatgtagtt

SEQ ID NO: 1940012 - DNA, 15 bp, Homo sapiens
taattgatgtagttg

SEQ ID NO: 1940013 - DNA, 15 bp, Homo sapiens
aattgatgtagttga

SEQ ID NO: 1940014 - DNA, 15 bp, Homo sapiens
attgatgtagttgat

SEQ ID NO: 1940015 - DNA, 15 bp, Homo sapiens
ttgatgtagttgatc

SEQ ID NO: 1940016 - DNA, 15 bp, Homo sapiens
tgatgtagttgatca

SEQ ID NO: 1940017 - DNA, 15 bp, Homo sapiens
gatgtagttgatcaa

SEQ ID NO: 1940018 - DNA, 15 bp, Homo sapiens
atgtagttgatcaaa

SEQ ID NO: 1940019 - DNA, 15 bp, Homo sapiens
tgtagttgatcaaat

SEQ ID NO: 1940020 - DNA, 15 bp, Homo sapiens
gtagttgatcaaatg

SEQ ID NO: 1940021 - DNA, 15 bp, Homo sapiens
tagttgatcaaatgg

SEQ ID NO: 1940022 - DNA, 15 bp, Homo sapiens
agttgatcaaatgga

SEQ ID NO: 1940023 - DNA, 15 bp, Homo sapiens
gttgatcaaatggac

SEQ ID NO: 1940024 - DNA, 15 bp, Homo sapiens
ttgatcaaatggact

SEQ ID NO: 1940025 - DNA, 15 bp, Homo sapiens
tgatcaaatggactt

SEQ ID NO: 1940026 - DNA, 15 bp, Homo sapiens
gatcaaatggacttt

SEQ ID NO: 1940027 - DNA, 15 bp, Homo sapiens
atcaaatggactttg

SEQ ID NO: 1940028 - DNA, 15 bp, Homo sapiens
tcaaatggactttga

SEQ ID NO: 1940029 - DNA, 15 bp, Homo sapiens
caaatggactttgaa

SEQ ID NO: 1940030 - DNA, 15 bp, Homo sapiens
aaatggactttgaaa

SEQ ID NO: 1940031 - DNA, 15 bp, Homo sapiens
aatggactttgaaac

SEQ ID NO: 1940032 - DNA, 15 bp, Homo sapiens
atggactttgaaacc

SEQ ID NO: 1940033 - DNA, 15 bp, Homo sapiens
tggactttgaaacct

SEQ ID NO: 1940034 - DNA, 15 bp, Homo sapiens
ggactttgaaacctc

SEQ ID NO: 1940035 - DNA, 15 bp, Homo sapiens
gactttgaaacctca

SEQ ID NO: 1940036 - DNA, 15 bp, Homo sapiens
actttgaaacctcat

SEQ ID NO: 1940037 - DNA, 15 bp, Homo sapiens
ctttgaaacctcatc

SEQ ID NO: 1940038 - DNA, 15 bp, Homo sapiens
tttgaaacctcatct

SEQ ID NO: 1940039 - DNA, 15 bp, Homo sapiens
ttgaaacctcatcta

SEQ ID NO: 1940040 - DNA, 15 bp, Homo sapiens
tgaaacctcatctaa

SEQ ID NO: 1940041 - DNA, 15 bp, Homo sapiens
gaaacctcatctaat

SEQ ID NO: 1940042 - DNA, 15 bp, Homo sapiens
aaacctcatctaatg

SEQ ID NO: 1940043 - DNA, 15 bp, Homo sapiens
aacctcatctaatgt

SEQ ID NO: 1940044 - DNA, 15 bp, Homo sapiens
acctcatctaatgtc

SEQ ID NO: 1940045 - DNA, 15 bp, Homo sapiens
cctcatctaatgtcc

SEQ ID NO: 1940046 - DNA, 15 bp, Homo sapiens
ctcatctaatgtcca

SEQ ID NO: 1940047 - DNA, 15 bp, Homo sapiens
tcatctaatgtccag

SEQ ID NO: 1940048 - DNA, 15 bp, Homo sapiens
catctaatgtccagt

SEQ ID NO: 1940049 - DNA, 15 bp, Homo sapiens
atctaatgtccagtt

SEQ ID NO: 1940050 - DNA, 15 bp, Homo sapiens
tctaatgtccagttt

SEQ ID NO: 1940051 - DNA, 15 bp, Homo sapiens
ctaatgtccagttta

SEQ ID NO: 1940052 - DNA, 15 bp, Homo sapiens
taatgtccagtttac

SEQ ID NO: 1940053 - DNA, 15 bp, Homo sapiens
aatgtccagtttact

SEQ ID NO: 1940054 - DNA, 15 bp, Homo sapiens
atgtccagtttactg

SEQ ID NO: 1940055 - DNA, 15 bp, Homo sapiens
tgtccagtttactgg

SEQ ID NO: 1940056 - DNA, 15 bp, Homo sapiens
gtccagtttactggt

SEQ ID NO: 1940057 - DNA, 15 bp, Homo sapiens
tccagtttactggtt

SEQ ID NO: 1940058 - DNA, 15 bp, Homo sapiens
ccagtttactggttt

SEQ ID NO: 1940059 - DNA, 15 bp, Homo sapiens
cagtttactggtttt

SEQ ID NO: 1940060 - DNA, 15 bp, Homo sapiens
agtttactggtttta

SEQ ID NO: 1940061 - DNA, 15 bp, Homo sapiens
gtttactggttttaa

SEQ ID NO: 1940062 - DNA, 15 bp, Homo sapiens
tttactggttttaat

SEQ ID NO: 1940063 - DNA, 15 bp, Homo sapiens
ttactggttttaatc

SEQ ID NO: 1940064 - DNA, 15 bp, Homo sapiens
tactggttttaatct

SEQ ID NO: 1940065 - DNA, 15 bp, Homo sapiens
actggttttaatcta

SEQ ID NO: 1940066 - DNA, 15 bp, Homo sapiens
ctggttttaatctaa

SEQ ID NO: 1940067 - DNA, 15 bp, Homo sapiens
tggttttaatctaac

SEQ ID NO: 1940068 - DNA, 15 bp, Homo sapiens
ggttttaatctaact

SEQ ID NO: 1940069 - DNA, 15 bp, Homo sapiens
gttttaatctaacta

SEQ ID NO: 1940070 - DNA, 15 bp, Homo sapiens
ttttaatctaactat

SEQ ID NO: 1940071 - DNA, 15 bp, Homo sapiens
tttaatctaactata

SEQ ID NO: 1940072 - DNA, 15 bp, Homo sapiens
ttaatctaactatat

SEQ ID NO: 1940073 - DNA, 15 bp, Homo sapiens
taatctaactatatt

SEQ ID NO: 1940074 - DNA, 15 bp, Homo sapiens
aatctaactatattg

SEQ ID NO: 1940075 - DNA, 15 bp, Homo sapiens
atctaactatattgc

SEQ ID NO: 1940076 - DNA, 15 bp, Homo sapiens
tctaactatattgca

SEQ ID NO: 1940077 - DNA, 15 bp, Homo sapiens
ctaactatattgcag

SEQ ID NO: 1940078 - DNA, 15 bp, Homo sapiens
taactatattgcagc

SEQ ID NO: 1940079 - DNA, 15 bp, Homo sapiens
aactatattgcagca

SEQ ID NO: 1940080 - DNA, 15 bp, Homo sapiens
actatattgcagcag

SEQ ID NO: 1940081 - DNA, 15 bp, Homo sapiens
ctatattgcagcagc

SEQ ID NO: 1940082 - DNA, 15 bp, Homo sapiens
tatattgcagcagca

SEQ ID NO: 1940083 - DNA, 15 bp, Homo sapiens
atattgcagcagcat

SEQ ID NO: 1940084 - DNA, 15 bp, Homo sapiens
tattgcagcagcata

SEQ ID NO: 1940085 - DNA, 15 bp, Homo sapiens
attgcagcagcatat

SEQ ID NO: 1940086 - DNA, 15 bp, Homo sapiens
ttgcagcagcatata

SEQ ID NO: 1940087 - DNA, 15 bp, Homo sapiens
tgcagcagcatatat

SEQ ID NO: 1940088 - DNA, 15 bp, Homo sapiens
gcagcagcatatatt

SEQ ID NO: 1940089 - DNA, 15 bp, Homo sapiens
cagcagcatatattg

SEQ ID NO: 1940090 - DNA, 15 bp, Homo sapiens
agcagcatatattga

SEQ ID NO: 1940091 - DNA, 15 bp, Homo sapiens
gcagcatatattgat

SEQ ID NO: 1940092 - DNA, 15 bp, Homo sapiens
cagcatatattgata

SEQ ID NO: 1940093 - DNA, 15 bp, Homo sapiens
agcatatattgatat

SEQ ID NO: 1940094 - DNA, 15 bp, Homo sapiens
gcatatattgatatt

SEQ ID NO: 1940095 - DNA, 15 bp, Homo sapiens
catatattgatatta

SEQ ID NO: 1940096 - DNA, 15 bp, Homo sapiens
atatattgatattat

SEQ ID NO: 1940097 - DNA, 15 bp, Homo sapiens
tatattgatattata

SEQ ID NO: 1940098 - DNA, 15 bp, Homo sapiens
atattgatattatat

SEQ ID NO: 1940099 - DNA, 15 bp, Homo sapiens
tattgatattatatt

SEQ ID NO: 1940100 - DNA, 15 bp, Homo sapiens
attgatattatattt

SEQ ID NO: 1940101 - DNA, 15 bp, Homo sapiens
ttgatattatatttc

SEQ ID NO: 1940102 - DNA, 15 bp, Homo sapiens
tgatattatatttca

SEQ ID NO: 1940103 - DNA, 15 bp, Homo sapiens
gatattatatttcac

SEQ ID NO: 1940104 - DNA, 15 bp, Homo sapiens
atattatatttcact

SEQ ID NO: 1940105 - DNA, 15 bp, Homo sapiens
tattatatttcactg

SEQ ID NO: 1940106 - DNA, 15 bp, Homo sapiens
attatatttcactgg

SEQ ID NO: 1940107 - DNA, 15 bp, Homo sapiens
ttatatttcactgga

SEQ ID NO: 1940108 - DNA, 15 bp, Homo sapiens
tatatttcactggag

SEQ ID NO: 1940109 - DNA, 15 bp, Homo sapiens
atatttcactggaga

SEQ ID NO: 1940110 - DNA, 15 bp, Homo sapiens
tatttcactggagaa

SEQ ID NO: 1940111 - DNA, 15 bp, Homo sapiens
atttcactggagaaa

SEQ ID NO: 1940112 - DNA, 15 bp, Homo sapiens
tttcactggagaaaa

SEQ ID NO: 1940113 - DNA, 15 bp, Homo sapiens
ttcactggagaaaac

SEQ ID NO: 1940114 - DNA, 15 bp, Homo sapiens
tcactggagaaaact

SEQ ID NO: 1940115 - DNA, 15 bp, Homo sapiens
cactggagaaaacta

SEQ ID NO: 1940116 - DNA, 15 bp, Homo sapiens
actggagaaaactaa

SEQ ID NO: 1940117 - DNA, 15 bp, Homo sapiens
ctggagaaaactaaa

SEQ ID NO: 1940118 - DNA, 15 bp, Homo sapiens
tggagaaaactaaat

SEQ ID NO: 1940119 - DNA, 15 bp, Homo sapiens
ggagaaaactaaatc

SEQ ID NO: 1940120 - DNA, 15 bp, Homo sapiens
gagaaaactaaatcc

SEQ ID NO: 1940121 - DNA, 15 bp, Homo sapiens
agaaaactaaatcct

SEQ ID NO: 1940122 - DNA, 15 bp, Homo sapiens
gaaaactaaatccta

SEQ ID NO: 1940123 - DNA, 15 bp, Homo sapiens
aaaactaaatcctag

SEQ ID NO: 1940124 - DNA, 15 bp, Homo sapiens
aaactaaatcctaga

SEQ ID NO: 1940125 - DNA, 15 bp, Homo sapiens
aactaaatcctagaa

SEQ ID NO: 1940126 - DNA, 15 bp, Homo sapiens
actaaatcctagaaa

SEQ ID NO: 1940127 - DNA, 15 bp, Homo sapiens
ctaaatcctagaaag

SEQ ID NO: 1940128 - DNA, 15 bp, Homo sapiens
taaatcctagaaagt

SEQ ID NO: 1940129 - DNA, 15 bp, Homo sapiens
aaatcctagaaagta

SEQ ID NO: 1940130 - DNA, 15 bp, Homo sapiens
aatcctagaaagtaa

SEQ ID NO: 1940131 - DNA, 15 bp, Homo sapiens
atcctagaaagtaaa

SEQ ID NO: 1940132 - DNA, 15 bp, Homo sapiens
tcctagaaagtaaaa

SEQ ID NO: 1940133 - DNA, 15 bp, Homo sapiens
cctagaaagtaaaaa

SEQ ID NO: 1940134 - DNA, 15 bp, Homo sapiens
ctagaaagtaaaaat

SEQ ID NO: 1940135 - DNA, 15 bp, Homo sapiens
tagaaagtaaaaatt

SEQ ID NO: 1940136 - DNA, 15 bp, Homo sapiens
agaaagtaaaaattt

SEQ ID NO: 1940137 - DNA, 15 bp, Homo sapiens
gaaagtaaaaattta

SEQ ID NO: 1940138 - DNA, 15 bp, Homo sapiens
aaagtaaaaatttag

SEQ ID NO: 1940139 - DNA, 15 bp, Homo sapiens
aagtaaaaatttagt

SEQ ID NO: 1940140 - DNA, 15 bp, Homo sapiens
agtaaaaatttagtc

SEQ ID NO: 1940141 - DNA, 15 bp, Homo sapiens
gtaaaaatttagtcc

SEQ ID NO: 1940142 - DNA, 15 bp, Homo sapiens
taaaaatttagtcca

SEQ ID NO: 1940143 - DNA, 15 bp, Homo sapiens
aaaaatttagtccat

SEQ ID NO: 1940144 - DNA, 15 bp, Homo sapiens
aaaatttagtccatt

SEQ ID NO: 1940145 - DNA, 15 bp, Homo sapiens
aaatttagtccattt

SEQ ID NO: 1940146 - DNA, 15 bp, Homo sapiens
aatttagtccatttt

SEQ ID NO: 1940147 - DNA, 15 bp, Homo sapiens
atttagtccattttg

SEQ ID NO: 1940148 - DNA, 15 bp, Homo sapiens
tttagtccattttgt

SEQ ID NO: 1940149 - DNA, 15 bp, Homo sapiens
ttagtccattttgtt

SEQ ID NO: 1940150 - DNA, 15 bp, Homo sapiens
tagtccattttgttc

SEQ ID NO: 1940151 - DNA, 15 bp, Homo sapiens
agtccattttgttct

SEQ ID NO: 1940152 - DNA, 15 bp, Homo sapiens
gtccattttgttctt

SEQ ID NO: 1940153 - DNA, 15 bp, Homo sapiens
tccattttgttcttt

SEQ ID NO: 1940154 - DNA, 15 bp, Homo sapiens
ccattttgttctttg

SEQ ID NO: 1940155 - DNA, 15 bp, Homo sapiens
cattttgttctttgt

SEQ ID NO: 1940156 - DNA, 15 bp, Homo sapiens
attttgttctttgta

SEQ ID NO: 1940157 - DNA, 15 bp, Homo sapiens
tttgttctttgtaat

SEQ ID NO: 1940158 - DNA, 15 bp, Homo sapiens
ttgttctttgtaata

SEQ ID NO: 1940159 - DNA, 15 bp, Homo sapiens
tgttctttgtaataa

SEQ ID NO: 1940160 - DNA, 15 bp, Homo sapiens
gttctttgtaataaa

SEQ ID NO: 1940161 - DNA, 15 bp, Homo sapiens
ttctttgtaataaat

SEQ ID NO: 1940162 - DNA, 15 bp, Homo sapiens
tctttgtaataaata

SEQ ID NO: 1940163 - DNA, 15 bp, Homo sapiens
ctttgtaataaatat

SEQ ID NO: 1940164 - DNA, 15 bp, Homo sapiens
tttgtaataaatata

SEQ ID NO: 1940165 - DNA, 15 bp, Homo sapiens
ttgtaataaatatat

SEQ ID NO: 1940166 - DNA, 15 bp, Homo sapiens
tgtaataaatatatt

SEQ ID NO: 1940167 - DNA, 15 bp, Homo sapiens
gtaataaatatattt

SEQ ID NO: 1940168 - DNA, 15 bp, Homo sapiens
taataaatatattta

SEQ ID NO: 1940169 - DNA, 15 bp, Homo sapiens
aataaatatatttat

SEQ ID NO: 1940170 - DNA, 15 bp, Homo sapiens
ataaatatatttatg

SEQ ID NO: 1940171 - DNA, 15 bp, Homo sapiens
taaatatatttatga

SEQ ID NO: 1940172 - DNA, 15 bp, Homo sapiens
aaatatatttatgat

SEQ ID NO: 1940173 - DNA, 15 bp, Homo sapiens
aatatatttatgatt

SEQ ID NO: 1940174 - DNA, 15 bp, Homo sapiens
atatatttatgattg

SEQ ID NO: 1940175 - DNA, 15 bp, Homo sapiens
tatatttatgattgt

SEQ ID NO: 1940176 - DNA, 15 bp, Homo sapiens
atatttatgattgtc

SEQ ID NO: 1940177 - DNA, 15 bp, Homo sapiens
tatttatgattgtct

SEQ ID NO: 1940178 - DNA, 15 bp, Homo sapiens
atttatgattgtctt

SEQ ID NO: 1940179 - DNA, 15 bp, Homo sapiens
tttatgattgtcttt

SEQ ID NO: 1940180 - DNA, 15 bp, Homo sapiens
ttatgattgtcttta

SEQ ID NO: 1940181 - DNA, 15 bp, Homo sapiens
tatgattgtctttat

SEQ ID NO: 1940182 - DNA, 15 bp, Homo sapiens
atgattgtctttatc

SEQ ID NO: 1940183 - DNA, 15 bp, Homo sapiens
tgattgtctttatcc

SEQ ID NO: 1940184 - DNA, 15 bp, Homo sapiens
gattgtctttatcca

SEQ ID NO: 1940185 - DNA, 15 bp, Homo sapiens
attgtctttatccaa

SEQ ID NO: 1940186 - DNA, 15 bp, Homo sapiens
ttgtctttatccaaa

SEQ ID NO: 1940187 - DNA, 15 bp, Homo sapiens
tgtctttatccaaac

SEQ ID NO: 1940188 - DNA, 15 bp, Homo sapiens
gtctttatccaaaca

SEQ ID NO: 1940189 - DNA, 15 bp, Homo sapiens
tctttatccaaacag

SEQ ID NO: 1940190 - DNA, 15 bp, Homo sapiens
ctttatccaaacagt

SEQ ID NO: 1940191 - DNA, 15 bp, Homo sapiens
tttatccaaacagtt

SEQ ID NO: 1940192 - DNA, 15 bp, Homo sapiens
ttatccaaacagttt

SEQ ID NO: 1940193 - DNA, 15 bp, Homo sapiens
tatccaaacagtttt

SEQ ID NO: 1940194 - DNA, 15 bp, Homo sapiens
atccaaacagtttta

SEQ ID NO: 1940195 - DNA, 15 bp, Homo sapiens
tccaaacagttttat

SEQ ID NO: 1940196 - DNA, 15 bp, Homo sapiens
ccaaacagttttatt

SEQ ID NO: 1940197 - DNA, 15 bp, Homo sapiens
caaacagttttattt

SEQ ID NO: 1940198 - DNA, 15 bp, Homo sapiens
aaacagttttatttt

SEQ ID NO: 1940199 - DNA, 15 bp, Homo sapiens
aacagttttatttta

SEQ ID NO: 1940200 - DNA, 15 bp, Homo sapiens
acagttttattttaa

SEQ ID NO: 1940201 - DNA, 15 bp, Homo sapiens
cagttttattttaaa

SEQ ID NO: 1940202 - DNA, 15 bp, Homo sapiens
agttttattttaaaa

SEQ ID NO: 1940203 - DNA, 15 bp, Homo sapiens
gttttattttaaaat

SEQ ID NO: 1940204 - DNA, 15 bp, Homo sapiens
ttttattttaaaata

SEQ ID NO: 1940205 - DNA, 15 bp, Homo sapiens
tttattttaaaatag

SEQ ID NO: 1940206 - DNA, 15 bp, Homo sapiens
ttattttaaaataga

SEQ ID NO: 1940207 - DNA, 15 bp, Homo sapiens
tattttaaaatagac

SEQ ID NO: 1940208 - DNA, 15 bp, Homo sapiens
attttaaaatagacc

SEQ ID NO: 1940209 - DNA, 15 bp, Homo sapiens
ttttaaaatagacct

SEQ ID NO: 1940210 - DNA, 15 bp, Homo sapiens
tttaaaatagaccta

SEQ ID NO: 1940211 - DNA, 15 bp, Homo sapiens
ttaaaatagacctaa

SEQ ID NO: 1940212 - DNA, 15 bp, Homo sapiens
taaaatagacctaaa

SEQ ID NO: 1940213 - DNA, 15 bp, Homo sapiens
aaaatagacctaaag

SEQ ID NO: 1940214 - DNA, 15 bp, Homo sapiens
aaatagacctaaaga

SEQ ID NO: 1940215 - DNA, 15 bp, Homo sapiens
aatagacctaaagaa

SEQ ID NO: 1940216 - DNA, 15 bp, Homo sapiens
atagacctaaagaag

SEQ ID NO: 1940217 - DNA, 15 bp, Homo sapiens
tagacctaaagaagg

SEQ ID NO: 1940218 - DNA, 15 bp, Homo sapiens
agacctaaagaaggg

SEQ ID NO: 1940219 - DNA, 15 bp, Homo sapiens
gacctaaagaaggga

SEQ ID NO: 1940220 - DNA, 15 bp, Homo sapiens
acctaaagaagggaa

SEQ ID NO: 1940221 - DNA, 15 bp, Homo sapiens
cctaaagaagggaaa

SEQ ID NO: 1940222 - DNA, 15 bp, Homo sapiens
ctaaagaagggaaaa

SEQ ID NO: 1940223 - DNA, 15 bp, Homo sapiens
taaagaagggaaaac

SEQ ID NO: 1940224 - DNA, 15 bp, Homo sapiens
aaagaagggaaaacc

SEQ ID NO: 1940225 - DNA, 15 bp, Homo sapiens
aagaagggaaaacca

SEQ ID NO: 1940226 - DNA, 15 bp, Homo sapiens
agaagggaaaaccag

SEQ ID NO: 1940227 - DNA, 15 bp, Homo sapiens
gaagggaaaaccaga

SEQ ID NO: 1940228 - DNA, 15 bp, Homo sapiens
aagggaaaaccagac

SEQ ID NO: 1940229 - DNA, 15 bp, Homo sapiens
agggaaaaccagaca

SEQ ID NO: 1940230 - DNA, 15 bp, Homo sapiens
gggaaaaccagacaa

SEQ ID NO: 1940231 - DNA, 15 bp, Homo sapiens
ggaaaaccagacaat

SEQ ID NO: 1940232 - DNA, 15 bp, Homo sapiens
gaaaaccagacaata

SEQ ID NO: 1940233 - DNA, 15 bp, Homo sapiens
aaaaccagacaataa

SEQ ID NO: 1940234 - DNA, 15 bp, Homo sapiens
aaaccagacaataat

SEQ ID NO: 1940235 - DNA, 15 bp, Homo sapiens
aaccagacaataata

SEQ ID NO: 1940236 - DNA, 15 bp, Homo sapiens
accagacaataatac

SEQ ID NO: 1940237 - DNA, 15 bp, Homo sapiens
ccagacaataatact

SEQ ID NO: 1940238 - DNA, 15 bp, Homo sapiens
cagacaataatactc

SEQ ID NO: 1940239 - DNA, 15 bp, Homo sapiens
agacaataatactct

SEQ ID NO: 1940240 - DNA, 15 bp, Homo sapiens
gacaataatactcta

SEQ ID NO: 1940241 - DNA, 15 bp, Homo sapiens
acaataatactctat

SEQ ID NO: 1940242 - DNA, 15 bp, Homo sapiens
caataatactctata

SEQ ID NO: 1940243 - DNA, 15 bp, Homo sapiens
aataatactctatag

SEQ ID NO: 1940244 - DNA, 15 bp, Homo sapiens
ataatactctatagt

SEQ ID NO: 1940245 - DNA, 15 bp, Homo sapiens
taatactctatagtg

SEQ ID NO: 1940246 - DNA, 15 bp, Homo sapiens
aatactctatagtga

SEQ ID NO: 1940247 - DNA, 15 bp, Homo sapiens
atactctatagtgag

SEQ ID NO: 1940248 - DNA, 15 bp, Homo sapiens
tactctatagtgagt

SEQ ID NO: 1940249 - DNA, 15 bp, Homo sapiens
actctatagtgagtg

SEQ ID NO: 1940250 - DNA, 15 bp, Homo sapiens
ctctatagtgagtgc

SEQ ID NO: 1940251 - DNA, 15 bp, Homo sapiens
tctatagtgagtgct

SEQ ID NO: 1940252 - DNA, 15 bp, Homo sapiens
ctatagtgagtgcta

SEQ ID NO: 1940253 - DNA, 15 bp, Homo sapiens
tatagtgagtgctaa

SEQ ID NO: 1940254 - DNA, 15 bp, Homo sapiens
atagtgagtgctaaa

SEQ ID NO: 1940255 - DNA, 15 bp, Homo sapiens
tagtgagtgctaaat

SEQ ID NO: 1940256 - DNA, 15 bp, Homo sapiens
agtgagtgctaaatt

SEQ ID NO: 1940257 - DNA, 15 bp, Homo sapiens
gtgagtgctaaattt

SEQ ID NO: 1940258 - DNA, 15 bp, Homo sapiens
tgagtgctaaatttg

SEQ ID NO: 1940259 - DNA, 15 bp, Homo sapiens
gagtgctaaatttgt

SEQ ID NO: 1940260 - DNA, 15 bp, Homo sapiens
agtgctaaatttgta

SEQ ID NO: 1940261 - DNA, 15 bp, Homo sapiens
gtgctaaatttgtaa

SEQ ID NO: 1940262 - DNA, 15 bp, Homo sapiens
tgctaaatttgtaat

SEQ ID NO: 1940263 - DNA, 15 bp, Homo sapiens
gctaaatttgtaatt

SEQ ID NO: 1940264 - DNA, 15 bp, Homo sapiens
ctaaatttgtaattc

SEQ ID NO: 1940265 - DNA, 15 bp, Homo sapiens
taaatttgtaattct

SEQ ID NO: 1940266 - DNA, 15 bp, Homo sapiens
aaatttgtaattctt

SEQ ID NO: 1940267 - DNA, 15 bp, Homo sapiens
aatttgtaattctta

SEQ ID NO: 1940268 - DNA, 15 bp, Homo sapiens
atttgtaattcttat

SEQ ID NO: 1940269 - DNA, 15 bp, Homo sapiens
tttgtaattcttatt

SEQ ID NO: 1940270 - DNA, 15 bp, Homo sapiens
ttgtaattcttattt

SEQ ID NO: 1940271 - DNA, 15 bp, Homo sapiens
tgtaattcttatttt

SEQ ID NO: 1940272 - DNA, 15 bp, Homo sapiens
gtaattcttatttta

SEQ ID NO: 1940273 - DNA, 15 bp, Homo sapiens
taattcttattttaa

SEQ ID NO: 1940274 - DNA, 15 bp, Homo sapiens
aattcttattttaat

SEQ ID NO: 1940275 - DNA, 15 bp, Homo sapiens
attcttattttaatt

SEQ ID NO: 1940276 - DNA, 15 bp, Homo sapiens
ttcttattttaatta

SEQ ID NO: 1940277 - DNA, 15 bp, Homo sapiens
tcttattttaattac

SEQ ID NO: 1940278 - DNA, 15 bp, Homo sapiens
cttattttaattacc

SEQ ID NO: 1940279 - DNA, 15 bp, Homo sapiens
ttattttaattacct

SEQ ID NO: 1940280 - DNA, 15 bp, Homo sapiens
tattttaattacctt

SEQ ID NO: 1940281 - DNA, 15 bp, Homo sapiens
attttaattaccttt

SEQ ID NO: 1940282 - DNA, 15 bp, Homo sapiens
ttttaattacctttt

SEQ ID NO: 1940283 - DNA, 15 bp, Homo sapiens
tttaattaccttttg

SEQ ID NO: 1940284 - DNA, 15 bp, Homo sapiens
ttaattaccttttgt

SEQ ID NO: 1940285 - DNA, 15 bp, Homo sapiens
taattaccttttgtt

SEQ ID NO: 1940286 - DNA, 15 bp, Homo sapiens
aattaccttttgttt

SEQ ID NO: 1940287 - DNA, 15 bp, Homo sapiens
attaccttttgtttt

SEQ ID NO: 1940288 - DNA, 15 bp, Homo sapiens
ttaccttttgttttc

SEQ ID NO: 1940289 - DNA, 15 bp, Homo sapiens
taccttttgttttct

SEQ ID NO: 1940290 - DNA, 15 bp, Homo sapiens
accttttgttttctc

SEQ ID NO: 1940291 - DNA, 15 bp, Homo sapiens
cttttgttttctctg

SEQ ID NO: 1940292 - DNA, 15 bp, Homo sapiens
tttgttttctctgtt

SEQ ID NO: 1940293 - DNA, 15 bp, Homo sapiens
ttgttttctctgttt

SEQ ID NO: 1940294 - DNA, 15 bp, Homo sapiens
tgttttctctgtttc

SEQ ID NO: 1940295 - DNA, 15 bp, Homo sapiens
gttttctctgtttca

SEQ ID NO: 1940296 - DNA, 15 bp, Homo sapiens
ttttctctgtttcaa

SEQ ID NO: 1940297 - DNA, 15 bp, Homo sapiens
tttctctgtttcaag

SEQ ID NO: 1940298 - DNA, 15 bp, Homo sapiens
ttctctgtttcaagg

SEQ ID NO: 1940299 - DNA, 15 bp, Homo sapiens
tctctgtttcaagga

SEQ ID NO: 1940300 - DNA, 15 bp, Homo sapiens
ctctgtttcaaggat

SEQ ID NO: 1940301 - DNA, 15 bp, Homo sapiens
tctgtttcaaggata

SEQ ID NO: 1940302 - DNA, 15 bp, Homo sapiens
ctgtttcaaggataa

SEQ ID NO: 1940303 - DNA, 15 bp, Homo sapiens
tgtttcaaggataaa

SEQ ID NO: 1940304 - DNA, 15 bp, Homo sapiens
gtttcaaggataaaa

SEQ ID NO: 1940305 - DNA, 15 bp, Homo sapiens
tttcaaggataaaaa

SEQ ID NO: 1940306 - DNA, 15 bp, Homo sapiens
ttcaaggataaaaat

SEQ ID NO: 1940307 - DNA, 15 bp, Homo sapiens
tcaaggataaaaatg

SEQ ID NO: 1940308 - DNA, 15 bp, Homo sapiens
caaggataaaaatgg

SEQ ID NO: 1940309 - DNA, 15 bp, Homo sapiens
aaggataaaaatggc

SEQ ID NO: 1940310 - DNA, 15 bp, Homo sapiens
aggataaaaatggca

SEQ ID NO: 1940311 - DNA, 15 bp, Homo sapiens
ggataaaaatggcaa

SEQ ID NO: 1940312 - DNA, 15 bp, Homo sapiens
gataaaaatggcaac

SEQ ID NO: 1940313 - DNA, 15 bp, Homo sapiens
ataaaaatggcaaca

SEQ ID NO: 1940314 - DNA, 15 bp, Homo sapiens
taaaaatggcaacaa

SEQ ID NO: 1940315 - DNA, 15 bp, Homo sapiens
aaaaatggcaacaaa

SEQ ID NO: 1940316 - DNA, 15 bp, Homo sapiens
aaaatggcaacaaaa

SEQ ID NO: 1940317 - DNA, 15 bp, Homo sapiens
aaatggcaacaaaat

SEQ ID NO: 1940318 - DNA, 15 bp, Homo sapiens
aatggcaacaaaatt

SEQ ID NO: 1940319 - DNA, 15 bp, Homo sapiens
atggcaacaaaattc

SEQ ID NO: 1940320 - DNA, 15 bp, Homo sapiens
tggcaacaaaattca

SEQ ID NO: 1940321 - DNA, 15 bp, Homo sapiens
ggcaacaaaattcat

SEQ ID NO: 1940322 - DNA, 15 bp, Homo sapiens
gcaacaaaattcatc

SEQ ID NO: 1940323 - DNA, 15 bp, Homo sapiens
caacaaaattcatca

SEQ ID NO: 1940324 - DNA, 15 bp, Homo sapiens
aacaaaattcatcac

SEQ ID NO: 1940325 - DNA, 15 bp, Homo sapiens
acaaaattcatcact

SEQ ID NO: 1940326 - DNA, 15 bp, Homo sapiens
caaaattcatcacta

SEQ ID NO: 1940327 - DNA, 15 bp, Homo sapiens
aaaattcatcactat

SEQ ID NO: 1940328 - DNA, 15 bp, Homo sapiens
aaattcatcactatt

SEQ ID NO: 1940329 - DNA, 15 bp, Homo sapiens
aattcatcactattt

SEQ ID NO: 1940330 - DNA, 15 bp, Homo sapiens
attcatcactatttc

SEQ ID NO: 1940331 - DNA, 15 bp, Homo sapiens
ttcatcactatttct

SEQ ID NO: 1940332 - DNA, 15 bp, Homo sapiens
tcatcactatttctc

SEQ ID NO: 1940333 - DNA, 15 bp, Homo sapiens
catcactatttctcc

SEQ ID NO: 1940334 - DNA, 15 bp, Homo sapiens
atcactatttctccc

SEQ ID NO: 1940335 - DNA, 15 bp, Homo sapiens
tcactatttctccca

SEQ ID NO: 1940336 - DNA, 15 bp, Homo sapiens
cactatttctcccaa

SEQ ID NO: 1940337 - DNA, 15 bp, Homo sapiens
actatttctcccaaa

SEQ ID NO: 1940338 - DNA, 15 bp, Homo sapiens
ctatttctcccaaac

SEQ ID NO: 1940339 - DNA, 15 bp, Homo sapiens
tatttctcccaaacc

SEQ ID NO: 1940340 - DNA, 15 bp, Homo sapiens
atttctcccaaaccc

SEQ ID NO: 1940341 - DNA, 15 bp, Homo sapiens
tttctcccaaaccca

SEQ ID NO: 1940342 - DNA, 15 bp, Homo sapiens
ttctcccaaacccac

SEQ ID NO: 1940343 - DNA, 15 bp, Homo sapiens
tctcccaaacccact

SEQ ID NO: 1940344 - DNA, 15 bp, Homo sapiens
ctcccaaacccactt

SEQ ID NO: 1940345 - DNA, 15 bp, Homo sapiens
tcccaaacccacttt

SEQ ID NO: 1940346 - DNA, 15 bp, Homo sapiens
cccaaacccactttt

SEQ ID NO: 1940347 - DNA, 15 bp, Homo sapiens
ccaaacccactttta

SEQ ID NO: 1940348 - DNA, 15 bp, Homo sapiens
caaacccacttttat

SEQ ID NO: 1940349 - DNA, 15 bp, Homo sapiens
aaacccacttttatt

SEQ ID NO: 1940350 - DNA, 15 bp, Homo sapiens
aacccacttttattc

SEQ ID NO: 1940351 - DNA, 15 bp, Homo sapiens
acccacttttattct

SEQ ID NO: 1940352 - DNA, 15 bp, Homo sapiens
cccacttttattctg

SEQ ID NO: 1940353 - DNA, 15 bp, Homo sapiens
ccacttttattctgg

SEQ ID NO: 1940354 - DNA, 15 bp, Homo sapiens
cacttttattctgga

SEQ ID NO: 1940355 - DNA, 15 bp, Homo sapiens
acttttattctggag

SEQ ID NO: 1940356 - DNA, 15 bp, Homo sapiens
cttttattctggagt

SEQ ID NO: 1940357 - DNA, 15 bp, Homo sapiens
ttttattctggagtt

SEQ ID NO: 1940358 - DNA, 15 bp, Homo sapiens
tttattctggagttt

SEQ ID NO: 1940359 - DNA, 15 bp, Homo sapiens
ttattctggagtttt

SEQ ID NO: 1940360 - DNA, 15 bp, Homo sapiens
tattctggagttttt

SEQ ID NO: 1940361 - DNA, 15 bp, Homo sapiens
attctggagtttttt

SEQ ID NO: 1940362 - DNA, 15 bp, Homo sapiens
ttctggagttttttg

SEQ ID NO: 1940363 - DNA, 15 bp, Homo sapiens
tctggagttttttgt

SEQ ID NO: 1940364 - DNA, 15 bp, Homo sapiens
ctggagttttttgtt

SEQ ID NO: 1940365 - DNA, 15 bp, Homo sapiens
tggagttttttgttt

SEQ ID NO: 1940366 - DNA, 15 bp, Homo sapiens
ggagttttttgtttc

SEQ ID NO: 1940367 - DNA, 15 bp, Homo sapiens
agttttttgtttctg

SEQ ID NO: 1940368 - DNA, 15 bp, Homo sapiens
gttttttgtttctgt

SEQ ID NO: 1940369 - DNA, 15 bp, Homo sapiens
ttttttgtttctgtt

SEQ ID NO: 1940370 - DNA, 15 bp, Homo sapiens
tttttgtttctgtta

SEQ ID NO: 1940371 - DNA, 15 bp, Homo sapiens
ttttgtttctgttaa

SEQ ID NO: 1940372 - DNA, 15 bp, Homo sapiens
tttgtttctgttaat

SEQ ID NO: 1940373 - DNA, 15 bp, Homo sapiens
ttgtttctgttaatt

SEQ ID NO: 1940374 - DNA, 15 bp, Homo sapiens
tgtttctgttaattg

SEQ ID NO: 1940375 - DNA, 15 bp, Homo sapiens
gtttctgttaattgt

SEQ ID NO: 1940376 - DNA, 15 bp, Homo sapiens
tttctgttaattgta

SEQ ID NO: 1940377 - DNA, 15 bp, Homo sapiens
ttctgttaattgtat

SEQ ID NO: 1940378 - DNA, 15 bp, Homo sapiens
tctgttaattgtatc

SEQ ID NO: 1940379 - DNA, 15 bp, Homo sapiens
ctgttaattgtatca

SEQ ID NO: 1940380 - DNA, 15 bp, Homo sapiens
tgttaattgtatcat

SEQ ID NO: 1940381 - DNA, 15 bp, Homo sapiens
gttaattgtatcatc

SEQ ID NO: 1940382 - DNA, 15 bp, Homo sapiens
ttaattgtatcatca

SEQ ID NO: 1940383 - DNA, 15 bp, Homo sapiens
taattgtatcatcat

SEQ ID NO: 1940384 - DNA, 15 bp, Homo sapiens
aattgtatcatcatt

SEQ ID NO: 1940385 - DNA, 15 bp, Homo sapiens
attgtatcatcattc

SEQ ID NO: 1940386 - DNA, 15 bp, Homo sapiens
ttgtatcatcattct

SEQ ID NO: 1940387 - DNA, 15 bp, Homo sapiens
tgtatcatcattctc

SEQ ID NO: 1940388 - DNA, 15 bp, Homo sapiens
gtatcatcattctct

SEQ ID NO: 1940389 - DNA, 15 bp, Homo sapiens
tatcatcattctctg

SEQ ID NO: 1940390 - DNA, 15 bp, Homo sapiens
atcatcattctctgg

SEQ ID NO: 1940391 - DNA, 15 bp, Homo sapiens
tcatcattctctggt

SEQ ID NO: 1940392 - DNA, 15 bp, Homo sapiens
catcattctctggta

SEQ ID NO: 1940393 - DNA, 15 bp, Homo sapiens
atcattctctggtat

SEQ ID NO: 1940394 - DNA, 15 bp, Homo sapiens
tcattctctggtatt

SEQ ID NO: 1940395 - DNA, 15 bp, Homo sapiens
cattctctggtatta

SEQ ID NO: 1940396 - DNA, 15 bp, Homo sapiens
attctctggtattaa

SEQ ID NO: 1940397 - DNA, 15 bp, Homo sapiens
ttctctggtattaat

SEQ ID NO: 1940398 - DNA, 15 bp, Homo sapiens
tctctggtattaata

SEQ ID NO: 1940399 - DNA, 15 bp, Homo sapiens
ctctggtattaatat

SEQ ID NO: 1940400 - DNA, 15 bp, Homo sapiens
tctggtattaatatt

SEQ ID NO: 1940401 - DNA, 15 bp, Homo sapiens
ctggtattaatattt

SEQ ID NO: 1940402 - DNA, 15 bp, Homo sapiens
tggtattaatatttt

SEQ ID NO: 1940403 - DNA, 15 bp, Homo sapiens
ggtattaatattttt

SEQ ID NO: 1940404 - DNA, 15 bp, Homo sapiens
gtattaatatttttt

SEQ ID NO: 1940405 - DNA, 15 bp, Homo sapiens
tattaatatttttta

SEQ ID NO: 1940406 - DNA, 15 bp, Homo sapiens
attaatattttttat

SEQ ID NO: 1940407 - DNA, 15 bp, Homo sapiens
ttaatattttttata

SEQ ID NO: 1940408 - DNA, 15 bp, Homo sapiens
taatattttttataa

SEQ ID NO: 1940409 - DNA, 15 bp, Homo sapiens
aatattttttataaa

SEQ ID NO: 1940410 - DNA, 15 bp, Homo sapiens
atattttttataaat

SEQ ID NO: 1940411 - DNA, 15 bp, Homo sapiens
tattttttataaatt

SEQ ID NO: 1940412 - DNA, 15 bp, Homo sapiens
attttttataaattt

SEQ ID NO: 1940413 - DNA, 15 bp, Homo sapiens
ttttttataaatttc

SEQ ID NO: 1940414 - DNA, 15 bp, Homo sapiens
tttttataaatttca

SEQ ID NO: 1940415 - DNA, 15 bp, Homo sapiens
ttttataaatttcac

SEQ ID NO: 1940416 - DNA, 15 bp, Homo sapiens
tttataaatttcact

SEQ ID NO: 1940417 - DNA, 15 bp, Homo sapiens
ttataaatttcactg

SEQ ID NO: 1940418 - DNA, 15 bp, Homo sapiens
tataaatttcactgc

SEQ ID NO: 1940419 - DNA, 15 bp, Homo sapiens
ataaatttcactgcc

SEQ ID NO: 1940420 - DNA, 15 bp, Homo sapiens
taaatttcactgcca

SEQ ID NO: 1940421 - DNA, 15 bp, Homo sapiens
aaatttcactgccac

SEQ ID NO: 1940422 - DNA, 15 bp, Homo sapiens
aatttcactgccact

SEQ ID NO: 1940423 - DNA, 15 bp, Homo sapiens
atttcactgccactc

SEQ ID NO: 1940424 - DNA, 15 bp, Homo sapiens
tttcactgccactct

SEQ ID NO: 1940425 - DNA, 15 bp, Homo sapiens
ttcactgccactctc

SEQ ID NO: 1940426 - DNA, 15 bp, Homo sapiens
tcactgccactctct

SEQ ID NO: 1940427 - DNA, 15 bp, Homo sapiens
cactgccactctctt

SEQ ID NO: 1940428 - DNA, 15 bp, Homo sapiens
actgccactctcttg

SEQ ID NO: 1940429 - DNA, 15 bp, Homo sapiens
ctgccactctcttgt

SEQ ID NO: 1940430 - DNA, 15 bp, Homo sapiens
tgccactctcttgtt

SEQ ID NO: 1940431 - DNA, 15 bp, Homo sapiens
gccactctcttgttt

SEQ ID NO: 1940432 - DNA, 15 bp, Homo sapiens
ccactctcttgttta

SEQ ID NO: 1940433 - DNA, 15 bp, Homo sapiens
cactctcttgtttag

SEQ ID NO: 1940434 - DNA, 15 bp, Homo sapiens
actctcttgtttagt

SEQ ID NO: 1940435 - DNA, 15 bp, Homo sapiens
ctctcttgtttagtg

SEQ ID NO: 1940436 - DNA, 15 bp, Homo sapiens
tctcttgtttagtgc

SEQ ID NO: 1940437 - DNA, 15 bp, Homo sapiens
ctcttgtttagtgct

SEQ ID NO: 1940438 - DNA, 15 bp, Homo sapiens
tcttgtttagtgctg

SEQ ID NO: 1940439 - DNA, 15 bp, Homo sapiens
cttgtttagtgctgt

SEQ ID NO: 1940440 - DNA, 15 bp, Homo sapiens
ttgtttagtgctgtc

SEQ ID NO: 1940441 - DNA, 15 bp, Homo sapiens
tgtttagtgctgtct

SEQ ID NO: 1940442 - DNA, 15 bp, Homo sapiens
gtttagtgctgtctt

SEQ ID NO: 1940443 - DNA, 15 bp, Homo sapiens
tttagtgctgtcttt

SEQ ID NO: 1940444 - DNA, 15 bp, Homo sapiens
ttagtgctgtctttt

SEQ ID NO: 1940445 - DNA, 15 bp, Homo sapiens
tagtgctgtcttttg

SEQ ID NO: 1940446 - DNA, 15 bp, Homo sapiens
agtgctgtcttttgc

SEQ ID NO: 1940447 - DNA, 15 bp, Homo sapiens
gtgctgtcttttgct

SEQ ID NO: 1940448 - DNA, 15 bp, Homo sapiens
tgctgtcttttgctt

SEQ ID NO: 1940449 - DNA, 15 bp, Homo sapiens
gctgtcttttgcttt

SEQ ID NO: 1940450 - DNA, 15 bp, Homo sapiens
ctgtcttttgctttg

SEQ ID NO: 1940451 - DNA, 15 bp, Homo sapiens
tgtcttttgctttga

SEQ ID NO: 1940452 - DNA, 15 bp, Homo sapiens
gtcttttgctttgat

SEQ ID NO: 1940453 - DNA, 15 bp, Homo sapiens
tcttttgctttgatt

SEQ ID NO: 1940454 - DNA, 15 bp, Homo sapiens
cttttgctttgatta

SEQ ID NO: 1940455 - DNA, 15 bp, Homo sapiens
ttttgctttgattac

SEQ ID NO: 1940456 - DNA, 15 bp, Homo sapiens
tttgctttgattacc

SEQ ID NO: 1940457 - DNA, 15 bp, Homo sapiens
ttgctttgattacca

SEQ ID NO: 1940458 - DNA, 15 bp, Homo sapiens
tgctttgattaccat

SEQ ID NO: 1940459 - DNA, 15 bp, Homo sapiens
gctttgattaccata

SEQ ID NO: 1940460 - DNA, 15 bp, Homo sapiens
ctttgattaccatat

SEQ ID NO: 1940461 - DNA, 15 bp, Homo sapiens
tttgattaccatatc

SEQ ID NO: 1940462 - DNA, 15 bp, Homo sapiens
ttgattaccatatct

SEQ ID NO: 1940463 - DNA, 15 bp, Homo sapiens
tgattaccatatctg

SEQ ID NO: 1940464 - DNA, 15 bp, Homo sapiens
gattaccatatctgt

SEQ ID NO: 1940465 - DNA, 15 bp, Homo sapiens
attaccatatctgtt

SEQ ID NO: 1940466 - DNA, 15 bp, Homo sapiens
ttaccatatctgttc

SEQ ID NO: 1940467 - DNA, 15 bp, Homo sapiens
taccatatctgttca

SEQ ID NO: 1940468 - DNA, 15 bp, Homo sapiens
accatatctgttcat

SEQ ID NO: 1940469 - DNA, 15 bp, Homo sapiens
ccatatctgttcatt

SEQ ID NO: 1940470 - DNA, 15 bp, Homo sapiens
catatctgttcattg

SEQ ID NO: 1940471 - DNA, 15 bp, Homo sapiens
atatctgttcattga

SEQ ID NO: 1940472 - DNA, 15 bp, Homo sapiens
tatctgttcattgag

SEQ ID NO: 1940473 - DNA, 15 bp, Homo sapiens
atctgttcattgagt

SEQ ID NO: 1940474 - DNA, 15 bp, Homo sapiens
tctgttcattgagtt

SEQ ID NO: 1940475 - DNA, 15 bp, Homo sapiens
ctgttcattgagttt

SEQ ID NO: 1940476 - DNA, 15 bp, Homo sapiens
tgttcattgagttta

SEQ ID NO: 1940477 - DNA, 15 bp, Homo sapiens
gttcattgagtttat

SEQ ID NO: 1940478 - DNA, 15 bp, Homo sapiens
ttcattgagtttatg

SEQ ID NO: 1940479 - DNA, 15 bp, Homo sapiens
tcattgagtttatgg

SEQ ID NO: 1940480 - DNA, 15 bp, Homo sapiens
cattgagtttatggc

SEQ ID NO: 1940481 - DNA, 15 bp, Homo sapiens
attgagtttatggct

SEQ ID NO: 1940482 - DNA, 15 bp, Homo sapiens
ttgagtttatggcta

SEQ ID NO: 1940483 - DNA, 15 bp, Homo sapiens
tgagtttatggctag

SEQ ID NO: 1940484 - DNA, 15 bp, Homo sapiens
gagtttatggctagt

SEQ ID NO: 1940485 - DNA, 15 bp, Homo sapiens
agtttatggctagtc

SEQ ID NO: 1940486 - DNA, 15 bp, Homo sapiens
gtttatggctagtct

SEQ ID NO: 1940487 - DNA, 15 bp, Homo sapiens
tttatggctagtcta

SEQ ID NO: 1940488 - DNA, 15 bp, Homo sapiens
ttatggctagtctat

SEQ ID NO: 1940489 - DNA, 15 bp, Homo sapiens
tatggctagtctatt

SEQ ID NO: 1940490 - DNA, 15 bp, Homo sapiens
atggctagtctattt

SEQ ID NO: 1940491 - DNA, 15 bp, Homo sapiens
tggctagtctatttc

SEQ ID NO: 1940492 - DNA, 15 bp, Homo sapiens
ggctagtctatttct

SEQ ID NO: 1940493 - DNA, 15 bp, Homo sapiens
gctagtctatttctt

SEQ ID NO: 1940494 - DNA, 15 bp, Homo sapiens
ctagtctatttcttc

SEQ ID NO: 1940495 - DNA, 15 bp, Homo sapiens
tagtctatttcttcc

SEQ ID NO: 1940496 - DNA, 15 bp, Homo sapiens
agtctatttcttcct

SEQ ID NO: 1940497 - DNA, 15 bp, Homo sapiens
gtctatttcttcctc

SEQ ID NO: 1940498 - DNA, 15 bp, Homo sapiens
tctatttcttcctcc

SEQ ID NO: 1940499 - DNA, 15 bp, Homo sapiens
ctatttcttcctcca

SEQ ID NO: 1940500 - DNA, 15 bp, Homo sapiens
tatttcttcctccaa

SEQ ID NO: 1940501 - DNA, 15 bp, Homo sapiens
atttcttcctccaaa

SEQ ID NO: 1940502 - DNA, 15 bp, Homo sapiens
tttcttcctccaaac

SEQ ID NO: 1940503 - DNA, 15 bp, Homo sapiens
ttcttcctccaaacc

SEQ ID NO: 1940504 - DNA, 15 bp, Homo sapiens
tcttcctccaaaccg

SEQ ID NO: 1940505 - DNA, 15 bp, Homo sapiens
cttcctccaaaccgg

SEQ ID NO: 1940506 - DNA, 15 bp, Homo sapiens
ttcctccaaaccggt

SEQ ID NO: 1940507 - DNA, 15 bp, Homo sapiens
tcctccaaaccggtg

SEQ ID NO: 1940508 - DNA, 15 bp, Homo sapiens
cctccaaaccggtgg

SEQ ID NO: 1940509 - DNA, 15 bp, Homo sapiens
ctccaaaccggtggt

SEQ ID NO: 1940510 - DNA, 15 bp, Homo sapiens
tccaaaccggtggtt

SEQ ID NO: 1940511 - DNA, 15 bp, Homo sapiens
ccaaaccggtggttt

SEQ ID NO: 1940512 - DNA, 15 bp, Homo sapiens
caaaccggtggtttt

SEQ ID NO: 1940513 - DNA, 15 bp, Homo sapiens
aaaccggtggttttc

SEQ ID NO: 1940514 - DNA, 15 bp, Homo sapiens
aaccggtggttttca

SEQ ID NO: 1940515 - DNA, 15 bp, Homo sapiens
accggtggttttcaa

SEQ ID NO: 1940516 - DNA, 15 bp, Homo sapiens
ccggtggttttcaaa

SEQ ID NO: 1940517 - DNA, 15 bp, Homo sapiens
cggtggttttcaaag

SEQ ID NO: 1940518 - DNA, 15 bp, Homo sapiens
ggtggttttcaaagt

SEQ ID NO: 1940519 - DNA, 15 bp, Homo sapiens
gtggttttcaaagta

SEQ ID NO: 1940520 - DNA, 15 bp, Homo sapiens
tggttttcaaagtat

SEQ ID NO: 1940521 - DNA, 15 bp, Homo sapiens
ggttttcaaagtatg

SEQ ID NO: 1940522 - DNA, 15 bp, Homo sapiens
gttttcaaagtatgg

SEQ ID NO: 1940523 - DNA, 15 bp, Homo sapiens
ttttcaaagtatggt

SEQ ID NO: 1940524 - DNA, 15 bp, Homo sapiens
tttcaaagtatggtc

SEQ ID NO: 1940525 - DNA, 15 bp, Homo sapiens
ttcaaagtatggtca

SEQ ID NO: 1940526 - DNA, 15 bp, Homo sapiens
tcaaagtatggtcag

SEQ ID NO: 1940527 - DNA, 15 bp, Homo sapiens
caaagtatggtcagt

SEQ ID NO: 1940528 - DNA, 15 bp, Homo sapiens
aaagtatggtcagtg

SEQ ID NO: 1940529 - DNA, 15 bp, Homo sapiens
aagtatggtcagtgg

SEQ ID NO: 1940530 - DNA, 15 bp, Homo sapiens
agtatggtcagtgga

SEQ ID NO: 1940531 - DNA, 15 bp, Homo sapiens
gtatggtcagtggac

SEQ ID NO: 1940532 - DNA, 15 bp, Homo sapiens
tatggtcagtggacg

SEQ ID NO: 1940533 - DNA, 15 bp, Homo sapiens
atggtcagtggacgg

SEQ ID NO: 1940534 - DNA, 15 bp, Homo sapiens
tggtcagtggacggg

SEQ ID NO: 1940535 - DNA, 15 bp, Homo sapiens
ggtcagtggacgggc

SEQ ID NO: 1940536 - DNA, 15 bp, Homo sapiens
gtcagtggacgggca

SEQ ID NO: 1940537 - DNA, 15 bp, Homo sapiens
tcagtggacgggcag

SEQ ID NO: 1940538 - DNA, 15 bp, Homo sapiens
cagtggacgggcagc

SEQ ID NO: 1940539 - DNA, 15 bp, Homo sapiens
agtggacgggcagca

SEQ ID NO: 1940540 - DNA, 15 bp, Homo sapiens
gtggacgggcagcat

SEQ ID NO: 1940541 - DNA, 15 bp, Homo sapiens
tggacgggcagcatc

SEQ ID NO: 1940542 - DNA, 15 bp, Homo sapiens
ggacgggcagcatca

SEQ ID NO: 1940543 - DNA, 15 bp, Homo sapiens
gacgggcagcatcag

SEQ ID NO: 1940544 - DNA, 15 bp, Homo sapiens
acgggcagcatcaga

SEQ ID NO: 1940545 - DNA, 15 bp, Homo sapiens
cgggcagcatcagaa

SEQ ID NO: 1940546 - DNA, 15 bp, Homo sapiens
gggcagcatcagaat

SEQ ID NO: 1940547 - DNA, 15 bp, Homo sapiens
ggcagcatcagaatt

SEQ ID NO: 1940548 - DNA, 15 bp, Homo sapiens
gcagcatcagaatta

SEQ ID NO: 1940549 - DNA, 15 bp, Homo sapiens
cagcatcagaattat

SEQ ID NO: 1940550 - DNA, 15 bp, Homo sapiens
agcatcagaattatc

SEQ ID NO: 1940551 - DNA, 15 bp, Homo sapiens
gcatcagaattatct

SEQ ID NO: 1940552 - DNA, 15 bp, Homo sapiens
catcagaattatctg

SEQ ID NO: 1940553 - DNA, 15 bp, Homo sapiens
atcagaattatctgt

SEQ ID NO: 1940554 - DNA, 15 bp, Homo sapiens
tcagaattatctgtg

SEQ ID NO: 1940555 - DNA, 15 bp, Homo sapiens
cagaattatctgtga

SEQ ID NO: 1940556 - DNA, 15 bp, Homo sapiens
agaattatctgtgaa

SEQ ID NO: 1940557 - DNA, 15 bp, Homo sapiens
gaattatctgtgaac

SEQ ID NO: 1940558 - DNA, 15 bp, Homo sapiens
aattatctgtgaact

SEQ ID NO: 1940559 - DNA, 15 bp, Homo sapiens
attatctgtgaactt

SEQ ID NO: 1940560 - DNA, 15 bp, Homo sapiens
ttatctgtgaacttg

SEQ ID NO: 1940561 - DNA, 15 bp, Homo sapiens
tatctgtgaacttgt

SEQ ID NO: 1940562 - DNA, 15 bp, Homo sapiens
atctgtgaacttgtt

SEQ ID NO: 1940563 - DNA, 15 bp, Homo sapiens
tctgtgaacttgtta

SEQ ID NO: 1940564 - DNA, 15 bp, Homo sapiens
ctgtgaacttgttag

SEQ ID NO: 1940565 - DNA, 15 bp, Homo sapiens
tgtgaacttgttaga

SEQ ID NO: 1940566 - DNA, 15 bp, Homo sapiens
gtgaacttgttagag

SEQ ID NO: 1940567 - DNA, 15 bp, Homo sapiens
tgaacttgttagaga

SEQ ID NO: 1940568 - DNA, 15 bp, Homo sapiens
gaacttgttagagat

SEQ ID NO: 1940569 - DNA, 15 bp, Homo sapiens
aacttgttagagatg

SEQ ID NO: 1940570 - DNA, 15 bp, Homo sapiens
acttgttagagatgc

SEQ ID NO: 1940571 - DNA, 15 bp, Homo sapiens
cttgttagagatgca

SEQ ID NO: 1940572 - DNA, 15 bp, Homo sapiens
ttgttagagatgcac

SEQ ID NO: 1940573 - DNA, 15 bp, Homo sapiens
tgttagagatgcaca

SEQ ID NO: 1940574 - DNA, 15 bp, Homo sapiens
gttagagatgcacat

SEQ ID NO: 1940575 - DNA, 15 bp, Homo sapiens
ttagagatgcacatt

SEQ ID NO: 1940576 - DNA, 15 bp, Homo sapiens
tagagatgcacattc

SEQ ID NO: 1940577 - DNA, 15 bp, Homo sapiens
agagatgcacattct

SEQ ID NO: 1940578 - DNA, 15 bp, Homo sapiens
gagatgcacattctg

SEQ ID NO: 1940579 - DNA, 15 bp, Homo sapiens
agatgcacattctgg

SEQ ID NO: 1940580 - DNA, 15 bp, Homo sapiens
gatgcacattctggc

SEQ ID NO: 1940581 - DNA, 15 bp, Homo sapiens
atgcacattctggct

SEQ ID NO: 1940582 - DNA, 15 bp, Homo sapiens
tgcacattctggctg

SEQ ID NO: 1940583 - DNA, 15 bp, Homo sapiens
gcacattctggctga

SEQ ID NO: 1940584 - DNA, 15 bp, Homo sapiens
cacattctggctgag

SEQ ID NO: 1940585 - DNA, 15 bp, Homo sapiens
acattctggctgagc

SEQ ID NO: 1940586 - DNA, 15 bp, Homo sapiens
cattctggctgagcg

SEQ ID NO: 1940587 - DNA, 15 bp, Homo sapiens
attctggctgagcgt

SEQ ID NO: 1940588 - DNA, 15 bp, Homo sapiens
ttctggctgagcgtg

SEQ ID NO: 1940589 - DNA, 15 bp, Homo sapiens
tctggctgagcgtgg

SEQ ID NO: 1940590 - DNA, 15 bp, Homo sapiens
ctggctgagcgtggt

SEQ ID NO: 1940591 - DNA, 15 bp, Homo sapiens
tggctgagcgtggtg

SEQ ID NO: 1940592 - DNA, 15 bp, Homo sapiens
ggctgagcgtggtgg

SEQ ID NO: 1940593 - DNA, 15 bp, Homo sapiens
gctgagcgtggtggc

SEQ ID NO: 1940594 - DNA, 15 bp, Homo sapiens
ctgagcgtggtggct

SEQ ID NO: 1940595 - DNA, 15 bp, Homo sapiens
tgagcgtggtggctc

SEQ ID NO: 1940596 - DNA, 15 bp, Homo sapiens
gagcgtggtggctca

SEQ ID NO: 1940597 - DNA, 15 bp, Homo sapiens
agcgtggtggctcac

SEQ ID NO: 1940598 - DNA, 15 bp, Homo sapiens
cgtggtggctcacac

SEQ ID NO: 1940599 - DNA, 15 bp, Homo sapiens
gtggtggctcacacc

SEQ ID NO: 1940600 - DNA, 15 bp, Homo sapiens
ctcacacctgtaata

SEQ ID NO: 1940601 - DNA, 15 bp, Homo sapiens
tcacacctgtaatac

SEQ ID NO: 1940602 - DNA, 15 bp, Homo sapiens
cacacctgtaatacc

SEQ ID NO: 1940603 - DNA, 15 bp, Homo sapiens
acacctgtaatacca

SEQ ID NO: 1940604 - DNA, 15 bp, Homo sapiens
cacctgtaataccaa

SEQ ID NO: 1940605 - DNA, 15 bp, Homo sapiens
acctgtaataccaat

SEQ ID NO: 1940606 - DNA, 15 bp, Homo sapiens
cctgtaataccaata

SEQ ID NO: 1940607 - DNA, 15 bp, Homo sapiens
ctgtaataccaatac

SEQ ID NO: 1940608 - DNA, 15 bp, Homo sapiens
tgtaataccaatact

SEQ ID NO: 1940609 - DNA, 15 bp, Homo sapiens
gtaataccaatactc

SEQ ID NO: 1940610 - DNA, 15 bp, Homo sapiens
taataccaatactct

SEQ ID NO: 1940611 - DNA, 15 bp, Homo sapiens
aataccaatactctg

SEQ ID NO: 1940612 - DNA, 15 bp, Homo sapiens
ataccaatactctgg

SEQ ID NO: 1940613 - DNA, 15 bp, Homo sapiens
taccaatactctggg

SEQ ID NO: 1940614 - DNA, 15 bp, Homo sapiens
accaatactctggga

SEQ ID NO: 1940615 - DNA, 15 bp, Homo sapiens
ccaatactctgggag

SEQ ID NO: 1940616 - DNA, 15 bp, Homo sapiens
caatactctgggagg

SEQ ID NO: 1940617 - DNA, 15 bp, Homo sapiens
aatactctgggaggt

SEQ ID NO: 1940618 - DNA, 15 bp, Homo sapiens
atactctgggaggtt

SEQ ID NO: 1940619 - DNA, 15 bp, Homo sapiens
tactctgggaggttg

SEQ ID NO: 1940620 - DNA, 15 bp, Homo sapiens
actctgggaggttga

SEQ ID NO: 1940621 - DNA, 15 bp, Homo sapiens
ctctgggaggttgag

SEQ ID NO: 1940622 - DNA, 15 bp, Homo sapiens
tctgggaggttgagg

SEQ ID NO: 1940623 - DNA, 15 bp, Homo sapiens
ctgggaggttgaggc

SEQ ID NO: 1940624 - DNA, 15 bp, Homo sapiens
tgggaggttgaggca

SEQ ID NO: 1940625 - DNA, 15 bp, Homo sapiens
ggttgaggcaggagg

SEQ ID NO: 1940626 - DNA, 15 bp, Homo sapiens
gttgaggcaggagga

SEQ ID NO: 1940627 - DNA, 15 bp, Homo sapiens
ttgaggcaggaggat

SEQ ID NO: 1940628 - DNA, 15 bp, Homo sapiens
gaggattgcttgagg

SEQ ID NO: 1940629 - DNA, 15 bp, Homo sapiens
aggattgcttgaggc

SEQ ID NO: 1940630 - DNA, 15 bp, Homo sapiens
cctgggcaacatagc

SEQ ID NO: 1940631 - DNA, 15 bp, Homo sapiens
ctgggcaacatagcc

SEQ ID NO: 1940632 - DNA, 15 bp, Homo sapiens
tgggcaacatagcca

SEQ ID NO: 1940633 - DNA, 15 bp, Homo sapiens
gggcaacatagccaa

SEQ ID NO: 1940634 - DNA, 15 bp, Homo sapiens
ggcaacatagccaag

SEQ ID NO: 1940635 - DNA, 15 bp, Homo sapiens
gcaacatagccaaga

SEQ ID NO: 1940636 - DNA, 15 bp, Homo sapiens
caacatagccaagac

SEQ ID NO: 1940637 - DNA, 15 bp, Homo sapiens
aacatagccaagacc

SEQ ID NO: 1940638 - DNA, 15 bp, Homo sapiens
acatagccaagacca

SEQ ID NO: 1940639 - DNA, 15 bp, Homo sapiens
catagccaagaccac

SEQ ID NO: 1940640 - DNA, 15 bp, Homo sapiens
atagccaagaccaca

SEQ ID NO: 1940641 - DNA, 15 bp, Homo sapiens
tagccaagaccacat

SEQ ID NO: 1940642 - DNA, 15 bp, Homo sapiens
agccaagaccacatc

SEQ ID NO: 1940643 - DNA, 15 bp, Homo sapiens
gccaagaccacatct

SEQ ID NO: 1940644 - DNA, 15 bp, Homo sapiens
ccaagaccacatctc

SEQ ID NO: 1940645 - DNA, 15 bp, Homo sapiens
caagaccacatctct

SEQ ID NO: 1940646 - DNA, 15 bp, Homo sapiens
aagaccacatctcta

SEQ ID NO: 1940647 - DNA, 15 bp, Homo sapiens
agaccacatctctac

SEQ ID NO: 1940648 - DNA, 15 bp, Homo sapiens
gaccacatctctaca

SEQ ID NO: 1940649 - DNA, 15 bp, Homo sapiens
accacatctctacaa

SEQ ID NO: 1940650 - DNA, 15 bp, Homo sapiens
ccacatctctacaaa

SEQ ID NO: 1940651 - DNA, 15 bp, Homo sapiens
cacatctctacaaaa

SEQ ID NO: 1940652 - DNA, 15 bp, Homo sapiens
acatctctacaaaaa

SEQ ID NO: 1940653 - DNA, 15 bp, Homo sapiens
ctctacaaaaattaa

SEQ ID NO: 1940654 - DNA, 15 bp, Homo sapiens
tctacaaaaattaaa

SEQ ID NO: 1940655 - DNA, 15 bp, Homo sapiens
ctacaaaaattaaaa

SEQ ID NO: 1940656 - DNA, 15 bp, Homo sapiens
tacaaaaattaaaaa

SEQ ID NO: 1940657 - DNA, 15 bp, Homo sapiens
aaaaattaaaaaaaa

SEQ ID NO: 1940658 - DNA, 15 bp, Homo sapiens
aaaattaaaaaaaaa

SEQ ID NO: 1940659 - DNA, 15 bp, Homo sapiens
aaattaaaaaaaaaa

SEQ ID NO: 1940660 - DNA, 15 bp, Homo sapiens
aaaaaaaaaattagc

SEQ ID NO: 1940661 - DNA, 15 bp, Homo sapiens
aaaaaattagccaga

SEQ ID NO: 1940662 - DNA, 15 bp, Homo sapiens
attagccagacatga

SEQ ID NO: 1940663 - DNA, 15 bp, Homo sapiens
ttagccagacatgat

SEQ ID NO: 1940664 - DNA, 15 bp, Homo sapiens
tagccagacatgatg

SEQ ID NO: 1940665 - DNA, 15 bp, Homo sapiens
agccagacatgatga

SEQ ID NO: 1940666 - DNA, 15 bp, Homo sapiens
gccagacatgatgac

SEQ ID NO: 1940667 - DNA, 15 bp, Homo sapiens
ccagacatgatgaca

SEQ ID NO: 1940668 - DNA, 15 bp, Homo sapiens
cagacatgatgacat

SEQ ID NO: 1940669 - DNA, 15 bp, Homo sapiens
agacatgatgacata

SEQ ID NO: 1940670 - DNA, 15 bp, Homo sapiens
gacatgatgacatac

SEQ ID NO: 1940671 - DNA, 15 bp, Homo sapiens
acatgatgacataca

SEQ ID NO: 1940672 - DNA, 15 bp, Homo sapiens
catgatgacatacac

SEQ ID NO: 1940673 - DNA, 15 bp, Homo sapiens
atgatgacatacact

SEQ ID NO: 1940674 - DNA, 15 bp, Homo sapiens
tgatgacatacactg

SEQ ID NO: 1940675 - DNA, 15 bp, Homo sapiens
gatgacatacactgg

SEQ ID NO: 1940676 - DNA, 15 bp, Homo sapiens
atgacatacactggt

SEQ ID NO: 1940677 - DNA, 15 bp, Homo sapiens
tgacatacactggta

SEQ ID NO: 1940678 - DNA, 15 bp, Homo sapiens
gacatacactggtag

SEQ ID NO: 1940679 - DNA, 15 bp, Homo sapiens
acatacactggtagt

SEQ ID NO: 1940680 - DNA, 15 bp, Homo sapiens
catacactggtagtc

SEQ ID NO: 1940681 - DNA, 15 bp, Homo sapiens
atacactggtagtcc

SEQ ID NO: 1940682 - DNA, 15 bp, Homo sapiens
tacactggtagtcct

SEQ ID NO: 1940683 - DNA, 15 bp, Homo sapiens
acactggtagtccta

SEQ ID NO: 1940684 - DNA, 15 bp, Homo sapiens
cactggtagtcctag

SEQ ID NO: 1940685 - DNA, 15 bp, Homo sapiens
actggtagtcctagc

SEQ ID NO: 1940686 - DNA, 15 bp, Homo sapiens
ctggtagtcctagct

SEQ ID NO: 1940687 - DNA, 15 bp, Homo sapiens
tggtagtcctagcta

SEQ ID NO: 1940688 - DNA, 15 bp, Homo sapiens
ggtagtcctagctac

SEQ ID NO: 1940689 - DNA, 15 bp, Homo sapiens
tagtcctagctactc

SEQ ID NO: 1940690 - DNA, 15 bp, Homo sapiens
agtcctagctactca

SEQ ID NO: 1940691 - DNA, 15 bp, Homo sapiens
gtcctagctactcag

SEQ ID NO: 1940692 - DNA, 15 bp, Homo sapiens
tcctagctactcagg

SEQ ID NO: 1940693 - DNA, 15 bp, Homo sapiens
cctagctactcagga

SEQ ID NO: 1940694 - DNA, 15 bp, Homo sapiens
ctagctactcaggag

SEQ ID NO: 1940695 - DNA, 15 bp, Homo sapiens
tagctactcaggagg

SEQ ID NO: 1940696 - DNA, 15 bp, Homo sapiens
caggaggctaaggct

SEQ ID NO: 1940697 - DNA, 15 bp, Homo sapiens
aggaggctaaggctc

SEQ ID NO: 1940698 - DNA, 15 bp, Homo sapiens
ggaggctaaggctcc

SEQ ID NO: 1940699 - DNA, 15 bp, Homo sapiens
gaggctaaggctcct

SEQ ID NO: 1940700 - DNA, 15 bp, Homo sapiens
aggctaaggctcctt

SEQ ID NO: 1940701 - DNA, 15 bp, Homo sapiens
ggctaaggctccttg

SEQ ID NO: 1940702 - DNA, 15 bp, Homo sapiens
gctaaggctccttgc

SEQ ID NO: 1940703 - DNA, 15 bp, Homo sapiens
ctaaggctccttgct

SEQ ID NO: 1940704 - DNA, 15 bp, Homo sapiens
taaggctccttgctt

SEQ ID NO: 1940705 - DNA, 15 bp, Homo sapiens
aaggctccttgcttg

SEQ ID NO: 1940706 - DNA, 15 bp, Homo sapiens
aggctccttgcttga

SEQ ID NO: 1940707 - DNA, 15 bp, Homo sapiens
ggctccttgcttgag

SEQ ID NO: 1940708 - DNA, 15 bp, Homo sapiens
gctccttgcttgagc

SEQ ID NO: 1940709 - DNA, 15 bp, Homo sapiens
ctccttgcttgagct

SEQ ID NO: 1940710 - DNA, 15 bp, Homo sapiens
tccttgcttgagctg

SEQ ID NO: 1940711 - DNA, 15 bp, Homo sapiens
ccttgcttgagctga

SEQ ID NO: 1940712 - DNA, 15 bp, Homo sapiens
cttgcttgagctgag

SEQ ID NO: 1940713 - DNA, 15 bp, Homo sapiens
ttgcttgagctgagg

SEQ ID NO: 1940714 - DNA, 15 bp, Homo sapiens
tgcttgagctgagga

SEQ ID NO: 1940715 - DNA, 15 bp, Homo sapiens
gcttgagctgaggag

SEQ ID NO: 1940716 - DNA, 15 bp, Homo sapiens
cttgagctgaggagg

SEQ ID NO: 1940717 - DNA, 15 bp, Homo sapiens
ttgagctgaggaggt

SEQ ID NO: 1940718 - DNA, 15 bp, Homo sapiens
tgagctgaggaggtc

SEQ ID NO: 1940719 - DNA, 15 bp, Homo sapiens
gagctgaggaggtca

SEQ ID NO: 1940720 - DNA, 15 bp, Homo sapiens
agctgaggaggtcaa

SEQ ID NO: 1940721 - DNA, 15 bp, Homo sapiens
gctgaggaggtcaag

SEQ ID NO: 1940722 - DNA, 15 bp, Homo sapiens
ctgaggaggtcaagg

SEQ ID NO: 1940723 - DNA, 15 bp, Homo sapiens
tgaggaggtcaaggc

SEQ ID NO: 1940724 - DNA, 15 bp, Homo sapiens
gaggaggtcaaggct

SEQ ID NO: 1940725 - DNA, 15 bp, Homo sapiens
gtcaaggctgcagta

SEQ ID NO: 1940726 - DNA, 15 bp, Homo sapiens
ggctgcagtaagttg

SEQ ID NO: 1940727 - DNA, 15 bp, Homo sapiens
gctgcagtaagttgt

SEQ ID NO: 1940728 - DNA, 15 bp, Homo sapiens
ctgcagtaagttgtg

SEQ ID NO: 1940729 - DNA, 15 bp, Homo sapiens
tgcagtaagttgtga

SEQ ID NO: 1940730 - DNA, 15 bp, Homo sapiens
gcagtaagttgtgat

SEQ ID NO: 1940731 - DNA, 15 bp, Homo sapiens
cagtaagttgtgatc

SEQ ID NO: 1940732 - DNA, 15 bp, Homo sapiens
agtaagttgtgatca

SEQ ID NO: 1940733 - DNA, 15 bp, Homo sapiens
gtaagttgtgatcat

SEQ ID NO: 1940734 - DNA, 15 bp, Homo sapiens
taagttgtgatcata

SEQ ID NO: 1940735 - DNA, 15 bp, Homo sapiens
aagttgtgatcatac

SEQ ID NO: 1940736 - DNA, 15 bp, Homo sapiens
agttgtgatcatacc

SEQ ID NO: 1940737 - DNA, 15 bp, Homo sapiens
gttgtgatcatacca

SEQ ID NO: 1940738 - DNA, 15 bp, Homo sapiens
ttgtgatcataccac

SEQ ID NO: 1940739 - DNA, 15 bp, Homo sapiens
tgtgatcataccact

SEQ ID NO: 1940740 - DNA, 15 bp, Homo sapiens
gtgatcataccactg

SEQ ID NO: 1940741 - DNA, 15 bp, Homo sapiens
tgatcataccactgt

SEQ ID NO: 1940742 - DNA, 15 bp, Homo sapiens
gatcataccactgta

SEQ ID NO: 1940743 - DNA, 15 bp, Homo sapiens
atcataccactgtaa

SEQ ID NO: 1940744 - DNA, 15 bp, Homo sapiens
tcataccactgtaat

SEQ ID NO: 1940745 - DNA, 15 bp, Homo sapiens
cataccactgtaatc

SEQ ID NO: 1940746 - DNA, 15 bp, Homo sapiens
ataccactgtaatcc

SEQ ID NO: 1940747 - DNA, 15 bp, Homo sapiens
taccactgtaatcca

SEQ ID NO: 1940748 - DNA, 15 bp, Homo sapiens
ccactgtaatccagc

SEQ ID NO: 1940749 - DNA, 15 bp, Homo sapiens
cactgtaatccagcc

SEQ ID NO: 1940750 - DNA, 15 bp, Homo sapiens
actgtaatccagcct

SEQ ID NO: 1940751 - DNA, 15 bp, Homo sapiens
ctgtaatccagccta

SEQ ID NO: 1940752 - DNA, 15 bp, Homo sapiens
tgtaatccagcctag

SEQ ID NO: 1940753 - DNA, 15 bp, Homo sapiens
gtaatccagcctagg

SEQ ID NO: 1940754 - DNA, 15 bp, Homo sapiens
taatccagcctaggg

SEQ ID NO: 1940755 - DNA, 15 bp, Homo sapiens
aatccagcctaggga

SEQ ID NO: 1940756 - DNA, 15 bp, Homo sapiens
atccagcctagggaa

SEQ ID NO: 1940757 - DNA, 15 bp, Homo sapiens
tccagcctagggaac

SEQ ID NO: 1940758 - DNA, 15 bp, Homo sapiens
ccagcctagggaaca

SEQ ID NO: 1940759 - DNA, 15 bp, Homo sapiens
cagcctagggaacag

SEQ ID NO: 1940760 - DNA, 15 bp, Homo sapiens
agcctagggaacaga

SEQ ID NO: 1940761 - DNA, 15 bp, Homo sapiens
gcctagggaacagag

SEQ ID NO: 1940762 - DNA, 15 bp, Homo sapiens
cctagggaacagagc

SEQ ID NO: 1940763 - DNA, 15 bp, Homo sapiens
ctagggaacagagca

SEQ ID NO: 1940764 - DNA, 15 bp, Homo sapiens
tagggaacagagcaa

SEQ ID NO: 1940765 - DNA, 15 bp, Homo sapiens
agggaacagagcaag

SEQ ID NO: 1940766 - DNA, 15 bp, Homo sapiens
gggaacagagcaaga

SEQ ID NO: 1940767 - DNA, 15 bp, Homo sapiens
ggaacagagcaagac

SEQ ID NO: 1940768 - DNA, 15 bp, Homo sapiens
gaacagagcaagacc

SEQ ID NO: 1940769 - DNA, 15 bp, Homo sapiens
acagagcaagacccc

SEQ ID NO: 1940770 - DNA, 15 bp, Homo sapiens
cagagcaagacccca

SEQ ID NO: 1940771 - DNA, 15 bp, Homo sapiens
agagcaagaccccat

SEQ ID NO: 1940772 - DNA, 15 bp, Homo sapiens
gagcaagaccccatc

SEQ ID NO: 1940773 - DNA, 15 bp, Homo sapiens
accccatctctaaaa

SEQ ID NO: 1940774 - DNA, 15 bp, Homo sapiens
cccatctctaaaaag

SEQ ID NO: 1940775 - DNA, 15 bp, Homo sapiens
ccatctctaaaaaga

SEQ ID NO: 1940776 - DNA, 15 bp, Homo sapiens
catctctaaaaagaa

SEQ ID NO: 1940777 - DNA, 15 bp, Homo sapiens
atctctaaaaagaaa

SEQ ID NO: 1940778 - DNA, 15 bp, Homo sapiens
tctctaaaaagaaaa

SEQ ID NO: 1940779 - DNA, 15 bp, Homo sapiens
ctctaaaaagaaaag

SEQ ID NO: 1940780 - DNA, 15 bp, Homo sapiens
tctaaaaagaaaaga

SEQ ID NO: 1940781 - DNA, 15 bp, Homo sapiens
ctaaaaagaaaagaa

SEQ ID NO: 1940782 - DNA, 15 bp, Homo sapiens
taaaaagaaaagaaa

SEQ ID NO: 1940783 - DNA, 15 bp, Homo sapiens
aaaaagaaaagaaat

SEQ ID NO: 1940784 - DNA, 15 bp, Homo sapiens
aaaagaaaagaaatg

SEQ ID NO: 1940785 - DNA, 15 bp, Homo sapiens
aaagaaaagaaatgc

SEQ ID NO: 1940786 - DNA, 15 bp, Homo sapiens
aagaaaagaaatgca

SEQ ID NO: 1940787 - DNA, 15 bp, Homo sapiens
agaaaagaaatgcac

SEQ ID NO: 1940788 - DNA, 15 bp, Homo sapiens
gaaaagaaatgcaca

SEQ ID NO: 1940789 - DNA, 15 bp, Homo sapiens
aaaagaaatgcacat

SEQ ID NO: 1940790 - DNA, 15 bp, Homo sapiens
aaagaaatgcacatt

SEQ ID NO: 1940791 - DNA, 15 bp, Homo sapiens
aagaaatgcacattc

SEQ ID NO: 1940792 - DNA, 15 bp, Homo sapiens
agaaatgcacattct

SEQ ID NO: 1940793 - DNA, 15 bp, Homo sapiens
gaaatgcacattctc

SEQ ID NO: 1940794 - DNA, 15 bp, Homo sapiens
aaatgcacattctca

SEQ ID NO: 1940795 - DNA, 15 bp, Homo sapiens
aatgcacattctcag

SEQ ID NO: 1940796 - DNA, 15 bp, Homo sapiens
atgcacattctcagg

SEQ ID NO: 1940797 - DNA, 15 bp, Homo sapiens
tgcacattctcaggt

SEQ ID NO: 1940798 - DNA, 15 bp, Homo sapiens
gcacattctcaggtc

SEQ ID NO: 1940799 - DNA, 15 bp, Homo sapiens
cacattctcaggtcc

SEQ ID NO: 1940800 - DNA, 15 bp, Homo sapiens
acattctcaggtccc

SEQ ID NO: 1940801 - DNA, 15 bp, Homo sapiens
cattctcaggtccca

SEQ ID NO: 1940802 - DNA, 15 bp, Homo sapiens
attctcaggtcccat

SEQ ID NO: 1940803 - DNA, 15 bp, Homo sapiens
ttctcaggtcccatc

SEQ ID NO: 1940804 - DNA, 15 bp, Homo sapiens
tctcaggtcccatcc

SEQ ID NO: 1940805 - DNA, 15 bp, Homo sapiens
ctcaggtcccatcct

SEQ ID NO: 1940806 - DNA, 15 bp, Homo sapiens
tcaggtcccatcctc

SEQ ID NO: 1940807 - DNA, 15 bp, Homo sapiens
caggtcccatcctcg

SEQ ID NO: 1940808 - DNA, 15 bp, Homo sapiens
aggtcccatcctcga

SEQ ID NO: 1940809 - DNA, 15 bp, Homo sapiens
ggtcccatcctcgac

SEQ ID NO: 1940810 - DNA, 15 bp, Homo sapiens
gtcccatcctcgacc

SEQ ID NO: 1940811 - DNA, 15 bp, Homo sapiens
tcccatcctcgaccc

SEQ ID NO: 1940812 - DNA, 15 bp, Homo sapiens
cccatcctcgaccca

SEQ ID NO: 1940813 - DNA, 15 bp, Homo sapiens
ccatcctcgacccaa

SEQ ID NO: 1940814 - DNA, 15 bp, Homo sapiens
catcctcgacccaat

SEQ ID NO: 1940815 - DNA, 15 bp, Homo sapiens
atcctcgacccaata

SEQ ID NO: 1940816 - DNA, 15 bp, Homo sapiens
tcctcgacccaataa

SEQ ID NO: 1940817 - DNA, 15 bp, Homo sapiens
cctcgacccaataaa

SEQ ID NO: 1940818 - DNA, 15 bp, Homo sapiens
ctcgacccaataaat

SEQ ID NO: 1940819 - DNA, 15 bp, Homo sapiens
tcgacccaataaatc

SEQ ID NO: 1940820 - DNA, 15 bp, Homo sapiens
cgacccaataaatca

SEQ ID NO: 1940821 - DNA, 15 bp, Homo sapiens
gacccaataaatcaa

SEQ ID NO: 1940822 - DNA, 15 bp, Homo sapiens
acccaataaatcaaa

SEQ ID NO: 1940823 - DNA, 15 bp, Homo sapiens
cccaataaatcaaaa

SEQ ID NO: 1940824 - DNA, 15 bp, Homo sapiens
ccaataaatcaaaag

SEQ ID NO: 1940825 - DNA, 15 bp, Homo sapiens
caataaatcaaaagc

SEQ ID NO: 1940826 - DNA, 15 bp, Homo sapiens
aataaatcaaaagct

SEQ ID NO: 1940827 - DNA, 15 bp, Homo sapiens
ataaatcaaaagctc

SEQ ID NO: 1940828 - DNA, 15 bp, Homo sapiens
taaatcaaaagctct

SEQ ID NO: 1940829 - DNA, 15 bp, Homo sapiens
aaatcaaaagctcta

SEQ ID NO: 1940830 - DNA, 15 bp, Homo sapiens
aatcaaaagctctac

SEQ ID NO: 1940831 - DNA, 15 bp, Homo sapiens
atcaaaagctctacc

SEQ ID NO: 1940832 - DNA, 15 bp, Homo sapiens
tcaaaagctctacct

SEQ ID NO: 1940833 - DNA, 15 bp, Homo sapiens
caaaagctctacctg

SEQ ID NO: 1940834 - DNA, 15 bp, Homo sapiens
aaaagctctacctga

SEQ ID NO: 1940835 - DNA, 15 bp, Homo sapiens
aaagctctacctgag

SEQ ID NO: 1940836 - DNA, 15 bp, Homo sapiens
aagctctacctgagt

SEQ ID NO: 1940837 - DNA, 15 bp, Homo sapiens
agctctacctgagtt

SEQ ID NO: 1940838 - DNA, 15 bp, Homo sapiens
gctctacctgagttt

SEQ ID NO: 1940839 - DNA, 15 bp, Homo sapiens
ctctacctgagtttc

SEQ ID NO: 1940840 - DNA, 15 bp, Homo sapiens
tctacctgagtttca

SEQ ID NO: 1940841 - DNA, 15 bp, Homo sapiens
ctacctgagtttcag

SEQ ID NO: 1940842 - DNA, 15 bp, Homo sapiens
tacctgagtttcaga

SEQ ID NO: 1940843 - DNA, 15 bp, Homo sapiens
acctgagtttcagat

SEQ ID NO: 1940844 - DNA, 15 bp, Homo sapiens
cctgagtttcagatt

SEQ ID NO: 1940845 - DNA, 15 bp, Homo sapiens
ctgagtttcagattt

SEQ ID NO: 1940846 - DNA, 15 bp, Homo sapiens
tgagtttcagattta

SEQ ID NO: 1940847 - DNA, 15 bp, Homo sapiens
gagtttcagatttag

SEQ ID NO: 1940848 - DNA, 15 bp, Homo sapiens
agtttcagatttagt

SEQ ID NO: 1940849 - DNA, 15 bp, Homo sapiens
gtttcagatttagta

SEQ ID NO: 1940850 - DNA, 15 bp, Homo sapiens
tttcagatttagtag

SEQ ID NO: 1940851 - DNA, 15 bp, Homo sapiens
ttcagatttagtagt

SEQ ID NO: 1940852 - DNA, 15 bp, Homo sapiens
tcagatttagtagtt

SEQ ID NO: 1940853 - DNA, 15 bp, Homo sapiens
cagatttagtagttc

SEQ ID NO: 1940854 - DNA, 15 bp, Homo sapiens
agatttagtagttcc

SEQ ID NO: 1940855 - DNA, 15 bp, Homo sapiens
gatttagtagttccg

SEQ ID NO: 1940856 - DNA, 15 bp, Homo sapiens
atttagtagttccgt

SEQ ID NO: 1940857 - DNA, 15 bp, Homo sapiens
tttagtagttccgtg

SEQ ID NO: 1940858 - DNA, 15 bp, Homo sapiens
ttagtagttccgtgt

SEQ ID NO: 1940859 - DNA, 15 bp, Homo sapiens
tagtagttccgtgtt

SEQ ID NO: 1940860 - DNA, 15 bp, Homo sapiens
agtagttccgtgttg

SEQ ID NO: 1940861 - DNA, 15 bp, Homo sapiens
gtagttccgtgttgg

SEQ ID NO: 1940862 - DNA, 15 bp, Homo sapiens
tagttccgtgttggg

SEQ ID NO: 1940863 - DNA, 15 bp, Homo sapiens
agttccgtgttgggg

SEQ ID NO: 1940864 - DNA, 15 bp, Homo sapiens
gttccgtgttggggt

SEQ ID NO: 1940865 - DNA, 15 bp, Homo sapiens
ttccgtgttggggtt

SEQ ID NO: 1940866 - DNA, 15 bp, Homo sapiens
tccgtgttggggttc

SEQ ID NO: 1940867 - DNA, 15 bp, Homo sapiens
ccgtgttggggttca

SEQ ID NO: 1940868 - DNA, 15 bp, Homo sapiens
cgtgttggggttcaa

SEQ ID NO: 1940869 - DNA, 15 bp, Homo sapiens
gtgttggggttcaac

SEQ ID NO: 1940870 - DNA, 15 bp, Homo sapiens
tgttggggttcaaca

SEQ ID NO: 1940871 - DNA, 15 bp, Homo sapiens
gttggggttcaacaa

SEQ ID NO: 1940872 - DNA, 15 bp, Homo sapiens
ttggggttcaacaat

SEQ ID NO: 1940873 - DNA, 15 bp, Homo sapiens
tggggttcaacaatg

SEQ ID NO: 1940874 - DNA, 15 bp, Homo sapiens
ggggttcaacaatgt

SEQ ID NO: 1940875 - DNA, 15 bp, Homo sapiens
gggttcaacaatgtg

SEQ ID NO: 1940876 - DNA, 15 bp, Homo sapiens
ggttcaacaatgtgt

SEQ ID NO: 1940877 - DNA, 15 bp, Homo sapiens
gttcaacaatgtgta

SEQ ID NO: 1940878 - DNA, 15 bp, Homo sapiens
ttcaacaatgtgtag

SEQ ID NO: 1940879 - DNA, 15 bp, Homo sapiens
tcaacaatgtgtagg

SEQ ID NO: 1940880 - DNA, 15 bp, Homo sapiens
caacaatgtgtaggg

SEQ ID NO: 1940881 - DNA, 15 bp, Homo sapiens
aacaatgtgtagggg

SEQ ID NO: 1940882 - DNA, 15 bp, Homo sapiens
acaatgtgtaggggt

SEQ ID NO: 1940883 - DNA, 15 bp, Homo sapiens
caatgtgtaggggtc

SEQ ID NO: 1940884 - DNA, 15 bp, Homo sapiens
aatgtgtaggggtcc

SEQ ID NO: 1940885 - DNA, 15 bp, Homo sapiens
atgtgtaggggtcct

SEQ ID NO: 1940886 - DNA, 15 bp, Homo sapiens
tgtgtaggggtccta

SEQ ID NO: 1940887 - DNA, 15 bp, Homo sapiens
gtgtaggggtcctat

SEQ ID NO: 1940888 - DNA, 15 bp, Homo sapiens
tgtaggggtcctata

SEQ ID NO: 1940889 - DNA, 15 bp, Homo sapiens
gtaggggtcctatac

SEQ ID NO: 1940890 - DNA, 15 bp, Homo sapiens
taggggtcctatacg

SEQ ID NO: 1940891 - DNA, 15 bp, Homo sapiens
aggggtcctatacgt

SEQ ID NO: 1940892 - DNA, 15 bp, Homo sapiens
ggggtcctatacgta

SEQ ID NO: 1940893 - DNA, 15 bp, Homo sapiens
gggtcctatacgtat

SEQ ID NO: 1940894 - DNA, 15 bp, Homo sapiens
ggtcctatacgtatt

SEQ ID NO: 1940895 - DNA, 15 bp, Homo sapiens
gtcctatacgtatta

SEQ ID NO: 1940896 - DNA, 15 bp, Homo sapiens
tcctatacgtattag

SEQ ID NO: 1940897 - DNA, 15 bp, Homo sapiens
cctatacgtattagc

SEQ ID NO: 1940898 - DNA, 15 bp, Homo sapiens
ctatacgtattagct

SEQ ID NO: 1940899 - DNA, 15 bp, Homo sapiens
tatacgtattagctc

SEQ ID NO: 1940900 - DNA, 15 bp, Homo sapiens
atacgtattagctct

SEQ ID NO: 1940901 - DNA, 15 bp, Homo sapiens
tacgtattagctctc

SEQ ID NO: 1940902 - DNA, 15 bp, Homo sapiens
acgtattagctctca

SEQ ID NO: 1940903 - DNA, 15 bp, Homo sapiens
cgtattagctctcac

SEQ ID NO: 1940904 - DNA, 15 bp, Homo sapiens
gtattagctctcact

SEQ ID NO: 1940905 - DNA, 15 bp, Homo sapiens
tattagctctcactc

SEQ ID NO: 1940906 - DNA, 15 bp, Homo sapiens
attagctctcactcc

SEQ ID NO: 1940907 - DNA, 15 bp, Homo sapiens
ttagctctcactcct

SEQ ID NO: 1940908 - DNA, 15 bp, Homo sapiens
tagctctcactcctt

SEQ ID NO: 1940909 - DNA, 15 bp, Homo sapiens
agctctcactcctta

SEQ ID NO: 1940910 - DNA, 15 bp, Homo sapiens
gctctcactccttat

SEQ ID NO: 1940911 - DNA, 15 bp, Homo sapiens
ctctcactccttatt

SEQ ID NO: 1940912 - DNA, 15 bp, Homo sapiens
tctcactccttattc

SEQ ID NO: 1940913 - DNA, 15 bp, Homo sapiens
ctcactccttattcc

SEQ ID NO: 1940914 - DNA, 15 bp, Homo sapiens
tcactccttattcct

SEQ ID NO: 1940915 - DNA, 15 bp, Homo sapiens
cactccttattcctc

SEQ ID NO: 1940916 - DNA, 15 bp, Homo sapiens
actccttattcctcc

SEQ ID NO: 1940917 - DNA, 15 bp, Homo sapiens
ctccttattcctcca

SEQ ID NO: 1940918 - DNA, 15 bp, Homo sapiens
tccttattcctccaa

SEQ ID NO: 1940919 - DNA, 15 bp, Homo sapiens
ccttattcctccaac

SEQ ID NO: 1940920 - DNA, 15 bp, Homo sapiens
cttattcctccaact

SEQ ID NO: 1940921 - DNA, 15 bp, Homo sapiens
ttattcctccaactt

SEQ ID NO: 1940922 - DNA, 15 bp, Homo sapiens
tattcctccaacttg

SEQ ID NO: 1940923 - DNA, 15 bp, Homo sapiens
attcctccaacttgg

SEQ ID NO: 1940924 - DNA, 15 bp, Homo sapiens
ttcctccaacttggt

SEQ ID NO: 1940925 - DNA, 15 bp, Homo sapiens
tcctccaacttggtc

SEQ ID NO: 1940926 - DNA, 15 bp, Homo sapiens
cctccaacttggtca

SEQ ID NO: 1940927 - DNA, 15 bp, Homo sapiens
ctccaacttggtcat

SEQ ID NO: 1940928 - DNA, 15 bp, Homo sapiens
tccaacttggtcatg

SEQ ID NO: 1940929 - DNA, 15 bp, Homo sapiens
ccaacttggtcatgg

SEQ ID NO: 1940930 - DNA, 15 bp, Homo sapiens
caacttggtcatggt

SEQ ID NO: 1940931 - DNA, 15 bp, Homo sapiens
aacttggtcatggta

SEQ ID NO: 1940932 - DNA, 15 bp, Homo sapiens
acttggtcatggtat

SEQ ID NO: 1940933 - DNA, 15 bp, Homo sapiens
cttggtcatggtata

SEQ ID NO: 1940934 - DNA, 15 bp, Homo sapiens
ttggtcatggtatat

SEQ ID NO: 1940935 - DNA, 15 bp, Homo sapiens
tggtcatggtatata

SEQ ID NO: 1940936 - DNA, 15 bp, Homo sapiens
ggtcatggtatataa

SEQ ID NO: 1940937 - DNA, 15 bp, Homo sapiens
gtcatggtatataat

SEQ ID NO: 1940938 - DNA, 15 bp, Homo sapiens
tcatggtatataatt

SEQ ID NO: 1940939 - DNA, 15 bp, Homo sapiens
catggtatataattc

SEQ ID NO: 1940940 - DNA, 15 bp, Homo sapiens
atggtatataattct

SEQ ID NO: 1940941 - DNA, 15 bp, Homo sapiens
tggtatataattctt

SEQ ID NO: 1940942 - DNA, 15 bp, Homo sapiens
ggtatataattcttt

SEQ ID NO: 1940943 - DNA, 15 bp, Homo sapiens
gtatataattctttt

SEQ ID NO: 1940944 - DNA, 15 bp, Homo sapiens
tatataattcttttt

SEQ ID NO: 1940945 - DNA, 15 bp, Homo sapiens
atataattcttttta

SEQ ID NO: 1940946 - DNA, 15 bp, Homo sapiens
tataattctttttat

SEQ ID NO: 1940947 - DNA, 15 bp, Homo sapiens
ataattctttttata

SEQ ID NO: 1940948 - DNA, 15 bp, Homo sapiens
taattctttttatag

SEQ ID NO: 1940949 - DNA, 15 bp, Homo sapiens
aattctttttataga

SEQ ID NO: 1940950 - DNA, 15 bp, Homo sapiens
attctttttatagat

SEQ ID NO: 1940951 - DNA, 15 bp, Homo sapiens
ttctttttatagatt

SEQ ID NO: 1940952 - DNA, 15 bp, Homo sapiens
tctttttatagattc

SEQ ID NO: 1940953 - DNA, 15 bp, Homo sapiens
ctttttatagattcc

SEQ ID NO: 1940954 - DNA, 15 bp, Homo sapiens
tttttatagattcct

SEQ ID NO: 1940955 - DNA, 15 bp, Homo sapiens
ttttatagattcctg

SEQ ID NO: 1940956 - DNA, 15 bp, Homo sapiens
tttatagattcctgg

SEQ ID NO: 1940957 - DNA, 15 bp, Homo sapiens
ttatagattcctgga

SEQ ID NO: 1940958 - DNA, 15 bp, Homo sapiens
tatagattcctggat

SEQ ID NO: 1940959 - DNA, 15 bp, Homo sapiens
atagattcctggatt

SEQ ID NO: 1940960 - DNA, 15 bp, Homo sapiens
tagattcctggattt

SEQ ID NO: 1940961 - DNA, 15 bp, Homo sapiens
agattcctggatttt

SEQ ID NO: 1940962 - DNA, 15 bp, Homo sapiens
gattcctggattttg

SEQ ID NO: 1940963 - DNA, 15 bp, Homo sapiens
attcctggattttgt

SEQ ID NO: 1940964 - DNA, 15 bp, Homo sapiens
ttcctggattttgtt

SEQ ID NO: 1940965 - DNA, 15 bp, Homo sapiens
tcctggattttgttt

SEQ ID NO: 1940966 - DNA, 15 bp, Homo sapiens
cctggattttgtttg

SEQ ID NO: 1940967 - DNA, 15 bp, Homo sapiens
ctggattttgtttgc

SEQ ID NO: 1940968 - DNA, 15 bp, Homo sapiens
tggattttgtttgct

SEQ ID NO: 1940969 - DNA, 15 bp, Homo sapiens
ggattttgtttgcta

SEQ ID NO: 1940970 - DNA, 15 bp, Homo sapiens
gattttgtttgctaa

SEQ ID NO: 1940971 - DNA, 15 bp, Homo sapiens
attttgtttgctaat

SEQ ID NO: 1940972 - DNA, 15 bp, Homo sapiens
ttttgtttgctaata

SEQ ID NO: 1940973 - DNA, 15 bp, Homo sapiens
tttgtttgctaatat

SEQ ID NO: 1940974 - DNA, 15 bp, Homo sapiens
ttgtttgctaatatt

SEQ ID NO: 1940975 - DNA, 15 bp, Homo sapiens
tgtttgctaatattt

SEQ ID NO: 1940976 - DNA, 15 bp, Homo sapiens
gtttgctaatatttt

SEQ ID NO: 1940977 - DNA, 15 bp, Homo sapiens
tttgctaatatttta

SEQ ID NO: 1940978 - DNA, 15 bp, Homo sapiens
ttgctaatattttat

SEQ ID NO: 1940979 - DNA, 15 bp, Homo sapiens
tgctaatattttatt

SEQ ID NO: 1940980 - DNA, 15 bp, Homo sapiens
gctaatattttattg

SEQ ID NO: 1940981 - DNA, 15 bp, Homo sapiens
ctaatattttattga

SEQ ID NO: 1940982 - DNA, 15 bp, Homo sapiens
taatattttattgag

SEQ ID NO: 1940983 - DNA, 15 bp, Homo sapiens
aatattttattgagg

SEQ ID NO: 1940984 - DNA, 15 bp, Homo sapiens
atattttattgagga

SEQ ID NO: 1940985 - DNA, 15 bp, Homo sapiens
tattttattgaggat

SEQ ID NO: 1940986 - DNA, 15 bp, Homo sapiens
attttattgaggatt

SEQ ID NO: 1940987 - DNA, 15 bp, Homo sapiens
ttttattgaggattt

SEQ ID NO: 1940988 - DNA, 15 bp, Homo sapiens
tttattgaggatttt

SEQ ID NO: 1940989 - DNA, 15 bp, Homo sapiens
ttattgaggattttt

SEQ ID NO: 1940990 - DNA, 15 bp, Homo sapiens
tattgaggatttttg

SEQ ID NO: 1940991 - DNA, 15 bp, Homo sapiens
attgaggatttttgc

SEQ ID NO: 1940992 - DNA, 15 bp, Homo sapiens
ttgaggatttttgca

SEQ ID NO: 1940993 - DNA, 15 bp, Homo sapiens
tgaggatttttgcat

SEQ ID NO: 1940994 - DNA, 15 bp, Homo sapiens
gaggatttttgcatt

SEQ ID NO: 1940995 - DNA, 15 bp, Homo sapiens
aggatttttgcattt

SEQ ID NO: 1940996 - DNA, 15 bp, Homo sapiens
ggatttttgcattta

SEQ ID NO: 1940997 - DNA, 15 bp, Homo sapiens
gatttttgcatttat

SEQ ID NO: 1940998 - DNA, 15 bp, Homo sapiens
atttttgcatttata

SEQ ID NO: 1940999 - DNA, 15 bp, Homo sapiens
tttttgcatttatat

SEQ ID NO: 1941000 - DNA, 15 bp, Homo sapiens
ttttgcatttatatt

SEQ ID NO: 1941001 - DNA, 15 bp, Homo sapiens
tttgcatttatattt

SEQ ID NO: 1941002 - DNA, 15 bp, Homo sapiens
ttgcatttatattta

SEQ ID NO: 1941003 - DNA, 15 bp, Homo sapiens
tgcatttatatttat

SEQ ID NO: 1941004 - DNA, 15 bp, Homo sapiens
gcatttatatttata

SEQ ID NO: 1941005 - DNA, 15 bp, Homo sapiens
catttatatttatac

SEQ ID NO: 1941006 - DNA, 15 bp, Homo sapiens
atttatatttataca

SEQ ID NO: 1941007 - DNA, 15 bp, Homo sapiens
tttatatttatacag

SEQ ID NO: 1941008 - DNA, 15 bp, Homo sapiens
ttatatttatacagg

SEQ ID NO: 1941009 - DNA, 15 bp, Homo sapiens
tatatttatacagga

SEQ ID NO: 1941010 - DNA, 15 bp, Homo sapiens
atatttatacaggat

SEQ ID NO: 1941011 - DNA, 15 bp, Homo sapiens
tatttatacaggata

SEQ ID NO: 1941012 - DNA, 15 bp, Homo sapiens
atttatacaggatat

SEQ ID NO: 1941013 - DNA, 15 bp, Homo sapiens
tttatacaggatata

SEQ ID NO: 1941014 - DNA, 15 bp, Homo sapiens
ttatacaggatatat

SEQ ID NO: 1941015 - DNA, 15 bp, Homo sapiens
tatacaggatatatg

SEQ ID NO: 1941016 - DNA, 15 bp, Homo sapiens
atacaggatatatgt

SEQ ID NO: 1941017 - DNA, 15 bp, Homo sapiens
tacaggatatatgtc

SEQ ID NO: 1941018 - DNA, 15 bp, Homo sapiens
acaggatatatgtct

SEQ ID NO: 1941019 - DNA, 15 bp, Homo sapiens
caggatatatgtctg

SEQ ID NO: 1941020 - DNA, 15 bp, Homo sapiens
aggatatatgtctgt

SEQ ID NO: 1941021 - DNA, 15 bp, Homo sapiens
ggatatatgtctgtc

SEQ ID NO: 1941022 - DNA, 15 bp, Homo sapiens
gatatatgtctgtcc

SEQ ID NO: 1941023 - DNA, 15 bp, Homo sapiens
atatatgtctgtcct

SEQ ID NO: 1941024 - DNA, 15 bp, Homo sapiens
tatatgtctgtcctt

SEQ ID NO: 1941025 - DNA, 15 bp, Homo sapiens
atatgtctgtccttt

SEQ ID NO: 1941026 - DNA, 15 bp, Homo sapiens
tatgtctgtcctttt

SEQ ID NO: 1941027 - DNA, 15 bp, Homo sapiens
atgtctgtccttttc

SEQ ID NO: 1941028 - DNA, 15 bp, Homo sapiens
tgtctgtccttttct

SEQ ID NO: 1941029 - DNA, 15 bp, Homo sapiens
gtctgtccttttctt

SEQ ID NO: 1941030 - DNA, 15 bp, Homo sapiens
tctgtccttttcttg

SEQ ID NO: 1941031 - DNA, 15 bp, Homo sapiens
ctgtccttttcttgt

SEQ ID NO: 1941032 - DNA, 15 bp, Homo sapiens
tgtccttttcttgtg

SEQ ID NO: 1941033 - DNA, 15 bp, Homo sapiens
gtccttttcttgtga

SEQ ID NO: 1941034 - DNA, 15 bp, Homo sapiens
tccttttcttgtgat

SEQ ID NO: 1941035 - DNA, 15 bp, Homo sapiens
ccttttcttgtgatg

SEQ ID NO: 1941036 - DNA, 15 bp, Homo sapiens
cttttcttgtgatgt

SEQ ID NO: 1941037 - DNA, 15 bp, Homo sapiens
ttttcttgtgatgtc

SEQ ID NO: 1941038 - DNA, 15 bp, Homo sapiens
tttcttgtgatgtct

SEQ ID NO: 1941039 - DNA, 15 bp, Homo sapiens
ttcttgtgatgtctt

SEQ ID NO: 1941040 - DNA, 15 bp, Homo sapiens
tcttgtgatgtcttt

SEQ ID NO: 1941041 - DNA, 15 bp, Homo sapiens
cttgtgatgtctttg

SEQ ID NO: 1941042 - DNA, 15 bp, Homo sapiens
ttgtgatgtctttgt

SEQ ID NO: 1941043 - DNA, 15 bp, Homo sapiens
tgtgatgtctttgtc

SEQ ID NO: 1941044 - DNA, 15 bp, Homo sapiens
gtgatgtctttgtct

SEQ ID NO: 1941045 - DNA, 15 bp, Homo sapiens
tgatgtctttgtctg

SEQ ID NO: 1941046 - DNA, 15 bp, Homo sapiens
gatgtctttgtctga

SEQ ID NO: 1941047 - DNA, 15 bp, Homo sapiens
atgtctttgtctgat

SEQ ID NO: 1941048 - DNA, 15 bp, Homo sapiens
tgtctttgtctgatt

SEQ ID NO: 1941049 - DNA, 15 bp, Homo sapiens
gtctttgtctgattt

SEQ ID NO: 1941050 - DNA, 15 bp, Homo sapiens
tctttgtctgatttt

SEQ ID NO: 1941051 - DNA, 15 bp, Homo sapiens
ctttgtctgattttg

SEQ ID NO: 1941052 - DNA, 15 bp, Homo sapiens
tttgtctgattttgg

SEQ ID NO: 1941053 - DNA, 15 bp, Homo sapiens
ttgtctgattttggt

SEQ ID NO: 1941054 - DNA, 15 bp, Homo sapiens
tgtctgattttggta

SEQ ID NO: 1941055 - DNA, 15 bp, Homo sapiens
gtctgattttggtat

SEQ ID NO: 1941056 - DNA, 15 bp, Homo sapiens
tctgattttggtatc

SEQ ID NO: 1941057 - DNA, 15 bp, Homo sapiens
ctgattttggtatca

SEQ ID NO: 1941058 - DNA, 15 bp, Homo sapiens
tgattttggtatcat

SEQ ID NO: 1941059 - DNA, 15 bp, Homo sapiens
gattttggtatcata

SEQ ID NO: 1941060 - DNA, 15 bp, Homo sapiens
taccatgatgaagtg

SEQ ID NO: 1941061 - DNA, 15 bp, Homo sapiens
accatgatgaagtgg

SEQ ID NO: 1941062 - DNA, 15 bp, Homo sapiens
ccatgatgaagtggg

SEQ ID NO: 1941063 - DNA, 15 bp, Homo sapiens
catgatgaagtggga

SEQ ID NO: 1941064 - DNA, 15 bp, Homo sapiens
atgatgaagtgggat

SEQ ID NO: 1941065 - DNA, 15 bp, Homo sapiens
tgatgaagtgggatt

SEQ ID NO: 1941066 - DNA, 15 bp, Homo sapiens
gatgaagtgggattt

SEQ ID NO: 1941067 - DNA, 15 bp, Homo sapiens
atgaagtgggattta

SEQ ID NO: 1941068 - DNA, 15 bp, Homo sapiens
tgaagtgggatttat

SEQ ID NO: 1941069 - DNA, 15 bp, Homo sapiens
gaagtgggatttatt

SEQ ID NO: 1941070 - DNA, 15 bp, Homo sapiens
aagtgggatttattc

SEQ ID NO: 1941071 - DNA, 15 bp, Homo sapiens
agtgggatttattcc

SEQ ID NO: 1941072 - DNA, 15 bp, Homo sapiens
gtgggatttattcca

SEQ ID NO: 1941073 - DNA, 15 bp, Homo sapiens
tgggatttattccag

SEQ ID NO: 1941074 - DNA, 15 bp, Homo sapiens
gggatttattccagg

SEQ ID NO: 1941075 - DNA, 15 bp, Homo sapiens
ggatttattccagga

SEQ ID NO: 1941076 - DNA, 15 bp, Homo sapiens
gatttattccaggaa

SEQ ID NO: 1941077 - DNA, 15 bp, Homo sapiens
atttattccaggaat

SEQ ID NO: 1941078 - DNA, 15 bp, Homo sapiens
tttattccaggaatg

SEQ ID NO: 1941079 - DNA, 15 bp, Homo sapiens
ttattccaggaatgc

SEQ ID NO: 1941080 - DNA, 15 bp, Homo sapiens
tattccaggaatgca

SEQ ID NO: 1941081 - DNA, 15 bp, Homo sapiens
attccaggaatgcaa

SEQ ID NO: 1941082 - DNA, 15 bp, Homo sapiens
ttccaggaatgcaag

SEQ ID NO: 1941083 - DNA, 15 bp, Homo sapiens
tccaggaatgcaagt

SEQ ID NO: 1941084 - DNA, 15 bp, Homo sapiens
ccaggaatgcaagtt

SEQ ID NO: 1941085 - DNA, 15 bp, Homo sapiens
caggaatgcaagttt

SEQ ID NO: 1941086 - DNA, 15 bp, Homo sapiens
aggaatgcaagtttg

SEQ ID NO: 1941087 - DNA, 15 bp, Homo sapiens
ggaatgcaagtttgg

SEQ ID NO: 1941088 - DNA, 15 bp, Homo sapiens
gaatgcaagtttggt

SEQ ID NO: 1941089 - DNA, 15 bp, Homo sapiens
aatgcaagtttggtt

SEQ ID NO: 1941090 - DNA, 15 bp, Homo sapiens
atgcaagtttggttc

SEQ ID NO: 1941091 - DNA, 15 bp, Homo sapiens
tgcaagtttggttca

SEQ ID NO: 1941092 - DNA, 15 bp, Homo sapiens
gcaagtttggttcaa

SEQ ID NO: 1941093 - DNA, 15 bp, Homo sapiens
caagtttggttcaac

SEQ ID NO: 1941094 - DNA, 15 bp, Homo sapiens
aagtttggttcaacg

SEQ ID NO: 1941095 - DNA, 15 bp, Homo sapiens
agtttggttcaacgt

SEQ ID NO: 1941096 - DNA, 15 bp, Homo sapiens
gtttggttcaacgtg

SEQ ID NO: 1941097 - DNA, 15 bp, Homo sapiens
tttggttcaacgtgc

SEQ ID NO: 1941098 - DNA, 15 bp, Homo sapiens
ttggttcaacgtgct

SEQ ID NO: 1941099 - DNA, 15 bp, Homo sapiens
tggttcaacgtgcta

SEQ ID NO: 1941100 - DNA, 15 bp, Homo sapiens
ggttcaacgtgctaa

SEQ ID NO: 1941101 - DNA, 15 bp, Homo sapiens
gttcaacgtgctaaa

SEQ ID NO: 1941102 - DNA, 15 bp, Homo sapiens
ttcaacgtgctaaaa

SEQ ID NO: 1941103 - DNA, 15 bp, Homo sapiens
tcaacgtgctaaaac

SEQ ID NO: 1941104 - DNA, 15 bp, Homo sapiens
caacgtgctaaaacc

SEQ ID NO: 1941105 - DNA, 15 bp, Homo sapiens
aacgtgctaaaacca

SEQ ID NO: 1941106 - DNA, 15 bp, Homo sapiens
acgtgctaaaaccaa

SEQ ID NO: 1941107 - DNA, 15 bp, Homo sapiens
cgtgctaaaaccaat

SEQ ID NO: 1941108 - DNA, 15 bp, Homo sapiens
gtgctaaaaccaatc

SEQ ID NO: 1941109 - DNA, 15 bp, Homo sapiens
tgctaaaaccaatca

SEQ ID NO: 1941110 - DNA, 15 bp, Homo sapiens
gctaaaaccaatcaa

SEQ ID NO: 1941111 - DNA, 15 bp, Homo sapiens
ctaaaaccaatcaat

SEQ ID NO: 1941112 - DNA, 15 bp, Homo sapiens
taaaaccaatcaatg

SEQ ID NO: 1941113 - DNA, 15 bp, Homo sapiens
aaaaccaatcaatgt

SEQ ID NO: 1941114 - DNA, 15 bp, Homo sapiens
aaaccaatcaatgta

SEQ ID NO: 1941115 - DNA, 15 bp, Homo sapiens
aaccaatcaatgtaa

SEQ ID NO: 1941116 - DNA, 15 bp, Homo sapiens
accaatcaatgtaat

SEQ ID NO: 1941117 - DNA, 15 bp, Homo sapiens
ccaatcaatgtaata

SEQ ID NO: 1941118 - DNA, 15 bp, Homo sapiens
caatcaatgtaatag

SEQ ID NO: 1941119 - DNA, 15 bp, Homo sapiens
aatcaatgtaataga

SEQ ID NO: 1941120 - DNA, 15 bp, Homo sapiens
atcaatgtaatagat

SEQ ID NO: 1941121 - DNA, 15 bp, Homo sapiens
tcaatgtaatagatt

SEQ ID NO: 1941122 - DNA, 15 bp, Homo sapiens
caatgtaatagatta

SEQ ID NO: 1941123 - DNA, 15 bp, Homo sapiens
aatgtaatagattac

SEQ ID NO: 1941124 - DNA, 15 bp, Homo sapiens
atgtaatagattact

SEQ ID NO: 1941125 - DNA, 15 bp, Homo sapiens
tgtaatagattacta

SEQ ID NO: 1941126 - DNA, 15 bp, Homo sapiens
gtaatagattactag

SEQ ID NO: 1941127 - DNA, 15 bp, Homo sapiens
taatagattactagc

SEQ ID NO: 1941128 - DNA, 15 bp, Homo sapiens
aatagattactagca

SEQ ID NO: 1941129 - DNA, 15 bp, Homo sapiens
atagattactagcat

SEQ ID NO: 1941130 - DNA, 15 bp, Homo sapiens
tagattactagcata

SEQ ID NO: 1941131 - DNA, 15 bp, Homo sapiens
agattactagcataa

SEQ ID NO: 1941132 - DNA, 15 bp, Homo sapiens
gattactagcataaa

SEQ ID NO: 1941133 - DNA, 15 bp, Homo sapiens
attactagcataaag

SEQ ID NO: 1941134 - DNA, 15 bp, Homo sapiens
ttactagcataaaga

SEQ ID NO: 1941135 - DNA, 15 bp, Homo sapiens
tactagcataaagaa

SEQ ID NO: 1941136 - DNA, 15 bp, Homo sapiens
actagcataaagaac

SEQ ID NO: 1941137 - DNA, 15 bp, Homo sapiens
ctagcataaagaaca

SEQ ID NO: 1941138 - DNA, 15 bp, Homo sapiens
tagcataaagaacaa

SEQ ID NO: 1941139 - DNA, 15 bp, Homo sapiens
agcataaagaacaag

SEQ ID NO: 1941140 - DNA, 15 bp, Homo sapiens
gcataaagaacaaga

SEQ ID NO: 1941141 - DNA, 15 bp, Homo sapiens
cataaagaacaagaa

SEQ ID NO: 1941142 - DNA, 15 bp, Homo sapiens
ataaagaacaagaaa

SEQ ID NO: 1941143 - DNA, 15 bp, Homo sapiens
taaagaacaagaaaa

SEQ ID NO: 1941144 - DNA, 15 bp, Homo sapiens
aaagaacaagaaaag

SEQ ID NO: 1941145 - DNA, 15 bp, Homo sapiens
aagaacaagaaaagc

SEQ ID NO: 1941146 - DNA, 15 bp, Homo sapiens
agaacaagaaaagca

SEQ ID NO: 1941147 - DNA, 15 bp, Homo sapiens
gaacaagaaaagcat

SEQ ID NO: 1941148 - DNA, 15 bp, Homo sapiens
aacaagaaaagcata

SEQ ID NO: 1941149 - DNA, 15 bp, Homo sapiens
acaagaaaagcataa

SEQ ID NO: 1941150 - DNA, 15 bp, Homo sapiens
caagaaaagcataat

SEQ ID NO: 1941151 - DNA, 15 bp, Homo sapiens
aagaaaagcataatt

SEQ ID NO: 1941152 - DNA, 15 bp, Homo sapiens
agaaaagcataatta

SEQ ID NO: 1941153 - DNA, 15 bp, Homo sapiens
gaaaagcataattat

SEQ ID NO: 1941154 - DNA, 15 bp, Homo sapiens
aaaagcataattatc

SEQ ID NO: 1941155 - DNA, 15 bp, Homo sapiens
aaagcataattatct

SEQ ID NO: 1941156 - DNA, 15 bp, Homo sapiens
aagcataattatctc

SEQ ID NO: 1941157 - DNA, 15 bp, Homo sapiens
agcataattatctca

SEQ ID NO: 1941158 - DNA, 15 bp, Homo sapiens
gcataattatctcag

SEQ ID NO: 1941159 - DNA, 15 bp, Homo sapiens
cataattatctcagt

SEQ ID NO: 1941160 - DNA, 15 bp, Homo sapiens
ataattatctcagta

SEQ ID NO: 1941161 - DNA, 15 bp, Homo sapiens
taattatctcagtat

SEQ ID NO: 1941162 - DNA, 15 bp, Homo sapiens
aattatctcagtata

SEQ ID NO: 1941163 - DNA, 15 bp, Homo sapiens
attatctcagtatat

SEQ ID NO: 1941164 - DNA, 15 bp, Homo sapiens
ttatctcagtatatg

SEQ ID NO: 1941165 - DNA, 15 bp, Homo sapiens
tatctcagtatatgg

SEQ ID NO: 1941166 - DNA, 15 bp, Homo sapiens
atctcagtatatgga

SEQ ID NO: 1941167 - DNA, 15 bp, Homo sapiens
tctcagtatatggag

SEQ ID NO: 1941168 - DNA, 15 bp, Homo sapiens
ctcagtatatggaga

SEQ ID NO: 1941169 - DNA, 15 bp, Homo sapiens
tcagtatatggagaa

SEQ ID NO: 1941170 - DNA, 15 bp, Homo sapiens
cagtatatggagaaa

SEQ ID NO: 1941171 - DNA, 15 bp, Homo sapiens
agtatatggagaaaa

SEQ ID NO: 1941172 - DNA, 15 bp, Homo sapiens
gtatatggagaaaaa

SEQ ID NO: 1941173 - DNA, 15 bp, Homo sapiens
tatatggagaaaaaa

SEQ ID NO: 1941174 - DNA, 15 bp, Homo sapiens
atatggagaaaaaaa

SEQ ID NO: 1941175 - DNA, 15 bp, Homo sapiens
tatggagaaaaaaac

SEQ ID NO: 1941176 - DNA, 15 bp, Homo sapiens
atggagaaaaaaaca

SEQ ID NO: 1941177 - DNA, 15 bp, Homo sapiens
tggagaaaaaaacat

SEQ ID NO: 1941178 - DNA, 15 bp, Homo sapiens
ggagaaaaaaacatt

SEQ ID NO: 1941179 - DNA, 15 bp, Homo sapiens
gagaaaaaaacattg

SEQ ID NO: 1941180 - DNA, 15 bp, Homo sapiens
agaaaaaaacattga

SEQ ID NO: 1941181 - DNA, 15 bp, Homo sapiens
gaaaaaaacattgac

SEQ ID NO: 1941182 - DNA, 15 bp, Homo sapiens
aaaaaaacattgaca

SEQ ID NO: 1941183 - DNA, 15 bp, Homo sapiens
aaaaaacattgacaa

SEQ ID NO: 1941184 - DNA, 15 bp, Homo sapiens
aaaaacattgacaaa

SEQ ID NO: 1941185 - DNA, 15 bp, Homo sapiens
aaaacattgacaaaa

SEQ ID NO: 1941186 - DNA, 15 bp, Homo sapiens
aaacattgacaaaat

SEQ ID NO: 1941187 - DNA, 15 bp, Homo sapiens
aacattgacaaaatt

SEQ ID NO: 1941188 - DNA, 15 bp, Homo sapiens
acattgacaaaattt

SEQ ID NO: 1941189 - DNA, 15 bp, Homo sapiens
cattgacaaaattta

SEQ ID NO: 1941190 - DNA, 15 bp, Homo sapiens
attgacaaaatttaa

SEQ ID NO: 1941191 - DNA, 15 bp, Homo sapiens
ttgacaaaatttaac

SEQ ID NO: 1941192 - DNA, 15 bp, Homo sapiens
tgacaaaatttaaca

SEQ ID NO: 1941193 - DNA, 15 bp, Homo sapiens
gacaaaatttaacaa

SEQ ID NO: 1941194 - DNA, 15 bp, Homo sapiens
acaaaatttaacaat

SEQ ID NO: 1941195 - DNA, 15 bp, Homo sapiens
caaaatttaacaatc

SEQ ID NO: 1941196 - DNA, 15 bp, Homo sapiens
aaaatttaacaatcc

SEQ ID NO: 1941197 - DNA, 15 bp, Homo sapiens
aaatttaacaatcct

SEQ ID NO: 1941198 - DNA, 15 bp, Homo sapiens
aatttaacaatcctt

SEQ ID NO: 1941199 - DNA, 15 bp, Homo sapiens
atttaacaatccttt

SEQ ID NO: 1941200 - DNA, 15 bp, Homo sapiens
tttaacaatcctttc

SEQ ID NO: 1941201 - DNA, 15 bp, Homo sapiens
ttaacaatcctttca

SEQ ID NO: 1941202 - DNA, 15 bp, Homo sapiens
taacaatcctttcat

SEQ ID NO: 1941203 - DNA, 15 bp, Homo sapiens
aacaatcctttcatg

SEQ ID NO: 1941204 - DNA, 15 bp, Homo sapiens
acaatcctttcatga

SEQ ID NO: 1941205 - DNA, 15 bp, Homo sapiens
caatcctttcatgat

SEQ ID NO: 1941206 - DNA, 15 bp, Homo sapiens
aatcctttcatgata

SEQ ID NO: 1941207 - DNA, 15 bp, Homo sapiens
atcctttcatgataa

SEQ ID NO: 1941208 - DNA, 15 bp, Homo sapiens
tcctttcatgataaa

SEQ ID NO: 1941209 - DNA, 15 bp, Homo sapiens
cctttcatgataaaa

SEQ ID NO: 1941210 - DNA, 15 bp, Homo sapiens
ctttcatgataaaaa

SEQ ID NO: 1941211 - DNA, 15 bp, Homo sapiens
tttcatgataaaaaa

SEQ ID NO: 1941212 - DNA, 15 bp, Homo sapiens
ttcatgataaaaaaa

SEQ ID NO: 1941213 - DNA, 15 bp, Homo sapiens
tcatgataaaaaaaa

SEQ ID NO: 1941214 - DNA, 15 bp, Homo sapiens
catgataaaaaaaaa

SEQ ID NO: 1941215 - DNA, 15 bp, Homo sapiens
atgataaaaaaaaaa

SEQ ID NO: 1941216 - DNA, 15 bp, Homo sapiens
tgataaaaaaaaaaa

SEQ ID NO: 1941217 - DNA, 15 bp, Homo sapiens
aaaaaaaaaaaacca

SEQ ID NO: 1941218 - DNA, 15 bp, Homo sapiens
aaaaaaaaaaaccaa

SEQ ID NO: 1941219 - DNA, 15 bp, Homo sapiens
aaaaaaaaaaccaac

SEQ ID NO: 1941220 - DNA, 15 bp, Homo sapiens
aaaaaaaaaccaaca

SEQ ID NO: 1941221 - DNA, 15 bp, Homo sapiens
aaaaaaaaccaacaa

SEQ ID NO: 1941222 - DNA, 15 bp, Homo sapiens
aaaaaaaccaacaaa

SEQ ID NO: 1941223 - DNA, 15 bp, Homo sapiens
aaaaaaccaacaaat

SEQ ID NO: 1941224 - DNA, 15 bp, Homo sapiens
aaaaaccaacaaatt

SEQ ID NO: 1941225 - DNA, 15 bp, Homo sapiens
aaaaccaacaaatta

SEQ ID NO: 1941226 - DNA, 15 bp, Homo sapiens
aaaccaacaaattag

SEQ ID NO: 1941227 - DNA, 15 bp, Homo sapiens
aaccaacaaattagg

SEQ ID NO: 1941228 - DNA, 15 bp, Homo sapiens
accaacaaattagga

SEQ ID NO: 1941229 - DNA, 15 bp, Homo sapiens
ccaacaaattaggaa

SEQ ID NO: 1941230 - DNA, 15 bp, Homo sapiens
caacaaattaggaat

SEQ ID NO: 1941231 - DNA, 15 bp, Homo sapiens
aacaaattaggaata

SEQ ID NO: 1941232 - DNA, 15 bp, Homo sapiens
acaaattaggaatag

SEQ ID NO: 1941233 - DNA, 15 bp, Homo sapiens
caaattaggaataga

SEQ ID NO: 1941234 - DNA, 15 bp, Homo sapiens
aaattaggaatagaa

SEQ ID NO: 1941235 - DNA, 15 bp, Homo sapiens
aattaggaatagaag

SEQ ID NO: 1941236 - DNA, 15 bp, Homo sapiens
attaggaatagaagg

SEQ ID NO: 1941237 - DNA, 15 bp, Homo sapiens
ttaggaatagaaggg

SEQ ID NO: 1941238 - DNA, 15 bp, Homo sapiens
taggaatagaaggga

SEQ ID NO: 1941239 - DNA, 15 bp, Homo sapiens
aggaatagaagggaa

SEQ ID NO: 1941240 - DNA, 15 bp, Homo sapiens
ggaatagaagggaac

SEQ ID NO: 1941241 - DNA, 15 bp, Homo sapiens
gaatagaagggaact

SEQ ID NO: 1941242 - DNA, 15 bp, Homo sapiens
aatagaagggaactt

SEQ ID NO: 1941243 - DNA, 15 bp, Homo sapiens
atagaagggaacttc

SEQ ID NO: 1941244 - DNA, 15 bp, Homo sapiens
tagaagggaacttct

SEQ ID NO: 1941245 - DNA, 15 bp, Homo sapiens
agaagggaacttctc

SEQ ID NO: 1941246 - DNA, 15 bp, Homo sapiens
gaagggaacttctca

SEQ ID NO: 1941247 - DNA, 15 bp, Homo sapiens
aagggaacttctcaa

SEQ ID NO: 1941248 - DNA, 15 bp, Homo sapiens
agggaacttctcaac

SEQ ID NO: 1941249 - DNA, 15 bp, Homo sapiens
gggaacttctcaacc

SEQ ID NO: 1941250 - DNA, 15 bp, Homo sapiens
ggaacttctcaacct

SEQ ID NO: 1941251 - DNA, 15 bp, Homo sapiens
gaacttctcaacctg

SEQ ID NO: 1941252 - DNA, 15 bp, Homo sapiens
aacttctcaacctga

SEQ ID NO: 1941253 - DNA, 15 bp, Homo sapiens
acttctcaacctgaa

SEQ ID NO: 1941254 - DNA, 15 bp, Homo sapiens
cttctcaacctgaaa

SEQ ID NO: 1941255 - DNA, 15 bp, Homo sapiens
ttctcaacctgaaaa

SEQ ID NO: 1941256 - DNA, 15 bp, Homo sapiens
tctcaacctgaaaaa

SEQ ID NO: 1941257 - DNA, 15 bp, Homo sapiens
ctcaacctgaaaaag

SEQ ID NO: 1941258 - DNA, 15 bp, Homo sapiens
tcaacctgaaaaagg

SEQ ID NO: 1941259 - DNA, 15 bp, Homo sapiens
caacctgaaaaagga

SEQ ID NO: 1941260 - DNA, 15 bp, Homo sapiens
aacctgaaaaaggac

SEQ ID NO: 1941261 - DNA, 15 bp, Homo sapiens
acctgaaaaaggaca

SEQ ID NO: 1941262 - DNA, 15 bp, Homo sapiens
cctgaaaaaggacac

SEQ ID NO: 1941263 - DNA, 15 bp, Homo sapiens
ctgaaaaaggacacc

SEQ ID NO: 1941264 - DNA, 15 bp, Homo sapiens
tgaaaaaggacacct

SEQ ID NO: 1941265 - DNA, 15 bp, Homo sapiens
gaaaaaggacaccta

SEQ ID NO: 1941266 - DNA, 15 bp, Homo sapiens
aaaaaggacacctat

SEQ ID NO: 1941267 - DNA, 15 bp, Homo sapiens
aaaaggacacctatg

SEQ ID NO: 1941268 - DNA, 15 bp, Homo sapiens
aaaggacacctatga

SEQ ID NO: 1941269 - DNA, 15 bp, Homo sapiens
aaggacacctatgaa

SEQ ID NO: 1941270 - DNA, 15 bp, Homo sapiens
aggacacctatgaaa

SEQ ID NO: 1941271 - DNA, 15 bp, Homo sapiens
ggacacctatgaaaa

SEQ ID NO: 1941272 - DNA, 15 bp, Homo sapiens
gacacctatgaaaaa

SEQ ID NO: 1941273 - DNA, 15 bp, Homo sapiens
cacctatgaaaaagc

SEQ ID NO: 1941274 - DNA, 15 bp, Homo sapiens
acctatgaaaaagcc

SEQ ID NO: 1941275 - DNA, 15 bp, Homo sapiens
cctatgaaaaagcct

SEQ ID NO: 1941276 - DNA, 15 bp, Homo sapiens
ctatgaaaaagcctc

SEQ ID NO: 1941277 - DNA, 15 bp, Homo sapiens
tatgaaaaagcctca

SEQ ID NO: 1941278 - DNA, 15 bp, Homo sapiens
atgaaaaagcctcag

SEQ ID NO: 1941279 - DNA, 15 bp, Homo sapiens
tgaaaaagcctcagc

SEQ ID NO: 1941280 - DNA, 15 bp, Homo sapiens
gaaaaagcctcagct

SEQ ID NO: 1941281 - DNA, 15 bp, Homo sapiens
aaaaagcctcagcta

SEQ ID NO: 1941282 - DNA, 15 bp, Homo sapiens
aaaagcctcagctaa

SEQ ID NO: 1941283 - DNA, 15 bp, Homo sapiens
aaagcctcagctaat

SEQ ID NO: 1941284 - DNA, 15 bp, Homo sapiens
aagcctcagctaata

SEQ ID NO: 1941285 - DNA, 15 bp, Homo sapiens
agcctcagctaatat

SEQ ID NO: 1941286 - DNA, 15 bp, Homo sapiens
gcctcagctaatatc

SEQ ID NO: 1941287 - DNA, 15 bp, Homo sapiens
cctcagctaatatca

SEQ ID NO: 1941288 - DNA, 15 bp, Homo sapiens
ctcagctaatatcat

SEQ ID NO: 1941289 - DNA, 15 bp, Homo sapiens
tcagctaatatcata

SEQ ID NO: 1941290 - DNA, 15 bp, Homo sapiens
cagctaatatcatac

SEQ ID NO: 1941291 - DNA, 15 bp, Homo sapiens
agctaatatcatact

SEQ ID NO: 1941292 - DNA, 15 bp, Homo sapiens
gctaatatcatactt

SEQ ID NO: 1941293 - DNA, 15 bp, Homo sapiens
ctaatatcatactta

SEQ ID NO: 1941294 - DNA, 15 bp, Homo sapiens
taatatcatacttaa

SEQ ID NO: 1941295 - DNA, 15 bp, Homo sapiens
aatatcatacttaat

SEQ ID NO: 1941296 - DNA, 15 bp, Homo sapiens
atatcatacttaatg

SEQ ID NO: 1941297 - DNA, 15 bp, Homo sapiens
tatcatacttaatga

SEQ ID NO: 1941298 - DNA, 15 bp, Homo sapiens
atcatacttaatgat

SEQ ID NO: 1941299 - DNA, 15 bp, Homo sapiens
tcatacttaatgatg

SEQ ID NO: 1941300 - DNA, 15 bp, Homo sapiens
catacttaatgatga

SEQ ID NO: 1941301 - DNA, 15 bp, Homo sapiens
atacttaatgatgaa

SEQ ID NO: 1941302 - DNA, 15 bp, Homo sapiens
tacttaatgatgaaa

SEQ ID NO: 1941303 - DNA, 15 bp, Homo sapiens
acttaatgatgaaac

SEQ ID NO: 1941304 - DNA, 15 bp, Homo sapiens
cttaatgatgaaaca

SEQ ID NO: 1941305 - DNA, 15 bp, Homo sapiens
ttaatgatgaaacat

SEQ ID NO: 1941306 - DNA, 15 bp, Homo sapiens
taatgatgaaacatt

SEQ ID NO: 1941307 - DNA, 15 bp, Homo sapiens
aatgatgaaacattg

SEQ ID NO: 1941308 - DNA, 15 bp, Homo sapiens
atgatgaaacattga

SEQ ID NO: 1941309 - DNA, 15 bp, Homo sapiens
tgatgaaacattgaa

SEQ ID NO: 1941310 - DNA, 15 bp, Homo sapiens
gatgaaacattgaaa

SEQ ID NO: 1941311 - DNA, 15 bp, Homo sapiens
atgaaacattgaaag

SEQ ID NO: 1941312 - DNA, 15 bp, Homo sapiens
tgaaacattgaaagc

SEQ ID NO: 1941313 - DNA, 15 bp, Homo sapiens
gaaacattgaaagct

SEQ ID NO: 1941314 - DNA, 15 bp, Homo sapiens
aaacattgaaagctt

SEQ ID NO: 1941315 - DNA, 15 bp, Homo sapiens
aacattgaaagcttt

SEQ ID NO: 1941316 - DNA, 15 bp, Homo sapiens
acattgaaagcttta

SEQ ID NO: 1941317 - DNA, 15 bp, Homo sapiens
cattgaaagctttac

SEQ ID NO: 1941318 - DNA, 15 bp, Homo sapiens
attgaaagctttacc

SEQ ID NO: 1941319 - DNA, 15 bp, Homo sapiens
ttgaaagctttaccc

SEQ ID NO: 1941320 - DNA, 15 bp, Homo sapiens
tgaaagctttacccc

SEQ ID NO: 1941321 - DNA, 15 bp, Homo sapiens
gaaagctttacccct

SEQ ID NO: 1941322 - DNA, 15 bp, Homo sapiens
aaagctttaccccta

SEQ ID NO: 1941323 - DNA, 15 bp, Homo sapiens
aagctttacccctaa

SEQ ID NO: 1941324 - DNA, 15 bp, Homo sapiens
agctttacccctaag

SEQ ID NO: 1941325 - DNA, 15 bp, Homo sapiens
gctttacccctaaga

SEQ ID NO: 1941326 - DNA, 15 bp, Homo sapiens
ctttacccctaagat

SEQ ID NO: 1941327 - DNA, 15 bp, Homo sapiens
tttacccctaagatc

SEQ ID NO: 1941328 - DNA, 15 bp, Homo sapiens
ttacccctaagatca

SEQ ID NO: 1941329 - DNA, 15 bp, Homo sapiens
tacccctaagatcaa

SEQ ID NO: 1941330 - DNA, 15 bp, Homo sapiens
acccctaagatcaag

SEQ ID NO: 1941331 - DNA, 15 bp, Homo sapiens
cccctaagatcaaga

SEQ ID NO: 1941332 - DNA, 15 bp, Homo sapiens
ccctaagatcaagaa

SEQ ID NO: 1941333 - DNA, 15 bp, Homo sapiens
cctaagatcaagaag

SEQ ID NO: 1941334 - DNA, 15 bp, Homo sapiens
ctaagatcaagaaga

SEQ ID NO: 1941335 - DNA, 15 bp, Homo sapiens
taagatcaagaagaa

SEQ ID NO: 1941336 - DNA, 15 bp, Homo sapiens
aagatcaagaagaag

SEQ ID NO: 1941337 - DNA, 15 bp, Homo sapiens
agatcaagaagaaga

SEQ ID NO: 1941338 - DNA, 15 bp, Homo sapiens
gatcaagaagaagac

SEQ ID NO: 1941339 - DNA, 15 bp, Homo sapiens
atcaagaagaagacg

SEQ ID NO: 1941340 - DNA, 15 bp, Homo sapiens
tcaagaagaagacga

SEQ ID NO: 1941341 - DNA, 15 bp, Homo sapiens
caagaagaagacgag

SEQ ID NO: 1941342 - DNA, 15 bp, Homo sapiens
aagaagaagacgagg

SEQ ID NO: 1941343 - DNA, 15 bp, Homo sapiens
agaagaagacgagga

SEQ ID NO: 1941344 - DNA, 15 bp, Homo sapiens
gaagaagacgaggat

SEQ ID NO: 1941345 - DNA, 15 bp, Homo sapiens
aagaagacgaggatg

SEQ ID NO: 1941346 - DNA, 15 bp, Homo sapiens
agaagacgaggatgt

SEQ ID NO: 1941347 - DNA, 15 bp, Homo sapiens
gaagacgaggatgtc

SEQ ID NO: 1941348 - DNA, 15 bp, Homo sapiens
aagacgaggatgtcc

SEQ ID NO: 1941349 - DNA, 15 bp, Homo sapiens
agacgaggatgtcca

SEQ ID NO: 1941350 - DNA, 15 bp, Homo sapiens
gacgaggatgtccac

SEQ ID NO: 1941351 - DNA, 15 bp, Homo sapiens
acgaggatgtccact

SEQ ID NO: 1941352 - DNA, 15 bp, Homo sapiens
cgaggatgtccactc

SEQ ID NO: 1941353 - DNA, 15 bp, Homo sapiens
gaggatgtccactct

SEQ ID NO: 1941354 - DNA, 15 bp, Homo sapiens
aggatgtccactctt

SEQ ID NO: 1941355 - DNA, 15 bp, Homo sapiens
ggatgtccactctta

SEQ ID NO: 1941356 - DNA, 15 bp, Homo sapiens
gatgtccactcttac

SEQ ID NO: 1941357 - DNA, 15 bp, Homo sapiens
atgtccactcttacc

SEQ ID NO: 1941358 - DNA, 15 bp, Homo sapiens
tgtccactcttacca

SEQ ID NO: 1941359 - DNA, 15 bp, Homo sapiens
gtccactcttaccac

SEQ ID NO: 1941360 - DNA, 15 bp, Homo sapiens
tccactcttaccact

SEQ ID NO: 1941361 - DNA, 15 bp, Homo sapiens
ccactcttaccactc

SEQ ID NO: 1941362 - DNA, 15 bp, Homo sapiens
cactcttaccactct

SEQ ID NO: 1941363 - DNA, 15 bp, Homo sapiens
actcttaccactctt

SEQ ID NO: 1941364 - DNA, 15 bp, Homo sapiens
ctcttaccactcttg

SEQ ID NO: 1941365 - DNA, 15 bp, Homo sapiens
tcttaccactcttgt

SEQ ID NO: 1941366 - DNA, 15 bp, Homo sapiens
cttaccactcttgtt

SEQ ID NO: 1941367 - DNA, 15 bp, Homo sapiens
ttaccactcttgttc

SEQ ID NO: 1941368 - DNA, 15 bp, Homo sapiens
taccactcttgttca

SEQ ID NO: 1941369 - DNA, 15 bp, Homo sapiens
accactcttgttcaa

SEQ ID NO: 1941370 - DNA, 15 bp, Homo sapiens
ccactcttgttcaac

SEQ ID NO: 1941371 - DNA, 15 bp, Homo sapiens
cactcttgttcaaca

SEQ ID NO: 1941372 - DNA, 15 bp, Homo sapiens
actcttgttcaacat

SEQ ID NO: 1941373 - DNA, 15 bp, Homo sapiens
ctcttgttcaacatt

SEQ ID NO: 1941374 - DNA, 15 bp, Homo sapiens
tcttgttcaacattg

SEQ ID NO: 1941375 - DNA, 15 bp, Homo sapiens
cttgttcaacattgt

SEQ ID NO: 1941376 - DNA, 15 bp, Homo sapiens
ttgttcaacattgta

SEQ ID NO: 1941377 - DNA, 15 bp, Homo sapiens
tgttcaacattgtag

SEQ ID NO: 1941378 - DNA, 15 bp, Homo sapiens
gttcaacattgtagt

SEQ ID NO: 1941379 - DNA, 15 bp, Homo sapiens
ttcaacattgtagtg

SEQ ID NO: 1941380 - DNA, 15 bp, Homo sapiens
tcaacattgtagtgg

SEQ ID NO: 1941381 - DNA, 15 bp, Homo sapiens
caacattgtagtggc

SEQ ID NO: 1941382 - DNA, 15 bp, Homo sapiens
aacattgtagtggca

SEQ ID NO: 1941383 - DNA, 15 bp, Homo sapiens
acattgtagtggcag

SEQ ID NO: 1941384 - DNA, 15 bp, Homo sapiens
cattgtagtggcagt

SEQ ID NO: 1941385 - DNA, 15 bp, Homo sapiens
attgtagtggcagtt

SEQ ID NO: 1941386 - DNA, 15 bp, Homo sapiens
ttgtagtggcagttc

SEQ ID NO: 1941387 - DNA, 15 bp, Homo sapiens
tgtagtggcagttct

SEQ ID NO: 1941388 - DNA, 15 bp, Homo sapiens
gtagtggcagttcta

SEQ ID NO: 1941389 - DNA, 15 bp, Homo sapiens
tagtggcagttctag

SEQ ID NO: 1941390 - DNA, 15 bp, Homo sapiens
agtggcagttctagc

SEQ ID NO: 1941391 - DNA, 15 bp, Homo sapiens
gtggcagttctagcc

SEQ ID NO: 1941392 - DNA, 15 bp, Homo sapiens
tggcagttctagcca

SEQ ID NO: 1941393 - DNA, 15 bp, Homo sapiens
ggcagttctagccag

SEQ ID NO: 1941394 - DNA, 15 bp, Homo sapiens
gcagttctagccagg

SEQ ID NO: 1941395 - DNA, 15 bp, Homo sapiens
cagttctagccaggg

SEQ ID NO: 1941396 - DNA, 15 bp, Homo sapiens
agttctagccagggg

SEQ ID NO: 1941397 - DNA, 15 bp, Homo sapiens
gttctagccaggggc

SEQ ID NO: 1941398 - DNA, 15 bp, Homo sapiens
ttctagccaggggca

SEQ ID NO: 1941399 - DNA, 15 bp, Homo sapiens
tctagccaggggcag

SEQ ID NO: 1941400 - DNA, 15 bp, Homo sapiens
ctagccaggggcagt

SEQ ID NO: 1941401 - DNA, 15 bp, Homo sapiens
tagccaggggcagtt

SEQ ID NO: 1941402 - DNA, 15 bp, Homo sapiens
agccaggggcagtta

SEQ ID NO: 1941403 - DNA, 15 bp, Homo sapiens
gccaggggcagttaa

SEQ ID NO: 1941404 - DNA, 15 bp, Homo sapiens
ccaggggcagttaag

SEQ ID NO: 1941405 - DNA, 15 bp, Homo sapiens
caggggcagttaagc

SEQ ID NO: 1941406 - DNA, 15 bp, Homo sapiens
aggggcagttaagca

SEQ ID NO: 1941407 - DNA, 15 bp, Homo sapiens
ggggcagttaagcaa

SEQ ID NO: 1941408 - DNA, 15 bp, Homo sapiens
gggcagttaagcaag

SEQ ID NO: 1941409 - DNA, 15 bp, Homo sapiens
ggcagttaagcaaga

SEQ ID NO: 1941410 - DNA, 15 bp, Homo sapiens
gcagttaagcaagaa

SEQ ID NO: 1941411 - DNA, 15 bp, Homo sapiens
cagttaagcaagaaa

SEQ ID NO: 1941412 - DNA, 15 bp, Homo sapiens
agttaagcaagaaaa

SEQ ID NO: 1941413 - DNA, 15 bp, Homo sapiens
gttaagcaagaaaaa

SEQ ID NO: 1941414 - DNA, 15 bp, Homo sapiens
ttaagcaagaaaaag

SEQ ID NO: 1941415 - DNA, 15 bp, Homo sapiens
taagcaagaaaaaga

SEQ ID NO: 1941416 - DNA, 15 bp, Homo sapiens
aagcaagaaaaagaa

SEQ ID NO: 1941417 - DNA, 15 bp, Homo sapiens
agcaagaaaaagaaa

SEQ ID NO: 1941418 - DNA, 15 bp, Homo sapiens
gcaagaaaaagaaat

SEQ ID NO: 1941419 - DNA, 15 bp, Homo sapiens
caagaaaaagaaata

SEQ ID NO: 1941420 - DNA, 15 bp, Homo sapiens
agaaaaagaaataaa

SEQ ID NO: 1941421 - DNA, 15 bp, Homo sapiens
gaaaaagaaataaaa

SEQ ID NO: 1941422 - DNA, 15 bp, Homo sapiens
aaaaagaaataaaag

SEQ ID NO: 1941423 - DNA, 15 bp, Homo sapiens
aaaagaaataaaagg

SEQ ID NO: 1941424 - DNA, 15 bp, Homo sapiens
aaagaaataaaaggc

SEQ ID NO: 1941425 - DNA, 15 bp, Homo sapiens
aagaaataaaaggca

SEQ ID NO: 1941426 - DNA, 15 bp, Homo sapiens
agaaataaaaggcaa

SEQ ID NO: 1941427 - DNA, 15 bp, Homo sapiens
gaaataaaaggcaac

SEQ ID NO: 1941428 - DNA, 15 bp, Homo sapiens
aaataaaaggcaacc

SEQ ID NO: 1941429 - DNA, 15 bp, Homo sapiens
aataaaaggcaacca

SEQ ID NO: 1941430 - DNA, 15 bp, Homo sapiens
ataaaaggcaaccag

SEQ ID NO: 1941431 - DNA, 15 bp, Homo sapiens
taaaaggcaaccaga

SEQ ID NO: 1941432 - DNA, 15 bp, Homo sapiens
aaaaggcaaccagat

SEQ ID NO: 1941433 - DNA, 15 bp, Homo sapiens
aaaggcaaccagatt

SEQ ID NO: 1941434 - DNA, 15 bp, Homo sapiens
aaggcaaccagattg

SEQ ID NO: 1941435 - DNA, 15 bp, Homo sapiens
aggcaaccagattgg

SEQ ID NO: 1941436 - DNA, 15 bp, Homo sapiens
ggcaaccagattgga

SEQ ID NO: 1941437 - DNA, 15 bp, Homo sapiens
gcaaccagattggaa

SEQ ID NO: 1941438 - DNA, 15 bp, Homo sapiens
caaccagattggaaa

SEQ ID NO: 1941439 - DNA, 15 bp, Homo sapiens
aaccagattggaaag

SEQ ID NO: 1941440 - DNA, 15 bp, Homo sapiens
accagattggaaagg

SEQ ID NO: 1941441 - DNA, 15 bp, Homo sapiens
ccagattggaaagga

SEQ ID NO: 1941442 - DNA, 15 bp, Homo sapiens
cagattggaaaggaa

SEQ ID NO: 1941443 - DNA, 15 bp, Homo sapiens
ttggaaaggaaaaat

SEQ ID NO: 1941444 - DNA, 15 bp, Homo sapiens
tggaaaggaaaaata

SEQ ID NO: 1941445 - DNA, 15 bp, Homo sapiens
ggaaaggaaaaataa

SEQ ID NO: 1941446 - DNA, 15 bp, Homo sapiens
gaaaggaaaaataaa

SEQ ID NO: 1941447 - DNA, 15 bp, Homo sapiens
aaaggaaaaataaaa

SEQ ID NO: 1941448 - DNA, 15 bp, Homo sapiens
aaggaaaaataaaac

SEQ ID NO: 1941449 - DNA, 15 bp, Homo sapiens
aggaaaaataaaact

SEQ ID NO: 1941450 - DNA, 15 bp, Homo sapiens
ggaaaaataaaacta

SEQ ID NO: 1941451 - DNA, 15 bp, Homo sapiens
gaaaaataaaactat

SEQ ID NO: 1941452 - DNA, 15 bp, Homo sapiens
aaaaataaaactatt

SEQ ID NO: 1941453 - DNA, 15 bp, Homo sapiens
aaaataaaactattt

SEQ ID NO: 1941454 - DNA, 15 bp, Homo sapiens
aaataaaactatttt

SEQ ID NO: 1941455 - DNA, 15 bp, Homo sapiens
aataaaactattttc

SEQ ID NO: 1941456 - DNA, 15 bp, Homo sapiens
ataaaactattttca

SEQ ID NO: 1941457 - DNA, 15 bp, Homo sapiens
taaaactattttcag

SEQ ID NO: 1941458 - DNA, 15 bp, Homo sapiens
aaaactattttcaga

SEQ ID NO: 1941459 - DNA, 15 bp, Homo sapiens
aaactattttcagaa

SEQ ID NO: 1941460 - DNA, 15 bp, Homo sapiens
aactattttcagaaa

SEQ ID NO: 1941461 - DNA, 15 bp, Homo sapiens
actattttcagaaat

SEQ ID NO: 1941462 - DNA, 15 bp, Homo sapiens
ctattttcagaaatc

SEQ ID NO: 1941463 - DNA, 15 bp, Homo sapiens
tattttcagaaatca

SEQ ID NO: 1941464 - DNA, 15 bp, Homo sapiens
attttcagaaatcac

SEQ ID NO: 1941465 - DNA, 15 bp, Homo sapiens
ttttcagaaatcaca

SEQ ID NO: 1941466 - DNA, 15 bp, Homo sapiens
tttcagaaatcacat

SEQ ID NO: 1941467 - DNA, 15 bp, Homo sapiens
ttcagaaatcacatg

SEQ ID NO: 1941468 - DNA, 15 bp, Homo sapiens
tcagaaatcacatga

SEQ ID NO: 1941469 - DNA, 15 bp, Homo sapiens
cagaaatcacatgat

SEQ ID NO: 1941470 - DNA, 15 bp, Homo sapiens
agaaatcacatgatc

SEQ ID NO: 1941471 - DNA, 15 bp, Homo sapiens
gaaatcacatgatct

SEQ ID NO: 1941472 - DNA, 15 bp, Homo sapiens
aaatcacatgatctt

SEQ ID NO: 1941473 - DNA, 15 bp, Homo sapiens
aatcacatgatctta

SEQ ID NO: 1941474 - DNA, 15 bp, Homo sapiens
atcacatgatcttat

SEQ ID NO: 1941475 - DNA, 15 bp, Homo sapiens
tcacatgatcttata

SEQ ID NO: 1941476 - DNA, 15 bp, Homo sapiens
cacatgatcttatat

SEQ ID NO: 1941477 - DNA, 15 bp, Homo sapiens
acatgatcttatata

SEQ ID NO: 1941478 - DNA, 15 bp, Homo sapiens
catgatcttatatat

SEQ ID NO: 1941479 - DNA, 15 bp, Homo sapiens
atgatcttatatata

SEQ ID NO: 1941480 - DNA, 15 bp, Homo sapiens
tgatcttatatatag

SEQ ID NO: 1941481 - DNA, 15 bp, Homo sapiens
gatcttatatatagt

SEQ ID NO: 1941482 - DNA, 15 bp, Homo sapiens
atcttatatatagta

SEQ ID NO: 1941483 - DNA, 15 bp, Homo sapiens
tcttatatatagtaa

SEQ ID NO: 1941484 - DNA, 15 bp, Homo sapiens
cttatatatagtaac

SEQ ID NO: 1941485 - DNA, 15 bp, Homo sapiens
ttatatatagtaact

SEQ ID NO: 1941486 - DNA, 15 bp, Homo sapiens
tatatatagtaactc

SEQ ID NO: 1941487 - DNA, 15 bp, Homo sapiens
atatatagtaactcc

SEQ ID NO: 1941488 - DNA, 15 bp, Homo sapiens
tatatagtaactcct

SEQ ID NO: 1941489 - DNA, 15 bp, Homo sapiens
atatagtaactccta

SEQ ID NO: 1941490 - DNA, 15 bp, Homo sapiens
tatagtaactcctaa

SEQ ID NO: 1941491 - DNA, 15 bp, Homo sapiens
atagtaactcctaaa

SEQ ID NO: 1941492 - DNA, 15 bp, Homo sapiens
tagtaactcctaaag

SEQ ID NO: 1941493 - DNA, 15 bp, Homo sapiens
agtaactcctaaaga

SEQ ID NO: 1941494 - DNA, 15 bp, Homo sapiens
gtaactcctaaagaa

SEQ ID NO: 1941495 - DNA, 15 bp, Homo sapiens
taactcctaaagaac

SEQ ID NO: 1941496 - DNA, 15 bp, Homo sapiens
aactcctaaagaacc

SEQ ID NO: 1941497 - DNA, 15 bp, Homo sapiens
actcctaaagaacct

SEQ ID NO: 1941498 - DNA, 15 bp, Homo sapiens
ctcctaaagaacctc

SEQ ID NO: 1941499 - DNA, 15 bp, Homo sapiens
tcctaaagaacctcc

SEQ ID NO: 1941500 - DNA, 15 bp, Homo sapiens
cctaaagaacctccc

SEQ ID NO: 1941501 - DNA, 15 bp, Homo sapiens
ctaaagaacctcccc

SEQ ID NO: 1941502 - DNA, 15 bp, Homo sapiens
taaagaacctcccct

SEQ ID NO: 1941503 - DNA, 15 bp, Homo sapiens
aaagaacctccccta

SEQ ID NO: 1941504 - DNA, 15 bp, Homo sapiens
aagaacctcccctaa

SEQ ID NO: 1941505 - DNA, 15 bp, Homo sapiens
agaacctcccctaaa

SEQ ID NO: 1941506 - DNA, 15 bp, Homo sapiens
gaacctcccctaaaa

SEQ ID NO: 1941507 - DNA, 15 bp, Homo sapiens
aacctcccctaaaat

SEQ ID NO: 1941508 - DNA, 15 bp, Homo sapiens
acctcccctaaaatt

SEQ ID NO: 1941509 - DNA, 15 bp, Homo sapiens
cctcccctaaaattt

SEQ ID NO: 1941510 - DNA, 15 bp, Homo sapiens
ctcccctaaaattta

SEQ ID NO: 1941511 - DNA, 15 bp, Homo sapiens
tcccctaaaatttat

SEQ ID NO: 1941512 - DNA, 15 bp, Homo sapiens
cccctaaaatttatt

SEQ ID NO: 1941513 - DNA, 15 bp, Homo sapiens
ccctaaaatttatta

SEQ ID NO: 1941514 - DNA, 15 bp, Homo sapiens
cctaaaatttattag

SEQ ID NO: 1941515 - DNA, 15 bp, Homo sapiens
ctaaaatttattaga

SEQ ID NO: 1941516 - DNA, 15 bp, Homo sapiens
taaaatttattagag

SEQ ID NO: 1941517 - DNA, 15 bp, Homo sapiens
aaaatttattagagc

SEQ ID NO: 1941518 - DNA, 15 bp, Homo sapiens
aaatttattagagct

SEQ ID NO: 1941519 - DNA, 15 bp, Homo sapiens
aatttattagagcta

SEQ ID NO: 1941520 - DNA, 15 bp, Homo sapiens
atttattagagctaa

SEQ ID NO: 1941521 - DNA, 15 bp, Homo sapiens
tttattagagctaat

SEQ ID NO: 1941522 - DNA, 15 bp, Homo sapiens
ttattagagctaata

SEQ ID NO: 1941523 - DNA, 15 bp, Homo sapiens
tattagagctaataa

SEQ ID NO: 1941524 - DNA, 15 bp, Homo sapiens
attagagctaataaa

SEQ ID NO: 1941525 - DNA, 15 bp, Homo sapiens
ttagagctaataaat

SEQ ID NO: 1941526 - DNA, 15 bp, Homo sapiens
tagagctaataaatg

SEQ ID NO: 1941527 - DNA, 15 bp, Homo sapiens
agagctaataaatga

SEQ ID NO: 1941528 - DNA, 15 bp, Homo sapiens
gagctaataaatgaa

SEQ ID NO: 1941529 - DNA, 15 bp, Homo sapiens
agctaataaatgaat

SEQ ID NO: 1941530 - DNA, 15 bp, Homo sapiens
gctaataaatgaatt

SEQ ID NO: 1941531 - DNA, 15 bp, Homo sapiens
ctaataaatgaattc

SEQ ID NO: 1941532 - DNA, 15 bp, Homo sapiens
taataaatgaattca

SEQ ID NO: 1941533 - DNA, 15 bp, Homo sapiens
aataaatgaattcag

SEQ ID NO: 1941534 - DNA, 15 bp, Homo sapiens
ataaatgaattcagc

SEQ ID NO: 1941535 - DNA, 15 bp, Homo sapiens
taaatgaattcagca

SEQ ID NO: 1941536 - DNA, 15 bp, Homo sapiens
aaatgaattcagcaa

SEQ ID NO: 1941537 - DNA, 15 bp, Homo sapiens
aatgaattcagcaaa

SEQ ID NO: 1941538 - DNA, 15 bp, Homo sapiens
atgaattcagcaaag

SEQ ID NO: 1941539 - DNA, 15 bp, Homo sapiens
tgaattcagcaaagt

SEQ ID NO: 1941540 - DNA, 15 bp, Homo sapiens
gaattcagcaaagtt

SEQ ID NO: 1941541 - DNA, 15 bp, Homo sapiens
aattcagcaaagttg

SEQ ID NO: 1941542 - DNA, 15 bp, Homo sapiens
attcagcaaagttgc

SEQ ID NO: 1941543 - DNA, 15 bp, Homo sapiens
ttcagcaaagttgca

SEQ ID NO: 1941544 - DNA, 15 bp, Homo sapiens
tcagcaaagttgcag

SEQ ID NO: 1941545 - DNA, 15 bp, Homo sapiens
cagcaaagttgcagg

SEQ ID NO: 1941546 - DNA, 15 bp, Homo sapiens
agcaaagttgcagga

SEQ ID NO: 1941547 - DNA, 15 bp, Homo sapiens
gcaaagttgcaggat

SEQ ID NO: 1941548 - DNA, 15 bp, Homo sapiens
caaagttgcaggata

SEQ ID NO: 1941549 - DNA, 15 bp, Homo sapiens
aaagttgcaggatac

SEQ ID NO: 1941550 - DNA, 15 bp, Homo sapiens
aagttgcaggataca

SEQ ID NO: 1941551 - DNA, 15 bp, Homo sapiens
agttgcaggatacaa

SEQ ID NO: 1941552 - DNA, 15 bp, Homo sapiens
gttgcaggatacaat

SEQ ID NO: 1941553 - DNA, 15 bp, Homo sapiens
ttgcaggatacaata

SEQ ID NO: 1941554 - DNA, 15 bp, Homo sapiens
tgcaggatacaatat

SEQ ID NO: 1941555 - DNA, 15 bp, Homo sapiens
gcaggatacaatatc

SEQ ID NO: 1941556 - DNA, 15 bp, Homo sapiens
caggatacaatatca

SEQ ID NO: 1941557 - DNA, 15 bp, Homo sapiens
aggatacaatatcaa

SEQ ID NO: 1941558 - DNA, 15 bp, Homo sapiens
ggatacaatatcaat

SEQ ID NO: 1941559 - DNA, 15 bp, Homo sapiens
gatacaatatcaata

SEQ ID NO: 1941560 - DNA, 15 bp, Homo sapiens
atacaatatcaatat

SEQ ID NO: 1941561 - DNA, 15 bp, Homo sapiens
tacaatatcaatata

SEQ ID NO: 1941562 - DNA, 15 bp, Homo sapiens
acaatatcaatatac

SEQ ID NO: 1941563 - DNA, 15 bp, Homo sapiens
caatatcaatataca

SEQ ID NO: 1941564 - DNA, 15 bp, Homo sapiens
aatatcaatatacaa

SEQ ID NO: 1941565 - DNA, 15 bp, Homo sapiens
atatcaatatacaaa

SEQ ID NO: 1941566 - DNA, 15 bp, Homo sapiens
tatcaatatacaaaa

SEQ ID NO: 1941567 - DNA, 15 bp, Homo sapiens
atatacaaaaattaa

SEQ ID NO: 1941568 - DNA, 15 bp, Homo sapiens
tatacaaaaattaat

SEQ ID NO: 1941569 - DNA, 15 bp, Homo sapiens
atacaaaaattaatt

SEQ ID NO: 1941570 - DNA, 15 bp, Homo sapiens
tacaaaaattaatta

SEQ ID NO: 1941571 - DNA, 15 bp, Homo sapiens
acaaaaattaattat

SEQ ID NO: 1941572 - DNA, 15 bp, Homo sapiens
caaaaattaattata

SEQ ID NO: 1941573 - DNA, 15 bp, Homo sapiens
aaaaattaattatat

SEQ ID NO: 1941574 - DNA, 15 bp, Homo sapiens
aaaattaattatatt

SEQ ID NO: 1941575 - DNA, 15 bp, Homo sapiens
aaattaattatattt

SEQ ID NO: 1941576 - DNA, 15 bp, Homo sapiens
aattaattatatttt

SEQ ID NO: 1941577 - DNA, 15 bp, Homo sapiens
attaattatattttt

SEQ ID NO: 1941578 - DNA, 15 bp, Homo sapiens
ttaattatattttta

SEQ ID NO: 1941579 - DNA, 15 bp, Homo sapiens
taattatatttttat

SEQ ID NO: 1941580 - DNA, 15 bp, Homo sapiens
aattatatttttata

SEQ ID NO: 1941581 - DNA, 15 bp, Homo sapiens
attatatttttatac

SEQ ID NO: 1941582 - DNA, 15 bp, Homo sapiens
ttatatttttataca

SEQ ID NO: 1941583 - DNA, 15 bp, Homo sapiens
tatatttttatacac

SEQ ID NO: 1941584 - DNA, 15 bp, Homo sapiens
atatttttatacact

SEQ ID NO: 1941585 - DNA, 15 bp, Homo sapiens
tatttttatacacta

SEQ ID NO: 1941586 - DNA, 15 bp, Homo sapiens
atttttatacactag

SEQ ID NO: 1941587 - DNA, 15 bp, Homo sapiens
tttttatacactagg

SEQ ID NO: 1941588 - DNA, 15 bp, Homo sapiens
ttttatacactagga

SEQ ID NO: 1941589 - DNA, 15 bp, Homo sapiens
tttatacactaggaa

SEQ ID NO: 1941590 - DNA, 15 bp, Homo sapiens
ttatacactaggaat

SEQ ID NO: 1941591 - DNA, 15 bp, Homo sapiens
tatacactaggaatg

SEQ ID NO: 1941592 - DNA, 15 bp, Homo sapiens
atacactaggaatga

SEQ ID NO: 1941593 - DNA, 15 bp, Homo sapiens
tacactaggaatgaa

SEQ ID NO: 1941594 - DNA, 15 bp, Homo sapiens
acactaggaatgaac

SEQ ID NO: 1941595 - DNA, 15 bp, Homo sapiens
cactaggaatgaaca

SEQ ID NO: 1941596 - DNA, 15 bp, Homo sapiens
actaggaatgaacaa

SEQ ID NO: 1941597 - DNA, 15 bp, Homo sapiens
ctaggaatgaacaat

SEQ ID NO: 1941598 - DNA, 15 bp, Homo sapiens
taggaatgaacaatc

SEQ ID NO: 1941599 - DNA, 15 bp, Homo sapiens
aggaatgaacaatcc

SEQ ID NO: 1941600 - DNA, 15 bp, Homo sapiens
ggaatgaacaatcct

SEQ ID NO: 1941601 - DNA, 15 bp, Homo sapiens
gaatgaacaatccta

SEQ ID NO: 1941602 - DNA, 15 bp, Homo sapiens
aatgaacaatcctaa

SEQ ID NO: 1941603 - DNA, 15 bp, Homo sapiens
atgaacaatcctaaa

SEQ ID NO: 1941604 - DNA, 15 bp, Homo sapiens
tgaacaatcctaaaa

SEQ ID NO: 1941605 - DNA, 15 bp, Homo sapiens
gaacaatcctaaaat

SEQ ID NO: 1941606 - DNA, 15 bp, Homo sapiens
aacaatcctaaaatg

SEQ ID NO: 1941607 - DNA, 15 bp, Homo sapiens
acaatcctaaaatga

SEQ ID NO: 1941608 - DNA, 15 bp, Homo sapiens
caatcctaaaatgaa

SEQ ID NO: 1941609 - DNA, 15 bp, Homo sapiens
aatcctaaaatgaaa

SEQ ID NO: 1941610 - DNA, 15 bp, Homo sapiens
atcctaaaatgaaat

SEQ ID NO: 1941611 - DNA, 15 bp, Homo sapiens
tcctaaaatgaaatt

SEQ ID NO: 1941612 - DNA, 15 bp, Homo sapiens
cctaaaatgaaatta

SEQ ID NO: 1941613 - DNA, 15 bp, Homo sapiens
ctaaaatgaaattaa

SEQ ID NO: 1941614 - DNA, 15 bp, Homo sapiens
taaaatgaaattaag

SEQ ID NO: 1941615 - DNA, 15 bp, Homo sapiens
aaaatgaaattaaga

SEQ ID NO: 1941616 - DNA, 15 bp, Homo sapiens
aaatgaaattaagaa

SEQ ID NO: 1941617 - DNA, 15 bp, Homo sapiens
aatgaaattaagaac

SEQ ID NO: 1941618 - DNA, 15 bp, Homo sapiens
atgaaattaagaaca

SEQ ID NO: 1941619 - DNA, 15 bp, Homo sapiens
tgaaattaagaacac

SEQ ID NO: 1941620 - DNA, 15 bp, Homo sapiens
gaaattaagaacaca

SEQ ID NO: 1941621 - DNA, 15 bp, Homo sapiens
aattaagaacacaat

SEQ ID NO: 1941622 - DNA, 15 bp, Homo sapiens
attaagaacacaatt

SEQ ID NO: 1941623 - DNA, 15 bp, Homo sapiens
ttaagaacacaattc

SEQ ID NO: 1941624 - DNA, 15 bp, Homo sapiens
taagaacacaattct

SEQ ID NO: 1941625 - DNA, 15 bp, Homo sapiens
aagaacacaattctg

SEQ ID NO: 1941626 - DNA, 15 bp, Homo sapiens
agaacacaattctgg

SEQ ID NO: 1941627 - DNA, 15 bp, Homo sapiens
gaacacaattctggc

SEQ ID NO: 1941628 - DNA, 15 bp, Homo sapiens
aacacaattctggct

SEQ ID NO: 1941629 - DNA, 15 bp, Homo sapiens
acacaattctggctg

SEQ ID NO: 1941630 - DNA, 15 bp, Homo sapiens
cacaattctggctgg

SEQ ID NO: 1941631 - DNA, 15 bp, Homo sapiens
acaattctggctggg

SEQ ID NO: 1941632 - DNA, 15 bp, Homo sapiens
caattctggctgggc

SEQ ID NO: 1941633 - DNA, 15 bp, Homo sapiens
aattctggctgggca

SEQ ID NO: 1941634 - DNA, 15 bp, Homo sapiens
attctggctgggcat

SEQ ID NO: 1941635 - DNA, 15 bp, Homo sapiens
ttctggctgggcatg

SEQ ID NO: 1941636 - DNA, 15 bp, Homo sapiens
tctggctgggcatga

SEQ ID NO: 1941637 - DNA, 15 bp, Homo sapiens
ctggctgggcatgat

SEQ ID NO: 1941638 - DNA, 15 bp, Homo sapiens
tggctgggcatgatg

SEQ ID NO: 1941639 - DNA, 15 bp, Homo sapiens
ggctgggcatgatgt

SEQ ID NO: 1941640 - DNA, 15 bp, Homo sapiens
gctgggcatgatgtc

SEQ ID NO: 1941641 - DNA, 15 bp, Homo sapiens
ctgggcatgatgtct

SEQ ID NO: 1941642 - DNA, 15 bp, Homo sapiens
tgggcatgatgtctc

SEQ ID NO: 1941643 - DNA, 15 bp, Homo sapiens
gggcatgatgtctca

SEQ ID NO: 1941644 - DNA, 15 bp, Homo sapiens
ggcatgatgtctcac

SEQ ID NO: 1941645 - DNA, 15 bp, Homo sapiens
gcatgatgtctcacg

SEQ ID NO: 1941646 - DNA, 15 bp, Homo sapiens
catgatgtctcacgc

SEQ ID NO: 1941647 - DNA, 15 bp, Homo sapiens
atgatgtctcacgcc

SEQ ID NO: 1941648 - DNA, 15 bp, Homo sapiens
tgatgtctcacgcct

SEQ ID NO: 1941649 - DNA, 15 bp, Homo sapiens
gatgtctcacgcctg

SEQ ID NO: 1941650 - DNA, 15 bp, Homo sapiens
atgtctcacgcctgt

SEQ ID NO: 1941651 - DNA, 15 bp, Homo sapiens
tgtctcacgcctgta

SEQ ID NO: 1941652 - DNA, 15 bp, Homo sapiens
gtctcacgcctgtaa

SEQ ID NO: 1941653 - DNA, 15 bp, Homo sapiens
tctcacgcctgtaat

SEQ ID NO: 1941654 - DNA, 15 bp, Homo sapiens
ttgggaggccaaagc

SEQ ID NO: 1941655 - DNA, 15 bp, Homo sapiens
tgggaggccaaagca

SEQ ID NO: 1941656 - DNA, 15 bp, Homo sapiens
gggaggccaaagcag

SEQ ID NO: 1941657 - DNA, 15 bp, Homo sapiens
ggaggccaaagcagg

SEQ ID NO: 1941658 - DNA, 15 bp, Homo sapiens
gaggccaaagcagga

SEQ ID NO: 1941659 - DNA, 15 bp, Homo sapiens
aggccaaagcaggag

SEQ ID NO: 1941660 - DNA, 15 bp, Homo sapiens
ggccaaagcaggagg

SEQ ID NO: 1941661 - DNA, 15 bp, Homo sapiens
gccaaagcaggagga

SEQ ID NO: 1941662 - DNA, 15 bp, Homo sapiens
ccaaagcaggaggac

SEQ ID NO: 1941663 - DNA, 15 bp, Homo sapiens
caaagcaggaggacc

SEQ ID NO: 1941664 - DNA, 15 bp, Homo sapiens
aaagcaggaggaccg

SEQ ID NO: 1941665 - DNA, 15 bp, Homo sapiens
aagcaggaggaccgc

SEQ ID NO: 1941666 - DNA, 15 bp, Homo sapiens
agcaggaggaccgct

SEQ ID NO: 1941667 - DNA, 15 bp, Homo sapiens
gcaggaggaccgctt

SEQ ID NO: 1941668 - DNA, 15 bp, Homo sapiens
caggaggaccgctta

SEQ ID NO: 1941669 - DNA, 15 bp, Homo sapiens
aggaggaccgcttag

SEQ ID NO: 1941670 - DNA, 15 bp, Homo sapiens
ggaggaccgcttagc

SEQ ID NO: 1941671 - DNA, 15 bp, Homo sapiens
gaggaccgcttagcc

SEQ ID NO: 1941672 - DNA, 15 bp, Homo sapiens
aggaccgcttagccc

SEQ ID NO: 1941673 - DNA, 15 bp, Homo sapiens
ggaccgcttagcccg

SEQ ID NO: 1941674 - DNA, 15 bp, Homo sapiens
gaccgcttagcccgg

SEQ ID NO: 1941675 - DNA, 15 bp, Homo sapiens
accgcttagcccggg

SEQ ID NO: 1941676 - DNA, 15 bp, Homo sapiens
ccgcttagcccggga

SEQ ID NO: 1941677 - DNA, 15 bp, Homo sapiens
cgcttagcccgggag

SEQ ID NO: 1941678 - DNA, 15 bp, Homo sapiens
gcttagcccgggagt

SEQ ID NO: 1941679 - DNA, 15 bp, Homo sapiens
cttagcccgggagtt

SEQ ID NO: 1941680 - DNA, 15 bp, Homo sapiens
ttagcccgggagttt

SEQ ID NO: 1941681 - DNA, 15 bp, Homo sapiens
tagcccgggagttta

SEQ ID NO: 1941682 - DNA, 15 bp, Homo sapiens
agcccgggagtttaa

SEQ ID NO: 1941683 - DNA, 15 bp, Homo sapiens
gcccgggagtttaag

SEQ ID NO: 1941684 - DNA, 15 bp, Homo sapiens
cccgggagtttaaga

SEQ ID NO: 1941685 - DNA, 15 bp, Homo sapiens
ccgggagtttaagac

SEQ ID NO: 1941686 - DNA, 15 bp, Homo sapiens
cgggagtttaagacc

SEQ ID NO: 1941687 - DNA, 15 bp, Homo sapiens
gggagtttaagacca

SEQ ID NO: 1941688 - DNA, 15 bp, Homo sapiens
tttaagaccagccta

SEQ ID NO: 1941689 - DNA, 15 bp, Homo sapiens
ttaagaccagcctag

SEQ ID NO: 1941690 - DNA, 15 bp, Homo sapiens
taagaccagcctagg

SEQ ID NO: 1941691 - DNA, 15 bp, Homo sapiens
aagaccagcctaggc

SEQ ID NO: 1941692 - DNA, 15 bp, Homo sapiens
cctaggcaacatggt

SEQ ID NO: 1941693 - DNA, 15 bp, Homo sapiens
ctaggcaacatggtg

SEQ ID NO: 1941694 - DNA, 15 bp, Homo sapiens
taggcaacatggtga

SEQ ID NO: 1941695 - DNA, 15 bp, Homo sapiens
aggcaacatggtgaa

SEQ ID NO: 1941696 - DNA, 15 bp, Homo sapiens
atggtgaaaccccac

SEQ ID NO: 1941697 - DNA, 15 bp, Homo sapiens
tggtgaaaccccacc

SEQ ID NO: 1941698 - DNA, 15 bp, Homo sapiens
aaccccacctctaca

SEQ ID NO: 1941699 - DNA, 15 bp, Homo sapiens
accccacctctacaa

SEQ ID NO: 1941700 - DNA, 15 bp, Homo sapiens
ccccacctctacaaa

SEQ ID NO: 1941701 - DNA, 15 bp, Homo sapiens
cccacctctacaaaa

SEQ ID NO: 1941702 - DNA, 15 bp, Homo sapiens
ccacctctacaaaaa

SEQ ID NO: 1941703 - DNA, 15 bp, Homo sapiens
cacctctacaaaaat

SEQ ID NO: 1941704 - DNA, 15 bp, Homo sapiens
acctctacaaaaatt

SEQ ID NO: 1941705 - DNA, 15 bp, Homo sapiens
cctctacaaaaatta

SEQ ID NO: 1941706 - DNA, 15 bp, Homo sapiens
aaattaaaaaaaaac

SEQ ID NO: 1941707 - DNA, 15 bp, Homo sapiens
aattaaaaaaaaaca

SEQ ID NO: 1941708 - DNA, 15 bp, Homo sapiens
attaaaaaaaaacaa

SEQ ID NO: 1941709 - DNA, 15 bp, Homo sapiens
ttaaaaaaaaacaaa

SEQ ID NO: 1941710 - DNA, 15 bp, Homo sapiens
aaaaacaaaacgcca

SEQ ID NO: 1941711 - DNA, 15 bp, Homo sapiens
aaaacaaaacgccag

SEQ ID NO: 1941712 - DNA, 15 bp, Homo sapiens
aaacaaaacgccaga

SEQ ID NO: 1941713 - DNA, 15 bp, Homo sapiens
aacaaaacgccagat

SEQ ID NO: 1941714 - DNA, 15 bp, Homo sapiens
acaaaacgccagatg

SEQ ID NO: 1941715 - DNA, 15 bp, Homo sapiens
caaaacgccagatgt

SEQ ID NO: 1941716 - DNA, 15 bp, Homo sapiens
aaaacgccagatgtc

SEQ ID NO: 1941717 - DNA, 15 bp, Homo sapiens
aaacgccagatgtca

SEQ ID NO: 1941718 - DNA, 15 bp, Homo sapiens
aacgccagatgtcat

SEQ ID NO: 1941719 - DNA, 15 bp, Homo sapiens
acgccagatgtcatg

SEQ ID NO: 1941720 - DNA, 15 bp, Homo sapiens
cgccagatgtcatgg

SEQ ID NO: 1941721 - DNA, 15 bp, Homo sapiens
gccagatgtcatggc

SEQ ID NO: 1941722 - DNA, 15 bp, Homo sapiens
ccagatgtcatggca

SEQ ID NO: 1941723 - DNA, 15 bp, Homo sapiens
cagatgtcatggcac

SEQ ID NO: 1941724 - DNA, 15 bp, Homo sapiens
agatgtcatggcacg

SEQ ID NO: 1941725 - DNA, 15 bp, Homo sapiens
gatgtcatggcacgt

SEQ ID NO: 1941726 - DNA, 15 bp, Homo sapiens
atgtcatggcacgtg

SEQ ID NO: 1941727 - DNA, 15 bp, Homo sapiens
tgtcatggcacgtgc

SEQ ID NO: 1941728 - DNA, 15 bp, Homo sapiens
gtcatggcacgtgcc

SEQ ID NO: 1941729 - DNA, 15 bp, Homo sapiens
tcatggcacgtgcct

SEQ ID NO: 1941730 - DNA, 15 bp, Homo sapiens
catggcacgtgcctg

SEQ ID NO: 1941731 - DNA, 15 bp, Homo sapiens
atggcacgtgcctgt

SEQ ID NO: 1941732 - DNA, 15 bp, Homo sapiens
tggcacgtgcctgta

SEQ ID NO: 1941733 - DNA, 15 bp, Homo sapiens
ggcacgtgcctgtag

SEQ ID NO: 1941734 - DNA, 15 bp, Homo sapiens
gcacgtgcctgtagt

SEQ ID NO: 1941735 - DNA, 15 bp, Homo sapiens
cacgtgcctgtagtc

SEQ ID NO: 1941736 - DNA, 15 bp, Homo sapiens
cctgtagtcccagca

SEQ ID NO: 1941737 - DNA, 15 bp, Homo sapiens
ctgtagtcccagcaa

SEQ ID NO: 1941738 - DNA, 15 bp, Homo sapiens
tgtagtcccagcaac

SEQ ID NO: 1941739 - DNA, 15 bp, Homo sapiens
gtagtcccagcaact

SEQ ID NO: 1941740 - DNA, 15 bp, Homo sapiens
tagtcccagcaactt

SEQ ID NO: 1941741 - DNA, 15 bp, Homo sapiens
agtcccagcaacttg

SEQ ID NO: 1941742 - DNA, 15 bp, Homo sapiens
gtcccagcaacttgg

SEQ ID NO: 1941743 - DNA, 15 bp, Homo sapiens
tcccagcaacttggg

SEQ ID NO: 1941744 - DNA, 15 bp, Homo sapiens
cccagcaacttggga

SEQ ID NO: 1941745 - DNA, 15 bp, Homo sapiens
ccagcaacttgggag

SEQ ID NO: 1941746 - DNA, 15 bp, Homo sapiens
cagcaacttgggagg

SEQ ID NO: 1941747 - DNA, 15 bp, Homo sapiens
agcaacttgggaggc

SEQ ID NO: 1941748 - DNA, 15 bp, Homo sapiens
gcaacttgggaggct

SEQ ID NO: 1941749 - DNA, 15 bp, Homo sapiens
caacttgggaggctg

SEQ ID NO: 1941750 - DNA, 15 bp, Homo sapiens
aacttgggaggctga

SEQ ID NO: 1941751 - DNA, 15 bp, Homo sapiens
acttgggaggctgaa

SEQ ID NO: 1941752 - DNA, 15 bp, Homo sapiens
cttgggaggctgaag

SEQ ID NO: 1941753 - DNA, 15 bp, Homo sapiens
ttgggaggctgaagt

SEQ ID NO: 1941754 - DNA, 15 bp, Homo sapiens
tgggaggctgaagtg

SEQ ID NO: 1941755 - DNA, 15 bp, Homo sapiens
gggaggctgaagtgg

SEQ ID NO: 1941756 - DNA, 15 bp, Homo sapiens
ggaggctgaagtggg

SEQ ID NO: 1941757 - DNA, 15 bp, Homo sapiens
gaggctgaagtggga

SEQ ID NO: 1941758 - DNA, 15 bp, Homo sapiens
aggctgaagtgggag

SEQ ID NO: 1941759 - DNA, 15 bp, Homo sapiens
ggctgaagtgggagg

SEQ ID NO: 1941760 - DNA, 15 bp, Homo sapiens
gctgaagtgggagga

SEQ ID NO: 1941761 - DNA, 15 bp, Homo sapiens
ctgaagtgggaggat

SEQ ID NO: 1941762 - DNA, 15 bp, Homo sapiens
tgaagtgggaggatc

SEQ ID NO: 1941763 - DNA, 15 bp, Homo sapiens
gaagtgggaggatca

SEQ ID NO: 1941764 - DNA, 15 bp, Homo sapiens
aagtgggaggatcac

SEQ ID NO: 1941765 - DNA, 15 bp, Homo sapiens
agtgggaggatcact

SEQ ID NO: 1941766 - DNA, 15 bp, Homo sapiens
ggaggatcacttgat

SEQ ID NO: 1941767 - DNA, 15 bp, Homo sapiens
gaggatcacttgatc

SEQ ID NO: 1941768 - DNA, 15 bp, Homo sapiens
aggatcacttgatcc

SEQ ID NO: 1941769 - DNA, 15 bp, Homo sapiens
ggatcacttgatcct

SEQ ID NO: 1941770 - DNA, 15 bp, Homo sapiens
gatcacttgatcctg

SEQ ID NO: 1941771 - DNA, 15 bp, Homo sapiens
atcacttgatcctgg

SEQ ID NO: 1941772 - DNA, 15 bp, Homo sapiens
tcacttgatcctggg

SEQ ID NO: 1941773 - DNA, 15 bp, Homo sapiens
cacttgatcctggga

SEQ ID NO: 1941774 - DNA, 15 bp, Homo sapiens
acttgatcctgggag

SEQ ID NO: 1941775 - DNA, 15 bp, Homo sapiens
cttgatcctgggaga

SEQ ID NO: 1941776 - DNA, 15 bp, Homo sapiens
ttgatcctgggagat

SEQ ID NO: 1941777 - DNA, 15 bp, Homo sapiens
tgatcctgggagatt

SEQ ID NO: 1941778 - DNA, 15 bp, Homo sapiens
gatcctgggagatta

SEQ ID NO: 1941779 - DNA, 15 bp, Homo sapiens
atcctgggagattaa

SEQ ID NO: 1941780 - DNA, 15 bp, Homo sapiens
tcctgggagattaag

SEQ ID NO: 1941781 - DNA, 15 bp, Homo sapiens
cctgggagattaagg

SEQ ID NO: 1941782 - DNA, 15 bp, Homo sapiens
ctgggagattaaggc

SEQ ID NO: 1941783 - DNA, 15 bp, Homo sapiens
tgggagattaaggct

SEQ ID NO: 1941784 - DNA, 15 bp, Homo sapiens
gggagattaaggctg

SEQ ID NO: 1941785 - DNA, 15 bp, Homo sapiens
ggagattaaggctgc

SEQ ID NO: 1941786 - DNA, 15 bp, Homo sapiens
gagattaaggctgca

SEQ ID NO: 1941787 - DNA, 15 bp, Homo sapiens
agattaaggctgcag

SEQ ID NO: 1941788 - DNA, 15 bp, Homo sapiens
gattaaggctgcagt

SEQ ID NO: 1941789 - DNA, 15 bp, Homo sapiens
aacagagtgagacct

SEQ ID NO: 1941790 - DNA, 15 bp, Homo sapiens
aaaagaaaaaagaat

SEQ ID NO: 1941791 - DNA, 15 bp, Homo sapiens
aaagaaaaaagaatg

SEQ ID NO: 1941792 - DNA, 15 bp, Homo sapiens
aagaaaaaagaatgt

SEQ ID NO: 1941793 - DNA, 15 bp, Homo sapiens
agaaaaaagaatgta

SEQ ID NO: 1941794 - DNA, 15 bp, Homo sapiens
gaaaaaagaatgtaa

SEQ ID NO: 1941795 - DNA, 15 bp, Homo sapiens
aaaaaagaatgtaat

SEQ ID NO: 1941796 - DNA, 15 bp, Homo sapiens
aaaaagaatgtaatt

SEQ ID NO: 1941797 - DNA, 15 bp, Homo sapiens
aaaagaatgtaattt

SEQ ID NO: 1941798 - DNA, 15 bp, Homo sapiens
aaagaatgtaatttt

SEQ ID NO: 1941799 - DNA, 15 bp, Homo sapiens
aagaatgtaatttta

SEQ ID NO: 1941800 - DNA, 15 bp, Homo sapiens
agaatgtaattttat

SEQ ID NO: 1941801 - DNA, 15 bp, Homo sapiens
gaatgtaattttata

SEQ ID NO: 1941802 - DNA, 15 bp, Homo sapiens
aatgtaattttataa

SEQ ID NO: 1941803 - DNA, 15 bp, Homo sapiens
atgtaattttataat

SEQ ID NO: 1941804 - DNA, 15 bp, Homo sapiens
tgtaattttataata

SEQ ID NO: 1941805 - DNA, 15 bp, Homo sapiens
gtaattttataataa

SEQ ID NO: 1941806 - DNA, 15 bp, Homo sapiens
taattttataataac

SEQ ID NO: 1941807 - DNA, 15 bp, Homo sapiens
aattttataataaca

SEQ ID NO: 1941808 - DNA, 15 bp, Homo sapiens
attttataataacat

SEQ ID NO: 1941809 - DNA, 15 bp, Homo sapiens
ttttataataacata

SEQ ID NO: 1941810 - DNA, 15 bp, Homo sapiens
tttataataacataa

SEQ ID NO: 1941811 - DNA, 15 bp, Homo sapiens
ttataataacataaa

SEQ ID NO: 1941812 - DNA, 15 bp, Homo sapiens
tataataacataaaa

SEQ ID NO: 1941813 - DNA, 15 bp, Homo sapiens
ataataacataaaaa

SEQ ID NO: 1941814 - DNA, 15 bp, Homo sapiens
taataacataaaaat

SEQ ID NO: 1941815 - DNA, 15 bp, Homo sapiens
aataacataaaaata

SEQ ID NO: 1941816 - DNA, 15 bp, Homo sapiens
ataacataaaaataa

SEQ ID NO: 1941817 - DNA, 15 bp, Homo sapiens
taacataaaaataaa

SEQ ID NO: 1941818 - DNA, 15 bp, Homo sapiens
aacataaaaataaaa

SEQ ID NO: 1941819 - DNA, 15 bp, Homo sapiens
cataaaaataaaatg

SEQ ID NO: 1941820 - DNA, 15 bp, Homo sapiens
ataaaaataaaatgt

SEQ ID NO: 1941821 - DNA, 15 bp, Homo sapiens
taaaaataaaatgtc

SEQ ID NO: 1941822 - DNA, 15 bp, Homo sapiens
aaaaataaaatgtct

SEQ ID NO: 1941823 - DNA, 15 bp, Homo sapiens
aaaataaaatgtctt

SEQ ID NO: 1941824 - DNA, 15 bp, Homo sapiens
aaataaaatgtcttg

SEQ ID NO: 1941825 - DNA, 15 bp, Homo sapiens
aataaaatgtcttgg

SEQ ID NO: 1941826 - DNA, 15 bp, Homo sapiens
ataaaatgtcttgga

SEQ ID NO: 1941827 - DNA, 15 bp, Homo sapiens
taaaatgtcttggaa

SEQ ID NO: 1941828 - DNA, 15 bp, Homo sapiens
aaaatgtcttggaat

SEQ ID NO: 1941829 - DNA, 15 bp, Homo sapiens
aaatgtcttggaata

SEQ ID NO: 1941830 - DNA, 15 bp, Homo sapiens
aatgtcttggaataa

SEQ ID NO: 1941831 - DNA, 15 bp, Homo sapiens
atgtcttggaataaa

SEQ ID NO: 1941832 - DNA, 15 bp, Homo sapiens
tgtcttggaataaat

SEQ ID NO: 1941833 - DNA, 15 bp, Homo sapiens
gtcttggaataaatt

SEQ ID NO: 1941834 - DNA, 15 bp, Homo sapiens
tcttggaataaattt

SEQ ID NO: 1941835 - DNA, 15 bp, Homo sapiens
cttggaataaatttt

SEQ ID NO: 1941836 - DNA, 15 bp, Homo sapiens
ttggaataaatttta

SEQ ID NO: 1941837 - DNA, 15 bp, Homo sapiens
tggaataaattttat

SEQ ID NO: 1941838 - DNA, 15 bp, Homo sapiens
ggaataaattttata

SEQ ID NO: 1941839 - DNA, 15 bp, Homo sapiens
gaataaattttataa

SEQ ID NO: 1941840 - DNA, 15 bp, Homo sapiens
aataaattttataaa

SEQ ID NO: 1941841 - DNA, 15 bp, Homo sapiens
ataaattttataaat

SEQ ID NO: 1941842 - DNA, 15 bp, Homo sapiens
taaattttataaatt

SEQ ID NO: 1941843 - DNA, 15 bp, Homo sapiens
aaattttataaattt

SEQ ID NO: 1941844 - DNA, 15 bp, Homo sapiens
aattttataaattta

SEQ ID NO: 1941845 - DNA, 15 bp, Homo sapiens
attttataaatttaa

SEQ ID NO: 1941846 - DNA, 15 bp, Homo sapiens
ttttataaatttaac

SEQ ID NO: 1941847 - DNA, 15 bp, Homo sapiens
tttataaatttaaca

SEQ ID NO: 1941848 - DNA, 15 bp, Homo sapiens
ttataaatttaacaa

SEQ ID NO: 1941849 - DNA, 15 bp, Homo sapiens
tataaatttaacaaa

SEQ ID NO: 1941850 - DNA, 15 bp, Homo sapiens
ataaatttaacaaaa

SEQ ID NO: 1941851 - DNA, 15 bp, Homo sapiens
taaatttaacaaaag

SEQ ID NO: 1941852 - DNA, 15 bp, Homo sapiens
aaatttaacaaaagt

SEQ ID NO: 1941853 - DNA, 15 bp, Homo sapiens
aatttaacaaaagta

SEQ ID NO: 1941854 - DNA, 15 bp, Homo sapiens
atttaacaaaagtac

SEQ ID NO: 1941855 - DNA, 15 bp, Homo sapiens
tttaacaaaagtaca

SEQ ID NO: 1941856 - DNA, 15 bp, Homo sapiens
ttaacaaaagtacaa

SEQ ID NO: 1941857 - DNA, 15 bp, Homo sapiens
taacaaaagtacaag

SEQ ID NO: 1941858 - DNA, 15 bp, Homo sapiens
aacaaaagtacaaga

SEQ ID NO: 1941859 - DNA, 15 bp, Homo sapiens
acaaaagtacaagac

SEQ ID NO: 1941860 - DNA, 15 bp, Homo sapiens
caaaagtacaagacc

SEQ ID NO: 1941861 - DNA, 15 bp, Homo sapiens
aaaagtacaagacct

SEQ ID NO: 1941862 - DNA, 15 bp, Homo sapiens
aaagtacaagaccta

SEQ ID NO: 1941863 - DNA, 15 bp, Homo sapiens
aagtacaagacctat

SEQ ID NO: 1941864 - DNA, 15 bp, Homo sapiens
agtacaagacctata

SEQ ID NO: 1941865 - DNA, 15 bp, Homo sapiens
gtacaagacctataa

SEQ ID NO: 1941866 - DNA, 15 bp, Homo sapiens
tacaagacctataac

SEQ ID NO: 1941867 - DNA, 15 bp, Homo sapiens
acaagacctataacc

SEQ ID NO: 1941868 - DNA, 15 bp, Homo sapiens
caagacctataacct

SEQ ID NO: 1941869 - DNA, 15 bp, Homo sapiens
aagacctataacctg

SEQ ID NO: 1941870 - DNA, 15 bp, Homo sapiens
agacctataacctga

SEQ ID NO: 1941871 - DNA, 15 bp, Homo sapiens
gacctataacctgaa

SEQ ID NO: 1941872 - DNA, 15 bp, Homo sapiens
acctataacctgaag

SEQ ID NO: 1941873 - DNA, 15 bp, Homo sapiens
cctataacctgaaga

SEQ ID NO: 1941874 - DNA, 15 bp, Homo sapiens
ctataacctgaagac

SEQ ID NO: 1941875 - DNA, 15 bp, Homo sapiens
tataacctgaagact

SEQ ID NO: 1941876 - DNA, 15 bp, Homo sapiens
ataacctgaagacta

SEQ ID NO: 1941877 - DNA, 15 bp, Homo sapiens
taacctgaagactac

SEQ ID NO: 1941878 - DNA, 15 bp, Homo sapiens
aacctgaagactaca

SEQ ID NO: 1941879 - DNA, 15 bp, Homo sapiens
acctgaagactacaa

SEQ ID NO: 1941880 - DNA, 15 bp, Homo sapiens
cctgaagactacaaa

SEQ ID NO: 1941881 - DNA, 15 bp, Homo sapiens
ctgaagactacaaag

SEQ ID NO: 1941882 - DNA, 15 bp, Homo sapiens
tgaagactacaaagc

SEQ ID NO: 1941883 - DNA, 15 bp, Homo sapiens
gaagactacaaagca

SEQ ID NO: 1941884 - DNA, 15 bp, Homo sapiens
aagactacaaagcac

SEQ ID NO: 1941885 - DNA, 15 bp, Homo sapiens
agactacaaagcact

SEQ ID NO: 1941886 - DNA, 15 bp, Homo sapiens
gactacaaagcactg

SEQ ID NO: 1941887 - DNA, 15 bp, Homo sapiens
actacaaagcactgc

SEQ ID NO: 1941888 - DNA, 15 bp, Homo sapiens
ctacaaagcactgct

SEQ ID NO: 1941889 - DNA, 15 bp, Homo sapiens
tacaaagcactgctg

SEQ ID NO: 1941890 - DNA, 15 bp, Homo sapiens
acaaagcactgctga

SEQ ID NO: 1941891 - DNA, 15 bp, Homo sapiens
caaagcactgctgag

SEQ ID NO: 1941892 - DNA, 15 bp, Homo sapiens
aaagcactgctgaga

SEQ ID NO: 1941893 - DNA, 15 bp, Homo sapiens
aagcactgctgagaa

SEQ ID NO: 1941894 - DNA, 15 bp, Homo sapiens
agcactgctgagaaa

SEQ ID NO: 1941895 - DNA, 15 bp, Homo sapiens
gcactgctgagaaaa

SEQ ID NO: 1941896 - DNA, 15 bp, Homo sapiens
cactgctgagaaaaa

SEQ ID NO: 1941897 - DNA, 15 bp, Homo sapiens
actgctgagaaaaat

SEQ ID NO: 1941898 - DNA, 15 bp, Homo sapiens
gctgagaaaaattac

SEQ ID NO: 1941899 - DNA, 15 bp, Homo sapiens
ctgagaaaaattaca

SEQ ID NO: 1941900 - DNA, 15 bp, Homo sapiens
tgagaaaaattacag

SEQ ID NO: 1941901 - DNA, 15 bp, Homo sapiens
gagaaaaattacaga

SEQ ID NO: 1941902 - DNA, 15 bp, Homo sapiens
agaaaaattacagaa

SEQ ID NO: 1941903 - DNA, 15 bp, Homo sapiens
gaaaaattacagaag

SEQ ID NO: 1941904 - DNA, 15 bp, Homo sapiens
aaaaattacagaaga

SEQ ID NO: 1941905 - DNA, 15 bp, Homo sapiens
aaaattacagaagac

SEQ ID NO: 1941906 - DNA, 15 bp, Homo sapiens
aaattacagaagact

SEQ ID NO: 1941907 - DNA, 15 bp, Homo sapiens
aattacagaagactt

SEQ ID NO: 1941908 - DNA, 15 bp, Homo sapiens
attacagaagactta

SEQ ID NO: 1941909 - DNA, 15 bp, Homo sapiens
ttacagaagacttag

SEQ ID NO: 1941910 - DNA, 15 bp, Homo sapiens
tacagaagacttaga

SEQ ID NO: 1941911 - DNA, 15 bp, Homo sapiens
acagaagacttagat

SEQ ID NO: 1941912 - DNA, 15 bp, Homo sapiens
cagaagacttagata

SEQ ID NO: 1941913 - DNA, 15 bp, Homo sapiens
agaagacttagataa

SEQ ID NO: 1941914 - DNA, 15 bp, Homo sapiens
gaagacttagataaa

SEQ ID NO: 1941915 - DNA, 15 bp, Homo sapiens
aagacttagataaat

SEQ ID NO: 1941916 - DNA, 15 bp, Homo sapiens
agacttagataaatg

SEQ ID NO: 1941917 - DNA, 15 bp, Homo sapiens
gacttagataaatgg

SEQ ID NO: 1941918 - DNA, 15 bp, Homo sapiens
acttagataaatgga

SEQ ID NO: 1941919 - DNA, 15 bp, Homo sapiens
cttagataaatggaa

SEQ ID NO: 1941920 - DNA, 15 bp, Homo sapiens
ttagataaatggaaa

SEQ ID NO: 1941921 - DNA, 15 bp, Homo sapiens
tagataaatggaaag

SEQ ID NO: 1941922 - DNA, 15 bp, Homo sapiens
agataaatggaaaga

SEQ ID NO: 1941923 - DNA, 15 bp, Homo sapiens
gataaatggaaagac

SEQ ID NO: 1941924 - DNA, 15 bp, Homo sapiens
ataaatggaaagaca

SEQ ID NO: 1941925 - DNA, 15 bp, Homo sapiens
taaatggaaagacat

SEQ ID NO: 1941926 - DNA, 15 bp, Homo sapiens
aaatggaaagacatc

SEQ ID NO: 1941927 - DNA, 15 bp, Homo sapiens
aatggaaagacatcc

SEQ ID NO: 1941928 - DNA, 15 bp, Homo sapiens
atggaaagacatcct

SEQ ID NO: 1941929 - DNA, 15 bp, Homo sapiens
tggaaagacatcctt

SEQ ID NO: 1941930 - DNA, 15 bp, Homo sapiens
ggaaagacatccttt

SEQ ID NO: 1941931 - DNA, 15 bp, Homo sapiens
gaaagacatcctttg

SEQ ID NO: 1941932 - DNA, 15 bp, Homo sapiens
aaagacatcctttgt

SEQ ID NO: 1941933 - DNA, 15 bp, Homo sapiens
aagacatcctttgtt

SEQ ID NO: 1941934 - DNA, 15 bp, Homo sapiens
agacatcctttgttc

SEQ ID NO: 1941935 - DNA, 15 bp, Homo sapiens
gacatcctttgttcc

SEQ ID NO: 1941936 - DNA, 15 bp, Homo sapiens
acatcctttgttcct

SEQ ID NO: 1941937 - DNA, 15 bp, Homo sapiens
catcctttgttcctg

SEQ ID NO: 1941938 - DNA, 15 bp, Homo sapiens
atcctttgttcctgg

SEQ ID NO: 1941939 - DNA, 15 bp, Homo sapiens
tcctttgttcctgga

SEQ ID NO: 1941940 - DNA, 15 bp, Homo sapiens
cctttgttcctggat

SEQ ID NO: 1941941 - DNA, 15 bp, Homo sapiens
ctttgttcctggata

SEQ ID NO: 1941942 - DNA, 15 bp, Homo sapiens
tttgttcctggatag

SEQ ID NO: 1941943 - DNA, 15 bp, Homo sapiens
ttgttcctggatagg

SEQ ID NO: 1941944 - DNA, 15 bp, Homo sapiens
tgttcctggatagga

SEQ ID NO: 1941945 - DNA, 15 bp, Homo sapiens
gttcctggataggaa

SEQ ID NO: 1941946 - DNA, 15 bp, Homo sapiens
ttcctggataggaag

SEQ ID NO: 1941947 - DNA, 15 bp, Homo sapiens
tcctggataggaaga

SEQ ID NO: 1941948 - DNA, 15 bp, Homo sapiens
cctggataggaagac

SEQ ID NO: 1941949 - DNA, 15 bp, Homo sapiens
ctggataggaagacc

SEQ ID NO: 1941950 - DNA, 15 bp, Homo sapiens
tggataggaagaccc

SEQ ID NO: 1941951 - DNA, 15 bp, Homo sapiens
ggataggaagaccca

SEQ ID NO: 1941952 - DNA, 15 bp, Homo sapiens
gataggaagacccaa

SEQ ID NO: 1941953 - DNA, 15 bp, Homo sapiens
ataggaagacccaat

SEQ ID NO: 1941954 - DNA, 15 bp, Homo sapiens
taggaagacccaata

SEQ ID NO: 1941955 - DNA, 15 bp, Homo sapiens
aggaagacccaatat

SEQ ID NO: 1941956 - DNA, 15 bp, Homo sapiens
ggaagacccaatatt

SEQ ID NO: 1941957 - DNA, 15 bp, Homo sapiens
gaagacccaatattg

SEQ ID NO: 1941958 - DNA, 15 bp, Homo sapiens
aagacccaatattgt

SEQ ID NO: 1941959 - DNA, 15 bp, Homo sapiens
agacccaatattgtt

SEQ ID NO: 1941960 - DNA, 15 bp, Homo sapiens
gacccaatattgtta

SEQ ID NO: 1941961 - DNA, 15 bp, Homo sapiens
acccaatattgttaa

SEQ ID NO: 1941962 - DNA, 15 bp, Homo sapiens
cccaatattgttaag

SEQ ID NO: 1941963 - DNA, 15 bp, Homo sapiens
ccaatattgttaaga

SEQ ID NO: 1941964 - DNA, 15 bp, Homo sapiens
caatattgttaagat

SEQ ID NO: 1941965 - DNA, 15 bp, Homo sapiens
aatattgttaagatg

SEQ ID NO: 1941966 - DNA, 15 bp, Homo sapiens
atattgttaagatgg

SEQ ID NO: 1941967 - DNA, 15 bp, Homo sapiens
tattgttaagatggc

SEQ ID NO: 1941968 - DNA, 15 bp, Homo sapiens
attgttaagatggca

SEQ ID NO: 1941969 - DNA, 15 bp, Homo sapiens
ttgttaagatggcag

SEQ ID NO: 1941970 - DNA, 15 bp, Homo sapiens
tgttaagatggcagt

SEQ ID NO: 1941971 - DNA, 15 bp, Homo sapiens
gttaagatggcagta

SEQ ID NO: 1941972 - DNA, 15 bp, Homo sapiens
ttaagatggcagtat

SEQ ID NO: 1941973 - DNA, 15 bp, Homo sapiens
taagatggcagtatt

SEQ ID NO: 1941974 - DNA, 15 bp, Homo sapiens
aagatggcagtattc

SEQ ID NO: 1941975 - DNA, 15 bp, Homo sapiens
agatggcagtattcc

SEQ ID NO: 1941976 - DNA, 15 bp, Homo sapiens
gatggcagtattcct

SEQ ID NO: 1941977 - DNA, 15 bp, Homo sapiens
atggcagtattcctc

SEQ ID NO: 1941978 - DNA, 15 bp, Homo sapiens
tggcagtattcctca

SEQ ID NO: 1941979 - DNA, 15 bp, Homo sapiens
ggcagtattcctcag

SEQ ID NO: 1941980 - DNA, 15 bp, Homo sapiens
gcagtattcctcagg

SEQ ID NO: 1941981 - DNA, 15 bp, Homo sapiens
cagtattcctcaggt

SEQ ID NO: 1941982 - DNA, 15 bp, Homo sapiens
agtattcctcaggtt

SEQ ID NO: 1941983 - DNA, 15 bp, Homo sapiens
gtattcctcaggttg

SEQ ID NO: 1941984 - DNA, 15 bp, Homo sapiens
tattcctcaggttga

SEQ ID NO: 1941985 - DNA, 15 bp, Homo sapiens
attcctcaggttgat

SEQ ID NO: 1941986 - DNA, 15 bp, Homo sapiens
ttcctcaggttgatc

SEQ ID NO: 1941987 - DNA, 15 bp, Homo sapiens
tcctcaggttgatct

SEQ ID NO: 1941988 - DNA, 15 bp, Homo sapiens
cctcaggttgatcta

SEQ ID NO: 1941989 - DNA, 15 bp, Homo sapiens
ctcaggttgatctac

SEQ ID NO: 1941990 - DNA, 15 bp, Homo sapiens
tcaggttgatctaca

SEQ ID NO: 1941991 - DNA, 15 bp, Homo sapiens
caggttgatctacag

SEQ ID NO: 1941992 - DNA, 15 bp, Homo sapiens
aggttgatctacaga

SEQ ID NO: 1941993 - DNA, 15 bp, Homo sapiens
ggttgatctacagat

SEQ ID NO: 1941994 - DNA, 15 bp, Homo sapiens
gttgatctacagatt

SEQ ID NO: 1941995 - DNA, 15 bp, Homo sapiens
ttgatctacagattc

SEQ ID NO: 1941996 - DNA, 15 bp, Homo sapiens
tgatctacagattca

SEQ ID NO: 1941997 - DNA, 15 bp, Homo sapiens
gatctacagattcat

SEQ ID NO: 1941998 - DNA, 15 bp, Homo sapiens
atctacagattcatt

SEQ ID NO: 1941999 - DNA, 15 bp, Homo sapiens
tctacagattcatta

SEQ ID NO: 1942000 - DNA, 15 bp, Homo sapiens
ctacagattcattac

SEQ ID NO: 1942001 - DNA, 15 bp, Homo sapiens
tacagattcattaca

SEQ ID NO: 1942002 - DNA, 15 bp, Homo sapiens
acagattcattacag

SEQ ID NO: 1942003 - DNA, 15 bp, Homo sapiens
cagattcattacagt

SEQ ID NO: 1942004 - DNA, 15 bp, Homo sapiens
agattcattacagtc

SEQ ID NO: 1942005 - DNA, 15 bp, Homo sapiens
gattcattacagtct

SEQ ID NO: 1942006 - DNA, 15 bp, Homo sapiens
attcattacagtctc

SEQ ID NO: 1942007 - DNA, 15 bp, Homo sapiens
ttcattacagtctct

SEQ ID NO: 1942008 - DNA, 15 bp, Homo sapiens
tcattacagtctcta

SEQ ID NO: 1942009 - DNA, 15 bp, Homo sapiens
cattacagtctctag

SEQ ID NO: 1942010 - DNA, 15 bp, Homo sapiens
attacagtctctagc

SEQ ID NO: 1942011 - DNA, 15 bp, Homo sapiens
ttacagtctctagca

SEQ ID NO: 1942012 - DNA, 15 bp, Homo sapiens
tacagtctctagcaa

SEQ ID NO: 1942013 - DNA, 15 bp, Homo sapiens
acagtctctagcaaa

SEQ ID NO: 1942014 - DNA, 15 bp, Homo sapiens
cagtctctagcaaaa

SEQ ID NO: 1942015 - DNA, 15 bp, Homo sapiens
agtctctagcaaaac

SEQ ID NO: 1942016 - DNA, 15 bp, Homo sapiens
gtctctagcaaaacc

SEQ ID NO: 1942017 - DNA, 15 bp, Homo sapiens
tctctagcaaaaccc

SEQ ID NO: 1942018 - DNA, 15 bp, Homo sapiens
ctctagcaaaacccc

SEQ ID NO: 1942019 - DNA, 15 bp, Homo sapiens
tctagcaaaacccca

SEQ ID NO: 1942020 - DNA, 15 bp, Homo sapiens
ctagcaaaaccccag

SEQ ID NO: 1942021 - DNA, 15 bp, Homo sapiens
tagcaaaaccccagc

SEQ ID NO: 1942022 - DNA, 15 bp, Homo sapiens
agcaaaaccccagct

SEQ ID NO: 1942023 - DNA, 15 bp, Homo sapiens
gcaaaaccccagctg

SEQ ID NO: 1942024 - DNA, 15 bp, Homo sapiens
caaaaccccagctgg

SEQ ID NO: 1942025 - DNA, 15 bp, Homo sapiens
aaaaccccagctgga

SEQ ID NO: 1942026 - DNA, 15 bp, Homo sapiens
aaaccccagctggat

SEQ ID NO: 1942027 - DNA, 15 bp, Homo sapiens
aaccccagctggatt

SEQ ID NO: 1942028 - DNA, 15 bp, Homo sapiens
accccagctggatta

SEQ ID NO: 1942029 - DNA, 15 bp, Homo sapiens
ccccagctggattag

SEQ ID NO: 1942030 - DNA, 15 bp, Homo sapiens
cccagctggattagt

SEQ ID NO: 1942031 - DNA, 15 bp, Homo sapiens
ccagctggattagtt

SEQ ID NO: 1942032 - DNA, 15 bp, Homo sapiens
cagctggattagtta

SEQ ID NO: 1942033 - DNA, 15 bp, Homo sapiens
agctggattagttat

SEQ ID NO: 1942034 - DNA, 15 bp, Homo sapiens
gctggattagttatt

SEQ ID NO: 1942035 - DNA, 15 bp, Homo sapiens
ctggattagttattt

SEQ ID NO: 1942036 - DNA, 15 bp, Homo sapiens
tggattagttatttt

SEQ ID NO: 1942037 - DNA, 15 bp, Homo sapiens
ggattagttattttt

SEQ ID NO: 1942038 - DNA, 15 bp, Homo sapiens
gattagttatttttt

SEQ ID NO: 1942039 - DNA, 15 bp, Homo sapiens
attagttattttttt

SEQ ID NO: 1942040 - DNA, 15 bp, Homo sapiens
ttagttatttttttc

SEQ ID NO: 1942041 - DNA, 15 bp, Homo sapiens
tagttatttttttct

SEQ ID NO: 1942042 - DNA, 15 bp, Homo sapiens
agttatttttttctt

SEQ ID NO: 1942043 - DNA, 15 bp, Homo sapiens
gttatttttttcttt

SEQ ID NO: 1942044 - DNA, 15 bp, Homo sapiens
ttatttttttctttt

SEQ ID NO: 1942045 - DNA, 15 bp, Homo sapiens
atttttttctttttg

SEQ ID NO: 1942046 - DNA, 15 bp, Homo sapiens
tttttttctttttgc

SEQ ID NO: 1942047 - DNA, 15 bp, Homo sapiens
ttttttctttttgca

SEQ ID NO: 1942048 - DNA, 15 bp, Homo sapiens
tttttctttttgcat

SEQ ID NO: 1942049 - DNA, 15 bp, Homo sapiens
ttttctttttgcata

SEQ ID NO: 1942050 - DNA, 15 bp, Homo sapiens
tttctttttgcataa

SEQ ID NO: 1942051 - DNA, 15 bp, Homo sapiens
ttctttttgcataaa

SEQ ID NO: 1942052 - DNA, 15 bp, Homo sapiens
tctttttgcataaat

SEQ ID NO: 1942053 - DNA, 15 bp, Homo sapiens
ctttttgcataaatt

SEQ ID NO: 1942054 - DNA, 15 bp, Homo sapiens
tttttgcataaattg

SEQ ID NO: 1942055 - DNA, 15 bp, Homo sapiens
ttttgcataaattga

SEQ ID NO: 1942056 - DNA, 15 bp, Homo sapiens
tttgcataaattgac

SEQ ID NO: 1942057 - DNA, 15 bp, Homo sapiens
ttgcataaattgacg

SEQ ID NO: 1942058 - DNA, 15 bp, Homo sapiens
tgcataaattgacga

SEQ ID NO: 1942059 - DNA, 15 bp, Homo sapiens
gcataaattgacgag

SEQ ID NO: 1942060 - DNA, 15 bp, Homo sapiens
cataaattgacgagc

SEQ ID NO: 1942061 - DNA, 15 bp, Homo sapiens
ataaattgacgagct

SEQ ID NO: 1942062 - DNA, 15 bp, Homo sapiens
taaattgacgagctg

SEQ ID NO: 1942063 - DNA, 15 bp, Homo sapiens
aaattgacgagctga

SEQ ID NO: 1942064 - DNA, 15 bp, Homo sapiens
aattgacgagctgat

SEQ ID NO: 1942065 - DNA, 15 bp, Homo sapiens
attgacgagctgatt

SEQ ID NO: 1942066 - DNA, 15 bp, Homo sapiens
ttgacgagctgattc

SEQ ID NO: 1942067 - DNA, 15 bp, Homo sapiens
tgacgagctgattct

SEQ ID NO: 1942068 - DNA, 15 bp, Homo sapiens
gacgagctgattcta

SEQ ID NO: 1942069 - DNA, 15 bp, Homo sapiens
acgagctgattctaa

SEQ ID NO: 1942070 - DNA, 15 bp, Homo sapiens
cgagctgattctaaa

SEQ ID NO: 1942071 - DNA, 15 bp, Homo sapiens
gagctgattctaaaa

SEQ ID NO: 1942072 - DNA, 15 bp, Homo sapiens
agctgattctaaaat

SEQ ID NO: 1942073 - DNA, 15 bp, Homo sapiens
gctgattctaaaatt

SEQ ID NO: 1942074 - DNA, 15 bp, Homo sapiens
ctgattctaaaattc

SEQ ID NO: 1942075 - DNA, 15 bp, Homo sapiens
tgattctaaaattca

SEQ ID NO: 1942076 - DNA, 15 bp, Homo sapiens
gattctaaaattcac

SEQ ID NO: 1942077 - DNA, 15 bp, Homo sapiens
attctaaaattcaca

SEQ ID NO: 1942078 - DNA, 15 bp, Homo sapiens
ttctaaaattcacac

SEQ ID NO: 1942079 - DNA, 15 bp, Homo sapiens
tctaaaattcacacg

SEQ ID NO: 1942080 - DNA, 15 bp, Homo sapiens
ctaaaattcacacgg

SEQ ID NO: 1942081 - DNA, 15 bp, Homo sapiens
taaaattcacacgga

SEQ ID NO: 1942082 - DNA, 15 bp, Homo sapiens
aaaattcacacggaa

SEQ ID NO: 1942083 - DNA, 15 bp, Homo sapiens
aaattcacacggaaa

SEQ ID NO: 1942084 - DNA, 15 bp, Homo sapiens
aattcacacggaaat

SEQ ID NO: 1942085 - DNA, 15 bp, Homo sapiens
attcacacggaaatg

SEQ ID NO: 1942086 - DNA, 15 bp, Homo sapiens
ttcacacggaaatgc

SEQ ID NO: 1942087 - DNA, 15 bp, Homo sapiens
tcacacggaaatgca

SEQ ID NO: 1942088 - DNA, 15 bp, Homo sapiens
cacacggaaatgcaa

SEQ ID NO: 1942089 - DNA, 15 bp, Homo sapiens
acacggaaatgcaag

SEQ ID NO: 1942090 - DNA, 15 bp, Homo sapiens
cacggaaatgcaaga

SEQ ID NO: 1942091 - DNA, 15 bp, Homo sapiens
acggaaatgcaagag

SEQ ID NO: 1942092 - DNA, 15 bp, Homo sapiens
cggaaatgcaagaga

SEQ ID NO: 1942093 - DNA, 15 bp, Homo sapiens
ggaaatgcaagagaa

SEQ ID NO: 1942094 - DNA, 15 bp, Homo sapiens
gaaatgcaagagaac

SEQ ID NO: 1942095 - DNA, 15 bp, Homo sapiens
aaatgcaagagaacc

SEQ ID NO: 1942096 - DNA, 15 bp, Homo sapiens
aatgcaagagaacca

SEQ ID NO: 1942097 - DNA, 15 bp, Homo sapiens
atgcaagagaaccat

SEQ ID NO: 1942098 - DNA, 15 bp, Homo sapiens
tgcaagagaaccata

SEQ ID NO: 1942099 - DNA, 15 bp, Homo sapiens
gcaagagaaccataa

SEQ ID NO: 1942100 - DNA, 15 bp, Homo sapiens
caagagaaccataat

SEQ ID NO: 1942101 - DNA, 15 bp, Homo sapiens
aagagaaccataata

SEQ ID NO: 1942102 - DNA, 15 bp, Homo sapiens
agagaaccataataa

SEQ ID NO: 1942103 - DNA, 15 bp, Homo sapiens
gagaaccataataaa

SEQ ID NO: 1942104 - DNA, 15 bp, Homo sapiens
agaaccataataaac

SEQ ID NO: 1942105 - DNA, 15 bp, Homo sapiens
gaaccataataaaca

SEQ ID NO: 1942106 - DNA, 15 bp, Homo sapiens
aaccataataaacaa

SEQ ID NO: 1942107 - DNA, 15 bp, Homo sapiens
accataataaacaaa

SEQ ID NO: 1942108 - DNA, 15 bp, Homo sapiens
ccataataaacaaaa

SEQ ID NO: 1942109 - DNA, 15 bp, Homo sapiens
cataataaacaaaac

SEQ ID NO: 1942110 - DNA, 15 bp, Homo sapiens
ataataaacaaaacc

SEQ ID NO: 1942111 - DNA, 15 bp, Homo sapiens
taataaacaaaacca

SEQ ID NO: 1942112 - DNA, 15 bp, Homo sapiens
aataaacaaaaccat

SEQ ID NO: 1942113 - DNA, 15 bp, Homo sapiens
ataaacaaaaccatc

SEQ ID NO: 1942114 - DNA, 15 bp, Homo sapiens
taaacaaaaccatct

SEQ ID NO: 1942115 - DNA, 15 bp, Homo sapiens
aaacaaaaccatctt

SEQ ID NO: 1942116 - DNA, 15 bp, Homo sapiens
aacaaaaccatcttg

SEQ ID NO: 1942117 - DNA, 15 bp, Homo sapiens
acaaaaccatcttga

SEQ ID NO: 1942118 - DNA, 15 bp, Homo sapiens
caaaaccatcttgaa

SEQ ID NO: 1942119 - DNA, 15 bp, Homo sapiens
aaaaccatcttgaaa

SEQ ID NO: 1942120 - DNA, 15 bp, Homo sapiens
aaaccatcttgaaaa

SEQ ID NO: 1942121 - DNA, 15 bp, Homo sapiens
aaccatcttgaaaaa

SEQ ID NO: 1942122 - DNA, 15 bp, Homo sapiens
accatcttgaaaaaa

SEQ ID NO: 1942123 - DNA, 15 bp, Homo sapiens
ccatcttgaaaaaag

SEQ ID NO: 1942124 - DNA, 15 bp, Homo sapiens
catcttgaaaaaaga

SEQ ID NO: 1942125 - DNA, 15 bp, Homo sapiens
atcttgaaaaaagag

SEQ ID NO: 1942126 - DNA, 15 bp, Homo sapiens
tcttgaaaaaagaga

SEQ ID NO: 1942127 - DNA, 15 bp, Homo sapiens
cttgaaaaaagagaa

SEQ ID NO: 1942128 - DNA, 15 bp, Homo sapiens
ttgaaaaaagagaac

SEQ ID NO: 1942129 - DNA, 15 bp, Homo sapiens
tgaaaaaagagaaca

SEQ ID NO: 1942130 - DNA, 15 bp, Homo sapiens
gaaaaaagagaacaa

SEQ ID NO: 1942131 - DNA, 15 bp, Homo sapiens
aaaaaagagaacaaa

SEQ ID NO: 1942132 - DNA, 15 bp, Homo sapiens
aaaaagagaacaaaa

SEQ ID NO: 1942133 - DNA, 15 bp, Homo sapiens
aaaagagaacaaaat

SEQ ID NO: 1942134 - DNA, 15 bp, Homo sapiens
aaagagaacaaaatg

SEQ ID NO: 1942135 - DNA, 15 bp, Homo sapiens
aagagaacaaaatgg

SEQ ID NO: 1942136 - DNA, 15 bp, Homo sapiens
agagaacaaaatgga

SEQ ID NO: 1942137 - DNA, 15 bp, Homo sapiens
gagaacaaaatggaa

SEQ ID NO: 1942138 - DNA, 15 bp, Homo sapiens
agaacaaaatggaaa

SEQ ID NO: 1942139 - DNA, 15 bp, Homo sapiens
gaacaaaatggaaag

SEQ ID NO: 1942140 - DNA, 15 bp, Homo sapiens
aacaaaatggaaaga

SEQ ID NO: 1942141 - DNA, 15 bp, Homo sapiens
acaaaatggaaagat

SEQ ID NO: 1942142 - DNA, 15 bp, Homo sapiens
caaaatggaaagatt

SEQ ID NO: 1942143 - DNA, 15 bp, Homo sapiens
aaaatggaaagattc

SEQ ID NO: 1942144 - DNA, 15 bp, Homo sapiens
aaatggaaagattca

SEQ ID NO: 1942145 - DNA, 15 bp, Homo sapiens
aatggaaagattcac

SEQ ID NO: 1942146 - DNA, 15 bp, Homo sapiens
atggaaagattcaca

SEQ ID NO: 1942147 - DNA, 15 bp, Homo sapiens
tggaaagattcacat

SEQ ID NO: 1942148 - DNA, 15 bp, Homo sapiens
ggaaagattcacatt

SEQ ID NO: 1942149 - DNA, 15 bp, Homo sapiens
gaaagattcacattt

SEQ ID NO: 1942150 - DNA, 15 bp, Homo sapiens
aaagattcacatttc

SEQ ID NO: 1942151 - DNA, 15 bp, Homo sapiens
aagattcacatttcc

SEQ ID NO: 1942152 - DNA, 15 bp, Homo sapiens
agattcacatttcct

SEQ ID NO: 1942153 - DNA, 15 bp, Homo sapiens
gattcacatttcctg

SEQ ID NO: 1942154 - DNA, 15 bp, Homo sapiens
attcacatttcctga

SEQ ID NO: 1942155 - DNA, 15 bp, Homo sapiens
ttcacatttcctgag

SEQ ID NO: 1942156 - DNA, 15 bp, Homo sapiens
tcacatttcctgaga

SEQ ID NO: 1942157 - DNA, 15 bp, Homo sapiens
cacatttcctgagat

SEQ ID NO: 1942158 - DNA, 15 bp, Homo sapiens
acatttcctgagata

SEQ ID NO: 1942159 - DNA, 15 bp, Homo sapiens
catttcctgagatac

SEQ ID NO: 1942160 - DNA, 15 bp, Homo sapiens
atttcctgagataca

SEQ ID NO: 1942161 - DNA, 15 bp, Homo sapiens
tttcctgagatacac

SEQ ID NO: 1942162 - DNA, 15 bp, Homo sapiens
ttcctgagatacact

SEQ ID NO: 1942163 - DNA, 15 bp, Homo sapiens
tcctgagatacactg

SEQ ID NO: 1942164 - DNA, 15 bp, Homo sapiens
cctgagatacactgg

SEQ ID NO: 1942165 - DNA, 15 bp, Homo sapiens
ctgagatacactgga

SEQ ID NO: 1942166 - DNA, 15 bp, Homo sapiens
tgagatacactggaa

SEQ ID NO: 1942167 - DNA, 15 bp, Homo sapiens
gagatacactggaaa

SEQ ID NO: 1942168 - DNA, 15 bp, Homo sapiens
agatacactggaaat

SEQ ID NO: 1942169 - DNA, 15 bp, Homo sapiens
gatacactggaaata

SEQ ID NO: 1942170 - DNA, 15 bp, Homo sapiens
atacactggaaatat

SEQ ID NO: 1942171 - DNA, 15 bp, Homo sapiens
tacactggaaatatt

SEQ ID NO: 1942172 - DNA, 15 bp, Homo sapiens
acactggaaatattg

SEQ ID NO: 1942173 - DNA, 15 bp, Homo sapiens
cactggaaatattgc

SEQ ID NO: 1942174 - DNA, 15 bp, Homo sapiens
actggaaatattgca

SEQ ID NO: 1942175 - DNA, 15 bp, Homo sapiens
ctggaaatattgcag

SEQ ID NO: 1942176 - DNA, 15 bp, Homo sapiens
tggaaatattgcaga

SEQ ID NO: 1942177 - DNA, 15 bp, Homo sapiens
ggaaatattgcagat

SEQ ID NO: 1942178 - DNA, 15 bp, Homo sapiens
gaaatattgcagatt

SEQ ID NO: 1942179 - DNA, 15 bp, Homo sapiens
aaatattgcagattt

SEQ ID NO: 1942180 - DNA, 15 bp, Homo sapiens
aatattgcagatttg

SEQ ID NO: 1942181 - DNA, 15 bp, Homo sapiens
atattgcagatttgg

SEQ ID NO: 1942182 - DNA, 15 bp, Homo sapiens
tattgcagatttggt

SEQ ID NO: 1942183 - DNA, 15 bp, Homo sapiens
attgcagatttggtt

SEQ ID NO: 1942184 - DNA, 15 bp, Homo sapiens
ttgcagatttggttc

SEQ ID NO: 1942185 - DNA, 15 bp, Homo sapiens
tgcagatttggttcc

SEQ ID NO: 1942186 - DNA, 15 bp, Homo sapiens
gcagatttggttcca

SEQ ID NO: 1942187 - DNA, 15 bp, Homo sapiens
cagatttggttccag

SEQ ID NO: 1942188 - DNA, 15 bp, Homo sapiens
agatttggttccaga

SEQ ID NO: 1942189 - DNA, 15 bp, Homo sapiens
gatttggttccagac

SEQ ID NO: 1942190 - DNA, 15 bp, Homo sapiens
atttggttccagacc

SEQ ID NO: 1942191 - DNA, 15 bp, Homo sapiens
tttggttccagacca

SEQ ID NO: 1942192 - DNA, 15 bp, Homo sapiens
ttggttccagaccac

SEQ ID NO: 1942193 - DNA, 15 bp, Homo sapiens
tggttccagaccact

SEQ ID NO: 1942194 - DNA, 15 bp, Homo sapiens
ggttccagaccactt

SEQ ID NO: 1942195 - DNA, 15 bp, Homo sapiens
gttccagaccacttc

SEQ ID NO: 1942196 - DNA, 15 bp, Homo sapiens
ttccagaccacttca

SEQ ID NO: 1942197 - DNA, 15 bp, Homo sapiens
tccagaccacttcaa

SEQ ID NO: 1942198 - DNA, 15 bp, Homo sapiens
ccagaccacttcaac

SEQ ID NO: 1942199 - DNA, 15 bp, Homo sapiens
cagaccacttcaaca

SEQ ID NO: 1942200 - DNA, 15 bp, Homo sapiens
agaccacttcaacaa

SEQ ID NO: 1942201 - DNA, 15 bp, Homo sapiens
gaccacttcaacaaa

SEQ ID NO: 1942202 - DNA, 15 bp, Homo sapiens
accacttcaacaaag

SEQ ID NO: 1942203 - DNA, 15 bp, Homo sapiens
ccacttcaacaaagc

SEQ ID NO: 1942204 - DNA, 15 bp, Homo sapiens
cacttcaacaaagcc

SEQ ID NO: 1942205 - DNA, 15 bp, Homo sapiens
acttcaacaaagcca

SEQ ID NO: 1942206 - DNA, 15 bp, Homo sapiens
cttcaacaaagccaa

SEQ ID NO: 1942207 - DNA, 15 bp, Homo sapiens
ttcaacaaagccaat

SEQ ID NO: 1942208 - DNA, 15 bp, Homo sapiens
tcaacaaagccaata

SEQ ID NO: 1942209 - DNA, 15 bp, Homo sapiens
caacaaagccaatat

SEQ ID NO: 1942210 - DNA, 15 bp, Homo sapiens
aacaaagccaatatt

SEQ ID NO: 1942211 - DNA, 15 bp, Homo sapiens
acaaagccaatatta

SEQ ID NO: 1942212 - DNA, 15 bp, Homo sapiens
caaagccaatattac

SEQ ID NO: 1942213 - DNA, 15 bp, Homo sapiens
aaagccaatattacg

SEQ ID NO: 1942214 - DNA, 15 bp, Homo sapiens
aagccaatattacga

SEQ ID NO: 1942215 - DNA, 15 bp, Homo sapiens
agccaatattacgat

SEQ ID NO: 1942216 - DNA, 15 bp, Homo sapiens
gccaatattacgata

SEQ ID NO: 1942217 - DNA, 15 bp, Homo sapiens
ccaatattacgataa

SEQ ID NO: 1942218 - DNA, 15 bp, Homo sapiens
caatattacgataaa

SEQ ID NO: 1942219 - DNA, 15 bp, Homo sapiens
aatattacgataaaa

SEQ ID NO: 1942220 - DNA, 15 bp, Homo sapiens
atattacgataaaag

SEQ ID NO: 1942221 - DNA, 15 bp, Homo sapiens
tattacgataaaaga

SEQ ID NO: 1942222 - DNA, 15 bp, Homo sapiens
attacgataaaagag

SEQ ID NO: 1942223 - DNA, 15 bp, Homo sapiens
ttacgataaaagagt

SEQ ID NO: 1942224 - DNA, 15 bp, Homo sapiens
tacgataaaagagtc

SEQ ID NO: 1942225 - DNA, 15 bp, Homo sapiens
acgataaaagagtca

SEQ ID NO: 1942226 - DNA, 15 bp, Homo sapiens
cgataaaagagtcac

SEQ ID NO: 1942227 - DNA, 15 bp, Homo sapiens
gataaaagagtcaca

SEQ ID NO: 1942228 - DNA, 15 bp, Homo sapiens
ataaaagagtcacac

SEQ ID NO: 1942229 - DNA, 15 bp, Homo sapiens
taaaagagtcacaca

SEQ ID NO: 1942230 - DNA, 15 bp, Homo sapiens
aaaagagtcacacaa

SEQ ID NO: 1942231 - DNA, 15 bp, Homo sapiens
aaagagtcacacaaa

SEQ ID NO: 1942232 - DNA, 15 bp, Homo sapiens
aagagtcacacaaat

SEQ ID NO: 1942233 - DNA, 15 bp, Homo sapiens
agagtcacacaaatt

SEQ ID NO: 1942234 - DNA, 15 bp, Homo sapiens
gagtcacacaaattt

SEQ ID NO: 1942235 - DNA, 15 bp, Homo sapiens
agtcacacaaatttt

SEQ ID NO: 1942236 - DNA, 15 bp, Homo sapiens
gtcacacaaattttt

SEQ ID NO: 1942237 - DNA, 15 bp, Homo sapiens
tcacacaaatttttt

SEQ ID NO: 1942238 - DNA, 15 bp, Homo sapiens
cacacaaatttttta

SEQ ID NO: 1942239 - DNA, 15 bp, Homo sapiens
acacaaattttttag

SEQ ID NO: 1942240 - DNA, 15 bp, Homo sapiens
cacaaattttttagt

SEQ ID NO: 1942241 - DNA, 15 bp, Homo sapiens
acaaattttttagtt

SEQ ID NO: 1942242 - DNA, 15 bp, Homo sapiens
caaattttttagttt

SEQ ID NO: 1942243 - DNA, 15 bp, Homo sapiens
aaattttttagtttc

SEQ ID NO: 1942244 - DNA, 15 bp, Homo sapiens
aattttttagtttcc

SEQ ID NO: 1942245 - DNA, 15 bp, Homo sapiens
attttttagtttccc

SEQ ID NO: 1942246 - DNA, 15 bp, Homo sapiens
ttttttagtttccca

SEQ ID NO: 1942247 - DNA, 15 bp, Homo sapiens
tttttagtttcccag

SEQ ID NO: 1942248 - DNA, 15 bp, Homo sapiens
ttttagtttcccagt

SEQ ID NO: 1942249 - DNA, 15 bp, Homo sapiens
tttagtttcccagta

SEQ ID NO: 1942250 - DNA, 15 bp, Homo sapiens
ttagtttcccagtac

SEQ ID NO: 1942251 - DNA, 15 bp, Homo sapiens
tagtttcccagtaca

SEQ ID NO: 1942252 - DNA, 15 bp, Homo sapiens
agtttcccagtacat

SEQ ID NO: 1942253 - DNA, 15 bp, Homo sapiens
gtttcccagtacata

SEQ ID NO: 1942254 - DNA, 15 bp, Homo sapiens
tttcccagtacatat

SEQ ID NO: 1942255 - DNA, 15 bp, Homo sapiens
ttcccagtacatata

SEQ ID NO: 1942256 - DNA, 15 bp, Homo sapiens
tcccagtacatataa

SEQ ID NO: 1942257 - DNA, 15 bp, Homo sapiens
cccagtacatataaa

SEQ ID NO: 1942258 - DNA, 15 bp, Homo sapiens
ccagtacatataaaa

SEQ ID NO: 1942259 - DNA, 15 bp, Homo sapiens
cagtacatataaaaa

SEQ ID NO: 1942260 - DNA, 15 bp, Homo sapiens
agtacatataaaaat

SEQ ID NO: 1942261 - DNA, 15 bp, Homo sapiens
gtacatataaaaatt

SEQ ID NO: 1942262 - DNA, 15 bp, Homo sapiens
tacatataaaaatta

SEQ ID NO: 1942263 - DNA, 15 bp, Homo sapiens
acatataaaaattac

SEQ ID NO: 1942264 - DNA, 15 bp, Homo sapiens
catataaaaattaca

SEQ ID NO: 1942265 - DNA, 15 bp, Homo sapiens
atataaaaattacat

SEQ ID NO: 1942266 - DNA, 15 bp, Homo sapiens
tataaaaattacatt

SEQ ID NO: 1942267 - DNA, 15 bp, Homo sapiens
ataaaaattacattt

SEQ ID NO: 1942268 - DNA, 15 bp, Homo sapiens
taaaaattacattta

SEQ ID NO: 1942269 - DNA, 15 bp, Homo sapiens
aaaaattacatttat

SEQ ID NO: 1942270 - DNA, 15 bp, Homo sapiens
aaaattacatttata

SEQ ID NO: 1942271 - DNA, 15 bp, Homo sapiens
aaattacatttatac

SEQ ID NO: 1942272 - DNA, 15 bp, Homo sapiens
aattacatttatact

SEQ ID NO: 1942273 - DNA, 15 bp, Homo sapiens
attacatttatacta

SEQ ID NO: 1942274 - DNA, 15 bp, Homo sapiens
ttacatttatactat

SEQ ID NO: 1942275 - DNA, 15 bp, Homo sapiens
tacatttatactata

SEQ ID NO: 1942276 - DNA, 15 bp, Homo sapiens
acatttatactatat

SEQ ID NO: 1942277 - DNA, 15 bp, Homo sapiens
catttatactatatt

SEQ ID NO: 1942278 - DNA, 15 bp, Homo sapiens
atttatactatatta

SEQ ID NO: 1942279 - DNA, 15 bp, Homo sapiens
tttatactatattaa

SEQ ID NO: 1942280 - DNA, 15 bp, Homo sapiens
ttatactatattaat

SEQ ID NO: 1942281 - DNA, 15 bp, Homo sapiens
tatactatattaatg

SEQ ID NO: 1942282 - DNA, 15 bp, Homo sapiens
atactatattaatgt

SEQ ID NO: 1942283 - DNA, 15 bp, Homo sapiens
tactatattaatgtg

SEQ ID NO: 1942284 - DNA, 15 bp, Homo sapiens
actatattaatgtgc

SEQ ID NO: 1942285 - DNA, 15 bp, Homo sapiens
ctatattaatgtgca

SEQ ID NO: 1942286 - DNA, 15 bp, Homo sapiens
tatattaatgtgcag

SEQ ID NO: 1942287 - DNA, 15 bp, Homo sapiens
atattaatgtgcagt

SEQ ID NO: 1942288 - DNA, 15 bp, Homo sapiens
tattaatgtgcagta

SEQ ID NO: 1942289 - DNA, 15 bp, Homo sapiens
attaatgtgcagtac

SEQ ID NO: 1942290 - DNA, 15 bp, Homo sapiens
ttaatgtgcagtacc

SEQ ID NO: 1942291 - DNA, 15 bp, Homo sapiens
taatgtgcagtacca

SEQ ID NO: 1942292 - DNA, 15 bp, Homo sapiens
aatgtgcagtaccat

SEQ ID NO: 1942293 - DNA, 15 bp, Homo sapiens
atgtgcagtaccatt

SEQ ID NO: 1942294 - DNA, 15 bp, Homo sapiens
tgtgcagtaccatta

SEQ ID NO: 1942295 - DNA, 15 bp, Homo sapiens
gtgcagtaccattat

SEQ ID NO: 1942296 - DNA, 15 bp, Homo sapiens
tgcagtaccattatg

SEQ ID NO: 1942297 - DNA, 15 bp, Homo sapiens
gcagtaccattatgt

SEQ ID NO: 1942298 - DNA, 15 bp, Homo sapiens
cagtaccattatgtc

SEQ ID NO: 1942299 - DNA, 15 bp, Homo sapiens
agtaccattatgtct

SEQ ID NO: 1942300 - DNA, 15 bp, Homo sapiens
gtaccattatgtctt

SEQ ID NO: 1942301 - DNA, 15 bp, Homo sapiens
taccattatgtctta

SEQ ID NO: 1942302 - DNA, 15 bp, Homo sapiens
accattatgtcttaa

SEQ ID NO: 1942303 - DNA, 15 bp, Homo sapiens
ccattatgtcttaaa

SEQ ID NO: 1942304 - DNA, 15 bp, Homo sapiens
cattatgtcttaaaa

SEQ ID NO: 1942305 - DNA, 15 bp, Homo sapiens
attatgtcttaaaaa

SEQ ID NO: 1942306 - DNA, 15 bp, Homo sapiens
ttatgtcttaaaaat

SEQ ID NO: 1942307 - DNA, 15 bp, Homo sapiens
tatgtcttaaaaatg

SEQ ID NO: 1942308 - DNA, 15 bp, Homo sapiens
atgtcttaaaaatgt

SEQ ID NO: 1942309 - DNA, 15 bp, Homo sapiens
tgtcttaaaaatgta

SEQ ID NO: 1942310 - DNA, 15 bp, Homo sapiens
gtcttaaaaatgtac

SEQ ID NO: 1942311 - DNA, 15 bp, Homo sapiens
tcttaaaaatgtaca

SEQ ID NO: 1942312 - DNA, 15 bp, Homo sapiens
cttaaaaatgtacat

SEQ ID NO: 1942313 - DNA, 15 bp, Homo sapiens
ttaaaaatgtacata

SEQ ID NO: 1942314 - DNA, 15 bp, Homo sapiens
taaaaatgtacatac

SEQ ID NO: 1942315 - DNA, 15 bp, Homo sapiens
aaaaatgtacatacc

SEQ ID NO: 1942316 - DNA, 15 bp, Homo sapiens
aaaatgtacatacct

SEQ ID NO: 1942317 - DNA, 15 bp, Homo sapiens
aaatgtacatacctt

SEQ ID NO: 1942318 - DNA, 15 bp, Homo sapiens
aatgtacatacctta

SEQ ID NO: 1942319 - DNA, 15 bp, Homo sapiens
atgtacataccttaa

SEQ ID NO: 1942320 - DNA, 15 bp, Homo sapiens
tgtacataccttaat

SEQ ID NO: 1942321 - DNA, 15 bp, Homo sapiens
gtacataccttaatt

SEQ ID NO: 1942322 - DNA, 15 bp, Homo sapiens
tacataccttaattt

SEQ ID NO: 1942323 - DNA, 15 bp, Homo sapiens
acataccttaattta

SEQ ID NO: 1942324 - DNA, 15 bp, Homo sapiens
cataccttaatttaa

SEQ ID NO: 1942325 - DNA, 15 bp, Homo sapiens
ataccttaatttaaa

SEQ ID NO: 1942326 - DNA, 15 bp, Homo sapiens
taccttaatttaaaa

SEQ ID NO: 1942327 - DNA, 15 bp, Homo sapiens
accttaatttaaaaa

SEQ ID NO: 1942328 - DNA, 15 bp, Homo sapiens
ccttaatttaaaaat

SEQ ID NO: 1942329 - DNA, 15 bp, Homo sapiens
cttaatttaaaaata

SEQ ID NO: 1942330 - DNA, 15 bp, Homo sapiens
ttaatttaaaaatat

SEQ ID NO: 1942331 - DNA, 15 bp, Homo sapiens
taatttaaaaatatt

SEQ ID NO: 1942332 - DNA, 15 bp, Homo sapiens
tttaaaaatatttta

SEQ ID NO: 1942333 - DNA, 15 bp, Homo sapiens
ttaaaaatattttat

SEQ ID NO: 1942334 - DNA, 15 bp, Homo sapiens
taaaaatattttatt

SEQ ID NO: 1942335 - DNA, 15 bp, Homo sapiens
aaaaatattttatta

SEQ ID NO: 1942336 - DNA, 15 bp, Homo sapiens
aaaatattttattac

SEQ ID NO: 1942337 - DNA, 15 bp, Homo sapiens
aaatattttattact

SEQ ID NO: 1942338 - DNA, 15 bp, Homo sapiens
aatattttattactg

SEQ ID NO: 1942339 - DNA, 15 bp, Homo sapiens
atattttattactga

SEQ ID NO: 1942340 - DNA, 15 bp, Homo sapiens
tattttattactgaa

SEQ ID NO: 1942341 - DNA, 15 bp, Homo sapiens
attttattactgaaa

SEQ ID NO: 1942342 - DNA, 15 bp, Homo sapiens
ttttattactgaaaa

SEQ ID NO: 1942343 - DNA, 15 bp, Homo sapiens
tttattactgaaaaa

SEQ ID NO: 1942344 - DNA, 15 bp, Homo sapiens
ttattactgaaaaat

SEQ ID NO: 1942345 - DNA, 15 bp, Homo sapiens
tattactgaaaaatg

SEQ ID NO: 1942346 - DNA, 15 bp, Homo sapiens
attactgaaaaatgc

SEQ ID NO: 1942347 - DNA, 15 bp, Homo sapiens
ttactgaaaaatgct

SEQ ID NO: 1942348 - DNA, 15 bp, Homo sapiens
tactgaaaaatgcta

SEQ ID NO: 1942349 - DNA, 15 bp, Homo sapiens
actgaaaaatgctag

SEQ ID NO: 1942350 - DNA, 15 bp, Homo sapiens
ctgaaaaatgctagt

SEQ ID NO: 1942351 - DNA, 15 bp, Homo sapiens
tgaaaaatgctagta

SEQ ID NO: 1942352 - DNA, 15 bp, Homo sapiens
gaaaaatgctagtaa

SEQ ID NO: 1942353 - DNA, 15 bp, Homo sapiens
aaaatgctagtaatg

SEQ ID NO: 1942354 - DNA, 15 bp, Homo sapiens
aaatgctagtaatga

SEQ ID NO: 1942355 - DNA, 15 bp, Homo sapiens
aatgctagtaatgat

SEQ ID NO: 1942356 - DNA, 15 bp, Homo sapiens
atgctagtaatgatc

SEQ ID NO: 1942357 - DNA, 15 bp, Homo sapiens
tgctagtaatgatct

SEQ ID NO: 1942358 - DNA, 15 bp, Homo sapiens
gctagtaatgatctg

SEQ ID NO: 1942359 - DNA, 15 bp, Homo sapiens
ctagtaatgatctga

SEQ ID NO: 1942360 - DNA, 15 bp, Homo sapiens
tagtaatgatctgag

SEQ ID NO: 1942361 - DNA, 15 bp, Homo sapiens
agtaatgatctgagc

SEQ ID NO: 1942362 - DNA, 15 bp, Homo sapiens
gtaatgatctgagca

SEQ ID NO: 1942363 - DNA, 15 bp, Homo sapiens
taatgatctgagcat

SEQ ID NO: 1942364 - DNA, 15 bp, Homo sapiens
aatgatctgagcatt

SEQ ID NO: 1942365 - DNA, 15 bp, Homo sapiens
atgatctgagcattt

SEQ ID NO: 1942366 - DNA, 15 bp, Homo sapiens
tgatctgagcattta

SEQ ID NO: 1942367 - DNA, 15 bp, Homo sapiens
gatctgagcatttag

SEQ ID NO: 1942368 - DNA, 15 bp, Homo sapiens
atctgagcatttaga

SEQ ID NO: 1942369 - DNA, 15 bp, Homo sapiens
tctgagcatttagaa

SEQ ID NO: 1942370 - DNA, 15 bp, Homo sapiens
ctgagcatttagaaa

SEQ ID NO: 1942371 - DNA, 15 bp, Homo sapiens
tgagcatttagaaag

SEQ ID NO: 1942372 - DNA, 15 bp, Homo sapiens
gagcatttagaaagt

SEQ ID NO: 1942373 - DNA, 15 bp, Homo sapiens
agcatttagaaagtc

SEQ ID NO: 1942374 - DNA, 15 bp, Homo sapiens
gcatttagaaagtca

SEQ ID NO: 1942375 - DNA, 15 bp, Homo sapiens
catttagaaagtcat

SEQ ID NO: 1942376 - DNA, 15 bp, Homo sapiens
atttagaaagtcata

SEQ ID NO: 1942377 - DNA, 15 bp, Homo sapiens
tttagaaagtcataa

SEQ ID NO: 1942378 - DNA, 15 bp, Homo sapiens
ttagaaagtcataat

SEQ ID NO: 1942379 - DNA, 15 bp, Homo sapiens
tagaaagtcataatc

SEQ ID NO: 1942380 - DNA, 15 bp, Homo sapiens
agaaagtcataatca

SEQ ID NO: 1942381 - DNA, 15 bp, Homo sapiens
gaaagtcataatcat

SEQ ID NO: 1942382 - DNA, 15 bp, Homo sapiens
aaagtcataatcatt

SEQ ID NO: 1942383 - DNA, 15 bp, Homo sapiens
aagtcataatcattt

SEQ ID NO: 1942384 - DNA, 15 bp, Homo sapiens
agtcataatcatttt

SEQ ID NO: 1942385 - DNA, 15 bp, Homo sapiens
gtcataatcattttg

SEQ ID NO: 1942386 - DNA, 15 bp, Homo sapiens
tcataatcattttgc

SEQ ID NO: 1942387 - DNA, 15 bp, Homo sapiens
cataatcattttgcg

SEQ ID NO: 1942388 - DNA, 15 bp, Homo sapiens
ataatcattttgcgg

SEQ ID NO: 1942389 - DNA, 15 bp, Homo sapiens
taatcattttgcggg

SEQ ID NO: 1942390 - DNA, 15 bp, Homo sapiens
aatcattttgcgggt

SEQ ID NO: 1942391 - DNA, 15 bp, Homo sapiens
atcattttgcgggtg

SEQ ID NO: 1942392 - DNA, 15 bp, Homo sapiens
tcattttgcgggtgg

SEQ ID NO: 1942393 - DNA, 15 bp, Homo sapiens
cattttgcgggtgga

SEQ ID NO: 1942394 - DNA, 15 bp, Homo sapiens
attttgcgggtggag

SEQ ID NO: 1942395 - DNA, 15 bp, Homo sapiens
ttttgcgggtggagg

SEQ ID NO: 1942396 - DNA, 15 bp, Homo sapiens
tttgcgggtggagga

SEQ ID NO: 1942397 - DNA, 15 bp, Homo sapiens
ttgcgggtggaggat

SEQ ID NO: 1942398 - DNA, 15 bp, Homo sapiens
tgcgggtggaggatc

SEQ ID NO: 1942399 - DNA, 15 bp, Homo sapiens
gcgggtggaggatca

SEQ ID NO: 1942400 - DNA, 15 bp, Homo sapiens
cgggtggaggatcat

SEQ ID NO: 1942401 - DNA, 15 bp, Homo sapiens
gggtggaggatcatg

SEQ ID NO: 1942402 - DNA, 15 bp, Homo sapiens
ggtggaggatcatgc

SEQ ID NO: 1942403 - DNA, 15 bp, Homo sapiens
gtggaggatcatgcc

SEQ ID NO: 1942404 - DNA, 15 bp, Homo sapiens
tggaggatcatgcct

SEQ ID NO: 1942405 - DNA, 15 bp, Homo sapiens
ggaggatcatgcctc

SEQ ID NO: 1942406 - DNA, 15 bp, Homo sapiens
gaggatcatgcctcg

SEQ ID NO: 1942407 - DNA, 15 bp, Homo sapiens
aggatcatgcctcga

SEQ ID NO: 1942408 - DNA, 15 bp, Homo sapiens
ggatcatgcctcgat

SEQ ID NO: 1942409 - DNA, 15 bp, Homo sapiens
gatcatgcctcgatg

SEQ ID NO: 1942410 - DNA, 15 bp, Homo sapiens
atcatgcctcgatgt

SEQ ID NO: 1942411 - DNA, 15 bp, Homo sapiens
tcatgcctcgatgtt

SEQ ID NO: 1942412 - DNA, 15 bp, Homo sapiens
catgcctcgatgttg

SEQ ID NO: 1942413 - DNA, 15 bp, Homo sapiens
atgcctcgatgttga

SEQ ID NO: 1942414 - DNA, 15 bp, Homo sapiens
tgcctcgatgttgat

SEQ ID NO: 1942415 - DNA, 15 bp, Homo sapiens
gcctcgatgttgatg

SEQ ID NO: 1942416 - DNA, 15 bp, Homo sapiens
cctcgatgttgatgg

SEQ ID NO: 1942417 - DNA, 15 bp, Homo sapiens
ctcgatgttgatggt

SEQ ID NO: 1942418 - DNA, 15 bp, Homo sapiens
tcgatgttgatggtt

SEQ ID NO: 1942419 - DNA, 15 bp, Homo sapiens
cgatgttgatggttg

SEQ ID NO: 1942420 - DNA, 15 bp, Homo sapiens
gatgttgatggttgc

SEQ ID NO: 1942421 - DNA, 15 bp, Homo sapiens
atgttgatggttgct

SEQ ID NO: 1942422 - DNA, 15 bp, Homo sapiens
tgttgatggttgctg

SEQ ID NO: 1942423 - DNA, 15 bp, Homo sapiens
gttgatggttgctga

SEQ ID NO: 1942424 - DNA, 15 bp, Homo sapiens
ttgatggttgctgac

SEQ ID NO: 1942425 - DNA, 15 bp, Homo sapiens
tgatggttgctgact

SEQ ID NO: 1942426 - DNA, 15 bp, Homo sapiens
gatggttgctgacta

SEQ ID NO: 1942427 - DNA, 15 bp, Homo sapiens
atggttgctgactaa

SEQ ID NO: 1942428 - DNA, 15 bp, Homo sapiens
tggttgctgactaat

SEQ ID NO: 1942429 - DNA, 15 bp, Homo sapiens
ggttgctgactaatc

SEQ ID NO: 1942430 - DNA, 15 bp, Homo sapiens
gttgctgactaatca

SEQ ID NO: 1942431 - DNA, 15 bp, Homo sapiens
ttgctgactaatcag

SEQ ID NO: 1942432 - DNA, 15 bp, Homo sapiens
tgctgactaatcagg

SEQ ID NO: 1942433 - DNA, 15 bp, Homo sapiens
gctgactaatcaggg

SEQ ID NO: 1942434 - DNA, 15 bp, Homo sapiens
ctgactaatcagggt

SEQ ID NO: 1942435 - DNA, 15 bp, Homo sapiens
tgactaatcagggtg

SEQ ID NO: 1942436 - DNA, 15 bp, Homo sapiens
gactaatcagggtgg

SEQ ID NO: 1942437 - DNA, 15 bp, Homo sapiens
actaatcagggtggt

SEQ ID NO: 1942438 - DNA, 15 bp, Homo sapiens
ctaatcagggtggtg

SEQ ID NO: 1942439 - DNA, 15 bp, Homo sapiens
taatcagggtggtgg

SEQ ID NO: 1942440 - DNA, 15 bp, Homo sapiens
aatcagggtggtggt

SEQ ID NO: 1942441 - DNA, 15 bp, Homo sapiens
atcagggtggtggtt

SEQ ID NO: 1942442 - DNA, 15 bp, Homo sapiens
tcagggtggtggttg

SEQ ID NO: 1942443 - DNA, 15 bp, Homo sapiens
cagggtggtggttgc

SEQ ID NO: 1942444 - DNA, 15 bp, Homo sapiens
agggtggtggttgct

SEQ ID NO: 1942445 - DNA, 15 bp, Homo sapiens
gggtggtggttgctg

SEQ ID NO: 1942446 - DNA, 15 bp, Homo sapiens
ggtggtggttgctga

SEQ ID NO: 1942447 - DNA, 15 bp, Homo sapiens
gtggtggttgctgaa

SEQ ID NO: 1942448 - DNA, 15 bp, Homo sapiens
tggtggttgctgaag

SEQ ID NO: 1942449 - DNA, 15 bp, Homo sapiens
ggtggttgctgaagg

SEQ ID NO: 1942450 - DNA, 15 bp, Homo sapiens
gtggttgctgaaggt

SEQ ID NO: 1942451 - DNA, 15 bp, Homo sapiens
tggttgctgaaggtt

SEQ ID NO: 1942452 - DNA, 15 bp, Homo sapiens
ggttgctgaaggttg

SEQ ID NO: 1942453 - DNA, 15 bp, Homo sapiens
gttgctgaaggttga

SEQ ID NO: 1942454 - DNA, 15 bp, Homo sapiens
ttgctgaaggttgag

SEQ ID NO: 1942455 - DNA, 15 bp, Homo sapiens
tgctgaaggttgagg

SEQ ID NO: 1942456 - DNA, 15 bp, Homo sapiens
gctgaaggttgaggt

SEQ ID NO: 1942457 - DNA, 15 bp, Homo sapiens
ctgaaggttgaggtg

SEQ ID NO: 1942458 - DNA, 15 bp, Homo sapiens
tgaaggttgaggtgg

SEQ ID NO: 1942459 - DNA, 15 bp, Homo sapiens
gaaggttgaggtggc

SEQ ID NO: 1942460 - DNA, 15 bp, Homo sapiens
aaggttgaggtggct

SEQ ID NO: 1942461 - DNA, 15 bp, Homo sapiens
aggttgaggtggctg

SEQ ID NO: 1942462 - DNA, 15 bp, Homo sapiens
ggttgaggtggctgt

SEQ ID NO: 1942463 - DNA, 15 bp, Homo sapiens
gttgaggtggctgtg

SEQ ID NO: 1942464 - DNA, 15 bp, Homo sapiens
ttgaggtggctgtgg

SEQ ID NO: 1942465 - DNA, 15 bp, Homo sapiens
tgaggtggctgtgga

SEQ ID NO: 1942466 - DNA, 15 bp, Homo sapiens
gaggtggctgtggaa

SEQ ID NO: 1942467 - DNA, 15 bp, Homo sapiens
aggtggctgtggaaa

SEQ ID NO: 1942468 - DNA, 15 bp, Homo sapiens
ggtggctgtggaaat

SEQ ID NO: 1942469 - DNA, 15 bp, Homo sapiens
gtggctgtggaaatt

SEQ ID NO: 1942470 - DNA, 15 bp, Homo sapiens
tggctgtggaaatta

SEQ ID NO: 1942471 - DNA, 15 bp, Homo sapiens
ggctgtggaaattac

SEQ ID NO: 1942472 - DNA, 15 bp, Homo sapiens
gctgtggaaattact

SEQ ID NO: 1942473 - DNA, 15 bp, Homo sapiens
ctgtggaaattactt

SEQ ID NO: 1942474 - DNA, 15 bp, Homo sapiens
tgtggaaattactta

SEQ ID NO: 1942475 - DNA, 15 bp, Homo sapiens
gtggaaattacttaa

SEQ ID NO: 1942476 - DNA, 15 bp, Homo sapiens
tggaaattacttaag

SEQ ID NO: 1942477 - DNA, 15 bp, Homo sapiens
ggaaattacttaagc

SEQ ID NO: 1942478 - DNA, 15 bp, Homo sapiens
gaaattacttaagct

SEQ ID NO: 1942479 - DNA, 15 bp, Homo sapiens
aaattacttaagcta

SEQ ID NO: 1942480 - DNA, 15 bp, Homo sapiens
aattacttaagctaa

SEQ ID NO: 1942481 - DNA, 15 bp, Homo sapiens
attacttaagctaag

SEQ ID NO: 1942482 - DNA, 15 bp, Homo sapiens
ttacttaagctaaga

SEQ ID NO: 1942483 - DNA, 15 bp, Homo sapiens
tacttaagctaagac

SEQ ID NO: 1942484 - DNA, 15 bp, Homo sapiens
acttaagctaagaca

SEQ ID NO: 1942485 - DNA, 15 bp, Homo sapiens
cttaagctaagacaa

SEQ ID NO: 1942486 - DNA, 15 bp, Homo sapiens
ttaagctaagacaac

SEQ ID NO: 1942487 - DNA, 15 bp, Homo sapiens
taagctaagacaacg

SEQ ID NO: 1942488 - DNA, 15 bp, Homo sapiens
aagctaagacaacga

SEQ ID NO: 1942489 - DNA, 15 bp, Homo sapiens
agctaagacaacgaa

SEQ ID NO: 1942490 - DNA, 15 bp, Homo sapiens
gctaagacaacgaag

SEQ ID NO: 1942491 - DNA, 15 bp, Homo sapiens
ctaagacaacgaagt

SEQ ID NO: 1942492 - DNA, 15 bp, Homo sapiens
taagacaacgaagtt

SEQ ID NO: 1942493 - DNA, 15 bp, Homo sapiens
aagacaacgaagttt

SEQ ID NO: 1942494 - DNA, 15 bp, Homo sapiens
agacaacgaagtttc

SEQ ID NO: 1942495 - DNA, 15 bp, Homo sapiens
gacaacgaagtttcc

SEQ ID NO: 1942496 - DNA, 15 bp, Homo sapiens
acaacgaagtttcct

SEQ ID NO: 1942497 - DNA, 15 bp, Homo sapiens
caacgaagtttcctg

SEQ ID NO: 1942498 - DNA, 15 bp, Homo sapiens
aacgaagtttcctgc

SEQ ID NO: 1942499 - DNA, 15 bp, Homo sapiens
acgaagtttcctgca

SEQ ID NO: 1942500 - DNA, 15 bp, Homo sapiens
cgaagtttcctgcat

SEQ ID NO: 1942501 - DNA, 15 bp, Homo sapiens
gaagtttcctgcatc

SEQ ID NO: 1942502 - DNA, 15 bp, Homo sapiens
aagtttcctgcatca

SEQ ID NO: 1942503 - DNA, 15 bp, Homo sapiens
agtttcctgcatcaa

SEQ ID NO: 1942504 - DNA, 15 bp, Homo sapiens
gtttcctgcatcaat

SEQ ID NO: 1942505 - DNA, 15 bp, Homo sapiens
tttcctgcatcaatt

SEQ ID NO: 1942506 - DNA, 15 bp, Homo sapiens
ttcctgcatcaattg

SEQ ID NO: 1942507 - DNA, 15 bp, Homo sapiens
tcctgcatcaattga

SEQ ID NO: 1942508 - DNA, 15 bp, Homo sapiens
cctgcatcaattgac

SEQ ID NO: 1942509 - DNA, 15 bp, Homo sapiens
ctgcatcaattgact

SEQ ID NO: 1942510 - DNA, 15 bp, Homo sapiens
tgcatcaattgactc

SEQ ID NO: 1942511 - DNA, 15 bp, Homo sapiens
gcatcaattgactct

SEQ ID NO: 1942512 - DNA, 15 bp, Homo sapiens
catcaattgactctt

SEQ ID NO: 1942513 - DNA, 15 bp, Homo sapiens
atcaattgactcttc

SEQ ID NO: 1942514 - DNA, 15 bp, Homo sapiens
tcaattgactcttcc

SEQ ID NO: 1942515 - DNA, 15 bp, Homo sapiens
caattgactcttcca

SEQ ID NO: 1942516 - DNA, 15 bp, Homo sapiens
aattgactcttccac

SEQ ID NO: 1942517 - DNA, 15 bp, Homo sapiens
attgactcttccaca

SEQ ID NO: 1942518 - DNA, 15 bp, Homo sapiens
ttgactcttccacaa

SEQ ID NO: 1942519 - DNA, 15 bp, Homo sapiens
tgactcttccacaaa

SEQ ID NO: 1942520 - DNA, 15 bp, Homo sapiens
gactcttccacaaaa

SEQ ID NO: 1942521 - DNA, 15 bp, Homo sapiens
actcttccacaaaat

SEQ ID NO: 1942522 - DNA, 15 bp, Homo sapiens
ctcttccacaaaatg

SEQ ID NO: 1942523 - DNA, 15 bp, Homo sapiens
tcttccacaaaatgt

SEQ ID NO: 1942524 - DNA, 15 bp, Homo sapiens
cttccacaaaatgtt

SEQ ID NO: 1942525 - DNA, 15 bp, Homo sapiens
ttccacaaaatgttt

SEQ ID NO: 1942526 - DNA, 15 bp, Homo sapiens
tccacaaaatgtttc

SEQ ID NO: 1942527 - DNA, 15 bp, Homo sapiens
ccacaaaatgtttct

SEQ ID NO: 1942528 - DNA, 15 bp, Homo sapiens
cacaaaatgtttctc

SEQ ID NO: 1942529 - DNA, 15 bp, Homo sapiens
acaaaatgtttctct

SEQ ID NO: 1942530 - DNA, 15 bp, Homo sapiens
caaaatgtttctctg

SEQ ID NO: 1942531 - DNA, 15 bp, Homo sapiens
aaaatgtttctctgt

SEQ ID NO: 1942532 - DNA, 15 bp, Homo sapiens
aaatgtttctctgtt

SEQ ID NO: 1942533 - DNA, 15 bp, Homo sapiens
aatgtttctctgttg

SEQ ID NO: 1942534 - DNA, 15 bp, Homo sapiens
atgtttctctgttgc

SEQ ID NO: 1942535 - DNA, 15 bp, Homo sapiens
tgtttctctgttgca

SEQ ID NO: 1942536 - DNA, 15 bp, Homo sapiens
gtttctctgttgcat

SEQ ID NO: 1942537 - DNA, 15 bp, Homo sapiens
tttctctgttgcatg

SEQ ID NO: 1942538 - DNA, 15 bp, Homo sapiens
ttctctgttgcatgt

SEQ ID NO: 1942539 - DNA, 15 bp, Homo sapiens
tctctgttgcatgtg

SEQ ID NO: 1942540 - DNA, 15 bp, Homo sapiens
ctctgttgcatgtga

SEQ ID NO: 1942541 - DNA, 15 bp, Homo sapiens
tctgttgcatgtgat

SEQ ID NO: 1942542 - DNA, 15 bp, Homo sapiens
ctgttgcatgtgatg

SEQ ID NO: 1942543 - DNA, 15 bp, Homo sapiens
tgttgcatgtgatgc

SEQ ID NO: 1942544 - DNA, 15 bp, Homo sapiens
gttgcatgtgatgct

SEQ ID NO: 1942545 - DNA, 15 bp, Homo sapiens
ttgcatgtgatgcta

SEQ ID NO: 1942546 - DNA, 15 bp, Homo sapiens
tgcatgtgatgctat

SEQ ID NO: 1942547 - DNA, 15 bp, Homo sapiens
gcatgtgatgctatt

SEQ ID NO: 1942548 - DNA, 15 bp, Homo sapiens
catgtgatgctattt

SEQ ID NO: 1942549 - DNA, 15 bp, Homo sapiens
atgtgatgctattta

SEQ ID NO: 1942550 - DNA, 15 bp, Homo sapiens
tgtgatgctatttaa

SEQ ID NO: 1942551 - DNA, 15 bp, Homo sapiens
gtgatgctatttaat

SEQ ID NO: 1942552 - DNA, 15 bp, Homo sapiens
tgatgctatttaata

SEQ ID NO: 1942553 - DNA, 15 bp, Homo sapiens
gatgctatttaatag

SEQ ID NO: 1942554 - DNA, 15 bp, Homo sapiens
atgctatttaatagc

SEQ ID NO: 1942555 - DNA, 15 bp, Homo sapiens
tgctatttaatagca

SEQ ID NO: 1942556 - DNA, 15 bp, Homo sapiens
gctatttaatagcat

SEQ ID NO: 1942557 - DNA, 15 bp, Homo sapiens
ctatttaatagcatt

SEQ ID NO: 1942558 - DNA, 15 bp, Homo sapiens
tatttaatagcattt

SEQ ID NO: 1942559 - DNA, 15 bp, Homo sapiens
atttaatagcatttt

SEQ ID NO: 1942560 - DNA, 15 bp, Homo sapiens
tttaatagcatttta

SEQ ID NO: 1942561 - DNA, 15 bp, Homo sapiens
ttaatagcattttac

SEQ ID NO: 1942562 - DNA, 15 bp, Homo sapiens
taatagcattttact

SEQ ID NO: 1942563 - DNA, 15 bp, Homo sapiens
aatagcattttactt

SEQ ID NO: 1942564 - DNA, 15 bp, Homo sapiens
atagcattttactta

SEQ ID NO: 1942565 - DNA, 15 bp, Homo sapiens
tagcattttacttac

SEQ ID NO: 1942566 - DNA, 15 bp, Homo sapiens
agcattttacttaca

SEQ ID NO: 1942567 - DNA, 15 bp, Homo sapiens
gcattttacttacag

SEQ ID NO: 1942568 - DNA, 15 bp, Homo sapiens
cattttacttacagt

SEQ ID NO: 1942569 - DNA, 15 bp, Homo sapiens
attttacttacagta

SEQ ID NO: 1942570 - DNA, 15 bp, Homo sapiens
ttttacttacagtag

SEQ ID NO: 1942571 - DNA, 15 bp, Homo sapiens
tttacttacagtaga

SEQ ID NO: 1942572 - DNA, 15 bp, Homo sapiens
ttacttacagtagaa

SEQ ID NO: 1942573 - DNA, 15 bp, Homo sapiens
tacttacagtagaac

SEQ ID NO: 1942574 - DNA, 15 bp, Homo sapiens
acttacagtagaact

SEQ ID NO: 1942575 - DNA, 15 bp, Homo sapiens
cttacagtagaactc

SEQ ID NO: 1942576 - DNA, 15 bp, Homo sapiens
ttacagtagaactcc

SEQ ID NO: 1942577 - DNA, 15 bp, Homo sapiens
tacagtagaactcct

SEQ ID NO: 1942578 - DNA, 15 bp, Homo sapiens
acagtagaactcctt

SEQ ID NO: 1942579 - DNA, 15 bp, Homo sapiens
cagtagaactccttt

SEQ ID NO: 1942580 - DNA, 15 bp, Homo sapiens
agtagaactcctttc

SEQ ID NO: 1942581 - DNA, 15 bp, Homo sapiens
gtagaactcctttca

SEQ ID NO: 1942582 - DNA, 15 bp, Homo sapiens
tagaactcctttcaa

SEQ ID NO: 1942583 - DNA, 15 bp, Homo sapiens
agaactcctttcaaa

SEQ ID NO: 1942584 - DNA, 15 bp, Homo sapiens
gaactcctttcaaaa

SEQ ID NO: 1942585 - DNA, 15 bp, Homo sapiens
aactcctttcaaaat

SEQ ID NO: 1942586 - DNA, 15 bp, Homo sapiens
actcctttcaaaatt

SEQ ID NO: 1942587 - DNA, 15 bp, Homo sapiens
ctcctttcaaaattg

SEQ ID NO: 1942588 - DNA, 15 bp, Homo sapiens
tcctttcaaaattgg

SEQ ID NO: 1942589 - DNA, 15 bp, Homo sapiens
cctttcaaaattgga

SEQ ID NO: 1942590 - DNA, 15 bp, Homo sapiens
caaaattggagtcag

SEQ ID NO: 1942591 - DNA, 15 bp, Homo sapiens
aaaattggagtcagt

SEQ ID NO: 1942592 - DNA, 15 bp, Homo sapiens
aaattggagtcagtc

SEQ ID NO: 1942593 - DNA, 15 bp, Homo sapiens
aattggagtcagtcc

SEQ ID NO: 1942594 - DNA, 15 bp, Homo sapiens
attggagtcagtcct

SEQ ID NO: 1942595 - DNA, 15 bp, Homo sapiens
ttggagtcagtcctc

SEQ ID NO: 1942596 - DNA, 15 bp, Homo sapiens
tggagtcagtcctct

SEQ ID NO: 1942597 - DNA, 15 bp, Homo sapiens
ggagtcagtcctctc

SEQ ID NO: 1942598 - DNA, 15 bp, Homo sapiens
gagtcagtcctctca

SEQ ID NO: 1942599 - DNA, 15 bp, Homo sapiens
agtcagtcctctcaa

SEQ ID NO: 1942600 - DNA, 15 bp, Homo sapiens
gtcagtcctctcaaa

SEQ ID NO: 1942601 - DNA, 15 bp, Homo sapiens
tcagtcctctcaaat

SEQ ID NO: 1942602 - DNA, 15 bp, Homo sapiens
cagtcctctcaaatc

SEQ ID NO: 1942603 - DNA, 15 bp, Homo sapiens
agtcctctcaaatcc

SEQ ID NO: 1942604 - DNA, 15 bp, Homo sapiens
gtcctctcaaatccc

SEQ ID NO: 1942605 - DNA, 15 bp, Homo sapiens
tcctctcaaatccct

SEQ ID NO: 1942606 - DNA, 15 bp, Homo sapiens
cctctcaaatccctc

SEQ ID NO: 1942607 - DNA, 15 bp, Homo sapiens
ctctcaaatccctcc

SEQ ID NO: 1942608 - DNA, 15 bp, Homo sapiens
tctcaaatccctcca

SEQ ID NO: 1942609 - DNA, 15 bp, Homo sapiens
ctcaaatccctccac

SEQ ID NO: 1942610 - DNA, 15 bp, Homo sapiens
tcaaatccctccact

SEQ ID NO: 1942611 - DNA, 15 bp, Homo sapiens
caaatccctccactg

SEQ ID NO: 1942612 - DNA, 15 bp, Homo sapiens
aaatccctccactgc

SEQ ID NO: 1942613 - DNA, 15 bp, Homo sapiens
aatccctccactgct

SEQ ID NO: 1942614 - DNA, 15 bp, Homo sapiens
atccctccactgctt

SEQ ID NO: 1942615 - DNA, 15 bp, Homo sapiens
tccctccactgcttt

SEQ ID NO: 1942616 - DNA, 15 bp, Homo sapiens
ccctccactgcttta

SEQ ID NO: 1942617 - DNA, 15 bp, Homo sapiens
cctccactgctttat

SEQ ID NO: 1942618 - DNA, 15 bp, Homo sapiens
ctccactgctttatc

SEQ ID NO: 1942619 - DNA, 15 bp, Homo sapiens
tccactgctttatca

SEQ ID NO: 1942620 - DNA, 15 bp, Homo sapiens
ccactgctttatcaa

SEQ ID NO: 1942621 - DNA, 15 bp, Homo sapiens
cactgctttatcaac

SEQ ID NO: 1942622 - DNA, 15 bp, Homo sapiens
actgctttatcaact

SEQ ID NO: 1942623 - DNA, 15 bp, Homo sapiens
ctgctttatcaactc

SEQ ID NO: 1942624 - DNA, 15 bp, Homo sapiens
tgctttatcaactca

SEQ ID NO: 1942625 - DNA, 15 bp, Homo sapiens
gctttatcaactcag

SEQ ID NO: 1942626 - DNA, 15 bp, Homo sapiens
ctttatcaactcagt

SEQ ID NO: 1942627 - DNA, 15 bp, Homo sapiens
tttatcaactcagtt

SEQ ID NO: 1942628 - DNA, 15 bp, Homo sapiens
ttatcaactcagttt

SEQ ID NO: 1942629 - DNA, 15 bp, Homo sapiens
tatcaactcagttta

SEQ ID NO: 1942630 - DNA, 15 bp, Homo sapiens
atcaactcagtttag

SEQ ID NO: 1942631 - DNA, 15 bp, Homo sapiens
tcaactcagtttagg

SEQ ID NO: 1942632 - DNA, 15 bp, Homo sapiens
caactcagtttaggt

SEQ ID NO: 1942633 - DNA, 15 bp, Homo sapiens
aactcagtttaggta

SEQ ID NO: 1942634 - DNA, 15 bp, Homo sapiens
actcagtttaggtaa

SEQ ID NO: 1942635 - DNA, 15 bp, Homo sapiens
ctcagtttaggtaat

SEQ ID NO: 1942636 - DNA, 15 bp, Homo sapiens
tcagtttaggtaata

SEQ ID NO: 1942637 - DNA, 15 bp, Homo sapiens
cagtttaggtaatat

SEQ ID NO: 1942638 - DNA, 15 bp, Homo sapiens
agtttaggtaatatc

SEQ ID NO: 1942639 - DNA, 15 bp, Homo sapiens
gtttaggtaatatct

SEQ ID NO: 1942640 - DNA, 15 bp, Homo sapiens
tttaggtaatatcta

SEQ ID NO: 1942641 - DNA, 15 bp, Homo sapiens
ttaggtaatatctag

SEQ ID NO: 1942642 - DNA, 15 bp, Homo sapiens
taggtaatatctagg

SEQ ID NO: 1942643 - DNA, 15 bp, Homo sapiens
aggtaatatctaggt

SEQ ID NO: 1942644 - DNA, 15 bp, Homo sapiens
ggtaatatctaggtt

SEQ ID NO: 1942645 - DNA, 15 bp, Homo sapiens
gtaatatctaggtta

SEQ ID NO: 1942646 - DNA, 15 bp, Homo sapiens
taatatctaggttaa

SEQ ID NO: 1942647 - DNA, 15 bp, Homo sapiens
aatatctaggttaat

SEQ ID NO: 1942648 - DNA, 15 bp, Homo sapiens
atatctaggttaatt

SEQ ID NO: 1942649 - DNA, 15 bp, Homo sapiens
tatctaggttaattg

SEQ ID NO: 1942650 - DNA, 15 bp, Homo sapiens
atctaggttaattgt

SEQ ID NO: 1942651 - DNA, 15 bp, Homo sapiens
tctaggttaattgtt

SEQ ID NO: 1942652 - DNA, 15 bp, Homo sapiens
ctaggttaattgttg

SEQ ID NO: 1942653 - DNA, 15 bp, Homo sapiens
taggttaattgttgt

SEQ ID NO: 1942654 - DNA, 15 bp, Homo sapiens
aggttaattgttgtc

SEQ ID NO: 1942655 - DNA, 15 bp, Homo sapiens
ggttaattgttgtca

SEQ ID NO: 1942656 - DNA, 15 bp, Homo sapiens
gttaattgttgtcat

SEQ ID NO: 1942657 - DNA, 15 bp, Homo sapiens
ttaattgttgtcatt

SEQ ID NO: 1942658 - DNA, 15 bp, Homo sapiens
taattgttgtcattt

SEQ ID NO: 1942659 - DNA, 15 bp, Homo sapiens
aattgttgtcatttg

SEQ ID NO: 1942660 - DNA, 15 bp, Homo sapiens
attgttgtcatttgt

SEQ ID NO: 1942661 - DNA, 15 bp, Homo sapiens
ttgttgtcatttgtc

SEQ ID NO: 1942662 - DNA, 15 bp, Homo sapiens
tgttgtcatttgtca

SEQ ID NO: 1942663 - DNA, 15 bp, Homo sapiens
gttgtcatttgtcat

SEQ ID NO: 1942664 - DNA, 15 bp, Homo sapiens
ttgtcatttgtcatt

SEQ ID NO: 1942665 - DNA, 15 bp, Homo sapiens
tgtcatttgtcattt

SEQ ID NO: 1942666 - DNA, 15 bp, Homo sapiens
gtcatttgtcatttc

SEQ ID NO: 1942667 - DNA, 15 bp, Homo sapiens
tcatttgtcatttca

SEQ ID NO: 1942668 - DNA, 15 bp, Homo sapiens
catttgtcatttcaa

SEQ ID NO: 1942669 - DNA, 15 bp, Homo sapiens
atttgtcatttcaac

SEQ ID NO: 1942670 - DNA, 15 bp, Homo sapiens
tttgtcatttcaaca

SEQ ID NO: 1942671 - DNA, 15 bp, Homo sapiens
ttgtcatttcaacag

SEQ ID NO: 1942672 - DNA, 15 bp, Homo sapiens
tgtcatttcaacagt

SEQ ID NO: 1942673 - DNA, 15 bp, Homo sapiens
gtcatttcaacagtg

SEQ ID NO: 1942674 - DNA, 15 bp, Homo sapiens
tcatttcaacagtgt

SEQ ID NO: 1942675 - DNA, 15 bp, Homo sapiens
catttcaacagtgtt

SEQ ID NO: 1942676 - DNA, 15 bp, Homo sapiens
atttcaacagtgttc

SEQ ID NO: 1942677 - DNA, 15 bp, Homo sapiens
tttcaacagtgttca

SEQ ID NO: 1942678 - DNA, 15 bp, Homo sapiens
ttcaacagtgttcac

SEQ ID NO: 1942679 - DNA, 15 bp, Homo sapiens
tcaacagtgttcaca

SEQ ID NO: 1942680 - DNA, 15 bp, Homo sapiens
caacagtgttcacag

SEQ ID NO: 1942681 - DNA, 15 bp, Homo sapiens
aacagtgttcacagc

SEQ ID NO: 1942682 - DNA, 15 bp, Homo sapiens
acagtgttcacagca

SEQ ID NO: 1942683 - DNA, 15 bp, Homo sapiens
cagtgttcacagcat

SEQ ID NO: 1942684 - DNA, 15 bp, Homo sapiens
agtgttcacagcatt

SEQ ID NO: 1942685 - DNA, 15 bp, Homo sapiens
gtgttcacagcattt

SEQ ID NO: 1942686 - DNA, 15 bp, Homo sapiens
tgttcacagcatttt

SEQ ID NO: 1942687 - DNA, 15 bp, Homo sapiens
gttcacagcattttc

SEQ ID NO: 1942688 - DNA, 15 bp, Homo sapiens
ttcacagcattttca

SEQ ID NO: 1942689 - DNA, 15 bp, Homo sapiens
tcacagcattttcac

SEQ ID NO: 1942690 - DNA, 15 bp, Homo sapiens
cacagcattttcacc

SEQ ID NO: 1942691 - DNA, 15 bp, Homo sapiens
acagcattttcacca

SEQ ID NO: 1942692 - DNA, 15 bp, Homo sapiens
cagcattttcaccag

SEQ ID NO: 1942693 - DNA, 15 bp, Homo sapiens
agcattttcaccaga

SEQ ID NO: 1942694 - DNA, 15 bp, Homo sapiens
gcattttcaccagaa

SEQ ID NO: 1942695 - DNA, 15 bp, Homo sapiens
cattttcaccagaag

SEQ ID NO: 1942696 - DNA, 15 bp, Homo sapiens
attttcaccagaagt

SEQ ID NO: 1942697 - DNA, 15 bp, Homo sapiens
ttttcaccagaagtg

SEQ ID NO: 1942698 - DNA, 15 bp, Homo sapiens
tttcaccagaagtgg

SEQ ID NO: 1942699 - DNA, 15 bp, Homo sapiens
ttcaccagaagtgga

SEQ ID NO: 1942700 - DNA, 15 bp, Homo sapiens
tcaccagaagtggag

SEQ ID NO: 1942701 - DNA, 15 bp, Homo sapiens
caccagaagtggagt

SEQ ID NO: 1942702 - DNA, 15 bp, Homo sapiens
accagaagtggagtc

SEQ ID NO: 1942703 - DNA, 15 bp, Homo sapiens
ccagaagtggagtcc

SEQ ID NO: 1942704 - DNA, 15 bp, Homo sapiens
cagaagtggagtcca

SEQ ID NO: 1942705 - DNA, 15 bp, Homo sapiens
agaagtggagtccat

SEQ ID NO: 1942706 - DNA, 15 bp, Homo sapiens
gaagtggagtccatc

SEQ ID NO: 1942707 - DNA, 15 bp, Homo sapiens
aagtggagtccatct

SEQ ID NO: 1942708 - DNA, 15 bp, Homo sapiens
agtggagtccatctc

SEQ ID NO: 1942709 - DNA, 15 bp, Homo sapiens
gtggagtccatctca

SEQ ID NO: 1942710 - DNA, 15 bp, Homo sapiens
tggagtccatctcaa

SEQ ID NO: 1942711 - DNA, 15 bp, Homo sapiens
ggagtccatctcaag

SEQ ID NO: 1942712 - DNA, 15 bp, Homo sapiens
gagtccatctcaaga

SEQ ID NO: 1942713 - DNA, 15 bp, Homo sapiens
agtccatctcaagaa

SEQ ID NO: 1942714 - DNA, 15 bp, Homo sapiens
gtccatctcaagaaa

SEQ ID NO: 1942715 - DNA, 15 bp, Homo sapiens
tccatctcaagaaac

SEQ ID NO: 1942716 - DNA, 15 bp, Homo sapiens
ccatctcaagaaacc

SEQ ID NO: 1942717 - DNA, 15 bp, Homo sapiens
catctcaagaaacca

SEQ ID NO: 1942718 - DNA, 15 bp, Homo sapiens
atctcaagaaaccac

SEQ ID NO: 1942719 - DNA, 15 bp, Homo sapiens
tctcaagaaaccact

SEQ ID NO: 1942720 - DNA, 15 bp, Homo sapiens
ctcaagaaaccactt

SEQ ID NO: 1942721 - DNA, 15 bp, Homo sapiens
tcaagaaaccacttt

SEQ ID NO: 1942722 - DNA, 15 bp, Homo sapiens
caagaaaccactttc

SEQ ID NO: 1942723 - DNA, 15 bp, Homo sapiens
aagaaaccactttct

SEQ ID NO: 1942724 - DNA, 15 bp, Homo sapiens
agaaaccactttctt

SEQ ID NO: 1942725 - DNA, 15 bp, Homo sapiens
gaaaccactttcttt

SEQ ID NO: 1942726 - DNA, 15 bp, Homo sapiens
aaaccactttctttg

SEQ ID NO: 1942727 - DNA, 15 bp, Homo sapiens
aaccactttctttgc

SEQ ID NO: 1942728 - DNA, 15 bp, Homo sapiens
ccactttctttgctc

SEQ ID NO: 1942729 - DNA, 15 bp, Homo sapiens
cactttctttgctca

SEQ ID NO: 1942730 - DNA, 15 bp, Homo sapiens
actttctttgctcat

SEQ ID NO: 1942731 - DNA, 15 bp, Homo sapiens
ctttctttgctcatc

SEQ ID NO: 1942732 - DNA, 15 bp, Homo sapiens
tttctttgctcatcc

SEQ ID NO: 1942733 - DNA, 15 bp, Homo sapiens
ttctttgctcatcca

SEQ ID NO: 1942734 - DNA, 15 bp, Homo sapiens
tctttgctcatccaa

SEQ ID NO: 1942735 - DNA, 15 bp, Homo sapiens
ctttgctcatccaaa

SEQ ID NO: 1942736 - DNA, 15 bp, Homo sapiens
tttgctcatccaaat

SEQ ID NO: 1942737 - DNA, 15 bp, Homo sapiens
ttgctcatccaaatg

SEQ ID NO: 1942738 - DNA, 15 bp, Homo sapiens
tgctcatccaaatga

SEQ ID NO: 1942739 - DNA, 15 bp, Homo sapiens
gctcatccaaatgag

SEQ ID NO: 1942740 - DNA, 15 bp, Homo sapiens
ctcatccaaatgagg

SEQ ID NO: 1942741 - DNA, 15 bp, Homo sapiens
tcatccaaatgagga

SEQ ID NO: 1942742 - DNA, 15 bp, Homo sapiens
catccaaatgaggat

SEQ ID NO: 1942743 - DNA, 15 bp, Homo sapiens
atccaaatgaggatt

SEQ ID NO: 1942744 - DNA, 15 bp, Homo sapiens
tccaaatgaggattt

SEQ ID NO: 1942745 - DNA, 15 bp, Homo sapiens
ccaaatgaggatttg

SEQ ID NO: 1942746 - DNA, 15 bp, Homo sapiens
caaatgaggatttgc

SEQ ID NO: 1942747 - DNA, 15 bp, Homo sapiens
aaatgaggatttgca

SEQ ID NO: 1942748 - DNA, 15 bp, Homo sapiens
aatgaggatttgcaa

SEQ ID NO: 1942749 - DNA, 15 bp, Homo sapiens
atgaggatttgcaaa

SEQ ID NO: 1942750 - DNA, 15 bp, Homo sapiens
tgaggatttgcaaat

SEQ ID NO: 1942751 - DNA, 15 bp, Homo sapiens
gaggatttgcaaatc

SEQ ID NO: 1942752 - DNA, 15 bp, Homo sapiens
aggatttgcaaatcc

SEQ ID NO: 1942753 - DNA, 15 bp, Homo sapiens
ggatttgcaaatcct

SEQ ID NO: 1942754 - DNA, 15 bp, Homo sapiens
gatttgcaaatcctc

SEQ ID NO: 1942755 - DNA, 15 bp, Homo sapiens
atttgcaaatcctca

SEQ ID NO: 1942756 - DNA, 15 bp, Homo sapiens
tttgcaaatcctcac

SEQ ID NO: 1942757 - DNA, 15 bp, Homo sapiens
ttgcaaatcctcact

SEQ ID NO: 1942758 - DNA, 15 bp, Homo sapiens
tgcaaatcctcactt

SEQ ID NO: 1942759 - DNA, 15 bp, Homo sapiens
gcaaatcctcacttg

SEQ ID NO: 1942760 - DNA, 15 bp, Homo sapiens
caaatcctcacttgt

SEQ ID NO: 1942761 - DNA, 15 bp, Homo sapiens
aaatcctcacttgtt

SEQ ID NO: 1942762 - DNA, 15 bp, Homo sapiens
aatcctcacttgttc

SEQ ID NO: 1942763 - DNA, 15 bp, Homo sapiens
atcctcacttgttca

SEQ ID NO: 1942764 - DNA, 15 bp, Homo sapiens
tcctcacttgttcaa

SEQ ID NO: 1942765 - DNA, 15 bp, Homo sapiens
cctcacttgttcaaa

SEQ ID NO: 1942766 - DNA, 15 bp, Homo sapiens
ctcacttgttcaaat

SEQ ID NO: 1942767 - DNA, 15 bp, Homo sapiens
tcacttgttcaaatt

SEQ ID NO: 1942768 - DNA, 15 bp, Homo sapiens
cacttgttcaaattt

SEQ ID NO: 1942769 - DNA, 15 bp, Homo sapiens
acttgttcaaatttt

SEQ ID NO: 1942770 - DNA, 15 bp, Homo sapiens
cttgttcaaatttta

SEQ ID NO: 1942771 - DNA, 15 bp, Homo sapiens
ttgttcaaattttat

SEQ ID NO: 1942772 - DNA, 15 bp, Homo sapiens
tgttcaaattttatc

SEQ ID NO: 1942773 - DNA, 15 bp, Homo sapiens
gttcaaattttatca

SEQ ID NO: 1942774 - DNA, 15 bp, Homo sapiens
ttcaaattttatcat

SEQ ID NO: 1942775 - DNA, 15 bp, Homo sapiens
tcaaattttatcatg

SEQ ID NO: 1942776 - DNA, 15 bp, Homo sapiens
caaattttatcatgg

SEQ ID NO: 1942777 - DNA, 15 bp, Homo sapiens
aaattttatcatggg

SEQ ID NO: 1942778 - DNA, 15 bp, Homo sapiens
aattttatcatggga

SEQ ID NO: 1942779 - DNA, 15 bp, Homo sapiens
attttatcatgggat

SEQ ID NO: 1942780 - DNA, 15 bp, Homo sapiens
ttttatcatgggatt

SEQ ID NO: 1942781 - DNA, 15 bp, Homo sapiens
tttatcatgggattc

SEQ ID NO: 1942782 - DNA, 15 bp, Homo sapiens
ttatcatgggattcc

SEQ ID NO: 1942783 - DNA, 15 bp, Homo sapiens
tatcatgggattcca

SEQ ID NO: 1942784 - DNA, 15 bp, Homo sapiens
atcatgggattccag

SEQ ID NO: 1942785 - DNA, 15 bp, Homo sapiens
tcatgggattccaga

SEQ ID NO: 1942786 - DNA, 15 bp, Homo sapiens
catgggattccagaa

SEQ ID NO: 1942787 - DNA, 15 bp, Homo sapiens
atgggattccagaaa

SEQ ID NO: 1942788 - DNA, 15 bp, Homo sapiens
tgggattccagaaat

SEQ ID NO: 1942789 - DNA, 15 bp, Homo sapiens
gggattccagaaatt

SEQ ID NO: 1942790 - DNA, 15 bp, Homo sapiens
ggattccagaaattc

SEQ ID NO: 1942791 - DNA, 15 bp, Homo sapiens
gattccagaaattca

SEQ ID NO: 1942792 - DNA, 15 bp, Homo sapiens
attccagaaattcaa

SEQ ID NO: 1942793 - DNA, 15 bp, Homo sapiens
ttccagaaattcaag

SEQ ID NO: 1942794 - DNA, 15 bp, Homo sapiens
tccagaaattcaagc

SEQ ID NO: 1942795 - DNA, 15 bp, Homo sapiens
ccagaaattcaagct

SEQ ID NO: 1942796 - DNA, 15 bp, Homo sapiens
cagaaattcaagcta

SEQ ID NO: 1942797 - DNA, 15 bp, Homo sapiens
agaaattcaagctat

SEQ ID NO: 1942798 - DNA, 15 bp, Homo sapiens
gaaattcaagctata

SEQ ID NO: 1942799 - DNA, 15 bp, Homo sapiens
aaattcaagctatac

SEQ ID NO: 1942800 - DNA, 15 bp, Homo sapiens
aattcaagctatact

SEQ ID NO: 1942801 - DNA, 15 bp, Homo sapiens
attcaagctatactt

SEQ ID NO: 1942802 - DNA, 15 bp, Homo sapiens
ttcaagctatacttc

SEQ ID NO: 1942803 - DNA, 15 bp, Homo sapiens
tcaagctatacttct

SEQ ID NO: 1942804 - DNA, 15 bp, Homo sapiens
caagctatacttcta

SEQ ID NO: 1942805 - DNA, 15 bp, Homo sapiens
aagctatacttctaa

SEQ ID NO: 1942806 - DNA, 15 bp, Homo sapiens
agctatacttctaat

SEQ ID NO: 1942807 - DNA, 15 bp, Homo sapiens
gctatacttctaatt

SEQ ID NO: 1942808 - DNA, 15 bp, Homo sapiens
ctatacttctaattc

SEQ ID NO: 1942809 - DNA, 15 bp, Homo sapiens
tatacttctaattct

SEQ ID NO: 1942810 - DNA, 15 bp, Homo sapiens
atacttctaattcta

SEQ ID NO: 1942811 - DNA, 15 bp, Homo sapiens
tacttctaattctag

SEQ ID NO: 1942812 - DNA, 15 bp, Homo sapiens
acttctaattctagt

SEQ ID NO: 1942813 - DNA, 15 bp, Homo sapiens
cttctaattctagta

SEQ ID NO: 1942814 - DNA, 15 bp, Homo sapiens
ttctaattctagtag

SEQ ID NO: 1942815 - DNA, 15 bp, Homo sapiens
tctaattctagtaga

SEQ ID NO: 1942816 - DNA, 15 bp, Homo sapiens
ctaattctagtagaa

SEQ ID NO: 1942817 - DNA, 15 bp, Homo sapiens
taattctagtagaat

SEQ ID NO: 1942818 - DNA, 15 bp, Homo sapiens
aattctagtagaatc

SEQ ID NO: 1942819 - DNA, 15 bp, Homo sapiens
attctagtagaatct

SEQ ID NO: 1942820 - DNA, 15 bp, Homo sapiens
ttctagtagaatctc

SEQ ID NO: 1942821 - DNA, 15 bp, Homo sapiens
tctagtagaatctct

SEQ ID NO: 1942822 - DNA, 15 bp, Homo sapiens
ctagtagaatctctt

SEQ ID NO: 1942823 - DNA, 15 bp, Homo sapiens
tagtagaatctcttc

SEQ ID NO: 1942824 - DNA, 15 bp, Homo sapiens
agtagaatctcttca

SEQ ID NO: 1942825 - DNA, 15 bp, Homo sapiens
gtagaatctcttcaa

SEQ ID NO: 1942826 - DNA, 15 bp, Homo sapiens
tagaatctcttcaag

SEQ ID NO: 1942827 - DNA, 15 bp, Homo sapiens
agaatctcttcaagc

SEQ ID NO: 1942828 - DNA, 15 bp, Homo sapiens
gaatctcttcaagct

SEQ ID NO: 1942829 - DNA, 15 bp, Homo sapiens
aatctcttcaagctc

SEQ ID NO: 1942830 - DNA, 15 bp, Homo sapiens
atctcttcaagctct

SEQ ID NO: 1942831 - DNA, 15 bp, Homo sapiens
tctcttcaagctcta

SEQ ID NO: 1942832 - DNA, 15 bp, Homo sapiens
ctcttcaagctctac

SEQ ID NO: 1942833 - DNA, 15 bp, Homo sapiens
tcttcaagctctact

SEQ ID NO: 1942834 - DNA, 15 bp, Homo sapiens
cttcaagctctactt

SEQ ID NO: 1942835 - DNA, 15 bp, Homo sapiens
ttcaagctctacttc

SEQ ID NO: 1942836 - DNA, 15 bp, Homo sapiens
tcaagctctacttct

SEQ ID NO: 1942837 - DNA, 15 bp, Homo sapiens
caagctctacttctt

SEQ ID NO: 1942838 - DNA, 15 bp, Homo sapiens
aagctctacttcttt

SEQ ID NO: 1942839 - DNA, 15 bp, Homo sapiens
agctctacttctttt

SEQ ID NO: 1942840 - DNA, 15 bp, Homo sapiens
gctctacttcttttt

SEQ ID NO: 1942841 - DNA, 15 bp, Homo sapiens
ctctacttctttttt

SEQ ID NO: 1942842 - DNA, 15 bp, Homo sapiens
tctacttcttttttt

SEQ ID NO: 1942843 - DNA, 15 bp, Homo sapiens
ctacttctttttttt

SEQ ID NO: 1942844 - DNA, 15 bp, Homo sapiens
tacttcttttttttt

SEQ ID NO: 1942845 - DNA, 15 bp, Homo sapiens
agatggagtcttgcc

SEQ ID NO: 1942846 - DNA, 15 bp, Homo sapiens
gatggagtcttgccc

SEQ ID NO: 1942847 - DNA, 15 bp, Homo sapiens
atggagtcttgccct

SEQ ID NO: 1942848 - DNA, 15 bp, Homo sapiens
tggagtcttgccctg

SEQ ID NO: 1942849 - DNA, 15 bp, Homo sapiens
ggagtcttgccctgt

SEQ ID NO: 1942850 - DNA, 15 bp, Homo sapiens
gagtcttgccctgtt

SEQ ID NO: 1942851 - DNA, 15 bp, Homo sapiens
agtcttgccctgttg

SEQ ID NO: 1942852 - DNA, 15 bp, Homo sapiens
gtcttgccctgttgc

SEQ ID NO: 1942853 - DNA, 15 bp, Homo sapiens
tcttgccctgttgcc

SEQ ID NO: 1942854 - DNA, 15 bp, Homo sapiens
cttgccctgttgccc

SEQ ID NO: 1942855 - DNA, 15 bp, Homo sapiens
ttgccctgttgccca

SEQ ID NO: 1942856 - DNA, 15 bp, Homo sapiens
tgccctgttgcccag

SEQ ID NO: 1942857 - DNA, 15 bp, Homo sapiens
gccctgttgcccagg

SEQ ID NO: 1942858 - DNA, 15 bp, Homo sapiens
gtggtgtaatctcgt

SEQ ID NO: 1942859 - DNA, 15 bp, Homo sapiens
tggtgtaatctcgtc

SEQ ID NO: 1942860 - DNA, 15 bp, Homo sapiens
ggtgtaatctcgtct

SEQ ID NO: 1942861 - DNA, 15 bp, Homo sapiens
gtgtaatctcgtctc

SEQ ID NO: 1942862 - DNA, 15 bp, Homo sapiens
tgtaatctcgtctca

SEQ ID NO: 1942863 - DNA, 15 bp, Homo sapiens
gtaatctcgtctcac

SEQ ID NO: 1942864 - DNA, 15 bp, Homo sapiens
taatctcgtctcact

SEQ ID NO: 1942865 - DNA, 15 bp, Homo sapiens
aatctcgtctcactg

SEQ ID NO: 1942866 - DNA, 15 bp, Homo sapiens
atctcgtctcactgc

SEQ ID NO: 1942867 - DNA, 15 bp, Homo sapiens
tctcgtctcactgca

SEQ ID NO: 1942868 - DNA, 15 bp, Homo sapiens
ctcgtctcactgcag

SEQ ID NO: 1942869 - DNA, 15 bp, Homo sapiens
tcgtctcactgcagc

SEQ ID NO: 1942870 - DNA, 15 bp, Homo sapiens
cgtctcactgcagcc

SEQ ID NO: 1942871 - DNA, 15 bp, Homo sapiens
gtctcactgcagcct

SEQ ID NO: 1942872 - DNA, 15 bp, Homo sapiens
tctcactgcagcctc

SEQ ID NO: 1942873 - DNA, 15 bp, Homo sapiens
gcagcctccacctcg

SEQ ID NO: 1942874 - DNA, 15 bp, Homo sapiens
cagcctccacctcgc

SEQ ID NO: 1942875 - DNA, 15 bp, Homo sapiens
agcctccacctcgcg

SEQ ID NO: 1942876 - DNA, 15 bp, Homo sapiens
gcctccacctcgcga

SEQ ID NO: 1942877 - DNA, 15 bp, Homo sapiens
cctccacctcgcgag

SEQ ID NO: 1942878 - DNA, 15 bp, Homo sapiens
ctccacctcgcgagt

SEQ ID NO: 1942879 - DNA, 15 bp, Homo sapiens
tccacctcgcgagtt

SEQ ID NO: 1942880 - DNA, 15 bp, Homo sapiens
ccacctcgcgagttc

SEQ ID NO: 1942881 - DNA, 15 bp, Homo sapiens
cacctcgcgagttca

SEQ ID NO: 1942882 - DNA, 15 bp, Homo sapiens
acctcgcgagttcaa

SEQ ID NO: 1942883 - DNA, 15 bp, Homo sapiens
cctcgcgagttcaag

SEQ ID NO: 1942884 - DNA, 15 bp, Homo sapiens
ctcgcgagttcaagt

SEQ ID NO: 1942885 - DNA, 15 bp, Homo sapiens
tcgcgagttcaagtg

SEQ ID NO: 1942886 - DNA, 15 bp, Homo sapiens
cgcgagttcaagtga

SEQ ID NO: 1942887 - DNA, 15 bp, Homo sapiens
gcgagttcaagtgac

SEQ ID NO: 1942888 - DNA, 15 bp, Homo sapiens
cgagttcaagtgact

SEQ ID NO: 1942889 - DNA, 15 bp, Homo sapiens
gagttcaagtgactc

SEQ ID NO: 1942890 - DNA, 15 bp, Homo sapiens
agttcaagtgactct

SEQ ID NO: 1942891 - DNA, 15 bp, Homo sapiens
gttcaagtgactctc

SEQ ID NO: 1942892 - DNA, 15 bp, Homo sapiens
ttcaagtgactctcc

SEQ ID NO: 1942893 - DNA, 15 bp, Homo sapiens
tcaagtgactctcct

SEQ ID NO: 1942894 - DNA, 15 bp, Homo sapiens
caagtgactctcctg

SEQ ID NO: 1942895 - DNA, 15 bp, Homo sapiens
aagtgactctcctgc

SEQ ID NO: 1942896 - DNA, 15 bp, Homo sapiens
agtgactctcctgcg

SEQ ID NO: 1942897 - DNA, 15 bp, Homo sapiens
gtgactctcctgcgt

SEQ ID NO: 1942898 - DNA, 15 bp, Homo sapiens
tgactctcctgcgtc

SEQ ID NO: 1942899 - DNA, 15 bp, Homo sapiens
gactctcctgcgtca

SEQ ID NO: 1942900 - DNA, 15 bp, Homo sapiens
actctcctgcgtcag

SEQ ID NO: 1942901 - DNA, 15 bp, Homo sapiens
ctctcctgcgtcagc

SEQ ID NO: 1942902 - DNA, 15 bp, Homo sapiens
tctcctgcgtcagcc

SEQ ID NO: 1942903 - DNA, 15 bp, Homo sapiens
ctcctgcgtcagcct

SEQ ID NO: 1942904 - DNA, 15 bp, Homo sapiens
tcctgcgtcagcctc

SEQ ID NO: 1942905 - DNA, 15 bp, Homo sapiens
cctgcgtcagcctcc

SEQ ID NO: 1942906 - DNA, 15 bp, Homo sapiens
ctgcgtcagcctcct

SEQ ID NO: 1942907 - DNA, 15 bp, Homo sapiens
tgcgtcagcctcctg

SEQ ID NO: 1942908 - DNA, 15 bp, Homo sapiens
gcgtcagcctcctga

SEQ ID NO: 1942909 - DNA, 15 bp, Homo sapiens
cgtcagcctcctgag

SEQ ID NO: 1942910 - DNA, 15 bp, Homo sapiens
gtcagcctcctgagt

SEQ ID NO: 1942911 - DNA, 15 bp, Homo sapiens
ctgagtagctgagat

SEQ ID NO: 1942912 - DNA, 15 bp, Homo sapiens
tgagtagctgagatt

SEQ ID NO: 1942913 - DNA, 15 bp, Homo sapiens
gcatgcaccaccaca

SEQ ID NO: 1942914 - DNA, 15 bp, Homo sapiens
catgcaccaccacac

SEQ ID NO: 1942915 - DNA, 15 bp, Homo sapiens
atgcaccaccacacc

SEQ ID NO: 1942916 - DNA, 15 bp, Homo sapiens
agctaattttttttt

SEQ ID NO: 1942917 - DNA, 15 bp, Homo sapiens
gctaatttttttttc

SEQ ID NO: 1942918 - DNA, 15 bp, Homo sapiens
ctaatttttttttct

SEQ ID NO: 1942919 - DNA, 15 bp, Homo sapiens
taatttttttttctg

SEQ ID NO: 1942920 - DNA, 15 bp, Homo sapiens
aatttttttttctgt

SEQ ID NO: 1942921 - DNA, 15 bp, Homo sapiens
atttttttttctgta

SEQ ID NO: 1942922 - DNA, 15 bp, Homo sapiens
tttttttttctgtat

SEQ ID NO: 1942923 - DNA, 15 bp, Homo sapiens
ttttttttctgtatt

SEQ ID NO: 1942924 - DNA, 15 bp, Homo sapiens
tttttttctgtattg

SEQ ID NO: 1942925 - DNA, 15 bp, Homo sapiens
ttttttctgtattgg

SEQ ID NO: 1942926 - DNA, 15 bp, Homo sapiens
tttttctgtattggt

SEQ ID NO: 1942927 - DNA, 15 bp, Homo sapiens
ttttctgtattggta

SEQ ID NO: 1942928 - DNA, 15 bp, Homo sapiens
tttctgtattggtag

SEQ ID NO: 1942929 - DNA, 15 bp, Homo sapiens
ttctgtattggtagt

SEQ ID NO: 1942930 - DNA, 15 bp, Homo sapiens
tctgtattggtagta

SEQ ID NO: 1942931 - DNA, 15 bp, Homo sapiens
ctgtattggtagtag

SEQ ID NO: 1942932 - DNA, 15 bp, Homo sapiens
tgtattggtagtaga

SEQ ID NO: 1942933 - DNA, 15 bp, Homo sapiens
gtattggtagtagag

SEQ ID NO: 1942934 - DNA, 15 bp, Homo sapiens
tattggtagtagaga

SEQ ID NO: 1942935 - DNA, 15 bp, Homo sapiens
attggtagtagagac

SEQ ID NO: 1942936 - DNA, 15 bp, Homo sapiens
ttggtagtagagaca

SEQ ID NO: 1942937 - DNA, 15 bp, Homo sapiens
tggtagtagagacag

SEQ ID NO: 1942938 - DNA, 15 bp, Homo sapiens
ggtagtagagacagg

SEQ ID NO: 1942939 - DNA, 15 bp, Homo sapiens
gtagtagagacaggg

SEQ ID NO: 1942940 - DNA, 15 bp, Homo sapiens
gagacagggtttcat

SEQ ID NO: 1942941 - DNA, 15 bp, Homo sapiens
agacagggtttcatc

SEQ ID NO: 1942942 - DNA, 15 bp, Homo sapiens
gacagggtttcatca

SEQ ID NO: 1942943 - DNA, 15 bp, Homo sapiens
acagggtttcatcat

SEQ ID NO: 1942944 - DNA, 15 bp, Homo sapiens
cagggtttcatcatg

SEQ ID NO: 1942945 - DNA, 15 bp, Homo sapiens
agggtttcatcatgt

SEQ ID NO: 1942946 - DNA, 15 bp, Homo sapiens
gggtttcatcatgtt

SEQ ID NO: 1942947 - DNA, 15 bp, Homo sapiens
ggtttcatcatgttg

SEQ ID NO: 1942948 - DNA, 15 bp, Homo sapiens
gtttcatcatgttgg

SEQ ID NO: 1942949 - DNA, 15 bp, Homo sapiens
tttcatcatgttggt

SEQ ID NO: 1942950 - DNA, 15 bp, Homo sapiens
ttcatcatgttggtc

SEQ ID NO: 1942951 - DNA, 15 bp, Homo sapiens
tcatcatgttggtca

SEQ ID NO: 1942952 - DNA, 15 bp, Homo sapiens
catcatgttggtcag

SEQ ID NO: 1942953 - DNA, 15 bp, Homo sapiens
atcatgttggtcagg

SEQ ID NO: 1942954 - DNA, 15 bp, Homo sapiens
tcatgttggtcaggc

SEQ ID NO: 1942955 - DNA, 15 bp, Homo sapiens
gacctcaaatgatct

SEQ ID NO: 1942956 - DNA, 15 bp, Homo sapiens
acctcaaatgatctg

SEQ ID NO: 1942957 - DNA, 15 bp, Homo sapiens
cctcaaatgatctgc

SEQ ID NO: 1942958 - DNA, 15 bp, Homo sapiens
ctcaaatgatctgcc

SEQ ID NO: 1942959 - DNA, 15 bp, Homo sapiens
tcaaatgatctgcct

SEQ ID NO: 1942960 - DNA, 15 bp, Homo sapiens
caaatgatctgcctg

SEQ ID NO: 1942961 - DNA, 15 bp, Homo sapiens
aaatgatctgcctgc

SEQ ID NO: 1942962 - DNA, 15 bp, Homo sapiens
aatgatctgcctgcc

SEQ ID NO: 1942963 - DNA, 15 bp, Homo sapiens
atgatctgcctgcct

SEQ ID NO: 1942964 - DNA, 15 bp, Homo sapiens
aagtgctaagattac

SEQ ID NO: 1942965 - DNA, 15 bp, Homo sapiens
agtgctaagattaca

SEQ ID NO: 1942966 - DNA, 15 bp, Homo sapiens
gtgctaagattacaa

SEQ ID NO: 1942967 - DNA, 15 bp, Homo sapiens
tgctaagattacaag

SEQ ID NO: 1942968 - DNA, 15 bp, Homo sapiens
gctaagattacaagc

SEQ ID NO: 1942969 - DNA, 15 bp, Homo sapiens
ctaagattacaagca

SEQ ID NO: 1942970 - DNA, 15 bp, Homo sapiens
taagattacaagcat

SEQ ID NO: 1942971 - DNA, 15 bp, Homo sapiens
aagattacaagcatg

SEQ ID NO: 1942972 - DNA, 15 bp, Homo sapiens
agattacaagcatga

SEQ ID NO: 1942973 - DNA, 15 bp, Homo sapiens
caccgcgcccggcct

SEQ ID NO: 1942974 - DNA, 15 bp, Homo sapiens
accgcgcccggcctt

SEQ ID NO: 1942975 - DNA, 15 bp, Homo sapiens
ccgcgcccggccttc

SEQ ID NO: 1942976 - DNA, 15 bp, Homo sapiens
cgcgcccggccttca

SEQ ID NO: 1942977 - DNA, 15 bp, Homo sapiens
gcgcccggccttcaa

SEQ ID NO: 1942978 - DNA, 15 bp, Homo sapiens
cgcccggccttcaag

SEQ ID NO: 1942979 - DNA, 15 bp, Homo sapiens
gcccggccttcaagc

SEQ ID NO: 1942980 - DNA, 15 bp, Homo sapiens
cccggccttcaagct

SEQ ID NO: 1942981 - DNA, 15 bp, Homo sapiens
ccggccttcaagctc

SEQ ID NO: 1942982 - DNA, 15 bp, Homo sapiens
cggccttcaagctct

SEQ ID NO: 1942983 - DNA, 15 bp, Homo sapiens
ggccttcaagctcta

SEQ ID NO: 1942984 - DNA, 15 bp, Homo sapiens
gccttcaagctctac

SEQ ID NO: 1942985 - DNA, 15 bp, Homo sapiens
ccttcaagctctact

SEQ ID NO: 1942986 - DNA, 15 bp, Homo sapiens
caagctctacttcta

SEQ ID NO: 1942987 - DNA, 15 bp, Homo sapiens
aagctctacttctaa

SEQ ID NO: 1942988 - DNA, 15 bp, Homo sapiens
agctctacttctaat

SEQ ID NO: 1942989 - DNA, 15 bp, Homo sapiens
gctctacttctaatt

SEQ ID NO: 1942990 - DNA, 15 bp, Homo sapiens
ctctacttctaattc

SEQ ID NO: 1942991 - DNA, 15 bp, Homo sapiens
tctacttctaattct

SEQ ID NO: 1942992 - DNA, 15 bp, Homo sapiens
ctacttctaattcta

SEQ ID NO: 1942993 - DNA, 15 bp, Homo sapiens
cttctaattctagtt

SEQ ID NO: 1942994 - DNA, 15 bp, Homo sapiens
ttctaattctagttc

SEQ ID NO: 1942995 - DNA, 15 bp, Homo sapiens
tctaattctagttct

SEQ ID NO: 1942996 - DNA, 15 bp, Homo sapiens
ctaattctagttctt

SEQ ID NO: 1942997 - DNA, 15 bp, Homo sapiens
taattctagttcttt

SEQ ID NO: 1942998 - DNA, 15 bp, Homo sapiens
aattctagttctttc

SEQ ID NO: 1942999 - DNA, 15 bp, Homo sapiens
attctagttctttcc

SEQ ID NO: 1943000 - DNA, 15 bp, Homo sapiens
ttctagttctttcct

SEQ ID NO: 1943001 - DNA, 15 bp, Homo sapiens
tctagttctttccta

SEQ ID NO: 1943002 - DNA, 15 bp, Homo sapiens
ctagttctttcctat

SEQ ID NO: 1943003 - DNA, 15 bp, Homo sapiens
tagttctttcctatt

SEQ ID NO: 1943004 - DNA, 15 bp, Homo sapiens
agttctttcctattt

SEQ ID NO: 1943005 - DNA, 15 bp, Homo sapiens
gttctttcctatttc

SEQ ID NO: 1943006 - DNA, 15 bp, Homo sapiens
ttctttcctatttct

SEQ ID NO: 1943007 - DNA, 15 bp, Homo sapiens
tctttcctatttcta

SEQ ID NO: 1943008 - DNA, 15 bp, Homo sapiens
ctttcctatttctac

SEQ ID NO: 1943009 - DNA, 15 bp, Homo sapiens
tttcctatttctacc

SEQ ID NO: 1943010 - DNA, 15 bp, Homo sapiens
ttcctatttctacca

SEQ ID NO: 1943011 - DNA, 15 bp, Homo sapiens
tcctatttctaccac

SEQ ID NO: 1943012 - DNA, 15 bp, Homo sapiens
cctatttctaccaca

SEQ ID NO: 1943013 - DNA, 15 bp, Homo sapiens
ctatttctaccacat

SEQ ID NO: 1943014 - DNA, 15 bp, Homo sapiens
tatttctaccacatc

SEQ ID NO: 1943015 - DNA, 15 bp, Homo sapiens
atttctaccacatct

SEQ ID NO: 1943016 - DNA, 15 bp, Homo sapiens
tttctaccacatctg

SEQ ID NO: 1943017 - DNA, 15 bp, Homo sapiens
ttctaccacatctgt

SEQ ID NO: 1943018 - DNA, 15 bp, Homo sapiens
tctaccacatctgta

SEQ ID NO: 1943019 - DNA, 15 bp, Homo sapiens
ctaccacatctgtag

SEQ ID NO: 1943020 - DNA, 15 bp, Homo sapiens
taccacatctgtagt

SEQ ID NO: 1943021 - DNA, 15 bp, Homo sapiens
accacatctgtagtt

SEQ ID NO: 1943022 - DNA, 15 bp, Homo sapiens
ccacatctgtagtta

SEQ ID NO: 1943023 - DNA, 15 bp, Homo sapiens
cacatctgtagttac

SEQ ID NO: 1943024 - DNA, 15 bp, Homo sapiens
acatctgtagttact

SEQ ID NO: 1943025 - DNA, 15 bp, Homo sapiens
catctgtagttactt

SEQ ID NO: 1943026 - DNA, 15 bp, Homo sapiens
atctgtagttacttt

SEQ ID NO: 1943027 - DNA, 15 bp, Homo sapiens
tctgtagttactttc

SEQ ID NO: 1943028 - DNA, 15 bp, Homo sapiens
ctgtagttactttct

SEQ ID NO: 1943029 - DNA, 15 bp, Homo sapiens
tgtagttactttctc

SEQ ID NO: 1943030 - DNA, 15 bp, Homo sapiens
gtagttactttctcc

SEQ ID NO: 1943031 - DNA, 15 bp, Homo sapiens
tagttactttctcca

SEQ ID NO: 1943032 - DNA, 15 bp, Homo sapiens
agttactttctccat

SEQ ID NO: 1943033 - DNA, 15 bp, Homo sapiens
gttactttctccatt

SEQ ID NO: 1943034 - DNA, 15 bp, Homo sapiens
ttactttctccattg

SEQ ID NO: 1943035 - DNA, 15 bp, Homo sapiens
tactttctccattga

SEQ ID NO: 1943036 - DNA, 15 bp, Homo sapiens
actttctccattgat

SEQ ID NO: 1943037 - DNA, 15 bp, Homo sapiens
ctttctccattgatg

SEQ ID NO: 1943038 - DNA, 15 bp, Homo sapiens
tttctccattgatgt

SEQ ID NO: 1943039 - DNA, 15 bp, Homo sapiens
ttctccattgatgtc

SEQ ID NO: 1943040 - DNA, 15 bp, Homo sapiens
tctccattgatgtct

SEQ ID NO: 1943041 - DNA, 15 bp, Homo sapiens
ctccattgatgtctt

SEQ ID NO: 1943042 - DNA, 15 bp, Homo sapiens
tccattgatgtcttg

SEQ ID NO: 1943043 - DNA, 15 bp, Homo sapiens
ccattgatgtcttga

SEQ ID NO: 1943044 - DNA, 15 bp, Homo sapiens
cattgatgtcttgaa

SEQ ID NO: 1943045 - DNA, 15 bp, Homo sapiens
attgatgtcttgaac

SEQ ID NO: 1943046 - DNA, 15 bp, Homo sapiens
ttgatgtcttgaaca

SEQ ID NO: 1943047 - DNA, 15 bp, Homo sapiens
tgatgtcttgaacac

SEQ ID NO: 1943048 - DNA, 15 bp, Homo sapiens
gatgtcttgaacacc

SEQ ID NO: 1943049 - DNA, 15 bp, Homo sapiens
atgtcttgaacacca

SEQ ID NO: 1943050 - DNA, 15 bp, Homo sapiens
tgtcttgaacaccac

SEQ ID NO: 1943051 - DNA, 15 bp, Homo sapiens
gtcttgaacaccaca

SEQ ID NO: 1943052 - DNA, 15 bp, Homo sapiens
tcttgaacaccacaa

SEQ ID NO: 1943053 - DNA, 15 bp, Homo sapiens
cttgaacaccacaag

SEQ ID NO: 1943054 - DNA, 15 bp, Homo sapiens
ttgaacaccacaagt

SEQ ID NO: 1943055 - DNA, 15 bp, Homo sapiens
tgaacaccacaagtc

SEQ ID NO: 1943056 - DNA, 15 bp, Homo sapiens
gaacaccacaagtca

SEQ ID NO: 1943057 - DNA, 15 bp, Homo sapiens
aacaccacaagtcat

SEQ ID NO: 1943058 - DNA, 15 bp, Homo sapiens
acaccacaagtcatc

SEQ ID NO: 1943059 - DNA, 15 bp, Homo sapiens
caccacaagtcatcc

SEQ ID NO: 1943060 - DNA, 15 bp, Homo sapiens
accacaagtcatcca

SEQ ID NO: 1943061 - DNA, 15 bp, Homo sapiens
ccacaagtcatccat

SEQ ID NO: 1943062 - DNA, 15 bp, Homo sapiens
cacaagtcatccatg

SEQ ID NO: 1943063 - DNA, 15 bp, Homo sapiens
acaagtcatccatga

SEQ ID NO: 1943064 - DNA, 15 bp, Homo sapiens
caagtcatccatgag

SEQ ID NO: 1943065 - DNA, 15 bp, Homo sapiens
atgagggttggaatc

SEQ ID NO: 1943066 - DNA, 15 bp, Homo sapiens
tgagggttggaatca

SEQ ID NO: 1943067 - DNA, 15 bp, Homo sapiens
gagggttggaatcaa

SEQ ID NO: 1943068 - DNA, 15 bp, Homo sapiens
agggttggaatcaac

SEQ ID NO: 1943069 - DNA, 15 bp, Homo sapiens
gggttggaatcaact

SEQ ID NO: 1943070 - DNA, 15 bp, Homo sapiens
ggttggaatcaactt

SEQ ID NO: 1943071 - DNA, 15 bp, Homo sapiens
gttggaatcaacttc

SEQ ID NO: 1943072 - DNA, 15 bp, Homo sapiens
ttggaatcaacttct

SEQ ID NO: 1943073 - DNA, 15 bp, Homo sapiens
tggaatcaacttctt

SEQ ID NO: 1943074 - DNA, 15 bp, Homo sapiens
ggaatcaacttcttc

SEQ ID NO: 1943075 - DNA, 15 bp, Homo sapiens
gaatcaacttcttcc

SEQ ID NO: 1943076 - DNA, 15 bp, Homo sapiens
aatcaacttcttcca

SEQ ID NO: 1943077 - DNA, 15 bp, Homo sapiens
atcaacttcttccaa

SEQ ID NO: 1943078 - DNA, 15 bp, Homo sapiens
tcaacttcttccaaa

SEQ ID NO: 1943079 - DNA, 15 bp, Homo sapiens
caacttcttccaaac

SEQ ID NO: 1943080 - DNA, 15 bp, Homo sapiens
aacttcttccaaact

SEQ ID NO: 1943081 - DNA, 15 bp, Homo sapiens
tcttccaaactccta

SEQ ID NO: 1943082 - DNA, 15 bp, Homo sapiens
cttccaaactcctat

SEQ ID NO: 1943083 - DNA, 15 bp, Homo sapiens
ttccaaactcctata

SEQ ID NO: 1943084 - DNA, 15 bp, Homo sapiens
tccaaactcctataa

SEQ ID NO: 1943085 - DNA, 15 bp, Homo sapiens
ccaaactcctataat

SEQ ID NO: 1943086 - DNA, 15 bp, Homo sapiens
caaactcctataatg

SEQ ID NO: 1943087 - DNA, 15 bp, Homo sapiens
aaactcctataatgt

SEQ ID NO: 1943088 - DNA, 15 bp, Homo sapiens
aactcctataatgtt

SEQ ID NO: 1943089 - DNA, 15 bp, Homo sapiens
actcctataatgtta

SEQ ID NO: 1943090 - DNA, 15 bp, Homo sapiens
ctcctataatgttat

SEQ ID NO: 1943091 - DNA, 15 bp, Homo sapiens
tcctataatgttatt

SEQ ID NO: 1943092 - DNA, 15 bp, Homo sapiens
cctataatgttattt

SEQ ID NO: 1943093 - DNA, 15 bp, Homo sapiens
ctataatgttatttt

SEQ ID NO: 1943094 - DNA, 15 bp, Homo sapiens
tataatgttatttta

SEQ ID NO: 1943095 - DNA, 15 bp, Homo sapiens
ataatgttattttaa

SEQ ID NO: 1943096 - DNA, 15 bp, Homo sapiens
taatgttattttaac

SEQ ID NO: 1943097 - DNA, 15 bp, Homo sapiens
aatgttattttaacc

SEQ ID NO: 1943098 - DNA, 15 bp, Homo sapiens
atgttattttaacct

SEQ ID NO: 1943099 - DNA, 15 bp, Homo sapiens
tgttattttaacctc

SEQ ID NO: 1943100 - DNA, 15 bp, Homo sapiens
gttattttaacctcc

SEQ ID NO: 1943101 - DNA, 15 bp, Homo sapiens
ttattttaacctccg

SEQ ID NO: 1943102 - DNA, 15 bp, Homo sapiens
tattttaacctccgt

SEQ ID NO: 1943103 - DNA, 15 bp, Homo sapiens
attttaacctccgtt

SEQ ID NO: 1943104 - DNA, 15 bp, Homo sapiens
ttttaacctccgttc

SEQ ID NO: 1943105 - DNA, 15 bp, Homo sapiens
tttaacctccgttca

SEQ ID NO: 1943106 - DNA, 15 bp, Homo sapiens
ttaacctccgttcat

SEQ ID NO: 1943107 - DNA, 15 bp, Homo sapiens
taacctccgttcatg

SEQ ID NO: 1943108 - DNA, 15 bp, Homo sapiens
aacctccgttcatga

SEQ ID NO: 1943109 - DNA, 15 bp, Homo sapiens
acctccgttcatgat

SEQ ID NO: 1943110 - DNA, 15 bp, Homo sapiens
cctccgttcatgatt

SEQ ID NO: 1943111 - DNA, 15 bp, Homo sapiens
ctccgttcatgattt

SEQ ID NO: 1943112 - DNA, 15 bp, Homo sapiens
tccgttcatgattta

SEQ ID NO: 1943113 - DNA, 15 bp, Homo sapiens
ccgttcatgatttac

SEQ ID NO: 1943114 - DNA, 15 bp, Homo sapiens
cgttcatgatttact

SEQ ID NO: 1943115 - DNA, 15 bp, Homo sapiens
gttcatgatttacta

SEQ ID NO: 1943116 - DNA, 15 bp, Homo sapiens
ttcatgatttactaa

SEQ ID NO: 1943117 - DNA, 15 bp, Homo sapiens
tcatgatttactaat

SEQ ID NO: 1943118 - DNA, 15 bp, Homo sapiens
catgatttactaatg

SEQ ID NO: 1943119 - DNA, 15 bp, Homo sapiens
atgatttactaatgt

SEQ ID NO: 1943120 - DNA, 15 bp, Homo sapiens
tgatttactaatgtt

SEQ ID NO: 1943121 - DNA, 15 bp, Homo sapiens
gatttactaatgttc

SEQ ID NO: 1943122 - DNA, 15 bp, Homo sapiens
atttactaatgttca

SEQ ID NO: 1943123 - DNA, 15 bp, Homo sapiens
tttactaatgttcat

SEQ ID NO: 1943124 - DNA, 15 bp, Homo sapiens
ttactaatgttcata

SEQ ID NO: 1943125 - DNA, 15 bp, Homo sapiens
tactaatgttcataa

SEQ ID NO: 1943126 - DNA, 15 bp, Homo sapiens
actaatgttcataat

SEQ ID NO: 1943127 - DNA, 15 bp, Homo sapiens
ctaatgttcataatg

SEQ ID NO: 1943128 - DNA, 15 bp, Homo sapiens
taatgttcataatgg

SEQ ID NO: 1943129 - DNA, 15 bp, Homo sapiens
aatgttcataatggc

SEQ ID NO: 1943130 - DNA, 15 bp, Homo sapiens
atgttcataatggca

SEQ ID NO: 1943131 - DNA, 15 bp, Homo sapiens
tgttcataatggcat

SEQ ID NO: 1943132 - DNA, 15 bp, Homo sapiens
gttcataatggcatc

SEQ ID NO: 1943133 - DNA, 15 bp, Homo sapiens
ttcataatggcatca

SEQ ID NO: 1943134 - DNA, 15 bp, Homo sapiens
tcataatggcatcaa

SEQ ID NO: 1943135 - DNA, 15 bp, Homo sapiens
cataatggcatcaaa

SEQ ID NO: 1943136 - DNA, 15 bp, Homo sapiens
ataatggcatcaaat

SEQ ID NO: 1943137 - DNA, 15 bp, Homo sapiens
taatggcatcaaatt

SEQ ID NO: 1943138 - DNA, 15 bp, Homo sapiens
aatggcatcaaattg

SEQ ID NO: 1943139 - DNA, 15 bp, Homo sapiens
atggcatcaaattgt

SEQ ID NO: 1943140 - DNA, 15 bp, Homo sapiens
tggcatcaaattgtt

SEQ ID NO: 1943141 - DNA, 15 bp, Homo sapiens
ggcatcaaattgttg

SEQ ID NO: 1943142 - DNA, 15 bp, Homo sapiens
gcatcaaattgttga

SEQ ID NO: 1943143 - DNA, 15 bp, Homo sapiens
catcaaattgttgaa

SEQ ID NO: 1943144 - DNA, 15 bp, Homo sapiens
atcaaattgttgaat

SEQ ID NO: 1943145 - DNA, 15 bp, Homo sapiens
tcaaattgttgaatc

SEQ ID NO: 1943146 - DNA, 15 bp, Homo sapiens
caaattgttgaatcc

SEQ ID NO: 1943147 - DNA, 15 bp, Homo sapiens
aaattgttgaatccc

SEQ ID NO: 1943148 - DNA, 15 bp, Homo sapiens
aattgttgaatccct

SEQ ID NO: 1943149 - DNA, 15 bp, Homo sapiens
attgttgaatccctt

SEQ ID NO: 1943150 - DNA, 15 bp, Homo sapiens
ttgttgaatcccttc

SEQ ID NO: 1943151 - DNA, 15 bp, Homo sapiens
tgttgaatcccttcc

SEQ ID NO: 1943152 - DNA, 15 bp, Homo sapiens
gttgaatcccttcca

SEQ ID NO: 1943153 - DNA, 15 bp, Homo sapiens
ttgaatcccttccag

SEQ ID NO: 1943154 - DNA, 15 bp, Homo sapiens
tgaatcccttccaga

SEQ ID NO: 1943155 - DNA, 15 bp, Homo sapiens
gaatcccttccagaa

SEQ ID NO: 1943156 - DNA, 15 bp, Homo sapiens
aatcccttccagaaa

SEQ ID NO: 1943157 - DNA, 15 bp, Homo sapiens
atcccttccagaaag

SEQ ID NO: 1943158 - DNA, 15 bp, Homo sapiens
tcccttccagaaagt

SEQ ID NO: 1943159 - DNA, 15 bp, Homo sapiens
cccttccagaaagtt

SEQ ID NO: 1943160 - DNA, 15 bp, Homo sapiens
ccttccagaaagttt

SEQ ID NO: 1943161 - DNA, 15 bp, Homo sapiens
cttccagaaagtttt

SEQ ID NO: 1943162 - DNA, 15 bp, Homo sapiens
ttccagaaagttttt

SEQ ID NO: 1943163 - DNA, 15 bp, Homo sapiens
tccagaaagtttttc

SEQ ID NO: 1943164 - DNA, 15 bp, Homo sapiens
ccagaaagtttttca

SEQ ID NO: 1943165 - DNA, 15 bp, Homo sapiens
cagaaagtttttcat

SEQ ID NO: 1943166 - DNA, 15 bp, Homo sapiens
agaaagtttttcatt

SEQ ID NO: 1943167 - DNA, 15 bp, Homo sapiens
gaaagtttttcattt

SEQ ID NO: 1943168 - DNA, 15 bp, Homo sapiens
aaagtttttcattta

SEQ ID NO: 1943169 - DNA, 15 bp, Homo sapiens
aagtttttcatttac

SEQ ID NO: 1943170 - DNA, 15 bp, Homo sapiens
agtttttcatttact

SEQ ID NO: 1943171 - DNA, 15 bp, Homo sapiens
gtttttcatttactt

SEQ ID NO: 1943172 - DNA, 15 bp, Homo sapiens
tttttcatttacttt

SEQ ID NO: 1943173 - DNA, 15 bp, Homo sapiens
ttttcatttactttg

SEQ ID NO: 1943174 - DNA, 15 bp, Homo sapiens
tttcatttactttgc

SEQ ID NO: 1943175 - DNA, 15 bp, Homo sapiens
ttcatttactttgcc

SEQ ID NO: 1943176 - DNA, 15 bp, Homo sapiens
tcatttactttgccc

SEQ ID NO: 1943177 - DNA, 15 bp, Homo sapiens
catttactttgccca

SEQ ID NO: 1943178 - DNA, 15 bp, Homo sapiens
atttactttgcccag

SEQ ID NO: 1943179 - DNA, 15 bp, Homo sapiens
tttactttgcccaga

SEQ ID NO: 1943180 - DNA, 15 bp, Homo sapiens
ttactttgcccagat

SEQ ID NO: 1943181 - DNA, 15 bp, Homo sapiens
tactttgcccagatc

SEQ ID NO: 1943182 - DNA, 15 bp, Homo sapiens
actttgcccagatcc

SEQ ID NO: 1943183 - DNA, 15 bp, Homo sapiens
ctttgcccagatcca

SEQ ID NO: 1943184 - DNA, 15 bp, Homo sapiens
tttgcccagatccat

SEQ ID NO: 1943185 - DNA, 15 bp, Homo sapiens
ttgcccagatccatc

SEQ ID NO: 1943186 - DNA, 15 bp, Homo sapiens
tgcccagatccatca

SEQ ID NO: 1943187 - DNA, 15 bp, Homo sapiens
gcccagatccatcag

SEQ ID NO: 1943188 - DNA, 15 bp, Homo sapiens
cccagatccatcaga

SEQ ID NO: 1943189 - DNA, 15 bp, Homo sapiens
ccagatccatcagag

SEQ ID NO: 1943190 - DNA, 15 bp, Homo sapiens
cagatccatcagagg

SEQ ID NO: 1943191 - DNA, 15 bp, Homo sapiens
agatccatcagagga

SEQ ID NO: 1943192 - DNA, 15 bp, Homo sapiens
gatccatcagaggaa

SEQ ID NO: 1943193 - DNA, 15 bp, Homo sapiens
atccatcagaggaat

SEQ ID NO: 1943194 - DNA, 15 bp, Homo sapiens
tccatcagaggaatc

SEQ ID NO: 1943195 - DNA, 15 bp, Homo sapiens
ccatcagaggaatca

SEQ ID NO: 1943196 - DNA, 15 bp, Homo sapiens
catcagaggaatcac

SEQ ID NO: 1943197 - DNA, 15 bp, Homo sapiens
atcagaggaatcact

SEQ ID NO: 1943198 - DNA, 15 bp, Homo sapiens
tcagaggaatcacta

SEQ ID NO: 1943199 - DNA, 15 bp, Homo sapiens
cagaggaatcactat

SEQ ID NO: 1943200 - DNA, 15 bp, Homo sapiens
agaggaatcactata

SEQ ID NO: 1943201 - DNA, 15 bp, Homo sapiens
gaggaatcactatag

SEQ ID NO: 1943202 - DNA, 15 bp, Homo sapiens
aggaatcactatagc

SEQ ID NO: 1943203 - DNA, 15 bp, Homo sapiens
ggaatcactatagct

SEQ ID NO: 1943204 - DNA, 15 bp, Homo sapiens
gaatcactatagcta

SEQ ID NO: 1943205 - DNA, 15 bp, Homo sapiens
aatcactatagctac

SEQ ID NO: 1943206 - DNA, 15 bp, Homo sapiens
atcactatagctaca

SEQ ID NO: 1943207 - DNA, 15 bp, Homo sapiens
tcactatagctacag

SEQ ID NO: 1943208 - DNA, 15 bp, Homo sapiens
cactatagctacagc

SEQ ID NO: 1943209 - DNA, 15 bp, Homo sapiens
actatagctacagct

SEQ ID NO: 1943210 - DNA, 15 bp, Homo sapiens
ctatagctacagctt

SEQ ID NO: 1943211 - DNA, 15 bp, Homo sapiens
tatagctacagcttt

SEQ ID NO: 1943212 - DNA, 15 bp, Homo sapiens
atagctacagcttta

SEQ ID NO: 1943213 - DNA, 15 bp, Homo sapiens
tagctacagctttat

SEQ ID NO: 1943214 - DNA, 15 bp, Homo sapiens
agctacagctttatg

SEQ ID NO: 1943215 - DNA, 15 bp, Homo sapiens
gctacagctttatga

SEQ ID NO: 1943216 - DNA, 15 bp, Homo sapiens
ctacagctttatgaa

SEQ ID NO: 1943217 - DNA, 15 bp, Homo sapiens
tacagctttatgaag

SEQ ID NO: 1943218 - DNA, 15 bp, Homo sapiens
acagctttatgaagt

SEQ ID NO: 1943219 - DNA, 15 bp, Homo sapiens
cagctttatgaagtg

SEQ ID NO: 1943220 - DNA, 15 bp, Homo sapiens
agctttatgaagtgt

SEQ ID NO: 1943221 - DNA, 15 bp, Homo sapiens
gctttatgaagtgta

SEQ ID NO: 1943222 - DNA, 15 bp, Homo sapiens
ctttatgaagtgtat

SEQ ID NO: 1943223 - DNA, 15 bp, Homo sapiens
tttatgaagtgtatt

SEQ ID NO: 1943224 - DNA, 15 bp, Homo sapiens
ttatgaagtgtattt

SEQ ID NO: 1943225 - DNA, 15 bp, Homo sapiens
tatgaagtgtatttt

SEQ ID NO: 1943226 - DNA, 15 bp, Homo sapiens
atgaagtgtattttt

SEQ ID NO: 1943227 - DNA, 15 bp, Homo sapiens
tgaagtgtatttttt

SEQ ID NO: 1943228 - DNA, 15 bp, Homo sapiens
gaagtgtatttttta

SEQ ID NO: 1943229 - DNA, 15 bp, Homo sapiens
aagtgtattttttat

SEQ ID NO: 1943230 - DNA, 15 bp, Homo sapiens
agtgtattttttatt

SEQ ID NO: 1943231 - DNA, 15 bp, Homo sapiens
gtgtattttttattt

SEQ ID NO: 1943232 - DNA, 15 bp, Homo sapiens
tgtattttttatttt

SEQ ID NO: 1943233 - DNA, 15 bp, Homo sapiens
gtattttttattttt

SEQ ID NO: 1943234 - DNA, 15 bp, Homo sapiens
ttattttttatttta

SEQ ID NO: 1943235 - DNA, 15 bp, Homo sapiens
tttttattttattta

SEQ ID NO: 1943236 - DNA, 15 bp, Homo sapiens
ttttattttatttat

SEQ ID NO: 1943237 - DNA, 15 bp, Homo sapiens
tttattttatttatt

SEQ ID NO: 1943238 - DNA, 15 bp, Homo sapiens
attttatttatttac

SEQ ID NO: 1943239 - DNA, 15 bp, Homo sapiens
ttttatttatttact

SEQ ID NO: 1943240 - DNA, 15 bp, Homo sapiens
tttatttatttactt

SEQ ID NO: 1943241 - DNA, 15 bp, Homo sapiens
ttatttatttacttt

SEQ ID NO: 1943242 - DNA, 15 bp, Homo sapiens
tatttatttactttt

SEQ ID NO: 1943243 - DNA, 15 bp, Homo sapiens
atttatttacttttt

SEQ ID NO: 1943244 - DNA, 15 bp, Homo sapiens
tttatttactttttg

SEQ ID NO: 1943245 - DNA, 15 bp, Homo sapiens
ttatttactttttga

SEQ ID NO: 1943246 - DNA, 15 bp, Homo sapiens
tatttactttttgag

SEQ ID NO: 1943247 - DNA, 15 bp, Homo sapiens
atttactttttgaga

SEQ ID NO: 1943248 - DNA, 15 bp, Homo sapiens
tttactttttgagat

SEQ ID NO: 1943249 - DNA, 15 bp, Homo sapiens
ttactttttgagatg

SEQ ID NO: 1943250 - DNA, 15 bp, Homo sapiens
tactttttgagatgg

SEQ ID NO: 1943251 - DNA, 15 bp, Homo sapiens
actttttgagatgga

SEQ ID NO: 1943252 - DNA, 15 bp, Homo sapiens
gatggagtctcgctg

SEQ ID NO: 1943253 - DNA, 15 bp, Homo sapiens
atggagtctcgctgt

SEQ ID NO: 1943254 - DNA, 15 bp, Homo sapiens
tggagtctcgctgtg

SEQ ID NO: 1943255 - DNA, 15 bp, Homo sapiens
ggagtctcgctgtgc

SEQ ID NO: 1943256 - DNA, 15 bp, Homo sapiens
gagtctcgctgtgcc

SEQ ID NO: 1943257 - DNA, 15 bp, Homo sapiens
agtctcgctgtgcca

SEQ ID NO: 1943258 - DNA, 15 bp, Homo sapiens
gtctcgctgtgccac

SEQ ID NO: 1943259 - DNA, 15 bp, Homo sapiens
tctcgctgtgccacc

SEQ ID NO: 1943260 - DNA, 15 bp, Homo sapiens
ctcgctgtgccaccc

SEQ ID NO: 1943261 - DNA, 15 bp, Homo sapiens
tcgctgtgccaccca

SEQ ID NO: 1943262 - DNA, 15 bp, Homo sapiens
cgctgtgccacccag

SEQ ID NO: 1943263 - DNA, 15 bp, Homo sapiens
gctgtgccacccagg

SEQ ID NO: 1943264 - DNA, 15 bp, Homo sapiens
ctgtgccacccaggc

SEQ ID NO: 1943265 - DNA, 15 bp, Homo sapiens
tgtgccacccaggct

SEQ ID NO: 1943266 - DNA, 15 bp, Homo sapiens
gtgccacccaggctc

SEQ ID NO: 1943267 - DNA, 15 bp, Homo sapiens
tgccacccaggctcg

SEQ ID NO: 1943268 - DNA, 15 bp, Homo sapiens
gccacccaggctcga

SEQ ID NO: 1943269 - DNA, 15 bp, Homo sapiens
ccacccaggctcgag

SEQ ID NO: 1943270 - DNA, 15 bp, Homo sapiens
cacccaggctcgagt

SEQ ID NO: 1943271 - DNA, 15 bp, Homo sapiens
acccaggctcgagta

SEQ ID NO: 1943272 - DNA, 15 bp, Homo sapiens
cccaggctcgagtac

SEQ ID NO: 1943273 - DNA, 15 bp, Homo sapiens
ccaggctcgagtaca

SEQ ID NO: 1943274 - DNA, 15 bp, Homo sapiens
caggctcgagtacaa

SEQ ID NO: 1943275 - DNA, 15 bp, Homo sapiens
aggctcgagtacaat

SEQ ID NO: 1943276 - DNA, 15 bp, Homo sapiens
ggctcgagtacaatg

SEQ ID NO: 1943277 - DNA, 15 bp, Homo sapiens
gctcgagtacaatgg

SEQ ID NO: 1943278 - DNA, 15 bp, Homo sapiens
ctcgagtacaatggt

SEQ ID NO: 1943279 - DNA, 15 bp, Homo sapiens
tcgagtacaatggtg

SEQ ID NO: 1943280 - DNA, 15 bp, Homo sapiens
cgagtacaatggtgt

SEQ ID NO: 1943281 - DNA, 15 bp, Homo sapiens
gagtacaatggtgtg

SEQ ID NO: 1943282 - DNA, 15 bp, Homo sapiens
agtacaatggtgtgg

SEQ ID NO: 1943283 - DNA, 15 bp, Homo sapiens
gtacaatggtgtggt

SEQ ID NO: 1943284 - DNA, 15 bp, Homo sapiens
tacaatggtgtggtc

SEQ ID NO: 1943285 - DNA, 15 bp, Homo sapiens
acaatggtgtggtct

SEQ ID NO: 1943286 - DNA, 15 bp, Homo sapiens
caatggtgtggtctt

SEQ ID NO: 1943287 - DNA, 15 bp, Homo sapiens
aatggtgtggtcttg

SEQ ID NO: 1943288 - DNA, 15 bp, Homo sapiens
atggtgtggtcttgg

SEQ ID NO: 1943289 - DNA, 15 bp, Homo sapiens
tggtgtggtcttggc

SEQ ID NO: 1943290 - DNA, 15 bp, Homo sapiens
ggtgtggtcttggct

SEQ ID NO: 1943291 - DNA, 15 bp, Homo sapiens
gtgtggtcttggctc

SEQ ID NO: 1943292 - DNA, 15 bp, Homo sapiens
tgtggtcttggctcg

SEQ ID NO: 1943293 - DNA, 15 bp, Homo sapiens
gtggtcttggctcgc

SEQ ID NO: 1943294 - DNA, 15 bp, Homo sapiens
tggtcttggctcgct

SEQ ID NO: 1943295 - DNA, 15 bp, Homo sapiens
ggtcttggctcgctt

SEQ ID NO: 1943296 - DNA, 15 bp, Homo sapiens
gtcttggctcgcttc

SEQ ID NO: 1943297 - DNA, 15 bp, Homo sapiens
tcttggctcgcttca

SEQ ID NO: 1943298 - DNA, 15 bp, Homo sapiens
cttggctcgcttcac

SEQ ID NO: 1943299 - DNA, 15 bp, Homo sapiens
ttggctcgcttcacc

SEQ ID NO: 1943300 - DNA, 15 bp, Homo sapiens
tggctcgcttcaccc

SEQ ID NO: 1943301 - DNA, 15 bp, Homo sapiens
ggctcgcttcaccct

SEQ ID NO: 1943302 - DNA, 15 bp, Homo sapiens
gctcgcttcaccctc

SEQ ID NO: 1943303 - DNA, 15 bp, Homo sapiens
ctcgcttcaccctct

SEQ ID NO: 1943304 - DNA, 15 bp, Homo sapiens
tcgcttcaccctctg

SEQ ID NO: 1943305 - DNA, 15 bp, Homo sapiens
cgcttcaccctctgc

SEQ ID NO: 1943306 - DNA, 15 bp, Homo sapiens
gcttcaccctctgcc

SEQ ID NO: 1943307 - DNA, 15 bp, Homo sapiens
cttcaccctctgcct

SEQ ID NO: 1943308 - DNA, 15 bp, Homo sapiens
ttcaccctctgcctc

SEQ ID NO: 1943309 - DNA, 15 bp, Homo sapiens
tcaccctctgcctcc

SEQ ID NO: 1943310 - DNA, 15 bp, Homo sapiens
caccctctgcctcct

SEQ ID NO: 1943311 - DNA, 15 bp, Homo sapiens
accctctgcctcctg

SEQ ID NO: 1943312 - DNA, 15 bp, Homo sapiens
ccctctgcctcctgg

SEQ ID NO: 1943313 - DNA, 15 bp, Homo sapiens
ctcctgcctcagctt

SEQ ID NO: 1943314 - DNA, 15 bp, Homo sapiens
ctgcctcagcttcct

SEQ ID NO: 1943315 - DNA, 15 bp, Homo sapiens
tgcctcagcttcctg

SEQ ID NO: 1943316 - DNA, 15 bp, Homo sapiens
gcctcagcttcctga

SEQ ID NO: 1943317 - DNA, 15 bp, Homo sapiens
cctcagcttcctgag

SEQ ID NO: 1943318 - DNA, 15 bp, Homo sapiens
ctcagcttcctgagt

SEQ ID NO: 1943319 - DNA, 15 bp, Homo sapiens
tcagcttcctgagta

SEQ ID NO: 1943320 - DNA, 15 bp, Homo sapiens
cagcttcctgagtag

SEQ ID NO: 1943321 - DNA, 15 bp, Homo sapiens
agcttcctgagtagc

SEQ ID NO: 1943322 - DNA, 15 bp, Homo sapiens
gcttcctgagtagct

SEQ ID NO: 1943323 - DNA, 15 bp, Homo sapiens
cttcctgagtagctg

SEQ ID NO: 1943324 - DNA, 15 bp, Homo sapiens
ttcctgagtagctgg

SEQ ID NO: 1943325 - DNA, 15 bp, Homo sapiens
gctgggactacagtt

SEQ ID NO: 1943326 - DNA, 15 bp, Homo sapiens
ctgggactacagttg

SEQ ID NO: 1943327 - DNA, 15 bp, Homo sapiens
tgggactacagttgc

SEQ ID NO: 1943328 - DNA, 15 bp, Homo sapiens
gggactacagttgca

SEQ ID NO: 1943329 - DNA, 15 bp, Homo sapiens
ggactacagttgcac

SEQ ID NO: 1943330 - DNA, 15 bp, Homo sapiens
gactacagttgcacg

SEQ ID NO: 1943331 - DNA, 15 bp, Homo sapiens
actacagttgcacgc

SEQ ID NO: 1943332 - DNA, 15 bp, Homo sapiens
ctacagttgcacgcc

SEQ ID NO: 1943333 - DNA, 15 bp, Homo sapiens
tacagttgcacgcca

SEQ ID NO: 1943334 - DNA, 15 bp, Homo sapiens
acagttgcacgccac

SEQ ID NO: 1943335 - DNA, 15 bp, Homo sapiens
cagttgcacgccacc

SEQ ID NO: 1943336 - DNA, 15 bp, Homo sapiens
agttgcacgccacca

SEQ ID NO: 1943337 - DNA, 15 bp, Homo sapiens
gttgcacgccaccat

SEQ ID NO: 1943338 - DNA, 15 bp, Homo sapiens
ttgcacgccaccatg

SEQ ID NO: 1943339 - DNA, 15 bp, Homo sapiens
tgcacgccaccatgc

SEQ ID NO: 1943340 - DNA, 15 bp, Homo sapiens
gcacgccaccatgcc

SEQ ID NO: 1943341 - DNA, 15 bp, Homo sapiens
cacgccaccatgccc

SEQ ID NO: 1943342 - DNA, 15 bp, Homo sapiens
acgccaccatgcccg

SEQ ID NO: 1943343 - DNA, 15 bp, Homo sapiens
cgccaccatgcccgg

SEQ ID NO: 1943344 - DNA, 15 bp, Homo sapiens
ttttagtagagacaa

SEQ ID NO: 1943345 - DNA, 15 bp, Homo sapiens
tttagtagagacaag

SEQ ID NO: 1943346 - DNA, 15 bp, Homo sapiens
ttagtagagacaagg

SEQ ID NO: 1943347 - DNA, 15 bp, Homo sapiens
tagtagagacaaggc

SEQ ID NO: 1943348 - DNA, 15 bp, Homo sapiens
agtagagacaaggct

SEQ ID NO: 1943349 - DNA, 15 bp, Homo sapiens
gtagagacaaggctt

SEQ ID NO: 1943350 - DNA, 15 bp, Homo sapiens
tagagacaaggcttc

SEQ ID NO: 1943351 - DNA, 15 bp, Homo sapiens
agagacaaggcttca

SEQ ID NO: 1943352 - DNA, 15 bp, Homo sapiens
gagacaaggcttcac

SEQ ID NO: 1943353 - DNA, 15 bp, Homo sapiens
agacaaggcttcacc

SEQ ID NO: 1943354 - DNA, 15 bp, Homo sapiens
gacaaggcttcacca

SEQ ID NO: 1943355 - DNA, 15 bp, Homo sapiens
acaaggcttcaccat

SEQ ID NO: 1943356 - DNA, 15 bp, Homo sapiens
caaggcttcaccatg

SEQ ID NO: 1943357 - DNA, 15 bp, Homo sapiens
aaggcttcaccatgt

SEQ ID NO: 1943358 - DNA, 15 bp, Homo sapiens
aggcttcaccatgtt

SEQ ID NO: 1943359 - DNA, 15 bp, Homo sapiens
ggcttcaccatgttg

SEQ ID NO: 1943360 - DNA, 15 bp, Homo sapiens
gcttcaccatgttga

SEQ ID NO: 1943361 - DNA, 15 bp, Homo sapiens
cttcaccatgttgat

SEQ ID NO: 1943362 - DNA, 15 bp, Homo sapiens
ttcaccatgttgatc

SEQ ID NO: 1943363 - DNA, 15 bp, Homo sapiens
tcaccatgttgatca

SEQ ID NO: 1943364 - DNA, 15 bp, Homo sapiens
caccatgttgatcag

SEQ ID NO: 1943365 - DNA, 15 bp, Homo sapiens
accatgttgatcagg

SEQ ID NO: 1943366 - DNA, 15 bp, Homo sapiens
ccatgttgatcaggc

SEQ ID NO: 1943367 - DNA, 15 bp, Homo sapiens
catgttgatcaggct

SEQ ID NO: 1943368 - DNA, 15 bp, Homo sapiens
atgttgatcaggctg

SEQ ID NO: 1943369 - DNA, 15 bp, Homo sapiens
tgttgatcaggctgg

SEQ ID NO: 1943370 - DNA, 15 bp, Homo sapiens
gttgatcaggctggt

SEQ ID NO: 1943371 - DNA, 15 bp, Homo sapiens
ttgatcaggctggtc

SEQ ID NO: 1943372 - DNA, 15 bp, Homo sapiens
tgatcaggctggtct

SEQ ID NO: 1943373 - DNA, 15 bp, Homo sapiens
gatcaggctggtctt

SEQ ID NO: 1943374 - DNA, 15 bp, Homo sapiens
atcaggctggtcttg

SEQ ID NO: 1943375 - DNA, 15 bp, Homo sapiens
tcaggctggtcttga

SEQ ID NO: 1943376 - DNA, 15 bp, Homo sapiens
gacctcaagtgattc

SEQ ID NO: 1943377 - DNA, 15 bp, Homo sapiens
acctcaagtgattca

SEQ ID NO: 1943378 - DNA, 15 bp, Homo sapiens
cctcaagtgattcac

SEQ ID NO: 1943379 - DNA, 15 bp, Homo sapiens
ctcaagtgattcacc

SEQ ID NO: 1943380 - DNA, 15 bp, Homo sapiens
tcaagtgattcaccc

SEQ ID NO: 1943381 - DNA, 15 bp, Homo sapiens
caagtgattcaccca

SEQ ID NO: 1943382 - DNA, 15 bp, Homo sapiens
aagtgattcacccat

SEQ ID NO: 1943383 - DNA, 15 bp, Homo sapiens
agtgattcacccatc

SEQ ID NO: 1943384 - DNA, 15 bp, Homo sapiens
gtgattcacccatct

SEQ ID NO: 1943385 - DNA, 15 bp, Homo sapiens
tgattcacccatctc

SEQ ID NO: 1943386 - DNA, 15 bp, Homo sapiens
gattcacccatctcg

SEQ ID NO: 1943387 - DNA, 15 bp, Homo sapiens
attcacccatctcgg

SEQ ID NO: 1943388 - DNA, 15 bp, Homo sapiens
ttcacccatctcggc

SEQ ID NO: 1943389 - DNA, 15 bp, Homo sapiens
tcacccatctcggcc

SEQ ID NO: 1943390 - DNA, 15 bp, Homo sapiens
cacccatctcggcct

SEQ ID NO: 1943391 - DNA, 15 bp, Homo sapiens
acccatctcggcctc

SEQ ID NO: 1943392 - DNA, 15 bp, Homo sapiens
ctcggcctcccaaaa

SEQ ID NO: 1943393 - DNA, 15 bp, Homo sapiens
tcggcctcccaaaat

SEQ ID NO: 1943394 - DNA, 15 bp, Homo sapiens
cggcctcccaaaatg

SEQ ID NO: 1943395 - DNA, 15 bp, Homo sapiens
ggcctcccaaaatgc

SEQ ID NO: 1943396 - DNA, 15 bp, Homo sapiens
gcctcccaaaatgct

SEQ ID NO: 1943397 - DNA, 15 bp, Homo sapiens
cctcccaaaatgctg

SEQ ID NO: 1943398 - DNA, 15 bp, Homo sapiens
ctcccaaaatgctgg

SEQ ID NO: 1943399 - DNA, 15 bp, Homo sapiens
tcccaaaatgctggg

SEQ ID NO: 1943400 - DNA, 15 bp, Homo sapiens
cccaaaatgctggga

SEQ ID NO: 1943401 - DNA, 15 bp, Homo sapiens
ccaaaatgctgggat

SEQ ID NO: 1943402 - DNA, 15 bp, Homo sapiens
caaaatgctgggatt

SEQ ID NO: 1943403 - DNA, 15 bp, Homo sapiens
aaaatgctgggatta

SEQ ID NO: 1943404 - DNA, 15 bp, Homo sapiens
aaatgctgggattac

SEQ ID NO: 1943405 - DNA, 15 bp, Homo sapiens
aatgctgggattaca

SEQ ID NO: 1943406 - DNA, 15 bp, Homo sapiens
atgctgggattacag

SEQ ID NO: 1943407 - DNA, 15 bp, Homo sapiens
gtgtaagccaccaca

SEQ ID NO: 1943408 - DNA, 15 bp, Homo sapiens
tgtaagccaccacac

SEQ ID NO: 1943409 - DNA, 15 bp, Homo sapiens
gtaagccaccacacc

SEQ ID NO: 1943410 - DNA, 15 bp, Homo sapiens
taagccaccacaccc

SEQ ID NO: 1943411 - DNA, 15 bp, Homo sapiens
aagccaccacaccca

SEQ ID NO: 1943412 - DNA, 15 bp, Homo sapiens
caccacacccagccc

SEQ ID NO: 1943413 - DNA, 15 bp, Homo sapiens
accacacccagccca

SEQ ID NO: 1943414 - DNA, 15 bp, Homo sapiens
ccacacccagcccaa

SEQ ID NO: 1943415 - DNA, 15 bp, Homo sapiens
cacacccagcccaaa

SEQ ID NO: 1943416 - DNA, 15 bp, Homo sapiens
acacccagcccaaag

SEQ ID NO: 1943417 - DNA, 15 bp, Homo sapiens
cacccagcccaaagt

SEQ ID NO: 1943418 - DNA, 15 bp, Homo sapiens
acccagcccaaagtg

SEQ ID NO: 1943419 - DNA, 15 bp, Homo sapiens
cccagcccaaagtgt

SEQ ID NO: 1943420 - DNA, 15 bp, Homo sapiens
ccagcccaaagtgta

SEQ ID NO: 1943421 - DNA, 15 bp, Homo sapiens
cagcccaaagtgtat

SEQ ID NO: 1943422 - DNA, 15 bp, Homo sapiens
agcccaaagtgtatt

SEQ ID NO: 1943423 - DNA, 15 bp, Homo sapiens
gcccaaagtgtattt

SEQ ID NO: 1943424 - DNA, 15 bp, Homo sapiens
agtgtattttttaaa

SEQ ID NO: 1943425 - DNA, 15 bp, Homo sapiens
gtgtattttttaaat

SEQ ID NO: 1943426 - DNA, 15 bp, Homo sapiens
tgtattttttaaata

SEQ ID NO: 1943427 - DNA, 15 bp, Homo sapiens
gtattttttaaataa

SEQ ID NO: 1943428 - DNA, 15 bp, Homo sapiens
tattttttaaataat

SEQ ID NO: 1943429 - DNA, 15 bp, Homo sapiens
attttttaaataata

SEQ ID NO: 1943430 - DNA, 15 bp, Homo sapiens
ttttttaaataataa

SEQ ID NO: 1943431 - DNA, 15 bp, Homo sapiens
tttttaaataataag

SEQ ID NO: 1943432 - DNA, 15 bp, Homo sapiens
ttttaaataataaga

SEQ ID NO: 1943433 - DNA, 15 bp, Homo sapiens
tttaaataataagac

SEQ ID NO: 1943434 - DNA, 15 bp, Homo sapiens
ttaaataataagaca

SEQ ID NO: 1943435 - DNA, 15 bp, Homo sapiens
taaataataagacat

SEQ ID NO: 1943436 - DNA, 15 bp, Homo sapiens
aaataataagacatg

SEQ ID NO: 1943437 - DNA, 15 bp, Homo sapiens
aataataagacatga

SEQ ID NO: 1943438 - DNA, 15 bp, Homo sapiens
ataataagacatgaa

SEQ ID NO: 1943439 - DNA, 15 bp, Homo sapiens
taataagacatgaaa

SEQ ID NO: 1943440 - DNA, 15 bp, Homo sapiens
aataagacatgaaag

SEQ ID NO: 1943441 - DNA, 15 bp, Homo sapiens
ataagacatgaaagt

SEQ ID NO: 1943442 - DNA, 15 bp, Homo sapiens
taagacatgaaagtc

SEQ ID NO: 1943443 - DNA, 15 bp, Homo sapiens
aagacatgaaagtcg

SEQ ID NO: 1943444 - DNA, 15 bp, Homo sapiens
agacatgaaagtcga

SEQ ID NO: 1943445 - DNA, 15 bp, Homo sapiens
gacatgaaagtcgaa

SEQ ID NO: 1943446 - DNA, 15 bp, Homo sapiens
acatgaaagtcgaac

SEQ ID NO: 1943447 - DNA, 15 bp, Homo sapiens
catgaaagtcgaact

SEQ ID NO: 1943448 - DNA, 15 bp, Homo sapiens
atgaaagtcgaactt

SEQ ID NO: 1943449 - DNA, 15 bp, Homo sapiens
tgaaagtcgaactta

SEQ ID NO: 1943450 - DNA, 15 bp, Homo sapiens
gaaagtcgaacttac

SEQ ID NO: 1943451 - DNA, 15 bp, Homo sapiens
aaagtcgaacttact

SEQ ID NO: 1943452 - DNA, 15 bp, Homo sapiens
aagtcgaacttactc

SEQ ID NO: 1943453 - DNA, 15 bp, Homo sapiens
agtcgaacttactcc

SEQ ID NO: 1943454 - DNA, 15 bp, Homo sapiens
gtcgaacttactccc

SEQ ID NO: 1943455 - DNA, 15 bp, Homo sapiens
tcgaacttactccct

SEQ ID NO: 1943456 - DNA, 15 bp, Homo sapiens
cgaacttactccctg

SEQ ID NO: 1943457 - DNA, 15 bp, Homo sapiens
gaacttactccctga

SEQ ID NO: 1943458 - DNA, 15 bp, Homo sapiens
aacttactccctgat

SEQ ID NO: 1943459 - DNA, 15 bp, Homo sapiens
acttactccctgatc

SEQ ID NO: 1943460 - DNA, 15 bp, Homo sapiens
cttactccctgatcc

SEQ ID NO: 1943461 - DNA, 15 bp, Homo sapiens
ttactccctgatcca

SEQ ID NO: 1943462 - DNA, 15 bp, Homo sapiens
tactccctgatccat

SEQ ID NO: 1943463 - DNA, 15 bp, Homo sapiens
actccctgatccatg

SEQ ID NO: 1943464 - DNA, 15 bp, Homo sapiens
ctccctgatccatgg

SEQ ID NO: 1943465 - DNA, 15 bp, Homo sapiens
tccctgatccatggg

SEQ ID NO: 1943466 - DNA, 15 bp, Homo sapiens
ccctgatccatgggc

SEQ ID NO: 1943467 - DNA, 15 bp, Homo sapiens
cctgatccatgggct

SEQ ID NO: 1943468 - DNA, 15 bp, Homo sapiens
ctgatccatgggctg

SEQ ID NO: 1943469 - DNA, 15 bp, Homo sapiens
tgatccatgggctgc

SEQ ID NO: 1943470 - DNA, 15 bp, Homo sapiens
gatccatgggctgca

SEQ ID NO: 1943471 - DNA, 15 bp, Homo sapiens
atccatgggctgcag

SEQ ID NO: 1943472 - DNA, 15 bp, Homo sapiens
tccatgggctgcagt

SEQ ID NO: 1943473 - DNA, 15 bp, Homo sapiens
ccatgggctgcagta

SEQ ID NO: 1943474 - DNA, 15 bp, Homo sapiens
catgggctgcagtat

SEQ ID NO: 1943475 - DNA, 15 bp, Homo sapiens
atgggctgcagtatg

SEQ ID NO: 1943476 - DNA, 15 bp, Homo sapiens
tgggctgcagtatgg

SEQ ID NO: 1943477 - DNA, 15 bp, Homo sapiens
gggctgcagtatgga

SEQ ID NO: 1943478 - DNA, 15 bp, Homo sapiens
ggctgcagtatggat

SEQ ID NO: 1943479 - DNA, 15 bp, Homo sapiens
gctgcagtatggatg

SEQ ID NO: 1943480 - DNA, 15 bp, Homo sapiens
ctgcagtatggatgt

SEQ ID NO: 1943481 - DNA, 15 bp, Homo sapiens
tgcagtatggatgtc

SEQ ID NO: 1943482 - DNA, 15 bp, Homo sapiens
gcagtatggatgtca

SEQ ID NO: 1943483 - DNA, 15 bp, Homo sapiens
cagtatggatgtcat

SEQ ID NO: 1943484 - DNA, 15 bp, Homo sapiens
agtatggatgtcatg

SEQ ID NO: 1943485 - DNA, 15 bp, Homo sapiens
gtatggatgtcatgt

SEQ ID NO: 1943486 - DNA, 15 bp, Homo sapiens
tatggatgtcatgtt

SEQ ID NO: 1943487 - DNA, 15 bp, Homo sapiens
atggatgtcatgtta

SEQ ID NO: 1943488 - DNA, 15 bp, Homo sapiens
tggatgtcatgttag

SEQ ID NO: 1943489 - DNA, 15 bp, Homo sapiens
ggatgtcatgttagc

SEQ ID NO: 1943490 - DNA, 15 bp, Homo sapiens
gatgtcatgttagca

SEQ ID NO: 1943491 - DNA, 15 bp, Homo sapiens
atgtcatgttagcag

SEQ ID NO: 1943492 - DNA, 15 bp, Homo sapiens
tgtcatgttagcagg

SEQ ID NO: 1943493 - DNA, 15 bp, Homo sapiens
gtcatgttagcaggc

SEQ ID NO: 1943494 - DNA, 15 bp, Homo sapiens
tcatgttagcaggca

SEQ ID NO: 1943495 - DNA, 15 bp, Homo sapiens
catgttagcaggcat

SEQ ID NO: 1943496 - DNA, 15 bp, Homo sapiens
atgttagcaggcatg

SEQ ID NO: 1943497 - DNA, 15 bp, Homo sapiens
tgttagcaggcatga

SEQ ID NO: 1943498 - DNA, 15 bp, Homo sapiens
gttagcaggcatgaa

SEQ ID NO: 1943499 - DNA, 15 bp, Homo sapiens
ttagcaggcatgaaa

SEQ ID NO: 1943500 - DNA, 15 bp, Homo sapiens
tagcaggcatgaaaa

SEQ ID NO: 1943501 - DNA, 15 bp, Homo sapiens
agcaggcatgaaaac

SEQ ID NO: 1943502 - DNA, 15 bp, Homo sapiens
gcaggcatgaaaaca

SEQ ID NO: 1943503 - DNA, 15 bp, Homo sapiens
caggcatgaaaacaa

SEQ ID NO: 1943504 - DNA, 15 bp, Homo sapiens
aggcatgaaaacaac

SEQ ID NO: 1943505 - DNA, 15 bp, Homo sapiens
ggcatgaaaacaaca

SEQ ID NO: 1943506 - DNA, 15 bp, Homo sapiens
gcatgaaaacaacat

SEQ ID NO: 1943507 - DNA, 15 bp, Homo sapiens
catgaaaacaacatt

SEQ ID NO: 1943508 - DNA, 15 bp, Homo sapiens
atgaaaacaacatta

SEQ ID NO: 1943509 - DNA, 15 bp, Homo sapiens
tgaaaacaacattaa

SEQ ID NO: 1943510 - DNA, 15 bp, Homo sapiens
gaaaacaacattaat

SEQ ID NO: 1943511 - DNA, 15 bp, Homo sapiens
aaaacaacattaatc

SEQ ID NO: 1943512 - DNA, 15 bp, Homo sapiens
aaacaacattaatct

SEQ ID NO: 1943513 - DNA, 15 bp, Homo sapiens
aacaacattaatctc

SEQ ID NO: 1943514 - DNA, 15 bp, Homo sapiens
acaacattaatctcc

SEQ ID NO: 1943515 - DNA, 15 bp, Homo sapiens
caacattaatctcct

SEQ ID NO: 1943516 - DNA, 15 bp, Homo sapiens
aacattaatctcctc

SEQ ID NO: 1943517 - DNA, 15 bp, Homo sapiens
acattaatctcctca

SEQ ID NO: 1943518 - DNA, 15 bp, Homo sapiens
cattaatctcctcat

SEQ ID NO: 1943519 - DNA, 15 bp, Homo sapiens
attaatctcctcata

SEQ ID NO: 1943520 - DNA, 15 bp, Homo sapiens
ttaatctcctcatac

SEQ ID NO: 1943521 - DNA, 15 bp, Homo sapiens
taatctcctcataca

SEQ ID NO: 1943522 - DNA, 15 bp, Homo sapiens
aatctcctcatacat

SEQ ID NO: 1943523 - DNA, 15 bp, Homo sapiens
atctcctcatacatc

SEQ ID NO: 1943524 - DNA, 15 bp, Homo sapiens
tctcctcatacatct

SEQ ID NO: 1943525 - DNA, 15 bp, Homo sapiens
ctcctcatacatctc

SEQ ID NO: 1943526 - DNA, 15 bp, Homo sapiens
tcctcatacatctcc

SEQ ID NO: 1943527 - DNA, 15 bp, Homo sapiens
cctcatacatctcca

SEQ ID NO: 1943528 - DNA, 15 bp, Homo sapiens
ctcatacatctccat

SEQ ID NO: 1943529 - DNA, 15 bp, Homo sapiens
tcatacatctccatc

SEQ ID NO: 1943530 - DNA, 15 bp, Homo sapiens
catacatctccatca

SEQ ID NO: 1943531 - DNA, 15 bp, Homo sapiens
catcagagctcttgg

SEQ ID NO: 1943532 - DNA, 15 bp, Homo sapiens
atcagagctcttggg

SEQ ID NO: 1943533 - DNA, 15 bp, Homo sapiens
tcagagctcttgggt

SEQ ID NO: 1943534 - DNA, 15 bp, Homo sapiens
cagagctcttgggtg

SEQ ID NO: 1943535 - DNA, 15 bp, Homo sapiens
agagctcttgggtga

SEQ ID NO: 1943536 - DNA, 15 bp, Homo sapiens
gagctcttgggtgat

SEQ ID NO: 1943537 - DNA, 15 bp, Homo sapiens
agctcttgggtgatg

SEQ ID NO: 1943538 - DNA, 15 bp, Homo sapiens
gctcttgggtgatga

SEQ ID NO: 1943539 - DNA, 15 bp, Homo sapiens
ctcttgggtgatgag

SEQ ID NO: 1943540 - DNA, 15 bp, Homo sapiens
tcttgggtgatgagg

SEQ ID NO: 1943541 - DNA, 15 bp, Homo sapiens
cttgggtgatgaggt

SEQ ID NO: 1943542 - DNA, 15 bp, Homo sapiens
ttgggtgatgaggta

SEQ ID NO: 1943543 - DNA, 15 bp, Homo sapiens
tgggtgatgaggtac

SEQ ID NO: 1943544 - DNA, 15 bp, Homo sapiens
gggtgatgaggtaca

SEQ ID NO: 1943545 - DNA, 15 bp, Homo sapiens
ggtgatgaggtacac

SEQ ID NO: 1943546 - DNA, 15 bp, Homo sapiens
gtgatgaggtacact

SEQ ID NO: 1943547 - DNA, 15 bp, Homo sapiens
tgatgaggtacactg

SEQ ID NO: 1943548 - DNA, 15 bp, Homo sapiens
gatgaggtacactgt

SEQ ID NO: 1943549 - DNA, 15 bp, Homo sapiens
atgaggtacactgtc

SEQ ID NO: 1943550 - DNA, 15 bp, Homo sapiens
tgaggtacactgtca

SEQ ID NO: 1943551 - DNA, 15 bp, Homo sapiens
gaggtacactgtcag

SEQ ID NO: 1943552 - DNA, 15 bp, Homo sapiens
aggtacactgtcagt

SEQ ID NO: 1943553 - DNA, 15 bp, Homo sapiens
ggtacactgtcagtt

SEQ ID NO: 1943554 - DNA, 15 bp, Homo sapiens
gtacactgtcagtta

SEQ ID NO: 1943555 - DNA, 15 bp, Homo sapiens
tacactgtcagttag

SEQ ID NO: 1943556 - DNA, 15 bp, Homo sapiens
acactgtcagttagc

SEQ ID NO: 1943557 - DNA, 15 bp, Homo sapiens
cactgtcagttagca

SEQ ID NO: 1943558 - DNA, 15 bp, Homo sapiens
actgtcagttagcag

SEQ ID NO: 1943559 - DNA, 15 bp, Homo sapiens
ctgtcagttagcagt

SEQ ID NO: 1943560 - DNA, 15 bp, Homo sapiens
tgtcagttagcagta

SEQ ID NO: 1943561 - DNA, 15 bp, Homo sapiens
gtcagttagcagtag

SEQ ID NO: 1943562 - DNA, 15 bp, Homo sapiens
tcagttagcagtagt

SEQ ID NO: 1943563 - DNA, 15 bp, Homo sapiens
cagttagcagtagta

SEQ ID NO: 1943564 - DNA, 15 bp, Homo sapiens
agttagcagtagtat

SEQ ID NO: 1943565 - DNA, 15 bp, Homo sapiens
gttagcagtagtatt

SEQ ID NO: 1943566 - DNA, 15 bp, Homo sapiens
ttagcagtagtattt

SEQ ID NO: 1943567 - DNA, 15 bp, Homo sapiens
tagcagtagtatttt

SEQ ID NO: 1943568 - DNA, 15 bp, Homo sapiens
agcagtagtattttg

SEQ ID NO: 1943569 - DNA, 15 bp, Homo sapiens
gcagtagtattttga

SEQ ID NO: 1943570 - DNA, 15 bp, Homo sapiens
cagtagtattttgaa

SEQ ID NO: 1943571 - DNA, 15 bp, Homo sapiens
agtagtattttgaaa

SEQ ID NO: 1943572 - DNA, 15 bp, Homo sapiens
gtagtattttgaaag

SEQ ID NO: 1943573 - DNA, 15 bp, Homo sapiens
tagtattttgaaagg

SEQ ID NO: 1943574 - DNA, 15 bp, Homo sapiens
agtattttgaaagga

SEQ ID NO: 1943575 - DNA, 15 bp, Homo sapiens
gtattttgaaaggaa

SEQ ID NO: 1943576 - DNA, 15 bp, Homo sapiens
tattttgaaaggaat

SEQ ID NO: 1943577 - DNA, 15 bp, Homo sapiens
attttgaaaggaatc

SEQ ID NO: 1943578 - DNA, 15 bp, Homo sapiens
ttttgaaaggaatct

SEQ ID NO: 1943579 - DNA, 15 bp, Homo sapiens
tttgaaaggaatctt

SEQ ID NO: 1943580 - DNA, 15 bp, Homo sapiens
ttgaaaggaatcttt

SEQ ID NO: 1943581 - DNA, 15 bp, Homo sapiens
tgaaaggaatctttt

SEQ ID NO: 1943582 - DNA, 15 bp, Homo sapiens
gaaaggaatcttttt

SEQ ID NO: 1943583 - DNA, 15 bp, Homo sapiens
aaaggaatctttttt

SEQ ID NO: 1943584 - DNA, 15 bp, Homo sapiens
aaggaatcttttttt

SEQ ID NO: 1943585 - DNA, 15 bp, Homo sapiens
aggaatctttttttc

SEQ ID NO: 1943586 - DNA, 15 bp, Homo sapiens
ggaatctttttttct

SEQ ID NO: 1943587 - DNA, 15 bp, Homo sapiens
gaatctttttttctg

SEQ ID NO: 1943588 - DNA, 15 bp, Homo sapiens
aatctttttttctga

SEQ ID NO: 1943589 - DNA, 15 bp, Homo sapiens
atctttttttctgaa

SEQ ID NO: 1943590 - DNA, 15 bp, Homo sapiens
tctttttttctgaac

SEQ ID NO: 1943591 - DNA, 15 bp, Homo sapiens
ctttttttctgaaca

SEQ ID NO: 1943592 - DNA, 15 bp, Homo sapiens
tttttttctgaacag

SEQ ID NO: 1943593 - DNA, 15 bp, Homo sapiens
ttttttctgaacagt

SEQ ID NO: 1943594 - DNA, 15 bp, Homo sapiens
tttttctgaacagta

SEQ ID NO: 1943595 - DNA, 15 bp, Homo sapiens
ttttctgaacagtag

SEQ ID NO: 1943596 - DNA, 15 bp, Homo sapiens
tttctgaacagtagg

SEQ ID NO: 1943597 - DNA, 15 bp, Homo sapiens
ttctgaacagtaggt

SEQ ID NO: 1943598 - DNA, 15 bp, Homo sapiens
tctgaacagtaggtc

SEQ ID NO: 1943599 - DNA, 15 bp, Homo sapiens
ctgaacagtaggtct

SEQ ID NO: 1943600 - DNA, 15 bp, Homo sapiens
tgaacagtaggtctc

SEQ ID NO: 1943601 - DNA, 15 bp, Homo sapiens
gaacagtaggtctca

SEQ ID NO: 1943602 - DNA, 15 bp, Homo sapiens
aacagtaggtctcaa

SEQ ID NO: 1943603 - DNA, 15 bp, Homo sapiens
acagtaggtctcaac

SEQ ID NO: 1943604 - DNA, 15 bp, Homo sapiens
gtaggtctcaacagt

SEQ ID NO: 1943605 - DNA, 15 bp, Homo sapiens
taggtctcaacagtg

SEQ ID NO: 1943606 - DNA, 15 bp, Homo sapiens
aggtctcaacagtgg

SEQ ID NO: 1943607 - DNA, 15 bp, Homo sapiens
ggtctcaacagtggg

SEQ ID NO: 1943608 - DNA, 15 bp, Homo sapiens
gtctcaacagtgggc

SEQ ID NO: 1943609 - DNA, 15 bp, Homo sapiens
tctcaacagtgggct

SEQ ID NO: 1943610 - DNA, 15 bp, Homo sapiens
ctcaacagtgggctt

SEQ ID NO: 1943611 - DNA, 15 bp, Homo sapiens
tcaacagtgggcttt

SEQ ID NO: 1943612 - DNA, 15 bp, Homo sapiens
caacagtgggcttta

SEQ ID NO: 1943613 - DNA, 15 bp, Homo sapiens
aacagtgggctttaa

SEQ ID NO: 1943614 - DNA, 15 bp, Homo sapiens
acagtgggctttaaa

SEQ ID NO: 1943615 - DNA, 15 bp, Homo sapiens
cagtgggctttaaat

SEQ ID NO: 1943616 - DNA, 15 bp, Homo sapiens
agtgggctttaaata

SEQ ID NO: 1943617 - DNA, 15 bp, Homo sapiens
gtgggctttaaatat

SEQ ID NO: 1943618 - DNA, 15 bp, Homo sapiens
tgggctttaaatatt

SEQ ID NO: 1943619 - DNA, 15 bp, Homo sapiens
gggctttaaatattc

SEQ ID NO: 1943620 - DNA, 15 bp, Homo sapiens
ggctttaaatattca

SEQ ID NO: 1943621 - DNA, 15 bp, Homo sapiens
gctttaaatattcag

SEQ ID NO: 1943622 - DNA, 15 bp, Homo sapiens
ctttaaatattcagt

SEQ ID NO: 1943623 - DNA, 15 bp, Homo sapiens
tttaaatattcagta

SEQ ID NO: 1943624 - DNA, 15 bp, Homo sapiens
ttaaatattcagtaa

SEQ ID NO: 1943625 - DNA, 15 bp, Homo sapiens
taaatattcagtaaa

SEQ ID NO: 1943626 - DNA, 15 bp, Homo sapiens
aaatattcagtaaac

SEQ ID NO: 1943627 - DNA, 15 bp, Homo sapiens
aatattcagtaaacc

SEQ ID NO: 1943628 - DNA, 15 bp, Homo sapiens
atattcagtaaacca

SEQ ID NO: 1943629 - DNA, 15 bp, Homo sapiens
tattcagtaaaccat

SEQ ID NO: 1943630 - DNA, 15 bp, Homo sapiens
attcagtaaaccatg

SEQ ID NO: 1943631 - DNA, 15 bp, Homo sapiens
ttcagtaaaccatgc

SEQ ID NO: 1943632 - DNA, 15 bp, Homo sapiens
tcagtaaaccatgct

SEQ ID NO: 1943633 - DNA, 15 bp, Homo sapiens
cagtaaaccatgctg

SEQ ID NO: 1943634 - DNA, 15 bp, Homo sapiens
agtaaaccatgctgt

SEQ ID NO: 1943635 - DNA, 15 bp, Homo sapiens
gtaaaccatgctgta

SEQ ID NO: 1943636 - DNA, 15 bp, Homo sapiens
taaaccatgctgtaa

SEQ ID NO: 1943637 - DNA, 15 bp, Homo sapiens
aaaccatgctgtaaa

SEQ ID NO: 1943638 - DNA, 15 bp, Homo sapiens
aaccatgctgtaaac

SEQ ID NO: 1943639 - DNA, 15 bp, Homo sapiens
accatgctgtaaact

SEQ ID NO: 1943640 - DNA, 15 bp, Homo sapiens
ccatgctgtaaactg

SEQ ID NO: 1943641 - DNA, 15 bp, Homo sapiens
catgctgtaaactga

SEQ ID NO: 1943642 - DNA, 15 bp, Homo sapiens
atgctgtaaactgat

SEQ ID NO: 1943643 - DNA, 15 bp, Homo sapiens
tgctgtaaactgatg

SEQ ID NO: 1943644 - DNA, 15 bp, Homo sapiens
gctgtaaactgatgt

SEQ ID NO: 1943645 - DNA, 15 bp, Homo sapiens
ctgtaaactgatgtg

SEQ ID NO: 1943646 - DNA, 15 bp, Homo sapiens
tgtaaactgatgtgc

SEQ ID NO: 1943647 - DNA, 15 bp, Homo sapiens
gtaaactgatgtgct

SEQ ID NO: 1943648 - DNA, 15 bp, Homo sapiens
taaactgatgtgcta

SEQ ID NO: 1943649 - DNA, 15 bp, Homo sapiens
aaactgatgtgctat

SEQ ID NO: 1943650 - DNA, 15 bp, Homo sapiens
aactgatgtgctatc

SEQ ID NO: 1943651 - DNA, 15 bp, Homo sapiens
actgatgtgctatca

SEQ ID NO: 1943652 - DNA, 15 bp, Homo sapiens
ctgatgtgctatcat

SEQ ID NO: 1943653 - DNA, 15 bp, Homo sapiens
tgatgtgctatcatc

SEQ ID NO: 1943654 - DNA, 15 bp, Homo sapiens
gatgtgctatcatcc

SEQ ID NO: 1943655 - DNA, 15 bp, Homo sapiens
atgtgctatcatcca

SEQ ID NO: 1943656 - DNA, 15 bp, Homo sapiens
tgtgctatcatccag

SEQ ID NO: 1943657 - DNA, 15 bp, Homo sapiens
gtgctatcatccagg

SEQ ID NO: 1943658 - DNA, 15 bp, Homo sapiens
tgctatcatccaggc

SEQ ID NO: 1943659 - DNA, 15 bp, Homo sapiens
gctatcatccaggct

SEQ ID NO: 1943660 - DNA, 15 bp, Homo sapiens
ctatcatccaggctt

SEQ ID NO: 1943661 - DNA, 15 bp, Homo sapiens
tatcatccaggcttt

SEQ ID NO: 1943662 - DNA, 15 bp, Homo sapiens
atcatccaggctttc

SEQ ID NO: 1943663 - DNA, 15 bp, Homo sapiens
tcatccaggctttct

SEQ ID NO: 1943664 - DNA, 15 bp, Homo sapiens
catccaggctttctt

SEQ ID NO: 1943665 - DNA, 15 bp, Homo sapiens
atccaggctttcttg

SEQ ID NO: 1943666 - DNA, 15 bp, Homo sapiens
tccaggctttcttgt

SEQ ID NO: 1943667 - DNA, 15 bp, Homo sapiens
ccaggctttcttgtt

SEQ ID NO: 1943668 - DNA, 15 bp, Homo sapiens
caggctttcttgttc

SEQ ID NO: 1943669 - DNA, 15 bp, Homo sapiens
aggctttcttgttcc

SEQ ID NO: 1943670 - DNA, 15 bp, Homo sapiens
ggctttcttgttcca

SEQ ID NO: 1943671 - DNA, 15 bp, Homo sapiens
gctttcttgttccat

SEQ ID NO: 1943672 - DNA, 15 bp, Homo sapiens
ctttcttgttccatt

SEQ ID NO: 1943673 - DNA, 15 bp, Homo sapiens
tttcttgttccattt

SEQ ID NO: 1943674 - DNA, 15 bp, Homo sapiens
ttcttgttccatttc

SEQ ID NO: 1943675 - DNA, 15 bp, Homo sapiens
tcttgttccatttct

SEQ ID NO: 1943676 - DNA, 15 bp, Homo sapiens
cttgttccatttcta

SEQ ID NO: 1943677 - DNA, 15 bp, Homo sapiens
ttgttccatttctaa

SEQ ID NO: 1943678 - DNA, 15 bp, Homo sapiens
tgttccatttctaaa

SEQ ID NO: 1943679 - DNA, 15 bp, Homo sapiens
gttccatttctaaag

SEQ ID NO: 1943680 - DNA, 15 bp, Homo sapiens
ttccatttctaaagc

SEQ ID NO: 1943681 - DNA, 15 bp, Homo sapiens
tccatttctaaagca

SEQ ID NO: 1943682 - DNA, 15 bp, Homo sapiens
ccatttctaaagcac

SEQ ID NO: 1943683 - DNA, 15 bp, Homo sapiens
catttctaaagcaca

SEQ ID NO: 1943684 - DNA, 15 bp, Homo sapiens
atttctaaagcacag

SEQ ID NO: 1943685 - DNA, 15 bp, Homo sapiens
tttctaaagcacagg

SEQ ID NO: 1943686 - DNA, 15 bp, Homo sapiens
ttctaaagcacaggc

SEQ ID NO: 1943687 - DNA, 15 bp, Homo sapiens
tctaaagcacaggca

SEQ ID NO: 1943688 - DNA, 15 bp, Homo sapiens
ctaaagcacaggcag

SEQ ID NO: 1943689 - DNA, 15 bp, Homo sapiens
taaagcacaggcaga

SEQ ID NO: 1943690 - DNA, 15 bp, Homo sapiens
aaagcacaggcagag

SEQ ID NO: 1943691 - DNA, 15 bp, Homo sapiens
aagcacaggcagagt

SEQ ID NO: 1943692 - DNA, 15 bp, Homo sapiens
agcacaggcagagta

SEQ ID NO: 1943693 - DNA, 15 bp, Homo sapiens
gcacaggcagagtag

SEQ ID NO: 1943694 - DNA, 15 bp, Homo sapiens
cacaggcagagtaga

SEQ ID NO: 1943695 - DNA, 15 bp, Homo sapiens
acaggcagagtagac

SEQ ID NO: 1943696 - DNA, 15 bp, Homo sapiens
caggcagagtagact

SEQ ID NO: 1943697 - DNA, 15 bp, Homo sapiens
aggcagagtagactt

SEQ ID NO: 1943698 - DNA, 15 bp, Homo sapiens
ggcagagtagactta

SEQ ID NO: 1943699 - DNA, 15 bp, Homo sapiens
gcagagtagacttag

SEQ ID NO: 1943700 - DNA, 15 bp, Homo sapiens
cagagtagacttagc

SEQ ID NO: 1943701 - DNA, 15 bp, Homo sapiens
agagtagacttagca

SEQ ID NO: 1943702 - DNA, 15 bp, Homo sapiens
gagtagacttagcac

SEQ ID NO: 1943703 - DNA, 15 bp, Homo sapiens
agtagacttagcaca

SEQ ID NO: 1943704 - DNA, 15 bp, Homo sapiens
gtagacttagcacaa

SEQ ID NO: 1943705 - DNA, 15 bp, Homo sapiens
tagacttagcacaat

SEQ ID NO: 1943706 - DNA, 15 bp, Homo sapiens
agacttagcacaatt

SEQ ID NO: 1943707 - DNA, 15 bp, Homo sapiens
gacttagcacaattt

SEQ ID NO: 1943708 - DNA, 15 bp, Homo sapiens
acttagcacaatttt

SEQ ID NO: 1943709 - DNA, 15 bp, Homo sapiens
cttagcacaattttt

SEQ ID NO: 1943710 - DNA, 15 bp, Homo sapiens
ttagcacaattttta

SEQ ID NO: 1943711 - DNA, 15 bp, Homo sapiens
tagcacaatttttaa

SEQ ID NO: 1943712 - DNA, 15 bp, Homo sapiens
agcacaatttttaag

SEQ ID NO: 1943713 - DNA, 15 bp, Homo sapiens
gcacaatttttaagg

SEQ ID NO: 1943714 - DNA, 15 bp, Homo sapiens
cacaatttttaaggg

SEQ ID NO: 1943715 - DNA, 15 bp, Homo sapiens
acaatttttaagggc

SEQ ID NO: 1943716 - DNA, 15 bp, Homo sapiens
caatttttaagggcc

SEQ ID NO: 1943717 - DNA, 15 bp, Homo sapiens
aatttttaagggccg

SEQ ID NO: 1943718 - DNA, 15 bp, Homo sapiens
atttttaagggccgt

SEQ ID NO: 1943719 - DNA, 15 bp, Homo sapiens
tttttaagggccgta

SEQ ID NO: 1943720 - DNA, 15 bp, Homo sapiens
ttttaagggccgtag

SEQ ID NO: 1943721 - DNA, 15 bp, Homo sapiens
tttaagggccgtagg

SEQ ID NO: 1943722 - DNA, 15 bp, Homo sapiens
ttaagggccgtagga

SEQ ID NO: 1943723 - DNA, 15 bp, Homo sapiens
taagggccgtaggat

SEQ ID NO: 1943724 - DNA, 15 bp, Homo sapiens
aagggccgtaggatc

SEQ ID NO: 1943725 - DNA, 15 bp, Homo sapiens
agggccgtaggatct

SEQ ID NO: 1943726 - DNA, 15 bp, Homo sapiens
gggccgtaggatctt

SEQ ID NO: 1943727 - DNA, 15 bp, Homo sapiens
ggccgtaggatcttt

SEQ ID NO: 1943728 - DNA, 15 bp, Homo sapiens
gccgtaggatctttg

SEQ ID NO: 1943729 - DNA, 15 bp, Homo sapiens
ccgtaggatctttga

SEQ ID NO: 1943730 - DNA, 15 bp, Homo sapiens
cgtaggatctttgaa

SEQ ID NO: 1943731 - DNA, 15 bp, Homo sapiens
gtaggatctttgaaa

SEQ ID NO: 1943732 - DNA, 15 bp, Homo sapiens
taggatctttgaaat

SEQ ID NO: 1943733 - DNA, 15 bp, Homo sapiens
aggatctttgaaatg

SEQ ID NO: 1943734 - DNA, 15 bp, Homo sapiens
ggatctttgaaatgg

SEQ ID NO: 1943735 - DNA, 15 bp, Homo sapiens
gatctttgaaatggt

SEQ ID NO: 1943736 - DNA, 15 bp, Homo sapiens
atctttgaaatggta

SEQ ID NO: 1943737 - DNA, 15 bp, Homo sapiens
tctttgaaatggtaa

SEQ ID NO: 1943738 - DNA, 15 bp, Homo sapiens
ctttgaaatggtaaa

SEQ ID NO: 1943739 - DNA, 15 bp, Homo sapiens
tttgaaatggtaaat

SEQ ID NO: 1943740 - DNA, 15 bp, Homo sapiens
ttgaaatggtaaatg

SEQ ID NO: 1943741 - DNA, 15 bp, Homo sapiens
tgaaatggtaaatga

SEQ ID NO: 1943742 - DNA, 15 bp, Homo sapiens
gaaatggtaaatgag

SEQ ID NO: 1943743 - DNA, 15 bp, Homo sapiens
aaatggtaaatgagc

SEQ ID NO: 1943744 - DNA, 15 bp, Homo sapiens
aatggtaaatgagca

SEQ ID NO: 1943745 - DNA, 15 bp, Homo sapiens
atggtaaatgagcac

SEQ ID NO: 1943746 - DNA, 15 bp, Homo sapiens
tggtaaatgagcact

SEQ ID NO: 1943747 - DNA, 15 bp, Homo sapiens
ggtaaatgagcactg

SEQ ID NO: 1943748 - DNA, 15 bp, Homo sapiens
gtaaatgagcactgg

SEQ ID NO: 1943749 - DNA, 15 bp, Homo sapiens
taaatgagcactggc

SEQ ID NO: 1943750 - DNA, 15 bp, Homo sapiens
aaatgagcactggct

SEQ ID NO: 1943751 - DNA, 15 bp, Homo sapiens
aatgagcactggctt

SEQ ID NO: 1943752 - DNA, 15 bp, Homo sapiens
atgagcactggcttc

SEQ ID NO: 1943753 - DNA, 15 bp, Homo sapiens
tgagcactggcttca

SEQ ID NO: 1943754 - DNA, 15 bp, Homo sapiens
gagcactggcttcag

SEQ ID NO: 1943755 - DNA, 15 bp, Homo sapiens
agcactggcttcagc

SEQ ID NO: 1943756 - DNA, 15 bp, Homo sapiens
gcactggcttcagct

SEQ ID NO: 1943757 - DNA, 15 bp, Homo sapiens
cactggcttcagctt

SEQ ID NO: 1943758 - DNA, 15 bp, Homo sapiens
actggcttcagctta

SEQ ID NO: 1943759 - DNA, 15 bp, Homo sapiens
ctggcttcagcttaa

SEQ ID NO: 1943760 - DNA, 15 bp, Homo sapiens
tggcttcagcttaaa

SEQ ID NO: 1943761 - DNA, 15 bp, Homo sapiens
ggcttcagcttaaag

SEQ ID NO: 1943762 - DNA, 15 bp, Homo sapiens
gcttcagcttaaagt

SEQ ID NO: 1943763 - DNA, 15 bp, Homo sapiens
cttcagcttaaagtc

SEQ ID NO: 1943764 - DNA, 15 bp, Homo sapiens
ttcagcttaaagtca

SEQ ID NO: 1943765 - DNA, 15 bp, Homo sapiens
tcagcttaaagtcac

SEQ ID NO: 1943766 - DNA, 15 bp, Homo sapiens
cagcttaaagtcacc

SEQ ID NO: 1943767 - DNA, 15 bp, Homo sapiens
agcttaaagtcacca

SEQ ID NO: 1943768 - DNA, 15 bp, Homo sapiens
gcttaaagtcaccag

SEQ ID NO: 1943769 - DNA, 15 bp, Homo sapiens
cttaaagtcaccagc

SEQ ID NO: 1943770 - DNA, 15 bp, Homo sapiens
ttaaagtcaccagct

SEQ ID NO: 1943771 - DNA, 15 bp, Homo sapiens
taaagtcaccagcta

SEQ ID NO: 1943772 - DNA, 15 bp, Homo sapiens
aaagtcaccagctac

SEQ ID NO: 1943773 - DNA, 15 bp, Homo sapiens
aagtcaccagctaca

SEQ ID NO: 1943774 - DNA, 15 bp, Homo sapiens
agtcaccagctacac

SEQ ID NO: 1943775 - DNA, 15 bp, Homo sapiens
gtcaccagctacact

SEQ ID NO: 1943776 - DNA, 15 bp, Homo sapiens
tcaccagctacacta

SEQ ID NO: 1943777 - DNA, 15 bp, Homo sapiens
caccagctacactag

SEQ ID NO: 1943778 - DNA, 15 bp, Homo sapiens
accagctacactagc

SEQ ID NO: 1943779 - DNA, 15 bp, Homo sapiens
ccagctacactagcc

SEQ ID NO: 1943780 - DNA, 15 bp, Homo sapiens
cagctacactagcct

SEQ ID NO: 1943781 - DNA, 15 bp, Homo sapiens
agctacactagcctc

SEQ ID NO: 1943782 - DNA, 15 bp, Homo sapiens
gctacactagcctct

SEQ ID NO: 1943783 - DNA, 15 bp, Homo sapiens
ctacactagcctcta

SEQ ID NO: 1943784 - DNA, 15 bp, Homo sapiens
tacactagcctctaa

SEQ ID NO: 1943785 - DNA, 15 bp, Homo sapiens
acactagcctctaac

SEQ ID NO: 1943786 - DNA, 15 bp, Homo sapiens
cactagcctctaaca

SEQ ID NO: 1943787 - DNA, 15 bp, Homo sapiens
actagcctctaacaa

SEQ ID NO: 1943788 - DNA, 15 bp, Homo sapiens
ctagcctctaacaag

SEQ ID NO: 1943789 - DNA, 15 bp, Homo sapiens
tagcctctaacaaga

SEQ ID NO: 1943790 - DNA, 15 bp, Homo sapiens
agcctctaacaagag

SEQ ID NO: 1943791 - DNA, 15 bp, Homo sapiens
gcctctaacaagagt

SEQ ID NO: 1943792 - DNA, 15 bp, Homo sapiens
cctctaacaagagtc

SEQ ID NO: 1943793 - DNA, 15 bp, Homo sapiens
ctctaacaagagtca

SEQ ID NO: 1943794 - DNA, 15 bp, Homo sapiens
tctaacaagagtcag

SEQ ID NO: 1943795 - DNA, 15 bp, Homo sapiens
ctaacaagagtcagc

SEQ ID NO: 1943796 - DNA, 15 bp, Homo sapiens
taacaagagtcagcc

SEQ ID NO: 1943797 - DNA, 15 bp, Homo sapiens
aacaagagtcagcct

SEQ ID NO: 1943798 - DNA, 15 bp, Homo sapiens
acaagagtcagcctg

SEQ ID NO: 1943799 - DNA, 15 bp, Homo sapiens
caagagtcagcctgt

SEQ ID NO: 1943800 - DNA, 15 bp, Homo sapiens
aagagtcagcctgtt

SEQ ID NO: 1943801 - DNA, 15 bp, Homo sapiens
agagtcagcctgttc

SEQ ID NO: 1943802 - DNA, 15 bp, Homo sapiens
gagtcagcctgttct

SEQ ID NO: 1943803 - DNA, 15 bp, Homo sapiens
agtcagcctgttctt

SEQ ID NO: 1943804 - DNA, 15 bp, Homo sapiens
gtcagcctgttcttt

SEQ ID NO: 1943805 - DNA, 15 bp, Homo sapiens
tcagcctgttctttg

SEQ ID NO: 1943806 - DNA, 15 bp, Homo sapiens
cagcctgttctttga

SEQ ID NO: 1943807 - DNA, 15 bp, Homo sapiens
agcctgttctttgaa

SEQ ID NO: 1943808 - DNA, 15 bp, Homo sapiens
gcctgttctttgaaa

SEQ ID NO: 1943809 - DNA, 15 bp, Homo sapiens
cctgttctttgaaac

SEQ ID NO: 1943810 - DNA, 15 bp, Homo sapiens
ctgttctttgaaact

SEQ ID NO: 1943811 - DNA, 15 bp, Homo sapiens
tgttctttgaaactt

SEQ ID NO: 1943812 - DNA, 15 bp, Homo sapiens
gttctttgaaacttt

SEQ ID NO: 1943813 - DNA, 15 bp, Homo sapiens
ttctttgaaactttg

SEQ ID NO: 1943814 - DNA, 15 bp, Homo sapiens
tctttgaaactttga

SEQ ID NO: 1943815 - DNA, 15 bp, Homo sapiens
ctttgaaactttgaa

SEQ ID NO: 1943816 - DNA, 15 bp, Homo sapiens
tttgaaactttgaag

SEQ ID NO: 1943817 - DNA, 15 bp, Homo sapiens
ttgaaactttgaagc

SEQ ID NO: 1943818 - DNA, 15 bp, Homo sapiens
tgaaactttgaagcc

SEQ ID NO: 1943819 - DNA, 15 bp, Homo sapiens
gaaactttgaagcct

SEQ ID NO: 1943820 - DNA, 15 bp, Homo sapiens
aaactttgaagcctg

SEQ ID NO: 1943821 - DNA, 15 bp, Homo sapiens
aactttgaagcctgg

SEQ ID NO: 1943822 - DNA, 15 bp, Homo sapiens
actttgaagcctgga

SEQ ID NO: 1943823 - DNA, 15 bp, Homo sapiens
ctttgaagcctggac

SEQ ID NO: 1943824 - DNA, 15 bp, Homo sapiens
tttgaagcctggact

SEQ ID NO: 1943825 - DNA, 15 bp, Homo sapiens
ttgaagcctggactt

SEQ ID NO: 1943826 - DNA, 15 bp, Homo sapiens
tgaagcctggacttt

SEQ ID NO: 1943827 - DNA, 15 bp, Homo sapiens
gaagcctggacttta

SEQ ID NO: 1943828 - DNA, 15 bp, Homo sapiens
aagcctggactttat

SEQ ID NO: 1943829 - DNA, 15 bp, Homo sapiens
agcctggactttata

SEQ ID NO: 1943830 - DNA, 15 bp, Homo sapiens
gcctggactttatag

SEQ ID NO: 1943831 - DNA, 15 bp, Homo sapiens
cctggactttatagc

SEQ ID NO: 1943832 - DNA, 15 bp, Homo sapiens
ctggactttatagct

SEQ ID NO: 1943833 - DNA, 15 bp, Homo sapiens
tggactttatagcta

SEQ ID NO: 1943834 - DNA, 15 bp, Homo sapiens
ggactttatagctat

SEQ ID NO: 1943835 - DNA, 15 bp, Homo sapiens
gactttatagctatg

SEQ ID NO: 1943836 - DNA, 15 bp, Homo sapiens
ttatagctatgaaag

SEQ ID NO: 1943837 - DNA, 15 bp, Homo sapiens
tatagctatgaaagt

SEQ ID NO: 1943838 - DNA, 15 bp, Homo sapiens
atagctatgaaagtc

SEQ ID NO: 1943839 - DNA, 15 bp, Homo sapiens
tagctatgaaagtcc

SEQ ID NO: 1943840 - DNA, 15 bp, Homo sapiens
agctatgaaagtcct

SEQ ID NO: 1943841 - DNA, 15 bp, Homo sapiens
gctatgaaagtccta

SEQ ID NO: 1943842 - DNA, 15 bp, Homo sapiens
ctatgaaagtcctag

SEQ ID NO: 1943843 - DNA, 15 bp, Homo sapiens
tatgaaagtcctaga

SEQ ID NO: 1943844 - DNA, 15 bp, Homo sapiens
atgaaagtcctagat

SEQ ID NO: 1943845 - DNA, 15 bp, Homo sapiens
tgaaagtcctagatc

SEQ ID NO: 1943846 - DNA, 15 bp, Homo sapiens
gaaagtcctagatct

SEQ ID NO: 1943847 - DNA, 15 bp, Homo sapiens
aaagtcctagatctt

SEQ ID NO: 1943848 - DNA, 15 bp, Homo sapiens
aagtcctagatcttc

SEQ ID NO: 1943849 - DNA, 15 bp, Homo sapiens
agtcctagatcttct

SEQ ID NO: 1943850 - DNA, 15 bp, Homo sapiens
gtcctagatcttctt

SEQ ID NO: 1943851 - DNA, 15 bp, Homo sapiens
tcctagatcttcttc

SEQ ID NO: 1943852 - DNA, 15 bp, Homo sapiens
cctagatcttcttcc

SEQ ID NO: 1943853 - DNA, 15 bp, Homo sapiens
ctagatcttcttcca

SEQ ID NO: 1943854 - DNA, 15 bp, Homo sapiens
tagatcttcttccaa

SEQ ID NO: 1943855 - DNA, 15 bp, Homo sapiens
agatcttcttccaat

SEQ ID NO: 1943856 - DNA, 15 bp, Homo sapiens
gatcttcttccaata

SEQ ID NO: 1943857 - DNA, 15 bp, Homo sapiens
atcttcttccaatag

SEQ ID NO: 1943858 - DNA, 15 bp, Homo sapiens
tcttcttccaataga

SEQ ID NO: 1943859 - DNA, 15 bp, Homo sapiens
cttcttccaatagag

SEQ ID NO: 1943860 - DNA, 15 bp, Homo sapiens
ttcttccaatagagg

SEQ ID NO: 1943861 - DNA, 15 bp, Homo sapiens
tcttccaatagaggg

SEQ ID NO: 1943862 - DNA, 15 bp, Homo sapiens
cttccaatagagggc

SEQ ID NO: 1943863 - DNA, 15 bp, Homo sapiens
ttccaatagagggct

SEQ ID NO: 1943864 - DNA, 15 bp, Homo sapiens
tccaatagagggctg

SEQ ID NO: 1943865 - DNA, 15 bp, Homo sapiens
ccaatagagggctgt

SEQ ID NO: 1943866 - DNA, 15 bp, Homo sapiens
caatagagggctgtt

SEQ ID NO: 1943867 - DNA, 15 bp, Homo sapiens
aatagagggctgttt

SEQ ID NO: 1943868 - DNA, 15 bp, Homo sapiens
atagagggctgtttc

SEQ ID NO: 1943869 - DNA, 15 bp, Homo sapiens
tagagggctgtttca

SEQ ID NO: 1943870 - DNA, 15 bp, Homo sapiens
agagggctgtttcat

SEQ ID NO: 1943871 - DNA, 15 bp, Homo sapiens
gagggctgtttcatc

SEQ ID NO: 1943872 - DNA, 15 bp, Homo sapiens
agggctgtttcatcc

SEQ ID NO: 1943873 - DNA, 15 bp, Homo sapiens
gggctgtttcatcca

SEQ ID NO: 1943874 - DNA, 15 bp, Homo sapiens
ggctgtttcatccat

SEQ ID NO: 1943875 - DNA, 15 bp, Homo sapiens
gctgtttcatccatg

SEQ ID NO: 1943876 - DNA, 15 bp, Homo sapiens
ctgtttcatccatgg

SEQ ID NO: 1943877 - DNA, 15 bp, Homo sapiens
tgtttcatccatggt

SEQ ID NO: 1943878 - DNA, 15 bp, Homo sapiens
gtttcatccatggtg

SEQ ID NO: 1943879 - DNA, 15 bp, Homo sapiens
tttcatccatggtga

SEQ ID NO: 1943880 - DNA, 15 bp, Homo sapiens
ttcatccatggtgaa

SEQ ID NO: 1943881 - DNA, 15 bp, Homo sapiens
tcatccatggtgaaa

SEQ ID NO: 1943882 - DNA, 15 bp, Homo sapiens
catccatggtgaaaa

SEQ ID NO: 1943883 - DNA, 15 bp, Homo sapiens
atccatggtgaaaat

SEQ ID NO: 1943884 - DNA, 15 bp, Homo sapiens
tccatggtgaaaatc

SEQ ID NO: 1943885 - DNA, 15 bp, Homo sapiens
ccatggtgaaaatct

SEQ ID NO: 1943886 - DNA, 15 bp, Homo sapiens
catggtgaaaatctg

SEQ ID NO: 1943887 - DNA, 15 bp, Homo sapiens
atggtgaaaatctgt

SEQ ID NO: 1943888 - DNA, 15 bp, Homo sapiens
tggtgaaaatctgtt

SEQ ID NO: 1943889 - DNA, 15 bp, Homo sapiens
ggtgaaaatctgttg

SEQ ID NO: 1943890 - DNA, 15 bp, Homo sapiens
gtgaaaatctgttgt

SEQ ID NO: 1943891 - DNA, 15 bp, Homo sapiens
tgaaaatctgttgtt

SEQ ID NO: 1943892 - DNA, 15 bp, Homo sapiens
gaaaatctgttgttt

SEQ ID NO: 1943893 - DNA, 15 bp, Homo sapiens
aaaatctgttgttta

SEQ ID NO: 1943894 - DNA, 15 bp, Homo sapiens
aaatctgttgtttag

SEQ ID NO: 1943895 - DNA, 15 bp, Homo sapiens
aatctgttgtttagt

SEQ ID NO: 1943896 - DNA, 15 bp, Homo sapiens
atctgttgtttagtg

SEQ ID NO: 1943897 - DNA, 15 bp, Homo sapiens
tctgttgtttagtgt

SEQ ID NO: 1943898 - DNA, 15 bp, Homo sapiens
ctgttgtttagtgta

SEQ ID NO: 1943899 - DNA, 15 bp, Homo sapiens
tgttgtttagtgtag

SEQ ID NO: 1943900 - DNA, 15 bp, Homo sapiens
gttgtttagtgtagc

SEQ ID NO: 1943901 - DNA, 15 bp, Homo sapiens
ttgtttagtgtagcc

SEQ ID NO: 1943902 - DNA, 15 bp, Homo sapiens
tgtttagtgtagcca

SEQ ID NO: 1943903 - DNA, 15 bp, Homo sapiens
gtttagtgtagccac

SEQ ID NO: 1943904 - DNA, 15 bp, Homo sapiens
tttagtgtagccacc

SEQ ID NO: 1943905 - DNA, 15 bp, Homo sapiens
ttagtgtagccacct

SEQ ID NO: 1943906 - DNA, 15 bp, Homo sapiens
tagtgtagccacctt

SEQ ID NO: 1943907 - DNA, 15 bp, Homo sapiens
agtgtagccaccttt

SEQ ID NO: 1943908 - DNA, 15 bp, Homo sapiens
gtgtagccaccttta

SEQ ID NO: 1943909 - DNA, 15 bp, Homo sapiens
tgtagccacctttat

SEQ ID NO: 1943910 - DNA, 15 bp, Homo sapiens
gtagccacctttata

SEQ ID NO: 1943911 - DNA, 15 bp, Homo sapiens
tagccacctttataa

SEQ ID NO: 1943912 - DNA, 15 bp, Homo sapiens
agccacctttataaa

SEQ ID NO: 1943913 - DNA, 15 bp, Homo sapiens
gccacctttataaat

SEQ ID NO: 1943914 - DNA, 15 bp, Homo sapiens
ccacctttataaatt

SEQ ID NO: 1943915 - DNA, 15 bp, Homo sapiens
cacctttataaatta

SEQ ID NO: 1943916 - DNA, 15 bp, Homo sapiens
acctttataaattat

SEQ ID NO: 1943917 - DNA, 15 bp, Homo sapiens
cctttataaattatc

SEQ ID NO: 1943918 - DNA, 15 bp, Homo sapiens
ctttataaattatct

SEQ ID NO: 1943919 - DNA, 15 bp, Homo sapiens
tttataaattatcta

SEQ ID NO: 1943920 - DNA, 15 bp, Homo sapiens
ttataaattatctaa

SEQ ID NO: 1943921 - DNA, 15 bp, Homo sapiens
tataaattatctaag

SEQ ID NO: 1943922 - DNA, 15 bp, Homo sapiens
ataaattatctaagc

SEQ ID NO: 1943923 - DNA, 15 bp, Homo sapiens
taaattatctaagct

SEQ ID NO: 1943924 - DNA, 15 bp, Homo sapiens
aaattatctaagcta

SEQ ID NO: 1943925 - DNA, 15 bp, Homo sapiens
aattatctaagctag

SEQ ID NO: 1943926 - DNA, 15 bp, Homo sapiens
attatctaagctaga

SEQ ID NO: 1943927 - DNA, 15 bp, Homo sapiens
ttatctaagctagat

SEQ ID NO: 1943928 - DNA, 15 bp, Homo sapiens
tatctaagctagatc

SEQ ID NO: 1943929 - DNA, 15 bp, Homo sapiens
atctaagctagatct

SEQ ID NO: 1943930 - DNA, 15 bp, Homo sapiens
tctaagctagatctt

SEQ ID NO: 1943931 - DNA, 15 bp, Homo sapiens
ctaagctagatcttc

SEQ ID NO: 1943932 - DNA, 15 bp, Homo sapiens
taagctagatcttct

SEQ ID NO: 1943933 - DNA, 15 bp, Homo sapiens
aagctagatcttcta

SEQ ID NO: 1943934 - DNA, 15 bp, Homo sapiens
agctagatcttctag

SEQ ID NO: 1943935 - DNA, 15 bp, Homo sapiens
gctagatcttctaga

SEQ ID NO: 1943936 - DNA, 15 bp, Homo sapiens
ctagatcttctagat

SEQ ID NO: 1943937 - DNA, 15 bp, Homo sapiens
tagatcttctagata

SEQ ID NO: 1943938 - DNA, 15 bp, Homo sapiens
agatcttctagataa

SEQ ID NO: 1943939 - DNA, 15 bp, Homo sapiens
gatcttctagataac

SEQ ID NO: 1943940 - DNA, 15 bp, Homo sapiens
atcttctagataact

SEQ ID NO: 1943941 - DNA, 15 bp, Homo sapiens
tcttctagataactt

SEQ ID NO: 1943942 - DNA, 15 bp, Homo sapiens
cttctagataacttg

SEQ ID NO: 1943943 - DNA, 15 bp, Homo sapiens
ttctagataacttgc

SEQ ID NO: 1943944 - DNA, 15 bp, Homo sapiens
tctagataacttgca

SEQ ID NO: 1943945 - DNA, 15 bp, Homo sapiens
ctagataacttgcag

SEQ ID NO: 1943946 - DNA, 15 bp, Homo sapiens
tagataacttgcagc

SEQ ID NO: 1943947 - DNA, 15 bp, Homo sapiens
agataacttgcagct

SEQ ID NO: 1943948 - DNA, 15 bp, Homo sapiens
gataacttgcagctt

SEQ ID NO: 1943949 - DNA, 15 bp, Homo sapiens
ataacttgcagcttc

SEQ ID NO: 1943950 - DNA, 15 bp, Homo sapiens
taacttgcagcttct

SEQ ID NO: 1943951 - DNA, 15 bp, Homo sapiens
aacttgcagcttcta

SEQ ID NO: 1943952 - DNA, 15 bp, Homo sapiens
acttgcagcttctac

SEQ ID NO: 1943953 - DNA, 15 bp, Homo sapiens
cttgcagcttctaca

SEQ ID NO: 1943954 - DNA, 15 bp, Homo sapiens
ttgcagcttctacat

SEQ ID NO: 1943955 - DNA, 15 bp, Homo sapiens
tgcagcttctacatg

SEQ ID NO: 1943956 - DNA, 15 bp, Homo sapiens
gcagcttctacatga

SEQ ID NO: 1943957 - DNA, 15 bp, Homo sapiens
cagcttctacatgag

SEQ ID NO: 1943958 - DNA, 15 bp, Homo sapiens
agcttctacatgagc

SEQ ID NO: 1943959 - DNA, 15 bp, Homo sapiens
gcttctacatgagca

SEQ ID NO: 1943960 - DNA, 15 bp, Homo sapiens
cttctacatgagcac

SEQ ID NO: 1943961 - DNA, 15 bp, Homo sapiens
ttctacatgagcact

SEQ ID NO: 1943962 - DNA, 15 bp, Homo sapiens
tctacatgagcactt

SEQ ID NO: 1943963 - DNA, 15 bp, Homo sapiens
ctacatgagcacttg

SEQ ID NO: 1943964 - DNA, 15 bp, Homo sapiens
tacatgagcacttgc

SEQ ID NO: 1943965 - DNA, 15 bp, Homo sapiens
acatgagcacttgct

SEQ ID NO: 1943966 - DNA, 15 bp, Homo sapiens
catgagcacttgctg

SEQ ID NO: 1943967 - DNA, 15 bp, Homo sapiens
atgagcacttgctgc

SEQ ID NO: 1943968 - DNA, 15 bp, Homo sapiens
tgagcacttgctgct

SEQ ID NO: 1943969 - DNA, 15 bp, Homo sapiens
gagcacttgctgctt

SEQ ID NO: 1943970 - DNA, 15 bp, Homo sapiens
agcacttgctgcttc

SEQ ID NO: 1943971 - DNA, 15 bp, Homo sapiens
gcacttgctgcttca

SEQ ID NO: 1943972 - DNA, 15 bp, Homo sapiens
cacttgctgcttcac

SEQ ID NO: 1943973 - DNA, 15 bp, Homo sapiens
acttgctgcttcact

SEQ ID NO: 1943974 - DNA, 15 bp, Homo sapiens
cttgctgcttcactt

SEQ ID NO: 1943975 - DNA, 15 bp, Homo sapiens
ttgctgcttcacttt

SEQ ID NO: 1943976 - DNA, 15 bp, Homo sapiens
gctgcttcactttgc

SEQ ID NO: 1943977 - DNA, 15 bp, Homo sapiens
ctgcttcactttgca

SEQ ID NO: 1943978 - DNA, 15 bp, Homo sapiens
tgcttcactttgcac

SEQ ID NO: 1943979 - DNA, 15 bp, Homo sapiens
gcttcactttgcact

SEQ ID NO: 1943980 - DNA, 15 bp, Homo sapiens
cttcactttgcactt

SEQ ID NO: 1943981 - DNA, 15 bp, Homo sapiens
ttcactttgcacttt

SEQ ID NO: 1943982 - DNA, 15 bp, Homo sapiens
tcactttgcactttt

SEQ ID NO: 1943983 - DNA, 15 bp, Homo sapiens
cactttgcacttttt

SEQ ID NO: 1943984 - DNA, 15 bp, Homo sapiens
actttgcactttttt

SEQ ID NO: 1943985 - DNA, 15 bp, Homo sapiens
ctttgcacttttttt

SEQ ID NO: 1943986 - DNA, 15 bp, Homo sapiens
tttgcactttttttt

SEQ ID NO: 1943987 - DNA, 15 bp, Homo sapiens
ttgcacttttttttt

SEQ ID NO: 1943988 - DNA, 15 bp, Homo sapiens
tgcactttttttttc

SEQ ID NO: 1943989 - DNA, 15 bp, Homo sapiens
gcactttttttttct

SEQ ID NO: 1943990 - DNA, 15 bp, Homo sapiens
cactttttttttctt

SEQ ID NO: 1943991 - DNA, 15 bp, Homo sapiens
actttttttttcttt

SEQ ID NO: 1943992 - DNA, 15 bp, Homo sapiens
ctttttttttctttt

SEQ ID NO: 1943993 - DNA, 15 bp, Homo sapiens
tttctttttgagaca

SEQ ID NO: 1943994 - DNA, 15 bp, Homo sapiens
ttctttttgagacaa

SEQ ID NO: 1943995 - DNA, 15 bp, Homo sapiens
tctttttgagacaag

SEQ ID NO: 1943996 - DNA, 15 bp, Homo sapiens
ctttttgagacaagg

SEQ ID NO: 1943997 - DNA, 15 bp, Homo sapiens
tttttgagacaaggt

SEQ ID NO: 1943998 - DNA, 15 bp, Homo sapiens
ttttgagacaaggtc

SEQ ID NO: 1943999 - DNA, 15 bp, Homo sapiens
tttgagacaaggtct

SEQ ID NO: 1944000 - DNA, 15 bp, Homo sapiens
ttgagacaaggtctg

SEQ ID NO: 1944001 - DNA, 15 bp, Homo sapiens
tgagacaaggtctgg

SEQ ID NO: 1944002 - DNA, 15 bp, Homo sapiens
gagacaaggtctggc

SEQ ID NO: 1944003 - DNA, 15 bp, Homo sapiens
agacaaggtctggct

SEQ ID NO: 1944004 - DNA, 15 bp, Homo sapiens
gacaaggtctggctg

SEQ ID NO: 1944005 - DNA, 15 bp, Homo sapiens
acaaggtctggctgt

SEQ ID NO: 1944006 - DNA, 15 bp, Homo sapiens
caaggtctggctgtc

SEQ ID NO: 1944007 - DNA, 15 bp, Homo sapiens
aaggtctggctgtca

SEQ ID NO: 1944008 - DNA, 15 bp, Homo sapiens
aggtctggctgtcac

SEQ ID NO: 1944009 - DNA, 15 bp, Homo sapiens
ggtctggctgtcacc

SEQ ID NO: 1944010 - DNA, 15 bp, Homo sapiens
gtctggctgtcaccc

SEQ ID NO: 1944011 - DNA, 15 bp, Homo sapiens
tctggctgtcaccca

SEQ ID NO: 1944012 - DNA, 15 bp, Homo sapiens
ctggctgtcacccag

SEQ ID NO: 1944013 - DNA, 15 bp, Homo sapiens
tggctgtcacccagg

SEQ ID NO: 1944014 - DNA, 15 bp, Homo sapiens
ggctgtcacccaggc

SEQ ID NO: 1944015 - DNA, 15 bp, Homo sapiens
agtggtgtgatctct

SEQ ID NO: 1944016 - DNA, 15 bp, Homo sapiens
gtggtgtgatctctg

SEQ ID NO: 1944017 - DNA, 15 bp, Homo sapiens
tggtgtgatctctgc

SEQ ID NO: 1944018 - DNA, 15 bp, Homo sapiens
ggtgtgatctctgct

SEQ ID NO: 1944019 - DNA, 15 bp, Homo sapiens
gtgtgatctctgctc

SEQ ID NO: 1944020 - DNA, 15 bp, Homo sapiens
tgtgatctctgctca

SEQ ID NO: 1944021 - DNA, 15 bp, Homo sapiens
gtgatctctgctcac

SEQ ID NO: 1944022 - DNA, 15 bp, Homo sapiens
tgatctctgctcact

SEQ ID NO: 1944023 - DNA, 15 bp, Homo sapiens
gatctctgctcacta

SEQ ID NO: 1944024 - DNA, 15 bp, Homo sapiens
atctctgctcactac

SEQ ID NO: 1944025 - DNA, 15 bp, Homo sapiens
tctctgctcactaca

SEQ ID NO: 1944026 - DNA, 15 bp, Homo sapiens
ctctgctcactacaa

SEQ ID NO: 1944027 - DNA, 15 bp, Homo sapiens
tctgctcactacaac

SEQ ID NO: 1944028 - DNA, 15 bp, Homo sapiens
ctgctcactacaacc

SEQ ID NO: 1944029 - DNA, 15 bp, Homo sapiens
tgctcactacaacct

SEQ ID NO: 1944030 - DNA, 15 bp, Homo sapiens
ctcactacaacctcc

SEQ ID NO: 1944031 - DNA, 15 bp, Homo sapiens
tcactacaacctcca

SEQ ID NO: 1944032 - DNA, 15 bp, Homo sapiens
cactacaacctccac

SEQ ID NO: 1944033 - DNA, 15 bp, Homo sapiens
actacaacctccacc

SEQ ID NO: 1944034 - DNA, 15 bp, Homo sapiens
ctacaacctccaccc

SEQ ID NO: 1944035 - DNA, 15 bp, Homo sapiens
tacaacctccacccc

SEQ ID NO: 1944036 - DNA, 15 bp, Homo sapiens
acaacctccacccca

SEQ ID NO: 1944037 - DNA, 15 bp, Homo sapiens
caacctccaccccaa

SEQ ID NO: 1944038 - DNA, 15 bp, Homo sapiens
aacctccaccccaag

SEQ ID NO: 1944039 - DNA, 15 bp, Homo sapiens
acctccaccccaagc

SEQ ID NO: 1944040 - DNA, 15 bp, Homo sapiens
cctccaccccaagct

SEQ ID NO: 1944041 - DNA, 15 bp, Homo sapiens
ctccaccccaagctc

SEQ ID NO: 1944042 - DNA, 15 bp, Homo sapiens
tccaccccaagctca

SEQ ID NO: 1944043 - DNA, 15 bp, Homo sapiens
ccaccccaagctcaa

SEQ ID NO: 1944044 - DNA, 15 bp, Homo sapiens
caccccaagctcaag

SEQ ID NO: 1944045 - DNA, 15 bp, Homo sapiens
accccaagctcaagc

SEQ ID NO: 1944046 - DNA, 15 bp, Homo sapiens
ccccaagctcaagcc

SEQ ID NO: 1944047 - DNA, 15 bp, Homo sapiens
cccaagctcaagcca

SEQ ID NO: 1944048 - DNA, 15 bp, Homo sapiens
ccaagctcaagccat

SEQ ID NO: 1944049 - DNA, 15 bp, Homo sapiens
caagctcaagccatc

SEQ ID NO: 1944050 - DNA, 15 bp, Homo sapiens
aagctcaagccatcc

SEQ ID NO: 1944051 - DNA, 15 bp, Homo sapiens
agctcaagccatcct

SEQ ID NO: 1944052 - DNA, 15 bp, Homo sapiens
gctcaagccatcctc

SEQ ID NO: 1944053 - DNA, 15 bp, Homo sapiens
ctcaagccatcctcc

SEQ ID NO: 1944054 - DNA, 15 bp, Homo sapiens
tcaagccatcctccc

SEQ ID NO: 1944055 - DNA, 15 bp, Homo sapiens
caagccatcctccca

SEQ ID NO: 1944056 - DNA, 15 bp, Homo sapiens
aagccatcctcccac

SEQ ID NO: 1944057 - DNA, 15 bp, Homo sapiens
agccatcctcccacc

SEQ ID NO: 1944058 - DNA, 15 bp, Homo sapiens
gccatcctcccacct

SEQ ID NO: 1944059 - DNA, 15 bp, Homo sapiens
gctaggactacaggt

SEQ ID NO: 1944060 - DNA, 15 bp, Homo sapiens
ctaggactacaggtg

SEQ ID NO: 1944061 - DNA, 15 bp, Homo sapiens
taggactacaggtgc

SEQ ID NO: 1944062 - DNA, 15 bp, Homo sapiens
aggactacaggtgca

SEQ ID NO: 1944063 - DNA, 15 bp, Homo sapiens
gactacaggtgcact

SEQ ID NO: 1944064 - DNA, 15 bp, Homo sapiens
actacaggtgcactc

SEQ ID NO: 1944065 - DNA, 15 bp, Homo sapiens
ctacaggtgcactct

SEQ ID NO: 1944066 - DNA, 15 bp, Homo sapiens
tacaggtgcactcta

SEQ ID NO: 1944067 - DNA, 15 bp, Homo sapiens
acaggtgcactctac

SEQ ID NO: 1944068 - DNA, 15 bp, Homo sapiens
caggtgcactctacc

SEQ ID NO: 1944069 - DNA, 15 bp, Homo sapiens
aggtgcactctacca

SEQ ID NO: 1944070 - DNA, 15 bp, Homo sapiens
ggtgcactctaccac

SEQ ID NO: 1944071 - DNA, 15 bp, Homo sapiens
gtgcactctaccaca

SEQ ID NO: 1944072 - DNA, 15 bp, Homo sapiens
tgcactctaccacac

SEQ ID NO: 1944073 - DNA, 15 bp, Homo sapiens
gcactctaccacacc

SEQ ID NO: 1944074 - DNA, 15 bp, Homo sapiens
cactctaccacacct

SEQ ID NO: 1944075 - DNA, 15 bp, Homo sapiens
actctaccacacctg

SEQ ID NO: 1944076 - DNA, 15 bp, Homo sapiens
ctctaccacacctgg

SEQ ID NO: 1944077 - DNA, 15 bp, Homo sapiens
tctaccacacctggc

SEQ ID NO: 1944078 - DNA, 15 bp, Homo sapiens
ctaccacacctggct

SEQ ID NO: 1944079 - DNA, 15 bp, Homo sapiens
taccacacctggcta

SEQ ID NO: 1944080 - DNA, 15 bp, Homo sapiens
cacacctggctaatg

SEQ ID NO: 1944081 - DNA, 15 bp, Homo sapiens
acacctggctaatgt

SEQ ID NO: 1944082 - DNA, 15 bp, Homo sapiens
cacctggctaatgtt

SEQ ID NO: 1944083 - DNA, 15 bp, Homo sapiens
cctggctaatgtttg

SEQ ID NO: 1944084 - DNA, 15 bp, Homo sapiens
ctggctaatgtttgt

SEQ ID NO: 1944085 - DNA, 15 bp, Homo sapiens
tggctaatgtttgta

SEQ ID NO: 1944086 - DNA, 15 bp, Homo sapiens
ggctaatgtttgtat

SEQ ID NO: 1944087 - DNA, 15 bp, Homo sapiens
gctaatgtttgtatt

SEQ ID NO: 1944088 - DNA, 15 bp, Homo sapiens
ctaatgtttgtattt

SEQ ID NO: 1944089 - DNA, 15 bp, Homo sapiens
taatgtttgtatttt

SEQ ID NO: 1944090 - DNA, 15 bp, Homo sapiens
aatgtttgtattttt

SEQ ID NO: 1944091 - DNA, 15 bp, Homo sapiens
atgtttgtatttttt

SEQ ID NO: 1944092 - DNA, 15 bp, Homo sapiens
tgtttgtattttttg

SEQ ID NO: 1944093 - DNA, 15 bp, Homo sapiens
gtttgtattttttgt

SEQ ID NO: 1944094 - DNA, 15 bp, Homo sapiens
ttgtattttttgtag

SEQ ID NO: 1944095 - DNA, 15 bp, Homo sapiens
tgtattttttgtaga

SEQ ID NO: 1944096 - DNA, 15 bp, Homo sapiens
gtattttttgtagag

SEQ ID NO: 1944097 - DNA, 15 bp, Homo sapiens
tgtagagatggggtt

SEQ ID NO: 1944098 - DNA, 15 bp, Homo sapiens
tagagatggggtttg

SEQ ID NO: 1944099 - DNA, 15 bp, Homo sapiens
agagatggggtttgg

SEQ ID NO: 1944100 - DNA, 15 bp, Homo sapiens
gagatggggtttggc

SEQ ID NO: 1944101 - DNA, 15 bp, Homo sapiens
agatggggtttggcc

SEQ ID NO: 1944102 - DNA, 15 bp, Homo sapiens
gatggggtttggcca

SEQ ID NO: 1944103 - DNA, 15 bp, Homo sapiens
atggggtttggccat

SEQ ID NO: 1944104 - DNA, 15 bp, Homo sapiens
tggggtttggccatg

SEQ ID NO: 1944105 - DNA, 15 bp, Homo sapiens
ggggtttggccatgt

SEQ ID NO: 1944106 - DNA, 15 bp, Homo sapiens
gggtttggccatgtt

SEQ ID NO: 1944107 - DNA, 15 bp, Homo sapiens
ggtttggccatgttt

SEQ ID NO: 1944108 - DNA, 15 bp, Homo sapiens
gtttggccatgtttc

SEQ ID NO: 1944109 - DNA, 15 bp, Homo sapiens
tttggccatgtttcc

SEQ ID NO: 1944110 - DNA, 15 bp, Homo sapiens
ttggccatgtttccc

SEQ ID NO: 1944111 - DNA, 15 bp, Homo sapiens
tggccatgtttccca

SEQ ID NO: 1944112 - DNA, 15 bp, Homo sapiens
ggccatgtttcccag

SEQ ID NO: 1944113 - DNA, 15 bp, Homo sapiens
gccatgtttcccagg

SEQ ID NO: 1944114 - DNA, 15 bp, Homo sapiens
gctggtcttgaattt

SEQ ID NO: 1944115 - DNA, 15 bp, Homo sapiens
ctggtcttgaatttg

SEQ ID NO: 1944116 - DNA, 15 bp, Homo sapiens
tggtcttgaatttgc

SEQ ID NO: 1944117 - DNA, 15 bp, Homo sapiens
ggtcttgaatttgct

SEQ ID NO: 1944118 - DNA, 15 bp, Homo sapiens
gtcttgaatttgctc

SEQ ID NO: 1944119 - DNA, 15 bp, Homo sapiens
tcttgaatttgctca

SEQ ID NO: 1944120 - DNA, 15 bp, Homo sapiens
cttgaatttgctcaa

SEQ ID NO: 1944121 - DNA, 15 bp, Homo sapiens
ttgaatttgctcaag

SEQ ID NO: 1944122 - DNA, 15 bp, Homo sapiens
tgaatttgctcaagt

SEQ ID NO: 1944123 - DNA, 15 bp, Homo sapiens
gaatttgctcaagtg

SEQ ID NO: 1944124 - DNA, 15 bp, Homo sapiens
aatttgctcaagtga

SEQ ID NO: 1944125 - DNA, 15 bp, Homo sapiens
atttgctcaagtgat

SEQ ID NO: 1944126 - DNA, 15 bp, Homo sapiens
tttgctcaagtgatc

SEQ ID NO: 1944127 - DNA, 15 bp, Homo sapiens
ttgctcaagtgatct

SEQ ID NO: 1944128 - DNA, 15 bp, Homo sapiens
tgctcaagtgatctg

SEQ ID NO: 1944129 - DNA, 15 bp, Homo sapiens
tcaagtgatctgcct

SEQ ID NO: 1944130 - DNA, 15 bp, Homo sapiens
caagtgatctgcctt

SEQ ID NO: 1944131 - DNA, 15 bp, Homo sapiens
aagtgatctgccttc

SEQ ID NO: 1944132 - DNA, 15 bp, Homo sapiens
agtgatctgccttct

SEQ ID NO: 1944133 - DNA, 15 bp, Homo sapiens
gtgatctgccttctt

SEQ ID NO: 1944134 - DNA, 15 bp, Homo sapiens
tgatctgccttcttc

SEQ ID NO: 1944135 - DNA, 15 bp, Homo sapiens
gatctgccttcttct

SEQ ID NO: 1944136 - DNA, 15 bp, Homo sapiens
atctgccttcttctc

SEQ ID NO: 1944137 - DNA, 15 bp, Homo sapiens
tctgccttcttctcc

SEQ ID NO: 1944138 - DNA, 15 bp, Homo sapiens
ctgccttcttctccc

SEQ ID NO: 1944139 - DNA, 15 bp, Homo sapiens
tgccttcttctccct

SEQ ID NO: 1944140 - DNA, 15 bp, Homo sapiens
gccttcttctccctt

SEQ ID NO: 1944141 - DNA, 15 bp, Homo sapiens
ccttcttctcccttc

SEQ ID NO: 1944142 - DNA, 15 bp, Homo sapiens
cttcttctcccttca

SEQ ID NO: 1944143 - DNA, 15 bp, Homo sapiens
ttcttctcccttcag

SEQ ID NO: 1944144 - DNA, 15 bp, Homo sapiens
tcttctcccttcaga

SEQ ID NO: 1944145 - DNA, 15 bp, Homo sapiens
cttctcccttcagaa

SEQ ID NO: 1944146 - DNA, 15 bp, Homo sapiens
ttctcccttcagaat

SEQ ID NO: 1944147 - DNA, 15 bp, Homo sapiens
tctcccttcagaatg

SEQ ID NO: 1944148 - DNA, 15 bp, Homo sapiens
ctcccttcagaatgc

SEQ ID NO: 1944149 - DNA, 15 bp, Homo sapiens
tcccttcagaatgct

SEQ ID NO: 1944150 - DNA, 15 bp, Homo sapiens
cccttcagaatgctg

SEQ ID NO: 1944151 - DNA, 15 bp, Homo sapiens
ccttcagaatgctgg

SEQ ID NO: 1944152 - DNA, 15 bp, Homo sapiens
cttcagaatgctggg

SEQ ID NO: 1944153 - DNA, 15 bp, Homo sapiens
ttcagaatgctggga

SEQ ID NO: 1944154 - DNA, 15 bp, Homo sapiens
tcagaatgctgggat

SEQ ID NO: 1944155 - DNA, 15 bp, Homo sapiens
cagaatgctgggatt

SEQ ID NO: 1944156 - DNA, 15 bp, Homo sapiens
agaatgctgggatta

SEQ ID NO: 1944157 - DNA, 15 bp, Homo sapiens
gaatgctgggattac

SEQ ID NO: 1944158 - DNA, 15 bp, Homo sapiens
accatgcccagccca

SEQ ID NO: 1944159 - DNA, 15 bp, Homo sapiens
ccatgcccagcccat

SEQ ID NO: 1944160 - DNA, 15 bp, Homo sapiens
catgcccagcccatt

SEQ ID NO: 1944161 - DNA, 15 bp, Homo sapiens
atgcccagcccattt

SEQ ID NO: 1944162 - DNA, 15 bp, Homo sapiens
tgcccagcccatttt

SEQ ID NO: 1944163 - DNA, 15 bp, Homo sapiens
gcccagcccattttg

SEQ ID NO: 1944164 - DNA, 15 bp, Homo sapiens
cccagcccattttgc

SEQ ID NO: 1944165 - DNA, 15 bp, Homo sapiens
ccagcccattttgca

SEQ ID NO: 1944166 - DNA, 15 bp, Homo sapiens
cagcccattttgcac

SEQ ID NO: 1944167 - DNA, 15 bp, Homo sapiens
agcccattttgcact

SEQ ID NO: 1944168 - DNA, 15 bp, Homo sapiens
gcccattttgcactt

SEQ ID NO: 1944169 - DNA, 15 bp, Homo sapiens
cccattttgcacttt

SEQ ID NO: 1944170 - DNA, 15 bp, Homo sapiens
ccattttgcactttt

SEQ ID NO: 1944171 - DNA, 15 bp, Homo sapiens
cattttgcactttta

SEQ ID NO: 1944172 - DNA, 15 bp, Homo sapiens
attttgcacttttat

SEQ ID NO: 1944173 - DNA, 15 bp, Homo sapiens
ttttgcacttttatg

SEQ ID NO: 1944174 - DNA, 15 bp, Homo sapiens
tttgcacttttatgt

SEQ ID NO: 1944175 - DNA, 15 bp, Homo sapiens
ttgcacttttatgtt

SEQ ID NO: 1944176 - DNA, 15 bp, Homo sapiens
tgcacttttatgtta

SEQ ID NO: 1944177 - DNA, 15 bp, Homo sapiens
gcacttttatgttat

SEQ ID NO: 1944178 - DNA, 15 bp, Homo sapiens
cacttttatgttatg

SEQ ID NO: 1944179 - DNA, 15 bp, Homo sapiens
acttttatgttatga

SEQ ID NO: 1944180 - DNA, 15 bp, Homo sapiens
cttttatgttatgaa

SEQ ID NO: 1944181 - DNA, 15 bp, Homo sapiens
ttttatgttatgaag

SEQ ID NO: 1944182 - DNA, 15 bp, Homo sapiens
tttatgttatgaaga

SEQ ID NO: 1944183 - DNA, 15 bp, Homo sapiens
ttatgttatgaagat

SEQ ID NO: 1944184 - DNA, 15 bp, Homo sapiens
tatgttatgaagatg

SEQ ID NO: 1944185 - DNA, 15 bp, Homo sapiens
atgttatgaagatgg

SEQ ID NO: 1944186 - DNA, 15 bp, Homo sapiens
tgttatgaagatggc

SEQ ID NO: 1944187 - DNA, 15 bp, Homo sapiens
gttatgaagatggct

SEQ ID NO: 1944188 - DNA, 15 bp, Homo sapiens
ttatgaagatggctt

SEQ ID NO: 1944189 - DNA, 15 bp, Homo sapiens
tatgaagatggcttc

SEQ ID NO: 1944190 - DNA, 15 bp, Homo sapiens
atgaagatggcttct

SEQ ID NO: 1944191 - DNA, 15 bp, Homo sapiens
tgaagatggcttctt

SEQ ID NO: 1944192 - DNA, 15 bp, Homo sapiens
gaagatggcttcttt

SEQ ID NO: 1944193 - DNA, 15 bp, Homo sapiens
aagatggcttctttt

SEQ ID NO: 1944194 - DNA, 15 bp, Homo sapiens
agatggcttcttttc

SEQ ID NO: 1944195 - DNA, 15 bp, Homo sapiens
gatggcttcttttct

SEQ ID NO: 1944196 - DNA, 15 bp, Homo sapiens
atggcttcttttctt

SEQ ID NO: 1944197 - DNA, 15 bp, Homo sapiens
tggcttcttttctta

SEQ ID NO: 1944198 - DNA, 15 bp, Homo sapiens
ggcttcttttcttaa

SEQ ID NO: 1944199 - DNA, 15 bp, Homo sapiens
gcttcttttcttaaa

SEQ ID NO: 1944200 - DNA, 15 bp, Homo sapiens
cttcttttcttaaac

SEQ ID NO: 1944201 - DNA, 15 bp, Homo sapiens
ttcttttcttaaacc

SEQ ID NO: 1944202 - DNA, 15 bp, Homo sapiens
tcttttcttaaacct

SEQ ID NO: 1944203 - DNA, 15 bp, Homo sapiens
cttttcttaaacctc

SEQ ID NO: 1944204 - DNA, 15 bp, Homo sapiens
ttttcttaaacctca

SEQ ID NO: 1944205 - DNA, 15 bp, Homo sapiens
tttcttaaacctcat

SEQ ID NO: 1944206 - DNA, 15 bp, Homo sapiens
ttcttaaacctcatg

SEQ ID NO: 1944207 - DNA, 15 bp, Homo sapiens
tcttaaacctcatga

SEQ ID NO: 1944208 - DNA, 15 bp, Homo sapiens
cttaaacctcatgaa

SEQ ID NO: 1944209 - DNA, 15 bp, Homo sapiens
ttaaacctcatgaat

SEQ ID NO: 1944210 - DNA, 15 bp, Homo sapiens
taaacctcatgaatg

SEQ ID NO: 1944211 - DNA, 15 bp, Homo sapiens
aaacctcatgaatga

SEQ ID NO: 1944212 - DNA, 15 bp, Homo sapiens
aacctcatgaatgaa

SEQ ID NO: 1944213 - DNA, 15 bp, Homo sapiens
acctcatgaatgaac

SEQ ID NO: 1944214 - DNA, 15 bp, Homo sapiens
cctcatgaatgaacc

SEQ ID NO: 1944215 - DNA, 15 bp, Homo sapiens
ctcatgaatgaacct

SEQ ID NO: 1944216 - DNA, 15 bp, Homo sapiens
tcatgaatgaacctc

SEQ ID NO: 1944217 - DNA, 15 bp, Homo sapiens
catgaatgaacctct

SEQ ID NO: 1944218 - DNA, 15 bp, Homo sapiens
atgaatgaacctctg

SEQ ID NO: 1944219 - DNA, 15 bp, Homo sapiens
tgaatgaacctctgt

SEQ ID NO: 1944220 - DNA, 15 bp, Homo sapiens
gaatgaacctctgtt

SEQ ID NO: 1944221 - DNA, 15 bp, Homo sapiens
aatgaacctctgtta

SEQ ID NO: 1944222 - DNA, 15 bp, Homo sapiens
atgaacctctgttag

SEQ ID NO: 1944223 - DNA, 15 bp, Homo sapiens
tgaacctctgttagc

SEQ ID NO: 1944224 - DNA, 15 bp, Homo sapiens
gaacctctgttagct

SEQ ID NO: 1944225 - DNA, 15 bp, Homo sapiens
aacctctgttagctt

SEQ ID NO: 1944226 - DNA, 15 bp, Homo sapiens
acctctgttagcttc

SEQ ID NO: 1944227 - DNA, 15 bp, Homo sapiens
cctctgttagcttct

SEQ ID NO: 1944228 - DNA, 15 bp, Homo sapiens
ctctgttagcttctg

SEQ ID NO: 1944229 - DNA, 15 bp, Homo sapiens
tctgttagcttctgt

SEQ ID NO: 1944230 - DNA, 15 bp, Homo sapiens
ctgttagcttctgta

SEQ ID NO: 1944231 - DNA, 15 bp, Homo sapiens
tgttagcttctgtag

SEQ ID NO: 1944232 - DNA, 15 bp, Homo sapiens
gttagcttctgtagc

SEQ ID NO: 1944233 - DNA, 15 bp, Homo sapiens
ttagcttctgtagct

SEQ ID NO: 1944234 - DNA, 15 bp, Homo sapiens
tagcttctgtagctt

SEQ ID NO: 1944235 - DNA, 15 bp, Homo sapiens
agcttctgtagcttc

SEQ ID NO: 1944236 - DNA, 15 bp, Homo sapiens
gcttctgtagcttcc

SEQ ID NO: 1944237 - DNA, 15 bp, Homo sapiens
cttctgtagcttcct

SEQ ID NO: 1944238 - DNA, 15 bp, Homo sapiens
ttctgtagcttcctc

SEQ ID NO: 1944239 - DNA, 15 bp, Homo sapiens
tctgtagcttcctca

SEQ ID NO: 1944240 - DNA, 15 bp, Homo sapiens
ctgtagcttcctcac

SEQ ID NO: 1944241 - DNA, 15 bp, Homo sapiens
tgtagcttcctcact

SEQ ID NO: 1944242 - DNA, 15 bp, Homo sapiens
gtagcttcctcactt

SEQ ID NO: 1944243 - DNA, 15 bp, Homo sapiens
tagcttcctcacttc

SEQ ID NO: 1944244 - DNA, 15 bp, Homo sapiens
agcttcctcacttct

SEQ ID NO: 1944245 - DNA, 15 bp, Homo sapiens
gcttcctcacttctg

SEQ ID NO: 1944246 - DNA, 15 bp, Homo sapiens
cttcctcacttctgg

SEQ ID NO: 1944247 - DNA, 15 bp, Homo sapiens
ttcctcacttctggc

SEQ ID NO: 1944248 - DNA, 15 bp, Homo sapiens
tcctcacttctggca

SEQ ID NO: 1944249 - DNA, 15 bp, Homo sapiens
cctcacttctggcag

SEQ ID NO: 1944250 - DNA, 15 bp, Homo sapiens
ctcacttctggcagc

SEQ ID NO: 1944251 - DNA, 15 bp, Homo sapiens
tcacttctggcagcc

SEQ ID NO: 1944252 - DNA, 15 bp, Homo sapiens
cacttctggcagcct

SEQ ID NO: 1944253 - DNA, 15 bp, Homo sapiens
acttctggcagcctt

SEQ ID NO: 1944254 - DNA, 15 bp, Homo sapiens
cttctggcagccttc

SEQ ID NO: 1944255 - DNA, 15 bp, Homo sapiens
ttctggcagccttca

SEQ ID NO: 1944256 - DNA, 15 bp, Homo sapiens
tctggcagccttcat

SEQ ID NO: 1944257 - DNA, 15 bp, Homo sapiens
ctggcagccttcata

SEQ ID NO: 1944258 - DNA, 15 bp, Homo sapiens
tggcagccttcataa

SEQ ID NO: 1944259 - DNA, 15 bp, Homo sapiens
ggcagccttcataaa

SEQ ID NO: 1944260 - DNA, 15 bp, Homo sapiens
gcagccttcataaaa

SEQ ID NO: 1944261 - DNA, 15 bp, Homo sapiens
cagccttcataaaat

SEQ ID NO: 1944262 - DNA, 15 bp, Homo sapiens
agccttcataaaatt

SEQ ID NO: 1944263 - DNA, 15 bp, Homo sapiens
gccttcataaaatta

SEQ ID NO: 1944264 - DNA, 15 bp, Homo sapiens
ccttcataaaattaa

SEQ ID NO: 1944265 - DNA, 15 bp, Homo sapiens
cttcataaaattaaa

SEQ ID NO: 1944266 - DNA, 15 bp, Homo sapiens
ttcataaaattaaag

SEQ ID NO: 1944267 - DNA, 15 bp, Homo sapiens
tcataaaattaaaga

SEQ ID NO: 1944268 - DNA, 15 bp, Homo sapiens
cataaaattaaagag

SEQ ID NO: 1944269 - DNA, 15 bp, Homo sapiens
ataaaattaaagagg

SEQ ID NO: 1944270 - DNA, 15 bp, Homo sapiens
taaaattaaagaggg

SEQ ID NO: 1944271 - DNA, 15 bp, Homo sapiens
aaaattaaagagggt

SEQ ID NO: 1944272 - DNA, 15 bp, Homo sapiens
aaattaaagagggta

SEQ ID NO: 1944273 - DNA, 15 bp, Homo sapiens
aattaaagagggtag

SEQ ID NO: 1944274 - DNA, 15 bp, Homo sapiens
attaaagagggtaga

SEQ ID NO: 1944275 - DNA, 15 bp, Homo sapiens
ttaaagagggtagag

SEQ ID NO: 1944276 - DNA, 15 bp, Homo sapiens
taaagagggtagagc

SEQ ID NO: 1944277 - DNA, 15 bp, Homo sapiens
aaagagggtagagca

SEQ ID NO: 1944278 - DNA, 15 bp, Homo sapiens
aagagggtagagcat

SEQ ID NO: 1944279 - DNA, 15 bp, Homo sapiens
agagggtagagcatt

SEQ ID NO: 1944280 - DNA, 15 bp, Homo sapiens
gagggtagagcattg

SEQ ID NO: 1944281 - DNA, 15 bp, Homo sapiens
agggtagagcattgc

SEQ ID NO: 1944282 - DNA, 15 bp, Homo sapiens
gggtagagcattgct

SEQ ID NO: 1944283 - DNA, 15 bp, Homo sapiens
ggtagagcattgctc

SEQ ID NO: 1944284 - DNA, 15 bp, Homo sapiens
gtagagcattgctct

SEQ ID NO: 1944285 - DNA, 15 bp, Homo sapiens
tagagcattgctctg

SEQ ID NO: 1944286 - DNA, 15 bp, Homo sapiens
agagcattgctctgg

SEQ ID NO: 1944287 - DNA, 15 bp, Homo sapiens
gagcattgctctgga

SEQ ID NO: 1944288 - DNA, 15 bp, Homo sapiens
agcattgctctggat

SEQ ID NO: 1944289 - DNA, 15 bp, Homo sapiens
gcattgctctggatt

SEQ ID NO: 1944290 - DNA, 15 bp, Homo sapiens
cattgctctggatta

SEQ ID NO: 1944291 - DNA, 15 bp, Homo sapiens
attgctctggattag

SEQ ID NO: 1944292 - DNA, 15 bp, Homo sapiens
ttgctctggattagg

SEQ ID NO: 1944293 - DNA, 15 bp, Homo sapiens
tgctctggattaggc

SEQ ID NO: 1944294 - DNA, 15 bp, Homo sapiens
gctctggattaggct

SEQ ID NO: 1944295 - DNA, 15 bp, Homo sapiens
ctctggattaggctt

SEQ ID NO: 1944296 - DNA, 15 bp, Homo sapiens
tctggattaggcttt

SEQ ID NO: 1944297 - DNA, 15 bp, Homo sapiens
ctggattaggctttg

SEQ ID NO: 1944298 - DNA, 15 bp, Homo sapiens
tggattaggctttgg

SEQ ID NO: 1944299 - DNA, 15 bp, Homo sapiens
ggattaggctttggc

SEQ ID NO: 1944300 - DNA, 15 bp, Homo sapiens
gattaggctttggct

SEQ ID NO: 1944301 - DNA, 15 bp, Homo sapiens
attaggctttggctt

SEQ ID NO: 1944302 - DNA, 15 bp, Homo sapiens
ttaggctttggctta

SEQ ID NO: 1944303 - DNA, 15 bp, Homo sapiens
taggctttggcttaa

SEQ ID NO: 1944304 - DNA, 15 bp, Homo sapiens
aggctttggcttaaa

SEQ ID NO: 1944305 - DNA, 15 bp, Homo sapiens
ggctttggcttaaag

SEQ ID NO: 1944306 - DNA, 15 bp, Homo sapiens
gctttggcttaaaga

SEQ ID NO: 1944307 - DNA, 15 bp, Homo sapiens
ctttggcttaaagaa

SEQ ID NO: 1944308 - DNA, 15 bp, Homo sapiens
tttggcttaaagaaa

SEQ ID NO: 1944309 - DNA, 15 bp, Homo sapiens
ttggcttaaagaaat

SEQ ID NO: 1944310 - DNA, 15 bp, Homo sapiens
tggcttaaagaaatg

SEQ ID NO: 1944311 - DNA, 15 bp, Homo sapiens
ggcttaaagaaatgt

SEQ ID NO: 1944312 - DNA, 15 bp, Homo sapiens
gcttaaagaaatgtt

SEQ ID NO: 1944313 - DNA, 15 bp, Homo sapiens
cttaaagaaatgttg

SEQ ID NO: 1944314 - DNA, 15 bp, Homo sapiens
ttaaagaaatgttgt

SEQ ID NO: 1944315 - DNA, 15 bp, Homo sapiens
taaagaaatgttgtg

SEQ ID NO: 1944316 - DNA, 15 bp, Homo sapiens
aaagaaatgttgtgg

SEQ ID NO: 1944317 - DNA, 15 bp, Homo sapiens
aagaaatgttgtggc

SEQ ID NO: 1944318 - DNA, 15 bp, Homo sapiens
agaaatgttgtggct

SEQ ID NO: 1944319 - DNA, 15 bp, Homo sapiens
gaaatgttgtggctg

SEQ ID NO: 1944320 - DNA, 15 bp, Homo sapiens
aaatgttgtggctgg

SEQ ID NO: 1944321 - DNA, 15 bp, Homo sapiens
aatgttgtggctggt

SEQ ID NO: 1944322 - DNA, 15 bp, Homo sapiens
atgttgtggctggtt

SEQ ID NO: 1944323 - DNA, 15 bp, Homo sapiens
tgttgtggctggttt

SEQ ID NO: 1944324 - DNA, 15 bp, Homo sapiens
gttgtggctggtttg

SEQ ID NO: 1944325 - DNA, 15 bp, Homo sapiens
ttgtggctggtttga

SEQ ID NO: 1944326 - DNA, 15 bp, Homo sapiens
tgtggctggtttgat

SEQ ID NO: 1944327 - DNA, 15 bp, Homo sapiens
gtggctggtttgatc

SEQ ID NO: 1944328 - DNA, 15 bp, Homo sapiens
tggctggtttgatcc

SEQ ID NO: 1944329 - DNA, 15 bp, Homo sapiens
ggctggtttgatcct

SEQ ID NO: 1944330 - DNA, 15 bp, Homo sapiens
gctggtttgatcctc

SEQ ID NO: 1944331 - DNA, 15 bp, Homo sapiens
ctggtttgatcctct

SEQ ID NO: 1944332 - DNA, 15 bp, Homo sapiens
tggtttgatcctcta

SEQ ID NO: 1944333 - DNA, 15 bp, Homo sapiens
ggtttgatcctctat

SEQ ID NO: 1944334 - DNA, 15 bp, Homo sapiens
gtttgatcctctatc

SEQ ID NO: 1944335 - DNA, 15 bp, Homo sapiens
tttgatcctctatcc

SEQ ID NO: 1944336 - DNA, 15 bp, Homo sapiens
ttgatcctctatcca

SEQ ID NO: 1944337 - DNA, 15 bp, Homo sapiens
tgatcctctatccag

SEQ ID NO: 1944338 - DNA, 15 bp, Homo sapiens
gatcctctatccaga

SEQ ID NO: 1944339 - DNA, 15 bp, Homo sapiens
atcctctatccagac

SEQ ID NO: 1944340 - DNA, 15 bp, Homo sapiens
tcctctatccagacc

SEQ ID NO: 1944341 - DNA, 15 bp, Homo sapiens
cctctatccagacca

SEQ ID NO: 1944342 - DNA, 15 bp, Homo sapiens
ctctatccagaccac

SEQ ID NO: 1944343 - DNA, 15 bp, Homo sapiens
tctatccagaccact

SEQ ID NO: 1944344 - DNA, 15 bp, Homo sapiens
ctatccagaccacta

SEQ ID NO: 1944345 - DNA, 15 bp, Homo sapiens
tatccagaccactaa

SEQ ID NO: 1944346 - DNA, 15 bp, Homo sapiens
atccagaccactaaa

SEQ ID NO: 1944347 - DNA, 15 bp, Homo sapiens
tccagaccactaaac

SEQ ID NO: 1944348 - DNA, 15 bp, Homo sapiens
ccagaccactaaacc

SEQ ID NO: 1944349 - DNA, 15 bp, Homo sapiens
cagaccactaaacct

SEQ ID NO: 1944350 - DNA, 15 bp, Homo sapiens
agaccactaaacctt

SEQ ID NO: 1944351 - DNA, 15 bp, Homo sapiens
gaccactaaaccttt

SEQ ID NO: 1944352 - DNA, 15 bp, Homo sapiens
accactaaacctttc

SEQ ID NO: 1944353 - DNA, 15 bp, Homo sapiens
ccactaaacctttct

SEQ ID NO: 1944354 - DNA, 15 bp, Homo sapiens
cactaaacctttctc

SEQ ID NO: 1944355 - DNA, 15 bp, Homo sapiens
actaaacctttctcc

SEQ ID NO: 1944356 - DNA, 15 bp, Homo sapiens
ctaaacctttctcca

SEQ ID NO: 1944357 - DNA, 15 bp, Homo sapiens
taaacctttctccat

SEQ ID NO: 1944358 - DNA, 15 bp, Homo sapiens
aaacctttctccata

SEQ ID NO: 1944359 - DNA, 15 bp, Homo sapiens
aacctttctccatat

SEQ ID NO: 1944360 - DNA, 15 bp, Homo sapiens
acctttctccatatc

SEQ ID NO: 1944361 - DNA, 15 bp, Homo sapiens
cctttctccatatca

SEQ ID NO: 1944362 - DNA, 15 bp, Homo sapiens
ctttctccatatcag

SEQ ID NO: 1944363 - DNA, 15 bp, Homo sapiens
tttctccatatcagc

SEQ ID NO: 1944364 - DNA, 15 bp, Homo sapiens
ttctccatatcagca

SEQ ID NO: 1944365 - DNA, 15 bp, Homo sapiens
tctccatatcagcaa

SEQ ID NO: 1944366 - DNA, 15 bp, Homo sapiens
ctccatatcagcaat

SEQ ID NO: 1944367 - DNA, 15 bp, Homo sapiens
tccatatcagcaata

SEQ ID NO: 1944368 - DNA, 15 bp, Homo sapiens
ccatatcagcaataa

SEQ ID NO: 1944369 - DNA, 15 bp, Homo sapiens
catatcagcaataag

SEQ ID NO: 1944370 - DNA, 15 bp, Homo sapiens
atatcagcaataagg

SEQ ID NO: 1944371 - DNA, 15 bp, Homo sapiens
tatcagcaataaggc

SEQ ID NO: 1944372 - DNA, 15 bp, Homo sapiens
atcagcaataaggct

SEQ ID NO: 1944373 - DNA, 15 bp, Homo sapiens
tcagcaataaggctg

SEQ ID NO: 1944374 - DNA, 15 bp, Homo sapiens
cagcaataaggctgt

SEQ ID NO: 1944375 - DNA, 15 bp, Homo sapiens
agcaataaggctgtt

SEQ ID NO: 1944376 - DNA, 15 bp, Homo sapiens
gcaataaggctgttt

SEQ ID NO: 1944377 - DNA, 15 bp, Homo sapiens
caataaggctgtttc

SEQ ID NO: 1944378 - DNA, 15 bp, Homo sapiens
aataaggctgtttca

SEQ ID NO: 1944379 - DNA, 15 bp, Homo sapiens
ataaggctgtttcac

SEQ ID NO: 1944380 - DNA, 15 bp, Homo sapiens
taaggctgtttcact

SEQ ID NO: 1944381 - DNA, 15 bp, Homo sapiens
aaggctgtttcactt

SEQ ID NO: 1944382 - DNA, 15 bp, Homo sapiens
aggctgtttcacttt

SEQ ID NO: 1944383 - DNA, 15 bp, Homo sapiens
ggctgtttcactttc

SEQ ID NO: 1944384 - DNA, 15 bp, Homo sapiens
gctgtttcactttct

SEQ ID NO: 1944385 - DNA, 15 bp, Homo sapiens
ctgtttcactttctt

SEQ ID NO: 1944386 - DNA, 15 bp, Homo sapiens
tgtttcactttctta

SEQ ID NO: 1944387 - DNA, 15 bp, Homo sapiens
gtttcactttcttat

SEQ ID NO: 1944388 - DNA, 15 bp, Homo sapiens
tttcactttcttatc

SEQ ID NO: 1944389 - DNA, 15 bp, Homo sapiens
ttcactttcttatca

SEQ ID NO: 1944390 - DNA, 15 bp, Homo sapiens
tcactttcttatcat

SEQ ID NO: 1944391 - DNA, 15 bp, Homo sapiens
cactttcttatcatt

SEQ ID NO: 1944392 - DNA, 15 bp, Homo sapiens
actttcttatcattc

SEQ ID NO: 1944393 - DNA, 15 bp, Homo sapiens
ctttcttatcattcg

SEQ ID NO: 1944394 - DNA, 15 bp, Homo sapiens
tttcttatcattcgt

SEQ ID NO: 1944395 - DNA, 15 bp, Homo sapiens
ttcttatcattcgtg

SEQ ID NO: 1944396 - DNA, 15 bp, Homo sapiens
tcttatcattcgtgt

SEQ ID NO: 1944397 - DNA, 15 bp, Homo sapiens
cttatcattcgtgtg

SEQ ID NO: 1944398 - DNA, 15 bp, Homo sapiens
ttatcattcgtgtgt

SEQ ID NO: 1944399 - DNA, 15 bp, Homo sapiens
tatcattcgtgtgtt

SEQ ID NO: 1944400 - DNA, 15 bp, Homo sapiens
atcattcgtgtgttc

SEQ ID NO: 1944401 - DNA, 15 bp, Homo sapiens
tcattcgtgtgttca

SEQ ID NO: 1944402 - DNA, 15 bp, Homo sapiens
cattcgtgtgttcac

SEQ ID NO: 1944403 - DNA, 15 bp, Homo sapiens
attcgtgtgttcact

SEQ ID NO: 1944404 - DNA, 15 bp, Homo sapiens
ttcgtgtgttcacta

SEQ ID NO: 1944405 - DNA, 15 bp, Homo sapiens
tcgtgtgttcactag

SEQ ID NO: 1944406 - DNA, 15 bp, Homo sapiens
cgtgtgttcactaga

SEQ ID NO: 1944407 - DNA, 15 bp, Homo sapiens
gtgtgttcactagag

SEQ ID NO: 1944408 - DNA, 15 bp, Homo sapiens
tgtgttcactagagt

SEQ ID NO: 1944409 - DNA, 15 bp, Homo sapiens
gtgttcactagagta

SEQ ID NO: 1944410 - DNA, 15 bp, Homo sapiens
tgttcactagagtag

SEQ ID NO: 1944411 - DNA, 15 bp, Homo sapiens
gttcactagagtagc

SEQ ID NO: 1944412 - DNA, 15 bp, Homo sapiens
ttcactagagtagca

SEQ ID NO: 1944413 - DNA, 15 bp, Homo sapiens
tcactagagtagcac

SEQ ID NO: 1944414 - DNA, 15 bp, Homo sapiens
cactagagtagcact

SEQ ID NO: 1944415 - DNA, 15 bp, Homo sapiens
actagagtagcactt

SEQ ID NO: 1944416 - DNA, 15 bp, Homo sapiens
ctagagtagcacttt

SEQ ID NO: 1944417 - DNA, 15 bp, Homo sapiens
tagagtagcactttg

SEQ ID NO: 1944418 - DNA, 15 bp, Homo sapiens
agagtagcactttga

SEQ ID NO: 1944419 - DNA, 15 bp, Homo sapiens
gagtagcactttgaa

SEQ ID NO: 1944420 - DNA, 15 bp, Homo sapiens
agtagcactttgaat

SEQ ID NO: 1944421 - DNA, 15 bp, Homo sapiens
gtagcactttgaatt

SEQ ID NO: 1944422 - DNA, 15 bp, Homo sapiens
tagcactttgaattt

SEQ ID NO: 1944423 - DNA, 15 bp, Homo sapiens
agcactttgaatttt

SEQ ID NO: 1944424 - DNA, 15 bp, Homo sapiens
gcactttgaattttt

SEQ ID NO: 1944425 - DNA, 15 bp, Homo sapiens
cactttgaatttttt

SEQ ID NO: 1944426 - DNA, 15 bp, Homo sapiens
actttgaattttttt

SEQ ID NO: 1944427 - DNA, 15 bp, Homo sapiens
ctttgaatttttttg

SEQ ID NO: 1944428 - DNA, 15 bp, Homo sapiens
tttgaatttttttgc

SEQ ID NO: 1944429 - DNA, 15 bp, Homo sapiens
ttgaatttttttgca

SEQ ID NO: 1944430 - DNA, 15 bp, Homo sapiens
tgaatttttttgcag

SEQ ID NO: 1944431 - DNA, 15 bp, Homo sapiens
gaatttttttgcaga

SEQ ID NO: 1944432 - DNA, 15 bp, Homo sapiens
aatttttttgcagaa

SEQ ID NO: 1944433 - DNA, 15 bp, Homo sapiens
atttttttgcagaag

SEQ ID NO: 1944434 - DNA, 15 bp, Homo sapiens
tttttttgcagaagc

SEQ ID NO: 1944435 - DNA, 15 bp, Homo sapiens
ttttttgcagaagct

SEQ ID NO: 1944436 - DNA, 15 bp, Homo sapiens
tttttgcagaagctt

SEQ ID NO: 1944437 - DNA, 15 bp, Homo sapiens
ttttgcagaagcttt

SEQ ID NO: 1944438 - DNA, 15 bp, Homo sapiens
tttgcagaagctttt

SEQ ID NO: 1944439 - DNA, 15 bp, Homo sapiens
ttgcagaagcttttc

SEQ ID NO: 1944440 - DNA, 15 bp, Homo sapiens
tgcagaagcttttcc

SEQ ID NO: 1944441 - DNA, 15 bp, Homo sapiens
gcagaagcttttcct

SEQ ID NO: 1944442 - DNA, 15 bp, Homo sapiens
cagaagcttttcctc

SEQ ID NO: 1944443 - DNA, 15 bp, Homo sapiens
agaagcttttcctct

SEQ ID NO: 1944444 - DNA, 15 bp, Homo sapiens
gaagcttttcctctg

SEQ ID NO: 1944445 - DNA, 15 bp, Homo sapiens
aagcttttcctctgc

SEQ ID NO: 1944446 - DNA, 15 bp, Homo sapiens
agcttttcctctgca

SEQ ID NO: 1944447 - DNA, 15 bp, Homo sapiens
gcttttcctctgcat

SEQ ID NO: 1944448 - DNA, 15 bp, Homo sapiens
cttttcctctgcatt

SEQ ID NO: 1944449 - DNA, 15 bp, Homo sapiens
ttttcctctgcattc

SEQ ID NO: 1944450 - DNA, 15 bp, Homo sapiens
tttcctctgcattca

SEQ ID NO: 1944451 - DNA, 15 bp, Homo sapiens
ttcctctgcattcac

SEQ ID NO: 1944452 - DNA, 15 bp, Homo sapiens
tcctctgcattcaca

SEQ ID NO: 1944453 - DNA, 15 bp, Homo sapiens
cctctgcattcacaa

SEQ ID NO: 1944454 - DNA, 15 bp, Homo sapiens
ctctgcattcacaac

SEQ ID NO: 1944455 - DNA, 15 bp, Homo sapiens
tctgcattcacaact

SEQ ID NO: 1944456 - DNA, 15 bp, Homo sapiens
ctgcattcacaactt

SEQ ID NO: 1944457 - DNA, 15 bp, Homo sapiens
tgcattcacaacttg

SEQ ID NO: 1944458 - DNA, 15 bp, Homo sapiens
gcattcacaacttgg

SEQ ID NO: 1944459 - DNA, 15 bp, Homo sapiens
cattcacaacttggc

SEQ ID NO: 1944460 - DNA, 15 bp, Homo sapiens
attcacaacttggct

SEQ ID NO: 1944461 - DNA, 15 bp, Homo sapiens
ttcacaacttggctg

SEQ ID NO: 1944462 - DNA, 15 bp, Homo sapiens
tcacaacttggctgt

SEQ ID NO: 1944463 - DNA, 15 bp, Homo sapiens
cacaacttggctgtt

SEQ ID NO: 1944464 - DNA, 15 bp, Homo sapiens
acaacttggctgttt

SEQ ID NO: 1944465 - DNA, 15 bp, Homo sapiens
caacttggctgtttg

SEQ ID NO: 1944466 - DNA, 15 bp, Homo sapiens
aacttggctgtttgg

SEQ ID NO: 1944467 - DNA, 15 bp, Homo sapiens
acttggctgtttggc

SEQ ID NO: 1944468 - DNA, 15 bp, Homo sapiens
cttggctgtttggca

SEQ ID NO: 1944469 - DNA, 15 bp, Homo sapiens
ttggctgtttggcag

SEQ ID NO: 1944470 - DNA, 15 bp, Homo sapiens
tggctgtttggcaga

SEQ ID NO: 1944471 - DNA, 15 bp, Homo sapiens
ggctgtttggcagaa

SEQ ID NO: 1944472 - DNA, 15 bp, Homo sapiens
gctgtttggcagaag

SEQ ID NO: 1944473 - DNA, 15 bp, Homo sapiens
ctgtttggcagaaga

SEQ ID NO: 1944474 - DNA, 15 bp, Homo sapiens
tgtttggcagaagag

SEQ ID NO: 1944475 - DNA, 15 bp, Homo sapiens
gtttggcagaagagg

SEQ ID NO: 1944476 - DNA, 15 bp, Homo sapiens
tttggcagaagaggc

SEQ ID NO: 1944477 - DNA, 15 bp, Homo sapiens
ttggcagaagaggcc

SEQ ID NO: 1944478 - DNA, 15 bp, Homo sapiens
tggcagaagaggcct

SEQ ID NO: 1944479 - DNA, 15 bp, Homo sapiens
ggcagaagaggccta

SEQ ID NO: 1944480 - DNA, 15 bp, Homo sapiens
gcagaagaggcctac

SEQ ID NO: 1944481 - DNA, 15 bp, Homo sapiens
cagaagaggcctacc

SEQ ID NO: 1944482 - DNA, 15 bp, Homo sapiens
agaagaggcctacct

SEQ ID NO: 1944483 - DNA, 15 bp, Homo sapiens
gaagaggcctacctt

SEQ ID NO: 1944484 - DNA, 15 bp, Homo sapiens
aagaggcctaccttt

SEQ ID NO: 1944485 - DNA, 15 bp, Homo sapiens
agaggcctacctttc

SEQ ID NO: 1944486 - DNA, 15 bp, Homo sapiens
gaggcctacctttca

SEQ ID NO: 1944487 - DNA, 15 bp, Homo sapiens
aggcctacctttcag

SEQ ID NO: 1944488 - DNA, 15 bp, Homo sapiens
ggcctacctttcagc

SEQ ID NO: 1944489 - DNA, 15 bp, Homo sapiens
gcctacctttcagcc

SEQ ID NO: 1944490 - DNA, 15 bp, Homo sapiens
cctacctttcagcct

SEQ ID NO: 1944491 - DNA, 15 bp, Homo sapiens
ctacctttcagcctg

SEQ ID NO: 1944492 - DNA, 15 bp, Homo sapiens
tacctttcagcctgt

SEQ ID NO: 1944493 - DNA, 15 bp, Homo sapiens
acctttcagcctgtc

SEQ ID NO: 1944494 - DNA, 15 bp, Homo sapiens
cctttcagcctgtct

SEQ ID NO: 1944495 - DNA, 15 bp, Homo sapiens
ctttcagcctgtctc

SEQ ID NO: 1944496 - DNA, 15 bp, Homo sapiens
tttcagcctgtctca

SEQ ID NO: 1944497 - DNA, 15 bp, Homo sapiens
ttcagcctgtctcag

SEQ ID NO: 1944498 - DNA, 15 bp, Homo sapiens
tcagcctgtctcagc

SEQ ID NO: 1944499 - DNA, 15 bp, Homo sapiens
cagcctgtctcagct

SEQ ID NO: 1944500 - DNA, 15 bp, Homo sapiens
agcctgtctcagctt

SEQ ID NO: 1944501 - DNA, 15 bp, Homo sapiens
gcctgtctcagcttt

SEQ ID NO: 1944502 - DNA, 15 bp, Homo sapiens
cctgtctcagctttt

SEQ ID NO: 1944503 - DNA, 15 bp, Homo sapiens
ctgtctcagcttttg

SEQ ID NO: 1944504 - DNA, 15 bp, Homo sapiens
tgtctcagcttttga

SEQ ID NO: 1944505 - DNA, 15 bp, Homo sapiens
gtctcagcttttgat

SEQ ID NO: 1944506 - DNA, 15 bp, Homo sapiens
tctcagcttttgatg

SEQ ID NO: 1944507 - DNA, 15 bp, Homo sapiens
ctcagcttttgatgt

SEQ ID NO: 1944508 - DNA, 15 bp, Homo sapiens
tcagcttttgatgtg

SEQ ID NO: 1944509 - DNA, 15 bp, Homo sapiens
cagcttttgatgtgc

SEQ ID NO: 1944510 - DNA, 15 bp, Homo sapiens
agcttttgatgtgct

SEQ ID NO: 1944511 - DNA, 15 bp, Homo sapiens
gcttttgatgtgctc

SEQ ID NO: 1944512 - DNA, 15 bp, Homo sapiens
cttttgatgtgctct

SEQ ID NO: 1944513 - DNA, 15 bp, Homo sapiens
ttttgatgtgctctc

SEQ ID NO: 1944514 - DNA, 15 bp, Homo sapiens
tttgatgtgctctcc

SEQ ID NO: 1944515 - DNA, 15 bp, Homo sapiens
ttgatgtgctctcct

SEQ ID NO: 1944516 - DNA, 15 bp, Homo sapiens
tgatgtgctctcctc

SEQ ID NO: 1944517 - DNA, 15 bp, Homo sapiens
gatgtgctctcctca

SEQ ID NO: 1944518 - DNA, 15 bp, Homo sapiens
atgtgctctcctcat

SEQ ID NO: 1944519 - DNA, 15 bp, Homo sapiens
tgtgctctcctcatt

SEQ ID NO: 1944520 - DNA, 15 bp, Homo sapiens
gtgctctcctcatta

SEQ ID NO: 1944521 - DNA, 15 bp, Homo sapiens
tgctctcctcattaa

SEQ ID NO: 1944522 - DNA, 15 bp, Homo sapiens
gctctcctcattaag

SEQ ID NO: 1944523 - DNA, 15 bp, Homo sapiens
ctctcctcattaagc

SEQ ID NO: 1944524 - DNA, 15 bp, Homo sapiens
tctcctcattaagct

SEQ ID NO: 1944525 - DNA, 15 bp, Homo sapiens
ctcctcattaagctt

SEQ ID NO: 1944526 - DNA, 15 bp, Homo sapiens
tcctcattaagctta

SEQ ID NO: 1944527 - DNA, 15 bp, Homo sapiens
cctcattaagcttag

SEQ ID NO: 1944528 - DNA, 15 bp, Homo sapiens
ctcattaagcttagt

SEQ ID NO: 1944529 - DNA, 15 bp, Homo sapiens
tcattaagcttagtc

SEQ ID NO: 1944530 - DNA, 15 bp, Homo sapiens
cattaagcttagtca

SEQ ID NO: 1944531 - DNA, 15 bp, Homo sapiens
attaagcttagtcat

SEQ ID NO: 1944532 - DNA, 15 bp, Homo sapiens
ttaagcttagtcatt

SEQ ID NO: 1944533 - DNA, 15 bp, Homo sapiens
taagcttagtcattt

SEQ ID NO: 1944534 - DNA, 15 bp, Homo sapiens
aagcttagtcatttc

SEQ ID NO: 1944535 - DNA, 15 bp, Homo sapiens
agcttagtcatttct

SEQ ID NO: 1944536 - DNA, 15 bp, Homo sapiens
gcttagtcatttcta

SEQ ID NO: 1944537 - DNA, 15 bp, Homo sapiens
cttagtcatttctag

SEQ ID NO: 1944538 - DNA, 15 bp, Homo sapiens
ttagtcatttctagt

SEQ ID NO: 1944539 - DNA, 15 bp, Homo sapiens
tagtcatttctagtt

SEQ ID NO: 1944540 - DNA, 15 bp, Homo sapiens
agtcatttctagttt

SEQ ID NO: 1944541 - DNA, 15 bp, Homo sapiens
gtcatttctagtttt

SEQ ID NO: 1944542 - DNA, 15 bp, Homo sapiens
tcatttctagttttt

SEQ ID NO: 1944543 - DNA, 15 bp, Homo sapiens
catttctagttttta

SEQ ID NO: 1944544 - DNA, 15 bp, Homo sapiens
atttctagtttttaa

SEQ ID NO: 1944545 - DNA, 15 bp, Homo sapiens
tttctagtttttaat

SEQ ID NO: 1944546 - DNA, 15 bp, Homo sapiens
ttctagtttttaatt

SEQ ID NO: 1944547 - DNA, 15 bp, Homo sapiens
tctagtttttaattt

SEQ ID NO: 1944548 - DNA, 15 bp, Homo sapiens
ctagtttttaattta

SEQ ID NO: 1944549 - DNA, 15 bp, Homo sapiens
tagtttttaatttag

SEQ ID NO: 1944550 - DNA, 15 bp, Homo sapiens
agtttttaatttaga

SEQ ID NO: 1944551 - DNA, 15 bp, Homo sapiens
gtttttaatttagag

SEQ ID NO: 1944552 - DNA, 15 bp, Homo sapiens
tttttaatttagagt

SEQ ID NO: 1944553 - DNA, 15 bp, Homo sapiens
ttttaatttagagtg

SEQ ID NO: 1944554 - DNA, 15 bp, Homo sapiens
tttaatttagagtga

SEQ ID NO: 1944555 - DNA, 15 bp, Homo sapiens
ttaatttagagtgag

SEQ ID NO: 1944556 - DNA, 15 bp, Homo sapiens
taatttagagtgaga

SEQ ID NO: 1944557 - DNA, 15 bp, Homo sapiens
aatttagagtgagag

SEQ ID NO: 1944558 - DNA, 15 bp, Homo sapiens
atttagagtgagaga

SEQ ID NO: 1944559 - DNA, 15 bp, Homo sapiens
tttagagtgagagac

SEQ ID NO: 1944560 - DNA, 15 bp, Homo sapiens
ttagagtgagagaca

SEQ ID NO: 1944561 - DNA, 15 bp, Homo sapiens
tagagtgagagacaa

SEQ ID NO: 1944562 - DNA, 15 bp, Homo sapiens
agagtgagagacaat

SEQ ID NO: 1944563 - DNA, 15 bp, Homo sapiens
gagtgagagacaatg

SEQ ID NO: 1944564 - DNA, 15 bp, Homo sapiens
agtgagagacaatga

SEQ ID NO: 1944565 - DNA, 15 bp, Homo sapiens
gtgagagacaatgac

SEQ ID NO: 1944566 - DNA, 15 bp, Homo sapiens
tgagagacaatgact

SEQ ID NO: 1944567 - DNA, 15 bp, Homo sapiens
gagagacaatgactc

SEQ ID NO: 1944568 - DNA, 15 bp, Homo sapiens
agagacaatgactct

SEQ ID NO: 1944569 - DNA, 15 bp, Homo sapiens
gagacaatgactctt

SEQ ID NO: 1944570 - DNA, 15 bp, Homo sapiens
agacaatgactcttc

SEQ ID NO: 1944571 - DNA, 15 bp, Homo sapiens
gacaatgactcttcc

SEQ ID NO: 1944572 - DNA, 15 bp, Homo sapiens
acaatgactcttcct

SEQ ID NO: 1944573 - DNA, 15 bp, Homo sapiens
caatgactcttcctt

SEQ ID NO: 1944574 - DNA, 15 bp, Homo sapiens
aatgactcttccttt

SEQ ID NO: 1944575 - DNA, 15 bp, Homo sapiens
atgactcttcctttc

SEQ ID NO: 1944576 - DNA, 15 bp, Homo sapiens
tgactcttcctttca

SEQ ID NO: 1944577 - DNA, 15 bp, Homo sapiens
gactcttcctttcac

SEQ ID NO: 1944578 - DNA, 15 bp, Homo sapiens
actcttcctttcact

SEQ ID NO: 1944579 - DNA, 15 bp, Homo sapiens
ctcttcctttcactt

SEQ ID NO: 1944580 - DNA, 15 bp, Homo sapiens
tcttcctttcacttg

SEQ ID NO: 1944581 - DNA, 15 bp, Homo sapiens
cttcctttcacttga

SEQ ID NO: 1944582 - DNA, 15 bp, Homo sapiens
ttcctttcacttgaa

SEQ ID NO: 1944583 - DNA, 15 bp, Homo sapiens
tcctttcacttgaac

SEQ ID NO: 1944584 - DNA, 15 bp, Homo sapiens
cctttcacttgaaca

SEQ ID NO: 1944585 - DNA, 15 bp, Homo sapiens
ctttcacttgaacac

SEQ ID NO: 1944586 - DNA, 15 bp, Homo sapiens
tttcacttgaacact

SEQ ID NO: 1944587 - DNA, 15 bp, Homo sapiens
ttcacttgaacactt

SEQ ID NO: 1944588 - DNA, 15 bp, Homo sapiens
tcacttgaacactta

SEQ ID NO: 1944589 - DNA, 15 bp, Homo sapiens
cacttgaacacttag

SEQ ID NO: 1944590 - DNA, 15 bp, Homo sapiens
acttgaacacttaga

SEQ ID NO: 1944591 - DNA, 15 bp, Homo sapiens
cttgaacacttagag

SEQ ID NO: 1944592 - DNA, 15 bp, Homo sapiens
ttgaacacttagagg

SEQ ID NO: 1944593 - DNA, 15 bp, Homo sapiens
tgaacacttagaggc

SEQ ID NO: 1944594 - DNA, 15 bp, Homo sapiens
gaacacttagaggct

SEQ ID NO: 1944595 - DNA, 15 bp, Homo sapiens
aacacttagaggctg

SEQ ID NO: 1944596 - DNA, 15 bp, Homo sapiens
acacttagaggctgt

SEQ ID NO: 1944597 - DNA, 15 bp, Homo sapiens
cacttagaggctgtt

SEQ ID NO: 1944598 - DNA, 15 bp, Homo sapiens
acttagaggctgttg

SEQ ID NO: 1944599 - DNA, 15 bp, Homo sapiens
cttagaggctgttgt

SEQ ID NO: 1944600 - DNA, 15 bp, Homo sapiens
ttagaggctgttgta

SEQ ID NO: 1944601 - DNA, 15 bp, Homo sapiens
tagaggctgttgtag

SEQ ID NO: 1944602 - DNA, 15 bp, Homo sapiens
agaggctgttgtaga

SEQ ID NO: 1944603 - DNA, 15 bp, Homo sapiens
gaggctgttgtagag

SEQ ID NO: 1944604 - DNA, 15 bp, Homo sapiens
aggctgttgtagagg

SEQ ID NO: 1944605 - DNA, 15 bp, Homo sapiens
ggctgttgtagaggt

SEQ ID NO: 1944606 - DNA, 15 bp, Homo sapiens
gctgttgtagaggta

SEQ ID NO: 1944607 - DNA, 15 bp, Homo sapiens
ctgttgtagaggtat

SEQ ID NO: 1944608 - DNA, 15 bp, Homo sapiens
caaagacctttctgt

SEQ ID NO: 1944609 - DNA, 15 bp, Homo sapiens
aaagacctttctgtg

SEQ ID NO: 1944610 - DNA, 15 bp, Homo sapiens
aagacctttctgtgt

SEQ ID NO: 1944611 - DNA, 15 bp, Homo sapiens
agacctttctgtgta

SEQ ID NO: 1944612 - DNA, 15 bp, Homo sapiens
gacctttctgtgtaa

SEQ ID NO: 1944613 - DNA, 15 bp, Homo sapiens
acctttctgtgtaaa

SEQ ID NO: 1944614 - DNA, 15 bp, Homo sapiens
cctttctgtgtaaat

SEQ ID NO: 1944615 - DNA, 15 bp, Homo sapiens
ctttctgtgtaaatt

SEQ ID NO: 1944616 - DNA, 15 bp, Homo sapiens
tttctgtgtaaatta

SEQ ID NO: 1944617 - DNA, 15 bp, Homo sapiens
ttctgtgtaaattaa

SEQ ID NO: 1944618 - DNA, 15 bp, Homo sapiens
tctgtgtaaattaaa

SEQ ID NO: 1944619 - DNA, 15 bp, Homo sapiens
ctgtgtaaattaaaa

SEQ ID NO: 1944620 - DNA, 15 bp, Homo sapiens
tgtgtaaattaaaat

SEQ ID NO: 1944621 - DNA, 15 bp, Homo sapiens
gtgtaaattaaaatt

SEQ ID NO: 1944622 - DNA, 15 bp, Homo sapiens
tgtaaattaaaatta

SEQ ID NO: 1944623 - DNA, 15 bp, Homo sapiens
gtaaattaaaattag

SEQ ID NO: 1944624 - DNA, 15 bp, Homo sapiens
taaattaaaattagg

SEQ ID NO: 1944625 - DNA, 15 bp, Homo sapiens
aaattaaaattaggt

SEQ ID NO: 1944626 - DNA, 15 bp, Homo sapiens
aattaaaattaggtc

SEQ ID NO: 1944627 - DNA, 15 bp, Homo sapiens
attaaaattaggtca

SEQ ID NO: 1944628 - DNA, 15 bp, Homo sapiens
ttaaaattaggtcaa

SEQ ID NO: 1944629 - DNA, 15 bp, Homo sapiens
taaaattaggtcaag

SEQ ID NO: 1944630 - DNA, 15 bp, Homo sapiens
aaaattaggtcaaga

SEQ ID NO: 1944631 - DNA, 15 bp, Homo sapiens
aaattaggtcaagac

SEQ ID NO: 1944632 - DNA, 15 bp, Homo sapiens
aattaggtcaagacc

SEQ ID NO: 1944633 - DNA, 15 bp, Homo sapiens
attaggtcaagacca

SEQ ID NO: 1944634 - DNA, 15 bp, Homo sapiens
ttaggtcaagaccag

SEQ ID NO: 1944635 - DNA, 15 bp, Homo sapiens
taggtcaagaccaga

SEQ ID NO: 1944636 - DNA, 15 bp, Homo sapiens
aggtcaagaccagag

SEQ ID NO: 1944637 - DNA, 15 bp, Homo sapiens
ggtcaagaccagagg

SEQ ID NO: 1944638 - DNA, 15 bp, Homo sapiens
gtcaagaccagagga

SEQ ID NO: 1944639 - DNA, 15 bp, Homo sapiens
tcaagaccagaggat

SEQ ID NO: 1944640 - DNA, 15 bp, Homo sapiens
caagaccagaggatg

SEQ ID NO: 1944641 - DNA, 15 bp, Homo sapiens
aagaccagaggatgt

SEQ ID NO: 1944642 - DNA, 15 bp, Homo sapiens
agaccagaggatgtt

SEQ ID NO: 1944643 - DNA, 15 bp, Homo sapiens
gaccagaggatgttc

SEQ ID NO: 1944644 - DNA, 15 bp, Homo sapiens
accagaggatgttca

SEQ ID NO: 1944645 - DNA, 15 bp, Homo sapiens
ccagaggatgttcaa

SEQ ID NO: 1944646 - DNA, 15 bp, Homo sapiens
cagaggatgttcaag

SEQ ID NO: 1944647 - DNA, 15 bp, Homo sapiens
agaggatgttcaaga

SEQ ID NO: 1944648 - DNA, 15 bp, Homo sapiens
gaggatgttcaagaa

SEQ ID NO: 1944649 - DNA, 15 bp, Homo sapiens
aggatgttcaagaat

SEQ ID NO: 1944650 - DNA, 15 bp, Homo sapiens
ggatgttcaagaatt

SEQ ID NO: 1944651 - DNA, 15 bp, Homo sapiens
gatgttcaagaatta

SEQ ID NO: 1944652 - DNA, 15 bp, Homo sapiens
atgttcaagaattag

SEQ ID NO: 1944653 - DNA, 15 bp, Homo sapiens
tgttcaagaattagc

SEQ ID NO: 1944654 - DNA, 15 bp, Homo sapiens
gttcaagaattagct

SEQ ID NO: 1944655 - DNA, 15 bp, Homo sapiens
ttcaagaattagcta

SEQ ID NO: 1944656 - DNA, 15 bp, Homo sapiens
tcaagaattagctag

SEQ ID NO: 1944657 - DNA, 15 bp, Homo sapiens
caagaattagctagg

SEQ ID NO: 1944658 - DNA, 15 bp, Homo sapiens
aagaattagctaggt

SEQ ID NO: 1944659 - DNA, 15 bp, Homo sapiens
agaattagctaggta

SEQ ID NO: 1944660 - DNA, 15 bp, Homo sapiens
gaattagctaggtaa

SEQ ID NO: 1944661 - DNA, 15 bp, Homo sapiens
aattagctaggtaaa

SEQ ID NO: 1944662 - DNA, 15 bp, Homo sapiens
attagctaggtaaaa

SEQ ID NO: 1944663 - DNA, 15 bp, Homo sapiens
ttagctaggtaaaaa

SEQ ID NO: 1944664 - DNA, 15 bp, Homo sapiens
tagctaggtaaaaag

SEQ ID NO: 1944665 - DNA, 15 bp, Homo sapiens
agctaggtaaaaagc

SEQ ID NO: 1944666 - DNA, 15 bp, Homo sapiens
gctaggtaaaaagct

SEQ ID NO: 1944667 - DNA, 15 bp, Homo sapiens
ctaggtaaaaagcta

SEQ ID NO: 1944668 - DNA, 15 bp, Homo sapiens
taggtaaaaagctag

SEQ ID NO: 1944669 - DNA, 15 bp, Homo sapiens
aggtaaaaagctagg

SEQ ID NO: 1944670 - DNA, 15 bp, Homo sapiens
ggtaaaaagctaggg

SEQ ID NO: 1944671 - DNA, 15 bp, Homo sapiens
gtaaaaagctagggg

SEQ ID NO: 1944672 - DNA, 15 bp, Homo sapiens
taaaaagctaggggg

SEQ ID NO: 1944673 - DNA, 15 bp, Homo sapiens
aaaaagctaggggga

SEQ ID NO: 1944674 - DNA, 15 bp, Homo sapiens
aaaagctagggggag

SEQ ID NO: 1944675 - DNA, 15 bp, Homo sapiens
aaagctagggggaga

SEQ ID NO: 1944676 - DNA, 15 bp, Homo sapiens
aagctagggggagaa

SEQ ID NO: 1944677 - DNA, 15 bp, Homo sapiens
agctagggggagaat

SEQ ID NO: 1944678 - DNA, 15 bp, Homo sapiens
gctagggggagaata

SEQ ID NO: 1944679 - DNA, 15 bp, Homo sapiens
ctagggggagaatat

SEQ ID NO: 1944680 - DNA, 15 bp, Homo sapiens
tagggggagaatatt

SEQ ID NO: 1944681 - DNA, 15 bp, Homo sapiens
agggggagaatattt

SEQ ID NO: 1944682 - DNA, 15 bp, Homo sapiens
gggggagaatatttc

SEQ ID NO: 1944683 - DNA, 15 bp, Homo sapiens
ggggagaatatttca

SEQ ID NO: 1944684 - DNA, 15 bp, Homo sapiens
gggagaatatttcag

SEQ ID NO: 1944685 - DNA, 15 bp, Homo sapiens
ggagaatatttcaga

SEQ ID NO: 1944686 - DNA, 15 bp, Homo sapiens
gagaatatttcagaa

SEQ ID NO: 1944687 - DNA, 15 bp, Homo sapiens
agaatatttcagaat

SEQ ID NO: 1944688 - DNA, 15 bp, Homo sapiens
gaatatttcagaatg

SEQ ID NO: 1944689 - DNA, 15 bp, Homo sapiens
aatatttcagaatga

SEQ ID NO: 1944690 - DNA, 15 bp, Homo sapiens
atatttcagaatgag

SEQ ID NO: 1944691 - DNA, 15 bp, Homo sapiens
tatttcagaatgaga

SEQ ID NO: 1944692 - DNA, 15 bp, Homo sapiens
atttcagaatgagat

SEQ ID NO: 1944693 - DNA, 15 bp, Homo sapiens
tttcagaatgagata

SEQ ID NO: 1944694 - DNA, 15 bp, Homo sapiens
ttcagaatgagatac

SEQ ID NO: 1944695 - DNA, 15 bp, Homo sapiens
tcagaatgagatact

SEQ ID NO: 1944696 - DNA, 15 bp, Homo sapiens
cagaatgagatacta

SEQ ID NO: 1944697 - DNA, 15 bp, Homo sapiens
agaatgagatactac

SEQ ID NO: 1944698 - DNA, 15 bp, Homo sapiens
gaatgagatactacc

SEQ ID NO: 1944699 - DNA, 15 bp, Homo sapiens
aatgagatactacca

SEQ ID NO: 1944700 - DNA, 15 bp, Homo sapiens
atgagatactaccat

SEQ ID NO: 1944701 - DNA, 15 bp, Homo sapiens
tgagatactaccatg

SEQ ID NO: 1944702 - DNA, 15 bp, Homo sapiens
gagatactaccatgt

SEQ ID NO: 1944703 - DNA, 15 bp, Homo sapiens
agatactaccatgtg

SEQ ID NO: 1944704 - DNA, 15 bp, Homo sapiens
gatactaccatgtgc

SEQ ID NO: 1944705 - DNA, 15 bp, Homo sapiens
atactaccatgtgcc

SEQ ID NO: 1944706 - DNA, 15 bp, Homo sapiens
tactaccatgtgcca

SEQ ID NO: 1944707 - DNA, 15 bp, Homo sapiens
actaccatgtgccaa

SEQ ID NO: 1944708 - DNA, 15 bp, Homo sapiens
ctaccatgtgccaat

SEQ ID NO: 1944709 - DNA, 15 bp, Homo sapiens
taccatgtgccaatg

SEQ ID NO: 1944710 - DNA, 15 bp, Homo sapiens
accatgtgccaatgt

SEQ ID NO: 1944711 - DNA, 15 bp, Homo sapiens
ccatgtgccaatgtt

SEQ ID NO: 1944712 - DNA, 15 bp, Homo sapiens
catgtgccaatgttc

SEQ ID NO: 1944713 - DNA, 15 bp, Homo sapiens
atgtgccaatgttct

SEQ ID NO: 1944714 - DNA, 15 bp, Homo sapiens
tgtgccaatgttctg

SEQ ID NO: 1944715 - DNA, 15 bp, Homo sapiens
gtgccaatgttctgc

SEQ ID NO: 1944716 - DNA, 15 bp, Homo sapiens
tgccaatgttctgca

SEQ ID NO: 1944717 - DNA, 15 bp, Homo sapiens
gccaatgttctgcag

SEQ ID NO: 1944718 - DNA, 15 bp, Homo sapiens
ccaatgttctgcagc

SEQ ID NO: 1944719 - DNA, 15 bp, Homo sapiens
caatgttctgcagca

SEQ ID NO: 1944720 - DNA, 15 bp, Homo sapiens
aatgttctgcagcaa

SEQ ID NO: 1944721 - DNA, 15 bp, Homo sapiens
atgttctgcagcaaa

SEQ ID NO: 1944722 - DNA, 15 bp, Homo sapiens
tgttctgcagcaaaa

SEQ ID NO: 1944723 - DNA, 15 bp, Homo sapiens
gttctgcagcaaaaa

SEQ ID NO: 1944724 - DNA, 15 bp, Homo sapiens
ttctgcagcaaaaaa

SEQ ID NO: 1944725 - DNA, 15 bp, Homo sapiens
tctgcagcaaaaaag

SEQ ID NO: 1944726 - DNA, 15 bp, Homo sapiens
ctgcagcaaaaaaga

SEQ ID NO: 1944727 - DNA, 15 bp, Homo sapiens
tgcagcaaaaaagag

SEQ ID NO: 1944728 - DNA, 15 bp, Homo sapiens
gcagcaaaaaagagc

SEQ ID NO: 1944729 - DNA, 15 bp, Homo sapiens
cagcaaaaaagagct

SEQ ID NO: 1944730 - DNA, 15 bp, Homo sapiens
agcaaaaaagagctt

SEQ ID NO: 1944731 - DNA, 15 bp, Homo sapiens
gcaaaaaagagcttg

SEQ ID NO: 1944732 - DNA, 15 bp, Homo sapiens
caaaaaagagcttgg

SEQ ID NO: 1944733 - DNA, 15 bp, Homo sapiens
aaaaaagagcttggt

SEQ ID NO: 1944734 - DNA, 15 bp, Homo sapiens
aaaaagagcttggtg

SEQ ID NO: 1944735 - DNA, 15 bp, Homo sapiens
aaaagagcttggtgg

SEQ ID NO: 1944736 - DNA, 15 bp, Homo sapiens
aaagagcttggtggt

SEQ ID NO: 1944737 - DNA, 15 bp, Homo sapiens
aagagcttggtggtt

SEQ ID NO: 1944738 - DNA, 15 bp, Homo sapiens
agagcttggtggttt

SEQ ID NO: 1944739 - DNA, 15 bp, Homo sapiens
gagcttggtggtttt

SEQ ID NO: 1944740 - DNA, 15 bp, Homo sapiens
agcttggtggtttta

SEQ ID NO: 1944741 - DNA, 15 bp, Homo sapiens
gcttggtggttttag

SEQ ID NO: 1944742 - DNA, 15 bp, Homo sapiens
cttggtggttttagg

SEQ ID NO: 1944743 - DNA, 15 bp, Homo sapiens
ttggtggttttaggt

SEQ ID NO: 1944744 - DNA, 15 bp, Homo sapiens
tggtggttttaggta

SEQ ID NO: 1944745 - DNA, 15 bp, Homo sapiens
ggtggttttaggtac

SEQ ID NO: 1944746 - DNA, 15 bp, Homo sapiens
gtggttttaggtact

SEQ ID NO: 1944747 - DNA, 15 bp, Homo sapiens
tggttttaggtactg

SEQ ID NO: 1944748 - DNA, 15 bp, Homo sapiens
ggttttaggtactgg

SEQ ID NO: 1944749 - DNA, 15 bp, Homo sapiens
gttttaggtactgga

SEQ ID NO: 1944750 - DNA, 15 bp, Homo sapiens
ttttaggtactggaa

SEQ ID NO: 1944751 - DNA, 15 bp, Homo sapiens
tttaggtactggaag

SEQ ID NO: 1944752 - DNA, 15 bp, Homo sapiens
ttaggtactggaagg

SEQ ID NO: 1944753 - DNA, 15 bp, Homo sapiens
taggtactggaaggc

SEQ ID NO: 1944754 - DNA, 15 bp, Homo sapiens
aggtactggaaggcc

SEQ ID NO: 1944755 - DNA, 15 bp, Homo sapiens
ggtactggaaggcca

SEQ ID NO: 1944756 - DNA, 15 bp, Homo sapiens
gtactggaaggccag

SEQ ID NO: 1944757 - DNA, 15 bp, Homo sapiens
tactggaaggccagt

SEQ ID NO: 1944758 - DNA, 15 bp, Homo sapiens
actggaaggccagtg

SEQ ID NO: 1944759 - DNA, 15 bp, Homo sapiens
ctggaaggccagtgt

SEQ ID NO: 1944760 - DNA, 15 bp, Homo sapiens
tggaaggccagtgtg

SEQ ID NO: 1944761 - DNA, 15 bp, Homo sapiens
ggaaggccagtgtgt

SEQ ID NO: 1944762 - DNA, 15 bp, Homo sapiens
gaaggccagtgtgtc

SEQ ID NO: 1944763 - DNA, 15 bp, Homo sapiens
aaggccagtgtgtca

SEQ ID NO: 1944764 - DNA, 15 bp, Homo sapiens
aggccagtgtgtcag

SEQ ID NO: 1944765 - DNA, 15 bp, Homo sapiens
ggccagtgtgtcagg

SEQ ID NO: 1944766 - DNA, 15 bp, Homo sapiens
gccagtgtgtcagga

SEQ ID NO: 1944767 - DNA, 15 bp, Homo sapiens
ccagtgtgtcaggag

SEQ ID NO: 1944768 - DNA, 15 bp, Homo sapiens
cagtgtgtcaggaga

SEQ ID NO: 1944769 - DNA, 15 bp, Homo sapiens
agtgtgtcaggagaa

SEQ ID NO: 1944770 - DNA, 15 bp, Homo sapiens
gtgtgtcaggagaac

SEQ ID NO: 1944771 - DNA, 15 bp, Homo sapiens
tgtgtcaggagaact

SEQ ID NO: 1944772 - DNA, 15 bp, Homo sapiens
gtgtcaggagaactg

SEQ ID NO: 1944773 - DNA, 15 bp, Homo sapiens
tgtcaggagaactgt

SEQ ID NO: 1944774 - DNA, 15 bp, Homo sapiens
gtcaggagaactgtg

SEQ ID NO: 1944775 - DNA, 15 bp, Homo sapiens
tcaggagaactgtga

SEQ ID NO: 1944776 - DNA, 15 bp, Homo sapiens
caggagaactgtgaa

SEQ ID NO: 1944777 - DNA, 15 bp, Homo sapiens
aggagaactgtgaat

SEQ ID NO: 1944778 - DNA, 15 bp, Homo sapiens
ggagaactgtgaatg

SEQ ID NO: 1944779 - DNA, 15 bp, Homo sapiens
gagaactgtgaatga

SEQ ID NO: 1944780 - DNA, 15 bp, Homo sapiens
agaactgtgaatgag

SEQ ID NO: 1944781 - DNA, 15 bp, Homo sapiens
gaactgtgaatgagt

SEQ ID NO: 1944782 - DNA, 15 bp, Homo sapiens
aactgtgaatgagtg

SEQ ID NO: 1944783 - DNA, 15 bp, Homo sapiens
actgtgaatgagtgg

SEQ ID NO: 1944784 - DNA, 15 bp, Homo sapiens
ctgtgaatgagtggg

SEQ ID NO: 1944785 - DNA, 15 bp, Homo sapiens
tgtgaatgagtggga

SEQ ID NO: 1944786 - DNA, 15 bp, Homo sapiens
gtgaatgagtgggag

SEQ ID NO: 1944787 - DNA, 15 bp, Homo sapiens
tgaatgagtgggaga

SEQ ID NO: 1944788 - DNA, 15 bp, Homo sapiens
gaatgagtgggagag

SEQ ID NO: 1944789 - DNA, 15 bp, Homo sapiens
aatgagtgggagagt

SEQ ID NO: 1944790 - DNA, 15 bp, Homo sapiens
atgagtgggagagtg

SEQ ID NO: 1944791 - DNA, 15 bp, Homo sapiens
tgagtgggagagtgg

SEQ ID NO: 1944792 - DNA, 15 bp, Homo sapiens
gagtgggagagtgga

SEQ ID NO: 1944793 - DNA, 15 bp, Homo sapiens
agtgggagagtggag

SEQ ID NO: 1944794 - DNA, 15 bp, Homo sapiens
gtgggagagtggagc

SEQ ID NO: 1944795 - DNA, 15 bp, Homo sapiens
tgggagagtggagca

SEQ ID NO: 1944796 - DNA, 15 bp, Homo sapiens
gggagagtggagcaa

SEQ ID NO: 1944797 - DNA, 15 bp, Homo sapiens
ggagagtggagcaag

SEQ ID NO: 1944798 - DNA, 15 bp, Homo sapiens
gagagtggagcaaga

SEQ ID NO: 1944799 - DNA, 15 bp, Homo sapiens
agagtggagcaagaa

SEQ ID NO: 1944800 - DNA, 15 bp, Homo sapiens
gagtggagcaagaac

SEQ ID NO: 1944801 - DNA, 15 bp, Homo sapiens
agtggagcaagaact

SEQ ID NO: 1944802 - DNA, 15 bp, Homo sapiens
gtggagcaagaacta

SEQ ID NO: 1944803 - DNA, 15 bp, Homo sapiens
tggagcaagaactat

SEQ ID NO: 1944804 - DNA, 15 bp, Homo sapiens
ggagcaagaactata

SEQ ID NO: 1944805 - DNA, 15 bp, Homo sapiens
gagcaagaactatac

SEQ ID NO: 1944806 - DNA, 15 bp, Homo sapiens
agcaagaactataca

SEQ ID NO: 1944807 - DNA, 15 bp, Homo sapiens
gcaagaactatacag

SEQ ID NO: 1944808 - DNA, 15 bp, Homo sapiens
caagaactatacagg

SEQ ID NO: 1944809 - DNA, 15 bp, Homo sapiens
aagaactatacaggg

SEQ ID NO: 1944810 - DNA, 15 bp, Homo sapiens
agaactatacagggc

SEQ ID NO: 1944811 - DNA, 15 bp, Homo sapiens
gaactatacagggct

SEQ ID NO: 1944812 - DNA, 15 bp, Homo sapiens
aactatacagggctt

SEQ ID NO: 1944813 - DNA, 15 bp, Homo sapiens
actatacagggctta

SEQ ID NO: 1944814 - DNA, 15 bp, Homo sapiens
ctatacagggcttag

SEQ ID NO: 1944815 - DNA, 15 bp, Homo sapiens
tatacagggcttaga

SEQ ID NO: 1944816 - DNA, 15 bp, Homo sapiens
atacagggcttagat

SEQ ID NO: 1944817 - DNA, 15 bp, Homo sapiens
tacagggcttagatt

SEQ ID NO: 1944818 - DNA, 15 bp, Homo sapiens
acagggcttagattt

SEQ ID NO: 1944819 - DNA, 15 bp, Homo sapiens
cagggcttagatttc

SEQ ID NO: 1944820 - DNA, 15 bp, Homo sapiens
agggcttagatttct

SEQ ID NO: 1944821 - DNA, 15 bp, Homo sapiens
gggcttagatttctc

SEQ ID NO: 1944822 - DNA, 15 bp, Homo sapiens
ggcttagatttctct

SEQ ID NO: 1944823 - DNA, 15 bp, Homo sapiens
gcttagatttctctt

SEQ ID NO: 1944824 - DNA, 15 bp, Homo sapiens
cttagatttctctta

SEQ ID NO: 1944825 - DNA, 15 bp, Homo sapiens
ttagatttctcttaa

SEQ ID NO: 1944826 - DNA, 15 bp, Homo sapiens
tagatttctcttaaa

SEQ ID NO: 1944827 - DNA, 15 bp, Homo sapiens
agatttctcttaaaa

SEQ ID NO: 1944828 - DNA, 15 bp, Homo sapiens
gatttctcttaaaat

SEQ ID NO: 1944829 - DNA, 15 bp, Homo sapiens
atttctcttaaaatg

SEQ ID NO: 1944830 - DNA, 15 bp, Homo sapiens
tttctcttaaaatgt

SEQ ID NO: 1944831 - DNA, 15 bp, Homo sapiens
ttctcttaaaatgta

SEQ ID NO: 1944832 - DNA, 15 bp, Homo sapiens
tctcttaaaatgtag

SEQ ID NO: 1944833 - DNA, 15 bp, Homo sapiens
ctcttaaaatgtagt

SEQ ID NO: 1944834 - DNA, 15 bp, Homo sapiens
tcttaaaatgtagtg

SEQ ID NO: 1944835 - DNA, 15 bp, Homo sapiens
cttaaaatgtagtga

SEQ ID NO: 1944836 - DNA, 15 bp, Homo sapiens
ttaaaatgtagtgag

SEQ ID NO: 1944837 - DNA, 15 bp, Homo sapiens
taaaatgtagtgagc

SEQ ID NO: 1944838 - DNA, 15 bp, Homo sapiens
aaaatgtagtgagca

SEQ ID NO: 1944839 - DNA, 15 bp, Homo sapiens
aaatgtagtgagcag

SEQ ID NO: 1944840 - DNA, 15 bp, Homo sapiens
aatgtagtgagcagc

SEQ ID NO: 1944841 - DNA, 15 bp, Homo sapiens
atgtagtgagcagcc

SEQ ID NO: 1944842 - DNA, 15 bp, Homo sapiens
tgtagtgagcagcca

SEQ ID NO: 1944843 - DNA, 15 bp, Homo sapiens
gtagtgagcagccag

SEQ ID NO: 1944844 - DNA, 15 bp, Homo sapiens
tagtgagcagccagt

SEQ ID NO: 1944845 - DNA, 15 bp, Homo sapiens
agtgagcagccagtc

SEQ ID NO: 1944846 - DNA, 15 bp, Homo sapiens
gtgagcagccagtcg

SEQ ID NO: 1944847 - DNA, 15 bp, Homo sapiens
tgagcagccagtcgt

SEQ ID NO: 1944848 - DNA, 15 bp, Homo sapiens
gagcagccagtcgtt

SEQ ID NO: 1944849 - DNA, 15 bp, Homo sapiens
agcagccagtcgttg

SEQ ID NO: 1944850 - DNA, 15 bp, Homo sapiens
gcagccagtcgttgg

SEQ ID NO: 1944851 - DNA, 15 bp, Homo sapiens
cagccagtcgttggt

SEQ ID NO: 1944852 - DNA, 15 bp, Homo sapiens
agccagtcgttggtt

SEQ ID NO: 1944853 - DNA, 15 bp, Homo sapiens
gccagtcgttggttt

SEQ ID NO: 1944854 - DNA, 15 bp, Homo sapiens
ccagtcgttggtttt

SEQ ID NO: 1944855 - DNA, 15 bp, Homo sapiens
cagtcgttggtttta

SEQ ID NO: 1944856 - DNA, 15 bp, Homo sapiens
agtcgttggttttaa

SEQ ID NO: 1944857 - DNA, 15 bp, Homo sapiens
gtcgttggttttaag

SEQ ID NO: 1944858 - DNA, 15 bp, Homo sapiens
tcgttggttttaagc

SEQ ID NO: 1944859 - DNA, 15 bp, Homo sapiens
cgttggttttaagca

SEQ ID NO: 1944860 - DNA, 15 bp, Homo sapiens
gttggttttaagcag

SEQ ID NO: 1944861 - DNA, 15 bp, Homo sapiens
ttggttttaagcaga

SEQ ID NO: 1944862 - DNA, 15 bp, Homo sapiens
tggttttaagcagag

SEQ ID NO: 1944863 - DNA, 15 bp, Homo sapiens
ggttttaagcagagt

SEQ ID NO: 1944864 - DNA, 15 bp, Homo sapiens
gttttaagcagagtg

SEQ ID NO: 1944865 - DNA, 15 bp, Homo sapiens
ttttaagcagagtgg

SEQ ID NO: 1944866 - DNA, 15 bp, Homo sapiens
tttaagcagagtggt

SEQ ID NO: 1944867 - DNA, 15 bp, Homo sapiens
ttaagcagagtggta

SEQ ID NO: 1944868 - DNA, 15 bp, Homo sapiens
taagcagagtggtaa

SEQ ID NO: 1944869 - DNA, 15 bp, Homo sapiens
aagcagagtggtaat

SEQ ID NO: 1944870 - DNA, 15 bp, Homo sapiens
agcagagtggtaata

SEQ ID NO: 1944871 - DNA, 15 bp, Homo sapiens
gcagagtggtaatat

SEQ ID NO: 1944872 - DNA, 15 bp, Homo sapiens
cagagtggtaatatg

SEQ ID NO: 1944873 - DNA, 15 bp, Homo sapiens
agagtggtaatatgg

SEQ ID NO: 1944874 - DNA, 15 bp, Homo sapiens
gagtggtaatatggt

SEQ ID NO: 1944875 - DNA, 15 bp, Homo sapiens
agtggtaatatggtc

SEQ ID NO: 1944876 - DNA, 15 bp, Homo sapiens
gtggtaatatggtct

SEQ ID NO: 1944877 - DNA, 15 bp, Homo sapiens
tggtaatatggtctg

SEQ ID NO: 1944878 - DNA, 15 bp, Homo sapiens
ggtaatatggtctgc

SEQ ID NO: 1944879 - DNA, 15 bp, Homo sapiens
gtaatatggtctgct

SEQ ID NO: 1944880 - DNA, 15 bp, Homo sapiens
taatatggtctgctt

SEQ ID NO: 1944881 - DNA, 15 bp, Homo sapiens
aatatggtctgcttt

SEQ ID NO: 1944882 - DNA, 15 bp, Homo sapiens
atatggtctgcttta

SEQ ID NO: 1944883 - DNA, 15 bp, Homo sapiens
tatggtctgctttac

SEQ ID NO: 1944884 - DNA, 15 bp, Homo sapiens
atggtctgctttaca

SEQ ID NO: 1944885 - DNA, 15 bp, Homo sapiens
tggtctgctttacat

SEQ ID NO: 1944886 - DNA, 15 bp, Homo sapiens
ggtctgctttacata

SEQ ID NO: 1944887 - DNA, 15 bp, Homo sapiens
gtctgctttacatat

SEQ ID NO: 1944888 - DNA, 15 bp, Homo sapiens
tctgctttacatatt

SEQ ID NO: 1944889 - DNA, 15 bp, Homo sapiens
ctgctttacatattt

SEQ ID NO: 1944890 - DNA, 15 bp, Homo sapiens
tgctttacatatttt

SEQ ID NO: 1944891 - DNA, 15 bp, Homo sapiens
gctttacatatttta

SEQ ID NO: 1944892 - DNA, 15 bp, Homo sapiens
ctttacatattttaa

SEQ ID NO: 1944893 - DNA, 15 bp, Homo sapiens
tttacatattttaac

SEQ ID NO: 1944894 - DNA, 15 bp, Homo sapiens
ttacatattttaact

SEQ ID NO: 1944895 - DNA, 15 bp, Homo sapiens
tacatattttaactt

SEQ ID NO: 1944896 - DNA, 15 bp, Homo sapiens
acatattttaacttt

SEQ ID NO: 1944897 - DNA, 15 bp, Homo sapiens
catattttaactttt

SEQ ID NO: 1944898 - DNA, 15 bp, Homo sapiens
atattttaactttta

SEQ ID NO: 1944899 - DNA, 15 bp, Homo sapiens
tattttaacttttat

SEQ ID NO: 1944900 - DNA, 15 bp, Homo sapiens
attttaacttttatt

SEQ ID NO: 1944901 - DNA, 15 bp, Homo sapiens
ttttaacttttattc

SEQ ID NO: 1944902 - DNA, 15 bp, Homo sapiens
tttaacttttattcc

SEQ ID NO: 1944903 - DNA, 15 bp, Homo sapiens
ttaacttttattcca

SEQ ID NO: 1944904 - DNA, 15 bp, Homo sapiens
taacttttattccag

SEQ ID NO: 1944905 - DNA, 15 bp, Homo sapiens
aacttttattccagc

SEQ ID NO: 1944906 - DNA, 15 bp, Homo sapiens
acttttattccagct

SEQ ID NO: 1944907 - DNA, 15 bp, Homo sapiens
cttttattccagctg

SEQ ID NO: 1944908 - DNA, 15 bp, Homo sapiens
ttttattccagctgc

SEQ ID NO: 1944909 - DNA, 15 bp, Homo sapiens
tttattccagctgca

SEQ ID NO: 1944910 - DNA, 15 bp, Homo sapiens
ttattccagctgcat

SEQ ID NO: 1944911 - DNA, 15 bp, Homo sapiens
tattccagctgcatc

SEQ ID NO: 1944912 - DNA, 15 bp, Homo sapiens
attccagctgcatca

SEQ ID NO: 1944913 - DNA, 15 bp, Homo sapiens
ttccagctgcatcag

SEQ ID NO: 1944914 - DNA, 15 bp, Homo sapiens
tccagctgcatcagt

SEQ ID NO: 1944915 - DNA, 15 bp, Homo sapiens
ccagctgcatcagtc

SEQ ID NO: 1944916 - DNA, 15 bp, Homo sapiens
cagctgcatcagtca

SEQ ID NO: 1944917 - DNA, 15 bp, Homo sapiens
agctgcatcagtcac

SEQ ID NO: 1944918 - DNA, 15 bp, Homo sapiens
gctgcatcagtcacc

SEQ ID NO: 1944919 - DNA, 15 bp, Homo sapiens
ctgcatcagtcacct

SEQ ID NO: 1944920 - DNA, 15 bp, Homo sapiens
tgcatcagtcacctc

SEQ ID NO: 1944921 - DNA, 15 bp, Homo sapiens
gcatcagtcacctcg

SEQ ID NO: 1944922 - DNA, 15 bp, Homo sapiens
catcagtcacctcga

SEQ ID NO: 1944923 - DNA, 15 bp, Homo sapiens
atcagtcacctcgag

SEQ ID NO: 1944924 - DNA, 15 bp, Homo sapiens
tcagtcacctcgagt

SEQ ID NO: 1944925 - DNA, 15 bp, Homo sapiens
cagtcacctcgagtc

SEQ ID NO: 1944926 - DNA, 15 bp, Homo sapiens
agtcacctcgagtca

SEQ ID NO: 1944927 - DNA, 15 bp, Homo sapiens
gtcacctcgagtcat

SEQ ID NO: 1944928 - DNA, 15 bp, Homo sapiens
tcacctcgagtcatt

SEQ ID NO: 1944929 - DNA, 15 bp, Homo sapiens
cacctcgagtcattc

SEQ ID NO: 1944930 - DNA, 15 bp, Homo sapiens
acctcgagtcattct

SEQ ID NO: 1944931 - DNA, 15 bp, Homo sapiens
cctcgagtcattctg

SEQ ID NO: 1944932 - DNA, 15 bp, Homo sapiens
ctcgagtcattctgt

SEQ ID NO: 1944933 - DNA, 15 bp, Homo sapiens
tcgagtcattctgtt

SEQ ID NO: 1944934 - DNA, 15 bp, Homo sapiens
cgagtcattctgttt

SEQ ID NO: 1944935 - DNA, 15 bp, Homo sapiens
gagtcattctgtttc

SEQ ID NO: 1944936 - DNA, 15 bp, Homo sapiens
agtcattctgtttcc

SEQ ID NO: 1944937 - DNA, 15 bp, Homo sapiens
gtcattctgtttccc

SEQ ID NO: 1944938 - DNA, 15 bp, Homo sapiens
tcattctgtttccca

SEQ ID NO: 1944939 - DNA, 15 bp, Homo sapiens
cattctgtttcccat

SEQ ID NO: 1944940 - DNA, 15 bp, Homo sapiens
attctgtttcccata

SEQ ID NO: 1944941 - DNA, 15 bp, Homo sapiens
ttctgtttcccatac

SEQ ID NO: 1944942 - DNA, 15 bp, Homo sapiens
tctgtttcccataca

SEQ ID NO: 1944943 - DNA, 15 bp, Homo sapiens
ctgtttcccatacac

SEQ ID NO: 1944944 - DNA, 15 bp, Homo sapiens
tgtttcccatacacc

SEQ ID NO: 1944945 - DNA, 15 bp, Homo sapiens
gtttcccatacacct

SEQ ID NO: 1944946 - DNA, 15 bp, Homo sapiens
tttcccatacacctt

SEQ ID NO: 1944947 - DNA, 15 bp, Homo sapiens
ttcccatacaccttg

SEQ ID NO: 1944948 - DNA, 15 bp, Homo sapiens
tcccatacaccttga

SEQ ID NO: 1944949 - DNA, 15 bp, Homo sapiens
cccatacaccttgat

SEQ ID NO: 1944950 - DNA, 15 bp, Homo sapiens
ccatacaccttgatg

SEQ ID NO: 1944951 - DNA, 15 bp, Homo sapiens
catacaccttgatgc

SEQ ID NO: 1944952 - DNA, 15 bp, Homo sapiens
atacaccttgatgcc

SEQ ID NO: 1944953 - DNA, 15 bp, Homo sapiens
tacaccttgatgcct

SEQ ID NO: 1944954 - DNA, 15 bp, Homo sapiens
acaccttgatgcctt

SEQ ID NO: 1944955 - DNA, 15 bp, Homo sapiens
caccttgatgccttt

SEQ ID NO: 1944956 - DNA, 15 bp, Homo sapiens
accttgatgcctttg

SEQ ID NO: 1944957 - DNA, 15 bp, Homo sapiens
ccttgatgcctttgc

SEQ ID NO: 1944958 - DNA, 15 bp, Homo sapiens
cttgatgcctttgct

SEQ ID NO: 1944959 - DNA, 15 bp, Homo sapiens
ttgatgcctttgctc

SEQ ID NO: 1944960 - DNA, 15 bp, Homo sapiens
tgatgcctttgctcc

SEQ ID NO: 1944961 - DNA, 15 bp, Homo sapiens
gatgcctttgctcct

SEQ ID NO: 1944962 - DNA, 15 bp, Homo sapiens
atgcctttgctcctg

SEQ ID NO: 1944963 - DNA, 15 bp, Homo sapiens
tgcctttgctcctgt

SEQ ID NO: 1944964 - DNA, 15 bp, Homo sapiens
gcctttgctcctgtc

SEQ ID NO: 1944965 - DNA, 15 bp, Homo sapiens
cctttgctcctgtct

SEQ ID NO: 1944966 - DNA, 15 bp, Homo sapiens
ctttgctcctgtctc

SEQ ID NO: 1944967 - DNA, 15 bp, Homo sapiens
tttgctcctgtctct

SEQ ID NO: 1944968 - DNA, 15 bp, Homo sapiens
ttgctcctgtctctt

SEQ ID NO: 1944969 - DNA, 15 bp, Homo sapiens
tgctcctgtctcttt

SEQ ID NO: 1944970 - DNA, 15 bp, Homo sapiens
gctcctgtctctttc

SEQ ID NO: 1944971 - DNA, 15 bp, Homo sapiens
ctcctgtctctttct

SEQ ID NO: 1944972 - DNA, 15 bp, Homo sapiens
tcctgtctctttctc

SEQ ID NO: 1944973 - DNA, 15 bp, Homo sapiens
cctgtctctttctcc

SEQ ID NO: 1944974 - DNA, 15 bp, Homo sapiens
ctgtctctttctcct

SEQ ID NO: 1944975 - DNA, 15 bp, Homo sapiens
tgtctctttctcctc

SEQ ID NO: 1944976 - DNA, 15 bp, Homo sapiens
gtctctttctcctca

SEQ ID NO: 1944977 - DNA, 15 bp, Homo sapiens
tctctttctcctcac

SEQ ID NO: 1944978 - DNA, 15 bp, Homo sapiens
ctctttctcctcacc

SEQ ID NO: 1944979 - DNA, 15 bp, Homo sapiens
tctttctcctcacct

SEQ ID NO: 1944980 - DNA, 15 bp, Homo sapiens
ctttctcctcacctg

SEQ ID NO: 1944981 - DNA, 15 bp, Homo sapiens
tttctcctcacctgg

SEQ ID NO: 1944982 - DNA, 15 bp, Homo sapiens
ttctcctcacctggg

SEQ ID NO: 1944983 - DNA, 15 bp, Homo sapiens
tctcctcacctgggg

SEQ ID NO: 1944984 - DNA, 15 bp, Homo sapiens
ctcctcacctgggga

SEQ ID NO: 1944985 - DNA, 15 bp, Homo sapiens
tcctcacctggggac

SEQ ID NO: 1944986 - DNA, 15 bp, Homo sapiens
cctcacctggggaca

SEQ ID NO: 1944987 - DNA, 15 bp, Homo sapiens
ctcacctggggacac

SEQ ID NO: 1944988 - DNA, 15 bp, Homo sapiens
tcacctggggacacc

SEQ ID NO: 1944989 - DNA, 15 bp, Homo sapiens
cacctggggacacct

SEQ ID NO: 1944990 - DNA, 15 bp, Homo sapiens
acctggggacacctt

SEQ ID NO: 1944991 - DNA, 15 bp, Homo sapiens
cctggggacaccttc

SEQ ID NO: 1944992 - DNA, 15 bp, Homo sapiens
ctggggacaccttca

SEQ ID NO: 1944993 - DNA, 15 bp, Homo sapiens
tggggacaccttcac

SEQ ID NO: 1944994 - DNA, 15 bp, Homo sapiens
ggggacaccttcacc

SEQ ID NO: 1944995 - DNA, 15 bp, Homo sapiens
gggacaccttcacct

SEQ ID NO: 1944996 - DNA, 15 bp, Homo sapiens
ggacaccttcacctt

SEQ ID NO: 1944997 - DNA, 15 bp, Homo sapiens
gacaccttcaccttt

SEQ ID NO: 1944998 - DNA, 15 bp, Homo sapiens
acaccttcacctttt

SEQ ID NO: 1944999 - DNA, 15 bp, Homo sapiens
caccttcaccttttt

SEQ ID NO: 1945000 - DNA, 15 bp, Homo sapiens
accttcacctttttt

SEQ ID NO: 1945001 - DNA, 15 bp, Homo sapiens
ccttcacctttttta

SEQ ID NO: 1945002 - DNA, 15 bp, Homo sapiens
cttcaccttttttac

SEQ ID NO: 1945003 - DNA, 15 bp, Homo sapiens
ttcaccttttttact

SEQ ID NO: 1945004 - DNA, 15 bp, Homo sapiens
tcaccttttttactt

SEQ ID NO: 1945005 - DNA, 15 bp, Homo sapiens
caccttttttacttc

SEQ ID NO: 1945006 - DNA, 15 bp, Homo sapiens
accttttttacttct

SEQ ID NO: 1945007 - DNA, 15 bp, Homo sapiens
ccttttttacttctg

SEQ ID NO: 1945008 - DNA, 15 bp, Homo sapiens
cttttttacttctgg

SEQ ID NO: 1945009 - DNA, 15 bp, Homo sapiens
ttttttacttctggg

SEQ ID NO: 1945010 - DNA, 15 bp, Homo sapiens
tttttacttctggga

SEQ ID NO: 1945011 - DNA, 15 bp, Homo sapiens
ttttacttctgggaa

SEQ ID NO: 1945012 - DNA, 15 bp, Homo sapiens
tttacttctgggaat

SEQ ID NO: 1945013 - DNA, 15 bp, Homo sapiens
ttacttctgggaatt

SEQ ID NO: 1945014 - DNA, 15 bp, Homo sapiens
tacttctgggaatta

SEQ ID NO: 1945015 - DNA, 15 bp, Homo sapiens
acttctgggaattag

SEQ ID NO: 1945016 - DNA, 15 bp, Homo sapiens
cttctgggaattagc

SEQ ID NO: 1945017 - DNA, 15 bp, Homo sapiens
ttctgggaattagca

SEQ ID NO: 1945018 - DNA, 15 bp, Homo sapiens
tctgggaattagcac

SEQ ID NO: 1945019 - DNA, 15 bp, Homo sapiens
ctgggaattagcaca

SEQ ID NO: 1945020 - DNA, 15 bp, Homo sapiens
tgggaattagcacag

SEQ ID NO: 1945021 - DNA, 15 bp, Homo sapiens
gggaattagcacagc

SEQ ID NO: 1945022 - DNA, 15 bp, Homo sapiens
ggaattagcacagca

SEQ ID NO: 1945023 - DNA, 15 bp, Homo sapiens
gaattagcacagcac

SEQ ID NO: 1945024 - DNA, 15 bp, Homo sapiens
aattagcacagcaca

SEQ ID NO: 1945025 - DNA, 15 bp, Homo sapiens
attagcacagcacag

SEQ ID NO: 1945026 - DNA, 15 bp, Homo sapiens
ttagcacagcacagt

SEQ ID NO: 1945027 - DNA, 15 bp, Homo sapiens
tagcacagcacagta

SEQ ID NO: 1945028 - DNA, 15 bp, Homo sapiens
agcacagcacagtag

SEQ ID NO: 1945029 - DNA, 15 bp, Homo sapiens
gcacagcacagtagt

SEQ ID NO: 1945030 - DNA, 15 bp, Homo sapiens
cacagcacagtagtc

SEQ ID NO: 1945031 - DNA, 15 bp, Homo sapiens
acagcacagtagtcc

SEQ ID NO: 1945032 - DNA, 15 bp, Homo sapiens
cagcacagtagtcct

SEQ ID NO: 1945033 - DNA, 15 bp, Homo sapiens
agcacagtagtccta

SEQ ID NO: 1945034 - DNA, 15 bp, Homo sapiens
gcacagtagtcctag

SEQ ID NO: 1945035 - DNA, 15 bp, Homo sapiens
cacagtagtcctaga

SEQ ID NO: 1945036 - DNA, 15 bp, Homo sapiens
acagtagtcctagaa

SEQ ID NO: 1945037 - DNA, 15 bp, Homo sapiens
cagtagtcctagaat

SEQ ID NO: 1945038 - DNA, 15 bp, Homo sapiens
agtagtcctagaatg

SEQ ID NO: 1945039 - DNA, 15 bp, Homo sapiens
gtagtcctagaatga

SEQ ID NO: 1945040 - DNA, 15 bp, Homo sapiens
tagtcctagaatgaa

SEQ ID NO: 1945041 - DNA, 15 bp, Homo sapiens
agtcctagaatgaac

SEQ ID NO: 1945042 - DNA, 15 bp, Homo sapiens
gtcctagaatgaact

SEQ ID NO: 1945043 - DNA, 15 bp, Homo sapiens
tcctagaatgaactc

SEQ ID NO: 1945044 - DNA, 15 bp, Homo sapiens
cctagaatgaactct

SEQ ID NO: 1945045 - DNA, 15 bp, Homo sapiens
ctagaatgaactcta

SEQ ID NO: 1945046 - DNA, 15 bp, Homo sapiens
tagaatgaactctag

SEQ ID NO: 1945047 - DNA, 15 bp, Homo sapiens
agaatgaactctaga

SEQ ID NO: 1945048 - DNA, 15 bp, Homo sapiens
gaatgaactctagaa

SEQ ID NO: 1945049 - DNA, 15 bp, Homo sapiens
aatgaactctagaac

SEQ ID NO: 1945050 - DNA, 15 bp, Homo sapiens
atgaactctagaacc

SEQ ID NO: 1945051 - DNA, 15 bp, Homo sapiens
tgaactctagaacca

SEQ ID NO: 1945052 - DNA, 15 bp, Homo sapiens
gaactctagaaccaa

SEQ ID NO: 1945053 - DNA, 15 bp, Homo sapiens
aactctagaaccaaa

SEQ ID NO: 1945054 - DNA, 15 bp, Homo sapiens
actctagaaccaaac

SEQ ID NO: 1945055 - DNA, 15 bp, Homo sapiens
ctctagaaccaaacg

SEQ ID NO: 1945056 - DNA, 15 bp, Homo sapiens
tctagaaccaaacgc

SEQ ID NO: 1945057 - DNA, 15 bp, Homo sapiens
ctagaaccaaacgct

SEQ ID NO: 1945058 - DNA, 15 bp, Homo sapiens
tagaaccaaacgctt

SEQ ID NO: 1945059 - DNA, 15 bp, Homo sapiens
agaaccaaacgcttt

SEQ ID NO: 1945060 - DNA, 15 bp, Homo sapiens
gaaccaaacgctttc

SEQ ID NO: 1945061 - DNA, 15 bp, Homo sapiens
aaccaaacgctttct

SEQ ID NO: 1945062 - DNA, 15 bp, Homo sapiens
accaaacgctttcta

SEQ ID NO: 1945063 - DNA, 15 bp, Homo sapiens
ccaaacgctttctag

SEQ ID NO: 1945064 - DNA, 15 bp, Homo sapiens
caaacgctttctagt

SEQ ID NO: 1945065 - DNA, 15 bp, Homo sapiens
aaacgctttctagtg

SEQ ID NO: 1945066 - DNA, 15 bp, Homo sapiens
aacgctttctagtgg

SEQ ID NO: 1945067 - DNA, 15 bp, Homo sapiens
acgctttctagtggc

SEQ ID NO: 1945068 - DNA, 15 bp, Homo sapiens
cgctttctagtggcg

SEQ ID NO: 1945069 - DNA, 15 bp, Homo sapiens
gctttctagtggcgt

SEQ ID NO: 1945070 - DNA, 15 bp, Homo sapiens
ctttctagtggcgtg

SEQ ID NO: 1945071 - DNA, 15 bp, Homo sapiens
tttctagtggcgtgg

SEQ ID NO: 1945072 - DNA, 15 bp, Homo sapiens
ttctagtggcgtggt

SEQ ID NO: 1945073 - DNA, 15 bp, Homo sapiens
tctagtggcgtggtc

SEQ ID NO: 1945074 - DNA, 15 bp, Homo sapiens
ctagtggcgtggtct

SEQ ID NO: 1945075 - DNA, 15 bp, Homo sapiens
tagtggcgtggtctt

SEQ ID NO: 1945076 - DNA, 15 bp, Homo sapiens
agtggcgtggtctta

SEQ ID NO: 1945077 - DNA, 15 bp, Homo sapiens
gtggcgtggtcttag

SEQ ID NO: 1945078 - DNA, 15 bp, Homo sapiens
tggcgtggtcttaga

SEQ ID NO: 1945079 - DNA, 15 bp, Homo sapiens
ggcgtggtcttagat

SEQ ID NO: 1945080 - DNA, 15 bp, Homo sapiens
gcgtggtcttagata

SEQ ID NO: 1945081 - DNA, 15 bp, Homo sapiens
cgtggtcttagatat

SEQ ID NO: 1945082 - DNA, 15 bp, Homo sapiens
gtggtcttagatatg

SEQ ID NO: 1945083 - DNA, 15 bp, Homo sapiens
tggtcttagatatgt

SEQ ID NO: 1945084 - DNA, 15 bp, Homo sapiens
ggtcttagatatgtt

SEQ ID NO: 1945085 - DNA, 15 bp, Homo sapiens
gtcttagatatgtta

SEQ ID NO: 1945086 - DNA, 15 bp, Homo sapiens
tcttagatatgttac

SEQ ID NO: 1945087 - DNA, 15 bp, Homo sapiens
cttagatatgttact

SEQ ID NO: 1945088 - DNA, 15 bp, Homo sapiens
ttagatatgttactt

SEQ ID NO: 1945089 - DNA, 15 bp, Homo sapiens
tagatatgttactta

SEQ ID NO: 1945090 - DNA, 15 bp, Homo sapiens
agatatgttacttaa

SEQ ID NO: 1945091 - DNA, 15 bp, Homo sapiens
gatatgttacttaaa

SEQ ID NO: 1945092 - DNA, 15 bp, Homo sapiens
atatgttacttaaat

SEQ ID NO: 1945093 - DNA, 15 bp, Homo sapiens
tatgttacttaaatc

SEQ ID NO: 1945094 - DNA, 15 bp, Homo sapiens
atgttacttaaatct

SEQ ID NO: 1945095 - DNA, 15 bp, Homo sapiens
tgttacttaaatcta

SEQ ID NO: 1945096 - DNA, 15 bp, Homo sapiens
gttacttaaatctat

SEQ ID NO: 1945097 - DNA, 15 bp, Homo sapiens
ttacttaaatctatc

SEQ ID NO: 1945098 - DNA, 15 bp, Homo sapiens
tacttaaatctatct

SEQ ID NO: 1945099 - DNA, 15 bp, Homo sapiens
acttaaatctatctg

SEQ ID NO: 1945100 - DNA, 15 bp, Homo sapiens
cttaaatctatctgt

SEQ ID NO: 1945101 - DNA, 15 bp, Homo sapiens
ttaaatctatctgtg

SEQ ID NO: 1945102 - DNA, 15 bp, Homo sapiens
taaatctatctgtgc

SEQ ID NO: 1945103 - DNA, 15 bp, Homo sapiens
aaatctatctgtgcc

SEQ ID NO: 1945104 - DNA, 15 bp, Homo sapiens
aatctatctgtgcct

SEQ ID NO: 1945105 - DNA, 15 bp, Homo sapiens
atctatctgtgcctc

SEQ ID NO: 1945106 - DNA, 15 bp, Homo sapiens
tctatctgtgcctca

SEQ ID NO: 1945107 - DNA, 15 bp, Homo sapiens
ctatctgtgcctcag

SEQ ID NO: 1945108 - DNA, 15 bp, Homo sapiens
tatctgtgcctcagt

SEQ ID NO: 1945109 - DNA, 15 bp, Homo sapiens
atctgtgcctcagtt

SEQ ID NO: 1945110 - DNA, 15 bp, Homo sapiens
tgcctcagtttcctt

SEQ ID NO: 1945111 - DNA, 15 bp, Homo sapiens
gcctcagtttccttt

SEQ ID NO: 1945112 - DNA, 15 bp, Homo sapiens
cctcagtttcctttg

SEQ ID NO: 1945113 - DNA, 15 bp, Homo sapiens
ctcagtttcctttgc

SEQ ID NO: 1945114 - DNA, 15 bp, Homo sapiens
tcagtttcctttgca

SEQ ID NO: 1945115 - DNA, 15 bp, Homo sapiens
cagtttcctttgcag

SEQ ID NO: 1945116 - DNA, 15 bp, Homo sapiens
agtttcctttgcaga

SEQ ID NO: 1945117 - DNA, 15 bp, Homo sapiens
gtttcctttgcagaa

SEQ ID NO: 1945118 - DNA, 15 bp, Homo sapiens
tttcctttgcagaag

SEQ ID NO: 1945119 - DNA, 15 bp, Homo sapiens
ttcctttgcagaagt

SEQ ID NO: 1945120 - DNA, 15 bp, Homo sapiens
tcctttgcagaagtg

SEQ ID NO: 1945121 - DNA, 15 bp, Homo sapiens
cctttgcagaagtgg

SEQ ID NO: 1945122 - DNA, 15 bp, Homo sapiens
ctttgcagaagtggg

SEQ ID NO: 1945123 - DNA, 15 bp, Homo sapiens
tttgcagaagtggga

SEQ ID NO: 1945124 - DNA, 15 bp, Homo sapiens
ttgcagaagtgggat

SEQ ID NO: 1945125 - DNA, 15 bp, Homo sapiens
tgcagaagtgggata

SEQ ID NO: 1945126 - DNA, 15 bp, Homo sapiens
gcagaagtgggatat

SEQ ID NO: 1945127 - DNA, 15 bp, Homo sapiens
cagaagtgggatata

SEQ ID NO: 1945128 - DNA, 15 bp, Homo sapiens
agaagtgggatataa

SEQ ID NO: 1945129 - DNA, 15 bp, Homo sapiens
gaagtgggatataat

SEQ ID NO: 1945130 - DNA, 15 bp, Homo sapiens
aagtgggatataata

SEQ ID NO: 1945131 - DNA, 15 bp, Homo sapiens
agtgggatataatat

SEQ ID NO: 1945132 - DNA, 15 bp, Homo sapiens
gtgggatataatatc

SEQ ID NO: 1945133 - DNA, 15 bp, Homo sapiens
tgggatataatatca

SEQ ID NO: 1945134 - DNA, 15 bp, Homo sapiens
gggatataatatcaa

SEQ ID NO: 1945135 - DNA, 15 bp, Homo sapiens
ggatataatatcaag

SEQ ID NO: 1945136 - DNA, 15 bp, Homo sapiens
gatataatatcaagg

SEQ ID NO: 1945137 - DNA, 15 bp, Homo sapiens
atataatatcaagga

SEQ ID NO: 1945138 - DNA, 15 bp, Homo sapiens
tataatatcaaggag

SEQ ID NO: 1945139 - DNA, 15 bp, Homo sapiens
ataatatcaaggaga

SEQ ID NO: 1945140 - DNA, 15 bp, Homo sapiens
taatatcaaggagat

SEQ ID NO: 1945141 - DNA, 15 bp, Homo sapiens
aatatcaaggagatg

SEQ ID NO: 1945142 - DNA, 15 bp, Homo sapiens
atatcaaggagatgg

SEQ ID NO: 1945143 - DNA, 15 bp, Homo sapiens
tatcaaggagatggc

SEQ ID NO: 1945144 - DNA, 15 bp, Homo sapiens
atcaaggagatggca

SEQ ID NO: 1945145 - DNA, 15 bp, Homo sapiens
tcaaggagatggcat

SEQ ID NO: 1945146 - DNA, 15 bp, Homo sapiens
caaggagatggcatg

SEQ ID NO: 1945147 - DNA, 15 bp, Homo sapiens
aaggagatggcatgt

SEQ ID NO: 1945148 - DNA, 15 bp, Homo sapiens
aggagatggcatgtg

SEQ ID NO: 1945149 - DNA, 15 bp, Homo sapiens
ggagatggcatgtgc

SEQ ID NO: 1945150 - DNA, 15 bp, Homo sapiens
gagatggcatgtgcc

SEQ ID NO: 1945151 - DNA, 15 bp, Homo sapiens
agatggcatgtgcct

SEQ ID NO: 1945152 - DNA, 15 bp, Homo sapiens
gatggcatgtgccta

SEQ ID NO: 1945153 - DNA, 15 bp, Homo sapiens
atggcatgtgcctaa

SEQ ID NO: 1945154 - DNA, 15 bp, Homo sapiens
tggcatgtgcctaac

SEQ ID NO: 1945155 - DNA, 15 bp, Homo sapiens
ggcatgtgcctaacc

SEQ ID NO: 1945156 - DNA, 15 bp, Homo sapiens
gcatgtgcctaaccc

SEQ ID NO: 1945157 - DNA, 15 bp, Homo sapiens
catgtgcctaaccca

SEQ ID NO: 1945158 - DNA, 15 bp, Homo sapiens
atgtgcctaacccac

SEQ ID NO: 1945159 - DNA, 15 bp, Homo sapiens
tgtgcctaacccaca

SEQ ID NO: 1945160 - DNA, 15 bp, Homo sapiens
gtgcctaacccacaa

SEQ ID NO: 1945161 - DNA, 15 bp, Homo sapiens
tgcctaacccacaat

SEQ ID NO: 1945162 - DNA, 15 bp, Homo sapiens
gcctaacccacaata

SEQ ID NO: 1945163 - DNA, 15 bp, Homo sapiens
cctaacccacaataa

SEQ ID NO: 1945164 - DNA, 15 bp, Homo sapiens
ctaacccacaataat

SEQ ID NO: 1945165 - DNA, 15 bp, Homo sapiens
taacccacaataatt

SEQ ID NO: 1945166 - DNA, 15 bp, Homo sapiens
aacccacaataattc

SEQ ID NO: 1945167 - DNA, 15 bp, Homo sapiens
acccacaataattcc

SEQ ID NO: 1945168 - DNA, 15 bp, Homo sapiens
cccacaataattcct

SEQ ID NO: 1945169 - DNA, 15 bp, Homo sapiens
ccacaataattccta

SEQ ID NO: 1945170 - DNA, 15 bp, Homo sapiens
cacaataattcctac

SEQ ID NO: 1945171 - DNA, 15 bp, Homo sapiens
acaataattcctaca

SEQ ID NO: 1945172 - DNA, 15 bp, Homo sapiens
caataattcctacaa

SEQ ID NO: 1945173 - DNA, 15 bp, Homo sapiens
aataattcctacaaa

SEQ ID NO: 1945174 - DNA, 15 bp, Homo sapiens
ataattcctacaaaa

SEQ ID NO: 1945175 - DNA, 15 bp, Homo sapiens
taattcctacaaaag

SEQ ID NO: 1945176 - DNA, 15 bp, Homo sapiens
aattcctacaaaagt

SEQ ID NO: 1945177 - DNA, 15 bp, Homo sapiens
attcctacaaaagtg

SEQ ID NO: 1945178 - DNA, 15 bp, Homo sapiens
ttcctacaaaagtgt

SEQ ID NO: 1945179 - DNA, 15 bp, Homo sapiens
tcctacaaaagtgtt

SEQ ID NO: 1945180 - DNA, 15 bp, Homo sapiens
cctacaaaagtgttt

SEQ ID NO: 1945181 - DNA, 15 bp, Homo sapiens
ctacaaaagtgtttg

SEQ ID NO: 1945182 - DNA, 15 bp, Homo sapiens
tacaaaagtgtttgc

SEQ ID NO: 1945183 - DNA, 15 bp, Homo sapiens
acaaaagtgtttgct

SEQ ID NO: 1945184 - DNA, 15 bp, Homo sapiens
caaaagtgtttgcta

SEQ ID NO: 1945185 - DNA, 15 bp, Homo sapiens
aaaagtgtttgctat

SEQ ID NO: 1945186 - DNA, 15 bp, Homo sapiens
aaagtgtttgctatt

SEQ ID NO: 1945187 - DNA, 15 bp, Homo sapiens
aagtgtttgctatta

SEQ ID NO: 1945188 - DNA, 15 bp, Homo sapiens
agtgtttgctattat

SEQ ID NO: 1945189 - DNA, 15 bp, Homo sapiens
gtgtttgctattatt

SEQ ID NO: 1945190 - DNA, 15 bp, Homo sapiens
tgtttgctattattg

SEQ ID NO: 1945191 - DNA, 15 bp, Homo sapiens
gtttgctattattgt

SEQ ID NO: 1945192 - DNA, 15 bp, Homo sapiens
tttgctattattgtt

SEQ ID NO: 1945193 - DNA, 15 bp, Homo sapiens
ttgctattattgttt

SEQ ID NO: 1945194 - DNA, 15 bp, Homo sapiens
tgctattattgtttt

SEQ ID NO: 1945195 - DNA, 15 bp, Homo sapiens
gctattattgttttt

SEQ ID NO: 1945196 - DNA, 15 bp, Homo sapiens
ctattattgttttta

SEQ ID NO: 1945197 - DNA, 15 bp, Homo sapiens
tattattgtttttat

SEQ ID NO: 1945198 - DNA, 15 bp, Homo sapiens
attattgtttttatt

SEQ ID NO: 1945199 - DNA, 15 bp, Homo sapiens
ttattgtttttatta

SEQ ID NO: 1945200 - DNA, 15 bp, Homo sapiens
tattgtttttattac

SEQ ID NO: 1945201 - DNA, 15 bp, Homo sapiens
attgtttttattact

SEQ ID NO: 1945202 - DNA, 15 bp, Homo sapiens
ttgtttttattacta

SEQ ID NO: 1945203 - DNA, 15 bp, Homo sapiens
gtttttattactatt

SEQ ID NO: 1945204 - DNA, 15 bp, Homo sapiens
tttttattactatta

SEQ ID NO: 1945205 - DNA, 15 bp, Homo sapiens
ttttattactattat

SEQ ID NO: 1945206 - DNA, 15 bp, Homo sapiens
tttattactattatt

SEQ ID NO: 1945207 - DNA, 15 bp, Homo sapiens
ttattactattatta

SEQ ID NO: 1945208 - DNA, 15 bp, Homo sapiens
tattactattattaa

SEQ ID NO: 1945209 - DNA, 15 bp, Homo sapiens
attactattattaag

SEQ ID NO: 1945210 - DNA, 15 bp, Homo sapiens
ttactattattaaga

SEQ ID NO: 1945211 - DNA, 15 bp, Homo sapiens
tactattattaagat

SEQ ID NO: 1945212 - DNA, 15 bp, Homo sapiens
actattattaagatt

SEQ ID NO: 1945213 - DNA, 15 bp, Homo sapiens
ctattattaagattc

SEQ ID NO: 1945214 - DNA, 15 bp, Homo sapiens
tattattaagattca

SEQ ID NO: 1945215 - DNA, 15 bp, Homo sapiens
attattaagattcac

SEQ ID NO: 1945216 - DNA, 15 bp, Homo sapiens
ttattaagattcacc

SEQ ID NO: 1945217 - DNA, 15 bp, Homo sapiens
tattaagattcacct

SEQ ID NO: 1945218 - DNA, 15 bp, Homo sapiens
attaagattcacctc

SEQ ID NO: 1945219 - DNA, 15 bp, Homo sapiens
ttaagattcacctca

SEQ ID NO: 1945220 - DNA, 15 bp, Homo sapiens
taagattcacctcaa

SEQ ID NO: 1945221 - DNA, 15 bp, Homo sapiens
aagattcacctcaaa

SEQ ID NO: 1945222 - DNA, 15 bp, Homo sapiens
agattcacctcaaat

SEQ ID NO: 1945223 - DNA, 15 bp, Homo sapiens
gattcacctcaaatg

SEQ ID NO: 1945224 - DNA, 15 bp, Homo sapiens
attcacctcaaatgt

SEQ ID NO: 1945225 - DNA, 15 bp, Homo sapiens
ttcacctcaaatgtt

SEQ ID NO: 1945226 - DNA, 15 bp, Homo sapiens
tcacctcaaatgtta

SEQ ID NO: 1945227 - DNA, 15 bp, Homo sapiens
cacctcaaatgttac

SEQ ID NO: 1945228 - DNA, 15 bp, Homo sapiens
acctcaaatgttact

SEQ ID NO: 1945229 - DNA, 15 bp, Homo sapiens
cctcaaatgttactg

SEQ ID NO: 1945230 - DNA, 15 bp, Homo sapiens
ctcaaatgttactgt

SEQ ID NO: 1945231 - DNA, 15 bp, Homo sapiens
tcaaatgttactgtg

SEQ ID NO: 1945232 - DNA, 15 bp, Homo sapiens
caaatgttactgtgt

SEQ ID NO: 1945233 - DNA, 15 bp, Homo sapiens
aaatgttactgtgta

SEQ ID NO: 1945234 - DNA, 15 bp, Homo sapiens
aatgttactgtgtaa

SEQ ID NO: 1945235 - DNA, 15 bp, Homo sapiens
atgttactgtgtaac

SEQ ID NO: 1945236 - DNA, 15 bp, Homo sapiens
tgttactgtgtaacc

SEQ ID NO: 1945237 - DNA, 15 bp, Homo sapiens
gttactgtgtaacct

SEQ ID NO: 1945238 - DNA, 15 bp, Homo sapiens
ttactgtgtaacctt

SEQ ID NO: 1945239 - DNA, 15 bp, Homo sapiens
tactgtgtaaccttc

SEQ ID NO: 1945240 - DNA, 15 bp, Homo sapiens
actgtgtaaccttct

SEQ ID NO: 1945241 - DNA, 15 bp, Homo sapiens
ctgtgtaaccttctc

SEQ ID NO: 1945242 - DNA, 15 bp, Homo sapiens
tgtgtaaccttctcc

SEQ ID NO: 1945243 - DNA, 15 bp, Homo sapiens
gtgtaaccttctccc

SEQ ID NO: 1945244 - DNA, 15 bp, Homo sapiens
tgtaaccttctccca

SEQ ID NO: 1945245 - DNA, 15 bp, Homo sapiens
gtaaccttctcccac

SEQ ID NO: 1945246 - DNA, 15 bp, Homo sapiens
taaccttctcccacc

SEQ ID NO: 1945247 - DNA, 15 bp, Homo sapiens
aaccttctcccacct

SEQ ID NO: 1945248 - DNA, 15 bp, Homo sapiens
accttctcccacctt

SEQ ID NO: 1945249 - DNA, 15 bp, Homo sapiens
ccttctcccaccttt

SEQ ID NO: 1945250 - DNA, 15 bp, Homo sapiens
cttctcccacctttt

SEQ ID NO: 1945251 - DNA, 15 bp, Homo sapiens
ttctcccaccttttc

SEQ ID NO: 1945252 - DNA, 15 bp, Homo sapiens
tctcccaccttttca

SEQ ID NO: 1945253 - DNA, 15 bp, Homo sapiens
ctcccaccttttcag

SEQ ID NO: 1945254 - DNA, 15 bp, Homo sapiens
tcccaccttttcagg

SEQ ID NO: 1945255 - DNA, 15 bp, Homo sapiens
cccaccttttcaggt

SEQ ID NO: 1945256 - DNA, 15 bp, Homo sapiens
ccaccttttcaggta

SEQ ID NO: 1945257 - DNA, 15 bp, Homo sapiens
caccttttcaggtat

SEQ ID NO: 1945258 - DNA, 15 bp, Homo sapiens
accttttcaggtata

SEQ ID NO: 1945259 - DNA, 15 bp, Homo sapiens
ccttttcaggtataa

SEQ ID NO: 1945260 - DNA, 15 bp, Homo sapiens
cttttcaggtataat

SEQ ID NO: 1945261 - DNA, 15 bp, Homo sapiens
ttttcaggtataatt

SEQ ID NO: 1945262 - DNA, 15 bp, Homo sapiens
tttcaggtataattc

SEQ ID NO: 1945263 - DNA, 15 bp, Homo sapiens
ttcaggtataattca

SEQ ID NO: 1945264 - DNA, 15 bp, Homo sapiens
tcaggtataattcat

SEQ ID NO: 1945265 - DNA, 15 bp, Homo sapiens
caggtataattcatt

SEQ ID NO: 1945266 - DNA, 15 bp, Homo sapiens
aggtataattcatta

SEQ ID NO: 1945267 - DNA, 15 bp, Homo sapiens
ggtataattcattac

SEQ ID NO: 1945268 - DNA, 15 bp, Homo sapiens
gtataattcattact

SEQ ID NO: 1945269 - DNA, 15 bp, Homo sapiens
tataattcattactt

SEQ ID NO: 1945270 - DNA, 15 bp, Homo sapiens
ataattcattacttc

SEQ ID NO: 1945271 - DNA, 15 bp, Homo sapiens
taattcattacttcc

SEQ ID NO: 1945272 - DNA, 15 bp, Homo sapiens
aattcattacttcct

SEQ ID NO: 1945273 - DNA, 15 bp, Homo sapiens
attcattacttcctc

SEQ ID NO: 1945274 - DNA, 15 bp, Homo sapiens
ttcattacttcctct

SEQ ID NO: 1945275 - DNA, 15 bp, Homo sapiens
tcattacttcctctt

SEQ ID NO: 1945276 - DNA, 15 bp, Homo sapiens
cattacttcctcttc

SEQ ID NO: 1945277 - DNA, 15 bp, Homo sapiens
attacttcctcttct

SEQ ID NO: 1945278 - DNA, 15 bp, Homo sapiens
ttacttcctcttctg

SEQ ID NO: 1945279 - DNA, 15 bp, Homo sapiens
tacttcctcttctgc

SEQ ID NO: 1945280 - DNA, 15 bp, Homo sapiens
acttcctcttctgca

SEQ ID NO: 1945281 - DNA, 15 bp, Homo sapiens
cttcctcttctgcag

SEQ ID NO: 1945282 - DNA, 15 bp, Homo sapiens
ttcctcttctgcagt

SEQ ID NO: 1945283 - DNA, 15 bp, Homo sapiens
tcctcttctgcagtc

SEQ ID NO: 1945284 - DNA, 15 bp, Homo sapiens
cctcttctgcagtcc

SEQ ID NO: 1945285 - DNA, 15 bp, Homo sapiens
ctcttctgcagtccc

SEQ ID NO: 1945286 - DNA, 15 bp, Homo sapiens
tcttctgcagtccca

SEQ ID NO: 1945287 - DNA, 15 bp, Homo sapiens
cttctgcagtcccac

SEQ ID NO: 1945288 - DNA, 15 bp, Homo sapiens
ttctgcagtcccaca

SEQ ID NO: 1945289 - DNA, 15 bp, Homo sapiens
tctgcagtcccacac

SEQ ID NO: 1945290 - DNA, 15 bp, Homo sapiens
ctgcagtcccacact

SEQ ID NO: 1945291 - DNA, 15 bp, Homo sapiens
tgcagtcccacactg

SEQ ID NO: 1945292 - DNA, 15 bp, Homo sapiens
gcagtcccacactgc

SEQ ID NO: 1945293 - DNA, 15 bp, Homo sapiens
cagtcccacactgcc

SEQ ID NO: 1945294 - DNA, 15 bp, Homo sapiens
agtcccacactgcca

SEQ ID NO: 1945295 - DNA, 15 bp, Homo sapiens
gtcccacactgccat

SEQ ID NO: 1945296 - DNA, 15 bp, Homo sapiens
tcccacactgccatg

SEQ ID NO: 1945297 - DNA, 15 bp, Homo sapiens
cccacactgccatgg

SEQ ID NO: 1945298 - DNA, 15 bp, Homo sapiens
ccacactgccatggt

SEQ ID NO: 1945299 - DNA, 15 bp, Homo sapiens
cacactgccatggtt

SEQ ID NO: 1945300 - DNA, 15 bp, Homo sapiens
acactgccatggttg

SEQ ID NO: 1945301 - DNA, 15 bp, Homo sapiens
cactgccatggttgc

SEQ ID NO: 1945302 - DNA, 15 bp, Homo sapiens
actgccatggttgct

SEQ ID NO: 1945303 - DNA, 15 bp, Homo sapiens
ctgccatggttgctt

SEQ ID NO: 1945304 - DNA, 15 bp, Homo sapiens
tgccatggttgcttt

SEQ ID NO: 1945305 - DNA, 15 bp, Homo sapiens
gccatggttgctttt

SEQ ID NO: 1945306 - DNA, 15 bp, Homo sapiens
ccatggttgctttta

SEQ ID NO: 1945307 - DNA, 15 bp, Homo sapiens
catggttgcttttat

SEQ ID NO: 1945308 - DNA, 15 bp, Homo sapiens
atggttgcttttatc

SEQ ID NO: 1945309 - DNA, 15 bp, Homo sapiens
tggttgcttttatca

SEQ ID NO: 1945310 - DNA, 15 bp, Homo sapiens
ggttgcttttatcac

SEQ ID NO: 1945311 - DNA, 15 bp, Homo sapiens
gttgcttttatcaca

SEQ ID NO: 1945312 - DNA, 15 bp, Homo sapiens
ttgcttttatcacac

SEQ ID NO: 1945313 - DNA, 15 bp, Homo sapiens
tgcttttatcacact

SEQ ID NO: 1945314 - DNA, 15 bp, Homo sapiens
gcttttatcacactg

SEQ ID NO: 1945315 - DNA, 15 bp, Homo sapiens
cttttatcacactgt

SEQ ID NO: 1945316 - DNA, 15 bp, Homo sapiens
ttttatcacactgtt

SEQ ID NO: 1945317 - DNA, 15 bp, Homo sapiens
tttatcacactgtta

SEQ ID NO: 1945318 - DNA, 15 bp, Homo sapiens
ttatcacactgttaa

SEQ ID NO: 1945319 - DNA, 15 bp, Homo sapiens
tatcacactgttaag

SEQ ID NO: 1945320 - DNA, 15 bp, Homo sapiens
atcacactgttaaga

SEQ ID NO: 1945321 - DNA, 15 bp, Homo sapiens
tcacactgttaagag

SEQ ID NO: 1945322 - DNA, 15 bp, Homo sapiens
cacactgttaagaga

SEQ ID NO: 1945323 - DNA, 15 bp, Homo sapiens
acactgttaagagag

SEQ ID NO: 1945324 - DNA, 15 bp, Homo sapiens
cactgttaagagagt

SEQ ID NO: 1945325 - DNA, 15 bp, Homo sapiens
actgttaagagagtt

SEQ ID NO: 1945326 - DNA, 15 bp, Homo sapiens
ctgttaagagagttg

SEQ ID NO: 1945327 - DNA, 15 bp, Homo sapiens
tgttaagagagttga

SEQ ID NO: 1945328 - DNA, 15 bp, Homo sapiens
gttaagagagttgaa

SEQ ID NO: 1945329 - DNA, 15 bp, Homo sapiens
ttaagagagttgaat

SEQ ID NO: 1945330 - DNA, 15 bp, Homo sapiens
taagagagttgaata

SEQ ID NO: 1945331 - DNA, 15 bp, Homo sapiens
aagagagttgaatat

SEQ ID NO: 1945332 - DNA, 15 bp, Homo sapiens
agagagttgaatatg

SEQ ID NO: 1945333 - DNA, 15 bp, Homo sapiens
gagagttgaatatgt

SEQ ID NO: 1945334 - DNA, 15 bp, Homo sapiens
agagttgaatatgta

SEQ ID NO: 1945335 - DNA, 15 bp, Homo sapiens
gagttgaatatgtac

SEQ ID NO: 1945336 - DNA, 15 bp, Homo sapiens
agttgaatatgtact

SEQ ID NO: 1945337 - DNA, 15 bp, Homo sapiens
gttgaatatgtactt

SEQ ID NO: 1945338 - DNA, 15 bp, Homo sapiens
ttgaatatgtacttt

SEQ ID NO: 1945339 - DNA, 15 bp, Homo sapiens
tgaatatgtactttt

SEQ ID NO: 1945340 - DNA, 15 bp, Homo sapiens
gaatatgtacttttt

SEQ ID NO: 1945341 - DNA, 15 bp, Homo sapiens
aatatgtactttttt

SEQ ID NO: 1945342 - DNA, 15 bp, Homo sapiens
atatgtacttttttg

SEQ ID NO: 1945343 - DNA, 15 bp, Homo sapiens
tatgtacttttttgt

SEQ ID NO: 1945344 - DNA, 15 bp, Homo sapiens
atgtacttttttgtt

SEQ ID NO: 1945345 - DNA, 15 bp, Homo sapiens
tgtacttttttgttg

SEQ ID NO: 1945346 - DNA, 15 bp, Homo sapiens
gtacttttttgttgt

SEQ ID NO: 1945347 - DNA, 15 bp, Homo sapiens
tacttttttgttgtt

SEQ ID NO: 1945348 - DNA, 15 bp, Homo sapiens
acttttttgttgtta

SEQ ID NO: 1945349 - DNA, 15 bp, Homo sapiens
cttttttgttgttat

SEQ ID NO: 1945350 - DNA, 15 bp, Homo sapiens
ttttttgttgttata

SEQ ID NO: 1945351 - DNA, 15 bp, Homo sapiens
tttttgttgttatag

SEQ ID NO: 1945352 - DNA, 15 bp, Homo sapiens
ttttgttgttataga

SEQ ID NO: 1945353 - DNA, 15 bp, Homo sapiens
tttgttgttatagat

SEQ ID NO: 1945354 - DNA, 15 bp, Homo sapiens
ttgttgttatagatt

SEQ ID NO: 1945355 - DNA, 15 bp, Homo sapiens
tgttgttatagatta

SEQ ID NO: 1945356 - DNA, 15 bp, Homo sapiens
gttgttatagattat

SEQ ID NO: 1945357 - DNA, 15 bp, Homo sapiens
ttgttatagattatg

SEQ ID NO: 1945358 - DNA, 15 bp, Homo sapiens
tgttatagattatga

SEQ ID NO: 1945359 - DNA, 15 bp, Homo sapiens
gttatagattatgaa

SEQ ID NO: 1945360 - DNA, 15 bp, Homo sapiens
ttatagattatgaat

SEQ ID NO: 1945361 - DNA, 15 bp, Homo sapiens
tatagattatgaatt

SEQ ID NO: 1945362 - DNA, 15 bp, Homo sapiens
atagattatgaattc

SEQ ID NO: 1945363 - DNA, 15 bp, Homo sapiens
tagattatgaattcc

SEQ ID NO: 1945364 - DNA, 15 bp, Homo sapiens
agattatgaattcct

SEQ ID NO: 1945365 - DNA, 15 bp, Homo sapiens
gattatgaattcctt

SEQ ID NO: 1945366 - DNA, 15 bp, Homo sapiens
attatgaattcctta

SEQ ID NO: 1945367 - DNA, 15 bp, Homo sapiens
ttatgaattccttaa

SEQ ID NO: 1945368 - DNA, 15 bp, Homo sapiens
tatgaattccttaag

SEQ ID NO: 1945369 - DNA, 15 bp, Homo sapiens
atgaattccttaagg

SEQ ID NO: 1945370 - DNA, 15 bp, Homo sapiens
tgaattccttaaggg

SEQ ID NO: 1945371 - DNA, 15 bp, Homo sapiens
gaattccttaagggc

SEQ ID NO: 1945372 - DNA, 15 bp, Homo sapiens
aattccttaagggca

SEQ ID NO: 1945373 - DNA, 15 bp, Homo sapiens
attccttaagggcag

SEQ ID NO: 1945374 - DNA, 15 bp, Homo sapiens
ttccttaagggcagc

SEQ ID NO: 1945375 - DNA, 15 bp, Homo sapiens
tccttaagggcagca

SEQ ID NO: 1945376 - DNA, 15 bp, Homo sapiens
ccttaagggcagcag

SEQ ID NO: 1945377 - DNA, 15 bp, Homo sapiens
cttaagggcagcagt

SEQ ID NO: 1945378 - DNA, 15 bp, Homo sapiens
ttaagggcagcagtc

SEQ ID NO: 1945379 - DNA, 15 bp, Homo sapiens
taagggcagcagtca

SEQ ID NO: 1945380 - DNA, 15 bp, Homo sapiens
aagggcagcagtcat

SEQ ID NO: 1945381 - DNA, 15 bp, Homo sapiens
agggcagcagtcatg

SEQ ID NO: 1945382 - DNA, 15 bp, Homo sapiens
gggcagcagtcatgt

SEQ ID NO: 1945383 - DNA, 15 bp, Homo sapiens
ggcagcagtcatgtg

SEQ ID NO: 1945384 - DNA, 15 bp, Homo sapiens
gcagcagtcatgtga

SEQ ID NO: 1945385 - DNA, 15 bp, Homo sapiens
cagcagtcatgtgac

SEQ ID NO: 1945386 - DNA, 15 bp, Homo sapiens
agcagtcatgtgaca

SEQ ID NO: 1945387 - DNA, 15 bp, Homo sapiens
gcagtcatgtgacat

SEQ ID NO: 1945388 - DNA, 15 bp, Homo sapiens
cagtcatgtgacatc

SEQ ID NO: 1945389 - DNA, 15 bp, Homo sapiens
agtcatgtgacatca

SEQ ID NO: 1945390 - DNA, 15 bp, Homo sapiens
gtcatgtgacatcaa

SEQ ID NO: 1945391 - DNA, 15 bp, Homo sapiens
tcatgtgacatcaag

SEQ ID NO: 1945392 - DNA, 15 bp, Homo sapiens
catgtgacatcaagc

SEQ ID NO: 1945393 - DNA, 15 bp, Homo sapiens
atgtgacatcaagca

SEQ ID NO: 1945394 - DNA, 15 bp, Homo sapiens
tgtgacatcaagcat

SEQ ID NO: 1945395 - DNA, 15 bp, Homo sapiens
gtgacatcaagcatc

SEQ ID NO: 1945396 - DNA, 15 bp, Homo sapiens
tgacatcaagcatcg

SEQ ID NO: 1945397 - DNA, 15 bp, Homo sapiens
gacatcaagcatcgg

SEQ ID NO: 1945398 - DNA, 15 bp, Homo sapiens
acatcaagcatcggg

SEQ ID NO: 1945399 - DNA, 15 bp, Homo sapiens
catcaagcatcggga

SEQ ID NO: 1945400 - DNA, 15 bp, Homo sapiens
atcaagcatcgggat

SEQ ID NO: 1945401 - DNA, 15 bp, Homo sapiens
tcaagcatcgggatt

SEQ ID NO: 1945402 - DNA, 15 bp, Homo sapiens
caagcatcgggattt

SEQ ID NO: 1945403 - DNA, 15 bp, Homo sapiens
aagcatcgggattta

SEQ ID NO: 1945404 - DNA, 15 bp, Homo sapiens
agcatcgggatttac

SEQ ID NO: 1945405 - DNA, 15 bp, Homo sapiens
gcatcgggatttaca

SEQ ID NO: 1945406 - DNA, 15 bp, Homo sapiens
catcgggatttacat

SEQ ID NO: 1945407 - DNA, 15 bp, Homo sapiens
atcgggatttacatt

SEQ ID NO: 1945408 - DNA, 15 bp, Homo sapiens
tcgggatttacattt

SEQ ID NO: 1945409 - DNA, 15 bp, Homo sapiens
cgggatttacatttc

SEQ ID NO: 1945410 - DNA, 15 bp, Homo sapiens
gggatttacatttct

SEQ ID NO: 1945411 - DNA, 15 bp, Homo sapiens
ggatttacatttctc

SEQ ID NO: 1945412 - DNA, 15 bp, Homo sapiens
gatttacatttctcc

SEQ ID NO: 1945413 - DNA, 15 bp, Homo sapiens
atttacatttctcct

SEQ ID NO: 1945414 - DNA, 15 bp, Homo sapiens
tttacatttctcctc

SEQ ID NO: 1945415 - DNA, 15 bp, Homo sapiens
ttacatttctcctct

SEQ ID NO: 1945416 - DNA, 15 bp, Homo sapiens
tacatttctcctcta

SEQ ID NO: 1945417 - DNA, 15 bp, Homo sapiens
acatttctcctctat

SEQ ID NO: 1945418 - DNA, 15 bp, Homo sapiens
catttctcctctatc

SEQ ID NO: 1945419 - DNA, 15 bp, Homo sapiens
atttctcctctatca

SEQ ID NO: 1945420 - DNA, 15 bp, Homo sapiens
tttctcctctatcac

SEQ ID NO: 1945421 - DNA, 15 bp, Homo sapiens
ttctcctctatcact

SEQ ID NO: 1945422 - DNA, 15 bp, Homo sapiens
tctcctctatcactg

SEQ ID NO: 1945423 - DNA, 15 bp, Homo sapiens
ctcctctatcactga

SEQ ID NO: 1945424 - DNA, 15 bp, Homo sapiens
tcctctatcactgat

SEQ ID NO: 1945425 - DNA, 15 bp, Homo sapiens
cctctatcactgatt

SEQ ID NO: 1945426 - DNA, 15 bp, Homo sapiens
ctctatcactgatta

SEQ ID NO: 1945427 - DNA, 15 bp, Homo sapiens
tctatcactgattaa

SEQ ID NO: 1945428 - DNA, 15 bp, Homo sapiens
ctatcactgattaat

SEQ ID NO: 1945429 - DNA, 15 bp, Homo sapiens
tatcactgattaatt

SEQ ID NO: 1945430 - DNA, 15 bp, Homo sapiens
atcactgattaattg

SEQ ID NO: 1945431 - DNA, 15 bp, Homo sapiens
tcactgattaattgt

SEQ ID NO: 1945432 - DNA, 15 bp, Homo sapiens
cactgattaattgta

SEQ ID NO: 1945433 - DNA, 15 bp, Homo sapiens
actgattaattgtac

SEQ ID NO: 1945434 - DNA, 15 bp, Homo sapiens
ctgattaattgtacg

SEQ ID NO: 1945435 - DNA, 15 bp, Homo sapiens
tgattaattgtacga

SEQ ID NO: 1945436 - DNA, 15 bp, Homo sapiens
gattaattgtacgac

SEQ ID NO: 1945437 - DNA, 15 bp, Homo sapiens
attaattgtacgacc

SEQ ID NO: 1945438 - DNA, 15 bp, Homo sapiens
ttaattgtacgacct

SEQ ID NO: 1945439 - DNA, 15 bp, Homo sapiens
taattgtacgacctt

SEQ ID NO: 1945440 - DNA, 15 bp, Homo sapiens
aattgtacgaccttg

SEQ ID NO: 1945441 - DNA, 15 bp, Homo sapiens
attgtacgaccttgg

SEQ ID NO: 1945442 - DNA, 15 bp, Homo sapiens
ttgtacgaccttgga

SEQ ID NO: 1945443 - DNA, 15 bp, Homo sapiens
tgtacgaccttggat

SEQ ID NO: 1945444 - DNA, 15 bp, Homo sapiens
gtacgaccttggata

SEQ ID NO: 1945445 - DNA, 15 bp, Homo sapiens
tacgaccttggataa

SEQ ID NO: 1945446 - DNA, 15 bp, Homo sapiens
acgaccttggataaa

SEQ ID NO: 1945447 - DNA, 15 bp, Homo sapiens
cgaccttggataaat

SEQ ID NO: 1945448 - DNA, 15 bp, Homo sapiens
gaccttggataaatt

SEQ ID NO: 1945449 - DNA, 15 bp, Homo sapiens
accttggataaattg

SEQ ID NO: 1945450 - DNA, 15 bp, Homo sapiens
ccttggataaattgt

SEQ ID NO: 1945451 - DNA, 15 bp, Homo sapiens
cttggataaattgtg

SEQ ID NO: 1945452 - DNA, 15 bp, Homo sapiens
ttggataaattgtgc

SEQ ID NO: 1945453 - DNA, 15 bp, Homo sapiens
tggataaattgtgca

SEQ ID NO: 1945454 - DNA, 15 bp, Homo sapiens
ggataaattgtgcag

SEQ ID NO: 1945455 - DNA, 15 bp, Homo sapiens
gataaattgtgcagc

SEQ ID NO: 1945456 - DNA, 15 bp, Homo sapiens
ataaattgtgcagct

SEQ ID NO: 1945457 - DNA, 15 bp, Homo sapiens
taaattgtgcagctt

SEQ ID NO: 1945458 - DNA, 15 bp, Homo sapiens
aaattgtgcagcttc

SEQ ID NO: 1945459 - DNA, 15 bp, Homo sapiens
aattgtgcagcttct

SEQ ID NO: 1945460 - DNA, 15 bp, Homo sapiens
attgtgcagcttctc

SEQ ID NO: 1945461 - DNA, 15 bp, Homo sapiens
ttgtgcagcttctcc

SEQ ID NO: 1945462 - DNA, 15 bp, Homo sapiens
tgtgcagcttctcca

SEQ ID NO: 1945463 - DNA, 15 bp, Homo sapiens
gtgcagcttctccat

SEQ ID NO: 1945464 - DNA, 15 bp, Homo sapiens
tgcagcttctccatc

SEQ ID NO: 1945465 - DNA, 15 bp, Homo sapiens
gcagcttctccatct

SEQ ID NO: 1945466 - DNA, 15 bp, Homo sapiens
cagcttctccatctt

SEQ ID NO: 1945467 - DNA, 15 bp, Homo sapiens
agcttctccatcttg

SEQ ID NO: 1945468 - DNA, 15 bp, Homo sapiens
gcttctccatcttgg

SEQ ID NO: 1945469 - DNA, 15 bp, Homo sapiens
cttctccatcttggt

SEQ ID NO: 1945470 - DNA, 15 bp, Homo sapiens
ttctccatcttggtt

SEQ ID NO: 1945471 - DNA, 15 bp, Homo sapiens
tctccatcttggttt

SEQ ID NO: 1945472 - DNA, 15 bp, Homo sapiens
ctccatcttggtttc

SEQ ID NO: 1945473 - DNA, 15 bp, Homo sapiens
tccatcttggtttcc

SEQ ID NO: 1945474 - DNA, 15 bp, Homo sapiens
ccatcttggtttcct

SEQ ID NO: 1945475 - DNA, 15 bp, Homo sapiens
catcttggtttcctc

SEQ ID NO: 1945476 - DNA, 15 bp, Homo sapiens
atcttggtttcctcg

SEQ ID NO: 1945477 - DNA, 15 bp, Homo sapiens
tcttggtttcctcgc

SEQ ID NO: 1945478 - DNA, 15 bp, Homo sapiens
cttggtttcctcgcc

SEQ ID NO: 1945479 - DNA, 15 bp, Homo sapiens
ttggtttcctcgcct

SEQ ID NO: 1945480 - DNA, 15 bp, Homo sapiens
tggtttcctcgcctg

SEQ ID NO: 1945481 - DNA, 15 bp, Homo sapiens
ggtttcctcgcctgt

SEQ ID NO: 1945482 - DNA, 15 bp, Homo sapiens
gtttcctcgcctgta

SEQ ID NO: 1945483 - DNA, 15 bp, Homo sapiens
tttcctcgcctgtaa

SEQ ID NO: 1945484 - DNA, 15 bp, Homo sapiens
ttcctcgcctgtaaa

SEQ ID NO: 1945485 - DNA, 15 bp, Homo sapiens
tcctcgcctgtaaaa

SEQ ID NO: 1945486 - DNA, 15 bp, Homo sapiens
cctcgcctgtaaaat

SEQ ID NO: 1945487 - DNA, 15 bp, Homo sapiens
ctcgcctgtaaaatg

SEQ ID NO: 1945488 - DNA, 15 bp, Homo sapiens
tcgcctgtaaaatga

SEQ ID NO: 1945489 - DNA, 15 bp, Homo sapiens
cgcctgtaaaatgag

SEQ ID NO: 1945490 - DNA, 15 bp, Homo sapiens
gcctgtaaaatgagg

SEQ ID NO: 1945491 - DNA, 15 bp, Homo sapiens
cctgtaaaatgagga

SEQ ID NO: 1945492 - DNA, 15 bp, Homo sapiens
ctgtaaaatgaggat

SEQ ID NO: 1945493 - DNA, 15 bp, Homo sapiens
tgtaaaatgaggata

SEQ ID NO: 1945494 - DNA, 15 bp, Homo sapiens
gtaaaatgaggatag

SEQ ID NO: 1945495 - DNA, 15 bp, Homo sapiens
taaaatgaggatagc

SEQ ID NO: 1945496 - DNA, 15 bp, Homo sapiens
aaaatgaggatagca

SEQ ID NO: 1945497 - DNA, 15 bp, Homo sapiens
aaatgaggatagcat

SEQ ID NO: 1945498 - DNA, 15 bp, Homo sapiens
aatgaggatagcatt

SEQ ID NO: 1945499 - DNA, 15 bp, Homo sapiens
atgaggatagcatta

SEQ ID NO: 1945500 - DNA, 15 bp, Homo sapiens
tgaggatagcattac

SEQ ID NO: 1945501 - DNA, 15 bp, Homo sapiens
gaggatagcattacc

SEQ ID NO: 1945502 - DNA, 15 bp, Homo sapiens
aggatagcattaccc

SEQ ID NO: 1945503 - DNA, 15 bp, Homo sapiens
ggatagcattaccca

SEQ ID NO: 1945504 - DNA, 15 bp, Homo sapiens
gatagcattacccat

SEQ ID NO: 1945505 - DNA, 15 bp, Homo sapiens
atagcattacccatc

SEQ ID NO: 1945506 - DNA, 15 bp, Homo sapiens
tagcattacccatct

SEQ ID NO: 1945507 - DNA, 15 bp, Homo sapiens
agcattacccatctt

SEQ ID NO: 1945508 - DNA, 15 bp, Homo sapiens
gcattacccatctta

SEQ ID NO: 1945509 - DNA, 15 bp, Homo sapiens
cattacccatcttaa

SEQ ID NO: 1945510 - DNA, 15 bp, Homo sapiens
attacccatcttaag

SEQ ID NO: 1945511 - DNA, 15 bp, Homo sapiens
ttacccatcttaaga

SEQ ID NO: 1945512 - DNA, 15 bp, Homo sapiens
tacccatcttaagag

SEQ ID NO: 1945513 - DNA, 15 bp, Homo sapiens
acccatcttaagagc

SEQ ID NO: 1945514 - DNA, 15 bp, Homo sapiens
cccatcttaagagct

SEQ ID NO: 1945515 - DNA, 15 bp, Homo sapiens
ccatcttaagagctt

SEQ ID NO: 1945516 - DNA, 15 bp, Homo sapiens
catcttaagagcttc

SEQ ID NO: 1945517 - DNA, 15 bp, Homo sapiens
atcttaagagcttct

SEQ ID NO: 1945518 - DNA, 15 bp, Homo sapiens
tcttaagagcttctg

SEQ ID NO: 1945519 - DNA, 15 bp, Homo sapiens
cttaagagcttctgt

SEQ ID NO: 1945520 - DNA, 15 bp, Homo sapiens
ttaagagcttctgtt

SEQ ID NO: 1945521 - DNA, 15 bp, Homo sapiens
taagagcttctgttt

SEQ ID NO: 1945522 - DNA, 15 bp, Homo sapiens
aagagcttctgtttt

SEQ ID NO: 1945523 - DNA, 15 bp, Homo sapiens
agagcttctgttttg

SEQ ID NO: 1945524 - DNA, 15 bp, Homo sapiens
gagcttctgttttgg

SEQ ID NO: 1945525 - DNA, 15 bp, Homo sapiens
agcttctgttttggt

SEQ ID NO: 1945526 - DNA, 15 bp, Homo sapiens
gcttctgttttggtt

SEQ ID NO: 1945527 - DNA, 15 bp, Homo sapiens
cttctgttttggttt

SEQ ID NO: 1945528 - DNA, 15 bp, Homo sapiens
ttctgttttggtttt

SEQ ID NO: 1945529 - DNA, 15 bp, Homo sapiens
tctgttttggttttg

SEQ ID NO: 1945530 - DNA, 15 bp, Homo sapiens
ctgttttggttttgt

SEQ ID NO: 1945531 - DNA, 15 bp, Homo sapiens
tgttttggttttgta

SEQ ID NO: 1945532 - DNA, 15 bp, Homo sapiens
gttttggttttgtaa

SEQ ID NO: 1945533 - DNA, 15 bp, Homo sapiens
ttttggttttgtaag

SEQ ID NO: 1945534 - DNA, 15 bp, Homo sapiens
ttggttttgtaagaa

SEQ ID NO: 1945535 - DNA, 15 bp, Homo sapiens
tggttttgtaagaaa

SEQ ID NO: 1945536 - DNA, 15 bp, Homo sapiens
ggttttgtaagaaac

SEQ ID NO: 1945537 - DNA, 15 bp, Homo sapiens
gttttgtaagaaaca

SEQ ID NO: 1945538 - DNA, 15 bp, Homo sapiens
ttttgtaagaaacac

SEQ ID NO: 1945539 - DNA, 15 bp, Homo sapiens
tttgtaagaaacaca

SEQ ID NO: 1945540 - DNA, 15 bp, Homo sapiens
ttgtaagaaacacat

SEQ ID NO: 1945541 - DNA, 15 bp, Homo sapiens
tgtaagaaacacatt

SEQ ID NO: 1945542 - DNA, 15 bp, Homo sapiens
gtaagaaacacattt

SEQ ID NO: 1945543 - DNA, 15 bp, Homo sapiens
taagaaacacatttg

SEQ ID NO: 1945544 - DNA, 15 bp, Homo sapiens
aagaaacacatttgc

SEQ ID NO: 1945545 - DNA, 15 bp, Homo sapiens
agaaacacatttgca

SEQ ID NO: 1945546 - DNA, 15 bp, Homo sapiens
gaaacacatttgcac

SEQ ID NO: 1945547 - DNA, 15 bp, Homo sapiens
aaacacatttgcacc

SEQ ID NO: 1945548 - DNA, 15 bp, Homo sapiens
aacacatttgcacca

SEQ ID NO: 1945549 - DNA, 15 bp, Homo sapiens
acacatttgcaccat

SEQ ID NO: 1945550 - DNA, 15 bp, Homo sapiens
cacatttgcaccata

SEQ ID NO: 1945551 - DNA, 15 bp, Homo sapiens
acatttgcaccatag

SEQ ID NO: 1945552 - DNA, 15 bp, Homo sapiens
catttgcaccatagc

SEQ ID NO: 1945553 - DNA, 15 bp, Homo sapiens
atttgcaccatagct

SEQ ID NO: 1945554 - DNA, 15 bp, Homo sapiens
tttgcaccatagcta

SEQ ID NO: 1945555 - DNA, 15 bp, Homo sapiens
ttgcaccatagctaa

SEQ ID NO: 1945556 - DNA, 15 bp, Homo sapiens
tgcaccatagctaat

SEQ ID NO: 1945557 - DNA, 15 bp, Homo sapiens
gcaccatagctaata

SEQ ID NO: 1945558 - DNA, 15 bp, Homo sapiens
caccatagctaatac

SEQ ID NO: 1945559 - DNA, 15 bp, Homo sapiens
accatagctaatact

SEQ ID NO: 1945560 - DNA, 15 bp, Homo sapiens
ccatagctaatactt

SEQ ID NO: 1945561 - DNA, 15 bp, Homo sapiens
catagctaatactta

SEQ ID NO: 1945562 - DNA, 15 bp, Homo sapiens
atagctaatacttag

SEQ ID NO: 1945563 - DNA, 15 bp, Homo sapiens
tagctaatacttagt

SEQ ID NO: 1945564 - DNA, 15 bp, Homo sapiens
agctaatacttagta

SEQ ID NO: 1945565 - DNA, 15 bp, Homo sapiens
gctaatacttagtaa

SEQ ID NO: 1945566 - DNA, 15 bp, Homo sapiens
ctaatacttagtaaa

SEQ ID NO: 1945567 - DNA, 15 bp, Homo sapiens
taatacttagtaaac

SEQ ID NO: 1945568 - DNA, 15 bp, Homo sapiens
aatacttagtaaaca

SEQ ID NO: 1945569 - DNA, 15 bp, Homo sapiens
atacttagtaaacac

SEQ ID NO: 1945570 - DNA, 15 bp, Homo sapiens
tacttagtaaacaca

SEQ ID NO: 1945571 - DNA, 15 bp, Homo sapiens
acttagtaaacacat

SEQ ID NO: 1945572 - DNA, 15 bp, Homo sapiens
cttagtaaacacata

SEQ ID NO: 1945573 - DNA, 15 bp, Homo sapiens
ttagtaaacacatat

SEQ ID NO: 1945574 - DNA, 15 bp, Homo sapiens
tagtaaacacatatg

SEQ ID NO: 1945575 - DNA, 15 bp, Homo sapiens
agtaaacacatatgc

SEQ ID NO: 1945576 - DNA, 15 bp, Homo sapiens
gtaaacacatatgct

SEQ ID NO: 1945577 - DNA, 15 bp, Homo sapiens
taaacacatatgctt

SEQ ID NO: 1945578 - DNA, 15 bp, Homo sapiens
aaacacatatgcttt

SEQ ID NO: 1945579 - DNA, 15 bp, Homo sapiens
aacacatatgctttt

SEQ ID NO: 1945580 - DNA, 15 bp, Homo sapiens
acacatatgcttttc

SEQ ID NO: 1945581 - DNA, 15 bp, Homo sapiens
cacatatgcttttct

SEQ ID NO: 1945582 - DNA, 15 bp, Homo sapiens
acatatgcttttctt

SEQ ID NO: 1945583 - DNA, 15 bp, Homo sapiens
catatgcttttcttc

SEQ ID NO: 1945584 - DNA, 15 bp, Homo sapiens
atatgcttttcttcc

SEQ ID NO: 1945585 - DNA, 15 bp, Homo sapiens
tatgcttttcttccc

SEQ ID NO: 1945586 - DNA, 15 bp, Homo sapiens
atgcttttcttccct

SEQ ID NO: 1945587 - DNA, 15 bp, Homo sapiens
tgcttttcttccctg

SEQ ID NO: 1945588 - DNA, 15 bp, Homo sapiens
gcttttcttccctgc

SEQ ID NO: 1945589 - DNA, 15 bp, Homo sapiens
cttttcttccctgcc

SEQ ID NO: 1945590 - DNA, 15 bp, Homo sapiens
ttttcttccctgcct

SEQ ID NO: 1945591 - DNA, 15 bp, Homo sapiens
tttcttccctgcctc

SEQ ID NO: 1945592 - DNA, 15 bp, Homo sapiens
ttcttccctgcctct

SEQ ID NO: 1945593 - DNA, 15 bp, Homo sapiens
tcttccctgcctctg

SEQ ID NO: 1945594 - DNA, 15 bp, Homo sapiens
cttccctgcctctgt

SEQ ID NO: 1945595 - DNA, 15 bp, Homo sapiens
ttccctgcctctgta

SEQ ID NO: 1945596 - DNA, 15 bp, Homo sapiens
tccctgcctctgtag

SEQ ID NO: 1945597 - DNA, 15 bp, Homo sapiens
ccctgcctctgtaga

SEQ ID NO: 1945598 - DNA, 15 bp, Homo sapiens
cctgcctctgtagat

SEQ ID NO: 1945599 - DNA, 15 bp, Homo sapiens
ctgcctctgtagatt

SEQ ID NO: 1945600 - DNA, 15 bp, Homo sapiens
tgcctctgtagattt

SEQ ID NO: 1945601 - DNA, 15 bp, Homo sapiens
gcctctgtagatttc

SEQ ID NO: 1945602 - DNA, 15 bp, Homo sapiens
cctctgtagatttct

SEQ ID NO: 1945603 - DNA, 15 bp, Homo sapiens
ctctgtagatttcta

SEQ ID NO: 1945604 - DNA, 15 bp, Homo sapiens
tctgtagatttctaa

SEQ ID NO: 1945605 - DNA, 15 bp, Homo sapiens
ctgtagatttctaac

SEQ ID NO: 1945606 - DNA, 15 bp, Homo sapiens
tgtagatttctaaca

SEQ ID NO: 1945607 - DNA, 15 bp, Homo sapiens
gtagatttctaacaa

SEQ ID NO: 1945608 - DNA, 15 bp, Homo sapiens
tagatttctaacaac

SEQ ID NO: 1945609 - DNA, 15 bp, Homo sapiens
agatttctaacaact

SEQ ID NO: 1945610 - DNA, 15 bp, Homo sapiens
gatttctaacaacta

SEQ ID NO: 1945611 - DNA, 15 bp, Homo sapiens
atttctaacaactaa

SEQ ID NO: 1945612 - DNA, 15 bp, Homo sapiens
tttctaacaactaag

SEQ ID NO: 1945613 - DNA, 15 bp, Homo sapiens
ttctaacaactaagt

SEQ ID NO: 1945614 - DNA, 15 bp, Homo sapiens
tctaacaactaagtt

SEQ ID NO: 1945615 - DNA, 15 bp, Homo sapiens
ctaacaactaagtta

SEQ ID NO: 1945616 - DNA, 15 bp, Homo sapiens
taacaactaagttag

SEQ ID NO: 1945617 - DNA, 15 bp, Homo sapiens
aacaactaagttaga

SEQ ID NO: 1945618 - DNA, 15 bp, Homo sapiens
acaactaagttagaa

SEQ ID NO: 1945619 - DNA, 15 bp, Homo sapiens
caactaagttagaaa

SEQ ID NO: 1945620 - DNA, 15 bp, Homo sapiens
aactaagttagaaac

SEQ ID NO: 1945621 - DNA, 15 bp, Homo sapiens
actaagttagaaaca

SEQ ID NO: 1945622 - DNA, 15 bp, Homo sapiens
ctaagttagaaacaa

SEQ ID NO: 1945623 - DNA, 15 bp, Homo sapiens
taagttagaaacaaa

SEQ ID NO: 1945624 - DNA, 15 bp, Homo sapiens
aagttagaaacaaag

SEQ ID NO: 1945625 - DNA, 15 bp, Homo sapiens
agttagaaacaaagt

SEQ ID NO: 1945626 - DNA, 15 bp, Homo sapiens
gttagaaacaaagtt

SEQ ID NO: 1945627 - DNA, 15 bp, Homo sapiens
ttagaaacaaagttg

SEQ ID NO: 1945628 - DNA, 15 bp, Homo sapiens
tagaaacaaagttgg

SEQ ID NO: 1945629 - DNA, 15 bp, Homo sapiens
agaaacaaagttggg

SEQ ID NO: 1945630 - DNA, 15 bp, Homo sapiens
gaaacaaagttgggc

SEQ ID NO: 1945631 - DNA, 15 bp, Homo sapiens
aaacaaagttgggcc

SEQ ID NO: 1945632 - DNA, 15 bp, Homo sapiens
aacaaagttgggcct

SEQ ID NO: 1945633 - DNA, 15 bp, Homo sapiens
acaaagttgggcctg

SEQ ID NO: 1945634 - DNA, 15 bp, Homo sapiens
caaagttgggcctgg

SEQ ID NO: 1945635 - DNA, 15 bp, Homo sapiens
aaagttgggcctggt

SEQ ID NO: 1945636 - DNA, 15 bp, Homo sapiens
aagttgggcctggtt

SEQ ID NO: 1945637 - DNA, 15 bp, Homo sapiens
agttgggcctggtta

SEQ ID NO: 1945638 - DNA, 15 bp, Homo sapiens
gttgggcctggttat

SEQ ID NO: 1945639 - DNA, 15 bp, Homo sapiens
ttgggcctggttatt

SEQ ID NO: 1945640 - DNA, 15 bp, Homo sapiens
tgggcctggttattt

SEQ ID NO: 1945641 - DNA, 15 bp, Homo sapiens
gggcctggttattta

SEQ ID NO: 1945642 - DNA, 15 bp, Homo sapiens
ggcctggttatttac

SEQ ID NO: 1945643 - DNA, 15 bp, Homo sapiens
gcctggttatttact

SEQ ID NO: 1945644 - DNA, 15 bp, Homo sapiens
cctggttatttactg

SEQ ID NO: 1945645 - DNA, 15 bp, Homo sapiens
ctggttatttactga

SEQ ID NO: 1945646 - DNA, 15 bp, Homo sapiens
tggttatttactgat

SEQ ID NO: 1945647 - DNA, 15 bp, Homo sapiens
ggttatttactgatt

SEQ ID NO: 1945648 - DNA, 15 bp, Homo sapiens
gttatttactgattg

SEQ ID NO: 1945649 - DNA, 15 bp, Homo sapiens
ttatttactgattgg

SEQ ID NO: 1945650 - DNA, 15 bp, Homo sapiens
tatttactgattgga

SEQ ID NO: 1945651 - DNA, 15 bp, Homo sapiens
atttactgattggag

SEQ ID NO: 1945652 - DNA, 15 bp, Homo sapiens
tttactgattggagg

SEQ ID NO: 1945653 - DNA, 15 bp, Homo sapiens
ttactgattggaggc

SEQ ID NO: 1945654 - DNA, 15 bp, Homo sapiens
tactgattggaggct

SEQ ID NO: 1945655 - DNA, 15 bp, Homo sapiens
actgattggaggctg

SEQ ID NO: 1945656 - DNA, 15 bp, Homo sapiens
ctgattggaggctga

SEQ ID NO: 1945657 - DNA, 15 bp, Homo sapiens
tgattggaggctgag

SEQ ID NO: 1945658 - DNA, 15 bp, Homo sapiens
gattggaggctgagg

SEQ ID NO: 1945659 - DNA, 15 bp, Homo sapiens
attggaggctgaggt

SEQ ID NO: 1945660 - DNA, 15 bp, Homo sapiens
ttggaggctgaggtg

SEQ ID NO: 1945661 - DNA, 15 bp, Homo sapiens
tggaggctgaggtgt

SEQ ID NO: 1945662 - DNA, 15 bp, Homo sapiens
ggaggctgaggtgtt

SEQ ID NO: 1945663 - DNA, 15 bp, Homo sapiens
gaggctgaggtgttg

SEQ ID NO: 1945664 - DNA, 15 bp, Homo sapiens
aggctgaggtgttga

SEQ ID NO: 1945665 - DNA, 15 bp, Homo sapiens
ggctgaggtgttgaa

SEQ ID NO: 1945666 - DNA, 15 bp, Homo sapiens
gctgaggtgttgaat

SEQ ID NO: 1945667 - DNA, 15 bp, Homo sapiens
ctgaggtgttgaata

SEQ ID NO: 1945668 - DNA, 15 bp, Homo sapiens
tgaggtgttgaataa

SEQ ID NO: 1945669 - DNA, 15 bp, Homo sapiens
gaggtgttgaataaa

SEQ ID NO: 1945670 - DNA, 15 bp, Homo sapiens
aggtgttgaataaat

SEQ ID NO: 1945671 - DNA, 15 bp, Homo sapiens
ggtgttgaataaata

SEQ ID NO: 1945672 - DNA, 15 bp, Homo sapiens
gtgttgaataaataa

SEQ ID NO: 1945673 - DNA, 15 bp, Homo sapiens
ttgaataaataaata

SEQ ID NO: 1945674 - DNA, 15 bp, Homo sapiens
tgaataaataaataa

SEQ ID NO: 1945675 - DNA, 15 bp, Homo sapiens
gaataaataaataat

SEQ ID NO: 1945676 - DNA, 15 bp, Homo sapiens
aataaataaataatg

SEQ ID NO: 1945677 - DNA, 15 bp, Homo sapiens
ataaataaataatga

SEQ ID NO: 1945678 - DNA, 15 bp, Homo sapiens
taaataaataatgag

SEQ ID NO: 1945679 - DNA, 15 bp, Homo sapiens
aaataaataatgagg

SEQ ID NO: 1945680 - DNA, 15 bp, Homo sapiens
aataaataatgaggg

SEQ ID NO: 1945681 - DNA, 15 bp, Homo sapiens
ataaataatgagggt

SEQ ID NO: 1945682 - DNA, 15 bp, Homo sapiens
taaataatgagggtt

SEQ ID NO: 1945683 - DNA, 15 bp, Homo sapiens
aaataatgagggttt

SEQ ID NO: 1945684 - DNA, 15 bp, Homo sapiens
aataatgagggtttt

SEQ ID NO: 1945685 - DNA, 15 bp, Homo sapiens
ataatgagggtttta

SEQ ID NO: 1945686 - DNA, 15 bp, Homo sapiens
taatgagggttttat

SEQ ID NO: 1945687 - DNA, 15 bp, Homo sapiens
aatgagggttttatg

SEQ ID NO: 1945688 - DNA, 15 bp, Homo sapiens
atgagggttttatga

SEQ ID NO: 1945689 - DNA, 15 bp, Homo sapiens
tgagggttttatgaa

SEQ ID NO: 1945690 - DNA, 15 bp, Homo sapiens
gagggttttatgaat

SEQ ID NO: 1945691 - DNA, 15 bp, Homo sapiens
agggttttatgaatg

SEQ ID NO: 1945692 - DNA, 15 bp, Homo sapiens
gggttttatgaatga

SEQ ID NO: 1945693 - DNA, 15 bp, Homo sapiens
ggttttatgaatgag

SEQ ID NO: 1945694 - DNA, 15 bp, Homo sapiens
gttttatgaatgagt

SEQ ID NO: 1945695 - DNA, 15 bp, Homo sapiens
ttttatgaatgagta

SEQ ID NO: 1945696 - DNA, 15 bp, Homo sapiens
tttatgaatgagtaa

SEQ ID NO: 1945697 - DNA, 15 bp, Homo sapiens
ttatgaatgagtaaa

SEQ ID NO: 1945698 - DNA, 15 bp, Homo sapiens
tatgaatgagtaaaa

SEQ ID NO: 1945699 - DNA, 15 bp, Homo sapiens
atgaatgagtaaaac

SEQ ID NO: 1945700 - DNA, 15 bp, Homo sapiens
tgaatgagtaaaaca

SEQ ID NO: 1945701 - DNA, 15 bp, Homo sapiens
gaatgagtaaaacaa

SEQ ID NO: 1945702 - DNA, 15 bp, Homo sapiens
aatgagtaaaacaac

SEQ ID NO: 1945703 - DNA, 15 bp, Homo sapiens
atgagtaaaacaaca

SEQ ID NO: 1945704 - DNA, 15 bp, Homo sapiens
tgagtaaaacaacaa

SEQ ID NO: 1945705 - DNA, 15 bp, Homo sapiens
gtaaaacaacaacac

SEQ ID NO: 1945706 - DNA, 15 bp, Homo sapiens
taaaacaacaacaca

SEQ ID NO: 1945707 - DNA, 15 bp, Homo sapiens
aaaacaacaacacaa

SEQ ID NO: 1945708 - DNA, 15 bp, Homo sapiens
aaacaacaacacaaa

SEQ ID NO: 1945709 - DNA, 15 bp, Homo sapiens
aacaacaacacaaaa

SEQ ID NO: 1945710 - DNA, 15 bp, Homo sapiens
acaacaacacaaaaa

SEQ ID NO: 1945711 - DNA, 15 bp, Homo sapiens
caacaacacaaaaaa

SEQ ID NO: 1945712 - DNA, 15 bp, Homo sapiens
aacaacacaaaaaaa

SEQ ID NO: 1945713 - DNA, 15 bp, Homo sapiens
acaacacaaaaaaaa

SEQ ID NO: 1945714 - DNA, 15 bp, Homo sapiens
caacacaaaaaaaag

SEQ ID NO: 1945715 - DNA, 15 bp, Homo sapiens
aacacaaaaaaaagg

SEQ ID NO: 1945716 - DNA, 15 bp, Homo sapiens
acacaaaaaaaagga

SEQ ID NO: 1945717 - DNA, 15 bp, Homo sapiens
cacaaaaaaaaggaa

SEQ ID NO: 1945718 - DNA, 15 bp, Homo sapiens
acaaaaaaaaggaag

SEQ ID NO: 1945719 - DNA, 15 bp, Homo sapiens
caaaaaaaaggaaga

SEQ ID NO: 1945720 - DNA, 15 bp, Homo sapiens
aaaggaagaaagaag

SEQ ID NO: 1945721 - DNA, 15 bp, Homo sapiens
gaagaaagaagaaat

SEQ ID NO: 1945722 - DNA, 15 bp, Homo sapiens
aagaaagaagaaatt

SEQ ID NO: 1945723 - DNA, 15 bp, Homo sapiens
agaaagaagaaattc

SEQ ID NO: 1945724 - DNA, 15 bp, Homo sapiens
gaaagaagaaattct

SEQ ID NO: 1945725 - DNA, 15 bp, Homo sapiens
aaagaagaaattctg

SEQ ID NO: 1945726 - DNA, 15 bp, Homo sapiens
aagaagaaattctgt

SEQ ID NO: 1945727 - DNA, 15 bp, Homo sapiens
agaagaaattctgtt

SEQ ID NO: 1945728 - DNA, 15 bp, Homo sapiens
gaagaaattctgttg

SEQ ID NO: 1945729 - DNA, 15 bp, Homo sapiens
aagaaattctgttgt

SEQ ID NO: 1945730 - DNA, 15 bp, Homo sapiens
agaaattctgttgtt

SEQ ID NO: 1945731 - DNA, 15 bp, Homo sapiens
gaaattctgttgtta

SEQ ID NO: 1945732 - DNA, 15 bp, Homo sapiens
aaattctgttgttaa

SEQ ID NO: 1945733 - DNA, 15 bp, Homo sapiens
aattctgttgttaaa

SEQ ID NO: 1945734 - DNA, 15 bp, Homo sapiens
attctgttgttaaat

SEQ ID NO: 1945735 - DNA, 15 bp, Homo sapiens
ttctgttgttaaata

SEQ ID NO: 1945736 - DNA, 15 bp, Homo sapiens
tctgttgttaaatat

SEQ ID NO: 1945737 - DNA, 15 bp, Homo sapiens
ctgttgttaaatatg

SEQ ID NO: 1945738 - DNA, 15 bp, Homo sapiens
tgttgttaaatatgt

SEQ ID NO: 1945739 - DNA, 15 bp, Homo sapiens
gttgttaaatatgtt

SEQ ID NO: 1945740 - DNA, 15 bp, Homo sapiens
ttgttaaatatgttg

SEQ ID NO: 1945741 - DNA, 15 bp, Homo sapiens
tgttaaatatgttgt

SEQ ID NO: 1945742 - DNA, 15 bp, Homo sapiens
gttaaatatgttgta

SEQ ID NO: 1945743 - DNA, 15 bp, Homo sapiens
ttaaatatgttgtac

SEQ ID NO: 1945744 - DNA, 15 bp, Homo sapiens
taaatatgttgtact

SEQ ID NO: 1945745 - DNA, 15 bp, Homo sapiens
aaatatgttgtactc

SEQ ID NO: 1945746 - DNA, 15 bp, Homo sapiens
aatatgttgtactcc

SEQ ID NO: 1945747 - DNA, 15 bp, Homo sapiens
atatgttgtactcct

SEQ ID NO: 1945748 - DNA, 15 bp, Homo sapiens
tatgttgtactcctg

SEQ ID NO: 1945749 - DNA, 15 bp, Homo sapiens
atgttgtactcctga

SEQ ID NO: 1945750 - DNA, 15 bp, Homo sapiens
tgttgtactcctgat

SEQ ID NO: 1945751 - DNA, 15 bp, Homo sapiens
gttgtactcctgatg

SEQ ID NO: 1945752 - DNA, 15 bp, Homo sapiens
ttgtactcctgatgc

SEQ ID NO: 1945753 - DNA, 15 bp, Homo sapiens
tgtactcctgatgct

SEQ ID NO: 1945754 - DNA, 15 bp, Homo sapiens
gtactcctgatgcta

SEQ ID NO: 1945755 - DNA, 15 bp, Homo sapiens
tactcctgatgctaa

SEQ ID NO: 1945756 - DNA, 15 bp, Homo sapiens
actcctgatgctaac

SEQ ID NO: 1945757 - DNA, 15 bp, Homo sapiens
ctcctgatgctaaca

SEQ ID NO: 1945758 - DNA, 15 bp, Homo sapiens
tcctgatgctaacag

SEQ ID NO: 1945759 - DNA, 15 bp, Homo sapiens
cctgatgctaacaga

SEQ ID NO: 1945760 - DNA, 15 bp, Homo sapiens
ctgatgctaacagat

SEQ ID NO: 1945761 - DNA, 15 bp, Homo sapiens
tgatgctaacagata

SEQ ID NO: 1945762 - DNA, 15 bp, Homo sapiens
gatgctaacagatat

SEQ ID NO: 1945763 - DNA, 15 bp, Homo sapiens
atgctaacagatata

SEQ ID NO: 1945764 - DNA, 15 bp, Homo sapiens
tgctaacagatatat

SEQ ID NO: 1945765 - DNA, 15 bp, Homo sapiens
gctaacagatatatc

SEQ ID NO: 1945766 - DNA, 15 bp, Homo sapiens
ctaacagatatatcc

SEQ ID NO: 1945767 - DNA, 15 bp, Homo sapiens
taacagatatatcct

SEQ ID NO: 1945768 - DNA, 15 bp, Homo sapiens
aacagatatatccta

SEQ ID NO: 1945769 - DNA, 15 bp, Homo sapiens
acagatatatcctaa

SEQ ID NO: 1945770 - DNA, 15 bp, Homo sapiens
cagatatatcctaat

SEQ ID NO: 1945771 - DNA, 15 bp, Homo sapiens
agatatatcctaatt

SEQ ID NO: 1945772 - DNA, 15 bp, Homo sapiens
gatatatcctaattt

SEQ ID NO: 1945773 - DNA, 15 bp, Homo sapiens
atatatcctaatttc

SEQ ID NO: 1945774 - DNA, 15 bp, Homo sapiens
tatatcctaatttct

SEQ ID NO: 1945775 - DNA, 15 bp, Homo sapiens
atatcctaatttcta

SEQ ID NO: 1945776 - DNA, 15 bp, Homo sapiens
tatcctaatttctaa

SEQ ID NO: 1945777 - DNA, 15 bp, Homo sapiens
atcctaatttctaag

SEQ ID NO: 1945778 - DNA, 15 bp, Homo sapiens
tcctaatttctaagt

SEQ ID NO: 1945779 - DNA, 15 bp, Homo sapiens
cctaatttctaagtt

SEQ ID NO: 1945780 - DNA, 15 bp, Homo sapiens
ctaatttctaagttc

SEQ ID NO: 1945781 - DNA, 15 bp, Homo sapiens
taatttctaagttca

SEQ ID NO: 1945782 - DNA, 15 bp, Homo sapiens
aatttctaagttcac

SEQ ID NO: 1945783 - DNA, 15 bp, Homo sapiens
atttctaagttcact

SEQ ID NO: 1945784 - DNA, 15 bp, Homo sapiens
tttctaagttcactc

SEQ ID NO: 1945785 - DNA, 15 bp, Homo sapiens
ttctaagttcactca

SEQ ID NO: 1945786 - DNA, 15 bp, Homo sapiens
tctaagttcactcaa

SEQ ID NO: 1945787 - DNA, 15 bp, Homo sapiens
ctaagttcactcaaa

SEQ ID NO: 1945788 - DNA, 15 bp, Homo sapiens
taagttcactcaaag

SEQ ID NO: 1945789 - DNA, 15 bp, Homo sapiens
aagttcactcaaagt

SEQ ID NO: 1945790 - DNA, 15 bp, Homo sapiens
agttcactcaaagtg

SEQ ID NO: 1945791 - DNA, 15 bp, Homo sapiens
gttcactcaaagtgt

SEQ ID NO: 1945792 - DNA, 15 bp, Homo sapiens
ttcactcaaagtgtg

SEQ ID NO: 1945793 - DNA, 15 bp, Homo sapiens
tcactcaaagtgtgt

SEQ ID NO: 1945794 - DNA, 15 bp, Homo sapiens
cactcaaagtgtgtt

SEQ ID NO: 1945795 - DNA, 15 bp, Homo sapiens
actcaaagtgtgttt

SEQ ID NO: 1945796 - DNA, 15 bp, Homo sapiens
ctcaaagtgtgttta

SEQ ID NO: 1945797 - DNA, 15 bp, Homo sapiens
tcaaagtgtgtttat

SEQ ID NO: 1945798 - DNA, 15 bp, Homo sapiens
caaagtgtgtttatc

SEQ ID NO: 1945799 - DNA, 15 bp, Homo sapiens
aaagtgtgtttatcc

SEQ ID NO: 1945800 - DNA, 15 bp, Homo sapiens
aagtgtgtttatcct

SEQ ID NO: 1945801 - DNA, 15 bp, Homo sapiens
agtgtgtttatcctg

SEQ ID NO: 1945802 - DNA, 15 bp, Homo sapiens
gtgtgtttatcctgt

SEQ ID NO: 1945803 - DNA, 15 bp, Homo sapiens
tgtgtttatcctgta

SEQ ID NO: 1945804 - DNA, 15 bp, Homo sapiens
gtgtttatcctgtag

SEQ ID NO: 1945805 - DNA, 15 bp, Homo sapiens
tgtttatcctgtagc

SEQ ID NO: 1945806 - DNA, 15 bp, Homo sapiens
gtttatcctgtagca

SEQ ID NO: 1945807 - DNA, 15 bp, Homo sapiens
tttatcctgtagcat

SEQ ID NO: 1945808 - DNA, 15 bp, Homo sapiens
ttatcctgtagcata

SEQ ID NO: 1945809 - DNA, 15 bp, Homo sapiens
tatcctgtagcatat

SEQ ID NO: 1945810 - DNA, 15 bp, Homo sapiens
atcctgtagcatatg

SEQ ID NO: 1945811 - DNA, 15 bp, Homo sapiens
tcctgtagcatatgt

SEQ ID NO: 1945812 - DNA, 15 bp, Homo sapiens
cctgtagcatatgtt

SEQ ID NO: 1945813 - DNA, 15 bp, Homo sapiens
ctgtagcatatgttt

SEQ ID NO: 1945814 - DNA, 15 bp, Homo sapiens
tgtagcatatgtttt

SEQ ID NO: 1945815 - DNA, 15 bp, Homo sapiens
gtagcatatgttttt

SEQ ID NO: 1945816 - DNA, 15 bp, Homo sapiens
tagcatatgttttta

SEQ ID NO: 1945817 - DNA, 15 bp, Homo sapiens
agcatatgtttttaa

SEQ ID NO: 1945818 - DNA, 15 bp, Homo sapiens
gcatatgtttttaaa

SEQ ID NO: 1945819 - DNA, 15 bp, Homo sapiens
catatgtttttaaat

SEQ ID NO: 1945820 - DNA, 15 bp, Homo sapiens
atatgtttttaaatc

SEQ ID NO: 1945821 - DNA, 15 bp, Homo sapiens
tatgtttttaaatcc

SEQ ID NO: 1945822 - DNA, 15 bp, Homo sapiens
atgtttttaaatcca

SEQ ID NO: 1945823 - DNA, 15 bp, Homo sapiens
tgtttttaaatccag

SEQ ID NO: 1945824 - DNA, 15 bp, Homo sapiens
gtttttaaatccagt

SEQ ID NO: 1945825 - DNA, 15 bp, Homo sapiens
tttttaaatccagtt

SEQ ID NO: 1945826 - DNA, 15 bp, Homo sapiens
ttttaaatccagttt

SEQ ID NO: 1945827 - DNA, 15 bp, Homo sapiens
taaatccagtttacc

SEQ ID NO: 1945828 - DNA, 15 bp, Homo sapiens
aaatccagtttaccc

SEQ ID NO: 1945829 - DNA, 15 bp, Homo sapiens
aatccagtttaccct

SEQ ID NO: 1945830 - DNA, 15 bp, Homo sapiens
atccagtttaccctt

SEQ ID NO: 1945831 - DNA, 15 bp, Homo sapiens
tccagtttaccctta

SEQ ID NO: 1945832 - DNA, 15 bp, Homo sapiens
ccagtttacccttag

SEQ ID NO: 1945833 - DNA, 15 bp, Homo sapiens
cagtttacccttagc

SEQ ID NO: 1945834 - DNA, 15 bp, Homo sapiens
agtttacccttagca

SEQ ID NO: 1945835 - DNA, 15 bp, Homo sapiens
gtttacccttagcat

SEQ ID NO: 1945836 - DNA, 15 bp, Homo sapiens
tttacccttagcatt

SEQ ID NO: 1945837 - DNA, 15 bp, Homo sapiens
ttacccttagcattt

SEQ ID NO: 1945838 - DNA, 15 bp, Homo sapiens
tacccttagcatttt

SEQ ID NO: 1945839 - DNA, 15 bp, Homo sapiens
acccttagcatttta

SEQ ID NO: 1945840 - DNA, 15 bp, Homo sapiens
cccttagcattttaa

SEQ ID NO: 1945841 - DNA, 15 bp, Homo sapiens
ccttagcattttaaa

SEQ ID NO: 1945842 - DNA, 15 bp, Homo sapiens
cttagcattttaaag

SEQ ID NO: 1945843 - DNA, 15 bp, Homo sapiens
ttagcattttaaaga

SEQ ID NO: 1945844 - DNA, 15 bp, Homo sapiens
tagcattttaaagaa

SEQ ID NO: 1945845 - DNA, 15 bp, Homo sapiens
gcattttaaagaaag

SEQ ID NO: 1945846 - DNA, 15 bp, Homo sapiens
cattttaaagaaaga

SEQ ID NO: 1945847 - DNA, 15 bp, Homo sapiens
attttaaagaaagat

SEQ ID NO: 1945848 - DNA, 15 bp, Homo sapiens
ttttaaagaaagata

SEQ ID NO: 1945849 - DNA, 15 bp, Homo sapiens
tttaaagaaagataa

SEQ ID NO: 1945850 - DNA, 15 bp, Homo sapiens
ttaaagaaagataaa

SEQ ID NO: 1945851 - DNA, 15 bp, Homo sapiens
taaagaaagataaac

SEQ ID NO: 1945852 - DNA, 15 bp, Homo sapiens
aaagaaagataaaca

SEQ ID NO: 1945853 - DNA, 15 bp, Homo sapiens
aagaaagataaacat

SEQ ID NO: 1945854 - DNA, 15 bp, Homo sapiens
agaaagataaacata

SEQ ID NO: 1945855 - DNA, 15 bp, Homo sapiens
gaaagataaacataa

SEQ ID NO: 1945856 - DNA, 15 bp, Homo sapiens
aaagataaacataat

SEQ ID NO: 1945857 - DNA, 15 bp, Homo sapiens
aagataaacataatg

SEQ ID NO: 1945858 - DNA, 15 bp, Homo sapiens
agataaacataatgg

SEQ ID NO: 1945859 - DNA, 15 bp, Homo sapiens
gataaacataatggc

SEQ ID NO: 1945860 - DNA, 15 bp, Homo sapiens
ataaacataatggcc

SEQ ID NO: 1945861 - DNA, 15 bp, Homo sapiens
taaacataatggcct

SEQ ID NO: 1945862 - DNA, 15 bp, Homo sapiens
aaacataatggcctg

SEQ ID NO: 1945863 - DNA, 15 bp, Homo sapiens
aacataatggcctga

SEQ ID NO: 1945864 - DNA, 15 bp, Homo sapiens
acataatggcctgag

SEQ ID NO: 1945865 - DNA, 15 bp, Homo sapiens
cataatggcctgagc

SEQ ID NO: 1945866 - DNA, 15 bp, Homo sapiens
ataatggcctgagct

SEQ ID NO: 1945867 - DNA, 15 bp, Homo sapiens
taatggcctgagctc

SEQ ID NO: 1945868 - DNA, 15 bp, Homo sapiens
aatggcctgagctca

SEQ ID NO: 1945869 - DNA, 15 bp, Homo sapiens
atggcctgagctcaa

SEQ ID NO: 1945870 - DNA, 15 bp, Homo sapiens
tggcctgagctcaaa

SEQ ID NO: 1945871 - DNA, 15 bp, Homo sapiens
ggcctgagctcaaat

SEQ ID NO: 1945872 - DNA, 15 bp, Homo sapiens
gcctgagctcaaatt

SEQ ID NO: 1945873 - DNA, 15 bp, Homo sapiens
cctgagctcaaattg

SEQ ID NO: 1945874 - DNA, 15 bp, Homo sapiens
ctgagctcaaattga

SEQ ID NO: 1945875 - DNA, 15 bp, Homo sapiens
tgagctcaaattgag

SEQ ID NO: 1945876 - DNA, 15 bp, Homo sapiens
gagctcaaattgagt

SEQ ID NO: 1945877 - DNA, 15 bp, Homo sapiens
agctcaaattgagta

SEQ ID NO: 1945878 - DNA, 15 bp, Homo sapiens
gctcaaattgagtag

SEQ ID NO: 1945879 - DNA, 15 bp, Homo sapiens
ctcaaattgagtagt

SEQ ID NO: 1945880 - DNA, 15 bp, Homo sapiens
tcaaattgagtagtg

SEQ ID NO: 1945881 - DNA, 15 bp, Homo sapiens
caaattgagtagtgg

SEQ ID NO: 1945882 - DNA, 15 bp, Homo sapiens
aaattgagtagtggt

SEQ ID NO: 1945883 - DNA, 15 bp, Homo sapiens
aattgagtagtggtt

SEQ ID NO: 1945884 - DNA, 15 bp, Homo sapiens
attgagtagtggttt

SEQ ID NO: 1945885 - DNA, 15 bp, Homo sapiens
ttgagtagtggtttc

SEQ ID NO: 1945886 - DNA, 15 bp, Homo sapiens
tgagtagtggtttct

SEQ ID NO: 1945887 - DNA, 15 bp, Homo sapiens
gagtagtggtttctt

SEQ ID NO: 1945888 - DNA, 15 bp, Homo sapiens
agtagtggtttcttc

SEQ ID NO: 1945889 - DNA, 15 bp, Homo sapiens
gtagtggtttcttca

SEQ ID NO: 1945890 - DNA, 15 bp, Homo sapiens
tagtggtttcttcag

SEQ ID NO: 1945891 - DNA, 15 bp, Homo sapiens
agtggtttcttcaga

SEQ ID NO: 1945892 - DNA, 15 bp, Homo sapiens
gtggtttcttcagaa

SEQ ID NO: 1945893 - DNA, 15 bp, Homo sapiens
tggtttcttcagaac

SEQ ID NO: 1945894 - DNA, 15 bp, Homo sapiens
ggtttcttcagaaca

SEQ ID NO: 1945895 - DNA, 15 bp, Homo sapiens
gtttcttcagaacac

SEQ ID NO: 1945896 - DNA, 15 bp, Homo sapiens
tttcttcagaacaca

SEQ ID NO: 1945897 - DNA, 15 bp, Homo sapiens
ttcttcagaacacag

SEQ ID NO: 1945898 - DNA, 15 bp, Homo sapiens
tcttcagaacacagt

SEQ ID NO: 1945899 - DNA, 15 bp, Homo sapiens
cttcagaacacagtt

SEQ ID NO: 1945900 - DNA, 15 bp, Homo sapiens
ttcagaacacagttt

SEQ ID NO: 1945901 - DNA, 15 bp, Homo sapiens
tcagaacacagtttt

SEQ ID NO: 1945902 - DNA, 15 bp, Homo sapiens
cagaacacagtttta

SEQ ID NO: 1945903 - DNA, 15 bp, Homo sapiens
agaacacagttttaa

SEQ ID NO: 1945904 - DNA, 15 bp, Homo sapiens
gaacacagttttaaa

SEQ ID NO: 1945905 - DNA, 15 bp, Homo sapiens
aacacagttttaaag

SEQ ID NO: 1945906 - DNA, 15 bp, Homo sapiens
acacagttttaaagc

SEQ ID NO: 1945907 - DNA, 15 bp, Homo sapiens
cacagttttaaagcc

SEQ ID NO: 1945908 - DNA, 15 bp, Homo sapiens
acagttttaaagcca

SEQ ID NO: 1945909 - DNA, 15 bp, Homo sapiens
cagttttaaagccat

SEQ ID NO: 1945910 - DNA, 15 bp, Homo sapiens
agttttaaagccatt

SEQ ID NO: 1945911 - DNA, 15 bp, Homo sapiens
gttttaaagccatta

SEQ ID NO: 1945912 - DNA, 15 bp, Homo sapiens
ttttaaagccattaa

SEQ ID NO: 1945913 - DNA, 15 bp, Homo sapiens
tttaaagccattaaa

SEQ ID NO: 1945914 - DNA, 15 bp, Homo sapiens
ttaaagccattaaaa

SEQ ID NO: 1945915 - DNA, 15 bp, Homo sapiens
taaagccattaaaat

SEQ ID NO: 1945916 - DNA, 15 bp, Homo sapiens
aaagccattaaaata

SEQ ID NO: 1945917 - DNA, 15 bp, Homo sapiens
aagccattaaaatag

SEQ ID NO: 1945918 - DNA, 15 bp, Homo sapiens
agccattaaaataga

SEQ ID NO: 1945919 - DNA, 15 bp, Homo sapiens
gccattaaaatagaa

SEQ ID NO: 1945920 - DNA, 15 bp, Homo sapiens
ccattaaaatagaag

SEQ ID NO: 1945921 - DNA, 15 bp, Homo sapiens
cattaaaatagaaga

SEQ ID NO: 1945922 - DNA, 15 bp, Homo sapiens
attaaaatagaagat

SEQ ID NO: 1945923 - DNA, 15 bp, Homo sapiens
ttaaaatagaagatg

SEQ ID NO: 1945924 - DNA, 15 bp, Homo sapiens
taaaatagaagatga

SEQ ID NO: 1945925 - DNA, 15 bp, Homo sapiens
aaaatagaagatgaa

SEQ ID NO: 1945926 - DNA, 15 bp, Homo sapiens
aaatagaagatgaaa

SEQ ID NO: 1945927 - DNA, 15 bp, Homo sapiens
aatagaagatgaaaa

SEQ ID NO: 1945928 - DNA, 15 bp, Homo sapiens
atagaagatgaaaag

SEQ ID NO: 1945929 - DNA, 15 bp, Homo sapiens
tagaagatgaaaagc

SEQ ID NO: 1945930 - DNA, 15 bp, Homo sapiens
agaagatgaaaagca

SEQ ID NO: 1945931 - DNA, 15 bp, Homo sapiens
gaagatgaaaagcaa

SEQ ID NO: 1945932 - DNA, 15 bp, Homo sapiens
aagatgaaaagcaac

SEQ ID NO: 1945933 - DNA, 15 bp, Homo sapiens
agatgaaaagcaact

SEQ ID NO: 1945934 - DNA, 15 bp, Homo sapiens
gatgaaaagcaactg

SEQ ID NO: 1945935 - DNA, 15 bp, Homo sapiens
atgaaaagcaactga

SEQ ID NO: 1945936 - DNA, 15 bp, Homo sapiens
tgaaaagcaactgat

SEQ ID NO: 1945937 - DNA, 15 bp, Homo sapiens
gaaaagcaactgatt

SEQ ID NO: 1945938 - DNA, 15 bp, Homo sapiens
aaaagcaactgatta

SEQ ID NO: 1945939 - DNA, 15 bp, Homo sapiens
aaagcaactgattag

SEQ ID NO: 1945940 - DNA, 15 bp, Homo sapiens
aagcaactgattaga

SEQ ID NO: 1945941 - DNA, 15 bp, Homo sapiens
agcaactgattagaa

SEQ ID NO: 1945942 - DNA, 15 bp, Homo sapiens
gcaactgattagaaa

SEQ ID NO: 1945943 - DNA, 15 bp, Homo sapiens
caactgattagaaaa

SEQ ID NO: 1945944 - DNA, 15 bp, Homo sapiens
aactgattagaaaaa

SEQ ID NO: 1945945 - DNA, 15 bp, Homo sapiens
actgattagaaaaag

SEQ ID NO: 1945946 - DNA, 15 bp, Homo sapiens
ctgattagaaaaaga

SEQ ID NO: 1945947 - DNA, 15 bp, Homo sapiens
tgattagaaaaagac

SEQ ID NO: 1945948 - DNA, 15 bp, Homo sapiens
gattagaaaaagact

SEQ ID NO: 1945949 - DNA, 15 bp, Homo sapiens
attagaaaaagactg

SEQ ID NO: 1945950 - DNA, 15 bp, Homo sapiens
ttagaaaaagactgc

SEQ ID NO: 1945951 - DNA, 15 bp, Homo sapiens
tagaaaaagactgct

SEQ ID NO: 1945952 - DNA, 15 bp, Homo sapiens
agaaaaagactgctc

SEQ ID NO: 1945953 - DNA, 15 bp, Homo sapiens
gaaaaagactgctca

SEQ ID NO: 1945954 - DNA, 15 bp, Homo sapiens
aaaaagactgctcac

SEQ ID NO: 1945955 - DNA, 15 bp, Homo sapiens
aaaagactgctcact

SEQ ID NO: 1945956 - DNA, 15 bp, Homo sapiens
aaagactgctcactt

SEQ ID NO: 1945957 - DNA, 15 bp, Homo sapiens
aagactgctcactta

SEQ ID NO: 1945958 - DNA, 15 bp, Homo sapiens
agactgctcacttac

SEQ ID NO: 1945959 - DNA, 15 bp, Homo sapiens
gactgctcacttact

SEQ ID NO: 1945960 - DNA, 15 bp, Homo sapiens
actgctcacttactt

SEQ ID NO: 1945961 - DNA, 15 bp, Homo sapiens
ctgctcacttactta

SEQ ID NO: 1945962 - DNA, 15 bp, Homo sapiens
tgctcacttacttag

SEQ ID NO: 1945963 - DNA, 15 bp, Homo sapiens
gctcacttacttagg

SEQ ID NO: 1945964 - DNA, 15 bp, Homo sapiens
ctcacttacttaggg

SEQ ID NO: 1945965 - DNA, 15 bp, Homo sapiens
tcacttacttagggt

SEQ ID NO: 1945966 - DNA, 15 bp, Homo sapiens
cacttacttagggtt

SEQ ID NO: 1945967 - DNA, 15 bp, Homo sapiens
acttacttagggttt

SEQ ID NO: 1945968 - DNA, 15 bp, Homo sapiens
cttacttagggttta

SEQ ID NO: 1945969 - DNA, 15 bp, Homo sapiens
ttacttagggtttag

SEQ ID NO: 1945970 - DNA, 15 bp, Homo sapiens
tacttagggtttagt

SEQ ID NO: 1945971 - DNA, 15 bp, Homo sapiens
acttagggtttagtt

SEQ ID NO: 1945972 - DNA, 15 bp, Homo sapiens
cttagggtttagttt

SEQ ID NO: 1945973 - DNA, 15 bp, Homo sapiens
ttagggtttagtttt

SEQ ID NO: 1945974 - DNA, 15 bp, Homo sapiens
tagggtttagttttc

SEQ ID NO: 1945975 - DNA, 15 bp, Homo sapiens
agggtttagttttct

SEQ ID NO: 1945976 - DNA, 15 bp, Homo sapiens
gggtttagttttctt

SEQ ID NO: 1945977 - DNA, 15 bp, Homo sapiens
ggtttagttttctta

SEQ ID NO: 1945978 - DNA, 15 bp, Homo sapiens
gtttagttttcttaa

SEQ ID NO: 1945979 - DNA, 15 bp, Homo sapiens
tttagttttcttaac

SEQ ID NO: 1945980 - DNA, 15 bp, Homo sapiens
ttagttttcttaact

SEQ ID NO: 1945981 - DNA, 15 bp, Homo sapiens
tagttttcttaacta

SEQ ID NO: 1945982 - DNA, 15 bp, Homo sapiens
agttttcttaactat

SEQ ID NO: 1945983 - DNA, 15 bp, Homo sapiens
gttttcttaactata

SEQ ID NO: 1945984 - DNA, 15 bp, Homo sapiens
ttttcttaactataa

SEQ ID NO: 1945985 - DNA, 15 bp, Homo sapiens
tttcttaactataaa

SEQ ID NO: 1945986 - DNA, 15 bp, Homo sapiens
tcttaactataaaat

SEQ ID NO: 1945987 - DNA, 15 bp, Homo sapiens
cttaactataaaatt

SEQ ID NO: 1945988 - DNA, 15 bp, Homo sapiens
ttaactataaaattt

SEQ ID NO: 1945989 - DNA, 15 bp, Homo sapiens
taactataaaatttg

SEQ ID NO: 1945990 - DNA, 15 bp, Homo sapiens
aactataaaatttga

SEQ ID NO: 1945991 - DNA, 15 bp, Homo sapiens
actataaaatttgat

SEQ ID NO: 1945992 - DNA, 15 bp, Homo sapiens
ctataaaatttgata

SEQ ID NO: 1945993 - DNA, 15 bp, Homo sapiens
tataaaatttgatag

SEQ ID NO: 1945994 - DNA, 15 bp, Homo sapiens
ataaaatttgataga

SEQ ID NO: 1945995 - DNA, 15 bp, Homo sapiens
taaaatttgatagac

SEQ ID NO: 1945996 - DNA, 15 bp, Homo sapiens
aaaatttgatagact

SEQ ID NO: 1945997 - DNA, 15 bp, Homo sapiens
aaatttgatagactg

SEQ ID NO: 1945998 - DNA, 15 bp, Homo sapiens
aatttgatagactga

SEQ ID NO: 1945999 - DNA, 15 bp, Homo sapiens
atttgatagactgat

SEQ ID NO: 1946000 - DNA, 15 bp, Homo sapiens
tttgatagactgatg

SEQ ID NO: 1946001 - DNA, 15 bp, Homo sapiens
ttgatagactgatgg

SEQ ID NO: 1946002 - DNA, 15 bp, Homo sapiens
tgatagactgatgga

SEQ ID NO: 1946003 - DNA, 15 bp, Homo sapiens
gatagactgatggat

SEQ ID NO: 1946004 - DNA, 15 bp, Homo sapiens
atagactgatggatg

SEQ ID NO: 1946005 - DNA, 15 bp, Homo sapiens
tagactgatggatga

SEQ ID NO: 1946006 - DNA, 15 bp, Homo sapiens
agactgatggatgaa

SEQ ID NO: 1946007 - DNA, 15 bp, Homo sapiens
gactgatggatgaaa

SEQ ID NO: 1946008 - DNA, 15 bp, Homo sapiens
actgatggatgaaat

SEQ ID NO: 1946009 - DNA, 15 bp, Homo sapiens
ctgatggatgaaatg

SEQ ID NO: 1946010 - DNA, 15 bp, Homo sapiens
tgatggatgaaatga

SEQ ID NO: 1946011 - DNA, 15 bp, Homo sapiens
gatggatgaaatgat

SEQ ID NO: 1946012 - DNA, 15 bp, Homo sapiens
atggatgaaatgatc

SEQ ID NO: 1946013 - DNA, 15 bp, Homo sapiens
tggatgaaatgatct

SEQ ID NO: 1946014 - DNA, 15 bp, Homo sapiens
ggatgaaatgatctc

SEQ ID NO: 1946015 - DNA, 15 bp, Homo sapiens
gatgaaatgatctct

SEQ ID NO: 1946016 - DNA, 15 bp, Homo sapiens
atgaaatgatctcta

SEQ ID NO: 1946017 - DNA, 15 bp, Homo sapiens
tgaaatgatctctaa

SEQ ID NO: 1946018 - DNA, 15 bp, Homo sapiens
gaaatgatctctaaa

SEQ ID NO: 1946019 - DNA, 15 bp, Homo sapiens
aaatgatctctaaaa

SEQ ID NO: 1946020 - DNA, 15 bp, Homo sapiens
aatgatctctaaaat

SEQ ID NO: 1946021 - DNA, 15 bp, Homo sapiens
atgatctctaaaatt

SEQ ID NO: 1946022 - DNA, 15 bp, Homo sapiens
tgatctctaaaattc

SEQ ID NO: 1946023 - DNA, 15 bp, Homo sapiens
gatctctaaaattcc

SEQ ID NO: 1946024 - DNA, 15 bp, Homo sapiens
atctctaaaattcct

SEQ ID NO: 1946025 - DNA, 15 bp, Homo sapiens
tctctaaaattcctt

SEQ ID NO: 1946026 - DNA, 15 bp, Homo sapiens
ctctaaaattccttc

SEQ ID NO: 1946027 - DNA, 15 bp, Homo sapiens
tctaaaattccttca

SEQ ID NO: 1946028 - DNA, 15 bp, Homo sapiens
ctaaaattccttcaa

SEQ ID NO: 1946029 - DNA, 15 bp, Homo sapiens
taaaattccttcaaa

SEQ ID NO: 1946030 - DNA, 15 bp, Homo sapiens
aaattccttcaaact

SEQ ID NO: 1946031 - DNA, 15 bp, Homo sapiens
aattccttcaaactc

SEQ ID NO: 1946032 - DNA, 15 bp, Homo sapiens
attccttcaaactct

SEQ ID NO: 1946033 - DNA, 15 bp, Homo sapiens
ttccttcaaactctc

SEQ ID NO: 1946034 - DNA, 15 bp, Homo sapiens
tccttcaaactctca

SEQ ID NO: 1946035 - DNA, 15 bp, Homo sapiens
ccttcaaactctcaa

SEQ ID NO: 1946036 - DNA, 15 bp, Homo sapiens
cttcaaactctcaaa

SEQ ID NO: 1946037 - DNA, 15 bp, Homo sapiens
ttcaaactctcaaat

SEQ ID NO: 1946038 - DNA, 15 bp, Homo sapiens
tcaaactctcaaatt

SEQ ID NO: 1946039 - DNA, 15 bp, Homo sapiens
caaactctcaaattc

SEQ ID NO: 1946040 - DNA, 15 bp, Homo sapiens
aaactctcaaattct

SEQ ID NO: 1946041 - DNA, 15 bp, Homo sapiens
aactctcaaattcta

SEQ ID NO: 1946042 - DNA, 15 bp, Homo sapiens
actctcaaattctat

SEQ ID NO: 1946043 - DNA, 15 bp, Homo sapiens
ctctcaaattctatg

SEQ ID NO: 1946044 - DNA, 15 bp, Homo sapiens
tctcaaattctatgg

SEQ ID NO: 1946045 - DNA, 15 bp, Homo sapiens
ctcaaattctatggt

SEQ ID NO: 1946046 - DNA, 15 bp, Homo sapiens
tcaaattctatggtt

SEQ ID NO: 1946047 - DNA, 15 bp, Homo sapiens
caaattctatggttt

SEQ ID NO: 1946048 - DNA, 15 bp, Homo sapiens
aaattctatggtttt

SEQ ID NO: 1946049 - DNA, 15 bp, Homo sapiens
aattctatggtttta

SEQ ID NO: 1946050 - DNA, 15 bp, Homo sapiens
attctatggttttat

SEQ ID NO: 1946051 - DNA, 15 bp, Homo sapiens
ttctatggttttatg

SEQ ID NO: 1946052 - DNA, 15 bp, Homo sapiens
tctatggttttatga

SEQ ID NO: 1946053 - DNA, 15 bp, Homo sapiens
ctatggttttatgat

SEQ ID NO: 1946054 - DNA, 15 bp, Homo sapiens
tatggttttatgatt

SEQ ID NO: 1946055 - DNA, 15 bp, Homo sapiens
atggttttatgattc

SEQ ID NO: 1946056 - DNA, 15 bp, Homo sapiens
tggttttatgattcc

SEQ ID NO: 1946057 - DNA, 15 bp, Homo sapiens
ggttttatgattccc

SEQ ID NO: 1946058 - DNA, 15 bp, Homo sapiens
gttttatgattccct

SEQ ID NO: 1946059 - DNA, 15 bp, Homo sapiens
ttttatgattccctg

SEQ ID NO: 1946060 - DNA, 15 bp, Homo sapiens
tttatgattccctgg

SEQ ID NO: 1946061 - DNA, 15 bp, Homo sapiens
ttatgattccctggt

SEQ ID NO: 1946062 - DNA, 15 bp, Homo sapiens
tatgattccctggtt

SEQ ID NO: 1946063 - DNA, 15 bp, Homo sapiens
atgattccctggttc

SEQ ID NO: 1946064 - DNA, 15 bp, Homo sapiens
tgattccctggttct

SEQ ID NO: 1946065 - DNA, 15 bp, Homo sapiens
gattccctggttctg

SEQ ID NO: 1946066 - DNA, 15 bp, Homo sapiens
attccctggttctga

SEQ ID NO: 1946067 - DNA, 15 bp, Homo sapiens
ttccctggttctgaa

SEQ ID NO: 1946068 - DNA, 15 bp, Homo sapiens
tccctggttctgaag

SEQ ID NO: 1946069 - DNA, 15 bp, Homo sapiens
ccctggttctgaaga

SEQ ID NO: 1946070 - DNA, 15 bp, Homo sapiens
cctggttctgaagac

SEQ ID NO: 1946071 - DNA, 15 bp, Homo sapiens
ctggttctgaagact

SEQ ID NO: 1946072 - DNA, 15 bp, Homo sapiens
tggttctgaagactt

SEQ ID NO: 1946073 - DNA, 15 bp, Homo sapiens
ggttctgaagacttg

SEQ ID NO: 1946074 - DNA, 15 bp, Homo sapiens
gttctgaagacttgt

SEQ ID NO: 1946075 - DNA, 15 bp, Homo sapiens
ttctgaagacttgta

SEQ ID NO: 1946076 - DNA, 15 bp, Homo sapiens
tctgaagacttgtac

SEQ ID NO: 1946077 - DNA, 15 bp, Homo sapiens
ctgaagacttgtaca

SEQ ID NO: 1946078 - DNA, 15 bp, Homo sapiens
tgaagacttgtacaa

SEQ ID NO: 1946079 - DNA, 15 bp, Homo sapiens
gaagacttgtacaaa

SEQ ID NO: 1946080 - DNA, 15 bp, Homo sapiens
aagacttgtacaaaa

SEQ ID NO: 1946081 - DNA, 15 bp, Homo sapiens
agacttgtacaaaat

SEQ ID NO: 1946082 - DNA, 15 bp, Homo sapiens
gacttgtacaaaatt

SEQ ID NO: 1946083 - DNA, 15 bp, Homo sapiens
acttgtacaaaatta

SEQ ID NO: 1946084 - DNA, 15 bp, Homo sapiens
cttgtacaaaattac

SEQ ID NO: 1946085 - DNA, 15 bp, Homo sapiens
ttgtacaaaattaca

SEQ ID NO: 1946086 - DNA, 15 bp, Homo sapiens
tgtacaaaattacaa

SEQ ID NO: 1946087 - DNA, 15 bp, Homo sapiens
gtacaaaattacaac

SEQ ID NO: 1946088 - DNA, 15 bp, Homo sapiens
tacaaaattacaaca

SEQ ID NO: 1946089 - DNA, 15 bp, Homo sapiens
acaaaattacaacaa

SEQ ID NO: 1946090 - DNA, 15 bp, Homo sapiens
caaaattacaacaac

SEQ ID NO: 1946091 - DNA, 15 bp, Homo sapiens
aaaattacaacaact

SEQ ID NO: 1946092 - DNA, 15 bp, Homo sapiens
aaattacaacaactt

SEQ ID NO: 1946093 - DNA, 15 bp, Homo sapiens
aattacaacaactta

SEQ ID NO: 1946094 - DNA, 15 bp, Homo sapiens
attacaacaacttaa

SEQ ID NO: 1946095 - DNA, 15 bp, Homo sapiens
ttacaacaacttaag

SEQ ID NO: 1946096 - DNA, 15 bp, Homo sapiens
tacaacaacttaaga

SEQ ID NO: 1946097 - DNA, 15 bp, Homo sapiens
acaacaacttaagat

SEQ ID NO: 1946098 - DNA, 15 bp, Homo sapiens
caacaacttaagatg

SEQ ID NO: 1946099 - DNA, 15 bp, Homo sapiens
aacaacttaagatgc

SEQ ID NO: 1946100 - DNA, 15 bp, Homo sapiens
acaacttaagatgct

SEQ ID NO: 1946101 - DNA, 15 bp, Homo sapiens
caacttaagatgcta

SEQ ID NO: 1946102 - DNA, 15 bp, Homo sapiens
aacttaagatgctag

SEQ ID NO: 1946103 - DNA, 15 bp, Homo sapiens
acttaagatgctaga

SEQ ID NO: 1946104 - DNA, 15 bp, Homo sapiens
cttaagatgctagat

SEQ ID NO: 1946105 - DNA, 15 bp, Homo sapiens
ttaagatgctagata

SEQ ID NO: 1946106 - DNA, 15 bp, Homo sapiens
taagatgctagataa

SEQ ID NO: 1946107 - DNA, 15 bp, Homo sapiens
aagatgctagataaa

SEQ ID NO: 1946108 - DNA, 15 bp, Homo sapiens
agatgctagataaaa

SEQ ID NO: 1946109 - DNA, 15 bp, Homo sapiens
gatgctagataaaat

SEQ ID NO: 1946110 - DNA, 15 bp, Homo sapiens
atgctagataaaatc

SEQ ID NO: 1946111 - DNA, 15 bp, Homo sapiens
tgctagataaaatcc

SEQ ID NO: 1946112 - DNA, 15 bp, Homo sapiens
gctagataaaatcct

SEQ ID NO: 1946113 - DNA, 15 bp, Homo sapiens
ctagataaaatccta

SEQ ID NO: 1946114 - DNA, 15 bp, Homo sapiens
tagataaaatcctaa

SEQ ID NO: 1946115 - DNA, 15 bp, Homo sapiens
agataaaatcctaat

SEQ ID NO: 1946116 - DNA, 15 bp, Homo sapiens
gataaaatcctaatg

SEQ ID NO: 1946117 - DNA, 15 bp, Homo sapiens
ataaaatcctaatgg

SEQ ID NO: 1946118 - DNA, 15 bp, Homo sapiens
taaaatcctaatggt

SEQ ID NO: 1946119 - DNA, 15 bp, Homo sapiens
aaaatcctaatggtg

SEQ ID NO: 1946120 - DNA, 15 bp, Homo sapiens
aaatcctaatggtga

SEQ ID NO: 1946121 - DNA, 15 bp, Homo sapiens
aatcctaatggtgaa

SEQ ID NO: 1946122 - DNA, 15 bp, Homo sapiens
atcctaatggtgaaa

SEQ ID NO: 1946123 - DNA, 15 bp, Homo sapiens
tcctaatggtgaaag

SEQ ID NO: 1946124 - DNA, 15 bp, Homo sapiens
cctaatggtgaaagg

SEQ ID NO: 1946125 - DNA, 15 bp, Homo sapiens
ctaatggtgaaaggg

SEQ ID NO: 1946126 - DNA, 15 bp, Homo sapiens
taatggtgaaaggga

SEQ ID NO: 1946127 - DNA, 15 bp, Homo sapiens
aatggtgaaagggag

SEQ ID NO: 1946128 - DNA, 15 bp, Homo sapiens
atggtgaaagggaga

SEQ ID NO: 1946129 - DNA, 15 bp, Homo sapiens
tggtgaaagggagag

SEQ ID NO: 1946130 - DNA, 15 bp, Homo sapiens
ggtgaaagggagagg

SEQ ID NO: 1946131 - DNA, 15 bp, Homo sapiens
gtgaaagggagaggc

SEQ ID NO: 1946132 - DNA, 15 bp, Homo sapiens
tgaaagggagaggca

SEQ ID NO: 1946133 - DNA, 15 bp, Homo sapiens
gaaagggagaggcaa

SEQ ID NO: 1946134 - DNA, 15 bp, Homo sapiens
aaagggagaggcaat

SEQ ID NO: 1946135 - DNA, 15 bp, Homo sapiens
aagggagaggcaatt

SEQ ID NO: 1946136 - DNA, 15 bp, Homo sapiens
agggagaggcaatta

SEQ ID NO: 1946137 - DNA, 15 bp, Homo sapiens
gggagaggcaattag

SEQ ID NO: 1946138 - DNA, 15 bp, Homo sapiens
ggagaggcaattagt

SEQ ID NO: 1946139 - DNA, 15 bp, Homo sapiens
gagaggcaattagta

SEQ ID NO: 1946140 - DNA, 15 bp, Homo sapiens
agaggcaattagtaa

SEQ ID NO: 1946141 - DNA, 15 bp, Homo sapiens
gaggcaattagtaaa

SEQ ID NO: 1946142 - DNA, 15 bp, Homo sapiens
aggcaattagtaaag

SEQ ID NO: 1946143 - DNA, 15 bp, Homo sapiens
ggcaattagtaaaga

SEQ ID NO: 1946144 - DNA, 15 bp, Homo sapiens
gcaattagtaaagaa

SEQ ID NO: 1946145 - DNA, 15 bp, Homo sapiens
caattagtaaagaaa

SEQ ID NO: 1946146 - DNA, 15 bp, Homo sapiens
aattagtaaagaaat

SEQ ID NO: 1946147 - DNA, 15 bp, Homo sapiens
attagtaaagaaata

SEQ ID NO: 1946148 - DNA, 15 bp, Homo sapiens
ttagtaaagaaataa

SEQ ID NO: 1946149 - DNA, 15 bp, Homo sapiens
tagtaaagaaataaa

SEQ ID NO: 1946150 - DNA, 15 bp, Homo sapiens
agtaaagaaataaat

SEQ ID NO: 1946151 - DNA, 15 bp, Homo sapiens
gtaaagaaataaatg

SEQ ID NO: 1946152 - DNA, 15 bp, Homo sapiens
taaagaaataaatgg

SEQ ID NO: 1946153 - DNA, 15 bp, Homo sapiens
aaagaaataaatggt

SEQ ID NO: 1946154 - DNA, 15 bp, Homo sapiens
aagaaataaatggtt

SEQ ID NO: 1946155 - DNA, 15 bp, Homo sapiens
agaaataaatggtta

SEQ ID NO: 1946156 - DNA, 15 bp, Homo sapiens
gaaataaatggttaa

SEQ ID NO: 1946157 - DNA, 15 bp, Homo sapiens
aaataaatggttaac

SEQ ID NO: 1946158 - DNA, 15 bp, Homo sapiens
aataaatggttaaca

SEQ ID NO: 1946159 - DNA, 15 bp, Homo sapiens
ataaatggttaacag

SEQ ID NO: 1946160 - DNA, 15 bp, Homo sapiens
taaatggttaacagt

SEQ ID NO: 1946161 - DNA, 15 bp, Homo sapiens
aaatggttaacagtc

SEQ ID NO: 1946162 - DNA, 15 bp, Homo sapiens
aatggttaacagtct

SEQ ID NO: 1946163 - DNA, 15 bp, Homo sapiens
atggttaacagtcta

SEQ ID NO: 1946164 - DNA, 15 bp, Homo sapiens
tggttaacagtctag

SEQ ID NO: 1946165 - DNA, 15 bp, Homo sapiens
ggttaacagtctaga

SEQ ID NO: 1946166 - DNA, 15 bp, Homo sapiens
gttaacagtctagag

SEQ ID NO: 1946167 - DNA, 15 bp, Homo sapiens
ttaacagtctagagc

SEQ ID NO: 1946168 - DNA, 15 bp, Homo sapiens
taacagtctagagcc

SEQ ID NO: 1946169 - DNA, 15 bp, Homo sapiens
aacagtctagagcca

SEQ ID NO: 1946170 - DNA, 15 bp, Homo sapiens
acagtctagagccat

SEQ ID NO: 1946171 - DNA, 15 bp, Homo sapiens
cagtctagagccatt

SEQ ID NO: 1946172 - DNA, 15 bp, Homo sapiens
agtctagagccattt

SEQ ID NO: 1946173 - DNA, 15 bp, Homo sapiens
gtctagagccattta

SEQ ID NO: 1946174 - DNA, 15 bp, Homo sapiens
tctagagccatttaa

SEQ ID NO: 1946175 - DNA, 15 bp, Homo sapiens
ctagagccatttaat

SEQ ID NO: 1946176 - DNA, 15 bp, Homo sapiens
tagagccatttaatg

SEQ ID NO: 1946177 - DNA, 15 bp, Homo sapiens
agagccatttaatgg

SEQ ID NO: 1946178 - DNA, 15 bp, Homo sapiens
gagccatttaatgga

SEQ ID NO: 1946179 - DNA, 15 bp, Homo sapiens
agccatttaatggag

SEQ ID NO: 1946180 - DNA, 15 bp, Homo sapiens
gccatttaatggaga

SEQ ID NO: 1946181 - DNA, 15 bp, Homo sapiens
ccatttaatggagag

SEQ ID NO: 1946182 - DNA, 15 bp, Homo sapiens
catttaatggagagg

SEQ ID NO: 1946183 - DNA, 15 bp, Homo sapiens
atttaatggagaggg

SEQ ID NO: 1946184 - DNA, 15 bp, Homo sapiens
tttaatggagaggga

SEQ ID NO: 1946185 - DNA, 15 bp, Homo sapiens
ttaatggagagggag

SEQ ID NO: 1946186 - DNA, 15 bp, Homo sapiens
taatggagagggaga

SEQ ID NO: 1946187 - DNA, 15 bp, Homo sapiens
aatggagagggagac

SEQ ID NO: 1946188 - DNA, 15 bp, Homo sapiens
atggagagggagaca

SEQ ID NO: 1946189 - DNA, 15 bp, Homo sapiens
tggagagggagacag

SEQ ID NO: 1946190 - DNA, 15 bp, Homo sapiens
ggagagggagacagc

SEQ ID NO: 1946191 - DNA, 15 bp, Homo sapiens
gagagggagacagcc

SEQ ID NO: 1946192 - DNA, 15 bp, Homo sapiens
agagggagacagccc

SEQ ID NO: 1946193 - DNA, 15 bp, Homo sapiens
gagggagacagccct

SEQ ID NO: 1946194 - DNA, 15 bp, Homo sapiens
agggagacagccctg

SEQ ID NO: 1946195 - DNA, 15 bp, Homo sapiens
gggagacagccctgc

SEQ ID NO: 1946196 - DNA, 15 bp, Homo sapiens
ggagacagccctgct

SEQ ID NO: 1946197 - DNA, 15 bp, Homo sapiens
gagacagccctgcta

SEQ ID NO: 1946198 - DNA, 15 bp, Homo sapiens
agacagccctgctac

SEQ ID NO: 1946199 - DNA, 15 bp, Homo sapiens
gacagccctgctacc

SEQ ID NO: 1946200 - DNA, 15 bp, Homo sapiens
acagccctgctacct

SEQ ID NO: 1946201 - DNA, 15 bp, Homo sapiens
cagccctgctacctc

SEQ ID NO: 1946202 - DNA, 15 bp, Homo sapiens
agccctgctacctca

SEQ ID NO: 1946203 - DNA, 15 bp, Homo sapiens
gccctgctacctcaa

SEQ ID NO: 1946204 - DNA, 15 bp, Homo sapiens
ccctgctacctcaac

SEQ ID NO: 1946205 - DNA, 15 bp, Homo sapiens
cctgctacctcaacg

SEQ ID NO: 1946206 - DNA, 15 bp, Homo sapiens
ctgctacctcaacgg

SEQ ID NO: 1946207 - DNA, 15 bp, Homo sapiens
tgctacctcaacggt

SEQ ID NO: 1946208 - DNA, 15 bp, Homo sapiens
gctacctcaacggta

SEQ ID NO: 1946209 - DNA, 15 bp, Homo sapiens
ctacctcaacggtaa

SEQ ID NO: 1946210 - DNA, 15 bp, Homo sapiens
tacctcaacggtaat

SEQ ID NO: 1946211 - DNA, 15 bp, Homo sapiens
acctcaacggtaatt

SEQ ID NO: 1946212 - DNA, 15 bp, Homo sapiens
cctcaacggtaattg

SEQ ID NO: 1946213 - DNA, 15 bp, Homo sapiens
ctcaacggtaattga

SEQ ID NO: 1946214 - DNA, 15 bp, Homo sapiens
tcaacggtaattgag

SEQ ID NO: 1946215 - DNA, 15 bp, Homo sapiens
caacggtaattgagt

SEQ ID NO: 1946216 - DNA, 15 bp, Homo sapiens
aacggtaattgagtt

SEQ ID NO: 1946217 - DNA, 15 bp, Homo sapiens
acggtaattgagttt

SEQ ID NO: 1946218 - DNA, 15 bp, Homo sapiens
cggtaattgagtttc

SEQ ID NO: 1946219 - DNA, 15 bp, Homo sapiens
ggtaattgagtttca

SEQ ID NO: 1946220 - DNA, 15 bp, Homo sapiens
gtaattgagtttcat

SEQ ID NO: 1946221 - DNA, 15 bp, Homo sapiens
taattgagtttcata

SEQ ID NO: 1946222 - DNA, 15 bp, Homo sapiens
aattgagtttcataa

SEQ ID NO: 1946223 - DNA, 15 bp, Homo sapiens
attgagtttcataat

SEQ ID NO: 1946224 - DNA, 15 bp, Homo sapiens
ttgagtttcataatg

SEQ ID NO: 1946225 - DNA, 15 bp, Homo sapiens
tgagtttcataatga

SEQ ID NO: 1946226 - DNA, 15 bp, Homo sapiens
gagtttcataatgat

SEQ ID NO: 1946227 - DNA, 15 bp, Homo sapiens
agtttcataatgatg

SEQ ID NO: 1946228 - DNA, 15 bp, Homo sapiens
gtttcataatgatga

SEQ ID NO: 1946229 - DNA, 15 bp, Homo sapiens
tttcataatgatgac

SEQ ID NO: 1946230 - DNA, 15 bp, Homo sapiens
ttcataatgatgaca

SEQ ID NO: 1946231 - DNA, 15 bp, Homo sapiens
tcataatgatgacac

SEQ ID NO: 1946232 - DNA, 15 bp, Homo sapiens
cataatgatgacact

SEQ ID NO: 1946233 - DNA, 15 bp, Homo sapiens
ataatgatgacactg

SEQ ID NO: 1946234 - DNA, 15 bp, Homo sapiens
taatgatgacactga

SEQ ID NO: 1946235 - DNA, 15 bp, Homo sapiens
aatgatgacactgag

SEQ ID NO: 1946236 - DNA, 15 bp, Homo sapiens
atgatgacactgagt

SEQ ID NO: 1946237 - DNA, 15 bp, Homo sapiens
tgatgacactgagtc

SEQ ID NO: 1946238 - DNA, 15 bp, Homo sapiens
gatgacactgagtca

SEQ ID NO: 1946239 - DNA, 15 bp, Homo sapiens
atgacactgagtcat

SEQ ID NO: 1946240 - DNA, 15 bp, Homo sapiens
tgacactgagtcatc

SEQ ID NO: 1946241 - DNA, 15 bp, Homo sapiens
gacactgagtcatca

SEQ ID NO: 1946242 - DNA, 15 bp, Homo sapiens
acactgagtcatcaa

SEQ ID NO: 1946243 - DNA, 15 bp, Homo sapiens
cactgagtcatcaaa

SEQ ID NO: 1946244 - DNA, 15 bp, Homo sapiens
actgagtcatcaaaa

SEQ ID NO: 1946245 - DNA, 15 bp, Homo sapiens
ctgagtcatcaaaaa

SEQ ID NO: 1946246 - DNA, 15 bp, Homo sapiens
tgagtcatcaaaaaa

SEQ ID NO: 1946247 - DNA, 15 bp, Homo sapiens
gagtcatcaaaaaag

SEQ ID NO: 1946248 - DNA, 15 bp, Homo sapiens
agtcatcaaaaaagg

SEQ ID NO: 1946249 - DNA, 15 bp, Homo sapiens
gtcatcaaaaaaggt

SEQ ID NO: 1946250 - DNA, 15 bp, Homo sapiens
tcatcaaaaaaggtt

SEQ ID NO: 1946251 - DNA, 15 bp, Homo sapiens
catcaaaaaaggtta

SEQ ID NO: 1946252 - DNA, 15 bp, Homo sapiens
atcaaaaaaggttaa

SEQ ID NO: 1946253 - DNA, 15 bp, Homo sapiens
tcaaaaaaggttaaa

SEQ ID NO: 1946254 - DNA, 15 bp, Homo sapiens
caaaaaaggttaaat

SEQ ID NO: 1946255 - DNA, 15 bp, Homo sapiens
aaaaaaggttaaatt

SEQ ID NO: 1946256 - DNA, 15 bp, Homo sapiens
aaaaaggttaaattt

SEQ ID NO: 1946257 - DNA, 15 bp, Homo sapiens
aaaaggttaaatttg

SEQ ID NO: 1946258 - DNA, 15 bp, Homo sapiens
aaaggttaaatttgg

SEQ ID NO: 1946259 - DNA, 15 bp, Homo sapiens
aaggttaaatttggt

SEQ ID NO: 1946260 - DNA, 15 bp, Homo sapiens
aggttaaatttggtt

SEQ ID NO: 1946261 - DNA, 15 bp, Homo sapiens
ggttaaatttggttc

SEQ ID NO: 1946262 - DNA, 15 bp, Homo sapiens
gttaaatttggttca

SEQ ID NO: 1946263 - DNA, 15 bp, Homo sapiens
ttaaatttggttcaa

SEQ ID NO: 1946264 - DNA, 15 bp, Homo sapiens
taaatttggttcaac

SEQ ID NO: 1946265 - DNA, 15 bp, Homo sapiens
aaatttggttcaacc

SEQ ID NO: 1946266 - DNA, 15 bp, Homo sapiens
aatttggttcaacct

SEQ ID NO: 1946267 - DNA, 15 bp, Homo sapiens
atttggttcaaccta

SEQ ID NO: 1946268 - DNA, 15 bp, Homo sapiens
tttggttcaacctac

SEQ ID NO: 1946269 - DNA, 15 bp, Homo sapiens
ttggttcaacctact

SEQ ID NO: 1946270 - DNA, 15 bp, Homo sapiens
tggttcaacctactc

SEQ ID NO: 1946271 - DNA, 15 bp, Homo sapiens
ggttcaacctactct

SEQ ID NO: 1946272 - DNA, 15 bp, Homo sapiens
gttcaacctactctc

SEQ ID NO: 1946273 - DNA, 15 bp, Homo sapiens
ttcaacctactctcc

SEQ ID NO: 1946274 - DNA, 15 bp, Homo sapiens
tcaacctactctcct

SEQ ID NO: 1946275 - DNA, 15 bp, Homo sapiens
caacctactctcctt

SEQ ID NO: 1946276 - DNA, 15 bp, Homo sapiens
aacctactctcctta

SEQ ID NO: 1946277 - DNA, 15 bp, Homo sapiens
acctactctccttaa

SEQ ID NO: 1946278 - DNA, 15 bp, Homo sapiens
cctactctccttaaa

SEQ ID NO: 1946279 - DNA, 15 bp, Homo sapiens
ctactctccttaaaa

SEQ ID NO: 1946280 - DNA, 15 bp, Homo sapiens
tactctccttaaaag

SEQ ID NO: 1946281 - DNA, 15 bp, Homo sapiens
actctccttaaaagg

SEQ ID NO: 1946282 - DNA, 15 bp, Homo sapiens
ctctccttaaaaggc

SEQ ID NO: 1946283 - DNA, 15 bp, Homo sapiens
tctccttaaaaggca

SEQ ID NO: 1946284 - DNA, 15 bp, Homo sapiens
ctccttaaaaggcaa

SEQ ID NO: 1946285 - DNA, 15 bp, Homo sapiens
tccttaaaaggcaaa

SEQ ID NO: 1946286 - DNA, 15 bp, Homo sapiens
ccttaaaaggcaaag

SEQ ID NO: 1946287 - DNA, 15 bp, Homo sapiens
cttaaaaggcaaaga

SEQ ID NO: 1946288 - DNA, 15 bp, Homo sapiens
ttaaaaggcaaagaa

SEQ ID NO: 1946289 - DNA, 15 bp, Homo sapiens
taaaaggcaaagaaa

SEQ ID NO: 1946290 - DNA, 15 bp, Homo sapiens
aaaaggcaaagaaat

SEQ ID NO: 1946291 - DNA, 15 bp, Homo sapiens
aaaggcaaagaaatg

SEQ ID NO: 1946292 - DNA, 15 bp, Homo sapiens
aaggcaaagaaatgt

SEQ ID NO: 1946293 - DNA, 15 bp, Homo sapiens
aggcaaagaaatgtg

SEQ ID NO: 1946294 - DNA, 15 bp, Homo sapiens
ggcaaagaaatgtgt

SEQ ID NO: 1946295 - DNA, 15 bp, Homo sapiens
gcaaagaaatgtgta

SEQ ID NO: 1946296 - DNA, 15 bp, Homo sapiens
caaagaaatgtgtaa

SEQ ID NO: 1946297 - DNA, 15 bp, Homo sapiens
aaagaaatgtgtaat

SEQ ID NO: 1946298 - DNA, 15 bp, Homo sapiens
aagaaatgtgtaatg

SEQ ID NO: 1946299 - DNA, 15 bp, Homo sapiens
agaaatgtgtaatgc

SEQ ID NO: 1946300 - DNA, 15 bp, Homo sapiens
gaaatgtgtaatgca

SEQ ID NO: 1946301 - DNA, 15 bp, Homo sapiens
aaatgtgtaatgcat

SEQ ID NO: 1946302 - DNA, 15 bp, Homo sapiens
aatgtgtaatgcatt

SEQ ID NO: 1946303 - DNA, 15 bp, Homo sapiens
atgtgtaatgcattt

SEQ ID NO: 1946304 - DNA, 15 bp, Homo sapiens
tgtgtaatgcatttt

SEQ ID NO: 1946305 - DNA, 15 bp, Homo sapiens
gtgtaatgcattttt

SEQ ID NO: 1946306 - DNA, 15 bp, Homo sapiens
tgtaatgcattttta

SEQ ID NO: 1946307 - DNA, 15 bp, Homo sapiens
gtaatgcatttttag

SEQ ID NO: 1946308 - DNA, 15 bp, Homo sapiens
taatgcatttttagg

SEQ ID NO: 1946309 - DNA, 15 bp, Homo sapiens
aatgcatttttagga

SEQ ID NO: 1946310 - DNA, 15 bp, Homo sapiens
atgcatttttaggaa

SEQ ID NO: 1946311 - DNA, 15 bp, Homo sapiens
tgcatttttaggaag

SEQ ID NO: 1946312 - DNA, 15 bp, Homo sapiens
gcatttttaggaaga

SEQ ID NO: 1946313 - DNA, 15 bp, Homo sapiens
catttttaggaagat

SEQ ID NO: 1946314 - DNA, 15 bp, Homo sapiens
atttttaggaagatt

SEQ ID NO: 1946315 - DNA, 15 bp, Homo sapiens
tttttaggaagattt

SEQ ID NO: 1946316 - DNA, 15 bp, Homo sapiens
ttttaggaagatttt

SEQ ID NO: 1946317 - DNA, 15 bp, Homo sapiens
tttaggaagattttt

SEQ ID NO: 1946318 - DNA, 15 bp, Homo sapiens
ttaggaagattttta

SEQ ID NO: 1946319 - DNA, 15 bp, Homo sapiens
taggaagatttttac

SEQ ID NO: 1946320 - DNA, 15 bp, Homo sapiens
aggaagatttttacc

SEQ ID NO: 1946321 - DNA, 15 bp, Homo sapiens
ggaagatttttacca

SEQ ID NO: 1946322 - DNA, 15 bp, Homo sapiens
gaagatttttaccaa

SEQ ID NO: 1946323 - DNA, 15 bp, Homo sapiens
aagatttttaccaat

SEQ ID NO: 1946324 - DNA, 15 bp, Homo sapiens
agatttttaccaata

SEQ ID NO: 1946325 - DNA, 15 bp, Homo sapiens
gatttttaccaataa

SEQ ID NO: 1946326 - DNA, 15 bp, Homo sapiens
atttttaccaataat

SEQ ID NO: 1946327 - DNA, 15 bp, Homo sapiens
tttttaccaataata

SEQ ID NO: 1946328 - DNA, 15 bp, Homo sapiens
ttttaccaataatat

SEQ ID NO: 1946329 - DNA, 15 bp, Homo sapiens
tttaccaataatatt

SEQ ID NO: 1946330 - DNA, 15 bp, Homo sapiens
ttaccaataatattt

SEQ ID NO: 1946331 - DNA, 15 bp, Homo sapiens
taccaataatatttt

SEQ ID NO: 1946332 - DNA, 15 bp, Homo sapiens
accaataatatttta

SEQ ID NO: 1946333 - DNA, 15 bp, Homo sapiens
ccaataatattttaa

SEQ ID NO: 1946334 - DNA, 15 bp, Homo sapiens
caataatattttaat

SEQ ID NO: 1946335 - DNA, 15 bp, Homo sapiens
aataatattttaata

SEQ ID NO: 1946336 - DNA, 15 bp, Homo sapiens
ataatattttaatat

SEQ ID NO: 1946337 - DNA, 15 bp, Homo sapiens
taatattttaatatt

SEQ ID NO: 1946338 - DNA, 15 bp, Homo sapiens
aatattttaatattt

SEQ ID NO: 1946339 - DNA, 15 bp, Homo sapiens
atattttaatatttt

SEQ ID NO: 1946340 - DNA, 15 bp, Homo sapiens
tattttaatatttta

SEQ ID NO: 1946341 - DNA, 15 bp, Homo sapiens
attttaatattttat

SEQ ID NO: 1946342 - DNA, 15 bp, Homo sapiens
ttttaatattttatt

SEQ ID NO: 1946343 - DNA, 15 bp, Homo sapiens
tttaatattttatta

SEQ ID NO: 1946344 - DNA, 15 bp, Homo sapiens
taatattttattagt

SEQ ID NO: 1946345 - DNA, 15 bp, Homo sapiens
aatattttattagtt

SEQ ID NO: 1946346 - DNA, 15 bp, Homo sapiens
atattttattagttt

SEQ ID NO: 1946347 - DNA, 15 bp, Homo sapiens
tattttattagtttt

SEQ ID NO: 1946348 - DNA, 15 bp, Homo sapiens
attttattagttttt

SEQ ID NO: 1946349 - DNA, 15 bp, Homo sapiens
ttttattagttttta

SEQ ID NO: 1946350 - DNA, 15 bp, Homo sapiens
tttattagtttttat

SEQ ID NO: 1946351 - DNA, 15 bp, Homo sapiens
ttattagtttttatt

SEQ ID NO: 1946352 - DNA, 15 bp, Homo sapiens
tattagtttttattc

SEQ ID NO: 1946353 - DNA, 15 bp, Homo sapiens
attagtttttattca

SEQ ID NO: 1946354 - DNA, 15 bp, Homo sapiens
ttagtttttattcaa

SEQ ID NO: 1946355 - DNA, 15 bp, Homo sapiens
tagtttttattcaac

SEQ ID NO: 1946356 - DNA, 15 bp, Homo sapiens
agtttttattcaact

SEQ ID NO: 1946357 - DNA, 15 bp, Homo sapiens
gtttttattcaactt

SEQ ID NO: 1946358 - DNA, 15 bp, Homo sapiens
tttttattcaactta

SEQ ID NO: 1946359 - DNA, 15 bp, Homo sapiens
ttttattcaacttaa

SEQ ID NO: 1946360 - DNA, 15 bp, Homo sapiens
tttattcaacttaaa

SEQ ID NO: 1946361 - DNA, 15 bp, Homo sapiens
ttattcaacttaaaa

SEQ ID NO: 1946362 - DNA, 15 bp, Homo sapiens
tattcaacttaaaat

SEQ ID NO: 1946363 - DNA, 15 bp, Homo sapiens
attcaacttaaaatt

SEQ ID NO: 1946364 - DNA, 15 bp, Homo sapiens
ttcaacttaaaattt

SEQ ID NO: 1946365 - DNA, 15 bp, Homo sapiens
tcaacttaaaattta

SEQ ID NO: 1946366 - DNA, 15 bp, Homo sapiens
caacttaaaatttaa

SEQ ID NO: 1946367 - DNA, 15 bp, Homo sapiens
aacttaaaatttaag

SEQ ID NO: 1946368 - DNA, 15 bp, Homo sapiens
acttaaaatttaagc

SEQ ID NO: 1946369 - DNA, 15 bp, Homo sapiens
cttaaaatttaagct

SEQ ID NO: 1946370 - DNA, 15 bp, Homo sapiens
ttaaaatttaagctt

SEQ ID NO: 1946371 - DNA, 15 bp, Homo sapiens
taaaatttaagcttt

SEQ ID NO: 1946372 - DNA, 15 bp, Homo sapiens
aaaatttaagcttta

SEQ ID NO: 1946373 - DNA, 15 bp, Homo sapiens
aaatttaagctttaa

SEQ ID NO: 1946374 - DNA, 15 bp, Homo sapiens
aatttaagctttaat

SEQ ID NO: 1946375 - DNA, 15 bp, Homo sapiens
atttaagctttaatt

SEQ ID NO: 1946376 - DNA, 15 bp, Homo sapiens
tttaagctttaatta

SEQ ID NO: 1946377 - DNA, 15 bp, Homo sapiens
ttaagctttaattat

SEQ ID NO: 1946378 - DNA, 15 bp, Homo sapiens
taagctttaattatt

SEQ ID NO: 1946379 - DNA, 15 bp, Homo sapiens
aagctttaattattt

SEQ ID NO: 1946380 - DNA, 15 bp, Homo sapiens
agctttaattatttg

SEQ ID NO: 1946381 - DNA, 15 bp, Homo sapiens
gctttaattatttgg

SEQ ID NO: 1946382 - DNA, 15 bp, Homo sapiens
ctttaattatttgga

SEQ ID NO: 1946383 - DNA, 15 bp, Homo sapiens
tttaattatttggaa

SEQ ID NO: 1946384 - DNA, 15 bp, Homo sapiens
taattatttggaaaa

SEQ ID NO: 1946385 - DNA, 15 bp, Homo sapiens
aattatttggaaaat

SEQ ID NO: 1946386 - DNA, 15 bp, Homo sapiens
attatttggaaaatt

SEQ ID NO: 1946387 - DNA, 15 bp, Homo sapiens
ttatttggaaaattc

SEQ ID NO: 1946388 - DNA, 15 bp, Homo sapiens
tatttggaaaattca

SEQ ID NO: 1946389 - DNA, 15 bp, Homo sapiens
atttggaaaattcac

SEQ ID NO: 1946390 - DNA, 15 bp, Homo sapiens
tttggaaaattcact

SEQ ID NO: 1946391 - DNA, 15 bp, Homo sapiens
ttggaaaattcactt

SEQ ID NO: 1946392 - DNA, 15 bp, Homo sapiens
tggaaaattcacttt

SEQ ID NO: 1946393 - DNA, 15 bp, Homo sapiens
ggaaaattcactttt

SEQ ID NO: 1946394 - DNA, 15 bp, Homo sapiens
gaaaattcacttttg

SEQ ID NO: 1946395 - DNA, 15 bp, Homo sapiens
aaaattcacttttgt

SEQ ID NO: 1946396 - DNA, 15 bp, Homo sapiens
aaattcacttttgta

SEQ ID NO: 1946397 - DNA, 15 bp, Homo sapiens
aattcacttttgtaa

SEQ ID NO: 1946398 - DNA, 15 bp, Homo sapiens
attcacttttgtaaa

SEQ ID NO: 1946399 - DNA, 15 bp, Homo sapiens
ttcacttttgtaaat

SEQ ID NO: 1946400 - DNA, 15 bp, Homo sapiens
cacttttgtaaatgt

SEQ ID NO: 1946401 - DNA, 15 bp, Homo sapiens
acttttgtaaatgtc

SEQ ID NO: 1946402 - DNA, 15 bp, Homo sapiens
cttttgtaaatgtct

SEQ ID NO: 1946403 - DNA, 15 bp, Homo sapiens
ttttgtaaatgtcta

SEQ ID NO: 1946404 - DNA, 15 bp, Homo sapiens
tttgtaaatgtctat

SEQ ID NO: 1946405 - DNA, 15 bp, Homo sapiens
ttgtaaatgtctatt

SEQ ID NO: 1946406 - DNA, 15 bp, Homo sapiens
tgtaaatgtctattt

SEQ ID NO: 1946407 - DNA, 15 bp, Homo sapiens
gtaaatgtctatttc

SEQ ID NO: 1946408 - DNA, 15 bp, Homo sapiens
taaatgtctatttcc

SEQ ID NO: 1946409 - DNA, 15 bp, Homo sapiens
aaatgtctatttcct

SEQ ID NO: 1946410 - DNA, 15 bp, Homo sapiens
aatgtctatttcctc

SEQ ID NO: 1946411 - DNA, 15 bp, Homo sapiens
atgtctatttcctct

SEQ ID NO: 1946412 - DNA, 15 bp, Homo sapiens
tgtctatttcctctc

SEQ ID NO: 1946413 - DNA, 15 bp, Homo sapiens
gtctatttcctctcc

SEQ ID NO: 1946414 - DNA, 15 bp, Homo sapiens
tctatttcctctccg

SEQ ID NO: 1946415 - DNA, 15 bp, Homo sapiens
ctatttcctctccgt

SEQ ID NO: 1946416 - DNA, 15 bp, Homo sapiens
tatttcctctccgtg

SEQ ID NO: 1946417 - DNA, 15 bp, Homo sapiens
atttcctctccgtga

SEQ ID NO: 1946418 - DNA, 15 bp, Homo sapiens
tttcctctccgtgaa

SEQ ID NO: 1946419 - DNA, 15 bp, Homo sapiens
ttcctctccgtgaag

SEQ ID NO: 1946420 - DNA, 15 bp, Homo sapiens
tcctctccgtgaagc

SEQ ID NO: 1946421 - DNA, 15 bp, Homo sapiens
cctctccgtgaagca

SEQ ID NO: 1946422 - DNA, 15 bp, Homo sapiens
ctctccgtgaagcaa

SEQ ID NO: 1946423 - DNA, 15 bp, Homo sapiens
tctccgtgaagcaag

SEQ ID NO: 1946424 - DNA, 15 bp, Homo sapiens
ctccgtgaagcaagc

SEQ ID NO: 1946425 - DNA, 15 bp, Homo sapiens
tccgtgaagcaagcc

SEQ ID NO: 1946426 - DNA, 15 bp, Homo sapiens
ccgtgaagcaagccc

SEQ ID NO: 1946427 - DNA, 15 bp, Homo sapiens
cgtgaagcaagccca

SEQ ID NO: 1946428 - DNA, 15 bp, Homo sapiens
gtgaagcaagcccat

SEQ ID NO: 1946429 - DNA, 15 bp, Homo sapiens
tgaagcaagcccatt

SEQ ID NO: 1946430 - DNA, 15 bp, Homo sapiens
gaagcaagcccattt

SEQ ID NO: 1946431 - DNA, 15 bp, Homo sapiens
aagcaagcccatttc

SEQ ID NO: 1946432 - DNA, 15 bp, Homo sapiens
agcaagcccatttca

SEQ ID NO: 1946433 - DNA, 15 bp, Homo sapiens
gcaagcccatttcag

SEQ ID NO: 1946434 - DNA, 15 bp, Homo sapiens
caagcccatttcagg

SEQ ID NO: 1946435 - DNA, 15 bp, Homo sapiens
aagcccatttcaggg

SEQ ID NO: 1946436 - DNA, 15 bp, Homo sapiens
agcccatttcagggg

SEQ ID NO: 1946437 - DNA, 15 bp, Homo sapiens
gcccatttcaggggc

SEQ ID NO: 1946438 - DNA, 15 bp, Homo sapiens
cccatttcaggggct

SEQ ID NO: 1946439 - DNA, 15 bp, Homo sapiens
ccatttcaggggcta

SEQ ID NO: 1946440 - DNA, 15 bp, Homo sapiens
catttcaggggctac

SEQ ID NO: 1946441 - DNA, 15 bp, Homo sapiens
atttcaggggctaca

SEQ ID NO: 1946442 - DNA, 15 bp, Homo sapiens
tttcaggggctacag

SEQ ID NO: 1946443 - DNA, 15 bp, Homo sapiens
ttcaggggctacaga

SEQ ID NO: 1946444 - DNA, 15 bp, Homo sapiens
tcaggggctacagag

SEQ ID NO: 1946445 - DNA, 15 bp, Homo sapiens
caggggctacagaga

SEQ ID NO: 1946446 - DNA, 15 bp, Homo sapiens
aggggctacagagat

SEQ ID NO: 1946447 - DNA, 15 bp, Homo sapiens
ggggctacagagatc

SEQ ID NO: 1946448 - DNA, 15 bp, Homo sapiens
gggctacagagatct

SEQ ID NO: 1946449 - DNA, 15 bp, Homo sapiens
ggctacagagatctt

SEQ ID NO: 1946450 - DNA, 15 bp, Homo sapiens
gctacagagatcttc

SEQ ID NO: 1946451 - DNA, 15 bp, Homo sapiens
ctacagagatcttcc

SEQ ID NO: 1946452 - DNA, 15 bp, Homo sapiens
tacagagatcttcct

SEQ ID NO: 1946453 - DNA, 15 bp, Homo sapiens
acagagatcttcctg

SEQ ID NO: 1946454 - DNA, 15 bp, Homo sapiens
cagagatcttcctgc

SEQ ID NO: 1946455 - DNA, 15 bp, Homo sapiens
agagatcttcctgcc

SEQ ID NO: 1946456 - DNA, 15 bp, Homo sapiens
gagatcttcctgccg

SEQ ID NO: 1946457 - DNA, 15 bp, Homo sapiens
agatcttcctgccgc

SEQ ID NO: 1946458 - DNA, 15 bp, Homo sapiens
gatcttcctgccgcc

SEQ ID NO: 1946459 - DNA, 15 bp, Homo sapiens
atcttcctgccgcca

SEQ ID NO: 1946460 - DNA, 15 bp, Homo sapiens
tcttcctgccgccac

SEQ ID NO: 1946461 - DNA, 15 bp, Homo sapiens
cttcctgccgccaca

SEQ ID NO: 1946462 - DNA, 15 bp, Homo sapiens
ttcctgccgccacag

SEQ ID NO: 1946463 - DNA, 15 bp, Homo sapiens
tcctgccgccacaga

SEQ ID NO: 1946464 - DNA, 15 bp, Homo sapiens
cctgccgccacagaa

SEQ ID NO: 1946465 - DNA, 15 bp, Homo sapiens
ctgccgccacagaat

SEQ ID NO: 1946466 - DNA, 15 bp, Homo sapiens
tgccgccacagaata

SEQ ID NO: 1946467 - DNA, 15 bp, Homo sapiens
gccgccacagaatag

SEQ ID NO: 1946468 - DNA, 15 bp, Homo sapiens
ccgccacagaatagc

SEQ ID NO: 1946469 - DNA, 15 bp, Homo sapiens
cgccacagaatagct

SEQ ID NO: 1946470 - DNA, 15 bp, Homo sapiens
gccacagaatagctt

SEQ ID NO: 1946471 - DNA, 15 bp, Homo sapiens
ccacagaatagctta

SEQ ID NO: 1946472 - DNA, 15 bp, Homo sapiens
cacagaatagcttat

SEQ ID NO: 1946473 - DNA, 15 bp, Homo sapiens
acagaatagcttatc

SEQ ID NO: 1946474 - DNA, 15 bp, Homo sapiens
cagaatagcttatca

SEQ ID NO: 1946475 - DNA, 15 bp, Homo sapiens
agaatagcttatcac

SEQ ID NO: 1946476 - DNA, 15 bp, Homo sapiens
gaatagcttatcact

SEQ ID NO: 1946477 - DNA, 15 bp, Homo sapiens
aatagcttatcactc

SEQ ID NO: 1946478 - DNA, 15 bp, Homo sapiens
atagcttatcactct

SEQ ID NO: 1946479 - DNA, 15 bp, Homo sapiens
tagcttatcactctg

SEQ ID NO: 1946480 - DNA, 15 bp, Homo sapiens
agcttatcactctgg

SEQ ID NO: 1946481 - DNA, 15 bp, Homo sapiens
gcttatcactctggt

SEQ ID NO: 1946482 - DNA, 15 bp, Homo sapiens
cttatcactctggta

SEQ ID NO: 1946483 - DNA, 15 bp, Homo sapiens
ttatcactctggtat

SEQ ID NO: 1946484 - DNA, 15 bp, Homo sapiens
tatcactctggtatc

SEQ ID NO: 1946485 - DNA, 15 bp, Homo sapiens
atcactctggtatca

SEQ ID NO: 1946486 - DNA, 15 bp, Homo sapiens
tcactctggtatcat

SEQ ID NO: 1946487 - DNA, 15 bp, Homo sapiens
cactctggtatcatg

SEQ ID NO: 1946488 - DNA, 15 bp, Homo sapiens
actctggtatcatgg

SEQ ID NO: 1946489 - DNA, 15 bp, Homo sapiens
ctctggtatcatggt

SEQ ID NO: 1946490 - DNA, 15 bp, Homo sapiens
tctggtatcatggtt

SEQ ID NO: 1946491 - DNA, 15 bp, Homo sapiens
ctggtatcatggttg

SEQ ID NO: 1946492 - DNA, 15 bp, Homo sapiens
tggtatcatggttgt

SEQ ID NO: 1946493 - DNA, 15 bp, Homo sapiens
ggtatcatggttgtt

SEQ ID NO: 1946494 - DNA, 15 bp, Homo sapiens
gtatcatggttgtta

SEQ ID NO: 1946495 - DNA, 15 bp, Homo sapiens
tatcatggttgttac

SEQ ID NO: 1946496 - DNA, 15 bp, Homo sapiens
atcatggttgttact

SEQ ID NO: 1946497 - DNA, 15 bp, Homo sapiens
tcatggttgttactc

SEQ ID NO: 1946498 - DNA, 15 bp, Homo sapiens
catggttgttactct

SEQ ID NO: 1946499 - DNA, 15 bp, Homo sapiens
atggttgttactctt

SEQ ID NO: 1946500 - DNA, 15 bp, Homo sapiens
tggttgttactcttt

SEQ ID NO: 1946501 - DNA, 15 bp, Homo sapiens
ggttgttactctttt

SEQ ID NO: 1946502 - DNA, 15 bp, Homo sapiens
gttgttactcttttt

SEQ ID NO: 1946503 - DNA, 15 bp, Homo sapiens
ttgttactctttttg

SEQ ID NO: 1946504 - DNA, 15 bp, Homo sapiens
tgttactctttttgt

SEQ ID NO: 1946505 - DNA, 15 bp, Homo sapiens
gttactctttttgta

SEQ ID NO: 1946506 - DNA, 15 bp, Homo sapiens
ttactctttttgtaa

SEQ ID NO: 1946507 - DNA, 15 bp, Homo sapiens
tactctttttgtaat

SEQ ID NO: 1946508 - DNA, 15 bp, Homo sapiens
actctttttgtaatt

SEQ ID NO: 1946509 - DNA, 15 bp, Homo sapiens
ctctttttgtaattt

SEQ ID NO: 1946510 - DNA, 15 bp, Homo sapiens
tctttttgtaattta

SEQ ID NO: 1946511 - DNA, 15 bp, Homo sapiens
ctttttgtaatttag

SEQ ID NO: 1946512 - DNA, 15 bp, Homo sapiens
tttttgtaatttagt

SEQ ID NO: 1946513 - DNA, 15 bp, Homo sapiens
ttttgtaatttagtg

SEQ ID NO: 1946514 - DNA, 15 bp, Homo sapiens
tttgtaatttagtgt

SEQ ID NO: 1946515 - DNA, 15 bp, Homo sapiens
ttgtaatttagtgtc

SEQ ID NO: 1946516 - DNA, 15 bp, Homo sapiens
tgtaatttagtgtcc

SEQ ID NO: 1946517 - DNA, 15 bp, Homo sapiens
gtaatttagtgtcct

SEQ ID NO: 1946518 - DNA, 15 bp, Homo sapiens
taatttagtgtccta

SEQ ID NO: 1946519 - DNA, 15 bp, Homo sapiens
aatttagtgtcctaa

SEQ ID NO: 1946520 - DNA, 15 bp, Homo sapiens
atttagtgtcctaaa

SEQ ID NO: 1946521 - DNA, 15 bp, Homo sapiens
tttagtgtcctaaat

SEQ ID NO: 1946522 - DNA, 15 bp, Homo sapiens
ttagtgtcctaaatt

SEQ ID NO: 1946523 - DNA, 15 bp, Homo sapiens
tagtgtcctaaattt

SEQ ID NO: 1946524 - DNA, 15 bp, Homo sapiens
agtgtcctaaatttt

SEQ ID NO: 1946525 - DNA, 15 bp, Homo sapiens
gtgtcctaaatttta

SEQ ID NO: 1946526 - DNA, 15 bp, Homo sapiens
tgtcctaaattttac

SEQ ID NO: 1946527 - DNA, 15 bp, Homo sapiens
gtcctaaattttaca

SEQ ID NO: 1946528 - DNA, 15 bp, Homo sapiens
tcctaaattttacac

SEQ ID NO: 1946529 - DNA, 15 bp, Homo sapiens
cctaaattttacaca

SEQ ID NO: 1946530 - DNA, 15 bp, Homo sapiens
ctaaattttacacat

SEQ ID NO: 1946531 - DNA, 15 bp, Homo sapiens
taaattttacacata

SEQ ID NO: 1946532 - DNA, 15 bp, Homo sapiens
aaattttacacataa

SEQ ID NO: 1946533 - DNA, 15 bp, Homo sapiens
aattttacacataaa

SEQ ID NO: 1946534 - DNA, 15 bp, Homo sapiens
attttacacataaaa

SEQ ID NO: 1946535 - DNA, 15 bp, Homo sapiens
ttttacacataaaaa

SEQ ID NO: 1946536 - DNA, 15 bp, Homo sapiens
tttacacataaaaat

SEQ ID NO: 1946537 - DNA, 15 bp, Homo sapiens
ttacacataaaaatg

SEQ ID NO: 1946538 - DNA, 15 bp, Homo sapiens
tacacataaaaatgc

SEQ ID NO: 1946539 - DNA, 15 bp, Homo sapiens
acacataaaaatgct

SEQ ID NO: 1946540 - DNA, 15 bp, Homo sapiens
cacataaaaatgcta

SEQ ID NO: 1946541 - DNA, 15 bp, Homo sapiens
acataaaaatgctac

SEQ ID NO: 1946542 - DNA, 15 bp, Homo sapiens
cataaaaatgctacc

SEQ ID NO: 1946543 - DNA, 15 bp, Homo sapiens
ataaaaatgctacca

SEQ ID NO: 1946544 - DNA, 15 bp, Homo sapiens
taaaaatgctaccat

SEQ ID NO: 1946545 - DNA, 15 bp, Homo sapiens
aaaaatgctaccatc

SEQ ID NO: 1946546 - DNA, 15 bp, Homo sapiens
aaaatgctaccatct

SEQ ID NO: 1946547 - DNA, 15 bp, Homo sapiens
aaatgctaccatctc

SEQ ID NO: 1946548 - DNA, 15 bp, Homo sapiens
aatgctaccatctca

SEQ ID NO: 1946549 - DNA, 15 bp, Homo sapiens
atgctaccatctcaa

SEQ ID NO: 1946550 - DNA, 15 bp, Homo sapiens
tgctaccatctcaag

SEQ ID NO: 1946551 - DNA, 15 bp, Homo sapiens
gctaccatctcaagc

SEQ ID NO: 1946552 - DNA, 15 bp, Homo sapiens
ctaccatctcaagct

SEQ ID NO: 1946553 - DNA, 15 bp, Homo sapiens
taccatctcaagctg

SEQ ID NO: 1946554 - DNA, 15 bp, Homo sapiens
accatctcaagctgg

SEQ ID NO: 1946555 - DNA, 15 bp, Homo sapiens
ccatctcaagctggg

SEQ ID NO: 1946556 - DNA, 15 bp, Homo sapiens
catctcaagctggga

SEQ ID NO: 1946557 - DNA, 15 bp, Homo sapiens
atctcaagctgggaa

SEQ ID NO: 1946558 - DNA, 15 bp, Homo sapiens
tctcaagctgggaac

SEQ ID NO: 1946559 - DNA, 15 bp, Homo sapiens
ctcaagctgggaaca

SEQ ID NO: 1946560 - DNA, 15 bp, Homo sapiens
tcaagctgggaacag

SEQ ID NO: 1946561 - DNA, 15 bp, Homo sapiens
caagctgggaacagt

SEQ ID NO: 1946562 - DNA, 15 bp, Homo sapiens
aagctgggaacagtg

SEQ ID NO: 1946563 - DNA, 15 bp, Homo sapiens
agctgggaacagtgg

SEQ ID NO: 1946564 - DNA, 15 bp, Homo sapiens
gctgggaacagtggc

SEQ ID NO: 1946565 - DNA, 15 bp, Homo sapiens
ctgggaacagtggca

SEQ ID NO: 1946566 - DNA, 15 bp, Homo sapiens
tgggaacagtggcat

SEQ ID NO: 1946567 - DNA, 15 bp, Homo sapiens
gggaacagtggcata

SEQ ID NO: 1946568 - DNA, 15 bp, Homo sapiens
ggaacagtggcatat

SEQ ID NO: 1946569 - DNA, 15 bp, Homo sapiens
gaacagtggcatata

SEQ ID NO: 1946570 - DNA, 15 bp, Homo sapiens
aacagtggcatatac

SEQ ID NO: 1946571 - DNA, 15 bp, Homo sapiens
acagtggcatatacc

SEQ ID NO: 1946572 - DNA, 15 bp, Homo sapiens
cagtggcatatacct

SEQ ID NO: 1946573 - DNA, 15 bp, Homo sapiens
agtggcatatacctg

SEQ ID NO: 1946574 - DNA, 15 bp, Homo sapiens
gtggcatatacctgt

SEQ ID NO: 1946575 - DNA, 15 bp, Homo sapiens
tggcatatacctgta

SEQ ID NO: 1946576 - DNA, 15 bp, Homo sapiens
ggcatatacctgtag

SEQ ID NO: 1946577 - DNA, 15 bp, Homo sapiens
gcatatacctgtagt

SEQ ID NO: 1946578 - DNA, 15 bp, Homo sapiens
catatacctgtagtc

SEQ ID NO: 1946579 - DNA, 15 bp, Homo sapiens
atatacctgtagtcc

SEQ ID NO: 1946580 - DNA, 15 bp, Homo sapiens
tatacctgtagtccc

SEQ ID NO: 1946581 - DNA, 15 bp, Homo sapiens
atacctgtagtcccc

SEQ ID NO: 1946582 - DNA, 15 bp, Homo sapiens
tacctgtagtcccca

SEQ ID NO: 1946583 - DNA, 15 bp, Homo sapiens
acctgtagtccccac

SEQ ID NO: 1946584 - DNA, 15 bp, Homo sapiens
cctgtagtccccact

SEQ ID NO: 1946585 - DNA, 15 bp, Homo sapiens
ctgtagtccccacta

SEQ ID NO: 1946586 - DNA, 15 bp, Homo sapiens
tgtagtccccactac

SEQ ID NO: 1946587 - DNA, 15 bp, Homo sapiens
gtagtccccactact

SEQ ID NO: 1946588 - DNA, 15 bp, Homo sapiens
tagtccccactactt

SEQ ID NO: 1946589 - DNA, 15 bp, Homo sapiens
agtccccactacttg

SEQ ID NO: 1946590 - DNA, 15 bp, Homo sapiens
gtccccactacttgg

SEQ ID NO: 1946591 - DNA, 15 bp, Homo sapiens
tccccactacttggg

SEQ ID NO: 1946592 - DNA, 15 bp, Homo sapiens
ccccactacttggga

SEQ ID NO: 1946593 - DNA, 15 bp, Homo sapiens
cccactacttgggag

SEQ ID NO: 1946594 - DNA, 15 bp, Homo sapiens
ccactacttgggagg

SEQ ID NO: 1946595 - DNA, 15 bp, Homo sapiens
cactacttgggaggc

SEQ ID NO: 1946596 - DNA, 15 bp, Homo sapiens
tgagatgggaggatc

SEQ ID NO: 1946597 - DNA, 15 bp, Homo sapiens
gagatgggaggatca

SEQ ID NO: 1946598 - DNA, 15 bp, Homo sapiens
agatgggaggatcat

SEQ ID NO: 1946599 - DNA, 15 bp, Homo sapiens
gatgggaggatcatt

SEQ ID NO: 1946600 - DNA, 15 bp, Homo sapiens
atgggaggatcattt

SEQ ID NO: 1946601 - DNA, 15 bp, Homo sapiens
tgggaggatcatttg

SEQ ID NO: 1946602 - DNA, 15 bp, Homo sapiens
gggaggatcatttga

SEQ ID NO: 1946603 - DNA, 15 bp, Homo sapiens
ggaggatcatttgag

SEQ ID NO: 1946604 - DNA, 15 bp, Homo sapiens
gaggatcatttgagt

SEQ ID NO: 1946605 - DNA, 15 bp, Homo sapiens
aggatcatttgagtc

SEQ ID NO: 1946606 - DNA, 15 bp, Homo sapiens
ggatcatttgagtcc

SEQ ID NO: 1946607 - DNA, 15 bp, Homo sapiens
gatcatttgagtcca

SEQ ID NO: 1946608 - DNA, 15 bp, Homo sapiens
atcatttgagtccag

SEQ ID NO: 1946609 - DNA, 15 bp, Homo sapiens
tcatttgagtccagg

SEQ ID NO: 1946610 - DNA, 15 bp, Homo sapiens
catttgagtccagga

SEQ ID NO: 1946611 - DNA, 15 bp, Homo sapiens
atttgagtccaggag

SEQ ID NO: 1946612 - DNA, 15 bp, Homo sapiens
tttgagtccaggagt

SEQ ID NO: 1946613 - DNA, 15 bp, Homo sapiens
tgagtccaggagttt

SEQ ID NO: 1946614 - DNA, 15 bp, Homo sapiens
gagtccaggagttta

SEQ ID NO: 1946615 - DNA, 15 bp, Homo sapiens
agtccaggagtttaa

SEQ ID NO: 1946616 - DNA, 15 bp, Homo sapiens
gtccaggagtttaag

SEQ ID NO: 1946617 - DNA, 15 bp, Homo sapiens
tccaggagtttaagg

SEQ ID NO: 1946618 - DNA, 15 bp, Homo sapiens
ccaggagtttaaggc

SEQ ID NO: 1946619 - DNA, 15 bp, Homo sapiens
caggagtttaaggct

SEQ ID NO: 1946620 - DNA, 15 bp, Homo sapiens
aggagtttaaggcta

SEQ ID NO: 1946621 - DNA, 15 bp, Homo sapiens
ggagtttaaggctag

SEQ ID NO: 1946622 - DNA, 15 bp, Homo sapiens
gagtttaaggctagc

SEQ ID NO: 1946623 - DNA, 15 bp, Homo sapiens
agtttaaggctagcc

SEQ ID NO: 1946624 - DNA, 15 bp, Homo sapiens
gtttaaggctagcct

SEQ ID NO: 1946625 - DNA, 15 bp, Homo sapiens
tttaaggctagcctg

SEQ ID NO: 1946626 - DNA, 15 bp, Homo sapiens
ttaaggctagcctgg

SEQ ID NO: 1946627 - DNA, 15 bp, Homo sapiens
taaggctagcctggg

SEQ ID NO: 1946628 - DNA, 15 bp, Homo sapiens
aaggctagcctgggc

SEQ ID NO: 1946629 - DNA, 15 bp, Homo sapiens
aggctagcctgggca

SEQ ID NO: 1946630 - DNA, 15 bp, Homo sapiens
ggctagcctgggcag

SEQ ID NO: 1946631 - DNA, 15 bp, Homo sapiens
gctagcctgggcagc

SEQ ID NO: 1946632 - DNA, 15 bp, Homo sapiens
ctagcctgggcagca

SEQ ID NO: 1946633 - DNA, 15 bp, Homo sapiens
tagcctgggcagcat

SEQ ID NO: 1946634 - DNA, 15 bp, Homo sapiens
agcctgggcagcata

SEQ ID NO: 1946635 - DNA, 15 bp, Homo sapiens
gcctgggcagcatag

SEQ ID NO: 1946636 - DNA, 15 bp, Homo sapiens
cctgggcagcatagg

SEQ ID NO: 1946637 - DNA, 15 bp, Homo sapiens
ctgggcagcataggg

SEQ ID NO: 1946638 - DNA, 15 bp, Homo sapiens
tgggcagcataggga

SEQ ID NO: 1946639 - DNA, 15 bp, Homo sapiens
gggcagcatagggag

SEQ ID NO: 1946640 - DNA, 15 bp, Homo sapiens
ggcagcatagggaga

SEQ ID NO: 1946641 - DNA, 15 bp, Homo sapiens
gcagcatagggagac

SEQ ID NO: 1946642 - DNA, 15 bp, Homo sapiens
cagcatagggagacc

SEQ ID NO: 1946643 - DNA, 15 bp, Homo sapiens
agcatagggagaccc

SEQ ID NO: 1946644 - DNA, 15 bp, Homo sapiens
gcatagggagaccct

SEQ ID NO: 1946645 - DNA, 15 bp, Homo sapiens
gggagaccctgtcta

SEQ ID NO: 1946646 - DNA, 15 bp, Homo sapiens
ggagaccctgtctaa

SEQ ID NO: 1946647 - DNA, 15 bp, Homo sapiens
gagaccctgtctaaa

SEQ ID NO: 1946648 - DNA, 15 bp, Homo sapiens
agaccctgtctaaaa

SEQ ID NO: 1946649 - DNA, 15 bp, Homo sapiens
gaccctgtctaaaaa

SEQ ID NO: 1946650 - DNA, 15 bp, Homo sapiens
accctgtctaaaaaa

SEQ ID NO: 1946651 - DNA, 15 bp, Homo sapiens
ccctgtctaaaaaaa

SEQ ID NO: 1946652 - DNA, 15 bp, Homo sapiens
cctgtctaaaaaaag

SEQ ID NO: 1946653 - DNA, 15 bp, Homo sapiens
ctgtctaaaaaaaga

SEQ ID NO: 1946654 - DNA, 15 bp, Homo sapiens
tgtctaaaaaaagaa

SEQ ID NO: 1946655 - DNA, 15 bp, Homo sapiens
gtctaaaaaaagaaa

SEQ ID NO: 1946656 - DNA, 15 bp, Homo sapiens
tctaaaaaaagaaaa

SEQ ID NO: 1946657 - DNA, 15 bp, Homo sapiens
ctaaaaaaagaaaaa

SEQ ID NO: 1946658 - DNA, 15 bp, Homo sapiens
aaagaaaaaagaaag

SEQ ID NO: 1946659 - DNA, 15 bp, Homo sapiens
aagaaaaaagaaagt

SEQ ID NO: 1946660 - DNA, 15 bp, Homo sapiens
agaaaaaagaaagtg

SEQ ID NO: 1946661 - DNA, 15 bp, Homo sapiens
gaaaaaagaaagtgg

SEQ ID NO: 1946662 - DNA, 15 bp, Homo sapiens
aaaaaagaaagtggt

SEQ ID NO: 1946663 - DNA, 15 bp, Homo sapiens
aaaaagaaagtggta

SEQ ID NO: 1946664 - DNA, 15 bp, Homo sapiens
aaaagaaagtggtag

SEQ ID NO: 1946665 - DNA, 15 bp, Homo sapiens
aaagaaagtggtaga

SEQ ID NO: 1946666 - DNA, 15 bp, Homo sapiens
aagaaagtggtagat

SEQ ID NO: 1946667 - DNA, 15 bp, Homo sapiens
agaaagtggtagatg

SEQ ID NO: 1946668 - DNA, 15 bp, Homo sapiens
gaaagtggtagatga

SEQ ID NO: 1946669 - DNA, 15 bp, Homo sapiens
aaagtggtagatgaa

SEQ ID NO: 1946670 - DNA, 15 bp, Homo sapiens
aagtggtagatgaac

SEQ ID NO: 1946671 - DNA, 15 bp, Homo sapiens
agtggtagatgaact

SEQ ID NO: 1946672 - DNA, 15 bp, Homo sapiens
gtggtagatgaactg

SEQ ID NO: 1946673 - DNA, 15 bp, Homo sapiens
tggtagatgaactga

SEQ ID NO: 1946674 - DNA, 15 bp, Homo sapiens
ggtagatgaactgaa

SEQ ID NO: 1946675 - DNA, 15 bp, Homo sapiens
gtagatgaactgaag

SEQ ID NO: 1946676 - DNA, 15 bp, Homo sapiens
tagatgaactgaaga

SEQ ID NO: 1946677 - DNA, 15 bp, Homo sapiens
agatgaactgaagag

SEQ ID NO: 1946678 - DNA, 15 bp, Homo sapiens
gatgaactgaagagg

SEQ ID NO: 1946679 - DNA, 15 bp, Homo sapiens
atgaactgaagaggt

SEQ ID NO: 1946680 - DNA, 15 bp, Homo sapiens
tgaactgaagaggtt

SEQ ID NO: 1946681 - DNA, 15 bp, Homo sapiens
gaactgaagaggttg

SEQ ID NO: 1946682 - DNA, 15 bp, Homo sapiens
aactgaagaggttga

SEQ ID NO: 1946683 - DNA, 15 bp, Homo sapiens
actgaagaggttgaa

SEQ ID NO: 1946684 - DNA, 15 bp, Homo sapiens
ctgaagaggttgaaa

SEQ ID NO: 1946685 - DNA, 15 bp, Homo sapiens
tgaagaggttgaaat

SEQ ID NO: 1946686 - DNA, 15 bp, Homo sapiens
gaagaggttgaaata

SEQ ID NO: 1946687 - DNA, 15 bp, Homo sapiens
aagaggttgaaatag

SEQ ID NO: 1946688 - DNA, 15 bp, Homo sapiens
agaggttgaaataga

SEQ ID NO: 1946689 - DNA, 15 bp, Homo sapiens
gaggttgaaatagat

SEQ ID NO: 1946690 - DNA, 15 bp, Homo sapiens
aggttgaaatagata

SEQ ID NO: 1946691 - DNA, 15 bp, Homo sapiens
gttgaaatagataat

SEQ ID NO: 1946692 - DNA, 15 bp, Homo sapiens
ttgaaatagataata

SEQ ID NO: 1946693 - DNA, 15 bp, Homo sapiens
tgaaatagataatac

SEQ ID NO: 1946694 - DNA, 15 bp, Homo sapiens
gaaatagataatact

SEQ ID NO: 1946695 - DNA, 15 bp, Homo sapiens
aaatagataatactg

SEQ ID NO: 1946696 - DNA, 15 bp, Homo sapiens
aatagataatactgt

SEQ ID NO: 1946697 - DNA, 15 bp, Homo sapiens
atagataatactgtg

SEQ ID NO: 1946698 - DNA, 15 bp, Homo sapiens
tagataatactgtgc

SEQ ID NO: 1946699 - DNA, 15 bp, Homo sapiens
agataatactgtgcg

SEQ ID NO: 1946700 - DNA, 15 bp, Homo sapiens
gataatactgtgcgt

SEQ ID NO: 1946701 - DNA, 15 bp, Homo sapiens
ataatactgtgcgtg

SEQ ID NO: 1946702 - DNA, 15 bp, Homo sapiens
taatactgtgcgtgt

SEQ ID NO: 1946703 - DNA, 15 bp, Homo sapiens
aatactgtgcgtgta

SEQ ID NO: 1946704 - DNA, 15 bp, Homo sapiens
atactgtgcgtgtat

SEQ ID NO: 1946705 - DNA, 15 bp, Homo sapiens
tactgtgcgtgtatg

SEQ ID NO: 1946706 - DNA, 15 bp, Homo sapiens
actgtgcgtgtatgt

SEQ ID NO: 1946707 - DNA, 15 bp, Homo sapiens
ctgtgcgtgtatgtc

SEQ ID NO: 1946708 - DNA, 15 bp, Homo sapiens
tgtgcgtgtatgtca

SEQ ID NO: 1946709 - DNA, 15 bp, Homo sapiens
gtgcgtgtatgtcat

SEQ ID NO: 1946710 - DNA, 15 bp, Homo sapiens
tgcgtgtatgtcatg

SEQ ID NO: 1946711 - DNA, 15 bp, Homo sapiens
gcgtgtatgtcatgc

SEQ ID NO: 1946712 - DNA, 15 bp, Homo sapiens
cgtgtatgtcatgct

SEQ ID NO: 1946713 - DNA, 15 bp, Homo sapiens
gtgtatgtcatgcta

SEQ ID NO: 1946714 - DNA, 15 bp, Homo sapiens
tgtatgtcatgctaa

SEQ ID NO: 1946715 - DNA, 15 bp, Homo sapiens
gtatgtcatgctaag

SEQ ID NO: 1946716 - DNA, 15 bp, Homo sapiens
tatgtcatgctaagg

SEQ ID NO: 1946717 - DNA, 15 bp, Homo sapiens
atgtcatgctaaggg

SEQ ID NO: 1946718 - DNA, 15 bp, Homo sapiens
tgtcatgctaagggg

SEQ ID NO: 1946719 - DNA, 15 bp, Homo sapiens
gtcatgctaaggggt

SEQ ID NO: 1946720 - DNA, 15 bp, Homo sapiens
tcatgctaaggggtt

SEQ ID NO: 1946721 - DNA, 15 bp, Homo sapiens
catgctaaggggttt

SEQ ID NO: 1946722 - DNA, 15 bp, Homo sapiens
atgctaaggggttta

SEQ ID NO: 1946723 - DNA, 15 bp, Homo sapiens
tgctaaggggtttaa

SEQ ID NO: 1946724 - DNA, 15 bp, Homo sapiens
gctaaggggtttaaa

SEQ ID NO: 1946725 - DNA, 15 bp, Homo sapiens
ctaaggggtttaaat

SEQ ID NO: 1946726 - DNA, 15 bp, Homo sapiens
taaggggtttaaatt

SEQ ID NO: 1946727 - DNA, 15 bp, Homo sapiens
aaggggtttaaattt

SEQ ID NO: 1946728 - DNA, 15 bp, Homo sapiens
aggggtttaaatttg

SEQ ID NO: 1946729 - DNA, 15 bp, Homo sapiens
ggggtttaaatttgt

SEQ ID NO: 1946730 - DNA, 15 bp, Homo sapiens
gggtttaaatttgtc

SEQ ID NO: 1946731 - DNA, 15 bp, Homo sapiens
ggtttaaatttgtct

SEQ ID NO: 1946732 - DNA, 15 bp, Homo sapiens
gtttaaatttgtctt

SEQ ID NO: 1946733 - DNA, 15 bp, Homo sapiens
tttaaatttgtctta

SEQ ID NO: 1946734 - DNA, 15 bp, Homo sapiens
ttaaatttgtcttaa

SEQ ID NO: 1946735 - DNA, 15 bp, Homo sapiens
taaatttgtcttaag

SEQ ID NO: 1946736 - DNA, 15 bp, Homo sapiens
aaatttgtcttaagg

SEQ ID NO: 1946737 - DNA, 15 bp, Homo sapiens
aatttgtcttaaggg

SEQ ID NO: 1946738 - DNA, 15 bp, Homo sapiens
atttgtcttaagggc

SEQ ID NO: 1946739 - DNA, 15 bp, Homo sapiens
tttgtcttaagggca

SEQ ID NO: 1946740 - DNA, 15 bp, Homo sapiens
ttgtcttaagggcag

SEQ ID NO: 1946741 - DNA, 15 bp, Homo sapiens
tgtcttaagggcagt

SEQ ID NO: 1946742 - DNA, 15 bp, Homo sapiens
gtcttaagggcagtg

SEQ ID NO: 1946743 - DNA, 15 bp, Homo sapiens
tcttaagggcagtgg

SEQ ID NO: 1946744 - DNA, 15 bp, Homo sapiens
cttaagggcagtgga

SEQ ID NO: 1946745 - DNA, 15 bp, Homo sapiens
ttaagggcagtggag

SEQ ID NO: 1946746 - DNA, 15 bp, Homo sapiens
taagggcagtggagg

SEQ ID NO: 1946747 - DNA, 15 bp, Homo sapiens
aagggcagtggagga

SEQ ID NO: 1946748 - DNA, 15 bp, Homo sapiens
agggcagtggaggag

SEQ ID NO: 1946749 - DNA, 15 bp, Homo sapiens
gggcagtggaggagt

SEQ ID NO: 1946750 - DNA, 15 bp, Homo sapiens
ggcagtggaggagtg

SEQ ID NO: 1946751 - DNA, 15 bp, Homo sapiens
gcagtggaggagtga

SEQ ID NO: 1946752 - DNA, 15 bp, Homo sapiens
cagtggaggagtgac

SEQ ID NO: 1946753 - DNA, 15 bp, Homo sapiens
agtggaggagtgaca

SEQ ID NO: 1946754 - DNA, 15 bp, Homo sapiens
gtggaggagtgacag

SEQ ID NO: 1946755 - DNA, 15 bp, Homo sapiens
tggaggagtgacagt

SEQ ID NO: 1946756 - DNA, 15 bp, Homo sapiens
ggaggagtgacagtc

SEQ ID NO: 1946757 - DNA, 15 bp, Homo sapiens
gaggagtgacagtca

SEQ ID NO: 1946758 - DNA, 15 bp, Homo sapiens
aggagtgacagtcac

SEQ ID NO: 1946759 - DNA, 15 bp, Homo sapiens
ggagtgacagtcaca

SEQ ID NO: 1946760 - DNA, 15 bp, Homo sapiens
gagtgacagtcacat

SEQ ID NO: 1946761 - DNA, 15 bp, Homo sapiens
agtgacagtcacatt

SEQ ID NO: 1946762 - DNA, 15 bp, Homo sapiens
gtgacagtcacattt

SEQ ID NO: 1946763 - DNA, 15 bp, Homo sapiens
tgacagtcacattta

SEQ ID NO: 1946764 - DNA, 15 bp, Homo sapiens
gacagtcacatttaa

SEQ ID NO: 1946765 - DNA, 15 bp, Homo sapiens
acagtcacatttaag

SEQ ID NO: 1946766 - DNA, 15 bp, Homo sapiens
cagtcacatttaagt

SEQ ID NO: 1946767 - DNA, 15 bp, Homo sapiens
agtcacatttaagtt

SEQ ID NO: 1946768 - DNA, 15 bp, Homo sapiens
gtcacatttaagttt

SEQ ID NO: 1946769 - DNA, 15 bp, Homo sapiens
tcacatttaagtttt

SEQ ID NO: 1946770 - DNA, 15 bp, Homo sapiens
cacatttaagtttta

SEQ ID NO: 1946771 - DNA, 15 bp, Homo sapiens
acatttaagttttag

SEQ ID NO: 1946772 - DNA, 15 bp, Homo sapiens
catttaagttttaga

SEQ ID NO: 1946773 - DNA, 15 bp, Homo sapiens
atttaagttttagaa

SEQ ID NO: 1946774 - DNA, 15 bp, Homo sapiens
tttaagttttagaaa

SEQ ID NO: 1946775 - DNA, 15 bp, Homo sapiens
ttaagttttagaaag

SEQ ID NO: 1946776 - DNA, 15 bp, Homo sapiens
taagttttagaaaga

SEQ ID NO: 1946777 - DNA, 15 bp, Homo sapiens
aagttttagaaagat

SEQ ID NO: 1946778 - DNA, 15 bp, Homo sapiens
agttttagaaagatg

SEQ ID NO: 1946779 - DNA, 15 bp, Homo sapiens
gttttagaaagatga

SEQ ID NO: 1946780 - DNA, 15 bp, Homo sapiens
ttttagaaagatgag

SEQ ID NO: 1946781 - DNA, 15 bp, Homo sapiens
tttagaaagatgagt

SEQ ID NO: 1946782 - DNA, 15 bp, Homo sapiens
ttagaaagatgagtc

SEQ ID NO: 1946783 - DNA, 15 bp, Homo sapiens
tagaaagatgagtct

SEQ ID NO: 1946784 - DNA, 15 bp, Homo sapiens
agaaagatgagtcta

SEQ ID NO: 1946785 - DNA, 15 bp, Homo sapiens
gaaagatgagtctag

SEQ ID NO: 1946786 - DNA, 15 bp, Homo sapiens
aaagatgagtctagt

SEQ ID NO: 1946787 - DNA, 15 bp, Homo sapiens
aagatgagtctagtg

SEQ ID NO: 1946788 - DNA, 15 bp, Homo sapiens
agatgagtctagtgg

SEQ ID NO: 1946789 - DNA, 15 bp, Homo sapiens
gatgagtctagtggc

SEQ ID NO: 1946790 - DNA, 15 bp, Homo sapiens
atgagtctagtggca

SEQ ID NO: 1946791 - DNA, 15 bp, Homo sapiens
tgagtctagtggcag

SEQ ID NO: 1946792 - DNA, 15 bp, Homo sapiens
gagtctagtggcagc

SEQ ID NO: 1946793 - DNA, 15 bp, Homo sapiens
agtctagtggcagca

SEQ ID NO: 1946794 - DNA, 15 bp, Homo sapiens
gtctagtggcagcat

SEQ ID NO: 1946795 - DNA, 15 bp, Homo sapiens
tctagtggcagcatg

SEQ ID NO: 1946796 - DNA, 15 bp, Homo sapiens
ctagtggcagcatgg

SEQ ID NO: 1946797 - DNA, 15 bp, Homo sapiens
tagtggcagcatgga

SEQ ID NO: 1946798 - DNA, 15 bp, Homo sapiens
agtggcagcatggag

SEQ ID NO: 1946799 - DNA, 15 bp, Homo sapiens
gtggcagcatggagg

SEQ ID NO: 1946800 - DNA, 15 bp, Homo sapiens
tggcagcatggaggg

SEQ ID NO: 1946801 - DNA, 15 bp, Homo sapiens
ggcagcatggagggt

SEQ ID NO: 1946802 - DNA, 15 bp, Homo sapiens
gcagcatggagggta

SEQ ID NO: 1946803 - DNA, 15 bp, Homo sapiens
cagcatggagggtag

SEQ ID NO: 1946804 - DNA, 15 bp, Homo sapiens
agcatggagggtaga

SEQ ID NO: 1946805 - DNA, 15 bp, Homo sapiens
gcatggagggtagat

SEQ ID NO: 1946806 - DNA, 15 bp, Homo sapiens
catggagggtagatt

SEQ ID NO: 1946807 - DNA, 15 bp, Homo sapiens
atggagggtagattg

SEQ ID NO: 1946808 - DNA, 15 bp, Homo sapiens
tggagggtagattga

SEQ ID NO: 1946809 - DNA, 15 bp, Homo sapiens
ggagggtagattgat

SEQ ID NO: 1946810 - DNA, 15 bp, Homo sapiens
gagggtagattgata

SEQ ID NO: 1946811 - DNA, 15 bp, Homo sapiens
agggtagattgatag

SEQ ID NO: 1946812 - DNA, 15 bp, Homo sapiens
gggtagattgataga

SEQ ID NO: 1946813 - DNA, 15 bp, Homo sapiens
ggtagattgatagaa

SEQ ID NO: 1946814 - DNA, 15 bp, Homo sapiens
gtagattgatagaag

SEQ ID NO: 1946815 - DNA, 15 bp, Homo sapiens
tagattgatagaagc

SEQ ID NO: 1946816 - DNA, 15 bp, Homo sapiens
agattgatagaagcc

SEQ ID NO: 1946817 - DNA, 15 bp, Homo sapiens
gattgatagaagcca

SEQ ID NO: 1946818 - DNA, 15 bp, Homo sapiens
attgatagaagccaa

SEQ ID NO: 1946819 - DNA, 15 bp, Homo sapiens
ttgatagaagccaaa

SEQ ID NO: 1946820 - DNA, 15 bp, Homo sapiens
tgatagaagccaaag

SEQ ID NO: 1946821 - DNA, 15 bp, Homo sapiens
gatagaagccaaagc

SEQ ID NO: 1946822 - DNA, 15 bp, Homo sapiens
atagaagccaaagct

SEQ ID NO: 1946823 - DNA, 15 bp, Homo sapiens
tagaagccaaagctg

SEQ ID NO: 1946824 - DNA, 15 bp, Homo sapiens
agaagccaaagctgg

SEQ ID NO: 1946825 - DNA, 15 bp, Homo sapiens
gaagccaaagctgga

SEQ ID NO: 1946826 - DNA, 15 bp, Homo sapiens
aagccaaagctggag

SEQ ID NO: 1946827 - DNA, 15 bp, Homo sapiens
agccaaagctggagg

SEQ ID NO: 1946828 - DNA, 15 bp, Homo sapiens
gccaaagctggagga

SEQ ID NO: 1946829 - DNA, 15 bp, Homo sapiens
ccaaagctggaggat

SEQ ID NO: 1946830 - DNA, 15 bp, Homo sapiens
caaagctggaggatc

SEQ ID NO: 1946831 - DNA, 15 bp, Homo sapiens
aaagctggaggatcc

SEQ ID NO: 1946832 - DNA, 15 bp, Homo sapiens
aagctggaggatcca

SEQ ID NO: 1946833 - DNA, 15 bp, Homo sapiens
agctggaggatccat

SEQ ID NO: 1946834 - DNA, 15 bp, Homo sapiens
gctggaggatccatg

SEQ ID NO: 1946835 - DNA, 15 bp, Homo sapiens
ctggaggatccatga

SEQ ID NO: 1946836 - DNA, 15 bp, Homo sapiens
tggaggatccatgaa

SEQ ID NO: 1946837 - DNA, 15 bp, Homo sapiens
ggaggatccatgaac

SEQ ID NO: 1946838 - DNA, 15 bp, Homo sapiens
gaggatccatgaaca

SEQ ID NO: 1946839 - DNA, 15 bp, Homo sapiens
aggatccatgaacaa

SEQ ID NO: 1946840 - DNA, 15 bp, Homo sapiens
ggatccatgaacaat

SEQ ID NO: 1946841 - DNA, 15 bp, Homo sapiens
gatccatgaacaatt

SEQ ID NO: 1946842 - DNA, 15 bp, Homo sapiens
atccatgaacaattt

SEQ ID NO: 1946843 - DNA, 15 bp, Homo sapiens
tccatgaacaatttg

SEQ ID NO: 1946844 - DNA, 15 bp, Homo sapiens
ccatgaacaatttgg

SEQ ID NO: 1946845 - DNA, 15 bp, Homo sapiens
catgaacaatttgga

SEQ ID NO: 1946846 - DNA, 15 bp, Homo sapiens
atgaacaatttggag

SEQ ID NO: 1946847 - DNA, 15 bp, Homo sapiens
tgaacaatttggaga

SEQ ID NO: 1946848 - DNA, 15 bp, Homo sapiens
gaacaatttggagac

SEQ ID NO: 1946849 - DNA, 15 bp, Homo sapiens
aacaatttggagact

SEQ ID NO: 1946850 - DNA, 15 bp, Homo sapiens
acaatttggagactg

SEQ ID NO: 1946851 - DNA, 15 bp, Homo sapiens
caatttggagactgt

SEQ ID NO: 1946852 - DNA, 15 bp, Homo sapiens
aatttggagactgtt

SEQ ID NO: 1946853 - DNA, 15 bp, Homo sapiens
atttggagactgttg

SEQ ID NO: 1946854 - DNA, 15 bp, Homo sapiens
tttggagactgttgt

SEQ ID NO: 1946855 - DNA, 15 bp, Homo sapiens
ttggagactgttgta

SEQ ID NO: 1946856 - DNA, 15 bp, Homo sapiens
tggagactgttgtac

SEQ ID NO: 1946857 - DNA, 15 bp, Homo sapiens
ggagactgttgtacc

SEQ ID NO: 1946858 - DNA, 15 bp, Homo sapiens
gagactgttgtacca

SEQ ID NO: 1946859 - DNA, 15 bp, Homo sapiens
agactgttgtaccag

SEQ ID NO: 1946860 - DNA, 15 bp, Homo sapiens
gactgttgtaccagt

SEQ ID NO: 1946861 - DNA, 15 bp, Homo sapiens
actgttgtaccagtc

SEQ ID NO: 1946862 - DNA, 15 bp, Homo sapiens
ctgttgtaccagtct

SEQ ID NO: 1946863 - DNA, 15 bp, Homo sapiens
tgttgtaccagtcta

SEQ ID NO: 1946864 - DNA, 15 bp, Homo sapiens
gttgtaccagtctag

SEQ ID NO: 1946865 - DNA, 15 bp, Homo sapiens
ttgtaccagtctaga

SEQ ID NO: 1946866 - DNA, 15 bp, Homo sapiens
tgtaccagtctagac

SEQ ID NO: 1946867 - DNA, 15 bp, Homo sapiens
gtaccagtctagaca

SEQ ID NO: 1946868 - DNA, 15 bp, Homo sapiens
taccagtctagacaa

SEQ ID NO: 1946869 - DNA, 15 bp, Homo sapiens
accagtctagacaag

SEQ ID NO: 1946870 - DNA, 15 bp, Homo sapiens
ccagtctagacaagg

SEQ ID NO: 1946871 - DNA, 15 bp, Homo sapiens
cagtctagacaaggg

SEQ ID NO: 1946872 - DNA, 15 bp, Homo sapiens
agtctagacaaggga

SEQ ID NO: 1946873 - DNA, 15 bp, Homo sapiens
gtctagacaagggat

SEQ ID NO: 1946874 - DNA, 15 bp, Homo sapiens
tctagacaagggatg

SEQ ID NO: 1946875 - DNA, 15 bp, Homo sapiens
ctagacaagggatgg

SEQ ID NO: 1946876 - DNA, 15 bp, Homo sapiens
tagacaagggatggt

SEQ ID NO: 1946877 - DNA, 15 bp, Homo sapiens
agacaagggatggta

SEQ ID NO: 1946878 - DNA, 15 bp, Homo sapiens
gacaagggatggtag

SEQ ID NO: 1946879 - DNA, 15 bp, Homo sapiens
acaagggatggtagg

SEQ ID NO: 1946880 - DNA, 15 bp, Homo sapiens
caagggatggtagga

SEQ ID NO: 1946881 - DNA, 15 bp, Homo sapiens
aagggatggtaggag

SEQ ID NO: 1946882 - DNA, 15 bp, Homo sapiens
agggatggtaggagc

SEQ ID NO: 1946883 - DNA, 15 bp, Homo sapiens
gggatggtaggagct

SEQ ID NO: 1946884 - DNA, 15 bp, Homo sapiens
ggatggtaggagctt

SEQ ID NO: 1946885 - DNA, 15 bp, Homo sapiens
gatggtaggagcttg

SEQ ID NO: 1946886 - DNA, 15 bp, Homo sapiens
atggtaggagcttgg

SEQ ID NO: 1946887 - DNA, 15 bp, Homo sapiens
tggtaggagcttgga

SEQ ID NO: 1946888 - DNA, 15 bp, Homo sapiens
ggtaggagcttggac

SEQ ID NO: 1946889 - DNA, 15 bp, Homo sapiens
gtaggagcttggaca

SEQ ID NO: 1946890 - DNA, 15 bp, Homo sapiens
taggagcttggacaa

SEQ ID NO: 1946891 - DNA, 15 bp, Homo sapiens
aggagcttggacaaa

SEQ ID NO: 1946892 - DNA, 15 bp, Homo sapiens
ggagcttggacaaag

SEQ ID NO: 1946893 - DNA, 15 bp, Homo sapiens
gagcttggacaaagg

SEQ ID NO: 1946894 - DNA, 15 bp, Homo sapiens
agcttggacaaaggt

SEQ ID NO: 1946895 - DNA, 15 bp, Homo sapiens
gcttggacaaaggta

SEQ ID NO: 1946896 - DNA, 15 bp, Homo sapiens
cttggacaaaggtag

SEQ ID NO: 1946897 - DNA, 15 bp, Homo sapiens
ttggacaaaggtaga

SEQ ID NO: 1946898 - DNA, 15 bp, Homo sapiens
tggacaaaggtagaa

SEQ ID NO: 1946899 - DNA, 15 bp, Homo sapiens
ggacaaaggtagaat

SEQ ID NO: 1946900 - DNA, 15 bp, Homo sapiens
gacaaaggtagaatt

SEQ ID NO: 1946901 - DNA, 15 bp, Homo sapiens
acaaaggtagaatta

SEQ ID NO: 1946902 - DNA, 15 bp, Homo sapiens
caaaggtagaattag

SEQ ID NO: 1946903 - DNA, 15 bp, Homo sapiens
aaaggtagaattagt

SEQ ID NO: 1946904 - DNA, 15 bp, Homo sapiens
aaggtagaattagtg

SEQ ID NO: 1946905 - DNA, 15 bp, Homo sapiens
aggtagaattagtgg

SEQ ID NO: 1946906 - DNA, 15 bp, Homo sapiens
ggtagaattagtgga

SEQ ID NO: 1946907 - DNA, 15 bp, Homo sapiens
gtagaattagtggag

SEQ ID NO: 1946908 - DNA, 15 bp, Homo sapiens
tagaattagtggagg

SEQ ID NO: 1946909 - DNA, 15 bp, Homo sapiens
agaattagtggagga

SEQ ID NO: 1946910 - DNA, 15 bp, Homo sapiens
gaattagtggaggaa

SEQ ID NO: 1946911 - DNA, 15 bp, Homo sapiens
aattagtggaggaag

SEQ ID NO: 1946912 - DNA, 15 bp, Homo sapiens
attagtggaggaaga

SEQ ID NO: 1946913 - DNA, 15 bp, Homo sapiens
ttagtggaggaagaa

SEQ ID NO: 1946914 - DNA, 15 bp, Homo sapiens
tagtggaggaagaaa

SEQ ID NO: 1946915 - DNA, 15 bp, Homo sapiens
agtggaggaagaaaa

SEQ ID NO: 1946916 - DNA, 15 bp, Homo sapiens
gtggaggaagaaaag

SEQ ID NO: 1946917 - DNA, 15 bp, Homo sapiens
tggaggaagaaaagg

SEQ ID NO: 1946918 - DNA, 15 bp, Homo sapiens
ggaggaagaaaagga

SEQ ID NO: 1946919 - DNA, 15 bp, Homo sapiens
gaggaagaaaaggag

SEQ ID NO: 1946920 - DNA, 15 bp, Homo sapiens
aggaagaaaaggagg

SEQ ID NO: 1946921 - DNA, 15 bp, Homo sapiens
ggaagaaaaggagga

SEQ ID NO: 1946922 - DNA, 15 bp, Homo sapiens
gaagaaaaggaggaa

SEQ ID NO: 1946923 - DNA, 15 bp, Homo sapiens
aagaaaaggaggaat

SEQ ID NO: 1946924 - DNA, 15 bp, Homo sapiens
agaaaaggaggaatg

SEQ ID NO: 1946925 - DNA, 15 bp, Homo sapiens
gaaaaggaggaatgg

SEQ ID NO: 1946926 - DNA, 15 bp, Homo sapiens
aaaaggaggaatgga

SEQ ID NO: 1946927 - DNA, 15 bp, Homo sapiens
aaaggaggaatggac

SEQ ID NO: 1946928 - DNA, 15 bp, Homo sapiens
aaggaggaatggaca

SEQ ID NO: 1946929 - DNA, 15 bp, Homo sapiens
aggaggaatggacat

SEQ ID NO: 1946930 - DNA, 15 bp, Homo sapiens
ggaggaatggacata

SEQ ID NO: 1946931 - DNA, 15 bp, Homo sapiens
gaggaatggacatag

SEQ ID NO: 1946932 - DNA, 15 bp, Homo sapiens
aggaatggacatagg

SEQ ID NO: 1946933 - DNA, 15 bp, Homo sapiens
ggaatggacatagga

SEQ ID NO: 1946934 - DNA, 15 bp, Homo sapiens
gaatggacataggac

SEQ ID NO: 1946935 - DNA, 15 bp, Homo sapiens
aatggacataggact

SEQ ID NO: 1946936 - DNA, 15 bp, Homo sapiens
atggacataggactt

SEQ ID NO: 1946937 - DNA, 15 bp, Homo sapiens
tggacataggacttg

SEQ ID NO: 1946938 - DNA, 15 bp, Homo sapiens
ggacataggacttga

SEQ ID NO: 1946939 - DNA, 15 bp, Homo sapiens
gacataggacttgaa

SEQ ID NO: 1946940 - DNA, 15 bp, Homo sapiens
acataggacttgaag

SEQ ID NO: 1946941 - DNA, 15 bp, Homo sapiens
cataggacttgaagg

SEQ ID NO: 1946942 - DNA, 15 bp, Homo sapiens
ataggacttgaagga

SEQ ID NO: 1946943 - DNA, 15 bp, Homo sapiens
taggacttgaaggaa

SEQ ID NO: 1946944 - DNA, 15 bp, Homo sapiens
aggacttgaaggaag

SEQ ID NO: 1946945 - DNA, 15 bp, Homo sapiens
ggacttgaaggaagt

SEQ ID NO: 1946946 - DNA, 15 bp, Homo sapiens
gacttgaaggaagtg

SEQ ID NO: 1946947 - DNA, 15 bp, Homo sapiens
acttgaaggaagtgg

SEQ ID NO: 1946948 - DNA, 15 bp, Homo sapiens
cttgaaggaagtgga

SEQ ID NO: 1946949 - DNA, 15 bp, Homo sapiens
ttgaaggaagtggaa

SEQ ID NO: 1946950 - DNA, 15 bp, Homo sapiens
tgaaggaagtggaat

SEQ ID NO: 1946951 - DNA, 15 bp, Homo sapiens
gaaggaagtggaatc

SEQ ID NO: 1946952 - DNA, 15 bp, Homo sapiens
aaggaagtggaatct

SEQ ID NO: 1946953 - DNA, 15 bp, Homo sapiens
aggaagtggaatctg

SEQ ID NO: 1946954 - DNA, 15 bp, Homo sapiens
ggaagtggaatctgc

SEQ ID NO: 1946955 - DNA, 15 bp, Homo sapiens
gaagtggaatctgca

SEQ ID NO: 1946956 - DNA, 15 bp, Homo sapiens
aagtggaatctgcag

SEQ ID NO: 1946957 - DNA, 15 bp, Homo sapiens
agtggaatctgcaga

SEQ ID NO: 1946958 - DNA, 15 bp, Homo sapiens
gtggaatctgcagat

SEQ ID NO: 1946959 - DNA, 15 bp, Homo sapiens
tggaatctgcagatt

SEQ ID NO: 1946960 - DNA, 15 bp, Homo sapiens
ggaatctgcagattt

SEQ ID NO: 1946961 - DNA, 15 bp, Homo sapiens
gaatctgcagattta

SEQ ID NO: 1946962 - DNA, 15 bp, Homo sapiens
aatctgcagatttag

SEQ ID NO: 1946963 - DNA, 15 bp, Homo sapiens
atctgcagatttaga

SEQ ID NO: 1946964 - DNA, 15 bp, Homo sapiens
tctgcagatttagag

SEQ ID NO: 1946965 - DNA, 15 bp, Homo sapiens
ctgcagatttagaga

SEQ ID NO: 1946966 - DNA, 15 bp, Homo sapiens
tgcagatttagagaa

SEQ ID NO: 1946967 - DNA, 15 bp, Homo sapiens
gcagatttagagaag

SEQ ID NO: 1946968 - DNA, 15 bp, Homo sapiens
cagatttagagaagt

SEQ ID NO: 1946969 - DNA, 15 bp, Homo sapiens
agatttagagaagta

SEQ ID NO: 1946970 - DNA, 15 bp, Homo sapiens
gatttagagaagtac

SEQ ID NO: 1946971 - DNA, 15 bp, Homo sapiens
atttagagaagtaca

SEQ ID NO: 1946972 - DNA, 15 bp, Homo sapiens
tttagagaagtacat

SEQ ID NO: 1946973 - DNA, 15 bp, Homo sapiens
ttagagaagtacatg

SEQ ID NO: 1946974 - DNA, 15 bp, Homo sapiens
tagagaagtacatga

SEQ ID NO: 1946975 - DNA, 15 bp, Homo sapiens
agagaagtacatgat

SEQ ID NO: 1946976 - DNA, 15 bp, Homo sapiens
gagaagtacatgatg

SEQ ID NO: 1946977 - DNA, 15 bp, Homo sapiens
agaagtacatgatgc

SEQ ID NO: 1946978 - DNA, 15 bp, Homo sapiens
gaagtacatgatgct

SEQ ID NO: 1946979 - DNA, 15 bp, Homo sapiens
aagtacatgatgctt

SEQ ID NO: 1946980 - DNA, 15 bp, Homo sapiens
agtacatgatgcttg

SEQ ID NO: 1946981 - DNA, 15 bp, Homo sapiens
gtacatgatgcttga

SEQ ID NO: 1946982 - DNA, 15 bp, Homo sapiens
tacatgatgcttgat

SEQ ID NO: 1946983 - DNA, 15 bp, Homo sapiens
acatgatgcttgata

SEQ ID NO: 1946984 - DNA, 15 bp, Homo sapiens
catgatgcttgatag

SEQ ID NO: 1946985 - DNA, 15 bp, Homo sapiens
atgatgcttgatagg

SEQ ID NO: 1946986 - DNA, 15 bp, Homo sapiens
tgatgcttgataggg

SEQ ID NO: 1946987 - DNA, 15 bp, Homo sapiens
gatgcttgatagggg

SEQ ID NO: 1946988 - DNA, 15 bp, Homo sapiens
atgcttgataggggt

SEQ ID NO: 1946989 - DNA, 15 bp, Homo sapiens
tgcttgataggggtt

SEQ ID NO: 1946990 - DNA, 15 bp, Homo sapiens
gcttgataggggttg

SEQ ID NO: 1946991 - DNA, 15 bp, Homo sapiens
cttgataggggttga

SEQ ID NO: 1946992 - DNA, 15 bp, Homo sapiens
ttgataggggttgag

SEQ ID NO: 1946993 - DNA, 15 bp, Homo sapiens
tgataggggttgagg

SEQ ID NO: 1946994 - DNA, 15 bp, Homo sapiens
gataggggttgaggt

SEQ ID NO: 1946995 - DNA, 15 bp, Homo sapiens
ataggggttgaggtt

SEQ ID NO: 1946996 - DNA, 15 bp, Homo sapiens
taggggttgaggtta

SEQ ID NO: 1946997 - DNA, 15 bp, Homo sapiens
aggggttgaggttaa

SEQ ID NO: 1946998 - DNA, 15 bp, Homo sapiens
ggggttgaggttaag

SEQ ID NO: 1946999 - DNA, 15 bp, Homo sapiens
gggttgaggttaaga

SEQ ID NO: 1947000 - DNA, 15 bp, Homo sapiens
ggttgaggttaagaa

SEQ ID NO: 1947001 - DNA, 15 bp, Homo sapiens
gttgaggttaagaac

SEQ ID NO: 1947002 - DNA, 15 bp, Homo sapiens
ttgaggttaagaact

SEQ ID NO: 1947003 - DNA, 15 bp, Homo sapiens
tgaggttaagaactg

SEQ ID NO: 1947004 - DNA, 15 bp, Homo sapiens
gaggttaagaactgg

SEQ ID NO: 1947005 - DNA, 15 bp, Homo sapiens
aggttaagaactgga

SEQ ID NO: 1947006 - DNA, 15 bp, Homo sapiens
ggttaagaactggat

SEQ ID NO: 1947007 - DNA, 15 bp, Homo sapiens
gttaagaactggatg

SEQ ID NO: 1947008 - DNA, 15 bp, Homo sapiens
ttaagaactggatgg

SEQ ID NO: 1947009 - DNA, 15 bp, Homo sapiens
taagaactggatgga

SEQ ID NO: 1947010 - DNA, 15 bp, Homo sapiens
aagaactggatggaa

SEQ ID NO: 1947011 - DNA, 15 bp, Homo sapiens
agaactggatggaat

SEQ ID NO: 1947012 - DNA, 15 bp, Homo sapiens
gaactggatggaatt

SEQ ID NO: 1947013 - DNA, 15 bp, Homo sapiens
aactggatggaattg

SEQ ID NO: 1947014 - DNA, 15 bp, Homo sapiens
actggatggaattgg

SEQ ID NO: 1947015 - DNA, 15 bp, Homo sapiens
ctggatggaattgga

SEQ ID NO: 1947016 - DNA, 15 bp, Homo sapiens
tggatggaattggat

SEQ ID NO: 1947017 - DNA, 15 bp, Homo sapiens
ggatggaattggatc

SEQ ID NO: 1947018 - DNA, 15 bp, Homo sapiens
gatggaattggatcc

SEQ ID NO: 1947019 - DNA, 15 bp, Homo sapiens
atggaattggatcca

SEQ ID NO: 1947020 - DNA, 15 bp, Homo sapiens
tggaattggatccag

SEQ ID NO: 1947021 - DNA, 15 bp, Homo sapiens
ggaattggatccagt

SEQ ID NO: 1947022 - DNA, 15 bp, Homo sapiens
gaattggatccagtt

SEQ ID NO: 1947023 - DNA, 15 bp, Homo sapiens
aattggatccagttc

SEQ ID NO: 1947024 - DNA, 15 bp, Homo sapiens
attggatccagttct

SEQ ID NO: 1947025 - DNA, 15 bp, Homo sapiens
ttggatccagttctg

SEQ ID NO: 1947026 - DNA, 15 bp, Homo sapiens
tggatccagttctgg

SEQ ID NO: 1947027 - DNA, 15 bp, Homo sapiens
ggatccagttctggc

SEQ ID NO: 1947028 - DNA, 15 bp, Homo sapiens
gatccagttctggct

SEQ ID NO: 1947029 - DNA, 15 bp, Homo sapiens
atccagttctggctt

SEQ ID NO: 1947030 - DNA, 15 bp, Homo sapiens
tccagttctggcttt

SEQ ID NO: 1947031 - DNA, 15 bp, Homo sapiens
ccagttctggctttc

SEQ ID NO: 1947032 - DNA, 15 bp, Homo sapiens
cagttctggctttct

SEQ ID NO: 1947033 - DNA, 15 bp, Homo sapiens
agttctggctttctg

SEQ ID NO: 1947034 - DNA, 15 bp, Homo sapiens
gttctggctttctgt

SEQ ID NO: 1947035 - DNA, 15 bp, Homo sapiens
ttctggctttctgtc

SEQ ID NO: 1947036 - DNA, 15 bp, Homo sapiens
tctggctttctgtcc

SEQ ID NO: 1947037 - DNA, 15 bp, Homo sapiens
ctggctttctgtcct

SEQ ID NO: 1947038 - DNA, 15 bp, Homo sapiens
tggctttctgtcctg

SEQ ID NO: 1947039 - DNA, 15 bp, Homo sapiens
ggctttctgtcctgg

SEQ ID NO: 1947040 - DNA, 15 bp, Homo sapiens
gctttctgtcctggg

SEQ ID NO: 1947041 - DNA, 15 bp, Homo sapiens
ctttctgtcctgggt

SEQ ID NO: 1947042 - DNA, 15 bp, Homo sapiens
tttctgtcctgggta

SEQ ID NO: 1947043 - DNA, 15 bp, Homo sapiens
ttctgtcctgggtaa

SEQ ID NO: 1947044 - DNA, 15 bp, Homo sapiens
tctgtcctgggtaac

SEQ ID NO: 1947045 - DNA, 15 bp, Homo sapiens
ctgtcctgggtaact

SEQ ID NO: 1947046 - DNA, 15 bp, Homo sapiens
tgtcctgggtaactg

SEQ ID NO: 1947047 - DNA, 15 bp, Homo sapiens
gtcctgggtaactgt

SEQ ID NO: 1947048 - DNA, 15 bp, Homo sapiens
tcctgggtaactgtt

SEQ ID NO: 1947049 - DNA, 15 bp, Homo sapiens
cctgggtaactgttt

SEQ ID NO: 1947050 - DNA, 15 bp, Homo sapiens
ctgggtaactgtttt

SEQ ID NO: 1947051 - DNA, 15 bp, Homo sapiens
tgggtaactgttttg

SEQ ID NO: 1947052 - DNA, 15 bp, Homo sapiens
gggtaactgttttgg

SEQ ID NO: 1947053 - DNA, 15 bp, Homo sapiens
ggtaactgttttgga

SEQ ID NO: 1947054 - DNA, 15 bp, Homo sapiens
gtaactgttttggag

SEQ ID NO: 1947055 - DNA, 15 bp, Homo sapiens
taactgttttggagg

SEQ ID NO: 1947056 - DNA, 15 bp, Homo sapiens
aactgttttggaggc

SEQ ID NO: 1947057 - DNA, 15 bp, Homo sapiens
actgttttggaggca

SEQ ID NO: 1947058 - DNA, 15 bp, Homo sapiens
ctgttttggaggcac

SEQ ID NO: 1947059 - DNA, 15 bp, Homo sapiens
tgttttggaggcacc

SEQ ID NO: 1947060 - DNA, 15 bp, Homo sapiens
gttttggaggcacca

SEQ ID NO: 1947061 - DNA, 15 bp, Homo sapiens
ttttggaggcaccat

SEQ ID NO: 1947062 - DNA, 15 bp, Homo sapiens
tttggaggcaccatt

SEQ ID NO: 1947063 - DNA, 15 bp, Homo sapiens
ttggaggcaccatta

SEQ ID NO: 1947064 - DNA, 15 bp, Homo sapiens
tggaggcaccattaa

SEQ ID NO: 1947065 - DNA, 15 bp, Homo sapiens
ggaggcaccattaac

SEQ ID NO: 1947066 - DNA, 15 bp, Homo sapiens
gaggcaccattaact

SEQ ID NO: 1947067 - DNA, 15 bp, Homo sapiens
aggcaccattaactg

SEQ ID NO: 1947068 - DNA, 15 bp, Homo sapiens
ggcaccattaactgg

SEQ ID NO: 1947069 - DNA, 15 bp, Homo sapiens
gcaccattaactgga

SEQ ID NO: 1947070 - DNA, 15 bp, Homo sapiens
caccattaactggaa

SEQ ID NO: 1947071 - DNA, 15 bp, Homo sapiens
accattaactggaat

SEQ ID NO: 1947072 - DNA, 15 bp, Homo sapiens
ccattaactggaatg

SEQ ID NO: 1947073 - DNA, 15 bp, Homo sapiens
cattaactggaatgt

SEQ ID NO: 1947074 - DNA, 15 bp, Homo sapiens
attaactggaatgtt

SEQ ID NO: 1947075 - DNA, 15 bp, Homo sapiens
ttaactggaatgttc

SEQ ID NO: 1947076 - DNA, 15 bp, Homo sapiens
taactggaatgttct

SEQ ID NO: 1947077 - DNA, 15 bp, Homo sapiens
aactggaatgttctg

SEQ ID NO: 1947078 - DNA, 15 bp, Homo sapiens
actggaatgttctgg

SEQ ID NO: 1947079 - DNA, 15 bp, Homo sapiens
ctggaatgttctggg

SEQ ID NO: 1947080 - DNA, 15 bp, Homo sapiens
tggaatgttctggga

SEQ ID NO: 1947081 - DNA, 15 bp, Homo sapiens
ggaatgttctgggaa

SEQ ID NO: 1947082 - DNA, 15 bp, Homo sapiens
gaatgttctgggaaa

SEQ ID NO: 1947083 - DNA, 15 bp, Homo sapiens
aatgttctgggaaag

SEQ ID NO: 1947084 - DNA, 15 bp, Homo sapiens
atgttctgggaaagc

SEQ ID NO: 1947085 - DNA, 15 bp, Homo sapiens
tgttctgggaaagcc

SEQ ID NO: 1947086 - DNA, 15 bp, Homo sapiens
gttctgggaaagcct

SEQ ID NO: 1947087 - DNA, 15 bp, Homo sapiens
ttctgggaaagcctt

SEQ ID NO: 1947088 - DNA, 15 bp, Homo sapiens
tctgggaaagccttt

SEQ ID NO: 1947089 - DNA, 15 bp, Homo sapiens
ctgggaaagcctttg

SEQ ID NO: 1947090 - DNA, 15 bp, Homo sapiens
tgggaaagcctttgc

SEQ ID NO: 1947091 - DNA, 15 bp, Homo sapiens
gggaaagcctttgct

SEQ ID NO: 1947092 - DNA, 15 bp, Homo sapiens
ggaaagcctttgctt

SEQ ID NO: 1947093 - DNA, 15 bp, Homo sapiens
gaaagcctttgcttt

SEQ ID NO: 1947094 - DNA, 15 bp, Homo sapiens
aaagcctttgctttt

SEQ ID NO: 1947095 - DNA, 15 bp, Homo sapiens
aagcctttgcttttc

SEQ ID NO: 1947096 - DNA, 15 bp, Homo sapiens
agcctttgcttttct

SEQ ID NO: 1947097 - DNA, 15 bp, Homo sapiens
gcctttgcttttctg

SEQ ID NO: 1947098 - DNA, 15 bp, Homo sapiens
cctttgcttttctga

SEQ ID NO: 1947099 - DNA, 15 bp, Homo sapiens
ctttgcttttctgat

SEQ ID NO: 1947100 - DNA, 15 bp, Homo sapiens
tttgcttttctgatg

SEQ ID NO: 1947101 - DNA, 15 bp, Homo sapiens
ttgcttttctgatgt

SEQ ID NO: 1947102 - DNA, 15 bp, Homo sapiens
tgcttttctgatgtg

SEQ ID NO: 1947103 - DNA, 15 bp, Homo sapiens
gcttttctgatgtga

SEQ ID NO: 1947104 - DNA, 15 bp, Homo sapiens
cttttctgatgtgag

SEQ ID NO: 1947105 - DNA, 15 bp, Homo sapiens
ttttctgatgtgagt

SEQ ID NO: 1947106 - DNA, 15 bp, Homo sapiens
tttctgatgtgagtg

SEQ ID NO: 1947107 - DNA, 15 bp, Homo sapiens
ttctgatgtgagtgc

SEQ ID NO: 1947108 - DNA, 15 bp, Homo sapiens
tctgatgtgagtgct

SEQ ID NO: 1947109 - DNA, 15 bp, Homo sapiens
ctgatgtgagtgctg

SEQ ID NO: 1947110 - DNA, 15 bp, Homo sapiens
tgatgtgagtgctgc

SEQ ID NO: 1947111 - DNA, 15 bp, Homo sapiens
gatgtgagtgctgct

SEQ ID NO: 1947112 - DNA, 15 bp, Homo sapiens
atgtgagtgctgctg

SEQ ID NO: 1947113 - DNA, 15 bp, Homo sapiens
tgtgagtgctgctgc

SEQ ID NO: 1947114 - DNA, 15 bp, Homo sapiens
gtgagtgctgctgcc

SEQ ID NO: 1947115 - DNA, 15 bp, Homo sapiens
tgagtgctgctgcct

SEQ ID NO: 1947116 - DNA, 15 bp, Homo sapiens
gagtgctgctgcctc

SEQ ID NO: 1947117 - DNA, 15 bp, Homo sapiens
agtgctgctgcctcc

SEQ ID NO: 1947118 - DNA, 15 bp, Homo sapiens
gtgctgctgcctcct

SEQ ID NO: 1947119 - DNA, 15 bp, Homo sapiens
tgctgctgcctcctg

SEQ ID NO: 1947120 - DNA, 15 bp, Homo sapiens
gctgctgcctcctgc

SEQ ID NO: 1947121 - DNA, 15 bp, Homo sapiens
ctgctgcctcctgct

SEQ ID NO: 1947122 - DNA, 15 bp, Homo sapiens
tgctgcctcctgctt

SEQ ID NO: 1947123 - DNA, 15 bp, Homo sapiens
gctgcctcctgcttt

SEQ ID NO: 1947124 - DNA, 15 bp, Homo sapiens
ctgcctcctgctttc

SEQ ID NO: 1947125 - DNA, 15 bp, Homo sapiens
tgcctcctgctttct

SEQ ID NO: 1947126 - DNA, 15 bp, Homo sapiens
gcctcctgctttctg

SEQ ID NO: 1947127 - DNA, 15 bp, Homo sapiens
cctcctgctttctga

SEQ ID NO: 1947128 - DNA, 15 bp, Homo sapiens
ctcctgctttctgat

SEQ ID NO: 1947129 - DNA, 15 bp, Homo sapiens
tcctgctttctgatg

SEQ ID NO: 1947130 - DNA, 15 bp, Homo sapiens
cctgctttctgatgc

SEQ ID NO: 1947131 - DNA, 15 bp, Homo sapiens
ctgctttctgatgcc

SEQ ID NO: 1947132 - DNA, 15 bp, Homo sapiens
tgctttctgatgcca

SEQ ID NO: 1947133 - DNA, 15 bp, Homo sapiens
gctttctgatgccac

SEQ ID NO: 1947134 - DNA, 15 bp, Homo sapiens
ctttctgatgccaca

SEQ ID NO: 1947135 - DNA, 15 bp, Homo sapiens
tttctgatgccacaa

SEQ ID NO: 1947136 - DNA, 15 bp, Homo sapiens
ttctgatgccacaac

SEQ ID NO: 1947137 - DNA, 15 bp, Homo sapiens
tctgatgccacaaca

SEQ ID NO: 1947138 - DNA, 15 bp, Homo sapiens
ctgatgccacaacag

SEQ ID NO: 1947139 - DNA, 15 bp, Homo sapiens
tgatgccacaacagc

SEQ ID NO: 1947140 - DNA, 15 bp, Homo sapiens
gatgccacaacagca

SEQ ID NO: 1947141 - DNA, 15 bp, Homo sapiens
atgccacaacagcaa

SEQ ID NO: 1947142 - DNA, 15 bp, Homo sapiens
tgccacaacagcaaa

SEQ ID NO: 1947143 - DNA, 15 bp, Homo sapiens
gccacaacagcaaaa

SEQ ID NO: 1947144 - DNA, 15 bp, Homo sapiens
ccacaacagcaaaag

SEQ ID NO: 1947145 - DNA, 15 bp, Homo sapiens
cacaacagcaaaagg

SEQ ID NO: 1947146 - DNA, 15 bp, Homo sapiens
acaacagcaaaaggc

SEQ ID NO: 1947147 - DNA, 15 bp, Homo sapiens
caacagcaaaaggca

SEQ ID NO: 1947148 - DNA, 15 bp, Homo sapiens
aacagcaaaaggcat

SEQ ID NO: 1947149 - DNA, 15 bp, Homo sapiens
acagcaaaaggcatc

SEQ ID NO: 1947150 - DNA, 15 bp, Homo sapiens
cagcaaaaggcatca

SEQ ID NO: 1947151 - DNA, 15 bp, Homo sapiens
agcaaaaggcatcat

SEQ ID NO: 1947152 - DNA, 15 bp, Homo sapiens
gcaaaaggcatcatg

SEQ ID NO: 1947153 - DNA, 15 bp, Homo sapiens
caaaaggcatcatgc

SEQ ID NO: 1947154 - DNA, 15 bp, Homo sapiens
aaaaggcatcatgca

SEQ ID NO: 1947155 - DNA, 15 bp, Homo sapiens
aaaggcatcatgcag

SEQ ID NO: 1947156 - DNA, 15 bp, Homo sapiens
aaggcatcatgcagc

SEQ ID NO: 1947157 - DNA, 15 bp, Homo sapiens
aggcatcatgcagct

SEQ ID NO: 1947158 - DNA, 15 bp, Homo sapiens
ggcatcatgcagctt

SEQ ID NO: 1947159 - DNA, 15 bp, Homo sapiens
gcatcatgcagcttt

SEQ ID NO: 1947160 - DNA, 15 bp, Homo sapiens
catcatgcagctttg

SEQ ID NO: 1947161 - DNA, 15 bp, Homo sapiens
atcatgcagctttga

SEQ ID NO: 1947162 - DNA, 15 bp, Homo sapiens
tcatgcagctttgag

SEQ ID NO: 1947163 - DNA, 15 bp, Homo sapiens
catgcagctttgagg

SEQ ID NO: 1947164 - DNA, 15 bp, Homo sapiens
atgcagctttgaggt

SEQ ID NO: 1947165 - DNA, 15 bp, Homo sapiens
tgcagctttgaggtg

SEQ ID NO: 1947166 - DNA, 15 bp, Homo sapiens
gcagctttgaggtga

SEQ ID NO: 1947167 - DNA, 15 bp, Homo sapiens
cagctttgaggtgat

SEQ ID NO: 1947168 - DNA, 15 bp, Homo sapiens
agctttgaggtgata

SEQ ID NO: 1947169 - DNA, 15 bp, Homo sapiens
gctttgaggtgataa

SEQ ID NO: 1947170 - DNA, 15 bp, Homo sapiens
ctttgaggtgataaa

SEQ ID NO: 1947171 - DNA, 15 bp, Homo sapiens
tttgaggtgataaac

SEQ ID NO: 1947172 - DNA, 15 bp, Homo sapiens
ttgaggtgataaaca

SEQ ID NO: 1947173 - DNA, 15 bp, Homo sapiens
tgaggtgataaacag

SEQ ID NO: 1947174 - DNA, 15 bp, Homo sapiens
gaggtgataaacagg

SEQ ID NO: 1947175 - DNA, 15 bp, Homo sapiens
aggtgataaacagga

SEQ ID NO: 1947176 - DNA, 15 bp, Homo sapiens
ggtgataaacaggag

SEQ ID NO: 1947177 - DNA, 15 bp, Homo sapiens
gtgataaacaggaga

SEQ ID NO: 1947178 - DNA, 15 bp, Homo sapiens
tgataaacaggagag

SEQ ID NO: 1947179 - DNA, 15 bp, Homo sapiens
gataaacaggagagt

SEQ ID NO: 1947180 - DNA, 15 bp, Homo sapiens
ataaacaggagagtg

SEQ ID NO: 1947181 - DNA, 15 bp, Homo sapiens
taaacaggagagtgg

SEQ ID NO: 1947182 - DNA, 15 bp, Homo sapiens
aaacaggagagtgga

SEQ ID NO: 1947183 - DNA, 15 bp, Homo sapiens
aacaggagagtggac

SEQ ID NO: 1947184 - DNA, 15 bp, Homo sapiens
acaggagagtggaca

SEQ ID NO: 1947185 - DNA, 15 bp, Homo sapiens
caggagagtggacat

SEQ ID NO: 1947186 - DNA, 15 bp, Homo sapiens
aggagagtggacatc

SEQ ID NO: 1947187 - DNA, 15 bp, Homo sapiens
ggagagtggacatct

SEQ ID NO: 1947188 - DNA, 15 bp, Homo sapiens
gagagtggacatcta

SEQ ID NO: 1947189 - DNA, 15 bp, Homo sapiens
agagtggacatctac

SEQ ID NO: 1947190 - DNA, 15 bp, Homo sapiens
gagtggacatctaca

SEQ ID NO: 1947191 - DNA, 15 bp, Homo sapiens
agtggacatctacac

SEQ ID NO: 1947192 - DNA, 15 bp, Homo sapiens
gtggacatctacaca

SEQ ID NO: 1947193 - DNA, 15 bp, Homo sapiens
tggacatctacacat

SEQ ID NO: 1947194 - DNA, 15 bp, Homo sapiens
ggacatctacacatt

SEQ ID NO: 1947195 - DNA, 15 bp, Homo sapiens
gacatctacacatta

SEQ ID NO: 1947196 - DNA, 15 bp, Homo sapiens
acatctacacattag

SEQ ID NO: 1947197 - DNA, 15 bp, Homo sapiens
catctacacattagt

SEQ ID NO: 1947198 - DNA, 15 bp, Homo sapiens
atctacacattagta

SEQ ID NO: 1947199 - DNA, 15 bp, Homo sapiens
tctacacattagtaa

SEQ ID NO: 1947200 - DNA, 15 bp, Homo sapiens
ctacacattagtaag

SEQ ID NO: 1947201 - DNA, 15 bp, Homo sapiens
tacacattagtaaga

SEQ ID NO: 1947202 - DNA, 15 bp, Homo sapiens
acacattagtaagag

SEQ ID NO: 1947203 - DNA, 15 bp, Homo sapiens
cacattagtaagagt

SEQ ID NO: 1947204 - DNA, 15 bp, Homo sapiens
acattagtaagagtg

SEQ ID NO: 1947205 - DNA, 15 bp, Homo sapiens
cattagtaagagtgg

SEQ ID NO: 1947206 - DNA, 15 bp, Homo sapiens
attagtaagagtgga

SEQ ID NO: 1947207 - DNA, 15 bp, Homo sapiens
ttagtaagagtggag

SEQ ID NO: 1947208 - DNA, 15 bp, Homo sapiens
tagtaagagtggagc

SEQ ID NO: 1947209 - DNA, 15 bp, Homo sapiens
agtaagagtggagca

SEQ ID NO: 1947210 - DNA, 15 bp, Homo sapiens
gtaagagtggagcaa

SEQ ID NO: 1947211 - DNA, 15 bp, Homo sapiens
taagagtggagcaaa

SEQ ID NO: 1947212 - DNA, 15 bp, Homo sapiens
aagagtggagcaaaa

SEQ ID NO: 1947213 - DNA, 15 bp, Homo sapiens
agagtggagcaaaaa

SEQ ID NO: 1947214 - DNA, 15 bp, Homo sapiens
gagtggagcaaaaag

SEQ ID NO: 1947215 - DNA, 15 bp, Homo sapiens
agtggagcaaaaaga

SEQ ID NO: 1947216 - DNA, 15 bp, Homo sapiens
gtggagcaaaaagag

SEQ ID NO: 1947217 - DNA, 15 bp, Homo sapiens
tggagcaaaaagagc

SEQ ID NO: 1947218 - DNA, 15 bp, Homo sapiens
ggagcaaaaagagcc

SEQ ID NO: 1947219 - DNA, 15 bp, Homo sapiens
gagcaaaaagagcca

SEQ ID NO: 1947220 - DNA, 15 bp, Homo sapiens
agcaaaaagagccag

SEQ ID NO: 1947221 - DNA, 15 bp, Homo sapiens
gcaaaaagagccagc

SEQ ID NO: 1947222 - DNA, 15 bp, Homo sapiens
caaaaagagccagct

SEQ ID NO: 1947223 - DNA, 15 bp, Homo sapiens
aaaaagagccagctt

SEQ ID NO: 1947224 - DNA, 15 bp, Homo sapiens
aaaagagccagcttc

SEQ ID NO: 1947225 - DNA, 15 bp, Homo sapiens
aaagagccagcttcc

SEQ ID NO: 1947226 - DNA, 15 bp, Homo sapiens
aagagccagcttcct

SEQ ID NO: 1947227 - DNA, 15 bp, Homo sapiens
agagccagcttcctg

SEQ ID NO: 1947228 - DNA, 15 bp, Homo sapiens
gagccagcttcctgg

SEQ ID NO: 1947229 - DNA, 15 bp, Homo sapiens
agccagcttcctggc

SEQ ID NO: 1947230 - DNA, 15 bp, Homo sapiens
gccagcttcctggca

SEQ ID NO: 1947231 - DNA, 15 bp, Homo sapiens
ccagcttcctggcac

SEQ ID NO: 1947232 - DNA, 15 bp, Homo sapiens
cagcttcctggcact

SEQ ID NO: 1947233 - DNA, 15 bp, Homo sapiens
agcttcctggcactc

SEQ ID NO: 1947234 - DNA, 15 bp, Homo sapiens
gcttcctggcactct

SEQ ID NO: 1947235 - DNA, 15 bp, Homo sapiens
cttcctggcactctt

SEQ ID NO: 1947236 - DNA, 15 bp, Homo sapiens
ttcctggcactcttg

SEQ ID NO: 1947237 - DNA, 15 bp, Homo sapiens
tcctggcactcttgt

SEQ ID NO: 1947238 - DNA, 15 bp, Homo sapiens
cctggcactcttgtg

SEQ ID NO: 1947239 - DNA, 15 bp, Homo sapiens
ctggcactcttgtgg

SEQ ID NO: 1947240 - DNA, 15 bp, Homo sapiens
tggcactcttgtgga

SEQ ID NO: 1947241 - DNA, 15 bp, Homo sapiens
ggcactcttgtggaa

SEQ ID NO: 1947242 - DNA, 15 bp, Homo sapiens
gcactcttgtggaat

SEQ ID NO: 1947243 - DNA, 15 bp, Homo sapiens
cactcttgtggaata

SEQ ID NO: 1947244 - DNA, 15 bp, Homo sapiens
actcttgtggaatag

SEQ ID NO: 1947245 - DNA, 15 bp, Homo sapiens
ctcttgtggaatagc

SEQ ID NO: 1947246 - DNA, 15 bp, Homo sapiens
tcttgtggaatagct

SEQ ID NO: 1947247 - DNA, 15 bp, Homo sapiens
cttgtggaatagctg

SEQ ID NO: 1947248 - DNA, 15 bp, Homo sapiens
ttgtggaatagctgc

SEQ ID NO: 1947249 - DNA, 15 bp, Homo sapiens
tgtggaatagctgcc

SEQ ID NO: 1947250 - DNA, 15 bp, Homo sapiens
gtggaatagctgccc

SEQ ID NO: 1947251 - DNA, 15 bp, Homo sapiens
tggaatagctgcccc

SEQ ID NO: 1947252 - DNA, 15 bp, Homo sapiens
ggaatagctgcccct

SEQ ID NO: 1947253 - DNA, 15 bp, Homo sapiens
gaatagctgcccctg

SEQ ID NO: 1947254 - DNA, 15 bp, Homo sapiens
aatagctgcccctgc

SEQ ID NO: 1947255 - DNA, 15 bp, Homo sapiens
atagctgcccctgcc

SEQ ID NO: 1947256 - DNA, 15 bp, Homo sapiens
tagctgcccctgccc

SEQ ID NO: 1947257 - DNA, 15 bp, Homo sapiens
agctgcccctgccct

SEQ ID NO: 1947258 - DNA, 15 bp, Homo sapiens
gctgcccctgccctg

SEQ ID NO: 1947259 - DNA, 15 bp, Homo sapiens
ctgcccctgccctgg

SEQ ID NO: 1947260 - DNA, 15 bp, Homo sapiens
tgcccctgccctggc

SEQ ID NO: 1947261 - DNA, 15 bp, Homo sapiens
gcccctgccctggcc

SEQ ID NO: 1947262 - DNA, 15 bp, Homo sapiens
cccctgccctggcca

SEQ ID NO: 1947263 - DNA, 15 bp, Homo sapiens
ccctgccctggccat

SEQ ID NO: 1947264 - DNA, 15 bp, Homo sapiens
cctgccctggccatg

SEQ ID NO: 1947265 - DNA, 15 bp, Homo sapiens
ctgccctggccatgc

SEQ ID NO: 1947266 - DNA, 15 bp, Homo sapiens
tgccctggccatgct

SEQ ID NO: 1947267 - DNA, 15 bp, Homo sapiens
gccctggccatgcta

SEQ ID NO: 1947268 - DNA, 15 bp, Homo sapiens
ccctggccatgctac

SEQ ID NO: 1947269 - DNA, 15 bp, Homo sapiens
cctggccatgctacc

SEQ ID NO: 1947270 - DNA, 15 bp, Homo sapiens
ctggccatgctacct

SEQ ID NO: 1947271 - DNA, 15 bp, Homo sapiens
tggccatgctacctc

SEQ ID NO: 1947272 - DNA, 15 bp, Homo sapiens
ggccatgctacctct

SEQ ID NO: 1947273 - DNA, 15 bp, Homo sapiens
gccatgctacctctg

SEQ ID NO: 1947274 - DNA, 15 bp, Homo sapiens
ccatgctacctctgg

SEQ ID NO: 1947275 - DNA, 15 bp, Homo sapiens
catgctacctctgga

SEQ ID NO: 1947276 - DNA, 15 bp, Homo sapiens
atgctacctctggat

SEQ ID NO: 1947277 - DNA, 15 bp, Homo sapiens
tgctacctctggatt

SEQ ID NO: 1947278 - DNA, 15 bp, Homo sapiens
gctacctctggattt

SEQ ID NO: 1947279 - DNA, 15 bp, Homo sapiens
ctacctctggatttc

SEQ ID NO: 1947280 - DNA, 15 bp, Homo sapiens
tacctctggatttct

SEQ ID NO: 1947281 - DNA, 15 bp, Homo sapiens
acctctggatttctt

SEQ ID NO: 1947282 - DNA, 15 bp, Homo sapiens
cctctggatttcttg

SEQ ID NO: 1947283 - DNA, 15 bp, Homo sapiens
ctctggatttcttgt

SEQ ID NO: 1947284 - DNA, 15 bp, Homo sapiens
tctggatttcttgtt

SEQ ID NO: 1947285 - DNA, 15 bp, Homo sapiens
ctggatttcttgtta

SEQ ID NO: 1947286 - DNA, 15 bp, Homo sapiens
tggatttcttgttat

SEQ ID NO: 1947287 - DNA, 15 bp, Homo sapiens
ggatttcttgttatg

SEQ ID NO: 1947288 - DNA, 15 bp, Homo sapiens
gatttcttgttatgt

SEQ ID NO: 1947289 - DNA, 15 bp, Homo sapiens
atttcttgttatgtg

SEQ ID NO: 1947290 - DNA, 15 bp, Homo sapiens
tttcttgttatgtgt

SEQ ID NO: 1947291 - DNA, 15 bp, Homo sapiens
ttcttgttatgtgtg

SEQ ID NO: 1947292 - DNA, 15 bp, Homo sapiens
tcttgttatgtgtga

SEQ ID NO: 1947293 - DNA, 15 bp, Homo sapiens
cttgttatgtgtgac

SEQ ID NO: 1947294 - DNA, 15 bp, Homo sapiens
ttgttatgtgtgaca

SEQ ID NO: 1947295 - DNA, 15 bp, Homo sapiens
tgttatgtgtgacag

SEQ ID NO: 1947296 - DNA, 15 bp, Homo sapiens
gttatgtgtgacaga

SEQ ID NO: 1947297 - DNA, 15 bp, Homo sapiens
ttatgtgtgacagac

SEQ ID NO: 1947298 - DNA, 15 bp, Homo sapiens
tatgtgtgacagaca

SEQ ID NO: 1947299 - DNA, 15 bp, Homo sapiens
atgtgtgacagacaa

SEQ ID NO: 1947300 - DNA, 15 bp, Homo sapiens
tgtgtgacagacaac

SEQ ID NO: 1947301 - DNA, 15 bp, Homo sapiens
gtgtgacagacaaca

SEQ ID NO: 1947302 - DNA, 15 bp, Homo sapiens
tgtgacagacaacac

SEQ ID NO: 1947303 - DNA, 15 bp, Homo sapiens
gtgacagacaacact

SEQ ID NO: 1947304 - DNA, 15 bp, Homo sapiens
tgacagacaacactt

SEQ ID NO: 1947305 - DNA, 15 bp, Homo sapiens
gacagacaacactta

SEQ ID NO: 1947306 - DNA, 15 bp, Homo sapiens
acagacaacacttac

SEQ ID NO: 1947307 - DNA, 15 bp, Homo sapiens
cagacaacacttaca

SEQ ID NO: 1947308 - DNA, 15 bp, Homo sapiens
agacaacacttacat

SEQ ID NO: 1947309 - DNA, 15 bp, Homo sapiens
gacaacacttacatg

SEQ ID NO: 1947310 - DNA, 15 bp, Homo sapiens
acaacacttacatgc

SEQ ID NO: 1947311 - DNA, 15 bp, Homo sapiens
caacacttacatgct

SEQ ID NO: 1947312 - DNA, 15 bp, Homo sapiens
aacacttacatgctt

SEQ ID NO: 1947313 - DNA, 15 bp, Homo sapiens
acacttacatgctta

SEQ ID NO: 1947314 - DNA, 15 bp, Homo sapiens
cacttacatgcttag

SEQ ID NO: 1947315 - DNA, 15 bp, Homo sapiens
acttacatgcttaga

SEQ ID NO: 1947316 - DNA, 15 bp, Homo sapiens
cttacatgcttagaa

SEQ ID NO: 1947317 - DNA, 15 bp, Homo sapiens
ttacatgcttagaaa

SEQ ID NO: 1947318 - DNA, 15 bp, Homo sapiens
tacatgcttagaaat

SEQ ID NO: 1947319 - DNA, 15 bp, Homo sapiens
acatgcttagaaata

SEQ ID NO: 1947320 - DNA, 15 bp, Homo sapiens
catgcttagaaatag

SEQ ID NO: 1947321 - DNA, 15 bp, Homo sapiens
atgcttagaaatagg

SEQ ID NO: 1947322 - DNA, 15 bp, Homo sapiens
tgcttagaaataggc

SEQ ID NO: 1947323 - DNA, 15 bp, Homo sapiens
gcttagaaataggca

SEQ ID NO: 1947324 - DNA, 15 bp, Homo sapiens
cttagaaataggcat

SEQ ID NO: 1947325 - DNA, 15 bp, Homo sapiens
ttagaaataggcatc

SEQ ID NO: 1947326 - DNA, 15 bp, Homo sapiens
tagaaataggcatct

SEQ ID NO: 1947327 - DNA, 15 bp, Homo sapiens
agaaataggcatctg

SEQ ID NO: 1947328 - DNA, 15 bp, Homo sapiens
gaaataggcatctga

SEQ ID NO: 1947329 - DNA, 15 bp, Homo sapiens
aaataggcatctgaa

SEQ ID NO: 1947330 - DNA, 15 bp, Homo sapiens
aataggcatctgaat

SEQ ID NO: 1947331 - DNA, 15 bp, Homo sapiens
ataggcatctgaata

SEQ ID NO: 1947332 - DNA, 15 bp, Homo sapiens
taggcatctgaatat

SEQ ID NO: 1947333 - DNA, 15 bp, Homo sapiens
aggcatctgaatatg

SEQ ID NO: 1947334 - DNA, 15 bp, Homo sapiens
ggcatctgaatatgt

SEQ ID NO: 1947335 - DNA, 15 bp, Homo sapiens
gcatctgaatatgtt

SEQ ID NO: 1947336 - DNA, 15 bp, Homo sapiens
catctgaatatgttt

SEQ ID NO: 1947337 - DNA, 15 bp, Homo sapiens
atctgaatatgttta

SEQ ID NO: 1947338 - DNA, 15 bp, Homo sapiens
tctgaatatgtttat

SEQ ID NO: 1947339 - DNA, 15 bp, Homo sapiens
ctgaatatgtttata

SEQ ID NO: 1947340 - DNA, 15 bp, Homo sapiens
tgaatatgtttataa

SEQ ID NO: 1947341 - DNA, 15 bp, Homo sapiens
gaatatgtttataac

SEQ ID NO: 1947342 - DNA, 15 bp, Homo sapiens
aatatgtttataacc

SEQ ID NO: 1947343 - DNA, 15 bp, Homo sapiens
atatgtttataacca

SEQ ID NO: 1947344 - DNA, 15 bp, Homo sapiens
tatgtttataaccaa

SEQ ID NO: 1947345 - DNA, 15 bp, Homo sapiens
atgtttataaccaat

SEQ ID NO: 1947346 - DNA, 15 bp, Homo sapiens
tgtttataaccaata

SEQ ID NO: 1947347 - DNA, 15 bp, Homo sapiens
gtttataaccaatag

SEQ ID NO: 1947348 - DNA, 15 bp, Homo sapiens
tttataaccaataga

SEQ ID NO: 1947349 - DNA, 15 bp, Homo sapiens
ttataaccaatagag

SEQ ID NO: 1947350 - DNA, 15 bp, Homo sapiens
tataaccaatagagt

SEQ ID NO: 1947351 - DNA, 15 bp, Homo sapiens
ataaccaatagagtg

SEQ ID NO: 1947352 - DNA, 15 bp, Homo sapiens
taaccaatagagtga

SEQ ID NO: 1947353 - DNA, 15 bp, Homo sapiens
aaccaatagagtgaa

SEQ ID NO: 1947354 - DNA, 15 bp, Homo sapiens
accaatagagtgaaa

SEQ ID NO: 1947355 - DNA, 15 bp, Homo sapiens
ccaatagagtgaaaa

SEQ ID NO: 1947356 - DNA, 15 bp, Homo sapiens
caatagagtgaaaaa

SEQ ID NO: 1947357 - DNA, 15 bp, Homo sapiens
aatagagtgaaaaat

SEQ ID NO: 1947358 - DNA, 15 bp, Homo sapiens
atagagtgaaaaatg

SEQ ID NO: 1947359 - DNA, 15 bp, Homo sapiens
tagagtgaaaaatga

SEQ ID NO: 1947360 - DNA, 15 bp, Homo sapiens
agagtgaaaaatgat

SEQ ID NO: 1947361 - DNA, 15 bp, Homo sapiens
gagtgaaaaatgatt

SEQ ID NO: 1947362 - DNA, 15 bp, Homo sapiens
agtgaaaaatgattg

SEQ ID NO: 1947363 - DNA, 15 bp, Homo sapiens
gtgaaaaatgattgg

SEQ ID NO: 1947364 - DNA, 15 bp, Homo sapiens
tgaaaaatgattggt

SEQ ID NO: 1947365 - DNA, 15 bp, Homo sapiens
gaaaaatgattggtc

SEQ ID NO: 1947366 - DNA, 15 bp, Homo sapiens
aaaaatgattggtca

SEQ ID NO: 1947367 - DNA, 15 bp, Homo sapiens
aaaatgattggtcag

SEQ ID NO: 1947368 - DNA, 15 bp, Homo sapiens
aaatgattggtcagt

SEQ ID NO: 1947369 - DNA, 15 bp, Homo sapiens
aatgattggtcagtt

SEQ ID NO: 1947370 - DNA, 15 bp, Homo sapiens
atgattggtcagttg

SEQ ID NO: 1947371 - DNA, 15 bp, Homo sapiens
tgattggtcagttgt

SEQ ID NO: 1947372 - DNA, 15 bp, Homo sapiens
gattggtcagttgta

SEQ ID NO: 1947373 - DNA, 15 bp, Homo sapiens
attggtcagttgtag

SEQ ID NO: 1947374 - DNA, 15 bp, Homo sapiens
ttggtcagttgtagt

SEQ ID NO: 1947375 - DNA, 15 bp, Homo sapiens
tggtcagttgtagtt

SEQ ID NO: 1947376 - DNA, 15 bp, Homo sapiens
ggtcagttgtagttt

SEQ ID NO: 1947377 - DNA, 15 bp, Homo sapiens
gtcagttgtagttta

SEQ ID NO: 1947378 - DNA, 15 bp, Homo sapiens
tcagttgtagtttat

SEQ ID NO: 1947379 - DNA, 15 bp, Homo sapiens
cagttgtagtttatt

SEQ ID NO: 1947380 - DNA, 15 bp, Homo sapiens
agttgtagtttattt

SEQ ID NO: 1947381 - DNA, 15 bp, Homo sapiens
gttgtagtttatttt

SEQ ID NO: 1947382 - DNA, 15 bp, Homo sapiens
tgtagtttattttcc

SEQ ID NO: 1947383 - DNA, 15 bp, Homo sapiens
gtagtttattttccg

SEQ ID NO: 1947384 - DNA, 15 bp, Homo sapiens
tagtttattttccgg

SEQ ID NO: 1947385 - DNA, 15 bp, Homo sapiens
agtttattttccgga

SEQ ID NO: 1947386 - DNA, 15 bp, Homo sapiens
gtttattttccggac

SEQ ID NO: 1947387 - DNA, 15 bp, Homo sapiens
tttattttccggacg

SEQ ID NO: 1947388 - DNA, 15 bp, Homo sapiens
ttattttccggacgt

SEQ ID NO: 1947389 - DNA, 15 bp, Homo sapiens
tattttccggacgtc

SEQ ID NO: 1947390 - DNA, 15 bp, Homo sapiens
attttccggacgtct

SEQ ID NO: 1947391 - DNA, 15 bp, Homo sapiens
ttttccggacgtctt

SEQ ID NO: 1947392 - DNA, 15 bp, Homo sapiens
tttccggacgtcttt

SEQ ID NO: 1947393 - DNA, 15 bp, Homo sapiens
ttccggacgtctttg

SEQ ID NO: 1947394 - DNA, 15 bp, Homo sapiens
tccggacgtctttgc

SEQ ID NO: 1947395 - DNA, 15 bp, Homo sapiens
ccggacgtctttgca

SEQ ID NO: 1947396 - DNA, 15 bp, Homo sapiens
cggacgtctttgcat

SEQ ID NO: 1947397 - DNA, 15 bp, Homo sapiens
ggacgtctttgcatt

SEQ ID NO: 1947398 - DNA, 15 bp, Homo sapiens
gacgtctttgcattc

SEQ ID NO: 1947399 - DNA, 15 bp, Homo sapiens
acgtctttgcattct

SEQ ID NO: 1947400 - DNA, 15 bp, Homo sapiens
cgtctttgcattcta

SEQ ID NO: 1947401 - DNA, 15 bp, Homo sapiens
gtctttgcattctaa

SEQ ID NO: 1947402 - DNA, 15 bp, Homo sapiens
tctttgcattctaaa

SEQ ID NO: 1947403 - DNA, 15 bp, Homo sapiens
ctttgcattctaaaa

SEQ ID NO: 1947404 - DNA, 15 bp, Homo sapiens
tttgcattctaaaaa

SEQ ID NO: 1947405 - DNA, 15 bp, Homo sapiens
ttgcattctaaaaac

SEQ ID NO: 1947406 - DNA, 15 bp, Homo sapiens
tgcattctaaaaaca

SEQ ID NO: 1947407 - DNA, 15 bp, Homo sapiens
gcattctaaaaacag

SEQ ID NO: 1947408 - DNA, 15 bp, Homo sapiens
cattctaaaaacaga

SEQ ID NO: 1947409 - DNA, 15 bp, Homo sapiens
attctaaaaacagat

SEQ ID NO: 1947410 - DNA, 15 bp, Homo sapiens
ttctaaaaacagatt

SEQ ID NO: 1947411 - DNA, 15 bp, Homo sapiens
tctaaaaacagattg

SEQ ID NO: 1947412 - DNA, 15 bp, Homo sapiens
ctaaaaacagattga

SEQ ID NO: 1947413 - DNA, 15 bp, Homo sapiens
taaaaacagattgag

SEQ ID NO: 1947414 - DNA, 15 bp, Homo sapiens
aaaaacagattgagc

SEQ ID NO: 1947415 - DNA, 15 bp, Homo sapiens
aaaacagattgagct

SEQ ID NO: 1947416 - DNA, 15 bp, Homo sapiens
aaacagattgagctc

SEQ ID NO: 1947417 - DNA, 15 bp, Homo sapiens
aacagattgagctct

SEQ ID NO: 1947418 - DNA, 15 bp, Homo sapiens
acagattgagctcta

SEQ ID NO: 1947419 - DNA, 15 bp, Homo sapiens
cagattgagctctaa

SEQ ID NO: 1947420 - DNA, 15 bp, Homo sapiens
agattgagctctaaa

SEQ ID NO: 1947421 - DNA, 15 bp, Homo sapiens
gattgagctctaaaa

SEQ ID NO: 1947422 - DNA, 15 bp, Homo sapiens
attgagctctaaaaa

SEQ ID NO: 1947423 - DNA, 15 bp, Homo sapiens
ttgagctctaaaaac

SEQ ID NO: 1947424 - DNA, 15 bp, Homo sapiens
tgagctctaaaaaca

SEQ ID NO: 1947425 - DNA, 15 bp, Homo sapiens
gagctctaaaaacag

SEQ ID NO: 1947426 - DNA, 15 bp, Homo sapiens
agctctaaaaacaga

SEQ ID NO: 1947427 - DNA, 15 bp, Homo sapiens
gctctaaaaacagat

SEQ ID NO: 1947428 - DNA, 15 bp, Homo sapiens
ctctaaaaacagatg

SEQ ID NO: 1947429 - DNA, 15 bp, Homo sapiens
tctaaaaacagatgc

SEQ ID NO: 1947430 - DNA, 15 bp, Homo sapiens
ctaaaaacagatgca

SEQ ID NO: 1947431 - DNA, 15 bp, Homo sapiens
taaaaacagatgcaa

SEQ ID NO: 1947432 - DNA, 15 bp, Homo sapiens
aaaaacagatgcaag

SEQ ID NO: 1947433 - DNA, 15 bp, Homo sapiens
aaaacagatgcaagc

SEQ ID NO: 1947434 - DNA, 15 bp, Homo sapiens
aaacagatgcaagct

SEQ ID NO: 1947435 - DNA, 15 bp, Homo sapiens
aacagatgcaagctc

SEQ ID NO: 1947436 - DNA, 15 bp, Homo sapiens
acagatgcaagctca

SEQ ID NO: 1947437 - DNA, 15 bp, Homo sapiens
cagatgcaagctcaa

SEQ ID NO: 1947438 - DNA, 15 bp, Homo sapiens
agatgcaagctcaaa

SEQ ID NO: 1947439 - DNA, 15 bp, Homo sapiens
gatgcaagctcaaaa

SEQ ID NO: 1947440 - DNA, 15 bp, Homo sapiens
atgcaagctcaaaaa

SEQ ID NO: 1947441 - DNA, 15 bp, Homo sapiens
tgcaagctcaaaaaa

SEQ ID NO: 1947442 - DNA, 15 bp, Homo sapiens
gcaagctcaaaaaaa

SEQ ID NO: 1947443 - DNA, 15 bp, Homo sapiens
caagctcaaaaaaag

SEQ ID NO: 1947444 - DNA, 15 bp, Homo sapiens
aagctcaaaaaaaga

SEQ ID NO: 1947445 - DNA, 15 bp, Homo sapiens
agctcaaaaaaagat

SEQ ID NO: 1947446 - DNA, 15 bp, Homo sapiens
gctcaaaaaaagatt

SEQ ID NO: 1947447 - DNA, 15 bp, Homo sapiens
ctcaaaaaaagattt

SEQ ID NO: 1947448 - DNA, 15 bp, Homo sapiens
tcaaaaaaagattta

SEQ ID NO: 1947449 - DNA, 15 bp, Homo sapiens
caaaaaaagatttat

SEQ ID NO: 1947450 - DNA, 15 bp, Homo sapiens
aaaaaaagatttatt

SEQ ID NO: 1947451 - DNA, 15 bp, Homo sapiens
aaaaaagatttattt

SEQ ID NO: 1947452 - DNA, 15 bp, Homo sapiens
aaaaagatttatttt

SEQ ID NO: 1947453 - DNA, 15 bp, Homo sapiens
aaaagatttatttta

SEQ ID NO: 1947454 - DNA, 15 bp, Homo sapiens
aaagatttattttaa

SEQ ID NO: 1947455 - DNA, 15 bp, Homo sapiens
aagatttattttaat

SEQ ID NO: 1947456 - DNA, 15 bp, Homo sapiens
agatttattttaata

SEQ ID NO: 1947457 - DNA, 15 bp, Homo sapiens
gatttattttaatat

SEQ ID NO: 1947458 - DNA, 15 bp, Homo sapiens
atttattttaatata

SEQ ID NO: 1947459 - DNA, 15 bp, Homo sapiens
tttattttaatatat

SEQ ID NO: 1947460 - DNA, 15 bp, Homo sapiens
ttattttaatatatt

SEQ ID NO: 1947461 - DNA, 15 bp, Homo sapiens
tattttaatatattt

SEQ ID NO: 1947462 - DNA, 15 bp, Homo sapiens
attttaatatattta

SEQ ID NO: 1947463 - DNA, 15 bp, Homo sapiens
ttttaatatatttat

SEQ ID NO: 1947464 - DNA, 15 bp, Homo sapiens
tttaatatatttata

SEQ ID NO: 1947465 - DNA, 15 bp, Homo sapiens
ttaatatatttatat

SEQ ID NO: 1947466 - DNA, 15 bp, Homo sapiens
taatatatttatatg

SEQ ID NO: 1947467 - DNA, 15 bp, Homo sapiens
aatatatttatatgt

SEQ ID NO: 1947468 - DNA, 15 bp, Homo sapiens
atatatttatatgtt

SEQ ID NO: 1947469 - DNA, 15 bp, Homo sapiens
tatatttatatgttg

SEQ ID NO: 1947470 - DNA, 15 bp, Homo sapiens
atatttatatgttga

SEQ ID NO: 1947471 - DNA, 15 bp, Homo sapiens
tatttatatgttgaa

SEQ ID NO: 1947472 - DNA, 15 bp, Homo sapiens
atttatatgttgaat

SEQ ID NO: 1947473 - DNA, 15 bp, Homo sapiens
tttatatgttgaatt

SEQ ID NO: 1947474 - DNA, 15 bp, Homo sapiens
ttatatgttgaattt

SEQ ID NO: 1947475 - DNA, 15 bp, Homo sapiens
tatatgttgaattta

SEQ ID NO: 1947476 - DNA, 15 bp, Homo sapiens
atatgttgaatttaa

SEQ ID NO: 1947477 - DNA, 15 bp, Homo sapiens
tatgttgaatttaat

SEQ ID NO: 1947478 - DNA, 15 bp, Homo sapiens
atgttgaatttaatt

SEQ ID NO: 1947479 - DNA, 15 bp, Homo sapiens
tgttgaatttaattg

SEQ ID NO: 1947480 - DNA, 15 bp, Homo sapiens
gttgaatttaattgt

SEQ ID NO: 1947481 - DNA, 15 bp, Homo sapiens
ttgaatttaattgta

SEQ ID NO: 1947482 - DNA, 15 bp, Homo sapiens
tgaatttaattgtac

SEQ ID NO: 1947483 - DNA, 15 bp, Homo sapiens
gaatttaattgtacc

SEQ ID NO: 1947484 - DNA, 15 bp, Homo sapiens
aatttaattgtacca

SEQ ID NO: 1947485 - DNA, 15 bp, Homo sapiens
atttaattgtaccat

SEQ ID NO: 1947486 - DNA, 15 bp, Homo sapiens
tttaattgtaccatt

SEQ ID NO: 1947487 - DNA, 15 bp, Homo sapiens
ttaattgtaccattg

SEQ ID NO: 1947488 - DNA, 15 bp, Homo sapiens
taattgtaccattgg

SEQ ID NO: 1947489 - DNA, 15 bp, Homo sapiens
aattgtaccattggc

SEQ ID NO: 1947490 - DNA, 15 bp, Homo sapiens
attgtaccattggct

SEQ ID NO: 1947491 - DNA, 15 bp, Homo sapiens
ttgtaccattggctt

SEQ ID NO: 1947492 - DNA, 15 bp, Homo sapiens
tgtaccattggcttc

SEQ ID NO: 1947493 - DNA, 15 bp, Homo sapiens
gtaccattggcttct

SEQ ID NO: 1947494 - DNA, 15 bp, Homo sapiens
taccattggcttcta

SEQ ID NO: 1947495 - DNA, 15 bp, Homo sapiens
accattggcttctaa

SEQ ID NO: 1947496 - DNA, 15 bp, Homo sapiens
ccattggcttctaag

SEQ ID NO: 1947497 - DNA, 15 bp, Homo sapiens
cattggcttctaagt

SEQ ID NO: 1947498 - DNA, 15 bp, Homo sapiens
attggcttctaagtt

SEQ ID NO: 1947499 - DNA, 15 bp, Homo sapiens
ttggcttctaagttt

SEQ ID NO: 1947500 - DNA, 15 bp, Homo sapiens
tggcttctaagtttt

SEQ ID NO: 1947501 - DNA, 15 bp, Homo sapiens
ggcttctaagttttt

SEQ ID NO: 1947502 - DNA, 15 bp, Homo sapiens
gcttctaagtttttc

SEQ ID NO: 1947503 - DNA, 15 bp, Homo sapiens
cttctaagtttttct

SEQ ID NO: 1947504 - DNA, 15 bp, Homo sapiens
ttctaagtttttctt

SEQ ID NO: 1947505 - DNA, 15 bp, Homo sapiens
tctaagtttttcttt

SEQ ID NO: 1947506 - DNA, 15 bp, Homo sapiens
ctaagtttttctttt

SEQ ID NO: 1947507 - DNA, 15 bp, Homo sapiens
taagtttttcttttg

SEQ ID NO: 1947508 - DNA, 15 bp, Homo sapiens
aagtttttcttttgg

SEQ ID NO: 1947509 - DNA, 15 bp, Homo sapiens
agtttttcttttggc

SEQ ID NO: 1947510 - DNA, 15 bp, Homo sapiens
gtttttcttttggct

SEQ ID NO: 1947511 - DNA, 15 bp, Homo sapiens
tttttcttttggctt

SEQ ID NO: 1947512 - DNA, 15 bp, Homo sapiens
ttttcttttggcttt

SEQ ID NO: 1947513 - DNA, 15 bp, Homo sapiens
tttcttttggctttt

SEQ ID NO: 1947514 - DNA, 15 bp, Homo sapiens
ttcttttggcttttt

SEQ ID NO: 1947515 - DNA, 15 bp, Homo sapiens
tcttttggctttttt

SEQ ID NO: 1947516 - DNA, 15 bp, Homo sapiens
cttttggctttttta

SEQ ID NO: 1947517 - DNA, 15 bp, Homo sapiens
ttttggcttttttat

SEQ ID NO: 1947518 - DNA, 15 bp, Homo sapiens
tttggcttttttata

SEQ ID NO: 1947519 - DNA, 15 bp, Homo sapiens
ttggcttttttatag

SEQ ID NO: 1947520 - DNA, 15 bp, Homo sapiens
tggcttttttataga

SEQ ID NO: 1947521 - DNA, 15 bp, Homo sapiens
ggcttttttatagag

SEQ ID NO: 1947522 - DNA, 15 bp, Homo sapiens
gcttttttatagagc

SEQ ID NO: 1947523 - DNA, 15 bp, Homo sapiens
cttttttatagagca

SEQ ID NO: 1947524 - DNA, 15 bp, Homo sapiens
ttttttatagagcaa

SEQ ID NO: 1947525 - DNA, 15 bp, Homo sapiens
tttttatagagcaaa

SEQ ID NO: 1947526 - DNA, 15 bp, Homo sapiens
ttttatagagcaaat

SEQ ID NO: 1947527 - DNA, 15 bp, Homo sapiens
tttatagagcaaatt

SEQ ID NO: 1947528 - DNA, 15 bp, Homo sapiens
ttatagagcaaatta

SEQ ID NO: 1947529 - DNA, 15 bp, Homo sapiens
tatagagcaaattac

SEQ ID NO: 1947530 - DNA, 15 bp, Homo sapiens
atagagcaaattact

SEQ ID NO: 1947531 - DNA, 15 bp, Homo sapiens
tagagcaaattacta

SEQ ID NO: 1947532 - DNA, 15 bp, Homo sapiens
agagcaaattactaa

SEQ ID NO: 1947533 - DNA, 15 bp, Homo sapiens
gagcaaattactaaa

SEQ ID NO: 1947534 - DNA, 15 bp, Homo sapiens
agcaaattactaaag

SEQ ID NO: 1947535 - DNA, 15 bp, Homo sapiens
gcaaattactaaaga

SEQ ID NO: 1947536 - DNA, 15 bp, Homo sapiens
caaattactaaagaa

SEQ ID NO: 1947537 - DNA, 15 bp, Homo sapiens
aaattactaaagaaa

SEQ ID NO: 1947538 - DNA, 15 bp, Homo sapiens
aattactaaagaaaa

SEQ ID NO: 1947539 - DNA, 15 bp, Homo sapiens
attactaaagaaaaa

SEQ ID NO: 1947540 - DNA, 15 bp, Homo sapiens
ttactaaagaaaaaa

SEQ ID NO: 1947541 - DNA, 15 bp, Homo sapiens
tactaaagaaaaaac

SEQ ID NO: 1947542 - DNA, 15 bp, Homo sapiens
actaaagaaaaaact

SEQ ID NO: 1947543 - DNA, 15 bp, Homo sapiens
ctaaagaaaaaactt

SEQ ID NO: 1947544 - DNA, 15 bp, Homo sapiens
taaagaaaaaacttt

SEQ ID NO: 1947545 - DNA, 15 bp, Homo sapiens
aaagaaaaaactttg

SEQ ID NO: 1947546 - DNA, 15 bp, Homo sapiens
aagaaaaaactttgt

SEQ ID NO: 1947547 - DNA, 15 bp, Homo sapiens
agaaaaaactttgtt

SEQ ID NO: 1947548 - DNA, 15 bp, Homo sapiens
gaaaaaactttgttt

SEQ ID NO: 1947549 - DNA, 15 bp, Homo sapiens
aaaaaactttgtttt

SEQ ID NO: 1947550 - DNA, 15 bp, Homo sapiens
aaaaactttgttttt

SEQ ID NO: 1947551 - DNA, 15 bp, Homo sapiens
aaaactttgttttta

SEQ ID NO: 1947552 - DNA, 15 bp, Homo sapiens
aaactttgtttttac

SEQ ID NO: 1947553 - DNA, 15 bp, Homo sapiens
aactttgtttttact

SEQ ID NO: 1947554 - DNA, 15 bp, Homo sapiens
actttgtttttacta

SEQ ID NO: 1947555 - DNA, 15 bp, Homo sapiens
ctttgtttttactag

SEQ ID NO: 1947556 - DNA, 15 bp, Homo sapiens
tttgtttttactagc

SEQ ID NO: 1947557 - DNA, 15 bp, Homo sapiens
ttgtttttactagca

SEQ ID NO: 1947558 - DNA, 15 bp, Homo sapiens
tgtttttactagcag

SEQ ID NO: 1947559 - DNA, 15 bp, Homo sapiens
gtttttactagcaga

SEQ ID NO: 1947560 - DNA, 15 bp, Homo sapiens
tttttactagcagac

SEQ ID NO: 1947561 - DNA, 15 bp, Homo sapiens
ttttactagcagacc

SEQ ID NO: 1947562 - DNA, 15 bp, Homo sapiens
tttactagcagacct

SEQ ID NO: 1947563 - DNA, 15 bp, Homo sapiens
ttactagcagacctc

SEQ ID NO: 1947564 - DNA, 15 bp, Homo sapiens
tactagcagacctct

SEQ ID NO: 1947565 - DNA, 15 bp, Homo sapiens
actagcagacctctt

SEQ ID NO: 1947566 - DNA, 15 bp, Homo sapiens
ctagcagacctctta

SEQ ID NO: 1947567 - DNA, 15 bp, Homo sapiens
tagcagacctcttag

SEQ ID NO: 1947568 - DNA, 15 bp, Homo sapiens
agcagacctcttagt

SEQ ID NO: 1947569 - DNA, 15 bp, Homo sapiens
gcagacctcttagta

SEQ ID NO: 1947570 - DNA, 15 bp, Homo sapiens
cagacctcttagtat

SEQ ID NO: 1947571 - DNA, 15 bp, Homo sapiens
agacctcttagtata

SEQ ID NO: 1947572 - DNA, 15 bp, Homo sapiens
gacctcttagtatac

SEQ ID NO: 1947573 - DNA, 15 bp, Homo sapiens
acctcttagtataca

SEQ ID NO: 1947574 - DNA, 15 bp, Homo sapiens
cctcttagtatacaa

SEQ ID NO: 1947575 - DNA, 15 bp, Homo sapiens
ctcttagtatacaaa

SEQ ID NO: 1947576 - DNA, 15 bp, Homo sapiens
tcttagtatacaaat

SEQ ID NO: 1947577 - DNA, 15 bp, Homo sapiens
cttagtatacaaatg

SEQ ID NO: 1947578 - DNA, 15 bp, Homo sapiens
ttagtatacaaatgg

SEQ ID NO: 1947579 - DNA, 15 bp, Homo sapiens
tagtatacaaatggg

SEQ ID NO: 1947580 - DNA, 15 bp, Homo sapiens
agtatacaaatgggg

SEQ ID NO: 1947581 - DNA, 15 bp, Homo sapiens
gtatacaaatgggga

SEQ ID NO: 1947582 - DNA, 15 bp, Homo sapiens
tatacaaatggggaa

SEQ ID NO: 1947583 - DNA, 15 bp, Homo sapiens
atacaaatggggaaa

SEQ ID NO: 1947584 - DNA, 15 bp, Homo sapiens
tacaaatggggaaaa

SEQ ID NO: 1947585 - DNA, 15 bp, Homo sapiens
acaaatggggaaaat

SEQ ID NO: 1947586 - DNA, 15 bp, Homo sapiens
caaatggggaaaatg

SEQ ID NO: 1947587 - DNA, 15 bp, Homo sapiens
aaatggggaaaatgt

SEQ ID NO: 1947588 - DNA, 15 bp, Homo sapiens
aatggggaaaatgtg

SEQ ID NO: 1947589 - DNA, 15 bp, Homo sapiens
atggggaaaatgtgc

SEQ ID NO: 1947590 - DNA, 15 bp, Homo sapiens
tggggaaaatgtgca

SEQ ID NO: 1947591 - DNA, 15 bp, Homo sapiens
ggggaaaatgtgcat

SEQ ID NO: 1947592 - DNA, 15 bp, Homo sapiens
gggaaaatgtgcata

SEQ ID NO: 1947593 - DNA, 15 bp, Homo sapiens
ggaaaatgtgcatat

SEQ ID NO: 1947594 - DNA, 15 bp, Homo sapiens
gaaaatgtgcatata

SEQ ID NO: 1947595 - DNA, 15 bp, Homo sapiens
aaaatgtgcatataa

SEQ ID NO: 1947596 - DNA, 15 bp, Homo sapiens
aaatgtgcatataaa

SEQ ID NO: 1947597 - DNA, 15 bp, Homo sapiens
aatgtgcatataaag

SEQ ID NO: 1947598 - DNA, 15 bp, Homo sapiens
atgtgcatataaaga

SEQ ID NO: 1947599 - DNA, 15 bp, Homo sapiens
tgtgcatataaagat

SEQ ID NO: 1947600 - DNA, 15 bp, Homo sapiens
gtgcatataaagatg

SEQ ID NO: 1947601 - DNA, 15 bp, Homo sapiens
tgcatataaagatgg

SEQ ID NO: 1947602 - DNA, 15 bp, Homo sapiens
gcatataaagatggg

SEQ ID NO: 1947603 - DNA, 15 bp, Homo sapiens
catataaagatggga

SEQ ID NO: 1947604 - DNA, 15 bp, Homo sapiens
atataaagatgggac

SEQ ID NO: 1947605 - DNA, 15 bp, Homo sapiens
tataaagatgggacc

SEQ ID NO: 1947606 - DNA, 15 bp, Homo sapiens
ataaagatgggacct

SEQ ID NO: 1947607 - DNA, 15 bp, Homo sapiens
taaagatgggaccta

SEQ ID NO: 1947608 - DNA, 15 bp, Homo sapiens
aaagatgggacctaa

SEQ ID NO: 1947609 - DNA, 15 bp, Homo sapiens
aagatgggacctaag

SEQ ID NO: 1947610 - DNA, 15 bp, Homo sapiens
agatgggacctaaga

SEQ ID NO: 1947611 - DNA, 15 bp, Homo sapiens
gatgggacctaagat

SEQ ID NO: 1947612 - DNA, 15 bp, Homo sapiens
atgggacctaagatt

SEQ ID NO: 1947613 - DNA, 15 bp, Homo sapiens
tgggacctaagattt

SEQ ID NO: 1947614 - DNA, 15 bp, Homo sapiens
gggacctaagatttg

SEQ ID NO: 1947615 - DNA, 15 bp, Homo sapiens
ggacctaagatttgg

SEQ ID NO: 1947616 - DNA, 15 bp, Homo sapiens
gacctaagatttgga

SEQ ID NO: 1947617 - DNA, 15 bp, Homo sapiens
acctaagatttggaa

SEQ ID NO: 1947618 - DNA, 15 bp, Homo sapiens
cctaagatttggaac

SEQ ID NO: 1947619 - DNA, 15 bp, Homo sapiens
ctaagatttggaaca

SEQ ID NO: 1947620 - DNA, 15 bp, Homo sapiens
taagatttggaacaa

SEQ ID NO: 1947621 - DNA, 15 bp, Homo sapiens
aagatttggaacaaa

SEQ ID NO: 1947622 - DNA, 15 bp, Homo sapiens
agatttggaacaaat

SEQ ID NO: 1947623 - DNA, 15 bp, Homo sapiens
gatttggaacaaatt

SEQ ID NO: 1947624 - DNA, 15 bp, Homo sapiens
atttggaacaaattc

SEQ ID NO: 1947625 - DNA, 15 bp, Homo sapiens
tttggaacaaattcc

SEQ ID NO: 1947626 - DNA, 15 bp, Homo sapiens
ttggaacaaattcca

SEQ ID NO: 1947627 - DNA, 15 bp, Homo sapiens
tggaacaaattccag

SEQ ID NO: 1947628 - DNA, 15 bp, Homo sapiens
ggaacaaattccaga

SEQ ID NO: 1947629 - DNA, 15 bp, Homo sapiens
gaacaaattccagag

SEQ ID NO: 1947630 - DNA, 15 bp, Homo sapiens
aacaaattccagagg

SEQ ID NO: 1947631 - DNA, 15 bp, Homo sapiens
acaaattccagagga

SEQ ID NO: 1947632 - DNA, 15 bp, Homo sapiens
caaattccagaggaa

SEQ ID NO: 1947633 - DNA, 15 bp, Homo sapiens
aaattccagaggaaa

SEQ ID NO: 1947634 - DNA, 15 bp, Homo sapiens
aattccagaggaaaa

SEQ ID NO: 1947635 - DNA, 15 bp, Homo sapiens
attccagaggaaaat

SEQ ID NO: 1947636 - DNA, 15 bp, Homo sapiens
ttccagaggaaaatt

SEQ ID NO: 1947637 - DNA, 15 bp, Homo sapiens
tccagaggaaaattt

SEQ ID NO: 1947638 - DNA, 15 bp, Homo sapiens
ccagaggaaaatttt

SEQ ID NO: 1947639 - DNA, 15 bp, Homo sapiens
cagaggaaaattttg

SEQ ID NO: 1947640 - DNA, 15 bp, Homo sapiens
agaggaaaattttgt

SEQ ID NO: 1947641 - DNA, 15 bp, Homo sapiens
gaggaaaattttgtt

SEQ ID NO: 1947642 - DNA, 15 bp, Homo sapiens
aggaaaattttgttg

SEQ ID NO: 1947643 - DNA, 15 bp, Homo sapiens
ggaaaattttgttga

SEQ ID NO: 1947644 - DNA, 15 bp, Homo sapiens
gaaaattttgttgac

SEQ ID NO: 1947645 - DNA, 15 bp, Homo sapiens
aaaattttgttgaca

SEQ ID NO: 1947646 - DNA, 15 bp, Homo sapiens
aaattttgttgacat

SEQ ID NO: 1947647 - DNA, 15 bp, Homo sapiens
aattttgttgacatt

SEQ ID NO: 1947648 - DNA, 15 bp, Homo sapiens
attttgttgacattg

SEQ ID NO: 1947649 - DNA, 15 bp, Homo sapiens
ttttgttgacattgg

SEQ ID NO: 1947650 - DNA, 15 bp, Homo sapiens
tttgttgacattgga

SEQ ID NO: 1947651 - DNA, 15 bp, Homo sapiens
ttgttgacattggaa

SEQ ID NO: 1947652 - DNA, 15 bp, Homo sapiens
tgttgacattggaat

SEQ ID NO: 1947653 - DNA, 15 bp, Homo sapiens
gttgacattggaatg

SEQ ID NO: 1947654 - DNA, 15 bp, Homo sapiens
ttgacattggaatga

SEQ ID NO: 1947655 - DNA, 15 bp, Homo sapiens
tgacattggaatgaa

SEQ ID NO: 1947656 - DNA, 15 bp, Homo sapiens
gacattggaatgaat

SEQ ID NO: 1947657 - DNA, 15 bp, Homo sapiens
acattggaatgaatt

SEQ ID NO: 1947658 - DNA, 15 bp, Homo sapiens
cattggaatgaatta

SEQ ID NO: 1947659 - DNA, 15 bp, Homo sapiens
attggaatgaattac

SEQ ID NO: 1947660 - DNA, 15 bp, Homo sapiens
ttggaatgaattact

SEQ ID NO: 1947661 - DNA, 15 bp, Homo sapiens
tggaatgaattacta

SEQ ID NO: 1947662 - DNA, 15 bp, Homo sapiens
ggaatgaattactaa

SEQ ID NO: 1947663 - DNA, 15 bp, Homo sapiens
gaatgaattactaaa

SEQ ID NO: 1947664 - DNA, 15 bp, Homo sapiens
aatgaattactaaat

SEQ ID NO: 1947665 - DNA, 15 bp, Homo sapiens
atgaattactaaata

SEQ ID NO: 1947666 - DNA, 15 bp, Homo sapiens
tgaattactaaatac

SEQ ID NO: 1947667 - DNA, 15 bp, Homo sapiens
gaattactaaatact

SEQ ID NO: 1947668 - DNA, 15 bp, Homo sapiens
aattactaaatactg

SEQ ID NO: 1947669 - DNA, 15 bp, Homo sapiens
attactaaatactgt

SEQ ID NO: 1947670 - DNA, 15 bp, Homo sapiens
ttactaaatactgtg

SEQ ID NO: 1947671 - DNA, 15 bp, Homo sapiens
tactaaatactgtgt

SEQ ID NO: 1947672 - DNA, 15 bp, Homo sapiens
actaaatactgtgtt

SEQ ID NO: 1947673 - DNA, 15 bp, Homo sapiens
ctaaatactgtgttt

SEQ ID NO: 1947674 - DNA, 15 bp, Homo sapiens
taaatactgtgtttg

SEQ ID NO: 1947675 - DNA, 15 bp, Homo sapiens
aaatactgtgtttga

SEQ ID NO: 1947676 - DNA, 15 bp, Homo sapiens
aatactgtgtttgat

SEQ ID NO: 1947677 - DNA, 15 bp, Homo sapiens
atactgtgtttgata

SEQ ID NO: 1947678 - DNA, 15 bp, Homo sapiens
tactgtgtttgatat

SEQ ID NO: 1947679 - DNA, 15 bp, Homo sapiens
actgtgtttgatatt

SEQ ID NO: 1947680 - DNA, 15 bp, Homo sapiens
ctgtgtttgatattt

SEQ ID NO: 1947681 - DNA, 15 bp, Homo sapiens
tgtgtttgatatttg

SEQ ID NO: 1947682 - DNA, 15 bp, Homo sapiens
gtgtttgatatttgg

SEQ ID NO: 1947683 - DNA, 15 bp, Homo sapiens
tgtttgatatttggt

SEQ ID NO: 1947684 - DNA, 15 bp, Homo sapiens
gtttgatatttggta

SEQ ID NO: 1947685 - DNA, 15 bp, Homo sapiens
tttgatatttggtaa

SEQ ID NO: 1947686 - DNA, 15 bp, Homo sapiens
ttgatatttggtaaa

SEQ ID NO: 1947687 - DNA, 15 bp, Homo sapiens
tgatatttggtaaaa

SEQ ID NO: 1947688 - DNA, 15 bp, Homo sapiens
gatatttggtaaaaa

SEQ ID NO: 1947689 - DNA, 15 bp, Homo sapiens
atatttggtaaaaat

SEQ ID NO: 1947690 - DNA, 15 bp, Homo sapiens
tatttggtaaaaatt

SEQ ID NO: 1947691 - DNA, 15 bp, Homo sapiens
atttggtaaaaatta

SEQ ID NO: 1947692 - DNA, 15 bp, Homo sapiens
tttggtaaaaattac

SEQ ID NO: 1947693 - DNA, 15 bp, Homo sapiens
ttggtaaaaattact

SEQ ID NO: 1947694 - DNA, 15 bp, Homo sapiens
tggtaaaaattactt

SEQ ID NO: 1947695 - DNA, 15 bp, Homo sapiens
ggtaaaaattactta

SEQ ID NO: 1947696 - DNA, 15 bp, Homo sapiens
gtaaaaattacttat

SEQ ID NO: 1947697 - DNA, 15 bp, Homo sapiens
aaaaattacttattt

SEQ ID NO: 1947698 - DNA, 15 bp, Homo sapiens
aattacttatttttg

SEQ ID NO: 1947699 - DNA, 15 bp, Homo sapiens
attacttatttttgt

SEQ ID NO: 1947700 - DNA, 15 bp, Homo sapiens
ttacttatttttgtc

SEQ ID NO: 1947701 - DNA, 15 bp, Homo sapiens
tacttatttttgtct

SEQ ID NO: 1947702 - DNA, 15 bp, Homo sapiens
acttatttttgtctt

SEQ ID NO: 1947703 - DNA, 15 bp, Homo sapiens
cttatttttgtcttc

SEQ ID NO: 1947704 - DNA, 15 bp, Homo sapiens
ttatttttgtcttct

SEQ ID NO: 1947705 - DNA, 15 bp, Homo sapiens
tatttttgtcttcta

SEQ ID NO: 1947706 - DNA, 15 bp, Homo sapiens
atttttgtcttctac

SEQ ID NO: 1947707 - DNA, 15 bp, Homo sapiens
tttttgtcttctact

SEQ ID NO: 1947708 - DNA, 15 bp, Homo sapiens
ttttgtcttctactc

SEQ ID NO: 1947709 - DNA, 15 bp, Homo sapiens
tttgtcttctactct

SEQ ID NO: 1947710 - DNA, 15 bp, Homo sapiens
ttgtcttctactctg

SEQ ID NO: 1947711 - DNA, 15 bp, Homo sapiens
tgtcttctactctga

SEQ ID NO: 1947712 - DNA, 15 bp, Homo sapiens
gtcttctactctgag

SEQ ID NO: 1947713 - DNA, 15 bp, Homo sapiens
tcttctactctgaga

SEQ ID NO: 1947714 - DNA, 15 bp, Homo sapiens
cttctactctgagaa

SEQ ID NO: 1947715 - DNA, 15 bp, Homo sapiens
ttctactctgagaag

SEQ ID NO: 1947716 - DNA, 15 bp, Homo sapiens
tctactctgagaagt

SEQ ID NO: 1947717 - DNA, 15 bp, Homo sapiens
ctactctgagaagta

SEQ ID NO: 1947718 - DNA, 15 bp, Homo sapiens
tactctgagaagtat

SEQ ID NO: 1947719 - DNA, 15 bp, Homo sapiens
actctgagaagtatt

SEQ ID NO: 1947720 - DNA, 15 bp, Homo sapiens
ctctgagaagtattt

SEQ ID NO: 1947721 - DNA, 15 bp, Homo sapiens
tctgagaagtatttc

SEQ ID NO: 1947722 - DNA, 15 bp, Homo sapiens
ctgagaagtatttct

SEQ ID NO: 1947723 - DNA, 15 bp, Homo sapiens
tgagaagtatttctt

SEQ ID NO: 1947724 - DNA, 15 bp, Homo sapiens
gagaagtatttctta

SEQ ID NO: 1947725 - DNA, 15 bp, Homo sapiens
agaagtatttcttac

SEQ ID NO: 1947726 - DNA, 15 bp, Homo sapiens
gaagtatttcttaca

SEQ ID NO: 1947727 - DNA, 15 bp, Homo sapiens
aagtatttcttacag

SEQ ID NO: 1947728 - DNA, 15 bp, Homo sapiens
agtatttcttacagt

SEQ ID NO: 1947729 - DNA, 15 bp, Homo sapiens
gtatttcttacagtc

SEQ ID NO: 1947730 - DNA, 15 bp, Homo sapiens
tatttcttacagtct

SEQ ID NO: 1947731 - DNA, 15 bp, Homo sapiens
atttcttacagtctt

SEQ ID NO: 1947732 - DNA, 15 bp, Homo sapiens
tttcttacagtctta

SEQ ID NO: 1947733 - DNA, 15 bp, Homo sapiens
ttcttacagtcttat

SEQ ID NO: 1947734 - DNA, 15 bp, Homo sapiens
tcttacagtcttatc

SEQ ID NO: 1947735 - DNA, 15 bp, Homo sapiens
cttacagtcttatca

SEQ ID NO: 1947736 - DNA, 15 bp, Homo sapiens
ttacagtcttatcat

SEQ ID NO: 1947737 - DNA, 15 bp, Homo sapiens
tacagtcttatcatt

SEQ ID NO: 1947738 - DNA, 15 bp, Homo sapiens
acagtcttatcatta

SEQ ID NO: 1947739 - DNA, 15 bp, Homo sapiens
cagtcttatcattag

SEQ ID NO: 1947740 - DNA, 15 bp, Homo sapiens
agtcttatcattaga

SEQ ID NO: 1947741 - DNA, 15 bp, Homo sapiens
gtcttatcattagag

SEQ ID NO: 1947742 - DNA, 15 bp, Homo sapiens
tcttatcattagaga

SEQ ID NO: 1947743 - DNA, 15 bp, Homo sapiens
cttatcattagagaa

SEQ ID NO: 1947744 - DNA, 15 bp, Homo sapiens
ttatcattagagaat

SEQ ID NO: 1947745 - DNA, 15 bp, Homo sapiens
tatcattagagaata

SEQ ID NO: 1947746 - DNA, 15 bp, Homo sapiens
atcattagagaatag

SEQ ID NO: 1947747 - DNA, 15 bp, Homo sapiens
tcattagagaataga

SEQ ID NO: 1947748 - DNA, 15 bp, Homo sapiens
cattagagaatagac

SEQ ID NO: 1947749 - DNA, 15 bp, Homo sapiens
attagagaatagact

SEQ ID NO: 1947750 - DNA, 15 bp, Homo sapiens
ttagagaatagactg

SEQ ID NO: 1947751 - DNA, 15 bp, Homo sapiens
tagagaatagactgg

SEQ ID NO: 1947752 - DNA, 15 bp, Homo sapiens
agagaatagactggt

SEQ ID NO: 1947753 - DNA, 15 bp, Homo sapiens
gagaatagactggtt

SEQ ID NO: 1947754 - DNA, 15 bp, Homo sapiens
agaatagactggttc

SEQ ID NO: 1947755 - DNA, 15 bp, Homo sapiens
gaatagactggttct

SEQ ID NO: 1947756 - DNA, 15 bp, Homo sapiens
aatagactggttcta

SEQ ID NO: 1947757 - DNA, 15 bp, Homo sapiens
atagactggttctaa

SEQ ID NO: 1947758 - DNA, 15 bp, Homo sapiens
tagactggttctaag

SEQ ID NO: 1947759 - DNA, 15 bp, Homo sapiens
agactggttctaagg

SEQ ID NO: 1947760 - DNA, 15 bp, Homo sapiens
gactggttctaaggc

SEQ ID NO: 1947761 - DNA, 15 bp, Homo sapiens
actggttctaaggct

SEQ ID NO: 1947762 - DNA, 15 bp, Homo sapiens
ctggttctaaggcta

SEQ ID NO: 1947763 - DNA, 15 bp, Homo sapiens
tggttctaaggctat

SEQ ID NO: 1947764 - DNA, 15 bp, Homo sapiens
ggttctaaggctatt

SEQ ID NO: 1947765 - DNA, 15 bp, Homo sapiens
gttctaaggctattt

SEQ ID NO: 1947766 - DNA, 15 bp, Homo sapiens
ttctaaggctatttt

SEQ ID NO: 1947767 - DNA, 15 bp, Homo sapiens
tctaaggctattttt

SEQ ID NO: 1947768 - DNA, 15 bp, Homo sapiens
ctaaggctatttttt

SEQ ID NO: 1947769 - DNA, 15 bp, Homo sapiens
taaggctatttttta

SEQ ID NO: 1947770 - DNA, 15 bp, Homo sapiens
aaggctattttttac

SEQ ID NO: 1947771 - DNA, 15 bp, Homo sapiens
aggctattttttaca

SEQ ID NO: 1947772 - DNA, 15 bp, Homo sapiens
ggctattttttacag

SEQ ID NO: 1947773 - DNA, 15 bp, Homo sapiens
gctattttttacagg

SEQ ID NO: 1947774 - DNA, 15 bp, Homo sapiens
ctattttttacagga

SEQ ID NO: 1947775 - DNA, 15 bp, Homo sapiens
tattttttacaggaa

SEQ ID NO: 1947776 - DNA, 15 bp, Homo sapiens
attttttacaggaac

SEQ ID NO: 1947777 - DNA, 15 bp, Homo sapiens
ttttttacaggaaca

SEQ ID NO: 1947778 - DNA, 15 bp, Homo sapiens
tttttacaggaacat

SEQ ID NO: 1947779 - DNA, 15 bp, Homo sapiens
ttttacaggaacata

SEQ ID NO: 1947780 - DNA, 15 bp, Homo sapiens
tttacaggaacatat

SEQ ID NO: 1947781 - DNA, 15 bp, Homo sapiens
ttacaggaacatatt

SEQ ID NO: 1947782 - DNA, 15 bp, Homo sapiens
tacaggaacatattg

SEQ ID NO: 1947783 - DNA, 15 bp, Homo sapiens
acaggaacatattgg

SEQ ID NO: 1947784 - DNA, 15 bp, Homo sapiens
caggaacatattggc

SEQ ID NO: 1947785 - DNA, 15 bp, Homo sapiens
aggaacatattggct

SEQ ID NO: 1947786 - DNA, 15 bp, Homo sapiens
ggaacatattggctt

SEQ ID NO: 1947787 - DNA, 15 bp, Homo sapiens
gaacatattggcttt

SEQ ID NO: 1947788 - DNA, 15 bp, Homo sapiens
aacatattggctttt

SEQ ID NO: 1947789 - DNA, 15 bp, Homo sapiens
acatattggcttttt

SEQ ID NO: 1947790 - DNA, 15 bp, Homo sapiens
catattggctttttc

SEQ ID NO: 1947791 - DNA, 15 bp, Homo sapiens
atattggctttttct

SEQ ID NO: 1947792 - DNA, 15 bp, Homo sapiens
tattggctttttctt

SEQ ID NO: 1947793 - DNA, 15 bp, Homo sapiens
attggctttttcttt

SEQ ID NO: 1947794 - DNA, 15 bp, Homo sapiens
ttggctttttcttta

SEQ ID NO: 1947795 - DNA, 15 bp, Homo sapiens
tggctttttctttag

SEQ ID NO: 1947796 - DNA, 15 bp, Homo sapiens
ggctttttctttaga

SEQ ID NO: 1947797 - DNA, 15 bp, Homo sapiens
gctttttctttagac

SEQ ID NO: 1947798 - DNA, 15 bp, Homo sapiens
ctttttctttagaca

SEQ ID NO: 1947799 - DNA, 15 bp, Homo sapiens
tttttctttagacat

SEQ ID NO: 1947800 - DNA, 15 bp, Homo sapiens
ttttctttagacatt

SEQ ID NO: 1947801 - DNA, 15 bp, Homo sapiens
tttctttagacatta

SEQ ID NO: 1947802 - DNA, 15 bp, Homo sapiens
ttctttagacattaa

SEQ ID NO: 1947803 - DNA, 15 bp, Homo sapiens
tctttagacattaaa

SEQ ID NO: 1947804 - DNA, 15 bp, Homo sapiens
ctttagacattaaac

SEQ ID NO: 1947805 - DNA, 15 bp, Homo sapiens
tttagacattaaacc

SEQ ID NO: 1947806 - DNA, 15 bp, Homo sapiens
ttagacattaaaccc

SEQ ID NO: 1947807 - DNA, 15 bp, Homo sapiens
tagacattaaaccca

SEQ ID NO: 1947808 - DNA, 15 bp, Homo sapiens
agacattaaacccaa

SEQ ID NO: 1947809 - DNA, 15 bp, Homo sapiens
gacattaaacccaat

SEQ ID NO: 1947810 - DNA, 15 bp, Homo sapiens
acattaaacccaatg

SEQ ID NO: 1947811 - DNA, 15 bp, Homo sapiens
cattaaacccaatga

SEQ ID NO: 1947812 - DNA, 15 bp, Homo sapiens
attaaacccaatgat

SEQ ID NO: 1947813 - DNA, 15 bp, Homo sapiens
ttaaacccaatgata

SEQ ID NO: 1947814 - DNA, 15 bp, Homo sapiens
taaacccaatgatat

SEQ ID NO: 1947815 - DNA, 15 bp, Homo sapiens
aaacccaatgatata

SEQ ID NO: 1947816 - DNA, 15 bp, Homo sapiens
aacccaatgatatat

SEQ ID NO: 1947817 - DNA, 15 bp, Homo sapiens
acccaatgatatatc

SEQ ID NO: 1947818 - DNA, 15 bp, Homo sapiens
cccaatgatatatcc

SEQ ID NO: 1947819 - DNA, 15 bp, Homo sapiens
ccaatgatatatcct

SEQ ID NO: 1947820 - DNA, 15 bp, Homo sapiens
caatgatatatcctg

SEQ ID NO: 1947821 - DNA, 15 bp, Homo sapiens
aatgatatatcctgt

SEQ ID NO: 1947822 - DNA, 15 bp, Homo sapiens
atgatatatcctgta

SEQ ID NO: 1947823 - DNA, 15 bp, Homo sapiens
tgatatatcctgtat

SEQ ID NO: 1947824 - DNA, 15 bp, Homo sapiens
gatatatcctgtatc

SEQ ID NO: 1947825 - DNA, 15 bp, Homo sapiens
atatatcctgtatct

SEQ ID NO: 1947826 - DNA, 15 bp, Homo sapiens
tatatcctgtatctt

SEQ ID NO: 1947827 - DNA, 15 bp, Homo sapiens
atatcctgtatctta

SEQ ID NO: 1947828 - DNA, 15 bp, Homo sapiens
tatcctgtatcttaa

SEQ ID NO: 1947829 - DNA, 15 bp, Homo sapiens
atcctgtatcttaaa

SEQ ID NO: 1947830 - DNA, 15 bp, Homo sapiens
tcctgtatcttaaaa

SEQ ID NO: 1947831 - DNA, 15 bp, Homo sapiens
cctgtatcttaaaaa

SEQ ID NO: 1947832 - DNA, 15 bp, Homo sapiens
ctgtatcttaaaaaa

SEQ ID NO: 1947833 - DNA, 15 bp, Homo sapiens
tgtatcttaaaaaac

SEQ ID NO: 1947834 - DNA, 15 bp, Homo sapiens
gtatcttaaaaaaca

SEQ ID NO: 1947835 - DNA, 15 bp, Homo sapiens
tatcttaaaaaacaa

SEQ ID NO: 1947836 - DNA, 15 bp, Homo sapiens
atcttaaaaaacaaa

SEQ ID NO: 1947837 - DNA, 15 bp, Homo sapiens
ttaaaaaacaaaaca

SEQ ID NO: 1947838 - DNA, 15 bp, Homo sapiens
taaaaaacaaaacag

SEQ ID NO: 1947839 - DNA, 15 bp, Homo sapiens
aaaaaacaaaacagt

SEQ ID NO: 1947840 - DNA, 15 bp, Homo sapiens
aaaaacaaaacagta

SEQ ID NO: 1947841 - DNA, 15 bp, Homo sapiens
aaaacaaaacagtaa

SEQ ID NO: 1947842 - DNA, 15 bp, Homo sapiens
aaacaaaacagtaaa

SEQ ID NO: 1947843 - DNA, 15 bp, Homo sapiens
aacaaaacagtaaat

SEQ ID NO: 1947844 - DNA, 15 bp, Homo sapiens
acaaaacagtaaatc

SEQ ID NO: 1947845 - DNA, 15 bp, Homo sapiens
caaaacagtaaatct

SEQ ID NO: 1947846 - DNA, 15 bp, Homo sapiens
aaaacagtaaatctg

SEQ ID NO: 1947847 - DNA, 15 bp, Homo sapiens
aaacagtaaatctgg

SEQ ID NO: 1947848 - DNA, 15 bp, Homo sapiens
aacagtaaatctgga

SEQ ID NO: 1947849 - DNA, 15 bp, Homo sapiens
acagtaaatctggaa

SEQ ID NO: 1947850 - DNA, 15 bp, Homo sapiens
cagtaaatctggaat

SEQ ID NO: 1947851 - DNA, 15 bp, Homo sapiens
agtaaatctggaatc

SEQ ID NO: 1947852 - DNA, 15 bp, Homo sapiens
gtaaatctggaatct

SEQ ID NO: 1947853 - DNA, 15 bp, Homo sapiens
taaatctggaatctt

SEQ ID NO: 1947854 - DNA, 15 bp, Homo sapiens
aaatctggaatctta

SEQ ID NO: 1947855 - DNA, 15 bp, Homo sapiens
aatctggaatcttac

SEQ ID NO: 1947856 - DNA, 15 bp, Homo sapiens
atctggaatcttacc

SEQ ID NO: 1947857 - DNA, 15 bp, Homo sapiens
tctggaatcttaccg

SEQ ID NO: 1947858 - DNA, 15 bp, Homo sapiens
ctggaatcttaccga

SEQ ID NO: 1947859 - DNA, 15 bp, Homo sapiens
tggaatcttaccgaa

SEQ ID NO: 1947860 - DNA, 15 bp, Homo sapiens
ggaatcttaccgaaa

SEQ ID NO: 1947861 - DNA, 15 bp, Homo sapiens
gaatcttaccgaaac

SEQ ID NO: 1947862 - DNA, 15 bp, Homo sapiens
aatcttaccgaaacc

SEQ ID NO: 1947863 - DNA, 15 bp, Homo sapiens
atcttaccgaaacca

SEQ ID NO: 1947864 - DNA, 15 bp, Homo sapiens
tcttaccgaaaccaa

SEQ ID NO: 1947865 - DNA, 15 bp, Homo sapiens
cttaccgaaaccaag

SEQ ID NO: 1947866 - DNA, 15 bp, Homo sapiens
ttaccgaaaccaagt

SEQ ID NO: 1947867 - DNA, 15 bp, Homo sapiens
taccgaaaccaagta

SEQ ID NO: 1947868 - DNA, 15 bp, Homo sapiens
accgaaaccaagtat

SEQ ID NO: 1947869 - DNA, 15 bp, Homo sapiens
ccgaaaccaagtatt

SEQ ID NO: 1947870 - DNA, 15 bp, Homo sapiens
cgaaaccaagtattt

SEQ ID NO: 1947871 - DNA, 15 bp, Homo sapiens
gaaaccaagtatttt

SEQ ID NO: 1947872 - DNA, 15 bp, Homo sapiens
aaaccaagtattttc

SEQ ID NO: 1947873 - DNA, 15 bp, Homo sapiens
aaccaagtattttcc

SEQ ID NO: 1947874 - DNA, 15 bp, Homo sapiens
accaagtattttcca

SEQ ID NO: 1947875 - DNA, 15 bp, Homo sapiens
ccaagtattttccat

SEQ ID NO: 1947876 - DNA, 15 bp, Homo sapiens
caagtattttccata

SEQ ID NO: 1947877 - DNA, 15 bp, Homo sapiens
aagtattttccatat

SEQ ID NO: 1947878 - DNA, 15 bp, Homo sapiens
agtattttccatata

SEQ ID NO: 1947879 - DNA, 15 bp, Homo sapiens
gtattttccatatac

SEQ ID NO: 1947880 - DNA, 15 bp, Homo sapiens
tattttccatataca

SEQ ID NO: 1947881 - DNA, 15 bp, Homo sapiens
attttccatatacat

SEQ ID NO: 1947882 - DNA, 15 bp, Homo sapiens
ttttccatatacatt

SEQ ID NO: 1947883 - DNA, 15 bp, Homo sapiens
tttccatatacattt

SEQ ID NO: 1947884 - DNA, 15 bp, Homo sapiens
ttccatatacatttg

SEQ ID NO: 1947885 - DNA, 15 bp, Homo sapiens
tccatatacatttgt

SEQ ID NO: 1947886 - DNA, 15 bp, Homo sapiens
ccatatacatttgtg

SEQ ID NO: 1947887 - DNA, 15 bp, Homo sapiens
catatacatttgtgt

SEQ ID NO: 1947888 - DNA, 15 bp, Homo sapiens
atatacatttgtgtc

SEQ ID NO: 1947889 - DNA, 15 bp, Homo sapiens
tatacatttgtgtct

SEQ ID NO: 1947890 - DNA, 15 bp, Homo sapiens
atacatttgtgtctg

SEQ ID NO: 1947891 - DNA, 15 bp, Homo sapiens
tacatttgtgtctgt

SEQ ID NO: 1947892 - DNA, 15 bp, Homo sapiens
acatttgtgtctgtc

SEQ ID NO: 1947893 - DNA, 15 bp, Homo sapiens
catttgtgtctgtct

SEQ ID NO: 1947894 - DNA, 15 bp, Homo sapiens
atttgtgtctgtctc

SEQ ID NO: 1947895 - DNA, 15 bp, Homo sapiens
tttgtgtctgtctcc

SEQ ID NO: 1947896 - DNA, 15 bp, Homo sapiens
ttgtgtctgtctcca

SEQ ID NO: 1947897 - DNA, 15 bp, Homo sapiens
tgtgtctgtctccat

SEQ ID NO: 1947898 - DNA, 15 bp, Homo sapiens
gtgtctgtctccata

SEQ ID NO: 1947899 - DNA, 15 bp, Homo sapiens
tgtctgtctccatat

SEQ ID NO: 1947900 - DNA, 15 bp, Homo sapiens
gtctgtctccatatt

SEQ ID NO: 1947901 - DNA, 15 bp, Homo sapiens
tctgtctccatatta

SEQ ID NO: 1947902 - DNA, 15 bp, Homo sapiens
ctgtctccatattaa

SEQ ID NO: 1947903 - DNA, 15 bp, Homo sapiens
tgtctccatattaag

SEQ ID NO: 1947904 - DNA, 15 bp, Homo sapiens
gtctccatattaaga

SEQ ID NO: 1947905 - DNA, 15 bp, Homo sapiens
tctccatattaagag

SEQ ID NO: 1947906 - DNA, 15 bp, Homo sapiens
ctccatattaagaga

SEQ ID NO: 1947907 - DNA, 15 bp, Homo sapiens
tccatattaagagag

SEQ ID NO: 1947908 - DNA, 15 bp, Homo sapiens
ccatattaagagaga

SEQ ID NO: 1947909 - DNA, 15 bp, Homo sapiens
catattaagagagat

SEQ ID NO: 1947910 - DNA, 15 bp, Homo sapiens
atattaagagagatt

SEQ ID NO: 1947911 - DNA, 15 bp, Homo sapiens
tattaagagagatta

SEQ ID NO: 1947912 - DNA, 15 bp, Homo sapiens
attaagagagattac

SEQ ID NO: 1947913 - DNA, 15 bp, Homo sapiens
ttaagagagattaca

SEQ ID NO: 1947914 - DNA, 15 bp, Homo sapiens
taagagagattacat

SEQ ID NO: 1947915 - DNA, 15 bp, Homo sapiens
aagagagattacatc

SEQ ID NO: 1947916 - DNA, 15 bp, Homo sapiens
agagagattacatca

SEQ ID NO: 1947917 - DNA, 15 bp, Homo sapiens
gagagattacatcag

SEQ ID NO: 1947918 - DNA, 15 bp, Homo sapiens
agagattacatcaga

SEQ ID NO: 1947919 - DNA, 15 bp, Homo sapiens
gagattacatcagag

SEQ ID NO: 1947920 - DNA, 15 bp, Homo sapiens
agattacatcagagt

SEQ ID NO: 1947921 - DNA, 15 bp, Homo sapiens
gattacatcagagtt

SEQ ID NO: 1947922 - DNA, 15 bp, Homo sapiens
attacatcagagttg

SEQ ID NO: 1947923 - DNA, 15 bp, Homo sapiens
ttacatcagagttga

SEQ ID NO: 1947924 - DNA, 15 bp, Homo sapiens
tacatcagagttgaa

SEQ ID NO: 1947925 - DNA, 15 bp, Homo sapiens
acatcagagttgaag

SEQ ID NO: 1947926 - DNA, 15 bp, Homo sapiens
catcagagttgaagg

SEQ ID NO: 1947927 - DNA, 15 bp, Homo sapiens
atcagagttgaaggc

SEQ ID NO: 1947928 - DNA, 15 bp, Homo sapiens
tcagagttgaaggct

SEQ ID NO: 1947929 - DNA, 15 bp, Homo sapiens
cagagttgaaggctt

SEQ ID NO: 1947930 - DNA, 15 bp, Homo sapiens
agagttgaaggcttt

SEQ ID NO: 1947931 - DNA, 15 bp, Homo sapiens
gagttgaaggctttc

SEQ ID NO: 1947932 - DNA, 15 bp, Homo sapiens
agttgaaggctttct

SEQ ID NO: 1947933 - DNA, 15 bp, Homo sapiens
gttgaaggctttctt

SEQ ID NO: 1947934 - DNA, 15 bp, Homo sapiens
ttgaaggctttcttt

SEQ ID NO: 1947935 - DNA, 15 bp, Homo sapiens
tgaaggctttctttg

SEQ ID NO: 1947936 - DNA, 15 bp, Homo sapiens
gaaggctttctttgg

SEQ ID NO: 1947937 - DNA, 15 bp, Homo sapiens
aaggctttctttggt

SEQ ID NO: 1947938 - DNA, 15 bp, Homo sapiens
aggctttctttggtc

SEQ ID NO: 1947939 - DNA, 15 bp, Homo sapiens
ggctttctttggtcc

SEQ ID NO: 1947940 - DNA, 15 bp, Homo sapiens
gctttctttggtccc

SEQ ID NO: 1947941 - DNA, 15 bp, Homo sapiens
ctttctttggtccca

SEQ ID NO: 1947942 - DNA, 15 bp, Homo sapiens
tttctttggtcccaa

SEQ ID NO: 1947943 - DNA, 15 bp, Homo sapiens
ttctttggtcccaaa

SEQ ID NO: 1947944 - DNA, 15 bp, Homo sapiens
tctttggtcccaaaa

SEQ ID NO: 1947945 - DNA, 15 bp, Homo sapiens
ctttggtcccaaaat

SEQ ID NO: 1947946 - DNA, 15 bp, Homo sapiens
tttggtcccaaaatc

SEQ ID NO: 1947947 - DNA, 15 bp, Homo sapiens
ttggtcccaaaatct

SEQ ID NO: 1947948 - DNA, 15 bp, Homo sapiens
tggtcccaaaatctg

SEQ ID NO: 1947949 - DNA, 15 bp, Homo sapiens
ggtcccaaaatctgt

SEQ ID NO: 1947950 - DNA, 15 bp, Homo sapiens
gtcccaaaatctgta

SEQ ID NO: 1947951 - DNA, 15 bp, Homo sapiens
tcccaaaatctgtac

SEQ ID NO: 1947952 - DNA, 15 bp, Homo sapiens
cccaaaatctgtact

SEQ ID NO: 1947953 - DNA, 15 bp, Homo sapiens
ccaaaatctgtactt

SEQ ID NO: 1947954 - DNA, 15 bp, Homo sapiens
caaaatctgtacttt

SEQ ID NO: 1947955 - DNA, 15 bp, Homo sapiens
aaaatctgtactttt

SEQ ID NO: 1947956 - DNA, 15 bp, Homo sapiens
aaatctgtacttttt

SEQ ID NO: 1947957 - DNA, 15 bp, Homo sapiens
aatctgtacttttta

SEQ ID NO: 1947958 - DNA, 15 bp, Homo sapiens
atctgtactttttaa

SEQ ID NO: 1947959 - DNA, 15 bp, Homo sapiens
tctgtactttttaaa

SEQ ID NO: 1947960 - DNA, 15 bp, Homo sapiens
ctgtactttttaaaa

SEQ ID NO: 1947961 - DNA, 15 bp, Homo sapiens
tgtactttttaaaaa

SEQ ID NO: 1947962 - DNA, 15 bp, Homo sapiens
gtactttttaaaaaa

SEQ ID NO: 1947963 - DNA, 15 bp, Homo sapiens
tactttttaaaaaaa

SEQ ID NO: 1947964 - DNA, 15 bp, Homo sapiens
actttttaaaaaaag

SEQ ID NO: 1947965 - DNA, 15 bp, Homo sapiens
ctttttaaaaaaagc

SEQ ID NO: 1947966 - DNA, 15 bp, Homo sapiens
ttttaaaaaaagcag

SEQ ID NO: 1947967 - DNA, 15 bp, Homo sapiens
tttaaaaaaagcagt

SEQ ID NO: 1947968 - DNA, 15 bp, Homo sapiens
ttaaaaaaagcagtg

SEQ ID NO: 1947969 - DNA, 15 bp, Homo sapiens
taaaaaaagcagtga

SEQ ID NO: 1947970 - DNA, 15 bp, Homo sapiens
aaaaaaagcagtgat

SEQ ID NO: 1947971 - DNA, 15 bp, Homo sapiens
aaaaaagcagtgatt

SEQ ID NO: 1947972 - DNA, 15 bp, Homo sapiens
aaaaagcagtgattg

SEQ ID NO: 1947973 - DNA, 15 bp, Homo sapiens
aaaagcagtgattgc

SEQ ID NO: 1947974 - DNA, 15 bp, Homo sapiens
aaagcagtgattgct

SEQ ID NO: 1947975 - DNA, 15 bp, Homo sapiens
aagcagtgattgctg

SEQ ID NO: 1947976 - DNA, 15 bp, Homo sapiens
agcagtgattgctgt

SEQ ID NO: 1947977 - DNA, 15 bp, Homo sapiens
gcagtgattgctgtg

SEQ ID NO: 1947978 - DNA, 15 bp, Homo sapiens
cagtgattgctgtgg

SEQ ID NO: 1947979 - DNA, 15 bp, Homo sapiens
agtgattgctgtggc

SEQ ID NO: 1947980 - DNA, 15 bp, Homo sapiens
gtgattgctgtggct

SEQ ID NO: 1947981 - DNA, 15 bp, Homo sapiens
tgattgctgtggctt

SEQ ID NO: 1947982 - DNA, 15 bp, Homo sapiens
gattgctgtggcttc

SEQ ID NO: 1947983 - DNA, 15 bp, Homo sapiens
attgctgtggcttct

SEQ ID NO: 1947984 - DNA, 15 bp, Homo sapiens
ttgctgtggcttctc

SEQ ID NO: 1947985 - DNA, 15 bp, Homo sapiens
tgctgtggcttctcc

SEQ ID NO: 1947986 - DNA, 15 bp, Homo sapiens
gctgtggcttctcca

SEQ ID NO: 1947987 - DNA, 15 bp, Homo sapiens
ctgtggcttctccag

SEQ ID NO: 1947988 - DNA, 15 bp, Homo sapiens
tgtggcttctccagt

SEQ ID NO: 1947989 - DNA, 15 bp, Homo sapiens
gtggcttctccagta

SEQ ID NO: 1947990 - DNA, 15 bp, Homo sapiens
tggcttctccagtat

SEQ ID NO: 1947991 - DNA, 15 bp, Homo sapiens
ggcttctccagtatg

SEQ ID NO: 1947992 - DNA, 15 bp, Homo sapiens
gcttctccagtatgc

SEQ ID NO: 1947993 - DNA, 15 bp, Homo sapiens
cttctccagtatgct

SEQ ID NO: 1947994 - DNA, 15 bp, Homo sapiens
ttctccagtatgctg

SEQ ID NO: 1947995 - DNA, 15 bp, Homo sapiens
tctccagtatgctgt

SEQ ID NO: 1947996 - DNA, 15 bp, Homo sapiens
ctccagtatgctgtg

SEQ ID NO: 1947997 - DNA, 15 bp, Homo sapiens
tccagtatgctgtgg

SEQ ID NO: 1947998 - DNA, 15 bp, Homo sapiens
ccagtatgctgtgga

SEQ ID NO: 1947999 - DNA, 15 bp, Homo sapiens
cagtatgctgtggaa

SEQ ID NO: 1948000 - DNA, 15 bp, Homo sapiens
agtatgctgtggaat

SEQ ID NO: 1948001 - DNA, 15 bp, Homo sapiens
gtatgctgtggaata

SEQ ID NO: 1948002 - DNA, 15 bp, Homo sapiens
tatgctgtggaatat

SEQ ID NO: 1948003 - DNA, 15 bp, Homo sapiens
atgctgtggaatata

SEQ ID NO: 1948004 - DNA, 15 bp, Homo sapiens
tgctgtggaatatat

SEQ ID NO: 1948005 - DNA, 15 bp, Homo sapiens
gctgtggaatatata

SEQ ID NO: 1948006 - DNA, 15 bp, Homo sapiens
ctgtggaatatatat

SEQ ID NO: 1948007 - DNA, 15 bp, Homo sapiens
tgtggaatatatatg

SEQ ID NO: 1948008 - DNA, 15 bp, Homo sapiens
gtggaatatatatgg

SEQ ID NO: 1948009 - DNA, 15 bp, Homo sapiens
tggaatatatatgga

SEQ ID NO: 1948010 - DNA, 15 bp, Homo sapiens
ggaatatatatggaa

SEQ ID NO: 1948011 - DNA, 15 bp, Homo sapiens
gaatatatatggaag

SEQ ID NO: 1948012 - DNA, 15 bp, Homo sapiens
aatatatatggaagt

SEQ ID NO: 1948013 - DNA, 15 bp, Homo sapiens
atatatatggaagtt

SEQ ID NO: 1948014 - DNA, 15 bp, Homo sapiens
tatatatggaagtta

SEQ ID NO: 1948015 - DNA, 15 bp, Homo sapiens
atatatggaagttat

SEQ ID NO: 1948016 - DNA, 15 bp, Homo sapiens
tatatggaagttatt

SEQ ID NO: 1948017 - DNA, 15 bp, Homo sapiens
atatggaagttattc

SEQ ID NO: 1948018 - DNA, 15 bp, Homo sapiens
tatggaagttattcc

SEQ ID NO: 1948019 - DNA, 15 bp, Homo sapiens
atggaagttattcca

SEQ ID NO: 1948020 - DNA, 15 bp, Homo sapiens
tggaagttattccag

SEQ ID NO: 1948021 - DNA, 15 bp, Homo sapiens
ggaagttattccagt

SEQ ID NO: 1948022 - DNA, 15 bp, Homo sapiens
gaagttattccagtg

SEQ ID NO: 1948023 - DNA, 15 bp, Homo sapiens
aagttattccagtgt

SEQ ID NO: 1948024 - DNA, 15 bp, Homo sapiens
agttattccagtgtt

SEQ ID NO: 1948025 - DNA, 15 bp, Homo sapiens
gttattccagtgttt

SEQ ID NO: 1948026 - DNA, 15 bp, Homo sapiens
ttattccagtgtttt

SEQ ID NO: 1948027 - DNA, 15 bp, Homo sapiens
tattccagtgttttt

SEQ ID NO: 1948028 - DNA, 15 bp, Homo sapiens
attccagtgtttttt

SEQ ID NO: 1948029 - DNA, 15 bp, Homo sapiens
ttccagtgttttttc

SEQ ID NO: 1948030 - DNA, 15 bp, Homo sapiens
tccagtgttttttct

SEQ ID NO: 1948031 - DNA, 15 bp, Homo sapiens
ccagtgttttttctc

SEQ ID NO: 1948032 - DNA, 15 bp, Homo sapiens
cagtgttttttctca

SEQ ID NO: 1948033 - DNA, 15 bp, Homo sapiens
agtgttttttctcag

SEQ ID NO: 1948034 - DNA, 15 bp, Homo sapiens
gtgttttttctcagt

SEQ ID NO: 1948035 - DNA, 15 bp, Homo sapiens
tgttttttctcagtc

SEQ ID NO: 1948036 - DNA, 15 bp, Homo sapiens
gttttttctcagtct

SEQ ID NO: 1948037 - DNA, 15 bp, Homo sapiens
ttttttctcagtctg

SEQ ID NO: 1948038 - DNA, 15 bp, Homo sapiens
tttttctcagtctga

SEQ ID NO: 1948039 - DNA, 15 bp, Homo sapiens
ttttctcagtctgac

SEQ ID NO: 1948040 - DNA, 15 bp, Homo sapiens
tttctcagtctgaca

SEQ ID NO: 1948041 - DNA, 15 bp, Homo sapiens
ttctcagtctgacat

SEQ ID NO: 1948042 - DNA, 15 bp, Homo sapiens
tctcagtctgacatc

SEQ ID NO: 1948043 - DNA, 15 bp, Homo sapiens
ctcagtctgacatcc

SEQ ID NO: 1948044 - DNA, 15 bp, Homo sapiens
tcagtctgacatcca

SEQ ID NO: 1948045 - DNA, 15 bp, Homo sapiens
cagtctgacatccaa

SEQ ID NO: 1948046 - DNA, 15 bp, Homo sapiens
agtctgacatccaaa

SEQ ID NO: 1948047 - DNA, 15 bp, Homo sapiens
gtctgacatccaaat

SEQ ID NO: 1948048 - DNA, 15 bp, Homo sapiens
tctgacatccaaatg

SEQ ID NO: 1948049 - DNA, 15 bp, Homo sapiens
ctgacatccaaatgg

SEQ ID NO: 1948050 - DNA, 15 bp, Homo sapiens
tgacatccaaatggc

SEQ ID NO: 1948051 - DNA, 15 bp, Homo sapiens
gacatccaaatggct

SEQ ID NO: 1948052 - DNA, 15 bp, Homo sapiens
acatccaaatggctg

SEQ ID NO: 1948053 - DNA, 15 bp, Homo sapiens
catccaaatggctgt

SEQ ID NO: 1948054 - DNA, 15 bp, Homo sapiens
atccaaatggctgta

SEQ ID NO: 1948055 - DNA, 15 bp, Homo sapiens
tccaaatggctgtac

SEQ ID NO: 1948056 - DNA, 15 bp, Homo sapiens
ccaaatggctgtaca

SEQ ID NO: 1948057 - DNA, 15 bp, Homo sapiens
caaatggctgtacat

SEQ ID NO: 1948058 - DNA, 15 bp, Homo sapiens
aaatggctgtacatt

SEQ ID NO: 1948059 - DNA, 15 bp, Homo sapiens
aatggctgtacatta

SEQ ID NO: 1948060 - DNA, 15 bp, Homo sapiens
atggctgtacattac

SEQ ID NO: 1948061 - DNA, 15 bp, Homo sapiens
tggctgtacattact

SEQ ID NO: 1948062 - DNA, 15 bp, Homo sapiens
ggctgtacattactt

SEQ ID NO: 1948063 - DNA, 15 bp, Homo sapiens
gctgtacattactta

SEQ ID NO: 1948064 - DNA, 15 bp, Homo sapiens
ctgtacattacttaa

SEQ ID NO: 1948065 - DNA, 15 bp, Homo sapiens
tgtacattacttaaa

SEQ ID NO: 1948066 - DNA, 15 bp, Homo sapiens
gtacattacttaaaa

SEQ ID NO: 1948067 - DNA, 15 bp, Homo sapiens
tacattacttaaaat

SEQ ID NO: 1948068 - DNA, 15 bp, Homo sapiens
acattacttaaaatc

SEQ ID NO: 1948069 - DNA, 15 bp, Homo sapiens
cattacttaaaatct

SEQ ID NO: 1948070 - DNA, 15 bp, Homo sapiens
attacttaaaatcta

SEQ ID NO: 1948071 - DNA, 15 bp, Homo sapiens
ttacttaaaatctac

SEQ ID NO: 1948072 - DNA, 15 bp, Homo sapiens
tacttaaaatctaca

SEQ ID NO: 1948073 - DNA, 15 bp, Homo sapiens
acttaaaatctacat

SEQ ID NO: 1948074 - DNA, 15 bp, Homo sapiens
cttaaaatctacatt

SEQ ID NO: 1948075 - DNA, 15 bp, Homo sapiens
ttaaaatctacattt

SEQ ID NO: 1948076 - DNA, 15 bp, Homo sapiens
taaaatctacatttg

SEQ ID NO: 1948077 - DNA, 15 bp, Homo sapiens
aaaatctacatttga

SEQ ID NO: 1948078 - DNA, 15 bp, Homo sapiens
aaatctacatttgag

SEQ ID NO: 1948079 - DNA, 15 bp, Homo sapiens
aatctacatttgaga

SEQ ID NO: 1948080 - DNA, 15 bp, Homo sapiens
atctacatttgagag

SEQ ID NO: 1948081 - DNA, 15 bp, Homo sapiens
tctacatttgagagt

SEQ ID NO: 1948082 - DNA, 15 bp, Homo sapiens
ctacatttgagagtc

SEQ ID NO: 1948083 - DNA, 15 bp, Homo sapiens
tacatttgagagtct

SEQ ID NO: 1948084 - DNA, 15 bp, Homo sapiens
acatttgagagtctg

SEQ ID NO: 1948085 - DNA, 15 bp, Homo sapiens
catttgagagtctgt

SEQ ID NO: 1948086 - DNA, 15 bp, Homo sapiens
atttgagagtctgtt

SEQ ID NO: 1948087 - DNA, 15 bp, Homo sapiens
tttgagagtctgttt

SEQ ID NO: 1948088 - DNA, 15 bp, Homo sapiens
ttgagagtctgtttt

SEQ ID NO: 1948089 - DNA, 15 bp, Homo sapiens
tgagagtctgttttc

SEQ ID NO: 1948090 - DNA, 15 bp, Homo sapiens
gagagtctgttttct

SEQ ID NO: 1948091 - DNA, 15 bp, Homo sapiens
agagtctgttttcta

SEQ ID NO: 1948092 - DNA, 15 bp, Homo sapiens
gagtctgttttctaa

SEQ ID NO: 1948093 - DNA, 15 bp, Homo sapiens
agtctgttttctaat

SEQ ID NO: 1948094 - DNA, 15 bp, Homo sapiens
gtctgttttctaatg

SEQ ID NO: 1948095 - DNA, 15 bp, Homo sapiens
tctgttttctaatgg

SEQ ID NO: 1948096 - DNA, 15 bp, Homo sapiens
ctgttttctaatggt

SEQ ID NO: 1948097 - DNA, 15 bp, Homo sapiens
tgttttctaatggtt

SEQ ID NO: 1948098 - DNA, 15 bp, Homo sapiens
gttttctaatggtta

SEQ ID NO: 1948099 - DNA, 15 bp, Homo sapiens
ttttctaatggttaa

SEQ ID NO: 1948100 - DNA, 15 bp, Homo sapiens
tttctaatggttaat

SEQ ID NO: 1948101 - DNA, 15 bp, Homo sapiens
ttctaatggttaatc

SEQ ID NO: 1948102 - DNA, 15 bp, Homo sapiens
tctaatggttaatca

SEQ ID NO: 1948103 - DNA, 15 bp, Homo sapiens
ctaatggttaatcaa

SEQ ID NO: 1948104 - DNA, 15 bp, Homo sapiens
taatggttaatcaaa

SEQ ID NO: 1948105 - DNA, 15 bp, Homo sapiens
aatggttaatcaaag

SEQ ID NO: 1948106 - DNA, 15 bp, Homo sapiens
atggttaatcaaagt

SEQ ID NO: 1948107 - DNA, 15 bp, Homo sapiens
tggttaatcaaagtg

SEQ ID NO: 1948108 - DNA, 15 bp, Homo sapiens
ggttaatcaaagtgt

SEQ ID NO: 1948109 - DNA, 15 bp, Homo sapiens
gttaatcaaagtgtt

SEQ ID NO: 1948110 - DNA, 15 bp, Homo sapiens
ttaatcaaagtgttt

SEQ ID NO: 1948111 - DNA, 15 bp, Homo sapiens
taatcaaagtgtttt

SEQ ID NO: 1948112 - DNA, 15 bp, Homo sapiens
aatcaaagtgttttc

SEQ ID NO: 1948113 - DNA, 15 bp, Homo sapiens
atcaaagtgttttca

SEQ ID NO: 1948114 - DNA, 15 bp, Homo sapiens
tcaaagtgttttcat

SEQ ID NO: 1948115 - DNA, 15 bp, Homo sapiens
caaagtgttttcatg

SEQ ID NO: 1948116 - DNA, 15 bp, Homo sapiens
aaagtgttttcatgc

SEQ ID NO: 1948117 - DNA, 15 bp, Homo sapiens
aagtgttttcatgct

SEQ ID NO: 1948118 - DNA, 15 bp, Homo sapiens
agtgttttcatgctt

SEQ ID NO: 1948119 - DNA, 15 bp, Homo sapiens
gtgttttcatgcttg

SEQ ID NO: 1948120 - DNA, 15 bp, Homo sapiens
tgttttcatgcttgc

SEQ ID NO: 1948121 - DNA, 15 bp, Homo sapiens
gttttcatgcttgca

SEQ ID NO: 1948122 - DNA, 15 bp, Homo sapiens
ttttcatgcttgcaa

SEQ ID NO: 1948123 - DNA, 15 bp, Homo sapiens
tttcatgcttgcaaa

SEQ ID NO: 1948124 - DNA, 15 bp, Homo sapiens
ttcatgcttgcaaat

SEQ ID NO: 1948125 - DNA, 15 bp, Homo sapiens
tcatgcttgcaaatt

SEQ ID NO: 1948126 - DNA, 15 bp, Homo sapiens
catgcttgcaaattc

SEQ ID NO: 1948127 - DNA, 15 bp, Homo sapiens
atgcttgcaaattca

SEQ ID NO: 1948128 - DNA, 15 bp, Homo sapiens
tgcttgcaaattcat

SEQ ID NO: 1948129 - DNA, 15 bp, Homo sapiens
gcttgcaaattcatc

SEQ ID NO: 1948130 - DNA, 15 bp, Homo sapiens
cttgcaaattcatct

SEQ ID NO: 1948131 - DNA, 15 bp, Homo sapiens
ttgcaaattcatctt

SEQ ID NO: 1948132 - DNA, 15 bp, Homo sapiens
tgcaaattcatcttc

SEQ ID NO: 1948133 - DNA, 15 bp, Homo sapiens
gcaaattcatcttct

SEQ ID NO: 1948134 - DNA, 15 bp, Homo sapiens
caaattcatcttcta

SEQ ID NO: 1948135 - DNA, 15 bp, Homo sapiens
aaattcatcttctaa

SEQ ID NO: 1948136 - DNA, 15 bp, Homo sapiens
aattcatcttctaac

SEQ ID NO: 1948137 - DNA, 15 bp, Homo sapiens
attcatcttctaaca

SEQ ID NO: 1948138 - DNA, 15 bp, Homo sapiens
ttcatcttctaacag

SEQ ID NO: 1948139 - DNA, 15 bp, Homo sapiens
tcatcttctaacagc

SEQ ID NO: 1948140 - DNA, 15 bp, Homo sapiens
catcttctaacagct

SEQ ID NO: 1948141 - DNA, 15 bp, Homo sapiens
atcttctaacagctt

SEQ ID NO: 1948142 - DNA, 15 bp, Homo sapiens
tcttctaacagcttt

SEQ ID NO: 1948143 - DNA, 15 bp, Homo sapiens
cttctaacagctttt

SEQ ID NO: 1948144 - DNA, 15 bp, Homo sapiens
ttctaacagctttta

SEQ ID NO: 1948145 - DNA, 15 bp, Homo sapiens
tctaacagcttttat

SEQ ID NO: 1948146 - DNA, 15 bp, Homo sapiens
ctaacagcttttatc

SEQ ID NO: 1948147 - DNA, 15 bp, Homo sapiens
taacagcttttatca

SEQ ID NO: 1948148 - DNA, 15 bp, Homo sapiens
aacagcttttatcat

SEQ ID NO: 1948149 - DNA, 15 bp, Homo sapiens
acagcttttatcatc

SEQ ID NO: 1948150 - DNA, 15 bp, Homo sapiens
cagcttttatcatcg

SEQ ID NO: 1948151 - DNA, 15 bp, Homo sapiens
agcttttatcatcgt

SEQ ID NO: 1948152 - DNA, 15 bp, Homo sapiens
gcttttatcatcgtg

SEQ ID NO: 1948153 - DNA, 15 bp, Homo sapiens
cttttatcatcgtgg

SEQ ID NO: 1948154 - DNA, 15 bp, Homo sapiens
ttttatcatcgtggc

SEQ ID NO: 1948155 - DNA, 15 bp, Homo sapiens
tttatcatcgtggca

SEQ ID NO: 1948156 - DNA, 15 bp, Homo sapiens
ttatcatcgtggcat

SEQ ID NO: 1948157 - DNA, 15 bp, Homo sapiens
tatcatcgtggcatt

SEQ ID NO: 1948158 - DNA, 15 bp, Homo sapiens
atcatcgtggcatta

SEQ ID NO: 1948159 - DNA, 15 bp, Homo sapiens
tcatcgtggcattaa

SEQ ID NO: 1948160 - DNA, 15 bp, Homo sapiens
catcgtggcattaaa

SEQ ID NO: 1948161 - DNA, 15 bp, Homo sapiens
atcgtggcattaaag

SEQ ID NO: 1948162 - DNA, 15 bp, Homo sapiens
tcgtggcattaaagt

SEQ ID NO: 1948163 - DNA, 15 bp, Homo sapiens
cgtggcattaaagtt

SEQ ID NO: 1948164 - DNA, 15 bp, Homo sapiens
gtggcattaaagtta

SEQ ID NO: 1948165 - DNA, 15 bp, Homo sapiens
tggcattaaagttaa

SEQ ID NO: 1948166 - DNA, 15 bp, Homo sapiens
ggcattaaagttaag

SEQ ID NO: 1948167 - DNA, 15 bp, Homo sapiens
gcattaaagttaaga

SEQ ID NO: 1948168 - DNA, 15 bp, Homo sapiens
cattaaagttaagaa

SEQ ID NO: 1948169 - DNA, 15 bp, Homo sapiens
attaaagttaagaat

SEQ ID NO: 1948170 - DNA, 15 bp, Homo sapiens
ttaaagttaagaatt

SEQ ID NO: 1948171 - DNA, 15 bp, Homo sapiens
taaagttaagaattt

SEQ ID NO: 1948172 - DNA, 15 bp, Homo sapiens
aaagttaagaatttg

SEQ ID NO: 1948173 - DNA, 15 bp, Homo sapiens
aagttaagaatttga

SEQ ID NO: 1948174 - DNA, 15 bp, Homo sapiens
agttaagaatttgat

SEQ ID NO: 1948175 - DNA, 15 bp, Homo sapiens
gttaagaatttgatg

SEQ ID NO: 1948176 - DNA, 15 bp, Homo sapiens
aagaatttgatgtta

SEQ ID NO: 1948177 - DNA, 15 bp, Homo sapiens
agaatttgatgttat

SEQ ID NO: 1948178 - DNA, 15 bp, Homo sapiens
gaatttgatgttatt

SEQ ID NO: 1948179 - DNA, 15 bp, Homo sapiens
aatttgatgttatta

SEQ ID NO: 1948180 - DNA, 15 bp, Homo sapiens
atttgatgttattaa

SEQ ID NO: 1948181 - DNA, 15 bp, Homo sapiens
tttgatgttattaaa

SEQ ID NO: 1948182 - DNA, 15 bp, Homo sapiens
ttgatgttattaaat

SEQ ID NO: 1948183 - DNA, 15 bp, Homo sapiens
tgatgttattaaatc

SEQ ID NO: 1948184 - DNA, 15 bp, Homo sapiens
gatgttattaaatca

SEQ ID NO: 1948185 - DNA, 15 bp, Homo sapiens
atgttattaaatcac

SEQ ID NO: 1948186 - DNA, 15 bp, Homo sapiens
tgttattaaatcact

SEQ ID NO: 1948187 - DNA, 15 bp, Homo sapiens
gttattaaatcactt

SEQ ID NO: 1948188 - DNA, 15 bp, Homo sapiens
ttattaaatcacttt

SEQ ID NO: 1948189 - DNA, 15 bp, Homo sapiens
tattaaatcactttt

SEQ ID NO: 1948190 - DNA, 15 bp, Homo sapiens
attaaatcacttttc

SEQ ID NO: 1948191 - DNA, 15 bp, Homo sapiens
ttaaatcacttttca

SEQ ID NO: 1948192 - DNA, 15 bp, Homo sapiens
taaatcacttttcat

SEQ ID NO: 1948193 - DNA, 15 bp, Homo sapiens
aaatcacttttcatt

SEQ ID NO: 1948194 - DNA, 15 bp, Homo sapiens
aatcacttttcattt

SEQ ID NO: 1948195 - DNA, 15 bp, Homo sapiens
atcacttttcattta

SEQ ID NO: 1948196 - DNA, 15 bp, Homo sapiens
tcacttttcatttaa

SEQ ID NO: 1948197 - DNA, 15 bp, Homo sapiens
cacttttcatttaag

SEQ ID NO: 1948198 - DNA, 15 bp, Homo sapiens
acttttcatttaaga

SEQ ID NO: 1948199 - DNA, 15 bp, Homo sapiens
cttttcatttaagat

SEQ ID NO: 1948200 - DNA, 15 bp, Homo sapiens
ttttcatttaagata

SEQ ID NO: 1948201 - DNA, 15 bp, Homo sapiens
tttcatttaagatat

SEQ ID NO: 1948202 - DNA, 15 bp, Homo sapiens
ttcatttaagatatt

SEQ ID NO: 1948203 - DNA, 15 bp, Homo sapiens
tcatttaagatattt

SEQ ID NO: 1948204 - DNA, 15 bp, Homo sapiens
catttaagatatttt

SEQ ID NO: 1948205 - DNA, 15 bp, Homo sapiens
atttaagatatttta

SEQ ID NO: 1948206 - DNA, 15 bp, Homo sapiens
tttaagatattttat

SEQ ID NO: 1948207 - DNA, 15 bp, Homo sapiens
ttaagatattttatg

SEQ ID NO: 1948208 - DNA, 15 bp, Homo sapiens
taagatattttatgc

SEQ ID NO: 1948209 - DNA, 15 bp, Homo sapiens
aagatattttatgca

SEQ ID NO: 1948210 - DNA, 15 bp, Homo sapiens
agatattttatgcag

SEQ ID NO: 1948211 - DNA, 15 bp, Homo sapiens
gatattttatgcagc

SEQ ID NO: 1948212 - DNA, 15 bp, Homo sapiens
atattttatgcagcc

SEQ ID NO: 1948213 - DNA, 15 bp, Homo sapiens
tattttatgcagcct

SEQ ID NO: 1948214 - DNA, 15 bp, Homo sapiens
attttatgcagcctt

SEQ ID NO: 1948215 - DNA, 15 bp, Homo sapiens
ttttatgcagccttc

SEQ ID NO: 1948216 - DNA, 15 bp, Homo sapiens
tttatgcagccttca

SEQ ID NO: 1948217 - DNA, 15 bp, Homo sapiens
ttatgcagccttcaa

SEQ ID NO: 1948218 - DNA, 15 bp, Homo sapiens
tatgcagccttcaaa

SEQ ID NO: 1948219 - DNA, 15 bp, Homo sapiens
atgcagccttcaaac

SEQ ID NO: 1948220 - DNA, 15 bp, Homo sapiens
tgcagccttcaaaca

SEQ ID NO: 1948221 - DNA, 15 bp, Homo sapiens
gcagccttcaaacaa

SEQ ID NO: 1948222 - DNA, 15 bp, Homo sapiens
cagccttcaaacaaa

SEQ ID NO: 1948223 - DNA, 15 bp, Homo sapiens
agccttcaaacaaag

SEQ ID NO: 1948224 - DNA, 15 bp, Homo sapiens
gccttcaaacaaagc

SEQ ID NO: 1948225 - DNA, 15 bp, Homo sapiens
ccttcaaacaaagcc

SEQ ID NO: 1948226 - DNA, 15 bp, Homo sapiens
cttcaaacaaagccc

SEQ ID NO: 1948227 - DNA, 15 bp, Homo sapiens
ttcaaacaaagccct

SEQ ID NO: 1948228 - DNA, 15 bp, Homo sapiens
tcaaacaaagccctg

SEQ ID NO: 1948229 - DNA, 15 bp, Homo sapiens
caaacaaagccctga

SEQ ID NO: 1948230 - DNA, 15 bp, Homo sapiens
aaacaaagccctgag

SEQ ID NO: 1948231 - DNA, 15 bp, Homo sapiens
aacaaagccctgagg

SEQ ID NO: 1948232 - DNA, 15 bp, Homo sapiens
acaaagccctgaggg

SEQ ID NO: 1948233 - DNA, 15 bp, Homo sapiens
caaagccctgaggga

SEQ ID NO: 1948234 - DNA, 15 bp, Homo sapiens
aaagccctgagggaa

SEQ ID NO: 1948235 - DNA, 15 bp, Homo sapiens
aagccctgagggaat

SEQ ID NO: 1948236 - DNA, 15 bp, Homo sapiens
agccctgagggaatt

SEQ ID NO: 1948237 - DNA, 15 bp, Homo sapiens
gccctgagggaattt

SEQ ID NO: 1948238 - DNA, 15 bp, Homo sapiens
ccctgagggaatttg

SEQ ID NO: 1948239 - DNA, 15 bp, Homo sapiens
cctgagggaatttgg

SEQ ID NO: 1948240 - DNA, 15 bp, Homo sapiens
ctgagggaatttggg

SEQ ID NO: 1948241 - DNA, 15 bp, Homo sapiens
tgagggaatttggga

SEQ ID NO: 1948242 - DNA, 15 bp, Homo sapiens
gagggaatttgggag

SEQ ID NO: 1948243 - DNA, 15 bp, Homo sapiens
agggaatttgggagg

SEQ ID NO: 1948244 - DNA, 15 bp, Homo sapiens
gggaatttgggagga

SEQ ID NO: 1948245 - DNA, 15 bp, Homo sapiens
ggaatttgggaggaa

SEQ ID NO: 1948246 - DNA, 15 bp, Homo sapiens
gaatttgggaggaaa

SEQ ID NO: 1948247 - DNA, 15 bp, Homo sapiens
aatttgggaggaaaa

SEQ ID NO: 1948248 - DNA, 15 bp, Homo sapiens
atttgggaggaaaaa

SEQ ID NO: 1948249 - DNA, 15 bp, Homo sapiens
tttgggaggaaaaat

SEQ ID NO: 1948250 - DNA, 15 bp, Homo sapiens
ttgggaggaaaaata

SEQ ID NO: 1948251 - DNA, 15 bp, Homo sapiens
tgggaggaaaaatac

SEQ ID NO: 1948252 - DNA, 15 bp, Homo sapiens
gggaggaaaaataca

SEQ ID NO: 1948253 - DNA, 15 bp, Homo sapiens
ggaggaaaaatacaa

SEQ ID NO: 1948254 - DNA, 15 bp, Homo sapiens
gaggaaaaatacaag

SEQ ID NO: 1948255 - DNA, 15 bp, Homo sapiens
aggaaaaatacaaga

SEQ ID NO: 1948256 - DNA, 15 bp, Homo sapiens
ggaaaaatacaagaa

SEQ ID NO: 1948257 - DNA, 15 bp, Homo sapiens
gaaaaatacaagaac

SEQ ID NO: 1948258 - DNA, 15 bp, Homo sapiens
aaaaatacaagaacc

SEQ ID NO: 1948259 - DNA, 15 bp, Homo sapiens
aaaatacaagaaccg

SEQ ID NO: 1948260 - DNA, 15 bp, Homo sapiens
aaatacaagaaccgt

SEQ ID NO: 1948261 - DNA, 15 bp, Homo sapiens
aatacaagaaccgta

SEQ ID NO: 1948262 - DNA, 15 bp, Homo sapiens
atacaagaaccgtag

SEQ ID NO: 1948263 - DNA, 15 bp, Homo sapiens
tacaagaaccgtagg

SEQ ID NO: 1948264 - DNA, 15 bp, Homo sapiens
acaagaaccgtagga

SEQ ID NO: 1948265 - DNA, 15 bp, Homo sapiens
caagaaccgtaggac

SEQ ID NO: 1948266 - DNA, 15 bp, Homo sapiens
aagaaccgtaggaca

SEQ ID NO: 1948267 - DNA, 15 bp, Homo sapiens
agaaccgtaggacaa

SEQ ID NO: 1948268 - DNA, 15 bp, Homo sapiens
gaaccgtaggacaag

SEQ ID NO: 1948269 - DNA, 15 bp, Homo sapiens
aaccgtaggacaagt

SEQ ID NO: 1948270 - DNA, 15 bp, Homo sapiens
accgtaggacaagta

SEQ ID NO: 1948271 - DNA, 15 bp, Homo sapiens
ccgtaggacaagtag

SEQ ID NO: 1948272 - DNA, 15 bp, Homo sapiens
cgtaggacaagtagg

SEQ ID NO: 1948273 - DNA, 15 bp, Homo sapiens
gtaggacaagtaggt

SEQ ID NO: 1948274 - DNA, 15 bp, Homo sapiens
taggacaagtaggtc

SEQ ID NO: 1948275 - DNA, 15 bp, Homo sapiens
aggacaagtaggtca

SEQ ID NO: 1948276 - DNA, 15 bp, Homo sapiens
ggacaagtaggtcat

SEQ ID NO: 1948277 - DNA, 15 bp, Homo sapiens
gacaagtaggtcata

SEQ ID NO: 1948278 - DNA, 15 bp, Homo sapiens
acaagtaggtcatag

SEQ ID NO: 1948279 - DNA, 15 bp, Homo sapiens
caagtaggtcataga

SEQ ID NO: 1948280 - DNA, 15 bp, Homo sapiens
aagtaggtcatagag

SEQ ID NO: 1948281 - DNA, 15 bp, Homo sapiens
agtaggtcatagagt

SEQ ID NO: 1948282 - DNA, 15 bp, Homo sapiens
gtaggtcatagagtg

SEQ ID NO: 1948283 - DNA, 15 bp, Homo sapiens
taggtcatagagtgc

SEQ ID NO: 1948284 - DNA, 15 bp, Homo sapiens
aggtcatagagtgca

SEQ ID NO: 1948285 - DNA, 15 bp, Homo sapiens
ggtcatagagtgcag

SEQ ID NO: 1948286 - DNA, 15 bp, Homo sapiens
gtcatagagtgcagc

SEQ ID NO: 1948287 - DNA, 15 bp, Homo sapiens
tcatagagtgcagca

SEQ ID NO: 1948288 - DNA, 15 bp, Homo sapiens
catagagtgcagcat

SEQ ID NO: 1948289 - DNA, 15 bp, Homo sapiens
atagagtgcagcatc

SEQ ID NO: 1948290 - DNA, 15 bp, Homo sapiens
tagagtgcagcatca

SEQ ID NO: 1948291 - DNA, 15 bp, Homo sapiens
agagtgcagcatcat

SEQ ID NO: 1948292 - DNA, 15 bp, Homo sapiens
gagtgcagcatcatc

SEQ ID NO: 1948293 - DNA, 15 bp, Homo sapiens
agtgcagcatcatca

SEQ ID NO: 1948294 - DNA, 15 bp, Homo sapiens
gtgcagcatcatcag

SEQ ID NO: 1948295 - DNA, 15 bp, Homo sapiens
tgcagcatcatcaga

SEQ ID NO: 1948296 - DNA, 15 bp, Homo sapiens
gcagcatcatcagat

SEQ ID NO: 1948297 - DNA, 15 bp, Homo sapiens
cagcatcatcagatg

SEQ ID NO: 1948298 - DNA, 15 bp, Homo sapiens
agcatcatcagatgg

SEQ ID NO: 1948299 - DNA, 15 bp, Homo sapiens
gcatcatcagatggt

SEQ ID NO: 1948300 - DNA, 15 bp, Homo sapiens
catcatcagatggtg

SEQ ID NO: 1948301 - DNA, 15 bp, Homo sapiens
atcatcagatggtgg

SEQ ID NO: 1948302 - DNA, 15 bp, Homo sapiens
tcatcagatggtgga

SEQ ID NO: 1948303 - DNA, 15 bp, Homo sapiens
catcagatggtggaa

SEQ ID NO: 1948304 - DNA, 15 bp, Homo sapiens
atcagatggtggaat

SEQ ID NO: 1948305 - DNA, 15 bp, Homo sapiens
tcagatggtggaatg

SEQ ID NO: 1948306 - DNA, 15 bp, Homo sapiens
cagatggtggaatgc

SEQ ID NO: 1948307 - DNA, 15 bp, Homo sapiens
agatggtggaatgca

SEQ ID NO: 1948308 - DNA, 15 bp, Homo sapiens
gatggtggaatgcag

SEQ ID NO: 1948309 - DNA, 15 bp, Homo sapiens
atggtggaatgcagg

SEQ ID NO: 1948310 - DNA, 15 bp, Homo sapiens
tggtggaatgcaggg

SEQ ID NO: 1948311 - DNA, 15 bp, Homo sapiens
ggtggaatgcagggc

SEQ ID NO: 1948312 - DNA, 15 bp, Homo sapiens
gtggaatgcagggca

SEQ ID NO: 1948313 - DNA, 15 bp, Homo sapiens
tggaatgcagggcag

SEQ ID NO: 1948314 - DNA, 15 bp, Homo sapiens
ggaatgcagggcagg

SEQ ID NO: 1948315 - DNA, 15 bp, Homo sapiens
gaatgcagggcaggg

SEQ ID NO: 1948316 - DNA, 15 bp, Homo sapiens
aatgcagggcagggc

SEQ ID NO: 1948317 - DNA, 15 bp, Homo sapiens
atgcagggcagggct

SEQ ID NO: 1948318 - DNA, 15 bp, Homo sapiens
tgcagggcagggctg

SEQ ID NO: 1948319 - DNA, 15 bp, Homo sapiens
gcagggcagggctgt

SEQ ID NO: 1948320 - DNA, 15 bp, Homo sapiens
cagggcagggctgtg

SEQ ID NO: 1948321 - DNA, 15 bp, Homo sapiens
agggcagggctgtgc

SEQ ID NO: 1948322 - DNA, 15 bp, Homo sapiens
gggcagggctgtgcg

SEQ ID NO: 1948323 - DNA, 15 bp, Homo sapiens
ggcagggctgtgcgt

SEQ ID NO: 1948324 - DNA, 15 bp, Homo sapiens
gcagggctgtgcgtc

SEQ ID NO: 1948325 - DNA, 15 bp, Homo sapiens
cagggctgtgcgtca

SEQ ID NO: 1948326 - DNA, 15 bp, Homo sapiens
agggctgtgcgtcag

SEQ ID NO: 1948327 - DNA, 15 bp, Homo sapiens
gggctgtgcgtcagg

SEQ ID NO: 1948328 - DNA, 15 bp, Homo sapiens
ggctgtgcgtcagga

SEQ ID NO: 1948329 - DNA, 15 bp, Homo sapiens
gctgtgcgtcaggag

SEQ ID NO: 1948330 - DNA, 15 bp, Homo sapiens
ctgtgcgtcaggaga

SEQ ID NO: 1948331 - DNA, 15 bp, Homo sapiens
tgtgcgtcaggagac

SEQ ID NO: 1948332 - DNA, 15 bp, Homo sapiens
gtgcgtcaggagact

SEQ ID NO: 1948333 - DNA, 15 bp, Homo sapiens
tgcgtcaggagactc

SEQ ID NO: 1948334 - DNA, 15 bp, Homo sapiens
gcgtcaggagactcc

SEQ ID NO: 1948335 - DNA, 15 bp, Homo sapiens
cgtcaggagactcca

SEQ ID NO: 1948336 - DNA, 15 bp, Homo sapiens
gtcaggagactccac

SEQ ID NO: 1948337 - DNA, 15 bp, Homo sapiens
tcaggagactccact

SEQ ID NO: 1948338 - DNA, 15 bp, Homo sapiens
caggagactccactc

SEQ ID NO: 1948339 - DNA, 15 bp, Homo sapiens
aggagactccactcc

SEQ ID NO: 1948340 - DNA, 15 bp, Homo sapiens
ggagactccactcca

SEQ ID NO: 1948341 - DNA, 15 bp, Homo sapiens
gagactccactccat

SEQ ID NO: 1948342 - DNA, 15 bp, Homo sapiens
agactccactccatt

SEQ ID NO: 1948343 - DNA, 15 bp, Homo sapiens
gactccactccattt

SEQ ID NO: 1948344 - DNA, 15 bp, Homo sapiens
actccactccatttc

SEQ ID NO: 1948345 - DNA, 15 bp, Homo sapiens
ctccactccatttct

SEQ ID NO: 1948346 - DNA, 15 bp, Homo sapiens
tccactccatttcta

SEQ ID NO: 1948347 - DNA, 15 bp, Homo sapiens
ccactccatttctat

SEQ ID NO: 1948348 - DNA, 15 bp, Homo sapiens
cactccatttctatc

SEQ ID NO: 1948349 - DNA, 15 bp, Homo sapiens
actccatttctatcc

SEQ ID NO: 1948350 - DNA, 15 bp, Homo sapiens
ctccatttctatcca

SEQ ID NO: 1948351 - DNA, 15 bp, Homo sapiens
tccatttctatccat

SEQ ID NO: 1948352 - DNA, 15 bp, Homo sapiens
ccatttctatccatg

SEQ ID NO: 1948353 - DNA, 15 bp, Homo sapiens
catttctatccatgg

SEQ ID NO: 1948354 - DNA, 15 bp, Homo sapiens
atttctatccatggc

SEQ ID NO: 1948355 - DNA, 15 bp, Homo sapiens
tttctatccatggct

SEQ ID NO: 1948356 - DNA, 15 bp, Homo sapiens
ttctatccatggctc

SEQ ID NO: 1948357 - DNA, 15 bp, Homo sapiens
tctatccatggctct

SEQ ID NO: 1948358 - DNA, 15 bp, Homo sapiens
ctatccatggctctc

SEQ ID NO: 1948359 - DNA, 15 bp, Homo sapiens
tatccatggctctct

SEQ ID NO: 1948360 - DNA, 15 bp, Homo sapiens
atccatggctctctt

SEQ ID NO: 1948361 - DNA, 15 bp, Homo sapiens
tccatggctctcttc

SEQ ID NO: 1948362 - DNA, 15 bp, Homo sapiens
ccatggctctcttcg

SEQ ID NO: 1948363 - DNA, 15 bp, Homo sapiens
catggctctcttcgt

SEQ ID NO: 1948364 - DNA, 15 bp, Homo sapiens
atggctctcttcgtg

SEQ ID NO: 1948365 - DNA, 15 bp, Homo sapiens
tggctctcttcgtga

SEQ ID NO: 1948366 - DNA, 15 bp, Homo sapiens
ggctctcttcgtgac

SEQ ID NO: 1948367 - DNA, 15 bp, Homo sapiens
gctctcttcgtgact

SEQ ID NO: 1948368 - DNA, 15 bp, Homo sapiens
ctctcttcgtgactt

SEQ ID NO: 1948369 - DNA, 15 bp, Homo sapiens
tctcttcgtgactta

SEQ ID NO: 1948370 - DNA, 15 bp, Homo sapiens
ctcttcgtgacttag

SEQ ID NO: 1948371 - DNA, 15 bp, Homo sapiens
tcttcgtgacttagt

SEQ ID NO: 1948372 - DNA, 15 bp, Homo sapiens
cttcgtgacttagtg

SEQ ID NO: 1948373 - DNA, 15 bp, Homo sapiens
ttcgtgacttagtga

SEQ ID NO: 1948374 - DNA, 15 bp, Homo sapiens
tcgtgacttagtgat

SEQ ID NO: 1948375 - DNA, 15 bp, Homo sapiens
cgtgacttagtgatt

SEQ ID NO: 1948376 - DNA, 15 bp, Homo sapiens
gtgacttagtgattg

SEQ ID NO: 1948377 - DNA, 15 bp, Homo sapiens
tgacttagtgattga

SEQ ID NO: 1948378 - DNA, 15 bp, Homo sapiens
gacttagtgattgac

SEQ ID NO: 1948379 - DNA, 15 bp, Homo sapiens
acttagtgattgacc

SEQ ID NO: 1948380 - DNA, 15 bp, Homo sapiens
cttagtgattgacct

SEQ ID NO: 1948381 - DNA, 15 bp, Homo sapiens
ttagtgattgacctt

SEQ ID NO: 1948382 - DNA, 15 bp, Homo sapiens
tagtgattgaccttg

SEQ ID NO: 1948383 - DNA, 15 bp, Homo sapiens
agtgattgaccttgg

SEQ ID NO: 1948384 - DNA, 15 bp, Homo sapiens
gtgattgaccttggg

SEQ ID NO: 1948385 - DNA, 15 bp, Homo sapiens
tgattgaccttgggc

SEQ ID NO: 1948386 - DNA, 15 bp, Homo sapiens
gattgaccttgggct

SEQ ID NO: 1948387 - DNA, 15 bp, Homo sapiens
attgaccttgggcta

SEQ ID NO: 1948388 - DNA, 15 bp, Homo sapiens
ttgaccttgggctac

SEQ ID NO: 1948389 - DNA, 15 bp, Homo sapiens
tgaccttgggctact

SEQ ID NO: 1948390 - DNA, 15 bp, Homo sapiens
gaccttgggctactt

SEQ ID NO: 1948391 - DNA, 15 bp, Homo sapiens
accttgggctactta

SEQ ID NO: 1948392 - DNA, 15 bp, Homo sapiens
ccttgggctacttat

SEQ ID NO: 1948393 - DNA, 15 bp, Homo sapiens
cttgggctacttatc

SEQ ID NO: 1948394 - DNA, 15 bp, Homo sapiens
ttgggctacttatca

SEQ ID NO: 1948395 - DNA, 15 bp, Homo sapiens
tgggctacttatcaa

SEQ ID NO: 1948396 - DNA, 15 bp, Homo sapiens
gggctacttatcaaa

SEQ ID NO: 1948397 - DNA, 15 bp, Homo sapiens
ggctacttatcaaag

SEQ ID NO: 1948398 - DNA, 15 bp, Homo sapiens
gctacttatcaaaga

SEQ ID NO: 1948399 - DNA, 15 bp, Homo sapiens
ctacttatcaaagag

SEQ ID NO: 1948400 - DNA, 15 bp, Homo sapiens
tacttatcaaagagc

SEQ ID NO: 1948401 - DNA, 15 bp, Homo sapiens
acttatcaaagagct

SEQ ID NO: 1948402 - DNA, 15 bp, Homo sapiens
cttatcaaagagctc

SEQ ID NO: 1948403 - DNA, 15 bp, Homo sapiens
ttatcaaagagctct

SEQ ID NO: 1948404 - DNA, 15 bp, Homo sapiens
tatcaaagagctctt

SEQ ID NO: 1948405 - DNA, 15 bp, Homo sapiens
atcaaagagctcttg

SEQ ID NO: 1948406 - DNA, 15 bp, Homo sapiens
tcaaagagctcttgc

SEQ ID NO: 1948407 - DNA, 15 bp, Homo sapiens
caaagagctcttgcc

SEQ ID NO: 1948408 - DNA, 15 bp, Homo sapiens
aaagagctcttgcct

SEQ ID NO: 1948409 - DNA, 15 bp, Homo sapiens
aagagctcttgcctc

SEQ ID NO: 1948410 - DNA, 15 bp, Homo sapiens
agagctcttgcctca

SEQ ID NO: 1948411 - DNA, 15 bp, Homo sapiens
gagctcttgcctcag

SEQ ID NO: 1948412 - DNA, 15 bp, Homo sapiens
agctcttgcctcagt

SEQ ID NO: 1948413 - DNA, 15 bp, Homo sapiens
gctcttgcctcagtt

SEQ ID NO: 1948414 - DNA, 15 bp, Homo sapiens
ctcttgcctcagttt

SEQ ID NO: 1948415 - DNA, 15 bp, Homo sapiens
tcttgcctcagtttc

SEQ ID NO: 1948416 - DNA, 15 bp, Homo sapiens
cttgcctcagtttca

SEQ ID NO: 1948417 - DNA, 15 bp, Homo sapiens
ttgcctcagtttcat

SEQ ID NO: 1948418 - DNA, 15 bp, Homo sapiens
tgcctcagtttcatc

SEQ ID NO: 1948419 - DNA, 15 bp, Homo sapiens
gcctcagtttcatct

SEQ ID NO: 1948420 - DNA, 15 bp, Homo sapiens
cctcagtttcatctt

SEQ ID NO: 1948421 - DNA, 15 bp, Homo sapiens
ctcagtttcatctta

SEQ ID NO: 1948422 - DNA, 15 bp, Homo sapiens
tcagtttcatcttag

SEQ ID NO: 1948423 - DNA, 15 bp, Homo sapiens
cagtttcatcttaga

SEQ ID NO: 1948424 - DNA, 15 bp, Homo sapiens
gtttcatcttagata

SEQ ID NO: 1948425 - DNA, 15 bp, Homo sapiens
tttcatcttagataa

SEQ ID NO: 1948426 - DNA, 15 bp, Homo sapiens
ttcatcttagataaa

SEQ ID NO: 1948427 - DNA, 15 bp, Homo sapiens
tcatcttagataaaa

SEQ ID NO: 1948428 - DNA, 15 bp, Homo sapiens
catcttagataaaat

SEQ ID NO: 1948429 - DNA, 15 bp, Homo sapiens
atcttagataaaatg

SEQ ID NO: 1948430 - DNA, 15 bp, Homo sapiens
tcttagataaaatgg

SEQ ID NO: 1948431 - DNA, 15 bp, Homo sapiens
cttagataaaatggg

SEQ ID NO: 1948432 - DNA, 15 bp, Homo sapiens
ttagataaaatgggg

SEQ ID NO: 1948433 - DNA, 15 bp, Homo sapiens
tagataaaatggggc

SEQ ID NO: 1948434 - DNA, 15 bp, Homo sapiens
agataaaatggggct

SEQ ID NO: 1948435 - DNA, 15 bp, Homo sapiens
gataaaatggggcta

SEQ ID NO: 1948436 - DNA, 15 bp, Homo sapiens
ataaaatggggctag

SEQ ID NO: 1948437 - DNA, 15 bp, Homo sapiens
taaaatggggctaga

SEQ ID NO: 1948438 - DNA, 15 bp, Homo sapiens
aaaatggggctagaa

SEQ ID NO: 1948439 - DNA, 15 bp, Homo sapiens
aaatggggctagaag

SEQ ID NO: 1948440 - DNA, 15 bp, Homo sapiens
aatggggctagaagt

SEQ ID NO: 1948441 - DNA, 15 bp, Homo sapiens
atggggctagaagtc

SEQ ID NO: 1948442 - DNA, 15 bp, Homo sapiens
tggggctagaagtca

SEQ ID NO: 1948443 - DNA, 15 bp, Homo sapiens
ggggctagaagtcac

SEQ ID NO: 1948444 - DNA, 15 bp, Homo sapiens
gggctagaagtcacc

SEQ ID NO: 1948445 - DNA, 15 bp, Homo sapiens
ggctagaagtcaccg

SEQ ID NO: 1948446 - DNA, 15 bp, Homo sapiens
gctagaagtcaccgg

SEQ ID NO: 1948447 - DNA, 15 bp, Homo sapiens
ctagaagtcaccgga

SEQ ID NO: 1948448 - DNA, 15 bp, Homo sapiens
tagaagtcaccggaa

SEQ ID NO: 1948449 - DNA, 15 bp, Homo sapiens
agaagtcaccggaaa

SEQ ID NO: 1948450 - DNA, 15 bp, Homo sapiens
gaagtcaccggaaac

SEQ ID NO: 1948451 - DNA, 15 bp, Homo sapiens
aagtcaccggaaaca

SEQ ID NO: 1948452 - DNA, 15 bp, Homo sapiens
agtcaccggaaacac

SEQ ID NO: 1948453 - DNA, 15 bp, Homo sapiens
gtcaccggaaacaca

SEQ ID NO: 1948454 - DNA, 15 bp, Homo sapiens
tcaccggaaacacat

SEQ ID NO: 1948455 - DNA, 15 bp, Homo sapiens
caccggaaacacatg

SEQ ID NO: 1948456 - DNA, 15 bp, Homo sapiens
accggaaacacatgt

SEQ ID NO: 1948457 - DNA, 15 bp, Homo sapiens
ccggaaacacatgtc

SEQ ID NO: 1948458 - DNA, 15 bp, Homo sapiens
cggaaacacatgtca

SEQ ID NO: 1948459 - DNA, 15 bp, Homo sapiens
ggaaacacatgtcaa

SEQ ID NO: 1948460 - DNA, 15 bp, Homo sapiens
gaaacacatgtcaaa

SEQ ID NO: 1948461 - DNA, 15 bp, Homo sapiens
aaacacatgtcaaat

SEQ ID NO: 1948462 - DNA, 15 bp, Homo sapiens
aacacatgtcaaatg

SEQ ID NO: 1948463 - DNA, 15 bp, Homo sapiens
acacatgtcaaatgt

SEQ ID NO: 1948464 - DNA, 15 bp, Homo sapiens
cacatgtcaaatgta

SEQ ID NO: 1948465 - DNA, 15 bp, Homo sapiens
acatgtcaaatgtat

SEQ ID NO: 1948466 - DNA, 15 bp, Homo sapiens
catgtcaaatgtatt

SEQ ID NO: 1948467 - DNA, 15 bp, Homo sapiens
atgtcaaatgtattg

SEQ ID NO: 1948468 - DNA, 15 bp, Homo sapiens
tgtcaaatgtattgt

SEQ ID NO: 1948469 - DNA, 15 bp, Homo sapiens
gtcaaatgtattgtg

SEQ ID NO: 1948470 - DNA, 15 bp, Homo sapiens
tcaaatgtattgtgg

SEQ ID NO: 1948471 - DNA, 15 bp, Homo sapiens
caaatgtattgtgga

SEQ ID NO: 1948472 - DNA, 15 bp, Homo sapiens
aaatgtattgtggag

SEQ ID NO: 1948473 - DNA, 15 bp, Homo sapiens
aatgtattgtggagt

SEQ ID NO: 1948474 - DNA, 15 bp, Homo sapiens
atgtattgtggagtt

SEQ ID NO: 1948475 - DNA, 15 bp, Homo sapiens
tgtattgtggagttc

SEQ ID NO: 1948476 - DNA, 15 bp, Homo sapiens
gtattgtggagttca

SEQ ID NO: 1948477 - DNA, 15 bp, Homo sapiens
tattgtggagttcac

SEQ ID NO: 1948478 - DNA, 15 bp, Homo sapiens
attgtggagttcaca

SEQ ID NO: 1948479 - DNA, 15 bp, Homo sapiens
ttgtggagttcacag

SEQ ID NO: 1948480 - DNA, 15 bp, Homo sapiens
tgtggagttcacaga

SEQ ID NO: 1948481 - DNA, 15 bp, Homo sapiens
gtggagttcacagac

SEQ ID NO: 1948482 - DNA, 15 bp, Homo sapiens
tggagttcacagact

SEQ ID NO: 1948483 - DNA, 15 bp, Homo sapiens
ggagttcacagactc

SEQ ID NO: 1948484 - DNA, 15 bp, Homo sapiens
gagttcacagactca

SEQ ID NO: 1948485 - DNA, 15 bp, Homo sapiens
agttcacagactcat

SEQ ID NO: 1948486 - DNA, 15 bp, Homo sapiens
gttcacagactcata

SEQ ID NO: 1948487 - DNA, 15 bp, Homo sapiens
ttcacagactcatag

SEQ ID NO: 1948488 - DNA, 15 bp, Homo sapiens
tcacagactcataga

SEQ ID NO: 1948489 - DNA, 15 bp, Homo sapiens
cacagactcatagac

SEQ ID NO: 1948490 - DNA, 15 bp, Homo sapiens
acagactcatagact

SEQ ID NO: 1948491 - DNA, 15 bp, Homo sapiens
cagactcatagactg

SEQ ID NO: 1948492 - DNA, 15 bp, Homo sapiens
agactcatagactgt

SEQ ID NO: 1948493 - DNA, 15 bp, Homo sapiens
gactcatagactgtc

SEQ ID NO: 1948494 - DNA, 15 bp, Homo sapiens
actcatagactgtca

SEQ ID NO: 1948495 - DNA, 15 bp, Homo sapiens
ctcatagactgtcaa

SEQ ID NO: 1948496 - DNA, 15 bp, Homo sapiens
tcatagactgtcaaa

SEQ ID NO: 1948497 - DNA, 15 bp, Homo sapiens
catagactgtcaaat

SEQ ID NO: 1948498 - DNA, 15 bp, Homo sapiens
atagactgtcaaatc

SEQ ID NO: 1948499 - DNA, 15 bp, Homo sapiens
tagactgtcaaatct

SEQ ID NO: 1948500 - DNA, 15 bp, Homo sapiens
agactgtcaaatctg

SEQ ID NO: 1948501 - DNA, 15 bp, Homo sapiens
gactgtcaaatctgg

SEQ ID NO: 1948502 - DNA, 15 bp, Homo sapiens
actgtcaaatctggg

SEQ ID NO: 1948503 - DNA, 15 bp, Homo sapiens
ctgtcaaatctggga

SEQ ID NO: 1948504 - DNA, 15 bp, Homo sapiens
tgtcaaatctgggag

SEQ ID NO: 1948505 - DNA, 15 bp, Homo sapiens
gtcaaatctgggaga

SEQ ID NO: 1948506 - DNA, 15 bp, Homo sapiens
tcaaatctgggagac

SEQ ID NO: 1948507 - DNA, 15 bp, Homo sapiens
caaatctgggagaca

SEQ ID NO: 1948508 - DNA, 15 bp, Homo sapiens
aaatctgggagacac

SEQ ID NO: 1948509 - DNA, 15 bp, Homo sapiens
aatctgggagacact

SEQ ID NO: 1948510 - DNA, 15 bp, Homo sapiens
atctgggagacactt

SEQ ID NO: 1948511 - DNA, 15 bp, Homo sapiens
tctgggagacacttt

SEQ ID NO: 1948512 - DNA, 15 bp, Homo sapiens
ctgggagacactttt

SEQ ID NO: 1948513 - DNA, 15 bp, Homo sapiens
tgggagacacttttc

SEQ ID NO: 1948514 - DNA, 15 bp, Homo sapiens
gggagacacttttca

SEQ ID NO: 1948515 - DNA, 15 bp, Homo sapiens
ggagacacttttcat

SEQ ID NO: 1948516 - DNA, 15 bp, Homo sapiens
gagacacttttcatt

SEQ ID NO: 1948517 - DNA, 15 bp, Homo sapiens
agacacttttcattc

SEQ ID NO: 1948518 - DNA, 15 bp, Homo sapiens
gacacttttcattca

SEQ ID NO: 1948519 - DNA, 15 bp, Homo sapiens
acacttttcattcat

SEQ ID NO: 1948520 - DNA, 15 bp, Homo sapiens
cacttttcattcatt

SEQ ID NO: 1948521 - DNA, 15 bp, Homo sapiens
acttttcattcattt

SEQ ID NO: 1948522 - DNA, 15 bp, Homo sapiens
cttttcattcatttg

SEQ ID NO: 1948523 - DNA, 15 bp, Homo sapiens
ttttcattcatttgc

SEQ ID NO: 1948524 - DNA, 15 bp, Homo sapiens
tttcattcatttgct

SEQ ID NO: 1948525 - DNA, 15 bp, Homo sapiens
ttcattcatttgctg

SEQ ID NO: 1948526 - DNA, 15 bp, Homo sapiens
tcattcatttgctgc

SEQ ID NO: 1948527 - DNA, 15 bp, Homo sapiens
cattcatttgctgca

SEQ ID NO: 1948528 - DNA, 15 bp, Homo sapiens
attcatttgctgcaa

SEQ ID NO: 1948529 - DNA, 15 bp, Homo sapiens
ttcatttgctgcaac

SEQ ID NO: 1948530 - DNA, 15 bp, Homo sapiens
tcatttgctgcaacc

SEQ ID NO: 1948531 - DNA, 15 bp, Homo sapiens
catttgctgcaaccc

SEQ ID NO: 1948532 - DNA, 15 bp, Homo sapiens
atttgctgcaaccca

SEQ ID NO: 1948533 - DNA, 15 bp, Homo sapiens
tttgctgcaacccaa

SEQ ID NO: 1948534 - DNA, 15 bp, Homo sapiens
ttgctgcaacccaaa

SEQ ID NO: 1948535 - DNA, 15 bp, Homo sapiens
tgctgcaacccaaaa

SEQ ID NO: 1948536 - DNA, 15 bp, Homo sapiens
gctgcaacccaaaat

SEQ ID NO: 1948537 - DNA, 15 bp, Homo sapiens
ctgcaacccaaaatg

SEQ ID NO: 1948538 - DNA, 15 bp, Homo sapiens
tgcaacccaaaatga

SEQ ID NO: 1948539 - DNA, 15 bp, Homo sapiens
gcaacccaaaatgaa

SEQ ID NO: 1948540 - DNA, 15 bp, Homo sapiens
caacccaaaatgaat

SEQ ID NO: 1948541 - DNA, 15 bp, Homo sapiens
aacccaaaatgaatc

SEQ ID NO: 1948542 - DNA, 15 bp, Homo sapiens
acccaaaatgaatcc

SEQ ID NO: 1948543 - DNA, 15 bp, Homo sapiens
cccaaaatgaatccc

SEQ ID NO: 1948544 - DNA, 15 bp, Homo sapiens
ccaaaatgaatcccc

SEQ ID NO: 1948545 - DNA, 15 bp, Homo sapiens
caaaatgaatcccca

SEQ ID NO: 1948546 - DNA, 15 bp, Homo sapiens
aaaatgaatccccac

SEQ ID NO: 1948547 - DNA, 15 bp, Homo sapiens
aaatgaatccccacc

SEQ ID NO: 1948548 - DNA, 15 bp, Homo sapiens
aatgaatccccacca

SEQ ID NO: 1948549 - DNA, 15 bp, Homo sapiens
atgaatccccaccac

SEQ ID NO: 1948550 - DNA, 15 bp, Homo sapiens
tgaatccccaccaca

SEQ ID NO: 1948551 - DNA, 15 bp, Homo sapiens
gaatccccaccacat

SEQ ID NO: 1948552 - DNA, 15 bp, Homo sapiens
aatccccaccacata

SEQ ID NO: 1948553 - DNA, 15 bp, Homo sapiens
atccccaccacataa

SEQ ID NO: 1948554 - DNA, 15 bp, Homo sapiens
tccccaccacataat

SEQ ID NO: 1948555 - DNA, 15 bp, Homo sapiens
ccccaccacataatt

SEQ ID NO: 1948556 - DNA, 15 bp, Homo sapiens
cccaccacataattt

SEQ ID NO: 1948557 - DNA, 15 bp, Homo sapiens
ccaccacataatttt

SEQ ID NO: 1948558 - DNA, 15 bp, Homo sapiens
caccacataattttt

SEQ ID NO: 1948559 - DNA, 15 bp, Homo sapiens
accacataatttttt

SEQ ID NO: 1948560 - DNA, 15 bp, Homo sapiens
ccacataattttttg

SEQ ID NO: 1948561 - DNA, 15 bp, Homo sapiens
cacataattttttga

SEQ ID NO: 1948562 - DNA, 15 bp, Homo sapiens
acataattttttgaa

SEQ ID NO: 1948563 - DNA, 15 bp, Homo sapiens
cataattttttgaag

SEQ ID NO: 1948564 - DNA, 15 bp, Homo sapiens
ataattttttgaagt

SEQ ID NO: 1948565 - DNA, 15 bp, Homo sapiens
taattttttgaagtg

SEQ ID NO: 1948566 - DNA, 15 bp, Homo sapiens
aattttttgaagtgt

SEQ ID NO: 1948567 - DNA, 15 bp, Homo sapiens
attttttgaagtgtt

SEQ ID NO: 1948568 - DNA, 15 bp, Homo sapiens
ttttttgaagtgttt

SEQ ID NO: 1948569 - DNA, 15 bp, Homo sapiens
tttttgaagtgtttt

SEQ ID NO: 1948570 - DNA, 15 bp, Homo sapiens
ttttgaagtgttttc

SEQ ID NO: 1948571 - DNA, 15 bp, Homo sapiens
tttgaagtgttttct

SEQ ID NO: 1948572 - DNA, 15 bp, Homo sapiens
ttgaagtgttttctg

SEQ ID NO: 1948573 - DNA, 15 bp, Homo sapiens
tgaagtgttttctgt

SEQ ID NO: 1948574 - DNA, 15 bp, Homo sapiens
gaagtgttttctgtt

SEQ ID NO: 1948575 - DNA, 15 bp, Homo sapiens
aagtgttttctgttc

SEQ ID NO: 1948576 - DNA, 15 bp, Homo sapiens
agtgttttctgttct

SEQ ID NO: 1948577 - DNA, 15 bp, Homo sapiens
gtgttttctgttctc

SEQ ID NO: 1948578 - DNA, 15 bp, Homo sapiens
tgttttctgttctct

SEQ ID NO: 1948579 - DNA, 15 bp, Homo sapiens
gttttctgttctcta

SEQ ID NO: 1948580 - DNA, 15 bp, Homo sapiens
ttttctgttctctac

SEQ ID NO: 1948581 - DNA, 15 bp, Homo sapiens
tttctgttctctact

SEQ ID NO: 1948582 - DNA, 15 bp, Homo sapiens
ttctgttctctactt

SEQ ID NO: 1948583 - DNA, 15 bp, Homo sapiens
tctgttctctacttg

SEQ ID NO: 1948584 - DNA, 15 bp, Homo sapiens
ctgttctctacttga

SEQ ID NO: 1948585 - DNA, 15 bp, Homo sapiens
tgttctctacttgaa

SEQ ID NO: 1948586 - DNA, 15 bp, Homo sapiens
gttctctacttgaac

SEQ ID NO: 1948587 - DNA, 15 bp, Homo sapiens
ttctctacttgaacg

SEQ ID NO: 1948588 - DNA, 15 bp, Homo sapiens
tctctacttgaacga

SEQ ID NO: 1948589 - DNA, 15 bp, Homo sapiens
ctctacttgaacgac

SEQ ID NO: 1948590 - DNA, 15 bp, Homo sapiens
tctacttgaacgact

SEQ ID NO: 1948591 - DNA, 15 bp, Homo sapiens
ctacttgaacgactc

SEQ ID NO: 1948592 - DNA, 15 bp, Homo sapiens
tacttgaacgactct

SEQ ID NO: 1948593 - DNA, 15 bp, Homo sapiens
acttgaacgactctt

SEQ ID NO: 1948594 - DNA, 15 bp, Homo sapiens
cttgaacgactcttg

SEQ ID NO: 1948595 - DNA, 15 bp, Homo sapiens
ttgaacgactcttgt

SEQ ID NO: 1948596 - DNA, 15 bp, Homo sapiens
tgaacgactcttgtg

SEQ ID NO: 1948597 - DNA, 15 bp, Homo sapiens
gaacgactcttgtga

SEQ ID NO: 1948598 - DNA, 15 bp, Homo sapiens
aacgactcttgtgac

SEQ ID NO: 1948599 - DNA, 15 bp, Homo sapiens
acgactcttgtgaca

SEQ ID NO: 1948600 - DNA, 15 bp, Homo sapiens
cgactcttgtgacag

SEQ ID NO: 1948601 - DNA, 15 bp, Homo sapiens
gactcttgtgacagt

SEQ ID NO: 1948602 - DNA, 15 bp, Homo sapiens
actcttgtgacagtg

SEQ ID NO: 1948603 - DNA, 15 bp, Homo sapiens
ctcttgtgacagtgg

SEQ ID NO: 1948604 - DNA, 15 bp, Homo sapiens
tcttgtgacagtgga

SEQ ID NO: 1948605 - DNA, 15 bp, Homo sapiens
cttgtgacagtggac

SEQ ID NO: 1948606 - DNA, 15 bp, Homo sapiens
ttgtgacagtggaca

SEQ ID NO: 1948607 - DNA, 15 bp, Homo sapiens
tgtgacagtggacat

SEQ ID NO: 1948608 - DNA, 15 bp, Homo sapiens
gtgacagtggacatc

SEQ ID NO: 1948609 - DNA, 15 bp, Homo sapiens
tgacagtggacatca

SEQ ID NO: 1948610 - DNA, 15 bp, Homo sapiens
gacagtggacatcac

SEQ ID NO: 1948611 - DNA, 15 bp, Homo sapiens
acagtggacatcacc

SEQ ID NO: 1948612 - DNA, 15 bp, Homo sapiens
cagtggacatcacct

SEQ ID NO: 1948613 - DNA, 15 bp, Homo sapiens
agtggacatcacctc

SEQ ID NO: 1948614 - DNA, 15 bp, Homo sapiens
gtggacatcacctcc

SEQ ID NO: 1948615 - DNA, 15 bp, Homo sapiens
tggacatcacctcct

SEQ ID NO: 1948616 - DNA, 15 bp, Homo sapiens
ggacatcacctcctc

SEQ ID NO: 1948617 - DNA, 15 bp, Homo sapiens
gacatcacctcctcc

SEQ ID NO: 1948618 - DNA, 15 bp, Homo sapiens
acatcacctcctcct

SEQ ID NO: 1948619 - DNA, 15 bp, Homo sapiens
catcacctcctcctg

SEQ ID NO: 1948620 - DNA, 15 bp, Homo sapiens
atcacctcctcctga

SEQ ID NO: 1948621 - DNA, 15 bp, Homo sapiens
tcacctcctcctgaa

SEQ ID NO: 1948622 - DNA, 15 bp, Homo sapiens
cacctcctcctgaag

SEQ ID NO: 1948623 - DNA, 15 bp, Homo sapiens
acctcctcctgaaga

SEQ ID NO: 1948624 - DNA, 15 bp, Homo sapiens
cctcctcctgaagaa

SEQ ID NO: 1948625 - DNA, 15 bp, Homo sapiens
ctcctcctgaagaaa

SEQ ID NO: 1948626 - DNA, 15 bp, Homo sapiens
tcctcctgaagaaac

SEQ ID NO: 1948627 - DNA, 15 bp, Homo sapiens
cctcctgaagaaacc

SEQ ID NO: 1948628 - DNA, 15 bp, Homo sapiens
ctcctgaagaaaccc

SEQ ID NO: 1948629 - DNA, 15 bp, Homo sapiens
tcctgaagaaaccca

SEQ ID NO: 1948630 - DNA, 15 bp, Homo sapiens
cctgaagaaacccac

SEQ ID NO: 1948631 - DNA, 15 bp, Homo sapiens
ctgaagaaacccact

SEQ ID NO: 1948632 - DNA, 15 bp, Homo sapiens
tgaagaaacccactc

SEQ ID NO: 1948633 - DNA, 15 bp, Homo sapiens
gaagaaacccactcc

SEQ ID NO: 1948634 - DNA, 15 bp, Homo sapiens
aagaaacccactcca

SEQ ID NO: 1948635 - DNA, 15 bp, Homo sapiens
agaaacccactccat

SEQ ID NO: 1948636 - DNA, 15 bp, Homo sapiens
gaaacccactccatt

SEQ ID NO: 1948637 - DNA, 15 bp, Homo sapiens
aaacccactccattt

SEQ ID NO: 1948638 - DNA, 15 bp, Homo sapiens
aacccactccatttt

SEQ ID NO: 1948639 - DNA, 15 bp, Homo sapiens
acccactccattttt

SEQ ID NO: 1948640 - DNA, 15 bp, Homo sapiens
cccactccattttta

SEQ ID NO: 1948641 - DNA, 15 bp, Homo sapiens
ccactccatttttaa

SEQ ID NO: 1948642 - DNA, 15 bp, Homo sapiens
cactccatttttaaa

SEQ ID NO: 1948643 - DNA, 15 bp, Homo sapiens
actccatttttaaac

SEQ ID NO: 1948644 - DNA, 15 bp, Homo sapiens
ctccatttttaaacg

SEQ ID NO: 1948645 - DNA, 15 bp, Homo sapiens
tccatttttaaacgt

SEQ ID NO: 1948646 - DNA, 15 bp, Homo sapiens
ccatttttaaacgtt

SEQ ID NO: 1948647 - DNA, 15 bp, Homo sapiens
catttttaaacgttt

SEQ ID NO: 1948648 - DNA, 15 bp, Homo sapiens
atttttaaacgtttt

SEQ ID NO: 1948649 - DNA, 15 bp, Homo sapiens
tttttaaacgttttt

SEQ ID NO: 1948650 - DNA, 15 bp, Homo sapiens
ttttaaacgttttta

SEQ ID NO: 1948651 - DNA, 15 bp, Homo sapiens
tttaaacgtttttag

SEQ ID NO: 1948652 - DNA, 15 bp, Homo sapiens
ttaaacgtttttagt

SEQ ID NO: 1948653 - DNA, 15 bp, Homo sapiens
taaacgtttttagtt

SEQ ID NO: 1948654 - DNA, 15 bp, Homo sapiens
aaacgtttttagttg

SEQ ID NO: 1948655 - DNA, 15 bp, Homo sapiens
aacgtttttagttgt

SEQ ID NO: 1948656 - DNA, 15 bp, Homo sapiens
acgtttttagttgtc

SEQ ID NO: 1948657 - DNA, 15 bp, Homo sapiens
cgtttttagttgtca

SEQ ID NO: 1948658 - DNA, 15 bp, Homo sapiens
gtttttagttgtcaa

SEQ ID NO: 1948659 - DNA, 15 bp, Homo sapiens
tttttagttgtcaag

SEQ ID NO: 1948660 - DNA, 15 bp, Homo sapiens
ttttagttgtcaaga

SEQ ID NO: 1948661 - DNA, 15 bp, Homo sapiens
tttagttgtcaagaa

SEQ ID NO: 1948662 - DNA, 15 bp, Homo sapiens
ttagttgtcaagaaa

SEQ ID NO: 1948663 - DNA, 15 bp, Homo sapiens
tagttgtcaagaaat

SEQ ID NO: 1948664 - DNA, 15 bp, Homo sapiens
agttgtcaagaaatt

SEQ ID NO: 1948665 - DNA, 15 bp, Homo sapiens
gttgtcaagaaatta

SEQ ID NO: 1948666 - DNA, 15 bp, Homo sapiens
ttgtcaagaaattaa

SEQ ID NO: 1948667 - DNA, 15 bp, Homo sapiens
tgtcaagaaattaat

SEQ ID NO: 1948668 - DNA, 15 bp, Homo sapiens
gtcaagaaattaatc

SEQ ID NO: 1948669 - DNA, 15 bp, Homo sapiens
tcaagaaattaatcc

SEQ ID NO: 1948670 - DNA, 15 bp, Homo sapiens
caagaaattaatcct

SEQ ID NO: 1948671 - DNA, 15 bp, Homo sapiens
aagaaattaatcctg

SEQ ID NO: 1948672 - DNA, 15 bp, Homo sapiens
agaaattaatcctgg

SEQ ID NO: 1948673 - DNA, 15 bp, Homo sapiens
gaaattaatcctggg

SEQ ID NO: 1948674 - DNA, 15 bp, Homo sapiens
aaattaatcctggga

SEQ ID NO: 1948675 - DNA, 15 bp, Homo sapiens
aattaatcctgggaa

SEQ ID NO: 1948676 - DNA, 15 bp, Homo sapiens
attaatcctgggaaa

SEQ ID NO: 1948677 - DNA, 15 bp, Homo sapiens
ttaatcctgggaaat

SEQ ID NO: 1948678 - DNA, 15 bp, Homo sapiens
taatcctgggaaata

SEQ ID NO: 1948679 - DNA, 15 bp, Homo sapiens
aatcctgggaaatac

SEQ ID NO: 1948680 - DNA, 15 bp, Homo sapiens
atcctgggaaatacc

SEQ ID NO: 1948681 - DNA, 15 bp, Homo sapiens
tcctgggaaatacct

SEQ ID NO: 1948682 - DNA, 15 bp, Homo sapiens
cctgggaaataccta

SEQ ID NO: 1948683 - DNA, 15 bp, Homo sapiens
ctgggaaatacctaa

SEQ ID NO: 1948684 - DNA, 15 bp, Homo sapiens
tgggaaatacctaaa

SEQ ID NO: 1948685 - DNA, 15 bp, Homo sapiens
gggaaatacctaaaa

SEQ ID NO: 1948686 - DNA, 15 bp, Homo sapiens
ggaaatacctaaaat

SEQ ID NO: 1948687 - DNA, 15 bp, Homo sapiens
gaaatacctaaaata

SEQ ID NO: 1948688 - DNA, 15 bp, Homo sapiens
aaatacctaaaatag

SEQ ID NO: 1948689 - DNA, 15 bp, Homo sapiens
aatacctaaaatagg

SEQ ID NO: 1948690 - DNA, 15 bp, Homo sapiens
atacctaaaataggc

SEQ ID NO: 1948691 - DNA, 15 bp, Homo sapiens
tacctaaaataggca

SEQ ID NO: 1948692 - DNA, 15 bp, Homo sapiens
acctaaaataggcaa

SEQ ID NO: 1948693 - DNA, 15 bp, Homo sapiens
cctaaaataggcaaa

SEQ ID NO: 1948694 - DNA, 15 bp, Homo sapiens
ctaaaataggcaaat

SEQ ID NO: 1948695 - DNA, 15 bp, Homo sapiens
taaaataggcaaatt

SEQ ID NO: 1948696 - DNA, 15 bp, Homo sapiens
aaaataggcaaattc

SEQ ID NO: 1948697 - DNA, 15 bp, Homo sapiens
aaataggcaaattca

SEQ ID NO: 1948698 - DNA, 15 bp, Homo sapiens
aataggcaaattcat

SEQ ID NO: 1948699 - DNA, 15 bp, Homo sapiens
ataggcaaattcata

SEQ ID NO: 1948700 - DNA, 15 bp, Homo sapiens
taggcaaattcatag

SEQ ID NO: 1948701 - DNA, 15 bp, Homo sapiens
aggcaaattcataga

SEQ ID NO: 1948702 - DNA, 15 bp, Homo sapiens
ggcaaattcatagag

SEQ ID NO: 1948703 - DNA, 15 bp, Homo sapiens
gcaaattcatagaga

SEQ ID NO: 1948704 - DNA, 15 bp, Homo sapiens
caaattcatagagac

SEQ ID NO: 1948705 - DNA, 15 bp, Homo sapiens
aaattcatagagaca

SEQ ID NO: 1948706 - DNA, 15 bp, Homo sapiens
aattcatagagacag

SEQ ID NO: 1948707 - DNA, 15 bp, Homo sapiens
attcatagagacaga

SEQ ID NO: 1948708 - DNA, 15 bp, Homo sapiens
ttcatagagacagaa

SEQ ID NO: 1948709 - DNA, 15 bp, Homo sapiens
tcatagagacagaaa

SEQ ID NO: 1948710 - DNA, 15 bp, Homo sapiens
catagagacagaaag

SEQ ID NO: 1948711 - DNA, 15 bp, Homo sapiens
atagagacagaaagt

SEQ ID NO: 1948712 - DNA, 15 bp, Homo sapiens
agagacagaaagtat

SEQ ID NO: 1948713 - DNA, 15 bp, Homo sapiens
gagacagaaagtata

SEQ ID NO: 1948714 - DNA, 15 bp, Homo sapiens
agacagaaagtatat

SEQ ID NO: 1948715 - DNA, 15 bp, Homo sapiens
gacagaaagtatatt

SEQ ID NO: 1948716 - DNA, 15 bp, Homo sapiens
acagaaagtatatta

SEQ ID NO: 1948717 - DNA, 15 bp, Homo sapiens
cagaaagtatattaa

SEQ ID NO: 1948718 - DNA, 15 bp, Homo sapiens
agaaagtatattaag

SEQ ID NO: 1948719 - DNA, 15 bp, Homo sapiens
gaaagtatattaagt

SEQ ID NO: 1948720 - DNA, 15 bp, Homo sapiens
aaagtatattaagtt

SEQ ID NO: 1948721 - DNA, 15 bp, Homo sapiens
aagtatattaagttt

SEQ ID NO: 1948722 - DNA, 15 bp, Homo sapiens
agtatattaagttta

SEQ ID NO: 1948723 - DNA, 15 bp, Homo sapiens
gtatattaagtttat

SEQ ID NO: 1948724 - DNA, 15 bp, Homo sapiens
tatattaagtttatc

SEQ ID NO: 1948725 - DNA, 15 bp, Homo sapiens
atattaagtttatca

SEQ ID NO: 1948726 - DNA, 15 bp, Homo sapiens
tattaagtttatcag

SEQ ID NO: 1948727 - DNA, 15 bp, Homo sapiens
attaagtttatcagg

SEQ ID NO: 1948728 - DNA, 15 bp, Homo sapiens
ttaagtttatcaggg

SEQ ID NO: 1948729 - DNA, 15 bp, Homo sapiens
taagtttatcaggga

SEQ ID NO: 1948730 - DNA, 15 bp, Homo sapiens
aagtttatcagggac

SEQ ID NO: 1948731 - DNA, 15 bp, Homo sapiens
agtttatcagggact

SEQ ID NO: 1948732 - DNA, 15 bp, Homo sapiens
gtttatcagggactg

SEQ ID NO: 1948733 - DNA, 15 bp, Homo sapiens
tttatcagggactga

SEQ ID NO: 1948734 - DNA, 15 bp, Homo sapiens
ttatcagggactgag

SEQ ID NO: 1948735 - DNA, 15 bp, Homo sapiens
tatcagggactgagg

SEQ ID NO: 1948736 - DNA, 15 bp, Homo sapiens
atcagggactgaggg

SEQ ID NO: 1948737 - DNA, 15 bp, Homo sapiens
tcagggactgaggga

SEQ ID NO: 1948738 - DNA, 15 bp, Homo sapiens
cagggactgagggaa

SEQ ID NO: 1948739 - DNA, 15 bp, Homo sapiens
agggactgagggaag

SEQ ID NO: 1948740 - DNA, 15 bp, Homo sapiens
gggactgagggaagt

SEQ ID NO: 1948741 - DNA, 15 bp, Homo sapiens
ggactgagggaagtg

SEQ ID NO: 1948742 - DNA, 15 bp, Homo sapiens
gactgagggaagtgg

SEQ ID NO: 1948743 - DNA, 15 bp, Homo sapiens
actgagggaagtgga

SEQ ID NO: 1948744 - DNA, 15 bp, Homo sapiens
ctgagggaagtggaa

SEQ ID NO: 1948745 - DNA, 15 bp, Homo sapiens
tgagggaagtggaaa

SEQ ID NO: 1948746 - DNA, 15 bp, Homo sapiens
gagggaagtggaaag

SEQ ID NO: 1948747 - DNA, 15 bp, Homo sapiens
agggaagtggaaagt

SEQ ID NO: 1948748 - DNA, 15 bp, Homo sapiens
gggaagtggaaagtg

SEQ ID NO: 1948749 - DNA, 15 bp, Homo sapiens
ggaagtggaaagtgg

SEQ ID NO: 1948750 - DNA, 15 bp, Homo sapiens
gaagtggaaagtggg

SEQ ID NO: 1948751 - DNA, 15 bp, Homo sapiens
aagtggaaagtgggg

SEQ ID NO: 1948752 - DNA, 15 bp, Homo sapiens
agtggaaagtgggga

SEQ ID NO: 1948753 - DNA, 15 bp, Homo sapiens
gtggaaagtggggag

SEQ ID NO: 1948754 - DNA, 15 bp, Homo sapiens
tggaaagtggggagc

SEQ ID NO: 1948755 - DNA, 15 bp, Homo sapiens
ggaaagtggggagct

SEQ ID NO: 1948756 - DNA, 15 bp, Homo sapiens
gaaagtggggagcta

SEQ ID NO: 1948757 - DNA, 15 bp, Homo sapiens
aaagtggggagctat

SEQ ID NO: 1948758 - DNA, 15 bp, Homo sapiens
aagtggggagctatt

SEQ ID NO: 1948759 - DNA, 15 bp, Homo sapiens
agtggggagctattg

SEQ ID NO: 1948760 - DNA, 15 bp, Homo sapiens
gtggggagctattgc

SEQ ID NO: 1948761 - DNA, 15 bp, Homo sapiens
tggggagctattgct

SEQ ID NO: 1948762 - DNA, 15 bp, Homo sapiens
ggggagctattgctc

SEQ ID NO: 1948763 - DNA, 15 bp, Homo sapiens
gggagctattgctca

SEQ ID NO: 1948764 - DNA, 15 bp, Homo sapiens
ggagctattgctcaa

SEQ ID NO: 1948765 - DNA, 15 bp, Homo sapiens
gagctattgctcaat

SEQ ID NO: 1948766 - DNA, 15 bp, Homo sapiens
agctattgctcaatg

SEQ ID NO: 1948767 - DNA, 15 bp, Homo sapiens
gctattgctcaatgg

SEQ ID NO: 1948768 - DNA, 15 bp, Homo sapiens
ctattgctcaatggc

SEQ ID NO: 1948769 - DNA, 15 bp, Homo sapiens
tattgctcaatggct

SEQ ID NO: 1948770 - DNA, 15 bp, Homo sapiens
attgctcaatggcta

SEQ ID NO: 1948771 - DNA, 15 bp, Homo sapiens
ttgctcaatggctag

SEQ ID NO: 1948772 - DNA, 15 bp, Homo sapiens
tgctcaatggctaga

SEQ ID NO: 1948773 - DNA, 15 bp, Homo sapiens
gctcaatggctagag

SEQ ID NO: 1948774 - DNA, 15 bp, Homo sapiens
ctcaatggctagaga

SEQ ID NO: 1948775 - DNA, 15 bp, Homo sapiens
tcaatggctagagag

SEQ ID NO: 1948776 - DNA, 15 bp, Homo sapiens
caatggctagagagt

SEQ ID NO: 1948777 - DNA, 15 bp, Homo sapiens
aatggctagagagtt

SEQ ID NO: 1948778 - DNA, 15 bp, Homo sapiens
atggctagagagttt

SEQ ID NO: 1948779 - DNA, 15 bp, Homo sapiens
tggctagagagtttc

SEQ ID NO: 1948780 - DNA, 15 bp, Homo sapiens
ggctagagagtttct

SEQ ID NO: 1948781 - DNA, 15 bp, Homo sapiens
gctagagagtttctg

SEQ ID NO: 1948782 - DNA, 15 bp, Homo sapiens
ctagagagtttctgt

SEQ ID NO: 1948783 - DNA, 15 bp, Homo sapiens
tagagagtttctgtc

SEQ ID NO: 1948784 - DNA, 15 bp, Homo sapiens
agagagtttctgtct

SEQ ID NO: 1948785 - DNA, 15 bp, Homo sapiens
gagagtttctgtctg

SEQ ID NO: 1948786 - DNA, 15 bp, Homo sapiens
agagtttctgtctgg

SEQ ID NO: 1948787 - DNA, 15 bp, Homo sapiens
gagtttctgtctggt

SEQ ID NO: 1948788 - DNA, 15 bp, Homo sapiens
agtttctgtctggtg

SEQ ID NO: 1948789 - DNA, 15 bp, Homo sapiens
gtttctgtctggtga

SEQ ID NO: 1948790 - DNA, 15 bp, Homo sapiens
tttctgtctggtgag

SEQ ID NO: 1948791 - DNA, 15 bp, Homo sapiens
ttctgtctggtgaga

SEQ ID NO: 1948792 - DNA, 15 bp, Homo sapiens
tctgtctggtgagat

SEQ ID NO: 1948793 - DNA, 15 bp, Homo sapiens
ctgtctggtgagatt

SEQ ID NO: 1948794 - DNA, 15 bp, Homo sapiens
tgtctggtgagattt

SEQ ID NO: 1948795 - DNA, 15 bp, Homo sapiens
gtctggtgagattta

SEQ ID NO: 1948796 - DNA, 15 bp, Homo sapiens
tctggtgagatttaa

SEQ ID NO: 1948797 - DNA, 15 bp, Homo sapiens
ctggtgagatttaag

SEQ ID NO: 1948798 - DNA, 15 bp, Homo sapiens
tggtgagatttaagt

SEQ ID NO: 1948799 - DNA, 15 bp, Homo sapiens
ggtgagatttaagtt

SEQ ID NO: 1948800 - DNA, 15 bp, Homo sapiens
gtgagatttaagttt

SEQ ID NO: 1948801 - DNA, 15 bp, Homo sapiens
tgagatttaagtttt

SEQ ID NO: 1948802 - DNA, 15 bp, Homo sapiens
gagatttaagttttg

SEQ ID NO: 1948803 - DNA, 15 bp, Homo sapiens
agatttaagttttgg

SEQ ID NO: 1948804 - DNA, 15 bp, Homo sapiens
gatttaagttttggg

SEQ ID NO: 1948805 - DNA, 15 bp, Homo sapiens
atttaagttttgggc

SEQ ID NO: 1948806 - DNA, 15 bp, Homo sapiens
tttaagttttgggct

SEQ ID NO: 1948807 - DNA, 15 bp, Homo sapiens
ttaagttttgggctg

SEQ ID NO: 1948808 - DNA, 15 bp, Homo sapiens
taagttttgggctgg

SEQ ID NO: 1948809 - DNA, 15 bp, Homo sapiens
aagttttgggctggg

SEQ ID NO: 1948810 - DNA, 15 bp, Homo sapiens
agttttgggctgggt

SEQ ID NO: 1948811 - DNA, 15 bp, Homo sapiens
gttttgggctgggtg

SEQ ID NO: 1948812 - DNA, 15 bp, Homo sapiens
ttttgggctgggtgc

SEQ ID NO: 1948813 - DNA, 15 bp, Homo sapiens
tttgggctgggtgcg

SEQ ID NO: 1948814 - DNA, 15 bp, Homo sapiens
ttgggctgggtgcgg

SEQ ID NO: 1948815 - DNA, 15 bp, Homo sapiens
tgggctgggtgcggt

SEQ ID NO: 1948816 - DNA, 15 bp, Homo sapiens
gcggtggctcacact

SEQ ID NO: 1948817 - DNA, 15 bp, Homo sapiens
cggtggctcacactt

SEQ ID NO: 1948818 - DNA, 15 bp, Homo sapiens
ggtggctcacacttg

SEQ ID NO: 1948819 - DNA, 15 bp, Homo sapiens
aggcagatcatgagg

SEQ ID NO: 1948820 - DNA, 15 bp, Homo sapiens
agatcatgaggtcaa

SEQ ID NO: 1948821 - DNA, 15 bp, Homo sapiens
gatcatgaggtcaag

SEQ ID NO: 1948822 - DNA, 15 bp, Homo sapiens
atcatgaggtcaaga

SEQ ID NO: 1948823 - DNA, 15 bp, Homo sapiens
tcatgaggtcaagag

SEQ ID NO: 1948824 - DNA, 15 bp, Homo sapiens
catgaggtcaagagt

SEQ ID NO: 1948825 - DNA, 15 bp, Homo sapiens
atgaggtcaagagtt

SEQ ID NO: 1948826 - DNA, 15 bp, Homo sapiens
aggcgtggtggtgca

SEQ ID NO: 1948827 - DNA, 15 bp, Homo sapiens
ggcgtggtggtgcat

SEQ ID NO: 1948828 - DNA, 15 bp, Homo sapiens
cgtggtggtgcatgc

SEQ ID NO: 1948829 - DNA, 15 bp, Homo sapiens
gtggtggtgcatgcc

SEQ ID NO: 1948830 - DNA, 15 bp, Homo sapiens
cccgggaggcagaga

SEQ ID NO: 1948831 - DNA, 15 bp, Homo sapiens
ccgggaggcagagat

SEQ ID NO: 1948832 - DNA, 15 bp, Homo sapiens
cgggaggcagagatt

SEQ ID NO: 1948833 - DNA, 15 bp, Homo sapiens
caccactgcactcta

SEQ ID NO: 1948834 - DNA, 15 bp, Homo sapiens
accactgcactctag

SEQ ID NO: 1948835 - DNA, 15 bp, Homo sapiens
gtctcaaaaaaaaag

SEQ ID NO: 1948836 - DNA, 15 bp, Homo sapiens
ctcaaaaaaaaagat

SEQ ID NO: 1948837 - DNA, 15 bp, Homo sapiens
tcaaaaaaaaagatt

SEQ ID NO: 1948838 - DNA, 15 bp, Homo sapiens
caaaaaaaaagattt

SEQ ID NO: 1948839 - DNA, 15 bp, Homo sapiens
aaaaaaaaagatttt

SEQ ID NO: 1948840 - DNA, 15 bp, Homo sapiens
aaaaaaaagattttg

SEQ ID NO: 1948841 - DNA, 15 bp, Homo sapiens
aaaaaaagattttgg

SEQ ID NO: 1948842 - DNA, 15 bp, Homo sapiens
aaaaaagattttgga

SEQ ID NO: 1948843 - DNA, 15 bp, Homo sapiens
aaaaagattttggaa

SEQ ID NO: 1948844 - DNA, 15 bp, Homo sapiens
aaaagattttggaaa

SEQ ID NO: 1948845 - DNA, 15 bp, Homo sapiens
aaagattttggaaat

SEQ ID NO: 1948846 - DNA, 15 bp, Homo sapiens
aagattttggaaata

SEQ ID NO: 1948847 - DNA, 15 bp, Homo sapiens
agattttggaaataa

SEQ ID NO: 1948848 - DNA, 15 bp, Homo sapiens
gattttggaaataaa

SEQ ID NO: 1948849 - DNA, 15 bp, Homo sapiens
attttggaaataaat

SEQ ID NO: 1948850 - DNA, 15 bp, Homo sapiens
ttggaaataaattat

SEQ ID NO: 1948851 - DNA, 15 bp, Homo sapiens
tggaaataaattatg

SEQ ID NO: 1948852 - DNA, 15 bp, Homo sapiens
ggaaataaattatgt

SEQ ID NO: 1948853 - DNA, 15 bp, Homo sapiens
gaaataaattatgtg

SEQ ID NO: 1948854 - DNA, 15 bp, Homo sapiens
aaataaattatgtga

SEQ ID NO: 1948855 - DNA, 15 bp, Homo sapiens
aataaattatgtgaa

SEQ ID NO: 1948856 - DNA, 15 bp, Homo sapiens
ataaattatgtgaat

SEQ ID NO: 1948857 - DNA, 15 bp, Homo sapiens
taaattatgtgaatc

SEQ ID NO: 1948858 - DNA, 15 bp, Homo sapiens
aaattatgtgaatct

SEQ ID NO: 1948859 - DNA, 15 bp, Homo sapiens
aattatgtgaatcta

SEQ ID NO: 1948860 - DNA, 15 bp, Homo sapiens
attatgtgaatctaa

SEQ ID NO: 1948861 - DNA, 15 bp, Homo sapiens
ttatgtgaatctaat

SEQ ID NO: 1948862 - DNA, 15 bp, Homo sapiens
tatgtgaatctaatt

SEQ ID NO: 1948863 - DNA, 15 bp, Homo sapiens
atgtgaatctaatta

SEQ ID NO: 1948864 - DNA, 15 bp, Homo sapiens
tgtgaatctaattaa

SEQ ID NO: 1948865 - DNA, 15 bp, Homo sapiens
gtgaatctaattaat

SEQ ID NO: 1948866 - DNA, 15 bp, Homo sapiens
tgaatctaattaatg

SEQ ID NO: 1948867 - DNA, 15 bp, Homo sapiens
gaatctaattaatgc

SEQ ID NO: 1948868 - DNA, 15 bp, Homo sapiens
aatctaattaatgcc

SEQ ID NO: 1948869 - DNA, 15 bp, Homo sapiens
atctaattaatgcca

SEQ ID NO: 1948870 - DNA, 15 bp, Homo sapiens
tctaattaatgccac

SEQ ID NO: 1948871 - DNA, 15 bp, Homo sapiens
ctaattaatgccact

SEQ ID NO: 1948872 - DNA, 15 bp, Homo sapiens
taattaatgccacta

SEQ ID NO: 1948873 - DNA, 15 bp, Homo sapiens
aattaatgccactaa

SEQ ID NO: 1948874 - DNA, 15 bp, Homo sapiens
attaatgccactaaa

SEQ ID NO: 1948875 - DNA, 15 bp, Homo sapiens
ttaatgccactaaat

SEQ ID NO: 1948876 - DNA, 15 bp, Homo sapiens
taatgccactaaatt

SEQ ID NO: 1948877 - DNA, 15 bp, Homo sapiens
aatgccactaaattg

SEQ ID NO: 1948878 - DNA, 15 bp, Homo sapiens
atgccactaaattgt

SEQ ID NO: 1948879 - DNA, 15 bp, Homo sapiens
tgccactaaattgtg

SEQ ID NO: 1948880 - DNA, 15 bp, Homo sapiens
gccactaaattgtga

SEQ ID NO: 1948881 - DNA, 15 bp, Homo sapiens
ccactaaattgtgag

SEQ ID NO: 1948882 - DNA, 15 bp, Homo sapiens
cactaaattgtgagt

SEQ ID NO: 1948883 - DNA, 15 bp, Homo sapiens
actaaattgtgagtc

SEQ ID NO: 1948884 - DNA, 15 bp, Homo sapiens
ctaaattgtgagtct

SEQ ID NO: 1948885 - DNA, 15 bp, Homo sapiens
taaattgtgagtcta

SEQ ID NO: 1948886 - DNA, 15 bp, Homo sapiens
aaattgtgagtctaa

SEQ ID NO: 1948887 - DNA, 15 bp, Homo sapiens
aattgtgagtctaat

SEQ ID NO: 1948888 - DNA, 15 bp, Homo sapiens
attgtgagtctaatt

SEQ ID NO: 1948889 - DNA, 15 bp, Homo sapiens
ttgtgagtctaatta

SEQ ID NO: 1948890 - DNA, 15 bp, Homo sapiens
tgtgagtctaattaa

SEQ ID NO: 1948891 - DNA, 15 bp, Homo sapiens
gtgagtctaattaat

SEQ ID NO: 1948892 - DNA, 15 bp, Homo sapiens
tgagtctaattaatg

SEQ ID NO: 1948893 - DNA, 15 bp, Homo sapiens
gagtctaattaatgc

SEQ ID NO: 1948894 - DNA, 15 bp, Homo sapiens
agtctaattaatgcc

SEQ ID NO: 1948895 - DNA, 15 bp, Homo sapiens
gtctaattaatgcca

SEQ ID NO: 1948896 - DNA, 15 bp, Homo sapiens
taattaatgccactc

SEQ ID NO: 1948897 - DNA, 15 bp, Homo sapiens
aattaatgccactca

SEQ ID NO: 1948898 - DNA, 15 bp, Homo sapiens
attaatgccactcag

SEQ ID NO: 1948899 - DNA, 15 bp, Homo sapiens
ttaatgccactcagt

SEQ ID NO: 1948900 - DNA, 15 bp, Homo sapiens
taatgccactcagtt

SEQ ID NO: 1948901 - DNA, 15 bp, Homo sapiens
aatgccactcagttg

SEQ ID NO: 1948902 - DNA, 15 bp, Homo sapiens
atgccactcagttgt

SEQ ID NO: 1948903 - DNA, 15 bp, Homo sapiens
tgccactcagttgta

SEQ ID NO: 1948904 - DNA, 15 bp, Homo sapiens
gccactcagttgtat

SEQ ID NO: 1948905 - DNA, 15 bp, Homo sapiens
ccactcagttgtata

SEQ ID NO: 1948906 - DNA, 15 bp, Homo sapiens
cactcagttgtatac

SEQ ID NO: 1948907 - DNA, 15 bp, Homo sapiens
actcagttgtatact

SEQ ID NO: 1948908 - DNA, 15 bp, Homo sapiens
ctcagttgtatactt

SEQ ID NO: 1948909 - DNA, 15 bp, Homo sapiens
tcagttgtatacttt

SEQ ID NO: 1948910 - DNA, 15 bp, Homo sapiens
cagttgtatacttta

SEQ ID NO: 1948911 - DNA, 15 bp, Homo sapiens
agttgtatactttac

SEQ ID NO: 1948912 - DNA, 15 bp, Homo sapiens
gttgtatactttacc

SEQ ID NO: 1948913 - DNA, 15 bp, Homo sapiens
ttgtatactttacca

SEQ ID NO: 1948914 - DNA, 15 bp, Homo sapiens
tgtatactttaccac

SEQ ID NO: 1948915 - DNA, 15 bp, Homo sapiens
gtatactttaccaca

SEQ ID NO: 1948916 - DNA, 15 bp, Homo sapiens
tatactttaccacaa

SEQ ID NO: 1948917 - DNA, 15 bp, Homo sapiens
atactttaccacaat

SEQ ID NO: 1948918 - DNA, 15 bp, Homo sapiens
tactttaccacaatt

SEQ ID NO: 1948919 - DNA, 15 bp, Homo sapiens
actttaccacaattt

SEQ ID NO: 1948920 - DNA, 15 bp, Homo sapiens
ctttaccacaatttt

SEQ ID NO: 1948921 - DNA, 15 bp, Homo sapiens
tttaccacaattttt

SEQ ID NO: 1948922 - DNA, 15 bp, Homo sapiens
ttaccacaattttta

SEQ ID NO: 1948923 - DNA, 15 bp, Homo sapiens
taccacaatttttaa

SEQ ID NO: 1948924 - DNA, 15 bp, Homo sapiens
accacaatttttaaa

SEQ ID NO: 1948925 - DNA, 15 bp, Homo sapiens
ccacaatttttaaag

SEQ ID NO: 1948926 - DNA, 15 bp, Homo sapiens
cacaatttttaaaga

SEQ ID NO: 1948927 - DNA, 15 bp, Homo sapiens
acaatttttaaagat

SEQ ID NO: 1948928 - DNA, 15 bp, Homo sapiens
caatttttaaagatt

SEQ ID NO: 1948929 - DNA, 15 bp, Homo sapiens
aatttttaaagattc

SEQ ID NO: 1948930 - DNA, 15 bp, Homo sapiens
atttttaaagattca

SEQ ID NO: 1948931 - DNA, 15 bp, Homo sapiens
tttttaaagattcac

SEQ ID NO: 1948932 - DNA, 15 bp, Homo sapiens
ttttaaagattcact

SEQ ID NO: 1948933 - DNA, 15 bp, Homo sapiens
tttaaagattcactg

SEQ ID NO: 1948934 - DNA, 15 bp, Homo sapiens
ttaaagattcactgt

SEQ ID NO: 1948935 - DNA, 15 bp, Homo sapiens
taaagattcactgtg

SEQ ID NO: 1948936 - DNA, 15 bp, Homo sapiens
aaagattcactgtgg

SEQ ID NO: 1948937 - DNA, 15 bp, Homo sapiens
aagattcactgtggt

SEQ ID NO: 1948938 - DNA, 15 bp, Homo sapiens
agattcactgtggtt

SEQ ID NO: 1948939 - DNA, 15 bp, Homo sapiens
gattcactgtggtta

SEQ ID NO: 1948940 - DNA, 15 bp, Homo sapiens
attcactgtggttag

SEQ ID NO: 1948941 - DNA, 15 bp, Homo sapiens
ttcactgtggttagt

SEQ ID NO: 1948942 - DNA, 15 bp, Homo sapiens
tcactgtggttagtt

SEQ ID NO: 1948943 - DNA, 15 bp, Homo sapiens
cactgtggttagttc

SEQ ID NO: 1948944 - DNA, 15 bp, Homo sapiens
actgtggttagttct

SEQ ID NO: 1948945 - DNA, 15 bp, Homo sapiens
ctgtggttagttcta

SEQ ID NO: 1948946 - DNA, 15 bp, Homo sapiens
tgtggttagttctat

SEQ ID NO: 1948947 - DNA, 15 bp, Homo sapiens
gtggttagttctata

SEQ ID NO: 1948948 - DNA, 15 bp, Homo sapiens
tggttagttctataa

SEQ ID NO: 1948949 - DNA, 15 bp, Homo sapiens
ggttagttctataat

SEQ ID NO: 1948950 - DNA, 15 bp, Homo sapiens
gttagttctataatc

SEQ ID NO: 1948951 - DNA, 15 bp, Homo sapiens
ttagttctataatct

SEQ ID NO: 1948952 - DNA, 15 bp, Homo sapiens
tagttctataatctc

SEQ ID NO: 1948953 - DNA, 15 bp, Homo sapiens
agttctataatctca

SEQ ID NO: 1948954 - DNA, 15 bp, Homo sapiens
gttctataatctcag

SEQ ID NO: 1948955 - DNA, 15 bp, Homo sapiens
ttctataatctcagt

SEQ ID NO: 1948956 - DNA, 15 bp, Homo sapiens
tctataatctcagtg

SEQ ID NO: 1948957 - DNA, 15 bp, Homo sapiens
ctataatctcagtgt

SEQ ID NO: 1948958 - DNA, 15 bp, Homo sapiens
tataatctcagtgtg

SEQ ID NO: 1948959 - DNA, 15 bp, Homo sapiens
ataatctcagtgtgg

SEQ ID NO: 1948960 - DNA, 15 bp, Homo sapiens
taatctcagtgtgga

SEQ ID NO: 1948961 - DNA, 15 bp, Homo sapiens
aatctcagtgtggag

SEQ ID NO: 1948962 - DNA, 15 bp, Homo sapiens
atctcagtgtggagg

SEQ ID NO: 1948963 - DNA, 15 bp, Homo sapiens
tctcagtgtggaggt

SEQ ID NO: 1948964 - DNA, 15 bp, Homo sapiens
ctcagtgtggaggta

SEQ ID NO: 1948965 - DNA, 15 bp, Homo sapiens
tcagtgtggaggtag

SEQ ID NO: 1948966 - DNA, 15 bp, Homo sapiens
cagtgtggaggtaga

SEQ ID NO: 1948967 - DNA, 15 bp, Homo sapiens
agtgtggaggtagac

SEQ ID NO: 1948968 - DNA, 15 bp, Homo sapiens
gtgtggaggtagacc

SEQ ID NO: 1948969 - DNA, 15 bp, Homo sapiens
tgtggaggtagacca

SEQ ID NO: 1948970 - DNA, 15 bp, Homo sapiens
gtggaggtagaccat

SEQ ID NO: 1948971 - DNA, 15 bp, Homo sapiens
tggaggtagaccata

SEQ ID NO: 1948972 - DNA, 15 bp, Homo sapiens
ggaggtagaccatat

SEQ ID NO: 1948973 - DNA, 15 bp, Homo sapiens
gaggtagaccatatt

SEQ ID NO: 1948974 - DNA, 15 bp, Homo sapiens
aggtagaccatattg

SEQ ID NO: 1948975 - DNA, 15 bp, Homo sapiens
ggtagaccatattgt

SEQ ID NO: 1948976 - DNA, 15 bp, Homo sapiens
gtagaccatattgtc

SEQ ID NO: 1948977 - DNA, 15 bp, Homo sapiens
tagaccatattgtcc

SEQ ID NO: 1948978 - DNA, 15 bp, Homo sapiens
agaccatattgtcca

SEQ ID NO: 1948979 - DNA, 15 bp, Homo sapiens
gaccatattgtccaa

SEQ ID NO: 1948980 - DNA, 15 bp, Homo sapiens
accatattgtccaag

SEQ ID NO: 1948981 - DNA, 15 bp, Homo sapiens
ccatattgtccaagt

SEQ ID NO: 1948982 - DNA, 15 bp, Homo sapiens
catattgtccaagtt

SEQ ID NO: 1948983 - DNA, 15 bp, Homo sapiens
atattgtccaagttt

SEQ ID NO: 1948984 - DNA, 15 bp, Homo sapiens
tattgtccaagtttt

SEQ ID NO: 1948985 - DNA, 15 bp, Homo sapiens
attgtccaagtttta

SEQ ID NO: 1948986 - DNA, 15 bp, Homo sapiens
ttgtccaagttttac

SEQ ID NO: 1948987 - DNA, 15 bp, Homo sapiens
tgtccaagttttaca

SEQ ID NO: 1948988 - DNA, 15 bp, Homo sapiens
gtccaagttttacag

SEQ ID NO: 1948989 - DNA, 15 bp, Homo sapiens
tccaagttttacaga

SEQ ID NO: 1948990 - DNA, 15 bp, Homo sapiens
ccaagttttacagaa

SEQ ID NO: 1948991 - DNA, 15 bp, Homo sapiens
caagttttacagaag

SEQ ID NO: 1948992 - DNA, 15 bp, Homo sapiens
aagttttacagaaga

SEQ ID NO: 1948993 - DNA, 15 bp, Homo sapiens
agttttacagaagag

SEQ ID NO: 1948994 - DNA, 15 bp, Homo sapiens
gttttacagaagaga

SEQ ID NO: 1948995 - DNA, 15 bp, Homo sapiens
ttttacagaagagac

SEQ ID NO: 1948996 - DNA, 15 bp, Homo sapiens
tttacagaagagaca

SEQ ID NO: 1948997 - DNA, 15 bp, Homo sapiens
ttacagaagagacaa

SEQ ID NO: 1948998 - DNA, 15 bp, Homo sapiens
tacagaagagacaac

SEQ ID NO: 1948999 - DNA, 15 bp, Homo sapiens
acagaagagacaaca

SEQ ID NO: 1949000 - DNA, 15 bp, Homo sapiens
cagaagagacaacag

SEQ ID NO: 1949001 - DNA, 15 bp, Homo sapiens
agaagagacaacaga

SEQ ID NO: 1949002 - DNA, 15 bp, Homo sapiens
gaagagacaacagag

SEQ ID NO: 1949003 - DNA, 15 bp, Homo sapiens
aagagacaacagagg

SEQ ID NO: 1949004 - DNA, 15 bp, Homo sapiens
gagacaacagaggct

SEQ ID NO: 1949005 - DNA, 15 bp, Homo sapiens
agacaacagaggctt

SEQ ID NO: 1949006 - DNA, 15 bp, Homo sapiens
gacaacagaggcttt

SEQ ID NO: 1949007 - DNA, 15 bp, Homo sapiens
acaacagaggcttta

SEQ ID NO: 1949008 - DNA, 15 bp, Homo sapiens
caacagaggctttaa

SEQ ID NO: 1949009 - DNA, 15 bp, Homo sapiens
aacagaggctttaag

SEQ ID NO: 1949010 - DNA, 15 bp, Homo sapiens
acagaggctttaaga

SEQ ID NO: 1949011 - DNA, 15 bp, Homo sapiens
cagaggctttaagat

SEQ ID NO: 1949012 - DNA, 15 bp, Homo sapiens
agaggctttaagatc

SEQ ID NO: 1949013 - DNA, 15 bp, Homo sapiens
gaggctttaagatca

SEQ ID NO: 1949014 - DNA, 15 bp, Homo sapiens
aggctttaagatcac

SEQ ID NO: 1949015 - DNA, 15 bp, Homo sapiens
ggctttaagatcaca

SEQ ID NO: 1949016 - DNA, 15 bp, Homo sapiens
gctttaagatcacat

SEQ ID NO: 1949017 - DNA, 15 bp, Homo sapiens
ctttaagatcacatg

SEQ ID NO: 1949018 - DNA, 15 bp, Homo sapiens
tttaagatcacatgg

SEQ ID NO: 1949019 - DNA, 15 bp, Homo sapiens
ttaagatcacatggc

SEQ ID NO: 1949020 - DNA, 15 bp, Homo sapiens
taagatcacatggct

SEQ ID NO: 1949021 - DNA, 15 bp, Homo sapiens
aagatcacatggcta

SEQ ID NO: 1949022 - DNA, 15 bp, Homo sapiens
agatcacatggctag

SEQ ID NO: 1949023 - DNA, 15 bp, Homo sapiens
gatcacatggctagg

SEQ ID NO: 1949024 - DNA, 15 bp, Homo sapiens
atcacatggctaggg

SEQ ID NO: 1949025 - DNA, 15 bp, Homo sapiens
tcacatggctaggga

SEQ ID NO: 1949026 - DNA, 15 bp, Homo sapiens
cacatggctagggag

SEQ ID NO: 1949027 - DNA, 15 bp, Homo sapiens
acatggctagggagg

SEQ ID NO: 1949028 - DNA, 15 bp, Homo sapiens
catggctagggagga

SEQ ID NO: 1949029 - DNA, 15 bp, Homo sapiens
atggctagggaggag

SEQ ID NO: 1949030 - DNA, 15 bp, Homo sapiens
tggctagggaggagc

SEQ ID NO: 1949031 - DNA, 15 bp, Homo sapiens
ggctagggaggagca

SEQ ID NO: 1949032 - DNA, 15 bp, Homo sapiens
gctagggaggagcag

SEQ ID NO: 1949033 - DNA, 15 bp, Homo sapiens
ctagggaggagcagt

SEQ ID NO: 1949034 - DNA, 15 bp, Homo sapiens
tagggaggagcagtg

SEQ ID NO: 1949035 - DNA, 15 bp, Homo sapiens
agggaggagcagtgt

SEQ ID NO: 1949036 - DNA, 15 bp, Homo sapiens
gggaggagcagtgtc

SEQ ID NO: 1949037 - DNA, 15 bp, Homo sapiens
ggaggagcagtgtca

SEQ ID NO: 1949038 - DNA, 15 bp, Homo sapiens
gaggagcagtgtcag

SEQ ID NO: 1949039 - DNA, 15 bp, Homo sapiens
aggagcagtgtcagg

SEQ ID NO: 1949040 - DNA, 15 bp, Homo sapiens
ggagcagtgtcagga

SEQ ID NO: 1949041 - DNA, 15 bp, Homo sapiens
gagcagtgtcaggat

SEQ ID NO: 1949042 - DNA, 15 bp, Homo sapiens
agcagtgtcaggatc

SEQ ID NO: 1949043 - DNA, 15 bp, Homo sapiens
gcagtgtcaggatct

SEQ ID NO: 1949044 - DNA, 15 bp, Homo sapiens
cagtgtcaggatctg

SEQ ID NO: 1949045 - DNA, 15 bp, Homo sapiens
agtgtcaggatctgc

SEQ ID NO: 1949046 - DNA, 15 bp, Homo sapiens
gtgtcaggatctgca

SEQ ID NO: 1949047 - DNA, 15 bp, Homo sapiens
tgtcaggatctgcac

SEQ ID NO: 1949048 - DNA, 15 bp, Homo sapiens
gtcaggatctgcacc

SEQ ID NO: 1949049 - DNA, 15 bp, Homo sapiens
tcaggatctgcacct

SEQ ID NO: 1949050 - DNA, 15 bp, Homo sapiens
caggatctgcacctg

SEQ ID NO: 1949051 - DNA, 15 bp, Homo sapiens
aggatctgcacctga

SEQ ID NO: 1949052 - DNA, 15 bp, Homo sapiens
ggatctgcacctgag

SEQ ID NO: 1949053 - DNA, 15 bp, Homo sapiens
gatctgcacctgagt

SEQ ID NO: 1949054 - DNA, 15 bp, Homo sapiens
atctgcacctgagta

SEQ ID NO: 1949055 - DNA, 15 bp, Homo sapiens
tctgcacctgagtac

SEQ ID NO: 1949056 - DNA, 15 bp, Homo sapiens
ctgcacctgagtact

SEQ ID NO: 1949057 - DNA, 15 bp, Homo sapiens
tgcacctgagtactt

SEQ ID NO: 1949058 - DNA, 15 bp, Homo sapiens
gcacctgagtacttg

SEQ ID NO: 1949059 - DNA, 15 bp, Homo sapiens
cacctgagtacttga

SEQ ID NO: 1949060 - DNA, 15 bp, Homo sapiens
acctgagtacttgac

SEQ ID NO: 1949061 - DNA, 15 bp, Homo sapiens
cctgagtacttgacc

SEQ ID NO: 1949062 - DNA, 15 bp, Homo sapiens
ctgagtacttgacct

SEQ ID NO: 1949063 - DNA, 15 bp, Homo sapiens
tgagtacttgacctt

SEQ ID NO: 1949064 - DNA, 15 bp, Homo sapiens
gagtacttgaccttc

SEQ ID NO: 1949065 - DNA, 15 bp, Homo sapiens
agtacttgaccttca

SEQ ID NO: 1949066 - DNA, 15 bp, Homo sapiens
gtacttgaccttcag

SEQ ID NO: 1949067 - DNA, 15 bp, Homo sapiens
tacttgaccttcaga

SEQ ID NO: 1949068 - DNA, 15 bp, Homo sapiens
acttgaccttcagac

SEQ ID NO: 1949069 - DNA, 15 bp, Homo sapiens
cttgaccttcagact

SEQ ID NO: 1949070 - DNA, 15 bp, Homo sapiens
ttgaccttcagactg

SEQ ID NO: 1949071 - DNA, 15 bp, Homo sapiens
tgaccttcagactgt

SEQ ID NO: 1949072 - DNA, 15 bp, Homo sapiens
gaccttcagactgtg

SEQ ID NO: 1949073 - DNA, 15 bp, Homo sapiens
accttcagactgtgg

SEQ ID NO: 1949074 - DNA, 15 bp, Homo sapiens
ccttcagactgtggg

SEQ ID NO: 1949075 - DNA, 15 bp, Homo sapiens
cttcagactgtgggt

SEQ ID NO: 1949076 - DNA, 15 bp, Homo sapiens
ttcagactgtgggtg

SEQ ID NO: 1949077 - DNA, 15 bp, Homo sapiens
tcagactgtgggtgt

SEQ ID NO: 1949078 - DNA, 15 bp, Homo sapiens
cagactgtgggtgtc

SEQ ID NO: 1949079 - DNA, 15 bp, Homo sapiens
agactgtgggtgtca

SEQ ID NO: 1949080 - DNA, 15 bp, Homo sapiens
gactgtgggtgtcac

SEQ ID NO: 1949081 - DNA, 15 bp, Homo sapiens
actgtgggtgtcacc

SEQ ID NO: 1949082 - DNA, 15 bp, Homo sapiens
ctgtgggtgtcacca

SEQ ID NO: 1949083 - DNA, 15 bp, Homo sapiens
tgtgggtgtcaccaa

SEQ ID NO: 1949084 - DNA, 15 bp, Homo sapiens
gtgggtgtcaccaag

SEQ ID NO: 1949085 - DNA, 15 bp, Homo sapiens
tgggtgtcaccaagt

SEQ ID NO: 1949086 - DNA, 15 bp, Homo sapiens
gggtgtcaccaagtt

SEQ ID NO: 1949087 - DNA, 15 bp, Homo sapiens
ggtgtcaccaagttc

SEQ ID NO: 1949088 - DNA, 15 bp, Homo sapiens
gtgtcaccaagttca

SEQ ID NO: 1949089 - DNA, 15 bp, Homo sapiens
tgtcaccaagttcat

SEQ ID NO: 1949090 - DNA, 15 bp, Homo sapiens
gtcaccaagttcata

SEQ ID NO: 1949091 - DNA, 15 bp, Homo sapiens
tcaccaagttcatat

SEQ ID NO: 1949092 - DNA, 15 bp, Homo sapiens
caccaagttcatatt

SEQ ID NO: 1949093 - DNA, 15 bp, Homo sapiens
accaagttcatattg

SEQ ID NO: 1949094 - DNA, 15 bp, Homo sapiens
ccaagttcatattgc

SEQ ID NO: 1949095 - DNA, 15 bp, Homo sapiens
caagttcatattgcc

SEQ ID NO: 1949096 - DNA, 15 bp, Homo sapiens
aagttcatattgcca

SEQ ID NO: 1949097 - DNA, 15 bp, Homo sapiens
agttcatattgccat

SEQ ID NO: 1949098 - DNA, 15 bp, Homo sapiens
gttcatattgccatc

SEQ ID NO: 1949099 - DNA, 15 bp, Homo sapiens
ttcatattgccatca

SEQ ID NO: 1949100 - DNA, 15 bp, Homo sapiens
tcatattgccatcac

SEQ ID NO: 1949101 - DNA, 15 bp, Homo sapiens
catattgccatcact

SEQ ID NO: 1949102 - DNA, 15 bp, Homo sapiens
atattgccatcactg

SEQ ID NO: 1949103 - DNA, 15 bp, Homo sapiens
tattgccatcactgt

SEQ ID NO: 1949104 - DNA, 15 bp, Homo sapiens
attgccatcactgtt

SEQ ID NO: 1949105 - DNA, 15 bp, Homo sapiens
ttgccatcactgttg

SEQ ID NO: 1949106 - DNA, 15 bp, Homo sapiens
tgccatcactgttgg

SEQ ID NO: 1949107 - DNA, 15 bp, Homo sapiens
gccatcactgttggg

SEQ ID NO: 1949108 - DNA, 15 bp, Homo sapiens
ccatcactgttggga

SEQ ID NO: 1949109 - DNA, 15 bp, Homo sapiens
catcactgttgggaa

SEQ ID NO: 1949110 - DNA, 15 bp, Homo sapiens
atcactgttgggaac

SEQ ID NO: 1949111 - DNA, 15 bp, Homo sapiens
tcactgttgggaaca

SEQ ID NO: 1949112 - DNA, 15 bp, Homo sapiens
cactgttgggaacag

SEQ ID NO: 1949113 - DNA, 15 bp, Homo sapiens
actgttgggaacaga

SEQ ID NO: 1949114 - DNA, 15 bp, Homo sapiens
ctgttgggaacagat

SEQ ID NO: 1949115 - DNA, 15 bp, Homo sapiens
tgttgggaacagatt

SEQ ID NO: 1949116 - DNA, 15 bp, Homo sapiens
gttgggaacagattt

SEQ ID NO: 1949117 - DNA, 15 bp, Homo sapiens
ttgggaacagatttg

SEQ ID NO: 1949118 - DNA, 15 bp, Homo sapiens
tgggaacagatttgt

SEQ ID NO: 1949119 - DNA, 15 bp, Homo sapiens
gggaacagatttgtt

SEQ ID NO: 1949120 - DNA, 15 bp, Homo sapiens
ggaacagatttgttc

SEQ ID NO: 1949121 - DNA, 15 bp, Homo sapiens
gaacagatttgttct

SEQ ID NO: 1949122 - DNA, 15 bp, Homo sapiens
aacagatttgttctc

SEQ ID NO: 1949123 - DNA, 15 bp, Homo sapiens
acagatttgttctca

SEQ ID NO: 1949124 - DNA, 15 bp, Homo sapiens
cagatttgttctcat

SEQ ID NO: 1949125 - DNA, 15 bp, Homo sapiens
agatttgttctcatc

SEQ ID NO: 1949126 - DNA, 15 bp, Homo sapiens
gatttgttctcatca

SEQ ID NO: 1949127 - DNA, 15 bp, Homo sapiens
atttgttctcatcat

SEQ ID NO: 1949128 - DNA, 15 bp, Homo sapiens
tttgttctcatcatt

SEQ ID NO: 1949129 - DNA, 15 bp, Homo sapiens
ttgttctcatcattt

SEQ ID NO: 1949130 - DNA, 15 bp, Homo sapiens
tgttctcatcatttg

SEQ ID NO: 1949131 - DNA, 15 bp, Homo sapiens
gttctcatcatttgg

SEQ ID NO: 1949132 - DNA, 15 bp, Homo sapiens
ttctcatcatttggg

SEQ ID NO: 1949133 - DNA, 15 bp, Homo sapiens
tctcatcatttggga

SEQ ID NO: 1949134 - DNA, 15 bp, Homo sapiens
ctcatcatttgggat

SEQ ID NO: 1949135 - DNA, 15 bp, Homo sapiens
tcatcatttgggatg

SEQ ID NO: 1949136 - DNA, 15 bp, Homo sapiens
catcatttgggatgc

SEQ ID NO: 1949137 - DNA, 15 bp, Homo sapiens
atcatttgggatgct

SEQ ID NO: 1949138 - DNA, 15 bp, Homo sapiens
tcatttgggatgctt

SEQ ID NO: 1949139 - DNA, 15 bp, Homo sapiens
catttgggatgcttt

SEQ ID NO: 1949140 - DNA, 15 bp, Homo sapiens
atttgggatgctttt

SEQ ID NO: 1949141 - DNA, 15 bp, Homo sapiens
tttgggatgcttttc

SEQ ID NO: 1949142 - DNA, 15 bp, Homo sapiens
ttgggatgcttttct

SEQ ID NO: 1949143 - DNA, 15 bp, Homo sapiens
tgggatgcttttctt

SEQ ID NO: 1949144 - DNA, 15 bp, Homo sapiens
gggatgcttttctta

SEQ ID NO: 1949145 - DNA, 15 bp, Homo sapiens
ggatgcttttcttac

SEQ ID NO: 1949146 - DNA, 15 bp, Homo sapiens
gatgcttttcttact

SEQ ID NO: 1949147 - DNA, 15 bp, Homo sapiens
atgcttttcttactg

SEQ ID NO: 1949148 - DNA, 15 bp, Homo sapiens
tgcttttcttactgt

SEQ ID NO: 1949149 - DNA, 15 bp, Homo sapiens
gcttttcttactgtg

SEQ ID NO: 1949150 - DNA, 15 bp, Homo sapiens
cttttcttactgtgc

SEQ ID NO: 1949151 - DNA, 15 bp, Homo sapiens
ttttcttactgtgcc

SEQ ID NO: 1949152 - DNA, 15 bp, Homo sapiens
tttcttactgtgccc

SEQ ID NO: 1949153 - DNA, 15 bp, Homo sapiens
ttcttactgtgccct

SEQ ID NO: 1949154 - DNA, 15 bp, Homo sapiens
tcttactgtgccctg

SEQ ID NO: 1949155 - DNA, 15 bp, Homo sapiens
cttactgtgccctga

SEQ ID NO: 1949156 - DNA, 15 bp, Homo sapiens
ttactgtgccctgag

SEQ ID NO: 1949157 - DNA, 15 bp, Homo sapiens
tactgtgccctgagc

SEQ ID NO: 1949158 - DNA, 15 bp, Homo sapiens
actgtgccctgagct

SEQ ID NO: 1949159 - DNA, 15 bp, Homo sapiens
ctgtgccctgagctg

SEQ ID NO: 1949160 - DNA, 15 bp, Homo sapiens
tgtgccctgagctgg

SEQ ID NO: 1949161 - DNA, 15 bp, Homo sapiens
gtgccctgagctggc

SEQ ID NO: 1949162 - DNA, 15 bp, Homo sapiens
tgccctgagctggcc

SEQ ID NO: 1949163 - DNA, 15 bp, Homo sapiens
gccctgagctggcca

SEQ ID NO: 1949164 - DNA, 15 bp, Homo sapiens
ccctgagctggccag

SEQ ID NO: 1949165 - DNA, 15 bp, Homo sapiens
cctgagctggccagt

SEQ ID NO: 1949166 - DNA, 15 bp, Homo sapiens
ctgagctggccagtg

SEQ ID NO: 1949167 - DNA, 15 bp, Homo sapiens
tgagctggccagtgc

SEQ ID NO: 1949168 - DNA, 15 bp, Homo sapiens
gagctggccagtgca

SEQ ID NO: 1949169 - DNA, 15 bp, Homo sapiens
agctggccagtgcag

SEQ ID NO: 1949170 - DNA, 15 bp, Homo sapiens
gctggccagtgcaga

SEQ ID NO: 1949171 - DNA, 15 bp, Homo sapiens
ctggccagtgcagag

SEQ ID NO: 1949172 - DNA, 15 bp, Homo sapiens
tggccagtgcagagg

SEQ ID NO: 1949173 - DNA, 15 bp, Homo sapiens
ggccagtgcagagga

SEQ ID NO: 1949174 - DNA, 15 bp, Homo sapiens
gccagtgcagaggaa

SEQ ID NO: 1949175 - DNA, 15 bp, Homo sapiens
ccagtgcagaggaag

SEQ ID NO: 1949176 - DNA, 15 bp, Homo sapiens
cagtgcagaggaagg

SEQ ID NO: 1949177 - DNA, 15 bp, Homo sapiens
agtgcagaggaaggc

SEQ ID NO: 1949178 - DNA, 15 bp, Homo sapiens
gtgcagaggaaggca

SEQ ID NO: 1949179 - DNA, 15 bp, Homo sapiens
tgcagaggaaggcag

SEQ ID NO: 1949180 - DNA, 15 bp, Homo sapiens
gcagaggaaggcaga

SEQ ID NO: 1949181 - DNA, 15 bp, Homo sapiens
cagaggaaggcagaa

SEQ ID NO: 1949182 - DNA, 15 bp, Homo sapiens
agaggaaggcagaac

SEQ ID NO: 1949183 - DNA, 15 bp, Homo sapiens
gaggaaggcagaaca

SEQ ID NO: 1949184 - DNA, 15 bp, Homo sapiens
aggaaggcagaacat

SEQ ID NO: 1949185 - DNA, 15 bp, Homo sapiens
ggaaggcagaacatt

SEQ ID NO: 1949186 - DNA, 15 bp, Homo sapiens
gaaggcagaacattt

SEQ ID NO: 1949187 - DNA, 15 bp, Homo sapiens
aaggcagaacatttc

SEQ ID NO: 1949188 - DNA, 15 bp, Homo sapiens
aggcagaacatttct

SEQ ID NO: 1949189 - DNA, 15 bp, Homo sapiens
ggcagaacatttcta

SEQ ID NO: 1949190 - DNA, 15 bp, Homo sapiens
gcagaacatttctac

SEQ ID NO: 1949191 - DNA, 15 bp, Homo sapiens
cagaacatttctacc

SEQ ID NO: 1949192 - DNA, 15 bp, Homo sapiens
agaacatttctacca

SEQ ID NO: 1949193 - DNA, 15 bp, Homo sapiens
gaacatttctaccac

SEQ ID NO: 1949194 - DNA, 15 bp, Homo sapiens
aacatttctaccacc

SEQ ID NO: 1949195 - DNA, 15 bp, Homo sapiens
acatttctaccaccc

SEQ ID NO: 1949196 - DNA, 15 bp, Homo sapiens
catttctaccaccct

SEQ ID NO: 1949197 - DNA, 15 bp, Homo sapiens
atttctaccaccctt

SEQ ID NO: 1949198 - DNA, 15 bp, Homo sapiens
tttctaccacccttg

SEQ ID NO: 1949199 - DNA, 15 bp, Homo sapiens
ttctaccacccttga

SEQ ID NO: 1949200 - DNA, 15 bp, Homo sapiens
tctaccacccttgat

SEQ ID NO: 1949201 - DNA, 15 bp, Homo sapiens
ctaccacccttgata

SEQ ID NO: 1949202 - DNA, 15 bp, Homo sapiens
taccacccttgataa

SEQ ID NO: 1949203 - DNA, 15 bp, Homo sapiens
accacccttgataaa

SEQ ID NO: 1949204 - DNA, 15 bp, Homo sapiens
ccacccttgataaat

SEQ ID NO: 1949205 - DNA, 15 bp, Homo sapiens
cacccttgataaatc

SEQ ID NO: 1949206 - DNA, 15 bp, Homo sapiens
acccttgataaatcc

SEQ ID NO: 1949207 - DNA, 15 bp, Homo sapiens
cccttgataaatcca

SEQ ID NO: 1949208 - DNA, 15 bp, Homo sapiens
ccttgataaatccag

SEQ ID NO: 1949209 - DNA, 15 bp, Homo sapiens
cttgataaatccaga

SEQ ID NO: 1949210 - DNA, 15 bp, Homo sapiens
ttgataaatccagag

SEQ ID NO: 1949211 - DNA, 15 bp, Homo sapiens
tgataaatccagaga

SEQ ID NO: 1949212 - DNA, 15 bp, Homo sapiens
gataaatccagagac

SEQ ID NO: 1949213 - DNA, 15 bp, Homo sapiens
ataaatccagagact

SEQ ID NO: 1949214 - DNA, 15 bp, Homo sapiens
taaatccagagactg

SEQ ID NO: 1949215 - DNA, 15 bp, Homo sapiens
aaatccagagactga

SEQ ID NO: 1949216 - DNA, 15 bp, Homo sapiens
aatccagagactgaa

SEQ ID NO: 1949217 - DNA, 15 bp, Homo sapiens
atccagagactgaaa

SEQ ID NO: 1949218 - DNA, 15 bp, Homo sapiens
tccagagactgaaac

SEQ ID NO: 1949219 - DNA, 15 bp, Homo sapiens
ccagagactgaaact

SEQ ID NO: 1949220 - DNA, 15 bp, Homo sapiens
cagagactgaaactc

SEQ ID NO: 1949221 - DNA, 15 bp, Homo sapiens
agagactgaaactca

SEQ ID NO: 1949222 - DNA, 15 bp, Homo sapiens
gagactgaaactcag

SEQ ID NO: 1949223 - DNA, 15 bp, Homo sapiens
agactgaaactcagt

SEQ ID NO: 1949224 - DNA, 15 bp, Homo sapiens
gactgaaactcagtt

SEQ ID NO: 1949225 - DNA, 15 bp, Homo sapiens
actgaaactcagtta

SEQ ID NO: 1949226 - DNA, 15 bp, Homo sapiens
ctgaaactcagttaa

SEQ ID NO: 1949227 - DNA, 15 bp, Homo sapiens
tgaaactcagttaac

SEQ ID NO: 1949228 - DNA, 15 bp, Homo sapiens
gaaactcagttaacg

SEQ ID NO: 1949229 - DNA, 15 bp, Homo sapiens
aaactcagttaacga

SEQ ID NO: 1949230 - DNA, 15 bp, Homo sapiens
aactcagttaacgac

SEQ ID NO: 1949231 - DNA, 15 bp, Homo sapiens
actcagttaacgaca

SEQ ID NO: 1949232 - DNA, 15 bp, Homo sapiens
ctcagttaacgacat

SEQ ID NO: 1949233 - DNA, 15 bp, Homo sapiens
tcagttaacgacatg

SEQ ID NO: 1949234 - DNA, 15 bp, Homo sapiens
cagttaacgacatgg

SEQ ID NO: 1949235 - DNA, 15 bp, Homo sapiens
agttaacgacatggc

SEQ ID NO: 1949236 - DNA, 15 bp, Homo sapiens
gttaacgacatggca

SEQ ID NO: 1949237 - DNA, 15 bp, Homo sapiens
ttaacgacatggcat

SEQ ID NO: 1949238 - DNA, 15 bp, Homo sapiens
taacgacatggcatg

SEQ ID NO: 1949239 - DNA, 15 bp, Homo sapiens
aacgacatggcatga

SEQ ID NO: 1949240 - DNA, 15 bp, Homo sapiens
acgacatggcatgag

SEQ ID NO: 1949241 - DNA, 15 bp, Homo sapiens
cgacatggcatgagc

SEQ ID NO: 1949242 - DNA, 15 bp, Homo sapiens
gacatggcatgagct

SEQ ID NO: 1949243 - DNA, 15 bp, Homo sapiens
acatggcatgagctt

SEQ ID NO: 1949244 - DNA, 15 bp, Homo sapiens
catggcatgagcttt

SEQ ID NO: 1949245 - DNA, 15 bp, Homo sapiens
atggcatgagctttt

SEQ ID NO: 1949246 - DNA, 15 bp, Homo sapiens
tggcatgagcttttt

SEQ ID NO: 1949247 - DNA, 15 bp, Homo sapiens
ggcatgagctttttt

SEQ ID NO: 1949248 - DNA, 15 bp, Homo sapiens
gcatgagcttttttg

SEQ ID NO: 1949249 - DNA, 15 bp, Homo sapiens
catgagcttttttgg

SEQ ID NO: 1949250 - DNA, 15 bp, Homo sapiens
atgagcttttttggc

SEQ ID NO: 1949251 - DNA, 15 bp, Homo sapiens
tgagcttttttggca

SEQ ID NO: 1949252 - DNA, 15 bp, Homo sapiens
gagcttttttggcag

SEQ ID NO: 1949253 - DNA, 15 bp, Homo sapiens
agcttttttggcagc

SEQ ID NO: 1949254 - DNA, 15 bp, Homo sapiens
gcttttttggcagct

SEQ ID NO: 1949255 - DNA, 15 bp, Homo sapiens
cttttttggcagcta

SEQ ID NO: 1949256 - DNA, 15 bp, Homo sapiens
ttttttggcagctac

SEQ ID NO: 1949257 - DNA, 15 bp, Homo sapiens
tttttggcagctaca

SEQ ID NO: 1949258 - DNA, 15 bp, Homo sapiens
ttttggcagctacag

SEQ ID NO: 1949259 - DNA, 15 bp, Homo sapiens
tttggcagctacagc

SEQ ID NO: 1949260 - DNA, 15 bp, Homo sapiens
ttggcagctacagca

SEQ ID NO: 1949261 - DNA, 15 bp, Homo sapiens
tggcagctacagcac

SEQ ID NO: 1949262 - DNA, 15 bp, Homo sapiens
ggcagctacagcaca

SEQ ID NO: 1949263 - DNA, 15 bp, Homo sapiens
gcagctacagcacac

SEQ ID NO: 1949264 - DNA, 15 bp, Homo sapiens
cagctacagcacact

SEQ ID NO: 1949265 - DNA, 15 bp, Homo sapiens
agctacagcacacta

SEQ ID NO: 1949266 - DNA, 15 bp, Homo sapiens
gctacagcacactat

SEQ ID NO: 1949267 - DNA, 15 bp, Homo sapiens
ctacagcacactatt

SEQ ID NO: 1949268 - DNA, 15 bp, Homo sapiens
tacagcacactattg

SEQ ID NO: 1949269 - DNA, 15 bp, Homo sapiens
acagcacactattga

SEQ ID NO: 1949270 - DNA, 15 bp, Homo sapiens
cagcacactattgat

SEQ ID NO: 1949271 - DNA, 15 bp, Homo sapiens
agcacactattgatt

SEQ ID NO: 1949272 - DNA, 15 bp, Homo sapiens
gcacactattgattc

SEQ ID NO: 1949273 - DNA, 15 bp, Homo sapiens
cacactattgattca

SEQ ID NO: 1949274 - DNA, 15 bp, Homo sapiens
acactattgattcat

SEQ ID NO: 1949275 - DNA, 15 bp, Homo sapiens
cactattgattcata

SEQ ID NO: 1949276 - DNA, 15 bp, Homo sapiens
actattgattcatat

SEQ ID NO: 1949277 - DNA, 15 bp, Homo sapiens
ctattgattcatatg

SEQ ID NO: 1949278 - DNA, 15 bp, Homo sapiens
tattgattcatatgg

SEQ ID NO: 1949279 - DNA, 15 bp, Homo sapiens
attgattcatatgga

SEQ ID NO: 1949280 - DNA, 15 bp, Homo sapiens
ttgattcatatggag

SEQ ID NO: 1949281 - DNA, 15 bp, Homo sapiens
tgattcatatggagc

SEQ ID NO: 1949282 - DNA, 15 bp, Homo sapiens
gattcatatggagct

SEQ ID NO: 1949283 - DNA, 15 bp, Homo sapiens
attcatatggagctt

SEQ ID NO: 1949284 - DNA, 15 bp, Homo sapiens
ttcatatggagctta

SEQ ID NO: 1949285 - DNA, 15 bp, Homo sapiens
tcatatggagcttat

SEQ ID NO: 1949286 - DNA, 15 bp, Homo sapiens
catatggagcttata

SEQ ID NO: 1949287 - DNA, 15 bp, Homo sapiens
atatggagcttatac

SEQ ID NO: 1949288 - DNA, 15 bp, Homo sapiens
tatggagcttatact

SEQ ID NO: 1949289 - DNA, 15 bp, Homo sapiens
atggagcttatactt

SEQ ID NO: 1949290 - DNA, 15 bp, Homo sapiens
tggagcttatactta

SEQ ID NO: 1949291 - DNA, 15 bp, Homo sapiens
ggagcttatacttaa

SEQ ID NO: 1949292 - DNA, 15 bp, Homo sapiens
gagcttatacttaat

SEQ ID NO: 1949293 - DNA, 15 bp, Homo sapiens
agcttatacttaatt

SEQ ID NO: 1949294 - DNA, 15 bp, Homo sapiens
gcttatacttaatta

SEQ ID NO: 1949295 - DNA, 15 bp, Homo sapiens
cttatacttaattaa

SEQ ID NO: 1949296 - DNA, 15 bp, Homo sapiens
ttatacttaattaaa

SEQ ID NO: 1949297 - DNA, 15 bp, Homo sapiens
tatacttaattaaat

SEQ ID NO: 1949298 - DNA, 15 bp, Homo sapiens
atacttaattaaatt

SEQ ID NO: 1949299 - DNA, 15 bp, Homo sapiens
tacttaattaaattt

SEQ ID NO: 1949300 - DNA, 15 bp, Homo sapiens
acttaattaaatttg

SEQ ID NO: 1949301 - DNA, 15 bp, Homo sapiens
cttaattaaatttgc

SEQ ID NO: 1949302 - DNA, 15 bp, Homo sapiens
ttaattaaatttgct

SEQ ID NO: 1949303 - DNA, 15 bp, Homo sapiens
taattaaatttgctc

SEQ ID NO: 1949304 - DNA, 15 bp, Homo sapiens
aattaaatttgctct

SEQ ID NO: 1949305 - DNA, 15 bp, Homo sapiens
attaaatttgctctc

SEQ ID NO: 1949306 - DNA, 15 bp, Homo sapiens
ttaaatttgctctcc

SEQ ID NO: 1949307 - DNA, 15 bp, Homo sapiens
taaatttgctctccc

SEQ ID NO: 1949308 - DNA, 15 bp, Homo sapiens
aaatttgctctccca

SEQ ID NO: 1949309 - DNA, 15 bp, Homo sapiens
aatttgctctcccaa

SEQ ID NO: 1949310 - DNA, 15 bp, Homo sapiens
atttgctctcccaac

SEQ ID NO: 1949311 - DNA, 15 bp, Homo sapiens
tttgctctcccaaca

SEQ ID NO: 1949312 - DNA, 15 bp, Homo sapiens
ttgctctcccaacat

SEQ ID NO: 1949313 - DNA, 15 bp, Homo sapiens
tgctctcccaacatt

SEQ ID NO: 1949314 - DNA, 15 bp, Homo sapiens
gctctcccaacattt

SEQ ID NO: 1949315 - DNA, 15 bp, Homo sapiens
ctctcccaacatttg

SEQ ID NO: 1949316 - DNA, 15 bp, Homo sapiens
tctcccaacatttga

SEQ ID NO: 1949317 - DNA, 15 bp, Homo sapiens
ctcccaacatttgat

SEQ ID NO: 1949318 - DNA, 15 bp, Homo sapiens
tcccaacatttgatt

SEQ ID NO: 1949319 - DNA, 15 bp, Homo sapiens
cccaacatttgattt

SEQ ID NO: 1949320 - DNA, 15 bp, Homo sapiens
ccaacatttgattta

SEQ ID NO: 1949321 - DNA, 15 bp, Homo sapiens
caacatttgatttat

SEQ ID NO: 1949322 - DNA, 15 bp, Homo sapiens
aacatttgatttata

SEQ ID NO: 1949323 - DNA, 15 bp, Homo sapiens
acatttgatttatac

SEQ ID NO: 1949324 - DNA, 15 bp, Homo sapiens
catttgatttataca

SEQ ID NO: 1949325 - DNA, 15 bp, Homo sapiens
atttgatttatacat

SEQ ID NO: 1949326 - DNA, 15 bp, Homo sapiens
tttgatttatacatg

SEQ ID NO: 1949327 - DNA, 15 bp, Homo sapiens
ttgatttatacatgc

SEQ ID NO: 1949328 - DNA, 15 bp, Homo sapiens
tgatttatacatgct

SEQ ID NO: 1949329 - DNA, 15 bp, Homo sapiens
gatttatacatgctg

SEQ ID NO: 1949330 - DNA, 15 bp, Homo sapiens
atttatacatgctgc

SEQ ID NO: 1949331 - DNA, 15 bp, Homo sapiens
tttatacatgctgct

SEQ ID NO: 1949332 - DNA, 15 bp, Homo sapiens
ttatacatgctgctc

SEQ ID NO: 1949333 - DNA, 15 bp, Homo sapiens
tatacatgctgctct

SEQ ID NO: 1949334 - DNA, 15 bp, Homo sapiens
atacatgctgctctt

SEQ ID NO: 1949335 - DNA, 15 bp, Homo sapiens
tacatgctgctcttt

SEQ ID NO: 1949336 - DNA, 15 bp, Homo sapiens
acatgctgctcttta

SEQ ID NO: 1949337 - DNA, 15 bp, Homo sapiens
catgctgctctttat

SEQ ID NO: 1949338 - DNA, 15 bp, Homo sapiens
atgctgctctttatt

SEQ ID NO: 1949339 - DNA, 15 bp, Homo sapiens
tgctgctctttatta

SEQ ID NO: 1949340 - DNA, 15 bp, Homo sapiens
gctgctctttattaa

SEQ ID NO: 1949341 - DNA, 15 bp, Homo sapiens
ctgctctttattaaa

SEQ ID NO: 1949342 - DNA, 15 bp, Homo sapiens
tgctctttattaaag

SEQ ID NO: 1949343 - DNA, 15 bp, Homo sapiens
gctctttattaaagc

SEQ ID NO: 1949344 - DNA, 15 bp, Homo sapiens
ctctttattaaagca

SEQ ID NO: 1949345 - DNA, 15 bp, Homo sapiens
tctttattaaagcag

SEQ ID NO: 1949346 - DNA, 15 bp, Homo sapiens
ctttattaaagcagg

SEQ ID NO: 1949347 - DNA, 15 bp, Homo sapiens
tttattaaagcaggt

SEQ ID NO: 1949348 - DNA, 15 bp, Homo sapiens
ttattaaagcaggtt

SEQ ID NO: 1949349 - DNA, 15 bp, Homo sapiens
tattaaagcaggttc

SEQ ID NO: 1949350 - DNA, 15 bp, Homo sapiens
attaaagcaggttcc

SEQ ID NO: 1949351 - DNA, 15 bp, Homo sapiens
ttaaagcaggttccc

SEQ ID NO: 1949352 - DNA, 15 bp, Homo sapiens
taaagcaggttccct

SEQ ID NO: 1949353 - DNA, 15 bp, Homo sapiens
aaagcaggttccctc

SEQ ID NO: 1949354 - DNA, 15 bp, Homo sapiens
aagcaggttccctcc

SEQ ID NO: 1949355 - DNA, 15 bp, Homo sapiens
agcaggttccctcca

SEQ ID NO: 1949356 - DNA, 15 bp, Homo sapiens
gcaggttccctccat

SEQ ID NO: 1949357 - DNA, 15 bp, Homo sapiens
caggttccctccatt

SEQ ID NO: 1949358 - DNA, 15 bp, Homo sapiens
aggttccctccattc

SEQ ID NO: 1949359 - DNA, 15 bp, Homo sapiens
ggttccctccattct

SEQ ID NO: 1949360 - DNA, 15 bp, Homo sapiens
gttccctccattctt

SEQ ID NO: 1949361 - DNA, 15 bp, Homo sapiens
ttccctccattctta

SEQ ID NO: 1949362 - DNA, 15 bp, Homo sapiens
tccctccattcttaa

SEQ ID NO: 1949363 - DNA, 15 bp, Homo sapiens
ccctccattcttaaa

SEQ ID NO: 1949364 - DNA, 15 bp, Homo sapiens
cctccattcttaaac

SEQ ID NO: 1949365 - DNA, 15 bp, Homo sapiens
ctccattcttaaact

SEQ ID NO: 1949366 - DNA, 15 bp, Homo sapiens
tccattcttaaactg

SEQ ID NO: 1949367 - DNA, 15 bp, Homo sapiens
ccattcttaaactgt

SEQ ID NO: 1949368 - DNA, 15 bp, Homo sapiens
cattcttaaactgtt

SEQ ID NO: 1949369 - DNA, 15 bp, Homo sapiens
attcttaaactgttg

SEQ ID NO: 1949370 - DNA, 15 bp, Homo sapiens
ttcttaaactgttga

SEQ ID NO: 1949371 - DNA, 15 bp, Homo sapiens
tcttaaactgttgag

SEQ ID NO: 1949372 - DNA, 15 bp, Homo sapiens
cttaaactgttgaga

SEQ ID NO: 1949373 - DNA, 15 bp, Homo sapiens
ttaaactgttgagat

SEQ ID NO: 1949374 - DNA, 15 bp, Homo sapiens
taaactgttgagatt

SEQ ID NO: 1949375 - DNA, 15 bp, Homo sapiens
aaactgttgagattt

SEQ ID NO: 1949376 - DNA, 15 bp, Homo sapiens
aactgttgagatttg

SEQ ID NO: 1949377 - DNA, 15 bp, Homo sapiens
actgttgagatttgt

SEQ ID NO: 1949378 - DNA, 15 bp, Homo sapiens
ctgttgagatttgtg

SEQ ID NO: 1949379 - DNA, 15 bp, Homo sapiens
tgttgagatttgtgt

SEQ ID NO: 1949380 - DNA, 15 bp, Homo sapiens
gttgagatttgtgta

SEQ ID NO: 1949381 - DNA, 15 bp, Homo sapiens
ttgagatttgtgtag

SEQ ID NO: 1949382 - DNA, 15 bp, Homo sapiens
tgagatttgtgtagc

SEQ ID NO: 1949383 - DNA, 15 bp, Homo sapiens
gagatttgtgtagca

SEQ ID NO: 1949384 - DNA, 15 bp, Homo sapiens
agatttgtgtagcat

SEQ ID NO: 1949385 - DNA, 15 bp, Homo sapiens
gatttgtgtagcatt

SEQ ID NO: 1949386 - DNA, 15 bp, Homo sapiens
atttgtgtagcattt

SEQ ID NO: 1949387 - DNA, 15 bp, Homo sapiens
tttgtgtagcattta

SEQ ID NO: 1949388 - DNA, 15 bp, Homo sapiens
ttgtgtagcatttaa

SEQ ID NO: 1949389 - DNA, 15 bp, Homo sapiens
tgtgtagcatttaaa

SEQ ID NO: 1949390 - DNA, 15 bp, Homo sapiens
gtgtagcatttaaat

SEQ ID NO: 1949391 - DNA, 15 bp, Homo sapiens
tgtagcatttaaata

SEQ ID NO: 1949392 - DNA, 15 bp, Homo sapiens
gtagcatttaaatac

SEQ ID NO: 1949393 - DNA, 15 bp, Homo sapiens
tagcatttaaatacg

SEQ ID NO: 1949394 - DNA, 15 bp, Homo sapiens
agcatttaaatacgc

SEQ ID NO: 1949395 - DNA, 15 bp, Homo sapiens
gcatttaaatacgca

SEQ ID NO: 1949396 - DNA, 15 bp, Homo sapiens
catttaaatacgcaa

SEQ ID NO: 1949397 - DNA, 15 bp, Homo sapiens
atttaaatacgcaag

SEQ ID NO: 1949398 - DNA, 15 bp, Homo sapiens
tttaaatacgcaaga

SEQ ID NO: 1949399 - DNA, 15 bp, Homo sapiens
ttaaatacgcaagaa

SEQ ID NO: 1949400 - DNA, 15 bp, Homo sapiens
taaatacgcaagaat

SEQ ID NO: 1949401 - DNA, 15 bp, Homo sapiens
aaatacgcaagaatt

SEQ ID NO: 1949402 - DNA, 15 bp, Homo sapiens
aatacgcaagaattt

SEQ ID NO: 1949403 - DNA, 15 bp, Homo sapiens
atacgcaagaattta

SEQ ID NO: 1949404 - DNA, 15 bp, Homo sapiens
tacgcaagaatttaa

SEQ ID NO: 1949405 - DNA, 15 bp, Homo sapiens
acgcaagaatttaaa

SEQ ID NO: 1949406 - DNA, 15 bp, Homo sapiens
cgcaagaatttaaaa

SEQ ID NO: 1949407 - DNA, 15 bp, Homo sapiens
gcaagaatttaaaat

SEQ ID NO: 1949408 - DNA, 15 bp, Homo sapiens
caagaatttaaaatt

SEQ ID NO: 1949409 - DNA, 15 bp, Homo sapiens
aagaatttaaaattt

SEQ ID NO: 1949410 - DNA, 15 bp, Homo sapiens
agaatttaaaattta

SEQ ID NO: 1949411 - DNA, 15 bp, Homo sapiens
gaatttaaaatttat

SEQ ID NO: 1949412 - DNA, 15 bp, Homo sapiens
aatttaaaatttatt

SEQ ID NO: 1949413 - DNA, 15 bp, Homo sapiens
atttaaaatttattc

SEQ ID NO: 1949414 - DNA, 15 bp, Homo sapiens
tttaaaatttattcc

SEQ ID NO: 1949415 - DNA, 15 bp, Homo sapiens
ttaaaatttattcct

SEQ ID NO: 1949416 - DNA, 15 bp, Homo sapiens
taaaatttattccta

SEQ ID NO: 1949417 - DNA, 15 bp, Homo sapiens
aaaatttattcctat

SEQ ID NO: 1949418 - DNA, 15 bp, Homo sapiens
aaatttattcctata

SEQ ID NO: 1949419 - DNA, 15 bp, Homo sapiens
aatttattcctatat

SEQ ID NO: 1949420 - DNA, 15 bp, Homo sapiens
atttattcctatatg

SEQ ID NO: 1949421 - DNA, 15 bp, Homo sapiens
ttattcctatatgtg

SEQ ID NO: 1949422 - DNA, 15 bp, Homo sapiens
tattcctatatgtga

SEQ ID NO: 1949423 - DNA, 15 bp, Homo sapiens
attcctatatgtgac

SEQ ID NO: 1949424 - DNA, 15 bp, Homo sapiens
ttcctatatgtgact

SEQ ID NO: 1949425 - DNA, 15 bp, Homo sapiens
tcctatatgtgacta

SEQ ID NO: 1949426 - DNA, 15 bp, Homo sapiens
cctatatgtgactac

SEQ ID NO: 1949427 - DNA, 15 bp, Homo sapiens
ctatatgtgactaca

SEQ ID NO: 1949428 - DNA, 15 bp, Homo sapiens
tatatgtgactacat

SEQ ID NO: 1949429 - DNA, 15 bp, Homo sapiens
atatgtgactacatc

SEQ ID NO: 1949430 - DNA, 15 bp, Homo sapiens
tatgtgactacatct

SEQ ID NO: 1949431 - DNA, 15 bp, Homo sapiens
atgtgactacatctt

SEQ ID NO: 1949432 - DNA, 15 bp, Homo sapiens
tgtgactacatcttg

SEQ ID NO: 1949433 - DNA, 15 bp, Homo sapiens
gtgactacatcttgt

SEQ ID NO: 1949434 - DNA, 15 bp, Homo sapiens
tgactacatcttgtt

SEQ ID NO: 1949435 - DNA, 15 bp, Homo sapiens
tttctggaacaaggc

SEQ ID NO: 1949436 - DNA, 15 bp, Homo sapiens
ttctggaacaaggct

SEQ ID NO: 1949437 - DNA, 15 bp, Homo sapiens
tctggaacaaggctg

SEQ ID NO: 1949438 - DNA, 15 bp, Homo sapiens
ctggaacaaggctgt

SEQ ID NO: 1949439 - DNA, 15 bp, Homo sapiens
tggaacaaggctgtc

SEQ ID NO: 1949440 - DNA, 15 bp, Homo sapiens
ggaacaaggctgtca

SEQ ID NO: 1949441 - DNA, 15 bp, Homo sapiens
gaacaaggctgtcag

SEQ ID NO: 1949442 - DNA, 15 bp, Homo sapiens
aacaaggctgtcagc

SEQ ID NO: 1949443 - DNA, 15 bp, Homo sapiens
acaaggctgtcagct

SEQ ID NO: 1949444 - DNA, 15 bp, Homo sapiens
caaggctgtcagcta

SEQ ID NO: 1949445 - DNA, 15 bp, Homo sapiens
aaggctgtcagctag

SEQ ID NO: 1949446 - DNA, 15 bp, Homo sapiens
aggctgtcagctagt

SEQ ID NO: 1949447 - DNA, 15 bp, Homo sapiens
ggctgtcagctagtt

SEQ ID NO: 1949448 - DNA, 15 bp, Homo sapiens
gctgtcagctagttt

SEQ ID NO: 1949449 - DNA, 15 bp, Homo sapiens
ctgtcagctagtttt

SEQ ID NO: 1949450 - DNA, 15 bp, Homo sapiens
tgtcagctagttttc

SEQ ID NO: 1949451 - DNA, 15 bp, Homo sapiens
gtcagctagttttca

SEQ ID NO: 1949452 - DNA, 15 bp, Homo sapiens
tcagctagttttcaa

SEQ ID NO: 1949453 - DNA, 15 bp, Homo sapiens
cagctagttttcaaa

SEQ ID NO: 1949454 - DNA, 15 bp, Homo sapiens
agctagttttcaaaa

SEQ ID NO: 1949455 - DNA, 15 bp, Homo sapiens
gctagttttcaaaat

SEQ ID NO: 1949456 - DNA, 15 bp, Homo sapiens
ctagttttcaaaatc

SEQ ID NO: 1949457 - DNA, 15 bp, Homo sapiens
tagttttcaaaatcc

SEQ ID NO: 1949458 - DNA, 15 bp, Homo sapiens
gttttcaaaatcctg

SEQ ID NO: 1949459 - DNA, 15 bp, Homo sapiens
ttttcaaaatcctgc

SEQ ID NO: 1949460 - DNA, 15 bp, Homo sapiens
tttcaaaatcctgca

SEQ ID NO: 1949461 - DNA, 15 bp, Homo sapiens
ttcaaaatcctgcac

SEQ ID NO: 1949462 - DNA, 15 bp, Homo sapiens
tcaaaatcctgcact

SEQ ID NO: 1949463 - DNA, 15 bp, Homo sapiens
caaaatcctgcactt

SEQ ID NO: 1949464 - DNA, 15 bp, Homo sapiens
aaaatcctgcacttc

SEQ ID NO: 1949465 - DNA, 15 bp, Homo sapiens
aaatcctgcacttct

SEQ ID NO: 1949466 - DNA, 15 bp, Homo sapiens
aatcctgcacttctg

SEQ ID NO: 1949467 - DNA, 15 bp, Homo sapiens
atcctgcacttctga

SEQ ID NO: 1949468 - DNA, 15 bp, Homo sapiens
tcctgcacttctgat

SEQ ID NO: 1949469 - DNA, 15 bp, Homo sapiens
cctgcacttctgatg

SEQ ID NO: 1949470 - DNA, 15 bp, Homo sapiens
ctgcacttctgatga

SEQ ID NO: 1949471 - DNA, 15 bp, Homo sapiens
tgcacttctgatgaa

SEQ ID NO: 1949472 - DNA, 15 bp, Homo sapiens
gcacttctgatgaaa

SEQ ID NO: 1949473 - DNA, 15 bp, Homo sapiens
cacttctgatgaaat

SEQ ID NO: 1949474 - DNA, 15 bp, Homo sapiens
acttctgatgaaatc

SEQ ID NO: 1949475 - DNA, 15 bp, Homo sapiens
cttctgatgaaatca

SEQ ID NO: 1949476 - DNA, 15 bp, Homo sapiens
ttctgatgaaatcaa

SEQ ID NO: 1949477 - DNA, 15 bp, Homo sapiens
tctgatgaaatcaat

SEQ ID NO: 1949478 - DNA, 15 bp, Homo sapiens
ctgatgaaatcaatg

SEQ ID NO: 1949479 - DNA, 15 bp, Homo sapiens
tgatgaaatcaatga

SEQ ID NO: 1949480 - DNA, 15 bp, Homo sapiens
gatgaaatcaatgaa

SEQ ID NO: 1949481 - DNA, 15 bp, Homo sapiens
atgaaatcaatgaat

SEQ ID NO: 1949482 - DNA, 15 bp, Homo sapiens
tgaaatcaatgaatt

SEQ ID NO: 1949483 - DNA, 15 bp, Homo sapiens
gaaatcaatgaattg

SEQ ID NO: 1949484 - DNA, 15 bp, Homo sapiens
aaatcaatgaattga

SEQ ID NO: 1949485 - DNA, 15 bp, Homo sapiens
aatcaatgaattgaa

SEQ ID NO: 1949486 - DNA, 15 bp, Homo sapiens
atcaatgaattgaaa

SEQ ID NO: 1949487 - DNA, 15 bp, Homo sapiens
tcaatgaattgaaag

SEQ ID NO: 1949488 - DNA, 15 bp, Homo sapiens
caatgaattgaaagt

SEQ ID NO: 1949489 - DNA, 15 bp, Homo sapiens
aatgaattgaaagtc

SEQ ID NO: 1949490 - DNA, 15 bp, Homo sapiens
atgaattgaaagtcc

SEQ ID NO: 1949491 - DNA, 15 bp, Homo sapiens
tgaattgaaagtcct

SEQ ID NO: 1949492 - DNA, 15 bp, Homo sapiens
gaattgaaagtcctc

SEQ ID NO: 1949493 - DNA, 15 bp, Homo sapiens
aattgaaagtcctcc

SEQ ID NO: 1949494 - DNA, 15 bp, Homo sapiens
attgaaagtcctcct

SEQ ID NO: 1949495 - DNA, 15 bp, Homo sapiens
ttgaaagtcctcctc

SEQ ID NO: 1949496 - DNA, 15 bp, Homo sapiens
tgaaagtcctcctct

SEQ ID NO: 1949497 - DNA, 15 bp, Homo sapiens
gaaagtcctcctctc

SEQ ID NO: 1949498 - DNA, 15 bp, Homo sapiens
aaagtcctcctctct

SEQ ID NO: 1949499 - DNA, 15 bp, Homo sapiens
aagtcctcctctctg

SEQ ID NO: 1949500 - DNA, 15 bp, Homo sapiens
agtcctcctctctgg

SEQ ID NO: 1949501 - DNA, 15 bp, Homo sapiens
gtcctcctctctggt

SEQ ID NO: 1949502 - DNA, 15 bp, Homo sapiens
tcctcctctctggtg

SEQ ID NO: 1949503 - DNA, 15 bp, Homo sapiens
cctcctctctggtgt

SEQ ID NO: 1949504 - DNA, 15 bp, Homo sapiens
ctcctctctggtgtg

SEQ ID NO: 1949505 - DNA, 15 bp, Homo sapiens
tcctctctggtgtgg

SEQ ID NO: 1949506 - DNA, 15 bp, Homo sapiens
cctctctggtgtgga

SEQ ID NO: 1949507 - DNA, 15 bp, Homo sapiens
tctctggtgtggaga

SEQ ID NO: 1949508 - DNA, 15 bp, Homo sapiens
ctctggtgtggagat

SEQ ID NO: 1949509 - DNA, 15 bp, Homo sapiens
tctggtgtggagata

SEQ ID NO: 1949510 - DNA, 15 bp, Homo sapiens
ctggtgtggagataa

SEQ ID NO: 1949511 - DNA, 15 bp, Homo sapiens
tggtgtggagataac

SEQ ID NO: 1949512 - DNA, 15 bp, Homo sapiens
ggtgtggagataacg

SEQ ID NO: 1949513 - DNA, 15 bp, Homo sapiens
gtgtggagataacgt

SEQ ID NO: 1949514 - DNA, 15 bp, Homo sapiens
tgtggagataacgtt

SEQ ID NO: 1949515 - DNA, 15 bp, Homo sapiens
gtggagataacgttg

SEQ ID NO: 1949516 - DNA, 15 bp, Homo sapiens
tggagataacgttga

SEQ ID NO: 1949517 - DNA, 15 bp, Homo sapiens
ggagataacgttgaa

SEQ ID NO: 1949518 - DNA, 15 bp, Homo sapiens
gagataacgttgaac

SEQ ID NO: 1949519 - DNA, 15 bp, Homo sapiens
agataacgttgaact

SEQ ID NO: 1949520 - DNA, 15 bp, Homo sapiens
gataacgttgaactg

SEQ ID NO: 1949521 - DNA, 15 bp, Homo sapiens
ataacgttgaactga

SEQ ID NO: 1949522 - DNA, 15 bp, Homo sapiens
taacgttgaactgat

SEQ ID NO: 1949523 - DNA, 15 bp, Homo sapiens
aacgttgaactgatc

SEQ ID NO: 1949524 - DNA, 15 bp, Homo sapiens
acgttgaactgatcc

SEQ ID NO: 1949525 - DNA, 15 bp, Homo sapiens
cgttgaactgatcca

SEQ ID NO: 1949526 - DNA, 15 bp, Homo sapiens
gttgaactgatccag

SEQ ID NO: 1949527 - DNA, 15 bp, Homo sapiens
ttgaactgatccagg

SEQ ID NO: 1949528 - DNA, 15 bp, Homo sapiens
tgaactgatccaggt

SEQ ID NO: 1949529 - DNA, 15 bp, Homo sapiens
gaactgatccaggtt

SEQ ID NO: 1949530 - DNA, 15 bp, Homo sapiens
aactgatccaggttc

SEQ ID NO: 1949531 - DNA, 15 bp, Homo sapiens
actgatccaggttcc

SEQ ID NO: 1949532 - DNA, 15 bp, Homo sapiens
ctgatccaggttcct

SEQ ID NO: 1949533 - DNA, 15 bp, Homo sapiens
tgatccaggttcctg

SEQ ID NO: 1949534 - DNA, 15 bp, Homo sapiens
gatccaggttcctga

SEQ ID NO: 1949535 - DNA, 15 bp, Homo sapiens
atccaggttcctgag

SEQ ID NO: 1949536 - DNA, 15 bp, Homo sapiens
tccaggttcctgagc

SEQ ID NO: 1949537 - DNA, 15 bp, Homo sapiens
ccaggttcctgagca

SEQ ID NO: 1949538 - DNA, 15 bp, Homo sapiens
caggttcctgagcag

SEQ ID NO: 1949539 - DNA, 15 bp, Homo sapiens
aggttcctgagcagc

SEQ ID NO: 1949540 - DNA, 15 bp, Homo sapiens
ggttcctgagcagct

SEQ ID NO: 1949541 - DNA, 15 bp, Homo sapiens
gttcctgagcagctc

SEQ ID NO: 1949542 - DNA, 15 bp, Homo sapiens
ttcctgagcagctca

SEQ ID NO: 1949543 - DNA, 15 bp, Homo sapiens
tcctgagcagctcaa

SEQ ID NO: 1949544 - DNA, 15 bp, Homo sapiens
cctgagcagctcaag

SEQ ID NO: 1949545 - DNA, 15 bp, Homo sapiens
ctgagcagctcaagg

SEQ ID NO: 1949546 - DNA, 15 bp, Homo sapiens
tgagcagctcaagga

SEQ ID NO: 1949547 - DNA, 15 bp, Homo sapiens
gagcagctcaaggag

SEQ ID NO: 1949548 - DNA, 15 bp, Homo sapiens
agcagctcaaggagg

SEQ ID NO: 1949549 - DNA, 15 bp, Homo sapiens
gcagctcaaggaggt

SEQ ID NO: 1949550 - DNA, 15 bp, Homo sapiens
cagctcaaggaggtc

SEQ ID NO: 1949551 - DNA, 15 bp, Homo sapiens
agctcaaggaggtcg

SEQ ID NO: 1949552 - DNA, 15 bp, Homo sapiens
gctcaaggaggtcga

SEQ ID NO: 1949553 - DNA, 15 bp, Homo sapiens
ctcaaggaggtcgat

SEQ ID NO: 1949554 - DNA, 15 bp, Homo sapiens
tcaaggaggtcgatg

SEQ ID NO: 1949555 - DNA, 15 bp, Homo sapiens
caaggaggtcgatgg

SEQ ID NO: 1949556 - DNA, 15 bp, Homo sapiens
aaggaggtcgatgga

SEQ ID NO: 1949557 - DNA, 15 bp, Homo sapiens
aggaggtcgatggaa

SEQ ID NO: 1949558 - DNA, 15 bp, Homo sapiens
ggaggtcgatggaag

SEQ ID NO: 1949559 - DNA, 15 bp, Homo sapiens
gaggtcgatggaaga

SEQ ID NO: 1949560 - DNA, 15 bp, Homo sapiens
aggtcgatggaagag

SEQ ID NO: 1949561 - DNA, 15 bp, Homo sapiens
ggtcgatggaagagg

SEQ ID NO: 1949562 - DNA, 15 bp, Homo sapiens
gtcgatggaagagga

SEQ ID NO: 1949563 - DNA, 15 bp, Homo sapiens
tcgatggaagaggaa

SEQ ID NO: 1949564 - DNA, 15 bp, Homo sapiens
cgatggaagaggaaa

SEQ ID NO: 1949565 - DNA, 15 bp, Homo sapiens
gatggaagaggaaaa

SEQ ID NO: 1949566 - DNA, 15 bp, Homo sapiens
atggaagaggaaaag

SEQ ID NO: 1949567 - DNA, 15 bp, Homo sapiens
tggaagaggaaaagg

SEQ ID NO: 1949568 - DNA, 15 bp, Homo sapiens
ggaagaggaaaagga

SEQ ID NO: 1949569 - DNA, 15 bp, Homo sapiens
gaagaggaaaaggat

SEQ ID NO: 1949570 - DNA, 15 bp, Homo sapiens
aagaggaaaaggatt

SEQ ID NO: 1949571 - DNA, 15 bp, Homo sapiens
agaggaaaaggattt

SEQ ID NO: 1949572 - DNA, 15 bp, Homo sapiens
gaggaaaaggattta

SEQ ID NO: 1949573 - DNA, 15 bp, Homo sapiens
aggaaaaggatttaa

SEQ ID NO: 1949574 - DNA, 15 bp, Homo sapiens
ggaaaaggatttaat

SEQ ID NO: 1949575 - DNA, 15 bp, Homo sapiens
gaaaaggatttaatg

SEQ ID NO: 1949576 - DNA, 15 bp, Homo sapiens
aaaaggatttaatgt

SEQ ID NO: 1949577 - DNA, 15 bp, Homo sapiens
aaaggatttaatgta

SEQ ID NO: 1949578 - DNA, 15 bp, Homo sapiens
aaggatttaatgtaa

SEQ ID NO: 1949579 - DNA, 15 bp, Homo sapiens
aggatttaatgtaaa

SEQ ID NO: 1949580 - DNA, 15 bp, Homo sapiens
ggatttaatgtaaat

SEQ ID NO: 1949581 - DNA, 15 bp, Homo sapiens
gatttaatgtaaatt

SEQ ID NO: 1949582 - DNA, 15 bp, Homo sapiens
atttaatgtaaattt

SEQ ID NO: 1949583 - DNA, 15 bp, Homo sapiens
tttaatgtaaattta

SEQ ID NO: 1949584 - DNA, 15 bp, Homo sapiens
ttaatgtaaatttaa

SEQ ID NO: 1949585 - DNA, 15 bp, Homo sapiens
taatgtaaatttaat

SEQ ID NO: 1949586 - DNA, 15 bp, Homo sapiens
aatgtaaatttaatg

SEQ ID NO: 1949587 - DNA, 15 bp, Homo sapiens
atgtaaatttaatgc

SEQ ID NO: 1949588 - DNA, 15 bp, Homo sapiens
tgtaaatttaatgca

SEQ ID NO: 1949589 - DNA, 15 bp, Homo sapiens
gtaaatttaatgcag

SEQ ID NO: 1949590 - DNA, 15 bp, Homo sapiens
taaatttaatgcagt

SEQ ID NO: 1949591 - DNA, 15 bp, Homo sapiens
aaatttaatgcagtt

SEQ ID NO: 1949592 - DNA, 15 bp, Homo sapiens
aatttaatgcagttt

SEQ ID NO: 1949593 - DNA, 15 bp, Homo sapiens
atttaatgcagtttc

SEQ ID NO: 1949594 - DNA, 15 bp, Homo sapiens
tttaatgcagtttct

SEQ ID NO: 1949595 - DNA, 15 bp, Homo sapiens
ttaatgcagtttctt

SEQ ID NO: 1949596 - DNA, 15 bp, Homo sapiens
taatgcagtttctta

SEQ ID NO: 1949597 - DNA, 15 bp, Homo sapiens
aatgcagtttcttag

SEQ ID NO: 1949598 - DNA, 15 bp, Homo sapiens
atgcagtttcttaga

SEQ ID NO: 1949599 - DNA, 15 bp, Homo sapiens
tgcagtttcttagat

SEQ ID NO: 1949600 - DNA, 15 bp, Homo sapiens
gcagtttcttagatc

SEQ ID NO: 1949601 - DNA, 15 bp, Homo sapiens
cagtttcttagatct

SEQ ID NO: 1949602 - DNA, 15 bp, Homo sapiens
agtttcttagatctg

SEQ ID NO: 1949603 - DNA, 15 bp, Homo sapiens
gtttcttagatctga

SEQ ID NO: 1949604 - DNA, 15 bp, Homo sapiens
tttcttagatctgat

SEQ ID NO: 1949605 - DNA, 15 bp, Homo sapiens
ttcttagatctgatc

SEQ ID NO: 1949606 - DNA, 15 bp, Homo sapiens
tcttagatctgatct

SEQ ID NO: 1949607 - DNA, 15 bp, Homo sapiens
cttagatctgatctt

SEQ ID NO: 1949608 - DNA, 15 bp, Homo sapiens
ttagatctgatctta

SEQ ID NO: 1949609 - DNA, 15 bp, Homo sapiens
tagatctgatcttag

SEQ ID NO: 1949610 - DNA, 15 bp, Homo sapiens
agatctgatcttaga

SEQ ID NO: 1949611 - DNA, 15 bp, Homo sapiens
gatctgatcttagag

SEQ ID NO: 1949612 - DNA, 15 bp, Homo sapiens
atctgatcttagaga

SEQ ID NO: 1949613 - DNA, 15 bp, Homo sapiens
tctgatcttagagaa

SEQ ID NO: 1949614 - DNA, 15 bp, Homo sapiens
ctgatcttagagaat

SEQ ID NO: 1949615 - DNA, 15 bp, Homo sapiens
tgatcttagagaata

SEQ ID NO: 1949616 - DNA, 15 bp, Homo sapiens
gatcttagagaatat

SEQ ID NO: 1949617 - DNA, 15 bp, Homo sapiens
atcttagagaatatc

SEQ ID NO: 1949618 - DNA, 15 bp, Homo sapiens
tcttagagaatatct

SEQ ID NO: 1949619 - DNA, 15 bp, Homo sapiens
cttagagaatatcta

SEQ ID NO: 1949620 - DNA, 15 bp, Homo sapiens
ttagagaatatctaa

SEQ ID NO: 1949621 - DNA, 15 bp, Homo sapiens
tagagaatatctaac

SEQ ID NO: 1949622 - DNA, 15 bp, Homo sapiens
agagaatatctaact

SEQ ID NO: 1949623 - DNA, 15 bp, Homo sapiens
gagaatatctaacta

SEQ ID NO: 1949624 - DNA, 15 bp, Homo sapiens
agaatatctaactag

SEQ ID NO: 1949625 - DNA, 15 bp, Homo sapiens
gaatatctaactagg

SEQ ID NO: 1949626 - DNA, 15 bp, Homo sapiens
aatatctaactaggt

SEQ ID NO: 1949627 - DNA, 15 bp, Homo sapiens
atatctaactaggtt

SEQ ID NO: 1949628 - DNA, 15 bp, Homo sapiens
tatctaactaggttg

SEQ ID NO: 1949629 - DNA, 15 bp, Homo sapiens
atctaactaggttga

SEQ ID NO: 1949630 - DNA, 15 bp, Homo sapiens
tctaactaggttgaa

SEQ ID NO: 1949631 - DNA, 15 bp, Homo sapiens
ctaactaggttgaaa

SEQ ID NO: 1949632 - DNA, 15 bp, Homo sapiens
taactaggttgaaaa

SEQ ID NO: 1949633 - DNA, 15 bp, Homo sapiens
aactaggttgaaaat

SEQ ID NO: 1949634 - DNA, 15 bp, Homo sapiens
actaggttgaaaatt

SEQ ID NO: 1949635 - DNA, 15 bp, Homo sapiens
ctaggttgaaaattc

SEQ ID NO: 1949636 - DNA, 15 bp, Homo sapiens
taggttgaaaattct

SEQ ID NO: 1949637 - DNA, 15 bp, Homo sapiens
aggttgaaaattctc

SEQ ID NO: 1949638 - DNA, 15 bp, Homo sapiens
ggttgaaaattctct

SEQ ID NO: 1949639 - DNA, 15 bp, Homo sapiens
gttgaaaattctctt

SEQ ID NO: 1949640 - DNA, 15 bp, Homo sapiens
ttgaaaattctcttt

SEQ ID NO: 1949641 - DNA, 15 bp, Homo sapiens
tgaaaattctctttc

SEQ ID NO: 1949642 - DNA, 15 bp, Homo sapiens
gaaaattctctttct

SEQ ID NO: 1949643 - DNA, 15 bp, Homo sapiens
aaaattctctttctg

SEQ ID NO: 1949644 - DNA, 15 bp, Homo sapiens
aaattctctttctgt

SEQ ID NO: 1949645 - DNA, 15 bp, Homo sapiens
aattctctttctgtt

SEQ ID NO: 1949646 - DNA, 15 bp, Homo sapiens
attctctttctgttg

SEQ ID NO: 1949647 - DNA, 15 bp, Homo sapiens
ttctctttctgttgt

SEQ ID NO: 1949648 - DNA, 15 bp, Homo sapiens
tctctttctgttgta

SEQ ID NO: 1949649 - DNA, 15 bp, Homo sapiens
ctctttctgttgtat

SEQ ID NO: 1949650 - DNA, 15 bp, Homo sapiens
tctttctgttgtatt

SEQ ID NO: 1949651 - DNA, 15 bp, Homo sapiens
ctttctgttgtattt

SEQ ID NO: 1949652 - DNA, 15 bp, Homo sapiens
tttctgttgtatttt

SEQ ID NO: 1949653 - DNA, 15 bp, Homo sapiens
ttctgttgtattttc

SEQ ID NO: 1949654 - DNA, 15 bp, Homo sapiens
tctgttgtattttca

SEQ ID NO: 1949655 - DNA, 15 bp, Homo sapiens
ctgttgtattttcaa

SEQ ID NO: 1949656 - DNA, 15 bp, Homo sapiens
tgttgtattttcaat

SEQ ID NO: 1949657 - DNA, 15 bp, Homo sapiens
gttgtattttcaatg

SEQ ID NO: 1949658 - DNA, 15 bp, Homo sapiens
ttgtattttcaatgg

SEQ ID NO: 1949659 - DNA, 15 bp, Homo sapiens
tgtattttcaatgga

SEQ ID NO: 1949660 - DNA, 15 bp, Homo sapiens
gtattttcaatggaa

SEQ ID NO: 1949661 - DNA, 15 bp, Homo sapiens
tattttcaatggaag

SEQ ID NO: 1949662 - DNA, 15 bp, Homo sapiens
attttcaatggaaga

SEQ ID NO: 1949663 - DNA, 15 bp, Homo sapiens
ttttcaatggaagag

SEQ ID NO: 1949664 - DNA, 15 bp, Homo sapiens
tttcaatggaagagc

SEQ ID NO: 1949665 - DNA, 15 bp, Homo sapiens
ttcaatggaagagca

SEQ ID NO: 1949666 - DNA, 15 bp, Homo sapiens
tcaatggaagagcaa

SEQ ID NO: 1949667 - DNA, 15 bp, Homo sapiens
caatggaagagcaac

SEQ ID NO: 1949668 - DNA, 15 bp, Homo sapiens
aatggaagagcaaca

SEQ ID NO: 1949669 - DNA, 15 bp, Homo sapiens
atggaagagcaacaa

SEQ ID NO: 1949670 - DNA, 15 bp, Homo sapiens
tggaagagcaacaaa

SEQ ID NO: 1949671 - DNA, 15 bp, Homo sapiens
ggaagagcaacaaag

SEQ ID NO: 1949672 - DNA, 15 bp, Homo sapiens
gaagagcaacaaagg

SEQ ID NO: 1949673 - DNA, 15 bp, Homo sapiens
aagagcaacaaagga

SEQ ID NO: 1949674 - DNA, 15 bp, Homo sapiens
agagcaacaaaggat

SEQ ID NO: 1949675 - DNA, 15 bp, Homo sapiens
gagcaacaaaggatt

SEQ ID NO: 1949676 - DNA, 15 bp, Homo sapiens
agcaacaaaggattt

SEQ ID NO: 1949677 - DNA, 15 bp, Homo sapiens
gcaacaaaggatttc

SEQ ID NO: 1949678 - DNA, 15 bp, Homo sapiens
caacaaaggatttct

SEQ ID NO: 1949679 - DNA, 15 bp, Homo sapiens
aacaaaggatttcta

SEQ ID NO: 1949680 - DNA, 15 bp, Homo sapiens
acaaaggatttctaa

SEQ ID NO: 1949681 - DNA, 15 bp, Homo sapiens
caaaggatttctaat

SEQ ID NO: 1949682 - DNA, 15 bp, Homo sapiens
aaaggatttctaatt

SEQ ID NO: 1949683 - DNA, 15 bp, Homo sapiens
aaggatttctaatta

SEQ ID NO: 1949684 - DNA, 15 bp, Homo sapiens
aggatttctaattaa

SEQ ID NO: 1949685 - DNA, 15 bp, Homo sapiens
ggatttctaattaat

SEQ ID NO: 1949686 - DNA, 15 bp, Homo sapiens
gatttctaattaata

SEQ ID NO: 1949687 - DNA, 15 bp, Homo sapiens
atttctaattaataa

SEQ ID NO: 1949688 - DNA, 15 bp, Homo sapiens
tttctaattaataaa

SEQ ID NO: 1949689 - DNA, 15 bp, Homo sapiens
ttctaattaataaag

SEQ ID NO: 1949690 - DNA, 15 bp, Homo sapiens
tctaattaataaagc

SEQ ID NO: 1949691 - DNA, 15 bp, Homo sapiens
ctaattaataaagcc

SEQ ID NO: 1949692 - DNA, 15 bp, Homo sapiens
taattaataaagcct

SEQ ID NO: 1949693 - DNA, 15 bp, Homo sapiens
aattaataaagcctt

SEQ ID NO: 1949694 - DNA, 15 bp, Homo sapiens
attaataaagccttt

SEQ ID NO: 1949695 - DNA, 15 bp, Homo sapiens
ttaataaagcctttt

SEQ ID NO: 1949696 - DNA, 15 bp, Homo sapiens
taataaagccttttt

SEQ ID NO: 1949697 - DNA, 15 bp, Homo sapiens
aataaagcctttttg

SEQ ID NO: 1949698 - DNA, 15 bp, Homo sapiens
ataaagcctttttgt

SEQ ID NO: 1949699 - DNA, 15 bp, Homo sapiens
taaagcctttttgtg

SEQ ID NO: 1949700 - DNA, 15 bp, Homo sapiens
aaagcctttttgtgc

SEQ ID NO: 1949701 - DNA, 15 bp, Homo sapiens
aagcctttttgtgcc

SEQ ID NO: 1949702 - DNA, 15 bp, Homo sapiens
agcctttttgtgcca

SEQ ID NO: 1949703 - DNA, 15 bp, Homo sapiens
gcctttttgtgccaa

SEQ ID NO: 1949704 - DNA, 15 bp, Homo sapiens
cctttttgtgccaag

SEQ ID NO: 1949705 - DNA, 15 bp, Homo sapiens
ctttttgtgccaagc

SEQ ID NO: 1949706 - DNA, 15 bp, Homo sapiens
tttttgtgccaagct

SEQ ID NO: 1949707 - DNA, 15 bp, Homo sapiens
ttttgtgccaagctg

SEQ ID NO: 1949708 - DNA, 15 bp, Homo sapiens
tttgtgccaagctga

SEQ ID NO: 1949709 - DNA, 15 bp, Homo sapiens
ttgtgccaagctgac

SEQ ID NO: 1949710 - DNA, 15 bp, Homo sapiens
tgtgccaagctgact

SEQ ID NO: 1949711 - DNA, 15 bp, Homo sapiens
gtgccaagctgactt

SEQ ID NO: 1949712 - DNA, 15 bp, Homo sapiens
tgccaagctgacttt

SEQ ID NO: 1949713 - DNA, 15 bp, Homo sapiens
gccaagctgacttta

SEQ ID NO: 1949714 - DNA, 15 bp, Homo sapiens
ccaagctgactttag

SEQ ID NO: 1949715 - DNA, 15 bp, Homo sapiens
caagctgactttaga

SEQ ID NO: 1949716 - DNA, 15 bp, Homo sapiens
aagctgactttagaa

SEQ ID NO: 1949717 - DNA, 15 bp, Homo sapiens
agctgactttagaat

SEQ ID NO: 1949718 - DNA, 15 bp, Homo sapiens
gctgactttagaata

SEQ ID NO: 1949719 - DNA, 15 bp, Homo sapiens
ctgactttagaataa

SEQ ID NO: 1949720 - DNA, 15 bp, Homo sapiens
tgactttagaataaa

SEQ ID NO: 1949721 - DNA, 15 bp, Homo sapiens
gactttagaataaaa

SEQ ID NO: 1949722 - DNA, 15 bp, Homo sapiens
actttagaataaaat

SEQ ID NO: 1949723 - DNA, 15 bp, Homo sapiens
ctttagaataaaatt

SEQ ID NO: 1949724 - DNA, 15 bp, Homo sapiens
tttagaataaaattc

SEQ ID NO: 1949725 - DNA, 15 bp, Homo sapiens
ttagaataaaattca

SEQ ID NO: 1949726 - DNA, 15 bp, Homo sapiens
tagaataaaattcat

SEQ ID NO: 1949727 - DNA, 15 bp, Homo sapiens
agaataaaattcatt

SEQ ID NO: 1949728 - DNA, 15 bp, Homo sapiens
gaataaaattcattc

SEQ ID NO: 1949729 - DNA, 15 bp, Homo sapiens
aataaaattcattcg

SEQ ID NO: 1949730 - DNA, 15 bp, Homo sapiens
ataaaattcattcgt

SEQ ID NO: 1949731 - DNA, 15 bp, Homo sapiens
taaaattcattcgtt

SEQ ID NO: 1949732 - DNA, 15 bp, Homo sapiens
aaaattcattcgttg

SEQ ID NO: 1949733 - DNA, 15 bp, Homo sapiens
aaattcattcgttga

SEQ ID NO: 1949734 - DNA, 15 bp, Homo sapiens
aattcattcgttgat

SEQ ID NO: 1949735 - DNA, 15 bp, Homo sapiens
attcattcgttgatt

SEQ ID NO: 1949736 - DNA, 15 bp, Homo sapiens
ttcattcgttgattt

SEQ ID NO: 1949737 - DNA, 15 bp, Homo sapiens
tcattcgttgatttg

SEQ ID NO: 1949738 - DNA, 15 bp, Homo sapiens
cattcgttgatttgc

SEQ ID NO: 1949739 - DNA, 15 bp, Homo sapiens
attcgttgatttgcc

SEQ ID NO: 1949740 - DNA, 15 bp, Homo sapiens
ttcgttgatttgcct

SEQ ID NO: 1949741 - DNA, 15 bp, Homo sapiens
tcgttgatttgcctt

SEQ ID NO: 1949742 - DNA, 15 bp, Homo sapiens
cgttgatttgccttt

SEQ ID NO: 1949743 - DNA, 15 bp, Homo sapiens
gttgatttgcctttt

SEQ ID NO: 1949744 - DNA, 15 bp, Homo sapiens
ttgatttgccttttt

SEQ ID NO: 1949745 - DNA, 15 bp, Homo sapiens
tgatttgccttttta

SEQ ID NO: 1949746 - DNA, 15 bp, Homo sapiens
gatttgcctttttaa

SEQ ID NO: 1949747 - DNA, 15 bp, Homo sapiens
atttgcctttttaaa

SEQ ID NO: 1949748 - DNA, 15 bp, Homo sapiens
tttgcctttttaaaa

SEQ ID NO: 1949749 - DNA, 15 bp, Homo sapiens
ttgcctttttaaaaa

SEQ ID NO: 1949750 - DNA, 15 bp, Homo sapiens
tgcctttttaaaaaa

SEQ ID NO: 1949751 - DNA, 15 bp, Homo sapiens
gcctttttaaaaaag

SEQ ID NO: 1949752 - DNA, 15 bp, Homo sapiens
cctttttaaaaaaga

SEQ ID NO: 1949753 - DNA, 15 bp, Homo sapiens
tttttaaaaaagaca

SEQ ID NO: 1949754 - DNA, 15 bp, Homo sapiens
ttttaaaaaagacag

SEQ ID NO: 1949755 - DNA, 15 bp, Homo sapiens
tttaaaaaagacaga

SEQ ID NO: 1949756 - DNA, 15 bp, Homo sapiens
ttaaaaaagacagaa

SEQ ID NO: 1949757 - DNA, 15 bp, Homo sapiens
taaaaaagacagaaa

SEQ ID NO: 1949758 - DNA, 15 bp, Homo sapiens
aaaaaagacagaaag

SEQ ID NO: 1949759 - DNA, 15 bp, Homo sapiens
aaaaagacagaaagt

SEQ ID NO: 1949760 - DNA, 15 bp, Homo sapiens
aaagacagaaagtca

SEQ ID NO: 1949761 - DNA, 15 bp, Homo sapiens
aagacagaaagtcat

SEQ ID NO: 1949762 - DNA, 15 bp, Homo sapiens
agacagaaagtcata

SEQ ID NO: 1949763 - DNA, 15 bp, Homo sapiens
gacagaaagtcataa

SEQ ID NO: 1949764 - DNA, 15 bp, Homo sapiens
acagaaagtcataag

SEQ ID NO: 1949765 - DNA, 15 bp, Homo sapiens
cagaaagtcataagc

SEQ ID NO: 1949766 - DNA, 15 bp, Homo sapiens
agaaagtcataagca

SEQ ID NO: 1949767 - DNA, 15 bp, Homo sapiens
gaaagtcataagcat

SEQ ID NO: 1949768 - DNA, 15 bp, Homo sapiens
aaagtcataagcatc

SEQ ID NO: 1949769 - DNA, 15 bp, Homo sapiens
aagtcataagcatcc

SEQ ID NO: 1949770 - DNA, 15 bp, Homo sapiens
agtcataagcatcct

SEQ ID NO: 1949771 - DNA, 15 bp, Homo sapiens
gtcataagcatcctt

SEQ ID NO: 1949772 - DNA, 15 bp, Homo sapiens
tcataagcatccttc

SEQ ID NO: 1949773 - DNA, 15 bp, Homo sapiens
cataagcatccttct

SEQ ID NO: 1949774 - DNA, 15 bp, Homo sapiens
ataagcatccttctg

SEQ ID NO: 1949775 - DNA, 15 bp, Homo sapiens
taagcatccttctgg

SEQ ID NO: 1949776 - DNA, 15 bp, Homo sapiens
aagcatccttctggt

SEQ ID NO: 1949777 - DNA, 15 bp, Homo sapiens
agcatccttctggtt

SEQ ID NO: 1949778 - DNA, 15 bp, Homo sapiens
gcatccttctggttt

SEQ ID NO: 1949779 - DNA, 15 bp, Homo sapiens
catccttctggtttg

SEQ ID NO: 1949780 - DNA, 15 bp, Homo sapiens
atccttctggtttgc

SEQ ID NO: 1949781 - DNA, 15 bp, Homo sapiens
tccttctggtttgca

SEQ ID NO: 1949782 - DNA, 15 bp, Homo sapiens
ccttctggtttgcag

SEQ ID NO: 1949783 - DNA, 15 bp, Homo sapiens
cttctggtttgcagg

SEQ ID NO: 1949784 - DNA, 15 bp, Homo sapiens
ttctggtttgcaggt

SEQ ID NO: 1949785 - DNA, 15 bp, Homo sapiens
tctggtttgcaggtc

SEQ ID NO: 1949786 - DNA, 15 bp, Homo sapiens
ctggtttgcaggtct

SEQ ID NO: 1949787 - DNA, 15 bp, Homo sapiens
tggtttgcaggtctt

SEQ ID NO: 1949788 - DNA, 15 bp, Homo sapiens
ggtttgcaggtcttg

SEQ ID NO: 1949789 - DNA, 15 bp, Homo sapiens
gtttgcaggtcttga

SEQ ID NO: 1949790 - DNA, 15 bp, Homo sapiens
tttgcaggtcttgat

SEQ ID NO: 1949791 - DNA, 15 bp, Homo sapiens
ttgcaggtcttgatg

SEQ ID NO: 1949792 - DNA, 15 bp, Homo sapiens
tgcaggtcttgatga

SEQ ID NO: 1949793 - DNA, 15 bp, Homo sapiens
gcaggtcttgatgat

SEQ ID NO: 1949794 - DNA, 15 bp, Homo sapiens
caggtcttgatgatt

SEQ ID NO: 1949795 - DNA, 15 bp, Homo sapiens
aggtcttgatgatta

SEQ ID NO: 1949796 - DNA, 15 bp, Homo sapiens
ggtcttgatgattac

SEQ ID NO: 1949797 - DNA, 15 bp, Homo sapiens
gtcttgatgattacc

SEQ ID NO: 1949798 - DNA, 15 bp, Homo sapiens
tcttgatgattaccc

SEQ ID NO: 1949799 - DNA, 15 bp, Homo sapiens
cttgatgattacccc

SEQ ID NO: 1949800 - DNA, 15 bp, Homo sapiens
ttgatgattacccct

SEQ ID NO: 1949801 - DNA, 15 bp, Homo sapiens
tgatgattacccctc

SEQ ID NO: 1949802 - DNA, 15 bp, Homo sapiens
gatgattacccctct

SEQ ID NO: 1949803 - DNA, 15 bp, Homo sapiens
atgattacccctctt

SEQ ID NO: 1949804 - DNA, 15 bp, Homo sapiens
tgattacccctcttt

SEQ ID NO: 1949805 - DNA, 15 bp, Homo sapiens
gattacccctcttta

SEQ ID NO: 1949806 - DNA, 15 bp, Homo sapiens
attacccctctttat

SEQ ID NO: 1949807 - DNA, 15 bp, Homo sapiens
ttacccctctttatt

SEQ ID NO: 1949808 - DNA, 15 bp, Homo sapiens
tacccctctttattt

SEQ ID NO: 1949809 - DNA, 15 bp, Homo sapiens
acccctctttatttc

SEQ ID NO: 1949810 - DNA, 15 bp, Homo sapiens
cccctctttatttct

SEQ ID NO: 1949811 - DNA, 15 bp, Homo sapiens
ccctctttatttctg

SEQ ID NO: 1949812 - DNA, 15 bp, Homo sapiens
cctctttatttctga

SEQ ID NO: 1949813 - DNA, 15 bp, Homo sapiens
ctctttatttctgag

SEQ ID NO: 1949814 - DNA, 15 bp, Homo sapiens
tctttatttctgaga

SEQ ID NO: 1949815 - DNA, 15 bp, Homo sapiens
ctttatttctgagaa

SEQ ID NO: 1949816 - DNA, 15 bp, Homo sapiens
tttatttctgagaac

SEQ ID NO: 1949817 - DNA, 15 bp, Homo sapiens
ttatttctgagaact

SEQ ID NO: 1949818 - DNA, 15 bp, Homo sapiens
tatttctgagaactc

SEQ ID NO: 1949819 - DNA, 15 bp, Homo sapiens
atttctgagaactca

SEQ ID NO: 1949820 - DNA, 15 bp, Homo sapiens
tttctgagaactcag

SEQ ID NO: 1949821 - DNA, 15 bp, Homo sapiens
ttctgagaactcagg

SEQ ID NO: 1949822 - DNA, 15 bp, Homo sapiens
tctgagaactcagga

SEQ ID NO: 1949823 - DNA, 15 bp, Homo sapiens
ctgagaactcaggaa

SEQ ID NO: 1949824 - DNA, 15 bp, Homo sapiens
tgagaactcaggaag

SEQ ID NO: 1949825 - DNA, 15 bp, Homo sapiens
gagaactcaggaagc

SEQ ID NO: 1949826 - DNA, 15 bp, Homo sapiens
agaactcaggaagca

SEQ ID NO: 1949827 - DNA, 15 bp, Homo sapiens
gaactcaggaagcat

SEQ ID NO: 1949828 - DNA, 15 bp, Homo sapiens
aactcaggaagcatc

SEQ ID NO: 1949829 - DNA, 15 bp, Homo sapiens
actcaggaagcatct

SEQ ID NO: 1949830 - DNA, 15 bp, Homo sapiens
ctcaggaagcatctc

SEQ ID NO: 1949831 - DNA, 15 bp, Homo sapiens
tcaggaagcatctcc

SEQ ID NO: 1949832 - DNA, 15 bp, Homo sapiens
caggaagcatctccg

SEQ ID NO: 1949833 - DNA, 15 bp, Homo sapiens
aggaagcatctccgg

SEQ ID NO: 1949834 - DNA, 15 bp, Homo sapiens
ggaagcatctccggc

SEQ ID NO: 1949835 - DNA, 15 bp, Homo sapiens
gaagcatctccggca

SEQ ID NO: 1949836 - DNA, 15 bp, Homo sapiens
aagcatctccggcag

SEQ ID NO: 1949837 - DNA, 15 bp, Homo sapiens
agcatctccggcagg

SEQ ID NO: 1949838 - DNA, 15 bp, Homo sapiens
gcatctccggcaggg

SEQ ID NO: 1949839 - DNA, 15 bp, Homo sapiens
catctccggcagggg

SEQ ID NO: 1949840 - DNA, 15 bp, Homo sapiens
atctccggcaggggt

SEQ ID NO: 1949841 - DNA, 15 bp, Homo sapiens
tctccggcaggggtt

SEQ ID NO: 1949842 - DNA, 15 bp, Homo sapiens
ctccggcaggggtta

SEQ ID NO: 1949843 - DNA, 15 bp, Homo sapiens
tccggcaggggttat

SEQ ID NO: 1949844 - DNA, 15 bp, Homo sapiens
ccggcaggggttatc

SEQ ID NO: 1949845 - DNA, 15 bp, Homo sapiens
cggcaggggttatcc

SEQ ID NO: 1949846 - DNA, 15 bp, Homo sapiens
ggcaggggttatcct

SEQ ID NO: 1949847 - DNA, 15 bp, Homo sapiens
gcaggggttatcctt

SEQ ID NO: 1949848 - DNA, 15 bp, Homo sapiens
caggggttatcctta

SEQ ID NO: 1949849 - DNA, 15 bp, Homo sapiens
aggggttatccttaa

SEQ ID NO: 1949850 - DNA, 15 bp, Homo sapiens
ggggttatccttaat

SEQ ID NO: 1949851 - DNA, 15 bp, Homo sapiens
gggttatccttaata

SEQ ID NO: 1949852 - DNA, 15 bp, Homo sapiens
ggttatccttaatag

SEQ ID NO: 1949853 - DNA, 15 bp, Homo sapiens
gttatccttaatagg

SEQ ID NO: 1949854 - DNA, 15 bp, Homo sapiens
ttatccttaataggc

SEQ ID NO: 1949855 - DNA, 15 bp, Homo sapiens
tatccttaataggcc

SEQ ID NO: 1949856 - DNA, 15 bp, Homo sapiens
atccttaataggccc

SEQ ID NO: 1949857 - DNA, 15 bp, Homo sapiens
tccttaataggcccc

SEQ ID NO: 1949858 - DNA, 15 bp, Homo sapiens
ccttaataggccccc

SEQ ID NO: 1949859 - DNA, 15 bp, Homo sapiens
cttaataggcccccg

SEQ ID NO: 1949860 - DNA, 15 bp, Homo sapiens
ttaataggcccccga

SEQ ID NO: 1949861 - DNA, 15 bp, Homo sapiens
taataggcccccgat

SEQ ID NO: 1949862 - DNA, 15 bp, Homo sapiens
aataggcccccgatc

SEQ ID NO: 1949863 - DNA, 15 bp, Homo sapiens
ataggcccccgatct

SEQ ID NO: 1949864 - DNA, 15 bp, Homo sapiens
taggcccccgatctc

SEQ ID NO: 1949865 - DNA, 15 bp, Homo sapiens
aggcccccgatctca

SEQ ID NO: 1949866 - DNA, 15 bp, Homo sapiens
ggcccccgatctcag

SEQ ID NO: 1949867 - DNA, 15 bp, Homo sapiens
gcccccgatctcagg

SEQ ID NO: 1949868 - DNA, 15 bp, Homo sapiens
cccccgatctcaggg

SEQ ID NO: 1949869 - DNA, 15 bp, Homo sapiens
ccccgatctcagggt

SEQ ID NO: 1949870 - DNA, 15 bp, Homo sapiens
cccgatctcagggtt

SEQ ID NO: 1949871 - DNA, 15 bp, Homo sapiens
ccgatctcagggttt

SEQ ID NO: 1949872 - DNA, 15 bp, Homo sapiens
cgatctcagggtttt

SEQ ID NO: 1949873 - DNA, 15 bp, Homo sapiens
gatctcagggtttta

SEQ ID NO: 1949874 - DNA, 15 bp, Homo sapiens
atctcagggttttaa

SEQ ID NO: 1949875 - DNA, 15 bp, Homo sapiens
tctcagggttttaag

SEQ ID NO: 1949876 - DNA, 15 bp, Homo sapiens
ctcagggttttaaga

SEQ ID NO: 1949877 - DNA, 15 bp, Homo sapiens
tcagggttttaagaa

SEQ ID NO: 1949878 - DNA, 15 bp, Homo sapiens
cagggttttaagaat

SEQ ID NO: 1949879 - DNA, 15 bp, Homo sapiens
agggttttaagaatc

SEQ ID NO: 1949880 - DNA, 15 bp, Homo sapiens
gggttttaagaatca

SEQ ID NO: 1949881 - DNA, 15 bp, Homo sapiens
ggttttaagaatcac

SEQ ID NO: 1949882 - DNA, 15 bp, Homo sapiens
gttttaagaatcaca

SEQ ID NO: 1949883 - DNA, 15 bp, Homo sapiens
ttttaagaatcacat

SEQ ID NO: 1949884 - DNA, 15 bp, Homo sapiens
tttaagaatcacatt

SEQ ID NO: 1949885 - DNA, 15 bp, Homo sapiens
ttaagaatcacattg

SEQ ID NO: 1949886 - DNA, 15 bp, Homo sapiens
taagaatcacattgg

SEQ ID NO: 1949887 - DNA, 15 bp, Homo sapiens
aagaatcacattggg

SEQ ID NO: 1949888 - DNA, 15 bp, Homo sapiens
agaatcacattggga

SEQ ID NO: 1949889 - DNA, 15 bp, Homo sapiens
gaatcacattgggaa

SEQ ID NO: 1949890 - DNA, 15 bp, Homo sapiens
aatcacattgggaaa

SEQ ID NO: 1949891 - DNA, 15 bp, Homo sapiens
atcacattgggaaaa

SEQ ID NO: 1949892 - DNA, 15 bp, Homo sapiens
tcacattgggaaaac

SEQ ID NO: 1949893 - DNA, 15 bp, Homo sapiens
cacattgggaaaacc

SEQ ID NO: 1949894 - DNA, 15 bp, Homo sapiens
acattgggaaaaccg

SEQ ID NO: 1949895 - DNA, 15 bp, Homo sapiens
cattgggaaaaccga

SEQ ID NO: 1949896 - DNA, 15 bp, Homo sapiens
attgggaaaaccgac

SEQ ID NO: 1949897 - DNA, 15 bp, Homo sapiens
ttgggaaaaccgaca

SEQ ID NO: 1949898 - DNA, 15 bp, Homo sapiens
tgggaaaaccgacag

SEQ ID NO: 1949899 - DNA, 15 bp, Homo sapiens
gggaaaaccgacaga

SEQ ID NO: 1949900 - DNA, 15 bp, Homo sapiens
ggaaaaccgacagat

SEQ ID NO: 1949901 - DNA, 15 bp, Homo sapiens
gaaaaccgacagatg

SEQ ID NO: 1949902 - DNA, 15 bp, Homo sapiens
aaaaccgacagatgg

SEQ ID NO: 1949903 - DNA, 15 bp, Homo sapiens
aaaccgacagatgga

SEQ ID NO: 1949904 - DNA, 15 bp, Homo sapiens
aaccgacagatggat

SEQ ID NO: 1949905 - DNA, 15 bp, Homo sapiens
accgacagatggata

SEQ ID NO: 1949906 - DNA, 15 bp, Homo sapiens
ccgacagatggataa

SEQ ID NO: 1949907 - DNA, 15 bp, Homo sapiens
cgacagatggataaa

SEQ ID NO: 1949908 - DNA, 15 bp, Homo sapiens
gacagatggataaaa

SEQ ID NO: 1949909 - DNA, 15 bp, Homo sapiens
acagatggataaaaa

SEQ ID NO: 1949910 - DNA, 15 bp, Homo sapiens
cagatggataaaaaa

SEQ ID NO: 1949911 - DNA, 15 bp, Homo sapiens
agatggataaaaaat

SEQ ID NO: 1949912 - DNA, 15 bp, Homo sapiens
gatggataaaaaata

SEQ ID NO: 1949913 - DNA, 15 bp, Homo sapiens
atggataaaaaataa

SEQ ID NO: 1949914 - DNA, 15 bp, Homo sapiens
tggataaaaaataat

SEQ ID NO: 1949915 - DNA, 15 bp, Homo sapiens
ggataaaaaataatt

SEQ ID NO: 1949916 - DNA, 15 bp, Homo sapiens
gataaaaaataatta

SEQ ID NO: 1949917 - DNA, 15 bp, Homo sapiens
ataaaaaataattac

SEQ ID NO: 1949918 - DNA, 15 bp, Homo sapiens
taaaaaataattacc

SEQ ID NO: 1949919 - DNA, 15 bp, Homo sapiens
aaaaaataattacca

SEQ ID NO: 1949920 - DNA, 15 bp, Homo sapiens
aaaaataattaccac

SEQ ID NO: 1949921 - DNA, 15 bp, Homo sapiens
aaaataattaccaca

SEQ ID NO: 1949922 - DNA, 15 bp, Homo sapiens
aaataattaccacac

SEQ ID NO: 1949923 - DNA, 15 bp, Homo sapiens
aataattaccacaca

SEQ ID NO: 1949924 - DNA, 15 bp, Homo sapiens
ataattaccacacag

SEQ ID NO: 1949925 - DNA, 15 bp, Homo sapiens
taattaccacacagt

SEQ ID NO: 1949926 - DNA, 15 bp, Homo sapiens
aattaccacacagtg

SEQ ID NO: 1949927 - DNA, 15 bp, Homo sapiens
attaccacacagtgt

SEQ ID NO: 1949928 - DNA, 15 bp, Homo sapiens
ttaccacacagtgtg

SEQ ID NO: 1949929 - DNA, 15 bp, Homo sapiens
taccacacagtgtga

SEQ ID NO: 1949930 - DNA, 15 bp, Homo sapiens
accacacagtgtgag

SEQ ID NO: 1949931 - DNA, 15 bp, Homo sapiens
cacacagtgtgagta

SEQ ID NO: 1949932 - DNA, 15 bp, Homo sapiens
acacagtgtgagtaa

SEQ ID NO: 1949933 - DNA, 15 bp, Homo sapiens
cacagtgtgagtaaa

SEQ ID NO: 1949934 - DNA, 15 bp, Homo sapiens
acagtgtgagtaaaa

SEQ ID NO: 1949935 - DNA, 15 bp, Homo sapiens
cagtgtgagtaaaac

SEQ ID NO: 1949936 - DNA, 15 bp, Homo sapiens
agtgtgagtaaaacc

SEQ ID NO: 1949937 - DNA, 15 bp, Homo sapiens
gtgtgagtaaaacct

SEQ ID NO: 1949938 - DNA, 15 bp, Homo sapiens
tgtgagtaaaacctt

SEQ ID NO: 1949939 - DNA, 15 bp, Homo sapiens
gtgagtaaaaccttt

SEQ ID NO: 1949940 - DNA, 15 bp, Homo sapiens
tgagtaaaacctttt

SEQ ID NO: 1949941 - DNA, 15 bp, Homo sapiens
gagtaaaacctttta

SEQ ID NO: 1949942 - DNA, 15 bp, Homo sapiens
agtaaaaccttttaa

SEQ ID NO: 1949943 - DNA, 15 bp, Homo sapiens
gtaaaaccttttaaa

SEQ ID NO: 1949944 - DNA, 15 bp, Homo sapiens
taaaaccttttaaaa

SEQ ID NO: 1949945 - DNA, 15 bp, Homo sapiens
aaaaccttttaaaaa

SEQ ID NO: 1949946 - DNA, 15 bp, Homo sapiens
aaaccttttaaaaag

SEQ ID NO: 1949947 - DNA, 15 bp, Homo sapiens
aaccttttaaaaagt

SEQ ID NO: 1949948 - DNA, 15 bp, Homo sapiens
accttttaaaaagtc

SEQ ID NO: 1949949 - DNA, 15 bp, Homo sapiens
ccttttaaaaagtct

SEQ ID NO: 1949950 - DNA, 15 bp, Homo sapiens
cttttaaaaagtcta

SEQ ID NO: 1949951 - DNA, 15 bp, Homo sapiens
ttttaaaaagtctat

SEQ ID NO: 1949952 - DNA, 15 bp, Homo sapiens
tttaaaaagtctatt

SEQ ID NO: 1949953 - DNA, 15 bp, Homo sapiens
ttaaaaagtctatta

SEQ ID NO: 1949954 - DNA, 15 bp, Homo sapiens
taaaaagtctattac

SEQ ID NO: 1949955 - DNA, 15 bp, Homo sapiens
aaaaagtctattact

SEQ ID NO: 1949956 - DNA, 15 bp, Homo sapiens
aaaagtctattactc

SEQ ID NO: 1949957 - DNA, 15 bp, Homo sapiens
aaagtctattactct

SEQ ID NO: 1949958 - DNA, 15 bp, Homo sapiens
aagtctattactctg

SEQ ID NO: 1949959 - DNA, 15 bp, Homo sapiens
agtctattactctgg

SEQ ID NO: 1949960 - DNA, 15 bp, Homo sapiens
gtctattactctggg

SEQ ID NO: 1949961 - DNA, 15 bp, Homo sapiens
tctattactctggga

SEQ ID NO: 1949962 - DNA, 15 bp, Homo sapiens
ctattactctgggag

SEQ ID NO: 1949963 - DNA, 15 bp, Homo sapiens
tattactctgggagc

SEQ ID NO: 1949964 - DNA, 15 bp, Homo sapiens
attactctgggagca

SEQ ID NO: 1949965 - DNA, 15 bp, Homo sapiens
ttactctgggagcac

SEQ ID NO: 1949966 - DNA, 15 bp, Homo sapiens
tactctgggagcaca

SEQ ID NO: 1949967 - DNA, 15 bp, Homo sapiens
actctgggagcacag

SEQ ID NO: 1949968 - DNA, 15 bp, Homo sapiens
ctctgggagcacaga

SEQ ID NO: 1949969 - DNA, 15 bp, Homo sapiens
tctgggagcacagag

SEQ ID NO: 1949970 - DNA, 15 bp, Homo sapiens
ctgggagcacagagt

SEQ ID NO: 1949971 - DNA, 15 bp, Homo sapiens
tgggagcacagagtg

SEQ ID NO: 1949972 - DNA, 15 bp, Homo sapiens
gggagcacagagtgg

SEQ ID NO: 1949973 - DNA, 15 bp, Homo sapiens
ggagcacagagtggc

SEQ ID NO: 1949974 - DNA, 15 bp, Homo sapiens
gagcacagagtggcg

SEQ ID NO: 1949975 - DNA, 15 bp, Homo sapiens
agcacagagtggcga

SEQ ID NO: 1949976 - DNA, 15 bp, Homo sapiens
gcacagagtggcgac

SEQ ID NO: 1949977 - DNA, 15 bp, Homo sapiens
cacagagtggcgacg

SEQ ID NO: 1949978 - DNA, 15 bp, Homo sapiens
acagagtggcgacgg

SEQ ID NO: 1949979 - DNA, 15 bp, Homo sapiens
cagagtggcgacggt

SEQ ID NO: 1949980 - DNA, 15 bp, Homo sapiens
agagtggcgacggtt

SEQ ID NO: 1949981 - DNA, 15 bp, Homo sapiens
gagtggcgacggttt

SEQ ID NO: 1949982 - DNA, 15 bp, Homo sapiens
agtggcgacggtttc

SEQ ID NO: 1949983 - DNA, 15 bp, Homo sapiens
gtggcgacggtttcc

SEQ ID NO: 1949984 - DNA, 15 bp, Homo sapiens
tggcgacggtttccc

SEQ ID NO: 1949985 - DNA, 15 bp, Homo sapiens
ggcgacggtttcccc

SEQ ID NO: 1949986 - DNA, 15 bp, Homo sapiens
gcgacggtttcccca

SEQ ID NO: 1949987 - DNA, 15 bp, Homo sapiens
cgacggtttccccag

SEQ ID NO: 1949988 - DNA, 15 bp, Homo sapiens
gacggtttccccagg

SEQ ID NO: 1949989 - DNA, 15 bp, Homo sapiens
acggtttccccaggc

SEQ ID NO: 1949990 - DNA, 15 bp, Homo sapiens
cggtttccccaggcc

SEQ ID NO: 1949991 - DNA, 15 bp, Homo sapiens
ggtttccccaggcct

SEQ ID NO: 1949992 - DNA, 15 bp, Homo sapiens
gtttccccaggcctc

SEQ ID NO: 1949993 - DNA, 15 bp, Homo sapiens
tttccccaggcctct

SEQ ID NO: 1949994 - DNA, 15 bp, Homo sapiens
ttccccaggcctcta

SEQ ID NO: 1949995 - DNA, 15 bp, Homo sapiens
tccccaggcctctac

SEQ ID NO: 1949996 - DNA, 15 bp, Homo sapiens
ccccaggcctctact

SEQ ID NO: 1949997 - DNA, 15 bp, Homo sapiens
cccaggcctctactt

SEQ ID NO: 1949998 - DNA, 15 bp, Homo sapiens
ccaggcctctacttt

SEQ ID NO: 1949999 - DNA, 15 bp, Homo sapiens
caggcctctacttta

SEQ ID NO: 1950000 - DNA, 15 bp, Homo sapiens
aggcctctactttag

SEQ ID NO: 1950001 - DNA, 15 bp, Homo sapiens
ggcctctactttagg

SEQ ID NO: 1950002 - DNA, 15 bp, Homo sapiens
gcctctactttagga

SEQ ID NO: 1950003 - DNA, 15 bp, Homo sapiens
cctctactttaggag

SEQ ID NO: 1950004 - DNA, 15 bp, Homo sapiens
ctctactttaggaga

SEQ ID NO: 1950005 - DNA, 15 bp, Homo sapiens
tctactttaggagac

SEQ ID NO: 1950006 - DNA, 15 bp, Homo sapiens
ctactttaggagact

SEQ ID NO: 1950007 - DNA, 15 bp, Homo sapiens
tactttaggagactt

SEQ ID NO: 1950008 - DNA, 15 bp, Homo sapiens
actttaggagacttg

SEQ ID NO: 1950009 - DNA, 15 bp, Homo sapiens
ctttaggagacttgg

SEQ ID NO: 1950010 - DNA, 15 bp, Homo sapiens
tttaggagacttggt

SEQ ID NO: 1950011 - DNA, 15 bp, Homo sapiens
ttaggagacttggtt

SEQ ID NO: 1950012 - DNA, 15 bp, Homo sapiens
taggagacttggttg

SEQ ID NO: 1950013 - DNA, 15 bp, Homo sapiens
aggagacttggttga

SEQ ID NO: 1950014 - DNA, 15 bp, Homo sapiens
ggagacttggttgag

SEQ ID NO: 1950015 - DNA, 15 bp, Homo sapiens
gagacttggttgaga

SEQ ID NO: 1950016 - DNA, 15 bp, Homo sapiens
agacttggttgagac

SEQ ID NO: 1950017 - DNA, 15 bp, Homo sapiens
gacttggttgagaca

SEQ ID NO: 1950018 - DNA, 15 bp, Homo sapiens
acttggttgagacaa

SEQ ID NO: 1950019 - DNA, 15 bp, Homo sapiens
cttggttgagacaat

SEQ ID NO: 1950020 - DNA, 15 bp, Homo sapiens
ttggttgagacaatt

SEQ ID NO: 1950021 - DNA, 15 bp, Homo sapiens
tggttgagacaatta

SEQ ID NO: 1950022 - DNA, 15 bp, Homo sapiens
ggttgagacaattac

SEQ ID NO: 1950023 - DNA, 15 bp, Homo sapiens
gttgagacaattact

SEQ ID NO: 1950024 - DNA, 15 bp, Homo sapiens
ttgagacaattactt

SEQ ID NO: 1950025 - DNA, 15 bp, Homo sapiens
tgagacaattacttc

SEQ ID NO: 1950026 - DNA, 15 bp, Homo sapiens
gagacaattacttca

SEQ ID NO: 1950027 - DNA, 15 bp, Homo sapiens
agacaattacttcac

SEQ ID NO: 1950028 - DNA, 15 bp, Homo sapiens
gacaattacttcact

SEQ ID NO: 1950029 - DNA, 15 bp, Homo sapiens
acaattacttcactg

SEQ ID NO: 1950030 - DNA, 15 bp, Homo sapiens
caattacttcactgg

SEQ ID NO: 1950031 - DNA, 15 bp, Homo sapiens
aattacttcactggg

SEQ ID NO: 1950032 - DNA, 15 bp, Homo sapiens
attacttcactgggc

SEQ ID NO: 1950033 - DNA, 15 bp, Homo sapiens
ttacttcactgggct

SEQ ID NO: 1950034 - DNA, 15 bp, Homo sapiens
tacttcactgggctg

SEQ ID NO: 1950035 - DNA, 15 bp, Homo sapiens
acttcactgggctgc

SEQ ID NO: 1950036 - DNA, 15 bp, Homo sapiens
cttcactgggctgca

SEQ ID NO: 1950037 - DNA, 15 bp, Homo sapiens
ttcactgggctgcat

SEQ ID NO: 1950038 - DNA, 15 bp, Homo sapiens
tcactgggctgcatc

SEQ ID NO: 1950039 - DNA, 15 bp, Homo sapiens
cactgggctgcatct

SEQ ID NO: 1950040 - DNA, 15 bp, Homo sapiens
actgggctgcatctg

SEQ ID NO: 1950041 - DNA, 15 bp, Homo sapiens
ctgggctgcatctga

SEQ ID NO: 1950042 - DNA, 15 bp, Homo sapiens
tgggctgcatctgaa

SEQ ID NO: 1950043 - DNA, 15 bp, Homo sapiens
gggctgcatctgaag

SEQ ID NO: 1950044 - DNA, 15 bp, Homo sapiens
ggctgcatctgaagg

SEQ ID NO: 1950045 - DNA, 15 bp, Homo sapiens
gctgcatctgaaggg

SEQ ID NO: 1950046 - DNA, 15 bp, Homo sapiens
ctgcatctgaaggga

SEQ ID NO: 1950047 - DNA, 15 bp, Homo sapiens
tgcatctgaagggac

SEQ ID NO: 1950048 - DNA, 15 bp, Homo sapiens
gcatctgaagggacg

SEQ ID NO: 1950049 - DNA, 15 bp, Homo sapiens
catctgaagggacgg

SEQ ID NO: 1950050 - DNA, 15 bp, Homo sapiens
atctgaagggacggt

SEQ ID NO: 1950051 - DNA, 15 bp, Homo sapiens
tctgaagggacggtc

SEQ ID NO: 1950052 - DNA, 15 bp, Homo sapiens
ctgaagggacggtca

SEQ ID NO: 1950053 - DNA, 15 bp, Homo sapiens
tgaagggacggtcat

SEQ ID NO: 1950054 - DNA, 15 bp, Homo sapiens
gaagggacggtcatc

SEQ ID NO: 1950055 - DNA, 15 bp, Homo sapiens
aagggacggtcatct

SEQ ID NO: 1950056 - DNA, 15 bp, Homo sapiens
agggacggtcatctt

SEQ ID NO: 1950057 - DNA, 15 bp, Homo sapiens
gggacggtcatctta

SEQ ID NO: 1950058 - DNA, 15 bp, Homo sapiens
ggacggtcatcttaa

SEQ ID NO: 1950059 - DNA, 15 bp, Homo sapiens
gacggtcatcttaat

SEQ ID NO: 1950060 - DNA, 15 bp, Homo sapiens
acggtcatcttaatc

SEQ ID NO: 1950061 - DNA, 15 bp, Homo sapiens
cggtcatcttaatca

SEQ ID NO: 1950062 - DNA, 15 bp, Homo sapiens
ggtcatcttaatcag

SEQ ID NO: 1950063 - DNA, 15 bp, Homo sapiens
gtcatcttaatcagt

SEQ ID NO: 1950064 - DNA, 15 bp, Homo sapiens
tcatcttaatcagta

SEQ ID NO: 1950065 - DNA, 15 bp, Homo sapiens
catcttaatcagtag

SEQ ID NO: 1950066 - DNA, 15 bp, Homo sapiens
atcttaatcagtagg

SEQ ID NO: 1950067 - DNA, 15 bp, Homo sapiens
tcttaatcagtagga

SEQ ID NO: 1950068 - DNA, 15 bp, Homo sapiens
cttaatcagtaggaa

SEQ ID NO: 1950069 - DNA, 15 bp, Homo sapiens
ttaatcagtaggaaa

SEQ ID NO: 1950070 - DNA, 15 bp, Homo sapiens
taatcagtaggaaaa

SEQ ID NO: 1950071 - DNA, 15 bp, Homo sapiens
aatcagtaggaaaac

SEQ ID NO: 1950072 - DNA, 15 bp, Homo sapiens
atcagtaggaaaaca

SEQ ID NO: 1950073 - DNA, 15 bp, Homo sapiens
tcagtaggaaaacat

SEQ ID NO: 1950074 - DNA, 15 bp, Homo sapiens
cagtaggaaaacatt

SEQ ID NO: 1950075 - DNA, 15 bp, Homo sapiens
agtaggaaaacattt

SEQ ID NO: 1950076 - DNA, 15 bp, Homo sapiens
gtaggaaaacatttg

SEQ ID NO: 1950077 - DNA, 15 bp, Homo sapiens
taggaaaacatttgc

SEQ ID NO: 1950078 - DNA, 15 bp, Homo sapiens
aggaaaacatttgcc

SEQ ID NO: 1950079 - DNA, 15 bp, Homo sapiens
ggaaaacatttgcca

SEQ ID NO: 1950080 - DNA, 15 bp, Homo sapiens
gaaaacatttgccaa

SEQ ID NO: 1950081 - DNA, 15 bp, Homo sapiens
aaaacatttgccaaa

SEQ ID NO: 1950082 - DNA, 15 bp, Homo sapiens
aaacatttgccaaac

SEQ ID NO: 1950083 - DNA, 15 bp, Homo sapiens
aacatttgccaaacc

SEQ ID NO: 1950084 - DNA, 15 bp, Homo sapiens
acatttgccaaaccc

SEQ ID NO: 1950085 - DNA, 15 bp, Homo sapiens
catttgccaaaccca

SEQ ID NO: 1950086 - DNA, 15 bp, Homo sapiens
atttgccaaacccag

SEQ ID NO: 1950087 - DNA, 15 bp, Homo sapiens
tttgccaaacccagc

SEQ ID NO: 1950088 - DNA, 15 bp, Homo sapiens
ttgccaaacccagct

SEQ ID NO: 1950089 - DNA, 15 bp, Homo sapiens
tgccaaacccagcta

SEQ ID NO: 1950090 - DNA, 15 bp, Homo sapiens
gccaaacccagctac

SEQ ID NO: 1950091 - DNA, 15 bp, Homo sapiens
ccaaacccagctacc

SEQ ID NO: 1950092 - DNA, 15 bp, Homo sapiens
caaacccagctaccg

SEQ ID NO: 1950093 - DNA, 15 bp, Homo sapiens
aaacccagctaccgt

SEQ ID NO: 1950094 - DNA, 15 bp, Homo sapiens
aacccagctaccgta

SEQ ID NO: 1950095 - DNA, 15 bp, Homo sapiens
acccagctaccgtaa

SEQ ID NO: 1950096 - DNA, 15 bp, Homo sapiens
cccagctaccgtaag

SEQ ID NO: 1950097 - DNA, 15 bp, Homo sapiens
ccagctaccgtaaga

SEQ ID NO: 1950098 - DNA, 15 bp, Homo sapiens
cagctaccgtaagaa

SEQ ID NO: 1950099 - DNA, 15 bp, Homo sapiens
agctaccgtaagaat

SEQ ID NO: 1950100 - DNA, 15 bp, Homo sapiens
gctaccgtaagaatt

SEQ ID NO: 1950101 - DNA, 15 bp, Homo sapiens
ctaccgtaagaattt

SEQ ID NO: 1950102 - DNA, 15 bp, Homo sapiens
taccgtaagaattta

SEQ ID NO: 1950103 - DNA, 15 bp, Homo sapiens
accgtaagaatttaa

SEQ ID NO: 1950104 - DNA, 15 bp, Homo sapiens
ccgtaagaatttaat

SEQ ID NO: 1950105 - DNA, 15 bp, Homo sapiens
cgtaagaatttaatg

SEQ ID NO: 1950106 - DNA, 15 bp, Homo sapiens
gtaagaatttaatgc

SEQ ID NO: 1950107 - DNA, 15 bp, Homo sapiens
taagaatttaatgct

SEQ ID NO: 1950108 - DNA, 15 bp, Homo sapiens
aagaatttaatgctg

SEQ ID NO: 1950109 - DNA, 15 bp, Homo sapiens
agaatttaatgctgt

SEQ ID NO: 1950110 - DNA, 15 bp, Homo sapiens
gaatttaatgctgtt

SEQ ID NO: 1950111 - DNA, 15 bp, Homo sapiens
aatttaatgctgtta

SEQ ID NO: 1950112 - DNA, 15 bp, Homo sapiens
atttaatgctgttaa

SEQ ID NO: 1950113 - DNA, 15 bp, Homo sapiens
tttaatgctgttaaa

SEQ ID NO: 1950114 - DNA, 15 bp, Homo sapiens
ttaatgctgttaaat

SEQ ID NO: 1950115 - DNA, 15 bp, Homo sapiens
taatgctgttaaatg

SEQ ID NO: 1950116 - DNA, 15 bp, Homo sapiens
aatgctgttaaatga

SEQ ID NO: 1950117 - DNA, 15 bp, Homo sapiens
atgctgttaaatgat

SEQ ID NO: 1950118 - DNA, 15 bp, Homo sapiens
tgctgttaaatgata

SEQ ID NO: 1950119 - DNA, 15 bp, Homo sapiens
gctgttaaatgatag

SEQ ID NO: 1950120 - DNA, 15 bp, Homo sapiens
ctgttaaatgatagt

SEQ ID NO: 1950121 - DNA, 15 bp, Homo sapiens
tgttaaatgatagtt

SEQ ID NO: 1950122 - DNA, 15 bp, Homo sapiens
gttaaatgatagttt

SEQ ID NO: 1950123 - DNA, 15 bp, Homo sapiens
ttaaatgatagtttg

SEQ ID NO: 1950124 - DNA, 15 bp, Homo sapiens
taaatgatagtttgt

SEQ ID NO: 1950125 - DNA, 15 bp, Homo sapiens
aaatgatagtttgtg

SEQ ID NO: 1950126 - DNA, 15 bp, Homo sapiens
aatgatagtttgtgg

SEQ ID NO: 1950127 - DNA, 15 bp, Homo sapiens
atgatagtttgtggg

SEQ ID NO: 1950128 - DNA, 15 bp, Homo sapiens
tgatagtttgtggga

SEQ ID NO: 1950129 - DNA, 15 bp, Homo sapiens
gatagtttgtgggat

SEQ ID NO: 1950130 - DNA, 15 bp, Homo sapiens
atagtttgtgggata

SEQ ID NO: 1950131 - DNA, 15 bp, Homo sapiens
tagtttgtgggataa

SEQ ID NO: 1950132 - DNA, 15 bp, Homo sapiens
agtttgtgggataag

SEQ ID NO: 1950133 - DNA, 15 bp, Homo sapiens
gtttgtgggataagt

SEQ ID NO: 1950134 - DNA, 15 bp, Homo sapiens
tttgtgggataagtt

SEQ ID NO: 1950135 - DNA, 15 bp, Homo sapiens
ttgtgggataagttt

SEQ ID NO: 1950136 - DNA, 15 bp, Homo sapiens
tgtgggataagtttg

SEQ ID NO: 1950137 - DNA, 15 bp, Homo sapiens
gtgggataagtttgg

SEQ ID NO: 1950138 - DNA, 15 bp, Homo sapiens
tgggataagtttggg

SEQ ID NO: 1950139 - DNA, 15 bp, Homo sapiens
gggataagtttgggg

SEQ ID NO: 1950140 - DNA, 15 bp, Homo sapiens
ggataagtttggggt

SEQ ID NO: 1950141 - DNA, 15 bp, Homo sapiens
gataagtttggggta

SEQ ID NO: 1950142 - DNA, 15 bp, Homo sapiens
ataagtttggggtat

SEQ ID NO: 1950143 - DNA, 15 bp, Homo sapiens
taagtttggggtata

SEQ ID NO: 1950144 - DNA, 15 bp, Homo sapiens
aagtttggggtataa

SEQ ID NO: 1950145 - DNA, 15 bp, Homo sapiens
agtttggggtataac

SEQ ID NO: 1950146 - DNA, 15 bp, Homo sapiens
gtttggggtataact

SEQ ID NO: 1950147 - DNA, 15 bp, Homo sapiens
tttggggtataactt

SEQ ID NO: 1950148 - DNA, 15 bp, Homo sapiens
ttggggtataacttc

SEQ ID NO: 1950149 - DNA, 15 bp, Homo sapiens
tggggtataacttct

SEQ ID NO: 1950150 - DNA, 15 bp, Homo sapiens
ggggtataacttcta

SEQ ID NO: 1950151 - DNA, 15 bp, Homo sapiens
gggtataacttctat

SEQ ID NO: 1950152 - DNA, 15 bp, Homo sapiens
ggtataacttctatt

SEQ ID NO: 1950153 - DNA, 15 bp, Homo sapiens
gtataacttctattt

SEQ ID NO: 1950154 - DNA, 15 bp, Homo sapiens
tataacttctatttg

SEQ ID NO: 1950155 - DNA, 15 bp, Homo sapiens
ataacttctatttgt

SEQ ID NO: 1950156 - DNA, 15 bp, Homo sapiens
taacttctatttgta

SEQ ID NO: 1950157 - DNA, 15 bp, Homo sapiens
aacttctatttgtag

SEQ ID NO: 1950158 - DNA, 15 bp, Homo sapiens
acttctatttgtagt

SEQ ID NO: 1950159 - DNA, 15 bp, Homo sapiens
cttctatttgtagtc

SEQ ID NO: 1950160 - DNA, 15 bp, Homo sapiens
ttctatttgtagtcc

SEQ ID NO: 1950161 - DNA, 15 bp, Homo sapiens
tctatttgtagtcct

SEQ ID NO: 1950162 - DNA, 15 bp, Homo sapiens
ctatttgtagtccta

SEQ ID NO: 1950163 - DNA, 15 bp, Homo sapiens
tatttgtagtcctaa

SEQ ID NO: 1950164 - DNA, 15 bp, Homo sapiens
atttgtagtcctaat

SEQ ID NO: 1950165 - DNA, 15 bp, Homo sapiens
tttgtagtcctaatc

SEQ ID NO: 1950166 - DNA, 15 bp, Homo sapiens
ttgtagtcctaatca

SEQ ID NO: 1950167 - DNA, 15 bp, Homo sapiens
tgtagtcctaatcat

SEQ ID NO: 1950168 - DNA, 15 bp, Homo sapiens
gtagtcctaatcatg

SEQ ID NO: 1950169 - DNA, 15 bp, Homo sapiens
tagtcctaatcatgg

SEQ ID NO: 1950170 - DNA, 15 bp, Homo sapiens
agtcctaatcatggg

SEQ ID NO: 1950171 - DNA, 15 bp, Homo sapiens
gtcctaatcatgggt

SEQ ID NO: 1950172 - DNA, 15 bp, Homo sapiens
tcctaatcatgggtc

SEQ ID NO: 1950173 - DNA, 15 bp, Homo sapiens
cctaatcatgggtct

SEQ ID NO: 1950174 - DNA, 15 bp, Homo sapiens
ctaatcatgggtcta

SEQ ID NO: 1950175 - DNA, 15 bp, Homo sapiens
taatcatgggtctag

SEQ ID NO: 1950176 - DNA, 15 bp, Homo sapiens
aatcatgggtctagt

SEQ ID NO: 1950177 - DNA, 15 bp, Homo sapiens
atcatgggtctagtg

SEQ ID NO: 1950178 - DNA, 15 bp, Homo sapiens
tcatgggtctagtgc

SEQ ID NO: 1950179 - DNA, 15 bp, Homo sapiens
catgggtctagtgct

SEQ ID NO: 1950180 - DNA, 15 bp, Homo sapiens
atgggtctagtgcta

SEQ ID NO: 1950181 - DNA, 15 bp, Homo sapiens
tgggtctagtgctac

SEQ ID NO: 1950182 - DNA, 15 bp, Homo sapiens
gggtctagtgctact

SEQ ID NO: 1950183 - DNA, 15 bp, Homo sapiens
ggtctagtgctactg

SEQ ID NO: 1950184 - DNA, 15 bp, Homo sapiens
gtctagtgctactga

SEQ ID NO: 1950185 - DNA, 15 bp, Homo sapiens
tctagtgctactgaa

SEQ ID NO: 1950186 - DNA, 15 bp, Homo sapiens
ctagtgctactgaat

SEQ ID NO: 1950187 - DNA, 15 bp, Homo sapiens
tagtgctactgaatt

SEQ ID NO: 1950188 - DNA, 15 bp, Homo sapiens
agtgctactgaatta

SEQ ID NO: 1950189 - DNA, 15 bp, Homo sapiens
gtgctactgaattat

SEQ ID NO: 1950190 - DNA, 15 bp, Homo sapiens
tgctactgaattatt

SEQ ID NO: 1950191 - DNA, 15 bp, Homo sapiens
gctactgaattattt

SEQ ID NO: 1950192 - DNA, 15 bp, Homo sapiens
ctactgaattatttt

SEQ ID NO: 1950193 - DNA, 15 bp, Homo sapiens
tactgaattattttt

SEQ ID NO: 1950194 - DNA, 15 bp, Homo sapiens
actgaattatttttt

SEQ ID NO: 1950195 - DNA, 15 bp, Homo sapiens
ctgaattattttttt

SEQ ID NO: 1950196 - DNA, 15 bp, Homo sapiens
tgaattatttttttc

SEQ ID NO: 1950197 - DNA, 15 bp, Homo sapiens
gaattatttttttcc

SEQ ID NO: 1950198 - DNA, 15 bp, Homo sapiens
aattatttttttcct

SEQ ID NO: 1950199 - DNA, 15 bp, Homo sapiens
attatttttttcctt

SEQ ID NO: 1950200 - DNA, 15 bp, Homo sapiens
ttatttttttccttg

SEQ ID NO: 1950201 - DNA, 15 bp, Homo sapiens
tatttttttccttgc

SEQ ID NO: 1950202 - DNA, 15 bp, Homo sapiens
atttttttccttgct

SEQ ID NO: 1950203 - DNA, 15 bp, Homo sapiens
tttttttccttgctg

SEQ ID NO: 1950204 - DNA, 15 bp, Homo sapiens
ttttttccttgctgt

SEQ ID NO: 1950205 - DNA, 15 bp, Homo sapiens
tttttccttgctgta

SEQ ID NO: 1950206 - DNA, 15 bp, Homo sapiens
ttttccttgctgtac

SEQ ID NO: 1950207 - DNA, 15 bp, Homo sapiens
tttccttgctgtacc

SEQ ID NO: 1950208 - DNA, 15 bp, Homo sapiens
ttccttgctgtacct

SEQ ID NO: 1950209 - DNA, 15 bp, Homo sapiens
tccttgctgtacctg

SEQ ID NO: 1950210 - DNA, 15 bp, Homo sapiens
ccttgctgtacctga

SEQ ID NO: 1950211 - DNA, 15 bp, Homo sapiens
cttgctgtacctgag

SEQ ID NO: 1950212 - DNA, 15 bp, Homo sapiens
ttgctgtacctgaga

SEQ ID NO: 1950213 - DNA, 15 bp, Homo sapiens
tgctgtacctgagat

SEQ ID NO: 1950214 - DNA, 15 bp, Homo sapiens
gctgtacctgagata

SEQ ID NO: 1950215 - DNA, 15 bp, Homo sapiens
ctgtacctgagatac

SEQ ID NO: 1950216 - DNA, 15 bp, Homo sapiens
tgtacctgagataca

SEQ ID NO: 1950217 - DNA, 15 bp, Homo sapiens
gtacctgagatacat

SEQ ID NO: 1950218 - DNA, 15 bp, Homo sapiens
tacctgagatacata

SEQ ID NO: 1950219 - DNA, 15 bp, Homo sapiens
acctgagatacatat

SEQ ID NO: 1950220 - DNA, 15 bp, Homo sapiens
cctgagatacatata

SEQ ID NO: 1950221 - DNA, 15 bp, Homo sapiens
ctgagatacatatat

SEQ ID NO: 1950222 - DNA, 15 bp, Homo sapiens
tgagatacatatata

SEQ ID NO: 1950223 - DNA, 15 bp, Homo sapiens
gagatacatatataa

SEQ ID NO: 1950224 - DNA, 15 bp, Homo sapiens
agatacatatataac

SEQ ID NO: 1950225 - DNA, 15 bp, Homo sapiens
gatacatatataaca

SEQ ID NO: 1950226 - DNA, 15 bp, Homo sapiens
atacatatataacac

SEQ ID NO: 1950227 - DNA, 15 bp, Homo sapiens
tacatatataacact

SEQ ID NO: 1950228 - DNA, 15 bp, Homo sapiens
acatatataacactt

SEQ ID NO: 1950229 - DNA, 15 bp, Homo sapiens
catatataacacttt

SEQ ID NO: 1950230 - DNA, 15 bp, Homo sapiens
atatataacacttta

SEQ ID NO: 1950231 - DNA, 15 bp, Homo sapiens
tatataacactttat

SEQ ID NO: 1950232 - DNA, 15 bp, Homo sapiens
atataacactttatt

SEQ ID NO: 1950233 - DNA, 15 bp, Homo sapiens
tataacactttattt

SEQ ID NO: 1950234 - DNA, 15 bp, Homo sapiens
ataacactttatttc

SEQ ID NO: 1950235 - DNA, 15 bp, Homo sapiens
taacactttatttct

SEQ ID NO: 1950236 - DNA, 15 bp, Homo sapiens
aacactttatttctc

SEQ ID NO: 1950237 - DNA, 15 bp, Homo sapiens
acactttatttctcc

SEQ ID NO: 1950238 - DNA, 15 bp, Homo sapiens
cactttatttctcca

SEQ ID NO: 1950239 - DNA, 15 bp, Homo sapiens
actttatttctccaa

SEQ ID NO: 1950240 - DNA, 15 bp, Homo sapiens
ctttatttctccaaa

SEQ ID NO: 1950241 - DNA, 15 bp, Homo sapiens
tttatttctccaaaa

SEQ ID NO: 1950242 - DNA, 15 bp, Homo sapiens
ttatttctccaaaat

SEQ ID NO: 1950243 - DNA, 15 bp, Homo sapiens
tatttctccaaaata

SEQ ID NO: 1950244 - DNA, 15 bp, Homo sapiens
atttctccaaaataa

SEQ ID NO: 1950245 - DNA, 15 bp, Homo sapiens
tttctccaaaataac

SEQ ID NO: 1950246 - DNA, 15 bp, Homo sapiens
ttctccaaaataaca

SEQ ID NO: 1950247 - DNA, 15 bp, Homo sapiens
tctccaaaataacat

SEQ ID NO: 1950248 - DNA, 15 bp, Homo sapiens
ctccaaaataacata

SEQ ID NO: 1950249 - DNA, 15 bp, Homo sapiens
tccaaaataacatac

SEQ ID NO: 1950250 - DNA, 15 bp, Homo sapiens
ccaaaataacatacc

SEQ ID NO: 1950251 - DNA, 15 bp, Homo sapiens
caaaataacatacct

SEQ ID NO: 1950252 - DNA, 15 bp, Homo sapiens
aaaataacatacctg

SEQ ID NO: 1950253 - DNA, 15 bp, Homo sapiens
aaataacatacctgc

SEQ ID NO: 1950254 - DNA, 15 bp, Homo sapiens
ataacatacctgcca

SEQ ID NO: 1950255 - DNA, 15 bp, Homo sapiens
taacatacctgccag

SEQ ID NO: 1950256 - DNA, 15 bp, Homo sapiens
aacatacctgccagt

SEQ ID NO: 1950257 - DNA, 15 bp, Homo sapiens
acatacctgccagtt

SEQ ID NO: 1950258 - DNA, 15 bp, Homo sapiens
catacctgccagttt

SEQ ID NO: 1950259 - DNA, 15 bp, Homo sapiens
atacctgccagtttt

SEQ ID NO: 1950260 - DNA, 15 bp, Homo sapiens
tacctgccagttttc

SEQ ID NO: 1950261 - DNA, 15 bp, Homo sapiens
acctgccagttttct

SEQ ID NO: 1950262 - DNA, 15 bp, Homo sapiens
cctgccagttttctg

SEQ ID NO: 1950263 - DNA, 15 bp, Homo sapiens
ctgccagttttctgg

SEQ ID NO: 1950264 - DNA, 15 bp, Homo sapiens
tgccagttttctgga

SEQ ID NO: 1950265 - DNA, 15 bp, Homo sapiens
gccagttttctggat

SEQ ID NO: 1950266 - DNA, 15 bp, Homo sapiens
ccagttttctggata

SEQ ID NO: 1950267 - DNA, 15 bp, Homo sapiens
cagttttctggatat

SEQ ID NO: 1950268 - DNA, 15 bp, Homo sapiens
agttttctggatatc

SEQ ID NO: 1950269 - DNA, 15 bp, Homo sapiens
gttttctggatatcc

SEQ ID NO: 1950270 - DNA, 15 bp, Homo sapiens
ttttctggatatcct

SEQ ID NO: 1950271 - DNA, 15 bp, Homo sapiens
tttctggatatcctg

SEQ ID NO: 1950272 - DNA, 15 bp, Homo sapiens
ttctggatatcctgc

SEQ ID NO: 1950273 - DNA, 15 bp, Homo sapiens
tctggatatcctgcc

SEQ ID NO: 1950274 - DNA, 15 bp, Homo sapiens
ctggatatcctgcca

SEQ ID NO: 1950275 - DNA, 15 bp, Homo sapiens
tggatatcctgccaa

SEQ ID NO: 1950276 - DNA, 15 bp, Homo sapiens
ggatatcctgccaaa

SEQ ID NO: 1950277 - DNA, 15 bp, Homo sapiens
gatatcctgccaaaa

SEQ ID NO: 1950278 - DNA, 15 bp, Homo sapiens
atatcctgccaaaac

SEQ ID NO: 1950279 - DNA, 15 bp, Homo sapiens
tatcctgccaaaact

SEQ ID NO: 1950280 - DNA, 15 bp, Homo sapiens
atcctgccaaaactg

SEQ ID NO: 1950281 - DNA, 15 bp, Homo sapiens
tcctgccaaaactga

SEQ ID NO: 1950282 - DNA, 15 bp, Homo sapiens
cctgccaaaactgaa

SEQ ID NO: 1950283 - DNA, 15 bp, Homo sapiens
ctgccaaaactgaat

SEQ ID NO: 1950284 - DNA, 15 bp, Homo sapiens
tgccaaaactgaatg

SEQ ID NO: 1950285 - DNA, 15 bp, Homo sapiens
gccaaaactgaatgc

SEQ ID NO: 1950286 - DNA, 15 bp, Homo sapiens
ccaaaactgaatgca

SEQ ID NO: 1950287 - DNA, 15 bp, Homo sapiens
caaaactgaatgcaa

SEQ ID NO: 1950288 - DNA, 15 bp, Homo sapiens
aaaactgaatgcaaa

SEQ ID NO: 1950289 - DNA, 15 bp, Homo sapiens
aaactgaatgcaaat

SEQ ID NO: 1950290 - DNA, 15 bp, Homo sapiens
aactgaatgcaaatt

SEQ ID NO: 1950291 - DNA, 15 bp, Homo sapiens
actgaatgcaaattt

SEQ ID NO: 1950292 - DNA, 15 bp, Homo sapiens
ctgaatgcaaatttt

SEQ ID NO: 1950293 - DNA, 15 bp, Homo sapiens
tgaatgcaaattttt

SEQ ID NO: 1950294 - DNA, 15 bp, Homo sapiens
gaatgcaaatttttc

SEQ ID NO: 1950295 - DNA, 15 bp, Homo sapiens
aatgcaaatttttct

SEQ ID NO: 1950296 - DNA, 15 bp, Homo sapiens
atgcaaatttttctc

SEQ ID NO: 1950297 - DNA, 15 bp, Homo sapiens
tgcaaatttttctct

SEQ ID NO: 1950298 - DNA, 15 bp, Homo sapiens
gcaaatttttctctc

SEQ ID NO: 1950299 - DNA, 15 bp, Homo sapiens
caaatttttctctcc

SEQ ID NO: 1950300 - DNA, 15 bp, Homo sapiens
aaatttttctctcca

SEQ ID NO: 1950301 - DNA, 15 bp, Homo sapiens
aatttttctctccaa

SEQ ID NO: 1950302 - DNA, 15 bp, Homo sapiens
atttttctctccaaa

SEQ ID NO: 1950303 - DNA, 15 bp, Homo sapiens
tttttctctccaaaa

SEQ ID NO: 1950304 - DNA, 15 bp, Homo sapiens
ttttctctccaaaaa

SEQ ID NO: 1950305 - DNA, 15 bp, Homo sapiens
tttctctccaaaaac

SEQ ID NO: 1950306 - DNA, 15 bp, Homo sapiens
ttctctccaaaaact

SEQ ID NO: 1950307 - DNA, 15 bp, Homo sapiens
tctctccaaaaactg

SEQ ID NO: 1950308 - DNA, 15 bp, Homo sapiens
ctctccaaaaactgc

SEQ ID NO: 1950309 - DNA, 15 bp, Homo sapiens
tctccaaaaactgca

SEQ ID NO: 1950310 - DNA, 15 bp, Homo sapiens
ctccaaaaactgcaa

SEQ ID NO: 1950311 - DNA, 15 bp, Homo sapiens
tccaaaaactgcaag

SEQ ID NO: 1950312 - DNA, 15 bp, Homo sapiens
ccaaaaactgcaagt

SEQ ID NO: 1950313 - DNA, 15 bp, Homo sapiens
caaaaactgcaagtt

SEQ ID NO: 1950314 - DNA, 15 bp, Homo sapiens
aaaaactgcaagttt

SEQ ID NO: 1950315 - DNA, 15 bp, Homo sapiens
aaaactgcaagtttg

SEQ ID NO: 1950316 - DNA, 15 bp, Homo sapiens
aaactgcaagtttgg

SEQ ID NO: 1950317 - DNA, 15 bp, Homo sapiens
aactgcaagtttggg

SEQ ID NO: 1950318 - DNA, 15 bp, Homo sapiens
actgcaagtttgggg

SEQ ID NO: 1950319 - DNA, 15 bp, Homo sapiens
ctgcaagtttggggc

SEQ ID NO: 1950320 - DNA, 15 bp, Homo sapiens
tgcaagtttggggct

SEQ ID NO: 1950321 - DNA, 15 bp, Homo sapiens
gcaagtttggggctt

SEQ ID NO: 1950322 - DNA, 15 bp, Homo sapiens
caagtttggggcttg

SEQ ID NO: 1950323 - DNA, 15 bp, Homo sapiens
aagtttggggcttga

SEQ ID NO: 1950324 - DNA, 15 bp, Homo sapiens
agtttggggcttgat

SEQ ID NO: 1950325 - DNA, 15 bp, Homo sapiens
gtttggggcttgatt

SEQ ID NO: 1950326 - DNA, 15 bp, Homo sapiens
tttggggcttgattt

SEQ ID NO: 1950327 - DNA, 15 bp, Homo sapiens
ttggggcttgattta

SEQ ID NO: 1950328 - DNA, 15 bp, Homo sapiens
tggggcttgatttaa

SEQ ID NO: 1950329 - DNA, 15 bp, Homo sapiens
ggggcttgatttaat

SEQ ID NO: 1950330 - DNA, 15 bp, Homo sapiens
gggcttgatttaatt

SEQ ID NO: 1950331 - DNA, 15 bp, Homo sapiens
ggcttgatttaattt

SEQ ID NO: 1950332 - DNA, 15 bp, Homo sapiens
gcttgatttaatttt

SEQ ID NO: 1950333 - DNA, 15 bp, Homo sapiens
cttgatttaattttc

SEQ ID NO: 1950334 - DNA, 15 bp, Homo sapiens
ttgatttaattttct

SEQ ID NO: 1950335 - DNA, 15 bp, Homo sapiens
tgatttaattttctc

SEQ ID NO: 1950336 - DNA, 15 bp, Homo sapiens
gatttaattttctcc

SEQ ID NO: 1950337 - DNA, 15 bp, Homo sapiens
atttaattttctcca

SEQ ID NO: 1950338 - DNA, 15 bp, Homo sapiens
tttaattttctccat

SEQ ID NO: 1950339 - DNA, 15 bp, Homo sapiens
ttaattttctccatg

SEQ ID NO: 1950340 - DNA, 15 bp, Homo sapiens
taattttctccatga

SEQ ID NO: 1950341 - DNA, 15 bp, Homo sapiens
aattttctccatgaa

SEQ ID NO: 1950342 - DNA, 15 bp, Homo sapiens
attttctccatgaag

SEQ ID NO: 1950343 - DNA, 15 bp, Homo sapiens
ttttctccatgaaga

SEQ ID NO: 1950344 - DNA, 15 bp, Homo sapiens
tttctccatgaagaa

SEQ ID NO: 1950345 - DNA, 15 bp, Homo sapiens
ttctccatgaagaat

SEQ ID NO: 1950346 - DNA, 15 bp, Homo sapiens
tctccatgaagaata

SEQ ID NO: 1950347 - DNA, 15 bp, Homo sapiens
ctccatgaagaatag

SEQ ID NO: 1950348 - DNA, 15 bp, Homo sapiens
tccatgaagaatagg

SEQ ID NO: 1950349 - DNA, 15 bp, Homo sapiens
ccatgaagaataggc

SEQ ID NO: 1950350 - DNA, 15 bp, Homo sapiens
catgaagaataggca

SEQ ID NO: 1950351 - DNA, 15 bp, Homo sapiens
atgaagaataggcaa

SEQ ID NO: 1950352 - DNA, 15 bp, Homo sapiens
tgaagaataggcaag

SEQ ID NO: 1950353 - DNA, 15 bp, Homo sapiens
gaagaataggcaagc

SEQ ID NO: 1950354 - DNA, 15 bp, Homo sapiens
aagaataggcaagct

SEQ ID NO: 1950355 - DNA, 15 bp, Homo sapiens
agaataggcaagctt

SEQ ID NO: 1950356 - DNA, 15 bp, Homo sapiens
gaataggcaagcttg

SEQ ID NO: 1950357 - DNA, 15 bp, Homo sapiens
aataggcaagcttga

SEQ ID NO: 1950358 - DNA, 15 bp, Homo sapiens
ataggcaagcttgat

SEQ ID NO: 1950359 - DNA, 15 bp, Homo sapiens
taggcaagcttgatg

SEQ ID NO: 1950360 - DNA, 15 bp, Homo sapiens
aggcaagcttgatgg

SEQ ID NO: 1950361 - DNA, 15 bp, Homo sapiens
ggcaagcttgatggg

SEQ ID NO: 1950362 - DNA, 15 bp, Homo sapiens
gcaagcttgatgggc

SEQ ID NO: 1950363 - DNA, 15 bp, Homo sapiens
caagcttgatgggca

SEQ ID NO: 1950364 - DNA, 15 bp, Homo sapiens
aagcttgatgggcag

SEQ ID NO: 1950365 - DNA, 15 bp, Homo sapiens
agcttgatgggcagc

SEQ ID NO: 1950366 - DNA, 15 bp, Homo sapiens
gcttgatgggcagca

SEQ ID NO: 1950367 - DNA, 15 bp, Homo sapiens
cttgatgggcagcaa

SEQ ID NO: 1950368 - DNA, 15 bp, Homo sapiens
ttgatgggcagcaac

SEQ ID NO: 1950369 - DNA, 15 bp, Homo sapiens
tgatgggcagcaact

SEQ ID NO: 1950370 - DNA, 15 bp, Homo sapiens
gatgggcagcaactc

SEQ ID NO: 1950371 - DNA, 15 bp, Homo sapiens
atgggcagcaactct

SEQ ID NO: 1950372 - DNA, 15 bp, Homo sapiens
tgggcagcaactctt

SEQ ID NO: 1950373 - DNA, 15 bp, Homo sapiens
gggcagcaactcttg

SEQ ID NO: 1950374 - DNA, 15 bp, Homo sapiens
ggcagcaactcttgt

SEQ ID NO: 1950375 - DNA, 15 bp, Homo sapiens
gcagcaactcttgta

SEQ ID NO: 1950376 - DNA, 15 bp, Homo sapiens
cagcaactcttgtac

SEQ ID NO: 1950377 - DNA, 15 bp, Homo sapiens
agcaactcttgtaca

SEQ ID NO: 1950378 - DNA, 15 bp, Homo sapiens
gcaactcttgtacaa

SEQ ID NO: 1950379 - DNA, 15 bp, Homo sapiens
caactcttgtacaat

SEQ ID NO: 1950380 - DNA, 15 bp, Homo sapiens
aactcttgtacaatt

SEQ ID NO: 1950381 - DNA, 15 bp, Homo sapiens
actcttgtacaatta

SEQ ID NO: 1950382 - DNA, 15 bp, Homo sapiens
ctcttgtacaattaa

SEQ ID NO: 1950383 - DNA, 15 bp, Homo sapiens
tcttgtacaattaaa

SEQ ID NO: 1950384 - DNA, 15 bp, Homo sapiens
cttgtacaattaaac

SEQ ID NO: 1950385 - DNA, 15 bp, Homo sapiens
ttgtacaattaaaca

SEQ ID NO: 1950386 - DNA, 15 bp, Homo sapiens
tgtacaattaaacat

SEQ ID NO: 1950387 - DNA, 15 bp, Homo sapiens
gtacaattaaacatt

SEQ ID NO: 1950388 - DNA, 15 bp, Homo sapiens
tacaattaaacatta

SEQ ID NO: 1950389 - DNA, 15 bp, Homo sapiens
acaattaaacattag

SEQ ID NO: 1950390 - DNA, 15 bp, Homo sapiens
caattaaacattagt

SEQ ID NO: 1950391 - DNA, 15 bp, Homo sapiens
aattaaacattagta

SEQ ID NO: 1950392 - DNA, 15 bp, Homo sapiens
attaaacattagtac

SEQ ID NO: 1950393 - DNA, 15 bp, Homo sapiens
ttaaacattagtact

SEQ ID NO: 1950394 - DNA, 15 bp, Homo sapiens
taaacattagtactt

SEQ ID NO: 1950395 - DNA, 15 bp, Homo sapiens
aaacattagtactta

SEQ ID NO: 1950396 - DNA, 15 bp, Homo sapiens
aacattagtacttaa

SEQ ID NO: 1950397 - DNA, 15 bp, Homo sapiens
acattagtacttaaa

SEQ ID NO: 1950398 - DNA, 15 bp, Homo sapiens
cattagtacttaaaa

SEQ ID NO: 1950399 - DNA, 15 bp, Homo sapiens
attagtacttaaaat

SEQ ID NO: 1950400 - DNA, 15 bp, Homo sapiens
ttagtacttaaaatt

SEQ ID NO: 1950401 - DNA, 15 bp, Homo sapiens
tagtacttaaaatta

SEQ ID NO: 1950402 - DNA, 15 bp, Homo sapiens
agtacttaaaattaa

SEQ ID NO: 1950403 - DNA, 15 bp, Homo sapiens
gtacttaaaattaac

SEQ ID NO: 1950404 - DNA, 15 bp, Homo sapiens
tacttaaaattaacc

SEQ ID NO: 1950405 - DNA, 15 bp, Homo sapiens
acttaaaattaacct

SEQ ID NO: 1950406 - DNA, 15 bp, Homo sapiens
cttaaaattaaccta

SEQ ID NO: 1950407 - DNA, 15 bp, Homo sapiens
ttaaaattaacctac

SEQ ID NO: 1950408 - DNA, 15 bp, Homo sapiens
taaaattaacctact

SEQ ID NO: 1950409 - DNA, 15 bp, Homo sapiens
aaaattaacctactt

SEQ ID NO: 1950410 - DNA, 15 bp, Homo sapiens
aaattaacctacttt

SEQ ID NO: 1950411 - DNA, 15 bp, Homo sapiens
aattaacctactttg

SEQ ID NO: 1950412 - DNA, 15 bp, Homo sapiens
attaacctactttga

SEQ ID NO: 1950413 - DNA, 15 bp, Homo sapiens
ttaacctactttgag

SEQ ID NO: 1950414 - DNA, 15 bp, Homo sapiens
taacctactttgaga

SEQ ID NO: 1950415 - DNA, 15 bp, Homo sapiens
aacctactttgagaa

SEQ ID NO: 1950416 - DNA, 15 bp, Homo sapiens
acctactttgagaaa

SEQ ID NO: 1950417 - DNA, 15 bp, Homo sapiens
cctactttgagaaaa

SEQ ID NO: 1950418 - DNA, 15 bp, Homo sapiens
ctactttgagaaaac

SEQ ID NO: 1950419 - DNA, 15 bp, Homo sapiens
tactttgagaaaaca

SEQ ID NO: 1950420 - DNA, 15 bp, Homo sapiens
actttgagaaaacag

SEQ ID NO: 1950421 - DNA, 15 bp, Homo sapiens
ctttgagaaaacagc

SEQ ID NO: 1950422 - DNA, 15 bp, Homo sapiens
tttgagaaaacagct

SEQ ID NO: 1950423 - DNA, 15 bp, Homo sapiens
ttgagaaaacagcta

SEQ ID NO: 1950424 - DNA, 15 bp, Homo sapiens
tgagaaaacagctaa

SEQ ID NO: 1950425 - DNA, 15 bp, Homo sapiens
gagaaaacagctaag

SEQ ID NO: 1950426 - DNA, 15 bp, Homo sapiens
agaaaacagctaagg

SEQ ID NO: 1950427 - DNA, 15 bp, Homo sapiens
gaaaacagctaagga

SEQ ID NO: 1950428 - DNA, 15 bp, Homo sapiens
aaaacagctaaggaa

SEQ ID NO: 1950429 - DNA, 15 bp, Homo sapiens
aaacagctaaggaaa

SEQ ID NO: 1950430 - DNA, 15 bp, Homo sapiens
aacagctaaggaaaa

SEQ ID NO: 1950431 - DNA, 15 bp, Homo sapiens
acagctaaggaaaat

SEQ ID NO: 1950432 - DNA, 15 bp, Homo sapiens
cagctaaggaaaatg

SEQ ID NO: 1950433 - DNA, 15 bp, Homo sapiens
agctaaggaaaatgt

SEQ ID NO: 1950434 - DNA, 15 bp, Homo sapiens
gctaaggaaaatgta

SEQ ID NO: 1950435 - DNA, 15 bp, Homo sapiens
ctaaggaaaatgtaa

SEQ ID NO: 1950436 - DNA, 15 bp, Homo sapiens
taaggaaaatgtaag

SEQ ID NO: 1950437 - DNA, 15 bp, Homo sapiens
aaggaaaatgtaagg

SEQ ID NO: 1950438 - DNA, 15 bp, Homo sapiens
aggaaaatgtaaggc

SEQ ID NO: 1950439 - DNA, 15 bp, Homo sapiens
ggaaaatgtaaggct

SEQ ID NO: 1950440 - DNA, 15 bp, Homo sapiens
gaaaatgtaaggctg

SEQ ID NO: 1950441 - DNA, 15 bp, Homo sapiens
aaaatgtaaggctgt

SEQ ID NO: 1950442 - DNA, 15 bp, Homo sapiens
aaatgtaaggctgtt

SEQ ID NO: 1950443 - DNA, 15 bp, Homo sapiens
aatgtaaggctgttt

SEQ ID NO: 1950444 - DNA, 15 bp, Homo sapiens
atgtaaggctgttta

SEQ ID NO: 1950445 - DNA, 15 bp, Homo sapiens
tgtaaggctgtttat

SEQ ID NO: 1950446 - DNA, 15 bp, Homo sapiens
gtaaggctgtttata

SEQ ID NO: 1950447 - DNA, 15 bp, Homo sapiens
taaggctgtttataa

SEQ ID NO: 1950448 - DNA, 15 bp, Homo sapiens
aaggctgtttataac

SEQ ID NO: 1950449 - DNA, 15 bp, Homo sapiens
aggctgtttataaca

SEQ ID NO: 1950450 - DNA, 15 bp, Homo sapiens
ggctgtttataacat

SEQ ID NO: 1950451 - DNA, 15 bp, Homo sapiens
gctgtttataacatt

SEQ ID NO: 1950452 - DNA, 15 bp, Homo sapiens
ctgtttataacattc

SEQ ID NO: 1950453 - DNA, 15 bp, Homo sapiens
tgtttataacattca

SEQ ID NO: 1950454 - DNA, 15 bp, Homo sapiens
gtttataacattcat

SEQ ID NO: 1950455 - DNA, 15 bp, Homo sapiens
tttataacattcata

SEQ ID NO: 1950456 - DNA, 15 bp, Homo sapiens
ttataacattcatac

SEQ ID NO: 1950457 - DNA, 15 bp, Homo sapiens
tataacattcataca

SEQ ID NO: 1950458 - DNA, 15 bp, Homo sapiens
ataacattcatacat

SEQ ID NO: 1950459 - DNA, 15 bp, Homo sapiens
taacattcatacatc

SEQ ID NO: 1950460 - DNA, 15 bp, Homo sapiens
aacattcatacatct

SEQ ID NO: 1950461 - DNA, 15 bp, Homo sapiens
acattcatacatcta

SEQ ID NO: 1950462 - DNA, 15 bp, Homo sapiens
cattcatacatctat

SEQ ID NO: 1950463 - DNA, 15 bp, Homo sapiens
attcatacatctata

SEQ ID NO: 1950464 - DNA, 15 bp, Homo sapiens
ttcatacatctataa

SEQ ID NO: 1950465 - DNA, 15 bp, Homo sapiens
tcatacatctataat

SEQ ID NO: 1950466 - DNA, 15 bp, Homo sapiens
catacatctataatc

SEQ ID NO: 1950467 - DNA, 15 bp, Homo sapiens
atacatctataatca

SEQ ID NO: 1950468 - DNA, 15 bp, Homo sapiens
tacatctataatcag

SEQ ID NO: 1950469 - DNA, 15 bp, Homo sapiens
acatctataatcagc

SEQ ID NO: 1950470 - DNA, 15 bp, Homo sapiens
catctataatcagcc

SEQ ID NO: 1950471 - DNA, 15 bp, Homo sapiens
atctataatcagcct

SEQ ID NO: 1950472 - DNA, 15 bp, Homo sapiens
tctataatcagcctt

SEQ ID NO: 1950473 - DNA, 15 bp, Homo sapiens
ctataatcagccttt

SEQ ID NO: 1950474 - DNA, 15 bp, Homo sapiens
tataatcagcctttc

SEQ ID NO: 1950475 - DNA, 15 bp, Homo sapiens
ataatcagcctttcg

SEQ ID NO: 1950476 - DNA, 15 bp, Homo sapiens
taatcagcctttcgt

SEQ ID NO: 1950477 - DNA, 15 bp, Homo sapiens
aatcagcctttcgtt

SEQ ID NO: 1950478 - DNA, 15 bp, Homo sapiens
atcagcctttcgttc

SEQ ID NO: 1950479 - DNA, 15 bp, Homo sapiens
tcagcctttcgttca

SEQ ID NO: 1950480 - DNA, 15 bp, Homo sapiens
cagcctttcgttcat

SEQ ID NO: 1950481 - DNA, 15 bp, Homo sapiens
agcctttcgttcata

SEQ ID NO: 1950482 - DNA, 15 bp, Homo sapiens
gcctttcgttcatag

SEQ ID NO: 1950483 - DNA, 15 bp, Homo sapiens
cctttcgttcataga

SEQ ID NO: 1950484 - DNA, 15 bp, Homo sapiens
ctttcgttcatagat

SEQ ID NO: 1950485 - DNA, 15 bp, Homo sapiens
tttcgttcatagata

SEQ ID NO: 1950486 - DNA, 15 bp, Homo sapiens
ttcgttcatagatag

SEQ ID NO: 1950487 - DNA, 15 bp, Homo sapiens
tcgttcatagatagg

SEQ ID NO: 1950488 - DNA, 15 bp, Homo sapiens
cgttcatagatagga

SEQ ID NO: 1950489 - DNA, 15 bp, Homo sapiens
gttcatagataggaa

SEQ ID NO: 1950490 - DNA, 15 bp, Homo sapiens
ttcatagataggaag

SEQ ID NO: 1950491 - DNA, 15 bp, Homo sapiens
tcatagataggaagc

SEQ ID NO: 1950492 - DNA, 15 bp, Homo sapiens
catagataggaagca

SEQ ID NO: 1950493 - DNA, 15 bp, Homo sapiens
atagataggaagcat

SEQ ID NO: 1950494 - DNA, 15 bp, Homo sapiens
tagataggaagcatc

SEQ ID NO: 1950495 - DNA, 15 bp, Homo sapiens
agataggaagcatct

SEQ ID NO: 1950496 - DNA, 15 bp, Homo sapiens
gataggaagcatctg

SEQ ID NO: 1950497 - DNA, 15 bp, Homo sapiens
ataggaagcatctgt

SEQ ID NO: 1950498 - DNA, 15 bp, Homo sapiens
taggaagcatctgtg

SEQ ID NO: 1950499 - DNA, 15 bp, Homo sapiens
aggaagcatctgtgg

SEQ ID NO: 1950500 - DNA, 15 bp, Homo sapiens
ggaagcatctgtgga

SEQ ID NO: 1950501 - DNA, 15 bp, Homo sapiens
gaagcatctgtggag

SEQ ID NO: 1950502 - DNA, 15 bp, Homo sapiens
aagcatctgtggagc

SEQ ID NO: 1950503 - DNA, 15 bp, Homo sapiens
agcatctgtggagca

SEQ ID NO: 1950504 - DNA, 15 bp, Homo sapiens
gcatctgtggagcaa

SEQ ID NO: 1950505 - DNA, 15 bp, Homo sapiens
catctgtggagcaaa

SEQ ID NO: 1950506 - DNA, 15 bp, Homo sapiens
atctgtggagcaaac

SEQ ID NO: 1950507 - DNA, 15 bp, Homo sapiens
tctgtggagcaaacc

SEQ ID NO: 1950508 - DNA, 15 bp, Homo sapiens
ctgtggagcaaacca

SEQ ID NO: 1950509 - DNA, 15 bp, Homo sapiens
tgtggagcaaaccat

SEQ ID NO: 1950510 - DNA, 15 bp, Homo sapiens
gtggagcaaaccata

SEQ ID NO: 1950511 - DNA, 15 bp, Homo sapiens
tggagcaaaccataa

SEQ ID NO: 1950512 - DNA, 15 bp, Homo sapiens
ggagcaaaccataat

SEQ ID NO: 1950513 - DNA, 15 bp, Homo sapiens
gagcaaaccataatc

SEQ ID NO: 1950514 - DNA, 15 bp, Homo sapiens
agcaaaccataatct

SEQ ID NO: 1950515 - DNA, 15 bp, Homo sapiens
gcaaaccataatctt

SEQ ID NO: 1950516 - DNA, 15 bp, Homo sapiens
caaaccataatcttg

SEQ ID NO: 1950517 - DNA, 15 bp, Homo sapiens
aaaccataatcttgt

SEQ ID NO: 1950518 - DNA, 15 bp, Homo sapiens
aaccataatcttgtt

SEQ ID NO: 1950519 - DNA, 15 bp, Homo sapiens
accataatcttgtta

SEQ ID NO: 1950520 - DNA, 15 bp, Homo sapiens
ccataatcttgttat

SEQ ID NO: 1950521 - DNA, 15 bp, Homo sapiens
cataatcttgttata

SEQ ID NO: 1950522 - DNA, 15 bp, Homo sapiens
ataatcttgttataa

SEQ ID NO: 1950523 - DNA, 15 bp, Homo sapiens
taatcttgttataat

SEQ ID NO: 1950524 - DNA, 15 bp, Homo sapiens
aatcttgttataata

SEQ ID NO: 1950525 - DNA, 15 bp, Homo sapiens
atcttgttataatac

SEQ ID NO: 1950526 - DNA, 15 bp, Homo sapiens
tcttgttataatacc

SEQ ID NO: 1950527 - DNA, 15 bp, Homo sapiens
cttgttataatacct

SEQ ID NO: 1950528 - DNA, 15 bp, Homo sapiens
ttgttataatacctc

SEQ ID NO: 1950529 - DNA, 15 bp, Homo sapiens
tgttataatacctcc

SEQ ID NO: 1950530 - DNA, 15 bp, Homo sapiens
gttataatacctccc

SEQ ID NO: 1950531 - DNA, 15 bp, Homo sapiens
ttataatacctccct

SEQ ID NO: 1950532 - DNA, 15 bp, Homo sapiens
tataatacctcccta

SEQ ID NO: 1950533 - DNA, 15 bp, Homo sapiens
ataatacctccctag

SEQ ID NO: 1950534 - DNA, 15 bp, Homo sapiens
taatacctccctagc

SEQ ID NO: 1950535 - DNA, 15 bp, Homo sapiens
aatacctccctagcc

SEQ ID NO: 1950536 - DNA, 15 bp, Homo sapiens
atacctccctagcct

SEQ ID NO: 1950537 - DNA, 15 bp, Homo sapiens
tacctccctagcctt

SEQ ID NO: 1950538 - DNA, 15 bp, Homo sapiens
acctccctagccttt

SEQ ID NO: 1950539 - DNA, 15 bp, Homo sapiens
cctccctagcctttt

SEQ ID NO: 1950540 - DNA, 15 bp, Homo sapiens
ctccctagccttttt

SEQ ID NO: 1950541 - DNA, 15 bp, Homo sapiens
tccctagcctttttc

SEQ ID NO: 1950542 - DNA, 15 bp, Homo sapiens
ccctagcctttttct

SEQ ID NO: 1950543 - DNA, 15 bp, Homo sapiens
cctagcctttttctt

SEQ ID NO: 1950544 - DNA, 15 bp, Homo sapiens
ctagcctttttcttt

SEQ ID NO: 1950545 - DNA, 15 bp, Homo sapiens
tagcctttttctttt

SEQ ID NO: 1950546 - DNA, 15 bp, Homo sapiens
agcctttttcttttt

SEQ ID NO: 1950547 - DNA, 15 bp, Homo sapiens
gcctttttctttttc

SEQ ID NO: 1950548 - DNA, 15 bp, Homo sapiens
cctttttctttttca

SEQ ID NO: 1950549 - DNA, 15 bp, Homo sapiens
ctttttctttttcat

SEQ ID NO: 1950550 - DNA, 15 bp, Homo sapiens
tttttctttttcatc

SEQ ID NO: 1950551 - DNA, 15 bp, Homo sapiens
tttctttttcatctt

SEQ ID NO: 1950552 - DNA, 15 bp, Homo sapiens
ttctttttcatcttt

SEQ ID NO: 1950553 - DNA, 15 bp, Homo sapiens
tctttttcatctttt

SEQ ID NO: 1950554 - DNA, 15 bp, Homo sapiens
ctttttcatcttttt

SEQ ID NO: 1950555 - DNA, 15 bp, Homo sapiens
tttttcatctttttt

SEQ ID NO: 1950556 - DNA, 15 bp, Homo sapiens
ttttcatcttttttt

SEQ ID NO: 1950557 - DNA, 15 bp, Homo sapiens
tttcatctttttttt

SEQ ID NO: 1950558 - DNA, 15 bp, Homo sapiens
ttcatcttttttttt

SEQ ID NO: 1950559 - DNA, 15 bp, Homo sapiens
tcatctttttttttt

SEQ ID NO: 1950560 - DNA, 15 bp, Homo sapiens
catcttttttttttg

SEQ ID NO: 1950561 - DNA, 15 bp, Homo sapiens
atcttttttttttgg

SEQ ID NO: 1950562 - DNA, 15 bp, Homo sapiens
tcttttttttttgga

SEQ ID NO: 1950563 - DNA, 15 bp, Homo sapiens
cttttttttttggag

SEQ ID NO: 1950564 - DNA, 15 bp, Homo sapiens
tttttttttggagaa

SEQ ID NO: 1950565 - DNA, 15 bp, Homo sapiens
ttttttttggagaag

SEQ ID NO: 1950566 - DNA, 15 bp, Homo sapiens
tttttttggagaagg

SEQ ID NO: 1950567 - DNA, 15 bp, Homo sapiens
ttttttggagaaggt

SEQ ID NO: 1950568 - DNA, 15 bp, Homo sapiens
tttttggagaaggtc

SEQ ID NO: 1950569 - DNA, 15 bp, Homo sapiens
ttttggagaaggtct

SEQ ID NO: 1950570 - DNA, 15 bp, Homo sapiens
tttggagaaggtctc

SEQ ID NO: 1950571 - DNA, 15 bp, Homo sapiens
ttggagaaggtctca

SEQ ID NO: 1950572 - DNA, 15 bp, Homo sapiens
tggagaaggtctcag

SEQ ID NO: 1950573 - DNA, 15 bp, Homo sapiens
ggagaaggtctcagt

SEQ ID NO: 1950574 - DNA, 15 bp, Homo sapiens
gagaaggtctcagtc

SEQ ID NO: 1950575 - DNA, 15 bp, Homo sapiens
agaaggtctcagtct

SEQ ID NO: 1950576 - DNA, 15 bp, Homo sapiens
gaaggtctcagtctg

SEQ ID NO: 1950577 - DNA, 15 bp, Homo sapiens
aaggtctcagtctgt

SEQ ID NO: 1950578 - DNA, 15 bp, Homo sapiens
aggtctcagtctgtc

SEQ ID NO: 1950579 - DNA, 15 bp, Homo sapiens
tcagtctgtcgccca

SEQ ID NO: 1950580 - DNA, 15 bp, Homo sapiens
cagtctgtcgcccag

SEQ ID NO: 1950581 - DNA, 15 bp, Homo sapiens
agtctgtcgcccagg

SEQ ID NO: 1950582 - DNA, 15 bp, Homo sapiens
gtctgtcgcccaggc

SEQ ID NO: 1950583 - DNA, 15 bp, Homo sapiens
tcgcccaggctggaa

SEQ ID NO: 1950584 - DNA, 15 bp, Homo sapiens
cgcccaggctggaat

SEQ ID NO: 1950585 - DNA, 15 bp, Homo sapiens
ccaggctggaatgcc

SEQ ID NO: 1950586 - DNA, 15 bp, Homo sapiens
caggctggaatgccg

SEQ ID NO: 1950587 - DNA, 15 bp, Homo sapiens
aggctggaatgccgt

SEQ ID NO: 1950588 - DNA, 15 bp, Homo sapiens
ggctggaatgccgtg

SEQ ID NO: 1950589 - DNA, 15 bp, Homo sapiens
gctggaatgccgtgg

SEQ ID NO: 1950590 - DNA, 15 bp, Homo sapiens
ctggaatgccgtggt

SEQ ID NO: 1950591 - DNA, 15 bp, Homo sapiens
tggaatgccgtggtg

SEQ ID NO: 1950592 - DNA, 15 bp, Homo sapiens
ggaatgccgtggtgc

SEQ ID NO: 1950593 - DNA, 15 bp, Homo sapiens
gaatgccgtggtgca

SEQ ID NO: 1950594 - DNA, 15 bp, Homo sapiens
aatgccgtggtgcaa

SEQ ID NO: 1950595 - DNA, 15 bp, Homo sapiens
atgccgtggtgcaat

SEQ ID NO: 1950596 - DNA, 15 bp, Homo sapiens
tgccgtggtgcaatc

SEQ ID NO: 1950597 - DNA, 15 bp, Homo sapiens
gccgtggtgcaatct

SEQ ID NO: 1950598 - DNA, 15 bp, Homo sapiens
ccgtggtgcaatctt

SEQ ID NO: 1950599 - DNA, 15 bp, Homo sapiens
cgtggtgcaatcttg

SEQ ID NO: 1950600 - DNA, 15 bp, Homo sapiens
gtggtgcaatcttgg

SEQ ID NO: 1950601 - DNA, 15 bp, Homo sapiens
tggtgcaatcttggc

SEQ ID NO: 1950602 - DNA, 15 bp, Homo sapiens
ggtgcaatcttggct

SEQ ID NO: 1950603 - DNA, 15 bp, Homo sapiens
gtgcaatcttggctc

SEQ ID NO: 1950604 - DNA, 15 bp, Homo sapiens
tgcaatcttggctca

SEQ ID NO: 1950605 - DNA, 15 bp, Homo sapiens
cttggctcactgtag

SEQ ID NO: 1950606 - DNA, 15 bp, Homo sapiens
ttggctcactgtagg

SEQ ID NO: 1950607 - DNA, 15 bp, Homo sapiens
tggctcactgtaggc

SEQ ID NO: 1950608 - DNA, 15 bp, Homo sapiens
ggctcactgtaggcc

SEQ ID NO: 1950609 - DNA, 15 bp, Homo sapiens
gctcactgtaggccc

SEQ ID NO: 1950610 - DNA, 15 bp, Homo sapiens
ctcactgtaggccca

SEQ ID NO: 1950611 - DNA, 15 bp, Homo sapiens
tcactgtaggcccac

SEQ ID NO: 1950612 - DNA, 15 bp, Homo sapiens
cactgtaggcccact

SEQ ID NO: 1950613 - DNA, 15 bp, Homo sapiens
actgtaggcccactg

SEQ ID NO: 1950614 - DNA, 15 bp, Homo sapiens
ctgtaggcccactgc

SEQ ID NO: 1950615 - DNA, 15 bp, Homo sapiens
tgtaggcccactgca

SEQ ID NO: 1950616 - DNA, 15 bp, Homo sapiens
gtaggcccactgcag

SEQ ID NO: 1950617 - DNA, 15 bp, Homo sapiens
taggcccactgcagc

SEQ ID NO: 1950618 - DNA, 15 bp, Homo sapiens
aggcccactgcagcc

SEQ ID NO: 1950619 - DNA, 15 bp, Homo sapiens
ggcccactgcagcct

SEQ ID NO: 1950620 - DNA, 15 bp, Homo sapiens
cccactgcagcctca

SEQ ID NO: 1950621 - DNA, 15 bp, Homo sapiens
ccactgcagcctcaa

SEQ ID NO: 1950622 - DNA, 15 bp, Homo sapiens
agcctcaacctccta

SEQ ID NO: 1950623 - DNA, 15 bp, Homo sapiens
gcctcaacctcctag

SEQ ID NO: 1950624 - DNA, 15 bp, Homo sapiens
cctcaacctcctagg

SEQ ID NO: 1950625 - DNA, 15 bp, Homo sapiens
ctcaacctcctaggc

SEQ ID NO: 1950626 - DNA, 15 bp, Homo sapiens
tcaacctcctaggct

SEQ ID NO: 1950627 - DNA, 15 bp, Homo sapiens
caacctcctaggctc

SEQ ID NO: 1950628 - DNA, 15 bp, Homo sapiens
aacctcctaggctca

SEQ ID NO: 1950629 - DNA, 15 bp, Homo sapiens
acctcctaggctcaa

SEQ ID NO: 1950630 - DNA, 15 bp, Homo sapiens
cctcctaggctcaag

SEQ ID NO: 1950631 - DNA, 15 bp, Homo sapiens
ctcctaggctcaagc

SEQ ID NO: 1950632 - DNA, 15 bp, Homo sapiens
tcctaggctcaagcg

SEQ ID NO: 1950633 - DNA, 15 bp, Homo sapiens
cctaggctcaagcga

SEQ ID NO: 1950634 - DNA, 15 bp, Homo sapiens
ctaggctcaagcgat

SEQ ID NO: 1950635 - DNA, 15 bp, Homo sapiens
taggctcaagcgata

SEQ ID NO: 1950636 - DNA, 15 bp, Homo sapiens
aggctcaagcgatac

SEQ ID NO: 1950637 - DNA, 15 bp, Homo sapiens
ggctcaagcgatact

SEQ ID NO: 1950638 - DNA, 15 bp, Homo sapiens
gctcaagcgatactt

SEQ ID NO: 1950639 - DNA, 15 bp, Homo sapiens
ctcaagcgatacttt

SEQ ID NO: 1950640 - DNA, 15 bp, Homo sapiens
tcaagcgatactttc

SEQ ID NO: 1950641 - DNA, 15 bp, Homo sapiens
caagcgatactttca

SEQ ID NO: 1950642 - DNA, 15 bp, Homo sapiens
aagcgatactttcac

SEQ ID NO: 1950643 - DNA, 15 bp, Homo sapiens
agcgatactttcacc

SEQ ID NO: 1950644 - DNA, 15 bp, Homo sapiens
gcgatactttcacct

SEQ ID NO: 1950645 - DNA, 15 bp, Homo sapiens
cgatactttcacctc

SEQ ID NO: 1950646 - DNA, 15 bp, Homo sapiens
gatactttcacctca

SEQ ID NO: 1950647 - DNA, 15 bp, Homo sapiens
atactttcacctcag

SEQ ID NO: 1950648 - DNA, 15 bp, Homo sapiens
tactttcacctcagc

SEQ ID NO: 1950649 - DNA, 15 bp, Homo sapiens
actttcacctcagcc

SEQ ID NO: 1950650 - DNA, 15 bp, Homo sapiens
ctttcacctcagccc

SEQ ID NO: 1950651 - DNA, 15 bp, Homo sapiens
tttcacctcagcccc

SEQ ID NO: 1950652 - DNA, 15 bp, Homo sapiens
ttcacctcagcccct

SEQ ID NO: 1950653 - DNA, 15 bp, Homo sapiens
tcacctcagccccta

SEQ ID NO: 1950654 - DNA, 15 bp, Homo sapiens
cacctcagcccctaa

SEQ ID NO: 1950655 - DNA, 15 bp, Homo sapiens
acctcagcccctaaa

SEQ ID NO: 1950656 - DNA, 15 bp, Homo sapiens
cctcagcccctaaat

SEQ ID NO: 1950657 - DNA, 15 bp, Homo sapiens
ctcagcccctaaata

SEQ ID NO: 1950658 - DNA, 15 bp, Homo sapiens
tcagcccctaaatag

SEQ ID NO: 1950659 - DNA, 15 bp, Homo sapiens
cagcccctaaatagc

SEQ ID NO: 1950660 - DNA, 15 bp, Homo sapiens
agcccctaaatagcc

SEQ ID NO: 1950661 - DNA, 15 bp, Homo sapiens
gcccctaaatagcca

SEQ ID NO: 1950662 - DNA, 15 bp, Homo sapiens
cccctaaatagccaa

SEQ ID NO: 1950663 - DNA, 15 bp, Homo sapiens
ccctaaatagccaag

SEQ ID NO: 1950664 - DNA, 15 bp, Homo sapiens
cctaaatagccaaga

SEQ ID NO: 1950665 - DNA, 15 bp, Homo sapiens
ctaaatagccaagac

SEQ ID NO: 1950666 - DNA, 15 bp, Homo sapiens
taaatagccaagact

SEQ ID NO: 1950667 - DNA, 15 bp, Homo sapiens
aaatagccaagacta

SEQ ID NO: 1950668 - DNA, 15 bp, Homo sapiens
aatagccaagactac

SEQ ID NO: 1950669 - DNA, 15 bp, Homo sapiens
atagccaagactaca

SEQ ID NO: 1950670 - DNA, 15 bp, Homo sapiens
tagccaagactacag

SEQ ID NO: 1950671 - DNA, 15 bp, Homo sapiens
agccaagactacagg

SEQ ID NO: 1950672 - DNA, 15 bp, Homo sapiens
gccaagactacaggc

SEQ ID NO: 1950673 - DNA, 15 bp, Homo sapiens
ccaagactacaggcg

SEQ ID NO: 1950674 - DNA, 15 bp, Homo sapiens
caagactacaggcgt

SEQ ID NO: 1950675 - DNA, 15 bp, Homo sapiens
aagactacaggcgta

SEQ ID NO: 1950676 - DNA, 15 bp, Homo sapiens
agactacaggcgtat

SEQ ID NO: 1950677 - DNA, 15 bp, Homo sapiens
gactacaggcgtatg

SEQ ID NO: 1950678 - DNA, 15 bp, Homo sapiens
actacaggcgtatgc

SEQ ID NO: 1950679 - DNA, 15 bp, Homo sapiens
ctacaggcgtatgcc

SEQ ID NO: 1950680 - DNA, 15 bp, Homo sapiens
tacaggcgtatgcca

SEQ ID NO: 1950681 - DNA, 15 bp, Homo sapiens
acaggcgtatgccac

SEQ ID NO: 1950682 - DNA, 15 bp, Homo sapiens
caggcgtatgccacc

SEQ ID NO: 1950683 - DNA, 15 bp, Homo sapiens
aggcgtatgccacca

SEQ ID NO: 1950684 - DNA, 15 bp, Homo sapiens
ggcgtatgccaccac

SEQ ID NO: 1950685 - DNA, 15 bp, Homo sapiens
gcgtatgccaccacg

SEQ ID NO: 1950686 - DNA, 15 bp, Homo sapiens
cgtatgccaccacgc

SEQ ID NO: 1950687 - DNA, 15 bp, Homo sapiens
gtatgccaccacgcc

SEQ ID NO: 1950688 - DNA, 15 bp, Homo sapiens
tatgccaccacgccc

SEQ ID NO: 1950689 - DNA, 15 bp, Homo sapiens
tgccaccacgcccat

SEQ ID NO: 1950690 - DNA, 15 bp, Homo sapiens
gccaccacgcccatc

SEQ ID NO: 1950691 - DNA, 15 bp, Homo sapiens
ccaccacgcccatcg

SEQ ID NO: 1950692 - DNA, 15 bp, Homo sapiens
caccacgcccatcga

SEQ ID NO: 1950693 - DNA, 15 bp, Homo sapiens
accacgcccatcgaa

SEQ ID NO: 1950694 - DNA, 15 bp, Homo sapiens
ccacgcccatcgaat

SEQ ID NO: 1950695 - DNA, 15 bp, Homo sapiens
cacgcccatcgaatt

SEQ ID NO: 1950696 - DNA, 15 bp, Homo sapiens
acgcccatcgaattt

SEQ ID NO: 1950697 - DNA, 15 bp, Homo sapiens
cgcccatcgaatttt

SEQ ID NO: 1950698 - DNA, 15 bp, Homo sapiens
gcccatcgaattttt

SEQ ID NO: 1950699 - DNA, 15 bp, Homo sapiens
cccatcgaatttttt

SEQ ID NO: 1950700 - DNA, 15 bp, Homo sapiens
ccatcgaattttttt

SEQ ID NO: 1950701 - DNA, 15 bp, Homo sapiens
catcgaattttttta

SEQ ID NO: 1950702 - DNA, 15 bp, Homo sapiens
atcgaatttttttat

SEQ ID NO: 1950703 - DNA, 15 bp, Homo sapiens
tcgaatttttttata

SEQ ID NO: 1950704 - DNA, 15 bp, Homo sapiens
cgaatttttttatat

SEQ ID NO: 1950705 - DNA, 15 bp, Homo sapiens
gaatttttttatatt

SEQ ID NO: 1950706 - DNA, 15 bp, Homo sapiens
tttttttatattttg

SEQ ID NO: 1950707 - DNA, 15 bp, Homo sapiens
ttttttatattttgt

SEQ ID NO: 1950708 - DNA, 15 bp, Homo sapiens
tttttatattttgta

SEQ ID NO: 1950709 - DNA, 15 bp, Homo sapiens
ttttatattttgtag

SEQ ID NO: 1950710 - DNA, 15 bp, Homo sapiens
tttatattttgtaga

SEQ ID NO: 1950711 - DNA, 15 bp, Homo sapiens
ttatattttgtagag

SEQ ID NO: 1950712 - DNA, 15 bp, Homo sapiens
tatattttgtagaga

SEQ ID NO: 1950713 - DNA, 15 bp, Homo sapiens
tctccctatgttgcc

SEQ ID NO: 1950714 - DNA, 15 bp, Homo sapiens
ctccctatgttgccc

SEQ ID NO: 1950715 - DNA, 15 bp, Homo sapiens
tccctatgttgccca

SEQ ID NO: 1950716 - DNA, 15 bp, Homo sapiens
ccctatgttgcccag

SEQ ID NO: 1950717 - DNA, 15 bp, Homo sapiens
cctatgttgcccagg

SEQ ID NO: 1950718 - DNA, 15 bp, Homo sapiens
ccaggctggtcttgg

SEQ ID NO: 1950719 - DNA, 15 bp, Homo sapiens
caggctggtcttggt

SEQ ID NO: 1950720 - DNA, 15 bp, Homo sapiens
aggctggtcttggtc

SEQ ID NO: 1950721 - DNA, 15 bp, Homo sapiens
ggctggtcttggtct

SEQ ID NO: 1950722 - DNA, 15 bp, Homo sapiens
gctggtcttggtctg

SEQ ID NO: 1950723 - DNA, 15 bp, Homo sapiens
ctggtcttggtctgg

SEQ ID NO: 1950724 - DNA, 15 bp, Homo sapiens
tggtcttggtctggg

SEQ ID NO: 1950725 - DNA, 15 bp, Homo sapiens
ggtcttggtctgggc

SEQ ID NO: 1950726 - DNA, 15 bp, Homo sapiens
gtcttggtctgggct

SEQ ID NO: 1950727 - DNA, 15 bp, Homo sapiens
tcttggtctgggctc

SEQ ID NO: 1950728 - DNA, 15 bp, Homo sapiens
cttggtctgggctca

SEQ ID NO: 1950729 - DNA, 15 bp, Homo sapiens
ttggtctgggctcaa

SEQ ID NO: 1950730 - DNA, 15 bp, Homo sapiens
tggtctgggctcaag

SEQ ID NO: 1950731 - DNA, 15 bp, Homo sapiens
ggtctgggctcaagc

SEQ ID NO: 1950732 - DNA, 15 bp, Homo sapiens
gtctgggctcaagca

SEQ ID NO: 1950733 - DNA, 15 bp, Homo sapiens
tctgggctcaagcag

SEQ ID NO: 1950734 - DNA, 15 bp, Homo sapiens
ctgggctcaagcagt

SEQ ID NO: 1950735 - DNA, 15 bp, Homo sapiens
tgggctcaagcagtc

SEQ ID NO: 1950736 - DNA, 15 bp, Homo sapiens
gggctcaagcagtcc

SEQ ID NO: 1950737 - DNA, 15 bp, Homo sapiens
ggctcaagcagtcct

SEQ ID NO: 1950738 - DNA, 15 bp, Homo sapiens
gctcaagcagtcctc

SEQ ID NO: 1950739 - DNA, 15 bp, Homo sapiens
caagcagtcctccct

SEQ ID NO: 1950740 - DNA, 15 bp, Homo sapiens
aagcagtcctccctc

SEQ ID NO: 1950741 - DNA, 15 bp, Homo sapiens
agcagtcctccctcc

SEQ ID NO: 1950742 - DNA, 15 bp, Homo sapiens
gcagtcctccctcct

SEQ ID NO: 1950743 - DNA, 15 bp, Homo sapiens
cagtcctccctcctc

SEQ ID NO: 1950744 - DNA, 15 bp, Homo sapiens
agtcctccctcctcg

SEQ ID NO: 1950745 - DNA, 15 bp, Homo sapiens
gtcctccctcctcga

SEQ ID NO: 1950746 - DNA, 15 bp, Homo sapiens
tcctccctcctcgac

SEQ ID NO: 1950747 - DNA, 15 bp, Homo sapiens
cctccctcctcgacc

SEQ ID NO: 1950748 - DNA, 15 bp, Homo sapiens
ctccctcctcgacct

SEQ ID NO: 1950749 - DNA, 15 bp, Homo sapiens
tccctcctcgacctc

SEQ ID NO: 1950750 - DNA, 15 bp, Homo sapiens
ccctcctcgacctcc

SEQ ID NO: 1950751 - DNA, 15 bp, Homo sapiens
cctcctcgacctccc

SEQ ID NO: 1950752 - DNA, 15 bp, Homo sapiens
ctcctcgacctccca

SEQ ID NO: 1950753 - DNA, 15 bp, Homo sapiens
tcctcgacctcccaa

SEQ ID NO: 1950754 - DNA, 15 bp, Homo sapiens
caggcatgaaccact

SEQ ID NO: 1950755 - DNA, 15 bp, Homo sapiens
aggcatgaaccactg

SEQ ID NO: 1950756 - DNA, 15 bp, Homo sapiens
ggcatgaaccactgt

SEQ ID NO: 1950757 - DNA, 15 bp, Homo sapiens
gcatgaaccactgtg

SEQ ID NO: 1950758 - DNA, 15 bp, Homo sapiens
catgaaccactgtgc

SEQ ID NO: 1950759 - DNA, 15 bp, Homo sapiens
atgaaccactgtgca

SEQ ID NO: 1950760 - DNA, 15 bp, Homo sapiens
tgaaccactgtgcat

SEQ ID NO: 1950761 - DNA, 15 bp, Homo sapiens
gaaccactgtgcatg

SEQ ID NO: 1950762 - DNA, 15 bp, Homo sapiens
aaccactgtgcatgg

SEQ ID NO: 1950763 - DNA, 15 bp, Homo sapiens
accactgtgcatggc

SEQ ID NO: 1950764 - DNA, 15 bp, Homo sapiens
ccactgtgcatggcc

SEQ ID NO: 1950765 - DNA, 15 bp, Homo sapiens
cactgtgcatggcca

SEQ ID NO: 1950766 - DNA, 15 bp, Homo sapiens
actgtgcatggccac

SEQ ID NO: 1950767 - DNA, 15 bp, Homo sapiens
ctgtgcatggccacc

SEQ ID NO: 1950768 - DNA, 15 bp, Homo sapiens
tgtgcatggccacct

SEQ ID NO: 1950769 - DNA, 15 bp, Homo sapiens
gtgcatggccacctc

SEQ ID NO: 1950770 - DNA, 15 bp, Homo sapiens
tgcatggccacctcc

SEQ ID NO: 1950771 - DNA, 15 bp, Homo sapiens
gcatggccacctccc

SEQ ID NO: 1950772 - DNA, 15 bp, Homo sapiens
catggccacctccca

SEQ ID NO: 1950773 - DNA, 15 bp, Homo sapiens
atggccacctcccaa

SEQ ID NO: 1950774 - DNA, 15 bp, Homo sapiens
tggccacctcccaag

SEQ ID NO: 1950775 - DNA, 15 bp, Homo sapiens
ggccacctcccaagc

SEQ ID NO: 1950776 - DNA, 15 bp, Homo sapiens
gccacctcccaagct

SEQ ID NO: 1950777 - DNA, 15 bp, Homo sapiens
ccacctcccaagctt

SEQ ID NO: 1950778 - DNA, 15 bp, Homo sapiens
cacctcccaagcttt

SEQ ID NO: 1950779 - DNA, 15 bp, Homo sapiens
acctcccaagctttt

SEQ ID NO: 1950780 - DNA, 15 bp, Homo sapiens
cctcccaagctttta

SEQ ID NO: 1950781 - DNA, 15 bp, Homo sapiens
ctcccaagcttttaa

SEQ ID NO: 1950782 - DNA, 15 bp, Homo sapiens
tcccaagcttttaaa

SEQ ID NO: 1950783 - DNA, 15 bp, Homo sapiens
cccaagcttttaaaa

SEQ ID NO: 1950784 - DNA, 15 bp, Homo sapiens
ccaagcttttaaaag

SEQ ID NO: 1950785 - DNA, 15 bp, Homo sapiens
caagcttttaaaagc

SEQ ID NO: 1950786 - DNA, 15 bp, Homo sapiens
aagcttttaaaagcc

SEQ ID NO: 1950787 - DNA, 15 bp, Homo sapiens
agcttttaaaagccc

SEQ ID NO: 1950788 - DNA, 15 bp, Homo sapiens
gcttttaaaagccct

SEQ ID NO: 1950789 - DNA, 15 bp, Homo sapiens
cttttaaaagccctt

SEQ ID NO: 1950790 - DNA, 15 bp, Homo sapiens
ttttaaaagccctta

SEQ ID NO: 1950791 - DNA, 15 bp, Homo sapiens
tttaaaagcccttat

SEQ ID NO: 1950792 - DNA, 15 bp, Homo sapiens
ttaaaagcccttatc

SEQ ID NO: 1950793 - DNA, 15 bp, Homo sapiens
taaaagcccttatca

SEQ ID NO: 1950794 - DNA, 15 bp, Homo sapiens
aaaagcccttatcac

SEQ ID NO: 1950795 - DNA, 15 bp, Homo sapiens
aaagcccttatcaca

SEQ ID NO: 1950796 - DNA, 15 bp, Homo sapiens
aagcccttatcacaa

SEQ ID NO: 1950797 - DNA, 15 bp, Homo sapiens
agcccttatcacaat

SEQ ID NO: 1950798 - DNA, 15 bp, Homo sapiens
gcccttatcacaata

SEQ ID NO: 1950799 - DNA, 15 bp, Homo sapiens
cccttatcacaatat

SEQ ID NO: 1950800 - DNA, 15 bp, Homo sapiens
ccttatcacaatatc

SEQ ID NO: 1950801 - DNA, 15 bp, Homo sapiens
cttatcacaatatca

SEQ ID NO: 1950802 - DNA, 15 bp, Homo sapiens
ttatcacaatatcat

SEQ ID NO: 1950803 - DNA, 15 bp, Homo sapiens
tatcacaatatcatt

SEQ ID NO: 1950804 - DNA, 15 bp, Homo sapiens
atcacaatatcattg

SEQ ID NO: 1950805 - DNA, 15 bp, Homo sapiens
tcacaatatcattgg

SEQ ID NO: 1950806 - DNA, 15 bp, Homo sapiens
cacaatatcattggt

SEQ ID NO: 1950807 - DNA, 15 bp, Homo sapiens
acaatatcattggta

SEQ ID NO: 1950808 - DNA, 15 bp, Homo sapiens
caatatcattggtag

SEQ ID NO: 1950809 - DNA, 15 bp, Homo sapiens
aatatcattggtaga

SEQ ID NO: 1950810 - DNA, 15 bp, Homo sapiens
atatcattggtagac

SEQ ID NO: 1950811 - DNA, 15 bp, Homo sapiens
tatcattggtagacc

SEQ ID NO: 1950812 - DNA, 15 bp, Homo sapiens
atcattggtagaccc

SEQ ID NO: 1950813 - DNA, 15 bp, Homo sapiens
tcattggtagacccc

SEQ ID NO: 1950814 - DNA, 15 bp, Homo sapiens
cattggtagacccca

SEQ ID NO: 1950815 - DNA, 15 bp, Homo sapiens
attggtagaccccag

SEQ ID NO: 1950816 - DNA, 15 bp, Homo sapiens
ttggtagaccccagt

SEQ ID NO: 1950817 - DNA, 15 bp, Homo sapiens
tggtagaccccagtg

SEQ ID NO: 1950818 - DNA, 15 bp, Homo sapiens
ggtagaccccagtgg

SEQ ID NO: 1950819 - DNA, 15 bp, Homo sapiens
gtagaccccagtggg

SEQ ID NO: 1950820 - DNA, 15 bp, Homo sapiens
tagaccccagtgggc

SEQ ID NO: 1950821 - DNA, 15 bp, Homo sapiens
agaccccagtgggca

SEQ ID NO: 1950822 - DNA, 15 bp, Homo sapiens
gaccccagtgggcaa

SEQ ID NO: 1950823 - DNA, 15 bp, Homo sapiens
accccagtgggcaaa

SEQ ID NO: 1950824 - DNA, 15 bp, Homo sapiens
ccccagtgggcaaaa

SEQ ID NO: 1950825 - DNA, 15 bp, Homo sapiens
cccagtgggcaaaaa

SEQ ID NO: 1950826 - DNA, 15 bp, Homo sapiens
ccagtgggcaaaaat

SEQ ID NO: 1950827 - DNA, 15 bp, Homo sapiens
cagtgggcaaaaatt

SEQ ID NO: 1950828 - DNA, 15 bp, Homo sapiens
agtgggcaaaaattg

SEQ ID NO: 1950829 - DNA, 15 bp, Homo sapiens
gtgggcaaaaattgg

SEQ ID NO: 1950830 - DNA, 15 bp, Homo sapiens
tgggcaaaaattggc

SEQ ID NO: 1950831 - DNA, 15 bp, Homo sapiens
gggcaaaaattggct

SEQ ID NO: 1950832 - DNA, 15 bp, Homo sapiens
ggcaaaaattggctc

SEQ ID NO: 1950833 - DNA, 15 bp, Homo sapiens
gcaaaaattggctca

SEQ ID NO: 1950834 - DNA, 15 bp, Homo sapiens
caaaaattggctcat

SEQ ID NO: 1950835 - DNA, 15 bp, Homo sapiens
aaaaattggctcatg

SEQ ID NO: 1950836 - DNA, 15 bp, Homo sapiens
aaaattggctcatga

SEQ ID NO: 1950837 - DNA, 15 bp, Homo sapiens
aaattggctcatgat

SEQ ID NO: 1950838 - DNA, 15 bp, Homo sapiens
aattggctcatgata

SEQ ID NO: 1950839 - DNA, 15 bp, Homo sapiens
attggctcatgatac

SEQ ID NO: 1950840 - DNA, 15 bp, Homo sapiens
ttggctcatgatact

SEQ ID NO: 1950841 - DNA, 15 bp, Homo sapiens
tggctcatgatactg

SEQ ID NO: 1950842 - DNA, 15 bp, Homo sapiens
ggctcatgatactgt

SEQ ID NO: 1950843 - DNA, 15 bp, Homo sapiens
gctcatgatactgta

SEQ ID NO: 1950844 - DNA, 15 bp, Homo sapiens
ctcatgatactgtag

SEQ ID NO: 1950845 - DNA, 15 bp, Homo sapiens
tcatgatactgtagg

SEQ ID NO: 1950846 - DNA, 15 bp, Homo sapiens
catgatactgtaggg

SEQ ID NO: 1950847 - DNA, 15 bp, Homo sapiens
atgatactgtagggg

SEQ ID NO: 1950848 - DNA, 15 bp, Homo sapiens
tgatactgtagggga

SEQ ID NO: 1950849 - DNA, 15 bp, Homo sapiens
gatactgtaggggac

SEQ ID NO: 1950850 - DNA, 15 bp, Homo sapiens
atactgtaggggaca

SEQ ID NO: 1950851 - DNA, 15 bp, Homo sapiens
tactgtaggggacaa

SEQ ID NO: 1950852 - DNA, 15 bp, Homo sapiens
actgtaggggacaaa

SEQ ID NO: 1950853 - DNA, 15 bp, Homo sapiens
ctgtaggggacaaaa

SEQ ID NO: 1950854 - DNA, 15 bp, Homo sapiens
tgtaggggacaaaaa

SEQ ID NO: 1950855 - DNA, 15 bp, Homo sapiens
gtaggggacaaaaac

SEQ ID NO: 1950856 - DNA, 15 bp, Homo sapiens
taggggacaaaaaca

SEQ ID NO: 1950857 - DNA, 15 bp, Homo sapiens
aggggacaaaaacaa

SEQ ID NO: 1950858 - DNA, 15 bp, Homo sapiens
ggggacaaaaacaaa

SEQ ID NO: 1950859 - DNA, 15 bp, Homo sapiens
gggacaaaaacaaac

SEQ ID NO: 1950860 - DNA, 15 bp, Homo sapiens
ggacaaaaacaaaca

SEQ ID NO: 1950861 - DNA, 15 bp, Homo sapiens
caaaaacaaacaaac

SEQ ID NO: 1950862 - DNA, 15 bp, Homo sapiens
acaaacaaacaaaat

SEQ ID NO: 1950863 - DNA, 15 bp, Homo sapiens
caaacaaacaaaata

SEQ ID NO: 1950864 - DNA, 15 bp, Homo sapiens
aaacaaacaaaatac

SEQ ID NO: 1950865 - DNA, 15 bp, Homo sapiens
aacaaacaaaatact

SEQ ID NO: 1950866 - DNA, 15 bp, Homo sapiens
acaaacaaaatactt

SEQ ID NO: 1950867 - DNA, 15 bp, Homo sapiens
caaacaaaatacttt

SEQ ID NO: 1950868 - DNA, 15 bp, Homo sapiens
aaacaaaatactttt

SEQ ID NO: 1950869 - DNA, 15 bp, Homo sapiens
aacaaaatacttttc

SEQ ID NO: 1950870 - DNA, 15 bp, Homo sapiens
acaaaatacttttcc

SEQ ID NO: 1950871 - DNA, 15 bp, Homo sapiens
caaaatacttttcct

SEQ ID NO: 1950872 - DNA, 15 bp, Homo sapiens
aaaatacttttcctt

SEQ ID NO: 1950873 - DNA, 15 bp, Homo sapiens
aaatacttttccttt

SEQ ID NO: 1950874 - DNA, 15 bp, Homo sapiens
aatacttttccttta

SEQ ID NO: 1950875 - DNA, 15 bp, Homo sapiens
atacttttcctttac

SEQ ID NO: 1950876 - DNA, 15 bp, Homo sapiens
tacttttcctttaca

SEQ ID NO: 1950877 - DNA, 15 bp, Homo sapiens
acttttcctttacat

SEQ ID NO: 1950878 - DNA, 15 bp, Homo sapiens
cttttcctttacatt

SEQ ID NO: 1950879 - DNA, 15 bp, Homo sapiens
ttttcctttacattt

SEQ ID NO: 1950880 - DNA, 15 bp, Homo sapiens
tttcctttacatttc

SEQ ID NO: 1950881 - DNA, 15 bp, Homo sapiens
ttcctttacatttca

SEQ ID NO: 1950882 - DNA, 15 bp, Homo sapiens
tcctttacatttcag

SEQ ID NO: 1950883 - DNA, 15 bp, Homo sapiens
cctttacatttcagg

SEQ ID NO: 1950884 - DNA, 15 bp, Homo sapiens
ctttacatttcaggt

SEQ ID NO: 1950885 - DNA, 15 bp, Homo sapiens
tttacatttcaggtt

SEQ ID NO: 1950886 - DNA, 15 bp, Homo sapiens
ttacatttcaggttt

SEQ ID NO: 1950887 - DNA, 15 bp, Homo sapiens
tacatttcaggttta

SEQ ID NO: 1950888 - DNA, 15 bp, Homo sapiens
acatttcaggtttag

SEQ ID NO: 1950889 - DNA, 15 bp, Homo sapiens
catttcaggtttagt

SEQ ID NO: 1950890 - DNA, 15 bp, Homo sapiens
atttcaggtttagtg

SEQ ID NO: 1950891 - DNA, 15 bp, Homo sapiens
tttcaggtttagtgg

SEQ ID NO: 1950892 - DNA, 15 bp, Homo sapiens
ttcaggtttagtggc

SEQ ID NO: 1950893 - DNA, 15 bp, Homo sapiens
tcaggtttagtggct

SEQ ID NO: 1950894 - DNA, 15 bp, Homo sapiens
caggtttagtggctg

SEQ ID NO: 1950895 - DNA, 15 bp, Homo sapiens
aggtttagtggctgg

SEQ ID NO: 1950896 - DNA, 15 bp, Homo sapiens
ggtttagtggctggg

SEQ ID NO: 1950897 - DNA, 15 bp, Homo sapiens
gtttagtggctgggg

SEQ ID NO: 1950898 - DNA, 15 bp, Homo sapiens
tttagtggctggggc

SEQ ID NO: 1950899 - DNA, 15 bp, Homo sapiens
ttagtggctggggcc

SEQ ID NO: 1950900 - DNA, 15 bp, Homo sapiens
tagtggctggggcct

SEQ ID NO: 1950901 - DNA, 15 bp, Homo sapiens
agtggctggggcctg

SEQ ID NO: 1950902 - DNA, 15 bp, Homo sapiens
gtggctggggcctgt

SEQ ID NO: 1950903 - DNA, 15 bp, Homo sapiens
tggctggggcctgtg

SEQ ID NO: 1950904 - DNA, 15 bp, Homo sapiens
ggctggggcctgtga

SEQ ID NO: 1950905 - DNA, 15 bp, Homo sapiens
gctggggcctgtgaa

SEQ ID NO: 1950906 - DNA, 15 bp, Homo sapiens
ctggggcctgtgaat

SEQ ID NO: 1950907 - DNA, 15 bp, Homo sapiens
tggggcctgtgaatt

SEQ ID NO: 1950908 - DNA, 15 bp, Homo sapiens
ggggcctgtgaatta

SEQ ID NO: 1950909 - DNA, 15 bp, Homo sapiens
gggcctgtgaattaa

SEQ ID NO: 1950910 - DNA, 15 bp, Homo sapiens
ggcctgtgaattaaa

SEQ ID NO: 1950911 - DNA, 15 bp, Homo sapiens
gcctgtgaattaaac

SEQ ID NO: 1950912 - DNA, 15 bp, Homo sapiens
cctgtgaattaaact

SEQ ID NO: 1950913 - DNA, 15 bp, Homo sapiens
ctgtgaattaaactg

SEQ ID NO: 1950914 - DNA, 15 bp, Homo sapiens
tgtgaattaaactga

SEQ ID NO: 1950915 - DNA, 15 bp, Homo sapiens
gtgaattaaactgac

SEQ ID NO: 1950916 - DNA, 15 bp, Homo sapiens
tgaattaaactgaca

SEQ ID NO: 1950917 - DNA, 15 bp, Homo sapiens
gaattaaactgacaa

SEQ ID NO: 1950918 - DNA, 15 bp, Homo sapiens
aattaaactgacaaa

SEQ ID NO: 1950919 - DNA, 15 bp, Homo sapiens
attaaactgacaaaa

SEQ ID NO: 1950920 - DNA, 15 bp, Homo sapiens
ttaaactgacaaaag

SEQ ID NO: 1950921 - DNA, 15 bp, Homo sapiens
taaactgacaaaagg

SEQ ID NO: 1950922 - DNA, 15 bp, Homo sapiens
aaactgacaaaaggt

SEQ ID NO: 1950923 - DNA, 15 bp, Homo sapiens
aactgacaaaaggta

SEQ ID NO: 1950924 - DNA, 15 bp, Homo sapiens
actgacaaaaggtaa

SEQ ID NO: 1950925 - DNA, 15 bp, Homo sapiens
ctgacaaaaggtaaa

SEQ ID NO: 1950926 - DNA, 15 bp, Homo sapiens
tgacaaaaggtaaat

SEQ ID NO: 1950927 - DNA, 15 bp, Homo sapiens
gacaaaaggtaaatt

SEQ ID NO: 1950928 - DNA, 15 bp, Homo sapiens
acaaaaggtaaatta

SEQ ID NO: 1950929 - DNA, 15 bp, Homo sapiens
caaaaggtaaattaa

SEQ ID NO: 1950930 - DNA, 15 bp, Homo sapiens
aaaaggtaaattaac

SEQ ID NO: 1950931 - DNA, 15 bp, Homo sapiens
aaaggtaaattaacc

SEQ ID NO: 1950932 - DNA, 15 bp, Homo sapiens
aaggtaaattaacca

SEQ ID NO: 1950933 - DNA, 15 bp, Homo sapiens
aggtaaattaaccag

SEQ ID NO: 1950934 - DNA, 15 bp, Homo sapiens
ggtaaattaaccaga

SEQ ID NO: 1950935 - DNA, 15 bp, Homo sapiens
gtaaattaaccagag

SEQ ID NO: 1950936 - DNA, 15 bp, Homo sapiens
taaattaaccagaga

SEQ ID NO: 1950937 - DNA, 15 bp, Homo sapiens
aaattaaccagagaa

SEQ ID NO: 1950938 - DNA, 15 bp, Homo sapiens
aattaaccagagaaa

SEQ ID NO: 1950939 - DNA, 15 bp, Homo sapiens
attaaccagagaaaa

SEQ ID NO: 1950940 - DNA, 15 bp, Homo sapiens
ttaaccagagaaaaa

SEQ ID NO: 1950941 - DNA, 15 bp, Homo sapiens
taaccagagaaaaag

SEQ ID NO: 1950942 - DNA, 15 bp, Homo sapiens
aaccagagaaaaagc

SEQ ID NO: 1950943 - DNA, 15 bp, Homo sapiens
accagagaaaaagca

SEQ ID NO: 1950944 - DNA, 15 bp, Homo sapiens
ccagagaaaaagcat

SEQ ID NO: 1950945 - DNA, 15 bp, Homo sapiens
cagagaaaaagcata

SEQ ID NO: 1950946 - DNA, 15 bp, Homo sapiens
agagaaaaagcatac

SEQ ID NO: 1950947 - DNA, 15 bp, Homo sapiens
gagaaaaagcataca

SEQ ID NO: 1950948 - DNA, 15 bp, Homo sapiens
agaaaaagcatacac

SEQ ID NO: 1950949 - DNA, 15 bp, Homo sapiens
gaaaaagcatacaca

SEQ ID NO: 1950950 - DNA, 15 bp, Homo sapiens
aaaaagcatacacat

SEQ ID NO: 1950951 - DNA, 15 bp, Homo sapiens
aaaagcatacacatt

SEQ ID NO: 1950952 - DNA, 15 bp, Homo sapiens
aaagcatacacattt

SEQ ID NO: 1950953 - DNA, 15 bp, Homo sapiens
aagcatacacatttt

SEQ ID NO: 1950954 - DNA, 15 bp, Homo sapiens
agcatacacatttta

SEQ ID NO: 1950955 - DNA, 15 bp, Homo sapiens
gcatacacattttat

SEQ ID NO: 1950956 - DNA, 15 bp, Homo sapiens
catacacattttatc

SEQ ID NO: 1950957 - DNA, 15 bp, Homo sapiens
atacacattttatca

SEQ ID NO: 1950958 - DNA, 15 bp, Homo sapiens
tacacattttatcaa

SEQ ID NO: 1950959 - DNA, 15 bp, Homo sapiens
acacattttatcaat

SEQ ID NO: 1950960 - DNA, 15 bp, Homo sapiens
cacattttatcaatg

SEQ ID NO: 1950961 - DNA, 15 bp, Homo sapiens
acattttatcaatgt

SEQ ID NO: 1950962 - DNA, 15 bp, Homo sapiens
cattttatcaatgtt

SEQ ID NO: 1950963 - DNA, 15 bp, Homo sapiens
attttatcaatgtta

SEQ ID NO: 1950964 - DNA, 15 bp, Homo sapiens
ttttatcaatgttaa

SEQ ID NO: 1950965 - DNA, 15 bp, Homo sapiens
tttatcaatgttaac

SEQ ID NO: 1950966 - DNA, 15 bp, Homo sapiens
ttatcaatgttaaca

SEQ ID NO: 1950967 - DNA, 15 bp, Homo sapiens
tatcaatgttaacat

SEQ ID NO: 1950968 - DNA, 15 bp, Homo sapiens
atcaatgttaacatt

SEQ ID NO: 1950969 - DNA, 15 bp, Homo sapiens
tcaatgttaacattt

SEQ ID NO: 1950970 - DNA, 15 bp, Homo sapiens
caatgttaacatttt

SEQ ID NO: 1950971 - DNA, 15 bp, Homo sapiens
aatgttaacattttt

SEQ ID NO: 1950972 - DNA, 15 bp, Homo sapiens
atgttaacattttta

SEQ ID NO: 1950973 - DNA, 15 bp, Homo sapiens
tgttaacatttttat

SEQ ID NO: 1950974 - DNA, 15 bp, Homo sapiens
gttaacatttttatg

SEQ ID NO: 1950975 - DNA, 15 bp, Homo sapiens
ttaacatttttatga

SEQ ID NO: 1950976 - DNA, 15 bp, Homo sapiens
taacatttttatgag

SEQ ID NO: 1950977 - DNA, 15 bp, Homo sapiens
aacatttttatgagc

SEQ ID NO: 1950978 - DNA, 15 bp, Homo sapiens
acatttttatgagca

SEQ ID NO: 1950979 - DNA, 15 bp, Homo sapiens
catttttatgagcat

SEQ ID NO: 1950980 - DNA, 15 bp, Homo sapiens
atttttatgagcatg

SEQ ID NO: 1950981 - DNA, 15 bp, Homo sapiens
tttttatgagcatgg

SEQ ID NO: 1950982 - DNA, 15 bp, Homo sapiens
ttttatgagcatggg

SEQ ID NO: 1950983 - DNA, 15 bp, Homo sapiens
tttatgagcatgggg

SEQ ID NO: 1950984 - DNA, 15 bp, Homo sapiens
ttatgagcatggggc

SEQ ID NO: 1950985 - DNA, 15 bp, Homo sapiens
tatgagcatggggct

SEQ ID NO: 1950986 - DNA, 15 bp, Homo sapiens
atgagcatggggctt

SEQ ID NO: 1950987 - DNA, 15 bp, Homo sapiens
tgagcatggggcttc

SEQ ID NO: 1950988 - DNA, 15 bp, Homo sapiens
gagcatggggcttca

SEQ ID NO: 1950989 - DNA, 15 bp, Homo sapiens
agcatggggcttcac

SEQ ID NO: 1950990 - DNA, 15 bp, Homo sapiens
gcatggggcttcaca

SEQ ID NO: 1950991 - DNA, 15 bp, Homo sapiens
catggggcttcacag

SEQ ID NO: 1950992 - DNA, 15 bp, Homo sapiens
atggggcttcacagt

SEQ ID NO: 1950993 - DNA, 15 bp, Homo sapiens
tggggcttcacagta

SEQ ID NO: 1950994 - DNA, 15 bp, Homo sapiens
ggggcttcacagtag

SEQ ID NO: 1950995 - DNA, 15 bp, Homo sapiens
gggcttcacagtagt

SEQ ID NO: 1950996 - DNA, 15 bp, Homo sapiens
ggcttcacagtagta

SEQ ID NO: 1950997 - DNA, 15 bp, Homo sapiens
gcttcacagtagtat

SEQ ID NO: 1950998 - DNA, 15 bp, Homo sapiens
cttcacagtagtata

SEQ ID NO: 1950999 - DNA, 15 bp, Homo sapiens
ttcacagtagtatat

SEQ ID NO: 1951000 - DNA, 15 bp, Homo sapiens
tcacagtagtatata

SEQ ID NO: 1951001 - DNA, 15 bp, Homo sapiens
cacagtagtatataa

SEQ ID NO: 1951002 - DNA, 15 bp, Homo sapiens
acagtagtatataag

SEQ ID NO: 1951003 - DNA, 15 bp, Homo sapiens
cagtagtatataaga

SEQ ID NO: 1951004 - DNA, 15 bp, Homo sapiens
agtagtatataagaa

SEQ ID NO: 1951005 - DNA, 15 bp, Homo sapiens
gtagtatataagaag

SEQ ID NO: 1951006 - DNA, 15 bp, Homo sapiens
tagtatataagaagt

SEQ ID NO: 1951007 - DNA, 15 bp, Homo sapiens
agtatataagaagtg

SEQ ID NO: 1951008 - DNA, 15 bp, Homo sapiens
gtatataagaagtgt

SEQ ID NO: 1951009 - DNA, 15 bp, Homo sapiens
tatataagaagtgtt

SEQ ID NO: 1951010 - DNA, 15 bp, Homo sapiens
atataagaagtgttt

SEQ ID NO: 1951011 - DNA, 15 bp, Homo sapiens
tataagaagtgttta

SEQ ID NO: 1951012 - DNA, 15 bp, Homo sapiens
ataagaagtgtttag

SEQ ID NO: 1951013 - DNA, 15 bp, Homo sapiens
taagaagtgtttaga

SEQ ID NO: 1951014 - DNA, 15 bp, Homo sapiens
aagaagtgtttagac

SEQ ID NO: 1951015 - DNA, 15 bp, Homo sapiens
agaagtgtttagact

SEQ ID NO: 1951016 - DNA, 15 bp, Homo sapiens
gaagtgtttagactc

SEQ ID NO: 1951017 - DNA, 15 bp, Homo sapiens
aagtgtttagactca

SEQ ID NO: 1951018 - DNA, 15 bp, Homo sapiens
agtgtttagactcag

SEQ ID NO: 1951019 - DNA, 15 bp, Homo sapiens
gtgtttagactcagg

SEQ ID NO: 1951020 - DNA, 15 bp, Homo sapiens
tgtttagactcaggg

SEQ ID NO: 1951021 - DNA, 15 bp, Homo sapiens
gtttagactcagggc

SEQ ID NO: 1951022 - DNA, 15 bp, Homo sapiens
tttagactcagggct

SEQ ID NO: 1951023 - DNA, 15 bp, Homo sapiens
ttagactcagggctt

SEQ ID NO: 1951024 - DNA, 15 bp, Homo sapiens
tagactcagggcttg

SEQ ID NO: 1951025 - DNA, 15 bp, Homo sapiens
agactcagggcttgt

SEQ ID NO: 1951026 - DNA, 15 bp, Homo sapiens
gactcagggcttgtc

SEQ ID NO: 1951027 - DNA, 15 bp, Homo sapiens
actcagggcttgtct

SEQ ID NO: 1951028 - DNA, 15 bp, Homo sapiens
ctcagggcttgtcta

SEQ ID NO: 1951029 - DNA, 15 bp, Homo sapiens
tcagggcttgtctac

SEQ ID NO: 1951030 - DNA, 15 bp, Homo sapiens
cagggcttgtctacc

SEQ ID NO: 1951031 - DNA, 15 bp, Homo sapiens
agggcttgtctacct

SEQ ID NO: 1951032 - DNA, 15 bp, Homo sapiens
gggcttgtctaccta

SEQ ID NO: 1951033 - DNA, 15 bp, Homo sapiens
ggcttgtctacctaa

SEQ ID NO: 1951034 - DNA, 15 bp, Homo sapiens
gcttgtctacctaac

SEQ ID NO: 1951035 - DNA, 15 bp, Homo sapiens
cttgtctacctaact

SEQ ID NO: 1951036 - DNA, 15 bp, Homo sapiens
ttgtctacctaactt

SEQ ID NO: 1951037 - DNA, 15 bp, Homo sapiens
tgtctacctaactta

SEQ ID NO: 1951038 - DNA, 15 bp, Homo sapiens
gtctacctaacttag

SEQ ID NO: 1951039 - DNA, 15 bp, Homo sapiens
tctacctaacttagt

SEQ ID NO: 1951040 - DNA, 15 bp, Homo sapiens
ctacctaacttagta

SEQ ID NO: 1951041 - DNA, 15 bp, Homo sapiens
tacctaacttagtag

SEQ ID NO: 1951042 - DNA, 15 bp, Homo sapiens
acctaacttagtagg

SEQ ID NO: 1951043 - DNA, 15 bp, Homo sapiens
cctaacttagtaggg

SEQ ID NO: 1951044 - DNA, 15 bp, Homo sapiens
ctaacttagtaggga

SEQ ID NO: 1951045 - DNA, 15 bp, Homo sapiens
taacttagtagggaa

SEQ ID NO: 1951046 - DNA, 15 bp, Homo sapiens
aacttagtagggaaa

SEQ ID NO: 1951047 - DNA, 15 bp, Homo sapiens
acttagtagggaaaa

SEQ ID NO: 1951048 - DNA, 15 bp, Homo sapiens
cttagtagggaaaag

SEQ ID NO: 1951049 - DNA, 15 bp, Homo sapiens
ttagtagggaaaagg

SEQ ID NO: 1951050 - DNA, 15 bp, Homo sapiens
tagtagggaaaaggg

SEQ ID NO: 1951051 - DNA, 15 bp, Homo sapiens
agtagggaaaaggga

SEQ ID NO: 1951052 - DNA, 15 bp, Homo sapiens
gtagggaaaagggag

SEQ ID NO: 1951053 - DNA, 15 bp, Homo sapiens
tagggaaaagggaga

SEQ ID NO: 1951054 - DNA, 15 bp, Homo sapiens
agggaaaagggagag

SEQ ID NO: 1951055 - DNA, 15 bp, Homo sapiens
gggaaaagggagagg

SEQ ID NO: 1951056 - DNA, 15 bp, Homo sapiens
ggaaaagggagagga

SEQ ID NO: 1951057 - DNA, 15 bp, Homo sapiens
gaaaagggagaggaa

SEQ ID NO: 1951058 - DNA, 15 bp, Homo sapiens
aaaagggagaggaag

SEQ ID NO: 1951059 - DNA, 15 bp, Homo sapiens
aaagggagaggaaga

SEQ ID NO: 1951060 - DNA, 15 bp, Homo sapiens
aagggagaggaagaa

SEQ ID NO: 1951061 - DNA, 15 bp, Homo sapiens
agggagaggaagaaa

SEQ ID NO: 1951062 - DNA, 15 bp, Homo sapiens
gggagaggaagaaaa

SEQ ID NO: 1951063 - DNA, 15 bp, Homo sapiens
ggagaggaagaaaag

SEQ ID NO: 1951064 - DNA, 15 bp, Homo sapiens
gagaggaagaaaagt

SEQ ID NO: 1951065 - DNA, 15 bp, Homo sapiens
agaggaagaaaagtt

SEQ ID NO: 1951066 - DNA, 15 bp, Homo sapiens
gaggaagaaaagttt

SEQ ID NO: 1951067 - DNA, 15 bp, Homo sapiens
aggaagaaaagtttc

SEQ ID NO: 1951068 - DNA, 15 bp, Homo sapiens
ggaagaaaagtttcc

SEQ ID NO: 1951069 - DNA, 15 bp, Homo sapiens
gaagaaaagtttcct

SEQ ID NO: 1951070 - DNA, 15 bp, Homo sapiens
aagaaaagtttccta

SEQ ID NO: 1951071 - DNA, 15 bp, Homo sapiens
agaaaagtttcctat

SEQ ID NO: 1951072 - DNA, 15 bp, Homo sapiens
gaaaagtttcctatg

SEQ ID NO: 1951073 - DNA, 15 bp, Homo sapiens
aaaagtttcctatgg

SEQ ID NO: 1951074 - DNA, 15 bp, Homo sapiens
aaagtttcctatggg

SEQ ID NO: 1951075 - DNA, 15 bp, Homo sapiens
aagtttcctatggga

SEQ ID NO: 1951076 - DNA, 15 bp, Homo sapiens
agtttcctatgggaa

SEQ ID NO: 1951077 - DNA, 15 bp, Homo sapiens
gtttcctatgggaag

SEQ ID NO: 1951078 - DNA, 15 bp, Homo sapiens
tttcctatgggaagg

SEQ ID NO: 1951079 - DNA, 15 bp, Homo sapiens
ttcctatgggaagga

SEQ ID NO: 1951080 - DNA, 15 bp, Homo sapiens
tcctatgggaaggac

SEQ ID NO: 1951081 - DNA, 15 bp, Homo sapiens
cctatgggaaggaca

SEQ ID NO: 1951082 - DNA, 15 bp, Homo sapiens
ctatgggaaggacaa

SEQ ID NO: 1951083 - DNA, 15 bp, Homo sapiens
tatgggaaggacaaa

SEQ ID NO: 1951084 - DNA, 15 bp, Homo sapiens
atgggaaggacaaat

SEQ ID NO: 1951085 - DNA, 15 bp, Homo sapiens
tgggaaggacaaatg

SEQ ID NO: 1951086 - DNA, 15 bp, Homo sapiens
gggaaggacaaatgg

SEQ ID NO: 1951087 - DNA, 15 bp, Homo sapiens
ggaaggacaaatggc

SEQ ID NO: 1951088 - DNA, 15 bp, Homo sapiens
gaaggacaaatggct

SEQ ID NO: 1951089 - DNA, 15 bp, Homo sapiens
aaggacaaatggctt

SEQ ID NO: 1951090 - DNA, 15 bp, Homo sapiens
aggacaaatggcttt

SEQ ID NO: 1951091 - DNA, 15 bp, Homo sapiens
ggacaaatggctttt

SEQ ID NO: 1951092 - DNA, 15 bp, Homo sapiens
gacaaatggcttttt

SEQ ID NO: 1951093 - DNA, 15 bp, Homo sapiens
acaaatggcttttta

SEQ ID NO: 1951094 - DNA, 15 bp, Homo sapiens
caaatggctttttag

SEQ ID NO: 1951095 - DNA, 15 bp, Homo sapiens
aaatggctttttagg

SEQ ID NO: 1951096 - DNA, 15 bp, Homo sapiens
aatggctttttagga

SEQ ID NO: 1951097 - DNA, 15 bp, Homo sapiens
atggctttttaggag

SEQ ID NO: 1951098 - DNA, 15 bp, Homo sapiens
tggctttttaggagg

SEQ ID NO: 1951099 - DNA, 15 bp, Homo sapiens
ggctttttaggagga

SEQ ID NO: 1951100 - DNA, 15 bp, Homo sapiens
gctttttaggaggac

SEQ ID NO: 1951101 - DNA, 15 bp, Homo sapiens
ctttttaggaggaca

SEQ ID NO: 1951102 - DNA, 15 bp, Homo sapiens
tttttaggaggacaa

SEQ ID NO: 1951103 - DNA, 15 bp, Homo sapiens
ttttaggaggacaag

SEQ ID NO: 1951104 - DNA, 15 bp, Homo sapiens
tttaggaggacaagt

SEQ ID NO: 1951105 - DNA, 15 bp, Homo sapiens
ttaggaggacaagtt

SEQ ID NO: 1951106 - DNA, 15 bp, Homo sapiens
taggaggacaagtta

SEQ ID NO: 1951107 - DNA, 15 bp, Homo sapiens
aggaggacaagttag

SEQ ID NO: 1951108 - DNA, 15 bp, Homo sapiens
ggaggacaagttagt

SEQ ID NO: 1951109 - DNA, 15 bp, Homo sapiens
gaggacaagttagtg

SEQ ID NO: 1951110 - DNA, 15 bp, Homo sapiens
aggacaagttagtgg

SEQ ID NO: 1951111 - DNA, 15 bp, Homo sapiens
ggacaagttagtggt

SEQ ID NO: 1951112 - DNA, 15 bp, Homo sapiens
gacaagttagtggta

SEQ ID NO: 1951113 - DNA, 15 bp, Homo sapiens
acaagttagtggtaa

SEQ ID NO: 1951114 - DNA, 15 bp, Homo sapiens
caagttagtggtaat

SEQ ID NO: 1951115 - DNA, 15 bp, Homo sapiens
aagttagtggtaatg

SEQ ID NO: 1951116 - DNA, 15 bp, Homo sapiens
agttagtggtaatgt

SEQ ID NO: 1951117 - DNA, 15 bp, Homo sapiens
gttagtggtaatgtt

SEQ ID NO: 1951118 - DNA, 15 bp, Homo sapiens
ttagtggtaatgttt

SEQ ID NO: 1951119 - DNA, 15 bp, Homo sapiens
tagtggtaatgtttt

SEQ ID NO: 1951120 - DNA, 15 bp, Homo sapiens
agtggtaatgttttt

SEQ ID NO: 1951121 - DNA, 15 bp, Homo sapiens
gtggtaatgtttttc

SEQ ID NO: 1951122 - DNA, 15 bp, Homo sapiens
tggtaatgtttttct

SEQ ID NO: 1951123 - DNA, 15 bp, Homo sapiens
ggtaatgtttttctt

SEQ ID NO: 1951124 - DNA, 15 bp, Homo sapiens
gtaatgtttttcttt

SEQ ID NO: 1951125 - DNA, 15 bp, Homo sapiens
atgtttttctttatg

SEQ ID NO: 1951126 - DNA, 15 bp, Homo sapiens
tgtttttctttatga

SEQ ID NO: 1951127 - DNA, 15 bp, Homo sapiens
gtttttctttatgag

SEQ ID NO: 1951128 - DNA, 15 bp, Homo sapiens
tttttctttatgagt

SEQ ID NO: 1951129 - DNA, 15 bp, Homo sapiens
ttttctttatgagta

SEQ ID NO: 1951130 - DNA, 15 bp, Homo sapiens
tttctttatgagtat

SEQ ID NO: 1951131 - DNA, 15 bp, Homo sapiens
ttctttatgagtatt

SEQ ID NO: 1951132 - DNA, 15 bp, Homo sapiens
tctttatgagtatta

SEQ ID NO: 1951133 - DNA, 15 bp, Homo sapiens
ctttatgagtattag

SEQ ID NO: 1951134 - DNA, 15 bp, Homo sapiens
tttatgagtattagt

SEQ ID NO: 1951135 - DNA, 15 bp, Homo sapiens
ttatgagtattagtg

SEQ ID NO: 1951136 - DNA, 15 bp, Homo sapiens
tatgagtattagtgg

SEQ ID NO: 1951137 - DNA, 15 bp, Homo sapiens
atgagtattagtggt

SEQ ID NO: 1951138 - DNA, 15 bp, Homo sapiens
tgagtattagtggtc

SEQ ID NO: 1951139 - DNA, 15 bp, Homo sapiens
gagtattagtggtct

SEQ ID NO: 1951140 - DNA, 15 bp, Homo sapiens
agtattagtggtctt

SEQ ID NO: 1951141 - DNA, 15 bp, Homo sapiens
gtattagtggtcttt

SEQ ID NO: 1951142 - DNA, 15 bp, Homo sapiens
tattagtggtctttc

SEQ ID NO: 1951143 - DNA, 15 bp, Homo sapiens
attagtggtctttct

SEQ ID NO: 1951144 - DNA, 15 bp, Homo sapiens
ttagtggtctttctg

SEQ ID NO: 1951145 - DNA, 15 bp, Homo sapiens
tagtggtctttctgt

SEQ ID NO: 1951146 - DNA, 15 bp, Homo sapiens
agtggtctttctgtc

SEQ ID NO: 1951147 - DNA, 15 bp, Homo sapiens
gtggtctttctgtct

SEQ ID NO: 1951148 - DNA, 15 bp, Homo sapiens
tggtctttctgtctc

SEQ ID NO: 1951149 - DNA, 15 bp, Homo sapiens
ggtctttctgtctcc

SEQ ID NO: 1951150 - DNA, 15 bp, Homo sapiens
gtctttctgtctccc

SEQ ID NO: 1951151 - DNA, 15 bp, Homo sapiens
tctttctgtctccct

SEQ ID NO: 1951152 - DNA, 15 bp, Homo sapiens
ctttctgtctccctc

SEQ ID NO: 1951153 - DNA, 15 bp, Homo sapiens
tttctgtctccctca

SEQ ID NO: 1951154 - DNA, 15 bp, Homo sapiens
ttctgtctccctcag

SEQ ID NO: 1951155 - DNA, 15 bp, Homo sapiens
tctgtctccctcagg

SEQ ID NO: 1951156 - DNA, 15 bp, Homo sapiens
ctgtctccctcaggg

SEQ ID NO: 1951157 - DNA, 15 bp, Homo sapiens
tgtctccctcagggc

SEQ ID NO: 1951158 - DNA, 15 bp, Homo sapiens
gtctccctcagggcc

SEQ ID NO: 1951159 - DNA, 15 bp, Homo sapiens
tctccctcagggcca

SEQ ID NO: 1951160 - DNA, 15 bp, Homo sapiens
ctccctcagggccac

SEQ ID NO: 1951161 - DNA, 15 bp, Homo sapiens
tccctcagggccaca

SEQ ID NO: 1951162 - DNA, 15 bp, Homo sapiens
ccctcagggccacaa

SEQ ID NO: 1951163 - DNA, 15 bp, Homo sapiens
cctcagggccacaaa

SEQ ID NO: 1951164 - DNA, 15 bp, Homo sapiens
ctcagggccacaaaa

SEQ ID NO: 1951165 - DNA, 15 bp, Homo sapiens
tcagggccacaaaat

SEQ ID NO: 1951166 - DNA, 15 bp, Homo sapiens
cagggccacaaaatt

SEQ ID NO: 1951167 - DNA, 15 bp, Homo sapiens
agggccacaaaattc

SEQ ID NO: 1951168 - DNA, 15 bp, Homo sapiens
gggccacaaaattcc

SEQ ID NO: 1951169 - DNA, 15 bp, Homo sapiens
ggccacaaaattccc

SEQ ID NO: 1951170 - DNA, 15 bp, Homo sapiens
gccacaaaattcccc

SEQ ID NO: 1951171 - DNA, 15 bp, Homo sapiens
ccacaaaattcccct

SEQ ID NO: 1951172 - DNA, 15 bp, Homo sapiens
cacaaaattcccctg

SEQ ID NO: 1951173 - DNA, 15 bp, Homo sapiens
acaaaattcccctgg

SEQ ID NO: 1951174 - DNA, 15 bp, Homo sapiens
caaaattcccctgga

SEQ ID NO: 1951175 - DNA, 15 bp, Homo sapiens
aaaattcccctggag

SEQ ID NO: 1951176 - DNA, 15 bp, Homo sapiens
aaattcccctggaga

SEQ ID NO: 1951177 - DNA, 15 bp, Homo sapiens
aattcccctggagaa

SEQ ID NO: 1951178 - DNA, 15 bp, Homo sapiens
attcccctggagaag

SEQ ID NO: 1951179 - DNA, 15 bp, Homo sapiens
ttcccctggagaagg

SEQ ID NO: 1951180 - DNA, 15 bp, Homo sapiens
tcccctggagaaggg

SEQ ID NO: 1951181 - DNA, 15 bp, Homo sapiens
cccctggagaaggga

SEQ ID NO: 1951182 - DNA, 15 bp, Homo sapiens
ccctggagaagggat

SEQ ID NO: 1951183 - DNA, 15 bp, Homo sapiens
cctggagaagggatt

SEQ ID NO: 1951184 - DNA, 15 bp, Homo sapiens
ctggagaagggattt

SEQ ID NO: 1951185 - DNA, 15 bp, Homo sapiens
tggagaagggattta

SEQ ID NO: 1951186 - DNA, 15 bp, Homo sapiens
ggagaagggatttac

SEQ ID NO: 1951187 - DNA, 15 bp, Homo sapiens
gagaagggatttaca

SEQ ID NO: 1951188 - DNA, 15 bp, Homo sapiens
agaagggatttacag

SEQ ID NO: 1951189 - DNA, 15 bp, Homo sapiens
gaagggatttacagt

SEQ ID NO: 1951190 - DNA, 15 bp, Homo sapiens
aagggatttacagta

SEQ ID NO: 1951191 - DNA, 15 bp, Homo sapiens
agggatttacagtag

SEQ ID NO: 1951192 - DNA, 15 bp, Homo sapiens
gggatttacagtagc

SEQ ID NO: 1951193 - DNA, 15 bp, Homo sapiens
ggatttacagtagcc

SEQ ID NO: 1951194 - DNA, 15 bp, Homo sapiens
gatttacagtagcct

SEQ ID NO: 1951195 - DNA, 15 bp, Homo sapiens
atttacagtagcctc

SEQ ID NO: 1951196 - DNA, 15 bp, Homo sapiens
tttacagtagcctca

SEQ ID NO: 1951197 - DNA, 15 bp, Homo sapiens
ttacagtagcctcaa

SEQ ID NO: 1951198 - DNA, 15 bp, Homo sapiens
tacagtagcctcaaa

SEQ ID NO: 1951199 - DNA, 15 bp, Homo sapiens
acagtagcctcaaat

SEQ ID NO: 1951200 - DNA, 15 bp, Homo sapiens
cagtagcctcaaatc

SEQ ID NO: 1951201 - DNA, 15 bp, Homo sapiens
agtagcctcaaatct

SEQ ID NO: 1951202 - DNA, 15 bp, Homo sapiens
gtagcctcaaatctc

SEQ ID NO: 1951203 - DNA, 15 bp, Homo sapiens
tagcctcaaatctca

SEQ ID NO: 1951204 - DNA, 15 bp, Homo sapiens
agcctcaaatctcag

SEQ ID NO: 1951205 - DNA, 15 bp, Homo sapiens
gcctcaaatctcaga

SEQ ID NO: 1951206 - DNA, 15 bp, Homo sapiens
cctcaaatctcagaa

SEQ ID NO: 1951207 - DNA, 15 bp, Homo sapiens
ctcaaatctcagaag

SEQ ID NO: 1951208 - DNA, 15 bp, Homo sapiens
tcaaatctcagaagc

SEQ ID NO: 1951209 - DNA, 15 bp, Homo sapiens
caaatctcagaagct

SEQ ID NO: 1951210 - DNA, 15 bp, Homo sapiens
aaatctcagaagcta

SEQ ID NO: 1951211 - DNA, 15 bp, Homo sapiens
aatctcagaagctac

SEQ ID NO: 1951212 - DNA, 15 bp, Homo sapiens
atctcagaagctact

SEQ ID NO: 1951213 - DNA, 15 bp, Homo sapiens
tctcagaagctactg

SEQ ID NO: 1951214 - DNA, 15 bp, Homo sapiens
ctcagaagctactgc

SEQ ID NO: 1951215 - DNA, 15 bp, Homo sapiens
tcagaagctactgct

SEQ ID NO: 1951216 - DNA, 15 bp, Homo sapiens
cagaagctactgctt

SEQ ID NO: 1951217 - DNA, 15 bp, Homo sapiens
agaagctactgcttt

SEQ ID NO: 1951218 - DNA, 15 bp, Homo sapiens
gaagctactgctttt

SEQ ID NO: 1951219 - DNA, 15 bp, Homo sapiens
aagctactgctttta

SEQ ID NO: 1951220 - DNA, 15 bp, Homo sapiens
agctactgcttttag

SEQ ID NO: 1951221 - DNA, 15 bp, Homo sapiens
gctactgcttttagt

SEQ ID NO: 1951222 - DNA, 15 bp, Homo sapiens
ctactgcttttagtc

SEQ ID NO: 1951223 - DNA, 15 bp, Homo sapiens
tactgcttttagtca

SEQ ID NO: 1951224 - DNA, 15 bp, Homo sapiens
actgcttttagtcag

SEQ ID NO: 1951225 - DNA, 15 bp, Homo sapiens
ctgcttttagtcaga

SEQ ID NO: 1951226 - DNA, 15 bp, Homo sapiens
tgcttttagtcagat

SEQ ID NO: 1951227 - DNA, 15 bp, Homo sapiens
gcttttagtcagata

SEQ ID NO: 1951228 - DNA, 15 bp, Homo sapiens
cttttagtcagataa

SEQ ID NO: 1951229 - DNA, 15 bp, Homo sapiens
ttttagtcagataag

SEQ ID NO: 1951230 - DNA, 15 bp, Homo sapiens
tttagtcagataagg

SEQ ID NO: 1951231 - DNA, 15 bp, Homo sapiens
ttagtcagataaggg

SEQ ID NO: 1951232 - DNA, 15 bp, Homo sapiens
tagtcagataaggga

SEQ ID NO: 1951233 - DNA, 15 bp, Homo sapiens
agtcagataagggaa

SEQ ID NO: 1951234 - DNA, 15 bp, Homo sapiens
gtcagataagggaag

SEQ ID NO: 1951235 - DNA, 15 bp, Homo sapiens
tcagataagggaaga

SEQ ID NO: 1951236 - DNA, 15 bp, Homo sapiens
cagataagggaagat

SEQ ID NO: 1951237 - DNA, 15 bp, Homo sapiens
agataagggaagatc

SEQ ID NO: 1951238 - DNA, 15 bp, Homo sapiens
gataagggaagatcc

SEQ ID NO: 1951239 - DNA, 15 bp, Homo sapiens
ataagggaagatcca

SEQ ID NO: 1951240 - DNA, 15 bp, Homo sapiens
taagggaagatccaa

SEQ ID NO: 1951241 - DNA, 15 bp, Homo sapiens
aagggaagatccaag

SEQ ID NO: 1951242 - DNA, 15 bp, Homo sapiens
agggaagatccaaga

SEQ ID NO: 1951243 - DNA, 15 bp, Homo sapiens
gggaagatccaagaa

SEQ ID NO: 1951244 - DNA, 15 bp, Homo sapiens
ggaagatccaagaaa

SEQ ID NO: 1951245 - DNA, 15 bp, Homo sapiens
gaagatccaagaaag

SEQ ID NO: 1951246 - DNA, 15 bp, Homo sapiens
aagatccaagaaagc

SEQ ID NO: 1951247 - DNA, 15 bp, Homo sapiens
agatccaagaaagct

SEQ ID NO: 1951248 - DNA, 15 bp, Homo sapiens
gatccaagaaagctt

SEQ ID NO: 1951249 - DNA, 15 bp, Homo sapiens
atccaagaaagcttt

SEQ ID NO: 1951250 - DNA, 15 bp, Homo sapiens
tccaagaaagctttg

SEQ ID NO: 1951251 - DNA, 15 bp, Homo sapiens
ccaagaaagctttgt

SEQ ID NO: 1951252 - DNA, 15 bp, Homo sapiens
caagaaagctttgtt

SEQ ID NO: 1951253 - DNA, 15 bp, Homo sapiens
aagaaagctttgttt

SEQ ID NO: 1951254 - DNA, 15 bp, Homo sapiens
agaaagctttgttta

SEQ ID NO: 1951255 - DNA, 15 bp, Homo sapiens
gaaagctttgtttag

SEQ ID NO: 1951256 - DNA, 15 bp, Homo sapiens
aaagctttgtttagc

SEQ ID NO: 1951257 - DNA, 15 bp, Homo sapiens
aagctttgtttagca

SEQ ID NO: 1951258 - DNA, 15 bp, Homo sapiens
agctttgtttagcac

SEQ ID NO: 1951259 - DNA, 15 bp, Homo sapiens
gctttgtttagcact

SEQ ID NO: 1951260 - DNA, 15 bp, Homo sapiens
ctttgtttagcactt

SEQ ID NO: 1951261 - DNA, 15 bp, Homo sapiens
tttgtttagcacttg

SEQ ID NO: 1951262 - DNA, 15 bp, Homo sapiens
ttgtttagcacttgt

SEQ ID NO: 1951263 - DNA, 15 bp, Homo sapiens
tgtttagcacttgtt

SEQ ID NO: 1951264 - DNA, 15 bp, Homo sapiens
gtttagcacttgttg

SEQ ID NO: 1951265 - DNA, 15 bp, Homo sapiens
tttagcacttgttga

SEQ ID NO: 1951266 - DNA, 15 bp, Homo sapiens
ttagcacttgttgaa

SEQ ID NO: 1951267 - DNA, 15 bp, Homo sapiens
tagcacttgttgaat

SEQ ID NO: 1951268 - DNA, 15 bp, Homo sapiens
agcacttgttgaatc

SEQ ID NO: 1951269 - DNA, 15 bp, Homo sapiens
gcacttgttgaatct

SEQ ID NO: 1951270 - DNA, 15 bp, Homo sapiens
cacttgttgaatcta

SEQ ID NO: 1951271 - DNA, 15 bp, Homo sapiens
acttgttgaatctaa

SEQ ID NO: 1951272 - DNA, 15 bp, Homo sapiens
cttgttgaatctaaa

SEQ ID NO: 1951273 - DNA, 15 bp, Homo sapiens
ttgttgaatctaaaa

SEQ ID NO: 1951274 - DNA, 15 bp, Homo sapiens
tgttgaatctaaaat

SEQ ID NO: 1951275 - DNA, 15 bp, Homo sapiens
gttgaatctaaaatg

SEQ ID NO: 1951276 - DNA, 15 bp, Homo sapiens
ttgaatctaaaatgt

SEQ ID NO: 1951277 - DNA, 15 bp, Homo sapiens
tgaatctaaaatgtc

SEQ ID NO: 1951278 - DNA, 15 bp, Homo sapiens
gaatctaaaatgtct

SEQ ID NO: 1951279 - DNA, 15 bp, Homo sapiens
aatctaaaatgtctt

SEQ ID NO: 1951280 - DNA, 15 bp, Homo sapiens
atctaaaatgtcttc

SEQ ID NO: 1951281 - DNA, 15 bp, Homo sapiens
tctaaaatgtcttca

SEQ ID NO: 1951282 - DNA, 15 bp, Homo sapiens
ctaaaatgtcttcag

SEQ ID NO: 1951283 - DNA, 15 bp, Homo sapiens
taaaatgtcttcagc

SEQ ID NO: 1951284 - DNA, 15 bp, Homo sapiens
aaaatgtcttcagct

SEQ ID NO: 1951285 - DNA, 15 bp, Homo sapiens
aaatgtcttcagctt

SEQ ID NO: 1951286 - DNA, 15 bp, Homo sapiens
aatgtcttcagctta

SEQ ID NO: 1951287 - DNA, 15 bp, Homo sapiens
atgtcttcagcttaa

SEQ ID NO: 1951288 - DNA, 15 bp, Homo sapiens
tgtcttcagcttaag

SEQ ID NO: 1951289 - DNA, 15 bp, Homo sapiens
gtcttcagcttaaga

SEQ ID NO: 1951290 - DNA, 15 bp, Homo sapiens
tcttcagcttaagat

SEQ ID NO: 1951291 - DNA, 15 bp, Homo sapiens
cttcagcttaagata

SEQ ID NO: 1951292 - DNA, 15 bp, Homo sapiens
ttcagcttaagataa

SEQ ID NO: 1951293 - DNA, 15 bp, Homo sapiens
tcagcttaagataat

SEQ ID NO: 1951294 - DNA, 15 bp, Homo sapiens
cagcttaagataatc

SEQ ID NO: 1951295 - DNA, 15 bp, Homo sapiens
agcttaagataatct

SEQ ID NO: 1951296 - DNA, 15 bp, Homo sapiens
gcttaagataatctt

SEQ ID NO: 1951297 - DNA, 15 bp, Homo sapiens
cttaagataatcttg

SEQ ID NO: 1951298 - DNA, 15 bp, Homo sapiens
ttaagataatcttga

SEQ ID NO: 1951299 - DNA, 15 bp, Homo sapiens
taagataatcttgaa

SEQ ID NO: 1951300 - DNA, 15 bp, Homo sapiens
aagataatcttgaaa

SEQ ID NO: 1951301 - DNA, 15 bp, Homo sapiens
agataatcttgaaac

SEQ ID NO: 1951302 - DNA, 15 bp, Homo sapiens
gataatcttgaaacc

SEQ ID NO: 1951303 - DNA, 15 bp, Homo sapiens
ataatcttgaaacca

SEQ ID NO: 1951304 - DNA, 15 bp, Homo sapiens
taatcttgaaaccaa

SEQ ID NO: 1951305 - DNA, 15 bp, Homo sapiens
aatcttgaaaccaat

SEQ ID NO: 1951306 - DNA, 15 bp, Homo sapiens
atcttgaaaccaatg

SEQ ID NO: 1951307 - DNA, 15 bp, Homo sapiens
tcttgaaaccaatgc

SEQ ID NO: 1951308 - DNA, 15 bp, Homo sapiens
cttgaaaccaatgct

SEQ ID NO: 1951309 - DNA, 15 bp, Homo sapiens
ttgaaaccaatgctg

SEQ ID NO: 1951310 - DNA, 15 bp, Homo sapiens
tgaaaccaatgctgg

SEQ ID NO: 1951311 - DNA, 15 bp, Homo sapiens
gaaaccaatgctgga

SEQ ID NO: 1951312 - DNA, 15 bp, Homo sapiens
aaaccaatgctggag

SEQ ID NO: 1951313 - DNA, 15 bp, Homo sapiens
aaccaatgctggagt

SEQ ID NO: 1951314 - DNA, 15 bp, Homo sapiens
accaatgctggagtt

SEQ ID NO: 1951315 - DNA, 15 bp, Homo sapiens
ccaatgctggagttc

SEQ ID NO: 1951316 - DNA, 15 bp, Homo sapiens
caatgctggagttct

SEQ ID NO: 1951317 - DNA, 15 bp, Homo sapiens
aatgctggagttctg

SEQ ID NO: 1951318 - DNA, 15 bp, Homo sapiens
atgctggagttctga

SEQ ID NO: 1951319 - DNA, 15 bp, Homo sapiens
tgctggagttctgag

SEQ ID NO: 1951320 - DNA, 15 bp, Homo sapiens
gctggagttctgagt

SEQ ID NO: 1951321 - DNA, 15 bp, Homo sapiens
ctggagttctgagtg

SEQ ID NO: 1951322 - DNA, 15 bp, Homo sapiens
tggagttctgagtgg

SEQ ID NO: 1951323 - DNA, 15 bp, Homo sapiens
ggagttctgagtgga

SEQ ID NO: 1951324 - DNA, 15 bp, Homo sapiens
gagttctgagtggat

SEQ ID NO: 1951325 - DNA, 15 bp, Homo sapiens
agttctgagtggatc

SEQ ID NO: 1951326 - DNA, 15 bp, Homo sapiens
gttctgagtggatcc

SEQ ID NO: 1951327 - DNA, 15 bp, Homo sapiens
ttctgagtggatccc

SEQ ID NO: 1951328 - DNA, 15 bp, Homo sapiens
tctgagtggatcccc

SEQ ID NO: 1951329 - DNA, 15 bp, Homo sapiens
ctgagtggatcccca

SEQ ID NO: 1951330 - DNA, 15 bp, Homo sapiens
tgagtggatccccac

SEQ ID NO: 1951331 - DNA, 15 bp, Homo sapiens
gagtggatccccaca

SEQ ID NO: 1951332 - DNA, 15 bp, Homo sapiens
agtggatccccacaa

SEQ ID NO: 1951333 - DNA, 15 bp, Homo sapiens
gtggatccccacaac

SEQ ID NO: 1951334 - DNA, 15 bp, Homo sapiens
tggatccccacaaca

SEQ ID NO: 1951335 - DNA, 15 bp, Homo sapiens
ggatccccacaacag

SEQ ID NO: 1951336 - DNA, 15 bp, Homo sapiens
gatccccacaacaga

SEQ ID NO: 1951337 - DNA, 15 bp, Homo sapiens
atccccacaacagag

SEQ ID NO: 1951338 - DNA, 15 bp, Homo sapiens
tccccacaacagagc

SEQ ID NO: 1951339 - DNA, 15 bp, Homo sapiens
ccccacaacagagca

SEQ ID NO: 1951340 - DNA, 15 bp, Homo sapiens
cccacaacagagcag

SEQ ID NO: 1951341 - DNA, 15 bp, Homo sapiens
ccacaacagagcagt

SEQ ID NO: 1951342 - DNA, 15 bp, Homo sapiens
cacaacagagcagtt

SEQ ID NO: 1951343 - DNA, 15 bp, Homo sapiens
acaacagagcagttc

SEQ ID NO: 1951344 - DNA, 15 bp, Homo sapiens
caacagagcagttca

SEQ ID NO: 1951345 - DNA, 15 bp, Homo sapiens
aacagagcagttcaa

SEQ ID NO: 1951346 - DNA, 15 bp, Homo sapiens
acagagcagttcaat

SEQ ID NO: 1951347 - DNA, 15 bp, Homo sapiens
cagagcagttcaatg

SEQ ID NO: 1951348 - DNA, 15 bp, Homo sapiens
agagcagttcaatgt

SEQ ID NO: 1951349 - DNA, 15 bp, Homo sapiens
gagcagttcaatgta

SEQ ID NO: 1951350 - DNA, 15 bp, Homo sapiens
agcagttcaatgtaa

SEQ ID NO: 1951351 - DNA, 15 bp, Homo sapiens
gcagttcaatgtaaa

SEQ ID NO: 1951352 - DNA, 15 bp, Homo sapiens
cagttcaatgtaaag

SEQ ID NO: 1951353 - DNA, 15 bp, Homo sapiens
agttcaatgtaaaga

SEQ ID NO: 1951354 - DNA, 15 bp, Homo sapiens
gttcaatgtaaagaa

SEQ ID NO: 1951355 - DNA, 15 bp, Homo sapiens
ttcaatgtaaagaat

SEQ ID NO: 1951356 - DNA, 15 bp, Homo sapiens
tcaatgtaaagaata

SEQ ID NO: 1951357 - DNA, 15 bp, Homo sapiens
caatgtaaagaatac

SEQ ID NO: 1951358 - DNA, 15 bp, Homo sapiens
aatgtaaagaatact

SEQ ID NO: 1951359 - DNA, 15 bp, Homo sapiens
atgtaaagaatactg

SEQ ID NO: 1951360 - DNA, 15 bp, Homo sapiens
tgtaaagaatactgc

SEQ ID NO: 1951361 - DNA, 15 bp, Homo sapiens
gtaaagaatactgca

SEQ ID NO: 1951362 - DNA, 15 bp, Homo sapiens
taaagaatactgcaa

SEQ ID NO: 1951363 - DNA, 15 bp, Homo sapiens
aaagaatactgcaaa

SEQ ID NO: 1951364 - DNA, 15 bp, Homo sapiens
aagaatactgcaaag

SEQ ID NO: 1951365 - DNA, 15 bp, Homo sapiens
agaatactgcaaagg

SEQ ID NO: 1951366 - DNA, 15 bp, Homo sapiens
gaatactgcaaaggt

SEQ ID NO: 1951367 - DNA, 15 bp, Homo sapiens
aatactgcaaaggtg

SEQ ID NO: 1951368 - DNA, 15 bp, Homo sapiens
atactgcaaaggtga

SEQ ID NO: 1951369 - DNA, 15 bp, Homo sapiens
tactgcaaaggtgag

SEQ ID NO: 1951370 - DNA, 15 bp, Homo sapiens
actgcaaaggtgagc

SEQ ID NO: 1951371 - DNA, 15 bp, Homo sapiens
ctgcaaaggtgagcc

SEQ ID NO: 1951372 - DNA, 15 bp, Homo sapiens
tgcaaaggtgagccg

SEQ ID NO: 1951373 - DNA, 15 bp, Homo sapiens
gcaaaggtgagccga

SEQ ID NO: 1951374 - DNA, 15 bp, Homo sapiens
caaaggtgagccgag

SEQ ID NO: 1951375 - DNA, 15 bp, Homo sapiens
aaaggtgagccgaga

SEQ ID NO: 1951376 - DNA, 15 bp, Homo sapiens
aaggtgagccgagat

SEQ ID NO: 1951377 - DNA, 15 bp, Homo sapiens
aggtgagccgagatc

SEQ ID NO: 1951378 - DNA, 15 bp, Homo sapiens
gagatcgcgccactg

SEQ ID NO: 1951379 - DNA, 15 bp, Homo sapiens
agatcgcgccactgc

SEQ ID NO: 1951380 - DNA, 15 bp, Homo sapiens
gatcgcgccactgca

SEQ ID NO: 1951381 - DNA, 15 bp, Homo sapiens
gccactgcagtccag

SEQ ID NO: 1951382 - DNA, 15 bp, Homo sapiens
ccactgcagtccagc

SEQ ID NO: 1951383 - DNA, 15 bp, Homo sapiens
cactgcagtccagcc

SEQ ID NO: 1951384 - DNA, 15 bp, Homo sapiens
actgcagtccagcct

SEQ ID NO: 1951385 - DNA, 15 bp, Homo sapiens
ctgcagtccagcctg

SEQ ID NO: 1951386 - DNA, 15 bp, Homo sapiens
tgcagtccagcctgg

SEQ ID NO: 1951387 - DNA, 15 bp, Homo sapiens
gcagtccagcctggg

SEQ ID NO: 1951388 - DNA, 15 bp, Homo sapiens
cagtccagcctgggc

SEQ ID NO: 1951389 - DNA, 15 bp, Homo sapiens
agtccagcctgggca

SEQ ID NO: 1951390 - DNA, 15 bp, Homo sapiens
gtccagcctgggcaa

SEQ ID NO: 1951391 - DNA, 15 bp, Homo sapiens
gagactccatctcag

SEQ ID NO: 1951392 - DNA, 15 bp, Homo sapiens
agactccatctcaga

SEQ ID NO: 1951393 - DNA, 15 bp, Homo sapiens
gactccatctcagaa

SEQ ID NO: 1951394 - DNA, 15 bp, Homo sapiens
aaaaaaaaaaatatt

SEQ ID NO: 1951395 - DNA, 15 bp, Homo sapiens
aaaaaaaaaatattg

SEQ ID NO: 1951396 - DNA, 15 bp, Homo sapiens
aaaaaaaaatattgc

SEQ ID NO: 1951397 - DNA, 15 bp, Homo sapiens
aaaaaaaatattgca

SEQ ID NO: 1951398 - DNA, 15 bp, Homo sapiens
aaaaaaatattgcaa

SEQ ID NO: 1951399 - DNA, 15 bp, Homo sapiens
aaaaaatattgcaaa

SEQ ID NO: 1951400 - DNA, 15 bp, Homo sapiens
aaaaatattgcaaag

SEQ ID NO: 1951401 - DNA, 15 bp, Homo sapiens
aaaatattgcaaagg

SEQ ID NO: 1951402 - DNA, 15 bp, Homo sapiens
aaatattgcaaaggc

SEQ ID NO: 1951403 - DNA, 15 bp, Homo sapiens
aatattgcaaaggct

SEQ ID NO: 1951404 - DNA, 15 bp, Homo sapiens
atattgcaaaggctg

SEQ ID NO: 1951405 - DNA, 15 bp, Homo sapiens
tattgcaaaggctgg

SEQ ID NO: 1951406 - DNA, 15 bp, Homo sapiens
attgcaaaggctggg

SEQ ID NO: 1951407 - DNA, 15 bp, Homo sapiens
ttgcaaaggctgggt

SEQ ID NO: 1951408 - DNA, 15 bp, Homo sapiens
tgcaaaggctgggtg

SEQ ID NO: 1951409 - DNA, 15 bp, Homo sapiens
gcaaaggctgggtgc

SEQ ID NO: 1951410 - DNA, 15 bp, Homo sapiens
caaaggctgggtgcg

SEQ ID NO: 1951411 - DNA, 15 bp, Homo sapiens
aaaggctgggtgcgg

SEQ ID NO: 1951412 - DNA, 15 bp, Homo sapiens
aaggctgggtgcggc

SEQ ID NO: 1951413 - DNA, 15 bp, Homo sapiens
aggctgggtgcggca

SEQ ID NO: 1951414 - DNA, 15 bp, Homo sapiens
ggctgggtgcggcag

SEQ ID NO: 1951415 - DNA, 15 bp, Homo sapiens
gctgggtgcggcagg

SEQ ID NO: 1951416 - DNA, 15 bp, Homo sapiens
ctgggtgcggcaggg

SEQ ID NO: 1951417 - DNA, 15 bp, Homo sapiens
tgggtgcggcagggc

SEQ ID NO: 1951418 - DNA, 15 bp, Homo sapiens
gggtgcggcagggca

SEQ ID NO: 1951419 - DNA, 15 bp, Homo sapiens
ggtgcggcagggcat

SEQ ID NO: 1951420 - DNA, 15 bp, Homo sapiens
gtgcggcagggcatg

SEQ ID NO: 1951421 - DNA, 15 bp, Homo sapiens
tgcggcagggcatgc

SEQ ID NO: 1951422 - DNA, 15 bp, Homo sapiens
gcggcagggcatgcc

SEQ ID NO: 1951423 - DNA, 15 bp, Homo sapiens
cggcagggcatgcct

SEQ ID NO: 1951424 - DNA, 15 bp, Homo sapiens
ggcagggcatgcctg

SEQ ID NO: 1951425 - DNA, 15 bp, Homo sapiens
gcagggcatgcctgt

SEQ ID NO: 1951426 - DNA, 15 bp, Homo sapiens
cagggcatgcctgta

SEQ ID NO: 1951427 - DNA, 15 bp, Homo sapiens
agggcatgcctgtaa

SEQ ID NO: 1951428 - DNA, 15 bp, Homo sapiens
gggcatgcctgtaat

SEQ ID NO: 1951429 - DNA, 15 bp, Homo sapiens
ggcatgcctgtaatc

SEQ ID NO: 1951430 - DNA, 15 bp, Homo sapiens
gcaatttgggaggct

SEQ ID NO: 1951431 - DNA, 15 bp, Homo sapiens
caatttgggaggctg

SEQ ID NO: 1951432 - DNA, 15 bp, Homo sapiens
aatttgggaggctga

SEQ ID NO: 1951433 - DNA, 15 bp, Homo sapiens
atttgggaggctgag

SEQ ID NO: 1951434 - DNA, 15 bp, Homo sapiens
gggaggctgaggcaa

SEQ ID NO: 1951435 - DNA, 15 bp, Homo sapiens
ggaggctgaggcaag

SEQ ID NO: 1951436 - DNA, 15 bp, Homo sapiens
gaggctgaggcaagg

SEQ ID NO: 1951437 - DNA, 15 bp, Homo sapiens
aggctgaggcaaggg

SEQ ID NO: 1951438 - DNA, 15 bp, Homo sapiens
ggctgaggcaagggg

SEQ ID NO: 1951439 - DNA, 15 bp, Homo sapiens
gctgaggcaagggga

SEQ ID NO: 1951440 - DNA, 15 bp, Homo sapiens
ctgaggcaaggggat

SEQ ID NO: 1951441 - DNA, 15 bp, Homo sapiens
tgaggcaaggggatc

SEQ ID NO: 1951442 - DNA, 15 bp, Homo sapiens
gaggcaaggggatca

SEQ ID NO: 1951443 - DNA, 15 bp, Homo sapiens
aggcaaggggatcag

SEQ ID NO: 1951444 - DNA, 15 bp, Homo sapiens
ggcaaggggatcagt

SEQ ID NO: 1951445 - DNA, 15 bp, Homo sapiens
gcaaggggatcagtt

SEQ ID NO: 1951446 - DNA, 15 bp, Homo sapiens
caaggggatcagttg

SEQ ID NO: 1951447 - DNA, 15 bp, Homo sapiens
aaggggatcagttga

SEQ ID NO: 1951448 - DNA, 15 bp, Homo sapiens
aggggatcagttgaa

SEQ ID NO: 1951449 - DNA, 15 bp, Homo sapiens
ggggatcagttgaaa

SEQ ID NO: 1951450 - DNA, 15 bp, Homo sapiens
gggatcagttgaaat

SEQ ID NO: 1951451 - DNA, 15 bp, Homo sapiens
ggatcagttgaaatc

SEQ ID NO: 1951452 - DNA, 15 bp, Homo sapiens
gatcagttgaaatca

SEQ ID NO: 1951453 - DNA, 15 bp, Homo sapiens
atcagttgaaatcag

SEQ ID NO: 1951454 - DNA, 15 bp, Homo sapiens
tcagttgaaatcagg

SEQ ID NO: 1951455 - DNA, 15 bp, Homo sapiens
cagttgaaatcagga

SEQ ID NO: 1951456 - DNA, 15 bp, Homo sapiens
agttgaaatcaggag

SEQ ID NO: 1951457 - DNA, 15 bp, Homo sapiens
gttgaaatcaggagt

SEQ ID NO: 1951458 - DNA, 15 bp, Homo sapiens
ttgaaatcaggagtt

SEQ ID NO: 1951459 - DNA, 15 bp, Homo sapiens
tgaaatcaggagttt

SEQ ID NO: 1951460 - DNA, 15 bp, Homo sapiens
gaaatcaggagtttg

SEQ ID NO: 1951461 - DNA, 15 bp, Homo sapiens
aaatcaggagtttga

SEQ ID NO: 1951462 - DNA, 15 bp, Homo sapiens
aatcaggagtttgag

SEQ ID NO: 1951463 - DNA, 15 bp, Homo sapiens
atcaggagtttgaga

SEQ ID NO: 1951464 - DNA, 15 bp, Homo sapiens
gcctggccaacgtga

SEQ ID NO: 1951465 - DNA, 15 bp, Homo sapiens
cctggccaacgtgac

SEQ ID NO: 1951466 - DNA, 15 bp, Homo sapiens
ctggccaacgtgaca

SEQ ID NO: 1951467 - DNA, 15 bp, Homo sapiens
tggccaacgtgacaa

SEQ ID NO: 1951468 - DNA, 15 bp, Homo sapiens
ggccaacgtgacaaa

SEQ ID NO: 1951469 - DNA, 15 bp, Homo sapiens
gccaacgtgacaaaa

SEQ ID NO: 1951470 - DNA, 15 bp, Homo sapiens
ccaacgtgacaaaac

SEQ ID NO: 1951471 - DNA, 15 bp, Homo sapiens
caacgtgacaaaacc

SEQ ID NO: 1951472 - DNA, 15 bp, Homo sapiens
aacgtgacaaaacct

SEQ ID NO: 1951473 - DNA, 15 bp, Homo sapiens
acgtgacaaaacctt

SEQ ID NO: 1951474 - DNA, 15 bp, Homo sapiens
cgtgacaaaaccttg

SEQ ID NO: 1951475 - DNA, 15 bp, Homo sapiens
gtgacaaaaccttgt

SEQ ID NO: 1951476 - DNA, 15 bp, Homo sapiens
tgacaaaaccttgtc

SEQ ID NO: 1951477 - DNA, 15 bp, Homo sapiens
gacaaaaccttgtct

SEQ ID NO: 1951478 - DNA, 15 bp, Homo sapiens
acaaaaccttgtctc

SEQ ID NO: 1951479 - DNA, 15 bp, Homo sapiens
caaaaccttgtctct

SEQ ID NO: 1951480 - DNA, 15 bp, Homo sapiens
aaaaccttgtctcta

SEQ ID NO: 1951481 - DNA, 15 bp, Homo sapiens
ttgtctctactaaac

SEQ ID NO: 1951482 - DNA, 15 bp, Homo sapiens
tgtctctactaaacg

SEQ ID NO: 1951483 - DNA, 15 bp, Homo sapiens
gtctctactaaacgt

SEQ ID NO: 1951484 - DNA, 15 bp, Homo sapiens
tctctactaaacgta

SEQ ID NO: 1951485 - DNA, 15 bp, Homo sapiens
ctctactaaacgtac

SEQ ID NO: 1951486 - DNA, 15 bp, Homo sapiens
tctactaaacgtaca

SEQ ID NO: 1951487 - DNA, 15 bp, Homo sapiens
ctactaaacgtacaa

SEQ ID NO: 1951488 - DNA, 15 bp, Homo sapiens
tactaaacgtacaaa

SEQ ID NO: 1951489 - DNA, 15 bp, Homo sapiens
actaaacgtacaaaa

SEQ ID NO: 1951490 - DNA, 15 bp, Homo sapiens
ctaaacgtacaaaaa

SEQ ID NO: 1951491 - DNA, 15 bp, Homo sapiens
taaacgtacaaaaat

SEQ ID NO: 1951492 - DNA, 15 bp, Homo sapiens
aaacgtacaaaaatt

SEQ ID NO: 1951493 - DNA, 15 bp, Homo sapiens
aacgtacaaaaatta

SEQ ID NO: 1951494 - DNA, 15 bp, Homo sapiens
acgtacaaaaattag

SEQ ID NO: 1951495 - DNA, 15 bp, Homo sapiens
cgtacaaaaattagc

SEQ ID NO: 1951496 - DNA, 15 bp, Homo sapiens
aaaaattagccggat

SEQ ID NO: 1951497 - DNA, 15 bp, Homo sapiens
aaaattagccggatg

SEQ ID NO: 1951498 - DNA, 15 bp, Homo sapiens
aaattagccggatgt

SEQ ID NO: 1951499 - DNA, 15 bp, Homo sapiens
aattagccggatgtg

SEQ ID NO: 1951500 - DNA, 15 bp, Homo sapiens
attagccggatgtgg

SEQ ID NO: 1951501 - DNA, 15 bp, Homo sapiens
ttagccggatgtggt

SEQ ID NO: 1951502 - DNA, 15 bp, Homo sapiens
tagccggatgtggtg

SEQ ID NO: 1951503 - DNA, 15 bp, Homo sapiens
agccggatgtggtgg

SEQ ID NO: 1951504 - DNA, 15 bp, Homo sapiens
ccggatgtggtggca

SEQ ID NO: 1951505 - DNA, 15 bp, Homo sapiens
cggatgtggtggcac

SEQ ID NO: 1951506 - DNA, 15 bp, Homo sapiens
ggatgtggtggcaca

SEQ ID NO: 1951507 - DNA, 15 bp, Homo sapiens
gatgtggtggcacac

SEQ ID NO: 1951508 - DNA, 15 bp, Homo sapiens
atgtggtggcacacg

SEQ ID NO: 1951509 - DNA, 15 bp, Homo sapiens
tgtggtggcacacgc

SEQ ID NO: 1951510 - DNA, 15 bp, Homo sapiens
aggaggcagaggctg

SEQ ID NO: 1951511 - DNA, 15 bp, Homo sapiens
ggaggcagaggctgc

SEQ ID NO: 1951512 - DNA, 15 bp, Homo sapiens
gaggcagaggctgca

SEQ ID NO: 1951513 - DNA, 15 bp, Homo sapiens
aggcagaggctgcag

SEQ ID NO: 1951514 - DNA, 15 bp, Homo sapiens
ggcagaggctgcagt

SEQ ID NO: 1951515 - DNA, 15 bp, Homo sapiens
gcagaggctgcagtg

SEQ ID NO: 1951516 - DNA, 15 bp, Homo sapiens
cagaggctgcagtga

SEQ ID NO: 1951517 - DNA, 15 bp, Homo sapiens
agaggctgcagtgag

SEQ ID NO: 1951518 - DNA, 15 bp, Homo sapiens
gctgcagtgagccga

SEQ ID NO: 1951519 - DNA, 15 bp, Homo sapiens
ctgcagtgagccgag

SEQ ID NO: 1951520 - DNA, 15 bp, Homo sapiens
tgggcgacaagagca

SEQ ID NO: 1951521 - DNA, 15 bp, Homo sapiens
gggcgacaagagcaa

SEQ ID NO: 1951522 - DNA, 15 bp, Homo sapiens
ggcgacaagagcaaa

SEQ ID NO: 1951523 - DNA, 15 bp, Homo sapiens
cgacaagagcaaaac

SEQ ID NO: 1951524 - DNA, 15 bp, Homo sapiens
gacaagagcaaaact

SEQ ID NO: 1951525 - DNA, 15 bp, Homo sapiens
acaagagcaaaactc

SEQ ID NO: 1951526 - DNA, 15 bp, Homo sapiens
aagagcaaaactccg

SEQ ID NO: 1951527 - DNA, 15 bp, Homo sapiens
agagcaaaactccgt

SEQ ID NO: 1951528 - DNA, 15 bp, Homo sapiens
gagcaaaactccgtc

SEQ ID NO: 1951529 - DNA, 15 bp, Homo sapiens
agcaaaactccgtct

SEQ ID NO: 1951530 - DNA, 15 bp, Homo sapiens
gcaaaactccgtctc

SEQ ID NO: 1951531 - DNA, 15 bp, Homo sapiens
caaaactccgtctca

SEQ ID NO: 1951532 - DNA, 15 bp, Homo sapiens
aaaactccgtctcaa

SEQ ID NO: 1951533 - DNA, 15 bp, Homo sapiens
caaaaaaaaaaagaa

SEQ ID NO: 1951534 - DNA, 15 bp, Homo sapiens
aaaaaaaaaagaata

SEQ ID NO: 1951535 - DNA, 15 bp, Homo sapiens
aaaaaaaaagaatac

SEQ ID NO: 1951536 - DNA, 15 bp, Homo sapiens
aaaaaaaagaatact

SEQ ID NO: 1951537 - DNA, 15 bp, Homo sapiens
aaaaaaagaatacta

SEQ ID NO: 1951538 - DNA, 15 bp, Homo sapiens
aaaaaagaatactac

SEQ ID NO: 1951539 - DNA, 15 bp, Homo sapiens
aaaaagaatactaca

SEQ ID NO: 1951540 - DNA, 15 bp, Homo sapiens
aaaagaatactacaa

SEQ ID NO: 1951541 - DNA, 15 bp, Homo sapiens
aaagaatactacaaa

SEQ ID NO: 1951542 - DNA, 15 bp, Homo sapiens
aagaatactacaaag

SEQ ID NO: 1951543 - DNA, 15 bp, Homo sapiens
agaatactacaaagg

SEQ ID NO: 1951544 - DNA, 15 bp, Homo sapiens
gaatactacaaaggg

SEQ ID NO: 1951545 - DNA, 15 bp, Homo sapiens
aatactacaaagggt

SEQ ID NO: 1951546 - DNA, 15 bp, Homo sapiens
atactacaaagggtc

SEQ ID NO: 1951547 - DNA, 15 bp, Homo sapiens
tactacaaagggtct

SEQ ID NO: 1951548 - DNA, 15 bp, Homo sapiens
actacaaagggtctc

SEQ ID NO: 1951549 - DNA, 15 bp, Homo sapiens
ctacaaagggtctct

SEQ ID NO: 1951550 - DNA, 15 bp, Homo sapiens
tacaaagggtctctg

SEQ ID NO: 1951551 - DNA, 15 bp, Homo sapiens
acaaagggtctctgt

SEQ ID NO: 1951552 - DNA, 15 bp, Homo sapiens
caaagggtctctgtg

SEQ ID NO: 1951553 - DNA, 15 bp, Homo sapiens
aaagggtctctgtgt

SEQ ID NO: 1951554 - DNA, 15 bp, Homo sapiens
aagggtctctgtgtt

SEQ ID NO: 1951555 - DNA, 15 bp, Homo sapiens
agggtctctgtgttc

SEQ ID NO: 1951556 - DNA, 15 bp, Homo sapiens
gggtctctgtgttct

SEQ ID NO: 1951557 - DNA, 15 bp, Homo sapiens
ggtctctgtgttctg

SEQ ID NO: 1951558 - DNA, 15 bp, Homo sapiens
gtctctgtgttctgg

SEQ ID NO: 1951559 - DNA, 15 bp, Homo sapiens
tctctgtgttctggt

SEQ ID NO: 1951560 - DNA, 15 bp, Homo sapiens
ctctgtgttctggtc

SEQ ID NO: 1951561 - DNA, 15 bp, Homo sapiens
tctgtgttctggtct

SEQ ID NO: 1951562 - DNA, 15 bp, Homo sapiens
ctgtgttctggtctc

SEQ ID NO: 1951563 - DNA, 15 bp, Homo sapiens
tgtgttctggtctct

SEQ ID NO: 1951564 - DNA, 15 bp, Homo sapiens
gtgttctggtctctg

SEQ ID NO: 1951565 - DNA, 15 bp, Homo sapiens
tgttctggtctctgt

SEQ ID NO: 1951566 - DNA, 15 bp, Homo sapiens
gttctggtctctgta

SEQ ID NO: 1951567 - DNA, 15 bp, Homo sapiens
ttctggtctctgtag

SEQ ID NO: 1951568 - DNA, 15 bp, Homo sapiens
tctggtctctgtagt

SEQ ID NO: 1951569 - DNA, 15 bp, Homo sapiens
ctggtctctgtagtc

SEQ ID NO: 1951570 - DNA, 15 bp, Homo sapiens
tggtctctgtagtcc

SEQ ID NO: 1951571 - DNA, 15 bp, Homo sapiens
ggtctctgtagtccc

SEQ ID NO: 1951572 - DNA, 15 bp, Homo sapiens
gtctctgtagtccca

SEQ ID NO: 1951573 - DNA, 15 bp, Homo sapiens
tctctgtagtcccac

SEQ ID NO: 1951574 - DNA, 15 bp, Homo sapiens
ctctgtagtcccact

SEQ ID NO: 1951575 - DNA, 15 bp, Homo sapiens
tctgtagtcccacta

SEQ ID NO: 1951576 - DNA, 15 bp, Homo sapiens
ctgtagtcccactat

SEQ ID NO: 1951577 - DNA, 15 bp, Homo sapiens
tgtagtcccactata

SEQ ID NO: 1951578 - DNA, 15 bp, Homo sapiens
gtagtcccactataa

SEQ ID NO: 1951579 - DNA, 15 bp, Homo sapiens
tagtcccactataat

SEQ ID NO: 1951580 - DNA, 15 bp, Homo sapiens
agtcccactataatt

SEQ ID NO: 1951581 - DNA, 15 bp, Homo sapiens
gtcccactataattt

SEQ ID NO: 1951582 - DNA, 15 bp, Homo sapiens
tcccactataattta

SEQ ID NO: 1951583 - DNA, 15 bp, Homo sapiens
cccactataatttat

SEQ ID NO: 1951584 - DNA, 15 bp, Homo sapiens
ccactataatttata

SEQ ID NO: 1951585 - DNA, 15 bp, Homo sapiens
cactataatttataa

SEQ ID NO: 1951586 - DNA, 15 bp, Homo sapiens
actataatttataac

SEQ ID NO: 1951587 - DNA, 15 bp, Homo sapiens
ctataatttataaca

SEQ ID NO: 1951588 - DNA, 15 bp, Homo sapiens
tataatttataacat

SEQ ID NO: 1951589 - DNA, 15 bp, Homo sapiens
ataatttataacata

SEQ ID NO: 1951590 - DNA, 15 bp, Homo sapiens
taatttataacataa

SEQ ID NO: 1951591 - DNA, 15 bp, Homo sapiens
aatttataacataac

SEQ ID NO: 1951592 - DNA, 15 bp, Homo sapiens
atttataacataact

SEQ ID NO: 1951593 - DNA, 15 bp, Homo sapiens
tttataacataactt

SEQ ID NO: 1951594 - DNA, 15 bp, Homo sapiens
ttataacataacttg

SEQ ID NO: 1951595 - DNA, 15 bp, Homo sapiens
tataacataacttga

SEQ ID NO: 1951596 - DNA, 15 bp, Homo sapiens
ataacataacttgat

SEQ ID NO: 1951597 - DNA, 15 bp, Homo sapiens
taacataacttgata

SEQ ID NO: 1951598 - DNA, 15 bp, Homo sapiens
aacataacttgatat

SEQ ID NO: 1951599 - DNA, 15 bp, Homo sapiens
acataacttgatata

SEQ ID NO: 1951600 - DNA, 15 bp, Homo sapiens
cataacttgatatag

SEQ ID NO: 1951601 - DNA, 15 bp, Homo sapiens
ataacttgatatagc

SEQ ID NO: 1951602 - DNA, 15 bp, Homo sapiens
taacttgatatagct

SEQ ID NO: 1951603 - DNA, 15 bp, Homo sapiens
aacttgatatagctt

SEQ ID NO: 1951604 - DNA, 15 bp, Homo sapiens
acttgatatagcttt

SEQ ID NO: 1951605 - DNA, 15 bp, Homo sapiens
cttgatatagctttt

SEQ ID NO: 1951606 - DNA, 15 bp, Homo sapiens
ttgatatagctttta

SEQ ID NO: 1951607 - DNA, 15 bp, Homo sapiens
tgatatagcttttag

SEQ ID NO: 1951608 - DNA, 15 bp, Homo sapiens
gatatagcttttagg

SEQ ID NO: 1951609 - DNA, 15 bp, Homo sapiens
atatagcttttaggt

SEQ ID NO: 1951610 - DNA, 15 bp, Homo sapiens
tatagcttttaggtt

SEQ ID NO: 1951611 - DNA, 15 bp, Homo sapiens
atagcttttaggttg

SEQ ID NO: 1951612 - DNA, 15 bp, Homo sapiens
tagcttttaggttgc

SEQ ID NO: 1951613 - DNA, 15 bp, Homo sapiens
agcttttaggttgcc

SEQ ID NO: 1951614 - DNA, 15 bp, Homo sapiens
gcttttaggttgcct

SEQ ID NO: 1951615 - DNA, 15 bp, Homo sapiens
cttttaggttgcctt

SEQ ID NO: 1951616 - DNA, 15 bp, Homo sapiens
ttttaggttgccttc

SEQ ID NO: 1951617 - DNA, 15 bp, Homo sapiens
tttaggttgccttcc

SEQ ID NO: 1951618 - DNA, 15 bp, Homo sapiens
ttaggttgccttcct

SEQ ID NO: 1951619 - DNA, 15 bp, Homo sapiens
taggttgccttcctg

SEQ ID NO: 1951620 - DNA, 15 bp, Homo sapiens
aggttgccttcctgt

SEQ ID NO: 1951621 - DNA, 15 bp, Homo sapiens
ggttgccttcctgtg

SEQ ID NO: 1951622 - DNA, 15 bp, Homo sapiens
gttgccttcctgtga

SEQ ID NO: 1951623 - DNA, 15 bp, Homo sapiens
ttgccttcctgtgat

SEQ ID NO: 1951624 - DNA, 15 bp, Homo sapiens
tgccttcctgtgatt

SEQ ID NO: 1951625 - DNA, 15 bp, Homo sapiens
gccttcctgtgattg

SEQ ID NO: 1951626 - DNA, 15 bp, Homo sapiens
ccttcctgtgattgc

SEQ ID NO: 1951627 - DNA, 15 bp, Homo sapiens
cttcctgtgattgca

SEQ ID NO: 1951628 - DNA, 15 bp, Homo sapiens
ttcctgtgattgcat

SEQ ID NO: 1951629 - DNA, 15 bp, Homo sapiens
tcctgtgattgcata

SEQ ID NO: 1951630 - DNA, 15 bp, Homo sapiens
cctgtgattgcatag

SEQ ID NO: 1951631 - DNA, 15 bp, Homo sapiens
ctgtgattgcatagg

SEQ ID NO: 1951632 - DNA, 15 bp, Homo sapiens
tgtgattgcatagga

SEQ ID NO: 1951633 - DNA, 15 bp, Homo sapiens
gtgattgcataggaa

SEQ ID NO: 1951634 - DNA, 15 bp, Homo sapiens
tgattgcataggaag

SEQ ID NO: 1951635 - DNA, 15 bp, Homo sapiens
gattgcataggaaga

SEQ ID NO: 1951636 - DNA, 15 bp, Homo sapiens
attgcataggaagac

SEQ ID NO: 1951637 - DNA, 15 bp, Homo sapiens
ttgcataggaagaca

SEQ ID NO: 1951638 - DNA, 15 bp, Homo sapiens
tgcataggaagacaa

SEQ ID NO: 1951639 - DNA, 15 bp, Homo sapiens
gcataggaagacaag

SEQ ID NO: 1951640 - DNA, 15 bp, Homo sapiens
cataggaagacaagc

SEQ ID NO: 1951641 - DNA, 15 bp, Homo sapiens
ataggaagacaagca

SEQ ID NO: 1951642 - DNA, 15 bp, Homo sapiens
taggaagacaagcac

SEQ ID NO: 1951643 - DNA, 15 bp, Homo sapiens
aggaagacaagcacg

SEQ ID NO: 1951644 - DNA, 15 bp, Homo sapiens
ggaagacaagcacgc

SEQ ID NO: 1951645 - DNA, 15 bp, Homo sapiens
gaagacaagcacgct

SEQ ID NO: 1951646 - DNA, 15 bp, Homo sapiens
aagacaagcacgctc

SEQ ID NO: 1951647 - DNA, 15 bp, Homo sapiens
agacaagcacgctct

SEQ ID NO: 1951648 - DNA, 15 bp, Homo sapiens
gacaagcacgctctg

SEQ ID NO: 1951649 - DNA, 15 bp, Homo sapiens
acaagcacgctctgc

SEQ ID NO: 1951650 - DNA, 15 bp, Homo sapiens
caagcacgctctgct

SEQ ID NO: 1951651 - DNA, 15 bp, Homo sapiens
aagcacgctctgctg

SEQ ID NO: 1951652 - DNA, 15 bp, Homo sapiens
agcacgctctgctgc

SEQ ID NO: 1951653 - DNA, 15 bp, Homo sapiens
gcacgctctgctgct

SEQ ID NO: 1951654 - DNA, 15 bp, Homo sapiens
cacgctctgctgctc

SEQ ID NO: 1951655 - DNA, 15 bp, Homo sapiens
acgctctgctgctct

SEQ ID NO: 1951656 - DNA, 15 bp, Homo sapiens
cgctctgctgctctc

SEQ ID NO: 1951657 - DNA, 15 bp, Homo sapiens
gctctgctgctctct

SEQ ID NO: 1951658 - DNA, 15 bp, Homo sapiens
ctctgctgctctctt

SEQ ID NO: 1951659 - DNA, 15 bp, Homo sapiens
tctgctgctctcttg

SEQ ID NO: 1951660 - DNA, 15 bp, Homo sapiens
ctgctgctctcttgg

SEQ ID NO: 1951661 - DNA, 15 bp, Homo sapiens
tgctgctctcttggc

SEQ ID NO: 1951662 - DNA, 15 bp, Homo sapiens
gctgctctcttggca

SEQ ID NO: 1951663 - DNA, 15 bp, Homo sapiens
ctgctctcttggcaa

SEQ ID NO: 1951664 - DNA, 15 bp, Homo sapiens
tgctctcttggcaag

SEQ ID NO: 1951665 - DNA, 15 bp, Homo sapiens
gctctcttggcaagg

SEQ ID NO: 1951666 - DNA, 15 bp, Homo sapiens
ctctcttggcaaggt

SEQ ID NO: 1951667 - DNA, 15 bp, Homo sapiens
tctcttggcaaggtc

SEQ ID NO: 1951668 - DNA, 15 bp, Homo sapiens
ctcttggcaaggtct

SEQ ID NO: 1951669 - DNA, 15 bp, Homo sapiens
tcttggcaaggtctt

SEQ ID NO: 1951670 - DNA, 15 bp, Homo sapiens
cttggcaaggtctta

SEQ ID NO: 1951671 - DNA, 15 bp, Homo sapiens
ttggcaaggtcttac

SEQ ID NO: 1951672 - DNA, 15 bp, Homo sapiens
tggcaaggtcttacg

SEQ ID NO: 1951673 - DNA, 15 bp, Homo sapiens
ggcaaggtcttacga

SEQ ID NO: 1951674 - DNA, 15 bp, Homo sapiens
gcaaggtcttacgat

SEQ ID NO: 1951675 - DNA, 15 bp, Homo sapiens
caaggtcttacgatt

SEQ ID NO: 1951676 - DNA, 15 bp, Homo sapiens
aaggtcttacgattg

SEQ ID NO: 1951677 - DNA, 15 bp, Homo sapiens
aggtcttacgattgc

SEQ ID NO: 1951678 - DNA, 15 bp, Homo sapiens
ggtcttacgattgcc

SEQ ID NO: 1951679 - DNA, 15 bp, Homo sapiens
gtcttacgattgcct

SEQ ID NO: 1951680 - DNA, 15 bp, Homo sapiens
tcttacgattgcctc

SEQ ID NO: 1951681 - DNA, 15 bp, Homo sapiens
cttacgattgcctca

SEQ ID NO: 1951682 - DNA, 15 bp, Homo sapiens
ttacgattgcctcaa

SEQ ID NO: 1951683 - DNA, 15 bp, Homo sapiens
tacgattgcctcaaa

SEQ ID NO: 1951684 - DNA, 15 bp, Homo sapiens
acgattgcctcaaac

SEQ ID NO: 1951685 - DNA, 15 bp, Homo sapiens
cgattgcctcaaaca

SEQ ID NO: 1951686 - DNA, 15 bp, Homo sapiens
gattgcctcaaacaa

SEQ ID NO: 1951687 - DNA, 15 bp, Homo sapiens
attgcctcaaacaac

SEQ ID NO: 1951688 - DNA, 15 bp, Homo sapiens
ttgcctcaaacaaca

SEQ ID NO: 1951689 - DNA, 15 bp, Homo sapiens
tgcctcaaacaacaa

SEQ ID NO: 1951690 - DNA, 15 bp, Homo sapiens
gcctcaaacaacaac

SEQ ID NO: 1951691 - DNA, 15 bp, Homo sapiens
cctcaaacaacaact

SEQ ID NO: 1951692 - DNA, 15 bp, Homo sapiens
ctcaaacaacaacta

SEQ ID NO: 1951693 - DNA, 15 bp, Homo sapiens
tcaaacaacaactag

SEQ ID NO: 1951694 - DNA, 15 bp, Homo sapiens
caaacaacaactaga

SEQ ID NO: 1951695 - DNA, 15 bp, Homo sapiens
aaacaacaactagac

SEQ ID NO: 1951696 - DNA, 15 bp, Homo sapiens
aacaacaactagaca

SEQ ID NO: 1951697 - DNA, 15 bp, Homo sapiens
acaacaactagacac

SEQ ID NO: 1951698 - DNA, 15 bp, Homo sapiens
caacaactagacaca

SEQ ID NO: 1951699 - DNA, 15 bp, Homo sapiens
aacaactagacacac

SEQ ID NO: 1951700 - DNA, 15 bp, Homo sapiens
acaactagacacact

SEQ ID NO: 1951701 - DNA, 15 bp, Homo sapiens
caactagacacactg

SEQ ID NO: 1951702 - DNA, 15 bp, Homo sapiens
aactagacacactgg

SEQ ID NO: 1951703 - DNA, 15 bp, Homo sapiens
actagacacactggc

SEQ ID NO: 1951704 - DNA, 15 bp, Homo sapiens
ctagacacactggct

SEQ ID NO: 1951705 - DNA, 15 bp, Homo sapiens
tagacacactggcta

SEQ ID NO: 1951706 - DNA, 15 bp, Homo sapiens
agacacactggctaa

SEQ ID NO: 1951707 - DNA, 15 bp, Homo sapiens
gacacactggctaat

SEQ ID NO: 1951708 - DNA, 15 bp, Homo sapiens
acacactggctaatt

SEQ ID NO: 1951709 - DNA, 15 bp, Homo sapiens
cacactggctaatta

SEQ ID NO: 1951710 - DNA, 15 bp, Homo sapiens
acactggctaattac

SEQ ID NO: 1951711 - DNA, 15 bp, Homo sapiens
cactggctaattact

SEQ ID NO: 1951712 - DNA, 15 bp, Homo sapiens
actggctaattactc

SEQ ID NO: 1951713 - DNA, 15 bp, Homo sapiens
ctggctaattactct

SEQ ID NO: 1951714 - DNA, 15 bp, Homo sapiens
tggctaattactctc

SEQ ID NO: 1951715 - DNA, 15 bp, Homo sapiens
ggctaattactctca

SEQ ID NO: 1951716 - DNA, 15 bp, Homo sapiens
gctaattactctcag

SEQ ID NO: 1951717 - DNA, 15 bp, Homo sapiens
ctaattactctcagt

SEQ ID NO: 1951718 - DNA, 15 bp, Homo sapiens
taattactctcagta

SEQ ID NO: 1951719 - DNA, 15 bp, Homo sapiens
aattactctcagtaa

SEQ ID NO: 1951720 - DNA, 15 bp, Homo sapiens
attactctcagtaag

SEQ ID NO: 1951721 - DNA, 15 bp, Homo sapiens
ttactctcagtaaga

SEQ ID NO: 1951722 - DNA, 15 bp, Homo sapiens
tactctcagtaagat

SEQ ID NO: 1951723 - DNA, 15 bp, Homo sapiens
actctcagtaagatc

SEQ ID NO: 1951724 - DNA, 15 bp, Homo sapiens
ctctcagtaagatca

SEQ ID NO: 1951725 - DNA, 15 bp, Homo sapiens
tctcagtaagatcag

SEQ ID NO: 1951726 - DNA, 15 bp, Homo sapiens
ctcagtaagatcagc

SEQ ID NO: 1951727 - DNA, 15 bp, Homo sapiens
tcagtaagatcagct

SEQ ID NO: 1951728 - DNA, 15 bp, Homo sapiens
cagtaagatcagctc

SEQ ID NO: 1951729 - DNA, 15 bp, Homo sapiens
agtaagatcagctca

SEQ ID NO: 1951730 - DNA, 15 bp, Homo sapiens
gtaagatcagctcag

SEQ ID NO: 1951731 - DNA, 15 bp, Homo sapiens
taagatcagctcagt

SEQ ID NO: 1951732 - DNA, 15 bp, Homo sapiens
aagatcagctcagtt

SEQ ID NO: 1951733 - DNA, 15 bp, Homo sapiens
agatcagctcagtta

SEQ ID NO: 1951734 - DNA, 15 bp, Homo sapiens
gatcagctcagttat

SEQ ID NO: 1951735 - DNA, 15 bp, Homo sapiens
atcagctcagttatg

SEQ ID NO: 1951736 - DNA, 15 bp, Homo sapiens
tcagctcagttatgc

SEQ ID NO: 1951737 - DNA, 15 bp, Homo sapiens
cagctcagttatgcc

SEQ ID NO: 1951738 - DNA, 15 bp, Homo sapiens
agctcagttatgcca

SEQ ID NO: 1951739 - DNA, 15 bp, Homo sapiens
gctcagttatgccaa

SEQ ID NO: 1951740 - DNA, 15 bp, Homo sapiens
ctcagttatgccaaa

SEQ ID NO: 1951741 - DNA, 15 bp, Homo sapiens
tcagttatgccaaaa

SEQ ID NO: 1951742 - DNA, 15 bp, Homo sapiens
cagttatgccaaaac

SEQ ID NO: 1951743 - DNA, 15 bp, Homo sapiens
agttatgccaaaacc

SEQ ID NO: 1951744 - DNA, 15 bp, Homo sapiens
gttatgccaaaacca

SEQ ID NO: 1951745 - DNA, 15 bp, Homo sapiens
ttatgccaaaaccaa

SEQ ID NO: 1951746 - DNA, 15 bp, Homo sapiens
tatgccaaaaccaaa

SEQ ID NO: 1951747 - DNA, 15 bp, Homo sapiens
atgccaaaaccaaat

SEQ ID NO: 1951748 - DNA, 15 bp, Homo sapiens
tgccaaaaccaaatc

SEQ ID NO: 1951749 - DNA, 15 bp, Homo sapiens
gccaaaaccaaatcc

SEQ ID NO: 1951750 - DNA, 15 bp, Homo sapiens
ccaaaaccaaatcca

SEQ ID NO: 1951751 - DNA, 15 bp, Homo sapiens
caaaaccaaatccaa

SEQ ID NO: 1951752 - DNA, 15 bp, Homo sapiens
aaaaccaaatccaac

SEQ ID NO: 1951753 - DNA, 15 bp, Homo sapiens
aaaccaaatccaaca

SEQ ID NO: 1951754 - DNA, 15 bp, Homo sapiens
aaccaaatccaacac

SEQ ID NO: 1951755 - DNA, 15 bp, Homo sapiens
accaaatccaacact

SEQ ID NO: 1951756 - DNA, 15 bp, Homo sapiens
ccaaatccaacactt

SEQ ID NO: 1951757 - DNA, 15 bp, Homo sapiens
caaatccaacacttt

SEQ ID NO: 1951758 - DNA, 15 bp, Homo sapiens
aaatccaacactttt

SEQ ID NO: 1951759 - DNA, 15 bp, Homo sapiens
aatccaacacttttc

SEQ ID NO: 1951760 - DNA, 15 bp, Homo sapiens
atccaacacttttct

SEQ ID NO: 1951761 - DNA, 15 bp, Homo sapiens
tccaacacttttctc

SEQ ID NO: 1951762 - DNA, 15 bp, Homo sapiens
ccaacacttttctca

SEQ ID NO: 1951763 - DNA, 15 bp, Homo sapiens
caacacttttctcag

SEQ ID NO: 1951764 - DNA, 15 bp, Homo sapiens
aacacttttctcagt

SEQ ID NO: 1951765 - DNA, 15 bp, Homo sapiens
acacttttctcagtt

SEQ ID NO: 1951766 - DNA, 15 bp, Homo sapiens
cacttttctcagtta

SEQ ID NO: 1951767 - DNA, 15 bp, Homo sapiens
acttttctcagttaa

SEQ ID NO: 1951768 - DNA, 15 bp, Homo sapiens
cttttctcagttaat

SEQ ID NO: 1951769 - DNA, 15 bp, Homo sapiens
ttttctcagttaatt

SEQ ID NO: 1951770 - DNA, 15 bp, Homo sapiens
tttctcagttaattg

SEQ ID NO: 1951771 - DNA, 15 bp, Homo sapiens
ttctcagttaattgt

SEQ ID NO: 1951772 - DNA, 15 bp, Homo sapiens
tctcagttaattgtt

SEQ ID NO: 1951773 - DNA, 15 bp, Homo sapiens
ctcagttaattgtta

SEQ ID NO: 1951774 - DNA, 15 bp, Homo sapiens
tcagttaattgttaa

SEQ ID NO: 1951775 - DNA, 15 bp, Homo sapiens
cagttaattgttaac

SEQ ID NO: 1951776 - DNA, 15 bp, Homo sapiens
agttaattgttaaca

SEQ ID NO: 1951777 - DNA, 15 bp, Homo sapiens
gttaattgttaacat

SEQ ID NO: 1951778 - DNA, 15 bp, Homo sapiens
ttaattgttaacatc

SEQ ID NO: 1951779 - DNA, 15 bp, Homo sapiens
taattgttaacatct

SEQ ID NO: 1951780 - DNA, 15 bp, Homo sapiens
aattgttaacatctt

SEQ ID NO: 1951781 - DNA, 15 bp, Homo sapiens
attgttaacatcttt

SEQ ID NO: 1951782 - DNA, 15 bp, Homo sapiens
ttgttaacatctttc

SEQ ID NO: 1951783 - DNA, 15 bp, Homo sapiens
tgttaacatctttca

SEQ ID NO: 1951784 - DNA, 15 bp, Homo sapiens
gttaacatctttcag

SEQ ID NO: 1951785 - DNA, 15 bp, Homo sapiens
ttaacatctttcagt

SEQ ID NO: 1951786 - DNA, 15 bp, Homo sapiens
taacatctttcagta

SEQ ID NO: 1951787 - DNA, 15 bp, Homo sapiens
aacatctttcagtag

SEQ ID NO: 1951788 - DNA, 15 bp, Homo sapiens
acatctttcagtaga

SEQ ID NO: 1951789 - DNA, 15 bp, Homo sapiens
catctttcagtagaa

SEQ ID NO: 1951790 - DNA, 15 bp, Homo sapiens
atctttcagtagaaa

SEQ ID NO: 1951791 - DNA, 15 bp, Homo sapiens
tctttcagtagaaaa

SEQ ID NO: 1951792 - DNA, 15 bp, Homo sapiens
ctttcagtagaaaac

SEQ ID NO: 1951793 - DNA, 15 bp, Homo sapiens
tttcagtagaaaaca

SEQ ID NO: 1951794 - DNA, 15 bp, Homo sapiens
ttcagtagaaaacat

SEQ ID NO: 1951795 - DNA, 15 bp, Homo sapiens
tcagtagaaaacatc

SEQ ID NO: 1951796 - DNA, 15 bp, Homo sapiens
cagtagaaaacatct

SEQ ID NO: 1951797 - DNA, 15 bp, Homo sapiens
agtagaaaacatctt

SEQ ID NO: 1951798 - DNA, 15 bp, Homo sapiens
gtagaaaacatcttg

SEQ ID NO: 1951799 - DNA, 15 bp, Homo sapiens
tagaaaacatcttgg

SEQ ID NO: 1951800 - DNA, 15 bp, Homo sapiens
agaaaacatcttgga

SEQ ID NO: 1951801 - DNA, 15 bp, Homo sapiens
gaaaacatcttggaa

SEQ ID NO: 1951802 - DNA, 15 bp, Homo sapiens
aaaacatcttggaaa

SEQ ID NO: 1951803 - DNA, 15 bp, Homo sapiens
aaacatcttggaaat

SEQ ID NO: 1951804 - DNA, 15 bp, Homo sapiens
aacatcttggaaatc

SEQ ID NO: 1951805 - DNA, 15 bp, Homo sapiens
acatcttggaaatct

SEQ ID NO: 1951806 - DNA, 15 bp, Homo sapiens
catcttggaaatctt

SEQ ID NO: 1951807 - DNA, 15 bp, Homo sapiens
atcttggaaatcttt

SEQ ID NO: 1951808 - DNA, 15 bp, Homo sapiens
tcttggaaatctttt

SEQ ID NO: 1951809 - DNA, 15 bp, Homo sapiens
cttggaaatctttta

SEQ ID NO: 1951810 - DNA, 15 bp, Homo sapiens
ttggaaatcttttaa

SEQ ID NO: 1951811 - DNA, 15 bp, Homo sapiens
tggaaatcttttaaa

SEQ ID NO: 1951812 - DNA, 15 bp, Homo sapiens
ggaaatcttttaaaa

SEQ ID NO: 1951813 - DNA, 15 bp, Homo sapiens
gaaatcttttaaaag

SEQ ID NO: 1951814 - DNA, 15 bp, Homo sapiens
aaatcttttaaaagt

SEQ ID NO: 1951815 - DNA, 15 bp, Homo sapiens
aatcttttaaaagtc

SEQ ID NO: 1951816 - DNA, 15 bp, Homo sapiens
atcttttaaaagtca

SEQ ID NO: 1951817 - DNA, 15 bp, Homo sapiens
tcttttaaaagtcat

SEQ ID NO: 1951818 - DNA, 15 bp, Homo sapiens
cttttaaaagtcatg

SEQ ID NO: 1951819 - DNA, 15 bp, Homo sapiens
ttttaaaagtcatga

SEQ ID NO: 1951820 - DNA, 15 bp, Homo sapiens
tttaaaagtcatgaa

SEQ ID NO: 1951821 - DNA, 15 bp, Homo sapiens
ttaaaagtcatgaat

SEQ ID NO: 1951822 - DNA, 15 bp, Homo sapiens
taaaagtcatgaatc

SEQ ID NO: 1951823 - DNA, 15 bp, Homo sapiens
aaaagtcatgaatca

SEQ ID NO: 1951824 - DNA, 15 bp, Homo sapiens
aaagtcatgaatcaa

SEQ ID NO: 1951825 - DNA, 15 bp, Homo sapiens
aagtcatgaatcaat

SEQ ID NO: 1951826 - DNA, 15 bp, Homo sapiens
agtcatgaatcaata

SEQ ID NO: 1951827 - DNA, 15 bp, Homo sapiens
gtcatgaatcaatag

SEQ ID NO: 1951828 - DNA, 15 bp, Homo sapiens
tcatgaatcaataga

SEQ ID NO: 1951829 - DNA, 15 bp, Homo sapiens
catgaatcaatagat

SEQ ID NO: 1951830 - DNA, 15 bp, Homo sapiens
atgaatcaatagatc

SEQ ID NO: 1951831 - DNA, 15 bp, Homo sapiens
tgaatcaatagatca

SEQ ID NO: 1951832 - DNA, 15 bp, Homo sapiens
gaatcaatagatcaa

SEQ ID NO: 1951833 - DNA, 15 bp, Homo sapiens
aatcaatagatcaag

SEQ ID NO: 1951834 - DNA, 15 bp, Homo sapiens
atcaatagatcaagt

SEQ ID NO: 1951835 - DNA, 15 bp, Homo sapiens
tcaatagatcaagtc

SEQ ID NO: 1951836 - DNA, 15 bp, Homo sapiens
caatagatcaagtca

SEQ ID NO: 1951837 - DNA, 15 bp, Homo sapiens
aatagatcaagtcag

SEQ ID NO: 1951838 - DNA, 15 bp, Homo sapiens
atagatcaagtcaga

SEQ ID NO: 1951839 - DNA, 15 bp, Homo sapiens
tagatcaagtcagat

SEQ ID NO: 1951840 - DNA, 15 bp, Homo sapiens
agatcaagtcagata

SEQ ID NO: 1951841 - DNA, 15 bp, Homo sapiens
gatcaagtcagatat

SEQ ID NO: 1951842 - DNA, 15 bp, Homo sapiens
atcaagtcagatatt

SEQ ID NO: 1951843 - DNA, 15 bp, Homo sapiens
tcaagtcagatattt

SEQ ID NO: 1951844 - DNA, 15 bp, Homo sapiens
caagtcagatatttt

SEQ ID NO: 1951845 - DNA, 15 bp, Homo sapiens
aagtcagatattttc

SEQ ID NO: 1951846 - DNA, 15 bp, Homo sapiens
agtcagatattttca

SEQ ID NO: 1951847 - DNA, 15 bp, Homo sapiens
gtcagatattttcat

SEQ ID NO: 1951848 - DNA, 15 bp, Homo sapiens
tcagatattttcatg

SEQ ID NO: 1951849 - DNA, 15 bp, Homo sapiens
cagatattttcatgg

SEQ ID NO: 1951850 - DNA, 15 bp, Homo sapiens
agatattttcatggg

SEQ ID NO: 1951851 - DNA, 15 bp, Homo sapiens
gatattttcatgggt

SEQ ID NO: 1951852 - DNA, 15 bp, Homo sapiens
atattttcatgggtt

SEQ ID NO: 1951853 - DNA, 15 bp, Homo sapiens
tattttcatgggttg

SEQ ID NO: 1951854 - DNA, 15 bp, Homo sapiens
attttcatgggttgt

SEQ ID NO: 1951855 - DNA, 15 bp, Homo sapiens
ttttcatgggttgtg

SEQ ID NO: 1951856 - DNA, 15 bp, Homo sapiens
tttcatgggttgtgt

SEQ ID NO: 1951857 - DNA, 15 bp, Homo sapiens
ttcatgggttgtgtt

SEQ ID NO: 1951858 - DNA, 15 bp, Homo sapiens
tcatgggttgtgttt

SEQ ID NO: 1951859 - DNA, 15 bp, Homo sapiens
catgggttgtgtttt

SEQ ID NO: 1951860 - DNA, 15 bp, Homo sapiens
atgggttgtgtttta

SEQ ID NO: 1951861 - DNA, 15 bp, Homo sapiens
tgggttgtgttttaa

SEQ ID NO: 1951862 - DNA, 15 bp, Homo sapiens
gggttgtgttttaat

SEQ ID NO: 1951863 - DNA, 15 bp, Homo sapiens
ggttgtgttttaata

SEQ ID NO: 1951864 - DNA, 15 bp, Homo sapiens
gttgtgttttaatac

SEQ ID NO: 1951865 - DNA, 15 bp, Homo sapiens
ttgtgttttaataca

SEQ ID NO: 1951866 - DNA, 15 bp, Homo sapiens
tgtgttttaatacaa

SEQ ID NO: 1951867 - DNA, 15 bp, Homo sapiens
gtgttttaatacaat

SEQ ID NO: 1951868 - DNA, 15 bp, Homo sapiens
tgttttaatacaatc

SEQ ID NO: 1951869 - DNA, 15 bp, Homo sapiens
gttttaatacaatct

SEQ ID NO: 1951870 - DNA, 15 bp, Homo sapiens
ttttaatacaatctc

SEQ ID NO: 1951871 - DNA, 15 bp, Homo sapiens
tttaatacaatctct

SEQ ID NO: 1951872 - DNA, 15 bp, Homo sapiens
ttaatacaatctctt

SEQ ID NO: 1951873 - DNA, 15 bp, Homo sapiens
taatacaatctcttt

SEQ ID NO: 1951874 - DNA, 15 bp, Homo sapiens
aatacaatctctttc

SEQ ID NO: 1951875 - DNA, 15 bp, Homo sapiens
atacaatctctttcc

SEQ ID NO: 1951876 - DNA, 15 bp, Homo sapiens
tacaatctctttcca

SEQ ID NO: 1951877 - DNA, 15 bp, Homo sapiens
acaatctctttccag

SEQ ID NO: 1951878 - DNA, 15 bp, Homo sapiens
caatctctttccaga

SEQ ID NO: 1951879 - DNA, 15 bp, Homo sapiens
aatctctttccagaa

SEQ ID NO: 1951880 - DNA, 15 bp, Homo sapiens
atctctttccagaaa

SEQ ID NO: 1951881 - DNA, 15 bp, Homo sapiens
tctctttccagaaat

SEQ ID NO: 1951882 - DNA, 15 bp, Homo sapiens
ctctttccagaaatc

SEQ ID NO: 1951883 - DNA, 15 bp, Homo sapiens
tctttccagaaatcc

SEQ ID NO: 1951884 - DNA, 15 bp, Homo sapiens
ctttccagaaatccc

SEQ ID NO: 1951885 - DNA, 15 bp, Homo sapiens
tttccagaaatccca

SEQ ID NO: 1951886 - DNA, 15 bp, Homo sapiens
ttccagaaatcccat

SEQ ID NO: 1951887 - DNA, 15 bp, Homo sapiens
tccagaaatcccata

SEQ ID NO: 1951888 - DNA, 15 bp, Homo sapiens
ccagaaatcccatag

SEQ ID NO: 1951889 - DNA, 15 bp, Homo sapiens
cagaaatcccatagc

SEQ ID NO: 1951890 - DNA, 15 bp, Homo sapiens
agaaatcccatagca

SEQ ID NO: 1951891 - DNA, 15 bp, Homo sapiens
gaaatcccatagcat

SEQ ID NO: 1951892 - DNA, 15 bp, Homo sapiens
aaatcccatagcatg

SEQ ID NO: 1951893 - DNA, 15 bp, Homo sapiens
aatcccatagcatgg

SEQ ID NO: 1951894 - DNA, 15 bp, Homo sapiens
atcccatagcatgga

SEQ ID NO: 1951895 - DNA, 15 bp, Homo sapiens
tcccatagcatggag

SEQ ID NO: 1951896 - DNA, 15 bp, Homo sapiens
cccatagcatggagt

SEQ ID NO: 1951897 - DNA, 15 bp, Homo sapiens
ccatagcatggagtt

SEQ ID NO: 1951898 - DNA, 15 bp, Homo sapiens
catagcatggagttt

SEQ ID NO: 1951899 - DNA, 15 bp, Homo sapiens
atagcatggagtttt

SEQ ID NO: 1951900 - DNA, 15 bp, Homo sapiens
tagcatggagttttg

SEQ ID NO: 1951901 - DNA, 15 bp, Homo sapiens
agcatggagttttgc

SEQ ID NO: 1951902 - DNA, 15 bp, Homo sapiens
gcatggagttttgcc

SEQ ID NO: 1951903 - DNA, 15 bp, Homo sapiens
catggagttttgcca

SEQ ID NO: 1951904 - DNA, 15 bp, Homo sapiens
atggagttttgccaa

SEQ ID NO: 1951905 - DNA, 15 bp, Homo sapiens
tggagttttgccaaa

SEQ ID NO: 1951906 - DNA, 15 bp, Homo sapiens
ggagttttgccaaaa

SEQ ID NO: 1951907 - DNA, 15 bp, Homo sapiens
gagttttgccaaaaa

SEQ ID NO: 1951908 - DNA, 15 bp, Homo sapiens
agttttgccaaaaaa

SEQ ID NO: 1951909 - DNA, 15 bp, Homo sapiens
gttttgccaaaaaaa

SEQ ID NO: 1951910 - DNA, 15 bp, Homo sapiens
ttttgccaaaaaaac

SEQ ID NO: 1951911 - DNA, 15 bp, Homo sapiens
tttgccaaaaaaaca

SEQ ID NO: 1951912 - DNA, 15 bp, Homo sapiens
ttgccaaaaaaacaa

SEQ ID NO: 1951913 - DNA, 15 bp, Homo sapiens
tgccaaaaaaacaaa

SEQ ID NO: 1951914 - DNA, 15 bp, Homo sapiens
gccaaaaaaacaaaa

SEQ ID NO: 1951915 - DNA, 15 bp, Homo sapiens
ccaaaaaaacaaaaa

SEQ ID NO: 1951916 - DNA, 15 bp, Homo sapiens
aaaaacaaaaaacat

SEQ ID NO: 1951917 - DNA, 15 bp, Homo sapiens
aaaacaaaaaacatt

SEQ ID NO: 1951918 - DNA, 15 bp, Homo sapiens
aaacaaaaaacattg

SEQ ID NO: 1951919 - DNA, 15 bp, Homo sapiens
aacaaaaaacattga

SEQ ID NO: 1951920 - DNA, 15 bp, Homo sapiens
acaaaaaacattgag

SEQ ID NO: 1951921 - DNA, 15 bp, Homo sapiens
caaaaaacattgagg

SEQ ID NO: 1951922 - DNA, 15 bp, Homo sapiens
aaaaaacattgaggc

SEQ ID NO: 1951923 - DNA, 15 bp, Homo sapiens
aaaaacattgaggcc

SEQ ID NO: 1951924 - DNA, 15 bp, Homo sapiens
aaaacattgaggcca

SEQ ID NO: 1951925 - DNA, 15 bp, Homo sapiens
aaacattgaggccag

SEQ ID NO: 1951926 - DNA, 15 bp, Homo sapiens
aacattgaggccagg

SEQ ID NO: 1951927 - DNA, 15 bp, Homo sapiens
acattgaggccaggt

SEQ ID NO: 1951928 - DNA, 15 bp, Homo sapiens
cattgaggccaggtg

SEQ ID NO: 1951929 - DNA, 15 bp, Homo sapiens
attgaggccaggtgt

SEQ ID NO: 1951930 - DNA, 15 bp, Homo sapiens
ttgaggccaggtgtg

SEQ ID NO: 1951931 - DNA, 15 bp, Homo sapiens
tgaggccaggtgtgg

SEQ ID NO: 1951932 - DNA, 15 bp, Homo sapiens
gaggccaggtgtggt

SEQ ID NO: 1951933 - DNA, 15 bp, Homo sapiens
atcccagcacttaga

SEQ ID NO: 1951934 - DNA, 15 bp, Homo sapiens
tcccagcacttagag

SEQ ID NO: 1951935 - DNA, 15 bp, Homo sapiens
cccagcacttagaga

SEQ ID NO: 1951936 - DNA, 15 bp, Homo sapiens
ccagcacttagagag

SEQ ID NO: 1951937 - DNA, 15 bp, Homo sapiens
cagcacttagagagg

SEQ ID NO: 1951938 - DNA, 15 bp, Homo sapiens
agcacttagagaggc

SEQ ID NO: 1951939 - DNA, 15 bp, Homo sapiens
gcacttagagaggcc

SEQ ID NO: 1951940 - DNA, 15 bp, Homo sapiens
cacttagagaggccg

SEQ ID NO: 1951941 - DNA, 15 bp, Homo sapiens
acttagagaggccga

SEQ ID NO: 1951942 - DNA, 15 bp, Homo sapiens
cttagagaggccgag

SEQ ID NO: 1951943 - DNA, 15 bp, Homo sapiens
ttagagaggccgagg

SEQ ID NO: 1951944 - DNA, 15 bp, Homo sapiens
tagagaggccgaggt

SEQ ID NO: 1951945 - DNA, 15 bp, Homo sapiens
agagaggccgaggtg

SEQ ID NO: 1951946 - DNA, 15 bp, Homo sapiens
aaggtcaggagatca

SEQ ID NO: 1951947 - DNA, 15 bp, Homo sapiens
gtctctactaaaaac

SEQ ID NO: 1951948 - DNA, 15 bp, Homo sapiens
tctctactaaaaaca

SEQ ID NO: 1951949 - DNA, 15 bp, Homo sapiens
ctctactaaaaacac

SEQ ID NO: 1951950 - DNA, 15 bp, Homo sapiens
tctactaaaaacaca

SEQ ID NO: 1951951 - DNA, 15 bp, Homo sapiens
ctactaaaaacacaa

SEQ ID NO: 1951952 - DNA, 15 bp, Homo sapiens
tactaaaaacacaaa

SEQ ID NO: 1951953 - DNA, 15 bp, Homo sapiens
actaaaaacacaaaa

SEQ ID NO: 1951954 - DNA, 15 bp, Homo sapiens
ctaaaaacacaaaaa

SEQ ID NO: 1951955 - DNA, 15 bp, Homo sapiens
taaaaacacaaaaaa

SEQ ID NO: 1951956 - DNA, 15 bp, Homo sapiens
aaaacacaaaaaaaa

SEQ ID NO: 1951957 - DNA, 15 bp, Homo sapiens
aaacacaaaaaaaat

SEQ ID NO: 1951958 - DNA, 15 bp, Homo sapiens
aacacaaaaaaaatt

SEQ ID NO: 1951959 - DNA, 15 bp, Homo sapiens
acacaaaaaaaatta

SEQ ID NO: 1951960 - DNA, 15 bp, Homo sapiens
cacaaaaaaaattag

SEQ ID NO: 1951961 - DNA, 15 bp, Homo sapiens
acaaaaaaaattagc

SEQ ID NO: 1951962 - DNA, 15 bp, Homo sapiens
caggtgtggtggtgg

SEQ ID NO: 1951963 - DNA, 15 bp, Homo sapiens
aggtgtggtggtggg

SEQ ID NO: 1951964 - DNA, 15 bp, Homo sapiens
ggtgggcgcctgtag

SEQ ID NO: 1951965 - DNA, 15 bp, Homo sapiens
gtgggcgcctgtagt

SEQ ID NO: 1951966 - DNA, 15 bp, Homo sapiens
tgggcgcctgtagtc

SEQ ID NO: 1951967 - DNA, 15 bp, Homo sapiens
caggagaatggcgta

SEQ ID NO: 1951968 - DNA, 15 bp, Homo sapiens
aggagaatggcgtaa

SEQ ID NO: 1951969 - DNA, 15 bp, Homo sapiens
ggagaatggcgtaaa

SEQ ID NO: 1951970 - DNA, 15 bp, Homo sapiens
gagaatggcgtaaac

SEQ ID NO: 1951971 - DNA, 15 bp, Homo sapiens
agaatggcgtaaact

SEQ ID NO: 1951972 - DNA, 15 bp, Homo sapiens
gaatggcgtaaactc

SEQ ID NO: 1951973 - DNA, 15 bp, Homo sapiens
aatggcgtaaactca

SEQ ID NO: 1951974 - DNA, 15 bp, Homo sapiens
atggcgtaaactcag

SEQ ID NO: 1951975 - DNA, 15 bp, Homo sapiens
tggcgtaaactcagg

SEQ ID NO: 1951976 - DNA, 15 bp, Homo sapiens
ggcgtaaactcagga

SEQ ID NO: 1951977 - DNA, 15 bp, Homo sapiens
gcgtaaactcaggag

SEQ ID NO: 1951978 - DNA, 15 bp, Homo sapiens
cgtaaactcaggagg

SEQ ID NO: 1951979 - DNA, 15 bp, Homo sapiens
gtaaactcaggaggc

SEQ ID NO: 1951980 - DNA, 15 bp, Homo sapiens
taaactcaggaggca

SEQ ID NO: 1951981 - DNA, 15 bp, Homo sapiens
aaactcaggaggcag

SEQ ID NO: 1951982 - DNA, 15 bp, Homo sapiens
aactcaggaggcaga

SEQ ID NO: 1951983 - DNA, 15 bp, Homo sapiens
actcaggaggcagag

SEQ ID NO: 1951984 - DNA, 15 bp, Homo sapiens
ctcaggaggcagagc

SEQ ID NO: 1951985 - DNA, 15 bp, Homo sapiens
tcaggaggcagagct

SEQ ID NO: 1951986 - DNA, 15 bp, Homo sapiens
caggaggcagagctt

SEQ ID NO: 1951987 - DNA, 15 bp, Homo sapiens
aggaggcagagcttg

SEQ ID NO: 1951988 - DNA, 15 bp, Homo sapiens
gtgagccgagatcgg

SEQ ID NO: 1951989 - DNA, 15 bp, Homo sapiens
tgagccgagatcggg

SEQ ID NO: 1951990 - DNA, 15 bp, Homo sapiens
gagccgagatcgggc

SEQ ID NO: 1951991 - DNA, 15 bp, Homo sapiens
agccgagatcgggcc

SEQ ID NO: 1951992 - DNA, 15 bp, Homo sapiens
gccgagatcgggcca

SEQ ID NO: 1951993 - DNA, 15 bp, Homo sapiens
ccgagatcgggccat

SEQ ID NO: 1951994 - DNA, 15 bp, Homo sapiens
cgagatcgggccatt

SEQ ID NO: 1951995 - DNA, 15 bp, Homo sapiens
gagatcgggccattg

SEQ ID NO: 1951996 - DNA, 15 bp, Homo sapiens
agatcgggccattgc

SEQ ID NO: 1951997 - DNA, 15 bp, Homo sapiens
gatcgggccattgca

SEQ ID NO: 1951998 - DNA, 15 bp, Homo sapiens
atcgggccattgcac

SEQ ID NO: 1951999 - DNA, 15 bp, Homo sapiens
tcgggccattgcact

SEQ ID NO: 1952000 - DNA, 15 bp, Homo sapiens
cgggccattgcactt

SEQ ID NO: 1952001 - DNA, 15 bp, Homo sapiens
gggccattgcacttc

SEQ ID NO: 1952002 - DNA, 15 bp, Homo sapiens
ggccattgcacttca

SEQ ID NO: 1952003 - DNA, 15 bp, Homo sapiens
gccattgcacttcag

SEQ ID NO: 1952004 - DNA, 15 bp, Homo sapiens
ccattgcacttcagc

SEQ ID NO: 1952005 - DNA, 15 bp, Homo sapiens
cattgcacttcagcc

SEQ ID NO: 1952006 - DNA, 15 bp, Homo sapiens
attgcacttcagcct

SEQ ID NO: 1952007 - DNA, 15 bp, Homo sapiens
ttgcacttcagcctg

SEQ ID NO: 1952008 - DNA, 15 bp, Homo sapiens
cacttcagcctgggc

SEQ ID NO: 1952009 - DNA, 15 bp, Homo sapiens
acttcagcctgggcg

SEQ ID NO: 1952010 - DNA, 15 bp, Homo sapiens
cttcagcctgggcga

SEQ ID NO: 1952011 - DNA, 15 bp, Homo sapiens
ttcagcctgggcgac

SEQ ID NO: 1952012 - DNA, 15 bp, Homo sapiens
tcagcctgggcgaca

SEQ ID NO: 1952013 - DNA, 15 bp, Homo sapiens
gacagagcaagaccc

SEQ ID NO: 1952014 - DNA, 15 bp, Homo sapiens
caagaccccatctca

SEQ ID NO: 1952015 - DNA, 15 bp, Homo sapiens
aagaccccatctcaa

SEQ ID NO: 1952016 - DNA, 15 bp, Homo sapiens
agaccccatctcaaa

SEQ ID NO: 1952017 - DNA, 15 bp, Homo sapiens
gaccccatctcaaaa

SEQ ID NO: 1952018 - DNA, 15 bp, Homo sapiens
accccatctcaaaaa

SEQ ID NO: 1952019 - DNA, 15 bp, Homo sapiens
ccccatctcaaaaaa

SEQ ID NO: 1952020 - DNA, 15 bp, Homo sapiens
ccatctcaaaaaaac

SEQ ID NO: 1952021 - DNA, 15 bp, Homo sapiens
tcaaaaaaacaaaaa

SEQ ID NO: 1952022 - DNA, 15 bp, Homo sapiens
aacaaaacaaaacac

SEQ ID NO: 1952023 - DNA, 15 bp, Homo sapiens
acaaaacaaaacact

SEQ ID NO: 1952024 - DNA, 15 bp, Homo sapiens
caaaacaaaacactg

SEQ ID NO: 1952025 - DNA, 15 bp, Homo sapiens
aaaacaaaacactga

SEQ ID NO: 1952026 - DNA, 15 bp, Homo sapiens
aaacaaaacactgaa

SEQ ID NO: 1952027 - DNA, 15 bp, Homo sapiens
aacaaaacactgaat

SEQ ID NO: 1952028 - DNA, 15 bp, Homo sapiens
acaaaacactgaata

SEQ ID NO: 1952029 - DNA, 15 bp, Homo sapiens
caaaacactgaataa

SEQ ID NO: 1952030 - DNA, 15 bp, Homo sapiens
aaaacactgaataat

SEQ ID NO: 1952031 - DNA, 15 bp, Homo sapiens
aaacactgaataata

SEQ ID NO: 1952032 - DNA, 15 bp, Homo sapiens
aacactgaataatac

SEQ ID NO: 1952033 - DNA, 15 bp, Homo sapiens
acactgaataatact

SEQ ID NO: 1952034 - DNA, 15 bp, Homo sapiens
cactgaataatactc

SEQ ID NO: 1952035 - DNA, 15 bp, Homo sapiens
actgaataatactcg

SEQ ID NO: 1952036 - DNA, 15 bp, Homo sapiens
ctgaataatactcgc

SEQ ID NO: 1952037 - DNA, 15 bp, Homo sapiens
tgaataatactcgca

SEQ ID NO: 1952038 - DNA, 15 bp, Homo sapiens
gaataatactcgcat

SEQ ID NO: 1952039 - DNA, 15 bp, Homo sapiens
aataatactcgcatc

SEQ ID NO: 1952040 - DNA, 15 bp, Homo sapiens
ataatactcgcatca

SEQ ID NO: 1952041 - DNA, 15 bp, Homo sapiens
taatactcgcatcaa

SEQ ID NO: 1952042 - DNA, 15 bp, Homo sapiens
aatactcgcatcaag

SEQ ID NO: 1952043 - DNA, 15 bp, Homo sapiens
atactcgcatcaagg

SEQ ID NO: 1952044 - DNA, 15 bp, Homo sapiens
tactcgcatcaaggc

SEQ ID NO: 1952045 - DNA, 15 bp, Homo sapiens
actcgcatcaaggct

SEQ ID NO: 1952046 - DNA, 15 bp, Homo sapiens
ctcgcatcaaggctt

SEQ ID NO: 1952047 - DNA, 15 bp, Homo sapiens
tcgcatcaaggcttt

SEQ ID NO: 1952048 - DNA, 15 bp, Homo sapiens
cgcatcaaggctttc

SEQ ID NO: 1952049 - DNA, 15 bp, Homo sapiens
gcatcaaggctttct

SEQ ID NO: 1952050 - DNA, 15 bp, Homo sapiens
catcaaggctttcta

SEQ ID NO: 1952051 - DNA, 15 bp, Homo sapiens
atcaaggctttctag

SEQ ID NO: 1952052 - DNA, 15 bp, Homo sapiens
tcaaggctttctaga

SEQ ID NO: 1952053 - DNA, 15 bp, Homo sapiens
caaggctttctagat

SEQ ID NO: 1952054 - DNA, 15 bp, Homo sapiens
aaggctttctagatt

SEQ ID NO: 1952055 - DNA, 15 bp, Homo sapiens
aggctttctagatta

SEQ ID NO: 1952056 - DNA, 15 bp, Homo sapiens
ggctttctagattac

SEQ ID NO: 1952057 - DNA, 15 bp, Homo sapiens
gctttctagattaca

SEQ ID NO: 1952058 - DNA, 15 bp, Homo sapiens
ctttctagattacat

SEQ ID NO: 1952059 - DNA, 15 bp, Homo sapiens
tttctagattacata

SEQ ID NO: 1952060 - DNA, 15 bp, Homo sapiens
ttctagattacatat

SEQ ID NO: 1952061 - DNA, 15 bp, Homo sapiens
tctagattacatatc

SEQ ID NO: 1952062 - DNA, 15 bp, Homo sapiens
ctagattacatatcg

SEQ ID NO: 1952063 - DNA, 15 bp, Homo sapiens
tagattacatatcgt

SEQ ID NO: 1952064 - DNA, 15 bp, Homo sapiens
agattacatatcgtg

SEQ ID NO: 1952065 - DNA, 15 bp, Homo sapiens
gattacatatcgtgg

SEQ ID NO: 1952066 - DNA, 15 bp, Homo sapiens
attacatatcgtggt

SEQ ID NO: 1952067 - DNA, 15 bp, Homo sapiens
ttacatatcgtggtc

SEQ ID NO: 1952068 - DNA, 15 bp, Homo sapiens
tacatatcgtggtca

SEQ ID NO: 1952069 - DNA, 15 bp, Homo sapiens
acatatcgtggtcag

SEQ ID NO: 1952070 - DNA, 15 bp, Homo sapiens
catatcgtggtcagt

SEQ ID NO: 1952071 - DNA, 15 bp, Homo sapiens
atatcgtggtcagta

SEQ ID NO: 1952072 - DNA, 15 bp, Homo sapiens
tatcgtggtcagtaa

SEQ ID NO: 1952073 - DNA, 15 bp, Homo sapiens
atcgtggtcagtaac

SEQ ID NO: 1952074 - DNA, 15 bp, Homo sapiens
tcgtggtcagtaact

SEQ ID NO: 1952075 - DNA, 15 bp, Homo sapiens
cgtggtcagtaactt

SEQ ID NO: 1952076 - DNA, 15 bp, Homo sapiens
gtggtcagtaacttt

SEQ ID NO: 1952077 - DNA, 15 bp, Homo sapiens
tggtcagtaactttt

SEQ ID NO: 1952078 - DNA, 15 bp, Homo sapiens
ggtcagtaacttttg

SEQ ID NO: 1952079 - DNA, 15 bp, Homo sapiens
gtcagtaacttttgc

SEQ ID NO: 1952080 - DNA, 15 bp, Homo sapiens
tcagtaacttttgcc

SEQ ID NO: 1952081 - DNA, 15 bp, Homo sapiens
cagtaacttttgcct

SEQ ID NO: 1952082 - DNA, 15 bp, Homo sapiens
agtaacttttgcctg

SEQ ID NO: 1952083 - DNA, 15 bp, Homo sapiens
gtaacttttgcctga

SEQ ID NO: 1952084 - DNA, 15 bp, Homo sapiens
taacttttgcctgaa

SEQ ID NO: 1952085 - DNA, 15 bp, Homo sapiens
aacttttgcctgaaa

SEQ ID NO: 1952086 - DNA, 15 bp, Homo sapiens
acttttgcctgaaaa

SEQ ID NO: 1952087 - DNA, 15 bp, Homo sapiens
cttttgcctgaaaac

SEQ ID NO: 1952088 - DNA, 15 bp, Homo sapiens
ttttgcctgaaaacc

SEQ ID NO: 1952089 - DNA, 15 bp, Homo sapiens
tttgcctgaaaacct

SEQ ID NO: 1952090 - DNA, 15 bp, Homo sapiens
ttgcctgaaaaccta

SEQ ID NO: 1952091 - DNA, 15 bp, Homo sapiens
tgcctgaaaacctat

SEQ ID NO: 1952092 - DNA, 15 bp, Homo sapiens
gcctgaaaacctatg

SEQ ID NO: 1952093 - DNA, 15 bp, Homo sapiens
cctgaaaacctatga

SEQ ID NO: 1952094 - DNA, 15 bp, Homo sapiens
ctgaaaacctatgac

SEQ ID NO: 1952095 - DNA, 15 bp, Homo sapiens
tgaaaacctatgaca

SEQ ID NO: 1952096 - DNA, 15 bp, Homo sapiens
gaaaacctatgacat

SEQ ID NO: 1952097 - DNA, 15 bp, Homo sapiens
aaaacctatgacata

SEQ ID NO: 1952098 - DNA, 15 bp, Homo sapiens
aaacctatgacatag

SEQ ID NO: 1952099 - DNA, 15 bp, Homo sapiens
aacctatgacatagg

SEQ ID NO: 1952100 - DNA, 15 bp, Homo sapiens
acctatgacataggc

SEQ ID NO: 1952101 - DNA, 15 bp, Homo sapiens
cctatgacataggca

SEQ ID NO: 1952102 - DNA, 15 bp, Homo sapiens
ctatgacataggcac

SEQ ID NO: 1952103 - DNA, 15 bp, Homo sapiens
tatgacataggcacc

SEQ ID NO: 1952104 - DNA, 15 bp, Homo sapiens
atgacataggcacct

SEQ ID NO: 1952105 - DNA, 15 bp, Homo sapiens
tgacataggcacctc

SEQ ID NO: 1952106 - DNA, 15 bp, Homo sapiens
gacataggcacctct

SEQ ID NO: 1952107 - DNA, 15 bp, Homo sapiens
acataggcacctctt

SEQ ID NO: 1952108 - DNA, 15 bp, Homo sapiens
cataggcacctcttt

SEQ ID NO: 1952109 - DNA, 15 bp, Homo sapiens
ataggcacctctttc

SEQ ID NO: 1952110 - DNA, 15 bp, Homo sapiens
taggcacctctttca

SEQ ID NO: 1952111 - DNA, 15 bp, Homo sapiens
aggcacctctttcac

SEQ ID NO: 1952112 - DNA, 15 bp, Homo sapiens
ggcacctctttcact

SEQ ID NO: 1952113 - DNA, 15 bp, Homo sapiens
gcacctctttcactt

SEQ ID NO: 1952114 - DNA, 15 bp, Homo sapiens
cacctctttcacttg

SEQ ID NO: 1952115 - DNA, 15 bp, Homo sapiens
acctctttcacttgt

SEQ ID NO: 1952116 - DNA, 15 bp, Homo sapiens
cctctttcacttgtg

SEQ ID NO: 1952117 - DNA, 15 bp, Homo sapiens
ctctttcacttgtgg

SEQ ID NO: 1952118 - DNA, 15 bp, Homo sapiens
tctttcacttgtggc

SEQ ID NO: 1952119 - DNA, 15 bp, Homo sapiens
ctttcacttgtggca

SEQ ID NO: 1952120 - DNA, 15 bp, Homo sapiens
tttcacttgtggcat

SEQ ID NO: 1952121 - DNA, 15 bp, Homo sapiens
ttcacttgtggcatc

SEQ ID NO: 1952122 - DNA, 15 bp, Homo sapiens
tcacttgtggcatct

SEQ ID NO: 1952123 - DNA, 15 bp, Homo sapiens
cacttgtggcatctc

SEQ ID NO: 1952124 - DNA, 15 bp, Homo sapiens
acttgtggcatctca

SEQ ID NO: 1952125 - DNA, 15 bp, Homo sapiens
cttgtggcatctcat

SEQ ID NO: 1952126 - DNA, 15 bp, Homo sapiens
ttgtggcatctcatt

SEQ ID NO: 1952127 - DNA, 15 bp, Homo sapiens
tgtggcatctcattt

SEQ ID NO: 1952128 - DNA, 15 bp, Homo sapiens
gtggcatctcattta

SEQ ID NO: 1952129 - DNA, 15 bp, Homo sapiens
tggcatctcatttaa

SEQ ID NO: 1952130 - DNA, 15 bp, Homo sapiens
ggcatctcatttaaa

SEQ ID NO: 1952131 - DNA, 15 bp, Homo sapiens
gcatctcatttaaag

SEQ ID NO: 1952132 - DNA, 15 bp, Homo sapiens
catctcatttaaaga

SEQ ID NO: 1952133 - DNA, 15 bp, Homo sapiens
atctcatttaaagat

SEQ ID NO: 1952134 - DNA, 15 bp, Homo sapiens
tctcatttaaagatt

SEQ ID NO: 1952135 - DNA, 15 bp, Homo sapiens
ctcatttaaagattt

SEQ ID NO: 1952136 - DNA, 15 bp, Homo sapiens
tcatttaaagatttg

SEQ ID NO: 1952137 - DNA, 15 bp, Homo sapiens
catttaaagatttgt

SEQ ID NO: 1952138 - DNA, 15 bp, Homo sapiens
atttaaagatttgtt

SEQ ID NO: 1952139 - DNA, 15 bp, Homo sapiens
tttaaagatttgttt

SEQ ID NO: 1952140 - DNA, 15 bp, Homo sapiens
ttaaagatttgttta

SEQ ID NO: 1952141 - DNA, 15 bp, Homo sapiens
taaagatttgtttat

SEQ ID NO: 1952142 - DNA, 15 bp, Homo sapiens
aaagatttgtttata

SEQ ID NO: 1952143 - DNA, 15 bp, Homo sapiens
aagatttgtttatac

SEQ ID NO: 1952144 - DNA, 15 bp, Homo sapiens
agatttgtttataca

SEQ ID NO: 1952145 - DNA, 15 bp, Homo sapiens
gatttgtttatacac

SEQ ID NO: 1952146 - DNA, 15 bp, Homo sapiens
atttgtttatacact

SEQ ID NO: 1952147 - DNA, 15 bp, Homo sapiens
tttgtttatacactt

SEQ ID NO: 1952148 - DNA, 15 bp, Homo sapiens
ttgtttatacacttg

SEQ ID NO: 1952149 - DNA, 15 bp, Homo sapiens
tgtttatacacttga

SEQ ID NO: 1952150 - DNA, 15 bp, Homo sapiens
gtttatacacttgac

SEQ ID NO: 1952151 - DNA, 15 bp, Homo sapiens
tttatacacttgaca

SEQ ID NO: 1952152 - DNA, 15 bp, Homo sapiens
ttatacacttgacat

SEQ ID NO: 1952153 - DNA, 15 bp, Homo sapiens
tatacacttgacatt

SEQ ID NO: 1952154 - DNA, 15 bp, Homo sapiens
atacacttgacattt

SEQ ID NO: 1952155 - DNA, 15 bp, Homo sapiens
tacacttgacatttc

SEQ ID NO: 1952156 - DNA, 15 bp, Homo sapiens
acacttgacatttct

SEQ ID NO: 1952157 - DNA, 15 bp, Homo sapiens
cacttgacatttctg

SEQ ID NO: 1952158 - DNA, 15 bp, Homo sapiens
acttgacatttctgt

SEQ ID NO: 1952159 - DNA, 15 bp, Homo sapiens
cttgacatttctgta

SEQ ID NO: 1952160 - DNA, 15 bp, Homo sapiens
ttgacatttctgtag

SEQ ID NO: 1952161 - DNA, 15 bp, Homo sapiens
tgacatttctgtaga

SEQ ID NO: 1952162 - DNA, 15 bp, Homo sapiens
gacatttctgtagaa

SEQ ID NO: 1952163 - DNA, 15 bp, Homo sapiens
acatttctgtagaag

SEQ ID NO: 1952164 - DNA, 15 bp, Homo sapiens
catttctgtagaaga

SEQ ID NO: 1952165 - DNA, 15 bp, Homo sapiens
atttctgtagaagac

SEQ ID NO: 1952166 - DNA, 15 bp, Homo sapiens
tttctgtagaagact

SEQ ID NO: 1952167 - DNA, 15 bp, Homo sapiens
ttctgtagaagactt

SEQ ID NO: 1952168 - DNA, 15 bp, Homo sapiens
tctgtagaagacttt

SEQ ID NO: 1952169 - DNA, 15 bp, Homo sapiens
ctgtagaagactttc

SEQ ID NO: 1952170 - DNA, 15 bp, Homo sapiens
tgtagaagactttct

SEQ ID NO: 1952171 - DNA, 15 bp, Homo sapiens
gtagaagactttctg

SEQ ID NO: 1952172 - DNA, 15 bp, Homo sapiens
tagaagactttctga

SEQ ID NO: 1952173 - DNA, 15 bp, Homo sapiens
agaagactttctgag

SEQ ID NO: 1952174 - DNA, 15 bp, Homo sapiens
gaagactttctgagg

SEQ ID NO: 1952175 - DNA, 15 bp, Homo sapiens
aagactttctgaggc

SEQ ID NO: 1952176 - DNA, 15 bp, Homo sapiens
agactttctgaggct

SEQ ID NO: 1952177 - DNA, 15 bp, Homo sapiens
gactttctgaggctc

SEQ ID NO: 1952178 - DNA, 15 bp, Homo sapiens
actttctgaggctct

SEQ ID NO: 1952179 - DNA, 15 bp, Homo sapiens
ctttctgaggctctc

SEQ ID NO: 1952180 - DNA, 15 bp, Homo sapiens
tttctgaggctctct

SEQ ID NO: 1952181 - DNA, 15 bp, Homo sapiens
ttctgaggctctctg

SEQ ID NO: 1952182 - DNA, 15 bp, Homo sapiens
tctgaggctctctga

SEQ ID NO: 1952183 - DNA, 15 bp, Homo sapiens
ctgaggctctctgaa

SEQ ID NO: 1952184 - DNA, 15 bp, Homo sapiens
tgaggctctctgaaa

SEQ ID NO: 1952185 - DNA, 15 bp, Homo sapiens
gaggctctctgaaac

SEQ ID NO: 1952186 - DNA, 15 bp, Homo sapiens
aggctctctgaaacc

SEQ ID NO: 1952187 - DNA, 15 bp, Homo sapiens
ggctctctgaaaccc

SEQ ID NO: 1952188 - DNA, 15 bp, Homo sapiens
gctctctgaaaccca

SEQ ID NO: 1952189 - DNA, 15 bp, Homo sapiens
ctctctgaaacccag

SEQ ID NO: 1952190 - DNA, 15 bp, Homo sapiens
tctctgaaacccagc

SEQ ID NO: 1952191 - DNA, 15 bp, Homo sapiens
ctctgaaacccagcc

SEQ ID NO: 1952192 - DNA, 15 bp, Homo sapiens
tctgaaacccagcct

SEQ ID NO: 1952193 - DNA, 15 bp, Homo sapiens
ctgaaacccagcctc

SEQ ID NO: 1952194 - DNA, 15 bp, Homo sapiens
tgaaacccagcctca

SEQ ID NO: 1952195 - DNA, 15 bp, Homo sapiens
gaaacccagcctcaa

SEQ ID NO: 1952196 - DNA, 15 bp, Homo sapiens
aaacccagcctcaag

SEQ ID NO: 1952197 - DNA, 15 bp, Homo sapiens
aacccagcctcaagc

SEQ ID NO: 1952198 - DNA, 15 bp, Homo sapiens
acccagcctcaagca

SEQ ID NO: 1952199 - DNA, 15 bp, Homo sapiens
cccagcctcaagcaa

SEQ ID NO: 1952200 - DNA, 15 bp, Homo sapiens
ccagcctcaagcaaa

SEQ ID NO: 1952201 - DNA, 15 bp, Homo sapiens
cagcctcaagcaaag

SEQ ID NO: 1952202 - DNA, 15 bp, Homo sapiens
agcctcaagcaaagt

SEQ ID NO: 1952203 - DNA, 15 bp, Homo sapiens
gcctcaagcaaagtt

SEQ ID NO: 1952204 - DNA, 15 bp, Homo sapiens
cctcaagcaaagtta

SEQ ID NO: 1952205 - DNA, 15 bp, Homo sapiens
ctcaagcaaagttat

SEQ ID NO: 1952206 - DNA, 15 bp, Homo sapiens
tcaagcaaagttatc

SEQ ID NO: 1952207 - DNA, 15 bp, Homo sapiens
caagcaaagttatct

SEQ ID NO: 1952208 - DNA, 15 bp, Homo sapiens
aagcaaagttatctg

SEQ ID NO: 1952209 - DNA, 15 bp, Homo sapiens
agcaaagttatctgg

SEQ ID NO: 1952210 - DNA, 15 bp, Homo sapiens
gcaaagttatctggg

SEQ ID NO: 1952211 - DNA, 15 bp, Homo sapiens
caaagttatctggga

SEQ ID NO: 1952212 - DNA, 15 bp, Homo sapiens
aaagttatctgggaa

SEQ ID NO: 1952213 - DNA, 15 bp, Homo sapiens
aagttatctgggaaa

SEQ ID NO: 1952214 - DNA, 15 bp, Homo sapiens
agttatctgggaaag

SEQ ID NO: 1952215 - DNA, 15 bp, Homo sapiens
gttatctgggaaaga

SEQ ID NO: 1952216 - DNA, 15 bp, Homo sapiens
ttatctgggaaagat

SEQ ID NO: 1952217 - DNA, 15 bp, Homo sapiens
tatctgggaaagatc

SEQ ID NO: 1952218 - DNA, 15 bp, Homo sapiens
atctgggaaagatca

SEQ ID NO: 1952219 - DNA, 15 bp, Homo sapiens
tctgggaaagatcac

SEQ ID NO: 1952220 - DNA, 15 bp, Homo sapiens
ctgggaaagatcaca

SEQ ID NO: 1952221 - DNA, 15 bp, Homo sapiens
tgggaaagatcacat

SEQ ID NO: 1952222 - DNA, 15 bp, Homo sapiens
gggaaagatcacatg

SEQ ID NO: 1952223 - DNA, 15 bp, Homo sapiens
ggaaagatcacatgt

SEQ ID NO: 1952224 - DNA, 15 bp, Homo sapiens
gaaagatcacatgtc

SEQ ID NO: 1952225 - DNA, 15 bp, Homo sapiens
aaagatcacatgtca

SEQ ID NO: 1952226 - DNA, 15 bp, Homo sapiens
aagatcacatgtcag

SEQ ID NO: 1952227 - DNA, 15 bp, Homo sapiens
agatcacatgtcagg

SEQ ID NO: 1952228 - DNA, 15 bp, Homo sapiens
gatcacatgtcaggt

SEQ ID NO: 1952229 - DNA, 15 bp, Homo sapiens
atcacatgtcaggtc

SEQ ID NO: 1952230 - DNA, 15 bp, Homo sapiens
tcacatgtcaggtct

SEQ ID NO: 1952231 - DNA, 15 bp, Homo sapiens
cacatgtcaggtctt

SEQ ID NO: 1952232 - DNA, 15 bp, Homo sapiens
acatgtcaggtcttc

SEQ ID NO: 1952233 - DNA, 15 bp, Homo sapiens
catgtcaggtcttct

SEQ ID NO: 1952234 - DNA, 15 bp, Homo sapiens
atgtcaggtcttctt

SEQ ID NO: 1952235 - DNA, 15 bp, Homo sapiens
tgtcaggtcttcttt

SEQ ID NO: 1952236 - DNA, 15 bp, Homo sapiens
gtcaggtcttctttg

SEQ ID NO: 1952237 - DNA, 15 bp, Homo sapiens
tcaggtcttctttgg

SEQ ID NO: 1952238 - DNA, 15 bp, Homo sapiens
caggtcttctttggt

SEQ ID NO: 1952239 - DNA, 15 bp, Homo sapiens
aggtcttctttggtt

SEQ ID NO: 1952240 - DNA, 15 bp, Homo sapiens
ggtcttctttggttt

SEQ ID NO: 1952241 - DNA, 15 bp, Homo sapiens
gtcttctttggtttt

SEQ ID NO: 1952242 - DNA, 15 bp, Homo sapiens
tcttctttggttttc

SEQ ID NO: 1952243 - DNA, 15 bp, Homo sapiens
cttctttggttttca

SEQ ID NO: 1952244 - DNA, 15 bp, Homo sapiens
ttctttggttttcat

SEQ ID NO: 1952245 - DNA, 15 bp, Homo sapiens
tctttggttttcatt

SEQ ID NO: 1952246 - DNA, 15 bp, Homo sapiens
ctttggttttcatta

SEQ ID NO: 1952247 - DNA, 15 bp, Homo sapiens
tttggttttcattat

SEQ ID NO: 1952248 - DNA, 15 bp, Homo sapiens
ttggttttcattata

SEQ ID NO: 1952249 - DNA, 15 bp, Homo sapiens
tggttttcattataa

SEQ ID NO: 1952250 - DNA, 15 bp, Homo sapiens
ggttttcattataaa

SEQ ID NO: 1952251 - DNA, 15 bp, Homo sapiens
gttttcattataaaa

SEQ ID NO: 1952252 - DNA, 15 bp, Homo sapiens
ttttcattataaaaa

SEQ ID NO: 1952253 - DNA, 15 bp, Homo sapiens
tttcattataaaaaa

SEQ ID NO: 1952254 - DNA, 15 bp, Homo sapiens
ttcattataaaaaaa

SEQ ID NO: 1952255 - DNA, 15 bp, Homo sapiens
tcattataaaaaaat

SEQ ID NO: 1952256 - DNA, 15 bp, Homo sapiens
cattataaaaaaatc

SEQ ID NO: 1952257 - DNA, 15 bp, Homo sapiens
attataaaaaaatca

SEQ ID NO: 1952258 - DNA, 15 bp, Homo sapiens
ttataaaaaaatcat

SEQ ID NO: 1952259 - DNA, 15 bp, Homo sapiens
tataaaaaaatcatt

SEQ ID NO: 1952260 - DNA, 15 bp, Homo sapiens
ataaaaaaatcattg

SEQ ID NO: 1952261 - DNA, 15 bp, Homo sapiens
taaaaaaatcattgt

SEQ ID NO: 1952262 - DNA, 15 bp, Homo sapiens
aaaaaaatcattgtg

SEQ ID NO: 1952263 - DNA, 15 bp, Homo sapiens
aaaaaatcattgtgc

SEQ ID NO: 1952264 - DNA, 15 bp, Homo sapiens
aaaaatcattgtgcc

SEQ ID NO: 1952265 - DNA, 15 bp, Homo sapiens
aaaatcattgtgcca

SEQ ID NO: 1952266 - DNA, 15 bp, Homo sapiens
aaatcattgtgccac

SEQ ID NO: 1952267 - DNA, 15 bp, Homo sapiens
aatcattgtgccacc

SEQ ID NO: 1952268 - DNA, 15 bp, Homo sapiens
atcattgtgccacct

SEQ ID NO: 1952269 - DNA, 15 bp, Homo sapiens
tcattgtgccacctc

SEQ ID NO: 1952270 - DNA, 15 bp, Homo sapiens
cattgtgccacctcc

SEQ ID NO: 1952271 - DNA, 15 bp, Homo sapiens
attgtgccacctcca

SEQ ID NO: 1952272 - DNA, 15 bp, Homo sapiens
ttgtgccacctccat

SEQ ID NO: 1952273 - DNA, 15 bp, Homo sapiens
tgtgccacctccatg

SEQ ID NO: 1952274 - DNA, 15 bp, Homo sapiens
gtgccacctccatgt

SEQ ID NO: 1952275 - DNA, 15 bp, Homo sapiens
tgccacctccatgtt

SEQ ID NO: 1952276 - DNA, 15 bp, Homo sapiens
gccacctccatgtta

SEQ ID NO: 1952277 - DNA, 15 bp, Homo sapiens
ccacctccatgttag

SEQ ID NO: 1952278 - DNA, 15 bp, Homo sapiens
cacctccatgttagg

SEQ ID NO: 1952279 - DNA, 15 bp, Homo sapiens
acctccatgttagga

SEQ ID NO: 1952280 - DNA, 15 bp, Homo sapiens
cctccatgttaggaa

SEQ ID NO: 1952281 - DNA, 15 bp, Homo sapiens
ctccatgttaggaat

SEQ ID NO: 1952282 - DNA, 15 bp, Homo sapiens
tccatgttaggaatc

SEQ ID NO: 1952283 - DNA, 15 bp, Homo sapiens
ccatgttaggaatct

SEQ ID NO: 1952284 - DNA, 15 bp, Homo sapiens
catgttaggaatcta

SEQ ID NO: 1952285 - DNA, 15 bp, Homo sapiens
atgttaggaatctaa

SEQ ID NO: 1952286 - DNA, 15 bp, Homo sapiens
tgttaggaatctaac

SEQ ID NO: 1952287 - DNA, 15 bp, Homo sapiens
gttaggaatctaacc

SEQ ID NO: 1952288 - DNA, 15 bp, Homo sapiens
ttaggaatctaacct

SEQ ID NO: 1952289 - DNA, 15 bp, Homo sapiens
taggaatctaacctg

SEQ ID NO: 1952290 - DNA, 15 bp, Homo sapiens
aggaatctaacctga

SEQ ID NO: 1952291 - DNA, 15 bp, Homo sapiens
ggaatctaacctgat

SEQ ID NO: 1952292 - DNA, 15 bp, Homo sapiens
gaatctaacctgatg

SEQ ID NO: 1952293 - DNA, 15 bp, Homo sapiens
aatctaacctgatgg

SEQ ID NO: 1952294 - DNA, 15 bp, Homo sapiens
atctaacctgatggg

SEQ ID NO: 1952295 - DNA, 15 bp, Homo sapiens
tctaacctgatggga

SEQ ID NO: 1952296 - DNA, 15 bp, Homo sapiens
ctaacctgatgggac

SEQ ID NO: 1952297 - DNA, 15 bp, Homo sapiens
taacctgatgggaca

SEQ ID NO: 1952298 - DNA, 15 bp, Homo sapiens
aacctgatgggacac

SEQ ID NO: 1952299 - DNA, 15 bp, Homo sapiens
acctgatgggacacc

SEQ ID NO: 1952300 - DNA, 15 bp, Homo sapiens
cctgatgggacaccc

SEQ ID NO: 1952301 - DNA, 15 bp, Homo sapiens
ctgatgggacaccct

SEQ ID NO: 1952302 - DNA, 15 bp, Homo sapiens
tgatgggacaccctc

SEQ ID NO: 1952303 - DNA, 15 bp, Homo sapiens
gatgggacaccctca

SEQ ID NO: 1952304 - DNA, 15 bp, Homo sapiens
atgggacaccctcac

SEQ ID NO: 1952305 - DNA, 15 bp, Homo sapiens
tgggacaccctcacc

SEQ ID NO: 1952306 - DNA, 15 bp, Homo sapiens
gggacaccctcaccc

SEQ ID NO: 1952307 - DNA, 15 bp, Homo sapiens
ggacaccctcaccca

SEQ ID NO: 1952308 - DNA, 15 bp, Homo sapiens
gacaccctcacccag

SEQ ID NO: 1952309 - DNA, 15 bp, Homo sapiens
acaccctcacccaga

SEQ ID NO: 1952310 - DNA, 15 bp, Homo sapiens
caccctcacccagaa

SEQ ID NO: 1952311 - DNA, 15 bp, Homo sapiens
accctcacccagaaa

SEQ ID NO: 1952312 - DNA, 15 bp, Homo sapiens
ccctcacccagaaac

SEQ ID NO: 1952313 - DNA, 15 bp, Homo sapiens
cctcacccagaaaca

SEQ ID NO: 1952314 - DNA, 15 bp, Homo sapiens
ctcacccagaaacat

SEQ ID NO: 1952315 - DNA, 15 bp, Homo sapiens
tcacccagaaacata

SEQ ID NO: 1952316 - DNA, 15 bp, Homo sapiens
cacccagaaacatag

SEQ ID NO: 1952317 - DNA, 15 bp, Homo sapiens
acccagaaacatagg

SEQ ID NO: 1952318 - DNA, 15 bp, Homo sapiens
cccagaaacatagga

SEQ ID NO: 1952319 - DNA, 15 bp, Homo sapiens
ccagaaacataggac

SEQ ID NO: 1952320 - DNA, 15 bp, Homo sapiens
cagaaacataggaca

SEQ ID NO: 1952321 - DNA, 15 bp, Homo sapiens
agaaacataggacac

SEQ ID NO: 1952322 - DNA, 15 bp, Homo sapiens
gaaacataggacact

SEQ ID NO: 1952323 - DNA, 15 bp, Homo sapiens
aaacataggacactt

SEQ ID NO: 1952324 - DNA, 15 bp, Homo sapiens
aacataggacacttc

SEQ ID NO: 1952325 - DNA, 15 bp, Homo sapiens
acataggacacttca

SEQ ID NO: 1952326 - DNA, 15 bp, Homo sapiens
cataggacacttcag

SEQ ID NO: 1952327 - DNA, 15 bp, Homo sapiens
ataggacacttcagg

SEQ ID NO: 1952328 - DNA, 15 bp, Homo sapiens
taggacacttcaggc

SEQ ID NO: 1952329 - DNA, 15 bp, Homo sapiens
aggacacttcaggca

SEQ ID NO: 1952330 - DNA, 15 bp, Homo sapiens
gacacttcaggcacc

SEQ ID NO: 1952331 - DNA, 15 bp, Homo sapiens
acacttcaggcacct

SEQ ID NO: 1952332 - DNA, 15 bp, Homo sapiens
cacttcaggcacctc

SEQ ID NO: 1952333 - DNA, 15 bp, Homo sapiens
acttcaggcacctca

SEQ ID NO: 1952334 - DNA, 15 bp, Homo sapiens
cttcaggcacctcag

SEQ ID NO: 1952335 - DNA, 15 bp, Homo sapiens
ttcaggcacctcagt

SEQ ID NO: 1952336 - DNA, 15 bp, Homo sapiens
tcaggcacctcagtg

SEQ ID NO: 1952337 - DNA, 15 bp, Homo sapiens
caggcacctcagtga

SEQ ID NO: 1952338 - DNA, 15 bp, Homo sapiens
aggcacctcagtgat

SEQ ID NO: 1952339 - DNA, 15 bp, Homo sapiens
ggcacctcagtgatt

SEQ ID NO: 1952340 - DNA, 15 bp, Homo sapiens
gcacctcagtgattt

SEQ ID NO: 1952341 - DNA, 15 bp, Homo sapiens
cacctcagtgatttg

SEQ ID NO: 1952342 - DNA, 15 bp, Homo sapiens
acctcagtgatttga

SEQ ID NO: 1952343 - DNA, 15 bp, Homo sapiens
cctcagtgatttgag

SEQ ID NO: 1952344 - DNA, 15 bp, Homo sapiens
ctcagtgatttgagt

SEQ ID NO: 1952345 - DNA, 15 bp, Homo sapiens
tcagtgatttgagtc

SEQ ID NO: 1952346 - DNA, 15 bp, Homo sapiens
cagtgatttgagtct

SEQ ID NO: 1952347 - DNA, 15 bp, Homo sapiens
agtgatttgagtctt

SEQ ID NO: 1952348 - DNA, 15 bp, Homo sapiens
gtgatttgagtcttg

SEQ ID NO: 1952349 - DNA, 15 bp, Homo sapiens
tgatttgagtcttga

SEQ ID NO: 1952350 - DNA, 15 bp, Homo sapiens
gatttgagtcttgaa

SEQ ID NO: 1952351 - DNA, 15 bp, Homo sapiens
atttgagtcttgaac

SEQ ID NO: 1952352 - DNA, 15 bp, Homo sapiens
tttgagtcttgaacg

SEQ ID NO: 1952353 - DNA, 15 bp, Homo sapiens
ttgagtcttgaacga

SEQ ID NO: 1952354 - DNA, 15 bp, Homo sapiens
tgagtcttgaacgat

SEQ ID NO: 1952355 - DNA, 15 bp, Homo sapiens
gagtcttgaacgatt

SEQ ID NO: 1952356 - DNA, 15 bp, Homo sapiens
agtcttgaacgattt

SEQ ID NO: 1952357 - DNA, 15 bp, Homo sapiens
gtcttgaacgatttg

SEQ ID NO: 1952358 - DNA, 15 bp, Homo sapiens
tcttgaacgatttgc

SEQ ID NO: 1952359 - DNA, 15 bp, Homo sapiens
cttgaacgatttgct

SEQ ID NO: 1952360 - DNA, 15 bp, Homo sapiens
ttgaacgatttgctc

SEQ ID NO: 1952361 - DNA, 15 bp, Homo sapiens
tgaacgatttgctct

SEQ ID NO: 1952362 - DNA, 15 bp, Homo sapiens
gaacgatttgctctt

SEQ ID NO: 1952363 - DNA, 15 bp, Homo sapiens
aacgatttgctcttc

SEQ ID NO: 1952364 - DNA, 15 bp, Homo sapiens
acgatttgctcttca

SEQ ID NO: 1952365 - DNA, 15 bp, Homo sapiens
cgatttgctcttcag

SEQ ID NO: 1952366 - DNA, 15 bp, Homo sapiens
gatttgctcttcagc

SEQ ID NO: 1952367 - DNA, 15 bp, Homo sapiens
atttgctcttcagcc

SEQ ID NO: 1952368 - DNA, 15 bp, Homo sapiens
tttgctcttcagcca

SEQ ID NO: 1952369 - DNA, 15 bp, Homo sapiens
ttgctcttcagccat

SEQ ID NO: 1952370 - DNA, 15 bp, Homo sapiens
tgctcttcagccatt

SEQ ID NO: 1952371 - DNA, 15 bp, Homo sapiens
gctcttcagccattg

SEQ ID NO: 1952372 - DNA, 15 bp, Homo sapiens
ctcttcagccattgt

SEQ ID NO: 1952373 - DNA, 15 bp, Homo sapiens
tcttcagccattgtc

SEQ ID NO: 1952374 - DNA, 15 bp, Homo sapiens
cttcagccattgtca

SEQ ID NO: 1952375 - DNA, 15 bp, Homo sapiens
ttcagccattgtcaa

SEQ ID NO: 1952376 - DNA, 15 bp, Homo sapiens
tcagccattgtcaaa

SEQ ID NO: 1952377 - DNA, 15 bp, Homo sapiens
cagccattgtcaaaa

SEQ ID NO: 1952378 - DNA, 15 bp, Homo sapiens
agccattgtcaaaaa

SEQ ID NO: 1952379 - DNA, 15 bp, Homo sapiens
gccattgtcaaaaac

SEQ ID NO: 1952380 - DNA, 15 bp, Homo sapiens
ccattgtcaaaaact

SEQ ID NO: 1952381 - DNA, 15 bp, Homo sapiens
cattgtcaaaaacta

SEQ ID NO: 1952382 - DNA, 15 bp, Homo sapiens
attgtcaaaaactag

SEQ ID NO: 1952383 - DNA, 15 bp, Homo sapiens
ttgtcaaaaactagg

SEQ ID NO: 1952384 - DNA, 15 bp, Homo sapiens
tgtcaaaaactaggc

SEQ ID NO: 1952385 - DNA, 15 bp, Homo sapiens
gtcaaaaactaggct

SEQ ID NO: 1952386 - DNA, 15 bp, Homo sapiens
tcaaaaactaggctg

SEQ ID NO: 1952387 - DNA, 15 bp, Homo sapiens
caaaaactaggctga

SEQ ID NO: 1952388 - DNA, 15 bp, Homo sapiens
aaaaactaggctgat

SEQ ID NO: 1952389 - DNA, 15 bp, Homo sapiens
aaaactaggctgatg

SEQ ID NO: 1952390 - DNA, 15 bp, Homo sapiens
aaactaggctgatgc

SEQ ID NO: 1952391 - DNA, 15 bp, Homo sapiens
aactaggctgatgca

SEQ ID NO: 1952392 - DNA, 15 bp, Homo sapiens
actaggctgatgcat

SEQ ID NO: 1952393 - DNA, 15 bp, Homo sapiens
ctaggctgatgcatt

SEQ ID NO: 1952394 - DNA, 15 bp, Homo sapiens
taggctgatgcattt

SEQ ID NO: 1952395 - DNA, 15 bp, Homo sapiens
aggctgatgcatttg

SEQ ID NO: 1952396 - DNA, 15 bp, Homo sapiens
ggctgatgcatttga

SEQ ID NO: 1952397 - DNA, 15 bp, Homo sapiens
gctgatgcatttgat

SEQ ID NO: 1952398 - DNA, 15 bp, Homo sapiens
ctgatgcatttgata

SEQ ID NO: 1952399 - DNA, 15 bp, Homo sapiens
tgatgcatttgatat

SEQ ID NO: 1952400 - DNA, 15 bp, Homo sapiens
gatgcatttgatatt

SEQ ID NO: 1952401 - DNA, 15 bp, Homo sapiens
atgcatttgatattt

SEQ ID NO: 1952402 - DNA, 15 bp, Homo sapiens
tgcatttgatattta

SEQ ID NO: 1952403 - DNA, 15 bp, Homo sapiens
gcatttgatatttaa

SEQ ID NO: 1952404 - DNA, 15 bp, Homo sapiens
catttgatatttaaa

SEQ ID NO: 1952405 - DNA, 15 bp, Homo sapiens
atttgatatttaaaa

SEQ ID NO: 1952406 - DNA, 15 bp, Homo sapiens
tttgatatttaaaaa

SEQ ID NO: 1952407 - DNA, 15 bp, Homo sapiens
ttgatatttaaaaag

SEQ ID NO: 1952408 - DNA, 15 bp, Homo sapiens
tgatatttaaaaagc

SEQ ID NO: 1952409 - DNA, 15 bp, Homo sapiens
gatatttaaaaagca

SEQ ID NO: 1952410 - DNA, 15 bp, Homo sapiens
atatttaaaaagcat

SEQ ID NO: 1952411 - DNA, 15 bp, Homo sapiens
tatttaaaaagcatt

SEQ ID NO: 1952412 - DNA, 15 bp, Homo sapiens
atttaaaaagcattt

SEQ ID NO: 1952413 - DNA, 15 bp, Homo sapiens
tttaaaaagcatttt

SEQ ID NO: 1952414 - DNA, 15 bp, Homo sapiens
ttaaaaagcattttt

SEQ ID NO: 1952415 - DNA, 15 bp, Homo sapiens
taaaaagcattttta

SEQ ID NO: 1952416 - DNA, 15 bp, Homo sapiens
aaaaagcatttttag

SEQ ID NO: 1952417 - DNA, 15 bp, Homo sapiens
aaaagcatttttagc

SEQ ID NO: 1952418 - DNA, 15 bp, Homo sapiens
aaagcatttttagct

SEQ ID NO: 1952419 - DNA, 15 bp, Homo sapiens
aagcatttttagctg

SEQ ID NO: 1952420 - DNA, 15 bp, Homo sapiens
agcatttttagctgg

SEQ ID NO: 1952421 - DNA, 15 bp, Homo sapiens
gcatttttagctggg

SEQ ID NO: 1952422 - DNA, 15 bp, Homo sapiens
catttttagctgggc

SEQ ID NO: 1952423 - DNA, 15 bp, Homo sapiens
atttttagctgggcg

SEQ ID NO: 1952424 - DNA, 15 bp, Homo sapiens
tttttagctgggcgc

SEQ ID NO: 1952425 - DNA, 15 bp, Homo sapiens
ttttagctgggcgca

SEQ ID NO: 1952426 - DNA, 15 bp, Homo sapiens
tttagctgggcgcag

SEQ ID NO: 1952427 - DNA, 15 bp, Homo sapiens
ttagctgggcgcagt

SEQ ID NO: 1952428 - DNA, 15 bp, Homo sapiens
tagctgggcgcagtg

SEQ ID NO: 1952429 - DNA, 15 bp, Homo sapiens
agctgggcgcagtgg

SEQ ID NO: 1952430 - DNA, 15 bp, Homo sapiens
gctgggcgcagtggc

SEQ ID NO: 1952431 - DNA, 15 bp, Homo sapiens
ctgggcgcagtggct

SEQ ID NO: 1952432 - DNA, 15 bp, Homo sapiens
tgggcgcagtggctc

SEQ ID NO: 1952433 - DNA, 15 bp, Homo sapiens
cagtggctcacgccc

SEQ ID NO: 1952434 - DNA, 15 bp, Homo sapiens
agtggctcacgccca

SEQ ID NO: 1952435 - DNA, 15 bp, Homo sapiens
gtggctcacgcccat

SEQ ID NO: 1952436 - DNA, 15 bp, Homo sapiens
tggctcacgcccata

SEQ ID NO: 1952437 - DNA, 15 bp, Homo sapiens
ggctcacgcccataa

SEQ ID NO: 1952438 - DNA, 15 bp, Homo sapiens
gctcacgcccataat

SEQ ID NO: 1952439 - DNA, 15 bp, Homo sapiens
ctcacgcccataatc

SEQ ID NO: 1952440 - DNA, 15 bp, Homo sapiens
tcacgcccataatcc

SEQ ID NO: 1952441 - DNA, 15 bp, Homo sapiens
cacgcccataatccc

SEQ ID NO: 1952442 - DNA, 15 bp, Homo sapiens
acgcccataatccca

SEQ ID NO: 1952443 - DNA, 15 bp, Homo sapiens
cgcccataatcccag

SEQ ID NO: 1952444 - DNA, 15 bp, Homo sapiens
gcccataatcccagt

SEQ ID NO: 1952445 - DNA, 15 bp, Homo sapiens
cccataatcccagta

SEQ ID NO: 1952446 - DNA, 15 bp, Homo sapiens
ccataatcccagtag

SEQ ID NO: 1952447 - DNA, 15 bp, Homo sapiens
cataatcccagtagt

SEQ ID NO: 1952448 - DNA, 15 bp, Homo sapiens
ataatcccagtagtt

SEQ ID NO: 1952449 - DNA, 15 bp, Homo sapiens
taatcccagtagttt

SEQ ID NO: 1952450 - DNA, 15 bp, Homo sapiens
aatcccagtagtttg

SEQ ID NO: 1952451 - DNA, 15 bp, Homo sapiens
atcccagtagtttgg

SEQ ID NO: 1952452 - DNA, 15 bp, Homo sapiens
tcccagtagtttggg

SEQ ID NO: 1952453 - DNA, 15 bp, Homo sapiens
cccagtagtttgggg

SEQ ID NO: 1952454 - DNA, 15 bp, Homo sapiens
ccagtagtttggggg

SEQ ID NO: 1952455 - DNA, 15 bp, Homo sapiens
cagtagtttgggggg

SEQ ID NO: 1952456 - DNA, 15 bp, Homo sapiens
agtagtttggggggc

SEQ ID NO: 1952457 - DNA, 15 bp, Homo sapiens
gtagtttggggggcc

SEQ ID NO: 1952458 - DNA, 15 bp, Homo sapiens
tagtttggggggccg

SEQ ID NO: 1952459 - DNA, 15 bp, Homo sapiens
agtttggggggccga

SEQ ID NO: 1952460 - DNA, 15 bp, Homo sapiens
gtttggggggccgag

SEQ ID NO: 1952461 - DNA, 15 bp, Homo sapiens
tttggggggccgagg

SEQ ID NO: 1952462 - DNA, 15 bp, Homo sapiens
ttggggggccgaggc

SEQ ID NO: 1952463 - DNA, 15 bp, Homo sapiens
tggggggccgaggca

SEQ ID NO: 1952464 - DNA, 15 bp, Homo sapiens
ggggggccgaggcag

SEQ ID NO: 1952465 - DNA, 15 bp, Homo sapiens
gggggccgaggcagg

SEQ ID NO: 1952466 - DNA, 15 bp, Homo sapiens
ggggccgaggcaggc

SEQ ID NO: 1952467 - DNA, 15 bp, Homo sapiens
gggccgaggcaggcg

SEQ ID NO: 1952468 - DNA, 15 bp, Homo sapiens
ggccgaggcaggcgg

SEQ ID NO: 1952469 - DNA, 15 bp, Homo sapiens
cgaggcaggcggatt

SEQ ID NO: 1952470 - DNA, 15 bp, Homo sapiens
gaggcaggcggattg

SEQ ID NO: 1952471 - DNA, 15 bp, Homo sapiens
aggcaggcggattgc

SEQ ID NO: 1952472 - DNA, 15 bp, Homo sapiens
ggcaggcggattgct

SEQ ID NO: 1952473 - DNA, 15 bp, Homo sapiens
gcaggcggattgctt

SEQ ID NO: 1952474 - DNA, 15 bp, Homo sapiens
caggcggattgctta

SEQ ID NO: 1952475 - DNA, 15 bp, Homo sapiens
aggcggattgcttaa

SEQ ID NO: 1952476 - DNA, 15 bp, Homo sapiens
ggcggattgcttaag

SEQ ID NO: 1952477 - DNA, 15 bp, Homo sapiens
gcggattgcttaagc

SEQ ID NO: 1952478 - DNA, 15 bp, Homo sapiens
cggattgcttaagct

SEQ ID NO: 1952479 - DNA, 15 bp, Homo sapiens
ggattgcttaagctc

SEQ ID NO: 1952480 - DNA, 15 bp, Homo sapiens
gattgcttaagctca

SEQ ID NO: 1952481 - DNA, 15 bp, Homo sapiens
attgcttaagctcaa

SEQ ID NO: 1952482 - DNA, 15 bp, Homo sapiens
ttgcttaagctcaag

SEQ ID NO: 1952483 - DNA, 15 bp, Homo sapiens
tgcttaagctcaaga

SEQ ID NO: 1952484 - DNA, 15 bp, Homo sapiens
gcttaagctcaagag

SEQ ID NO: 1952485 - DNA, 15 bp, Homo sapiens
cttaagctcaagagt

SEQ ID NO: 1952486 - DNA, 15 bp, Homo sapiens
ttaagctcaagagtt

SEQ ID NO: 1952487 - DNA, 15 bp, Homo sapiens
taagctcaagagttc

SEQ ID NO: 1952488 - DNA, 15 bp, Homo sapiens
aagctcaagagttca

SEQ ID NO: 1952489 - DNA, 15 bp, Homo sapiens
agctcaagagttcaa

SEQ ID NO: 1952490 - DNA, 15 bp, Homo sapiens
gctcaagagttcaag

SEQ ID NO: 1952491 - DNA, 15 bp, Homo sapiens
ctcaagagttcaaga

SEQ ID NO: 1952492 - DNA, 15 bp, Homo sapiens
tcaagagttcaagac

SEQ ID NO: 1952493 - DNA, 15 bp, Homo sapiens
caagagttcaagacc

SEQ ID NO: 1952494 - DNA, 15 bp, Homo sapiens
aagagttcaagacca

SEQ ID NO: 1952495 - DNA, 15 bp, Homo sapiens
agagttcaagaccag

SEQ ID NO: 1952496 - DNA, 15 bp, Homo sapiens
ctgggcaacatagta

SEQ ID NO: 1952497 - DNA, 15 bp, Homo sapiens
tgggcaacatagtaa

SEQ ID NO: 1952498 - DNA, 15 bp, Homo sapiens
gggcaacatagtaaa

SEQ ID NO: 1952499 - DNA, 15 bp, Homo sapiens
ggcaacatagtaaaa

SEQ ID NO: 1952500 - DNA, 15 bp, Homo sapiens
gcaacatagtaaaac

SEQ ID NO: 1952501 - DNA, 15 bp, Homo sapiens
caacatagtaaaacc

SEQ ID NO: 1952502 - DNA, 15 bp, Homo sapiens
aacatagtaaaaccc

SEQ ID NO: 1952503 - DNA, 15 bp, Homo sapiens
acatagtaaaacccc

SEQ ID NO: 1952504 - DNA, 15 bp, Homo sapiens
catagtaaaacccca

SEQ ID NO: 1952505 - DNA, 15 bp, Homo sapiens
atagtaaaaccccat

SEQ ID NO: 1952506 - DNA, 15 bp, Homo sapiens
tagtaaaaccccatc

SEQ ID NO: 1952507 - DNA, 15 bp, Homo sapiens
agtaaaaccccatct

SEQ ID NO: 1952508 - DNA, 15 bp, Homo sapiens
accccatctctacac

SEQ ID NO: 1952509 - DNA, 15 bp, Homo sapiens
ccccatctctacaca

SEQ ID NO: 1952510 - DNA, 15 bp, Homo sapiens
cccatctctacacaa

SEQ ID NO: 1952511 - DNA, 15 bp, Homo sapiens
ccatctctacacaaa

SEQ ID NO: 1952512 - DNA, 15 bp, Homo sapiens
catctctacacaaaa

SEQ ID NO: 1952513 - DNA, 15 bp, Homo sapiens
atctctacacaaaaa

SEQ ID NO: 1952514 - DNA, 15 bp, Homo sapiens
tctctacacaaaaat

SEQ ID NO: 1952515 - DNA, 15 bp, Homo sapiens
ctctacacaaaaata

SEQ ID NO: 1952516 - DNA, 15 bp, Homo sapiens
tctacacaaaaatat

SEQ ID NO: 1952517 - DNA, 15 bp, Homo sapiens
ctacacaaaaatatg

SEQ ID NO: 1952518 - DNA, 15 bp, Homo sapiens
tacacaaaaatatgt

SEQ ID NO: 1952519 - DNA, 15 bp, Homo sapiens
acacaaaaatatgta

SEQ ID NO: 1952520 - DNA, 15 bp, Homo sapiens
cacaaaaatatgtag

SEQ ID NO: 1952521 - DNA, 15 bp, Homo sapiens
acaaaaatatgtaga

SEQ ID NO: 1952522 - DNA, 15 bp, Homo sapiens
caaaaatatgtagag

SEQ ID NO: 1952523 - DNA, 15 bp, Homo sapiens
aaaaatatgtagaga

SEQ ID NO: 1952524 - DNA, 15 bp, Homo sapiens
aaaatatgtagagat

SEQ ID NO: 1952525 - DNA, 15 bp, Homo sapiens
aaatatgtagagatc

SEQ ID NO: 1952526 - DNA, 15 bp, Homo sapiens
aatatgtagagatca

SEQ ID NO: 1952527 - DNA, 15 bp, Homo sapiens
atatgtagagatcat

SEQ ID NO: 1952528 - DNA, 15 bp, Homo sapiens
tatgtagagatcatg

SEQ ID NO: 1952529 - DNA, 15 bp, Homo sapiens
atgtagagatcatga

SEQ ID NO: 1952530 - DNA, 15 bp, Homo sapiens
tgtagagatcatgaa

SEQ ID NO: 1952531 - DNA, 15 bp, Homo sapiens
gtagagatcatgaaa

SEQ ID NO: 1952532 - DNA, 15 bp, Homo sapiens
tagagatcatgaaaa

SEQ ID NO: 1952533 - DNA, 15 bp, Homo sapiens
agagatcatgaaaat

SEQ ID NO: 1952534 - DNA, 15 bp, Homo sapiens
gagatcatgaaaatg

SEQ ID NO: 1952535 - DNA, 15 bp, Homo sapiens
agatcatgaaaatga

SEQ ID NO: 1952536 - DNA, 15 bp, Homo sapiens
gatcatgaaaatgac

SEQ ID NO: 1952537 - DNA, 15 bp, Homo sapiens
atcatgaaaatgacc

SEQ ID NO: 1952538 - DNA, 15 bp, Homo sapiens
tcatgaaaatgacct

SEQ ID NO: 1952539 - DNA, 15 bp, Homo sapiens
catgaaaatgacctg

SEQ ID NO: 1952540 - DNA, 15 bp, Homo sapiens
atgaaaatgacctga

SEQ ID NO: 1952541 - DNA, 15 bp, Homo sapiens
tgaaaatgacctgaa

SEQ ID NO: 1952542 - DNA, 15 bp, Homo sapiens
gaaaatgacctgaac

SEQ ID NO: 1952543 - DNA, 15 bp, Homo sapiens
aaaatgacctgaaca

SEQ ID NO: 1952544 - DNA, 15 bp, Homo sapiens
aaatgacctgaacag

SEQ ID NO: 1952545 - DNA, 15 bp, Homo sapiens
aatgacctgaacagg

SEQ ID NO: 1952546 - DNA, 15 bp, Homo sapiens
atgacctgaacaggc

SEQ ID NO: 1952547 - DNA, 15 bp, Homo sapiens
tgacctgaacaggcc

SEQ ID NO: 1952548 - DNA, 15 bp, Homo sapiens
gacctgaacaggcca

SEQ ID NO: 1952549 - DNA, 15 bp, Homo sapiens
acctgaacaggccag

SEQ ID NO: 1952550 - DNA, 15 bp, Homo sapiens
cctgaacaggccagg

SEQ ID NO: 1952551 - DNA, 15 bp, Homo sapiens
ctgaacaggccaggc

SEQ ID NO: 1952552 - DNA, 15 bp, Homo sapiens
tgaacaggccaggcg

SEQ ID NO: 1952553 - DNA, 15 bp, Homo sapiens
gaacaggccaggcgg

SEQ ID NO: 1952554 - DNA, 15 bp, Homo sapiens
aacaggccaggcggg

SEQ ID NO: 1952555 - DNA, 15 bp, Homo sapiens
acaggccaggcgggg

SEQ ID NO: 1952556 - DNA, 15 bp, Homo sapiens
caggccaggcggggt

SEQ ID NO: 1952557 - DNA, 15 bp, Homo sapiens
aggccaggcggggtg

SEQ ID NO: 1952558 - DNA, 15 bp, Homo sapiens
ggccaggcggggtgg

SEQ ID NO: 1952559 - DNA, 15 bp, Homo sapiens
gccaggcggggtggc

SEQ ID NO: 1952560 - DNA, 15 bp, Homo sapiens
ccaggcggggtggct

SEQ ID NO: 1952561 - DNA, 15 bp, Homo sapiens
caggcggggtggctc

SEQ ID NO: 1952562 - DNA, 15 bp, Homo sapiens
aggcggggtggctca

SEQ ID NO: 1952563 - DNA, 15 bp, Homo sapiens
ggcggggtggctcac

SEQ ID NO: 1952564 - DNA, 15 bp, Homo sapiens
gcggggtggctcacg

SEQ ID NO: 1952565 - DNA, 15 bp, Homo sapiens
cggggtggctcacgt

SEQ ID NO: 1952566 - DNA, 15 bp, Homo sapiens
ggggtggctcacgtc

SEQ ID NO: 1952567 - DNA, 15 bp, Homo sapiens
gggtggctcacgtct

SEQ ID NO: 1952568 - DNA, 15 bp, Homo sapiens
gtggctcacgtctgt

SEQ ID NO: 1952569 - DNA, 15 bp, Homo sapiens
tggctcacgtctgta

SEQ ID NO: 1952570 - DNA, 15 bp, Homo sapiens
ggctcacgtctgtaa

SEQ ID NO: 1952571 - DNA, 15 bp, Homo sapiens
gctcacgtctgtaat

SEQ ID NO: 1952572 - DNA, 15 bp, Homo sapiens
ctcacgtctgtaatc

SEQ ID NO: 1952573 - DNA, 15 bp, Homo sapiens
tcacgtctgtaatcc

SEQ ID NO: 1952574 - DNA, 15 bp, Homo sapiens
cacgtctgtaatccc

SEQ ID NO: 1952575 - DNA, 15 bp, Homo sapiens
acgtctgtaatccca

SEQ ID NO: 1952576 - DNA, 15 bp, Homo sapiens
cgtctgtaatcccag

SEQ ID NO: 1952577 - DNA, 15 bp, Homo sapiens
gtctgtaatcccagc

SEQ ID NO: 1952578 - DNA, 15 bp, Homo sapiens
tctgtaatcccagca

SEQ ID NO: 1952579 - DNA, 15 bp, Homo sapiens
aaggtcaggagttca

SEQ ID NO: 1952580 - DNA, 15 bp, Homo sapiens
accagcctggccaaa

SEQ ID NO: 1952581 - DNA, 15 bp, Homo sapiens
ccagcctggccaaat

SEQ ID NO: 1952582 - DNA, 15 bp, Homo sapiens
cagcctggccaaata

SEQ ID NO: 1952583 - DNA, 15 bp, Homo sapiens
agcctggccaaatat

SEQ ID NO: 1952584 - DNA, 15 bp, Homo sapiens
gcctggccaaatatg

SEQ ID NO: 1952585 - DNA, 15 bp, Homo sapiens
cctggccaaatatgg

SEQ ID NO: 1952586 - DNA, 15 bp, Homo sapiens
ctggccaaatatggt

SEQ ID NO: 1952587 - DNA, 15 bp, Homo sapiens
tggccaaatatggtg

SEQ ID NO: 1952588 - DNA, 15 bp, Homo sapiens
ggccaaatatggtga

SEQ ID NO: 1952589 - DNA, 15 bp, Homo sapiens
gccaaatatggtgaa

SEQ ID NO: 1952590 - DNA, 15 bp, Homo sapiens
ccaaatatggtgaaa

SEQ ID NO: 1952591 - DNA, 15 bp, Homo sapiens
caaatatggtgaaac

SEQ ID NO: 1952592 - DNA, 15 bp, Homo sapiens
aaatatggtgaaacc

SEQ ID NO: 1952593 - DNA, 15 bp, Homo sapiens
catctctactaaaag

SEQ ID NO: 1952594 - DNA, 15 bp, Homo sapiens
atctctactaaaagt

SEQ ID NO: 1952595 - DNA, 15 bp, Homo sapiens
agtacaaaaattagt

SEQ ID NO: 1952596 - DNA, 15 bp, Homo sapiens
gtacaaaaattagtg

SEQ ID NO: 1952597 - DNA, 15 bp, Homo sapiens
tacaaaaattagtgg

SEQ ID NO: 1952598 - DNA, 15 bp, Homo sapiens
acaaaaattagtggg

SEQ ID NO: 1952599 - DNA, 15 bp, Homo sapiens
caaaaattagtgggg

SEQ ID NO: 1952600 - DNA, 15 bp, Homo sapiens
aaaaattagtggggt

SEQ ID NO: 1952601 - DNA, 15 bp, Homo sapiens
aaaattagtggggtg

SEQ ID NO: 1952602 - DNA, 15 bp, Homo sapiens
aaattagtggggtgt

SEQ ID NO: 1952603 - DNA, 15 bp, Homo sapiens
aattagtggggtgtg

SEQ ID NO: 1952604 - DNA, 15 bp, Homo sapiens
attagtggggtgtgg

SEQ ID NO: 1952605 - DNA, 15 bp, Homo sapiens
ttagtggggtgtggt

SEQ ID NO: 1952606 - DNA, 15 bp, Homo sapiens
tagtggggtgtggtg

SEQ ID NO: 1952607 - DNA, 15 bp, Homo sapiens
agtggggtgtggtgg

SEQ ID NO: 1952608 - DNA, 15 bp, Homo sapiens
gtggggtgtggtggc

SEQ ID NO: 1952609 - DNA, 15 bp, Homo sapiens
tggggtgtggtggca

SEQ ID NO: 1952610 - DNA, 15 bp, Homo sapiens
ggggtgtggtggcag

SEQ ID NO: 1952611 - DNA, 15 bp, Homo sapiens
gtagtcccagctacc

SEQ ID NO: 1952612 - DNA, 15 bp, Homo sapiens
tagtcccagctaccc

SEQ ID NO: 1952613 - DNA, 15 bp, Homo sapiens
agtcccagctaccca

SEQ ID NO: 1952614 - DNA, 15 bp, Homo sapiens
gtcccagctacccag

SEQ ID NO: 1952615 - DNA, 15 bp, Homo sapiens
tcccagctacccagg

SEQ ID NO: 1952616 - DNA, 15 bp, Homo sapiens
cccagctacccagga

SEQ ID NO: 1952617 - DNA, 15 bp, Homo sapiens
ccagctacccaggag

SEQ ID NO: 1952618 - DNA, 15 bp, Homo sapiens
cagctacccaggagg

SEQ ID NO: 1952619 - DNA, 15 bp, Homo sapiens
agctacccaggaggc

SEQ ID NO: 1952620 - DNA, 15 bp, Homo sapiens
gctacccaggaggct

SEQ ID NO: 1952621 - DNA, 15 bp, Homo sapiens
ctacccaggaggctg

SEQ ID NO: 1952622 - DNA, 15 bp, Homo sapiens
tacccaggaggctga

SEQ ID NO: 1952623 - DNA, 15 bp, Homo sapiens
acccaggaggctgag

SEQ ID NO: 1952624 - DNA, 15 bp, Homo sapiens
cccaggaggctgagg

SEQ ID NO: 1952625 - DNA, 15 bp, Homo sapiens
ccaggaggctgaggc

SEQ ID NO: 1952626 - DNA, 15 bp, Homo sapiens
tgacagagcgagatt

SEQ ID NO: 1952627 - DNA, 15 bp, Homo sapiens
gacagagcgagattc

SEQ ID NO: 1952628 - DNA, 15 bp, Homo sapiens
acagagcgagattcc

SEQ ID NO: 1952629 - DNA, 15 bp, Homo sapiens
cagagcgagattccg

SEQ ID NO: 1952630 - DNA, 15 bp, Homo sapiens
agagcgagattccgt

SEQ ID NO: 1952631 - DNA, 15 bp, Homo sapiens
gagcgagattccgtc

SEQ ID NO: 1952632 - DNA, 15 bp, Homo sapiens
agcgagattccgtct

SEQ ID NO: 1952633 - DNA, 15 bp, Homo sapiens
gcgagattccgtctc

SEQ ID NO: 1952634 - DNA, 15 bp, Homo sapiens
cgagattccgtctca

SEQ ID NO: 1952635 - DNA, 15 bp, Homo sapiens
gagattccgtctcaa

SEQ ID NO: 1952636 - DNA, 15 bp, Homo sapiens
agattccgtctcaaa

SEQ ID NO: 1952637 - DNA, 15 bp, Homo sapiens
gattccgtctcaaaa

SEQ ID NO: 1952638 - DNA, 15 bp, Homo sapiens
attccgtctcaaaaa

SEQ ID NO: 1952639 - DNA, 15 bp, Homo sapiens
ttccgtctcaaaaaa

SEQ ID NO: 1952640 - DNA, 15 bp, Homo sapiens
aaaaaagaaaaaaag

SEQ ID NO: 1952641 - DNA, 15 bp, Homo sapiens
aaaagaaaaaaagaa

SEQ ID NO: 1952642 - DNA, 15 bp, Homo sapiens
aaagaaaaaaagaaa

SEQ ID NO: 1952643 - DNA, 15 bp, Homo sapiens
aagaaaaaaagaaaa

SEQ ID NO: 1952644 - DNA, 15 bp, Homo sapiens
agaaaaaaagaaaat

SEQ ID NO: 1952645 - DNA, 15 bp, Homo sapiens
gaaaaaaagaaaatg

SEQ ID NO: 1952646 - DNA, 15 bp, Homo sapiens
aaaaaaagaaaatga

SEQ ID NO: 1952647 - DNA, 15 bp, Homo sapiens
aaaaaagaaaatgac

SEQ ID NO: 1952648 - DNA, 15 bp, Homo sapiens
aaaaagaaaatgacc

SEQ ID NO: 1952649 - DNA, 15 bp, Homo sapiens
aaaagaaaatgacct

SEQ ID NO: 1952650 - DNA, 15 bp, Homo sapiens
aaagaaaatgacctg

SEQ ID NO: 1952651 - DNA, 15 bp, Homo sapiens
aagaaaatgacctga

SEQ ID NO: 1952652 - DNA, 15 bp, Homo sapiens
agaaaatgacctgaa

SEQ ID NO: 1952653 - DNA, 15 bp, Homo sapiens
aaatgacctgaacat

SEQ ID NO: 1952654 - DNA, 15 bp, Homo sapiens
aatgacctgaacata

SEQ ID NO: 1952655 - DNA, 15 bp, Homo sapiens
atgacctgaacataa

SEQ ID NO: 1952656 - DNA, 15 bp, Homo sapiens
tgacctgaacataag

SEQ ID NO: 1952657 - DNA, 15 bp, Homo sapiens
gacctgaacataagt

SEQ ID NO: 1952658 - DNA, 15 bp, Homo sapiens
acctgaacataagtg

SEQ ID NO: 1952659 - DNA, 15 bp, Homo sapiens
cctgaacataagtgt

SEQ ID NO: 1952660 - DNA, 15 bp, Homo sapiens
ctgaacataagtgtc

SEQ ID NO: 1952661 - DNA, 15 bp, Homo sapiens
tgaacataagtgtca

SEQ ID NO: 1952662 - DNA, 15 bp, Homo sapiens
gaacataagtgtcaa

SEQ ID NO: 1952663 - DNA, 15 bp, Homo sapiens
aacataagtgtcaat

SEQ ID NO: 1952664 - DNA, 15 bp, Homo sapiens
acataagtgtcaatt

SEQ ID NO: 1952665 - DNA, 15 bp, Homo sapiens
cataagtgtcaatta

SEQ ID NO: 1952666 - DNA, 15 bp, Homo sapiens
ataagtgtcaattag

SEQ ID NO: 1952667 - DNA, 15 bp, Homo sapiens
taagtgtcaattagg

SEQ ID NO: 1952668 - DNA, 15 bp, Homo sapiens
aagtgtcaattaggc

SEQ ID NO: 1952669 - DNA, 15 bp, Homo sapiens
agtgtcaattaggca

SEQ ID NO: 1952670 - DNA, 15 bp, Homo sapiens
gtgtcaattaggcag

SEQ ID NO: 1952671 - DNA, 15 bp, Homo sapiens
tgtcaattaggcagt

SEQ ID NO: 1952672 - DNA, 15 bp, Homo sapiens
gtcaattaggcagtt

SEQ ID NO: 1952673 - DNA, 15 bp, Homo sapiens
tcaattaggcagttt

SEQ ID NO: 1952674 - DNA, 15 bp, Homo sapiens
caattaggcagtttg

SEQ ID NO: 1952675 - DNA, 15 bp, Homo sapiens
aattaggcagtttgg

SEQ ID NO: 1952676 - DNA, 15 bp, Homo sapiens
attaggcagtttggg

SEQ ID NO: 1952677 - DNA, 15 bp, Homo sapiens
ttaggcagtttggga

SEQ ID NO: 1952678 - DNA, 15 bp, Homo sapiens
taggcagtttgggaa

SEQ ID NO: 1952679 - DNA, 15 bp, Homo sapiens
aggcagtttgggaaa

SEQ ID NO: 1952680 - DNA, 15 bp, Homo sapiens
ggcagtttgggaaat

SEQ ID NO: 1952681 - DNA, 15 bp, Homo sapiens
gcagtttgggaaata

SEQ ID NO: 1952682 - DNA, 15 bp, Homo sapiens
cagtttgggaaatag

SEQ ID NO: 1952683 - DNA, 15 bp, Homo sapiens
agtttgggaaatagc

SEQ ID NO: 1952684 - DNA, 15 bp, Homo sapiens
gtttgggaaatagct

SEQ ID NO: 1952685 - DNA, 15 bp, Homo sapiens
tttgggaaatagcta

SEQ ID NO: 1952686 - DNA, 15 bp, Homo sapiens
ttgggaaatagctag

SEQ ID NO: 1952687 - DNA, 15 bp, Homo sapiens
tgggaaatagctagc

SEQ ID NO: 1952688 - DNA, 15 bp, Homo sapiens
gggaaatagctagct

SEQ ID NO: 1952689 - DNA, 15 bp, Homo sapiens
ggaaatagctagcta

SEQ ID NO: 1952690 - DNA, 15 bp, Homo sapiens
gaaatagctagctaa

SEQ ID NO: 1952691 - DNA, 15 bp, Homo sapiens
aaatagctagctaag

SEQ ID NO: 1952692 - DNA, 15 bp, Homo sapiens
aatagctagctaagt

SEQ ID NO: 1952693 - DNA, 15 bp, Homo sapiens
atagctagctaagta

SEQ ID NO: 1952694 - DNA, 15 bp, Homo sapiens
tagctagctaagtag

SEQ ID NO: 1952695 - DNA, 15 bp, Homo sapiens
agctagctaagtagc

SEQ ID NO: 1952696 - DNA, 15 bp, Homo sapiens
gctagctaagtagca

SEQ ID NO: 1952697 - DNA, 15 bp, Homo sapiens
ctagctaagtagcat

SEQ ID NO: 1952698 - DNA, 15 bp, Homo sapiens
tagctaagtagcatt

SEQ ID NO: 1952699 - DNA, 15 bp, Homo sapiens
agctaagtagcattg

SEQ ID NO: 1952700 - DNA, 15 bp, Homo sapiens
gctaagtagcattgc

SEQ ID NO: 1952701 - DNA, 15 bp, Homo sapiens
ctaagtagcattgca

SEQ ID NO: 1952702 - DNA, 15 bp, Homo sapiens
taagtagcattgcat

SEQ ID NO: 1952703 - DNA, 15 bp, Homo sapiens
aagtagcattgcatt

SEQ ID NO: 1952704 - DNA, 15 bp, Homo sapiens
agtagcattgcattt

SEQ ID NO: 1952705 - DNA, 15 bp, Homo sapiens
gtagcattgcatttc

SEQ ID NO: 1952706 - DNA, 15 bp, Homo sapiens
tagcattgcatttca

SEQ ID NO: 1952707 - DNA, 15 bp, Homo sapiens
agcattgcatttcat

SEQ ID NO: 1952708 - DNA, 15 bp, Homo sapiens
gcattgcatttcata

SEQ ID NO: 1952709 - DNA, 15 bp, Homo sapiens
cattgcatttcatat

SEQ ID NO: 1952710 - DNA, 15 bp, Homo sapiens
attgcatttcatatt

SEQ ID NO: 1952711 - DNA, 15 bp, Homo sapiens
ttgcatttcatattt

SEQ ID NO: 1952712 - DNA, 15 bp, Homo sapiens
tgcatttcatatttc

SEQ ID NO: 1952713 - DNA, 15 bp, Homo sapiens
gcatttcatatttca

SEQ ID NO: 1952714 - DNA, 15 bp, Homo sapiens
catttcatatttcat

SEQ ID NO: 1952715 - DNA, 15 bp, Homo sapiens
atttcatatttcatt

SEQ ID NO: 1952716 - DNA, 15 bp, Homo sapiens
tttcatatttcattt

SEQ ID NO: 1952717 - DNA, 15 bp, Homo sapiens
ttcatatttcatttt

SEQ ID NO: 1952718 - DNA, 15 bp, Homo sapiens
tcatatttcattttt

SEQ ID NO: 1952719 - DNA, 15 bp, Homo sapiens
catatttcatttttt

SEQ ID NO: 1952720 - DNA, 15 bp, Homo sapiens
atatttcattttttt

SEQ ID NO: 1952721 - DNA, 15 bp, Homo sapiens
tatttcattttttta

SEQ ID NO: 1952722 - DNA, 15 bp, Homo sapiens
atttcatttttttaa

SEQ ID NO: 1952723 - DNA, 15 bp, Homo sapiens
tttcatttttttaac

SEQ ID NO: 1952724 - DNA, 15 bp, Homo sapiens
ttcatttttttaact

SEQ ID NO: 1952725 - DNA, 15 bp, Homo sapiens
tcatttttttaacta

SEQ ID NO: 1952726 - DNA, 15 bp, Homo sapiens
catttttttaactat

SEQ ID NO: 1952727 - DNA, 15 bp, Homo sapiens
atttttttaactatt

SEQ ID NO: 1952728 - DNA, 15 bp, Homo sapiens
tttttttaactatta

SEQ ID NO: 1952729 - DNA, 15 bp, Homo sapiens
ttttttaactattag

SEQ ID NO: 1952730 - DNA, 15 bp, Homo sapiens
tttttaactattaga

SEQ ID NO: 1952731 - DNA, 15 bp, Homo sapiens
ttttaactattagaa

SEQ ID NO: 1952732 - DNA, 15 bp, Homo sapiens
tttaactattagaac

SEQ ID NO: 1952733 - DNA, 15 bp, Homo sapiens
ttaactattagaact

SEQ ID NO: 1952734 - DNA, 15 bp, Homo sapiens
taactattagaactt

SEQ ID NO: 1952735 - DNA, 15 bp, Homo sapiens
aactattagaacttt

SEQ ID NO: 1952736 - DNA, 15 bp, Homo sapiens
actattagaacttta

SEQ ID NO: 1952737 - DNA, 15 bp, Homo sapiens
ctattagaactttac

SEQ ID NO: 1952738 - DNA, 15 bp, Homo sapiens
tattagaactttaca

SEQ ID NO: 1952739 - DNA, 15 bp, Homo sapiens
attagaactttacac

SEQ ID NO: 1952740 - DNA, 15 bp, Homo sapiens
ttagaactttacaca

SEQ ID NO: 1952741 - DNA, 15 bp, Homo sapiens
tagaactttacacaa

SEQ ID NO: 1952742 - DNA, 15 bp, Homo sapiens
agaactttacacaat

SEQ ID NO: 1952743 - DNA, 15 bp, Homo sapiens
gaactttacacaatg

SEQ ID NO: 1952744 - DNA, 15 bp, Homo sapiens
aactttacacaatgc

SEQ ID NO: 1952745 - DNA, 15 bp, Homo sapiens
actttacacaatgct

SEQ ID NO: 1952746 - DNA, 15 bp, Homo sapiens
ctttacacaatgctt

SEQ ID NO: 1952747 - DNA, 15 bp, Homo sapiens
tttacacaatgcttc

SEQ ID NO: 1952748 - DNA, 15 bp, Homo sapiens
ttacacaatgcttct

SEQ ID NO: 1952749 - DNA, 15 bp, Homo sapiens
tacacaatgcttctt

SEQ ID NO: 1952750 - DNA, 15 bp, Homo sapiens
acacaatgcttctta

SEQ ID NO: 1952751 - DNA, 15 bp, Homo sapiens
cacaatgcttcttaa

SEQ ID NO: 1952752 - DNA, 15 bp, Homo sapiens
acaatgcttcttaaa

SEQ ID NO: 1952753 - DNA, 15 bp, Homo sapiens
caatgcttcttaaac

SEQ ID NO: 1952754 - DNA, 15 bp, Homo sapiens
aatgcttcttaaacc

SEQ ID NO: 1952755 - DNA, 15 bp, Homo sapiens
atgcttcttaaaccg

SEQ ID NO: 1952756 - DNA, 15 bp, Homo sapiens
tgcttcttaaaccga

SEQ ID NO: 1952757 - DNA, 15 bp, Homo sapiens
gcttcttaaaccgaa

SEQ ID NO: 1952758 - DNA, 15 bp, Homo sapiens
cttcttaaaccgaag

SEQ ID NO: 1952759 - DNA, 15 bp, Homo sapiens
ttcttaaaccgaagt

SEQ ID NO: 1952760 - DNA, 15 bp, Homo sapiens
tcttaaaccgaagtg

SEQ ID NO: 1952761 - DNA, 15 bp, Homo sapiens
cttaaaccgaagtgc

SEQ ID NO: 1952762 - DNA, 15 bp, Homo sapiens
ttaaaccgaagtgca

SEQ ID NO: 1952763 - DNA, 15 bp, Homo sapiens
taaaccgaagtgcac

SEQ ID NO: 1952764 - DNA, 15 bp, Homo sapiens
aaaccgaagtgcaca

SEQ ID NO: 1952765 - DNA, 15 bp, Homo sapiens
aaccgaagtgcacat

SEQ ID NO: 1952766 - DNA, 15 bp, Homo sapiens
accgaagtgcacata

SEQ ID NO: 1952767 - DNA, 15 bp, Homo sapiens
ccgaagtgcacataa

SEQ ID NO: 1952768 - DNA, 15 bp, Homo sapiens
cgaagtgcacataag

SEQ ID NO: 1952769 - DNA, 15 bp, Homo sapiens
gaagtgcacataaga

SEQ ID NO: 1952770 - DNA, 15 bp, Homo sapiens
aagtgcacataagaa

SEQ ID NO: 1952771 - DNA, 15 bp, Homo sapiens
agtgcacataagaat

SEQ ID NO: 1952772 - DNA, 15 bp, Homo sapiens
gtgcacataagaatc

SEQ ID NO: 1952773 - DNA, 15 bp, Homo sapiens
tgcacataagaatca

SEQ ID NO: 1952774 - DNA, 15 bp, Homo sapiens
gcacataagaatcat

SEQ ID NO: 1952775 - DNA, 15 bp, Homo sapiens
cacataagaatcatc

SEQ ID NO: 1952776 - DNA, 15 bp, Homo sapiens
acataagaatcatct

SEQ ID NO: 1952777 - DNA, 15 bp, Homo sapiens
cataagaatcatctc

SEQ ID NO: 1952778 - DNA, 15 bp, Homo sapiens
ataagaatcatctca

SEQ ID NO: 1952779 - DNA, 15 bp, Homo sapiens
taagaatcatctcag

SEQ ID NO: 1952780 - DNA, 15 bp, Homo sapiens
aagaatcatctcaga

SEQ ID NO: 1952781 - DNA, 15 bp, Homo sapiens
agaatcatctcagag

SEQ ID NO: 1952782 - DNA, 15 bp, Homo sapiens
gaatcatctcagagc

SEQ ID NO: 1952783 - DNA, 15 bp, Homo sapiens
aatcatctcagagct

SEQ ID NO: 1952784 - DNA, 15 bp, Homo sapiens
atcatctcagagctt

SEQ ID NO: 1952785 - DNA, 15 bp, Homo sapiens
tcatctcagagcttc

SEQ ID NO: 1952786 - DNA, 15 bp, Homo sapiens
catctcagagcttct

SEQ ID NO: 1952787 - DNA, 15 bp, Homo sapiens
atctcagagcttctc

SEQ ID NO: 1952788 - DNA, 15 bp, Homo sapiens
tctcagagcttctcc

SEQ ID NO: 1952789 - DNA, 15 bp, Homo sapiens
ctcagagcttctcca

SEQ ID NO: 1952790 - DNA, 15 bp, Homo sapiens
tcagagcttctccaa

SEQ ID NO: 1952791 - DNA, 15 bp, Homo sapiens
cagagcttctccaaa

SEQ ID NO: 1952792 - DNA, 15 bp, Homo sapiens
agagcttctccaaaa

SEQ ID NO: 1952793 - DNA, 15 bp, Homo sapiens
gagcttctccaaaat

SEQ ID NO: 1952794 - DNA, 15 bp, Homo sapiens
agcttctccaaaatg

SEQ ID NO: 1952795 - DNA, 15 bp, Homo sapiens
gcttctccaaaatgc

SEQ ID NO: 1952796 - DNA, 15 bp, Homo sapiens
cttctccaaaatgca

SEQ ID NO: 1952797 - DNA, 15 bp, Homo sapiens
ttctccaaaatgcag

SEQ ID NO: 1952798 - DNA, 15 bp, Homo sapiens
tctccaaaatgcaga

SEQ ID NO: 1952799 - DNA, 15 bp, Homo sapiens
ctccaaaatgcagat

SEQ ID NO: 1952800 - DNA, 15 bp, Homo sapiens
tccaaaatgcagatt

SEQ ID NO: 1952801 - DNA, 15 bp, Homo sapiens
ccaaaatgcagattt

SEQ ID NO: 1952802 - DNA, 15 bp, Homo sapiens
caaaatgcagatttc

SEQ ID NO: 1952803 - DNA, 15 bp, Homo sapiens
aaaatgcagatttct

SEQ ID NO: 1952804 - DNA, 15 bp, Homo sapiens
aaatgcagatttctg

SEQ ID NO: 1952805 - DNA, 15 bp, Homo sapiens
aatgcagatttctgg

SEQ ID NO: 1952806 - DNA, 15 bp, Homo sapiens
atgcagatttctgga

SEQ ID NO: 1952807 - DNA, 15 bp, Homo sapiens
tgcagatttctggat

SEQ ID NO: 1952808 - DNA, 15 bp, Homo sapiens
gcagatttctggatc

SEQ ID NO: 1952809 - DNA, 15 bp, Homo sapiens
cagatttctggatcc

SEQ ID NO: 1952810 - DNA, 15 bp, Homo sapiens
agatttctggatccc

SEQ ID NO: 1952811 - DNA, 15 bp, Homo sapiens
gatttctggatccca

SEQ ID NO: 1952812 - DNA, 15 bp, Homo sapiens
atttctggatcccac

SEQ ID NO: 1952813 - DNA, 15 bp, Homo sapiens
tttctggatcccaca

SEQ ID NO: 1952814 - DNA, 15 bp, Homo sapiens
ttctggatcccacaa

SEQ ID NO: 1952815 - DNA, 15 bp, Homo sapiens
tctggatcccacaaa

SEQ ID NO: 1952816 - DNA, 15 bp, Homo sapiens
ctggatcccacaaac

SEQ ID NO: 1952817 - DNA, 15 bp, Homo sapiens
tggatcccacaaact

SEQ ID NO: 1952818 - DNA, 15 bp, Homo sapiens
ggatcccacaaactc

SEQ ID NO: 1952819 - DNA, 15 bp, Homo sapiens
gatcccacaaactca

SEQ ID NO: 1952820 - DNA, 15 bp, Homo sapiens
atcccacaaactcag

SEQ ID NO: 1952821 - DNA, 15 bp, Homo sapiens
tcccacaaactcaga

SEQ ID NO: 1952822 - DNA, 15 bp, Homo sapiens
cccacaaactcagat

SEQ ID NO: 1952823 - DNA, 15 bp, Homo sapiens
ccacaaactcagatg

SEQ ID NO: 1952824 - DNA, 15 bp, Homo sapiens
cacaaactcagatgc

SEQ ID NO: 1952825 - DNA, 15 bp, Homo sapiens
acaaactcagatgct

SEQ ID NO: 1952826 - DNA, 15 bp, Homo sapiens
caaactcagatgctg

SEQ ID NO: 1952827 - DNA, 15 bp, Homo sapiens
aaactcagatgctga

SEQ ID NO: 1952828 - DNA, 15 bp, Homo sapiens
aactcagatgctgat

SEQ ID NO: 1952829 - DNA, 15 bp, Homo sapiens
actcagatgctgatt

SEQ ID NO: 1952830 - DNA, 15 bp, Homo sapiens
ctcagatgctgatta

SEQ ID NO: 1952831 - DNA, 15 bp, Homo sapiens
tcagatgctgattat

SEQ ID NO: 1952832 - DNA, 15 bp, Homo sapiens
cagatgctgattata

SEQ ID NO: 1952833 - DNA, 15 bp, Homo sapiens
agatgctgattatag

SEQ ID NO: 1952834 - DNA, 15 bp, Homo sapiens
gatgctgattatagt

SEQ ID NO: 1952835 - DNA, 15 bp, Homo sapiens
atgctgattatagta

SEQ ID NO: 1952836 - DNA, 15 bp, Homo sapiens
tgctgattatagtaa

SEQ ID NO: 1952837 - DNA, 15 bp, Homo sapiens
gctgattatagtaaa

SEQ ID NO: 1952838 - DNA, 15 bp, Homo sapiens
ctgattatagtaaat

SEQ ID NO: 1952839 - DNA, 15 bp, Homo sapiens
tgattatagtaaatc

SEQ ID NO: 1952840 - DNA, 15 bp, Homo sapiens
gattatagtaaatca

SEQ ID NO: 1952841 - DNA, 15 bp, Homo sapiens
attatagtaaatcaa

SEQ ID NO: 1952842 - DNA, 15 bp, Homo sapiens
ttatagtaaatcaag

SEQ ID NO: 1952843 - DNA, 15 bp, Homo sapiens
tatagtaaatcaagg

SEQ ID NO: 1952844 - DNA, 15 bp, Homo sapiens
atagtaaatcaaggg

SEQ ID NO: 1952845 - DNA, 15 bp, Homo sapiens
tagtaaatcaagggt

SEQ ID NO: 1952846 - DNA, 15 bp, Homo sapiens
agtaaatcaagggtt

SEQ ID NO: 1952847 - DNA, 15 bp, Homo sapiens
gtaaatcaagggttg

SEQ ID NO: 1952848 - DNA, 15 bp, Homo sapiens
taaatcaagggttga

SEQ ID NO: 1952849 - DNA, 15 bp, Homo sapiens
aaatcaagggttgaa

SEQ ID NO: 1952850 - DNA, 15 bp, Homo sapiens
aatcaagggttgaaa

SEQ ID NO: 1952851 - DNA, 15 bp, Homo sapiens
atcaagggttgaaaa

SEQ ID NO: 1952852 - DNA, 15 bp, Homo sapiens
tcaagggttgaaaac

SEQ ID NO: 1952853 - DNA, 15 bp, Homo sapiens
caagggttgaaaacc

SEQ ID NO: 1952854 - DNA, 15 bp, Homo sapiens
aagggttgaaaacca

SEQ ID NO: 1952855 - DNA, 15 bp, Homo sapiens
agggttgaaaaccag

SEQ ID NO: 1952856 - DNA, 15 bp, Homo sapiens
gggttgaaaaccagg

SEQ ID NO: 1952857 - DNA, 15 bp, Homo sapiens
ggttgaaaaccaggg

SEQ ID NO: 1952858 - DNA, 15 bp, Homo sapiens
gttgaaaaccaggga

SEQ ID NO: 1952859 - DNA, 15 bp, Homo sapiens
ttgaaaaccagggaa

SEQ ID NO: 1952860 - DNA, 15 bp, Homo sapiens
tgaaaaccagggaac

SEQ ID NO: 1952861 - DNA, 15 bp, Homo sapiens
gaaaaccagggaact

SEQ ID NO: 1952862 - DNA, 15 bp, Homo sapiens
aaaaccagggaactg

SEQ ID NO: 1952863 - DNA, 15 bp, Homo sapiens
aaaccagggaactgt

SEQ ID NO: 1952864 - DNA, 15 bp, Homo sapiens
aaccagggaactgta

SEQ ID NO: 1952865 - DNA, 15 bp, Homo sapiens
accagggaactgtac

SEQ ID NO: 1952866 - DNA, 15 bp, Homo sapiens
ccagggaactgtact

SEQ ID NO: 1952867 - DNA, 15 bp, Homo sapiens
cagggaactgtactt

SEQ ID NO: 1952868 - DNA, 15 bp, Homo sapiens
agggaactgtacttc

SEQ ID NO: 1952869 - DNA, 15 bp, Homo sapiens
gggaactgtacttca

SEQ ID NO: 1952870 - DNA, 15 bp, Homo sapiens
ggaactgtacttcaa

SEQ ID NO: 1952871 - DNA, 15 bp, Homo sapiens
gaactgtacttcaac

SEQ ID NO: 1952872 - DNA, 15 bp, Homo sapiens
aactgtacttcaaca

SEQ ID NO: 1952873 - DNA, 15 bp, Homo sapiens
actgtacttcaacaa

SEQ ID NO: 1952874 - DNA, 15 bp, Homo sapiens
ctgtacttcaacaag

SEQ ID NO: 1952875 - DNA, 15 bp, Homo sapiens
tgtacttcaacaagc

SEQ ID NO: 1952876 - DNA, 15 bp, Homo sapiens
gtacttcaacaagca

SEQ ID NO: 1952877 - DNA, 15 bp, Homo sapiens
tacttcaacaagcac

SEQ ID NO: 1952878 - DNA, 15 bp, Homo sapiens
acttcaacaagcacc

SEQ ID NO: 1952879 - DNA, 15 bp, Homo sapiens
cttcaacaagcaccg

SEQ ID NO: 1952880 - DNA, 15 bp, Homo sapiens
ttcaacaagcaccgt

SEQ ID NO: 1952881 - DNA, 15 bp, Homo sapiens
tcaacaagcaccgtt

SEQ ID NO: 1952882 - DNA, 15 bp, Homo sapiens
caacaagcaccgtta

SEQ ID NO: 1952883 - DNA, 15 bp, Homo sapiens
aacaagcaccgttaa

SEQ ID NO: 1952884 - DNA, 15 bp, Homo sapiens
acaagcaccgttaag

SEQ ID NO: 1952885 - DNA, 15 bp, Homo sapiens
caagcaccgttaagt

SEQ ID NO: 1952886 - DNA, 15 bp, Homo sapiens
aagcaccgttaagtg

SEQ ID NO: 1952887 - DNA, 15 bp, Homo sapiens
agcaccgttaagtga

SEQ ID NO: 1952888 - DNA, 15 bp, Homo sapiens
gcaccgttaagtgat

SEQ ID NO: 1952889 - DNA, 15 bp, Homo sapiens
caccgttaagtgatt

SEQ ID NO: 1952890 - DNA, 15 bp, Homo sapiens
accgttaagtgattc

SEQ ID NO: 1952891 - DNA, 15 bp, Homo sapiens
ccgttaagtgattca

SEQ ID NO: 1952892 - DNA, 15 bp, Homo sapiens
cgttaagtgattcaa

SEQ ID NO: 1952893 - DNA, 15 bp, Homo sapiens
gttaagtgattcaaa

SEQ ID NO: 1952894 - DNA, 15 bp, Homo sapiens
ttaagtgattcaaat

SEQ ID NO: 1952895 - DNA, 15 bp, Homo sapiens
taagtgattcaaatt

SEQ ID NO: 1952896 - DNA, 15 bp, Homo sapiens
aagtgattcaaattt

SEQ ID NO: 1952897 - DNA, 15 bp, Homo sapiens
agtgattcaaatttg

SEQ ID NO: 1952898 - DNA, 15 bp, Homo sapiens
gtgattcaaatttga

SEQ ID NO: 1952899 - DNA, 15 bp, Homo sapiens
tgattcaaatttgag

SEQ ID NO: 1952900 - DNA, 15 bp, Homo sapiens
gattcaaatttgaga

SEQ ID NO: 1952901 - DNA, 15 bp, Homo sapiens
attcaaatttgagaa

SEQ ID NO: 1952902 - DNA, 15 bp, Homo sapiens
ttcaaatttgagaaa

SEQ ID NO: 1952903 - DNA, 15 bp, Homo sapiens
tcaaatttgagaaaa

SEQ ID NO: 1952904 - DNA, 15 bp, Homo sapiens
caaatttgagaaaag

SEQ ID NO: 1952905 - DNA, 15 bp, Homo sapiens
aaatttgagaaaagc

SEQ ID NO: 1952906 - DNA, 15 bp, Homo sapiens
aatttgagaaaagct

SEQ ID NO: 1952907 - DNA, 15 bp, Homo sapiens
atttgagaaaagctg

SEQ ID NO: 1952908 - DNA, 15 bp, Homo sapiens
tttgagaaaagctgg

SEQ ID NO: 1952909 - DNA, 15 bp, Homo sapiens
ttgagaaaagctggc

SEQ ID NO: 1952910 - DNA, 15 bp, Homo sapiens
tgagaaaagctggct

SEQ ID NO: 1952911 - DNA, 15 bp, Homo sapiens
gagaaaagctggctt

SEQ ID NO: 1952912 - DNA, 15 bp, Homo sapiens
agaaaagctggctta

SEQ ID NO: 1952913 - DNA, 15 bp, Homo sapiens
gaaaagctggcttaa

SEQ ID NO: 1952914 - DNA, 15 bp, Homo sapiens
aaaagctggcttaag

SEQ ID NO: 1952915 - DNA, 15 bp, Homo sapiens
aaagctggcttaagg

SEQ ID NO: 1952916 - DNA, 15 bp, Homo sapiens
aagctggcttaaggg

SEQ ID NO: 1952917 - DNA, 15 bp, Homo sapiens
agctggcttaagggt

SEQ ID NO: 1952918 - DNA, 15 bp, Homo sapiens
gctggcttaagggta

SEQ ID NO: 1952919 - DNA, 15 bp, Homo sapiens
ctggcttaagggtaa

SEQ ID NO: 1952920 - DNA, 15 bp, Homo sapiens
tggcttaagggtaaa

SEQ ID NO: 1952921 - DNA, 15 bp, Homo sapiens
ggcttaagggtaaat

SEQ ID NO: 1952922 - DNA, 15 bp, Homo sapiens
gcttaagggtaaata

SEQ ID NO: 1952923 - DNA, 15 bp, Homo sapiens
cttaagggtaaataa

SEQ ID NO: 1952924 - DNA, 15 bp, Homo sapiens
ttaagggtaaataaa

SEQ ID NO: 1952925 - DNA, 15 bp, Homo sapiens
taagggtaaataaat

SEQ ID NO: 1952926 - DNA, 15 bp, Homo sapiens
aagggtaaataaata

SEQ ID NO: 1952927 - DNA, 15 bp, Homo sapiens
agggtaaataaatag

SEQ ID NO: 1952928 - DNA, 15 bp, Homo sapiens
gggtaaataaatagt

SEQ ID NO: 1952929 - DNA, 15 bp, Homo sapiens
ggtaaataaatagta

SEQ ID NO: 1952930 - DNA, 15 bp, Homo sapiens
gtaaataaatagtac

SEQ ID NO: 1952931 - DNA, 15 bp, Homo sapiens
taaataaatagtaca

SEQ ID NO: 1952932 - DNA, 15 bp, Homo sapiens
aaataaatagtacaa

SEQ ID NO: 1952933 - DNA, 15 bp, Homo sapiens
aataaatagtacaat

SEQ ID NO: 1952934 - DNA, 15 bp, Homo sapiens
ataaatagtacaatt

SEQ ID NO: 1952935 - DNA, 15 bp, Homo sapiens
taaatagtacaattt

SEQ ID NO: 1952936 - DNA, 15 bp, Homo sapiens
aaatagtacaattta

SEQ ID NO: 1952937 - DNA, 15 bp, Homo sapiens
aatagtacaatttaa

SEQ ID NO: 1952938 - DNA, 15 bp, Homo sapiens
atagtacaatttaaa

SEQ ID NO: 1952939 - DNA, 15 bp, Homo sapiens
tagtacaatttaaaa

SEQ ID NO: 1952940 - DNA, 15 bp, Homo sapiens
agtacaatttaaaaa

SEQ ID NO: 1952941 - DNA, 15 bp, Homo sapiens
gtacaatttaaaaaa

SEQ ID NO: 1952942 - DNA, 15 bp, Homo sapiens
tacaatttaaaaaat

SEQ ID NO: 1952943 - DNA, 15 bp, Homo sapiens
acaatttaaaaaatc

SEQ ID NO: 1952944 - DNA, 15 bp, Homo sapiens
caatttaaaaaatct

SEQ ID NO: 1952945 - DNA, 15 bp, Homo sapiens
aatttaaaaaatctt

SEQ ID NO: 1952946 - DNA, 15 bp, Homo sapiens
atttaaaaaatctta

SEQ ID NO: 1952947 - DNA, 15 bp, Homo sapiens
tttaaaaaatcttac

SEQ ID NO: 1952948 - DNA, 15 bp, Homo sapiens
ttaaaaaatcttaca

SEQ ID NO: 1952949 - DNA, 15 bp, Homo sapiens
taaaaaatcttacag

SEQ ID NO: 1952950 - DNA, 15 bp, Homo sapiens
aaaaaatcttacaga

SEQ ID NO: 1952951 - DNA, 15 bp, Homo sapiens
tgtgagacaaaaaac

SEQ ID NO: 1952952 - DNA, 15 bp, Homo sapiens
gtgagacaaaaaaca

SEQ ID NO: 1952953 - DNA, 15 bp, Homo sapiens
tgagacaaaaaacat

SEQ ID NO: 1952954 - DNA, 15 bp, Homo sapiens
gagacaaaaaacata

SEQ ID NO: 1952955 - DNA, 15 bp, Homo sapiens
agacaaaaaacataa

SEQ ID NO: 1952956 - DNA, 15 bp, Homo sapiens
gacaaaaaacataat

SEQ ID NO: 1952957 - DNA, 15 bp, Homo sapiens
acaaaaaacataatt

SEQ ID NO: 1952958 - DNA, 15 bp, Homo sapiens
caaaaaacataattt

SEQ ID NO: 1952959 - DNA, 15 bp, Homo sapiens
aaaaaacataattta

SEQ ID NO: 1952960 - DNA, 15 bp, Homo sapiens
aaaaacataatttat

SEQ ID NO: 1952961 - DNA, 15 bp, Homo sapiens
aaaacataatttatt

SEQ ID NO: 1952962 - DNA, 15 bp, Homo sapiens
aaacataatttattg

SEQ ID NO: 1952963 - DNA, 15 bp, Homo sapiens
aacataatttattga

SEQ ID NO: 1952964 - DNA, 15 bp, Homo sapiens
acataatttattgac

SEQ ID NO: 1952965 - DNA, 15 bp, Homo sapiens
cataatttattgacc

SEQ ID NO: 1952966 - DNA, 15 bp, Homo sapiens
ataatttattgacct

SEQ ID NO: 1952967 - DNA, 15 bp, Homo sapiens
taatttattgacctt

SEQ ID NO: 1952968 - DNA, 15 bp, Homo sapiens
aatttattgaccttt

SEQ ID NO: 1952969 - DNA, 15 bp, Homo sapiens
atttattgacctttt

SEQ ID NO: 1952970 - DNA, 15 bp, Homo sapiens
tttattgaccttttt

SEQ ID NO: 1952971 - DNA, 15 bp, Homo sapiens
ttattgaccttttta

SEQ ID NO: 1952972 - DNA, 15 bp, Homo sapiens
tattgacctttttat

SEQ ID NO: 1952973 - DNA, 15 bp, Homo sapiens
attgacctttttatc

SEQ ID NO: 1952974 - DNA, 15 bp, Homo sapiens
ttgacctttttatcc

SEQ ID NO: 1952975 - DNA, 15 bp, Homo sapiens
tgacctttttatcca

SEQ ID NO: 1952976 - DNA, 15 bp, Homo sapiens
gacctttttatccat

SEQ ID NO: 1952977 - DNA, 15 bp, Homo sapiens
acctttttatccata

SEQ ID NO: 1952978 - DNA, 15 bp, Homo sapiens
cctttttatccatat

SEQ ID NO: 1952979 - DNA, 15 bp, Homo sapiens
ctttttatccatatg

SEQ ID NO: 1952980 - DNA, 15 bp, Homo sapiens
tttttatccatatga

SEQ ID NO: 1952981 - DNA, 15 bp, Homo sapiens
ttttatccatatgat

SEQ ID NO: 1952982 - DNA, 15 bp, Homo sapiens
tttatccatatgata

SEQ ID NO: 1952983 - DNA, 15 bp, Homo sapiens
ttatccatatgataa

SEQ ID NO: 1952984 - DNA, 15 bp, Homo sapiens
tatccatatgataat

SEQ ID NO: 1952985 - DNA, 15 bp, Homo sapiens
atccatatgataata

SEQ ID NO: 1952986 - DNA, 15 bp, Homo sapiens
tccatatgataataa

SEQ ID NO: 1952987 - DNA, 15 bp, Homo sapiens
ccatatgataataat

SEQ ID NO: 1952988 - DNA, 15 bp, Homo sapiens
catatgataataata

SEQ ID NO: 1952989 - DNA, 15 bp, Homo sapiens
atatgataataataa

SEQ ID NO: 1952990 - DNA, 15 bp, Homo sapiens
tatgataataataat

SEQ ID NO: 1952991 - DNA, 15 bp, Homo sapiens
atgataataataata

SEQ ID NO: 1952992 - DNA, 15 bp, Homo sapiens
tgataataataataa

SEQ ID NO: 1952993 - DNA, 15 bp, Homo sapiens
gataataataataat

SEQ ID NO: 1952994 - DNA, 15 bp, Homo sapiens
ataataataataatt

SEQ ID NO: 1952995 - DNA, 15 bp, Homo sapiens
taataataataattc

SEQ ID NO: 1952996 - DNA, 15 bp, Homo sapiens
aataataataattcc

SEQ ID NO: 1952997 - DNA, 15 bp, Homo sapiens
ataataataattccc

SEQ ID NO: 1952998 - DNA, 15 bp, Homo sapiens
taataataattccca

SEQ ID NO: 1952999 - DNA, 15 bp, Homo sapiens
aataataattcccaa

SEQ ID NO: 1953000 - DNA, 15 bp, Homo sapiens
ataataattcccaac

SEQ ID NO: 1953001 - DNA, 15 bp, Homo sapiens
taataattcccaact

SEQ ID NO: 1953002 - DNA, 15 bp, Homo sapiens
aataattcccaactc

SEQ ID NO: 1953003 - DNA, 15 bp, Homo sapiens
ataattcccaactct

SEQ ID NO: 1953004 - DNA, 15 bp, Homo sapiens
taattcccaactctt

SEQ ID NO: 1953005 - DNA, 15 bp, Homo sapiens
aattcccaactctta

SEQ ID NO: 1953006 - DNA, 15 bp, Homo sapiens
attcccaactcttat

SEQ ID NO: 1953007 - DNA, 15 bp, Homo sapiens
ttcccaactcttatt

SEQ ID NO: 1953008 - DNA, 15 bp, Homo sapiens
tcccaactcttatta

SEQ ID NO: 1953009 - DNA, 15 bp, Homo sapiens
cccaactcttattaa

SEQ ID NO: 1953010 - DNA, 15 bp, Homo sapiens
ccaactcttattaag

SEQ ID NO: 1953011 - DNA, 15 bp, Homo sapiens
caactcttattaagt

SEQ ID NO: 1953012 - DNA, 15 bp, Homo sapiens
aactcttattaagtg

SEQ ID NO: 1953013 - DNA, 15 bp, Homo sapiens
actcttattaagtgc

SEQ ID NO: 1953014 - DNA, 15 bp, Homo sapiens
ctcttattaagtgct

SEQ ID NO: 1953015 - DNA, 15 bp, Homo sapiens
tcttattaagtgctt

SEQ ID NO: 1953016 - DNA, 15 bp, Homo sapiens
cttattaagtgcttt

SEQ ID NO: 1953017 - DNA, 15 bp, Homo sapiens
ttattaagtgctttc

SEQ ID NO: 1953018 - DNA, 15 bp, Homo sapiens
tattaagtgctttct

SEQ ID NO: 1953019 - DNA, 15 bp, Homo sapiens
attaagtgctttctg

SEQ ID NO: 1953020 - DNA, 15 bp, Homo sapiens
ttaagtgctttctgt

SEQ ID NO: 1953021 - DNA, 15 bp, Homo sapiens
taagtgctttctgtg

SEQ ID NO: 1953022 - DNA, 15 bp, Homo sapiens
aagtgctttctgtgt

SEQ ID NO: 1953023 - DNA, 15 bp, Homo sapiens
agtgctttctgtgtg

SEQ ID NO: 1953024 - DNA, 15 bp, Homo sapiens
gtgctttctgtgtgc

SEQ ID NO: 1953025 - DNA, 15 bp, Homo sapiens
tgctttctgtgtgca

SEQ ID NO: 1953026 - DNA, 15 bp, Homo sapiens
gctttctgtgtgcat

SEQ ID NO: 1953027 - DNA, 15 bp, Homo sapiens
ctttctgtgtgcatt

SEQ ID NO: 1953028 - DNA, 15 bp, Homo sapiens
tttctgtgtgcattt

SEQ ID NO: 1953029 - DNA, 15 bp, Homo sapiens
ttctgtgtgcattta

SEQ ID NO: 1953030 - DNA, 15 bp, Homo sapiens
tctgtgtgcatttaa

SEQ ID NO: 1953031 - DNA, 15 bp, Homo sapiens
ctgtgtgcatttaag

SEQ ID NO: 1953032 - DNA, 15 bp, Homo sapiens
tgtgtgcatttaagt

SEQ ID NO: 1953033 - DNA, 15 bp, Homo sapiens
gtgtgcatttaagtt

SEQ ID NO: 1953034 - DNA, 15 bp, Homo sapiens
tgtgcatttaagttt

SEQ ID NO: 1953035 - DNA, 15 bp, Homo sapiens
gtgcatttaagtttt

SEQ ID NO: 1953036 - DNA, 15 bp, Homo sapiens
tgcatttaagttttt

SEQ ID NO: 1953037 - DNA, 15 bp, Homo sapiens
gcatttaagtttttt

SEQ ID NO: 1953038 - DNA, 15 bp, Homo sapiens
catttaagttttttt

SEQ ID NO: 1953039 - DNA, 15 bp, Homo sapiens
atttaagtttttttt

SEQ ID NO: 1953040 - DNA, 15 bp, Homo sapiens
tttaagtttttttta

SEQ ID NO: 1953041 - DNA, 15 bp, Homo sapiens
ttaagttttttttat

SEQ ID NO: 1953042 - DNA, 15 bp, Homo sapiens
taagttttttttatc

SEQ ID NO: 1953043 - DNA, 15 bp, Homo sapiens
aagttttttttatca

SEQ ID NO: 1953044 - DNA, 15 bp, Homo sapiens
agttttttttatcaa

SEQ ID NO: 1953045 - DNA, 15 bp, Homo sapiens
gttttttttatcaaa

SEQ ID NO: 1953046 - DNA, 15 bp, Homo sapiens
ttttttttatcaaac

SEQ ID NO: 1953047 - DNA, 15 bp, Homo sapiens
tttttttatcaaaca

SEQ ID NO: 1953048 - DNA, 15 bp, Homo sapiens
ttttttatcaaacat

SEQ ID NO: 1953049 - DNA, 15 bp, Homo sapiens
tttttatcaaacatc

SEQ ID NO: 1953050 - DNA, 15 bp, Homo sapiens
ttttatcaaacatca

SEQ ID NO: 1953051 - DNA, 15 bp, Homo sapiens
tttatcaaacatcat

SEQ ID NO: 1953052 - DNA, 15 bp, Homo sapiens
ttatcaaacatcatt

SEQ ID NO: 1953053 - DNA, 15 bp, Homo sapiens
tatcaaacatcattc

SEQ ID NO: 1953054 - DNA, 15 bp, Homo sapiens
atcaaacatcattct

SEQ ID NO: 1953055 - DNA, 15 bp, Homo sapiens
tcaaacatcattcta

SEQ ID NO: 1953056 - DNA, 15 bp, Homo sapiens
caaacatcattctaa

SEQ ID NO: 1953057 - DNA, 15 bp, Homo sapiens
aaacatcattctaaa

SEQ ID NO: 1953058 - DNA, 15 bp, Homo sapiens
aacatcattctaaac

SEQ ID NO: 1953059 - DNA, 15 bp, Homo sapiens
acatcattctaaact

SEQ ID NO: 1953060 - DNA, 15 bp, Homo sapiens
catcattctaaactc

SEQ ID NO: 1953061 - DNA, 15 bp, Homo sapiens
atcattctaaactct

SEQ ID NO: 1953062 - DNA, 15 bp, Homo sapiens
tcattctaaactctt

SEQ ID NO: 1953063 - DNA, 15 bp, Homo sapiens
cattctaaactcttc

SEQ ID NO: 1953064 - DNA, 15 bp, Homo sapiens
attctaaactcttca

SEQ ID NO: 1953065 - DNA, 15 bp, Homo sapiens
ttctaaactcttcat

SEQ ID NO: 1953066 - DNA, 15 bp, Homo sapiens
tctaaactcttcatt

SEQ ID NO: 1953067 - DNA, 15 bp, Homo sapiens
ctaaactcttcatta

SEQ ID NO: 1953068 - DNA, 15 bp, Homo sapiens
taaactcttcattaa

SEQ ID NO: 1953069 - DNA, 15 bp, Homo sapiens
aaactcttcattaaa

SEQ ID NO: 1953070 - DNA, 15 bp, Homo sapiens
aactcttcattaaag

SEQ ID NO: 1953071 - DNA, 15 bp, Homo sapiens
actcttcattaaagg

SEQ ID NO: 1953072 - DNA, 15 bp, Homo sapiens
ctcttcattaaaggt

SEQ ID NO: 1953073 - DNA, 15 bp, Homo sapiens
tcttcattaaaggtt

SEQ ID NO: 1953074 - DNA, 15 bp, Homo sapiens
cttcattaaaggttg

SEQ ID NO: 1953075 - DNA, 15 bp, Homo sapiens
ttcattaaaggttgg

SEQ ID NO: 1953076 - DNA, 15 bp, Homo sapiens
tcattaaaggttggc

SEQ ID NO: 1953077 - DNA, 15 bp, Homo sapiens
cattaaaggttggca

SEQ ID NO: 1953078 - DNA, 15 bp, Homo sapiens
attaaaggttggcag

SEQ ID NO: 1953079 - DNA, 15 bp, Homo sapiens
ttaaaggttggcaga

SEQ ID NO: 1953080 - DNA, 15 bp, Homo sapiens
taaaggttggcagaa

SEQ ID NO: 1953081 - DNA, 15 bp, Homo sapiens
aaaggttggcagaat

SEQ ID NO: 1953082 - DNA, 15 bp, Homo sapiens
aaggttggcagaatg

SEQ ID NO: 1953083 - DNA, 15 bp, Homo sapiens
aggttggcagaatga

SEQ ID NO: 1953084 - DNA, 15 bp, Homo sapiens
ggttggcagaatgag

SEQ ID NO: 1953085 - DNA, 15 bp, Homo sapiens
gttggcagaatgaga

SEQ ID NO: 1953086 - DNA, 15 bp, Homo sapiens
ttggcagaatgagac

SEQ ID NO: 1953087 - DNA, 15 bp, Homo sapiens
tggcagaatgagaca

SEQ ID NO: 1953088 - DNA, 15 bp, Homo sapiens
ggcagaatgagacat

SEQ ID NO: 1953089 - DNA, 15 bp, Homo sapiens
gcagaatgagacatt

SEQ ID NO: 1953090 - DNA, 15 bp, Homo sapiens
cagaatgagacatta

SEQ ID NO: 1953091 - DNA, 15 bp, Homo sapiens
agaatgagacattaa

SEQ ID NO: 1953092 - DNA, 15 bp, Homo sapiens
gaatgagacattaag

SEQ ID NO: 1953093 - DNA, 15 bp, Homo sapiens
aatgagacattaagc

SEQ ID NO: 1953094 - DNA, 15 bp, Homo sapiens
atgagacattaagca

SEQ ID NO: 1953095 - DNA, 15 bp, Homo sapiens
tgagacattaagcat

SEQ ID NO: 1953096 - DNA, 15 bp, Homo sapiens
gagacattaagcata

SEQ ID NO: 1953097 - DNA, 15 bp, Homo sapiens
agacattaagcatac

SEQ ID NO: 1953098 - DNA, 15 bp, Homo sapiens
gacattaagcatact

SEQ ID NO: 1953099 - DNA, 15 bp, Homo sapiens
acattaagcatacta

SEQ ID NO: 1953100 - DNA, 15 bp, Homo sapiens
cattaagcatactac

SEQ ID NO: 1953101 - DNA, 15 bp, Homo sapiens
attaagcatactacc

SEQ ID NO: 1953102 - DNA, 15 bp, Homo sapiens
ttaagcatactacct

SEQ ID NO: 1953103 - DNA, 15 bp, Homo sapiens
taagcatactaccta

SEQ ID NO: 1953104 - DNA, 15 bp, Homo sapiens
aagcatactacctag

SEQ ID NO: 1953105 - DNA, 15 bp, Homo sapiens
agcatactacctagg

SEQ ID NO: 1953106 - DNA, 15 bp, Homo sapiens
gcatactacctaggg

SEQ ID NO: 1953107 - DNA, 15 bp, Homo sapiens
catactacctagggc

SEQ ID NO: 1953108 - DNA, 15 bp, Homo sapiens
atactacctagggca

SEQ ID NO: 1953109 - DNA, 15 bp, Homo sapiens
tactacctagggcat

SEQ ID NO: 1953110 - DNA, 15 bp, Homo sapiens
actacctagggcata

SEQ ID NO: 1953111 - DNA, 15 bp, Homo sapiens
ctacctagggcatag

SEQ ID NO: 1953112 - DNA, 15 bp, Homo sapiens
tacctagggcatagt

SEQ ID NO: 1953113 - DNA, 15 bp, Homo sapiens
acctagggcatagtt

SEQ ID NO: 1953114 - DNA, 15 bp, Homo sapiens
cctagggcatagtta

SEQ ID NO: 1953115 - DNA, 15 bp, Homo sapiens
ctagggcatagttaa

SEQ ID NO: 1953116 - DNA, 15 bp, Homo sapiens
tagggcatagttaac

SEQ ID NO: 1953117 - DNA, 15 bp, Homo sapiens
agggcatagttaacc

SEQ ID NO: 1953118 - DNA, 15 bp, Homo sapiens
gggcatagttaaccc

SEQ ID NO: 1953119 - DNA, 15 bp, Homo sapiens
ggcatagttaaccct

SEQ ID NO: 1953120 - DNA, 15 bp, Homo sapiens
gcatagttaaccctg

SEQ ID NO: 1953121 - DNA, 15 bp, Homo sapiens
catagttaaccctgt

SEQ ID NO: 1953122 - DNA, 15 bp, Homo sapiens
atagttaaccctgta

SEQ ID NO: 1953123 - DNA, 15 bp, Homo sapiens
tagttaaccctgtaa

SEQ ID NO: 1953124 - DNA, 15 bp, Homo sapiens
agttaaccctgtaaa

SEQ ID NO: 1953125 - DNA, 15 bp, Homo sapiens
gttaaccctgtaaaa

SEQ ID NO: 1953126 - DNA, 15 bp, Homo sapiens
ttaaccctgtaaaat

SEQ ID NO: 1953127 - DNA, 15 bp, Homo sapiens
taaccctgtaaaatg

SEQ ID NO: 1953128 - DNA, 15 bp, Homo sapiens
aaccctgtaaaatgt

SEQ ID NO: 1953129 - DNA, 15 bp, Homo sapiens
accctgtaaaatgta

SEQ ID NO: 1953130 - DNA, 15 bp, Homo sapiens
ccctgtaaaatgtaa

SEQ ID NO: 1953131 - DNA, 15 bp, Homo sapiens
cctgtaaaatgtaaa

SEQ ID NO: 1953132 - DNA, 15 bp, Homo sapiens
ctgtaaaatgtaaat

SEQ ID NO: 1953133 - DNA, 15 bp, Homo sapiens
tgtaaaatgtaaatg

SEQ ID NO: 1953134 - DNA, 15 bp, Homo sapiens
gtaaaatgtaaatga

SEQ ID NO: 1953135 - DNA, 15 bp, Homo sapiens
taaaatgtaaatgaa

SEQ ID NO: 1953136 - DNA, 15 bp, Homo sapiens
aaaatgtaaatgaat

SEQ ID NO: 1953137 - DNA, 15 bp, Homo sapiens
aaatgtaaatgaatg

SEQ ID NO: 1953138 - DNA, 15 bp, Homo sapiens
aatgtaaatgaatga

SEQ ID NO: 1953139 - DNA, 15 bp, Homo sapiens
atgtaaatgaatgaa

SEQ ID NO: 1953140 - DNA, 15 bp, Homo sapiens
tgtaaatgaatgaat

SEQ ID NO: 1953141 - DNA, 15 bp, Homo sapiens
gtaaatgaatgaata

SEQ ID NO: 1953142 - DNA, 15 bp, Homo sapiens
taaatgaatgaataa

SEQ ID NO: 1953143 - DNA, 15 bp, Homo sapiens
aaatgaatgaataat

SEQ ID NO: 1953144 - DNA, 15 bp, Homo sapiens
aatgaatgaataata

SEQ ID NO: 1953145 - DNA, 15 bp, Homo sapiens
atgaatgaataataa

SEQ ID NO: 1953146 - DNA, 15 bp, Homo sapiens
tgaatgaataataaa

SEQ ID NO: 1953147 - DNA, 15 bp, Homo sapiens
gaatgaataataaat

SEQ ID NO: 1953148 - DNA, 15 bp, Homo sapiens
aatgaataataaata

SEQ ID NO: 1953149 - DNA, 15 bp, Homo sapiens
atgaataataaatat

SEQ ID NO: 1953150 - DNA, 15 bp, Homo sapiens
tgaataataaatatc

SEQ ID NO: 1953151 - DNA, 15 bp, Homo sapiens
gaataataaatatct

SEQ ID NO: 1953152 - DNA, 15 bp, Homo sapiens
aataataaatatcta

SEQ ID NO: 1953153 - DNA, 15 bp, Homo sapiens
ataataaatatctat

SEQ ID NO: 1953154 - DNA, 15 bp, Homo sapiens
taataaatatctatt

SEQ ID NO: 1953155 - DNA, 15 bp, Homo sapiens
aataaatatctattc

SEQ ID NO: 1953156 - DNA, 15 bp, Homo sapiens
ataaatatctattcc

SEQ ID NO: 1953157 - DNA, 15 bp, Homo sapiens
taaatatctattcca

SEQ ID NO: 1953158 - DNA, 15 bp, Homo sapiens
aaatatctattccaa

SEQ ID NO: 1953159 - DNA, 15 bp, Homo sapiens
aatatctattccaat

SEQ ID NO: 1953160 - DNA, 15 bp, Homo sapiens
tatctattccaatct

SEQ ID NO: 1953161 - DNA, 15 bp, Homo sapiens
atctattccaatctt

SEQ ID NO: 1953162 - DNA, 15 bp, Homo sapiens
tctattccaatcttg

SEQ ID NO: 1953163 - DNA, 15 bp, Homo sapiens
ctattccaatcttgg

SEQ ID NO: 1953164 - DNA, 15 bp, Homo sapiens
tattccaatcttggt

SEQ ID NO: 1953165 - DNA, 15 bp, Homo sapiens
attccaatcttggtc

SEQ ID NO: 1953166 - DNA, 15 bp, Homo sapiens
ttccaatcttggtct

SEQ ID NO: 1953167 - DNA, 15 bp, Homo sapiens
tccaatcttggtctt

SEQ ID NO: 1953168 - DNA, 15 bp, Homo sapiens
ccaatcttggtctta

SEQ ID NO: 1953169 - DNA, 15 bp, Homo sapiens
caatcttggtcttaa

SEQ ID NO: 1953170 - DNA, 15 bp, Homo sapiens
aatcttggtcttaaa

SEQ ID NO: 1953171 - DNA, 15 bp, Homo sapiens
atcttggtcttaaaa

SEQ ID NO: 1953172 - DNA, 15 bp, Homo sapiens
tcttggtcttaaaaa

SEQ ID NO: 1953173 - DNA, 15 bp, Homo sapiens
cttggtcttaaaaac

SEQ ID NO: 1953174 - DNA, 15 bp, Homo sapiens
ttggtcttaaaaact

SEQ ID NO: 1953175 - DNA, 15 bp, Homo sapiens
tggtcttaaaaactt

SEQ ID NO: 1953176 - DNA, 15 bp, Homo sapiens
ggtcttaaaaactta

SEQ ID NO: 1953177 - DNA, 15 bp, Homo sapiens
gtcttaaaaacttat

SEQ ID NO: 1953178 - DNA, 15 bp, Homo sapiens
tcttaaaaacttatg

SEQ ID NO: 1953179 - DNA, 15 bp, Homo sapiens
cttaaaaacttatga

SEQ ID NO: 1953180 - DNA, 15 bp, Homo sapiens
ttaaaaacttatgat

SEQ ID NO: 1953181 - DNA, 15 bp, Homo sapiens
taaaaacttatgatg

SEQ ID NO: 1953182 - DNA, 15 bp, Homo sapiens
aaaaacttatgatga

SEQ ID NO: 1953183 - DNA, 15 bp, Homo sapiens
aaaacttatgatgaa

SEQ ID NO: 1953184 - DNA, 15 bp, Homo sapiens
aaacttatgatgaag

SEQ ID NO: 1953185 - DNA, 15 bp, Homo sapiens
aacttatgatgaaga

SEQ ID NO: 1953186 - DNA, 15 bp, Homo sapiens
acttatgatgaagat

SEQ ID NO: 1953187 - DNA, 15 bp, Homo sapiens
cttatgatgaagata

SEQ ID NO: 1953188 - DNA, 15 bp, Homo sapiens
ttatgatgaagataa

SEQ ID NO: 1953189 - DNA, 15 bp, Homo sapiens
tatgatgaagataag

SEQ ID NO: 1953190 - DNA, 15 bp, Homo sapiens
atgatgaagataagg

SEQ ID NO: 1953191 - DNA, 15 bp, Homo sapiens
tgatgaagataaggt

SEQ ID NO: 1953192 - DNA, 15 bp, Homo sapiens
gatgaagataaggta

SEQ ID NO: 1953193 - DNA, 15 bp, Homo sapiens
atgaagataaggtaa

SEQ ID NO: 1953194 - DNA, 15 bp, Homo sapiens
tgaagataaggtaat

SEQ ID NO: 1953195 - DNA, 15 bp, Homo sapiens
gaagataaggtaatg

SEQ ID NO: 1953196 - DNA, 15 bp, Homo sapiens
aagataaggtaatgt

SEQ ID NO: 1953197 - DNA, 15 bp, Homo sapiens
agataaggtaatgta

SEQ ID NO: 1953198 - DNA, 15 bp, Homo sapiens
gataaggtaatgtac

SEQ ID NO: 1953199 - DNA, 15 bp, Homo sapiens
ataaggtaatgtact

SEQ ID NO: 1953200 - DNA, 15 bp, Homo sapiens
taaggtaatgtactt

SEQ ID NO: 1953201 - DNA, 15 bp, Homo sapiens
aaggtaatgtactta

SEQ ID NO: 1953202 - DNA, 15 bp, Homo sapiens
aggtaatgtacttaa

SEQ ID NO: 1953203 - DNA, 15 bp, Homo sapiens
ggtaatgtacttaaa

SEQ ID NO: 1953204 - DNA, 15 bp, Homo sapiens
gtaatgtacttaaat

SEQ ID NO: 1953205 - DNA, 15 bp, Homo sapiens
taatgtacttaaata

SEQ ID NO: 1953206 - DNA, 15 bp, Homo sapiens
aatgtacttaaatat

SEQ ID NO: 1953207 - DNA, 15 bp, Homo sapiens
atgtacttaaatatt

SEQ ID NO: 1953208 - DNA, 15 bp, Homo sapiens
tgtacttaaatatta

SEQ ID NO: 1953209 - DNA, 15 bp, Homo sapiens
gtacttaaatattat

SEQ ID NO: 1953210 - DNA, 15 bp, Homo sapiens
tacttaaatattata

SEQ ID NO: 1953211 - DNA, 15 bp, Homo sapiens
acttaaatattatat

SEQ ID NO: 1953212 - DNA, 15 bp, Homo sapiens
cttaaatattatata

SEQ ID NO: 1953213 - DNA, 15 bp, Homo sapiens
ttaaatattatatac

SEQ ID NO: 1953214 - DNA, 15 bp, Homo sapiens
taaatattatatact

SEQ ID NO: 1953215 - DNA, 15 bp, Homo sapiens
aaatattatatacta

SEQ ID NO: 1953216 - DNA, 15 bp, Homo sapiens
aatattatatactac

SEQ ID NO: 1953217 - DNA, 15 bp, Homo sapiens
atattatatactact

SEQ ID NO: 1953218 - DNA, 15 bp, Homo sapiens
tattatatactactc

SEQ ID NO: 1953219 - DNA, 15 bp, Homo sapiens
attatatactactct

SEQ ID NO: 1953220 - DNA, 15 bp, Homo sapiens
ttatatactactctt

SEQ ID NO: 1953221 - DNA, 15 bp, Homo sapiens
tatatactactcttt

SEQ ID NO: 1953222 - DNA, 15 bp, Homo sapiens
atatactactcttta

SEQ ID NO: 1953223 - DNA, 15 bp, Homo sapiens
tatactactctttaa

SEQ ID NO: 1953224 - DNA, 15 bp, Homo sapiens
atactactctttaaa

SEQ ID NO: 1953225 - DNA, 15 bp, Homo sapiens
tactactctttaaac

SEQ ID NO: 1953226 - DNA, 15 bp, Homo sapiens
actactctttaaaca

SEQ ID NO: 1953227 - DNA, 15 bp, Homo sapiens
ctactctttaaacag

SEQ ID NO: 1953228 - DNA, 15 bp, Homo sapiens
tactctttaaacaga

SEQ ID NO: 1953229 - DNA, 15 bp, Homo sapiens
actctttaaacagat

SEQ ID NO: 1953230 - DNA, 15 bp, Homo sapiens
ctctttaaacagata

SEQ ID NO: 1953231 - DNA, 15 bp, Homo sapiens
tctttaaacagatag

SEQ ID NO: 1953232 - DNA, 15 bp, Homo sapiens
ctttaaacagataga

SEQ ID NO: 1953233 - DNA, 15 bp, Homo sapiens
tttaaacagatagac

SEQ ID NO: 1953234 - DNA, 15 bp, Homo sapiens
ttaaacagatagaca

SEQ ID NO: 1953235 - DNA, 15 bp, Homo sapiens
taaacagatagacag

SEQ ID NO: 1953236 - DNA, 15 bp, Homo sapiens
aaacagatagacagc

SEQ ID NO: 1953237 - DNA, 15 bp, Homo sapiens
aacagatagacagca

SEQ ID NO: 1953238 - DNA, 15 bp, Homo sapiens
acagatagacagcag

SEQ ID NO: 1953239 - DNA, 15 bp, Homo sapiens
cagatagacagcaga

SEQ ID NO: 1953240 - DNA, 15 bp, Homo sapiens
agatagacagcagaa

SEQ ID NO: 1953241 - DNA, 15 bp, Homo sapiens
gatagacagcagaaa

SEQ ID NO: 1953242 - DNA, 15 bp, Homo sapiens
atagacagcagaaaa

SEQ ID NO: 1953243 - DNA, 15 bp, Homo sapiens
tagacagcagaaaaa

SEQ ID NO: 1953244 - DNA, 15 bp, Homo sapiens
agacagcagaaaaat

SEQ ID NO: 1953245 - DNA, 15 bp, Homo sapiens
gacagcagaaaaatt

SEQ ID NO: 1953246 - DNA, 15 bp, Homo sapiens
acagcagaaaaatta

SEQ ID NO: 1953247 - DNA, 15 bp, Homo sapiens
cagcagaaaaattac

SEQ ID NO: 1953248 - DNA, 15 bp, Homo sapiens
agcagaaaaattact

SEQ ID NO: 1953249 - DNA, 15 bp, Homo sapiens
gcagaaaaattactg

SEQ ID NO: 1953250 - DNA, 15 bp, Homo sapiens
cagaaaaattactgt

SEQ ID NO: 1953251 - DNA, 15 bp, Homo sapiens
agaaaaattactgtg

SEQ ID NO: 1953252 - DNA, 15 bp, Homo sapiens
gaaaaattactgtgt

SEQ ID NO: 1953253 - DNA, 15 bp, Homo sapiens
aaaaattactgtgtt

SEQ ID NO: 1953254 - DNA, 15 bp, Homo sapiens
aaaattactgtgttc

SEQ ID NO: 1953255 - DNA, 15 bp, Homo sapiens
aaattactgtgttca

SEQ ID NO: 1953256 - DNA, 15 bp, Homo sapiens
aattactgtgttcac

SEQ ID NO: 1953257 - DNA, 15 bp, Homo sapiens
attactgtgttcact

SEQ ID NO: 1953258 - DNA, 15 bp, Homo sapiens
ttactgtgttcacta

SEQ ID NO: 1953259 - DNA, 15 bp, Homo sapiens
tactgtgttcactat

SEQ ID NO: 1953260 - DNA, 15 bp, Homo sapiens
actgtgttcactatc

SEQ ID NO: 1953261 - DNA, 15 bp, Homo sapiens
ctgtgttcactatca

SEQ ID NO: 1953262 - DNA, 15 bp, Homo sapiens
tgtgttcactatcaa

SEQ ID NO: 1953263 - DNA, 15 bp, Homo sapiens
gtgttcactatcaaa

SEQ ID NO: 1953264 - DNA, 15 bp, Homo sapiens
tgttcactatcaaat

SEQ ID NO: 1953265 - DNA, 15 bp, Homo sapiens
gttcactatcaaatt

SEQ ID NO: 1953266 - DNA, 15 bp, Homo sapiens
ttcactatcaaatta

SEQ ID NO: 1953267 - DNA, 15 bp, Homo sapiens
tcactatcaaattac

SEQ ID NO: 1953268 - DNA, 15 bp, Homo sapiens
cactatcaaattacc

SEQ ID NO: 1953269 - DNA, 15 bp, Homo sapiens
actatcaaattaccc

SEQ ID NO: 1953270 - DNA, 15 bp, Homo sapiens
ctatcaaattaccct

SEQ ID NO: 1953271 - DNA, 15 bp, Homo sapiens
tatcaaattacccta

SEQ ID NO: 1953272 - DNA, 15 bp, Homo sapiens
atcaaattaccctaa

SEQ ID NO: 1953273 - DNA, 15 bp, Homo sapiens
tcaaattaccctaaa

SEQ ID NO: 1953274 - DNA, 15 bp, Homo sapiens
caaattaccctaaaa

SEQ ID NO: 1953275 - DNA, 15 bp, Homo sapiens
aaattaccctaaaac

SEQ ID NO: 1953276 - DNA, 15 bp, Homo sapiens
aattaccctaaaaca

SEQ ID NO: 1953277 - DNA, 15 bp, Homo sapiens
attaccctaaaacat

SEQ ID NO: 1953278 - DNA, 15 bp, Homo sapiens
ttaccctaaaacata

SEQ ID NO: 1953279 - DNA, 15 bp, Homo sapiens
taccctaaaacatag

SEQ ID NO: 1953280 - DNA, 15 bp, Homo sapiens
accctaaaacatagc

SEQ ID NO: 1953281 - DNA, 15 bp, Homo sapiens
ccctaaaacatagca

SEQ ID NO: 1953282 - DNA, 15 bp, Homo sapiens
cctaaaacatagcaa

SEQ ID NO: 1953283 - DNA, 15 bp, Homo sapiens
ctaaaacatagcaac

SEQ ID NO: 1953284 - DNA, 15 bp, Homo sapiens
taaaacatagcaact

SEQ ID NO: 1953285 - DNA, 15 bp, Homo sapiens
aaaacatagcaactt

SEQ ID NO: 1953286 - DNA, 15 bp, Homo sapiens
aaacatagcaactta

SEQ ID NO: 1953287 - DNA, 15 bp, Homo sapiens
aacatagcaacttaa

SEQ ID NO: 1953288 - DNA, 15 bp, Homo sapiens
acatagcaacttaaa

SEQ ID NO: 1953289 - DNA, 15 bp, Homo sapiens
catagcaacttaaaa

SEQ ID NO: 1953290 - DNA, 15 bp, Homo sapiens
atagcaacttaaaac

SEQ ID NO: 1953291 - DNA, 15 bp, Homo sapiens
tagcaacttaaaaca

SEQ ID NO: 1953292 - DNA, 15 bp, Homo sapiens
agcaacttaaaacaa

SEQ ID NO: 1953293 - DNA, 15 bp, Homo sapiens
gcaacttaaaacaac

SEQ ID NO: 1953294 - DNA, 15 bp, Homo sapiens
caacttaaaacaaca

SEQ ID NO: 1953295 - DNA, 15 bp, Homo sapiens
aacttaaaacaacag

SEQ ID NO: 1953296 - DNA, 15 bp, Homo sapiens
acttaaaacaacaga

SEQ ID NO: 1953297 - DNA, 15 bp, Homo sapiens
cttaaaacaacagac

SEQ ID NO: 1953298 - DNA, 15 bp, Homo sapiens
ttaaaacaacagacg

SEQ ID NO: 1953299 - DNA, 15 bp, Homo sapiens
taaaacaacagacgt

SEQ ID NO: 1953300 - DNA, 15 bp, Homo sapiens
aaaacaacagacgtt

SEQ ID NO: 1953301 - DNA, 15 bp, Homo sapiens
aaacaacagacgttt

SEQ ID NO: 1953302 - DNA, 15 bp, Homo sapiens
aacaacagacgtttt

SEQ ID NO: 1953303 - DNA, 15 bp, Homo sapiens
acaacagacgttttt

SEQ ID NO: 1953304 - DNA, 15 bp, Homo sapiens
caacagacgtttttt

SEQ ID NO: 1953305 - DNA, 15 bp, Homo sapiens
aacagacgtttttta

SEQ ID NO: 1953306 - DNA, 15 bp, Homo sapiens
acagacgttttttat

SEQ ID NO: 1953307 - DNA, 15 bp, Homo sapiens
cagacgttttttatc

SEQ ID NO: 1953308 - DNA, 15 bp, Homo sapiens
agacgttttttatct

SEQ ID NO: 1953309 - DNA, 15 bp, Homo sapiens
gacgttttttatctc

SEQ ID NO: 1953310 - DNA, 15 bp, Homo sapiens
acgttttttatctca

SEQ ID NO: 1953311 - DNA, 15 bp, Homo sapiens
cgttttttatctcac

SEQ ID NO: 1953312 - DNA, 15 bp, Homo sapiens
gttttttatctcaca

SEQ ID NO: 1953313 - DNA, 15 bp, Homo sapiens
ttttttatctcacac

SEQ ID NO: 1953314 - DNA, 15 bp, Homo sapiens
tttttatctcacaca

SEQ ID NO: 1953315 - DNA, 15 bp, Homo sapiens
ttttatctcacacag

SEQ ID NO: 1953316 - DNA, 15 bp, Homo sapiens
tttatctcacacagt

SEQ ID NO: 1953317 - DNA, 15 bp, Homo sapiens
ttatctcacacagtt

SEQ ID NO: 1953318 - DNA, 15 bp, Homo sapiens
tatctcacacagttt

SEQ ID NO: 1953319 - DNA, 15 bp, Homo sapiens
atctcacacagtttc

SEQ ID NO: 1953320 - DNA, 15 bp, Homo sapiens
tctcacacagtttct

SEQ ID NO: 1953321 - DNA, 15 bp, Homo sapiens
ctcacacagtttctg

SEQ ID NO: 1953322 - DNA, 15 bp, Homo sapiens
tcacacagtttctga

SEQ ID NO: 1953323 - DNA, 15 bp, Homo sapiens
cacacagtttctgaa

SEQ ID NO: 1953324 - DNA, 15 bp, Homo sapiens
acacagtttctgaat

SEQ ID NO: 1953325 - DNA, 15 bp, Homo sapiens
cacagtttctgaatt

SEQ ID NO: 1953326 - DNA, 15 bp, Homo sapiens
acagtttctgaatta

SEQ ID NO: 1953327 - DNA, 15 bp, Homo sapiens
cagtttctgaattag

SEQ ID NO: 1953328 - DNA, 15 bp, Homo sapiens
agtttctgaattagg

SEQ ID NO: 1953329 - DNA, 15 bp, Homo sapiens
gtttctgaattagga

SEQ ID NO: 1953330 - DNA, 15 bp, Homo sapiens
tttctgaattaggaa

SEQ ID NO: 1953331 - DNA, 15 bp, Homo sapiens
ttctgaattaggaag

SEQ ID NO: 1953332 - DNA, 15 bp, Homo sapiens
tctgaattaggaagt

SEQ ID NO: 1953333 - DNA, 15 bp, Homo sapiens
ctgaattaggaagta

SEQ ID NO: 1953334 - DNA, 15 bp, Homo sapiens
tgaattaggaagtaa

SEQ ID NO: 1953335 - DNA, 15 bp, Homo sapiens
gaattaggaagtaag

SEQ ID NO: 1953336 - DNA, 15 bp, Homo sapiens
aattaggaagtaagg

SEQ ID NO: 1953337 - DNA, 15 bp, Homo sapiens
attaggaagtaagga

SEQ ID NO: 1953338 - DNA, 15 bp, Homo sapiens
ttaggaagtaaggaa

SEQ ID NO: 1953339 - DNA, 15 bp, Homo sapiens
taggaagtaaggaat

SEQ ID NO: 1953340 - DNA, 15 bp, Homo sapiens
aggaagtaaggaatc

SEQ ID NO: 1953341 - DNA, 15 bp, Homo sapiens
ggaagtaaggaatct

SEQ ID NO: 1953342 - DNA, 15 bp, Homo sapiens
gaagtaaggaatctg

SEQ ID NO: 1953343 - DNA, 15 bp, Homo sapiens
aagtaaggaatctgg

SEQ ID NO: 1953344 - DNA, 15 bp, Homo sapiens
agtaaggaatctgga

SEQ ID NO: 1953345 - DNA, 15 bp, Homo sapiens
gtaaggaatctggaa

SEQ ID NO: 1953346 - DNA, 15 bp, Homo sapiens
taaggaatctggaag

SEQ ID NO: 1953347 - DNA, 15 bp, Homo sapiens
aaggaatctggaagt

SEQ ID NO: 1953348 - DNA, 15 bp, Homo sapiens
aggaatctggaagta

SEQ ID NO: 1953349 - DNA, 15 bp, Homo sapiens
ggaatctggaagtag

SEQ ID NO: 1953350 - DNA, 15 bp, Homo sapiens
gaatctggaagtagc

SEQ ID NO: 1953351 - DNA, 15 bp, Homo sapiens
aatctggaagtagct

SEQ ID NO: 1953352 - DNA, 15 bp, Homo sapiens
atctggaagtagctt

SEQ ID NO: 1953353 - DNA, 15 bp, Homo sapiens
tctggaagtagctta

SEQ ID NO: 1953354 - DNA, 15 bp, Homo sapiens
ctggaagtagcttag

SEQ ID NO: 1953355 - DNA, 15 bp, Homo sapiens
tggaagtagcttagc

SEQ ID NO: 1953356 - DNA, 15 bp, Homo sapiens
ggaagtagcttagct

SEQ ID NO: 1953357 - DNA, 15 bp, Homo sapiens
gaagtagcttagctg

SEQ ID NO: 1953358 - DNA, 15 bp, Homo sapiens
aagtagcttagctgt

SEQ ID NO: 1953359 - DNA, 15 bp, Homo sapiens
agtagcttagctgta

SEQ ID NO: 1953360 - DNA, 15 bp, Homo sapiens
gtagcttagctgtaa

SEQ ID NO: 1953361 - DNA, 15 bp, Homo sapiens
tagcttagctgtaat

SEQ ID NO: 1953362 - DNA, 15 bp, Homo sapiens
agcttagctgtaatt

SEQ ID NO: 1953363 - DNA, 15 bp, Homo sapiens
gcttagctgtaattc

SEQ ID NO: 1953364 - DNA, 15 bp, Homo sapiens
cttagctgtaattct

SEQ ID NO: 1953365 - DNA, 15 bp, Homo sapiens
ttagctgtaattcta

SEQ ID NO: 1953366 - DNA, 15 bp, Homo sapiens
tagctgtaattctaa

SEQ ID NO: 1953367 - DNA, 15 bp, Homo sapiens
agctgtaattctaaa

SEQ ID NO: 1953368 - DNA, 15 bp, Homo sapiens
gctgtaattctaaat

SEQ ID NO: 1953369 - DNA, 15 bp, Homo sapiens
ctgtaattctaaatt

SEQ ID NO: 1953370 - DNA, 15 bp, Homo sapiens
tgtaattctaaatta

SEQ ID NO: 1953371 - DNA, 15 bp, Homo sapiens
gtaattctaaattat

SEQ ID NO: 1953372 - DNA, 15 bp, Homo sapiens
taattctaaattatt

SEQ ID NO: 1953373 - DNA, 15 bp, Homo sapiens
aattctaaattattt

SEQ ID NO: 1953374 - DNA, 15 bp, Homo sapiens
attctaaattatttt

SEQ ID NO: 1953375 - DNA, 15 bp, Homo sapiens
ttctaaattattttt

SEQ ID NO: 1953376 - DNA, 15 bp, Homo sapiens
tctaaattatttttg

SEQ ID NO: 1953377 - DNA, 15 bp, Homo sapiens
ctaaattatttttgg

SEQ ID NO: 1953378 - DNA, 15 bp, Homo sapiens
taaattatttttggt

SEQ ID NO: 1953379 - DNA, 15 bp, Homo sapiens
aaattatttttggta

SEQ ID NO: 1953380 - DNA, 15 bp, Homo sapiens
aattatttttggtaa

SEQ ID NO: 1953381 - DNA, 15 bp, Homo sapiens
attatttttggtaaa

SEQ ID NO: 1953382 - DNA, 15 bp, Homo sapiens
ttatttttggtaaaa

SEQ ID NO: 1953383 - DNA, 15 bp, Homo sapiens
tatttttggtaaaat

SEQ ID NO: 1953384 - DNA, 15 bp, Homo sapiens
atttttggtaaaatt

SEQ ID NO: 1953385 - DNA, 15 bp, Homo sapiens
tttttggtaaaatta

SEQ ID NO: 1953386 - DNA, 15 bp, Homo sapiens
ttttggtaaaattat

SEQ ID NO: 1953387 - DNA, 15 bp, Homo sapiens
tttggtaaaattatg

SEQ ID NO: 1953388 - DNA, 15 bp, Homo sapiens
ttggtaaaattatgc

SEQ ID NO: 1953389 - DNA, 15 bp, Homo sapiens
tggtaaaattatgcc

SEQ ID NO: 1953390 - DNA, 15 bp, Homo sapiens
ggtaaaattatgcca

SEQ ID NO: 1953391 - DNA, 15 bp, Homo sapiens
gtaaaattatgccac

SEQ ID NO: 1953392 - DNA, 15 bp, Homo sapiens
taaaattatgccact

SEQ ID NO: 1953393 - DNA, 15 bp, Homo sapiens
aaaattatgccactt

SEQ ID NO: 1953394 - DNA, 15 bp, Homo sapiens
aaattatgccactta

SEQ ID NO: 1953395 - DNA, 15 bp, Homo sapiens
aattatgccacttag

SEQ ID NO: 1953396 - DNA, 15 bp, Homo sapiens
attatgccacttaga

SEQ ID NO: 1953397 - DNA, 15 bp, Homo sapiens
ttatgccacttagaa

SEQ ID NO: 1953398 - DNA, 15 bp, Homo sapiens
tatgccacttagaaa

SEQ ID NO: 1953399 - DNA, 15 bp, Homo sapiens
atgccacttagaaag

SEQ ID NO: 1953400 - DNA, 15 bp, Homo sapiens
tgccacttagaaaga

SEQ ID NO: 1953401 - DNA, 15 bp, Homo sapiens
gccacttagaaagat

SEQ ID NO: 1953402 - DNA, 15 bp, Homo sapiens
ccacttagaaagata

SEQ ID NO: 1953403 - DNA, 15 bp, Homo sapiens
cacttagaaagataa

SEQ ID NO: 1953404 - DNA, 15 bp, Homo sapiens
acttagaaagataag

SEQ ID NO: 1953405 - DNA, 15 bp, Homo sapiens
cttagaaagataagt

SEQ ID NO: 1953406 - DNA, 15 bp, Homo sapiens
ttagaaagataagtc

SEQ ID NO: 1953407 - DNA, 15 bp, Homo sapiens
tagaaagataagtct

SEQ ID NO: 1953408 - DNA, 15 bp, Homo sapiens
agaaagataagtcta

SEQ ID NO: 1953409 - DNA, 15 bp, Homo sapiens
gaaagataagtctat

SEQ ID NO: 1953410 - DNA, 15 bp, Homo sapiens
aaagataagtctata

SEQ ID NO: 1953411 - DNA, 15 bp, Homo sapiens
aagataagtctatag

SEQ ID NO: 1953412 - DNA, 15 bp, Homo sapiens
agataagtctataga

SEQ ID NO: 1953413 - DNA, 15 bp, Homo sapiens
gataagtctatagat

SEQ ID NO: 1953414 - DNA, 15 bp, Homo sapiens
ataagtctatagatt

SEQ ID NO: 1953415 - DNA, 15 bp, Homo sapiens
taagtctatagatta

SEQ ID NO: 1953416 - DNA, 15 bp, Homo sapiens
aagtctatagattag

SEQ ID NO: 1953417 - DNA, 15 bp, Homo sapiens
agtctatagattagg

SEQ ID NO: 1953418 - DNA, 15 bp, Homo sapiens
gtctatagattaggg

SEQ ID NO: 1953419 - DNA, 15 bp, Homo sapiens
tctatagattagggt

SEQ ID NO: 1953420 - DNA, 15 bp, Homo sapiens
ctatagattagggtt

SEQ ID NO: 1953421 - DNA, 15 bp, Homo sapiens
tatagattagggtta

SEQ ID NO: 1953422 - DNA, 15 bp, Homo sapiens
atagattagggttat

SEQ ID NO: 1953423 - DNA, 15 bp, Homo sapiens
tagattagggttata

SEQ ID NO: 1953424 - DNA, 15 bp, Homo sapiens
agattagggttatag

SEQ ID NO: 1953425 - DNA, 15 bp, Homo sapiens
gattagggttatagt

SEQ ID NO: 1953426 - DNA, 15 bp, Homo sapiens
attagggttatagtg

SEQ ID NO: 1953427 - DNA, 15 bp, Homo sapiens
ttagggttatagtgg

SEQ ID NO: 1953428 - DNA, 15 bp, Homo sapiens
tagggttatagtgga

SEQ ID NO: 1953429 - DNA, 15 bp, Homo sapiens
agggttatagtggaa

SEQ ID NO: 1953430 - DNA, 15 bp, Homo sapiens
gggttatagtggaat

SEQ ID NO: 1953431 - DNA, 15 bp, Homo sapiens
ggttatagtggaata

SEQ ID NO: 1953432 - DNA, 15 bp, Homo sapiens
gttatagtggaataa

SEQ ID NO: 1953433 - DNA, 15 bp, Homo sapiens
ttatagtggaataaa

SEQ ID NO: 1953434 - DNA, 15 bp, Homo sapiens
tatagtggaataaac

SEQ ID NO: 1953435 - DNA, 15 bp, Homo sapiens
atagtggaataaaca

SEQ ID NO: 1953436 - DNA, 15 bp, Homo sapiens
tagtggaataaacat

SEQ ID NO: 1953437 - DNA, 15 bp, Homo sapiens
agtggaataaacatt

SEQ ID NO: 1953438 - DNA, 15 bp, Homo sapiens
gtggaataaacatta

SEQ ID NO: 1953439 - DNA, 15 bp, Homo sapiens
tggaataaacattag

SEQ ID NO: 1953440 - DNA, 15 bp, Homo sapiens
ggaataaacattagc

SEQ ID NO: 1953441 - DNA, 15 bp, Homo sapiens
gaataaacattagct

SEQ ID NO: 1953442 - DNA, 15 bp, Homo sapiens
aataaacattagctc

SEQ ID NO: 1953443 - DNA, 15 bp, Homo sapiens
ataaacattagctcg

SEQ ID NO: 1953444 - DNA, 15 bp, Homo sapiens
taaacattagctcgt

SEQ ID NO: 1953445 - DNA, 15 bp, Homo sapiens
aaacattagctcgtt

SEQ ID NO: 1953446 - DNA, 15 bp, Homo sapiens
aacattagctcgtta

SEQ ID NO: 1953447 - DNA, 15 bp, Homo sapiens
acattagctcgttag

SEQ ID NO: 1953448 - DNA, 15 bp, Homo sapiens
cattagctcgttagc

SEQ ID NO: 1953449 - DNA, 15 bp, Homo sapiens
attagctcgttagca

SEQ ID NO: 1953450 - DNA, 15 bp, Homo sapiens
ttagctcgttagcag

SEQ ID NO: 1953451 - DNA, 15 bp, Homo sapiens
tagctcgttagcagg

SEQ ID NO: 1953452 - DNA, 15 bp, Homo sapiens
agctcgttagcagga

SEQ ID NO: 1953453 - DNA, 15 bp, Homo sapiens
gctcgttagcaggaa

SEQ ID NO: 1953454 - DNA, 15 bp, Homo sapiens
ctcgttagcaggaac

SEQ ID NO: 1953455 - DNA, 15 bp, Homo sapiens
tcgttagcaggaacc

SEQ ID NO: 1953456 - DNA, 15 bp, Homo sapiens
cgttagcaggaaccc

SEQ ID NO: 1953457 - DNA, 15 bp, Homo sapiens
gttagcaggaaccct

SEQ ID NO: 1953458 - DNA, 15 bp, Homo sapiens
ttagcaggaaccctg

SEQ ID NO: 1953459 - DNA, 15 bp, Homo sapiens
tagcaggaaccctgc

SEQ ID NO: 1953460 - DNA, 15 bp, Homo sapiens
agcaggaaccctgca

SEQ ID NO: 1953461 - DNA, 15 bp, Homo sapiens
gcaggaaccctgcag

SEQ ID NO: 1953462 - DNA, 15 bp, Homo sapiens
caggaaccctgcaga

SEQ ID NO: 1953463 - DNA, 15 bp, Homo sapiens
aggaaccctgcagaa

SEQ ID NO: 1953464 - DNA, 15 bp, Homo sapiens
ggaaccctgcagaat

SEQ ID NO: 1953465 - DNA, 15 bp, Homo sapiens
gaaccctgcagaatt

SEQ ID NO: 1953466 - DNA, 15 bp, Homo sapiens
aaccctgcagaatta

SEQ ID NO: 1953467 - DNA, 15 bp, Homo sapiens
accctgcagaattat

SEQ ID NO: 1953468 - DNA, 15 bp, Homo sapiens
ccctgcagaattata

SEQ ID NO: 1953469 - DNA, 15 bp, Homo sapiens
cctgcagaattatag

SEQ ID NO: 1953470 - DNA, 15 bp, Homo sapiens
ctgcagaattatagt

SEQ ID NO: 1953471 - DNA, 15 bp, Homo sapiens
tgcagaattatagtg

SEQ ID NO: 1953472 - DNA, 15 bp, Homo sapiens
gcagaattatagtgg

SEQ ID NO: 1953473 - DNA, 15 bp, Homo sapiens
cagaattatagtggg

SEQ ID NO: 1953474 - DNA, 15 bp, Homo sapiens
agaattatagtgggg

SEQ ID NO: 1953475 - DNA, 15 bp, Homo sapiens
gaattatagtgggga

SEQ ID NO: 1953476 - DNA, 15 bp, Homo sapiens
aattatagtggggaa

SEQ ID NO: 1953477 - DNA, 15 bp, Homo sapiens
attatagtggggaac

SEQ ID NO: 1953478 - DNA, 15 bp, Homo sapiens
ttatagtggggaact

SEQ ID NO: 1953479 - DNA, 15 bp, Homo sapiens
tatagtggggaactt

SEQ ID NO: 1953480 - DNA, 15 bp, Homo sapiens
atagtggggaacttt

SEQ ID NO: 1953481 - DNA, 15 bp, Homo sapiens
tagtggggaactttt

SEQ ID NO: 1953482 - DNA, 15 bp, Homo sapiens
agtggggaacttttt

SEQ ID NO: 1953483 - DNA, 15 bp, Homo sapiens
gtggggaacttttta

SEQ ID NO: 1953484 - DNA, 15 bp, Homo sapiens
tggggaactttttat

SEQ ID NO: 1953485 - DNA, 15 bp, Homo sapiens
ggggaactttttata

SEQ ID NO: 1953486 - DNA, 15 bp, Homo sapiens
gggaactttttataa

SEQ ID NO: 1953487 - DNA, 15 bp, Homo sapiens
ggaactttttataag

SEQ ID NO: 1953488 - DNA, 15 bp, Homo sapiens
gaactttttataaga

SEQ ID NO: 1953489 - DNA, 15 bp, Homo sapiens
aactttttataagaa

SEQ ID NO: 1953490 - DNA, 15 bp, Homo sapiens
actttttataagaat

SEQ ID NO: 1953491 - DNA, 15 bp, Homo sapiens
ctttttataagaata

SEQ ID NO: 1953492 - DNA, 15 bp, Homo sapiens
tttttataagaatac

SEQ ID NO: 1953493 - DNA, 15 bp, Homo sapiens
ttttataagaatact

SEQ ID NO: 1953494 - DNA, 15 bp, Homo sapiens
tttataagaatactg

SEQ ID NO: 1953495 - DNA, 15 bp, Homo sapiens
ttataagaatactgg

SEQ ID NO: 1953496 - DNA, 15 bp, Homo sapiens
tataagaatactggg

SEQ ID NO: 1953497 - DNA, 15 bp, Homo sapiens
ataagaatactggga

SEQ ID NO: 1953498 - DNA, 15 bp, Homo sapiens
taagaatactgggat

SEQ ID NO: 1953499 - DNA, 15 bp, Homo sapiens
aagaatactgggatt

SEQ ID NO: 1953500 - DNA, 15 bp, Homo sapiens
agaatactgggattt

SEQ ID NO: 1953501 - DNA, 15 bp, Homo sapiens
gaatactgggatttg

SEQ ID NO: 1953502 - DNA, 15 bp, Homo sapiens
aatactgggatttga

SEQ ID NO: 1953503 - DNA, 15 bp, Homo sapiens
atactgggatttgat

SEQ ID NO: 1953504 - DNA, 15 bp, Homo sapiens
tactgggatttgata

SEQ ID NO: 1953505 - DNA, 15 bp, Homo sapiens
actgggatttgatat

SEQ ID NO: 1953506 - DNA, 15 bp, Homo sapiens
ctgggatttgatata

SEQ ID NO: 1953507 - DNA, 15 bp, Homo sapiens
tgggatttgatatat

SEQ ID NO: 1953508 - DNA, 15 bp, Homo sapiens
gggatttgatatatt

SEQ ID NO: 1953509 - DNA, 15 bp, Homo sapiens
ggatttgatatattt

SEQ ID NO: 1953510 - DNA, 15 bp, Homo sapiens
gatttgatatatttg

SEQ ID NO: 1953511 - DNA, 15 bp, Homo sapiens
atttgatatatttga

SEQ ID NO: 1953512 - DNA, 15 bp, Homo sapiens
tttgatatatttgat

SEQ ID NO: 1953513 - DNA, 15 bp, Homo sapiens
ttgatatatttgata

SEQ ID NO: 1953514 - DNA, 15 bp, Homo sapiens
tgatatatttgataa

SEQ ID NO: 1953515 - DNA, 15 bp, Homo sapiens
gatatatttgataag

SEQ ID NO: 1953516 - DNA, 15 bp, Homo sapiens
atatatttgataaga

SEQ ID NO: 1953517 - DNA, 15 bp, Homo sapiens
tatatttgataagaa

SEQ ID NO: 1953518 - DNA, 15 bp, Homo sapiens
atatttgataagaat

SEQ ID NO: 1953519 - DNA, 15 bp, Homo sapiens
tatttgataagaata

SEQ ID NO: 1953520 - DNA, 15 bp, Homo sapiens
atttgataagaatag

SEQ ID NO: 1953521 - DNA, 15 bp, Homo sapiens
tttgataagaatagt

SEQ ID NO: 1953522 - DNA, 15 bp, Homo sapiens
ttgataagaatagtg

SEQ ID NO: 1953523 - DNA, 15 bp, Homo sapiens
tgataagaatagtgt

SEQ ID NO: 1953524 - DNA, 15 bp, Homo sapiens
gataagaatagtgta

SEQ ID NO: 1953525 - DNA, 15 bp, Homo sapiens
ataagaatagtgtat

SEQ ID NO: 1953526 - DNA, 15 bp, Homo sapiens
taagaatagtgtatt

SEQ ID NO: 1953527 - DNA, 15 bp, Homo sapiens
aagaatagtgtattt

SEQ ID NO: 1953528 - DNA, 15 bp, Homo sapiens
agaatagtgtatttg

SEQ ID NO: 1953529 - DNA, 15 bp, Homo sapiens
gaatagtgtatttga

SEQ ID NO: 1953530 - DNA, 15 bp, Homo sapiens
aatagtgtatttgac

SEQ ID NO: 1953531 - DNA, 15 bp, Homo sapiens
atagtgtatttgaca

SEQ ID NO: 1953532 - DNA, 15 bp, Homo sapiens
tagtgtatttgacag

SEQ ID NO: 1953533 - DNA, 15 bp, Homo sapiens
agtgtatttgacaga

SEQ ID NO: 1953534 - DNA, 15 bp, Homo sapiens
gtgtatttgacagac

SEQ ID NO: 1953535 - DNA, 15 bp, Homo sapiens
tgtatttgacagaca

SEQ ID NO: 1953536 - DNA, 15 bp, Homo sapiens
gtatttgacagacat

SEQ ID NO: 1953537 - DNA, 15 bp, Homo sapiens
tatttgacagacatc

SEQ ID NO: 1953538 - DNA, 15 bp, Homo sapiens
atttgacagacatct

SEQ ID NO: 1953539 - DNA, 15 bp, Homo sapiens
tttgacagacatctt

SEQ ID NO: 1953540 - DNA, 15 bp, Homo sapiens
ttgacagacatctta

SEQ ID NO: 1953541 - DNA, 15 bp, Homo sapiens
tgacagacatcttac

SEQ ID NO: 1953542 - DNA, 15 bp, Homo sapiens
gacagacatcttaca

SEQ ID NO: 1953543 - DNA, 15 bp, Homo sapiens
acagacatcttacaa

SEQ ID NO: 1953544 - DNA, 15 bp, Homo sapiens
cagacatcttacaac

SEQ ID NO: 1953545 - DNA, 15 bp, Homo sapiens
agacatcttacaaca

SEQ ID NO: 1953546 - DNA, 15 bp, Homo sapiens
gacatcttacaacaa

SEQ ID NO: 1953547 - DNA, 15 bp, Homo sapiens
acatcttacaacaaa

SEQ ID NO: 1953548 - DNA, 15 bp, Homo sapiens
catcttacaacaaaa

SEQ ID NO: 1953549 - DNA, 15 bp, Homo sapiens
atcttacaacaaaaa

SEQ ID NO: 1953550 - DNA, 15 bp, Homo sapiens
tcttacaacaaaaag

SEQ ID NO: 1953551 - DNA, 15 bp, Homo sapiens
cttacaacaaaaagt

SEQ ID NO: 1953552 - DNA, 15 bp, Homo sapiens
ttacaacaaaaagtg

SEQ ID NO: 1953553 - DNA, 15 bp, Homo sapiens
tacaacaaaaagtga

SEQ ID NO: 1953554 - DNA, 15 bp, Homo sapiens
acaacaaaaagtgag

SEQ ID NO: 1953555 - DNA, 15 bp, Homo sapiens
caacaaaaagtgagc

SEQ ID NO: 1953556 - DNA, 15 bp, Homo sapiens
aacaaaaagtgagca

SEQ ID NO: 1953557 - DNA, 15 bp, Homo sapiens
acaaaaagtgagcaa

SEQ ID NO: 1953558 - DNA, 15 bp, Homo sapiens
caaaaagtgagcaaa

SEQ ID NO: 1953559 - DNA, 15 bp, Homo sapiens
aaaaagtgagcaaag

SEQ ID NO: 1953560 - DNA, 15 bp, Homo sapiens
aaaagtgagcaaagt

SEQ ID NO: 1953561 - DNA, 15 bp, Homo sapiens
aaagtgagcaaagtc

SEQ ID NO: 1953562 - DNA, 15 bp, Homo sapiens
aagtgagcaaagtcc

SEQ ID NO: 1953563 - DNA, 15 bp, Homo sapiens
agtgagcaaagtcca

SEQ ID NO: 1953564 - DNA, 15 bp, Homo sapiens
gtgagcaaagtccaa

SEQ ID NO: 1953565 - DNA, 15 bp, Homo sapiens
tgagcaaagtccaag

SEQ ID NO: 1953566 - DNA, 15 bp, Homo sapiens
gagcaaagtccaagt

SEQ ID NO: 1953567 - DNA, 15 bp, Homo sapiens
agcaaagtccaagtg

SEQ ID NO: 1953568 - DNA, 15 bp, Homo sapiens
gcaaagtccaagtgt

SEQ ID NO: 1953569 - DNA, 15 bp, Homo sapiens
caaagtccaagtgtc

SEQ ID NO: 1953570 - DNA, 15 bp, Homo sapiens
aaagtccaagtgtct

SEQ ID NO: 1953571 - DNA, 15 bp, Homo sapiens
aagtccaagtgtctg

SEQ ID NO: 1953572 - DNA, 15 bp, Homo sapiens
agtccaagtgtctgc

SEQ ID NO: 1953573 - DNA, 15 bp, Homo sapiens
gtccaagtgtctgct

SEQ ID NO: 1953574 - DNA, 15 bp, Homo sapiens
tccaagtgtctgctt

SEQ ID NO: 1953575 - DNA, 15 bp, Homo sapiens
ccaagtgtctgcttt

SEQ ID NO: 1953576 - DNA, 15 bp, Homo sapiens
caagtgtctgctttc

SEQ ID NO: 1953577 - DNA, 15 bp, Homo sapiens
aagtgtctgctttct

SEQ ID NO: 1953578 - DNA, 15 bp, Homo sapiens
agtgtctgctttctt

SEQ ID NO: 1953579 - DNA, 15 bp, Homo sapiens
gtgtctgctttcttt

SEQ ID NO: 1953580 - DNA, 15 bp, Homo sapiens
tgtctgctttctttg

SEQ ID NO: 1953581 - DNA, 15 bp, Homo sapiens
gtctgctttctttgg

SEQ ID NO: 1953582 - DNA, 15 bp, Homo sapiens
tctgctttctttggg

SEQ ID NO: 1953583 - DNA, 15 bp, Homo sapiens
ctgctttctttgggg

SEQ ID NO: 1953584 - DNA, 15 bp, Homo sapiens
tgctttctttgggga

SEQ ID NO: 1953585 - DNA, 15 bp, Homo sapiens
gctttctttggggag

SEQ ID NO: 1953586 - DNA, 15 bp, Homo sapiens
ctttctttggggagg

SEQ ID NO: 1953587 - DNA, 15 bp, Homo sapiens
tttctttggggaggg

SEQ ID NO: 1953588 - DNA, 15 bp, Homo sapiens
ttctttggggagggg

SEQ ID NO: 1953589 - DNA, 15 bp, Homo sapiens
tctttggggagggga

SEQ ID NO: 1953590 - DNA, 15 bp, Homo sapiens
ctttggggaggggaa

SEQ ID NO: 1953591 - DNA, 15 bp, Homo sapiens
tttggggaggggaat

SEQ ID NO: 1953592 - DNA, 15 bp, Homo sapiens
ttggggaggggaatg

SEQ ID NO: 1953593 - DNA, 15 bp, Homo sapiens
tggggaggggaatga

SEQ ID NO: 1953594 - DNA, 15 bp, Homo sapiens
ggggaggggaatgaa

SEQ ID NO: 1953595 - DNA, 15 bp, Homo sapiens
gggaggggaatgaag

SEQ ID NO: 1953596 - DNA, 15 bp, Homo sapiens
ggaggggaatgaaga

SEQ ID NO: 1953597 - DNA, 15 bp, Homo sapiens
gaggggaatgaagag

SEQ ID NO: 1953598 - DNA, 15 bp, Homo sapiens
aggggaatgaagagt

SEQ ID NO: 1953599 - DNA, 15 bp, Homo sapiens
ggggaatgaagagtc

SEQ ID NO: 1953600 - DNA, 15 bp, Homo sapiens
gggaatgaagagtct

SEQ ID NO: 1953601 - DNA, 15 bp, Homo sapiens
ggaatgaagagtctt

SEQ ID NO: 1953602 - DNA, 15 bp, Homo sapiens
gaatgaagagtcttc

SEQ ID NO: 1953603 - DNA, 15 bp, Homo sapiens
aatgaagagtcttcc

SEQ ID NO: 1953604 - DNA, 15 bp, Homo sapiens
atgaagagtcttcca

SEQ ID NO: 1953605 - DNA, 15 bp, Homo sapiens
tgaagagtcttccaa

SEQ ID NO: 1953606 - DNA, 15 bp, Homo sapiens
gaagagtcttccaaa

SEQ ID NO: 1953607 - DNA, 15 bp, Homo sapiens
aagagtcttccaaaa

SEQ ID NO: 1953608 - DNA, 15 bp, Homo sapiens
agagtcttccaaaag

SEQ ID NO: 1953609 - DNA, 15 bp, Homo sapiens
gagtcttccaaaaga

SEQ ID NO: 1953610 - DNA, 15 bp, Homo sapiens
agtcttccaaaagaa

SEQ ID NO: 1953611 - DNA, 15 bp, Homo sapiens
gtcttccaaaagaag

SEQ ID NO: 1953612 - DNA, 15 bp, Homo sapiens
tcttccaaaagaagt

SEQ ID NO: 1953613 - DNA, 15 bp, Homo sapiens
cttccaaaagaagta

SEQ ID NO: 1953614 - DNA, 15 bp, Homo sapiens
ttccaaaagaagtaa

SEQ ID NO: 1953615 - DNA, 15 bp, Homo sapiens
tccaaaagaagtaac

SEQ ID NO: 1953616 - DNA, 15 bp, Homo sapiens
ccaaaagaagtaact

SEQ ID NO: 1953617 - DNA, 15 bp, Homo sapiens
caaaagaagtaactg

SEQ ID NO: 1953618 - DNA, 15 bp, Homo sapiens
aaaagaagtaactgg

SEQ ID NO: 1953619 - DNA, 15 bp, Homo sapiens
aaagaagtaactgga

SEQ ID NO: 1953620 - DNA, 15 bp, Homo sapiens
aagaagtaactggag

SEQ ID NO: 1953621 - DNA, 15 bp, Homo sapiens
agaagtaactggaga

SEQ ID NO: 1953622 - DNA, 15 bp, Homo sapiens
gaagtaactggagac

SEQ ID NO: 1953623 - DNA, 15 bp, Homo sapiens
aagtaactggagacg

SEQ ID NO: 1953624 - DNA, 15 bp, Homo sapiens
agtaactggagacgt

SEQ ID NO: 1953625 - DNA, 15 bp, Homo sapiens
gtaactggagacgtc

SEQ ID NO: 1953626 - DNA, 15 bp, Homo sapiens
taactggagacgtca

SEQ ID NO: 1953627 - DNA, 15 bp, Homo sapiens
aactggagacgtcag

SEQ ID NO: 1953628 - DNA, 15 bp, Homo sapiens
actggagacgtcagg

SEQ ID NO: 1953629 - DNA, 15 bp, Homo sapiens
ctggagacgtcaggg

SEQ ID NO: 1953630 - DNA, 15 bp, Homo sapiens
tggagacgtcaggga

SEQ ID NO: 1953631 - DNA, 15 bp, Homo sapiens
ggagacgtcagggat

SEQ ID NO: 1953632 - DNA, 15 bp, Homo sapiens
gagacgtcagggata

SEQ ID NO: 1953633 - DNA, 15 bp, Homo sapiens
agacgtcagggatag

SEQ ID NO: 1953634 - DNA, 15 bp, Homo sapiens
gacgtcagggatagt

SEQ ID NO: 1953635 - DNA, 15 bp, Homo sapiens
acgtcagggatagtc

SEQ ID NO: 1953636 - DNA, 15 bp, Homo sapiens
cgtcagggatagtct

SEQ ID NO: 1953637 - DNA, 15 bp, Homo sapiens
gtcagggatagtctt

SEQ ID NO: 1953638 - DNA, 15 bp, Homo sapiens
tcagggatagtcttt

SEQ ID NO: 1953639 - DNA, 15 bp, Homo sapiens
cagggatagtctttt

SEQ ID NO: 1953640 - DNA, 15 bp, Homo sapiens
agggatagtcttttt

SEQ ID NO: 1953641 - DNA, 15 bp, Homo sapiens
gggatagtcttttta

SEQ ID NO: 1953642 - DNA, 15 bp, Homo sapiens
ggatagtctttttaa

SEQ ID NO: 1953643 - DNA, 15 bp, Homo sapiens
gatagtctttttaat

SEQ ID NO: 1953644 - DNA, 15 bp, Homo sapiens
atagtctttttaata

SEQ ID NO: 1953645 - DNA, 15 bp, Homo sapiens
tagtctttttaataa

SEQ ID NO: 1953646 - DNA, 15 bp, Homo sapiens
agtctttttaataac

SEQ ID NO: 1953647 - DNA, 15 bp, Homo sapiens
gtctttttaataact

SEQ ID NO: 1953648 - DNA, 15 bp, Homo sapiens
tctttttaataactt

SEQ ID NO: 1953649 - DNA, 15 bp, Homo sapiens
ctttttaataacttc

SEQ ID NO: 1953650 - DNA, 15 bp, Homo sapiens
tttttaataacttca

SEQ ID NO: 1953651 - DNA, 15 bp, Homo sapiens
ttttaataacttcag

SEQ ID NO: 1953652 - DNA, 15 bp, Homo sapiens
tttaataacttcaga

SEQ ID NO: 1953653 - DNA, 15 bp, Homo sapiens
ttaataacttcagat

SEQ ID NO: 1953654 - DNA, 15 bp, Homo sapiens
taataacttcagata

SEQ ID NO: 1953655 - DNA, 15 bp, Homo sapiens
aataacttcagatag

SEQ ID NO: 1953656 - DNA, 15 bp, Homo sapiens
ataacttcagatagc

SEQ ID NO: 1953657 - DNA, 15 bp, Homo sapiens
taacttcagatagct

SEQ ID NO: 1953658 - DNA, 15 bp, Homo sapiens
aacttcagatagctt

SEQ ID NO: 1953659 - DNA, 15 bp, Homo sapiens
acttcagatagcttt

SEQ ID NO: 1953660 - DNA, 15 bp, Homo sapiens
cttcagatagctttc

SEQ ID NO: 1953661 - DNA, 15 bp, Homo sapiens
ttcagatagctttca

SEQ ID NO: 1953662 - DNA, 15 bp, Homo sapiens
tcagatagctttcaa

SEQ ID NO: 1953663 - DNA, 15 bp, Homo sapiens
cagatagctttcaag

SEQ ID NO: 1953664 - DNA, 15 bp, Homo sapiens
agatagctttcaaga

SEQ ID NO: 1953665 - DNA, 15 bp, Homo sapiens
gatagctttcaagag

SEQ ID NO: 1953666 - DNA, 15 bp, Homo sapiens
atagctttcaagagt

SEQ ID NO: 1953667 - DNA, 15 bp, Homo sapiens
tagctttcaagagta

SEQ ID NO: 1953668 - DNA, 15 bp, Homo sapiens
agctttcaagagtag

SEQ ID NO: 1953669 - DNA, 15 bp, Homo sapiens
gctttcaagagtaga

SEQ ID NO: 1953670 - DNA, 15 bp, Homo sapiens
ctttcaagagtagat

SEQ ID NO: 1953671 - DNA, 15 bp, Homo sapiens
tttcaagagtagata

SEQ ID NO: 1953672 - DNA, 15 bp, Homo sapiens
ttcaagagtagatac

SEQ ID NO: 1953673 - DNA, 15 bp, Homo sapiens
tcaagagtagatact

SEQ ID NO: 1953674 - DNA, 15 bp, Homo sapiens
caagagtagatactg

SEQ ID NO: 1953675 - DNA, 15 bp, Homo sapiens
aagagtagatactga

SEQ ID NO: 1953676 - DNA, 15 bp, Homo sapiens
agagtagatactgaa

SEQ ID NO: 1953677 - DNA, 15 bp, Homo sapiens
gagtagatactgaaa

SEQ ID NO: 1953678 - DNA, 15 bp, Homo sapiens
agtagatactgaaac

SEQ ID NO: 1953679 - DNA, 15 bp, Homo sapiens
gtagatactgaaaca

SEQ ID NO: 1953680 - DNA, 15 bp, Homo sapiens
tagatactgaaacat

SEQ ID NO: 1953681 - DNA, 15 bp, Homo sapiens
agatactgaaacata

SEQ ID NO: 1953682 - DNA, 15 bp, Homo sapiens
gatactgaaacatac

SEQ ID NO: 1953683 - DNA, 15 bp, Homo sapiens
atactgaaacataca

SEQ ID NO: 1953684 - DNA, 15 bp, Homo sapiens
tactgaaacatacat

SEQ ID NO: 1953685 - DNA, 15 bp, Homo sapiens
actgaaacatacatg

SEQ ID NO: 1953686 - DNA, 15 bp, Homo sapiens
ctgaaacatacatga

SEQ ID NO: 1953687 - DNA, 15 bp, Homo sapiens
tgaaacatacatgac

SEQ ID NO: 1953688 - DNA, 15 bp, Homo sapiens
gaaacatacatgacc

SEQ ID NO: 1953689 - DNA, 15 bp, Homo sapiens
aaacatacatgaccc

SEQ ID NO: 1953690 - DNA, 15 bp, Homo sapiens
aacatacatgaccct

SEQ ID NO: 1953691 - DNA, 15 bp, Homo sapiens
acatacatgaccctt

SEQ ID NO: 1953692 - DNA, 15 bp, Homo sapiens
catacatgaccctta

SEQ ID NO: 1953693 - DNA, 15 bp, Homo sapiens
atacatgacccttaa

SEQ ID NO: 1953694 - DNA, 15 bp, Homo sapiens
tacatgacccttaag

SEQ ID NO: 1953695 - DNA, 15 bp, Homo sapiens
acatgacccttaagc

SEQ ID NO: 1953696 - DNA, 15 bp, Homo sapiens
catgacccttaagct

SEQ ID NO: 1953697 - DNA, 15 bp, Homo sapiens
atgacccttaagctt

SEQ ID NO: 1953698 - DNA, 15 bp, Homo sapiens
tgacccttaagcttt

SEQ ID NO: 1953699 - DNA, 15 bp, Homo sapiens
gacccttaagctttc

SEQ ID NO: 1953700 - DNA, 15 bp, Homo sapiens
acccttaagctttcc

SEQ ID NO: 1953701 - DNA, 15 bp, Homo sapiens
cccttaagctttcct

SEQ ID NO: 1953702 - DNA, 15 bp, Homo sapiens
ccttaagctttcctc

SEQ ID NO: 1953703 - DNA, 15 bp, Homo sapiens
cttaagctttcctca

SEQ ID NO: 1953704 - DNA, 15 bp, Homo sapiens
ttaagctttcctcac

SEQ ID NO: 1953705 - DNA, 15 bp, Homo sapiens
taagctttcctcact

SEQ ID NO: 1953706 - DNA, 15 bp, Homo sapiens
aagctttcctcactt

SEQ ID NO: 1953707 - DNA, 15 bp, Homo sapiens
agctttcctcacttt

SEQ ID NO: 1953708 - DNA, 15 bp, Homo sapiens
gctttcctcactttt

SEQ ID NO: 1953709 - DNA, 15 bp, Homo sapiens
ctttcctcacttttt

SEQ ID NO: 1953710 - DNA, 15 bp, Homo sapiens
tttcctcactttttg

SEQ ID NO: 1953711 - DNA, 15 bp, Homo sapiens
ttcctcactttttgt

SEQ ID NO: 1953712 - DNA, 15 bp, Homo sapiens
tcctcactttttgtg

SEQ ID NO: 1953713 - DNA, 15 bp, Homo sapiens
cctcactttttgtga

SEQ ID NO: 1953714 - DNA, 15 bp, Homo sapiens
ctcactttttgtgaa

SEQ ID NO: 1953715 - DNA, 15 bp, Homo sapiens
tcactttttgtgaac

SEQ ID NO: 1953716 - DNA, 15 bp, Homo sapiens
cactttttgtgaaca

SEQ ID NO: 1953717 - DNA, 15 bp, Homo sapiens
actttttgtgaacag

SEQ ID NO: 1953718 - DNA, 15 bp, Homo sapiens
ctttttgtgaacagc

SEQ ID NO: 1953719 - DNA, 15 bp, Homo sapiens
tttttgtgaacagcc

SEQ ID NO: 1953720 - DNA, 15 bp, Homo sapiens
ttttgtgaacagcct

SEQ ID NO: 1953721 - DNA, 15 bp, Homo sapiens
tttgtgaacagcctt

SEQ ID NO: 1953722 - DNA, 15 bp, Homo sapiens
ttgtgaacagcctta

SEQ ID NO: 1953723 - DNA, 15 bp, Homo sapiens
tgtgaacagccttaa

SEQ ID NO: 1953724 - DNA, 15 bp, Homo sapiens
gtgaacagccttaag

SEQ ID NO: 1953725 - DNA, 15 bp, Homo sapiens
tgaacagccttaagc

SEQ ID NO: 1953726 - DNA, 15 bp, Homo sapiens
gaacagccttaagcc

SEQ ID NO: 1953727 - DNA, 15 bp, Homo sapiens
aacagccttaagcca

SEQ ID NO: 1953728 - DNA, 15 bp, Homo sapiens
acagccttaagccag

SEQ ID NO: 1953729 - DNA, 15 bp, Homo sapiens
cagccttaagccaga

SEQ ID NO: 1953730 - DNA, 15 bp, Homo sapiens
agccttaagccagaa

SEQ ID NO: 1953731 - DNA, 15 bp, Homo sapiens
gccttaagccagaaa

SEQ ID NO: 1953732 - DNA, 15 bp, Homo sapiens
ccttaagccagaaat

SEQ ID NO: 1953733 - DNA, 15 bp, Homo sapiens
cttaagccagaaata

SEQ ID NO: 1953734 - DNA, 15 bp, Homo sapiens
ttaagccagaaatag

SEQ ID NO: 1953735 - DNA, 15 bp, Homo sapiens
taagccagaaatagg

SEQ ID NO: 1953736 - DNA, 15 bp, Homo sapiens
aagccagaaataggg

SEQ ID NO: 1953737 - DNA, 15 bp, Homo sapiens
agccagaaatagggc

SEQ ID NO: 1953738 - DNA, 15 bp, Homo sapiens
gccagaaatagggct

SEQ ID NO: 1953739 - DNA, 15 bp, Homo sapiens
ccagaaatagggctt

SEQ ID NO: 1953740 - DNA, 15 bp, Homo sapiens
cagaaatagggctta

SEQ ID NO: 1953741 - DNA, 15 bp, Homo sapiens
agaaatagggcttaa

SEQ ID NO: 1953742 - DNA, 15 bp, Homo sapiens
gaaatagggcttaac

SEQ ID NO: 1953743 - DNA, 15 bp, Homo sapiens
aaatagggcttaaca

SEQ ID NO: 1953744 - DNA, 15 bp, Homo sapiens
aatagggcttaacac

SEQ ID NO: 1953745 - DNA, 15 bp, Homo sapiens
atagggcttaacact

SEQ ID NO: 1953746 - DNA, 15 bp, Homo sapiens
tagggcttaacactg

SEQ ID NO: 1953747 - DNA, 15 bp, Homo sapiens
agggcttaacactgc

SEQ ID NO: 1953748 - DNA, 15 bp, Homo sapiens
gggcttaacactgcc

SEQ ID NO: 1953749 - DNA, 15 bp, Homo sapiens
ggcttaacactgcct

SEQ ID NO: 1953750 - DNA, 15 bp, Homo sapiens
gcttaacactgcctt

SEQ ID NO: 1953751 - DNA, 15 bp, Homo sapiens
cttaacactgccttc

SEQ ID NO: 1953752 - DNA, 15 bp, Homo sapiens
ttaacactgccttcc

SEQ ID NO: 1953753 - DNA, 15 bp, Homo sapiens
taacactgccttccc

SEQ ID NO: 1953754 - DNA, 15 bp, Homo sapiens
aacactgccttcccc

SEQ ID NO: 1953755 - DNA, 15 bp, Homo sapiens
acactgccttcccca

SEQ ID NO: 1953756 - DNA, 15 bp, Homo sapiens
cactgccttccccat

SEQ ID NO: 1953757 - DNA, 15 bp, Homo sapiens
actgccttccccatg

SEQ ID NO: 1953758 - DNA, 15 bp, Homo sapiens
ctgccttccccatgg

SEQ ID NO: 1953759 - DNA, 15 bp, Homo sapiens
tgccttccccatgga

SEQ ID NO: 1953760 - DNA, 15 bp, Homo sapiens
gccttccccatggaa

SEQ ID NO: 1953761 - DNA, 15 bp, Homo sapiens
ccttccccatggaaa

SEQ ID NO: 1953762 - DNA, 15 bp, Homo sapiens
cttccccatggaaac

SEQ ID NO: 1953763 - DNA, 15 bp, Homo sapiens
ttccccatggaaaca

SEQ ID NO: 1953764 - DNA, 15 bp, Homo sapiens
tccccatggaaacac

SEQ ID NO: 1953765 - DNA, 15 bp, Homo sapiens
ccccatggaaacact

SEQ ID NO: 1953766 - DNA, 15 bp, Homo sapiens
cccatggaaacactg

SEQ ID NO: 1953767 - DNA, 15 bp, Homo sapiens
ccatggaaacactga

SEQ ID NO: 1953768 - DNA, 15 bp, Homo sapiens
catggaaacactgaa

SEQ ID NO: 1953769 - DNA, 15 bp, Homo sapiens
atggaaacactgaaa

SEQ ID NO: 1953770 - DNA, 15 bp, Homo sapiens
tggaaacactgaaat

SEQ ID NO: 1953771 - DNA, 15 bp, Homo sapiens
ggaaacactgaaatt

SEQ ID NO: 1953772 - DNA, 15 bp, Homo sapiens
gaaacactgaaattg

SEQ ID NO: 1953773 - DNA, 15 bp, Homo sapiens
aaacactgaaattgg

SEQ ID NO: 1953774 - DNA, 15 bp, Homo sapiens
aacactgaaattggg

SEQ ID NO: 1953775 - DNA, 15 bp, Homo sapiens
cactgaaattgggaa

SEQ ID NO: 1953776 - DNA, 15 bp, Homo sapiens
actgaaattgggaat

SEQ ID NO: 1953777 - DNA, 15 bp, Homo sapiens
ctgaaattgggaata

SEQ ID NO: 1953778 - DNA, 15 bp, Homo sapiens
tgaaattgggaatag

SEQ ID NO: 1953779 - DNA, 15 bp, Homo sapiens
gaaattgggaatagc

SEQ ID NO: 1953780 - DNA, 15 bp, Homo sapiens
aaattgggaatagcc

SEQ ID NO: 1953781 - DNA, 15 bp, Homo sapiens
aattgggaatagccc

SEQ ID NO: 1953782 - DNA, 15 bp, Homo sapiens
attgggaatagccct

SEQ ID NO: 1953783 - DNA, 15 bp, Homo sapiens
ttgggaatagcccta

SEQ ID NO: 1953784 - DNA, 15 bp, Homo sapiens
tgggaatagccctat

SEQ ID NO: 1953785 - DNA, 15 bp, Homo sapiens
gggaatagccctatg

SEQ ID NO: 1953786 - DNA, 15 bp, Homo sapiens
ggaatagccctatgg

SEQ ID NO: 1953787 - DNA, 15 bp, Homo sapiens
gaatagccctatggc

SEQ ID NO: 1953788 - DNA, 15 bp, Homo sapiens
aatagccctatggcc

SEQ ID NO: 1953789 - DNA, 15 bp, Homo sapiens
atagccctatggcca

SEQ ID NO: 1953790 - DNA, 15 bp, Homo sapiens
tagccctatggccag

SEQ ID NO: 1953791 - DNA, 15 bp, Homo sapiens
agccctatggccaga

SEQ ID NO: 1953792 - DNA, 15 bp, Homo sapiens
gccctatggccagat

SEQ ID NO: 1953793 - DNA, 15 bp, Homo sapiens
ccctatggccagatc

SEQ ID NO: 1953794 - DNA, 15 bp, Homo sapiens
cctatggccagatct

SEQ ID NO: 1953795 - DNA, 15 bp, Homo sapiens
ctatggccagatctt

SEQ ID NO: 1953796 - DNA, 15 bp, Homo sapiens
tatggccagatcttt

SEQ ID NO: 1953797 - DNA, 15 bp, Homo sapiens
atggccagatcttta

SEQ ID NO: 1953798 - DNA, 15 bp, Homo sapiens
tggccagatctttaa

SEQ ID NO: 1953799 - DNA, 15 bp, Homo sapiens
ggccagatctttaac

SEQ ID NO: 1953800 - DNA, 15 bp, Homo sapiens
gccagatctttaaca

SEQ ID NO: 1953801 - DNA, 15 bp, Homo sapiens
ccagatctttaacac

SEQ ID NO: 1953802 - DNA, 15 bp, Homo sapiens
cagatctttaacacc

SEQ ID NO: 1953803 - DNA, 15 bp, Homo sapiens
agatctttaacacct

SEQ ID NO: 1953804 - DNA, 15 bp, Homo sapiens
gatctttaacaccta

SEQ ID NO: 1953805 - DNA, 15 bp, Homo sapiens
atctttaacacctaa

SEQ ID NO: 1953806 - DNA, 15 bp, Homo sapiens
tctttaacacctaac

SEQ ID NO: 1953807 - DNA, 15 bp, Homo sapiens
ctttaacacctaact

SEQ ID NO: 1953808 - DNA, 15 bp, Homo sapiens
tttaacacctaactg

SEQ ID NO: 1953809 - DNA, 15 bp, Homo sapiens
ttaacacctaactga

SEQ ID NO: 1953810 - DNA, 15 bp, Homo sapiens
taacacctaactgaa

SEQ ID NO: 1953811 - DNA, 15 bp, Homo sapiens
aacacctaactgaaa

SEQ ID NO: 1953812 - DNA, 15 bp, Homo sapiens
acacctaactgaaat

SEQ ID NO: 1953813 - DNA, 15 bp, Homo sapiens
cacctaactgaaatt

SEQ ID NO: 1953814 - DNA, 15 bp, Homo sapiens
acctaactgaaattt

SEQ ID NO: 1953815 - DNA, 15 bp, Homo sapiens
cctaactgaaatttt

SEQ ID NO: 1953816 - DNA, 15 bp, Homo sapiens
ctaactgaaattttt

SEQ ID NO: 1953817 - DNA, 15 bp, Homo sapiens
taactgaaatttttg

SEQ ID NO: 1953818 - DNA, 15 bp, Homo sapiens
aactgaaatttttga

SEQ ID NO: 1953819 - DNA, 15 bp, Homo sapiens
actgaaatttttgaa

SEQ ID NO: 1953820 - DNA, 15 bp, Homo sapiens
ctgaaatttttgaaa

SEQ ID NO: 1953821 - DNA, 15 bp, Homo sapiens
tgaaatttttgaaag

SEQ ID NO: 1953822 - DNA, 15 bp, Homo sapiens
gaaatttttgaaaga

SEQ ID NO: 1953823 - DNA, 15 bp, Homo sapiens
aaatttttgaaagag

SEQ ID NO: 1953824 - DNA, 15 bp, Homo sapiens
aatttttgaaagagg

SEQ ID NO: 1953825 - DNA, 15 bp, Homo sapiens
atttttgaaagaggc

SEQ ID NO: 1953826 - DNA, 15 bp, Homo sapiens
tttttgaaagaggcc

SEQ ID NO: 1953827 - DNA, 15 bp, Homo sapiens
ttttgaaagaggcct

SEQ ID NO: 1953828 - DNA, 15 bp, Homo sapiens
tttgaaagaggccta

SEQ ID NO: 1953829 - DNA, 15 bp, Homo sapiens
ttgaaagaggcctag

SEQ ID NO: 1953830 - DNA, 15 bp, Homo sapiens
tgaaagaggcctaga

SEQ ID NO: 1953831 - DNA, 15 bp, Homo sapiens
gaaagaggcctagac

SEQ ID NO: 1953832 - DNA, 15 bp, Homo sapiens
aaagaggcctagaca

SEQ ID NO: 1953833 - DNA, 15 bp, Homo sapiens
aagaggcctagacac

SEQ ID NO: 1953834 - DNA, 15 bp, Homo sapiens
agaggcctagacact

SEQ ID NO: 1953835 - DNA, 15 bp, Homo sapiens
gaggcctagacactg

SEQ ID NO: 1953836 - DNA, 15 bp, Homo sapiens
aggcctagacactgg

SEQ ID NO: 1953837 - DNA, 15 bp, Homo sapiens
ggcctagacactggg

SEQ ID NO: 1953838 - DNA, 15 bp, Homo sapiens
gcctagacactgggc

SEQ ID NO: 1953839 - DNA, 15 bp, Homo sapiens
cctagacactgggcg

SEQ ID NO: 1953840 - DNA, 15 bp, Homo sapiens
ctagacactgggcgc

SEQ ID NO: 1953841 - DNA, 15 bp, Homo sapiens
tagacactgggcgcg

SEQ ID NO: 1953842 - DNA, 15 bp, Homo sapiens
agacactgggcgcgg

SEQ ID NO: 1953843 - DNA, 15 bp, Homo sapiens
gacactgggcgcggt

SEQ ID NO: 1953844 - DNA, 15 bp, Homo sapiens
acactgggcgcggtg

SEQ ID NO: 1953845 - DNA, 15 bp, Homo sapiens
cactgggcgcggtgg

SEQ ID NO: 1953846 - DNA, 15 bp, Homo sapiens
actgggcgcggtggc

SEQ ID NO: 1953847 - DNA, 15 bp, Homo sapiens
cgcctgtaattccag

SEQ ID NO: 1953848 - DNA, 15 bp, Homo sapiens
gcctgtaattccagc

SEQ ID NO: 1953849 - DNA, 15 bp, Homo sapiens
cctgtaattccagca

SEQ ID NO: 1953850 - DNA, 15 bp, Homo sapiens
ctgtaattccagcac

SEQ ID NO: 1953851 - DNA, 15 bp, Homo sapiens
tgtaattccagcact

SEQ ID NO: 1953852 - DNA, 15 bp, Homo sapiens
gtaattccagcactt

SEQ ID NO: 1953853 - DNA, 15 bp, Homo sapiens
ttccagcactttggg

SEQ ID NO: 1953854 - DNA, 15 bp, Homo sapiens
tccagcactttggga

SEQ ID NO: 1953855 - DNA, 15 bp, Homo sapiens
ctgaggtgggtggaa

SEQ ID NO: 1953856 - DNA, 15 bp, Homo sapiens
tgaggtgggtggaac

SEQ ID NO: 1953857 - DNA, 15 bp, Homo sapiens
gaggtgggtggaaca

SEQ ID NO: 1953858 - DNA, 15 bp, Homo sapiens
aggtgggtggaacac

SEQ ID NO: 1953859 - DNA, 15 bp, Homo sapiens
ggtgggtggaacacg

SEQ ID NO: 1953860 - DNA, 15 bp, Homo sapiens
gtgggtggaacacgg

SEQ ID NO: 1953861 - DNA, 15 bp, Homo sapiens
tgggtggaacacggg

SEQ ID NO: 1953862 - DNA, 15 bp, Homo sapiens
gggtggaacacggga

SEQ ID NO: 1953863 - DNA, 15 bp, Homo sapiens
ggtggaacacgggag

SEQ ID NO: 1953864 - DNA, 15 bp, Homo sapiens
gtggaacacgggagg

SEQ ID NO: 1953865 - DNA, 15 bp, Homo sapiens
tggaacacgggaggt

SEQ ID NO: 1953866 - DNA, 15 bp, Homo sapiens
ggaacacgggaggtc

SEQ ID NO: 1953867 - DNA, 15 bp, Homo sapiens
gaacacgggaggtcc

SEQ ID NO: 1953868 - DNA, 15 bp, Homo sapiens
aacacgggaggtcca

SEQ ID NO: 1953869 - DNA, 15 bp, Homo sapiens
acacgggaggtccag

SEQ ID NO: 1953870 - DNA, 15 bp, Homo sapiens
cacgggaggtccagt

SEQ ID NO: 1953871 - DNA, 15 bp, Homo sapiens
acgggaggtccagtc

SEQ ID NO: 1953872 - DNA, 15 bp, Homo sapiens
cgggaggtccagtcc

SEQ ID NO: 1953873 - DNA, 15 bp, Homo sapiens
gggaggtccagtccg

SEQ ID NO: 1953874 - DNA, 15 bp, Homo sapiens
ggaggtccagtccga

SEQ ID NO: 1953875 - DNA, 15 bp, Homo sapiens
gaggtccagtccgag

SEQ ID NO: 1953876 - DNA, 15 bp, Homo sapiens
aggtccagtccgaga

SEQ ID NO: 1953877 - DNA, 15 bp, Homo sapiens
ggtccagtccgagac

SEQ ID NO: 1953878 - DNA, 15 bp, Homo sapiens
gtccagtccgagacc

SEQ ID NO: 1953879 - DNA, 15 bp, Homo sapiens
tccagtccgagacca

SEQ ID NO: 1953880 - DNA, 15 bp, Homo sapiens
ccagtccgagaccaa

SEQ ID NO: 1953881 - DNA, 15 bp, Homo sapiens
cagtccgagaccaac

SEQ ID NO: 1953882 - DNA, 15 bp, Homo sapiens
agtccgagaccaacc

SEQ ID NO: 1953883 - DNA, 15 bp, Homo sapiens
gtccgagaccaacct

SEQ ID NO: 1953884 - DNA, 15 bp, Homo sapiens
tccgagaccaacctg

SEQ ID NO: 1953885 - DNA, 15 bp, Homo sapiens
ccgagaccaacctga

SEQ ID NO: 1953886 - DNA, 15 bp, Homo sapiens
cgagaccaacctgac

SEQ ID NO: 1953887 - DNA, 15 bp, Homo sapiens
gagaccaacctgacc

SEQ ID NO: 1953888 - DNA, 15 bp, Homo sapiens
agaccaacctgacca

SEQ ID NO: 1953889 - DNA, 15 bp, Homo sapiens
gaccaacctgaccaa

SEQ ID NO: 1953890 - DNA, 15 bp, Homo sapiens
accaacctgaccaac

SEQ ID NO: 1953891 - DNA, 15 bp, Homo sapiens
ccaacctgaccaaca

SEQ ID NO: 1953892 - DNA, 15 bp, Homo sapiens
caacctgaccaacat

SEQ ID NO: 1953893 - DNA, 15 bp, Homo sapiens
aacctgaccaacatg

SEQ ID NO: 1953894 - DNA, 15 bp, Homo sapiens
acctgaccaacatgg

SEQ ID NO: 1953895 - DNA, 15 bp, Homo sapiens
catggagaaaccccg

SEQ ID NO: 1953896 - DNA, 15 bp, Homo sapiens
atggagaaaccccgt

SEQ ID NO: 1953897 - DNA, 15 bp, Homo sapiens
tggagaaaccccgtt

SEQ ID NO: 1953898 - DNA, 15 bp, Homo sapiens
ggagaaaccccgttt

SEQ ID NO: 1953899 - DNA, 15 bp, Homo sapiens
gagaaaccccgtttc

SEQ ID NO: 1953900 - DNA, 15 bp, Homo sapiens
agaaaccccgtttct

SEQ ID NO: 1953901 - DNA, 15 bp, Homo sapiens
gtttctactaaaaat

SEQ ID NO: 1953902 - DNA, 15 bp, Homo sapiens
acaaaattagccgga

SEQ ID NO: 1953903 - DNA, 15 bp, Homo sapiens
caaaattagccggac

SEQ ID NO: 1953904 - DNA, 15 bp, Homo sapiens
aaaattagccggaca

SEQ ID NO: 1953905 - DNA, 15 bp, Homo sapiens
aaattagccggacat

SEQ ID NO: 1953906 - DNA, 15 bp, Homo sapiens
aattagccggacatg

SEQ ID NO: 1953907 - DNA, 15 bp, Homo sapiens
attagccggacatgg

SEQ ID NO: 1953908 - DNA, 15 bp, Homo sapiens
ttagccggacatggt

SEQ ID NO: 1953909 - DNA, 15 bp, Homo sapiens
tagccggacatggtg

SEQ ID NO: 1953910 - DNA, 15 bp, Homo sapiens
agccggacatggtgg

SEQ ID NO: 1953911 - DNA, 15 bp, Homo sapiens
gccggacatggtggt

SEQ ID NO: 1953912 - DNA, 15 bp, Homo sapiens
ccggacatggtggtg

SEQ ID NO: 1953913 - DNA, 15 bp, Homo sapiens
cggacatggtggtgc

SEQ ID NO: 1953914 - DNA, 15 bp, Homo sapiens
ggacatggtggtgca

SEQ ID NO: 1953915 - DNA, 15 bp, Homo sapiens
gacatggtggtgcat

SEQ ID NO: 1953916 - DNA, 15 bp, Homo sapiens
acatggtggtgcatg

SEQ ID NO: 1953917 - DNA, 15 bp, Homo sapiens
gtggtgcatgcctga

SEQ ID NO: 1953918 - DNA, 15 bp, Homo sapiens
tggtgcatgcctgaa

SEQ ID NO: 1953919 - DNA, 15 bp, Homo sapiens
ggtgcatgcctgaaa

SEQ ID NO: 1953920 - DNA, 15 bp, Homo sapiens
gtgcatgcctgaaat

SEQ ID NO: 1953921 - DNA, 15 bp, Homo sapiens
tgcatgcctgaaatc

SEQ ID NO: 1953922 - DNA, 15 bp, Homo sapiens
gcatgcctgaaatcc

SEQ ID NO: 1953923 - DNA, 15 bp, Homo sapiens
catgcctgaaatccc

SEQ ID NO: 1953924 - DNA, 15 bp, Homo sapiens
atgcctgaaatccca

SEQ ID NO: 1953925 - DNA, 15 bp, Homo sapiens
tgcctgaaatcccag

SEQ ID NO: 1953926 - DNA, 15 bp, Homo sapiens
gcctgaaatcccagc

SEQ ID NO: 1953927 - DNA, 15 bp, Homo sapiens
tgaggcaggagagtc

SEQ ID NO: 1953928 - DNA, 15 bp, Homo sapiens
gaggcaggagagtcg

SEQ ID NO: 1953929 - DNA, 15 bp, Homo sapiens
aggcaggagagtcgc

SEQ ID NO: 1953930 - DNA, 15 bp, Homo sapiens
ggcaggagagtcgct

SEQ ID NO: 1953931 - DNA, 15 bp, Homo sapiens
gcaggagagtcgctt

SEQ ID NO: 1953932 - DNA, 15 bp, Homo sapiens
caggagagtcgcttg

SEQ ID NO: 1953933 - DNA, 15 bp, Homo sapiens
aggagagtcgcttga

SEQ ID NO: 1953934 - DNA, 15 bp, Homo sapiens
ggagagtcgcttgaa

SEQ ID NO: 1953935 - DNA, 15 bp, Homo sapiens
gagagtcgcttgaac

SEQ ID NO: 1953936 - DNA, 15 bp, Homo sapiens
agagtcgcttgaacc

SEQ ID NO: 1953937 - DNA, 15 bp, Homo sapiens
gagtcgcttgaacct

SEQ ID NO: 1953938 - DNA, 15 bp, Homo sapiens
agtcgcttgaacctg

SEQ ID NO: 1953939 - DNA, 15 bp, Homo sapiens
gtcgcttgaacctgg

SEQ ID NO: 1953940 - DNA, 15 bp, Homo sapiens
tcgcttgaacctggg

SEQ ID NO: 1953941 - DNA, 15 bp, Homo sapiens
cgcttgaacctggga

SEQ ID NO: 1953942 - DNA, 15 bp, Homo sapiens
gcttgaacctgggag

SEQ ID NO: 1953943 - DNA, 15 bp, Homo sapiens
ccgagatcacgccat

SEQ ID NO: 1953944 - DNA, 15 bp, Homo sapiens
cgagatcacgccatt

SEQ ID NO: 1953945 - DNA, 15 bp, Homo sapiens
gagatcacgccattg

SEQ ID NO: 1953946 - DNA, 15 bp, Homo sapiens
agatcacgccattgc

SEQ ID NO: 1953947 - DNA, 15 bp, Homo sapiens
gatcacgccattgca

SEQ ID NO: 1953948 - DNA, 15 bp, Homo sapiens
atcacgccattgcac

SEQ ID NO: 1953949 - DNA, 15 bp, Homo sapiens
cacgccattgcactc

SEQ ID NO: 1953950 - DNA, 15 bp, Homo sapiens
acgccattgcactcc

SEQ ID NO: 1953951 - DNA, 15 bp, Homo sapiens
cgccattgcactcca

SEQ ID NO: 1953952 - DNA, 15 bp, Homo sapiens
gccattgcactccag

SEQ ID NO: 1953953 - DNA, 15 bp, Homo sapiens
gtgaaactccgtcta

SEQ ID NO: 1953954 - DNA, 15 bp, Homo sapiens
tgaaactccgtctaa

SEQ ID NO: 1953955 - DNA, 15 bp, Homo sapiens
gaaactccgtctaaa

SEQ ID NO: 1953956 - DNA, 15 bp, Homo sapiens
aaactccgtctaaaa

SEQ ID NO: 1953957 - DNA, 15 bp, Homo sapiens
aactccgtctaaaaa

SEQ ID NO: 1953958 - DNA, 15 bp, Homo sapiens
actccgtctaaaaac

SEQ ID NO: 1953959 - DNA, 15 bp, Homo sapiens
ctccgtctaaaaaca

SEQ ID NO: 1953960 - DNA, 15 bp, Homo sapiens
tccgtctaaaaacaa

SEQ ID NO: 1953961 - DNA, 15 bp, Homo sapiens
ccgtctaaaaacaaa

SEQ ID NO: 1953962 - DNA, 15 bp, Homo sapiens
cgtctaaaaacaaac

SEQ ID NO: 1953963 - DNA, 15 bp, Homo sapiens
gtctaaaaacaaaca

SEQ ID NO: 1953964 - DNA, 15 bp, Homo sapiens
tctaaaaacaaacaa

SEQ ID NO: 1953965 - DNA, 15 bp, Homo sapiens
ctaaaaacaaacaaa

SEQ ID NO: 1953966 - DNA, 15 bp, Homo sapiens
aacaaacaaacaaag

SEQ ID NO: 1953967 - DNA, 15 bp, Homo sapiens
acaaacaaacaaagg

SEQ ID NO: 1953968 - DNA, 15 bp, Homo sapiens
caaacaaacaaaggg

SEQ ID NO: 1953969 - DNA, 15 bp, Homo sapiens
aaacaaacaaagggc

SEQ ID NO: 1953970 - DNA, 15 bp, Homo sapiens
aacaaacaaagggcc

SEQ ID NO: 1953971 - DNA, 15 bp, Homo sapiens
acaaacaaagggcct

SEQ ID NO: 1953972 - DNA, 15 bp, Homo sapiens
caaacaaagggccta

SEQ ID NO: 1953973 - DNA, 15 bp, Homo sapiens
aaacaaagggcctag

SEQ ID NO: 1953974 - DNA, 15 bp, Homo sapiens
aacaaagggcctaga

SEQ ID NO: 1953975 - DNA, 15 bp, Homo sapiens
acaaagggcctagag

SEQ ID NO: 1953976 - DNA, 15 bp, Homo sapiens
caaagggcctagagc

SEQ ID NO: 1953977 - DNA, 15 bp, Homo sapiens
aaagggcctagagcc

SEQ ID NO: 1953978 - DNA, 15 bp, Homo sapiens
aagggcctagagccc

SEQ ID NO: 1953979 - DNA, 15 bp, Homo sapiens
agggcctagagccct

SEQ ID NO: 1953980 - DNA, 15 bp, Homo sapiens
gggcctagagccctc

SEQ ID NO: 1953981 - DNA, 15 bp, Homo sapiens
ggcctagagccctca

SEQ ID NO: 1953982 - DNA, 15 bp, Homo sapiens
gcctagagccctcag

SEQ ID NO: 1953983 - DNA, 15 bp, Homo sapiens
cctagagccctcaga

SEQ ID NO: 1953984 - DNA, 15 bp, Homo sapiens
ctagagccctcagac

SEQ ID NO: 1953985 - DNA, 15 bp, Homo sapiens
tagagccctcagacc

SEQ ID NO: 1953986 - DNA, 15 bp, Homo sapiens
agagccctcagacct

SEQ ID NO: 1953987 - DNA, 15 bp, Homo sapiens
gagccctcagaccta

SEQ ID NO: 1953988 - DNA, 15 bp, Homo sapiens
agccctcagacctag

SEQ ID NO: 1953989 - DNA, 15 bp, Homo sapiens
gccctcagacctaga

SEQ ID NO: 1953990 - DNA, 15 bp, Homo sapiens
ccctcagacctagaa

SEQ ID NO: 1953991 - DNA, 15 bp, Homo sapiens
cctcagacctagaat

SEQ ID NO: 1953992 - DNA, 15 bp, Homo sapiens
ctcagacctagaata

SEQ ID NO: 1953993 - DNA, 15 bp, Homo sapiens
tcagacctagaataa

SEQ ID NO: 1953994 - DNA, 15 bp, Homo sapiens
cagacctagaataaa

SEQ ID NO: 1953995 - DNA, 15 bp, Homo sapiens
agacctagaataaac

SEQ ID NO: 1953996 - DNA, 15 bp, Homo sapiens
gacctagaataaact

SEQ ID NO: 1953997 - DNA, 15 bp, Homo sapiens
acctagaataaactt

SEQ ID NO: 1953998 - DNA, 15 bp, Homo sapiens
cctagaataaactta

SEQ ID NO: 1953999 - DNA, 15 bp, Homo sapiens
ctagaataaacttat

SEQ ID NO: 1954000 - DNA, 15 bp, Homo sapiens
tagaataaacttatg

SEQ ID NO: 1954001 - DNA, 15 bp, Homo sapiens
agaataaacttatgc

SEQ ID NO: 1954002 - DNA, 15 bp, Homo sapiens
gaataaacttatgcc

SEQ ID NO: 1954003 - DNA, 15 bp, Homo sapiens
aataaacttatgcct

SEQ ID NO: 1954004 - DNA, 15 bp, Homo sapiens
ataaacttatgcctt

SEQ ID NO: 1954005 - DNA, 15 bp, Homo sapiens
taaacttatgccttt

SEQ ID NO: 1954006 - DNA, 15 bp, Homo sapiens
aaacttatgccttta

SEQ ID NO: 1954007 - DNA, 15 bp, Homo sapiens
aacttatgcctttac

SEQ ID NO: 1954008 - DNA, 15 bp, Homo sapiens
acttatgcctttaca

SEQ ID NO: 1954009 - DNA, 15 bp, Homo sapiens
cttatgcctttacag

SEQ ID NO: 1954010 - DNA, 15 bp, Homo sapiens
ttatgcctttacaga

SEQ ID NO: 1954011 - DNA, 15 bp, Homo sapiens
tatgcctttacagat

SEQ ID NO: 1954012 - DNA, 15 bp, Homo sapiens
atgcctttacagata

SEQ ID NO: 1954013 - DNA, 15 bp, Homo sapiens
tgcctttacagataa

SEQ ID NO: 1954014 - DNA, 15 bp, Homo sapiens
gcctttacagataaa

SEQ ID NO: 1954015 - DNA, 15 bp, Homo sapiens
cctttacagataaaa

SEQ ID NO: 1954016 - DNA, 15 bp, Homo sapiens
ctttacagataaaaa

SEQ ID NO: 1954017 - DNA, 15 bp, Homo sapiens
tttacagataaaaac

SEQ ID NO: 1954018 - DNA, 15 bp, Homo sapiens
ttacagataaaaact

SEQ ID NO: 1954019 - DNA, 15 bp, Homo sapiens
tacagataaaaacta

SEQ ID NO: 1954020 - DNA, 15 bp, Homo sapiens
acagataaaaactaa

SEQ ID NO: 1954021 - DNA, 15 bp, Homo sapiens
cagataaaaactaat

SEQ ID NO: 1954022 - DNA, 15 bp, Homo sapiens
agataaaaactaata

SEQ ID NO: 1954023 - DNA, 15 bp, Homo sapiens
gataaaaactaataa

SEQ ID NO: 1954024 - DNA, 15 bp, Homo sapiens
aaaaactaataaaag

SEQ ID NO: 1954025 - DNA, 15 bp, Homo sapiens
aaaactaataaaagc

SEQ ID NO: 1954026 - DNA, 15 bp, Homo sapiens
aaactaataaaagca

SEQ ID NO: 1954027 - DNA, 15 bp, Homo sapiens
aactaataaaagcat

SEQ ID NO: 1954028 - DNA, 15 bp, Homo sapiens
actaataaaagcatc

SEQ ID NO: 1954029 - DNA, 15 bp, Homo sapiens
ctaataaaagcatcc

SEQ ID NO: 1954030 - DNA, 15 bp, Homo sapiens
taataaaagcatcca

SEQ ID NO: 1954031 - DNA, 15 bp, Homo sapiens
aataaaagcatccag

SEQ ID NO: 1954032 - DNA, 15 bp, Homo sapiens
ataaaagcatccagg

SEQ ID NO: 1954033 - DNA, 15 bp, Homo sapiens
taaaagcatccaggg

SEQ ID NO: 1954034 - DNA, 15 bp, Homo sapiens
aaaagcatccaggga

SEQ ID NO: 1954035 - DNA, 15 bp, Homo sapiens
aaagcatccagggaa

SEQ ID NO: 1954036 - DNA, 15 bp, Homo sapiens
aagcatccagggaaa

SEQ ID NO: 1954037 - DNA, 15 bp, Homo sapiens
agcatccagggaaag

SEQ ID NO: 1954038 - DNA, 15 bp, Homo sapiens
gcatccagggaaaga

SEQ ID NO: 1954039 - DNA, 15 bp, Homo sapiens
catccagggaaagaa

SEQ ID NO: 1954040 - DNA, 15 bp, Homo sapiens
atccagggaaagaag

SEQ ID NO: 1954041 - DNA, 15 bp, Homo sapiens
tccagggaaagaaga

SEQ ID NO: 1954042 - DNA, 15 bp, Homo sapiens
ccagggaaagaagac

SEQ ID NO: 1954043 - DNA, 15 bp, Homo sapiens
cagggaaagaagacc

SEQ ID NO: 1954044 - DNA, 15 bp, Homo sapiens
agggaaagaagaccc

SEQ ID NO: 1954045 - DNA, 15 bp, Homo sapiens
gggaaagaagaccct

SEQ ID NO: 1954046 - DNA, 15 bp, Homo sapiens
ggaaagaagaccctt

SEQ ID NO: 1954047 - DNA, 15 bp, Homo sapiens
gaaagaagacccttg

SEQ ID NO: 1954048 - DNA, 15 bp, Homo sapiens
aaagaagacccttga

SEQ ID NO: 1954049 - DNA, 15 bp, Homo sapiens
aagaagacccttgat

SEQ ID NO: 1954050 - DNA, 15 bp, Homo sapiens
agaagacccttgata

SEQ ID NO: 1954051 - DNA, 15 bp, Homo sapiens
gaagacccttgataa

SEQ ID NO: 1954052 - DNA, 15 bp, Homo sapiens
aagacccttgataaa

SEQ ID NO: 1954053 - DNA, 15 bp, Homo sapiens
agacccttgataaag

SEQ ID NO: 1954054 - DNA, 15 bp, Homo sapiens
gacccttgataaaga

SEQ ID NO: 1954055 - DNA, 15 bp, Homo sapiens
acccttgataaagaa

SEQ ID NO: 1954056 - DNA, 15 bp, Homo sapiens
cccttgataaagaag

SEQ ID NO: 1954057 - DNA, 15 bp, Homo sapiens
ccttgataaagaagt

SEQ ID NO: 1954058 - DNA, 15 bp, Homo sapiens
cttgataaagaagta

SEQ ID NO: 1954059 - DNA, 15 bp, Homo sapiens
ttgataaagaagtat

SEQ ID NO: 1954060 - DNA, 15 bp, Homo sapiens
tgataaagaagtatg

SEQ ID NO: 1954061 - DNA, 15 bp, Homo sapiens
gataaagaagtatgt

SEQ ID NO: 1954062 - DNA, 15 bp, Homo sapiens
ataaagaagtatgta

SEQ ID NO: 1954063 - DNA, 15 bp, Homo sapiens
taaagaagtatgtaa

SEQ ID NO: 1954064 - DNA, 15 bp, Homo sapiens
aaagaagtatgtaaa

SEQ ID NO: 1954065 - DNA, 15 bp, Homo sapiens
aagaagtatgtaaat

SEQ ID NO: 1954066 - DNA, 15 bp, Homo sapiens
agaagtatgtaaata

SEQ ID NO: 1954067 - DNA, 15 bp, Homo sapiens
gaagtatgtaaatac

SEQ ID NO: 1954068 - DNA, 15 bp, Homo sapiens
aagtatgtaaatact

SEQ ID NO: 1954069 - DNA, 15 bp, Homo sapiens
agtatgtaaatactg

SEQ ID NO: 1954070 - DNA, 15 bp, Homo sapiens
gtatgtaaatactgt

SEQ ID NO: 1954071 - DNA, 15 bp, Homo sapiens
tatgtaaatactgta

SEQ ID NO: 1954072 - DNA, 15 bp, Homo sapiens
atgtaaatactgtaa

SEQ ID NO: 1954073 - DNA, 15 bp, Homo sapiens
tgtaaatactgtaaa

SEQ ID NO: 1954074 - DNA, 15 bp, Homo sapiens
gtaaatactgtaaac

SEQ ID NO: 1954075 - DNA, 15 bp, Homo sapiens
taaatactgtaaaca

SEQ ID NO: 1954076 - DNA, 15 bp, Homo sapiens
aaatactgtaaacag

SEQ ID NO: 1954077 - DNA, 15 bp, Homo sapiens
aatactgtaaacaga

SEQ ID NO: 1954078 - DNA, 15 bp, Homo sapiens
atactgtaaacagaa

SEQ ID NO: 1954079 - DNA, 15 bp, Homo sapiens
tactgtaaacagaaa

SEQ ID NO: 1954080 - DNA, 15 bp, Homo sapiens
actgtaaacagaaaa

SEQ ID NO: 1954081 - DNA, 15 bp, Homo sapiens
ctgtaaacagaaaag

SEQ ID NO: 1954082 - DNA, 15 bp, Homo sapiens
tgtaaacagaaaaga

SEQ ID NO: 1954083 - DNA, 15 bp, Homo sapiens
gtaaacagaaaagat

SEQ ID NO: 1954084 - DNA, 15 bp, Homo sapiens
taaacagaaaagata

SEQ ID NO: 1954085 - DNA, 15 bp, Homo sapiens
aaacagaaaagatat

SEQ ID NO: 1954086 - DNA, 15 bp, Homo sapiens
aacagaaaagatatt

SEQ ID NO: 1954087 - DNA, 15 bp, Homo sapiens
acagaaaagatattg

SEQ ID NO: 1954088 - DNA, 15 bp, Homo sapiens
cagaaaagatattgg

SEQ ID NO: 1954089 - DNA, 15 bp, Homo sapiens
agaaaagatattgga

SEQ ID NO: 1954090 - DNA, 15 bp, Homo sapiens
gaaaagatattggaa

SEQ ID NO: 1954091 - DNA, 15 bp, Homo sapiens
aaaagatattggaaa

SEQ ID NO: 1954092 - DNA, 15 bp, Homo sapiens
aaagatattggaaaa

SEQ ID NO: 1954093 - DNA, 15 bp, Homo sapiens
aagatattggaaaaa

SEQ ID NO: 1954094 - DNA, 15 bp, Homo sapiens
agatattggaaaaac

SEQ ID NO: 1954095 - DNA, 15 bp, Homo sapiens
gatattggaaaaaca

SEQ ID NO: 1954096 - DNA, 15 bp, Homo sapiens
atattggaaaaacaa

SEQ ID NO: 1954097 - DNA, 15 bp, Homo sapiens
tattggaaaaacaat

SEQ ID NO: 1954098 - DNA, 15 bp, Homo sapiens
attggaaaaacaatt

SEQ ID NO: 1954099 - DNA, 15 bp, Homo sapiens
ttggaaaaacaattg

SEQ ID NO: 1954100 - DNA, 15 bp, Homo sapiens
tggaaaaacaattgt

SEQ ID NO: 1954101 - DNA, 15 bp, Homo sapiens
ggaaaaacaattgtg

SEQ ID NO: 1954102 - DNA, 15 bp, Homo sapiens
gaaaaacaattgtgc

SEQ ID NO: 1954103 - DNA, 15 bp, Homo sapiens
aaaaacaattgtgct

SEQ ID NO: 1954104 - DNA, 15 bp, Homo sapiens
aaaacaattgtgcta

SEQ ID NO: 1954105 - DNA, 15 bp, Homo sapiens
aaacaattgtgctag

SEQ ID NO: 1954106 - DNA, 15 bp, Homo sapiens
aacaattgtgctagt

SEQ ID NO: 1954107 - DNA, 15 bp, Homo sapiens
acaattgtgctagtt

SEQ ID NO: 1954108 - DNA, 15 bp, Homo sapiens
caattgtgctagtta

SEQ ID NO: 1954109 - DNA, 15 bp, Homo sapiens
aattgtgctagttaa

SEQ ID NO: 1954110 - DNA, 15 bp, Homo sapiens
attgtgctagttaac

SEQ ID NO: 1954111 - DNA, 15 bp, Homo sapiens
ttgtgctagttaaca

SEQ ID NO: 1954112 - DNA, 15 bp, Homo sapiens
tgtgctagttaacaa

SEQ ID NO: 1954113 - DNA, 15 bp, Homo sapiens
gtgctagttaacaaa

SEQ ID NO: 1954114 - DNA, 15 bp, Homo sapiens
tgctagttaacaaac

SEQ ID NO: 1954115 - DNA, 15 bp, Homo sapiens
gctagttaacaaact

SEQ ID NO: 1954116 - DNA, 15 bp, Homo sapiens
ctagttaacaaactg

SEQ ID NO: 1954117 - DNA, 15 bp, Homo sapiens
tagttaacaaactga

SEQ ID NO: 1954118 - DNA, 15 bp, Homo sapiens
agttaacaaactgaa

SEQ ID NO: 1954119 - DNA, 15 bp, Homo sapiens
gttaacaaactgaag

SEQ ID NO: 1954120 - DNA, 15 bp, Homo sapiens
ttaacaaactgaagg

SEQ ID NO: 1954121 - DNA, 15 bp, Homo sapiens
taacaaactgaaggg

SEQ ID NO: 1954122 - DNA, 15 bp, Homo sapiens
aacaaactgaagggg

SEQ ID NO: 1954123 - DNA, 15 bp, Homo sapiens
acaaactgaaggggg

SEQ ID NO: 1954124 - DNA, 15 bp, Homo sapiens
caaactgaagggggg

SEQ ID NO: 1954125 - DNA, 15 bp, Homo sapiens
aaactgaagggggga

SEQ ID NO: 1954126 - DNA, 15 bp, Homo sapiens
aactgaaggggggaa

SEQ ID NO: 1954127 - DNA, 15 bp, Homo sapiens
actgaaggggggaaa

SEQ ID NO: 1954128 - DNA, 15 bp, Homo sapiens
ctgaaggggggaaaa

SEQ ID NO: 1954129 - DNA, 15 bp, Homo sapiens
tgaaggggggaaaag

SEQ ID NO: 1954130 - DNA, 15 bp, Homo sapiens
gaaggggggaaaagg

SEQ ID NO: 1954131 - DNA, 15 bp, Homo sapiens
aaggggggaaaaggt

SEQ ID NO: 1954132 - DNA, 15 bp, Homo sapiens
aggggggaaaaggtc

SEQ ID NO: 1954133 - DNA, 15 bp, Homo sapiens
ggggggaaaaggtca

SEQ ID NO: 1954134 - DNA, 15 bp, Homo sapiens
gggggaaaaggtcag

SEQ ID NO: 1954135 - DNA, 15 bp, Homo sapiens
ggggaaaaggtcagt

SEQ ID NO: 1954136 - DNA, 15 bp, Homo sapiens
gggaaaaggtcagta

SEQ ID NO: 1954137 - DNA, 15 bp, Homo sapiens
ggaaaaggtcagtaa

SEQ ID NO: 1954138 - DNA, 15 bp, Homo sapiens
gaaaaggtcagtaaa

SEQ ID NO: 1954139 - DNA, 15 bp, Homo sapiens
aaaaggtcagtaaaa

SEQ ID NO: 1954140 - DNA, 15 bp, Homo sapiens
aaaggtcagtaaaaa

SEQ ID NO: 1954141 - DNA, 15 bp, Homo sapiens
aaggtcagtaaaaaa

SEQ ID NO: 1954142 - DNA, 15 bp, Homo sapiens
aggtcagtaaaaaat

SEQ ID NO: 1954143 - DNA, 15 bp, Homo sapiens
ggtcagtaaaaaata

SEQ ID NO: 1954144 - DNA, 15 bp, Homo sapiens
gtcagtaaaaaataa

SEQ ID NO: 1954145 - DNA, 15 bp, Homo sapiens
tcagtaaaaaataaa

SEQ ID NO: 1954146 - DNA, 15 bp, Homo sapiens
cagtaaaaaataaag

SEQ ID NO: 1954147 - DNA, 15 bp, Homo sapiens
agtaaaaaataaagt

SEQ ID NO: 1954148 - DNA, 15 bp, Homo sapiens
gtaaaaaataaagtt

SEQ ID NO: 1954149 - DNA, 15 bp, Homo sapiens
aaaaaataaagttgc

SEQ ID NO: 1954150 - DNA, 15 bp, Homo sapiens
aaaaataaagttgct

SEQ ID NO: 1954151 - DNA, 15 bp, Homo sapiens
aaaataaagttgctc

SEQ ID NO: 1954152 - DNA, 15 bp, Homo sapiens
aaataaagttgctct

SEQ ID NO: 1954153 - DNA, 15 bp, Homo sapiens
aataaagttgctcta

SEQ ID NO: 1954154 - DNA, 15 bp, Homo sapiens
ataaagttgctctaa

SEQ ID NO: 1954155 - DNA, 15 bp, Homo sapiens
taaagttgctctaag

SEQ ID NO: 1954156 - DNA, 15 bp, Homo sapiens
aaagttgctctaagg

SEQ ID NO: 1954157 - DNA, 15 bp, Homo sapiens
aagttgctctaaggg

SEQ ID NO: 1954158 - DNA, 15 bp, Homo sapiens
agttgctctaagggg

SEQ ID NO: 1954159 - DNA, 15 bp, Homo sapiens
gttgctctaaggggg

SEQ ID NO: 1954160 - DNA, 15 bp, Homo sapiens
ttgctctaaggggga

SEQ ID NO: 1954161 - DNA, 15 bp, Homo sapiens
tgctctaagggggac

SEQ ID NO: 1954162 - DNA, 15 bp, Homo sapiens
gctctaagggggact

SEQ ID NO: 1954163 - DNA, 15 bp, Homo sapiens
ctctaagggggactc

SEQ ID NO: 1954164 - DNA, 15 bp, Homo sapiens
tctaagggggactca

SEQ ID NO: 1954165 - DNA, 15 bp, Homo sapiens
ctaagggggactcaa

SEQ ID NO: 1954166 - DNA, 15 bp, Homo sapiens
taagggggactcaag

SEQ ID NO: 1954167 - DNA, 15 bp, Homo sapiens
aagggggactcaagt

SEQ ID NO: 1954168 - DNA, 15 bp, Homo sapiens
agggggactcaagta

SEQ ID NO: 1954169 - DNA, 15 bp, Homo sapiens
gggggactcaagtac

SEQ ID NO: 1954170 - DNA, 15 bp, Homo sapiens
ggggactcaagtacc

SEQ ID NO: 1954171 - DNA, 15 bp, Homo sapiens
gggactcaagtaccc

SEQ ID NO: 1954172 - DNA, 15 bp, Homo sapiens
ggactcaagtaccca

SEQ ID NO: 1954173 - DNA, 15 bp, Homo sapiens
gactcaagtacccaa

SEQ ID NO: 1954174 - DNA, 15 bp, Homo sapiens
actcaagtacccaat

SEQ ID NO: 1954175 - DNA, 15 bp, Homo sapiens
ctcaagtacccaatt

SEQ ID NO: 1954176 - DNA, 15 bp, Homo sapiens
tcaagtacccaatta

SEQ ID NO: 1954177 - DNA, 15 bp, Homo sapiens
caagtacccaattaa

SEQ ID NO: 1954178 - DNA, 15 bp, Homo sapiens
aagtacccaattaac

SEQ ID NO: 1954179 - DNA, 15 bp, Homo sapiens
agtacccaattaacc

SEQ ID NO: 1954180 - DNA, 15 bp, Homo sapiens
gtacccaattaacca

SEQ ID NO: 1954181 - DNA, 15 bp, Homo sapiens
tacccaattaaccat

SEQ ID NO: 1954182 - DNA, 15 bp, Homo sapiens
acccaattaaccatt

SEQ ID NO: 1954183 - DNA, 15 bp, Homo sapiens
cccaattaaccattt

SEQ ID NO: 1954184 - DNA, 15 bp, Homo sapiens
ccaattaaccatttt

SEQ ID NO: 1954185 - DNA, 15 bp, Homo sapiens
caattaaccatttta

SEQ ID NO: 1954186 - DNA, 15 bp, Homo sapiens
aattaaccattttat

SEQ ID NO: 1954187 - DNA, 15 bp, Homo sapiens
attaaccattttatt

SEQ ID NO: 1954188 - DNA, 15 bp, Homo sapiens
ttaaccattttattt

SEQ ID NO: 1954189 - DNA, 15 bp, Homo sapiens
taaccattttatttt

SEQ ID NO: 1954190 - DNA, 15 bp, Homo sapiens
aaccattttattttt

SEQ ID NO: 1954191 - DNA, 15 bp, Homo sapiens
accattttattttta

SEQ ID NO: 1954192 - DNA, 15 bp, Homo sapiens
ccattttatttttat

SEQ ID NO: 1954193 - DNA, 15 bp, Homo sapiens
cattttatttttatt

SEQ ID NO: 1954194 - DNA, 15 bp, Homo sapiens
attttatttttattt

SEQ ID NO: 1954195 - DNA, 15 bp, Homo sapiens
ttttattttttttct

SEQ ID NO: 1954196 - DNA, 15 bp, Homo sapiens
tttattttttttctg

SEQ ID NO: 1954197 - DNA, 15 bp, Homo sapiens
ttattttttttctga

SEQ ID NO: 1954198 - DNA, 15 bp, Homo sapiens
tattttttttctgag

SEQ ID NO: 1954199 - DNA, 15 bp, Homo sapiens
attttttttctgaga

SEQ ID NO: 1954200 - DNA, 15 bp, Homo sapiens
ttttttttctgagac

SEQ ID NO: 1954201 - DNA, 15 bp, Homo sapiens
tttttttctgagacg

SEQ ID NO: 1954202 - DNA, 15 bp, Homo sapiens
ttttttctgagacgg

SEQ ID NO: 1954203 - DNA, 15 bp, Homo sapiens
tttttctgagacgga

SEQ ID NO: 1954204 - DNA, 15 bp, Homo sapiens
ttttctgagacggag

SEQ ID NO: 1954205 - DNA, 15 bp, Homo sapiens
tttctgagacggagt

SEQ ID NO: 1954206 - DNA, 15 bp, Homo sapiens
ttctgagacggagtc

SEQ ID NO: 1954207 - DNA, 15 bp, Homo sapiens
tctgagacggagtct

SEQ ID NO: 1954208 - DNA, 15 bp, Homo sapiens
ctgagacggagtctc

SEQ ID NO: 1954209 - DNA, 15 bp, Homo sapiens
tgcaagctccgcctt

SEQ ID NO: 1954210 - DNA, 15 bp, Homo sapiens
gcaagctccgccttc

SEQ ID NO: 1954211 - DNA, 15 bp, Homo sapiens
caagctccgccttcc

SEQ ID NO: 1954212 - DNA, 15 bp, Homo sapiens
aagctccgccttccg

SEQ ID NO: 1954213 - DNA, 15 bp, Homo sapiens
agctccgccttccgg

SEQ ID NO: 1954214 - DNA, 15 bp, Homo sapiens
gctccgccttccggg

SEQ ID NO: 1954215 - DNA, 15 bp, Homo sapiens
ctccgccttccgggt

SEQ ID NO: 1954216 - DNA, 15 bp, Homo sapiens
tccgccttccgggtt

SEQ ID NO: 1954217 - DNA, 15 bp, Homo sapiens
ccgccttccgggttc

SEQ ID NO: 1954218 - DNA, 15 bp, Homo sapiens
cgccttccgggttca

SEQ ID NO: 1954219 - DNA, 15 bp, Homo sapiens
gccttccgggttcac

SEQ ID NO: 1954220 - DNA, 15 bp, Homo sapiens
ctcccaagtagctga

SEQ ID NO: 1954221 - DNA, 15 bp, Homo sapiens
tcccaagtagctgag

SEQ ID NO: 1954222 - DNA, 15 bp, Homo sapiens
cccaagtagctgaga

SEQ ID NO: 1954223 - DNA, 15 bp, Homo sapiens
ccaagtagctgagac

SEQ ID NO: 1954224 - DNA, 15 bp, Homo sapiens
caagtagctgagact

SEQ ID NO: 1954225 - DNA, 15 bp, Homo sapiens
aagtagctgagacta

SEQ ID NO: 1954226 - DNA, 15 bp, Homo sapiens
agtagctgagactac

SEQ ID NO: 1954227 - DNA, 15 bp, Homo sapiens
gtagctgagactaca

SEQ ID NO: 1954228 - DNA, 15 bp, Homo sapiens
tagctgagactacag

SEQ ID NO: 1954229 - DNA, 15 bp, Homo sapiens
agctgagactacagg

SEQ ID NO: 1954230 - DNA, 15 bp, Homo sapiens
gctgagactacaggt

SEQ ID NO: 1954231 - DNA, 15 bp, Homo sapiens
ctgagactacaggtg

SEQ ID NO: 1954232 - DNA, 15 bp, Homo sapiens
tgagactacaggtgc

SEQ ID NO: 1954233 - DNA, 15 bp, Homo sapiens
gagactacaggtgcc

SEQ ID NO: 1954234 - DNA, 15 bp, Homo sapiens
agactacaggtgcct

SEQ ID NO: 1954235 - DNA, 15 bp, Homo sapiens
ctgccaccacacccg

SEQ ID NO: 1954236 - DNA, 15 bp, Homo sapiens
tgccaccacacccgt

SEQ ID NO: 1954237 - DNA, 15 bp, Homo sapiens
gccaccacacccgtc

SEQ ID NO: 1954238 - DNA, 15 bp, Homo sapiens
ccaccacacccgtct

SEQ ID NO: 1954239 - DNA, 15 bp, Homo sapiens
caccacacccgtcta

SEQ ID NO: 1954240 - DNA, 15 bp, Homo sapiens
accacacccgtctaa

SEQ ID NO: 1954241 - DNA, 15 bp, Homo sapiens
ccacacccgtctaat

SEQ ID NO: 1954242 - DNA, 15 bp, Homo sapiens
cacacccgtctaatt

SEQ ID NO: 1954243 - DNA, 15 bp, Homo sapiens
acacccgtctaattt

SEQ ID NO: 1954244 - DNA, 15 bp, Homo sapiens
cacccgtctaatttt

SEQ ID NO: 1954245 - DNA, 15 bp, Homo sapiens
acccgtctaattttt

SEQ ID NO: 1954246 - DNA, 15 bp, Homo sapiens
cccgtctaatttttt

SEQ ID NO: 1954247 - DNA, 15 bp, Homo sapiens
ccgtctaattttttg

SEQ ID NO: 1954248 - DNA, 15 bp, Homo sapiens
cgtctaattttttgt

SEQ ID NO: 1954249 - DNA, 15 bp, Homo sapiens
gtctaattttttgta

SEQ ID NO: 1954250 - DNA, 15 bp, Homo sapiens
ttttgtattttcagg

SEQ ID NO: 1954251 - DNA, 15 bp, Homo sapiens
tttgtattttcagga

SEQ ID NO: 1954252 - DNA, 15 bp, Homo sapiens
ttgtattttcaggag

SEQ ID NO: 1954253 - DNA, 15 bp, Homo sapiens
tgtattttcaggaga

SEQ ID NO: 1954254 - DNA, 15 bp, Homo sapiens
gtattttcaggagag

SEQ ID NO: 1954255 - DNA, 15 bp, Homo sapiens
tattttcaggagaga

SEQ ID NO: 1954256 - DNA, 15 bp, Homo sapiens
attttcaggagagat

SEQ ID NO: 1954257 - DNA, 15 bp, Homo sapiens
ttttcaggagagatg

SEQ ID NO: 1954258 - DNA, 15 bp, Homo sapiens
tttcaggagagatgg

SEQ ID NO: 1954259 - DNA, 15 bp, Homo sapiens
ttcaggagagatggg

SEQ ID NO: 1954260 - DNA, 15 bp, Homo sapiens
tcaggagagatgggg

SEQ ID NO: 1954261 - DNA, 15 bp, Homo sapiens
caggagagatggggt

SEQ ID NO: 1954262 - DNA, 15 bp, Homo sapiens
aggagagatggggtt

SEQ ID NO: 1954263 - DNA, 15 bp, Homo sapiens
ggagagatggggttt

SEQ ID NO: 1954264 - DNA, 15 bp, Homo sapiens
gagagatggggtttc

SEQ ID NO: 1954265 - DNA, 15 bp, Homo sapiens
tagccaggatggtcc

SEQ ID NO: 1954266 - DNA, 15 bp, Homo sapiens
agccaggatggtccc

SEQ ID NO: 1954267 - DNA, 15 bp, Homo sapiens
gccaggatggtcccg

SEQ ID NO: 1954268 - DNA, 15 bp, Homo sapiens
ccaggatggtcccga

SEQ ID NO: 1954269 - DNA, 15 bp, Homo sapiens
caggatggtcccgat

SEQ ID NO: 1954270 - DNA, 15 bp, Homo sapiens
aggatggtcccgatc

SEQ ID NO: 1954271 - DNA, 15 bp, Homo sapiens
ggatggtcccgatct

SEQ ID NO: 1954272 - DNA, 15 bp, Homo sapiens
gatggtcccgatctc

SEQ ID NO: 1954273 - DNA, 15 bp, Homo sapiens
atggtcccgatctcc

SEQ ID NO: 1954274 - DNA, 15 bp, Homo sapiens
tggtcccgatctcct

SEQ ID NO: 1954275 - DNA, 15 bp, Homo sapiens
ggtcccgatctcctg

SEQ ID NO: 1954276 - DNA, 15 bp, Homo sapiens
gtcccgatctcctga

SEQ ID NO: 1954277 - DNA, 15 bp, Homo sapiens
tcccgatctcctgac

SEQ ID NO: 1954278 - DNA, 15 bp, Homo sapiens
cccgatctcctgacc

SEQ ID NO: 1954279 - DNA, 15 bp, Homo sapiens
ccgatctcctgacct

SEQ ID NO: 1954280 - DNA, 15 bp, Homo sapiens
cgatctcctgacctt

SEQ ID NO: 1954281 - DNA, 15 bp, Homo sapiens
tgaccttgtgatccg

SEQ ID NO: 1954282 - DNA, 15 bp, Homo sapiens
gaccttgtgatccgc

SEQ ID NO: 1954283 - DNA, 15 bp, Homo sapiens
accttgtgatccgcc

SEQ ID NO: 1954284 - DNA, 15 bp, Homo sapiens
ccttgtgatccgccc

SEQ ID NO: 1954285 - DNA, 15 bp, Homo sapiens
cttgtgatccgccca

SEQ ID NO: 1954286 - DNA, 15 bp, Homo sapiens
ttgtgatccgcccac

SEQ ID NO: 1954287 - DNA, 15 bp, Homo sapiens
tgtgatccgcccacc

SEQ ID NO: 1954288 - DNA, 15 bp, Homo sapiens
tccgcccacctcggc

SEQ ID NO: 1954289 - DNA, 15 bp, Homo sapiens
ccgcccacctcggcc

SEQ ID NO: 1954290 - DNA, 15 bp, Homo sapiens
cgcccacctcggcct

SEQ ID NO: 1954291 - DNA, 15 bp, Homo sapiens
gcccacctcggcctc

SEQ ID NO: 1954292 - DNA, 15 bp, Homo sapiens
caggtgtgaaccact

SEQ ID NO: 1954293 - DNA, 15 bp, Homo sapiens
aggtgtgaaccactg

SEQ ID NO: 1954294 - DNA, 15 bp, Homo sapiens
ggtgtgaaccactgc

SEQ ID NO: 1954295 - DNA, 15 bp, Homo sapiens
gtgtgaaccactgcg

SEQ ID NO: 1954296 - DNA, 15 bp, Homo sapiens
tgtgaaccactgcgc

SEQ ID NO: 1954297 - DNA, 15 bp, Homo sapiens
gtgaaccactgcgcc

SEQ ID NO: 1954298 - DNA, 15 bp, Homo sapiens
tgaaccactgcgccc

SEQ ID NO: 1954299 - DNA, 15 bp, Homo sapiens
gaaccactgcgcccg

SEQ ID NO: 1954300 - DNA, 15 bp, Homo sapiens
aaccactgcgcccgg

SEQ ID NO: 1954301 - DNA, 15 bp, Homo sapiens
accactgcgcccggc

SEQ ID NO: 1954302 - DNA, 15 bp, Homo sapiens
cactgcgcccggccg

SEQ ID NO: 1954303 - DNA, 15 bp, Homo sapiens
actgcgcccggccgc

SEQ ID NO: 1954304 - DNA, 15 bp, Homo sapiens
ctgcgcccggccgct

SEQ ID NO: 1954305 - DNA, 15 bp, Homo sapiens
tgcgcccggccgctt

SEQ ID NO: 1954306 - DNA, 15 bp, Homo sapiens
gcgcccggccgcttt

SEQ ID NO: 1954307 - DNA, 15 bp, Homo sapiens
cgcccggccgcttta

SEQ ID NO: 1954308 - DNA, 15 bp, Homo sapiens
gcccggccgctttac

SEQ ID NO: 1954309 - DNA, 15 bp, Homo sapiens
cccggccgctttact

SEQ ID NO: 1954310 - DNA, 15 bp, Homo sapiens
ccggccgctttactc

SEQ ID NO: 1954311 - DNA, 15 bp, Homo sapiens
cggccgctttactct

SEQ ID NO: 1954312 - DNA, 15 bp, Homo sapiens
ggccgctttactctt

SEQ ID NO: 1954313 - DNA, 15 bp, Homo sapiens
gccgctttactctta

SEQ ID NO: 1954314 - DNA, 15 bp, Homo sapiens
ccgctttactcttaa

SEQ ID NO: 1954315 - DNA, 15 bp, Homo sapiens
cgctttactcttaag

SEQ ID NO: 1954316 - DNA, 15 bp, Homo sapiens
gctttactcttaagt

SEQ ID NO: 1954317 - DNA, 15 bp, Homo sapiens
ctttactcttaagtt

SEQ ID NO: 1954318 - DNA, 15 bp, Homo sapiens
tttactcttaagttc

SEQ ID NO: 1954319 - DNA, 15 bp, Homo sapiens
ttactcttaagttca

SEQ ID NO: 1954320 - DNA, 15 bp, Homo sapiens
tactcttaagttcac

SEQ ID NO: 1954321 - DNA, 15 bp, Homo sapiens
actcttaagttcacg

SEQ ID NO: 1954322 - DNA, 15 bp, Homo sapiens
ctcttaagttcacga

SEQ ID NO: 1954323 - DNA, 15 bp, Homo sapiens
tcttaagttcacgag

SEQ ID NO: 1954324 - DNA, 15 bp, Homo sapiens
cttaagttcacgaga

SEQ ID NO: 1954325 - DNA, 15 bp, Homo sapiens
ttaagttcacgagaa

SEQ ID NO: 1954326 - DNA, 15 bp, Homo sapiens
taagttcacgagaaa

SEQ ID NO: 1954327 - DNA, 15 bp, Homo sapiens
aagttcacgagaaaa

SEQ ID NO: 1954328 - DNA, 15 bp, Homo sapiens
agttcacgagaaaaa

SEQ ID NO: 1954329 - DNA, 15 bp, Homo sapiens
gttcacgagaaaaat

SEQ ID NO: 1954330 - DNA, 15 bp, Homo sapiens
ttcacgagaaaaatt

SEQ ID NO: 1954331 - DNA, 15 bp, Homo sapiens
tcacgagaaaaattt

SEQ ID NO: 1954332 - DNA, 15 bp, Homo sapiens
cacgagaaaaattta

SEQ ID NO: 1954333 - DNA, 15 bp, Homo sapiens
acgagaaaaatttat

SEQ ID NO: 1954334 - DNA, 15 bp, Homo sapiens
cgagaaaaatttatg

SEQ ID NO: 1954335 - DNA, 15 bp, Homo sapiens
gagaaaaatttatgt

SEQ ID NO: 1954336 - DNA, 15 bp, Homo sapiens
agaaaaatttatgtc

SEQ ID NO: 1954337 - DNA, 15 bp, Homo sapiens
gaaaaatttatgtca

SEQ ID NO: 1954338 - DNA, 15 bp, Homo sapiens
aaaaatttatgtcaa

SEQ ID NO: 1954339 - DNA, 15 bp, Homo sapiens
aaaatttatgtcaat

SEQ ID NO: 1954340 - DNA, 15 bp, Homo sapiens
aaatttatgtcaatg

SEQ ID NO: 1954341 - DNA, 15 bp, Homo sapiens
aatttatgtcaatgt

SEQ ID NO: 1954342 - DNA, 15 bp, Homo sapiens
atttatgtcaatgtt

SEQ ID NO: 1954343 - DNA, 15 bp, Homo sapiens
tttatgtcaatgtta

SEQ ID NO: 1954344 - DNA, 15 bp, Homo sapiens
ttatgtcaatgttat

SEQ ID NO: 1954345 - DNA, 15 bp, Homo sapiens
tatgtcaatgttata

SEQ ID NO: 1954346 - DNA, 15 bp, Homo sapiens
atgtcaatgttatag

SEQ ID NO: 1954347 - DNA, 15 bp, Homo sapiens
tgtcaatgttataga

SEQ ID NO: 1954348 - DNA, 15 bp, Homo sapiens
gtcaatgttatagaa

SEQ ID NO: 1954349 - DNA, 15 bp, Homo sapiens
tcaatgttatagaac

SEQ ID NO: 1954350 - DNA, 15 bp, Homo sapiens
caatgttatagaaca

SEQ ID NO: 1954351 - DNA, 15 bp, Homo sapiens
aatgttatagaacag

SEQ ID NO: 1954352 - DNA, 15 bp, Homo sapiens
atgttatagaacagt

SEQ ID NO: 1954353 - DNA, 15 bp, Homo sapiens
tgttatagaacagtc

SEQ ID NO: 1954354 - DNA, 15 bp, Homo sapiens
gttatagaacagtct

SEQ ID NO: 1954355 - DNA, 15 bp, Homo sapiens
ttatagaacagtctt

SEQ ID NO: 1954356 - DNA, 15 bp, Homo sapiens
tatagaacagtcttg

SEQ ID NO: 1954357 - DNA, 15 bp, Homo sapiens
atagaacagtcttga

SEQ ID NO: 1954358 - DNA, 15 bp, Homo sapiens
tagaacagtcttgaa

SEQ ID NO: 1954359 - DNA, 15 bp, Homo sapiens
agaacagtcttgaaa

SEQ ID NO: 1954360 - DNA, 15 bp, Homo sapiens
gaacagtcttgaaaa

SEQ ID NO: 1954361 - DNA, 15 bp, Homo sapiens
aacagtcttgaaaat

SEQ ID NO: 1954362 - DNA, 15 bp, Homo sapiens
acagtcttgaaaatg

SEQ ID NO: 1954363 - DNA, 15 bp, Homo sapiens
cagtcttgaaaatgt

SEQ ID NO: 1954364 - DNA, 15 bp, Homo sapiens
agtcttgaaaatgtt

SEQ ID NO: 1954365 - DNA, 15 bp, Homo sapiens
gtcttgaaaatgttt

SEQ ID NO: 1954366 - DNA, 15 bp, Homo sapiens
tcttgaaaatgtttt

SEQ ID NO: 1954367 - DNA, 15 bp, Homo sapiens
cttgaaaatgttttt

SEQ ID NO: 1954368 - DNA, 15 bp, Homo sapiens
ttgaaaatgtttttt

SEQ ID NO: 1954369 - DNA, 15 bp, Homo sapiens
tgaaaatgttttttt

SEQ ID NO: 1954370 - DNA, 15 bp, Homo sapiens
gaaaatgtttttttg

SEQ ID NO: 1954371 - DNA, 15 bp, Homo sapiens
aaaatgtttttttga

SEQ ID NO: 1954372 - DNA, 15 bp, Homo sapiens
aaatgtttttttgat

SEQ ID NO: 1954373 - DNA, 15 bp, Homo sapiens
aatgtttttttgatg

SEQ ID NO: 1954374 - DNA, 15 bp, Homo sapiens
atgtttttttgatga

SEQ ID NO: 1954375 - DNA, 15 bp, Homo sapiens
tgtttttttgatgat

SEQ ID NO: 1954376 - DNA, 15 bp, Homo sapiens
gtttttttgatgatg

SEQ ID NO: 1954377 - DNA, 15 bp, Homo sapiens
tttttttgatgatga

SEQ ID NO: 1954378 - DNA, 15 bp, Homo sapiens
ttttttgatgatgag

SEQ ID NO: 1954379 - DNA, 15 bp, Homo sapiens
tttttgatgatgagt

SEQ ID NO: 1954380 - DNA, 15 bp, Homo sapiens
ttttgatgatgagta

SEQ ID NO: 1954381 - DNA, 15 bp, Homo sapiens
tttgatgatgagtat

SEQ ID NO: 1954382 - DNA, 15 bp, Homo sapiens
ttgatgatgagtatt

SEQ ID NO: 1954383 - DNA, 15 bp, Homo sapiens
tgatgatgagtatta

SEQ ID NO: 1954384 - DNA, 15 bp, Homo sapiens
gatgatgagtattag

SEQ ID NO: 1954385 - DNA, 15 bp, Homo sapiens
atgatgagtattaga

SEQ ID NO: 1954386 - DNA, 15 bp, Homo sapiens
tgatgagtattagaa

SEQ ID NO: 1954387 - DNA, 15 bp, Homo sapiens
gatgagtattagaat

SEQ ID NO: 1954388 - DNA, 15 bp, Homo sapiens
atgagtattagaata

SEQ ID NO: 1954389 - DNA, 15 bp, Homo sapiens
tgagtattagaatac

SEQ ID NO: 1954390 - DNA, 15 bp, Homo sapiens
gagtattagaatacc

SEQ ID NO: 1954391 - DNA, 15 bp, Homo sapiens
agtattagaatacct

SEQ ID NO: 1954392 - DNA, 15 bp, Homo sapiens
gtattagaatacctc

SEQ ID NO: 1954393 - DNA, 15 bp, Homo sapiens
tattagaatacctcc

SEQ ID NO: 1954394 - DNA, 15 bp, Homo sapiens
attagaatacctccc

SEQ ID NO: 1954395 - DNA, 15 bp, Homo sapiens
ttagaatacctccct

SEQ ID NO: 1954396 - DNA, 15 bp, Homo sapiens
tagaatacctccctt

SEQ ID NO: 1954397 - DNA, 15 bp, Homo sapiens
agaatacctcccttt

SEQ ID NO: 1954398 - DNA, 15 bp, Homo sapiens
gaatacctcccttta

SEQ ID NO: 1954399 - DNA, 15 bp, Homo sapiens
aatacctccctttaa

SEQ ID NO: 1954400 - DNA, 15 bp, Homo sapiens
atacctccctttaac

SEQ ID NO: 1954401 - DNA, 15 bp, Homo sapiens
tacctccctttaact

SEQ ID NO: 1954402 - DNA, 15 bp, Homo sapiens
acctccctttaactc

SEQ ID NO: 1954403 - DNA, 15 bp, Homo sapiens
cctccctttaactca

SEQ ID NO: 1954404 - DNA, 15 bp, Homo sapiens
ctccctttaactcag

SEQ ID NO: 1954405 - DNA, 15 bp, Homo sapiens
tccctttaactcagg

SEQ ID NO: 1954406 - DNA, 15 bp, Homo sapiens
ccctttaactcaggt

SEQ ID NO: 1954407 - DNA, 15 bp, Homo sapiens
cctttaactcaggtg

SEQ ID NO: 1954408 - DNA, 15 bp, Homo sapiens
ctttaactcaggtgc

SEQ ID NO: 1954409 - DNA, 15 bp, Homo sapiens
tttaactcaggtgct

SEQ ID NO: 1954410 - DNA, 15 bp, Homo sapiens
ttaactcaggtgctg

SEQ ID NO: 1954411 - DNA, 15 bp, Homo sapiens
taactcaggtgctga

SEQ ID NO: 1954412 - DNA, 15 bp, Homo sapiens
aactcaggtgctgag

SEQ ID NO: 1954413 - DNA, 15 bp, Homo sapiens
actcaggtgctgaga

SEQ ID NO: 1954414 - DNA, 15 bp, Homo sapiens
ctcaggtgctgagat

SEQ ID NO: 1954415 - DNA, 15 bp, Homo sapiens
tcaggtgctgagata

SEQ ID NO: 1954416 - DNA, 15 bp, Homo sapiens
caggtgctgagatat

SEQ ID NO: 1954417 - DNA, 15 bp, Homo sapiens
aggtgctgagatatc

SEQ ID NO: 1954418 - DNA, 15 bp, Homo sapiens
ggtgctgagatatca

SEQ ID NO: 1954419 - DNA, 15 bp, Homo sapiens
gtgctgagatatcac

SEQ ID NO: 1954420 - DNA, 15 bp, Homo sapiens
tgctgagatatcaca

SEQ ID NO: 1954421 - DNA, 15 bp, Homo sapiens
gctgagatatcacat

SEQ ID NO: 1954422 - DNA, 15 bp, Homo sapiens
ctgagatatcacatc

SEQ ID NO: 1954423 - DNA, 15 bp, Homo sapiens
tgagatatcacatct

SEQ ID NO: 1954424 - DNA, 15 bp, Homo sapiens
gagatatcacatctc

SEQ ID NO: 1954425 - DNA, 15 bp, Homo sapiens
agatatcacatctcc

SEQ ID NO: 1954426 - DNA, 15 bp, Homo sapiens
gatatcacatctccc

SEQ ID NO: 1954427 - DNA, 15 bp, Homo sapiens
atatcacatctccca

SEQ ID NO: 1954428 - DNA, 15 bp, Homo sapiens
tatcacatctcccag

SEQ ID NO: 1954429 - DNA, 15 bp, Homo sapiens
atcacatctcccaga

SEQ ID NO: 1954430 - DNA, 15 bp, Homo sapiens
tcacatctcccagaa

SEQ ID NO: 1954431 - DNA, 15 bp, Homo sapiens
cacatctcccagaag

SEQ ID NO: 1954432 - DNA, 15 bp, Homo sapiens
acatctcccagaagg

SEQ ID NO: 1954433 - DNA, 15 bp, Homo sapiens
catctcccagaaggt

SEQ ID NO: 1954434 - DNA, 15 bp, Homo sapiens
atctcccagaaggtc

SEQ ID NO: 1954435 - DNA, 15 bp, Homo sapiens
tctcccagaaggtca

SEQ ID NO: 1954436 - DNA, 15 bp, Homo sapiens
ctcccagaaggtcaa

SEQ ID NO: 1954437 - DNA, 15 bp, Homo sapiens
tcccagaaggtcaac

SEQ ID NO: 1954438 - DNA, 15 bp, Homo sapiens
cccagaaggtcaaca

SEQ ID NO: 1954439 - DNA, 15 bp, Homo sapiens
ccagaaggtcaacaa

SEQ ID NO: 1954440 - DNA, 15 bp, Homo sapiens
cagaaggtcaacaaa

SEQ ID NO: 1954441 - DNA, 15 bp, Homo sapiens
agaaggtcaacaaac

SEQ ID NO: 1954442 - DNA, 15 bp, Homo sapiens
gaaggtcaacaaact

SEQ ID NO: 1954443 - DNA, 15 bp, Homo sapiens
aaggtcaacaaacta

SEQ ID NO: 1954444 - DNA, 15 bp, Homo sapiens
aggtcaacaaactac

SEQ ID NO: 1954445 - DNA, 15 bp, Homo sapiens
ggtcaacaaactact

SEQ ID NO: 1954446 - DNA, 15 bp, Homo sapiens
gtcaacaaactactc

SEQ ID NO: 1954447 - DNA, 15 bp, Homo sapiens
tcaacaaactactca

SEQ ID NO: 1954448 - DNA, 15 bp, Homo sapiens
caacaaactactcag

SEQ ID NO: 1954449 - DNA, 15 bp, Homo sapiens
aacaaactactcagg

SEQ ID NO: 1954450 - DNA, 15 bp, Homo sapiens
acaaactactcaggt

SEQ ID NO: 1954451 - DNA, 15 bp, Homo sapiens
caaactactcaggtg

SEQ ID NO: 1954452 - DNA, 15 bp, Homo sapiens
aaactactcaggtgg

SEQ ID NO: 1954453 - DNA, 15 bp, Homo sapiens
aactactcaggtggt

SEQ ID NO: 1954454 - DNA, 15 bp, Homo sapiens
actactcaggtggtg

SEQ ID NO: 1954455 - DNA, 15 bp, Homo sapiens
ctactcaggtggtgg

SEQ ID NO: 1954456 - DNA, 15 bp, Homo sapiens
tactcaggtggtggg

SEQ ID NO: 1954457 - DNA, 15 bp, Homo sapiens
actcaggtggtggga

SEQ ID NO: 1954458 - DNA, 15 bp, Homo sapiens
ctcaggtggtgggat

SEQ ID NO: 1954459 - DNA, 15 bp, Homo sapiens
tcaggtggtgggatc

SEQ ID NO: 1954460 - DNA, 15 bp, Homo sapiens
caggtggtgggatct

SEQ ID NO: 1954461 - DNA, 15 bp, Homo sapiens
aggtggtgggatcta

SEQ ID NO: 1954462 - DNA, 15 bp, Homo sapiens
ggtggtgggatctat

SEQ ID NO: 1954463 - DNA, 15 bp, Homo sapiens
gtggtgggatctatt

SEQ ID NO: 1954464 - DNA, 15 bp, Homo sapiens
tggtgggatctattg

SEQ ID NO: 1954465 - DNA, 15 bp, Homo sapiens
ggtgggatctattgt

SEQ ID NO: 1954466 - DNA, 15 bp, Homo sapiens
gtgggatctattgtg

SEQ ID NO: 1954467 - DNA, 15 bp, Homo sapiens
tgggatctattgtgt

SEQ ID NO: 1954468 - DNA, 15 bp, Homo sapiens
gggatctattgtgta

SEQ ID NO: 1954469 - DNA, 15 bp, Homo sapiens
ggatctattgtgtaa

SEQ ID NO: 1954470 - DNA, 15 bp, Homo sapiens
gatctattgtgtaaa

SEQ ID NO: 1954471 - DNA, 15 bp, Homo sapiens
atctattgtgtaaat

SEQ ID NO: 1954472 - DNA, 15 bp, Homo sapiens
tctattgtgtaaatg

SEQ ID NO: 1954473 - DNA, 15 bp, Homo sapiens
ctattgtgtaaatga

SEQ ID NO: 1954474 - DNA, 15 bp, Homo sapiens
tattgtgtaaatgaa

SEQ ID NO: 1954475 - DNA, 15 bp, Homo sapiens
attgtgtaaatgaat

SEQ ID NO: 1954476 - DNA, 15 bp, Homo sapiens
ttgtgtaaatgaatc

SEQ ID NO: 1954477 - DNA, 15 bp, Homo sapiens
tgtgtaaatgaatct

SEQ ID NO: 1954478 - DNA, 15 bp, Homo sapiens
gtgtaaatgaatctg

SEQ ID NO: 1954479 - DNA, 15 bp, Homo sapiens
tgtaaatgaatctgc

SEQ ID NO: 1954480 - DNA, 15 bp, Homo sapiens
gtaaatgaatctgcc

SEQ ID NO: 1954481 - DNA, 15 bp, Homo sapiens
taaatgaatctgcca

SEQ ID NO: 1954482 - DNA, 15 bp, Homo sapiens
aaatgaatctgccag

SEQ ID NO: 1954483 - DNA, 15 bp, Homo sapiens
aatgaatctgccaga

SEQ ID NO: 1954484 - DNA, 15 bp, Homo sapiens
atgaatctgccagat

SEQ ID NO: 1954485 - DNA, 15 bp, Homo sapiens
tgaatctgccagatt

SEQ ID NO: 1954486 - DNA, 15 bp, Homo sapiens
gaatctgccagatta

SEQ ID NO: 1954487 - DNA, 15 bp, Homo sapiens
aatctgccagattaa

SEQ ID NO: 1954488 - DNA, 15 bp, Homo sapiens
atctgccagattaac

SEQ ID NO: 1954489 - DNA, 15 bp, Homo sapiens
tctgccagattaact

SEQ ID NO: 1954490 - DNA, 15 bp, Homo sapiens
ctgccagattaactg

SEQ ID NO: 1954491 - DNA, 15 bp, Homo sapiens
tgccagattaactgc

SEQ ID NO: 1954492 - DNA, 15 bp, Homo sapiens
gccagattaactgct

SEQ ID NO: 1954493 - DNA, 15 bp, Homo sapiens
ccagattaactgctc

SEQ ID NO: 1954494 - DNA, 15 bp, Homo sapiens
cagattaactgctcc

SEQ ID NO: 1954495 - DNA, 15 bp, Homo sapiens
agattaactgctcca

SEQ ID NO: 1954496 - DNA, 15 bp, Homo sapiens
gattaactgctccac

SEQ ID NO: 1954497 - DNA, 15 bp, Homo sapiens
attaactgctccact

SEQ ID NO: 1954498 - DNA, 15 bp, Homo sapiens
ttaactgctccacta

SEQ ID NO: 1954499 - DNA, 15 bp, Homo sapiens
taactgctccactaa

SEQ ID NO: 1954500 - DNA, 15 bp, Homo sapiens
aactgctccactaaa

SEQ ID NO: 1954501 - DNA, 15 bp, Homo sapiens
actgctccactaaac

SEQ ID NO: 1954502 - DNA, 15 bp, Homo sapiens
ctgctccactaaaca

SEQ ID NO: 1954503 - DNA, 15 bp, Homo sapiens
tgctccactaaacac

SEQ ID NO: 1954504 - DNA, 15 bp, Homo sapiens
gctccactaaacacc

SEQ ID NO: 1954505 - DNA, 15 bp, Homo sapiens
ctccactaaacacct

SEQ ID NO: 1954506 - DNA, 15 bp, Homo sapiens
tccactaaacacctc

SEQ ID NO: 1954507 - DNA, 15 bp, Homo sapiens
ccactaaacacctct

SEQ ID NO: 1954508 - DNA, 15 bp, Homo sapiens
cactaaacacctctt

SEQ ID NO: 1954509 - DNA, 15 bp, Homo sapiens
actaaacacctcttc

SEQ ID NO: 1954510 - DNA, 15 bp, Homo sapiens
ctaaacacctcttct

SEQ ID NO: 1954511 - DNA, 15 bp, Homo sapiens
taaacacctcttctt

SEQ ID NO: 1954512 - DNA, 15 bp, Homo sapiens
aaacacctcttcttt

SEQ ID NO: 1954513 - DNA, 15 bp, Homo sapiens
aacacctcttctttg

SEQ ID NO: 1954514 - DNA, 15 bp, Homo sapiens
acacctcttctttga

SEQ ID NO: 1954515 - DNA, 15 bp, Homo sapiens
cacctcttctttgag

SEQ ID NO: 1954516 - DNA, 15 bp, Homo sapiens
acctcttctttgaga

SEQ ID NO: 1954517 - DNA, 15 bp, Homo sapiens
cctcttctttgagat

SEQ ID NO: 1954518 - DNA, 15 bp, Homo sapiens
ctcttctttgagatc

SEQ ID NO: 1954519 - DNA, 15 bp, Homo sapiens
tcttctttgagatcc

SEQ ID NO: 1954520 - DNA, 15 bp, Homo sapiens
cttctttgagatcca

SEQ ID NO: 1954521 - DNA, 15 bp, Homo sapiens
ttctttgagatccat

SEQ ID NO: 1954522 - DNA, 15 bp, Homo sapiens
tctttgagatccata

SEQ ID NO: 1954523 - DNA, 15 bp, Homo sapiens
ctttgagatccatag

SEQ ID NO: 1954524 - DNA, 15 bp, Homo sapiens
tttgagatccatagg

SEQ ID NO: 1954525 - DNA, 15 bp, Homo sapiens
ttgagatccataggg

SEQ ID NO: 1954526 - DNA, 15 bp, Homo sapiens
tgagatccataggga

SEQ ID NO: 1954527 - DNA, 15 bp, Homo sapiens
gagatccatagggac

SEQ ID NO: 1954528 - DNA, 15 bp, Homo sapiens
agatccatagggact

SEQ ID NO: 1954529 - DNA, 15 bp, Homo sapiens
gatccatagggactt

SEQ ID NO: 1954530 - DNA, 15 bp, Homo sapiens
atccatagggacttc

SEQ ID NO: 1954531 - DNA, 15 bp, Homo sapiens
tccatagggacttcc

SEQ ID NO: 1954532 - DNA, 15 bp, Homo sapiens
ccatagggacttccc

SEQ ID NO: 1954533 - DNA, 15 bp, Homo sapiens
catagggacttccct

SEQ ID NO: 1954534 - DNA, 15 bp, Homo sapiens
atagggacttcccta

SEQ ID NO: 1954535 - DNA, 15 bp, Homo sapiens
tagggacttccctat

SEQ ID NO: 1954536 - DNA, 15 bp, Homo sapiens
agggacttccctatt

SEQ ID NO: 1954537 - DNA, 15 bp, Homo sapiens
gggacttccctatta

SEQ ID NO: 1954538 - DNA, 15 bp, Homo sapiens
ggacttccctattaa

SEQ ID NO: 1954539 - DNA, 15 bp, Homo sapiens
gacttccctattaaa

SEQ ID NO: 1954540 - DNA, 15 bp, Homo sapiens
acttccctattaaaa

SEQ ID NO: 1954541 - DNA, 15 bp, Homo sapiens
cttccctattaaaac

SEQ ID NO: 1954542 - DNA, 15 bp, Homo sapiens
ttccctattaaaaca

SEQ ID NO: 1954543 - DNA, 15 bp, Homo sapiens
tccctattaaaacac

SEQ ID NO: 1954544 - DNA, 15 bp, Homo sapiens
ccctattaaaacaca

SEQ ID NO: 1954545 - DNA, 15 bp, Homo sapiens
cctattaaaacacag

SEQ ID NO: 1954546 - DNA, 15 bp, Homo sapiens
ctattaaaacacagg

SEQ ID NO: 1954547 - DNA, 15 bp, Homo sapiens
tattaaaacacaggc

SEQ ID NO: 1954548 - DNA, 15 bp, Homo sapiens
attaaaacacaggcc

SEQ ID NO: 1954549 - DNA, 15 bp, Homo sapiens
ttaaaacacaggcca

SEQ ID NO: 1954550 - DNA, 15 bp, Homo sapiens
taaaacacaggccaa

SEQ ID NO: 1954551 - DNA, 15 bp, Homo sapiens
aaaacacaggccaag

SEQ ID NO: 1954552 - DNA, 15 bp, Homo sapiens
aaacacaggccaagg

SEQ ID NO: 1954553 - DNA, 15 bp, Homo sapiens
aacacaggccaaggc

SEQ ID NO: 1954554 - DNA, 15 bp, Homo sapiens
acacaggccaaggct

SEQ ID NO: 1954555 - DNA, 15 bp, Homo sapiens
cacaggccaaggcta

SEQ ID NO: 1954556 - DNA, 15 bp, Homo sapiens
acaggccaaggctag

SEQ ID NO: 1954557 - DNA, 15 bp, Homo sapiens
caggccaaggctagt

SEQ ID NO: 1954558 - DNA, 15 bp, Homo sapiens
aggccaaggctagtt

SEQ ID NO: 1954559 - DNA, 15 bp, Homo sapiens
ggccaaggctagttt

SEQ ID NO: 1954560 - DNA, 15 bp, Homo sapiens
gccaaggctagtttg

SEQ ID NO: 1954561 - DNA, 15 bp, Homo sapiens
ccaaggctagtttga

SEQ ID NO: 1954562 - DNA, 15 bp, Homo sapiens
caaggctagtttgaa

SEQ ID NO: 1954563 - DNA, 15 bp, Homo sapiens
aaggctagtttgaaa

SEQ ID NO: 1954564 - DNA, 15 bp, Homo sapiens
aggctagtttgaaaa

SEQ ID NO: 1954565 - DNA, 15 bp, Homo sapiens
ggctagtttgaaaat

SEQ ID NO: 1954566 - DNA, 15 bp, Homo sapiens
gctagtttgaaaatg

SEQ ID NO: 1954567 - DNA, 15 bp, Homo sapiens
ctagtttgaaaatgt

SEQ ID NO: 1954568 - DNA, 15 bp, Homo sapiens
tagtttgaaaatgta

SEQ ID NO: 1954569 - DNA, 15 bp, Homo sapiens
agtttgaaaatgtac

SEQ ID NO: 1954570 - DNA, 15 bp, Homo sapiens
gtttgaaaatgtact

SEQ ID NO: 1954571 - DNA, 15 bp, Homo sapiens
tttgaaaatgtactg

SEQ ID NO: 1954572 - DNA, 15 bp, Homo sapiens
ttgaaaatgtactgg

SEQ ID NO: 1954573 - DNA, 15 bp, Homo sapiens
tgaaaatgtactggt

SEQ ID NO: 1954574 - DNA, 15 bp, Homo sapiens
gaaaatgtactggta

SEQ ID NO: 1954575 - DNA, 15 bp, Homo sapiens
aaaatgtactggtat

SEQ ID NO: 1954576 - DNA, 15 bp, Homo sapiens
aaatgtactggtatc

SEQ ID NO: 1954577 - DNA, 15 bp, Homo sapiens
aatgtactggtatcc

SEQ ID NO: 1954578 - DNA, 15 bp, Homo sapiens
atgtactggtatcct

SEQ ID NO: 1954579 - DNA, 15 bp, Homo sapiens
tgtactggtatcctt

SEQ ID NO: 1954580 - DNA, 15 bp, Homo sapiens
gtactggtatccttg

SEQ ID NO: 1954581 - DNA, 15 bp, Homo sapiens
tactggtatccttgt

SEQ ID NO: 1954582 - DNA, 15 bp, Homo sapiens
actggtatccttgtg

SEQ ID NO: 1954583 - DNA, 15 bp, Homo sapiens
ctggtatccttgtgc

SEQ ID NO: 1954584 - DNA, 15 bp, Homo sapiens
tggtatccttgtgcc

SEQ ID NO: 1954585 - DNA, 15 bp, Homo sapiens
ggtatccttgtgcct

SEQ ID NO: 1954586 - DNA, 15 bp, Homo sapiens
gtatccttgtgccta

SEQ ID NO: 1954587 - DNA, 15 bp, Homo sapiens
tatccttgtgcctaa

SEQ ID NO: 1954588 - DNA, 15 bp, Homo sapiens
atccttgtgcctaaa

SEQ ID NO: 1954589 - DNA, 15 bp, Homo sapiens
tccttgtgcctaaat

SEQ ID NO: 1954590 - DNA, 15 bp, Homo sapiens
ccttgtgcctaaatc

SEQ ID NO: 1954591 - DNA, 15 bp, Homo sapiens
cttgtgcctaaatca

SEQ ID NO: 1954592 - DNA, 15 bp, Homo sapiens
ttgtgcctaaatcaa

SEQ ID NO: 1954593 - DNA, 15 bp, Homo sapiens
tgtgcctaaatcaag

SEQ ID NO: 1954594 - DNA, 15 bp, Homo sapiens
gtgcctaaatcaagc

SEQ ID NO: 1954595 - DNA, 15 bp, Homo sapiens
tgcctaaatcaagct

SEQ ID NO: 1954596 - DNA, 15 bp, Homo sapiens
gcctaaatcaagctc

SEQ ID NO: 1954597 - DNA, 15 bp, Homo sapiens
cctaaatcaagctca

SEQ ID NO: 1954598 - DNA, 15 bp, Homo sapiens
ctaaatcaagctcac

SEQ ID NO: 1954599 - DNA, 15 bp, Homo sapiens
taaatcaagctcaca

SEQ ID NO: 1954600 - DNA, 15 bp, Homo sapiens
aaatcaagctcacat

SEQ ID NO: 1954601 - DNA, 15 bp, Homo sapiens
aatcaagctcacatt

SEQ ID NO: 1954602 - DNA, 15 bp, Homo sapiens
atcaagctcacattg

SEQ ID NO: 1954603 - DNA, 15 bp, Homo sapiens
tcaagctcacattga

SEQ ID NO: 1954604 - DNA, 15 bp, Homo sapiens
caagctcacattgaa

SEQ ID NO: 1954605 - DNA, 15 bp, Homo sapiens
aagctcacattgaag

SEQ ID NO: 1954606 - DNA, 15 bp, Homo sapiens
agctcacattgaagg

SEQ ID NO: 1954607 - DNA, 15 bp, Homo sapiens
gctcacattgaaggt

SEQ ID NO: 1954608 - DNA, 15 bp, Homo sapiens
ctcacattgaaggtc

SEQ ID NO: 1954609 - DNA, 15 bp, Homo sapiens
tcacattgaaggtct

SEQ ID NO: 1954610 - DNA, 15 bp, Homo sapiens
cacattgaaggtctc

SEQ ID NO: 1954611 - DNA, 15 bp, Homo sapiens
acattgaaggtctct

SEQ ID NO: 1954612 - DNA, 15 bp, Homo sapiens
cattgaaggtctcta

SEQ ID NO: 1954613 - DNA, 15 bp, Homo sapiens
attgaaggtctctat

SEQ ID NO: 1954614 - DNA, 15 bp, Homo sapiens
ttgaaggtctctata

SEQ ID NO: 1954615 - DNA, 15 bp, Homo sapiens
tgaaggtctctataa

SEQ ID NO: 1954616 - DNA, 15 bp, Homo sapiens
gaaggtctctataat

SEQ ID NO: 1954617 - DNA, 15 bp, Homo sapiens
aaggtctctataatg

SEQ ID NO: 1954618 - DNA, 15 bp, Homo sapiens
aggtctctataatgt

SEQ ID NO: 1954619 - DNA, 15 bp, Homo sapiens
ggtctctataatgtc

SEQ ID NO: 1954620 - DNA, 15 bp, Homo sapiens
gtctctataatgtcc

SEQ ID NO: 1954621 - DNA, 15 bp, Homo sapiens
tctctataatgtcct

SEQ ID NO: 1954622 - DNA, 15 bp, Homo sapiens
ctctataatgtcctg

SEQ ID NO: 1954623 - DNA, 15 bp, Homo sapiens
tctataatgtcctgt

SEQ ID NO: 1954624 - DNA, 15 bp, Homo sapiens
ctataatgtcctgta

SEQ ID NO: 1954625 - DNA, 15 bp, Homo sapiens
tataatgtcctgtac

SEQ ID NO: 1954626 - DNA, 15 bp, Homo sapiens
ataatgtcctgtact

SEQ ID NO: 1954627 - DNA, 15 bp, Homo sapiens
taatgtcctgtactg

SEQ ID NO: 1954628 - DNA, 15 bp, Homo sapiens
aatgtcctgtactgg

SEQ ID NO: 1954629 - DNA, 15 bp, Homo sapiens
atgtcctgtactggc

SEQ ID NO: 1954630 - DNA, 15 bp, Homo sapiens
tgtcctgtactggcc

SEQ ID NO: 1954631 - DNA, 15 bp, Homo sapiens
gtcctgtactggcct

SEQ ID NO: 1954632 - DNA, 15 bp, Homo sapiens
tcctgtactggcctc

SEQ ID NO: 1954633 - DNA, 15 bp, Homo sapiens
cctgtactggcctcc

SEQ ID NO: 1954634 - DNA, 15 bp, Homo sapiens
ctgtactggcctcct

SEQ ID NO: 1954635 - DNA, 15 bp, Homo sapiens
tgtactggcctcctt

SEQ ID NO: 1954636 - DNA, 15 bp, Homo sapiens
gtactggcctcctta

SEQ ID NO: 1954637 - DNA, 15 bp, Homo sapiens
tactggcctccttat

SEQ ID NO: 1954638 - DNA, 15 bp, Homo sapiens
actggcctccttatg

SEQ ID NO: 1954639 - DNA, 15 bp, Homo sapiens
ctggcctccttatgg

SEQ ID NO: 1954640 - DNA, 15 bp, Homo sapiens
tggcctccttatgga

SEQ ID NO: 1954641 - DNA, 15 bp, Homo sapiens
ggcctccttatggac

SEQ ID NO: 1954642 - DNA, 15 bp, Homo sapiens
gcctccttatggact

SEQ ID NO: 1954643 - DNA, 15 bp, Homo sapiens
cctccttatggactt

SEQ ID NO: 1954644 - DNA, 15 bp, Homo sapiens
ctccttatggactta

SEQ ID NO: 1954645 - DNA, 15 bp, Homo sapiens
tccttatggacttaa

SEQ ID NO: 1954646 - DNA, 15 bp, Homo sapiens
ccttatggacttaaa

SEQ ID NO: 1954647 - DNA, 15 bp, Homo sapiens
cttatggacttaaag

SEQ ID NO: 1954648 - DNA, 15 bp, Homo sapiens
ttatggacttaaagt

SEQ ID NO: 1954649 - DNA, 15 bp, Homo sapiens
tatggacttaaagtt

SEQ ID NO: 1954650 - DNA, 15 bp, Homo sapiens
atggacttaaagttc

SEQ ID NO: 1954651 - DNA, 15 bp, Homo sapiens
tggacttaaagttct

SEQ ID NO: 1954652 - DNA, 15 bp, Homo sapiens
ggacttaaagttcta

SEQ ID NO: 1954653 - DNA, 15 bp, Homo sapiens
gacttaaagttctac

SEQ ID NO: 1954654 - DNA, 15 bp, Homo sapiens
acttaaagttctact

SEQ ID NO: 1954655 - DNA, 15 bp, Homo sapiens
cttaaagttctactg

SEQ ID NO: 1954656 - DNA, 15 bp, Homo sapiens
ttaaagttctactga

SEQ ID NO: 1954657 - DNA, 15 bp, Homo sapiens
taaagttctactgat

SEQ ID NO: 1954658 - DNA, 15 bp, Homo sapiens
aaagttctactgata

SEQ ID NO: 1954659 - DNA, 15 bp, Homo sapiens
aagttctactgatat

SEQ ID NO: 1954660 - DNA, 15 bp, Homo sapiens
agttctactgatata

SEQ ID NO: 1954661 - DNA, 15 bp, Homo sapiens
gttctactgatatac

SEQ ID NO: 1954662 - DNA, 15 bp, Homo sapiens
ttctactgatatacg

SEQ ID NO: 1954663 - DNA, 15 bp, Homo sapiens
tctactgatatacgt

SEQ ID NO: 1954664 - DNA, 15 bp, Homo sapiens
ctactgatatacgta

SEQ ID NO: 1954665 - DNA, 15 bp, Homo sapiens
tactgatatacgtag

SEQ ID NO: 1954666 - DNA, 15 bp, Homo sapiens
actgatatacgtagt

SEQ ID NO: 1954667 - DNA, 15 bp, Homo sapiens
ctgatatacgtagtg

SEQ ID NO: 1954668 - DNA, 15 bp, Homo sapiens
tgatatacgtagtgt

SEQ ID NO: 1954669 - DNA, 15 bp, Homo sapiens
gatatacgtagtgta

SEQ ID NO: 1954670 - DNA, 15 bp, Homo sapiens
atatacgtagtgtag

SEQ ID NO: 1954671 - DNA, 15 bp, Homo sapiens
tatacgtagtgtagg

SEQ ID NO: 1954672 - DNA, 15 bp, Homo sapiens
atacgtagtgtaggg

SEQ ID NO: 1954673 - DNA, 15 bp, Homo sapiens
tacgtagtgtagggg

SEQ ID NO: 1954674 - DNA, 15 bp, Homo sapiens
acgtagtgtagggga

SEQ ID NO: 1954675 - DNA, 15 bp, Homo sapiens
cgtagtgtaggggag

SEQ ID NO: 1954676 - DNA, 15 bp, Homo sapiens
gtagtgtaggggagg

SEQ ID NO: 1954677 - DNA, 15 bp, Homo sapiens
tagtgtaggggagga

SEQ ID NO: 1954678 - DNA, 15 bp, Homo sapiens
agtgtaggggaggaa

SEQ ID NO: 1954679 - DNA, 15 bp, Homo sapiens
gtgtaggggaggaaa

SEQ ID NO: 1954680 - DNA, 15 bp, Homo sapiens
tgtaggggaggaaaa

SEQ ID NO: 1954681 - DNA, 15 bp, Homo sapiens
gtaggggaggaaaaa

SEQ ID NO: 1954682 - DNA, 15 bp, Homo sapiens
taggggaggaaaaac

SEQ ID NO: 1954683 - DNA, 15 bp, Homo sapiens
aggggaggaaaaact

SEQ ID NO: 1954684 - DNA, 15 bp, Homo sapiens
ggggaggaaaaactt

SEQ ID NO: 1954685 - DNA, 15 bp, Homo sapiens
gggaggaaaaacttt

SEQ ID NO: 1954686 - DNA, 15 bp, Homo sapiens
ggaggaaaaactttt

SEQ ID NO: 1954687 - DNA, 15 bp, Homo sapiens
gaggaaaaacttttc

SEQ ID NO: 1954688 - DNA, 15 bp, Homo sapiens
aggaaaaacttttct

SEQ ID NO: 1954689 - DNA, 15 bp, Homo sapiens
ggaaaaacttttctt

SEQ ID NO: 1954690 - DNA, 15 bp, Homo sapiens
gaaaaacttttcttc

SEQ ID NO: 1954691 - DNA, 15 bp, Homo sapiens
aaaaacttttcttca

SEQ ID NO: 1954692 - DNA, 15 bp, Homo sapiens
aaaacttttcttcaa

SEQ ID NO: 1954693 - DNA, 15 bp, Homo sapiens
aaacttttcttcaac

SEQ ID NO: 1954694 - DNA, 15 bp, Homo sapiens
aacttttcttcaacc

SEQ ID NO: 1954695 - DNA, 15 bp, Homo sapiens
acttttcttcaaccc

SEQ ID NO: 1954696 - DNA, 15 bp, Homo sapiens
cttttcttcaaccct

SEQ ID NO: 1954697 - DNA, 15 bp, Homo sapiens
ttttcttcaaccctc

SEQ ID NO: 1954698 - DNA, 15 bp, Homo sapiens
tttcttcaaccctcg

SEQ ID NO: 1954699 - DNA, 15 bp, Homo sapiens
ttcttcaaccctcgt

SEQ ID NO: 1954700 - DNA, 15 bp, Homo sapiens
tcttcaaccctcgtt

SEQ ID NO: 1954701 - DNA, 15 bp, Homo sapiens
cttcaaccctcgttg

SEQ ID NO: 1954702 - DNA, 15 bp, Homo sapiens
ttcaaccctcgttgg

SEQ ID NO: 1954703 - DNA, 15 bp, Homo sapiens
tcaaccctcgttggt

SEQ ID NO: 1954704 - DNA, 15 bp, Homo sapiens
caaccctcgttggtt

SEQ ID NO: 1954705 - DNA, 15 bp, Homo sapiens
aaccctcgttggttc

SEQ ID NO: 1954706 - DNA, 15 bp, Homo sapiens
accctcgttggttca

SEQ ID NO: 1954707 - DNA, 15 bp, Homo sapiens
ccctcgttggttcag

SEQ ID NO: 1954708 - DNA, 15 bp, Homo sapiens
cctcgttggttcagt

SEQ ID NO: 1954709 - DNA, 15 bp, Homo sapiens
ctcgttggttcagta

SEQ ID NO: 1954710 - DNA, 15 bp, Homo sapiens
tcgttggttcagtaa

SEQ ID NO: 1954711 - DNA, 15 bp, Homo sapiens
cgttggttcagtaac

SEQ ID NO: 1954712 - DNA, 15 bp, Homo sapiens
gttggttcagtaact

SEQ ID NO: 1954713 - DNA, 15 bp, Homo sapiens
ttggttcagtaactg

SEQ ID NO: 1954714 - DNA, 15 bp, Homo sapiens
tggttcagtaactgg

SEQ ID NO: 1954715 - DNA, 15 bp, Homo sapiens
ggttcagtaactggg

SEQ ID NO: 1954716 - DNA, 15 bp, Homo sapiens
gttcagtaactgggg

SEQ ID NO: 1954717 - DNA, 15 bp, Homo sapiens
ttcagtaactggggc

SEQ ID NO: 1954718 - DNA, 15 bp, Homo sapiens
tcagtaactggggcc

SEQ ID NO: 1954719 - DNA, 15 bp, Homo sapiens
cagtaactggggccc

SEQ ID NO: 1954720 - DNA, 15 bp, Homo sapiens
agtaactggggccct

SEQ ID NO: 1954721 - DNA, 15 bp, Homo sapiens
gtaactggggccctg

SEQ ID NO: 1954722 - DNA, 15 bp, Homo sapiens
taactggggccctgc

SEQ ID NO: 1954723 - DNA, 15 bp, Homo sapiens
aactggggccctgca

SEQ ID NO: 1954724 - DNA, 15 bp, Homo sapiens
actggggccctgcaa

SEQ ID NO: 1954725 - DNA, 15 bp, Homo sapiens
ctggggccctgcaaa

SEQ ID NO: 1954726 - DNA, 15 bp, Homo sapiens
tggggccctgcaaat

SEQ ID NO: 1954727 - DNA, 15 bp, Homo sapiens
ggggccctgcaaatt

SEQ ID NO: 1954728 - DNA, 15 bp, Homo sapiens
gggccctgcaaatta

SEQ ID NO: 1954729 - DNA, 15 bp, Homo sapiens
ggccctgcaaattaa

SEQ ID NO: 1954730 - DNA, 15 bp, Homo sapiens
gccctgcaaattaaa

SEQ ID NO: 1954731 - DNA, 15 bp, Homo sapiens
ccctgcaaattaaac

SEQ ID NO: 1954732 - DNA, 15 bp, Homo sapiens
cctgcaaattaaact

SEQ ID NO: 1954733 - DNA, 15 bp, Homo sapiens
ctgcaaattaaactg

SEQ ID NO: 1954734 - DNA, 15 bp, Homo sapiens
tgcaaattaaactga

SEQ ID NO: 1954735 - DNA, 15 bp, Homo sapiens
gcaaattaaactgac

SEQ ID NO: 1954736 - DNA, 15 bp, Homo sapiens
caaattaaactgacc

SEQ ID NO: 1954737 - DNA, 15 bp, Homo sapiens
aaattaaactgacca

SEQ ID NO: 1954738 - DNA, 15 bp, Homo sapiens
aattaaactgaccaa

SEQ ID NO: 1954739 - DNA, 15 bp, Homo sapiens
attaaactgaccaaa

SEQ ID NO: 1954740 - DNA, 15 bp, Homo sapiens
ttaaactgaccaaaa

SEQ ID NO: 1954741 - DNA, 15 bp, Homo sapiens
taaactgaccaaaaa

SEQ ID NO: 1954742 - DNA, 15 bp, Homo sapiens
aaactgaccaaaaat

SEQ ID NO: 1954743 - DNA, 15 bp, Homo sapiens
aactgaccaaaaata

SEQ ID NO: 1954744 - DNA, 15 bp, Homo sapiens
actgaccaaaaatag

SEQ ID NO: 1954745 - DNA, 15 bp, Homo sapiens
ctgaccaaaaatagg

SEQ ID NO: 1954746 - DNA, 15 bp, Homo sapiens
tgaccaaaaataggc

SEQ ID NO: 1954747 - DNA, 15 bp, Homo sapiens
gaccaaaaataggct

SEQ ID NO: 1954748 - DNA, 15 bp, Homo sapiens
accaaaaataggcta

SEQ ID NO: 1954749 - DNA, 15 bp, Homo sapiens
ccaaaaataggctag

SEQ ID NO: 1954750 - DNA, 15 bp, Homo sapiens
caaaaataggctagc

SEQ ID NO: 1954751 - DNA, 15 bp, Homo sapiens
aaaaataggctagca

SEQ ID NO: 1954752 - DNA, 15 bp, Homo sapiens
aaaataggctagcag

SEQ ID NO: 1954753 - DNA, 15 bp, Homo sapiens
aaataggctagcagg

SEQ ID NO: 1954754 - DNA, 15 bp, Homo sapiens
aataggctagcagga

SEQ ID NO: 1954755 - DNA, 15 bp, Homo sapiens
ataggctagcaggat

SEQ ID NO: 1954756 - DNA, 15 bp, Homo sapiens
taggctagcaggata

SEQ ID NO: 1954757 - DNA, 15 bp, Homo sapiens
aggctagcaggataa

SEQ ID NO: 1954758 - DNA, 15 bp, Homo sapiens
ggctagcaggataaa

SEQ ID NO: 1954759 - DNA, 15 bp, Homo sapiens
gctagcaggataaat

SEQ ID NO: 1954760 - DNA, 15 bp, Homo sapiens
ctagcaggataaata

SEQ ID NO: 1954761 - DNA, 15 bp, Homo sapiens
tagcaggataaatag

SEQ ID NO: 1954762 - DNA, 15 bp, Homo sapiens
agcaggataaatagt

SEQ ID NO: 1954763 - DNA, 15 bp, Homo sapiens
gcaggataaatagtt

SEQ ID NO: 1954764 - DNA, 15 bp, Homo sapiens
caggataaatagtta

SEQ ID NO: 1954765 - DNA, 15 bp, Homo sapiens
aggataaatagttat

SEQ ID NO: 1954766 - DNA, 15 bp, Homo sapiens
ggataaatagttatg

SEQ ID NO: 1954767 - DNA, 15 bp, Homo sapiens
gataaatagttatgt

SEQ ID NO: 1954768 - DNA, 15 bp, Homo sapiens
ataaatagttatgta

SEQ ID NO: 1954769 - DNA, 15 bp, Homo sapiens
taaatagttatgtat

SEQ ID NO: 1954770 - DNA, 15 bp, Homo sapiens
aaatagttatgtatg

SEQ ID NO: 1954771 - DNA, 15 bp, Homo sapiens
aatagttatgtatgc

SEQ ID NO: 1954772 - DNA, 15 bp, Homo sapiens
atagttatgtatgca

SEQ ID NO: 1954773 - DNA, 15 bp, Homo sapiens
tagttatgtatgcac

SEQ ID NO: 1954774 - DNA, 15 bp, Homo sapiens
agttatgtatgcacc

SEQ ID NO: 1954775 - DNA, 15 bp, Homo sapiens
gttatgtatgcaccc

SEQ ID NO: 1954776 - DNA, 15 bp, Homo sapiens
ttatgtatgcaccca

SEQ ID NO: 1954777 - DNA, 15 bp, Homo sapiens
tatgtatgcacccag

SEQ ID NO: 1954778 - DNA, 15 bp, Homo sapiens
atgtatgcacccaga

SEQ ID NO: 1954779 - DNA, 15 bp, Homo sapiens
tgtatgcacccagag

SEQ ID NO: 1954780 - DNA, 15 bp, Homo sapiens
gtatgcacccagagg

SEQ ID NO: 1954781 - DNA, 15 bp, Homo sapiens
tatgcacccagaggc

SEQ ID NO: 1954782 - DNA, 15 bp, Homo sapiens
atgcacccagaggca

SEQ ID NO: 1954783 - DNA, 15 bp, Homo sapiens
tgcacccagaggcat

SEQ ID NO: 1954784 - DNA, 15 bp, Homo sapiens
gcacccagaggcatc

SEQ ID NO: 1954785 - DNA, 15 bp, Homo sapiens
cacccagaggcatcc

SEQ ID NO: 1954786 - DNA, 15 bp, Homo sapiens
acccagaggcatcca

SEQ ID NO: 1954787 - DNA, 15 bp, Homo sapiens
cccagaggcatccac

SEQ ID NO: 1954788 - DNA, 15 bp, Homo sapiens
ccagaggcatccaca

SEQ ID NO: 1954789 - DNA, 15 bp, Homo sapiens
cagaggcatccacag

SEQ ID NO: 1954790 - DNA, 15 bp, Homo sapiens
agaggcatccacaga

SEQ ID NO: 1954791 - DNA, 15 bp, Homo sapiens
gaggcatccacagaa

SEQ ID NO: 1954792 - DNA, 15 bp, Homo sapiens
aggcatccacagaaa

SEQ ID NO: 1954793 - DNA, 15 bp, Homo sapiens
ggcatccacagaaac

SEQ ID NO: 1954794 - DNA, 15 bp, Homo sapiens
gcatccacagaaaca

SEQ ID NO: 1954795 - DNA, 15 bp, Homo sapiens
catccacagaaacaa

SEQ ID NO: 1954796 - DNA, 15 bp, Homo sapiens
atccacagaaacaaa

SEQ ID NO: 1954797 - DNA, 15 bp, Homo sapiens
tccacagaaacaaaa

SEQ ID NO: 1954798 - DNA, 15 bp, Homo sapiens
ccacagaaacaaaat

SEQ ID NO: 1954799 - DNA, 15 bp, Homo sapiens
cacagaaacaaaatg

SEQ ID NO: 1954800 - DNA, 15 bp, Homo sapiens
acagaaacaaaatga

SEQ ID NO: 1954801 - DNA, 15 bp, Homo sapiens
cagaaacaaaatgaa

SEQ ID NO: 1954802 - DNA, 15 bp, Homo sapiens
agaaacaaaatgaag

SEQ ID NO: 1954803 - DNA, 15 bp, Homo sapiens
gaaacaaaatgaaga

SEQ ID NO: 1954804 - DNA, 15 bp, Homo sapiens
aaacaaaatgaagac

SEQ ID NO: 1954805 - DNA, 15 bp, Homo sapiens
aacaaaatgaagaca

SEQ ID NO: 1954806 - DNA, 15 bp, Homo sapiens
acaaaatgaagacaa

SEQ ID NO: 1954807 - DNA, 15 bp, Homo sapiens
caaaatgaagacaaa

SEQ ID NO: 1954808 - DNA, 15 bp, Homo sapiens
aaaatgaagacaaag

SEQ ID NO: 1954809 - DNA, 15 bp, Homo sapiens
aaatgaagacaaaga

SEQ ID NO: 1954810 - DNA, 15 bp, Homo sapiens
aatgaagacaaagaa

SEQ ID NO: 1954811 - DNA, 15 bp, Homo sapiens
atgaagacaaagaaa

SEQ ID NO: 1954812 - DNA, 15 bp, Homo sapiens
tgaagacaaagaaac

SEQ ID NO: 1954813 - DNA, 15 bp, Homo sapiens
gaagacaaagaaaca

SEQ ID NO: 1954814 - DNA, 15 bp, Homo sapiens
aagacaaagaaacag

SEQ ID NO: 1954815 - DNA, 15 bp, Homo sapiens
agacaaagaaacaga

SEQ ID NO: 1954816 - DNA, 15 bp, Homo sapiens
gacaaagaaacagac

SEQ ID NO: 1954817 - DNA, 15 bp, Homo sapiens
acaaagaaacagact

SEQ ID NO: 1954818 - DNA, 15 bp, Homo sapiens
caaagaaacagactt

SEQ ID NO: 1954819 - DNA, 15 bp, Homo sapiens
aaagaaacagacttg

SEQ ID NO: 1954820 - DNA, 15 bp, Homo sapiens
aagaaacagacttgg

SEQ ID NO: 1954821 - DNA, 15 bp, Homo sapiens
agaaacagacttgga

SEQ ID NO: 1954822 - DNA, 15 bp, Homo sapiens
gaaacagacttggag

SEQ ID NO: 1954823 - DNA, 15 bp, Homo sapiens
aaacagacttggagg

SEQ ID NO: 1954824 - DNA, 15 bp, Homo sapiens
aacagacttggaggc

SEQ ID NO: 1954825 - DNA, 15 bp, Homo sapiens
acagacttggaggct

SEQ ID NO: 1954826 - DNA, 15 bp, Homo sapiens
cagacttggaggctt

SEQ ID NO: 1954827 - DNA, 15 bp, Homo sapiens
agacttggaggcttt

SEQ ID NO: 1954828 - DNA, 15 bp, Homo sapiens
gacttggaggcttta

SEQ ID NO: 1954829 - DNA, 15 bp, Homo sapiens
acttggaggctttat

SEQ ID NO: 1954830 - DNA, 15 bp, Homo sapiens
cttggaggctttata

SEQ ID NO: 1954831 - DNA, 15 bp, Homo sapiens
ttggaggctttatat

SEQ ID NO: 1954832 - DNA, 15 bp, Homo sapiens
tggaggctttatata

SEQ ID NO: 1954833 - DNA, 15 bp, Homo sapiens
ggaggctttatatac

SEQ ID NO: 1954834 - DNA, 15 bp, Homo sapiens
gaggctttatatacc

SEQ ID NO: 1954835 - DNA, 15 bp, Homo sapiens
aggctttatatacca

SEQ ID NO: 1954836 - DNA, 15 bp, Homo sapiens
ggctttatataccat

SEQ ID NO: 1954837 - DNA, 15 bp, Homo sapiens
gctttatataccatt

SEQ ID NO: 1954838 - DNA, 15 bp, Homo sapiens
ctttatataccattt

SEQ ID NO: 1954839 - DNA, 15 bp, Homo sapiens
tttatataccatttt

SEQ ID NO: 1954840 - DNA, 15 bp, Homo sapiens
ttatataccatttta

SEQ ID NO: 1954841 - DNA, 15 bp, Homo sapiens
tatataccattttaa

SEQ ID NO: 1954842 - DNA, 15 bp, Homo sapiens
atataccattttaac

SEQ ID NO: 1954843 - DNA, 15 bp, Homo sapiens
tataccattttaaca

SEQ ID NO: 1954844 - DNA, 15 bp, Homo sapiens
ataccattttaacaa

SEQ ID NO: 1954845 - DNA, 15 bp, Homo sapiens
taccattttaacaaa

SEQ ID NO: 1954846 - DNA, 15 bp, Homo sapiens
accattttaacaaac

SEQ ID NO: 1954847 - DNA, 15 bp, Homo sapiens
ccattttaacaaaca

SEQ ID NO: 1954848 - DNA, 15 bp, Homo sapiens
cattttaacaaacag

SEQ ID NO: 1954849 - DNA, 15 bp, Homo sapiens
attttaacaaacagc

SEQ ID NO: 1954850 - DNA, 15 bp, Homo sapiens
ttttaacaaacagca

SEQ ID NO: 1954851 - DNA, 15 bp, Homo sapiens
tttaacaaacagcag

SEQ ID NO: 1954852 - DNA, 15 bp, Homo sapiens
ttaacaaacagcagt

SEQ ID NO: 1954853 - DNA, 15 bp, Homo sapiens
taacaaacagcagta

SEQ ID NO: 1954854 - DNA, 15 bp, Homo sapiens
aacaaacagcagtat

SEQ ID NO: 1954855 - DNA, 15 bp, Homo sapiens
acaaacagcagtata

SEQ ID NO: 1954856 - DNA, 15 bp, Homo sapiens
caaacagcagtataa

SEQ ID NO: 1954857 - DNA, 15 bp, Homo sapiens
aaacagcagtataaa

SEQ ID NO: 1954858 - DNA, 15 bp, Homo sapiens
aacagcagtataaag

SEQ ID NO: 1954859 - DNA, 15 bp, Homo sapiens
acagcagtataaaga

SEQ ID NO: 1954860 - DNA, 15 bp, Homo sapiens
cagcagtataaagaa

SEQ ID NO: 1954861 - DNA, 15 bp, Homo sapiens
agcagtataaagaag

SEQ ID NO: 1954862 - DNA, 15 bp, Homo sapiens
gcagtataaagaagt

SEQ ID NO: 1954863 - DNA, 15 bp, Homo sapiens
cagtataaagaagtg

SEQ ID NO: 1954864 - DNA, 15 bp, Homo sapiens
agtataaagaagtgg

SEQ ID NO: 1954865 - DNA, 15 bp, Homo sapiens
gtataaagaagtggc

SEQ ID NO: 1954866 - DNA, 15 bp, Homo sapiens
tataaagaagtggca

SEQ ID NO: 1954867 - DNA, 15 bp, Homo sapiens
ataaagaagtggcaa

SEQ ID NO: 1954868 - DNA, 15 bp, Homo sapiens
taaagaagtggcaag

SEQ ID NO: 1954869 - DNA, 15 bp, Homo sapiens
aaagaagtggcaaga

SEQ ID NO: 1954870 - DNA, 15 bp, Homo sapiens
aagaagtggcaagac

SEQ ID NO: 1954871 - DNA, 15 bp, Homo sapiens
agaagtggcaagaca

SEQ ID NO: 1954872 - DNA, 15 bp, Homo sapiens
gaagtggcaagacaa

SEQ ID NO: 1954873 - DNA, 15 bp, Homo sapiens
aagtggcaagacaaa

SEQ ID NO: 1954874 - DNA, 15 bp, Homo sapiens
agtggcaagacaaag

SEQ ID NO: 1954875 - DNA, 15 bp, Homo sapiens
gtggcaagacaaagg

SEQ ID NO: 1954876 - DNA, 15 bp, Homo sapiens
tggcaagacaaagga

SEQ ID NO: 1954877 - DNA, 15 bp, Homo sapiens
ggcaagacaaaggaa

SEQ ID NO: 1954878 - DNA, 15 bp, Homo sapiens
gcaagacaaaggaaa

SEQ ID NO: 1954879 - DNA, 15 bp, Homo sapiens
caagacaaaggaaag

SEQ ID NO: 1954880 - DNA, 15 bp, Homo sapiens
aagacaaaggaaagg

SEQ ID NO: 1954881 - DNA, 15 bp, Homo sapiens
agacaaaggaaaggg

SEQ ID NO: 1954882 - DNA, 15 bp, Homo sapiens
gacaaaggaaaggga

SEQ ID NO: 1954883 - DNA, 15 bp, Homo sapiens
acaaaggaaagggag

SEQ ID NO: 1954884 - DNA, 15 bp, Homo sapiens
caaaggaaagggagt

SEQ ID NO: 1954885 - DNA, 15 bp, Homo sapiens
aaaggaaagggagtt

SEQ ID NO: 1954886 - DNA, 15 bp, Homo sapiens
aaggaaagggagttc

SEQ ID NO: 1954887 - DNA, 15 bp, Homo sapiens
aggaaagggagttca

SEQ ID NO: 1954888 - DNA, 15 bp, Homo sapiens
ggaaagggagttcag

SEQ ID NO: 1954889 - DNA, 15 bp, Homo sapiens
gaaagggagttcagc

SEQ ID NO: 1954890 - DNA, 15 bp, Homo sapiens
aaagggagttcagcc

SEQ ID NO: 1954891 - DNA, 15 bp, Homo sapiens
aagggagttcagcct

SEQ ID NO: 1954892 - DNA, 15 bp, Homo sapiens
agggagttcagcctt

SEQ ID NO: 1954893 - DNA, 15 bp, Homo sapiens
gggagttcagccttg

SEQ ID NO: 1954894 - DNA, 15 bp, Homo sapiens
ggagttcagccttgt

SEQ ID NO: 1954895 - DNA, 15 bp, Homo sapiens
gagttcagccttgta

SEQ ID NO: 1954896 - DNA, 15 bp, Homo sapiens
agttcagccttgtag

SEQ ID NO: 1954897 - DNA, 15 bp, Homo sapiens
gttcagccttgtagg

SEQ ID NO: 1954898 - DNA, 15 bp, Homo sapiens
ttcagccttgtaggg

SEQ ID NO: 1954899 - DNA, 15 bp, Homo sapiens
tcagccttgtagggg

SEQ ID NO: 1954900 - DNA, 15 bp, Homo sapiens
cagccttgtaggggt

SEQ ID NO: 1954901 - DNA, 15 bp, Homo sapiens
agccttgtaggggtg

SEQ ID NO: 1954902 - DNA, 15 bp, Homo sapiens
gccttgtaggggtgg

SEQ ID NO: 1954903 - DNA, 15 bp, Homo sapiens
ccttgtaggggtggt

SEQ ID NO: 1954904 - DNA, 15 bp, Homo sapiens
cttgtaggggtggta

SEQ ID NO: 1954905 - DNA, 15 bp, Homo sapiens
ttgtaggggtggtaa

SEQ ID NO: 1954906 - DNA, 15 bp, Homo sapiens
tgtaggggtggtaaa

SEQ ID NO: 1954907 - DNA, 15 bp, Homo sapiens
gtaggggtggtaaat

SEQ ID NO: 1954908 - DNA, 15 bp, Homo sapiens
taggggtggtaaatt

SEQ ID NO: 1954909 - DNA, 15 bp, Homo sapiens
aggggtggtaaattg

SEQ ID NO: 1954910 - DNA, 15 bp, Homo sapiens
ggggtggtaaattgt

SEQ ID NO: 1954911 - DNA, 15 bp, Homo sapiens
gggtggtaaattgtg

SEQ ID NO: 1954912 - DNA, 15 bp, Homo sapiens
ggtggtaaattgtgg

SEQ ID NO: 1954913 - DNA, 15 bp, Homo sapiens
gtggtaaattgtgga

SEQ ID NO: 1954914 - DNA, 15 bp, Homo sapiens
tggtaaattgtggat

SEQ ID NO: 1954915 - DNA, 15 bp, Homo sapiens
ggtaaattgtggatt

SEQ ID NO: 1954916 - DNA, 15 bp, Homo sapiens
gtaaattgtggattt

SEQ ID NO: 1954917 - DNA, 15 bp, Homo sapiens
taaattgtggatttt

SEQ ID NO: 1954918 - DNA, 15 bp, Homo sapiens
aaattgtggattttc

SEQ ID NO: 1954919 - DNA, 15 bp, Homo sapiens
aattgtggattttcc

SEQ ID NO: 1954920 - DNA, 15 bp, Homo sapiens
attgtggattttcct

SEQ ID NO: 1954921 - DNA, 15 bp, Homo sapiens
ttgtggattttcctg

SEQ ID NO: 1954922 - DNA, 15 bp, Homo sapiens
tgtggattttcctgg

SEQ ID NO: 1954923 - DNA, 15 bp, Homo sapiens
gtggattttcctggt

SEQ ID NO: 1954924 - DNA, 15 bp, Homo sapiens
tggattttcctggta

SEQ ID NO: 1954925 - DNA, 15 bp, Homo sapiens
ggattttcctggtat

SEQ ID NO: 1954926 - DNA, 15 bp, Homo sapiens
gattttcctggtatg

SEQ ID NO: 1954927 - DNA, 15 bp, Homo sapiens
attttcctggtatga

SEQ ID NO: 1954928 - DNA, 15 bp, Homo sapiens
ttttcctggtatgaa

SEQ ID NO: 1954929 - DNA, 15 bp, Homo sapiens
tttcctggtatgaaa

SEQ ID NO: 1954930 - DNA, 15 bp, Homo sapiens
ttcctggtatgaaag

SEQ ID NO: 1954931 - DNA, 15 bp, Homo sapiens
tcctggtatgaaaga

SEQ ID NO: 1954932 - DNA, 15 bp, Homo sapiens
cctggtatgaaagag

SEQ ID NO: 1954933 - DNA, 15 bp, Homo sapiens
ctggtatgaaagagt

SEQ ID NO: 1954934 - DNA, 15 bp, Homo sapiens
tggtatgaaagagtg

SEQ ID NO: 1954935 - DNA, 15 bp, Homo sapiens
ggtatgaaagagtga

SEQ ID NO: 1954936 - DNA, 15 bp, Homo sapiens
gtatgaaagagtgaa

SEQ ID NO: 1954937 - DNA, 15 bp, Homo sapiens
tatgaaagagtgaag

SEQ ID NO: 1954938 - DNA, 15 bp, Homo sapiens
atgaaagagtgaagg

SEQ ID NO: 1954939 - DNA, 15 bp, Homo sapiens
tgaaagagtgaaggg

SEQ ID NO: 1954940 - DNA, 15 bp, Homo sapiens
gaaagagtgaaggga

SEQ ID NO: 1954941 - DNA, 15 bp, Homo sapiens
aaagagtgaagggag

SEQ ID NO: 1954942 - DNA, 15 bp, Homo sapiens
aagagtgaagggagg

SEQ ID NO: 1954943 - DNA, 15 bp, Homo sapiens
agagtgaagggagga

SEQ ID NO: 1954944 - DNA, 15 bp, Homo sapiens
gagtgaagggaggac

SEQ ID NO: 1954945 - DNA, 15 bp, Homo sapiens
agtgaagggaggacg

SEQ ID NO: 1954946 - DNA, 15 bp, Homo sapiens
gtgaagggaggacgt

SEQ ID NO: 1954947 - DNA, 15 bp, Homo sapiens
tgaagggaggacgtt

SEQ ID NO: 1954948 - DNA, 15 bp, Homo sapiens
gaagggaggacgttt

SEQ ID NO: 1954949 - DNA, 15 bp, Homo sapiens
aagggaggacgtttt

SEQ ID NO: 1954950 - DNA, 15 bp, Homo sapiens
agggaggacgttttc

SEQ ID NO: 1954951 - DNA, 15 bp, Homo sapiens
gggaggacgttttct

SEQ ID NO: 1954952 - DNA, 15 bp, Homo sapiens
ggaggacgttttctt

SEQ ID NO: 1954953 - DNA, 15 bp, Homo sapiens
gaggacgttttctta

SEQ ID NO: 1954954 - DNA, 15 bp, Homo sapiens
aggacgttttcttaa

SEQ ID NO: 1954955 - DNA, 15 bp, Homo sapiens
ggacgttttcttaaa

SEQ ID NO: 1954956 - DNA, 15 bp, Homo sapiens
gacgttttcttaaac

SEQ ID NO: 1954957 - DNA, 15 bp, Homo sapiens
acgttttcttaaaca

SEQ ID NO: 1954958 - DNA, 15 bp, Homo sapiens
cgttttcttaaacaa

SEQ ID NO: 1954959 - DNA, 15 bp, Homo sapiens
gttttcttaaacaaa

SEQ ID NO: 1954960 - DNA, 15 bp, Homo sapiens
ttttcttaaacaaaa

SEQ ID NO: 1954961 - DNA, 15 bp, Homo sapiens
tttcttaaacaaaaa

SEQ ID NO: 1954962 - DNA, 15 bp, Homo sapiens
ttcttaaacaaaaat

SEQ ID NO: 1954963 - DNA, 15 bp, Homo sapiens
tcttaaacaaaaatt

SEQ ID NO: 1954964 - DNA, 15 bp, Homo sapiens
cttaaacaaaaattt

SEQ ID NO: 1954965 - DNA, 15 bp, Homo sapiens
ttaaacaaaaattta

SEQ ID NO: 1954966 - DNA, 15 bp, Homo sapiens
taaacaaaaatttat

SEQ ID NO: 1954967 - DNA, 15 bp, Homo sapiens
aaacaaaaatttatg

SEQ ID NO: 1954968 - DNA, 15 bp, Homo sapiens
aacaaaaatttatgc

SEQ ID NO: 1954969 - DNA, 15 bp, Homo sapiens
acaaaaatttatgcc

SEQ ID NO: 1954970 - DNA, 15 bp, Homo sapiens
caaaaatttatgccc

SEQ ID NO: 1954971 - DNA, 15 bp, Homo sapiens
aaaaatttatgccct

SEQ ID NO: 1954972 - DNA, 15 bp, Homo sapiens
aaaatttatgccctg

SEQ ID NO: 1954973 - DNA, 15 bp, Homo sapiens
aaatttatgccctgc

SEQ ID NO: 1954974 - DNA, 15 bp, Homo sapiens
aatttatgccctgct

SEQ ID NO: 1954975 - DNA, 15 bp, Homo sapiens
atttatgccctgctt

SEQ ID NO: 1954976 - DNA, 15 bp, Homo sapiens
tttatgccctgcttt

SEQ ID NO: 1954977 - DNA, 15 bp, Homo sapiens
ttatgccctgctttc

SEQ ID NO: 1954978 - DNA, 15 bp, Homo sapiens
tatgccctgctttca

SEQ ID NO: 1954979 - DNA, 15 bp, Homo sapiens
atgccctgctttcaa

SEQ ID NO: 1954980 - DNA, 15 bp, Homo sapiens
tgccctgctttcaag

SEQ ID NO: 1954981 - DNA, 15 bp, Homo sapiens
gccctgctttcaagc

SEQ ID NO: 1954982 - DNA, 15 bp, Homo sapiens
ccctgctttcaagca

SEQ ID NO: 1954983 - DNA, 15 bp, Homo sapiens
cctgctttcaagcaa

SEQ ID NO: 1954984 - DNA, 15 bp, Homo sapiens
ctgctttcaagcaag

SEQ ID NO: 1954985 - DNA, 15 bp, Homo sapiens
tgctttcaagcaagt

SEQ ID NO: 1954986 - DNA, 15 bp, Homo sapiens
gctttcaagcaagta

SEQ ID NO: 1954987 - DNA, 15 bp, Homo sapiens
ctttcaagcaagtag

SEQ ID NO: 1954988 - DNA, 15 bp, Homo sapiens
tttcaagcaagtagg

SEQ ID NO: 1954989 - DNA, 15 bp, Homo sapiens
ttcaagcaagtaggg

SEQ ID NO: 1954990 - DNA, 15 bp, Homo sapiens
tcaagcaagtagggg

SEQ ID NO: 1954991 - DNA, 15 bp, Homo sapiens
caagcaagtaggggg

SEQ ID NO: 1954992 - DNA, 15 bp, Homo sapiens
aagcaagtaggggga

SEQ ID NO: 1954993 - DNA, 15 bp, Homo sapiens
agcaagtagggggag

SEQ ID NO: 1954994 - DNA, 15 bp, Homo sapiens
gcaagtagggggagg

SEQ ID NO: 1954995 - DNA, 15 bp, Homo sapiens
caagtagggggaggg

SEQ ID NO: 1954996 - DNA, 15 bp, Homo sapiens
aagtagggggagggc

SEQ ID NO: 1954997 - DNA, 15 bp, Homo sapiens
agtagggggagggca

SEQ ID NO: 1954998 - DNA, 15 bp, Homo sapiens
gtagggggagggcac

SEQ ID NO: 1954999 - DNA, 15 bp, Homo sapiens
tagggggagggcaca

SEQ ID NO: 1955000 - DNA, 15 bp, Homo sapiens
agggggagggcacag

SEQ ID NO: 1955001 - DNA, 15 bp, Homo sapiens
gggggagggcacaga

SEQ ID NO: 1955002 - DNA, 15 bp, Homo sapiens
ggggagggcacagag

SEQ ID NO: 1955003 - DNA, 15 bp, Homo sapiens
gggagggcacagagc

SEQ ID NO: 1955004 - DNA, 15 bp, Homo sapiens
ggagggcacagagct

SEQ ID NO: 1955005 - DNA, 15 bp, Homo sapiens
gagggcacagagctt

SEQ ID NO: 1955006 - DNA, 15 bp, Homo sapiens
agggcacagagcttt

SEQ ID NO: 1955007 - DNA, 15 bp, Homo sapiens
gggcacagagctttt

SEQ ID NO: 1955008 - DNA, 15 bp, Homo sapiens
ggcacagagcttttc

SEQ ID NO: 1955009 - DNA, 15 bp, Homo sapiens
gcacagagcttttct

SEQ ID NO: 1955010 - DNA, 15 bp, Homo sapiens
cacagagcttttctg

SEQ ID NO: 1955011 - DNA, 15 bp, Homo sapiens
acagagcttttctgt

SEQ ID NO: 1955012 - DNA, 15 bp, Homo sapiens
cagagcttttctgtg

SEQ ID NO: 1955013 - DNA, 15 bp, Homo sapiens
agagcttttctgtgc

SEQ ID NO: 1955014 - DNA, 15 bp, Homo sapiens
gagcttttctgtgcc

SEQ ID NO: 1955015 - DNA, 15 bp, Homo sapiens
agcttttctgtgcct

SEQ ID NO: 1955016 - DNA, 15 bp, Homo sapiens
gcttttctgtgcctg

SEQ ID NO: 1955017 - DNA, 15 bp, Homo sapiens
cttttctgtgcctgc

SEQ ID NO: 1955018 - DNA, 15 bp, Homo sapiens
ttttctgtgcctgct

SEQ ID NO: 1955019 - DNA, 15 bp, Homo sapiens
tttctgtgcctgcta

SEQ ID NO: 1955020 - DNA, 15 bp, Homo sapiens
ttctgtgcctgctat

SEQ ID NO: 1955021 - DNA, 15 bp, Homo sapiens
tctgtgcctgctatt

SEQ ID NO: 1955022 - DNA, 15 bp, Homo sapiens
ctgtgcctgctattt

SEQ ID NO: 1955023 - DNA, 15 bp, Homo sapiens
tgtgcctgctatttc

SEQ ID NO: 1955024 - DNA, 15 bp, Homo sapiens
gtgcctgctatttct

SEQ ID NO: 1955025 - DNA, 15 bp, Homo sapiens
tgcctgctatttctt

SEQ ID NO: 1955026 - DNA, 15 bp, Homo sapiens
gcctgctatttcttg

SEQ ID NO: 1955027 - DNA, 15 bp, Homo sapiens
cctgctatttcttga

SEQ ID NO: 1955028 - DNA, 15 bp, Homo sapiens
ctgctatttcttgat

SEQ ID NO: 1955029 - DNA, 15 bp, Homo sapiens
tgctatttcttgatt

SEQ ID NO: 1955030 - DNA, 15 bp, Homo sapiens
gctatttcttgattg

SEQ ID NO: 1955031 - DNA, 15 bp, Homo sapiens
ctatttcttgattgc

SEQ ID NO: 1955032 - DNA, 15 bp, Homo sapiens
tatttcttgattgcc

SEQ ID NO: 1955033 - DNA, 15 bp, Homo sapiens
atttcttgattgcct

SEQ ID NO: 1955034 - DNA, 15 bp, Homo sapiens
tttcttgattgcctt

SEQ ID NO: 1955035 - DNA, 15 bp, Homo sapiens
ttcttgattgccttc

SEQ ID NO: 1955036 - DNA, 15 bp, Homo sapiens
tcttgattgccttca

SEQ ID NO: 1955037 - DNA, 15 bp, Homo sapiens
cttgattgccttcag

SEQ ID NO: 1955038 - DNA, 15 bp, Homo sapiens
ttgattgccttcagc

SEQ ID NO: 1955039 - DNA, 15 bp, Homo sapiens
tgattgccttcagct

SEQ ID NO: 1955040 - DNA, 15 bp, Homo sapiens
gattgccttcagctt

SEQ ID NO: 1955041 - DNA, 15 bp, Homo sapiens
attgccttcagctta

SEQ ID NO: 1955042 - DNA, 15 bp, Homo sapiens
ttgccttcagcttaa

SEQ ID NO: 1955043 - DNA, 15 bp, Homo sapiens
tgccttcagcttaaa

SEQ ID NO: 1955044 - DNA, 15 bp, Homo sapiens
gccttcagcttaaaa

SEQ ID NO: 1955045 - DNA, 15 bp, Homo sapiens
ccttcagcttaaaat

SEQ ID NO: 1955046 - DNA, 15 bp, Homo sapiens
cttcagcttaaaata

SEQ ID NO: 1955047 - DNA, 15 bp, Homo sapiens
ttcagcttaaaataa

SEQ ID NO: 1955048 - DNA, 15 bp, Homo sapiens
tcagcttaaaataat

SEQ ID NO: 1955049 - DNA, 15 bp, Homo sapiens
cagcttaaaataatt

SEQ ID NO: 1955050 - DNA, 15 bp, Homo sapiens
agcttaaaataattc

SEQ ID NO: 1955051 - DNA, 15 bp, Homo sapiens
gcttaaaataattct

SEQ ID NO: 1955052 - DNA, 15 bp, Homo sapiens
cttaaaataattctt

SEQ ID NO: 1955053 - DNA, 15 bp, Homo sapiens
ttaaaataattctta

SEQ ID NO: 1955054 - DNA, 15 bp, Homo sapiens
taaaataattcttat

SEQ ID NO: 1955055 - DNA, 15 bp, Homo sapiens
aaaataattcttatg

SEQ ID NO: 1955056 - DNA, 15 bp, Homo sapiens
aaataattcttatgt

SEQ ID NO: 1955057 - DNA, 15 bp, Homo sapiens
aataattcttatgtc

SEQ ID NO: 1955058 - DNA, 15 bp, Homo sapiens
ataattcttatgtca

SEQ ID NO: 1955059 - DNA, 15 bp, Homo sapiens
taattcttatgtcaa

SEQ ID NO: 1955060 - DNA, 15 bp, Homo sapiens
aattcttatgtcaaa

SEQ ID NO: 1955061 - DNA, 15 bp, Homo sapiens
attcttatgtcaaag

SEQ ID NO: 1955062 - DNA, 15 bp, Homo sapiens
ttcttatgtcaaaga

SEQ ID NO: 1955063 - DNA, 15 bp, Homo sapiens
tcttatgtcaaagag

SEQ ID NO: 1955064 - DNA, 15 bp, Homo sapiens
cttatgtcaaagagg

SEQ ID NO: 1955065 - DNA, 15 bp, Homo sapiens
ttatgtcaaagagga

SEQ ID NO: 1955066 - DNA, 15 bp, Homo sapiens
tatgtcaaagaggaa

SEQ ID NO: 1955067 - DNA, 15 bp, Homo sapiens
atgtcaaagaggaaa

SEQ ID NO: 1955068 - DNA, 15 bp, Homo sapiens
tgtcaaagaggaaaa

SEQ ID NO: 1955069 - DNA, 15 bp, Homo sapiens
gtcaaagaggaaaat

SEQ ID NO: 1955070 - DNA, 15 bp, Homo sapiens
tcaaagaggaaaatt

SEQ ID NO: 1955071 - DNA, 15 bp, Homo sapiens
caaagaggaaaattt

SEQ ID NO: 1955072 - DNA, 15 bp, Homo sapiens
aaagaggaaaatttt

SEQ ID NO: 1955073 - DNA, 15 bp, Homo sapiens
aagaggaaaattttg

SEQ ID NO: 1955074 - DNA, 15 bp, Homo sapiens
agaggaaaattttgg

SEQ ID NO: 1955075 - DNA, 15 bp, Homo sapiens
gaggaaaattttggg

SEQ ID NO: 1955076 - DNA, 15 bp, Homo sapiens
aggaaaattttgggg

SEQ ID NO: 1955077 - DNA, 15 bp, Homo sapiens
ggaaaattttggggt

SEQ ID NO: 1955078 - DNA, 15 bp, Homo sapiens
gaaaattttggggtg

SEQ ID NO: 1955079 - DNA, 15 bp, Homo sapiens
aaaattttggggtgg

SEQ ID NO: 1955080 - DNA, 15 bp, Homo sapiens
aaattttggggtggc

SEQ ID NO: 1955081 - DNA, 15 bp, Homo sapiens
aattttggggtggca

SEQ ID NO: 1955082 - DNA, 15 bp, Homo sapiens
attttggggtggcat

SEQ ID NO: 1955083 - DNA, 15 bp, Homo sapiens
ttttggggtggcata

SEQ ID NO: 1955084 - DNA, 15 bp, Homo sapiens
tttggggtggcatac

SEQ ID NO: 1955085 - DNA, 15 bp, Homo sapiens
ttggggtggcatact

SEQ ID NO: 1955086 - DNA, 15 bp, Homo sapiens
tggggtggcatactc

SEQ ID NO: 1955087 - DNA, 15 bp, Homo sapiens
ggggtggcatactct

SEQ ID NO: 1955088 - DNA, 15 bp, Homo sapiens
gggtggcatactctg

SEQ ID NO: 1955089 - DNA, 15 bp, Homo sapiens
ggtggcatactctga

SEQ ID NO: 1955090 - DNA, 15 bp, Homo sapiens
gtggcatactctgat

SEQ ID NO: 1955091 - DNA, 15 bp, Homo sapiens
tggcatactctgatc

SEQ ID NO: 1955092 - DNA, 15 bp, Homo sapiens
ggcatactctgatct

SEQ ID NO: 1955093 - DNA, 15 bp, Homo sapiens
gcatactctgatctg

SEQ ID NO: 1955094 - DNA, 15 bp, Homo sapiens
catactctgatctgt

SEQ ID NO: 1955095 - DNA, 15 bp, Homo sapiens
atactctgatctgta

SEQ ID NO: 1955096 - DNA, 15 bp, Homo sapiens
tactctgatctgtag

SEQ ID NO: 1955097 - DNA, 15 bp, Homo sapiens
actctgatctgtaga

SEQ ID NO: 1955098 - DNA, 15 bp, Homo sapiens
ctctgatctgtagaa

SEQ ID NO: 1955099 - DNA, 15 bp, Homo sapiens
tctgatctgtagaat

SEQ ID NO: 1955100 - DNA, 15 bp, Homo sapiens
ctgatctgtagaatt

SEQ ID NO: 1955101 - DNA, 15 bp, Homo sapiens
tgatctgtagaattc

SEQ ID NO: 1955102 - DNA, 15 bp, Homo sapiens
gatctgtagaattca

SEQ ID NO: 1955103 - DNA, 15 bp, Homo sapiens
atctgtagaattcag

SEQ ID NO: 1955104 - DNA, 15 bp, Homo sapiens
tctgtagaattcagt

SEQ ID NO: 1955105 - DNA, 15 bp, Homo sapiens
ctgtagaattcagta

SEQ ID NO: 1955106 - DNA, 15 bp, Homo sapiens
tgtagaattcagtag

SEQ ID NO: 1955107 - DNA, 15 bp, Homo sapiens
gtagaattcagtaga

SEQ ID NO: 1955108 - DNA, 15 bp, Homo sapiens
tagaattcagtagaa

SEQ ID NO: 1955109 - DNA, 15 bp, Homo sapiens
agaattcagtagaat

SEQ ID NO: 1955110 - DNA, 15 bp, Homo sapiens
gaattcagtagaatt

SEQ ID NO: 1955111 - DNA, 15 bp, Homo sapiens
aattcagtagaattt

SEQ ID NO: 1955112 - DNA, 15 bp, Homo sapiens
attcagtagaatttt

SEQ ID NO: 1955113 - DNA, 15 bp, Homo sapiens
ttcagtagaattttt

SEQ ID NO: 1955114 - DNA, 15 bp, Homo sapiens
tcagtagaattttta

SEQ ID NO: 1955115 - DNA, 15 bp, Homo sapiens
cagtagaatttttag

SEQ ID NO: 1955116 - DNA, 15 bp, Homo sapiens
agtagaatttttagg

SEQ ID NO: 1955117 - DNA, 15 bp, Homo sapiens
gtagaatttttaggg

SEQ ID NO: 1955118 - DNA, 15 bp, Homo sapiens
tagaatttttagggc

SEQ ID NO: 1955119 - DNA, 15 bp, Homo sapiens
agaatttttagggct

SEQ ID NO: 1955120 - DNA, 15 bp, Homo sapiens
gaatttttagggctg

SEQ ID NO: 1955121 - DNA, 15 bp, Homo sapiens
aatttttagggctga

SEQ ID NO: 1955122 - DNA, 15 bp, Homo sapiens
atttttagggctgaa

SEQ ID NO: 1955123 - DNA, 15 bp, Homo sapiens
tttttagggctgaat

SEQ ID NO: 1955124 - DNA, 15 bp, Homo sapiens
ttttagggctgaatc

SEQ ID NO: 1955125 - DNA, 15 bp, Homo sapiens
tttagggctgaatct

SEQ ID NO: 1955126 - DNA, 15 bp, Homo sapiens
ttagggctgaatcta

SEQ ID NO: 1955127 - DNA, 15 bp, Homo sapiens
tagggctgaatctat

SEQ ID NO: 1955128 - DNA, 15 bp, Homo sapiens
agggctgaatctatc

SEQ ID NO: 1955129 - DNA, 15 bp, Homo sapiens
gggctgaatctatca

SEQ ID NO: 1955130 - DNA, 15 bp, Homo sapiens
ggctgaatctatcaa

SEQ ID NO: 1955131 - DNA, 15 bp, Homo sapiens
gctgaatctatcaag

SEQ ID NO: 1955132 - DNA, 15 bp, Homo sapiens
ctgaatctatcaagg

SEQ ID NO: 1955133 - DNA, 15 bp, Homo sapiens
tgaatctatcaaggt

SEQ ID NO: 1955134 - DNA, 15 bp, Homo sapiens
gaatctatcaaggtt

SEQ ID NO: 1955135 - DNA, 15 bp, Homo sapiens
aatctatcaaggtta

SEQ ID NO: 1955136 - DNA, 15 bp, Homo sapiens
atctatcaaggttat

SEQ ID NO: 1955137 - DNA, 15 bp, Homo sapiens
tctatcaaggttatg

SEQ ID NO: 1955138 - DNA, 15 bp, Homo sapiens
ctatcaaggttatgt

SEQ ID NO: 1955139 - DNA, 15 bp, Homo sapiens
tatcaaggttatgtt

SEQ ID NO: 1955140 - DNA, 15 bp, Homo sapiens
atcaaggttatgttg

SEQ ID NO: 1955141 - DNA, 15 bp, Homo sapiens
tcaaggttatgttga

SEQ ID NO: 1955142 - DNA, 15 bp, Homo sapiens
caaggttatgttgac

SEQ ID NO: 1955143 - DNA, 15 bp, Homo sapiens
aaggttatgttgaca

SEQ ID NO: 1955144 - DNA, 15 bp, Homo sapiens
aggttatgttgacac

SEQ ID NO: 1955145 - DNA, 15 bp, Homo sapiens
ggttatgttgacaca

SEQ ID NO: 1955146 - DNA, 15 bp, Homo sapiens
gttatgttgacacat

SEQ ID NO: 1955147 - DNA, 15 bp, Homo sapiens
ttatgttgacacatt

SEQ ID NO: 1955148 - DNA, 15 bp, Homo sapiens
tatgttgacacattc

SEQ ID NO: 1955149 - DNA, 15 bp, Homo sapiens
atgttgacacattca

SEQ ID NO: 1955150 - DNA, 15 bp, Homo sapiens
tgttgacacattcaa

SEQ ID NO: 1955151 - DNA, 15 bp, Homo sapiens
gttgacacattcaaa

SEQ ID NO: 1955152 - DNA, 15 bp, Homo sapiens
ttgacacattcaaaa

SEQ ID NO: 1955153 - DNA, 15 bp, Homo sapiens
tgacacattcaaaac

SEQ ID NO: 1955154 - DNA, 15 bp, Homo sapiens
gacacattcaaaaca

SEQ ID NO: 1955155 - DNA, 15 bp, Homo sapiens
acacattcaaaacat

SEQ ID NO: 1955156 - DNA, 15 bp, Homo sapiens
cacattcaaaacata

SEQ ID NO: 1955157 - DNA, 15 bp, Homo sapiens
acattcaaaacatat

SEQ ID NO: 1955158 - DNA, 15 bp, Homo sapiens
cattcaaaacatatt

SEQ ID NO: 1955159 - DNA, 15 bp, Homo sapiens
attcaaaacatattc

SEQ ID NO: 1955160 - DNA, 15 bp, Homo sapiens
ttcaaaacatattca

SEQ ID NO: 1955161 - DNA, 15 bp, Homo sapiens
tcaaaacatattcaa

SEQ ID NO: 1955162 - DNA, 15 bp, Homo sapiens
caaaacatattcaag

SEQ ID NO: 1955163 - DNA, 15 bp, Homo sapiens
aaaacatattcaagc

SEQ ID NO: 1955164 - DNA, 15 bp, Homo sapiens
aaacatattcaagct

SEQ ID NO: 1955165 - DNA, 15 bp, Homo sapiens
aacatattcaagctt

SEQ ID NO: 1955166 - DNA, 15 bp, Homo sapiens
acatattcaagcttg

SEQ ID NO: 1955167 - DNA, 15 bp, Homo sapiens
catattcaagcttgc

SEQ ID NO: 1955168 - DNA, 15 bp, Homo sapiens
atattcaagcttgca

SEQ ID NO: 1955169 - DNA, 15 bp, Homo sapiens
tattcaagcttgcac

SEQ ID NO: 1955170 - DNA, 15 bp, Homo sapiens
attcaagcttgcaca

SEQ ID NO: 1955171 - DNA, 15 bp, Homo sapiens
ttcaagcttgcacaa

SEQ ID NO: 1955172 - DNA, 15 bp, Homo sapiens
tcaagcttgcacaat

SEQ ID NO: 1955173 - DNA, 15 bp, Homo sapiens
caagcttgcacaata

SEQ ID NO: 1955174 - DNA, 15 bp, Homo sapiens
aagcttgcacaataa

SEQ ID NO: 1955175 - DNA, 15 bp, Homo sapiens
agcttgcacaataac

SEQ ID NO: 1955176 - DNA, 15 bp, Homo sapiens
gcttgcacaataact

SEQ ID NO: 1955177 - DNA, 15 bp, Homo sapiens
cttgcacaataactt

SEQ ID NO: 1955178 - DNA, 15 bp, Homo sapiens
ttgcacaataacttc

SEQ ID NO: 1955179 - DNA, 15 bp, Homo sapiens
tgcacaataacttct

SEQ ID NO: 1955180 - DNA, 15 bp, Homo sapiens
gcacaataacttcta

SEQ ID NO: 1955181 - DNA, 15 bp, Homo sapiens
cacaataacttctaa

SEQ ID NO: 1955182 - DNA, 15 bp, Homo sapiens
acaataacttctaaa

SEQ ID NO: 1955183 - DNA, 15 bp, Homo sapiens
caataacttctaaaa

SEQ ID NO: 1955184 - DNA, 15 bp, Homo sapiens
aataacttctaaaaa

SEQ ID NO: 1955185 - DNA, 15 bp, Homo sapiens
ataacttctaaaaac

SEQ ID NO: 1955186 - DNA, 15 bp, Homo sapiens
taacttctaaaaaca

SEQ ID NO: 1955187 - DNA, 15 bp, Homo sapiens
aacttctaaaaacag

SEQ ID NO: 1955188 - DNA, 15 bp, Homo sapiens
acttctaaaaacagt

SEQ ID NO: 1955189 - DNA, 15 bp, Homo sapiens
cttctaaaaacagta

SEQ ID NO: 1955190 - DNA, 15 bp, Homo sapiens
ttctaaaaacagtag

SEQ ID NO: 1955191 - DNA, 15 bp, Homo sapiens
tctaaaaacagtaga

SEQ ID NO: 1955192 - DNA, 15 bp, Homo sapiens
ctaaaaacagtagat

SEQ ID NO: 1955193 - DNA, 15 bp, Homo sapiens
taaaaacagtagata

SEQ ID NO: 1955194 - DNA, 15 bp, Homo sapiens
aaaaacagtagataa

SEQ ID NO: 1955195 - DNA, 15 bp, Homo sapiens
aaaacagtagataaa

SEQ ID NO: 1955196 - DNA, 15 bp, Homo sapiens
aaacagtagataaag

SEQ ID NO: 1955197 - DNA, 15 bp, Homo sapiens
aacagtagataaaga

SEQ ID NO: 1955198 - DNA, 15 bp, Homo sapiens
acagtagataaagaa

SEQ ID NO: 1955199 - DNA, 15 bp, Homo sapiens
cagtagataaagaac

SEQ ID NO: 1955200 - DNA, 15 bp, Homo sapiens
agtagataaagaact

SEQ ID NO: 1955201 - DNA, 15 bp, Homo sapiens
gtagataaagaacta

SEQ ID NO: 1955202 - DNA, 15 bp, Homo sapiens
tagataaagaactaa

SEQ ID NO: 1955203 - DNA, 15 bp, Homo sapiens
agataaagaactaaa

SEQ ID NO: 1955204 - DNA, 15 bp, Homo sapiens
gataaagaactaaaa

SEQ ID NO: 1955205 - DNA, 15 bp, Homo sapiens
ataaagaactaaaat

SEQ ID NO: 1955206 - DNA, 15 bp, Homo sapiens
taaagaactaaaatc

SEQ ID NO: 1955207 - DNA, 15 bp, Homo sapiens
aaagaactaaaatca

SEQ ID NO: 1955208 - DNA, 15 bp, Homo sapiens
aagaactaaaatcaa

SEQ ID NO: 1955209 - DNA, 15 bp, Homo sapiens
agaactaaaatcaat

SEQ ID NO: 1955210 - DNA, 15 bp, Homo sapiens
gaactaaaatcaata

SEQ ID NO: 1955211 - DNA, 15 bp, Homo sapiens
aactaaaatcaatag

SEQ ID NO: 1955212 - DNA, 15 bp, Homo sapiens
actaaaatcaatagt

SEQ ID NO: 1955213 - DNA, 15 bp, Homo sapiens
ctaaaatcaatagtt

SEQ ID NO: 1955214 - DNA, 15 bp, Homo sapiens
taaaatcaatagttg

SEQ ID NO: 1955215 - DNA, 15 bp, Homo sapiens
aaaatcaatagttga

SEQ ID NO: 1955216 - DNA, 15 bp, Homo sapiens
aaatcaatagttgaa

SEQ ID NO: 1955217 - DNA, 15 bp, Homo sapiens
aatcaatagttgaaa

SEQ ID NO: 1955218 - DNA, 15 bp, Homo sapiens
atcaatagttgaaag

SEQ ID NO: 1955219 - DNA, 15 bp, Homo sapiens
tcaatagttgaaagc

SEQ ID NO: 1955220 - DNA, 15 bp, Homo sapiens
caatagttgaaagcc

SEQ ID NO: 1955221 - DNA, 15 bp, Homo sapiens
aatagttgaaagcct

SEQ ID NO: 1955222 - DNA, 15 bp, Homo sapiens
atagttgaaagccta

SEQ ID NO: 1955223 - DNA, 15 bp, Homo sapiens
tagttgaaagcctaa

SEQ ID NO: 1955224 - DNA, 15 bp, Homo sapiens
agttgaaagcctaat

SEQ ID NO: 1955225 - DNA, 15 bp, Homo sapiens
gttgaaagcctaatt

SEQ ID NO: 1955226 - DNA, 15 bp, Homo sapiens
ttgaaagcctaattt

SEQ ID NO: 1955227 - DNA, 15 bp, Homo sapiens
tgaaagcctaattta

SEQ ID NO: 1955228 - DNA, 15 bp, Homo sapiens
gaaagcctaatttaa

SEQ ID NO: 1955229 - DNA, 15 bp, Homo sapiens
aaagcctaatttaaa

SEQ ID NO: 1955230 - DNA, 15 bp, Homo sapiens
aagcctaatttaaaa

SEQ ID NO: 1955231 - DNA, 15 bp, Homo sapiens
agcctaatttaaaaa

SEQ ID NO: 1955232 - DNA, 15 bp, Homo sapiens
gcctaatttaaaaaa

SEQ ID NO: 1955233 - DNA, 15 bp, Homo sapiens
cctaatttaaaaaaa

SEQ ID NO: 1955234 - DNA, 15 bp, Homo sapiens
ctaatttaaaaaaaa

SEQ ID NO: 1955235 - DNA, 15 bp, Homo sapiens
taatttaaaaaaaag

SEQ ID NO: 1955236 - DNA, 15 bp, Homo sapiens
aatttaaaaaaaaga

SEQ ID NO: 1955237 - DNA, 15 bp, Homo sapiens
atttaaaaaaaagac

SEQ ID NO: 1955238 - DNA, 15 bp, Homo sapiens
tttaaaaaaaagact

SEQ ID NO: 1955239 - DNA, 15 bp, Homo sapiens
ttaaaaaaaagactc

SEQ ID NO: 1955240 - DNA, 15 bp, Homo sapiens
taaaaaaaagactct

SEQ ID NO: 1955241 - DNA, 15 bp, Homo sapiens
aaaaaaaagactctc

SEQ ID NO: 1955242 - DNA, 15 bp, Homo sapiens
aaaaaaagactctct

SEQ ID NO: 1955243 - DNA, 15 bp, Homo sapiens
aaaaaagactctctg

SEQ ID NO: 1955244 - DNA, 15 bp, Homo sapiens
aaaaagactctctgg

SEQ ID NO: 1955245 - DNA, 15 bp, Homo sapiens
aaaagactctctggc

SEQ ID NO: 1955246 - DNA, 15 bp, Homo sapiens
aaagactctctggct

SEQ ID NO: 1955247 - DNA, 15 bp, Homo sapiens
aagactctctggctg

SEQ ID NO: 1955248 - DNA, 15 bp, Homo sapiens
agactctctggctgg

SEQ ID NO: 1955249 - DNA, 15 bp, Homo sapiens
gactctctggctggg

SEQ ID NO: 1955250 - DNA, 15 bp, Homo sapiens
actctctggctgggc

SEQ ID NO: 1955251 - DNA, 15 bp, Homo sapiens
ctctctggctgggcg

SEQ ID NO: 1955252 - DNA, 15 bp, Homo sapiens
tctctggctgggcgt

SEQ ID NO: 1955253 - DNA, 15 bp, Homo sapiens
ctctggctgggcgtg

SEQ ID NO: 1955254 - DNA, 15 bp, Homo sapiens
tctggctgggcgtgg

SEQ ID NO: 1955255 - DNA, 15 bp, Homo sapiens
ctggctgggcgtggt

SEQ ID NO: 1955256 - DNA, 15 bp, Homo sapiens
tggctgggcgtggtg

SEQ ID NO: 1955257 - DNA, 15 bp, Homo sapiens
ggctgggcgtggtgg

SEQ ID NO: 1955258 - DNA, 15 bp, Homo sapiens
ctgggcgtggtggct

SEQ ID NO: 1955259 - DNA, 15 bp, Homo sapiens
tgggcgtggtggctc

SEQ ID NO: 1955260 - DNA, 15 bp, Homo sapiens
cgtggtggctcacga

SEQ ID NO: 1955261 - DNA, 15 bp, Homo sapiens
gtggtggctcacgac

SEQ ID NO: 1955262 - DNA, 15 bp, Homo sapiens
tggtggctcacgact

SEQ ID NO: 1955263 - DNA, 15 bp, Homo sapiens
ggtggctcacgactg

SEQ ID NO: 1955264 - DNA, 15 bp, Homo sapiens
gtggctcacgactgt

SEQ ID NO: 1955265 - DNA, 15 bp, Homo sapiens
tggctcacgactgta

SEQ ID NO: 1955266 - DNA, 15 bp, Homo sapiens
ggctcacgactgtaa

SEQ ID NO: 1955267 - DNA, 15 bp, Homo sapiens
gctcacgactgtaat

SEQ ID NO: 1955268 - DNA, 15 bp, Homo sapiens
ctcacgactgtaatc

SEQ ID NO: 1955269 - DNA, 15 bp, Homo sapiens
tcacgactgtaatcc

SEQ ID NO: 1955270 - DNA, 15 bp, Homo sapiens
cacgactgtaatccc

SEQ ID NO: 1955271 - DNA, 15 bp, Homo sapiens
acgactgtaatccca

SEQ ID NO: 1955272 - DNA, 15 bp, Homo sapiens
cgactgtaatcccag

SEQ ID NO: 1955273 - DNA, 15 bp, Homo sapiens
actgtaatcccagca

SEQ ID NO: 1955274 - DNA, 15 bp, Homo sapiens
agatcacctgaggtt

SEQ ID NO: 1955275 - DNA, 15 bp, Homo sapiens
gatcacctgaggttg

SEQ ID NO: 1955276 - DNA, 15 bp, Homo sapiens
atcacctgaggttgg

SEQ ID NO: 1955277 - DNA, 15 bp, Homo sapiens
tcacctgaggttgga

SEQ ID NO: 1955278 - DNA, 15 bp, Homo sapiens
cacctgaggttggaa

SEQ ID NO: 1955279 - DNA, 15 bp, Homo sapiens
acctgaggttggaag

SEQ ID NO: 1955280 - DNA, 15 bp, Homo sapiens
cctgaggttggaagt

SEQ ID NO: 1955281 - DNA, 15 bp, Homo sapiens
ctgaggttggaagtt

SEQ ID NO: 1955282 - DNA, 15 bp, Homo sapiens
tgaggttggaagttt

SEQ ID NO: 1955283 - DNA, 15 bp, Homo sapiens
gaggttggaagtttt

SEQ ID NO: 1955284 - DNA, 15 bp, Homo sapiens
aggttggaagttttg

SEQ ID NO: 1955285 - DNA, 15 bp, Homo sapiens
ggttggaagttttga

SEQ ID NO: 1955286 - DNA, 15 bp, Homo sapiens
gttggaagttttgag

SEQ ID NO: 1955287 - DNA, 15 bp, Homo sapiens
ttggaagttttgaga

SEQ ID NO: 1955288 - DNA, 15 bp, Homo sapiens
tggaagttttgagac

SEQ ID NO: 1955289 - DNA, 15 bp, Homo sapiens
ggaagttttgagacc

SEQ ID NO: 1955290 - DNA, 15 bp, Homo sapiens
gaagttttgagacca

SEQ ID NO: 1955291 - DNA, 15 bp, Homo sapiens
aagttttgagaccag

SEQ ID NO: 1955292 - DNA, 15 bp, Homo sapiens
agttttgagaccagc

SEQ ID NO: 1955293 - DNA, 15 bp, Homo sapiens
gttttgagaccagcg

SEQ ID NO: 1955294 - DNA, 15 bp, Homo sapiens
ttttgagaccagcgt

SEQ ID NO: 1955295 - DNA, 15 bp, Homo sapiens
tttgagaccagcgtg

SEQ ID NO: 1955296 - DNA, 15 bp, Homo sapiens
ttgagaccagcgtga

SEQ ID NO: 1955297 - DNA, 15 bp, Homo sapiens
tgagaccagcgtgac

SEQ ID NO: 1955298 - DNA, 15 bp, Homo sapiens
gagaccagcgtgaca

SEQ ID NO: 1955299 - DNA, 15 bp, Homo sapiens
agaccagcgtgacaa

SEQ ID NO: 1955300 - DNA, 15 bp, Homo sapiens
gaccagcgtgacaaa

SEQ ID NO: 1955301 - DNA, 15 bp, Homo sapiens
accagcgtgacaaac

SEQ ID NO: 1955302 - DNA, 15 bp, Homo sapiens
ccagcgtgacaaaca

SEQ ID NO: 1955303 - DNA, 15 bp, Homo sapiens
cagcgtgacaaacat

SEQ ID NO: 1955304 - DNA, 15 bp, Homo sapiens
agcgtgacaaacatg

SEQ ID NO: 1955305 - DNA, 15 bp, Homo sapiens
gcgtgacaaacatgg

SEQ ID NO: 1955306 - DNA, 15 bp, Homo sapiens
cgtgacaaacatgga

SEQ ID NO: 1955307 - DNA, 15 bp, Homo sapiens
gtgacaaacatggag

SEQ ID NO: 1955308 - DNA, 15 bp, Homo sapiens
tgacaaacatggaga

SEQ ID NO: 1955309 - DNA, 15 bp, Homo sapiens
gacaaacatggagaa

SEQ ID NO: 1955310 - DNA, 15 bp, Homo sapiens
acaaacatggagaaa

SEQ ID NO: 1955311 - DNA, 15 bp, Homo sapiens
aaacatggagaaacc

SEQ ID NO: 1955312 - DNA, 15 bp, Homo sapiens
aaaaaaattagccgg

SEQ ID NO: 1955313 - DNA, 15 bp, Homo sapiens
gccgggcttggtggt

SEQ ID NO: 1955314 - DNA, 15 bp, Homo sapiens
ccgggcttggtggtt

SEQ ID NO: 1955315 - DNA, 15 bp, Homo sapiens
cgggcttggtggttg

SEQ ID NO: 1955316 - DNA, 15 bp, Homo sapiens
gggcttggtggttgc

SEQ ID NO: 1955317 - DNA, 15 bp, Homo sapiens
ggcttggtggttgca

SEQ ID NO: 1955318 - DNA, 15 bp, Homo sapiens
gcttggtggttgcat

SEQ ID NO: 1955319 - DNA, 15 bp, Homo sapiens
cttggtggttgcatg

SEQ ID NO: 1955320 - DNA, 15 bp, Homo sapiens
ttggtggttgcatgc

SEQ ID NO: 1955321 - DNA, 15 bp, Homo sapiens
tggtggttgcatgcc

SEQ ID NO: 1955322 - DNA, 15 bp, Homo sapiens
ggtggttgcatgcct

SEQ ID NO: 1955323 - DNA, 15 bp, Homo sapiens
gtggttgcatgccta

SEQ ID NO: 1955324 - DNA, 15 bp, Homo sapiens
tggttgcatgcctat

SEQ ID NO: 1955325 - DNA, 15 bp, Homo sapiens
ggttgcatgcctata

SEQ ID NO: 1955326 - DNA, 15 bp, Homo sapiens
gttgcatgcctataa

SEQ ID NO: 1955327 - DNA, 15 bp, Homo sapiens
ttgcatgcctataat

SEQ ID NO: 1955328 - DNA, 15 bp, Homo sapiens
tgcatgcctataatc

SEQ ID NO: 1955329 - DNA, 15 bp, Homo sapiens
gcatgcctataatcc

SEQ ID NO: 1955330 - DNA, 15 bp, Homo sapiens
tataatcccagctat

SEQ ID NO: 1955331 - DNA, 15 bp, Homo sapiens
ataatcccagctatg

SEQ ID NO: 1955332 - DNA, 15 bp, Homo sapiens
taatcccagctatgc

SEQ ID NO: 1955333 - DNA, 15 bp, Homo sapiens
aatcccagctatgca

SEQ ID NO: 1955334 - DNA, 15 bp, Homo sapiens
atcccagctatgcag

SEQ ID NO: 1955335 - DNA, 15 bp, Homo sapiens
tcccagctatgcagg

SEQ ID NO: 1955336 - DNA, 15 bp, Homo sapiens
cccagctatgcagga

SEQ ID NO: 1955337 - DNA, 15 bp, Homo sapiens
ccagctatgcaggag

SEQ ID NO: 1955338 - DNA, 15 bp, Homo sapiens
cagctatgcaggagg

SEQ ID NO: 1955339 - DNA, 15 bp, Homo sapiens
agctatgcaggaggc

SEQ ID NO: 1955340 - DNA, 15 bp, Homo sapiens
gctatgcaggaggct

SEQ ID NO: 1955341 - DNA, 15 bp, Homo sapiens
ctatgcaggaggctg

SEQ ID NO: 1955342 - DNA, 15 bp, Homo sapiens
tatgcaggaggctga

SEQ ID NO: 1955343 - DNA, 15 bp, Homo sapiens
atgcaggaggctgag

SEQ ID NO: 1955344 - DNA, 15 bp, Homo sapiens
tgcaggaggctgagg

SEQ ID NO: 1955345 - DNA, 15 bp, Homo sapiens
gcaggaggctgaggc

SEQ ID NO: 1955346 - DNA, 15 bp, Homo sapiens
gagattgtgccattg

SEQ ID NO: 1955347 - DNA, 15 bp, Homo sapiens
agattgtgccattgc

SEQ ID NO: 1955348 - DNA, 15 bp, Homo sapiens
gattgtgccattgca

SEQ ID NO: 1955349 - DNA, 15 bp, Homo sapiens
attgtgccattgcaa

SEQ ID NO: 1955350 - DNA, 15 bp, Homo sapiens
ttgtgccattgcaat

SEQ ID NO: 1955351 - DNA, 15 bp, Homo sapiens
tgtgccattgcaatc

SEQ ID NO: 1955352 - DNA, 15 bp, Homo sapiens
gtgccattgcaatcc

SEQ ID NO: 1955353 - DNA, 15 bp, Homo sapiens
tgccattgcaatcca

SEQ ID NO: 1955354 - DNA, 15 bp, Homo sapiens
gccattgcaatccag

SEQ ID NO: 1955355 - DNA, 15 bp, Homo sapiens
ccattgcaatccagc

SEQ ID NO: 1955356 - DNA, 15 bp, Homo sapiens
cattgcaatccagcc

SEQ ID NO: 1955357 - DNA, 15 bp, Homo sapiens
attgcaatccagcct

SEQ ID NO: 1955358 - DNA, 15 bp, Homo sapiens
ttgcaatccagcctg

SEQ ID NO: 1955359 - DNA, 15 bp, Homo sapiens
caatccagcctgggc

SEQ ID NO: 1955360 - DNA, 15 bp, Homo sapiens
aatccagcctgggca

SEQ ID NO: 1955361 - DNA, 15 bp, Homo sapiens
atccagcctgggcaa

SEQ ID NO: 1955362 - DNA, 15 bp, Homo sapiens
aagagcgaaactccg

SEQ ID NO: 1955363 - DNA, 15 bp, Homo sapiens
gaaactccgtctcag

SEQ ID NO: 1955364 - DNA, 15 bp, Homo sapiens
aaactccgtctcaga

SEQ ID NO: 1955365 - DNA, 15 bp, Homo sapiens
aactccgtctcagaa

SEQ ID NO: 1955366 - DNA, 15 bp, Homo sapiens
cgtctcagaaaaaaa

SEQ ID NO: 1955367 - DNA, 15 bp, Homo sapiens
aaaaaaaaaaagact

SEQ ID NO: 1955368 - DNA, 15 bp, Homo sapiens
aaaaaaaaaagactc

SEQ ID NO: 1955369 - DNA, 15 bp, Homo sapiens
aaaaaaaaagactca

SEQ ID NO: 1955370 - DNA, 15 bp, Homo sapiens
aaaaaaaagactcac

SEQ ID NO: 1955371 - DNA, 15 bp, Homo sapiens
aaaaaaagactcacc

SEQ ID NO: 1955372 - DNA, 15 bp, Homo sapiens
aaaaaagactcacca

SEQ ID NO: 1955373 - DNA, 15 bp, Homo sapiens
aaaaagactcaccat

SEQ ID NO: 1955374 - DNA, 15 bp, Homo sapiens
aaaagactcaccata

SEQ ID NO: 1955375 - DNA, 15 bp, Homo sapiens
aaagactcaccataa

SEQ ID NO: 1955376 - DNA, 15 bp, Homo sapiens
aagactcaccataac

SEQ ID NO: 1955377 - DNA, 15 bp, Homo sapiens
agactcaccataact

SEQ ID NO: 1955378 - DNA, 15 bp, Homo sapiens
gactcaccataactt

SEQ ID NO: 1955379 - DNA, 15 bp, Homo sapiens
actcaccataacttg

SEQ ID NO: 1955380 - DNA, 15 bp, Homo sapiens
ctcaccataacttgt

SEQ ID NO: 1955381 - DNA, 15 bp, Homo sapiens
tcaccataacttgta

SEQ ID NO: 1955382 - DNA, 15 bp, Homo sapiens
caccataacttgtac

SEQ ID NO: 1955383 - DNA, 15 bp, Homo sapiens
accataacttgtact

SEQ ID NO: 1955384 - DNA, 15 bp, Homo sapiens
ccataacttgtactg

SEQ ID NO: 1955385 - DNA, 15 bp, Homo sapiens
cataacttgtactgg

SEQ ID NO: 1955386 - DNA, 15 bp, Homo sapiens
ataacttgtactggt

SEQ ID NO: 1955387 - DNA, 15 bp, Homo sapiens
taacttgtactggtc

SEQ ID NO: 1955388 - DNA, 15 bp, Homo sapiens
aacttgtactggtcc

SEQ ID NO: 1955389 - DNA, 15 bp, Homo sapiens
acttgtactggtcct

SEQ ID NO: 1955390 - DNA, 15 bp, Homo sapiens
cttgtactggtcctt

SEQ ID NO: 1955391 - DNA, 15 bp, Homo sapiens
ttgtactggtcctta

SEQ ID NO: 1955392 - DNA, 15 bp, Homo sapiens
tgtactggtccttac

SEQ ID NO: 1955393 - DNA, 15 bp, Homo sapiens
gtactggtccttacg

SEQ ID NO: 1955394 - DNA, 15 bp, Homo sapiens
tactggtccttacgt

SEQ ID NO: 1955395 - DNA, 15 bp, Homo sapiens
actggtccttacgtc

SEQ ID NO: 1955396 - DNA, 15 bp, Homo sapiens
ctggtccttacgtca

SEQ ID NO: 1955397 - DNA, 15 bp, Homo sapiens
tggtccttacgtcaa

SEQ ID NO: 1955398 - DNA, 15 bp, Homo sapiens
ggtccttacgtcaaa

SEQ ID NO: 1955399 - DNA, 15 bp, Homo sapiens
gtccttacgtcaaat

SEQ ID NO: 1955400 - DNA, 15 bp, Homo sapiens
tccttacgtcaaata

SEQ ID NO: 1955401 - DNA, 15 bp, Homo sapiens
ccttacgtcaaataa

SEQ ID NO: 1955402 - DNA, 15 bp, Homo sapiens
cttacgtcaaataac

SEQ ID NO: 1955403 - DNA, 15 bp, Homo sapiens
ttacgtcaaataaca

SEQ ID NO: 1955404 - DNA, 15 bp, Homo sapiens
tacgtcaaataacac

SEQ ID NO: 1955405 - DNA, 15 bp, Homo sapiens
acgtcaaataacaca

SEQ ID NO: 1955406 - DNA, 15 bp, Homo sapiens
cgtcaaataacacaa

SEQ ID NO: 1955407 - DNA, 15 bp, Homo sapiens
gtcaaataacacaat

SEQ ID NO: 1955408 - DNA, 15 bp, Homo sapiens
tcaaataacacaatc

SEQ ID NO: 1955409 - DNA, 15 bp, Homo sapiens
caaataacacaatct

SEQ ID NO: 1955410 - DNA, 15 bp, Homo sapiens
aaataacacaatctg

SEQ ID NO: 1955411 - DNA, 15 bp, Homo sapiens
aataacacaatctgc

SEQ ID NO: 1955412 - DNA, 15 bp, Homo sapiens
ataacacaatctgca

SEQ ID NO: 1955413 - DNA, 15 bp, Homo sapiens
taacacaatctgcaa

SEQ ID NO: 1955414 - DNA, 15 bp, Homo sapiens
aacacaatctgcaat

SEQ ID NO: 1955415 - DNA, 15 bp, Homo sapiens
acacaatctgcaatg

SEQ ID NO: 1955416 - DNA, 15 bp, Homo sapiens
cacaatctgcaatga

SEQ ID NO: 1955417 - DNA, 15 bp, Homo sapiens
acaatctgcaatgat

SEQ ID NO: 1955418 - DNA, 15 bp, Homo sapiens
caatctgcaatgata

SEQ ID NO: 1955419 - DNA, 15 bp, Homo sapiens
aatctgcaatgatat

SEQ ID NO: 1955420 - DNA, 15 bp, Homo sapiens
atctgcaatgatata

SEQ ID NO: 1955421 - DNA, 15 bp, Homo sapiens
tctgcaatgatatat

SEQ ID NO: 1955422 - DNA, 15 bp, Homo sapiens
ctgcaatgatatata

SEQ ID NO: 1955423 - DNA, 15 bp, Homo sapiens
tgcaatgatatatat

SEQ ID NO: 1955424 - DNA, 15 bp, Homo sapiens
gcaatgatatatatt

SEQ ID NO: 1955425 - DNA, 15 bp, Homo sapiens
caatgatatatatta

SEQ ID NO: 1955426 - DNA, 15 bp, Homo sapiens
aatgatatatattag

SEQ ID NO: 1955427 - DNA, 15 bp, Homo sapiens
atgatatatattagt

SEQ ID NO: 1955428 - DNA, 15 bp, Homo sapiens
tgatatatattagtt

SEQ ID NO: 1955429 - DNA, 15 bp, Homo sapiens
gatatatattagttt

SEQ ID NO: 1955430 - DNA, 15 bp, Homo sapiens
atatatattagttta

SEQ ID NO: 1955431 - DNA, 15 bp, Homo sapiens
tatatattagtttag

SEQ ID NO: 1955432 - DNA, 15 bp, Homo sapiens
atatattagtttagg

SEQ ID NO: 1955433 - DNA, 15 bp, Homo sapiens
tatattagtttagga

SEQ ID NO: 1955434 - DNA, 15 bp, Homo sapiens
atattagtttaggac

SEQ ID NO: 1955435 - DNA, 15 bp, Homo sapiens
tattagtttaggacc

SEQ ID NO: 1955436 - DNA, 15 bp, Homo sapiens
attagtttaggacct

SEQ ID NO: 1955437 - DNA, 15 bp, Homo sapiens
ttagtttaggacctc

SEQ ID NO: 1955438 - DNA, 15 bp, Homo sapiens
tagtttaggacctca

SEQ ID NO: 1955439 - DNA, 15 bp, Homo sapiens
agtttaggacctcag

SEQ ID NO: 1955440 - DNA, 15 bp, Homo sapiens
gtttaggacctcagg

SEQ ID NO: 1955441 - DNA, 15 bp, Homo sapiens
tttaggacctcaggg

SEQ ID NO: 1955442 - DNA, 15 bp, Homo sapiens
ttaggacctcagggt

SEQ ID NO: 1955443 - DNA, 15 bp, Homo sapiens
taggacctcagggtc

SEQ ID NO: 1955444 - DNA, 15 bp, Homo sapiens
aggacctcagggtca

SEQ ID NO: 1955445 - DNA, 15 bp, Homo sapiens
ggacctcagggtcat

SEQ ID NO: 1955446 - DNA, 15 bp, Homo sapiens
gacctcagggtcata

SEQ ID NO: 1955447 - DNA, 15 bp, Homo sapiens
acctcagggtcataa

SEQ ID NO: 1955448 - DNA, 15 bp, Homo sapiens
cctcagggtcataaa

SEQ ID NO: 1955449 - DNA, 15 bp, Homo sapiens
ctcagggtcataaac

SEQ ID NO: 1955450 - DNA, 15 bp, Homo sapiens
tcagggtcataaaca

SEQ ID NO: 1955451 - DNA, 15 bp, Homo sapiens
cagggtcataaacaa

SEQ ID NO: 1955452 - DNA, 15 bp, Homo sapiens
agggtcataaacaaa

SEQ ID NO: 1955453 - DNA, 15 bp, Homo sapiens
gggtcataaacaaaa

SEQ ID NO: 1955454 - DNA, 15 bp, Homo sapiens
ggtcataaacaaaac

SEQ ID NO: 1955455 - DNA, 15 bp, Homo sapiens
gtcataaacaaaact

SEQ ID NO: 1955456 - DNA, 15 bp, Homo sapiens
tcataaacaaaactg

SEQ ID NO: 1955457 - DNA, 15 bp, Homo sapiens
cataaacaaaactgc

SEQ ID NO: 1955458 - DNA, 15 bp, Homo sapiens
ataaacaaaactgcc

SEQ ID NO: 1955459 - DNA, 15 bp, Homo sapiens
taaacaaaactgcca

SEQ ID NO: 1955460 - DNA, 15 bp, Homo sapiens
aaacaaaactgccat

SEQ ID NO: 1955461 - DNA, 15 bp, Homo sapiens
aacaaaactgccatt

SEQ ID NO: 1955462 - DNA, 15 bp, Homo sapiens
acaaaactgccattc

SEQ ID NO: 1955463 - DNA, 15 bp, Homo sapiens
caaaactgccattcc

SEQ ID NO: 1955464 - DNA, 15 bp, Homo sapiens
aaaactgccattcct

SEQ ID NO: 1955465 - DNA, 15 bp, Homo sapiens
aaactgccattcctg

SEQ ID NO: 1955466 - DNA, 15 bp, Homo sapiens
aactgccattcctga

SEQ ID NO: 1955467 - DNA, 15 bp, Homo sapiens
actgccattcctgaa

SEQ ID NO: 1955468 - DNA, 15 bp, Homo sapiens
ctgccattcctgaac

SEQ ID NO: 1955469 - DNA, 15 bp, Homo sapiens
tgccattcctgaact

SEQ ID NO: 1955470 - DNA, 15 bp, Homo sapiens
gccattcctgaactt

SEQ ID NO: 1955471 - DNA, 15 bp, Homo sapiens
ccattcctgaacttt

SEQ ID NO: 1955472 - DNA, 15 bp, Homo sapiens
cattcctgaactttc

SEQ ID NO: 1955473 - DNA, 15 bp, Homo sapiens
attcctgaactttct

SEQ ID NO: 1955474 - DNA, 15 bp, Homo sapiens
ttcctgaactttctg

SEQ ID NO: 1955475 - DNA, 15 bp, Homo sapiens
tcctgaactttctgt

SEQ ID NO: 1955476 - DNA, 15 bp, Homo sapiens
cctgaactttctgta

SEQ ID NO: 1955477 - DNA, 15 bp, Homo sapiens
ctgaactttctgtat

SEQ ID NO: 1955478 - DNA, 15 bp, Homo sapiens
tgaactttctgtata

SEQ ID NO: 1955479 - DNA, 15 bp, Homo sapiens
gaactttctgtatac

SEQ ID NO: 1955480 - DNA, 15 bp, Homo sapiens
aactttctgtatact

SEQ ID NO: 1955481 - DNA, 15 bp, Homo sapiens
actttctgtatactg

SEQ ID NO: 1955482 - DNA, 15 bp, Homo sapiens
ctttctgtatactga

SEQ ID NO: 1955483 - DNA, 15 bp, Homo sapiens
tttctgtatactgag

SEQ ID NO: 1955484 - DNA, 15 bp, Homo sapiens
ttctgtatactgagc

SEQ ID NO: 1955485 - DNA, 15 bp, Homo sapiens
tctgtatactgagct

SEQ ID NO: 1955486 - DNA, 15 bp, Homo sapiens
ctgtatactgagctc

SEQ ID NO: 1955487 - DNA, 15 bp, Homo sapiens
tgtatactgagctct

SEQ ID NO: 1955488 - DNA, 15 bp, Homo sapiens
gtatactgagctcta

SEQ ID NO: 1955489 - DNA, 15 bp, Homo sapiens
tatactgagctctaa

SEQ ID NO: 1955490 - DNA, 15 bp, Homo sapiens
atactgagctctaat

SEQ ID NO: 1955491 - DNA, 15 bp, Homo sapiens
tactgagctctaata

SEQ ID NO: 1955492 - DNA, 15 bp, Homo sapiens
actgagctctaatac

SEQ ID NO: 1955493 - DNA, 15 bp, Homo sapiens
ctgagctctaatact

SEQ ID NO: 1955494 - DNA, 15 bp, Homo sapiens
tgagctctaatacta

SEQ ID NO: 1955495 - DNA, 15 bp, Homo sapiens
gagctctaatactat

SEQ ID NO: 1955496 - DNA, 15 bp, Homo sapiens
agctctaatactatt

SEQ ID NO: 1955497 - DNA, 15 bp, Homo sapiens
gctctaatactattt

SEQ ID NO: 1955498 - DNA, 15 bp, Homo sapiens
ctctaatactatttt

SEQ ID NO: 1955499 - DNA, 15 bp, Homo sapiens
tctaatactattttc

SEQ ID NO: 1955500 - DNA, 15 bp, Homo sapiens
ctaatactattttct

SEQ ID NO: 1955501 - DNA, 15 bp, Homo sapiens
taatactattttctt

SEQ ID NO: 1955502 - DNA, 15 bp, Homo sapiens
aatactattttcttg

SEQ ID NO: 1955503 - DNA, 15 bp, Homo sapiens
atactattttcttgt

SEQ ID NO: 1955504 - DNA, 15 bp, Homo sapiens
tactattttcttgtg

SEQ ID NO: 1955505 - DNA, 15 bp, Homo sapiens
actattttcttgtgg

SEQ ID NO: 1955506 - DNA, 15 bp, Homo sapiens
ctattttcttgtggg

SEQ ID NO: 1955507 - DNA, 15 bp, Homo sapiens
tattttcttgtgggg

SEQ ID NO: 1955508 - DNA, 15 bp, Homo sapiens
attttcttgtggggt

SEQ ID NO: 1955509 - DNA, 15 bp, Homo sapiens
ttttcttgtggggtt

SEQ ID NO: 1955510 - DNA, 15 bp, Homo sapiens
tttcttgtggggtta

SEQ ID NO: 1955511 - DNA, 15 bp, Homo sapiens
ttcttgtggggttac

SEQ ID NO: 1955512 - DNA, 15 bp, Homo sapiens
tcttgtggggttaca

SEQ ID NO: 1955513 - DNA, 15 bp, Homo sapiens
cttgtggggttacat

SEQ ID NO: 1955514 - DNA, 15 bp, Homo sapiens
ttgtggggttacata

SEQ ID NO: 1955515 - DNA, 15 bp, Homo sapiens
tgtggggttacatat

SEQ ID NO: 1955516 - DNA, 15 bp, Homo sapiens
gtggggttacatatt

SEQ ID NO: 1955517 - DNA, 15 bp, Homo sapiens
tggggttacatattc

SEQ ID NO: 1955518 - DNA, 15 bp, Homo sapiens
ggggttacatattct

SEQ ID NO: 1955519 - DNA, 15 bp, Homo sapiens
gggttacatattctg

SEQ ID NO: 1955520 - DNA, 15 bp, Homo sapiens
ggttacatattctgg

SEQ ID NO: 1955521 - DNA, 15 bp, Homo sapiens
gttacatattctgga

SEQ ID NO: 1955522 - DNA, 15 bp, Homo sapiens
ttacatattctggac

SEQ ID NO: 1955523 - DNA, 15 bp, Homo sapiens
tacatattctggact

SEQ ID NO: 1955524 - DNA, 15 bp, Homo sapiens
acatattctggactt

SEQ ID NO: 1955525 - DNA, 15 bp, Homo sapiens
catattctggactta

SEQ ID NO: 1955526 - DNA, 15 bp, Homo sapiens
atattctggacttag

SEQ ID NO: 1955527 - DNA, 15 bp, Homo sapiens
tattctggacttaga

SEQ ID NO: 1955528 - DNA, 15 bp, Homo sapiens
attctggacttagaa

SEQ ID NO: 1955529 - DNA, 15 bp, Homo sapiens
ttctggacttagaaa

SEQ ID NO: 1955530 - DNA, 15 bp, Homo sapiens
tctggacttagaaat

SEQ ID NO: 1955531 - DNA, 15 bp, Homo sapiens
ctggacttagaaatc

SEQ ID NO: 1955532 - DNA, 15 bp, Homo sapiens
tggacttagaaatct

SEQ ID NO: 1955533 - DNA, 15 bp, Homo sapiens
ggacttagaaatctg

SEQ ID NO: 1955534 - DNA, 15 bp, Homo sapiens
gacttagaaatctgt

SEQ ID NO: 1955535 - DNA, 15 bp, Homo sapiens
acttagaaatctgtg

SEQ ID NO: 1955536 - DNA, 15 bp, Homo sapiens
cttagaaatctgtgc

SEQ ID NO: 1955537 - DNA, 15 bp, Homo sapiens
ttagaaatctgtgct

SEQ ID NO: 1955538 - DNA, 15 bp, Homo sapiens
tagaaatctgtgcta

SEQ ID NO: 1955539 - DNA, 15 bp, Homo sapiens
agaaatctgtgctat

SEQ ID NO: 1955540 - DNA, 15 bp, Homo sapiens
gaaatctgtgctatg

SEQ ID NO: 1955541 - DNA, 15 bp, Homo sapiens
aaatctgtgctatgc

SEQ ID NO: 1955542 - DNA, 15 bp, Homo sapiens
aatctgtgctatgcc

SEQ ID NO: 1955543 - DNA, 15 bp, Homo sapiens
atctgtgctatgccc

SEQ ID NO: 1955544 - DNA, 15 bp, Homo sapiens
tctgtgctatgccct

SEQ ID NO: 1955545 - DNA, 15 bp, Homo sapiens
ctgtgctatgccctc

SEQ ID NO: 1955546 - DNA, 15 bp, Homo sapiens
tgtgctatgccctct

SEQ ID NO: 1955547 - DNA, 15 bp, Homo sapiens
gtgctatgccctctt

SEQ ID NO: 1955548 - DNA, 15 bp, Homo sapiens
tgctatgccctcttt

SEQ ID NO: 1955549 - DNA, 15 bp, Homo sapiens
gctatgccctcttta

SEQ ID NO: 1955550 - DNA, 15 bp, Homo sapiens
ctatgccctctttag

SEQ ID NO: 1955551 - DNA, 15 bp, Homo sapiens
tatgccctctttagt

SEQ ID NO: 1955552 - DNA, 15 bp, Homo sapiens
atgccctctttagtg

SEQ ID NO: 1955553 - DNA, 15 bp, Homo sapiens
tgccctctttagtgg

SEQ ID NO: 1955554 - DNA, 15 bp, Homo sapiens
gccctctttagtggt

SEQ ID NO: 1955555 - DNA, 15 bp, Homo sapiens
ccctctttagtggtt

SEQ ID NO: 1955556 - DNA, 15 bp, Homo sapiens
cctctttagtggttc

SEQ ID NO: 1955557 - DNA, 15 bp, Homo sapiens
ctctttagtggttcc

SEQ ID NO: 1955558 - DNA, 15 bp, Homo sapiens
tctttagtggttcct

SEQ ID NO: 1955559 - DNA, 15 bp, Homo sapiens
ctttagtggttcctt

SEQ ID NO: 1955560 - DNA, 15 bp, Homo sapiens
tttagtggttcctta

SEQ ID NO: 1955561 - DNA, 15 bp, Homo sapiens
ttagtggttccttag

SEQ ID NO: 1955562 - DNA, 15 bp, Homo sapiens
tagtggttccttagg

SEQ ID NO: 1955563 - DNA, 15 bp, Homo sapiens
agtggttccttaggg

SEQ ID NO: 1955564 - DNA, 15 bp, Homo sapiens
gtggttccttagggt

SEQ ID NO: 1955565 - DNA, 15 bp, Homo sapiens
tggttccttagggta

SEQ ID NO: 1955566 - DNA, 15 bp, Homo sapiens
ggttccttagggtag

SEQ ID NO: 1955567 - DNA, 15 bp, Homo sapiens
gttccttagggtaga

SEQ ID NO: 1955568 - DNA, 15 bp, Homo sapiens
ttccttagggtagat

SEQ ID NO: 1955569 - DNA, 15 bp, Homo sapiens
tccttagggtagatt

SEQ ID NO: 1955570 - DNA, 15 bp, Homo sapiens
ccttagggtagattg

SEQ ID NO: 1955571 - DNA, 15 bp, Homo sapiens
cttagggtagattga

SEQ ID NO: 1955572 - DNA, 15 bp, Homo sapiens
ttagggtagattgaa

SEQ ID NO: 1955573 - DNA, 15 bp, Homo sapiens
tagggtagattgaaa

SEQ ID NO: 1955574 - DNA, 15 bp, Homo sapiens
agggtagattgaaat

SEQ ID NO: 1955575 - DNA, 15 bp, Homo sapiens
gggtagattgaaata

SEQ ID NO: 1955576 - DNA, 15 bp, Homo sapiens
ggtagattgaaatag

SEQ ID NO: 1955577 - DNA, 15 bp, Homo sapiens
gtagattgaaatagt

SEQ ID NO: 1955578 - DNA, 15 bp, Homo sapiens
tagattgaaatagtt

SEQ ID NO: 1955579 - DNA, 15 bp, Homo sapiens
agattgaaatagtta

SEQ ID NO: 1955580 - DNA, 15 bp, Homo sapiens
gattgaaatagttaa

SEQ ID NO: 1955581 - DNA, 15 bp, Homo sapiens
attgaaatagttaat

SEQ ID NO: 1955582 - DNA, 15 bp, Homo sapiens
ttgaaatagttaatc

SEQ ID NO: 1955583 - DNA, 15 bp, Homo sapiens
tgaaatagttaatcg

SEQ ID NO: 1955584 - DNA, 15 bp, Homo sapiens
gaaatagttaatcgt

SEQ ID NO: 1955585 - DNA, 15 bp, Homo sapiens
aaatagttaatcgtg

SEQ ID NO: 1955586 - DNA, 15 bp, Homo sapiens
aatagttaatcgtgc

SEQ ID NO: 1955587 - DNA, 15 bp, Homo sapiens
atagttaatcgtgct

SEQ ID NO: 1955588 - DNA, 15 bp, Homo sapiens
tagttaatcgtgctc

SEQ ID NO: 1955589 - DNA, 15 bp, Homo sapiens
agttaatcgtgctca

SEQ ID NO: 1955590 - DNA, 15 bp, Homo sapiens
gttaatcgtgctcac

SEQ ID NO: 1955591 - DNA, 15 bp, Homo sapiens
ttaatcgtgctcact

SEQ ID NO: 1955592 - DNA, 15 bp, Homo sapiens
taatcgtgctcactt

SEQ ID NO: 1955593 - DNA, 15 bp, Homo sapiens
aatcgtgctcacttt

SEQ ID NO: 1955594 - DNA, 15 bp, Homo sapiens
atcgtgctcactttt

SEQ ID NO: 1955595 - DNA, 15 bp, Homo sapiens
tcgtgctcacttttt

SEQ ID NO: 1955596 - DNA, 15 bp, Homo sapiens
cgtgctcactttttc

SEQ ID NO: 1955597 - DNA, 15 bp, Homo sapiens
gtgctcactttttcc

SEQ ID NO: 1955598 - DNA, 15 bp, Homo sapiens
tgctcactttttcct

SEQ ID NO: 1955599 - DNA, 15 bp, Homo sapiens
gctcactttttcctg

SEQ ID NO: 1955600 - DNA, 15 bp, Homo sapiens
ctcactttttcctgg

SEQ ID NO: 1955601 - DNA, 15 bp, Homo sapiens
tcactttttcctggt

SEQ ID NO: 1955602 - DNA, 15 bp, Homo sapiens
cactttttcctggta

SEQ ID NO: 1955603 - DNA, 15 bp, Homo sapiens
actttttcctggtaa

SEQ ID NO: 1955604 - DNA, 15 bp, Homo sapiens
ctttttcctggtaaa

SEQ ID NO: 1955605 - DNA, 15 bp, Homo sapiens
tttttcctggtaaag

SEQ ID NO: 1955606 - DNA, 15 bp, Homo sapiens
ttttcctggtaaagt

SEQ ID NO: 1955607 - DNA, 15 bp, Homo sapiens
tttcctggtaaagtc

SEQ ID NO: 1955608 - DNA, 15 bp, Homo sapiens
ttcctggtaaagtca

SEQ ID NO: 1955609 - DNA, 15 bp, Homo sapiens
tcctggtaaagtcaa

SEQ ID NO: 1955610 - DNA, 15 bp, Homo sapiens
cctggtaaagtcaac

SEQ ID NO: 1955611 - DNA, 15 bp, Homo sapiens
ctggtaaagtcaacg

SEQ ID NO: 1955612 - DNA, 15 bp, Homo sapiens
tggtaaagtcaacga

SEQ ID NO: 1955613 - DNA, 15 bp, Homo sapiens
ggtaaagtcaacgat

SEQ ID NO: 1955614 - DNA, 15 bp, Homo sapiens
gtaaagtcaacgata

SEQ ID NO: 1955615 - DNA, 15 bp, Homo sapiens
taaagtcaacgatat

SEQ ID NO: 1955616 - DNA, 15 bp, Homo sapiens
aaagtcaacgatatg

SEQ ID NO: 1955617 - DNA, 15 bp, Homo sapiens
aagtcaacgatatgc

SEQ ID NO: 1955618 - DNA, 15 bp, Homo sapiens
agtcaacgatatgct

SEQ ID NO: 1955619 - DNA, 15 bp, Homo sapiens
gtcaacgatatgctt

SEQ ID NO: 1955620 - DNA, 15 bp, Homo sapiens
tcaacgatatgcttt

SEQ ID NO: 1955621 - DNA, 15 bp, Homo sapiens
caacgatatgctttg

SEQ ID NO: 1955622 - DNA, 15 bp, Homo sapiens
aacgatatgctttga

SEQ ID NO: 1955623 - DNA, 15 bp, Homo sapiens
acgatatgctttgac

SEQ ID NO: 1955624 - DNA, 15 bp, Homo sapiens
cgatatgctttgaca

SEQ ID NO: 1955625 - DNA, 15 bp, Homo sapiens
gatatgctttgacag

SEQ ID NO: 1955626 - DNA, 15 bp, Homo sapiens
atatgctttgacagt

SEQ ID NO: 1955627 - DNA, 15 bp, Homo sapiens
tatgctttgacagtt

SEQ ID NO: 1955628 - DNA, 15 bp, Homo sapiens
atgctttgacagtta

SEQ ID NO: 1955629 - DNA, 15 bp, Homo sapiens
tgctttgacagttat

SEQ ID NO: 1955630 - DNA, 15 bp, Homo sapiens
gctttgacagttatg

SEQ ID NO: 1955631 - DNA, 15 bp, Homo sapiens
ctttgacagttatgc

SEQ ID NO: 1955632 - DNA, 15 bp, Homo sapiens
tttgacagttatgct

SEQ ID NO: 1955633 - DNA, 15 bp, Homo sapiens
ttgacagttatgctt

SEQ ID NO: 1955634 - DNA, 15 bp, Homo sapiens
tgacagttatgcttt

SEQ ID NO: 1955635 - DNA, 15 bp, Homo sapiens
gacagttatgcttta

SEQ ID NO: 1955636 - DNA, 15 bp, Homo sapiens
acagttatgctttag

SEQ ID NO: 1955637 - DNA, 15 bp, Homo sapiens
cagttatgctttagt

SEQ ID NO: 1955638 - DNA, 15 bp, Homo sapiens
agttatgctttagtg

SEQ ID NO: 1955639 - DNA, 15 bp, Homo sapiens
gttatgctttagtga

SEQ ID NO: 1955640 - DNA, 15 bp, Homo sapiens
ttatgctttagtgat

SEQ ID NO: 1955641 - DNA, 15 bp, Homo sapiens
tatgctttagtgatt

SEQ ID NO: 1955642 - DNA, 15 bp, Homo sapiens
atgctttagtgattt

SEQ ID NO: 1955643 - DNA, 15 bp, Homo sapiens
tgctttagtgattta

SEQ ID NO: 1955644 - DNA, 15 bp, Homo sapiens
gctttagtgatttac

SEQ ID NO: 1955645 - DNA, 15 bp, Homo sapiens
ctttagtgatttacc

SEQ ID NO: 1955646 - DNA, 15 bp, Homo sapiens
tttagtgatttacct

SEQ ID NO: 1955647 - DNA, 15 bp, Homo sapiens
ttagtgatttacctt

SEQ ID NO: 1955648 - DNA, 15 bp, Homo sapiens
tagtgatttaccttt

SEQ ID NO: 1955649 - DNA, 15 bp, Homo sapiens
agtgatttacctttt

SEQ ID NO: 1955650 - DNA, 15 bp, Homo sapiens
gtgatttaccttttt

SEQ ID NO: 1955651 - DNA, 15 bp, Homo sapiens
tgatttacctttttt

SEQ ID NO: 1955652 - DNA, 15 bp, Homo sapiens
gatttaccttttttt

SEQ ID NO: 1955653 - DNA, 15 bp, Homo sapiens
atttacctttttttc

SEQ ID NO: 1955654 - DNA, 15 bp, Homo sapiens
tttacctttttttca

SEQ ID NO: 1955655 - DNA, 15 bp, Homo sapiens
ttacctttttttcac

SEQ ID NO: 1955656 - DNA, 15 bp, Homo sapiens
tacctttttttcaca

SEQ ID NO: 1955657 - DNA, 15 bp, Homo sapiens
acctttttttcacaa

SEQ ID NO: 1955658 - DNA, 15 bp, Homo sapiens
cctttttttcacaag

SEQ ID NO: 1955659 - DNA, 15 bp, Homo sapiens
ctttttttcacaagt

SEQ ID NO: 1955660 - DNA, 15 bp, Homo sapiens
tttttttcacaagtt

SEQ ID NO: 1955661 - DNA, 15 bp, Homo sapiens
ttttttcacaagttc

SEQ ID NO: 1955662 - DNA, 15 bp, Homo sapiens
tttttcacaagttca

SEQ ID NO: 1955663 - DNA, 15 bp, Homo sapiens
ttttcacaagttcat

SEQ ID NO: 1955664 - DNA, 15 bp, Homo sapiens
tttcacaagttcatg

SEQ ID NO: 1955665 - DNA, 15 bp, Homo sapiens
ttcacaagttcatga

SEQ ID NO: 1955666 - DNA, 15 bp, Homo sapiens
tcacaagttcatgat

SEQ ID NO: 1955667 - DNA, 15 bp, Homo sapiens
cacaagttcatgatt

SEQ ID NO: 1955668 - DNA, 15 bp, Homo sapiens
acaagttcatgatta

SEQ ID NO: 1955669 - DNA, 15 bp, Homo sapiens
caagttcatgattag

SEQ ID NO: 1955670 - DNA, 15 bp, Homo sapiens
aagttcatgattagg

SEQ ID NO: 1955671 - DNA, 15 bp, Homo sapiens
agttcatgattagga

SEQ ID NO: 1955672 - DNA, 15 bp, Homo sapiens
gttcatgattaggac

SEQ ID NO: 1955673 - DNA, 15 bp, Homo sapiens
ttcatgattaggacc

SEQ ID NO: 1955674 - DNA, 15 bp, Homo sapiens
tcatgattaggacct

SEQ ID NO: 1955675 - DNA, 15 bp, Homo sapiens
catgattaggacctt

SEQ ID NO: 1955676 - DNA, 15 bp, Homo sapiens
atgattaggaccttc

SEQ ID NO: 1955677 - DNA, 15 bp, Homo sapiens
tgattaggaccttct

SEQ ID NO: 1955678 - DNA, 15 bp, Homo sapiens
gattaggaccttctg

SEQ ID NO: 1955679 - DNA, 15 bp, Homo sapiens
attaggaccttctga

SEQ ID NO: 1955680 - DNA, 15 bp, Homo sapiens
ttaggaccttctgaa

SEQ ID NO: 1955681 - DNA, 15 bp, Homo sapiens
taggaccttctgaac

SEQ ID NO: 1955682 - DNA, 15 bp, Homo sapiens
aggaccttctgaacc

SEQ ID NO: 1955683 - DNA, 15 bp, Homo sapiens
ggaccttctgaacct

SEQ ID NO: 1955684 - DNA, 15 bp, Homo sapiens
gaccttctgaacctt

SEQ ID NO: 1955685 - DNA, 15 bp, Homo sapiens
accttctgaacctta

SEQ ID NO: 1955686 - DNA, 15 bp, Homo sapiens
ccttctgaaccttaa

SEQ ID NO: 1955687 - DNA, 15 bp, Homo sapiens
cttctgaaccttaaa

SEQ ID NO: 1955688 - DNA, 15 bp, Homo sapiens
ttctgaaccttaaat

SEQ ID NO: 1955689 - DNA, 15 bp, Homo sapiens
tctgaaccttaaatt

SEQ ID NO: 1955690 - DNA, 15 bp, Homo sapiens
ctgaaccttaaattt

SEQ ID NO: 1955691 - DNA, 15 bp, Homo sapiens
tgaaccttaaatttc

SEQ ID NO: 1955692 - DNA, 15 bp, Homo sapiens
gaaccttaaatttcc

SEQ ID NO: 1955693 - DNA, 15 bp, Homo sapiens
aaccttaaatttcct

SEQ ID NO: 1955694 - DNA, 15 bp, Homo sapiens
accttaaatttcctt

SEQ ID NO: 1955695 - DNA, 15 bp, Homo sapiens
ccttaaatttccttg

SEQ ID NO: 1955696 - DNA, 15 bp, Homo sapiens
cttaaatttccttga

SEQ ID NO: 1955697 - DNA, 15 bp, Homo sapiens
ttaaatttccttgaa

SEQ ID NO: 1955698 - DNA, 15 bp, Homo sapiens
taaatttccttgaaa

SEQ ID NO: 1955699 - DNA, 15 bp, Homo sapiens
aaatttccttgaaac

SEQ ID NO: 1955700 - DNA, 15 bp, Homo sapiens
aatttccttgaaact

SEQ ID NO: 1955701 - DNA, 15 bp, Homo sapiens
atttccttgaaactc

SEQ ID NO: 1955702 - DNA, 15 bp, Homo sapiens
tttccttgaaactct

SEQ ID NO: 1955703 - DNA, 15 bp, Homo sapiens
ttccttgaaactcta

SEQ ID NO: 1955704 - DNA, 15 bp, Homo sapiens
tccttgaaactctac

SEQ ID NO: 1955705 - DNA, 15 bp, Homo sapiens
ccttgaaactctact

SEQ ID NO: 1955706 - DNA, 15 bp, Homo sapiens
cttgaaactctactt

SEQ ID NO: 1955707 - DNA, 15 bp, Homo sapiens
ttgaaactctacttg

SEQ ID NO: 1955708 - DNA, 15 bp, Homo sapiens
tgaaactctacttgt

SEQ ID NO: 1955709 - DNA, 15 bp, Homo sapiens
gaaactctacttgta

SEQ ID NO: 1955710 - DNA, 15 bp, Homo sapiens
aaactctacttgtat

SEQ ID NO: 1955711 - DNA, 15 bp, Homo sapiens
aactctacttgtatc

SEQ ID NO: 1955712 - DNA, 15 bp, Homo sapiens
actctacttgtatcc

SEQ ID NO: 1955713 - DNA, 15 bp, Homo sapiens
ctctacttgtatccc

SEQ ID NO: 1955714 - DNA, 15 bp, Homo sapiens
tctacttgtatccca

SEQ ID NO: 1955715 - DNA, 15 bp, Homo sapiens
ctacttgtatcccat

SEQ ID NO: 1955716 - DNA, 15 bp, Homo sapiens
tacttgtatcccata

SEQ ID NO: 1955717 - DNA, 15 bp, Homo sapiens
acttgtatcccatat

SEQ ID NO: 1955718 - DNA, 15 bp, Homo sapiens
cttgtatcccatatg

SEQ ID NO: 1955719 - DNA, 15 bp, Homo sapiens
ttgtatcccatatgt

SEQ ID NO: 1955720 - DNA, 15 bp, Homo sapiens
tgtatcccatatgta

SEQ ID NO: 1955721 - DNA, 15 bp, Homo sapiens
gtatcccatatgtag

SEQ ID NO: 1955722 - DNA, 15 bp, Homo sapiens
tatcccatatgtaga

SEQ ID NO: 1955723 - DNA, 15 bp, Homo sapiens
atcccatatgtagat

SEQ ID NO: 1955724 - DNA, 15 bp, Homo sapiens
tcccatatgtagatg

SEQ ID NO: 1955725 - DNA, 15 bp, Homo sapiens
cccatatgtagatga

SEQ ID NO: 1955726 - DNA, 15 bp, Homo sapiens
ccatatgtagatgac

SEQ ID NO: 1955727 - DNA, 15 bp, Homo sapiens
catatgtagatgacc

SEQ ID NO: 1955728 - DNA, 15 bp, Homo sapiens
atatgtagatgacca

SEQ ID NO: 1955729 - DNA, 15 bp, Homo sapiens
tatgtagatgaccac

SEQ ID NO: 1955730 - DNA, 15 bp, Homo sapiens
atgtagatgaccact

SEQ ID NO: 1955731 - DNA, 15 bp, Homo sapiens
tgtagatgaccactt

SEQ ID NO: 1955732 - DNA, 15 bp, Homo sapiens
gtagatgaccacttg

SEQ ID NO: 1955733 - DNA, 15 bp, Homo sapiens
tagatgaccacttgt

SEQ ID NO: 1955734 - DNA, 15 bp, Homo sapiens
agatgaccacttgtt

SEQ ID NO: 1955735 - DNA, 15 bp, Homo sapiens
gatgaccacttgtta

SEQ ID NO: 1955736 - DNA, 15 bp, Homo sapiens
atgaccacttgttat

SEQ ID NO: 1955737 - DNA, 15 bp, Homo sapiens
tgaccacttgttata

SEQ ID NO: 1955738 - DNA, 15 bp, Homo sapiens
gaccacttgttatat

SEQ ID NO: 1955739 - DNA, 15 bp, Homo sapiens
accacttgttatatt

SEQ ID NO: 1955740 - DNA, 15 bp, Homo sapiens
ccacttgttatattc

SEQ ID NO: 1955741 - DNA, 15 bp, Homo sapiens
cacttgttatattct

SEQ ID NO: 1955742 - DNA, 15 bp, Homo sapiens
acttgttatattcta

SEQ ID NO: 1955743 - DNA, 15 bp, Homo sapiens
cttgttatattctaa

SEQ ID NO: 1955744 - DNA, 15 bp, Homo sapiens
ttgttatattctaaa

SEQ ID NO: 1955745 - DNA, 15 bp, Homo sapiens
tgttatattctaaaa

SEQ ID NO: 1955746 - DNA, 15 bp, Homo sapiens
gttatattctaaaaa

SEQ ID NO: 1955747 - DNA, 15 bp, Homo sapiens
ttatattctaaaaat

SEQ ID NO: 1955748 - DNA, 15 bp, Homo sapiens
tatattctaaaaatg

SEQ ID NO: 1955749 - DNA, 15 bp, Homo sapiens
atattctaaaaatga

SEQ ID NO: 1955750 - DNA, 15 bp, Homo sapiens
tattctaaaaatgag

SEQ ID NO: 1955751 - DNA, 15 bp, Homo sapiens
attctaaaaatgagt

SEQ ID NO: 1955752 - DNA, 15 bp, Homo sapiens
ttctaaaaatgagtt

SEQ ID NO: 1955753 - DNA, 15 bp, Homo sapiens
tctaaaaatgagttg

SEQ ID NO: 1955754 - DNA, 15 bp, Homo sapiens
ctaaaaatgagttga

SEQ ID NO: 1955755 - DNA, 15 bp, Homo sapiens
taaaaatgagttgag

SEQ ID NO: 1955756 - DNA, 15 bp, Homo sapiens
aaaaatgagttgagc

SEQ ID NO: 1955757 - DNA, 15 bp, Homo sapiens
aaaatgagttgagct

SEQ ID NO: 1955758 - DNA, 15 bp, Homo sapiens
aaatgagttgagctc

SEQ ID NO: 1955759 - DNA, 15 bp, Homo sapiens
aatgagttgagctct

SEQ ID NO: 1955760 - DNA, 15 bp, Homo sapiens
atgagttgagctctc

SEQ ID NO: 1955761 - DNA, 15 bp, Homo sapiens
tgagttgagctctct

SEQ ID NO: 1955762 - DNA, 15 bp, Homo sapiens
gagttgagctctctt

SEQ ID NO: 1955763 - DNA, 15 bp, Homo sapiens
agttgagctctctta

SEQ ID NO: 1955764 - DNA, 15 bp, Homo sapiens
gttgagctctcttag

SEQ ID NO: 1955765 - DNA, 15 bp, Homo sapiens
ttgagctctcttagt

SEQ ID NO: 1955766 - DNA, 15 bp, Homo sapiens
tgagctctcttagtc

SEQ ID NO: 1955767 - DNA, 15 bp, Homo sapiens
gagctctcttagtca

SEQ ID NO: 1955768 - DNA, 15 bp, Homo sapiens
agctctcttagtcat

SEQ ID NO: 1955769 - DNA, 15 bp, Homo sapiens
gctctcttagtcatt

SEQ ID NO: 1955770 - DNA, 15 bp, Homo sapiens
ctctcttagtcattt

SEQ ID NO: 1955771 - DNA, 15 bp, Homo sapiens
tctcttagtcattta

SEQ ID NO: 1955772 - DNA, 15 bp, Homo sapiens
ctcttagtcatttat

SEQ ID NO: 1955773 - DNA, 15 bp, Homo sapiens
tcttagtcatttatg

SEQ ID NO: 1955774 - DNA, 15 bp, Homo sapiens
cttagtcatttatgt

SEQ ID NO: 1955775 - DNA, 15 bp, Homo sapiens
ttagtcatttatgtt

SEQ ID NO: 1955776 - DNA, 15 bp, Homo sapiens
tagtcatttatgttc

SEQ ID NO: 1955777 - DNA, 15 bp, Homo sapiens
agtcatttatgttct

SEQ ID NO: 1955778 - DNA, 15 bp, Homo sapiens
gtcatttatgttctt

SEQ ID NO: 1955779 - DNA, 15 bp, Homo sapiens
tcatttatgttctta

SEQ ID NO: 1955780 - DNA, 15 bp, Homo sapiens
catttatgttcttac

SEQ ID NO: 1955781 - DNA, 15 bp, Homo sapiens
atttatgttcttaca

SEQ ID NO: 1955782 - DNA, 15 bp, Homo sapiens
tttatgttcttacag

SEQ ID NO: 1955783 - DNA, 15 bp, Homo sapiens
ttatgttcttacagt

SEQ ID NO: 1955784 - DNA, 15 bp, Homo sapiens
tatgttcttacagtt

SEQ ID NO: 1955785 - DNA, 15 bp, Homo sapiens
atgttcttacagttt

SEQ ID NO: 1955786 - DNA, 15 bp, Homo sapiens
tgttcttacagtttt

SEQ ID NO: 1955787 - DNA, 15 bp, Homo sapiens
gttcttacagtttta

SEQ ID NO: 1955788 - DNA, 15 bp, Homo sapiens
ttcttacagttttaa

SEQ ID NO: 1955789 - DNA, 15 bp, Homo sapiens
tcttacagttttaac

SEQ ID NO: 1955790 - DNA, 15 bp, Homo sapiens
cttacagttttaact

SEQ ID NO: 1955791 - DNA, 15 bp, Homo sapiens
ttacagttttaactc

SEQ ID NO: 1955792 - DNA, 15 bp, Homo sapiens
tacagttttaactca

SEQ ID NO: 1955793 - DNA, 15 bp, Homo sapiens
acagttttaactcag

SEQ ID NO: 1955794 - DNA, 15 bp, Homo sapiens
cagttttaactcaga

SEQ ID NO: 1955795 - DNA, 15 bp, Homo sapiens
agttttaactcagaa

SEQ ID NO: 1955796 - DNA, 15 bp, Homo sapiens
gttttaactcagaaa

SEQ ID NO: 1955797 - DNA, 15 bp, Homo sapiens
ttttaactcagaaag

SEQ ID NO: 1955798 - DNA, 15 bp, Homo sapiens
tttaactcagaaagg

SEQ ID NO: 1955799 - DNA, 15 bp, Homo sapiens
ttaactcagaaagga

SEQ ID NO: 1955800 - DNA, 15 bp, Homo sapiens
taactcagaaaggac

SEQ ID NO: 1955801 - DNA, 15 bp, Homo sapiens
aactcagaaaggact

SEQ ID NO: 1955802 - DNA, 15 bp, Homo sapiens
actcagaaaggactt

SEQ ID NO: 1955803 - DNA, 15 bp, Homo sapiens
ctcagaaaggactta

SEQ ID NO: 1955804 - DNA, 15 bp, Homo sapiens
tcagaaaggacttaa

SEQ ID NO: 1955805 - DNA, 15 bp, Homo sapiens
cagaaaggacttaaa

SEQ ID NO: 1955806 - DNA, 15 bp, Homo sapiens
agaaaggacttaaag

SEQ ID NO: 1955807 - DNA, 15 bp, Homo sapiens
gaaaggacttaaagt

SEQ ID NO: 1955808 - DNA, 15 bp, Homo sapiens
aaaggacttaaagtt

SEQ ID NO: 1955809 - DNA, 15 bp, Homo sapiens
aaggacttaaagtta

SEQ ID NO: 1955810 - DNA, 15 bp, Homo sapiens
aggacttaaagttag

SEQ ID NO: 1955811 - DNA, 15 bp, Homo sapiens
ggacttaaagttaga

SEQ ID NO: 1955812 - DNA, 15 bp, Homo sapiens
gacttaaagttagaa

SEQ ID NO: 1955813 - DNA, 15 bp, Homo sapiens
acttaaagttagaag

SEQ ID NO: 1955814 - DNA, 15 bp, Homo sapiens
cttaaagttagaagg

SEQ ID NO: 1955815 - DNA, 15 bp, Homo sapiens
ttaaagttagaagga

SEQ ID NO: 1955816 - DNA, 15 bp, Homo sapiens
taaagttagaaggaa

SEQ ID NO: 1955817 - DNA, 15 bp, Homo sapiens
aaagttagaaggaaa

SEQ ID NO: 1955818 - DNA, 15 bp, Homo sapiens
aagttagaaggaaag

SEQ ID NO: 1955819 - DNA, 15 bp, Homo sapiens
agttagaaggaaagt

SEQ ID NO: 1955820 - DNA, 15 bp, Homo sapiens
gttagaaggaaagtt

SEQ ID NO: 1955821 - DNA, 15 bp, Homo sapiens
ttagaaggaaagtta

SEQ ID NO: 1955822 - DNA, 15 bp, Homo sapiens
tagaaggaaagttac

SEQ ID NO: 1955823 - DNA, 15 bp, Homo sapiens
agaaggaaagttaca

SEQ ID NO: 1955824 - DNA, 15 bp, Homo sapiens
gaaggaaagttacaa

SEQ ID NO: 1955825 - DNA, 15 bp, Homo sapiens
aaggaaagttacaat

SEQ ID NO: 1955826 - DNA, 15 bp, Homo sapiens
aggaaagttacaatt

SEQ ID NO: 1955827 - DNA, 15 bp, Homo sapiens
ggaaagttacaattt

SEQ ID NO: 1955828 - DNA, 15 bp, Homo sapiens
gaaagttacaatttt

SEQ ID NO: 1955829 - DNA, 15 bp, Homo sapiens
aaagttacaattttc

SEQ ID NO: 1955830 - DNA, 15 bp, Homo sapiens
aagttacaattttct

SEQ ID NO: 1955831 - DNA, 15 bp, Homo sapiens
agttacaattttctc

SEQ ID NO: 1955832 - DNA, 15 bp, Homo sapiens
gttacaattttctca

SEQ ID NO: 1955833 - DNA, 15 bp, Homo sapiens
ttacaattttctcaa

SEQ ID NO: 1955834 - DNA, 15 bp, Homo sapiens
tacaattttctcaaa

SEQ ID NO: 1955835 - DNA, 15 bp, Homo sapiens
acaattttctcaaaa

SEQ ID NO: 1955836 - DNA, 15 bp, Homo sapiens
caattttctcaaaac

SEQ ID NO: 1955837 - DNA, 15 bp, Homo sapiens
aattttctcaaaaca

SEQ ID NO: 1955838 - DNA, 15 bp, Homo sapiens
attttctcaaaacag

SEQ ID NO: 1955839 - DNA, 15 bp, Homo sapiens
ttttctcaaaacaga

SEQ ID NO: 1955840 - DNA, 15 bp, Homo sapiens
tttctcaaaacagat

SEQ ID NO: 1955841 - DNA, 15 bp, Homo sapiens
ttctcaaaacagatt

SEQ ID NO: 1955842 - DNA, 15 bp, Homo sapiens
tctcaaaacagattg

SEQ ID NO: 1955843 - DNA, 15 bp, Homo sapiens
ctcaaaacagattgt

SEQ ID NO: 1955844 - DNA, 15 bp, Homo sapiens
tcaaaacagattgtg

SEQ ID NO: 1955845 - DNA, 15 bp, Homo sapiens
caaaacagattgtgt

SEQ ID NO: 1955846 - DNA, 15 bp, Homo sapiens
aaaacagattgtgtg

SEQ ID NO: 1955847 - DNA, 15 bp, Homo sapiens
aaacagattgtgtga

SEQ ID NO: 1955848 - DNA, 15 bp, Homo sapiens
aacagattgtgtgac

SEQ ID NO: 1955849 - DNA, 15 bp, Homo sapiens
acagattgtgtgact

SEQ ID NO: 1955850 - DNA, 15 bp, Homo sapiens
cagattgtgtgactt

SEQ ID NO: 1955851 - DNA, 15 bp, Homo sapiens
agattgtgtgactta

SEQ ID NO: 1955852 - DNA, 15 bp, Homo sapiens
gattgtgtgacttag

SEQ ID NO: 1955853 - DNA, 15 bp, Homo sapiens
attgtgtgacttaga

SEQ ID NO: 1955854 - DNA, 15 bp, Homo sapiens
ttgtgtgacttagat

SEQ ID NO: 1955855 - DNA, 15 bp, Homo sapiens
tgtgtgacttagatc

SEQ ID NO: 1955856 - DNA, 15 bp, Homo sapiens
gtgtgacttagatca

SEQ ID NO: 1955857 - DNA, 15 bp, Homo sapiens
tgtgacttagatcaa

SEQ ID NO: 1955858 - DNA, 15 bp, Homo sapiens
gtgacttagatcaag

SEQ ID NO: 1955859 - DNA, 15 bp, Homo sapiens
tgacttagatcaaga

SEQ ID NO: 1955860 - DNA, 15 bp, Homo sapiens
gacttagatcaagat

SEQ ID NO: 1955861 - DNA, 15 bp, Homo sapiens
acttagatcaagatt

SEQ ID NO: 1955862 - DNA, 15 bp, Homo sapiens
cttagatcaagattt

SEQ ID NO: 1955863 - DNA, 15 bp, Homo sapiens
ttagatcaagattta

SEQ ID NO: 1955864 - DNA, 15 bp, Homo sapiens
tagatcaagatttat

SEQ ID NO: 1955865 - DNA, 15 bp, Homo sapiens
agatcaagatttatt

SEQ ID NO: 1955866 - DNA, 15 bp, Homo sapiens
gatcaagatttattc

SEQ ID NO: 1955867 - DNA, 15 bp, Homo sapiens
atcaagatttattca

SEQ ID NO: 1955868 - DNA, 15 bp, Homo sapiens
tcaagatttattcaa

SEQ ID NO: 1955869 - DNA, 15 bp, Homo sapiens
caagatttattcaag

SEQ ID NO: 1955870 - DNA, 15 bp, Homo sapiens
aagatttattcaaga

SEQ ID NO: 1955871 - DNA, 15 bp, Homo sapiens
agatttattcaagag

SEQ ID NO: 1955872 - DNA, 15 bp, Homo sapiens
gatttattcaagagt

SEQ ID NO: 1955873 - DNA, 15 bp, Homo sapiens
atttattcaagagta

SEQ ID NO: 1955874 - DNA, 15 bp, Homo sapiens
tttattcaagagtaa

SEQ ID NO: 1955875 - DNA, 15 bp, Homo sapiens
ttattcaagagtaaa

SEQ ID NO: 1955876 - DNA, 15 bp, Homo sapiens
tattcaagagtaaat

SEQ ID NO: 1955877 - DNA, 15 bp, Homo sapiens
attcaagagtaaata

SEQ ID NO: 1955878 - DNA, 15 bp, Homo sapiens
ttcaagagtaaatac

SEQ ID NO: 1955879 - DNA, 15 bp, Homo sapiens
tcaagagtaaatacc

SEQ ID NO: 1955880 - DNA, 15 bp, Homo sapiens
caagagtaaataccc

SEQ ID NO: 1955881 - DNA, 15 bp, Homo sapiens
aagagtaaatacccc

SEQ ID NO: 1955882 - DNA, 15 bp, Homo sapiens
agagtaaatacccca

SEQ ID NO: 1955883 - DNA, 15 bp, Homo sapiens
gagtaaataccccac

SEQ ID NO: 1955884 - DNA, 15 bp, Homo sapiens
agtaaataccccact

SEQ ID NO: 1955885 - DNA, 15 bp, Homo sapiens
gtaaataccccactt

SEQ ID NO: 1955886 - DNA, 15 bp, Homo sapiens
taaataccccactta

SEQ ID NO: 1955887 - DNA, 15 bp, Homo sapiens
aaataccccacttag

SEQ ID NO: 1955888 - DNA, 15 bp, Homo sapiens
aataccccacttagg

SEQ ID NO: 1955889 - DNA, 15 bp, Homo sapiens
ataccccacttagga

SEQ ID NO: 1955890 - DNA, 15 bp, Homo sapiens
taccccacttaggac

SEQ ID NO: 1955891 - DNA, 15 bp, Homo sapiens
accccacttaggaca

SEQ ID NO: 1955892 - DNA, 15 bp, Homo sapiens
ccccacttaggacag

SEQ ID NO: 1955893 - DNA, 15 bp, Homo sapiens
cccacttaggacaga

SEQ ID NO: 1955894 - DNA, 15 bp, Homo sapiens
ccacttaggacagag

SEQ ID NO: 1955895 - DNA, 15 bp, Homo sapiens
cacttaggacagagg

SEQ ID NO: 1955896 - DNA, 15 bp, Homo sapiens
acttaggacagagga

SEQ ID NO: 1955897 - DNA, 15 bp, Homo sapiens
cttaggacagaggaa

SEQ ID NO: 1955898 - DNA, 15 bp, Homo sapiens
ttaggacagaggaaa

SEQ ID NO: 1955899 - DNA, 15 bp, Homo sapiens
taggacagaggaaaa

SEQ ID NO: 1955900 - DNA, 15 bp, Homo sapiens
aggacagaggaaaag

SEQ ID NO: 1955901 - DNA, 15 bp, Homo sapiens
ggacagaggaaaagc

SEQ ID NO: 1955902 - DNA, 15 bp, Homo sapiens
gacagaggaaaagcc

SEQ ID NO: 1955903 - DNA, 15 bp, Homo sapiens
acagaggaaaagcca

SEQ ID NO: 1955904 - DNA, 15 bp, Homo sapiens
cagaggaaaagccat

SEQ ID NO: 1955905 - DNA, 15 bp, Homo sapiens
agaggaaaagccatt

SEQ ID NO: 1955906 - DNA, 15 bp, Homo sapiens
gaggaaaagccattc

SEQ ID NO: 1955907 - DNA, 15 bp, Homo sapiens
aggaaaagccattca

SEQ ID NO: 1955908 - DNA, 15 bp, Homo sapiens
ggaaaagccattcaa

SEQ ID NO: 1955909 - DNA, 15 bp, Homo sapiens
gaaaagccattcaac

SEQ ID NO: 1955910 - DNA, 15 bp, Homo sapiens
aaaagccattcaacg

SEQ ID NO: 1955911 - DNA, 15 bp, Homo sapiens
aaagccattcaacgg

SEQ ID NO: 1955912 - DNA, 15 bp, Homo sapiens
aagccattcaacggt

SEQ ID NO: 1955913 - DNA, 15 bp, Homo sapiens
agccattcaacggtt

SEQ ID NO: 1955914 - DNA, 15 bp, Homo sapiens
gccattcaacggttt

SEQ ID NO: 1955915 - DNA, 15 bp, Homo sapiens
ccattcaacggtttt

SEQ ID NO: 1955916 - DNA, 15 bp, Homo sapiens
cattcaacggttttc

SEQ ID NO: 1955917 - DNA, 15 bp, Homo sapiens
attcaacggttttcc

SEQ ID NO: 1955918 - DNA, 15 bp, Homo sapiens
ttcaacggttttcca

SEQ ID NO: 1955919 - DNA, 15 bp, Homo sapiens
tcaacggttttccag

SEQ ID NO: 1955920 - DNA, 15 bp, Homo sapiens
caacggttttccagg

SEQ ID NO: 1955921 - DNA, 15 bp, Homo sapiens
aacggttttccaggc

SEQ ID NO: 1955922 - DNA, 15 bp, Homo sapiens
acggttttccaggcc

SEQ ID NO: 1955923 - DNA, 15 bp, Homo sapiens
cggttttccaggcca

SEQ ID NO: 1955924 - DNA, 15 bp, Homo sapiens
ggttttccaggccaa

SEQ ID NO: 1955925 - DNA, 15 bp, Homo sapiens
gttttccaggccaaa

SEQ ID NO: 1955926 - DNA, 15 bp, Homo sapiens
ttttccaggccaaag

SEQ ID NO: 1955927 - DNA, 15 bp, Homo sapiens
tttccaggccaaagc

SEQ ID NO: 1955928 - DNA, 15 bp, Homo sapiens
ttccaggccaaagct

SEQ ID NO: 1955929 - DNA, 15 bp, Homo sapiens
tccaggccaaagcta

SEQ ID NO: 1955930 - DNA, 15 bp, Homo sapiens
ccaggccaaagctac

SEQ ID NO: 1955931 - DNA, 15 bp, Homo sapiens
caggccaaagctaca

SEQ ID NO: 1955932 - DNA, 15 bp, Homo sapiens
aggccaaagctacac

SEQ ID NO: 1955933 - DNA, 15 bp, Homo sapiens
ggccaaagctacaca

SEQ ID NO: 1955934 - DNA, 15 bp, Homo sapiens
gccaaagctacacac

SEQ ID NO: 1955935 - DNA, 15 bp, Homo sapiens
ccaaagctacacacc

SEQ ID NO: 1955936 - DNA, 15 bp, Homo sapiens
caaagctacacacca

SEQ ID NO: 1955937 - DNA, 15 bp, Homo sapiens
aaagctacacaccat

SEQ ID NO: 1955938 - DNA, 15 bp, Homo sapiens
aagctacacaccatg

SEQ ID NO: 1955939 - DNA, 15 bp, Homo sapiens
agctacacaccatga

SEQ ID NO: 1955940 - DNA, 15 bp, Homo sapiens
gctacacaccatgat

SEQ ID NO: 1955941 - DNA, 15 bp, Homo sapiens
ctacacaccatgata

SEQ ID NO: 1955942 - DNA, 15 bp, Homo sapiens
tacacaccatgatat

SEQ ID NO: 1955943 - DNA, 15 bp, Homo sapiens
acacaccatgatata

SEQ ID NO: 1955944 - DNA, 15 bp, Homo sapiens
cacaccatgatatac

SEQ ID NO: 1955945 - DNA, 15 bp, Homo sapiens
acaccatgatataca

SEQ ID NO: 1955946 - DNA, 15 bp, Homo sapiens
caccatgatatacac

SEQ ID NO: 1955947 - DNA, 15 bp, Homo sapiens
accatgatatacacc

SEQ ID NO: 1955948 - DNA, 15 bp, Homo sapiens
ccatgatatacacct

SEQ ID NO: 1955949 - DNA, 15 bp, Homo sapiens
catgatatacacctg

SEQ ID NO: 1955950 - DNA, 15 bp, Homo sapiens
atgatatacacctgt

SEQ ID NO: 1955951 - DNA, 15 bp, Homo sapiens
tgatatacacctgta

SEQ ID NO: 1955952 - DNA, 15 bp, Homo sapiens
gatatacacctgtag

SEQ ID NO: 1955953 - DNA, 15 bp, Homo sapiens
atatacacctgtagt

SEQ ID NO: 1955954 - DNA, 15 bp, Homo sapiens
tatacacctgtagtc

SEQ ID NO: 1955955 - DNA, 15 bp, Homo sapiens
atacacctgtagtcc

SEQ ID NO: 1955956 - DNA, 15 bp, Homo sapiens
tacacctgtagtcct

SEQ ID NO: 1955957 - DNA, 15 bp, Homo sapiens
acacctgtagtccta

SEQ ID NO: 1955958 - DNA, 15 bp, Homo sapiens
ctgtagtcctagctt

SEQ ID NO: 1955959 - DNA, 15 bp, Homo sapiens
tgtagtcctagcttc

SEQ ID NO: 1955960 - DNA, 15 bp, Homo sapiens
gtagtcctagcttct

SEQ ID NO: 1955961 - DNA, 15 bp, Homo sapiens
tagtcctagcttctc

SEQ ID NO: 1955962 - DNA, 15 bp, Homo sapiens
agtcctagcttctca

SEQ ID NO: 1955963 - DNA, 15 bp, Homo sapiens
gtcctagcttctcag

SEQ ID NO: 1955964 - DNA, 15 bp, Homo sapiens
tcctagcttctcagg

SEQ ID NO: 1955965 - DNA, 15 bp, Homo sapiens
cctagcttctcagga

SEQ ID NO: 1955966 - DNA, 15 bp, Homo sapiens
ctagcttctcaggag

SEQ ID NO: 1955967 - DNA, 15 bp, Homo sapiens
tagcttctcaggagg

SEQ ID NO: 1955968 - DNA, 15 bp, Homo sapiens
agcttctcaggaggc

SEQ ID NO: 1955969 - DNA, 15 bp, Homo sapiens
gcttctcaggaggct

SEQ ID NO: 1955970 - DNA, 15 bp, Homo sapiens
cttctcaggaggctg

SEQ ID NO: 1955971 - DNA, 15 bp, Homo sapiens
ttctcaggaggctga

SEQ ID NO: 1955972 - DNA, 15 bp, Homo sapiens
tctcaggaggctgag

SEQ ID NO: 1955973 - DNA, 15 bp, Homo sapiens
ggctgaggcaggagc

SEQ ID NO: 1955974 - DNA, 15 bp, Homo sapiens
gctgaggcaggagca

SEQ ID NO: 1955975 - DNA, 15 bp, Homo sapiens
ctgaggcaggagcag

SEQ ID NO: 1955976 - DNA, 15 bp, Homo sapiens
tgaggcaggagcagg

SEQ ID NO: 1955977 - DNA, 15 bp, Homo sapiens
gaggcaggagcagga

SEQ ID NO: 1955978 - DNA, 15 bp, Homo sapiens
aggcaggagcaggag

SEQ ID NO: 1955979 - DNA, 15 bp, Homo sapiens
ggcaggagcaggagg

SEQ ID NO: 1955980 - DNA, 15 bp, Homo sapiens
gcaggagcaggagga

SEQ ID NO: 1955981 - DNA, 15 bp, Homo sapiens
caggagcaggaggat

SEQ ID NO: 1955982 - DNA, 15 bp, Homo sapiens
aggagcaggaggatc

SEQ ID NO: 1955983 - DNA, 15 bp, Homo sapiens
ggagcaggaggatct

SEQ ID NO: 1955984 - DNA, 15 bp, Homo sapiens
gagcaggaggatctc

SEQ ID NO: 1955985 - DNA, 15 bp, Homo sapiens
agcaggaggatctct

SEQ ID NO: 1955986 - DNA, 15 bp, Homo sapiens
gcaggaggatctctt

SEQ ID NO: 1955987 - DNA, 15 bp, Homo sapiens
caggaggatctcttg

SEQ ID NO: 1955988 - DNA, 15 bp, Homo sapiens
aggaggatctcttga

SEQ ID NO: 1955989 - DNA, 15 bp, Homo sapiens
ctcttgagcccagga

SEQ ID NO: 1955990 - DNA, 15 bp, Homo sapiens
tcttgagcccaggaa

SEQ ID NO: 1955991 - DNA, 15 bp, Homo sapiens
gagcccaggaatttc

SEQ ID NO: 1955992 - DNA, 15 bp, Homo sapiens
agcccaggaatttca

SEQ ID NO: 1955993 - DNA, 15 bp, Homo sapiens
gcccaggaatttcag

SEQ ID NO: 1955994 - DNA, 15 bp, Homo sapiens
cccaggaatttcagc

SEQ ID NO: 1955995 - DNA, 15 bp, Homo sapiens
ccaggaatttcagcc

SEQ ID NO: 1955996 - DNA, 15 bp, Homo sapiens
caggaatttcagcct

SEQ ID NO: 1955997 - DNA, 15 bp, Homo sapiens
aggaatttcagcctg

SEQ ID NO: 1955998 - DNA, 15 bp, Homo sapiens
ggaatttcagcctgt

SEQ ID NO: 1955999 - DNA, 15 bp, Homo sapiens
gaatttcagcctgtc

SEQ ID NO: 1956000 - DNA, 15 bp, Homo sapiens
aatttcagcctgtct

SEQ ID NO: 1956001 - DNA, 15 bp, Homo sapiens
atttcagcctgtcta

SEQ ID NO: 1956002 - DNA, 15 bp, Homo sapiens
tttcagcctgtctag

SEQ ID NO: 1956003 - DNA, 15 bp, Homo sapiens
ttcagcctgtctagg

SEQ ID NO: 1956004 - DNA, 15 bp, Homo sapiens
tcagcctgtctagga

SEQ ID NO: 1956005 - DNA, 15 bp, Homo sapiens
cagcctgtctaggat

SEQ ID NO: 1956006 - DNA, 15 bp, Homo sapiens
agcctgtctaggatt

SEQ ID NO: 1956007 - DNA, 15 bp, Homo sapiens
gcctgtctaggattg

SEQ ID NO: 1956008 - DNA, 15 bp, Homo sapiens
cctgtctaggattgc

SEQ ID NO: 1956009 - DNA, 15 bp, Homo sapiens
ctgtctaggattgct

SEQ ID NO: 1956010 - DNA, 15 bp, Homo sapiens
tgtctaggattgctc

SEQ ID NO: 1956011 - DNA, 15 bp, Homo sapiens
gtctaggattgctcc

SEQ ID NO: 1956012 - DNA, 15 bp, Homo sapiens
tctaggattgctcca

SEQ ID NO: 1956013 - DNA, 15 bp, Homo sapiens
ctaggattgctccag

SEQ ID NO: 1956014 - DNA, 15 bp, Homo sapiens
taggattgctccagt

SEQ ID NO: 1956015 - DNA, 15 bp, Homo sapiens
aggattgctccagtg

SEQ ID NO: 1956016 - DNA, 15 bp, Homo sapiens
ggattgctccagtga

SEQ ID NO: 1956017 - DNA, 15 bp, Homo sapiens
gattgctccagtgaa

SEQ ID NO: 1956018 - DNA, 15 bp, Homo sapiens
attgctccagtgaat

SEQ ID NO: 1956019 - DNA, 15 bp, Homo sapiens
ttgctccagtgaata

SEQ ID NO: 1956020 - DNA, 15 bp, Homo sapiens
tgctccagtgaatag

SEQ ID NO: 1956021 - DNA, 15 bp, Homo sapiens
gctccagtgaatagc

SEQ ID NO: 1956022 - DNA, 15 bp, Homo sapiens
ctccagtgaatagca

SEQ ID NO: 1956023 - DNA, 15 bp, Homo sapiens
tccagtgaatagcaa

SEQ ID NO: 1956024 - DNA, 15 bp, Homo sapiens
ccagtgaatagcaac

SEQ ID NO: 1956025 - DNA, 15 bp, Homo sapiens
cagtgaatagcaact

SEQ ID NO: 1956026 - DNA, 15 bp, Homo sapiens
agtgaatagcaactg

SEQ ID NO: 1956027 - DNA, 15 bp, Homo sapiens
gtgaatagcaactgt

SEQ ID NO: 1956028 - DNA, 15 bp, Homo sapiens
tgaatagcaactgta

SEQ ID NO: 1956029 - DNA, 15 bp, Homo sapiens
gaatagcaactgtac

SEQ ID NO: 1956030 - DNA, 15 bp, Homo sapiens
aatagcaactgtact

SEQ ID NO: 1956031 - DNA, 15 bp, Homo sapiens
atagcaactgtactc

SEQ ID NO: 1956032 - DNA, 15 bp, Homo sapiens
tagcaactgtactcc

SEQ ID NO: 1956033 - DNA, 15 bp, Homo sapiens
agcaactgtactcca

SEQ ID NO: 1956034 - DNA, 15 bp, Homo sapiens
gcaactgtactccag

SEQ ID NO: 1956035 - DNA, 15 bp, Homo sapiens
caactgtactccagc

SEQ ID NO: 1956036 - DNA, 15 bp, Homo sapiens
aactgtactccagcc

SEQ ID NO: 1956037 - DNA, 15 bp, Homo sapiens
cagcctgggcaaaaa

SEQ ID NO: 1956038 - DNA, 15 bp, Homo sapiens
agcctgggcaaaaaa

SEQ ID NO: 1956039 - DNA, 15 bp, Homo sapiens
gcctgggcaaaaaac

SEQ ID NO: 1956040 - DNA, 15 bp, Homo sapiens
cctgggcaaaaaacc

SEQ ID NO: 1956041 - DNA, 15 bp, Homo sapiens
ctgggcaaaaaacca

SEQ ID NO: 1956042 - DNA, 15 bp, Homo sapiens
tgggcaaaaaaccaa

SEQ ID NO: 1956043 - DNA, 15 bp, Homo sapiens
gggcaaaaaaccaag

SEQ ID NO: 1956044 - DNA, 15 bp, Homo sapiens
ggcaaaaaaccaaga

SEQ ID NO: 1956045 - DNA, 15 bp, Homo sapiens
gcaaaaaaccaagat

SEQ ID NO: 1956046 - DNA, 15 bp, Homo sapiens
caaaaaaccaagatc

SEQ ID NO: 1956047 - DNA, 15 bp, Homo sapiens
aaaaaaccaagatcc

SEQ ID NO: 1956048 - DNA, 15 bp, Homo sapiens
aaaaaccaagatccc

SEQ ID NO: 1956049 - DNA, 15 bp, Homo sapiens
aaaaccaagatccca

SEQ ID NO: 1956050 - DNA, 15 bp, Homo sapiens
aaaccaagatcccat

SEQ ID NO: 1956051 - DNA, 15 bp, Homo sapiens
aaccaagatcccatc

SEQ ID NO: 1956052 - DNA, 15 bp, Homo sapiens
accaagatcccatct

SEQ ID NO: 1956053 - DNA, 15 bp, Homo sapiens
ccaagatcccatctc

SEQ ID NO: 1956054 - DNA, 15 bp, Homo sapiens
caagatcccatctct

SEQ ID NO: 1956055 - DNA, 15 bp, Homo sapiens
aagatcccatctcta

SEQ ID NO: 1956056 - DNA, 15 bp, Homo sapiens
agatcccatctctaa

SEQ ID NO: 1956057 - DNA, 15 bp, Homo sapiens
gatcccatctctaaa

SEQ ID NO: 1956058 - DNA, 15 bp, Homo sapiens
atcccatctctaaaa

SEQ ID NO: 1956059 - DNA, 15 bp, Homo sapiens
tcccatctctaaaac

SEQ ID NO: 1956060 - DNA, 15 bp, Homo sapiens
atctctaaaacaaaa

SEQ ID NO: 1956061 - DNA, 15 bp, Homo sapiens
tctctaaaacaaaaa

SEQ ID NO: 1956062 - DNA, 15 bp, Homo sapiens
ctctaaaacaaaaac

SEQ ID NO: 1956063 - DNA, 15 bp, Homo sapiens
tctaaaacaaaaaca

SEQ ID NO: 1956064 - DNA, 15 bp, Homo sapiens
aaaacaaaaacaaac

SEQ ID NO: 1956065 - DNA, 15 bp, Homo sapiens
aaacaaaaacaaaca

SEQ ID NO: 1956066 - DNA, 15 bp, Homo sapiens
aacaaaaacaaacac

SEQ ID NO: 1956067 - DNA, 15 bp, Homo sapiens
acaaaaacaaacaca

SEQ ID NO: 1956068 - DNA, 15 bp, Homo sapiens
caaaaacaaacacaa

SEQ ID NO: 1956069 - DNA, 15 bp, Homo sapiens
aaaaacaaacacaaa

SEQ ID NO: 1956070 - DNA, 15 bp, Homo sapiens
aaaacaaacacaaac

SEQ ID NO: 1956071 - DNA, 15 bp, Homo sapiens
aaacaaacacaaaca

SEQ ID NO: 1956072 - DNA, 15 bp, Homo sapiens
aacaaacacaaacaa

SEQ ID NO: 1956073 - DNA, 15 bp, Homo sapiens
acaaacacaaacaaa

SEQ ID NO: 1956074 - DNA, 15 bp, Homo sapiens
caaacacaaacaaac

SEQ ID NO: 1956075 - DNA, 15 bp, Homo sapiens
aaacacaaacaaact

SEQ ID NO: 1956076 - DNA, 15 bp, Homo sapiens
aacacaaacaaactt

SEQ ID NO: 1956077 - DNA, 15 bp, Homo sapiens
acacaaacaaacttt

SEQ ID NO: 1956078 - DNA, 15 bp, Homo sapiens
cacaaacaaactttt

SEQ ID NO: 1956079 - DNA, 15 bp, Homo sapiens
acaaacaaacttttc

SEQ ID NO: 1956080 - DNA, 15 bp, Homo sapiens
caaacaaacttttct

SEQ ID NO: 1956081 - DNA, 15 bp, Homo sapiens
aaacaaacttttctg

SEQ ID NO: 1956082 - DNA, 15 bp, Homo sapiens
aacaaacttttctgg

SEQ ID NO: 1956083 - DNA, 15 bp, Homo sapiens
acaaacttttctggg

SEQ ID NO: 1956084 - DNA, 15 bp, Homo sapiens
caaacttttctgggc

SEQ ID NO: 1956085 - DNA, 15 bp, Homo sapiens
aaacttttctgggcc

SEQ ID NO: 1956086 - DNA, 15 bp, Homo sapiens
aacttttctgggcca

SEQ ID NO: 1956087 - DNA, 15 bp, Homo sapiens
acttttctgggccag

SEQ ID NO: 1956088 - DNA, 15 bp, Homo sapiens
cttttctgggccagt

SEQ ID NO: 1956089 - DNA, 15 bp, Homo sapiens
ttttctgggccagtt

SEQ ID NO: 1956090 - DNA, 15 bp, Homo sapiens
tttctgggccagtta

SEQ ID NO: 1956091 - DNA, 15 bp, Homo sapiens
ttctgggccagttat

SEQ ID NO: 1956092 - DNA, 15 bp, Homo sapiens
tctgggccagttatt

SEQ ID NO: 1956093 - DNA, 15 bp, Homo sapiens
ctgggccagttattc

SEQ ID NO: 1956094 - DNA, 15 bp, Homo sapiens
tgggccagttattca

SEQ ID NO: 1956095 - DNA, 15 bp, Homo sapiens
gggccagttattcag

SEQ ID NO: 1956096 - DNA, 15 bp, Homo sapiens
ggccagttattcaga

SEQ ID NO: 1956097 - DNA, 15 bp, Homo sapiens
gccagttattcagag

SEQ ID NO: 1956098 - DNA, 15 bp, Homo sapiens
ccagttattcagagt

SEQ ID NO: 1956099 - DNA, 15 bp, Homo sapiens
cagttattcagagtc

SEQ ID NO: 1956100 - DNA, 15 bp, Homo sapiens
agttattcagagtca

SEQ ID NO: 1956101 - DNA, 15 bp, Homo sapiens
gttattcagagtcaa

SEQ ID NO: 1956102 - DNA, 15 bp, Homo sapiens
ttattcagagtcaat

SEQ ID NO: 1956103 - DNA, 15 bp, Homo sapiens
tattcagagtcaatt

SEQ ID NO: 1956104 - DNA, 15 bp, Homo sapiens
attcagagtcaatta

SEQ ID NO: 1956105 - DNA, 15 bp, Homo sapiens
ttcagagtcaattaa

SEQ ID NO: 1956106 - DNA, 15 bp, Homo sapiens
tcagagtcaattaag

SEQ ID NO: 1956107 - DNA, 15 bp, Homo sapiens
cagagtcaattaaga

SEQ ID NO: 1956108 - DNA, 15 bp, Homo sapiens
agagtcaattaagag

SEQ ID NO: 1956109 - DNA, 15 bp, Homo sapiens
gagtcaattaagagg

SEQ ID NO: 1956110 - DNA, 15 bp, Homo sapiens
agtcaattaagagga

SEQ ID NO: 1956111 - DNA, 15 bp, Homo sapiens
gtcaattaagaggat

SEQ ID NO: 1956112 - DNA, 15 bp, Homo sapiens
tcaattaagaggatt

SEQ ID NO: 1956113 - DNA, 15 bp, Homo sapiens
caattaagaggattc

SEQ ID NO: 1956114 - DNA, 15 bp, Homo sapiens
aattaagaggattcc

SEQ ID NO: 1956115 - DNA, 15 bp, Homo sapiens
attaagaggattcca

SEQ ID NO: 1956116 - DNA, 15 bp, Homo sapiens
ttaagaggattccaa

SEQ ID NO: 1956117 - DNA, 15 bp, Homo sapiens
taagaggattccaac

SEQ ID NO: 1956118 - DNA, 15 bp, Homo sapiens
aagaggattccaact

SEQ ID NO: 1956119 - DNA, 15 bp, Homo sapiens
agaggattccaactg

SEQ ID NO: 1956120 - DNA, 15 bp, Homo sapiens
gaggattccaactgt

SEQ ID NO: 1956121 - DNA, 15 bp, Homo sapiens
aggattccaactgtc

SEQ ID NO: 1956122 - DNA, 15 bp, Homo sapiens
ggattccaactgtcc

SEQ ID NO: 1956123 - DNA, 15 bp, Homo sapiens
gattccaactgtcct

SEQ ID NO: 1956124 - DNA, 15 bp, Homo sapiens
attccaactgtccta

SEQ ID NO: 1956125 - DNA, 15 bp, Homo sapiens
ttccaactgtcctaa

SEQ ID NO: 1956126 - DNA, 15 bp, Homo sapiens
tccaactgtcctaaa

SEQ ID NO: 1956127 - DNA, 15 bp, Homo sapiens
ccaactgtcctaaaa

SEQ ID NO: 1956128 - DNA, 15 bp, Homo sapiens
caactgtcctaaaat

SEQ ID NO: 1956129 - DNA, 15 bp, Homo sapiens
aactgtcctaaaatc

SEQ ID NO: 1956130 - DNA, 15 bp, Homo sapiens
actgtcctaaaatca

SEQ ID NO: 1956131 - DNA, 15 bp, Homo sapiens
ctgtcctaaaatcat

SEQ ID NO: 1956132 - DNA, 15 bp, Homo sapiens
tgtcctaaaatcatc

SEQ ID NO: 1956133 - DNA, 15 bp, Homo sapiens
gtcctaaaatcatca

SEQ ID NO: 1956134 - DNA, 15 bp, Homo sapiens
tcctaaaatcatcat

SEQ ID NO: 1956135 - DNA, 15 bp, Homo sapiens
cctaaaatcatcatg

SEQ ID NO: 1956136 - DNA, 15 bp, Homo sapiens
ctaaaatcatcatga

SEQ ID NO: 1956137 - DNA, 15 bp, Homo sapiens
taaaatcatcatgac

SEQ ID NO: 1956138 - DNA, 15 bp, Homo sapiens
aaaatcatcatgact

SEQ ID NO: 1956139 - DNA, 15 bp, Homo sapiens
aaatcatcatgactc

SEQ ID NO: 1956140 - DNA, 15 bp, Homo sapiens
aatcatcatgactct

SEQ ID NO: 1956141 - DNA, 15 bp, Homo sapiens
atcatcatgactcta

SEQ ID NO: 1956142 - DNA, 15 bp, Homo sapiens
tcatcatgactctat

SEQ ID NO: 1956143 - DNA, 15 bp, Homo sapiens
catcatgactctatc

SEQ ID NO: 1956144 - DNA, 15 bp, Homo sapiens
atcatgactctatct

SEQ ID NO: 1956145 - DNA, 15 bp, Homo sapiens
tcatgactctatctg

SEQ ID NO: 1956146 - DNA, 15 bp, Homo sapiens
catgactctatctga

SEQ ID NO: 1956147 - DNA, 15 bp, Homo sapiens
atgactctatctgat

SEQ ID NO: 1956148 - DNA, 15 bp, Homo sapiens
tgactctatctgatt

SEQ ID NO: 1956149 - DNA, 15 bp, Homo sapiens
gactctatctgattt

SEQ ID NO: 1956150 - DNA, 15 bp, Homo sapiens
actctatctgattta

SEQ ID NO: 1956151 - DNA, 15 bp, Homo sapiens
ctctatctgatttaa

SEQ ID NO: 1956152 - DNA, 15 bp, Homo sapiens
tctatctgatttaaa

SEQ ID NO: 1956153 - DNA, 15 bp, Homo sapiens
ctatctgatttaaac

SEQ ID NO: 1956154 - DNA, 15 bp, Homo sapiens
tatctgatttaaaca

SEQ ID NO: 1956155 - DNA, 15 bp, Homo sapiens
atctgatttaaacaa

SEQ ID NO: 1956156 - DNA, 15 bp, Homo sapiens
tctgatttaaacaag

SEQ ID NO: 1956157 - DNA, 15 bp, Homo sapiens
ctgatttaaacaagt

SEQ ID NO: 1956158 - DNA, 15 bp, Homo sapiens
tgatttaaacaagtt

SEQ ID NO: 1956159 - DNA, 15 bp, Homo sapiens
gatttaaacaagttt

SEQ ID NO: 1956160 - DNA, 15 bp, Homo sapiens
atttaaacaagtttt

SEQ ID NO: 1956161 - DNA, 15 bp, Homo sapiens
tttaaacaagtttta

SEQ ID NO: 1956162 - DNA, 15 bp, Homo sapiens
ttaaacaagttttaa

SEQ ID NO: 1956163 - DNA, 15 bp, Homo sapiens
taaacaagttttaaa

SEQ ID NO: 1956164 - DNA, 15 bp, Homo sapiens
aaacaagttttaaat

SEQ ID NO: 1956165 - DNA, 15 bp, Homo sapiens
aacaagttttaaata

SEQ ID NO: 1956166 - DNA, 15 bp, Homo sapiens
acaagttttaaataa

SEQ ID NO: 1956167 - DNA, 15 bp, Homo sapiens
caagttttaaataat

SEQ ID NO: 1956168 - DNA, 15 bp, Homo sapiens
aagttttaaataatc

SEQ ID NO: 1956169 - DNA, 15 bp, Homo sapiens
agttttaaataatca

SEQ ID NO: 1956170 - DNA, 15 bp, Homo sapiens
gttttaaataatcaa

SEQ ID NO: 1956171 - DNA, 15 bp, Homo sapiens
ttttaaataatcaaa

SEQ ID NO: 1956172 - DNA, 15 bp, Homo sapiens
tttaaataatcaaaa

SEQ ID NO: 1956173 - DNA, 15 bp, Homo sapiens
ttaaataatcaaaac

SEQ ID NO: 1956174 - DNA, 15 bp, Homo sapiens
taaataatcaaaact

SEQ ID NO: 1956175 - DNA, 15 bp, Homo sapiens
aaataatcaaaactc

SEQ ID NO: 1956176 - DNA, 15 bp, Homo sapiens
aataatcaaaactct

SEQ ID NO: 1956177 - DNA, 15 bp, Homo sapiens
ataatcaaaactctt

SEQ ID NO: 1956178 - DNA, 15 bp, Homo sapiens
taatcaaaactcttc

SEQ ID NO: 1956179 - DNA, 15 bp, Homo sapiens
aatcaaaactcttcc

SEQ ID NO: 1956180 - DNA, 15 bp, Homo sapiens
atcaaaactcttcct

SEQ ID NO: 1956181 - DNA, 15 bp, Homo sapiens
tcaaaactcttcctt

SEQ ID NO: 1956182 - DNA, 15 bp, Homo sapiens
caaaactcttccttg

SEQ ID NO: 1956183 - DNA, 15 bp, Homo sapiens
aaaactcttccttgg

SEQ ID NO: 1956184 - DNA, 15 bp, Homo sapiens
aaactcttccttggg

SEQ ID NO: 1956185 - DNA, 15 bp, Homo sapiens
aactcttccttggga

SEQ ID NO: 1956186 - DNA, 15 bp, Homo sapiens
actcttccttgggag

SEQ ID NO: 1956187 - DNA, 15 bp, Homo sapiens
ctcttccttgggagc

SEQ ID NO: 1956188 - DNA, 15 bp, Homo sapiens
tcttccttgggagcc

SEQ ID NO: 1956189 - DNA, 15 bp, Homo sapiens
cttccttgggagcct

SEQ ID NO: 1956190 - DNA, 15 bp, Homo sapiens
ttccttgggagccta

SEQ ID NO: 1956191 - DNA, 15 bp, Homo sapiens
tccttgggagcctag

SEQ ID NO: 1956192 - DNA, 15 bp, Homo sapiens
ccttgggagcctaga

SEQ ID NO: 1956193 - DNA, 15 bp, Homo sapiens
cttgggagcctagat

SEQ ID NO: 1956194 - DNA, 15 bp, Homo sapiens
ttgggagcctagata

SEQ ID NO: 1956195 - DNA, 15 bp, Homo sapiens
tgggagcctagatat

SEQ ID NO: 1956196 - DNA, 15 bp, Homo sapiens
gggagcctagatatg

SEQ ID NO: 1956197 - DNA, 15 bp, Homo sapiens
ggagcctagatatga

SEQ ID NO: 1956198 - DNA, 15 bp, Homo sapiens
gagcctagatatgag

SEQ ID NO: 1956199 - DNA, 15 bp, Homo sapiens
agcctagatatgagc

SEQ ID NO: 1956200 - DNA, 15 bp, Homo sapiens
gcctagatatgagcc

SEQ ID NO: 1956201 - DNA, 15 bp, Homo sapiens
cctagatatgagcca

SEQ ID NO: 1956202 - DNA, 15 bp, Homo sapiens
ctagatatgagccag

SEQ ID NO: 1956203 - DNA, 15 bp, Homo sapiens
tagatatgagccagc

SEQ ID NO: 1956204 - DNA, 15 bp, Homo sapiens
agatatgagccagca

SEQ ID NO: 1956205 - DNA, 15 bp, Homo sapiens
gatatgagccagcat

SEQ ID NO: 1956206 - DNA, 15 bp, Homo sapiens
atatgagccagcatt

SEQ ID NO: 1956207 - DNA, 15 bp, Homo sapiens
tatgagccagcattt

SEQ ID NO: 1956208 - DNA, 15 bp, Homo sapiens
atgagccagcatttt

SEQ ID NO: 1956209 - DNA, 15 bp, Homo sapiens
tgagccagcatttta

SEQ ID NO: 1956210 - DNA, 15 bp, Homo sapiens
gagccagcattttat

SEQ ID NO: 1956211 - DNA, 15 bp, Homo sapiens
agccagcattttatg

SEQ ID NO: 1956212 - DNA, 15 bp, Homo sapiens
gccagcattttatga

SEQ ID NO: 1956213 - DNA, 15 bp, Homo sapiens
ccagcattttatgat

SEQ ID NO: 1956214 - DNA, 15 bp, Homo sapiens
cagcattttatgatt

SEQ ID NO: 1956215 - DNA, 15 bp, Homo sapiens
agcattttatgattt

SEQ ID NO: 1956216 - DNA, 15 bp, Homo sapiens
gcattttatgattta

SEQ ID NO: 1956217 - DNA, 15 bp, Homo sapiens
cattttatgatttaa

SEQ ID NO: 1956218 - DNA, 15 bp, Homo sapiens
attttatgatttaaa

SEQ ID NO: 1956219 - DNA, 15 bp, Homo sapiens
ttttatgatttaaaa

SEQ ID NO: 1956220 - DNA, 15 bp, Homo sapiens
tttatgatttaaaat

SEQ ID NO: 1956221 - DNA, 15 bp, Homo sapiens
ttatgatttaaaatg

SEQ ID NO: 1956222 - DNA, 15 bp, Homo sapiens
tatgatttaaaatga

SEQ ID NO: 1956223 - DNA, 15 bp, Homo sapiens
atgatttaaaatgag

SEQ ID NO: 1956224 - DNA, 15 bp, Homo sapiens
tgatttaaaatgaga

SEQ ID NO: 1956225 - DNA, 15 bp, Homo sapiens
gatttaaaatgagat

SEQ ID NO: 1956226 - DNA, 15 bp, Homo sapiens
atttaaaatgagatt

SEQ ID NO: 1956227 - DNA, 15 bp, Homo sapiens
tttaaaatgagattt

SEQ ID NO: 1956228 - DNA, 15 bp, Homo sapiens
ttaaaatgagatttt

SEQ ID NO: 1956229 - DNA, 15 bp, Homo sapiens
taaaatgagattttt

SEQ ID NO: 1956230 - DNA, 15 bp, Homo sapiens
aaaatgagattttta

SEQ ID NO: 1956231 - DNA, 15 bp, Homo sapiens
aaatgagatttttaa

SEQ ID NO: 1956232 - DNA, 15 bp, Homo sapiens
aatgagatttttaac

SEQ ID NO: 1956233 - DNA, 15 bp, Homo sapiens
atgagatttttaaca

SEQ ID NO: 1956234 - DNA, 15 bp, Homo sapiens
tgagatttttaacat

SEQ ID NO: 1956235 - DNA, 15 bp, Homo sapiens
gagatttttaacatc

SEQ ID NO: 1956236 - DNA, 15 bp, Homo sapiens
agatttttaacatct

SEQ ID NO: 1956237 - DNA, 15 bp, Homo sapiens
gatttttaacatctt

SEQ ID NO: 1956238 - DNA, 15 bp, Homo sapiens
atttttaacatcttc

SEQ ID NO: 1956239 - DNA, 15 bp, Homo sapiens
tttttaacatcttca

SEQ ID NO: 1956240 - DNA, 15 bp, Homo sapiens
ttttaacatcttcat

SEQ ID NO: 1956241 - DNA, 15 bp, Homo sapiens
tttaacatcttcata

SEQ ID NO: 1956242 - DNA, 15 bp, Homo sapiens
ttaacatcttcatat

SEQ ID NO: 1956243 - DNA, 15 bp, Homo sapiens
taacatcttcatatg

SEQ ID NO: 1956244 - DNA, 15 bp, Homo sapiens
aacatcttcatatgc

SEQ ID NO: 1956245 - DNA, 15 bp, Homo sapiens
acatcttcatatgct

SEQ ID NO: 1956246 - DNA, 15 bp, Homo sapiens
catcttcatatgctg

SEQ ID NO: 1956247 - DNA, 15 bp, Homo sapiens
atcttcatatgctga

SEQ ID NO: 1956248 - DNA, 15 bp, Homo sapiens
tcttcatatgctgag

SEQ ID NO: 1956249 - DNA, 15 bp, Homo sapiens
cttcatatgctgagt

SEQ ID NO: 1956250 - DNA, 15 bp, Homo sapiens
ttcatatgctgagtc

SEQ ID NO: 1956251 - DNA, 15 bp, Homo sapiens
tcatatgctgagtca

SEQ ID NO: 1956252 - DNA, 15 bp, Homo sapiens
catatgctgagtcat

SEQ ID NO: 1956253 - DNA, 15 bp, Homo sapiens
atatgctgagtcatc

SEQ ID NO: 1956254 - DNA, 15 bp, Homo sapiens
tatgctgagtcatct

SEQ ID NO: 1956255 - DNA, 15 bp, Homo sapiens
atgctgagtcatctt

SEQ ID NO: 1956256 - DNA, 15 bp, Homo sapiens
tgctgagtcatctta

SEQ ID NO: 1956257 - DNA, 15 bp, Homo sapiens
gctgagtcatcttaa

SEQ ID NO: 1956258 - DNA, 15 bp, Homo sapiens
ctgagtcatcttaag

SEQ ID NO: 1956259 - DNA, 15 bp, Homo sapiens
tgagtcatcttaagt

SEQ ID NO: 1956260 - DNA, 15 bp, Homo sapiens
gagtcatcttaagta

SEQ ID NO: 1956261 - DNA, 15 bp, Homo sapiens
agtcatcttaagtat

SEQ ID NO: 1956262 - DNA, 15 bp, Homo sapiens
gtcatcttaagtatt

SEQ ID NO: 1956263 - DNA, 15 bp, Homo sapiens
tcatcttaagtattt

SEQ ID NO: 1956264 - DNA, 15 bp, Homo sapiens
catcttaagtatttt

SEQ ID NO: 1956265 - DNA, 15 bp, Homo sapiens
atcttaagtatttta

SEQ ID NO: 1956266 - DNA, 15 bp, Homo sapiens
tcttaagtattttaa

SEQ ID NO: 1956267 - DNA, 15 bp, Homo sapiens
cttaagtattttaaa

SEQ ID NO: 1956268 - DNA, 15 bp, Homo sapiens
ttaagtattttaaac

SEQ ID NO: 1956269 - DNA, 15 bp, Homo sapiens
taagtattttaaacc

SEQ ID NO: 1956270 - DNA, 15 bp, Homo sapiens
aagtattttaaacca

SEQ ID NO: 1956271 - DNA, 15 bp, Homo sapiens
agtattttaaaccac

SEQ ID NO: 1956272 - DNA, 15 bp, Homo sapiens
gtattttaaaccact

SEQ ID NO: 1956273 - DNA, 15 bp, Homo sapiens
tattttaaaccactt

SEQ ID NO: 1956274 - DNA, 15 bp, Homo sapiens
attttaaaccacttt

SEQ ID NO: 1956275 - DNA, 15 bp, Homo sapiens
ttttaaaccacttta

SEQ ID NO: 1956276 - DNA, 15 bp, Homo sapiens
tttaaaccactttac

SEQ ID NO: 1956277 - DNA, 15 bp, Homo sapiens
ttaaaccactttacc

SEQ ID NO: 1956278 - DNA, 15 bp, Homo sapiens
taaaccactttacct

SEQ ID NO: 1956279 - DNA, 15 bp, Homo sapiens
aaaccactttaccta

SEQ ID NO: 1956280 - DNA, 15 bp, Homo sapiens
aaccactttacctat

SEQ ID NO: 1956281 - DNA, 15 bp, Homo sapiens
accactttacctatt

SEQ ID NO: 1956282 - DNA, 15 bp, Homo sapiens
ccactttacctattt

SEQ ID NO: 1956283 - DNA, 15 bp, Homo sapiens
cactttacctatttg

SEQ ID NO: 1956284 - DNA, 15 bp, Homo sapiens
actttacctatttgc

SEQ ID NO: 1956285 - DNA, 15 bp, Homo sapiens
ctttacctatttgca

SEQ ID NO: 1956286 - DNA, 15 bp, Homo sapiens
tttacctatttgcat

SEQ ID NO: 1956287 - DNA, 15 bp, Homo sapiens
ttacctatttgcata

SEQ ID NO: 1956288 - DNA, 15 bp, Homo sapiens
tacctatttgcatat

SEQ ID NO: 1956289 - DNA, 15 bp, Homo sapiens
acctatttgcatata

SEQ ID NO: 1956290 - DNA, 15 bp, Homo sapiens
cctatttgcatataa

SEQ ID NO: 1956291 - DNA, 15 bp, Homo sapiens
ctatttgcatataag

SEQ ID NO: 1956292 - DNA, 15 bp, Homo sapiens
tatttgcatataagc

SEQ ID NO: 1956293 - DNA, 15 bp, Homo sapiens
atttgcatataagca

SEQ ID NO: 1956294 - DNA, 15 bp, Homo sapiens
tttgcatataagcaa

SEQ ID NO: 1956295 - DNA, 15 bp, Homo sapiens
ttgcatataagcaat

SEQ ID NO: 1956296 - DNA, 15 bp, Homo sapiens
tgcatataagcaatg

SEQ ID NO: 1956297 - DNA, 15 bp, Homo sapiens
gcatataagcaatga

SEQ ID NO: 1956298 - DNA, 15 bp, Homo sapiens
catataagcaatgat

SEQ ID NO: 1956299 - DNA, 15 bp, Homo sapiens
atataagcaatgatg

SEQ ID NO: 1956300 - DNA, 15 bp, Homo sapiens
tataagcaatgatgg

SEQ ID NO: 1956301 - DNA, 15 bp, Homo sapiens
ataagcaatgatgga

SEQ ID NO: 1956302 - DNA, 15 bp, Homo sapiens
taagcaatgatggac

SEQ ID NO: 1956303 - DNA, 15 bp, Homo sapiens
aagcaatgatggaca

SEQ ID NO: 1956304 - DNA, 15 bp, Homo sapiens
agcaatgatggacaa

SEQ ID NO: 1956305 - DNA, 15 bp, Homo sapiens
gcaatgatggacaag

SEQ ID NO: 1956306 - DNA, 15 bp, Homo sapiens
caatgatggacaagc

SEQ ID NO: 1956307 - DNA, 15 bp, Homo sapiens
aatgatggacaagcc

SEQ ID NO: 1956308 - DNA, 15 bp, Homo sapiens
atgatggacaagccc

SEQ ID NO: 1956309 - DNA, 15 bp, Homo sapiens
tgatggacaagccct

SEQ ID NO: 1956310 - DNA, 15 bp, Homo sapiens
gatggacaagccctt

SEQ ID NO: 1956311 - DNA, 15 bp, Homo sapiens
atggacaagccctta

SEQ ID NO: 1956312 - DNA, 15 bp, Homo sapiens
tggacaagcccttag

SEQ ID NO: 1956313 - DNA, 15 bp, Homo sapiens
ggacaagcccttagt

SEQ ID NO: 1956314 - DNA, 15 bp, Homo sapiens
gacaagcccttagta

SEQ ID NO: 1956315 - DNA, 15 bp, Homo sapiens
acaagcccttagtat

SEQ ID NO: 1956316 - DNA, 15 bp, Homo sapiens
caagcccttagtatt

SEQ ID NO: 1956317 - DNA, 15 bp, Homo sapiens
aagcccttagtattc

SEQ ID NO: 1956318 - DNA, 15 bp, Homo sapiens
agcccttagtattct

SEQ ID NO: 1956319 - DNA, 15 bp, Homo sapiens
gcccttagtattctg

SEQ ID NO: 1956320 - DNA, 15 bp, Homo sapiens
cccttagtattctga

SEQ ID NO: 1956321 - DNA, 15 bp, Homo sapiens
ccttagtattctgac

SEQ ID NO: 1956322 - DNA, 15 bp, Homo sapiens
cttagtattctgact

SEQ ID NO: 1956323 - DNA, 15 bp, Homo sapiens
ttagtattctgactc

SEQ ID NO: 1956324 - DNA, 15 bp, Homo sapiens
tagtattctgactca

SEQ ID NO: 1956325 - DNA, 15 bp, Homo sapiens
agtattctgactcag

SEQ ID NO: 1956326 - DNA, 15 bp, Homo sapiens
gtattctgactcagc

SEQ ID NO: 1956327 - DNA, 15 bp, Homo sapiens
tattctgactcagct

SEQ ID NO: 1956328 - DNA, 15 bp, Homo sapiens
attctgactcagctt

SEQ ID NO: 1956329 - DNA, 15 bp, Homo sapiens
ttctgactcagcttt

SEQ ID NO: 1956330 - DNA, 15 bp, Homo sapiens
tctgactcagcttta

SEQ ID NO: 1956331 - DNA, 15 bp, Homo sapiens
ctgactcagctttat

SEQ ID NO: 1956332 - DNA, 15 bp, Homo sapiens
tgactcagctttata

SEQ ID NO: 1956333 - DNA, 15 bp, Homo sapiens
gactcagctttatag

SEQ ID NO: 1956334 - DNA, 15 bp, Homo sapiens
actcagctttatagc

SEQ ID NO: 1956335 - DNA, 15 bp, Homo sapiens
ctcagctttatagca

SEQ ID NO: 1956336 - DNA, 15 bp, Homo sapiens
tcagctttatagcat

SEQ ID NO: 1956337 - DNA, 15 bp, Homo sapiens
cagctttatagcatt

SEQ ID NO: 1956338 - DNA, 15 bp, Homo sapiens
agctttatagcattt

SEQ ID NO: 1956339 - DNA, 15 bp, Homo sapiens
gctttatagcattta

SEQ ID NO: 1956340 - DNA, 15 bp, Homo sapiens
ctttatagcatttat

SEQ ID NO: 1956341 - DNA, 15 bp, Homo sapiens
tttatagcatttatc

SEQ ID NO: 1956342 - DNA, 15 bp, Homo sapiens
ttatagcatttatca

SEQ ID NO: 1956343 - DNA, 15 bp, Homo sapiens
tatagcatttatcag

SEQ ID NO: 1956344 - DNA, 15 bp, Homo sapiens
atagcatttatcaga

SEQ ID NO: 1956345 - DNA, 15 bp, Homo sapiens
tagcatttatcagag

SEQ ID NO: 1956346 - DNA, 15 bp, Homo sapiens
agcatttatcagaga

SEQ ID NO: 1956347 - DNA, 15 bp, Homo sapiens
gcatttatcagagac

SEQ ID NO: 1956348 - DNA, 15 bp, Homo sapiens
catttatcagagact

SEQ ID NO: 1956349 - DNA, 15 bp, Homo sapiens
atttatcagagactt

SEQ ID NO: 1956350 - DNA, 15 bp, Homo sapiens
tttatcagagacttg

SEQ ID NO: 1956351 - DNA, 15 bp, Homo sapiens
ttatcagagacttgc

SEQ ID NO: 1956352 - DNA, 15 bp, Homo sapiens
tatcagagacttgct

SEQ ID NO: 1956353 - DNA, 15 bp, Homo sapiens
atcagagacttgcta

SEQ ID NO: 1956354 - DNA, 15 bp, Homo sapiens
tcagagacttgctac

SEQ ID NO: 1956355 - DNA, 15 bp, Homo sapiens
cagagacttgctaca

SEQ ID NO: 1956356 - DNA, 15 bp, Homo sapiens
agagacttgctacag

SEQ ID NO: 1956357 - DNA, 15 bp, Homo sapiens
gagacttgctacagc

SEQ ID NO: 1956358 - DNA, 15 bp, Homo sapiens
agacttgctacagct

SEQ ID NO: 1956359 - DNA, 15 bp, Homo sapiens
gacttgctacagctt

SEQ ID NO: 1956360 - DNA, 15 bp, Homo sapiens
acttgctacagcttt

SEQ ID NO: 1956361 - DNA, 15 bp, Homo sapiens
cttgctacagctttc

SEQ ID NO: 1956362 - DNA, 15 bp, Homo sapiens
ttgctacagctttcc

SEQ ID NO: 1956363 - DNA, 15 bp, Homo sapiens
tgctacagctttcct

SEQ ID NO: 1956364 - DNA, 15 bp, Homo sapiens
gctacagctttcctc

SEQ ID NO: 1956365 - DNA, 15 bp, Homo sapiens
ctacagctttcctct

SEQ ID NO: 1956366 - DNA, 15 bp, Homo sapiens
tacagctttcctctt

SEQ ID NO: 1956367 - DNA, 15 bp, Homo sapiens
acagctttcctcttg

SEQ ID NO: 1956368 - DNA, 15 bp, Homo sapiens
cagctttcctcttga

SEQ ID NO: 1956369 - DNA, 15 bp, Homo sapiens
agctttcctcttgac

SEQ ID NO: 1956370 - DNA, 15 bp, Homo sapiens
gctttcctcttgacc

SEQ ID NO: 1956371 - DNA, 15 bp, Homo sapiens
ctttcctcttgaccc

SEQ ID NO: 1956372 - DNA, 15 bp, Homo sapiens
tttcctcttgaccca

SEQ ID NO: 1956373 - DNA, 15 bp, Homo sapiens
ttcctcttgacccaa

SEQ ID NO: 1956374 - DNA, 15 bp, Homo sapiens
tcctcttgacccaat

SEQ ID NO: 1956375 - DNA, 15 bp, Homo sapiens
cctcttgacccaatg

SEQ ID NO: 1956376 - DNA, 15 bp, Homo sapiens
ctcttgacccaatgg

SEQ ID NO: 1956377 - DNA, 15 bp, Homo sapiens
tcttgacccaatggc

SEQ ID NO: 1956378 - DNA, 15 bp, Homo sapiens
cttgacccaatggca

SEQ ID NO: 1956379 - DNA, 15 bp, Homo sapiens
ttgacccaatggcaa

SEQ ID NO: 1956380 - DNA, 15 bp, Homo sapiens
tgacccaatggcaaa

SEQ ID NO: 1956381 - DNA, 15 bp, Homo sapiens
gacccaatggcaaaa

SEQ ID NO: 1956382 - DNA, 15 bp, Homo sapiens
acccaatggcaaaag

SEQ ID NO: 1956383 - DNA, 15 bp, Homo sapiens
cccaatggcaaaagt

SEQ ID NO: 1956384 - DNA, 15 bp, Homo sapiens
ccaatggcaaaagtg

SEQ ID NO: 1956385 - DNA, 15 bp, Homo sapiens
caatggcaaaagtgc

SEQ ID NO: 1956386 - DNA, 15 bp, Homo sapiens
aatggcaaaagtgca

SEQ ID NO: 1956387 - DNA, 15 bp, Homo sapiens
atggcaaaagtgcac

SEQ ID NO: 1956388 - DNA, 15 bp, Homo sapiens
tggcaaaagtgcacc

SEQ ID NO: 1956389 - DNA, 15 bp, Homo sapiens
ggcaaaagtgcacct

SEQ ID NO: 1956390 - DNA, 15 bp, Homo sapiens
gcaaaagtgcacctt

SEQ ID NO: 1956391 - DNA, 15 bp, Homo sapiens
caaaagtgcaccttc

SEQ ID NO: 1956392 - DNA, 15 bp, Homo sapiens
aaaagtgcaccttcc

SEQ ID NO: 1956393 - DNA, 15 bp, Homo sapiens
aaagtgcaccttcct

SEQ ID NO: 1956394 - DNA, 15 bp, Homo sapiens
aagtgcaccttcctt

SEQ ID NO: 1956395 - DNA, 15 bp, Homo sapiens
agtgcaccttccttg

SEQ ID NO: 1956396 - DNA, 15 bp, Homo sapiens
gtgcaccttccttgt

SEQ ID NO: 1956397 - DNA, 15 bp, Homo sapiens
tgcaccttccttgtc

SEQ ID NO: 1956398 - DNA, 15 bp, Homo sapiens
gcaccttccttgtct

SEQ ID NO: 1956399 - DNA, 15 bp, Homo sapiens
caccttccttgtctc

SEQ ID NO: 1956400 - DNA, 15 bp, Homo sapiens
accttccttgtctca

SEQ ID NO: 1956401 - DNA, 15 bp, Homo sapiens
ccttccttgtctcag

SEQ ID NO: 1956402 - DNA, 15 bp, Homo sapiens
cttccttgtctcagg

SEQ ID NO: 1956403 - DNA, 15 bp, Homo sapiens
ttccttgtctcaggg

SEQ ID NO: 1956404 - DNA, 15 bp, Homo sapiens
tccttgtctcagggc

SEQ ID NO: 1956405 - DNA, 15 bp, Homo sapiens
ccttgtctcagggca

SEQ ID NO: 1956406 - DNA, 15 bp, Homo sapiens
cttgtctcagggcaa

SEQ ID NO: 1956407 - DNA, 15 bp, Homo sapiens
ttgtctcagggcaat

SEQ ID NO: 1956408 - DNA, 15 bp, Homo sapiens
tgtctcagggcaata

SEQ ID NO: 1956409 - DNA, 15 bp, Homo sapiens
gtctcagggcaatag

SEQ ID NO: 1956410 - DNA, 15 bp, Homo sapiens
tctcagggcaatagc

SEQ ID NO: 1956411 - DNA, 15 bp, Homo sapiens
ctcagggcaatagca

SEQ ID NO: 1956412 - DNA, 15 bp, Homo sapiens
tcagggcaatagcaa

SEQ ID NO: 1956413 - DNA, 15 bp, Homo sapiens
cagggcaatagcaac

SEQ ID NO: 1956414 - DNA, 15 bp, Homo sapiens
agggcaatagcaact

SEQ ID NO: 1956415 - DNA, 15 bp, Homo sapiens
gggcaatagcaactc

SEQ ID NO: 1956416 - DNA, 15 bp, Homo sapiens
ggcaatagcaactca

SEQ ID NO: 1956417 - DNA, 15 bp, Homo sapiens
gcaatagcaactcag

SEQ ID NO: 1956418 - DNA, 15 bp, Homo sapiens
caatagcaactcagc

SEQ ID NO: 1956419 - DNA, 15 bp, Homo sapiens
aattggaagtttcct

SEQ ID NO: 1956420 - DNA, 15 bp, Homo sapiens
attggaagtttcctg

SEQ ID NO: 1956421 - DNA, 15 bp, Homo sapiens
ttggaagtttcctga

SEQ ID NO: 1956422 - DNA, 15 bp, Homo sapiens
tggaagtttcctgag

SEQ ID NO: 1956423 - DNA, 15 bp, Homo sapiens
ggaagtttcctgaga

SEQ ID NO: 1956424 - DNA, 15 bp, Homo sapiens
gaagtttcctgagac

SEQ ID NO: 1956425 - DNA, 15 bp, Homo sapiens
aagtttcctgagacc

SEQ ID NO: 1956426 - DNA, 15 bp, Homo sapiens
cctgagacctcccta

SEQ ID NO: 1956427 - DNA, 15 bp, Homo sapiens
ctgagacctccctag

SEQ ID NO: 1956428 - DNA, 15 bp, Homo sapiens
tgagacctccctagc

SEQ ID NO: 1956429 - DNA, 15 bp, Homo sapiens
gagacctccctagcc

SEQ ID NO: 1956430 - DNA, 15 bp, Homo sapiens
agacctccctagcca

SEQ ID NO: 1956431 - DNA, 15 bp, Homo sapiens
gacctccctagccat

SEQ ID NO: 1956432 - DNA, 15 bp, Homo sapiens
acctccctagccatc

SEQ ID NO: 1956433 - DNA, 15 bp, Homo sapiens
cctccctagccatcc

SEQ ID NO: 1956434 - DNA, 15 bp, Homo sapiens
ctccctagccatcct

SEQ ID NO: 1956435 - DNA, 15 bp, Homo sapiens
tccctagccatcctt

SEQ ID NO: 1956436 - DNA, 15 bp, Homo sapiens
ccctagccatccttc

SEQ ID NO: 1956437 - DNA, 15 bp, Homo sapiens
cctagccatccttcc

SEQ ID NO: 1956438 - DNA, 15 bp, Homo sapiens
ctagccatccttcct

SEQ ID NO: 1956439 - DNA, 15 bp, Homo sapiens
tagccatccttcctg

SEQ ID NO: 1956440 - DNA, 15 bp, Homo sapiens
agccatccttcctgt

SEQ ID NO: 1956441 - DNA, 15 bp, Homo sapiens
gccatccttcctgta

SEQ ID NO: 1956442 - DNA, 15 bp, Homo sapiens
ccatccttcctgtac

SEQ ID NO: 1956443 - DNA, 15 bp, Homo sapiens
catccttcctgtaca

SEQ ID NO: 1956444 - DNA, 15 bp, Homo sapiens
atccttcctgtacag

SEQ ID NO: 1956445 - DNA, 15 bp, Homo sapiens
tccttcctgtacagc

SEQ ID NO: 1956446 - DNA, 15 bp, Homo sapiens
ccttcctgtacagcc

SEQ ID NO: 1956447 - DNA, 15 bp, Homo sapiens
cttcctgtacagcct

SEQ ID NO: 1956448 - DNA, 15 bp, Homo sapiens
ttcctgtacagcctg

SEQ ID NO: 1956449 - DNA, 15 bp, Homo sapiens
tcctgtacagcctgc

SEQ ID NO: 1956450 - DNA, 15 bp, Homo sapiens
cctgtacagcctgca

SEQ ID NO: 1956451 - DNA, 15 bp, Homo sapiens
ctgtacagcctgcag

SEQ ID NO: 1956452 - DNA, 15 bp, Homo sapiens
tgtacagcctgcaga

SEQ ID NO: 1956453 - DNA, 15 bp, Homo sapiens
gtacagcctgcagaa

SEQ ID NO: 1956454 - DNA, 15 bp, Homo sapiens
tacagcctgcagaac

SEQ ID NO: 1956455 - DNA, 15 bp, Homo sapiens
acagcctgcagaacc

SEQ ID NO: 1956456 - DNA, 15 bp, Homo sapiens
cagcctgcagaaccc

SEQ ID NO: 1956457 - DNA, 15 bp, Homo sapiens
agcctgcagaaccca

SEQ ID NO: 1956458 - DNA, 15 bp, Homo sapiens
gcctgcagaacccat

SEQ ID NO: 1956459 - DNA, 15 bp, Homo sapiens
cctgcagaacccatg

SEQ ID NO: 1956460 - DNA, 15 bp, Homo sapiens
ctgcagaacccatga

SEQ ID NO: 1956461 - DNA, 15 bp, Homo sapiens
tgcagaacccatgag

SEQ ID NO: 1956462 - DNA, 15 bp, Homo sapiens
gcagaacccatgagc

SEQ ID NO: 1956463 - DNA, 15 bp, Homo sapiens
cagaacccatgagcc

SEQ ID NO: 1956464 - DNA, 15 bp, Homo sapiens
agaacccatgagcca

SEQ ID NO: 1956465 - DNA, 15 bp, Homo sapiens
gaacccatgagccaa

SEQ ID NO: 1956466 - DNA, 15 bp, Homo sapiens
aacccatgagccaat

SEQ ID NO: 1956467 - DNA, 15 bp, Homo sapiens
acccatgagccaatt

SEQ ID NO: 1956468 - DNA, 15 bp, Homo sapiens
cccatgagccaatta

SEQ ID NO: 1956469 - DNA, 15 bp, Homo sapiens
ccatgagccaattaa

SEQ ID NO: 1956470 - DNA, 15 bp, Homo sapiens
catgagccaattaaa

SEQ ID NO: 1956471 - DNA, 15 bp, Homo sapiens
atgagccaattaaac

SEQ ID NO: 1956472 - DNA, 15 bp, Homo sapiens
tgagccaattaaacc

SEQ ID NO: 1956473 - DNA, 15 bp, Homo sapiens
gagccaattaaacct

SEQ ID NO: 1956474 - DNA, 15 bp, Homo sapiens
agccaattaaacctc

SEQ ID NO: 1956475 - DNA, 15 bp, Homo sapiens
gccaattaaacctct

SEQ ID NO: 1956476 - DNA, 15 bp, Homo sapiens
caattaaacctcttt

SEQ ID NO: 1956477 - DNA, 15 bp, Homo sapiens
aattaaacctctttt

SEQ ID NO: 1956478 - DNA, 15 bp, Homo sapiens
attaaacctcttttc

SEQ ID NO: 1956479 - DNA, 15 bp, Homo sapiens
ttaaacctcttttct

SEQ ID NO: 1956480 - DNA, 15 bp, Homo sapiens
taaacctcttttctt

SEQ ID NO: 1956481 - DNA, 15 bp, Homo sapiens
aaacctcttttcttt

SEQ ID NO: 1956482 - DNA, 15 bp, Homo sapiens
aacctcttttcttta

SEQ ID NO: 1956483 - DNA, 15 bp, Homo sapiens
acctcttttctttat

SEQ ID NO: 1956484 - DNA, 15 bp, Homo sapiens
cctcttttctttata

SEQ ID NO: 1956485 - DNA, 15 bp, Homo sapiens
ctcttttctttataa

SEQ ID NO: 1956486 - DNA, 15 bp, Homo sapiens
tcttttctttataaa

SEQ ID NO: 1956487 - DNA, 15 bp, Homo sapiens
cttttctttataaat

SEQ ID NO: 1956488 - DNA, 15 bp, Homo sapiens
ttttctttataaatt

SEQ ID NO: 1956489 - DNA, 15 bp, Homo sapiens
cccagtctcaggtag

SEQ ID NO: 1956490 - DNA, 15 bp, Homo sapiens
ccagtctcaggtagt

SEQ ID NO: 1956491 - DNA, 15 bp, Homo sapiens
cagtctcaggtagtt

SEQ ID NO: 1956492 - DNA, 15 bp, Homo sapiens
agtctcaggtagttc

SEQ ID NO: 1956493 - DNA, 15 bp, Homo sapiens
gtctcaggtagttct

SEQ ID NO: 1956494 - DNA, 15 bp, Homo sapiens
tctcaggtagttctt

SEQ ID NO: 1956495 - DNA, 15 bp, Homo sapiens
ctcaggtagttcttt

SEQ ID NO: 1956496 - DNA, 15 bp, Homo sapiens
tcaggtagttcttta

SEQ ID NO: 1956497 - DNA, 15 bp, Homo sapiens
caggtagttctttat

SEQ ID NO: 1956498 - DNA, 15 bp, Homo sapiens
aggtagttctttata

SEQ ID NO: 1956499 - DNA, 15 bp, Homo sapiens
ggtagttctttataa

SEQ ID NO: 1956500 - DNA, 15 bp, Homo sapiens
gtagttctttataac

SEQ ID NO: 1956501 - DNA, 15 bp, Homo sapiens
tagttctttataaca

SEQ ID NO: 1956502 - DNA, 15 bp, Homo sapiens
agttctttataacaa

SEQ ID NO: 1956503 - DNA, 15 bp, Homo sapiens
gttctttataacaat

SEQ ID NO: 1956504 - DNA, 15 bp, Homo sapiens
ttctttataacaatg

SEQ ID NO: 1956505 - DNA, 15 bp, Homo sapiens
tctttataacaatgc

SEQ ID NO: 1956506 - DNA, 15 bp, Homo sapiens
ctttataacaatgca

SEQ ID NO: 1956507 - DNA, 15 bp, Homo sapiens
tttataacaatgcaa

SEQ ID NO: 1956508 - DNA, 15 bp, Homo sapiens
ttataacaatgcaag

SEQ ID NO: 1956509 - DNA, 15 bp, Homo sapiens
tataacaatgcaaga

SEQ ID NO: 1956510 - DNA, 15 bp, Homo sapiens
ataacaatgcaagaa

SEQ ID NO: 1956511 - DNA, 15 bp, Homo sapiens
taacaatgcaagaat

SEQ ID NO: 1956512 - DNA, 15 bp, Homo sapiens
aacaatgcaagaatg

SEQ ID NO: 1956513 - DNA, 15 bp, Homo sapiens
acaatgcaagaatgg

SEQ ID NO: 1956514 - DNA, 15 bp, Homo sapiens
caatgcaagaatgga

SEQ ID NO: 1956515 - DNA, 15 bp, Homo sapiens
aatgcaagaatggac

SEQ ID NO: 1956516 - DNA, 15 bp, Homo sapiens
atgcaagaatggact

SEQ ID NO: 1956517 - DNA, 15 bp, Homo sapiens
tgcaagaatggacta

SEQ ID NO: 1956518 - DNA, 15 bp, Homo sapiens
gcaagaatggactaa

SEQ ID NO: 1956519 - DNA, 15 bp, Homo sapiens
caagaatggactaat

SEQ ID NO: 1956520 - DNA, 15 bp, Homo sapiens
aagaatggactaata

SEQ ID NO: 1956521 - DNA, 15 bp, Homo sapiens
agaatggactaatac

SEQ ID NO: 1956522 - DNA, 15 bp, Homo sapiens
gaatggactaataca

SEQ ID NO: 1956523 - DNA, 15 bp, Homo sapiens
aatggactaatacag

SEQ ID NO: 1956524 - DNA, 15 bp, Homo sapiens
atggactaatacaga

SEQ ID NO: 1956525 - DNA, 15 bp, Homo sapiens
tggactaatacagaa

SEQ ID NO: 1956526 - DNA, 15 bp, Homo sapiens
ggactaatacagaaa

SEQ ID NO: 1956527 - DNA, 15 bp, Homo sapiens
gactaatacagaaaa

SEQ ID NO: 1956528 - DNA, 15 bp, Homo sapiens
actaatacagaaaat

SEQ ID NO: 1956529 - DNA, 15 bp, Homo sapiens
ctaatacagaaaatt

SEQ ID NO: 1956530 - DNA, 15 bp, Homo sapiens
taatacagaaaattg

SEQ ID NO: 1956531 - DNA, 15 bp, Homo sapiens
aatacagaaaattgg

SEQ ID NO: 1956532 - DNA, 15 bp, Homo sapiens
atacagaaaattggt

SEQ ID NO: 1956533 - DNA, 15 bp, Homo sapiens
tacagaaaattggta

SEQ ID NO: 1956534 - DNA, 15 bp, Homo sapiens
acagaaaattggtac

SEQ ID NO: 1956535 - DNA, 15 bp, Homo sapiens
cagaaaattggtacc

SEQ ID NO: 1956536 - DNA, 15 bp, Homo sapiens
agaaaattggtacca

SEQ ID NO: 1956537 - DNA, 15 bp, Homo sapiens
gaaaattggtaccag

SEQ ID NO: 1956538 - DNA, 15 bp, Homo sapiens
aaaattggtaccagg

SEQ ID NO: 1956539 - DNA, 15 bp, Homo sapiens
aaattggtaccagga

SEQ ID NO: 1956540 - DNA, 15 bp, Homo sapiens
aattggtaccaggag

SEQ ID NO: 1956541 - DNA, 15 bp, Homo sapiens
attggtaccaggagt

SEQ ID NO: 1956542 - DNA, 15 bp, Homo sapiens
ttggtaccaggagtg

SEQ ID NO: 1956543 - DNA, 15 bp, Homo sapiens
tggtaccaggagtga

SEQ ID NO: 1956544 - DNA, 15 bp, Homo sapiens
ggtaccaggagtgag

SEQ ID NO: 1956545 - DNA, 15 bp, Homo sapiens
gtaccaggagtgagg

SEQ ID NO: 1956546 - DNA, 15 bp, Homo sapiens
taccaggagtgaggc

SEQ ID NO: 1956547 - DNA, 15 bp, Homo sapiens
accaggagtgaggca

SEQ ID NO: 1956548 - DNA, 15 bp, Homo sapiens
ccaggagtgaggcac

SEQ ID NO: 1956549 - DNA, 15 bp, Homo sapiens
caggagtgaggcact

SEQ ID NO: 1956550 - DNA, 15 bp, Homo sapiens
aggagtgaggcactg

SEQ ID NO: 1956551 - DNA, 15 bp, Homo sapiens
ggagtgaggcactgc

SEQ ID NO: 1956552 - DNA, 15 bp, Homo sapiens
gagtgaggcactgct

SEQ ID NO: 1956553 - DNA, 15 bp, Homo sapiens
agtgaggcactgctg

SEQ ID NO: 1956554 - DNA, 15 bp, Homo sapiens
gtgaggcactgctgt

SEQ ID NO: 1956555 - DNA, 15 bp, Homo sapiens
tgaggcactgctgta

SEQ ID NO: 1956556 - DNA, 15 bp, Homo sapiens
gaggcactgctgtaa

SEQ ID NO: 1956557 - DNA, 15 bp, Homo sapiens
aggcactgctgtaaa

SEQ ID NO: 1956558 - DNA, 15 bp, Homo sapiens
ggcactgctgtaaat

SEQ ID NO: 1956559 - DNA, 15 bp, Homo sapiens
gcactgctgtaaata

SEQ ID NO: 1956560 - DNA, 15 bp, Homo sapiens
cactgctgtaaatat

SEQ ID NO: 1956561 - DNA, 15 bp, Homo sapiens
actgctgtaaatata

SEQ ID NO: 1956562 - DNA, 15 bp, Homo sapiens
ctgctgtaaatatac

SEQ ID NO: 1956563 - DNA, 15 bp, Homo sapiens
tgctgtaaatatacc

SEQ ID NO: 1956564 - DNA, 15 bp, Homo sapiens
gctgtaaatatacct

SEQ ID NO: 1956565 - DNA, 15 bp, Homo sapiens
ctgtaaatatacctg

SEQ ID NO: 1956566 - DNA, 15 bp, Homo sapiens
tgtaaatatacctga

SEQ ID NO: 1956567 - DNA, 15 bp, Homo sapiens
gtaaatatacctgaa

SEQ ID NO: 1956568 - DNA, 15 bp, Homo sapiens
taaatatacctgaaa

SEQ ID NO: 1956569 - DNA, 15 bp, Homo sapiens
aaatatacctgaaaa

SEQ ID NO: 1956570 - DNA, 15 bp, Homo sapiens
aatatacctgaaaat

SEQ ID NO: 1956571 - DNA, 15 bp, Homo sapiens
atatacctgaaaatg

SEQ ID NO: 1956572 - DNA, 15 bp, Homo sapiens
tatacctgaaaatgt

SEQ ID NO: 1956573 - DNA, 15 bp, Homo sapiens
atacctgaaaatgtg

SEQ ID NO: 1956574 - DNA, 15 bp, Homo sapiens
tacctgaaaatgtgg

SEQ ID NO: 1956575 - DNA, 15 bp, Homo sapiens
acctgaaaatgtgga

SEQ ID NO: 1956576 - DNA, 15 bp, Homo sapiens
cctgaaaatgtggaa

SEQ ID NO: 1956577 - DNA, 15 bp, Homo sapiens
ctgaaaatgtggaag

SEQ ID NO: 1956578 - DNA, 15 bp, Homo sapiens
tgaaaatgtggaagc

SEQ ID NO: 1956579 - DNA, 15 bp, Homo sapiens
gaaaatgtggaagca

SEQ ID NO: 1956580 - DNA, 15 bp, Homo sapiens
aaaatgtggaagcag

SEQ ID NO: 1956581 - DNA, 15 bp, Homo sapiens
aaatgtggaagcagc

SEQ ID NO: 1956582 - DNA, 15 bp, Homo sapiens
aatgtggaagcagct

SEQ ID NO: 1956583 - DNA, 15 bp, Homo sapiens
atgtggaagcagctt

SEQ ID NO: 1956584 - DNA, 15 bp, Homo sapiens
tgtggaagcagcttt

SEQ ID NO: 1956585 - DNA, 15 bp, Homo sapiens
gtggaagcagctttg

SEQ ID NO: 1956586 - DNA, 15 bp, Homo sapiens
tggaagcagctttgg

SEQ ID NO: 1956587 - DNA, 15 bp, Homo sapiens
ggaagcagctttgga

SEQ ID NO: 1956588 - DNA, 15 bp, Homo sapiens
gaagcagctttggaa

SEQ ID NO: 1956589 - DNA, 15 bp, Homo sapiens
aagcagctttggaac

SEQ ID NO: 1956590 - DNA, 15 bp, Homo sapiens
agcagctttggaact

SEQ ID NO: 1956591 - DNA, 15 bp, Homo sapiens
gcagctttggaactg

SEQ ID NO: 1956592 - DNA, 15 bp, Homo sapiens
cagctttggaactgg

SEQ ID NO: 1956593 - DNA, 15 bp, Homo sapiens
agctttggaactggg

SEQ ID NO: 1956594 - DNA, 15 bp, Homo sapiens
gctttggaactgggt

SEQ ID NO: 1956595 - DNA, 15 bp, Homo sapiens
ctttggaactgggta

SEQ ID NO: 1956596 - DNA, 15 bp, Homo sapiens
tttggaactgggtaa

SEQ ID NO: 1956597 - DNA, 15 bp, Homo sapiens
ttggaactgggtaat

SEQ ID NO: 1956598 - DNA, 15 bp, Homo sapiens
tggaactgggtaatg

SEQ ID NO: 1956599 - DNA, 15 bp, Homo sapiens
ggaactgggtaatgg

SEQ ID NO: 1956600 - DNA, 15 bp, Homo sapiens
gaactgggtaatggg

SEQ ID NO: 1956601 - DNA, 15 bp, Homo sapiens
aactgggtaatgggc

SEQ ID NO: 1956602 - DNA, 15 bp, Homo sapiens
actgggtaatgggca

SEQ ID NO: 1956603 - DNA, 15 bp, Homo sapiens
ctgggtaatgggcag

SEQ ID NO: 1956604 - DNA, 15 bp, Homo sapiens
tgggtaatgggcaga

SEQ ID NO: 1956605 - DNA, 15 bp, Homo sapiens
gggtaatgggcagag

SEQ ID NO: 1956606 - DNA, 15 bp, Homo sapiens
ggtaatgggcagagg

SEQ ID NO: 1956607 - DNA, 15 bp, Homo sapiens
gtaatgggcagaggt

SEQ ID NO: 1956608 - DNA, 15 bp, Homo sapiens
taatgggcagaggtt

SEQ ID NO: 1956609 - DNA, 15 bp, Homo sapiens
aatgggcagaggttg

SEQ ID NO: 1956610 - DNA, 15 bp, Homo sapiens
atgggcagaggttgg

SEQ ID NO: 1956611 - DNA, 15 bp, Homo sapiens
tgggcagaggttgga

SEQ ID NO: 1956612 - DNA, 15 bp, Homo sapiens
gggcagaggttggaa

SEQ ID NO: 1956613 - DNA, 15 bp, Homo sapiens
ggcagaggttggaac

SEQ ID NO: 1956614 - DNA, 15 bp, Homo sapiens
gcagaggttggaaca

SEQ ID NO: 1956615 - DNA, 15 bp, Homo sapiens
cagaggttggaacag

SEQ ID NO: 1956616 - DNA, 15 bp, Homo sapiens
agaggttggaacagt

SEQ ID NO: 1956617 - DNA, 15 bp, Homo sapiens
gaggttggaacagtt

SEQ ID NO: 1956618 - DNA, 15 bp, Homo sapiens
aggttggaacagttt

SEQ ID NO: 1956619 - DNA, 15 bp, Homo sapiens
ggttggaacagtttg

SEQ ID NO: 1956620 - DNA, 15 bp, Homo sapiens
gttggaacagtttgg

SEQ ID NO: 1956621 - DNA, 15 bp, Homo sapiens
ttggaacagtttgga

SEQ ID NO: 1956622 - DNA, 15 bp, Homo sapiens
tggaacagtttggag

SEQ ID NO: 1956623 - DNA, 15 bp, Homo sapiens
ggaacagtttggagg

SEQ ID NO: 1956624 - DNA, 15 bp, Homo sapiens
gaacagtttggaggg

SEQ ID NO: 1956625 - DNA, 15 bp, Homo sapiens
aacagtttggagggc

SEQ ID NO: 1956626 - DNA, 15 bp, Homo sapiens
acagtttggagggct

SEQ ID NO: 1956627 - DNA, 15 bp, Homo sapiens
cagtttggagggctc

SEQ ID NO: 1956628 - DNA, 15 bp, Homo sapiens
agtttggagggctca

SEQ ID NO: 1956629 - DNA, 15 bp, Homo sapiens
gtttggagggctcag

SEQ ID NO: 1956630 - DNA, 15 bp, Homo sapiens
tttggagggctcaga

SEQ ID NO: 1956631 - DNA, 15 bp, Homo sapiens
ttggagggctcagaa

SEQ ID NO: 1956632 - DNA, 15 bp, Homo sapiens
tggagggctcagaag

SEQ ID NO: 1956633 - DNA, 15 bp, Homo sapiens
ggagggctcagaaga

SEQ ID NO: 1956634 - DNA, 15 bp, Homo sapiens
gagggctcagaagaa

SEQ ID NO: 1956635 - DNA, 15 bp, Homo sapiens
agggctcagaagaag

SEQ ID NO: 1956636 - DNA, 15 bp, Homo sapiens
gggctcagaagaaga

SEQ ID NO: 1956637 - DNA, 15 bp, Homo sapiens
ggctcagaagaagac

SEQ ID NO: 1956638 - DNA, 15 bp, Homo sapiens
gctcagaagaagaca

SEQ ID NO: 1956639 - DNA, 15 bp, Homo sapiens
ctcagaagaagacag

SEQ ID NO: 1956640 - DNA, 15 bp, Homo sapiens
tcagaagaagacagg

SEQ ID NO: 1956641 - DNA, 15 bp, Homo sapiens
cagaagaagacagga

SEQ ID NO: 1956642 - DNA, 15 bp, Homo sapiens
agaagaagacaggaa

SEQ ID NO: 1956643 - DNA, 15 bp, Homo sapiens
gaagaagacaggaag

SEQ ID NO: 1956644 - DNA, 15 bp, Homo sapiens
aagaagacaggaagg

SEQ ID NO: 1956645 - DNA, 15 bp, Homo sapiens
agaagacaggaaggt

SEQ ID NO: 1956646 - DNA, 15 bp, Homo sapiens
gaagacaggaaggtg

SEQ ID NO: 1956647 - DNA, 15 bp, Homo sapiens
aagacaggaaggtga

SEQ ID NO: 1956648 - DNA, 15 bp, Homo sapiens
agacaggaaggtgag

SEQ ID NO: 1956649 - DNA, 15 bp, Homo sapiens
gacaggaaggtgagg

SEQ ID NO: 1956650 - DNA, 15 bp, Homo sapiens
acaggaaggtgaggg

SEQ ID NO: 1956651 - DNA, 15 bp, Homo sapiens
caggaaggtgagggc

SEQ ID NO: 1956652 - DNA, 15 bp, Homo sapiens
aggaaggtgagggca

SEQ ID NO: 1956653 - DNA, 15 bp, Homo sapiens
ggaaggtgagggcaa

SEQ ID NO: 1956654 - DNA, 15 bp, Homo sapiens
gaaggtgagggcaag

SEQ ID NO: 1956655 - DNA, 15 bp, Homo sapiens
aaggtgagggcaagt

SEQ ID NO: 1956656 - DNA, 15 bp, Homo sapiens
aggtgagggcaagtt

SEQ ID NO: 1956657 - DNA, 15 bp, Homo sapiens
ggtgagggcaagttt

SEQ ID NO: 1956658 - DNA, 15 bp, Homo sapiens
gtgagggcaagtttg

SEQ ID NO: 1956659 - DNA, 15 bp, Homo sapiens
tgagggcaagtttgg

SEQ ID NO: 1956660 - DNA, 15 bp, Homo sapiens
gagggcaagtttgga

SEQ ID NO: 1956661 - DNA, 15 bp, Homo sapiens
agggcaagtttggaa

SEQ ID NO: 1956662 - DNA, 15 bp, Homo sapiens
gggcaagtttggaac

SEQ ID NO: 1956663 - DNA, 15 bp, Homo sapiens
ggcaagtttggaact

SEQ ID NO: 1956664 - DNA, 15 bp, Homo sapiens
gcaagtttggaactt

SEQ ID NO: 1956665 - DNA, 15 bp, Homo sapiens
caagtttggaacttc

SEQ ID NO: 1956666 - DNA, 15 bp, Homo sapiens
aagtttggaacttcc

SEQ ID NO: 1956667 - DNA, 15 bp, Homo sapiens
agtttggaacttcct

SEQ ID NO: 1956668 - DNA, 15 bp, Homo sapiens
gtttggaacttccta

SEQ ID NO: 1956669 - DNA, 15 bp, Homo sapiens
tttggaacttcctag

SEQ ID NO: 1956670 - DNA, 15 bp, Homo sapiens
ttggaacttcctaga

SEQ ID NO: 1956671 - DNA, 15 bp, Homo sapiens
tggaacttcctagag

SEQ ID NO: 1956672 - DNA, 15 bp, Homo sapiens
ggaacttcctagaga

SEQ ID NO: 1956673 - DNA, 15 bp, Homo sapiens
gaacttcctagagac

SEQ ID NO: 1956674 - DNA, 15 bp, Homo sapiens
aacttcctagagact

SEQ ID NO: 1956675 - DNA, 15 bp, Homo sapiens
acttcctagagactt

SEQ ID NO: 1956676 - DNA, 15 bp, Homo sapiens
cttcctagagacttg

SEQ ID NO: 1956677 - DNA, 15 bp, Homo sapiens
ttcctagagacttgt

SEQ ID NO: 1956678 - DNA, 15 bp, Homo sapiens
tcctagagacttgtt

SEQ ID NO: 1956679 - DNA, 15 bp, Homo sapiens
cctagagacttgtta

SEQ ID NO: 1956680 - DNA, 15 bp, Homo sapiens
ctagagacttgttaa

SEQ ID NO: 1956681 - DNA, 15 bp, Homo sapiens
tagagacttgttaaa

SEQ ID NO: 1956682 - DNA, 15 bp, Homo sapiens
agagacttgttaaat

SEQ ID NO: 1956683 - DNA, 15 bp, Homo sapiens
gagacttgttaaatg

SEQ ID NO: 1956684 - DNA, 15 bp, Homo sapiens
agacttgttaaatgg

SEQ ID NO: 1956685 - DNA, 15 bp, Homo sapiens
gacttgttaaatggc

SEQ ID NO: 1956686 - DNA, 15 bp, Homo sapiens
acttgttaaatggct

SEQ ID NO: 1956687 - DNA, 15 bp, Homo sapiens
cttgttaaatggctg

SEQ ID NO: 1956688 - DNA, 15 bp, Homo sapiens
ttgttaaatggctgt

SEQ ID NO: 1956689 - DNA, 15 bp, Homo sapiens
tgttaaatggctgtg

SEQ ID NO: 1956690 - DNA, 15 bp, Homo sapiens
gttaaatggctgtga

SEQ ID NO: 1956691 - DNA, 15 bp, Homo sapiens
ttaaatggctgtgac

SEQ ID NO: 1956692 - DNA, 15 bp, Homo sapiens
taaatggctgtgacc

SEQ ID NO: 1956693 - DNA, 15 bp, Homo sapiens
aaatggctgtgacca

SEQ ID NO: 1956694 - DNA, 15 bp, Homo sapiens
aatggctgtgaccaa

SEQ ID NO: 1956695 - DNA, 15 bp, Homo sapiens
atggctgtgaccaaa

SEQ ID NO: 1956696 - DNA, 15 bp, Homo sapiens
tggctgtgaccaaaa

SEQ ID NO: 1956697 - DNA, 15 bp, Homo sapiens
ggctgtgaccaaaat

SEQ ID NO: 1956698 - DNA, 15 bp, Homo sapiens
gctgtgaccaaaatg

SEQ ID NO: 1956699 - DNA, 15 bp, Homo sapiens
ctgtgaccaaaatgc

SEQ ID NO: 1956700 - DNA, 15 bp, Homo sapiens
tgtgaccaaaatgct

SEQ ID NO: 1956701 - DNA, 15 bp, Homo sapiens
gtgaccaaaatgctg

SEQ ID NO: 1956702 - DNA, 15 bp, Homo sapiens
tgaccaaaatgctga

SEQ ID NO: 1956703 - DNA, 15 bp, Homo sapiens
gaccaaaatgctgat

SEQ ID NO: 1956704 - DNA, 15 bp, Homo sapiens
accaaaatgctgata

SEQ ID NO: 1956705 - DNA, 15 bp, Homo sapiens
ccaaaatgctgatag

SEQ ID NO: 1956706 - DNA, 15 bp, Homo sapiens
caaaatgctgatagt

SEQ ID NO: 1956707 - DNA, 15 bp, Homo sapiens
aaaatgctgatagtg

SEQ ID NO: 1956708 - DNA, 15 bp, Homo sapiens
aaatgctgatagtga

SEQ ID NO: 1956709 - DNA, 15 bp, Homo sapiens
aatgctgatagtgat

SEQ ID NO: 1956710 - DNA, 15 bp, Homo sapiens
atgctgatagtgata

SEQ ID NO: 1956711 - DNA, 15 bp, Homo sapiens
tgctgatagtgatat

SEQ ID NO: 1956712 - DNA, 15 bp, Homo sapiens
gctgatagtgatatc

SEQ ID NO: 1956713 - DNA, 15 bp, Homo sapiens
ctgatagtgatatcg

SEQ ID NO: 1956714 - DNA, 15 bp, Homo sapiens
tgatagtgatatcga

SEQ ID NO: 1956715 - DNA, 15 bp, Homo sapiens
gatagtgatatcgac

SEQ ID NO: 1956716 - DNA, 15 bp, Homo sapiens
atagtgatatcgaca

SEQ ID NO: 1956717 - DNA, 15 bp, Homo sapiens
tagtgatatcgacag

SEQ ID NO: 1956718 - DNA, 15 bp, Homo sapiens
agtgatatcgacagt

SEQ ID NO: 1956719 - DNA, 15 bp, Homo sapiens
gtgatatcgacagtg

SEQ ID NO: 1956720 - DNA, 15 bp, Homo sapiens
tgatatcgacagtga

SEQ ID NO: 1956721 - DNA, 15 bp, Homo sapiens
gatatcgacagtgac

SEQ ID NO: 1956722 - DNA, 15 bp, Homo sapiens
atatcgacagtgacg

SEQ ID NO: 1956723 - DNA, 15 bp, Homo sapiens
tatcgacagtgacgt

SEQ ID NO: 1956724 - DNA, 15 bp, Homo sapiens
atcgacagtgacgtc

SEQ ID NO: 1956725 - DNA, 15 bp, Homo sapiens
tcgacagtgacgtcc

SEQ ID NO: 1956726 - DNA, 15 bp, Homo sapiens
cgacagtgacgtcca

SEQ ID NO: 1956727 - DNA, 15 bp, Homo sapiens
gacagtgacgtccag

SEQ ID NO: 1956728 - DNA, 15 bp, Homo sapiens
acagtgacgtccagg

SEQ ID NO: 1956729 - DNA, 15 bp, Homo sapiens
cagtgacgtccaggc

SEQ ID NO: 1956730 - DNA, 15 bp, Homo sapiens
agtgacgtccaggct

SEQ ID NO: 1956731 - DNA, 15 bp, Homo sapiens
gtgacgtccaggctg

SEQ ID NO: 1956732 - DNA, 15 bp, Homo sapiens
tgacgtccaggctga

SEQ ID NO: 1956733 - DNA, 15 bp, Homo sapiens
gacgtccaggctgag

SEQ ID NO: 1956734 - DNA, 15 bp, Homo sapiens
acgtccaggctgagg

SEQ ID NO: 1956735 - DNA, 15 bp, Homo sapiens
cgtccaggctgagga

SEQ ID NO: 1956736 - DNA, 15 bp, Homo sapiens
gtccaggctgaggag

SEQ ID NO: 1956737 - DNA, 15 bp, Homo sapiens
tccaggctgaggagg

SEQ ID NO: 1956738 - DNA, 15 bp, Homo sapiens
ccaggctgaggaggt

SEQ ID NO: 1956739 - DNA, 15 bp, Homo sapiens
caggctgaggaggtc

SEQ ID NO: 1956740 - DNA, 15 bp, Homo sapiens
aggctgaggaggtct

SEQ ID NO: 1956741 - DNA, 15 bp, Homo sapiens
ggctgaggaggtctc

SEQ ID NO: 1956742 - DNA, 15 bp, Homo sapiens
gctgaggaggtctca

SEQ ID NO: 1956743 - DNA, 15 bp, Homo sapiens
ctgaggaggtctcag

SEQ ID NO: 1956744 - DNA, 15 bp, Homo sapiens
tgaggaggtctcaga

SEQ ID NO: 1956745 - DNA, 15 bp, Homo sapiens
gaggaggtctcagat

SEQ ID NO: 1956746 - DNA, 15 bp, Homo sapiens
aggaggtctcagatg

SEQ ID NO: 1956747 - DNA, 15 bp, Homo sapiens
ggaggtctcagatgg

SEQ ID NO: 1956748 - DNA, 15 bp, Homo sapiens
gaggtctcagatgga

SEQ ID NO: 1956749 - DNA, 15 bp, Homo sapiens
aggtctcagatggaa

SEQ ID NO: 1956750 - DNA, 15 bp, Homo sapiens
ggtctcagatggaaa

SEQ ID NO: 1956751 - DNA, 15 bp, Homo sapiens
gtctcagatggaaat

SEQ ID NO: 1956752 - DNA, 15 bp, Homo sapiens
tctcagatggaaatg

SEQ ID NO: 1956753 - DNA, 15 bp, Homo sapiens
ctcagatggaaatga

SEQ ID NO: 1956754 - DNA, 15 bp, Homo sapiens
tcagatggaaatgag

SEQ ID NO: 1956755 - DNA, 15 bp, Homo sapiens
cagatggaaatgagg

SEQ ID NO: 1956756 - DNA, 15 bp, Homo sapiens
agatggaaatgagga

SEQ ID NO: 1956757 - DNA, 15 bp, Homo sapiens
gatggaaatgaggaa

SEQ ID NO: 1956758 - DNA, 15 bp, Homo sapiens
atggaaatgaggaac

SEQ ID NO: 1956759 - DNA, 15 bp, Homo sapiens
tggaaatgaggaact

SEQ ID NO: 1956760 - DNA, 15 bp, Homo sapiens
ggaaatgaggaactt

SEQ ID NO: 1956761 - DNA, 15 bp, Homo sapiens
gaaatgaggaactta

SEQ ID NO: 1956762 - DNA, 15 bp, Homo sapiens
aaatgaggaacttat

SEQ ID NO: 1956763 - DNA, 15 bp, Homo sapiens
aatgaggaacttatt

SEQ ID NO: 1956764 - DNA, 15 bp, Homo sapiens
atgaggaacttattg

SEQ ID NO: 1956765 - DNA, 15 bp, Homo sapiens
tgaggaacttattgg

SEQ ID NO: 1956766 - DNA, 15 bp, Homo sapiens
gaggaacttattggg

SEQ ID NO: 1956767 - DNA, 15 bp, Homo sapiens
aggaacttattggga

SEQ ID NO: 1956768 - DNA, 15 bp, Homo sapiens
ggaacttattgggaa

SEQ ID NO: 1956769 - DNA, 15 bp, Homo sapiens
gaacttattgggaac

SEQ ID NO: 1956770 - DNA, 15 bp, Homo sapiens
aacttattgggaact

SEQ ID NO: 1956771 - DNA, 15 bp, Homo sapiens
acttattgggaactg

SEQ ID NO: 1956772 - DNA, 15 bp, Homo sapiens
cttattgggaactgg

SEQ ID NO: 1956773 - DNA, 15 bp, Homo sapiens
ttattgggaactgga

SEQ ID NO: 1956774 - DNA, 15 bp, Homo sapiens
tattgggaactggag

SEQ ID NO: 1956775 - DNA, 15 bp, Homo sapiens
attgggaactggagt

SEQ ID NO: 1956776 - DNA, 15 bp, Homo sapiens
ttgggaactggagta

SEQ ID NO: 1956777 - DNA, 15 bp, Homo sapiens
tgggaactggagtaa

SEQ ID NO: 1956778 - DNA, 15 bp, Homo sapiens
gggaactggagtaaa

SEQ ID NO: 1956779 - DNA, 15 bp, Homo sapiens
ggaactggagtaaag

SEQ ID NO: 1956780 - DNA, 15 bp, Homo sapiens
gaactggagtaaagg

SEQ ID NO: 1956781 - DNA, 15 bp, Homo sapiens
aactggagtaaaggt

SEQ ID NO: 1956782 - DNA, 15 bp, Homo sapiens
actggagtaaaggta

SEQ ID NO: 1956783 - DNA, 15 bp, Homo sapiens
ctggagtaaaggtaa

SEQ ID NO: 1956784 - DNA, 15 bp, Homo sapiens
tggagtaaaggtaac

SEQ ID NO: 1956785 - DNA, 15 bp, Homo sapiens
ggagtaaaggtaact

SEQ ID NO: 1956786 - DNA, 15 bp, Homo sapiens
gagtaaaggtaactc

SEQ ID NO: 1956787 - DNA, 15 bp, Homo sapiens
agtaaaggtaactct

SEQ ID NO: 1956788 - DNA, 15 bp, Homo sapiens
gtaaaggtaactctt

SEQ ID NO: 1956789 - DNA, 15 bp, Homo sapiens
taaaggtaactcttg

SEQ ID NO: 1956790 - DNA, 15 bp, Homo sapiens
aaaggtaactcttga

SEQ ID NO: 1956791 - DNA, 15 bp, Homo sapiens
aaggtaactcttgat

SEQ ID NO: 1956792 - DNA, 15 bp, Homo sapiens
aggtaactcttgata

SEQ ID NO: 1956793 - DNA, 15 bp, Homo sapiens
ggtaactcttgatat

SEQ ID NO: 1956794 - DNA, 15 bp, Homo sapiens
gtaactcttgatatg

SEQ ID NO: 1956795 - DNA, 15 bp, Homo sapiens
taactcttgatatgc

SEQ ID NO: 1956796 - DNA, 15 bp, Homo sapiens
aactcttgatatgct

SEQ ID NO: 1956797 - DNA, 15 bp, Homo sapiens
actcttgatatgctt

SEQ ID NO: 1956798 - DNA, 15 bp, Homo sapiens
ctcttgatatgcttt

SEQ ID NO: 1956799 - DNA, 15 bp, Homo sapiens
tcttgatatgcttta

SEQ ID NO: 1956800 - DNA, 15 bp, Homo sapiens
cttgatatgctttag

SEQ ID NO: 1956801 - DNA, 15 bp, Homo sapiens
ttgatatgctttagc

SEQ ID NO: 1956802 - DNA, 15 bp, Homo sapiens
tgatatgctttagca

SEQ ID NO: 1956803 - DNA, 15 bp, Homo sapiens
gatatgctttagcaa

SEQ ID NO: 1956804 - DNA, 15 bp, Homo sapiens
atatgctttagcaaa

SEQ ID NO: 1956805 - DNA, 15 bp, Homo sapiens
tatgctttagcaaag

SEQ ID NO: 1956806 - DNA, 15 bp, Homo sapiens
atgctttagcaaaga

SEQ ID NO: 1956807 - DNA, 15 bp, Homo sapiens
tgctttagcaaagag

SEQ ID NO: 1956808 - DNA, 15 bp, Homo sapiens
gctttagcaaagaga

SEQ ID NO: 1956809 - DNA, 15 bp, Homo sapiens
ctttagcaaagagat

SEQ ID NO: 1956810 - DNA, 15 bp, Homo sapiens
tttagcaaagagatg

SEQ ID NO: 1956811 - DNA, 15 bp, Homo sapiens
ttagcaaagagatgg

SEQ ID NO: 1956812 - DNA, 15 bp, Homo sapiens
tagcaaagagatggc

SEQ ID NO: 1956813 - DNA, 15 bp, Homo sapiens
agcaaagagatggca

SEQ ID NO: 1956814 - DNA, 15 bp, Homo sapiens
gcaaagagatggcag

SEQ ID NO: 1956815 - DNA, 15 bp, Homo sapiens
caaagagatggcagc

SEQ ID NO: 1956816 - DNA, 15 bp, Homo sapiens
aaagagatggcagca

SEQ ID NO: 1956817 - DNA, 15 bp, Homo sapiens
aagagatggcagcat

SEQ ID NO: 1956818 - DNA, 15 bp, Homo sapiens
agagatggcagcatt

SEQ ID NO: 1956819 - DNA, 15 bp, Homo sapiens
gagatggcagcattg

SEQ ID NO: 1956820 - DNA, 15 bp, Homo sapiens
agatggcagcattgt

SEQ ID NO: 1956821 - DNA, 15 bp, Homo sapiens
gatggcagcattgtg

SEQ ID NO: 1956822 - DNA, 15 bp, Homo sapiens
atggcagcattgtgc

SEQ ID NO: 1956823 - DNA, 15 bp, Homo sapiens
tggcagcattgtgcc

SEQ ID NO: 1956824 - DNA, 15 bp, Homo sapiens
ggcagcattgtgccc

SEQ ID NO: 1956825 - DNA, 15 bp, Homo sapiens
gcagcattgtgcccc

SEQ ID NO: 1956826 - DNA, 15 bp, Homo sapiens
cagcattgtgcccct

SEQ ID NO: 1956827 - DNA, 15 bp, Homo sapiens
agcattgtgcccctg

SEQ ID NO: 1956828 - DNA, 15 bp, Homo sapiens
gcattgtgcccctgc

SEQ ID NO: 1956829 - DNA, 15 bp, Homo sapiens
cattgtgcccctgct

SEQ ID NO: 1956830 - DNA, 15 bp, Homo sapiens
attgtgcccctgctc

SEQ ID NO: 1956831 - DNA, 15 bp, Homo sapiens
ttgtgcccctgctct

SEQ ID NO: 1956832 - DNA, 15 bp, Homo sapiens
tgtgcccctgctcta

SEQ ID NO: 1956833 - DNA, 15 bp, Homo sapiens
gtgcccctgctctag

SEQ ID NO: 1956834 - DNA, 15 bp, Homo sapiens
tgcccctgctctagg

SEQ ID NO: 1956835 - DNA, 15 bp, Homo sapiens
gcccctgctctaggg

SEQ ID NO: 1956836 - DNA, 15 bp, Homo sapiens
cccctgctctaggga

SEQ ID NO: 1956837 - DNA, 15 bp, Homo sapiens
ccctgctctagggat

SEQ ID NO: 1956838 - DNA, 15 bp, Homo sapiens
cctgctctagggatc

SEQ ID NO: 1956839 - DNA, 15 bp, Homo sapiens
ctgctctagggatct

SEQ ID NO: 1956840 - DNA, 15 bp, Homo sapiens
tgctctagggatctg

SEQ ID NO: 1956841 - DNA, 15 bp, Homo sapiens
gctctagggatctgt

SEQ ID NO: 1956842 - DNA, 15 bp, Homo sapiens
ctctagggatctgtg

SEQ ID NO: 1956843 - DNA, 15 bp, Homo sapiens
tctagggatctgtgg

SEQ ID NO: 1956844 - DNA, 15 bp, Homo sapiens
ctagggatctgtgga

SEQ ID NO: 1956845 - DNA, 15 bp, Homo sapiens
tagggatctgtggaa

SEQ ID NO: 1956846 - DNA, 15 bp, Homo sapiens
agggatctgtggaac

SEQ ID NO: 1956847 - DNA, 15 bp, Homo sapiens
gggatctgtggaact

SEQ ID NO: 1956848 - DNA, 15 bp, Homo sapiens
ggatctgtggaactt

SEQ ID NO: 1956849 - DNA, 15 bp, Homo sapiens
gatctgtggaacttt

SEQ ID NO: 1956850 - DNA, 15 bp, Homo sapiens
atctgtggaactttg

SEQ ID NO: 1956851 - DNA, 15 bp, Homo sapiens
tctgtggaactttga

SEQ ID NO: 1956852 - DNA, 15 bp, Homo sapiens
ctgtggaactttgaa

SEQ ID NO: 1956853 - DNA, 15 bp, Homo sapiens
tgtggaactttgaac

SEQ ID NO: 1956854 - DNA, 15 bp, Homo sapiens
gtggaactttgaact

SEQ ID NO: 1956855 - DNA, 15 bp, Homo sapiens
tggaactttgaactt

SEQ ID NO: 1956856 - DNA, 15 bp, Homo sapiens
ggaactttgaacttg

SEQ ID NO: 1956857 - DNA, 15 bp, Homo sapiens
gaactttgaacttga

SEQ ID NO: 1956858 - DNA, 15 bp, Homo sapiens
aactttgaacttgag

SEQ ID NO: 1956859 - DNA, 15 bp, Homo sapiens
actttgaacttgaga

SEQ ID NO: 1956860 - DNA, 15 bp, Homo sapiens
ctttgaacttgagag

SEQ ID NO: 1956861 - DNA, 15 bp, Homo sapiens
tttgaacttgagagt

SEQ ID NO: 1956862 - DNA, 15 bp, Homo sapiens
ttgaacttgagagtg

SEQ ID NO: 1956863 - DNA, 15 bp, Homo sapiens
tgaacttgagagtga

SEQ ID NO: 1956864 - DNA, 15 bp, Homo sapiens
gaacttgagagtgat

SEQ ID NO: 1956865 - DNA, 15 bp, Homo sapiens
aacttgagagtgatg

SEQ ID NO: 1956866 - DNA, 15 bp, Homo sapiens
acttgagagtgatga

SEQ ID NO: 1956867 - DNA, 15 bp, Homo sapiens
cttgagagtgatgat

SEQ ID NO: 1956868 - DNA, 15 bp, Homo sapiens
ttgagagtgatgatt

SEQ ID NO: 1956869 - DNA, 15 bp, Homo sapiens
tgagagtgatgattt

SEQ ID NO: 1956870 - DNA, 15 bp, Homo sapiens
gagagtgatgattta

SEQ ID NO: 1956871 - DNA, 15 bp, Homo sapiens
agagtgatgatttag

SEQ ID NO: 1956872 - DNA, 15 bp, Homo sapiens
gagtgatgatttaga

SEQ ID NO: 1956873 - DNA, 15 bp, Homo sapiens
agtgatgatttagaa

SEQ ID NO: 1956874 - DNA, 15 bp, Homo sapiens
gtgatgatttagaaa

SEQ ID NO: 1956875 - DNA, 15 bp, Homo sapiens
tgatgatttagaaaa

SEQ ID NO: 1956876 - DNA, 15 bp, Homo sapiens
gatgatttagaaaaa

SEQ ID NO: 1956877 - DNA, 15 bp, Homo sapiens
atgatttagaaaaaa

SEQ ID NO: 1956878 - DNA, 15 bp, Homo sapiens
tgatttagaaaaaat

SEQ ID NO: 1956879 - DNA, 15 bp, Homo sapiens
gatttagaaaaaatg

SEQ ID NO: 1956880 - DNA, 15 bp, Homo sapiens
atttagaaaaaatgg

SEQ ID NO: 1956881 - DNA, 15 bp, Homo sapiens
tttagaaaaaatggc

SEQ ID NO: 1956882 - DNA, 15 bp, Homo sapiens
ttagaaaaaatggca

SEQ ID NO: 1956883 - DNA, 15 bp, Homo sapiens
tagaaaaaatggcag

SEQ ID NO: 1956884 - DNA, 15 bp, Homo sapiens
agaaaaaatggcaga

SEQ ID NO: 1956885 - DNA, 15 bp, Homo sapiens
gaaaaaatggcagat

SEQ ID NO: 1956886 - DNA, 15 bp, Homo sapiens
aaaaaatggcagatg

SEQ ID NO: 1956887 - DNA, 15 bp, Homo sapiens
aaaaatggcagatga

SEQ ID NO: 1956888 - DNA, 15 bp, Homo sapiens
aaaatggcagatgaa

SEQ ID NO: 1956889 - DNA, 15 bp, Homo sapiens
aaatggcagatgaaa

SEQ ID NO: 1956890 - DNA, 15 bp, Homo sapiens
aatggcagatgaaat

SEQ ID NO: 1956891 - DNA, 15 bp, Homo sapiens
atggcagatgaaatt

SEQ ID NO: 1956892 - DNA, 15 bp, Homo sapiens
tggcagatgaaattt

SEQ ID NO: 1956893 - DNA, 15 bp, Homo sapiens
ggcagatgaaatttc

SEQ ID NO: 1956894 - DNA, 15 bp, Homo sapiens
gcagatgaaatttct

SEQ ID NO: 1956895 - DNA, 15 bp, Homo sapiens
cagatgaaatttcta

SEQ ID NO: 1956896 - DNA, 15 bp, Homo sapiens
agatgaaatttctaa

SEQ ID NO: 1956897 - DNA, 15 bp, Homo sapiens
gatgaaatttctaag

SEQ ID NO: 1956898 - DNA, 15 bp, Homo sapiens
atgaaatttctaagt

SEQ ID NO: 1956899 - DNA, 15 bp, Homo sapiens
tgaaatttctaagtg

SEQ ID NO: 1956900 - DNA, 15 bp, Homo sapiens
gaaatttctaagtgc

SEQ ID NO: 1956901 - DNA, 15 bp, Homo sapiens
aaatttctaagtgca

SEQ ID NO: 1956902 - DNA, 15 bp, Homo sapiens
aatttctaagtgcag

SEQ ID NO: 1956903 - DNA, 15 bp, Homo sapiens
atttctaagtgcagc

SEQ ID NO: 1956904 - DNA, 15 bp, Homo sapiens
tttctaagtgcagct

SEQ ID NO: 1956905 - DNA, 15 bp, Homo sapiens
ttctaagtgcagctt

SEQ ID NO: 1956906 - DNA, 15 bp, Homo sapiens
tctaagtgcagcttg

SEQ ID NO: 1956907 - DNA, 15 bp, Homo sapiens
ctaagtgcagcttgc

SEQ ID NO: 1956908 - DNA, 15 bp, Homo sapiens
taagtgcagcttgct

SEQ ID NO: 1956909 - DNA, 15 bp, Homo sapiens
aagtgcagcttgctc

SEQ ID NO: 1956910 - DNA, 15 bp, Homo sapiens
agtgcagcttgctct

SEQ ID NO: 1956911 - DNA, 15 bp, Homo sapiens
gtgcagcttgctctt

SEQ ID NO: 1956912 - DNA, 15 bp, Homo sapiens
tgcagcttgctcttc

SEQ ID NO: 1956913 - DNA, 15 bp, Homo sapiens
gcagcttgctcttca

SEQ ID NO: 1956914 - DNA, 15 bp, Homo sapiens
cagcttgctcttcag

SEQ ID NO: 1956915 - DNA, 15 bp, Homo sapiens
agcttgctcttcagt

SEQ ID NO: 1956916 - DNA, 15 bp, Homo sapiens
gcttgctcttcagtg

SEQ ID NO: 1956917 - DNA, 15 bp, Homo sapiens
cttgctcttcagtga

SEQ ID NO: 1956918 - DNA, 15 bp, Homo sapiens
ttgctcttcagtgaa

SEQ ID NO: 1956919 - DNA, 15 bp, Homo sapiens
tgctcttcagtgaac

SEQ ID NO: 1956920 - DNA, 15 bp, Homo sapiens
gctcttcagtgaaca

SEQ ID NO: 1956921 - DNA, 15 bp, Homo sapiens
ctcttcagtgaacac

SEQ ID NO: 1956922 - DNA, 15 bp, Homo sapiens
tcttcagtgaacacc

SEQ ID NO: 1956923 - DNA, 15 bp, Homo sapiens
cttcagtgaacacca

SEQ ID NO: 1956924 - DNA, 15 bp, Homo sapiens
ttcagtgaacaccaa

SEQ ID NO: 1956925 - DNA, 15 bp, Homo sapiens
tcagtgaacaccaat

SEQ ID NO: 1956926 - DNA, 15 bp, Homo sapiens
cagtgaacaccaata

SEQ ID NO: 1956927 - DNA, 15 bp, Homo sapiens
agtgaacaccaataa

SEQ ID NO: 1956928 - DNA, 15 bp, Homo sapiens
gtgaacaccaataaa

SEQ ID NO: 1956929 - DNA, 15 bp, Homo sapiens
tgaacaccaataaat

SEQ ID NO: 1956930 - DNA, 15 bp, Homo sapiens
gaacaccaataaata

SEQ ID NO: 1956931 - DNA, 15 bp, Homo sapiens
aacaccaataaataa

SEQ ID NO: 1956932 - DNA, 15 bp, Homo sapiens
acaccaataaataag

SEQ ID NO: 1956933 - DNA, 15 bp, Homo sapiens
caccaataaataagt

SEQ ID NO: 1956934 - DNA, 15 bp, Homo sapiens
accaataaataagta

SEQ ID NO: 1956935 - DNA, 15 bp, Homo sapiens
ccaataaataagtat

SEQ ID NO: 1956936 - DNA, 15 bp, Homo sapiens
caataaataagtatt

SEQ ID NO: 1956937 - DNA, 15 bp, Homo sapiens
aataaataagtattc

SEQ ID NO: 1956938 - DNA, 15 bp, Homo sapiens
ataaataagtattca

SEQ ID NO: 1956939 - DNA, 15 bp, Homo sapiens
taaataagtattcag

SEQ ID NO: 1956940 - DNA, 15 bp, Homo sapiens
aaataagtattcaga

SEQ ID NO: 1956941 - DNA, 15 bp, Homo sapiens
aataagtattcagac

SEQ ID NO: 1956942 - DNA, 15 bp, Homo sapiens
ataagtattcagaca

SEQ ID NO: 1956943 - DNA, 15 bp, Homo sapiens
taagtattcagacag

SEQ ID NO: 1956944 - DNA, 15 bp, Homo sapiens
aagtattcagacagt

SEQ ID NO: 1956945 - DNA, 15 bp, Homo sapiens
agtattcagacagtt

SEQ ID NO: 1956946 - DNA, 15 bp, Homo sapiens
gtattcagacagtta

SEQ ID NO: 1956947 - DNA, 15 bp, Homo sapiens
tattcagacagttac

SEQ ID NO: 1956948 - DNA, 15 bp, Homo sapiens
attcagacagttaca

SEQ ID NO: 1956949 - DNA, 15 bp, Homo sapiens
ttcagacagttacag

SEQ ID NO: 1956950 - DNA, 15 bp, Homo sapiens
tcagacagttacagc

SEQ ID NO: 1956951 - DNA, 15 bp, Homo sapiens
cagacagttacagct

SEQ ID NO: 1956952 - DNA, 15 bp, Homo sapiens
agacagttacagctg

SEQ ID NO: 1956953 - DNA, 15 bp, Homo sapiens
gacagttacagctga

SEQ ID NO: 1956954 - DNA, 15 bp, Homo sapiens
acagttacagctgaa

SEQ ID NO: 1956955 - DNA, 15 bp, Homo sapiens
cagttacagctgaac

SEQ ID NO: 1956956 - DNA, 15 bp, Homo sapiens
agttacagctgaaca

SEQ ID NO: 1956957 - DNA, 15 bp, Homo sapiens
gttacagctgaacag

SEQ ID NO: 1956958 - DNA, 15 bp, Homo sapiens
ttacagctgaacagg

SEQ ID NO: 1956959 - DNA, 15 bp, Homo sapiens
tacagctgaacaggg

SEQ ID NO: 1956960 - DNA, 15 bp, Homo sapiens
acagctgaacagggc

SEQ ID NO: 1956961 - DNA, 15 bp, Homo sapiens
cagctgaacagggcg

SEQ ID NO: 1956962 - DNA, 15 bp, Homo sapiens
agctgaacagggcgg

SEQ ID NO: 1956963 - DNA, 15 bp, Homo sapiens
gctgaacagggcggg

SEQ ID NO: 1956964 - DNA, 15 bp, Homo sapiens
ctgaacagggcgggg

SEQ ID NO: 1956965 - DNA, 15 bp, Homo sapiens
tgaacagggcgggga

SEQ ID NO: 1956966 - DNA, 15 bp, Homo sapiens
gaacagggcggggag

SEQ ID NO: 1956967 - DNA, 15 bp, Homo sapiens
aacagggcggggagc

SEQ ID NO: 1956968 - DNA, 15 bp, Homo sapiens
acagggcggggagca

SEQ ID NO: 1956969 - DNA, 15 bp, Homo sapiens
cagggcggggagcag

SEQ ID NO: 1956970 - DNA, 15 bp, Homo sapiens
agggcggggagcagc

SEQ ID NO: 1956971 - DNA, 15 bp, Homo sapiens
gggcggggagcagct

SEQ ID NO: 1956972 - DNA, 15 bp, Homo sapiens
ggcggggagcagctc

SEQ ID NO: 1956973 - DNA, 15 bp, Homo sapiens
gcggggagcagctcc

SEQ ID NO: 1956974 - DNA, 15 bp, Homo sapiens
cggggagcagctcct

SEQ ID NO: 1956975 - DNA, 15 bp, Homo sapiens
ggggagcagctcctc

SEQ ID NO: 1956976 - DNA, 15 bp, Homo sapiens
gggagcagctcctcc

SEQ ID NO: 1956977 - DNA, 15 bp, Homo sapiens
ggagcagctcctcca

SEQ ID NO: 1956978 - DNA, 15 bp, Homo sapiens
gagcagctcctccaa

SEQ ID NO: 1956979 - DNA, 15 bp, Homo sapiens
agcagctcctccaag

SEQ ID NO: 1956980 - DNA, 15 bp, Homo sapiens
gcagctcctccaagg

SEQ ID NO: 1956981 - DNA, 15 bp, Homo sapiens
cagctcctccaaggg

SEQ ID NO: 1956982 - DNA, 15 bp, Homo sapiens
agctcctccaaggga

SEQ ID NO: 1956983 - DNA, 15 bp, Homo sapiens
gctcctccaagggag

SEQ ID NO: 1956984 - DNA, 15 bp, Homo sapiens
ctcctccaagggagt

SEQ ID NO: 1956985 - DNA, 15 bp, Homo sapiens
tcctccaagggagtg

SEQ ID NO: 1956986 - DNA, 15 bp, Homo sapiens
cctccaagggagtgc

SEQ ID NO: 1956987 - DNA, 15 bp, Homo sapiens
ctccaagggagtgct

SEQ ID NO: 1956988 - DNA, 15 bp, Homo sapiens
tccaagggagtgctg

SEQ ID NO: 1956989 - DNA, 15 bp, Homo sapiens
ccaagggagtgctgc

SEQ ID NO: 1956990 - DNA, 15 bp, Homo sapiens
caagggagtgctgct

SEQ ID NO: 1956991 - DNA, 15 bp, Homo sapiens
aagggagtgctgctt

SEQ ID NO: 1956992 - DNA, 15 bp, Homo sapiens
agggagtgctgcttt

SEQ ID NO: 1956993 - DNA, 15 bp, Homo sapiens
gggagtgctgcttta

SEQ ID NO: 1956994 - DNA, 15 bp, Homo sapiens
ggagtgctgctttaa

SEQ ID NO: 1956995 - DNA, 15 bp, Homo sapiens
gagtgctgctttaag

SEQ ID NO: 1956996 - DNA, 15 bp, Homo sapiens
agtgctgctttaaga

SEQ ID NO: 1956997 - DNA, 15 bp, Homo sapiens
gtgctgctttaagat

SEQ ID NO: 1956998 - DNA, 15 bp, Homo sapiens
tgctgctttaagatc

SEQ ID NO: 1956999 - DNA, 15 bp, Homo sapiens
gctgctttaagatct

SEQ ID NO: 1957000 - DNA, 15 bp, Homo sapiens
ctgctttaagatctg

SEQ ID NO: 1957001 - DNA, 15 bp, Homo sapiens
tgctttaagatctgt

SEQ ID NO: 1957002 - DNA, 15 bp, Homo sapiens
gctttaagatctgtc

SEQ ID NO: 1957003 - DNA, 15 bp, Homo sapiens
ctttaagatctgtct

SEQ ID NO: 1957004 - DNA, 15 bp, Homo sapiens
tttaagatctgtctg

SEQ ID NO: 1957005 - DNA, 15 bp, Homo sapiens
ttaagatctgtctgc

SEQ ID NO: 1957006 - DNA, 15 bp, Homo sapiens
taagatctgtctgcc

SEQ ID NO: 1957007 - DNA, 15 bp, Homo sapiens
aagatctgtctgcca

SEQ ID NO: 1957008 - DNA, 15 bp, Homo sapiens
agatctgtctgccag

SEQ ID NO: 1957009 - DNA, 15 bp, Homo sapiens
gatctgtctgccagg

SEQ ID NO: 1957010 - DNA, 15 bp, Homo sapiens
atctgtctgccaggt

SEQ ID NO: 1957011 - DNA, 15 bp, Homo sapiens
tctgtctgccaggta

SEQ ID NO: 1957012 - DNA, 15 bp, Homo sapiens
ctgtctgccaggtat

SEQ ID NO: 1957013 - DNA, 15 bp, Homo sapiens
tgtctgccaggtatt

SEQ ID NO: 1957014 - DNA, 15 bp, Homo sapiens
gtctgccaggtattt

SEQ ID NO: 1957015 - DNA, 15 bp, Homo sapiens
tctgccaggtattta

SEQ ID NO: 1957016 - DNA, 15 bp, Homo sapiens
ctgccaggtatttac

SEQ ID NO: 1957017 - DNA, 15 bp, Homo sapiens
tgccaggtatttact

SEQ ID NO: 1957018 - DNA, 15 bp, Homo sapiens
gccaggtatttactg

SEQ ID NO: 1957019 - DNA, 15 bp, Homo sapiens
ccaggtatttactga

SEQ ID NO: 1957020 - DNA, 15 bp, Homo sapiens
caggtatttactgag

SEQ ID NO: 1957021 - DNA, 15 bp, Homo sapiens
aggtatttactgaga

SEQ ID NO: 1957022 - DNA, 15 bp, Homo sapiens
ggtatttactgagaa

SEQ ID NO: 1957023 - DNA, 15 bp, Homo sapiens
gtatttactgagaag

SEQ ID NO: 1957024 - DNA, 15 bp, Homo sapiens
tatttactgagaagg

SEQ ID NO: 1957025 - DNA, 15 bp, Homo sapiens
atttactgagaaggc

SEQ ID NO: 1957026 - DNA, 15 bp, Homo sapiens
tttactgagaaggct

SEQ ID NO: 1957027 - DNA, 15 bp, Homo sapiens
ttactgagaaggctt

SEQ ID NO: 1957028 - DNA, 15 bp, Homo sapiens
tactgagaaggcttg

SEQ ID NO: 1957029 - DNA, 15 bp, Homo sapiens
actgagaaggcttgt

SEQ ID NO: 1957030 - DNA, 15 bp, Homo sapiens
ctgagaaggcttgtt

SEQ ID NO: 1957031 - DNA, 15 bp, Homo sapiens
tgagaaggcttgtta

SEQ ID NO: 1957032 - DNA, 15 bp, Homo sapiens
gagaaggcttgttaa

SEQ ID NO: 1957033 - DNA, 15 bp, Homo sapiens
agaaggcttgttaaa

SEQ ID NO: 1957034 - DNA, 15 bp, Homo sapiens
aaggcttgttaaact

SEQ ID NO: 1957035 - DNA, 15 bp, Homo sapiens
aggcttgttaaacta

SEQ ID NO: 1957036 - DNA, 15 bp, Homo sapiens
ggcttgttaaactac

SEQ ID NO: 1957037 - DNA, 15 bp, Homo sapiens
gcttgttaaactaca

SEQ ID NO: 1957038 - DNA, 15 bp, Homo sapiens
cttgttaaactacag

SEQ ID NO: 1957039 - DNA, 15 bp, Homo sapiens
ttgttaaactacagt

SEQ ID NO: 1957040 - DNA, 15 bp, Homo sapiens
tgttaaactacagtt

SEQ ID NO: 1957041 - DNA, 15 bp, Homo sapiens
gttaaactacagttt

SEQ ID NO: 1957042 - DNA, 15 bp, Homo sapiens
ttaaactacagttta

SEQ ID NO: 1957043 - DNA, 15 bp, Homo sapiens
taaactacagtttag

SEQ ID NO: 1957044 - DNA, 15 bp, Homo sapiens
aaactacagtttaga

SEQ ID NO: 1957045 - DNA, 15 bp, Homo sapiens
aactacagtttagac

SEQ ID NO: 1957046 - DNA, 15 bp, Homo sapiens
actacagtttagaca

SEQ ID NO: 1957047 - DNA, 15 bp, Homo sapiens
ctacagtttagacaa

SEQ ID NO: 1957048 - DNA, 15 bp, Homo sapiens
tacagtttagacaaa

SEQ ID NO: 1957049 - DNA, 15 bp, Homo sapiens
acagtttagacaaat

SEQ ID NO: 1957050 - DNA, 15 bp, Homo sapiens
cagtttagacaaata

SEQ ID NO: 1957051 - DNA, 15 bp, Homo sapiens
agtttagacaaataa

SEQ ID NO: 1957052 - DNA, 15 bp, Homo sapiens
gtttagacaaataag

SEQ ID NO: 1957053 - DNA, 15 bp, Homo sapiens
tttagacaaataaga

SEQ ID NO: 1957054 - DNA, 15 bp, Homo sapiens
ttagacaaataagaa

SEQ ID NO: 1957055 - DNA, 15 bp, Homo sapiens
tagacaaataagaaa

SEQ ID NO: 1957056 - DNA, 15 bp, Homo sapiens
agacaaataagaaac

SEQ ID NO: 1957057 - DNA, 15 bp, Homo sapiens
gacaaataagaaaca

SEQ ID NO: 1957058 - DNA, 15 bp, Homo sapiens
acaaataagaaacat

SEQ ID NO: 1957059 - DNA, 15 bp, Homo sapiens
caaataagaaacatc

SEQ ID NO: 1957060 - DNA, 15 bp, Homo sapiens
aaataagaaacatcc

SEQ ID NO: 1957061 - DNA, 15 bp, Homo sapiens
aataagaaacatcca

SEQ ID NO: 1957062 - DNA, 15 bp, Homo sapiens
ataagaaacatccac

SEQ ID NO: 1957063 - DNA, 15 bp, Homo sapiens
taagaaacatccacc

SEQ ID NO: 1957064 - DNA, 15 bp, Homo sapiens
aagaaacatccacca

SEQ ID NO: 1957065 - DNA, 15 bp, Homo sapiens
agaaacatccaccag

SEQ ID NO: 1957066 - DNA, 15 bp, Homo sapiens
gaaacatccaccagg

SEQ ID NO: 1957067 - DNA, 15 bp, Homo sapiens
aaacatccaccaggt

SEQ ID NO: 1957068 - DNA, 15 bp, Homo sapiens
aacatccaccaggtg

SEQ ID NO: 1957069 - DNA, 15 bp, Homo sapiens
acatccaccaggtgg

SEQ ID NO: 1957070 - DNA, 15 bp, Homo sapiens
catccaccaggtggc

SEQ ID NO: 1957071 - DNA, 15 bp, Homo sapiens
atccaccaggtggct

SEQ ID NO: 1957072 - DNA, 15 bp, Homo sapiens
tccaccaggtggcta

SEQ ID NO: 1957073 - DNA, 15 bp, Homo sapiens
ccaccaggtggctat

SEQ ID NO: 1957074 - DNA, 15 bp, Homo sapiens
caccaggtggctatt

SEQ ID NO: 1957075 - DNA, 15 bp, Homo sapiens
accaggtggctattt

SEQ ID NO: 1957076 - DNA, 15 bp, Homo sapiens
ccaggtggctatttg

SEQ ID NO: 1957077 - DNA, 15 bp, Homo sapiens
caggtggctatttgg

SEQ ID NO: 1957078 - DNA, 15 bp, Homo sapiens
aggtggctatttggg

SEQ ID NO: 1957079 - DNA, 15 bp, Homo sapiens
ggtggctatttgggg

SEQ ID NO: 1957080 - DNA, 15 bp, Homo sapiens
gtggctatttggggt

SEQ ID NO: 1957081 - DNA, 15 bp, Homo sapiens
tggctatttggggtc

SEQ ID NO: 1957082 - DNA, 15 bp, Homo sapiens
ggctatttggggtcg

SEQ ID NO: 1957083 - DNA, 15 bp, Homo sapiens
gctatttggggtcgg

SEQ ID NO: 1957084 - DNA, 15 bp, Homo sapiens
ctatttggggtcggg

SEQ ID NO: 1957085 - DNA, 15 bp, Homo sapiens
tatttggggtcgggt

SEQ ID NO: 1957086 - DNA, 15 bp, Homo sapiens
atttggggtcgggtc

SEQ ID NO: 1957087 - DNA, 15 bp, Homo sapiens
tttggggtcgggtca

SEQ ID NO: 1957088 - DNA, 15 bp, Homo sapiens
ttggggtcgggtcat

SEQ ID NO: 1957089 - DNA, 15 bp, Homo sapiens
tggggtcgggtcatg

SEQ ID NO: 1957090 - DNA, 15 bp, Homo sapiens
ggggtcgggtcatga

SEQ ID NO: 1957091 - DNA, 15 bp, Homo sapiens
gggtcgggtcatgag

SEQ ID NO: 1957092 - DNA, 15 bp, Homo sapiens
ggtcgggtcatgagg

SEQ ID NO: 1957093 - DNA, 15 bp, Homo sapiens
gtcgggtcatgaggt

SEQ ID NO: 1957094 - DNA, 15 bp, Homo sapiens
tcgggtcatgaggtg

SEQ ID NO: 1957095 - DNA, 15 bp, Homo sapiens
cgggtcatgaggtgc

SEQ ID NO: 1957096 - DNA, 15 bp, Homo sapiens
gggtcatgaggtgca

SEQ ID NO: 1957097 - DNA, 15 bp, Homo sapiens
ggtcatgaggtgcat

SEQ ID NO: 1957098 - DNA, 15 bp, Homo sapiens
gtcatgaggtgcata

SEQ ID NO: 1957099 - DNA, 15 bp, Homo sapiens
tcatgaggtgcatat

SEQ ID NO: 1957100 - DNA, 15 bp, Homo sapiens
catgaggtgcatatg

SEQ ID NO: 1957101 - DNA, 15 bp, Homo sapiens
atgaggtgcatatgg

SEQ ID NO: 1957102 - DNA, 15 bp, Homo sapiens
tgaggtgcatatggc

SEQ ID NO: 1957103 - DNA, 15 bp, Homo sapiens
gaggtgcatatggcc

SEQ ID NO: 1957104 - DNA, 15 bp, Homo sapiens
aggtgcatatggcct

SEQ ID NO: 1957105 - DNA, 15 bp, Homo sapiens
ggtgcatatggcctc

SEQ ID NO: 1957106 - DNA, 15 bp, Homo sapiens
gtgcatatggcctct

SEQ ID NO: 1957107 - DNA, 15 bp, Homo sapiens
tgcatatggcctctg

SEQ ID NO: 1957108 - DNA, 15 bp, Homo sapiens
gcatatggcctctgt

SEQ ID NO: 1957109 - DNA, 15 bp, Homo sapiens
catatggcctctgtt

SEQ ID NO: 1957110 - DNA, 15 bp, Homo sapiens
atatggcctctgttt

SEQ ID NO: 1957111 - DNA, 15 bp, Homo sapiens
tatggcctctgttta

SEQ ID NO: 1957112 - DNA, 15 bp, Homo sapiens
atggcctctgtttat

SEQ ID NO: 1957113 - DNA, 15 bp, Homo sapiens
tggcctctgtttatt

SEQ ID NO: 1957114 - DNA, 15 bp, Homo sapiens
ggcctctgtttatta

SEQ ID NO: 1957115 - DNA, 15 bp, Homo sapiens
gcctctgtttattac

SEQ ID NO: 1957116 - DNA, 15 bp, Homo sapiens
cctctgtttattacg

SEQ ID NO: 1957117 - DNA, 15 bp, Homo sapiens
ctctgtttattacgt

SEQ ID NO: 1957118 - DNA, 15 bp, Homo sapiens
tctgtttattacgtc

SEQ ID NO: 1957119 - DNA, 15 bp, Homo sapiens
ctgtttattacgtct

SEQ ID NO: 1957120 - DNA, 15 bp, Homo sapiens
tgtttattacgtctg

SEQ ID NO: 1957121 - DNA, 15 bp, Homo sapiens
gtttattacgtctga

SEQ ID NO: 1957122 - DNA, 15 bp, Homo sapiens
tttattacgtctgaa

SEQ ID NO: 1957123 - DNA, 15 bp, Homo sapiens
ttattacgtctgaaa

SEQ ID NO: 1957124 - DNA, 15 bp, Homo sapiens
tattacgtctgaaag

SEQ ID NO: 1957125 - DNA, 15 bp, Homo sapiens
attacgtctgaaagc

SEQ ID NO: 1957126 - DNA, 15 bp, Homo sapiens
ttacgtctgaaagca

SEQ ID NO: 1957127 - DNA, 15 bp, Homo sapiens
tacgtctgaaagcac

SEQ ID NO: 1957128 - DNA, 15 bp, Homo sapiens
acgtctgaaagcact

SEQ ID NO: 1957129 - DNA, 15 bp, Homo sapiens
cgtctgaaagcactc

SEQ ID NO: 1957130 - DNA, 15 bp, Homo sapiens
gtctgaaagcactca

SEQ ID NO: 1957131 - DNA, 15 bp, Homo sapiens
tctgaaagcactcaa

SEQ ID NO: 1957132 - DNA, 15 bp, Homo sapiens
ctgaaagcactcaaa

SEQ ID NO: 1957133 - DNA, 15 bp, Homo sapiens
tgaaagcactcaaac

SEQ ID NO: 1957134 - DNA, 15 bp, Homo sapiens
gaaagcactcaaacc

SEQ ID NO: 1957135 - DNA, 15 bp, Homo sapiens
aaagcactcaaacca

SEQ ID NO: 1957136 - DNA, 15 bp, Homo sapiens
aagcactcaaaccac

SEQ ID NO: 1957137 - DNA, 15 bp, Homo sapiens
agcactcaaaccaca

SEQ ID NO: 1957138 - DNA, 15 bp, Homo sapiens
gcactcaaaccacat

SEQ ID NO: 1957139 - DNA, 15 bp, Homo sapiens
cactcaaaccacatt

SEQ ID NO: 1957140 - DNA, 15 bp, Homo sapiens
actcaaaccacattc

SEQ ID NO: 1957141 - DNA, 15 bp, Homo sapiens
ctcaaaccacattct

SEQ ID NO: 1957142 - DNA, 15 bp, Homo sapiens
tcaaaccacattctt

SEQ ID NO: 1957143 - DNA, 15 bp, Homo sapiens
caaaccacattctta

SEQ ID NO: 1957144 - DNA, 15 bp, Homo sapiens
aaaccacattcttag

SEQ ID NO: 1957145 - DNA, 15 bp, Homo sapiens
aaccacattcttagg

SEQ ID NO: 1957146 - DNA, 15 bp, Homo sapiens
accacattcttagga

SEQ ID NO: 1957147 - DNA, 15 bp, Homo sapiens
ccacattcttaggag

SEQ ID NO: 1957148 - DNA, 15 bp, Homo sapiens
cacattcttaggagg

SEQ ID NO: 1957149 - DNA, 15 bp, Homo sapiens
acattcttaggaggc

SEQ ID NO: 1957150 - DNA, 15 bp, Homo sapiens
cattcttaggaggct

SEQ ID NO: 1957151 - DNA, 15 bp, Homo sapiens
attcttaggaggctg

SEQ ID NO: 1957152 - DNA, 15 bp, Homo sapiens
ttcttaggaggctgt

SEQ ID NO: 1957153 - DNA, 15 bp, Homo sapiens
tcttaggaggctgtg

SEQ ID NO: 1957154 - DNA, 15 bp, Homo sapiens
cttaggaggctgtgt

SEQ ID NO: 1957155 - DNA, 15 bp, Homo sapiens
ttaggaggctgtgtt

SEQ ID NO: 1957156 - DNA, 15 bp, Homo sapiens
taggaggctgtgttc

SEQ ID NO: 1957157 - DNA, 15 bp, Homo sapiens
aggaggctgtgttca

SEQ ID NO: 1957158 - DNA, 15 bp, Homo sapiens
ggaggctgtgttcag

SEQ ID NO: 1957159 - DNA, 15 bp, Homo sapiens
gaggctgtgttcagc

SEQ ID NO: 1957160 - DNA, 15 bp, Homo sapiens
aggctgtgttcagca

SEQ ID NO: 1957161 - DNA, 15 bp, Homo sapiens
ggctgtgttcagcac

SEQ ID NO: 1957162 - DNA, 15 bp, Homo sapiens
gctgtgttcagcact

SEQ ID NO: 1957163 - DNA, 15 bp, Homo sapiens
ctgtgttcagcactc

SEQ ID NO: 1957164 - DNA, 15 bp, Homo sapiens
tgtgttcagcactcc

SEQ ID NO: 1957165 - DNA, 15 bp, Homo sapiens
gtgttcagcactcct

SEQ ID NO: 1957166 - DNA, 15 bp, Homo sapiens
tgttcagcactcctt

SEQ ID NO: 1957167 - DNA, 15 bp, Homo sapiens
gttcagcactcctta

SEQ ID NO: 1957168 - DNA, 15 bp, Homo sapiens
ttcagcactccttat

SEQ ID NO: 1957169 - DNA, 15 bp, Homo sapiens
tcagcactccttatc

SEQ ID NO: 1957170 - DNA, 15 bp, Homo sapiens
cagcactccttatca

SEQ ID NO: 1957171 - DNA, 15 bp, Homo sapiens
agcactccttatcac

SEQ ID NO: 1957172 - DNA, 15 bp, Homo sapiens
gcactccttatcaca

SEQ ID NO: 1957173 - DNA, 15 bp, Homo sapiens
cactccttatcacac

SEQ ID NO: 1957174 - DNA, 15 bp, Homo sapiens
actccttatcacaca

SEQ ID NO: 1957175 - DNA, 15 bp, Homo sapiens
ctccttatcacacat

SEQ ID NO: 1957176 - DNA, 15 bp, Homo sapiens
tccttatcacacatc

SEQ ID NO: 1957177 - DNA, 15 bp, Homo sapiens
ccttatcacacatcc

SEQ ID NO: 1957178 - DNA, 15 bp, Homo sapiens
cttatcacacatcct

SEQ ID NO: 1957179 - DNA, 15 bp, Homo sapiens
ttatcacacatcctg

SEQ ID NO: 1957180 - DNA, 15 bp, Homo sapiens
tatcacacatcctgt

SEQ ID NO: 1957181 - DNA, 15 bp, Homo sapiens
atcacacatcctgtt

SEQ ID NO: 1957182 - DNA, 15 bp, Homo sapiens
tcacacatcctgttc

SEQ ID NO: 1957183 - DNA, 15 bp, Homo sapiens
cacacatcctgttcc

SEQ ID NO: 1957184 - DNA, 15 bp, Homo sapiens
acacatcctgttcct

SEQ ID NO: 1957185 - DNA, 15 bp, Homo sapiens
cacatcctgttcctt

SEQ ID NO: 1957186 - DNA, 15 bp, Homo sapiens
acatcctgttccttg

SEQ ID NO: 1957187 - DNA, 15 bp, Homo sapiens
catcctgttccttgt

SEQ ID NO: 1957188 - DNA, 15 bp, Homo sapiens
atcctgttccttgtc

SEQ ID NO: 1957189 - DNA, 15 bp, Homo sapiens
tcctgttccttgtct

SEQ ID NO: 1957190 - DNA, 15 bp, Homo sapiens
cctgttccttgtctt

SEQ ID NO: 1957191 - DNA, 15 bp, Homo sapiens
ctgttccttgtcttg

SEQ ID NO: 1957192 - DNA, 15 bp, Homo sapiens
tgttccttgtcttgt

SEQ ID NO: 1957193 - DNA, 15 bp, Homo sapiens
gttccttgtcttgtt

SEQ ID NO: 1957194 - DNA, 15 bp, Homo sapiens
ttccttgtcttgttt

SEQ ID NO: 1957195 - DNA, 15 bp, Homo sapiens
tccttgtcttgtttt

SEQ ID NO: 1957196 - DNA, 15 bp, Homo sapiens
ccttgtcttgttttc

SEQ ID NO: 1957197 - DNA, 15 bp, Homo sapiens
cttgtcttgttttca

SEQ ID NO: 1957198 - DNA, 15 bp, Homo sapiens
ttgtcttgttttcag

SEQ ID NO: 1957199 - DNA, 15 bp, Homo sapiens
tgtcttgttttcagg

SEQ ID NO: 1957200 - DNA, 15 bp, Homo sapiens
gtcttgttttcaggg

SEQ ID NO: 1957201 - DNA, 15 bp, Homo sapiens
tcttgttttcagggt

SEQ ID NO: 1957202 - DNA, 15 bp, Homo sapiens
cttgttttcagggtc

SEQ ID NO: 1957203 - DNA, 15 bp, Homo sapiens
ttgttttcagggtca

SEQ ID NO: 1957204 - DNA, 15 bp, Homo sapiens
tgttttcagggtcaa

SEQ ID NO: 1957205 - DNA, 15 bp, Homo sapiens
gttttcagggtcaag

SEQ ID NO: 1957206 - DNA, 15 bp, Homo sapiens
ttttcagggtcaagg

SEQ ID NO: 1957207 - DNA, 15 bp, Homo sapiens
tttcagggtcaagga

SEQ ID NO: 1957208 - DNA, 15 bp, Homo sapiens
ttcagggtcaaggag

SEQ ID NO: 1957209 - DNA, 15 bp, Homo sapiens
tcagggtcaaggagt

SEQ ID NO: 1957210 - DNA, 15 bp, Homo sapiens
cagggtcaaggagtt

SEQ ID NO: 1957211 - DNA, 15 bp, Homo sapiens
agggtcaaggagtta

SEQ ID NO: 1957212 - DNA, 15 bp, Homo sapiens
gggtcaaggagttac

SEQ ID NO: 1957213 - DNA, 15 bp, Homo sapiens
ggtcaaggagttaca

SEQ ID NO: 1957214 - DNA, 15 bp, Homo sapiens
gtcaaggagttacag

SEQ ID NO: 1957215 - DNA, 15 bp, Homo sapiens
tcaaggagttacagt

SEQ ID NO: 1957216 - DNA, 15 bp, Homo sapiens
caaggagttacagtc

SEQ ID NO: 1957217 - DNA, 15 bp, Homo sapiens
aaggagttacagtct

SEQ ID NO: 1957218 - DNA, 15 bp, Homo sapiens
aggagttacagtctc

SEQ ID NO: 1957219 - DNA, 15 bp, Homo sapiens
ggagttacagtctca

SEQ ID NO: 1957220 - DNA, 15 bp, Homo sapiens
gagttacagtctcat

SEQ ID NO: 1957221 - DNA, 15 bp, Homo sapiens
agttacagtctcatg

SEQ ID NO: 1957222 - DNA, 15 bp, Homo sapiens
gttacagtctcatgc

SEQ ID NO: 1957223 - DNA, 15 bp, Homo sapiens
ttacagtctcatgca

SEQ ID NO: 1957224 - DNA, 15 bp, Homo sapiens
tacagtctcatgcac

SEQ ID NO: 1957225 - DNA, 15 bp, Homo sapiens
acagtctcatgcaca

SEQ ID NO: 1957226 - DNA, 15 bp, Homo sapiens
cagtctcatgcacaa

SEQ ID NO: 1957227 - DNA, 15 bp, Homo sapiens
agtctcatgcacaaa

SEQ ID NO: 1957228 - DNA, 15 bp, Homo sapiens
gtctcatgcacaaac

SEQ ID NO: 1957229 - DNA, 15 bp, Homo sapiens
tctcatgcacaaaca

SEQ ID NO: 1957230 - DNA, 15 bp, Homo sapiens
ctcatgcacaaacaa

SEQ ID NO: 1957231 - DNA, 15 bp, Homo sapiens
tcatgcacaaacaac

SEQ ID NO: 1957232 - DNA, 15 bp, Homo sapiens
catgcacaaacaaca

SEQ ID NO: 1957233 - DNA, 15 bp, Homo sapiens
atgcacaaacaacat

SEQ ID NO: 1957234 - DNA, 15 bp, Homo sapiens
tgcacaaacaacata

SEQ ID NO: 1957235 - DNA, 15 bp, Homo sapiens
gcacaaacaacatac

SEQ ID NO: 1957236 - DNA, 15 bp, Homo sapiens
cacaaacaacataca

SEQ ID NO: 1957237 - DNA, 15 bp, Homo sapiens
acaaacaacatacac

SEQ ID NO: 1957238 - DNA, 15 bp, Homo sapiens
caaacaacatacaca

SEQ ID NO: 1957239 - DNA, 15 bp, Homo sapiens
aaacaacatacacac

SEQ ID NO: 1957240 - DNA, 15 bp, Homo sapiens
aacaacatacacaca

SEQ ID NO: 1957241 - DNA, 15 bp, Homo sapiens
acaacatacacacag

SEQ ID NO: 1957242 - DNA, 15 bp, Homo sapiens
caacatacacacagt

SEQ ID NO: 1957243 - DNA, 15 bp, Homo sapiens
aacatacacacagtg

SEQ ID NO: 1957244 - DNA, 15 bp, Homo sapiens
acatacacacagtgc

SEQ ID NO: 1957245 - DNA, 15 bp, Homo sapiens
catacacacagtgcc

SEQ ID NO: 1957246 - DNA, 15 bp, Homo sapiens
atacacacagtgcct

SEQ ID NO: 1957247 - DNA, 15 bp, Homo sapiens
tacacacagtgcctc

SEQ ID NO: 1957248 - DNA, 15 bp, Homo sapiens
acacacagtgcctca

SEQ ID NO: 1957249 - DNA, 15 bp, Homo sapiens
cacacagtgcctcag

SEQ ID NO: 1957250 - DNA, 15 bp, Homo sapiens
acacagtgcctcagt

SEQ ID NO: 1957251 - DNA, 15 bp, Homo sapiens
cacagtgcctcagta

SEQ ID NO: 1957252 - DNA, 15 bp, Homo sapiens
acagtgcctcagtat

SEQ ID NO: 1957253 - DNA, 15 bp, Homo sapiens
cagtgcctcagtatt

SEQ ID NO: 1957254 - DNA, 15 bp, Homo sapiens
agtgcctcagtattt

SEQ ID NO: 1957255 - DNA, 15 bp, Homo sapiens
gtgcctcagtatttt

SEQ ID NO: 1957256 - DNA, 15 bp, Homo sapiens
tgcctcagtattttt

SEQ ID NO: 1957257 - DNA, 15 bp, Homo sapiens
gcctcagtatttttc

SEQ ID NO: 1957258 - DNA, 15 bp, Homo sapiens
cctcagtatttttcc

SEQ ID NO: 1957259 - DNA, 15 bp, Homo sapiens
ctcagtatttttcca

SEQ ID NO: 1957260 - DNA, 15 bp, Homo sapiens
tcagtatttttccat

SEQ ID NO: 1957261 - DNA, 15 bp, Homo sapiens
cagtatttttccatg

SEQ ID NO: 1957262 - DNA, 15 bp, Homo sapiens
agtatttttccatgc

SEQ ID NO: 1957263 - DNA, 15 bp, Homo sapiens
gtatttttccatgct

SEQ ID NO: 1957264 - DNA, 15 bp, Homo sapiens
tatttttccatgctt

SEQ ID NO: 1957265 - DNA, 15 bp, Homo sapiens
atttttccatgcttc

SEQ ID NO: 1957266 - DNA, 15 bp, Homo sapiens
tttttccatgcttcg

SEQ ID NO: 1957267 - DNA, 15 bp, Homo sapiens
ttttccatgcttcga

SEQ ID NO: 1957268 - DNA, 15 bp, Homo sapiens
tttccatgcttcgat

SEQ ID NO: 1957269 - DNA, 15 bp, Homo sapiens
ttccatgcttcgatc

SEQ ID NO: 1957270 - DNA, 15 bp, Homo sapiens
tccatgcttcgatct

SEQ ID NO: 1957271 - DNA, 15 bp, Homo sapiens
ccatgcttcgatctc

SEQ ID NO: 1957272 - DNA, 15 bp, Homo sapiens
catgcttcgatctca

SEQ ID NO: 1957273 - DNA, 15 bp, Homo sapiens
atgcttcgatctcaa

SEQ ID NO: 1957274 - DNA, 15 bp, Homo sapiens
tgcttcgatctcaaa

SEQ ID NO: 1957275 - DNA, 15 bp, Homo sapiens
gcttcgatctcaaat

SEQ ID NO: 1957276 - DNA, 15 bp, Homo sapiens
cttcgatctcaaatg

SEQ ID NO: 1957277 - DNA, 15 bp, Homo sapiens
ttcgatctcaaatgc

SEQ ID NO: 1957278 - DNA, 15 bp, Homo sapiens
tcgatctcaaatgcc

SEQ ID NO: 1957279 - DNA, 15 bp, Homo sapiens
cgatctcaaatgcct

SEQ ID NO: 1957280 - DNA, 15 bp, Homo sapiens
gatctcaaatgcctt

SEQ ID NO: 1957281 - DNA, 15 bp, Homo sapiens
atctcaaatgccttg

SEQ ID NO: 1957282 - DNA, 15 bp, Homo sapiens
tctcaaatgccttgt

SEQ ID NO: 1957283 - DNA, 15 bp, Homo sapiens
ctcaaatgccttgta

SEQ ID NO: 1957284 - DNA, 15 bp, Homo sapiens
tcaaatgccttgtac

SEQ ID NO: 1957285 - DNA, 15 bp, Homo sapiens
aaatgccttgtacat

SEQ ID NO: 1957286 - DNA, 15 bp, Homo sapiens
aatgccttgtacata

SEQ ID NO: 1957287 - DNA, 15 bp, Homo sapiens
atgccttgtacataa

SEQ ID NO: 1957288 - DNA, 15 bp, Homo sapiens
tgccttgtacataag

SEQ ID NO: 1957289 - DNA, 15 bp, Homo sapiens
gccttgtacataagc

SEQ ID NO: 1957290 - DNA, 15 bp, Homo sapiens
ccttgtacataagct

SEQ ID NO: 1957291 - DNA, 15 bp, Homo sapiens
cttgtacataagctt

SEQ ID NO: 1957292 - DNA, 15 bp, Homo sapiens
ttgtacataagcttg

SEQ ID NO: 1957293 - DNA, 15 bp, Homo sapiens
tgtacataagcttga

SEQ ID NO: 1957294 - DNA, 15 bp, Homo sapiens
gtacataagcttgac

SEQ ID NO: 1957295 - DNA, 15 bp, Homo sapiens
tacataagcttgact

SEQ ID NO: 1957296 - DNA, 15 bp, Homo sapiens
acataagcttgactg

SEQ ID NO: 1957297 - DNA, 15 bp, Homo sapiens
cataagcttgactgt

SEQ ID NO: 1957298 - DNA, 15 bp, Homo sapiens
ataagcttgactgta

SEQ ID NO: 1957299 - DNA, 15 bp, Homo sapiens
taagcttgactgtat

SEQ ID NO: 1957300 - DNA, 15 bp, Homo sapiens
aagcttgactgtatt

SEQ ID NO: 1957301 - DNA, 15 bp, Homo sapiens
agcttgactgtattg

SEQ ID NO: 1957302 - DNA, 15 bp, Homo sapiens
gcttgactgtattgt

SEQ ID NO: 1957303 - DNA, 15 bp, Homo sapiens
cttgactgtattgtt

SEQ ID NO: 1957304 - DNA, 15 bp, Homo sapiens
ttgactgtattgttg

SEQ ID NO: 1957305 - DNA, 15 bp, Homo sapiens
tgactgtattgttgt

SEQ ID NO: 1957306 - DNA, 15 bp, Homo sapiens
gactgtattgttgta

SEQ ID NO: 1957307 - DNA, 15 bp, Homo sapiens
actgtattgttgtac

SEQ ID NO: 1957308 - DNA, 15 bp, Homo sapiens
ctgtattgttgtaca

SEQ ID NO: 1957309 - DNA, 15 bp, Homo sapiens
tgtattgttgtacac

SEQ ID NO: 1957310 - DNA, 15 bp, Homo sapiens
gtattgttgtacacc

SEQ ID NO: 1957311 - DNA, 15 bp, Homo sapiens
tattgttgtacaccc

SEQ ID NO: 1957312 - DNA, 15 bp, Homo sapiens
attgttgtacacccc

SEQ ID NO: 1957313 - DNA, 15 bp, Homo sapiens
ttgttgtacaccccc

SEQ ID NO: 1957314 - DNA, 15 bp, Homo sapiens
tgttgtacacccccc

SEQ ID NO: 1957315 - DNA, 15 bp, Homo sapiens
gttgtacaccccccc

SEQ ID NO: 1957316 - DNA, 15 bp, Homo sapiens
ttgtacaccccccca

SEQ ID NO: 1957317 - DNA, 15 bp, Homo sapiens
tgtacacccccccat

SEQ ID NO: 1957318 - DNA, 15 bp, Homo sapiens
gtacacccccccata

SEQ ID NO: 1957319 - DNA, 15 bp, Homo sapiens
tacacccccccatat

SEQ ID NO: 1957320 - DNA, 15 bp, Homo sapiens
acacccccccatatc

SEQ ID NO: 1957321 - DNA, 15 bp, Homo sapiens
cacccccccatatcg

SEQ ID NO: 1957322 - DNA, 15 bp, Homo sapiens
acccccccatatcgc

SEQ ID NO: 1957323 - DNA, 15 bp, Homo sapiens
cccccccatatcgcc

SEQ ID NO: 1957324 - DNA, 15 bp, Homo sapiens
ccccccatatcgccc

SEQ ID NO: 1957325 - DNA, 15 bp, Homo sapiens
cccccatatcgcccc

SEQ ID NO: 1957326 - DNA, 15 bp, Homo sapiens
ccccatatcgccccc

SEQ ID NO: 1957327 - DNA, 15 bp, Homo sapiens
cccatatcgccccct

SEQ ID NO: 1957328 - DNA, 15 bp, Homo sapiens
ccatatcgccccctt

SEQ ID NO: 1957329 - DNA, 15 bp, Homo sapiens
catatcgcccccttt

SEQ ID NO: 1957330 - DNA, 15 bp, Homo sapiens
atatcgccccctttt

SEQ ID NO: 1957331 - DNA, 15 bp, Homo sapiens
tatcgcccccttttt

SEQ ID NO: 1957332 - DNA, 15 bp, Homo sapiens
atcgccccctttttt

SEQ ID NO: 1957333 - DNA, 15 bp, Homo sapiens
tcgcccccttttttg

SEQ ID NO: 1957334 - DNA, 15 bp, Homo sapiens
cgcccccttttttgt

SEQ ID NO: 1957335 - DNA, 15 bp, Homo sapiens
gcccccttttttgtt

SEQ ID NO: 1957336 - DNA, 15 bp, Homo sapiens
cccccttttttgttt

SEQ ID NO: 1957337 - DNA, 15 bp, Homo sapiens
ccccttttttgttta

SEQ ID NO: 1957338 - DNA, 15 bp, Homo sapiens
cccttttttgtttat

SEQ ID NO: 1957339 - DNA, 15 bp, Homo sapiens
ccttttttgtttatt

SEQ ID NO: 1957340 - DNA, 15 bp, Homo sapiens
cttttttgtttatta

SEQ ID NO: 1957341 - DNA, 15 bp, Homo sapiens
ttttttgtttattaa

SEQ ID NO: 1957342 - DNA, 15 bp, Homo sapiens
tttttgtttattaat

SEQ ID NO: 1957343 - DNA, 15 bp, Homo sapiens
ttttgtttattaata

SEQ ID NO: 1957344 - DNA, 15 bp, Homo sapiens
tttgtttattaatat

SEQ ID NO: 1957345 - DNA, 15 bp, Homo sapiens
ttgtttattaatata

SEQ ID NO: 1957346 - DNA, 15 bp, Homo sapiens
tgtttattaatatat

SEQ ID NO: 1957347 - DNA, 15 bp, Homo sapiens
gtttattaatatata

SEQ ID NO: 1957348 - DNA, 15 bp, Homo sapiens
tttattaatatatac

SEQ ID NO: 1957349 - DNA, 15 bp, Homo sapiens
ttattaatatatact

SEQ ID NO: 1957350 - DNA, 15 bp, Homo sapiens
tattaatatatactt

SEQ ID NO: 1957351 - DNA, 15 bp, Homo sapiens
attaatatatacttt

SEQ ID NO: 1957352 - DNA, 15 bp, Homo sapiens
ttaatatatacttta

SEQ ID NO: 1957353 - DNA, 15 bp, Homo sapiens
taatatatactttaa

SEQ ID NO: 1957354 - DNA, 15 bp, Homo sapiens
aatatatactttaag

SEQ ID NO: 1957355 - DNA, 15 bp, Homo sapiens
atatatactttaaga

SEQ ID NO: 1957356 - DNA, 15 bp, Homo sapiens
tatatactttaagag

SEQ ID NO: 1957357 - DNA, 15 bp, Homo sapiens
atatactttaagagt

SEQ ID NO: 1957358 - DNA, 15 bp, Homo sapiens
tatactttaagagtt

SEQ ID NO: 1957359 - DNA, 15 bp, Homo sapiens
atactttaagagttc

SEQ ID NO: 1957360 - DNA, 15 bp, Homo sapiens
tactttaagagttcg

SEQ ID NO: 1957361 - DNA, 15 bp, Homo sapiens
actttaagagttcga

SEQ ID NO: 1957362 - DNA, 15 bp, Homo sapiens
ctttaagagttcgat

SEQ ID NO: 1957363 - DNA, 15 bp, Homo sapiens
tttaagagttcgatg

SEQ ID NO: 1957364 - DNA, 15 bp, Homo sapiens
ttaagagttcgatga

SEQ ID NO: 1957365 - DNA, 15 bp, Homo sapiens
taagagttcgatgag

SEQ ID NO: 1957366 - DNA, 15 bp, Homo sapiens
aagagttcgatgagc

SEQ ID NO: 1957367 - DNA, 15 bp, Homo sapiens
agagttcgatgagct

SEQ ID NO: 1957368 - DNA, 15 bp, Homo sapiens
gagttcgatgagctt

SEQ ID NO: 1957369 - DNA, 15 bp, Homo sapiens
agttcgatgagcttg

SEQ ID NO: 1957370 - DNA, 15 bp, Homo sapiens
gttcgatgagcttgt

SEQ ID NO: 1957371 - DNA, 15 bp, Homo sapiens
ttcgatgagcttgtt

SEQ ID NO: 1957372 - DNA, 15 bp, Homo sapiens
tcgatgagcttgttc

SEQ ID NO: 1957373 - DNA, 15 bp, Homo sapiens
cgatgagcttgttca

SEQ ID NO: 1957374 - DNA, 15 bp, Homo sapiens
gatgagcttgttcaa

SEQ ID NO: 1957375 - DNA, 15 bp, Homo sapiens
atgagcttgttcaac

SEQ ID NO: 1957376 - DNA, 15 bp, Homo sapiens
tgagcttgttcaaca

SEQ ID NO: 1957377 - DNA, 15 bp, Homo sapiens
gagcttgttcaacaa

SEQ ID NO: 1957378 - DNA, 15 bp, Homo sapiens
agcttgttcaacaat

SEQ ID NO: 1957379 - DNA, 15 bp, Homo sapiens
gcttgttcaacaatg

SEQ ID NO: 1957380 - DNA, 15 bp, Homo sapiens
cttgttcaacaatgg

SEQ ID NO: 1957381 - DNA, 15 bp, Homo sapiens
ttgttcaacaatggc

SEQ ID NO: 1957382 - DNA, 15 bp, Homo sapiens
tgttcaacaatggcc

SEQ ID NO: 1957383 - DNA, 15 bp, Homo sapiens
gttcaacaatggcct

SEQ ID NO: 1957384 - DNA, 15 bp, Homo sapiens
ttcaacaatggcctg

SEQ ID NO: 1957385 - DNA, 15 bp, Homo sapiens
tcaacaatggcctga

SEQ ID NO: 1957386 - DNA, 15 bp, Homo sapiens
caacaatggcctgac

SEQ ID NO: 1957387 - DNA, 15 bp, Homo sapiens
aacaatggcctgacc

SEQ ID NO: 1957388 - DNA, 15 bp, Homo sapiens
acaatggcctgacca

SEQ ID NO: 1957389 - DNA, 15 bp, Homo sapiens
caatggcctgaccag

SEQ ID NO: 1957390 - DNA, 15 bp, Homo sapiens
aatggcctgaccagt

SEQ ID NO: 1957391 - DNA, 15 bp, Homo sapiens
atggcctgaccagtt

SEQ ID NO: 1957392 - DNA, 15 bp, Homo sapiens
tggcctgaccagttg

SEQ ID NO: 1957393 - DNA, 15 bp, Homo sapiens
ggcctgaccagttga

SEQ ID NO: 1957394 - DNA, 15 bp, Homo sapiens
gcctgaccagttgag

SEQ ID NO: 1957395 - DNA, 15 bp, Homo sapiens
cctgaccagttgagt

SEQ ID NO: 1957396 - DNA, 15 bp, Homo sapiens
ctgaccagttgagtt

SEQ ID NO: 1957397 - DNA, 15 bp, Homo sapiens
tgaccagttgagtta

SEQ ID NO: 1957398 - DNA, 15 bp, Homo sapiens
gaccagttgagttat

SEQ ID NO: 1957399 - DNA, 15 bp, Homo sapiens
accagttgagttata

SEQ ID NO: 1957400 - DNA, 15 bp, Homo sapiens
ccagttgagttataa

SEQ ID NO: 1957401 - DNA, 15 bp, Homo sapiens
cagttgagttataag

SEQ ID NO: 1957402 - DNA, 15 bp, Homo sapiens
agttgagttataagg

SEQ ID NO: 1957403 - DNA, 15 bp, Homo sapiens
gttgagttataagga

SEQ ID NO: 1957404 - DNA, 15 bp, Homo sapiens
ttgagttataaggaa

SEQ ID NO: 1957405 - DNA, 15 bp, Homo sapiens
tgagttataaggaat

SEQ ID NO: 1957406 - DNA, 15 bp, Homo sapiens
gagttataaggaata

SEQ ID NO: 1957407 - DNA, 15 bp, Homo sapiens
agttataaggaatac

SEQ ID NO: 1957408 - DNA, 15 bp, Homo sapiens
gttataaggaatacc

SEQ ID NO: 1957409 - DNA, 15 bp, Homo sapiens
ttataaggaatacca

SEQ ID NO: 1957410 - DNA, 15 bp, Homo sapiens
tataaggaataccag

SEQ ID NO: 1957411 - DNA, 15 bp, Homo sapiens
ataaggaataccagt

SEQ ID NO: 1957412 - DNA, 15 bp, Homo sapiens
taaggaataccagtt

SEQ ID NO: 1957413 - DNA, 15 bp, Homo sapiens
aaggaataccagttt

SEQ ID NO: 1957414 - DNA, 15 bp, Homo sapiens
aggaataccagtttt

SEQ ID NO: 1957415 - DNA, 15 bp, Homo sapiens
ggaataccagtttta

SEQ ID NO: 1957416 - DNA, 15 bp, Homo sapiens
gaataccagttttat

SEQ ID NO: 1957417 - DNA, 15 bp, Homo sapiens
aataccagttttatg

SEQ ID NO: 1957418 - DNA, 15 bp, Homo sapiens
ataccagttttatgt

SEQ ID NO: 1957419 - DNA, 15 bp, Homo sapiens
taccagttttatgtt

SEQ ID NO: 1957420 - DNA, 15 bp, Homo sapiens
accagttttatgttg

SEQ ID NO: 1957421 - DNA, 15 bp, Homo sapiens
ccagttttatgttgt

SEQ ID NO: 1957422 - DNA, 15 bp, Homo sapiens
cagttttatgttgta

SEQ ID NO: 1957423 - DNA, 15 bp, Homo sapiens
agttttatgttgtat

SEQ ID NO: 1957424 - DNA, 15 bp, Homo sapiens
gttttatgttgtatg

SEQ ID NO: 1957425 - DNA, 15 bp, Homo sapiens
ttttatgttgtatgt

SEQ ID NO: 1957426 - DNA, 15 bp, Homo sapiens
tttatgttgtatgtg

SEQ ID NO: 1957427 - DNA, 15 bp, Homo sapiens
ttatgttgtatgtgc

SEQ ID NO: 1957428 - DNA, 15 bp, Homo sapiens
tatgttgtatgtgcc

SEQ ID NO: 1957429 - DNA, 15 bp, Homo sapiens
atgttgtatgtgcca

SEQ ID NO: 1957430 - DNA, 15 bp, Homo sapiens
tgttgtatgtgccaa

SEQ ID NO: 1957431 - DNA, 15 bp, Homo sapiens
gttgtatgtgccaat

SEQ ID NO: 1957432 - DNA, 15 bp, Homo sapiens
ttgtatgtgccaatg

SEQ ID NO: 1957433 - DNA, 15 bp, Homo sapiens
tgtatgtgccaatgt

SEQ ID NO: 1957434 - DNA, 15 bp, Homo sapiens
gtatgtgccaatgtt

SEQ ID NO: 1957435 - DNA, 15 bp, Homo sapiens
tatgtgccaatgttt

SEQ ID NO: 1957436 - DNA, 15 bp, Homo sapiens
atgtgccaatgtttc

SEQ ID NO: 1957437 - DNA, 15 bp, Homo sapiens
tgtgccaatgtttca

SEQ ID NO: 1957438 - DNA, 15 bp, Homo sapiens
gtgccaatgtttcaa

SEQ ID NO: 1957439 - DNA, 15 bp, Homo sapiens
tgccaatgtttcaat

SEQ ID NO: 1957440 - DNA, 15 bp, Homo sapiens
gccaatgtttcaatg

SEQ ID NO: 1957441 - DNA, 15 bp, Homo sapiens
ccaatgtttcaatgc

SEQ ID NO: 1957442 - DNA, 15 bp, Homo sapiens
caatgtttcaatgca

SEQ ID NO: 1957443 - DNA, 15 bp, Homo sapiens
aatgtttcaatgcat

SEQ ID NO: 1957444 - DNA, 15 bp, Homo sapiens
atgtttcaatgcata

SEQ ID NO: 1957445 - DNA, 15 bp, Homo sapiens
tgtttcaatgcatat

SEQ ID NO: 1957446 - DNA, 15 bp, Homo sapiens
gtttcaatgcatatg

SEQ ID NO: 1957447 - DNA, 15 bp, Homo sapiens
tttcaatgcatatgc

SEQ ID NO: 1957448 - DNA, 15 bp, Homo sapiens
ttcaatgcatatgca

SEQ ID NO: 1957449 - DNA, 15 bp, Homo sapiens
tcaatgcatatgcaa

SEQ ID NO: 1957450 - DNA, 15 bp, Homo sapiens
caatgcatatgcaaa

SEQ ID NO: 1957451 - DNA, 15 bp, Homo sapiens
aatgcatatgcaaat

SEQ ID NO: 1957452 - DNA, 15 bp, Homo sapiens
atgcatatgcaaatc

SEQ ID NO: 1957453 - DNA, 15 bp, Homo sapiens
tgcatatgcaaatcg

SEQ ID NO: 1957454 - DNA, 15 bp, Homo sapiens
gcatatgcaaatcga

SEQ ID NO: 1957455 - DNA, 15 bp, Homo sapiens
catatgcaaatcgag

SEQ ID NO: 1957456 - DNA, 15 bp, Homo sapiens
atatgcaaatcgagc

SEQ ID NO: 1957457 - DNA, 15 bp, Homo sapiens
tatgcaaatcgagcg

SEQ ID NO: 1957458 - DNA, 15 bp, Homo sapiens
atgcaaatcgagcgc

SEQ ID NO: 1957459 - DNA, 15 bp, Homo sapiens
tgcaaatcgagcgct

SEQ ID NO: 1957460 - DNA, 15 bp, Homo sapiens
gcaaatcgagcgcta

SEQ ID NO: 1957461 - DNA, 15 bp, Homo sapiens
caaatcgagcgctaa

SEQ ID NO: 1957462 - DNA, 15 bp, Homo sapiens
aaatcgagcgctaag

SEQ ID NO: 1957463 - DNA, 15 bp, Homo sapiens
aatcgagcgctaaga

SEQ ID NO: 1957464 - DNA, 15 bp, Homo sapiens
atcgagcgctaagat

SEQ ID NO: 1957465 - DNA, 15 bp, Homo sapiens
tcgagcgctaagata

SEQ ID NO: 1957466 - DNA, 15 bp, Homo sapiens
cgagcgctaagatag

SEQ ID NO: 1957467 - DNA, 15 bp, Homo sapiens
gagcgctaagatagc

SEQ ID NO: 1957468 - DNA, 15 bp, Homo sapiens
agcgctaagatagcg

SEQ ID NO: 1957469 - DNA, 15 bp, Homo sapiens
gcgctaagatagcga

SEQ ID NO: 1957470 - DNA, 15 bp, Homo sapiens
cgctaagatagcgag

SEQ ID NO: 1957471 - DNA, 15 bp, Homo sapiens
gctaagatagcgagg

SEQ ID NO: 1957472 - DNA, 15 bp, Homo sapiens
ctaagatagcgagga

SEQ ID NO: 1957473 - DNA, 15 bp, Homo sapiens
taagatagcgaggac

SEQ ID NO: 1957474 - DNA, 15 bp, Homo sapiens
aagatagcgaggacc

SEQ ID NO: 1957475 - DNA, 15 bp, Homo sapiens
agatagcgaggacca

SEQ ID NO: 1957476 - DNA, 15 bp, Homo sapiens
gatagcgaggaccat

SEQ ID NO: 1957477 - DNA, 15 bp, Homo sapiens
atagcgaggaccatt

SEQ ID NO: 1957478 - DNA, 15 bp, Homo sapiens
tagcgaggaccatta

SEQ ID NO: 1957479 - DNA, 15 bp, Homo sapiens
agcgaggaccattat

SEQ ID NO: 1957480 - DNA, 15 bp, Homo sapiens
gcgaggaccattatc

SEQ ID NO: 1957481 - DNA, 15 bp, Homo sapiens
cgaggaccattatca

SEQ ID NO: 1957482 - DNA, 15 bp, Homo sapiens
gaggaccattatcag

SEQ ID NO: 1957483 - DNA, 15 bp, Homo sapiens
aggaccattatcagt

SEQ ID NO: 1957484 - DNA, 15 bp, Homo sapiens
ggaccattatcagtt

SEQ ID NO: 1957485 - DNA, 15 bp, Homo sapiens
gaccattatcagttt

SEQ ID NO: 1957486 - DNA, 15 bp, Homo sapiens
accattatcagtttt

SEQ ID NO: 1957487 - DNA, 15 bp, Homo sapiens
ccattatcagttttt

SEQ ID NO: 1957488 - DNA, 15 bp, Homo sapiens
cattatcagttttta

SEQ ID NO: 1957489 - DNA, 15 bp, Homo sapiens
attatcagtttttat

SEQ ID NO: 1957490 - DNA, 15 bp, Homo sapiens
ttatcagtttttata

SEQ ID NO: 1957491 - DNA, 15 bp, Homo sapiens
tatcagtttttatag

SEQ ID NO: 1957492 - DNA, 15 bp, Homo sapiens
atcagtttttatagt

SEQ ID NO: 1957493 - DNA, 15 bp, Homo sapiens
tcagtttttatagtt

SEQ ID NO: 1957494 - DNA, 15 bp, Homo sapiens
cagtttttatagttt

SEQ ID NO: 1957495 - DNA, 15 bp, Homo sapiens
agtttttatagtttt

SEQ ID NO: 1957496 - DNA, 15 bp, Homo sapiens
gtttttatagttttt

SEQ ID NO: 1957497 - DNA, 15 bp, Homo sapiens
tttttatagtttttg

SEQ ID NO: 1957498 - DNA, 15 bp, Homo sapiens
ttttatagtttttgg

SEQ ID NO: 1957499 - DNA, 15 bp, Homo sapiens
tttatagtttttgga

SEQ ID NO: 1957500 - DNA, 15 bp, Homo sapiens
ttatagtttttggaa

SEQ ID NO: 1957501 - DNA, 15 bp, Homo sapiens
tatagtttttggaag

SEQ ID NO: 1957502 - DNA, 15 bp, Homo sapiens
atagtttttggaagg

SEQ ID NO: 1957503 - DNA, 15 bp, Homo sapiens
tagtttttggaaggc

SEQ ID NO: 1957504 - DNA, 15 bp, Homo sapiens
agtttttggaaggcc

SEQ ID NO: 1957505 - DNA, 15 bp, Homo sapiens
gtttttggaaggcct

SEQ ID NO: 1957506 - DNA, 15 bp, Homo sapiens
tttttggaaggccta

SEQ ID NO: 1957507 - DNA, 15 bp, Homo sapiens
ttttggaaggcctaa

SEQ ID NO: 1957508 - DNA, 15 bp, Homo sapiens
tttggaaggcctaag

SEQ ID NO: 1957509 - DNA, 15 bp, Homo sapiens
ttggaaggcctaagg

SEQ ID NO: 1957510 - DNA, 15 bp, Homo sapiens
tggaaggcctaaggt

SEQ ID NO: 1957511 - DNA, 15 bp, Homo sapiens
ggaaggcctaaggtc

SEQ ID NO: 1957512 - DNA, 15 bp, Homo sapiens
gaaggcctaaggtca

SEQ ID NO: 1957513 - DNA, 15 bp, Homo sapiens
aaggcctaaggtcat

SEQ ID NO: 1957514 - DNA, 15 bp, Homo sapiens
aggcctaaggtcata

SEQ ID NO: 1957515 - DNA, 15 bp, Homo sapiens
ggcctaaggtcataa

SEQ ID NO: 1957516 - DNA, 15 bp, Homo sapiens
gcctaaggtcataat

SEQ ID NO: 1957517 - DNA, 15 bp, Homo sapiens
cctaaggtcataata

SEQ ID NO: 1957518 - DNA, 15 bp, Homo sapiens
ctaaggtcataatag

SEQ ID NO: 1957519 - DNA, 15 bp, Homo sapiens
taaggtcataataga

SEQ ID NO: 1957520 - DNA, 15 bp, Homo sapiens
aaggtcataatagat

SEQ ID NO: 1957521 - DNA, 15 bp, Homo sapiens
aggtcataatagatt

SEQ ID NO: 1957522 - DNA, 15 bp, Homo sapiens
ggtcataatagattt

SEQ ID NO: 1957523 - DNA, 15 bp, Homo sapiens
gtcataatagatttt

SEQ ID NO: 1957524 - DNA, 15 bp, Homo sapiens
tcataatagatttta

SEQ ID NO: 1957525 - DNA, 15 bp, Homo sapiens
cataatagattttaa

SEQ ID NO: 1957526 - DNA, 15 bp, Homo sapiens
ataatagattttaaa

SEQ ID NO: 1957527 - DNA, 15 bp, Homo sapiens
taatagattttaaaa

SEQ ID NO: 1957528 - DNA, 15 bp, Homo sapiens
aatagattttaaaag

SEQ ID NO: 1957529 - DNA, 15 bp, Homo sapiens
atagattttaaaaga

SEQ ID NO: 1957530 - DNA, 15 bp, Homo sapiens
tagattttaaaagat

SEQ ID NO: 1957531 - DNA, 15 bp, Homo sapiens
agattttaaaagatg

SEQ ID NO: 1957532 - DNA, 15 bp, Homo sapiens
gattttaaaagatga

SEQ ID NO: 1957533 - DNA, 15 bp, Homo sapiens
attttaaaagatgag

SEQ ID NO: 1957534 - DNA, 15 bp, Homo sapiens
ttttaaaagatgagc

SEQ ID NO: 1957535 - DNA, 15 bp, Homo sapiens
tttaaaagatgagca

SEQ ID NO: 1957536 - DNA, 15 bp, Homo sapiens
ttaaaagatgagcaa

SEQ ID NO: 1957537 - DNA, 15 bp, Homo sapiens
taaaagatgagcaat

SEQ ID NO: 1957538 - DNA, 15 bp, Homo sapiens
aaaagatgagcaatt

SEQ ID NO: 1957539 - DNA, 15 bp, Homo sapiens
aaagatgagcaattg

SEQ ID NO: 1957540 - DNA, 15 bp, Homo sapiens
aagatgagcaattgc

SEQ ID NO: 1957541 - DNA, 15 bp, Homo sapiens
agatgagcaattgct

SEQ ID NO: 1957542 - DNA, 15 bp, Homo sapiens
gatgagcaattgctc

SEQ ID NO: 1957543 - DNA, 15 bp, Homo sapiens
atgagcaattgctct

SEQ ID NO: 1957544 - DNA, 15 bp, Homo sapiens
tgagcaattgctctt

SEQ ID NO: 1957545 - DNA, 15 bp, Homo sapiens
gagcaattgctcttt

SEQ ID NO: 1957546 - DNA, 15 bp, Homo sapiens
agcaattgctcttta

SEQ ID NO: 1957547 - DNA, 15 bp, Homo sapiens
gcaattgctctttag

SEQ ID NO: 1957548 - DNA, 15 bp, Homo sapiens
caattgctctttagt

SEQ ID NO: 1957549 - DNA, 15 bp, Homo sapiens
aattgctctttagtt

SEQ ID NO: 1957550 - DNA, 15 bp, Homo sapiens
attgctctttagttt

SEQ ID NO: 1957551 - DNA, 15 bp, Homo sapiens
ttgctctttagtttt

SEQ ID NO: 1957552 - DNA, 15 bp, Homo sapiens
tgctctttagttttt

SEQ ID NO: 1957553 - DNA, 15 bp, Homo sapiens
gctctttagtttttt

SEQ ID NO: 1957554 - DNA, 15 bp, Homo sapiens
ctctttagttttttg

SEQ ID NO: 1957555 - DNA, 15 bp, Homo sapiens
tctttagttttttgt

SEQ ID NO: 1957556 - DNA, 15 bp, Homo sapiens
ctttagttttttgtc

SEQ ID NO: 1957557 - DNA, 15 bp, Homo sapiens
tttagttttttgtcc

SEQ ID NO: 1957558 - DNA, 15 bp, Homo sapiens
ttagttttttgtcca

SEQ ID NO: 1957559 - DNA, 15 bp, Homo sapiens
tagttttttgtccag

SEQ ID NO: 1957560 - DNA, 15 bp, Homo sapiens
agttttttgtccagt

SEQ ID NO: 1957561 - DNA, 15 bp, Homo sapiens
gttttttgtccagtc

SEQ ID NO: 1957562 - DNA, 15 bp, Homo sapiens
ttttttgtccagtcc

SEQ ID NO: 1957563 - DNA, 15 bp, Homo sapiens
tttttgtccagtcca

SEQ ID NO: 1957564 - DNA, 15 bp, Homo sapiens
ttttgtccagtccag

SEQ ID NO: 1957565 - DNA, 15 bp, Homo sapiens
tttgtccagtccagg

SEQ ID NO: 1957566 - DNA, 15 bp, Homo sapiens
ttgtccagtccaggg

SEQ ID NO: 1957567 - DNA, 15 bp, Homo sapiens
tgtccagtccaggga

SEQ ID NO: 1957568 - DNA, 15 bp, Homo sapiens
gtccagtccagggag

SEQ ID NO: 1957569 - DNA, 15 bp, Homo sapiens
tccagtccagggagt

SEQ ID NO: 1957570 - DNA, 15 bp, Homo sapiens
ccagtccagggagta

SEQ ID NO: 1957571 - DNA, 15 bp, Homo sapiens
cagtccagggagtag

SEQ ID NO: 1957572 - DNA, 15 bp, Homo sapiens
agtccagggagtagc

SEQ ID NO: 1957573 - DNA, 15 bp, Homo sapiens
gtccagggagtagca

SEQ ID NO: 1957574 - DNA, 15 bp, Homo sapiens
tccagggagtagcat

SEQ ID NO: 1957575 - DNA, 15 bp, Homo sapiens
ccagggagtagcatg

SEQ ID NO: 1957576 - DNA, 15 bp, Homo sapiens
cagggagtagcatgt

SEQ ID NO: 1957577 - DNA, 15 bp, Homo sapiens
agggagtagcatgtt

SEQ ID NO: 1957578 - DNA, 15 bp, Homo sapiens
gggagtagcatgttt

SEQ ID NO: 1957579 - DNA, 15 bp, Homo sapiens
ggagtagcatgtttc

SEQ ID NO: 1957580 - DNA, 15 bp, Homo sapiens
gagtagcatgtttca

SEQ ID NO: 1957581 - DNA, 15 bp, Homo sapiens
agtagcatgtttcag

SEQ ID NO: 1957582 - DNA, 15 bp, Homo sapiens
gtagcatgtttcagg

SEQ ID NO: 1957583 - DNA, 15 bp, Homo sapiens
tagcatgtttcaggc

SEQ ID NO: 1957584 - DNA, 15 bp, Homo sapiens
agcatgtttcaggcc

SEQ ID NO: 1957585 - DNA, 15 bp, Homo sapiens
gcatgtttcaggccc

SEQ ID NO: 1957586 - DNA, 15 bp, Homo sapiens
catgtttcaggcccg

SEQ ID NO: 1957587 - DNA, 15 bp, Homo sapiens
atgtttcaggcccgt

SEQ ID NO: 1957588 - DNA, 15 bp, Homo sapiens
tgtttcaggcccgta

SEQ ID NO: 1957589 - DNA, 15 bp, Homo sapiens
gtttcaggcccgtat

SEQ ID NO: 1957590 - DNA, 15 bp, Homo sapiens
tttcaggcccgtata

SEQ ID NO: 1957591 - DNA, 15 bp, Homo sapiens
ttcaggcccgtataa

SEQ ID NO: 1957592 - DNA, 15 bp, Homo sapiens
tcaggcccgtataag

SEQ ID NO: 1957593 - DNA, 15 bp, Homo sapiens
caggcccgtataagt

SEQ ID NO: 1957594 - DNA, 15 bp, Homo sapiens
aggcccgtataagtg

SEQ ID NO: 1957595 - DNA, 15 bp, Homo sapiens
ggcccgtataagtgt

SEQ ID NO: 1957596 - DNA, 15 bp, Homo sapiens
gcccgtataagtgtc

SEQ ID NO: 1957597 - DNA, 15 bp, Homo sapiens
cccgtataagtgtcc

SEQ ID NO: 1957598 - DNA, 15 bp, Homo sapiens
ccgtataagtgtcca

SEQ ID NO: 1957599 - DNA, 15 bp, Homo sapiens
cgtataagtgtccac

SEQ ID NO: 1957600 - DNA, 15 bp, Homo sapiens
gtataagtgtccaca

SEQ ID NO: 1957601 - DNA, 15 bp, Homo sapiens
tataagtgtccacag

SEQ ID NO: 1957602 - DNA, 15 bp, Homo sapiens
ataagtgtccacagt

SEQ ID NO: 1957603 - DNA, 15 bp, Homo sapiens
taagtgtccacagta

SEQ ID NO: 1957604 - DNA, 15 bp, Homo sapiens
aagtgtccacagtaa

SEQ ID NO: 1957605 - DNA, 15 bp, Homo sapiens
agtgtccacagtaac

SEQ ID NO: 1957606 - DNA, 15 bp, Homo sapiens
gtgtccacagtaacg

SEQ ID NO: 1957607 - DNA, 15 bp, Homo sapiens
tgtccacagtaacgt

SEQ ID NO: 1957608 - DNA, 15 bp, Homo sapiens
gtccacagtaacgtg

SEQ ID NO: 1957609 - DNA, 15 bp, Homo sapiens
tccacagtaacgtgg

SEQ ID NO: 1957610 - DNA, 15 bp, Homo sapiens
ccacagtaacgtgga

SEQ ID NO: 1957611 - DNA, 15 bp, Homo sapiens
cacagtaacgtggag

SEQ ID NO: 1957612 - DNA, 15 bp, Homo sapiens
acagtaacgtggaga

SEQ ID NO: 1957613 - DNA, 15 bp, Homo sapiens
cagtaacgtggagaa

SEQ ID NO: 1957614 - DNA, 15 bp, Homo sapiens
agtaacgtggagaaa

SEQ ID NO: 1957615 - DNA, 15 bp, Homo sapiens
gtaacgtggagaaat

SEQ ID NO: 1957616 - DNA, 15 bp, Homo sapiens
taacgtggagaaatt

SEQ ID NO: 1957617 - DNA, 15 bp, Homo sapiens
aacgtggagaaattt

SEQ ID NO: 1957618 - DNA, 15 bp, Homo sapiens
acgtggagaaattta

SEQ ID NO: 1957619 - DNA, 15 bp, Homo sapiens
cgtggagaaatttaa

SEQ ID NO: 1957620 - DNA, 15 bp, Homo sapiens
gtggagaaatttaaa

SEQ ID NO: 1957621 - DNA, 15 bp, Homo sapiens
tggagaaatttaaag

SEQ ID NO: 1957622 - DNA, 15 bp, Homo sapiens
ggagaaatttaaagc

SEQ ID NO: 1957623 - DNA, 15 bp, Homo sapiens
gagaaatttaaagca

SEQ ID NO: 1957624 - DNA, 15 bp, Homo sapiens
agaaatttaaagcat

SEQ ID NO: 1957625 - DNA, 15 bp, Homo sapiens
gaaatttaaagcatt

SEQ ID NO: 1957626 - DNA, 15 bp, Homo sapiens
aaatttaaagcattc

SEQ ID NO: 1957627 - DNA, 15 bp, Homo sapiens
aatttaaagcattca

SEQ ID NO: 1957628 - DNA, 15 bp, Homo sapiens
atttaaagcattcaa

SEQ ID NO: 1957629 - DNA, 15 bp, Homo sapiens
tttaaagcattcaaa

SEQ ID NO: 1957630 - DNA, 15 bp, Homo sapiens
ttaaagcattcaaag

SEQ ID NO: 1957631 - DNA, 15 bp, Homo sapiens
taaagcattcaaagg

SEQ ID NO: 1957632 - DNA, 15 bp, Homo sapiens
aaagcattcaaaggt

SEQ ID NO: 1957633 - DNA, 15 bp, Homo sapiens
aagcattcaaaggta

SEQ ID NO: 1957634 - DNA, 15 bp, Homo sapiens
agcattcaaaggtag

SEQ ID NO: 1957635 - DNA, 15 bp, Homo sapiens
gcattcaaaggtaga

SEQ ID NO: 1957636 - DNA, 15 bp, Homo sapiens
cattcaaaggtagat

SEQ ID NO: 1957637 - DNA, 15 bp, Homo sapiens
attcaaaggtagatg

SEQ ID NO: 1957638 - DNA, 15 bp, Homo sapiens
ttcaaaggtagatgc

SEQ ID NO: 1957639 - DNA, 15 bp, Homo sapiens
tcaaaggtagatgct

SEQ ID NO: 1957640 - DNA, 15 bp, Homo sapiens
caaaggtagatgctg

SEQ ID NO: 1957641 - DNA, 15 bp, Homo sapiens
aaaggtagatgctga

SEQ ID NO: 1957642 - DNA, 15 bp, Homo sapiens
aaggtagatgctgag

SEQ ID NO: 1957643 - DNA, 15 bp, Homo sapiens
aggtagatgctgagt

SEQ ID NO: 1957644 - DNA, 15 bp, Homo sapiens
ggtagatgctgagta

SEQ ID NO: 1957645 - DNA, 15 bp, Homo sapiens
gtagatgctgagtaa

SEQ ID NO: 1957646 - DNA, 15 bp, Homo sapiens
tagatgctgagtaat

SEQ ID NO: 1957647 - DNA, 15 bp, Homo sapiens
agatgctgagtaata

SEQ ID NO: 1957648 - DNA, 15 bp, Homo sapiens
gatgctgagtaatat

SEQ ID NO: 1957649 - DNA, 15 bp, Homo sapiens
atgctgagtaatatc

SEQ ID NO: 1957650 - DNA, 15 bp, Homo sapiens
tgctgagtaatatca

SEQ ID NO: 1957651 - DNA, 15 bp, Homo sapiens
gctgagtaatatcag

SEQ ID NO: 1957652 - DNA, 15 bp, Homo sapiens
ctgagtaatatcagt

SEQ ID NO: 1957653 - DNA, 15 bp, Homo sapiens
tgagtaatatcagtg

SEQ ID NO: 1957654 - DNA, 15 bp, Homo sapiens
gagtaatatcagtgt

SEQ ID NO: 1957655 - DNA, 15 bp, Homo sapiens
agtaatatcagtgta

SEQ ID NO: 1957656 - DNA, 15 bp, Homo sapiens
gtaatatcagtgtac

SEQ ID NO: 1957657 - DNA, 15 bp, Homo sapiens
taatatcagtgtacc

SEQ ID NO: 1957658 - DNA, 15 bp, Homo sapiens
aatatcagtgtacca

SEQ ID NO: 1957659 - DNA, 15 bp, Homo sapiens
atatcagtgtaccag

SEQ ID NO: 1957660 - DNA, 15 bp, Homo sapiens
tatcagtgtaccaga

SEQ ID NO: 1957661 - DNA, 15 bp, Homo sapiens
atcagtgtaccagat

SEQ ID NO: 1957662 - DNA, 15 bp, Homo sapiens
tcagtgtaccagata

SEQ ID NO: 1957663 - DNA, 15 bp, Homo sapiens
cagtgtaccagatag

SEQ ID NO: 1957664 - DNA, 15 bp, Homo sapiens
agtgtaccagatagc

SEQ ID NO: 1957665 - DNA, 15 bp, Homo sapiens
gtgtaccagatagca

SEQ ID NO: 1957666 - DNA, 15 bp, Homo sapiens
tgtaccagatagcat

SEQ ID NO: 1957667 - DNA, 15 bp, Homo sapiens
gtaccagatagcatt

SEQ ID NO: 1957668 - DNA, 15 bp, Homo sapiens
taccagatagcatta

SEQ ID NO: 1957669 - DNA, 15 bp, Homo sapiens
accagatagcattag

SEQ ID NO: 1957670 - DNA, 15 bp, Homo sapiens
ccagatagcattagg

SEQ ID NO: 1957671 - DNA, 15 bp, Homo sapiens
cagatagcattaggt

SEQ ID NO: 1957672 - DNA, 15 bp, Homo sapiens
agatagcattaggta

SEQ ID NO: 1957673 - DNA, 15 bp, Homo sapiens
gatagcattaggtac

SEQ ID NO: 1957674 - DNA, 15 bp, Homo sapiens
atagcattaggtacc

SEQ ID NO: 1957675 - DNA, 15 bp, Homo sapiens
tagcattaggtacca

SEQ ID NO: 1957676 - DNA, 15 bp, Homo sapiens
agcattaggtaccag

SEQ ID NO: 1957677 - DNA, 15 bp, Homo sapiens
gcattaggtaccaga

SEQ ID NO: 1957678 - DNA, 15 bp, Homo sapiens
cattaggtaccagac

SEQ ID NO: 1957679 - DNA, 15 bp, Homo sapiens
attaggtaccagacc

SEQ ID NO: 1957680 - DNA, 15 bp, Homo sapiens
ttaggtaccagacct

SEQ ID NO: 1957681 - DNA, 15 bp, Homo sapiens
taggtaccagacctc

SEQ ID NO: 1957682 - DNA, 15 bp, Homo sapiens
aggtaccagacctca

SEQ ID NO: 1957683 - DNA, 15 bp, Homo sapiens
ggtaccagacctcat

SEQ ID NO: 1957684 - DNA, 15 bp, Homo sapiens
gtaccagacctcatg

SEQ ID NO: 1957685 - DNA, 15 bp, Homo sapiens
taccagacctcatgg

SEQ ID NO: 1957686 - DNA, 15 bp, Homo sapiens
accagacctcatggg

SEQ ID NO: 1957687 - DNA, 15 bp, Homo sapiens
ccagacctcatgggt

SEQ ID NO: 1957688 - DNA, 15 bp, Homo sapiens
cagacctcatgggtt

SEQ ID NO: 1957689 - DNA, 15 bp, Homo sapiens
agacctcatgggttg

SEQ ID NO: 1957690 - DNA, 15 bp, Homo sapiens
gacctcatgggttgg

SEQ ID NO: 1957691 - DNA, 15 bp, Homo sapiens
acctcatgggttggc

SEQ ID NO: 1957692 - DNA, 15 bp, Homo sapiens
cctcatgggttggca

SEQ ID NO: 1957693 - DNA, 15 bp, Homo sapiens
ctcatgggttggcac

SEQ ID NO: 1957694 - DNA, 15 bp, Homo sapiens
tcatgggttggcacc

SEQ ID NO: 1957695 - DNA, 15 bp, Homo sapiens
catgggttggcacca

SEQ ID NO: 1957696 - DNA, 15 bp, Homo sapiens
atgggttggcaccaa

SEQ ID NO: 1957697 - DNA, 15 bp, Homo sapiens
tgggttggcaccaag

SEQ ID NO: 1957698 - DNA, 15 bp, Homo sapiens
gggttggcaccaagt

SEQ ID NO: 1957699 - DNA, 15 bp, Homo sapiens
ggttggcaccaagtt

SEQ ID NO: 1957700 - DNA, 15 bp, Homo sapiens
gttggcaccaagttc

SEQ ID NO: 1957701 - DNA, 15 bp, Homo sapiens
ttggcaccaagttcc

SEQ ID NO: 1957702 - DNA, 15 bp, Homo sapiens
tggcaccaagttcca

SEQ ID NO: 1957703 - DNA, 15 bp, Homo sapiens
ggcaccaagttccaa

SEQ ID NO: 1957704 - DNA, 15 bp, Homo sapiens
gcaccaagttccaat

SEQ ID NO: 1957705 - DNA, 15 bp, Homo sapiens
caccaagttccaatg

SEQ ID NO: 1957706 - DNA, 15 bp, Homo sapiens
accaagttccaatga

SEQ ID NO: 1957707 - DNA, 15 bp, Homo sapiens
ccaagttccaatgaa

SEQ ID NO: 1957708 - DNA, 15 bp, Homo sapiens
caagttccaatgaaa

SEQ ID NO: 1957709 - DNA, 15 bp, Homo sapiens
aagttccaatgaaaa

SEQ ID NO: 1957710 - DNA, 15 bp, Homo sapiens
agttccaatgaaaaa

SEQ ID NO: 1957711 - DNA, 15 bp, Homo sapiens
gttccaatgaaaaag

SEQ ID NO: 1957712 - DNA, 15 bp, Homo sapiens
ttccaatgaaaaagg

SEQ ID NO: 1957713 - DNA, 15 bp, Homo sapiens
tccaatgaaaaaggg

SEQ ID NO: 1957714 - DNA, 15 bp, Homo sapiens
ccaatgaaaaagggg

SEQ ID NO: 1957715 - DNA, 15 bp, Homo sapiens
caatgaaaaagggga

SEQ ID NO: 1957716 - DNA, 15 bp, Homo sapiens
aatgaaaaaggggag

SEQ ID NO: 1957717 - DNA, 15 bp, Homo sapiens
atgaaaaaggggaga

SEQ ID NO: 1957718 - DNA, 15 bp, Homo sapiens
tgaaaaaggggagag

SEQ ID NO: 1957719 - DNA, 15 bp, Homo sapiens
gaaaaaggggagaga

SEQ ID NO: 1957720 - DNA, 15 bp, Homo sapiens
aaaaaggggagagag

SEQ ID NO: 1957721 - DNA, 15 bp, Homo sapiens
aaaaggggagagaga

SEQ ID NO: 1957722 - DNA, 15 bp, Homo sapiens
aaaggggagagagaa

SEQ ID NO: 1957723 - DNA, 15 bp, Homo sapiens
aaggggagagagaat

SEQ ID NO: 1957724 - DNA, 15 bp, Homo sapiens
aggggagagagaatg

SEQ ID NO: 1957725 - DNA, 15 bp, Homo sapiens
ggggagagagaatgc

SEQ ID NO: 1957726 - DNA, 15 bp, Homo sapiens
gggagagagaatgcc

SEQ ID NO: 1957727 - DNA, 15 bp, Homo sapiens
ggagagagaatgccc

SEQ ID NO: 1957728 - DNA, 15 bp, Homo sapiens
gagagagaatgccct

SEQ ID NO: 1957729 - DNA, 15 bp, Homo sapiens
agagagaatgccctt

SEQ ID NO: 1957730 - DNA, 15 bp, Homo sapiens
gagagaatgcccttg

SEQ ID NO: 1957731 - DNA, 15 bp, Homo sapiens
agagaatgcccttgg

SEQ ID NO: 1957732 - DNA, 15 bp, Homo sapiens
gagaatgcccttggc

SEQ ID NO: 1957733 - DNA, 15 bp, Homo sapiens
agaatgcccttggca

SEQ ID NO: 1957734 - DNA, 15 bp, Homo sapiens
gaatgcccttggcaa

SEQ ID NO: 1957735 - DNA, 15 bp, Homo sapiens
aatgcccttggcaat

SEQ ID NO: 1957736 - DNA, 15 bp, Homo sapiens
atgcccttggcaatc

SEQ ID NO: 1957737 - DNA, 15 bp, Homo sapiens
tgcccttggcaatca

SEQ ID NO: 1957738 - DNA, 15 bp, Homo sapiens
gcccttggcaatcag

SEQ ID NO: 1957739 - DNA, 15 bp, Homo sapiens
cccttggcaatcagg

SEQ ID NO: 1957740 - DNA, 15 bp, Homo sapiens
ccttggcaatcagga

SEQ ID NO: 1957741 - DNA, 15 bp, Homo sapiens
cttggcaatcaggac

SEQ ID NO: 1957742 - DNA, 15 bp, Homo sapiens
ttggcaatcaggaca

SEQ ID NO: 1957743 - DNA, 15 bp, Homo sapiens
tggcaatcaggacaa

SEQ ID NO: 1957744 - DNA, 15 bp, Homo sapiens
ggcaatcaggacaag

SEQ ID NO: 1957745 - DNA, 15 bp, Homo sapiens
gcaatcaggacaagt

SEQ ID NO: 1957746 - DNA, 15 bp, Homo sapiens
caatcaggacaagtt

SEQ ID NO: 1957747 - DNA, 15 bp, Homo sapiens
aatcaggacaagttt

SEQ ID NO: 1957748 - DNA, 15 bp, Homo sapiens
atcaggacaagtttt

SEQ ID NO: 1957749 - DNA, 15 bp, Homo sapiens
tcaggacaagtttta

SEQ ID NO: 1957750 - DNA, 15 bp, Homo sapiens
caggacaagttttaa

SEQ ID NO: 1957751 - DNA, 15 bp, Homo sapiens
aggacaagttttaat

SEQ ID NO: 1957752 - DNA, 15 bp, Homo sapiens
ggacaagttttaata

SEQ ID NO: 1957753 - DNA, 15 bp, Homo sapiens
gacaagttttaataa

SEQ ID NO: 1957754 - DNA, 15 bp, Homo sapiens
acaagttttaataat

SEQ ID NO: 1957755 - DNA, 15 bp, Homo sapiens
caagttttaataatc

SEQ ID NO: 1957756 - DNA, 15 bp, Homo sapiens
aagttttaataatca

SEQ ID NO: 1957757 - DNA, 15 bp, Homo sapiens
agttttaataatcat

SEQ ID NO: 1957758 - DNA, 15 bp, Homo sapiens
gttttaataatcatg

SEQ ID NO: 1957759 - DNA, 15 bp, Homo sapiens
ttttaataatcatgc

SEQ ID NO: 1957760 - DNA, 15 bp, Homo sapiens
tttaataatcatgcg

SEQ ID NO: 1957761 - DNA, 15 bp, Homo sapiens
ttaataatcatgcga

SEQ ID NO: 1957762 - DNA, 15 bp, Homo sapiens
taataatcatgcgag

SEQ ID NO: 1957763 - DNA, 15 bp, Homo sapiens
aataatcatgcgagc

SEQ ID NO: 1957764 - DNA, 15 bp, Homo sapiens
ataatcatgcgagct

SEQ ID NO: 1957765 - DNA, 15 bp, Homo sapiens
taatcatgcgagctt

SEQ ID NO: 1957766 - DNA, 15 bp, Homo sapiens
aatcatgcgagcttg

SEQ ID NO: 1957767 - DNA, 15 bp, Homo sapiens
atcatgcgagcttga

SEQ ID NO: 1957768 - DNA, 15 bp, Homo sapiens
tcatgcgagcttgag

SEQ ID NO: 1957769 - DNA, 15 bp, Homo sapiens
catgcgagcttgagc

SEQ ID NO: 1957770 - DNA, 15 bp, Homo sapiens
atgcgagcttgagca

SEQ ID NO: 1957771 - DNA, 15 bp, Homo sapiens
tgcgagcttgagcaa

SEQ ID NO: 1957772 - DNA, 15 bp, Homo sapiens
gcgagcttgagcaag

SEQ ID NO: 1957773 - DNA, 15 bp, Homo sapiens
cgagcttgagcaagc

SEQ ID NO: 1957774 - DNA, 15 bp, Homo sapiens
gagcttgagcaagcg

SEQ ID NO: 1957775 - DNA, 15 bp, Homo sapiens
agcttgagcaagcgt

SEQ ID NO: 1957776 - DNA, 15 bp, Homo sapiens
gcttgagcaagcgtt

SEQ ID NO: 1957777 - DNA, 15 bp, Homo sapiens
cttgagcaagcgtta

SEQ ID NO: 1957778 - DNA, 15 bp, Homo sapiens
ttgagcaagcgttaa

SEQ ID NO: 1957779 - DNA, 15 bp, Homo sapiens
tgagcaagcgttaaa

SEQ ID NO: 1957780 - DNA, 15 bp, Homo sapiens
gagcaagcgttaaat

SEQ ID NO: 1957781 - DNA, 15 bp, Homo sapiens
agcaagcgttaaatg

SEQ ID NO: 1957782 - DNA, 15 bp, Homo sapiens
gcaagcgttaaatga

SEQ ID NO: 1957783 - DNA, 15 bp, Homo sapiens
caagcgttaaatgaa

SEQ ID NO: 1957784 - DNA, 15 bp, Homo sapiens
aagcgttaaatgaaa

SEQ ID NO: 1957785 - DNA, 15 bp, Homo sapiens
agcgttaaatgaaac

SEQ ID NO: 1957786 - DNA, 15 bp, Homo sapiens
gcgttaaatgaaact

SEQ ID NO: 1957787 - DNA, 15 bp, Homo sapiens
cgttaaatgaaactg

SEQ ID NO: 1957788 - DNA, 15 bp, Homo sapiens
gttaaatgaaactgt

SEQ ID NO: 1957789 - DNA, 15 bp, Homo sapiens
ttaaatgaaactgtt

SEQ ID NO: 1957790 - DNA, 15 bp, Homo sapiens
taaatgaaactgttg

SEQ ID NO: 1957791 - DNA, 15 bp, Homo sapiens
aaatgaaactgttgt

SEQ ID NO: 1957792 - DNA, 15 bp, Homo sapiens
aatgaaactgttgtg

SEQ ID NO: 1957793 - DNA, 15 bp, Homo sapiens
atgaaactgttgtgt

SEQ ID NO: 1957794 - DNA, 15 bp, Homo sapiens
tgaaactgttgtgta

SEQ ID NO: 1957795 - DNA, 15 bp, Homo sapiens
gaaactgttgtgtaa

SEQ ID NO: 1957796 - DNA, 15 bp, Homo sapiens
aaactgttgtgtaag

SEQ ID NO: 1957797 - DNA, 15 bp, Homo sapiens
aactgttgtgtaaga

SEQ ID NO: 1957798 - DNA, 15 bp, Homo sapiens
actgttgtgtaagac

SEQ ID NO: 1957799 - DNA, 15 bp, Homo sapiens
ctgttgtgtaagact

SEQ ID NO: 1957800 - DNA, 15 bp, Homo sapiens
tgttgtgtaagactg

SEQ ID NO: 1957801 - DNA, 15 bp, Homo sapiens
gttgtgtaagactgc

SEQ ID NO: 1957802 - DNA, 15 bp, Homo sapiens
ttgtgtaagactgcg

SEQ ID NO: 1957803 - DNA, 15 bp, Homo sapiens
tgtgtaagactgcgg

SEQ ID NO: 1957804 - DNA, 15 bp, Homo sapiens
gtgtaagactgcggg

SEQ ID NO: 1957805 - DNA, 15 bp, Homo sapiens
tgtaagactgcgggc

SEQ ID NO: 1957806 - DNA, 15 bp, Homo sapiens
gtaagactgcgggcg

SEQ ID NO: 1957807 - DNA, 15 bp, Homo sapiens
taagactgcgggcgt

SEQ ID NO: 1957808 - DNA, 15 bp, Homo sapiens
aagactgcgggcgtt

SEQ ID NO: 1957809 - DNA, 15 bp, Homo sapiens
agactgcgggcgttc

SEQ ID NO: 1957810 - DNA, 15 bp, Homo sapiens
gactgcgggcgttct

SEQ ID NO: 1957811 - DNA, 15 bp, Homo sapiens
actgcgggcgttctg

SEQ ID NO: 1957812 - DNA, 15 bp, Homo sapiens
ctgcgggcgttctga

SEQ ID NO: 1957813 - DNA, 15 bp, Homo sapiens
tgcgggcgttctgat

SEQ ID NO: 1957814 - DNA, 15 bp, Homo sapiens
gcgggcgttctgatg

SEQ ID NO: 1957815 - DNA, 15 bp, Homo sapiens
cgggcgttctgatga

SEQ ID NO: 1957816 - DNA, 15 bp, Homo sapiens
gggcgttctgatgaa

SEQ ID NO: 1957817 - DNA, 15 bp, Homo sapiens
ggcgttctgatgaaa

SEQ ID NO: 1957818 - DNA, 15 bp, Homo sapiens
gcgttctgatgaaaa

SEQ ID NO: 1957819 - DNA, 15 bp, Homo sapiens
cgttctgatgaaaaa

SEQ ID NO: 1957820 - DNA, 15 bp, Homo sapiens
gttctgatgaaaaaa

SEQ ID NO: 1957821 - DNA, 15 bp, Homo sapiens
ttctgatgaaaaaaa

SEQ ID NO: 1957822 - DNA, 15 bp, Homo sapiens
tctgatgaaaaaaag

SEQ ID NO: 1957823 - DNA, 15 bp, Homo sapiens
ctgatgaaaaaaagg

SEQ ID NO: 1957824 - DNA, 15 bp, Homo sapiens
tgatgaaaaaaagga

SEQ ID NO: 1957825 - DNA, 15 bp, Homo sapiens
gatgaaaaaaaggaa

SEQ ID NO: 1957826 - DNA, 15 bp, Homo sapiens
atgaaaaaaaggaat

SEQ ID NO: 1957827 - DNA, 15 bp, Homo sapiens
tgaaaaaaaggaatg

SEQ ID NO: 1957828 - DNA, 15 bp, Homo sapiens
gaaaaaaaggaatga

SEQ ID NO: 1957829 - DNA, 15 bp, Homo sapiens
aaaaaaaggaatgat

SEQ ID NO: 1957830 - DNA, 15 bp, Homo sapiens
aaaaaaggaatgatc

SEQ ID NO: 1957831 - DNA, 15 bp, Homo sapiens
aaaaaggaatgatca

SEQ ID NO: 1957832 - DNA, 15 bp, Homo sapiens
aaaaggaatgatcag

SEQ ID NO: 1957833 - DNA, 15 bp, Homo sapiens
aaaggaatgatcagc

SEQ ID NO: 1957834 - DNA, 15 bp, Homo sapiens
aaggaatgatcagct

SEQ ID NO: 1957835 - DNA, 15 bp, Homo sapiens
aggaatgatcagctt

SEQ ID NO: 1957836 - DNA, 15 bp, Homo sapiens
ggaatgatcagcttg

SEQ ID NO: 1957837 - DNA, 15 bp, Homo sapiens
gaatgatcagcttga

SEQ ID NO: 1957838 - DNA, 15 bp, Homo sapiens
aatgatcagcttgag

SEQ ID NO: 1957839 - DNA, 15 bp, Homo sapiens
atgatcagcttgagc

SEQ ID NO: 1957840 - DNA, 15 bp, Homo sapiens
tgatcagcttgagct

SEQ ID NO: 1957841 - DNA, 15 bp, Homo sapiens
gatcagcttgagctc

SEQ ID NO: 1957842 - DNA, 15 bp, Homo sapiens
atcagcttgagctca

SEQ ID NO: 1957843 - DNA, 15 bp, Homo sapiens
tcagcttgagctcac

SEQ ID NO: 1957844 - DNA, 15 bp, Homo sapiens
cagcttgagctcaca

SEQ ID NO: 1957845 - DNA, 15 bp, Homo sapiens
agcttgagctcacaa

SEQ ID NO: 1957846 - DNA, 15 bp, Homo sapiens
gcttgagctcacaaa

SEQ ID NO: 1957847 - DNA, 15 bp, Homo sapiens
cttgagctcacaaaa

SEQ ID NO: 1957848 - DNA, 15 bp, Homo sapiens
ttgagctcacaaaaa

SEQ ID NO: 1957849 - DNA, 15 bp, Homo sapiens
tgagctcacaaaaaa

SEQ ID NO: 1957850 - DNA, 15 bp, Homo sapiens
gagctcacaaaaaag

SEQ ID NO: 1957851 - DNA, 15 bp, Homo sapiens
agctcacaaaaaagc

SEQ ID NO: 1957852 - DNA, 15 bp, Homo sapiens
gctcacaaaaaagca

SEQ ID NO: 1957853 - DNA, 15 bp, Homo sapiens
ctcacaaaaaagcaa

SEQ ID NO: 1957854 - DNA, 15 bp, Homo sapiens
tcacaaaaaagcaag

SEQ ID NO: 1957855 - DNA, 15 bp, Homo sapiens
cacaaaaaagcaaga

SEQ ID NO: 1957856 - DNA, 15 bp, Homo sapiens
acaaaaaagcaagag

SEQ ID NO: 1957857 - DNA, 15 bp, Homo sapiens
caaaaaagcaagaga

SEQ ID NO: 1957858 - DNA, 15 bp, Homo sapiens
aaaaaagcaagagag

SEQ ID NO: 1957859 - DNA, 15 bp, Homo sapiens
aaaaagcaagagagt

SEQ ID NO: 1957860 - DNA, 15 bp, Homo sapiens
aaaagcaagagagtc

SEQ ID NO: 1957861 - DNA, 15 bp, Homo sapiens
aaagcaagagagtct

SEQ ID NO: 1957862 - DNA, 15 bp, Homo sapiens
aagcaagagagtctg

SEQ ID NO: 1957863 - DNA, 15 bp, Homo sapiens
agcaagagagtctga

SEQ ID NO: 1957864 - DNA, 15 bp, Homo sapiens
gcaagagagtctgaa

SEQ ID NO: 1957865 - DNA, 15 bp, Homo sapiens
caagagagtctgaaa

SEQ ID NO: 1957866 - DNA, 15 bp, Homo sapiens
aagagagtctgaaaa

SEQ ID NO: 1957867 - DNA, 15 bp, Homo sapiens
agagagtctgaaaac

SEQ ID NO: 1957868 - DNA, 15 bp, Homo sapiens
gagagtctgaaaacc

SEQ ID NO: 1957869 - DNA, 15 bp, Homo sapiens
agagtctgaaaacca

SEQ ID NO: 1957870 - DNA, 15 bp, Homo sapiens
gagtctgaaaaccac

SEQ ID NO: 1957871 - DNA, 15 bp, Homo sapiens
agtctgaaaaccaca

SEQ ID NO: 1957872 - DNA, 15 bp, Homo sapiens
gtctgaaaaccacat

SEQ ID NO: 1957873 - DNA, 15 bp, Homo sapiens
tctgaaaaccacatc

SEQ ID NO: 1957874 - DNA, 15 bp, Homo sapiens
ctgaaaaccacatct

SEQ ID NO: 1957875 - DNA, 15 bp, Homo sapiens
tgaaaaccacatctg

SEQ ID NO: 1957876 - DNA, 15 bp, Homo sapiens
gaaaaccacatctgt

SEQ ID NO: 1957877 - DNA, 15 bp, Homo sapiens
aaaaccacatctgtg

SEQ ID NO: 1957878 - DNA, 15 bp, Homo sapiens
aaaccacatctgtgg

SEQ ID NO: 1957879 - DNA, 15 bp, Homo sapiens
aaccacatctgtggt

SEQ ID NO: 1957880 - DNA, 15 bp, Homo sapiens
accacatctgtggtt

SEQ ID NO: 1957881 - DNA, 15 bp, Homo sapiens
ccacatctgtggttg

SEQ ID NO: 1957882 - DNA, 15 bp, Homo sapiens
cacatctgtggttgt

SEQ ID NO: 1957883 - DNA, 15 bp, Homo sapiens
acatctgtggttgta

SEQ ID NO: 1957884 - DNA, 15 bp, Homo sapiens
catctgtggttgtac

SEQ ID NO: 1957885 - DNA, 15 bp, Homo sapiens
atctgtggttgtacc

SEQ ID NO: 1957886 - DNA, 15 bp, Homo sapiens
tctgtggttgtacca

SEQ ID NO: 1957887 - DNA, 15 bp, Homo sapiens
ctgtggttgtaccag

SEQ ID NO: 1957888 - DNA, 15 bp, Homo sapiens
tgtggttgtaccaga

SEQ ID NO: 1957889 - DNA, 15 bp, Homo sapiens
gtggttgtaccagag

SEQ ID NO: 1957890 - DNA, 15 bp, Homo sapiens
tggttgtaccagagc

SEQ ID NO: 1957891 - DNA, 15 bp, Homo sapiens
ggttgtaccagagca

SEQ ID NO: 1957892 - DNA, 15 bp, Homo sapiens
gttgtaccagagcat

SEQ ID NO: 1957893 - DNA, 15 bp, Homo sapiens
ttgtaccagagcatc

SEQ ID NO: 1957894 - DNA, 15 bp, Homo sapiens
tgtaccagagcatca

SEQ ID NO: 1957895 - DNA, 15 bp, Homo sapiens
gtaccagagcatcaa

SEQ ID NO: 1957896 - DNA, 15 bp, Homo sapiens
taccagagcatcaac

SEQ ID NO: 1957897 - DNA, 15 bp, Homo sapiens
accagagcatcaact

SEQ ID NO: 1957898 - DNA, 15 bp, Homo sapiens
ccagagcatcaactc

SEQ ID NO: 1957899 - DNA, 15 bp, Homo sapiens
cagagcatcaactca

SEQ ID NO: 1957900 - DNA, 15 bp, Homo sapiens
agagcatcaactcaa

SEQ ID NO: 1957901 - DNA, 15 bp, Homo sapiens
gagcatcaactcaaa

SEQ ID NO: 1957902 - DNA, 15 bp, Homo sapiens
agcatcaactcaaac

SEQ ID NO: 1957903 - DNA, 15 bp, Homo sapiens
gcatcaactcaaaca

SEQ ID NO: 1957904 - DNA, 15 bp, Homo sapiens
catcaactcaaacat

SEQ ID NO: 1957905 - DNA, 15 bp, Homo sapiens
atcaactcaaacatt

SEQ ID NO: 1957906 - DNA, 15 bp, Homo sapiens
tcaactcaaacattc

SEQ ID NO: 1957907 - DNA, 15 bp, Homo sapiens
caactcaaacattcc

SEQ ID NO: 1957908 - DNA, 15 bp, Homo sapiens
aactcaaacattccc

SEQ ID NO: 1957909 - DNA, 15 bp, Homo sapiens
actcaaacattccct

SEQ ID NO: 1957910 - DNA, 15 bp, Homo sapiens
ctcaaacattccctt

SEQ ID NO: 1957911 - DNA, 15 bp, Homo sapiens
tcaaacattcccttc

SEQ ID NO: 1957912 - DNA, 15 bp, Homo sapiens
caaacattcccttct

SEQ ID NO: 1957913 - DNA, 15 bp, Homo sapiens
aaacattcccttctg

SEQ ID NO: 1957914 - DNA, 15 bp, Homo sapiens
aacattcccttctga

SEQ ID NO: 1957915 - DNA, 15 bp, Homo sapiens
acattcccttctgac

SEQ ID NO: 1957916 - DNA, 15 bp, Homo sapiens
cattcccttctgaca

SEQ ID NO: 1957917 - DNA, 15 bp, Homo sapiens
attcccttctgacag

SEQ ID NO: 1957918 - DNA, 15 bp, Homo sapiens
ttcccttctgacagg

SEQ ID NO: 1957919 - DNA, 15 bp, Homo sapiens
tcccttctgacaggg

SEQ ID NO: 1957920 - DNA, 15 bp, Homo sapiens
cccttctgacaggga

SEQ ID NO: 1957921 - DNA, 15 bp, Homo sapiens
ccttctgacagggac

SEQ ID NO: 1957922 - DNA, 15 bp, Homo sapiens
cttctgacagggacc

SEQ ID NO: 1957923 - DNA, 15 bp, Homo sapiens
ttctgacagggacca

SEQ ID NO: 1957924 - DNA, 15 bp, Homo sapiens
tctgacagggaccag

SEQ ID NO: 1957925 - DNA, 15 bp, Homo sapiens
ctgacagggaccagg

SEQ ID NO: 1957926 - DNA, 15 bp, Homo sapiens
tgacagggaccaggt

SEQ ID NO: 1957927 - DNA, 15 bp, Homo sapiens
gacagggaccaggta

SEQ ID NO: 1957928 - DNA, 15 bp, Homo sapiens
acagggaccaggtag

SEQ ID NO: 1957929 - DNA, 15 bp, Homo sapiens
cagggaccaggtagc

SEQ ID NO: 1957930 - DNA, 15 bp, Homo sapiens
agggaccaggtagcc

SEQ ID NO: 1957931 - DNA, 15 bp, Homo sapiens
gggaccaggtagccc

SEQ ID NO: 1957932 - DNA, 15 bp, Homo sapiens
ggaccaggtagccca

SEQ ID NO: 1957933 - DNA, 15 bp, Homo sapiens
gaccaggtagcccag

SEQ ID NO: 1957934 - DNA, 15 bp, Homo sapiens
accaggtagcccaga

SEQ ID NO: 1957935 - DNA, 15 bp, Homo sapiens
ccaggtagcccagaa

SEQ ID NO: 1957936 - DNA, 15 bp, Homo sapiens
caggtagcccagaat

SEQ ID NO: 1957937 - DNA, 15 bp, Homo sapiens
aggtagcccagaatg

SEQ ID NO: 1957938 - DNA, 15 bp, Homo sapiens
ggtagcccagaatga

SEQ ID NO: 1957939 - DNA, 15 bp, Homo sapiens
gtagcccagaatgag

SEQ ID NO: 1957940 - DNA, 15 bp, Homo sapiens
tagcccagaatgaga

SEQ ID NO: 1957941 - DNA, 15 bp, Homo sapiens
agcccagaatgagag

SEQ ID NO: 1957942 - DNA, 15 bp, Homo sapiens
gcccagaatgagagc

SEQ ID NO: 1957943 - DNA, 15 bp, Homo sapiens
cccagaatgagagcg

SEQ ID NO: 1957944 - DNA, 15 bp, Homo sapiens
ccagaatgagagcga

SEQ ID NO: 1957945 - DNA, 15 bp, Homo sapiens
cagaatgagagcgaa

SEQ ID NO: 1957946 - DNA, 15 bp, Homo sapiens
agaatgagagcgaat

SEQ ID NO: 1957947 - DNA, 15 bp, Homo sapiens
gaatgagagcgaata

SEQ ID NO: 1957948 - DNA, 15 bp, Homo sapiens
aatgagagcgaatat

SEQ ID NO: 1957949 - DNA, 15 bp, Homo sapiens
atgagagcgaatatg

SEQ ID NO: 1957950 - DNA, 15 bp, Homo sapiens
tgagagcgaatatgt

SEQ ID NO: 1957951 - DNA, 15 bp, Homo sapiens
gagagcgaatatgtg

SEQ ID NO: 1957952 - DNA, 15 bp, Homo sapiens
agagcgaatatgtgt

SEQ ID NO: 1957953 - DNA, 15 bp, Homo sapiens
gagcgaatatgtgtg

SEQ ID NO: 1957954 - DNA, 15 bp, Homo sapiens
agcgaatatgtgtga

SEQ ID NO: 1957955 - DNA, 15 bp, Homo sapiens
gcgaatatgtgtgat

SEQ ID NO: 1957956 - DNA, 15 bp, Homo sapiens
cgaatatgtgtgata

SEQ ID NO: 1957957 - DNA, 15 bp, Homo sapiens
gaatatgtgtgatat

SEQ ID NO: 1957958 - DNA, 15 bp, Homo sapiens
aatatgtgtgatata

SEQ ID NO: 1957959 - DNA, 15 bp, Homo sapiens
atatgtgtgatataa

SEQ ID NO: 1957960 - DNA, 15 bp, Homo sapiens
tatgtgtgatataaa

SEQ ID NO: 1957961 - DNA, 15 bp, Homo sapiens
atgtgtgatataaag

SEQ ID NO: 1957962 - DNA, 15 bp, Homo sapiens
tgtgtgatataaagg

SEQ ID NO: 1957963 - DNA, 15 bp, Homo sapiens
gtgtgatataaaggg

SEQ ID NO: 1957964 - DNA, 15 bp, Homo sapiens
tgtgatataaagggg

SEQ ID NO: 1957965 - DNA, 15 bp, Homo sapiens
gtgatataaaggggg

SEQ ID NO: 1957966 - DNA, 15 bp, Homo sapiens
tgatataaagggggt

SEQ ID NO: 1957967 - DNA, 15 bp, Homo sapiens
gatataaagggggtg

SEQ ID NO: 1957968 - DNA, 15 bp, Homo sapiens
atataaagggggtga

SEQ ID NO: 1957969 - DNA, 15 bp, Homo sapiens
tataaagggggtgat

SEQ ID NO: 1957970 - DNA, 15 bp, Homo sapiens
ataaagggggtgatg

SEQ ID NO: 1957971 - DNA, 15 bp, Homo sapiens
taaagggggtgatga

SEQ ID NO: 1957972 - DNA, 15 bp, Homo sapiens
aaagggggtgatgac

SEQ ID NO: 1957973 - DNA, 15 bp, Homo sapiens
aagggggtgatgacg

SEQ ID NO: 1957974 - DNA, 15 bp, Homo sapiens
agggggtgatgacgg

SEQ ID NO: 1957975 - DNA, 15 bp, Homo sapiens
gggggtgatgacggg

SEQ ID NO: 1957976 - DNA, 15 bp, Homo sapiens
ggggtgatgacgggc

SEQ ID NO: 1957977 - DNA, 15 bp, Homo sapiens
gggtgatgacgggca

SEQ ID NO: 1957978 - DNA, 15 bp, Homo sapiens
ggtgatgacgggcac

SEQ ID NO: 1957979 - DNA, 15 bp, Homo sapiens
gtgatgacgggcaca

SEQ ID NO: 1957980 - DNA, 15 bp, Homo sapiens
tgatgacgggcacag

SEQ ID NO: 1957981 - DNA, 15 bp, Homo sapiens
gatgacgggcacaga

SEQ ID NO: 1957982 - DNA, 15 bp, Homo sapiens
atgacgggcacagag

SEQ ID NO: 1957983 - DNA, 15 bp, Homo sapiens
tgacgggcacagagg

SEQ ID NO: 1957984 - DNA, 15 bp, Homo sapiens
gacgggcacagagga

SEQ ID NO: 1957985 - DNA, 15 bp, Homo sapiens
acgggcacagaggag

SEQ ID NO: 1957986 - DNA, 15 bp, Homo sapiens
cgggcacagaggagc

SEQ ID NO: 1957987 - DNA, 15 bp, Homo sapiens
gggcacagaggagct

SEQ ID NO: 1957988 - DNA, 15 bp, Homo sapiens
ggcacagaggagctc

SEQ ID NO: 1957989 - DNA, 15 bp, Homo sapiens
gcacagaggagctcc

SEQ ID NO: 1957990 - DNA, 15 bp, Homo sapiens
cacagaggagctcct

SEQ ID NO: 1957991 - DNA, 15 bp, Homo sapiens
acagaggagctcctg

SEQ ID NO: 1957992 - DNA, 15 bp, Homo sapiens
cagaggagctcctgc

SEQ ID NO: 1957993 - DNA, 15 bp, Homo sapiens
agaggagctcctgca

SEQ ID NO: 1957994 - DNA, 15 bp, Homo sapiens
gaggagctcctgcac

SEQ ID NO: 1957995 - DNA, 15 bp, Homo sapiens
aggagctcctgcact

SEQ ID NO: 1957996 - DNA, 15 bp, Homo sapiens
ggagctcctgcactg

SEQ ID NO: 1957997 - DNA, 15 bp, Homo sapiens
gagctcctgcactgt

SEQ ID NO: 1957998 - DNA, 15 bp, Homo sapiens
agctcctgcactgtg

SEQ ID NO: 1957999 - DNA, 15 bp, Homo sapiens
gctcctgcactgtga

SEQ ID NO: 1958000 - DNA, 15 bp, Homo sapiens
ctcctgcactgtgag

SEQ ID NO: 1958001 - DNA, 15 bp, Homo sapiens
tcctgcactgtgaga

SEQ ID NO: 1958002 - DNA, 15 bp, Homo sapiens
cctgcactgtgagaa

SEQ ID NO: 1958003 - DNA, 15 bp, Homo sapiens
ctgcactgtgagaag

SEQ ID NO: 1958004 - DNA, 15 bp, Homo sapiens
tgcactgtgagaagt

SEQ ID NO: 1958005 - DNA, 15 bp, Homo sapiens
gcactgtgagaagta

SEQ ID NO: 1958006 - DNA, 15 bp, Homo sapiens
cactgtgagaagtag

SEQ ID NO: 1958007 - DNA, 15 bp, Homo sapiens
actgtgagaagtagg

SEQ ID NO: 1958008 - DNA, 15 bp, Homo sapiens
ctgtgagaagtaggg

SEQ ID NO: 1958009 - DNA, 15 bp, Homo sapiens
tgtgagaagtagggt

SEQ ID NO: 1958010 - DNA, 15 bp, Homo sapiens
gtgagaagtagggtt

SEQ ID NO: 1958011 - DNA, 15 bp, Homo sapiens
tgagaagtagggtta

SEQ ID NO: 1958012 - DNA, 15 bp, Homo sapiens
gagaagtagggttag

SEQ ID NO: 1958013 - DNA, 15 bp, Homo sapiens
agaagtagggttagt

SEQ ID NO: 1958014 - DNA, 15 bp, Homo sapiens
gaagtagggttagta

SEQ ID NO: 1958015 - DNA, 15 bp, Homo sapiens
aagtagggttagtag

SEQ ID NO: 1958016 - DNA, 15 bp, Homo sapiens
agtagggttagtagg

SEQ ID NO: 1958017 - DNA, 15 bp, Homo sapiens
gtagggttagtaggg

SEQ ID NO: 1958018 - DNA, 15 bp, Homo sapiens
tagggttagtagggg

SEQ ID NO: 1958019 - DNA, 15 bp, Homo sapiens
agggttagtaggggt

SEQ ID NO: 1958020 - DNA, 15 bp, Homo sapiens
gggttagtaggggtt

SEQ ID NO: 1958021 - DNA, 15 bp, Homo sapiens
ggttagtaggggttc

SEQ ID NO: 1958022 - DNA, 15 bp, Homo sapiens
gttagtaggggttca

SEQ ID NO: 1958023 - DNA, 15 bp, Homo sapiens
ttagtaggggttcat

SEQ ID NO: 1958024 - DNA, 15 bp, Homo sapiens
tagtaggggttcatt

SEQ ID NO: 1958025 - DNA, 15 bp, Homo sapiens
agtaggggttcatta

SEQ ID NO: 1958026 - DNA, 15 bp, Homo sapiens
gtaggggttcattag

SEQ ID NO: 1958027 - DNA, 15 bp, Homo sapiens
taggggttcattagt

SEQ ID NO: 1958028 - DNA, 15 bp, Homo sapiens
aggggttcattagta

SEQ ID NO: 1958029 - DNA, 15 bp, Homo sapiens
ggggttcattagtag

SEQ ID NO: 1958030 - DNA, 15 bp, Homo sapiens
gggttcattagtagt

SEQ ID NO: 1958031 - DNA, 15 bp, Homo sapiens
ggttcattagtagtg

SEQ ID NO: 1958032 - DNA, 15 bp, Homo sapiens
gttcattagtagtgc

SEQ ID NO: 1958033 - DNA, 15 bp, Homo sapiens
ttcattagtagtgcc

SEQ ID NO: 1958034 - DNA, 15 bp, Homo sapiens
tcattagtagtgcct

SEQ ID NO: 1958035 - DNA, 15 bp, Homo sapiens
cattagtagtgcctt

SEQ ID NO: 1958036 - DNA, 15 bp, Homo sapiens
attagtagtgccttt

SEQ ID NO: 1958037 - DNA, 15 bp, Homo sapiens
ttagtagtgcctttc

SEQ ID NO: 1958038 - DNA, 15 bp, Homo sapiens
tagtagtgcctttca

SEQ ID NO: 1958039 - DNA, 15 bp, Homo sapiens
agtagtgcctttcag

SEQ ID NO: 1958040 - DNA, 15 bp, Homo sapiens
gtagtgcctttcaga

SEQ ID NO: 1958041 - DNA, 15 bp, Homo sapiens
tagtgcctttcagat

SEQ ID NO: 1958042 - DNA, 15 bp, Homo sapiens
agtgcctttcagatg

SEQ ID NO: 1958043 - DNA, 15 bp, Homo sapiens
gtgcctttcagatgt

SEQ ID NO: 1958044 - DNA, 15 bp, Homo sapiens
tgcctttcagatgtg

SEQ ID NO: 1958045 - DNA, 15 bp, Homo sapiens
gcctttcagatgtgc

SEQ ID NO: 1958046 - DNA, 15 bp, Homo sapiens
cctttcagatgtgcg

SEQ ID NO: 1958047 - DNA, 15 bp, Homo sapiens
ctttcagatgtgcga

SEQ ID NO: 1958048 - DNA, 15 bp, Homo sapiens
tttcagatgtgcgag

SEQ ID NO: 1958049 - DNA, 15 bp, Homo sapiens
ttcagatgtgcgaga

SEQ ID NO: 1958050 - DNA, 15 bp, Homo sapiens
tcagatgtgcgagat

SEQ ID NO: 1958051 - DNA, 15 bp, Homo sapiens
cagatgtgcgagatc

SEQ ID NO: 1958052 - DNA, 15 bp, Homo sapiens
agatgtgcgagatct

SEQ ID NO: 1958053 - DNA, 15 bp, Homo sapiens
gatgtgcgagatcta

SEQ ID NO: 1958054 - DNA, 15 bp, Homo sapiens
atgtgcgagatctaa

SEQ ID NO: 1958055 - DNA, 15 bp, Homo sapiens
tgtgcgagatctaaa

SEQ ID NO: 1958056 - DNA, 15 bp, Homo sapiens
gtgcgagatctaaat

SEQ ID NO: 1958057 - DNA, 15 bp, Homo sapiens
tgcgagatctaaatg

SEQ ID NO: 1958058 - DNA, 15 bp, Homo sapiens
gcgagatctaaatga

SEQ ID NO: 1958059 - DNA, 15 bp, Homo sapiens
cgagatctaaatgag

SEQ ID NO: 1958060 - DNA, 15 bp, Homo sapiens
gagatctaaatgagt

SEQ ID NO: 1958061 - DNA, 15 bp, Homo sapiens
agatctaaatgagta

SEQ ID NO: 1958062 - DNA, 15 bp, Homo sapiens
gatctaaatgagtaa

SEQ ID NO: 1958063 - DNA, 15 bp, Homo sapiens
atctaaatgagtaat

SEQ ID NO: 1958064 - DNA, 15 bp, Homo sapiens
tctaaatgagtaata

SEQ ID NO: 1958065 - DNA, 15 bp, Homo sapiens
ctaaatgagtaatac

SEQ ID NO: 1958066 - DNA, 15 bp, Homo sapiens
taaatgagtaatact

SEQ ID NO: 1958067 - DNA, 15 bp, Homo sapiens
aaatgagtaatacta

SEQ ID NO: 1958068 - DNA, 15 bp, Homo sapiens
aatgagtaatactac

SEQ ID NO: 1958069 - DNA, 15 bp, Homo sapiens
atgagtaatactaca

SEQ ID NO: 1958070 - DNA, 15 bp, Homo sapiens
tgagtaatactacac

SEQ ID NO: 1958071 - DNA, 15 bp, Homo sapiens
gagtaatactacaca

SEQ ID NO: 1958072 - DNA, 15 bp, Homo sapiens
agtaatactacacac

SEQ ID NO: 1958073 - DNA, 15 bp, Homo sapiens
gtaatactacacacc

SEQ ID NO: 1958074 - DNA, 15 bp, Homo sapiens
taatactacacaccg

SEQ ID NO: 1958075 - DNA, 15 bp, Homo sapiens
aatactacacaccgc

SEQ ID NO: 1958076 - DNA, 15 bp, Homo sapiens
atactacacaccgca

SEQ ID NO: 1958077 - DNA, 15 bp, Homo sapiens
tactacacaccgcat

SEQ ID NO: 1958078 - DNA, 15 bp, Homo sapiens
actacacaccgcata

SEQ ID NO: 1958079 - DNA, 15 bp, Homo sapiens
ctacacaccgcataa

SEQ ID NO: 1958080 - DNA, 15 bp, Homo sapiens
tacacaccgcataag

SEQ ID NO: 1958081 - DNA, 15 bp, Homo sapiens
acacaccgcataaga

SEQ ID NO: 1958082 - DNA, 15 bp, Homo sapiens
cacaccgcataagag

SEQ ID NO: 1958083 - DNA, 15 bp, Homo sapiens
acaccgcataagagg

SEQ ID NO: 1958084 - DNA, 15 bp, Homo sapiens
caccgcataagagga

SEQ ID NO: 1958085 - DNA, 15 bp, Homo sapiens
accgcataagaggaa

SEQ ID NO: 1958086 - DNA, 15 bp, Homo sapiens
ccgcataagaggaat

SEQ ID NO: 1958087 - DNA, 15 bp, Homo sapiens
cgcataagaggaatc

SEQ ID NO: 1958088 - DNA, 15 bp, Homo sapiens
gcataagaggaatca

SEQ ID NO: 1958089 - DNA, 15 bp, Homo sapiens
cataagaggaatcac

SEQ ID NO: 1958090 - DNA, 15 bp, Homo sapiens
ataagaggaatcact

SEQ ID NO: 1958091 - DNA, 15 bp, Homo sapiens
taagaggaatcacta

SEQ ID NO: 1958092 - DNA, 15 bp, Homo sapiens
aagaggaatcactaa

SEQ ID NO: 1958093 - DNA, 15 bp, Homo sapiens
agaggaatcactaat

SEQ ID NO: 1958094 - DNA, 15 bp, Homo sapiens
gaggaatcactaatt

SEQ ID NO: 1958095 - DNA, 15 bp, Homo sapiens
aggaatcactaatta

SEQ ID NO: 1958096 - DNA, 15 bp, Homo sapiens
ggaatcactaattat

SEQ ID NO: 1958097 - DNA, 15 bp, Homo sapiens
gaatcactaattata

SEQ ID NO: 1958098 - DNA, 15 bp, Homo sapiens
aatcactaattatat

SEQ ID NO: 1958099 - DNA, 15 bp, Homo sapiens
atcactaattatatt

SEQ ID NO: 1958100 - DNA, 15 bp, Homo sapiens
tcactaattatattt

SEQ ID NO: 1958101 - DNA, 15 bp, Homo sapiens
cactaattatattta

SEQ ID NO: 1958102 - DNA, 15 bp, Homo sapiens
actaattatatttat

SEQ ID NO: 1958103 - DNA, 15 bp, Homo sapiens
ctaattatatttatg

SEQ ID NO: 1958104 - DNA, 15 bp, Homo sapiens
taattatatttatgt

SEQ ID NO: 1958105 - DNA, 15 bp, Homo sapiens
aattatatttatgtc

SEQ ID NO: 1958106 - DNA, 15 bp, Homo sapiens
attatatttatgtct

SEQ ID NO: 1958107 - DNA, 15 bp, Homo sapiens
ttatatttatgtctt

SEQ ID NO: 1958108 - DNA, 15 bp, Homo sapiens
tatatttatgtcttg

SEQ ID NO: 1958109 - DNA, 15 bp, Homo sapiens
atatttatgtcttgg

SEQ ID NO: 1958110 - DNA, 15 bp, Homo sapiens
tatttatgtcttggt

SEQ ID NO: 1958111 - DNA, 15 bp, Homo sapiens
atttatgtcttggtg

SEQ ID NO: 1958112 - DNA, 15 bp, Homo sapiens
tttatgtcttggtga

SEQ ID NO: 1958113 - DNA, 15 bp, Homo sapiens
ttatgtcttggtgag

SEQ ID NO: 1958114 - DNA, 15 bp, Homo sapiens
tatgtcttggtgagg

SEQ ID NO: 1958115 - DNA, 15 bp, Homo sapiens
atgtcttggtgagga

SEQ ID NO: 1958116 - DNA, 15 bp, Homo sapiens
tgtcttggtgaggaa

SEQ ID NO: 1958117 - DNA, 15 bp, Homo sapiens
gtcttggtgaggaaa

SEQ ID NO: 1958118 - DNA, 15 bp, Homo sapiens
tcttggtgaggaaaa

SEQ ID NO: 1958119 - DNA, 15 bp, Homo sapiens
cttggtgaggaaaag

SEQ ID NO: 1958120 - DNA, 15 bp, Homo sapiens
ttggtgaggaaaagt

SEQ ID NO: 1958121 - DNA, 15 bp, Homo sapiens
tggtgaggaaaagtt

SEQ ID NO: 1958122 - DNA, 15 bp, Homo sapiens
ggtgaggaaaagttt

SEQ ID NO: 1958123 - DNA, 15 bp, Homo sapiens
gtgaggaaaagtttg

SEQ ID NO: 1958124 - DNA, 15 bp, Homo sapiens
tgaggaaaagtttgt

SEQ ID NO: 1958125 - DNA, 15 bp, Homo sapiens
gaggaaaagtttgta

SEQ ID NO: 1958126 - DNA, 15 bp, Homo sapiens
aggaaaagtttgtaa

SEQ ID NO: 1958127 - DNA, 15 bp, Homo sapiens
ggaaaagtttgtaag

SEQ ID NO: 1958128 - DNA, 15 bp, Homo sapiens
gaaaagtttgtaagg

SEQ ID NO: 1958129 - DNA, 15 bp, Homo sapiens
aaaagtttgtaaggc

SEQ ID NO: 1958130 - DNA, 15 bp, Homo sapiens
aaagtttgtaaggcc

SEQ ID NO: 1958131 - DNA, 15 bp, Homo sapiens
aagtttgtaaggcca

SEQ ID NO: 1958132 - DNA, 15 bp, Homo sapiens
agtttgtaaggccag

SEQ ID NO: 1958133 - DNA, 15 bp, Homo sapiens
gtttgtaaggccagc

SEQ ID NO: 1958134 - DNA, 15 bp, Homo sapiens
tttgtaaggccagca

SEQ ID NO: 1958135 - DNA, 15 bp, Homo sapiens
ttgtaaggccagcat

SEQ ID NO: 1958136 - DNA, 15 bp, Homo sapiens
tgtaaggccagcatt

SEQ ID NO: 1958137 - DNA, 15 bp, Homo sapiens
gtaaggccagcatta

SEQ ID NO: 1958138 - DNA, 15 bp, Homo sapiens
taaggccagcattag

SEQ ID NO: 1958139 - DNA, 15 bp, Homo sapiens
aaggccagcattagg

SEQ ID NO: 1958140 - DNA, 15 bp, Homo sapiens
aggccagcattaggg

SEQ ID NO: 1958141 - DNA, 15 bp, Homo sapiens
ggccagcattagggc

SEQ ID NO: 1958142 - DNA, 15 bp, Homo sapiens
gccagcattagggca

SEQ ID NO: 1958143 - DNA, 15 bp, Homo sapiens
ccagcattagggcac

SEQ ID NO: 1958144 - DNA, 15 bp, Homo sapiens
cagcattagggcacc

SEQ ID NO: 1958145 - DNA, 15 bp, Homo sapiens
agcattagggcacct

SEQ ID NO: 1958146 - DNA, 15 bp, Homo sapiens
gcattagggcaccta

SEQ ID NO: 1958147 - DNA, 15 bp, Homo sapiens
cattagggcacctaa

SEQ ID NO: 1958148 - DNA, 15 bp, Homo sapiens
attagggcacctaac

SEQ ID NO: 1958149 - DNA, 15 bp, Homo sapiens
ttagggcacctaact

SEQ ID NO: 1958150 - DNA, 15 bp, Homo sapiens
tagggcacctaactt

SEQ ID NO: 1958151 - DNA, 15 bp, Homo sapiens
agggcacctaacttt

SEQ ID NO: 1958152 - DNA, 15 bp, Homo sapiens
gggcacctaactttg

SEQ ID NO: 1958153 - DNA, 15 bp, Homo sapiens
ggcacctaactttgc

SEQ ID NO: 1958154 - DNA, 15 bp, Homo sapiens
gcacctaactttgcc

SEQ ID NO: 1958155 - DNA, 15 bp, Homo sapiens
cacctaactttgcct

SEQ ID NO: 1958156 - DNA, 15 bp, Homo sapiens
acctaactttgcctg

SEQ ID NO: 1958157 - DNA, 15 bp, Homo sapiens
cctaactttgcctgt

SEQ ID NO: 1958158 - DNA, 15 bp, Homo sapiens
ctaactttgcctgtt

SEQ ID NO: 1958159 - DNA, 15 bp, Homo sapiens
taactttgcctgttg

SEQ ID NO: 1958160 - DNA, 15 bp, Homo sapiens
aactttgcctgttgc

SEQ ID NO: 1958161 - DNA, 15 bp, Homo sapiens
actttgcctgttgca

SEQ ID NO: 1958162 - DNA, 15 bp, Homo sapiens
ctttgcctgttgcat

SEQ ID NO: 1958163 - DNA, 15 bp, Homo sapiens
tttgcctgttgcata

SEQ ID NO: 1958164 - DNA, 15 bp, Homo sapiens
ttgcctgttgcatag

SEQ ID NO: 1958165 - DNA, 15 bp, Homo sapiens
tgcctgttgcatagt

SEQ ID NO: 1958166 - DNA, 15 bp, Homo sapiens
gcctgttgcatagtt

SEQ ID NO: 1958167 - DNA, 15 bp, Homo sapiens
cctgttgcatagttt

SEQ ID NO: 1958168 - DNA, 15 bp, Homo sapiens
ctgttgcatagtttt

SEQ ID NO: 1958169 - DNA, 15 bp, Homo sapiens
tgttgcatagttttg

SEQ ID NO: 1958170 - DNA, 15 bp, Homo sapiens
gttgcatagttttga

SEQ ID NO: 1958171 - DNA, 15 bp, Homo sapiens
ttgcatagttttgaa

SEQ ID NO: 1958172 - DNA, 15 bp, Homo sapiens
tgcatagttttgaaa

SEQ ID NO: 1958173 - DNA, 15 bp, Homo sapiens
gcatagttttgaaat

SEQ ID NO: 1958174 - DNA, 15 bp, Homo sapiens
catagttttgaaatg

SEQ ID NO: 1958175 - DNA, 15 bp, Homo sapiens
atagttttgaaatgt

SEQ ID NO: 1958176 - DNA, 15 bp, Homo sapiens
tagttttgaaatgtt

SEQ ID NO: 1958177 - DNA, 15 bp, Homo sapiens
agttttgaaatgttc

SEQ ID NO: 1958178 - DNA, 15 bp, Homo sapiens
gttttgaaatgttcc

SEQ ID NO: 1958179 - DNA, 15 bp, Homo sapiens
ttttgaaatgttcct

SEQ ID NO: 1958180 - DNA, 15 bp, Homo sapiens
tttgaaatgttcctg

SEQ ID NO: 1958181 - DNA, 15 bp, Homo sapiens
ttgaaatgttcctgg

SEQ ID NO: 1958182 - DNA, 15 bp, Homo sapiens
tgaaatgttcctgga

SEQ ID NO: 1958183 - DNA, 15 bp, Homo sapiens
gaaatgttcctggat

SEQ ID NO: 1958184 - DNA, 15 bp, Homo sapiens
aaatgttcctggatt

SEQ ID NO: 1958185 - DNA, 15 bp, Homo sapiens
aatgttcctggattt

SEQ ID NO: 1958186 - DNA, 15 bp, Homo sapiens
atgttcctggatttt

SEQ ID NO: 1958187 - DNA, 15 bp, Homo sapiens
tgttcctggattttg

SEQ ID NO: 1958188 - DNA, 15 bp, Homo sapiens
gttcctggattttgt

SEQ ID NO: 1958189 - DNA, 15 bp, Homo sapiens
ttcctggattttgtg

SEQ ID NO: 1958190 - DNA, 15 bp, Homo sapiens
tcctggattttgtgc

SEQ ID NO: 1958191 - DNA, 15 bp, Homo sapiens
cctggattttgtgct

SEQ ID NO: 1958192 - DNA, 15 bp, Homo sapiens
ctggattttgtgctg

SEQ ID NO: 1958193 - DNA, 15 bp, Homo sapiens
tggattttgtgctgc

SEQ ID NO: 1958194 - DNA, 15 bp, Homo sapiens
ggattttgtgctgcc

SEQ ID NO: 1958195 - DNA, 15 bp, Homo sapiens
gattttgtgctgcca

SEQ ID NO: 1958196 - DNA, 15 bp, Homo sapiens
attttgtgctgccag

SEQ ID NO: 1958197 - DNA, 15 bp, Homo sapiens
ttttgtgctgccagt

SEQ ID NO: 1958198 - DNA, 15 bp, Homo sapiens
tttgtgctgccagtt

SEQ ID NO: 1958199 - DNA, 15 bp, Homo sapiens
ttgtgctgccagttt

SEQ ID NO: 1958200 - DNA, 15 bp, Homo sapiens
tgtgctgccagtttt

SEQ ID NO: 1958201 - DNA, 15 bp, Homo sapiens
gtgctgccagttttg

SEQ ID NO: 1958202 - DNA, 15 bp, Homo sapiens
tgctgccagttttgc

SEQ ID NO: 1958203 - DNA, 15 bp, Homo sapiens
gctgccagttttgca

SEQ ID NO: 1958204 - DNA, 15 bp, Homo sapiens
ctgccagttttgcat

SEQ ID NO: 1958205 - DNA, 15 bp, Homo sapiens
tgccagttttgcatg

SEQ ID NO: 1958206 - DNA, 15 bp, Homo sapiens
gccagttttgcatgg

SEQ ID NO: 1958207 - DNA, 15 bp, Homo sapiens
ccagttttgcatggc

SEQ ID NO: 1958208 - DNA, 15 bp, Homo sapiens
cagttttgcatggca

SEQ ID NO: 1958209 - DNA, 15 bp, Homo sapiens
agttttgcatggcat

SEQ ID NO: 1958210 - DNA, 15 bp, Homo sapiens
gttttgcatggcatc

SEQ ID NO: 1958211 - DNA, 15 bp, Homo sapiens
ttttgcatggcatct

SEQ ID NO: 1958212 - DNA, 15 bp, Homo sapiens
tttgcatggcatctt

SEQ ID NO: 1958213 - DNA, 15 bp, Homo sapiens
ttgcatggcatcttg

SEQ ID NO: 1958214 - DNA, 15 bp, Homo sapiens
tgcatggcatcttgc

SEQ ID NO: 1958215 - DNA, 15 bp, Homo sapiens
gcatggcatcttgca

SEQ ID NO: 1958216 - DNA, 15 bp, Homo sapiens
catggcatcttgcac

SEQ ID NO: 1958217 - DNA, 15 bp, Homo sapiens
atggcatcttgcaca

SEQ ID NO: 1958218 - DNA, 15 bp, Homo sapiens
tggcatcttgcacac

SEQ ID NO: 1958219 - DNA, 15 bp, Homo sapiens
ggcatcttgcacact

SEQ ID NO: 1958220 - DNA, 15 bp, Homo sapiens
gcatcttgcacacta

SEQ ID NO: 1958221 - DNA, 15 bp, Homo sapiens
catcttgcacactat

SEQ ID NO: 1958222 - DNA, 15 bp, Homo sapiens
atcttgcacactata

SEQ ID NO: 1958223 - DNA, 15 bp, Homo sapiens
tcttgcacactatac

SEQ ID NO: 1958224 - DNA, 15 bp, Homo sapiens
cttgcacactatacc

SEQ ID NO: 1958225 - DNA, 15 bp, Homo sapiens
ttgcacactatacct

SEQ ID NO: 1958226 - DNA, 15 bp, Homo sapiens
tgcacactatacctg

SEQ ID NO: 1958227 - DNA, 15 bp, Homo sapiens
gcacactatacctgc

SEQ ID NO: 1958228 - DNA, 15 bp, Homo sapiens
cacactatacctgcc

SEQ ID NO: 1958229 - DNA, 15 bp, Homo sapiens
acactatacctgcct

SEQ ID NO: 1958230 - DNA, 15 bp, Homo sapiens
cactatacctgcctt

SEQ ID NO: 1958231 - DNA, 15 bp, Homo sapiens
actatacctgccttt

SEQ ID NO: 1958232 - DNA, 15 bp, Homo sapiens
ctatacctgcctttt

SEQ ID NO: 1958233 - DNA, 15 bp, Homo sapiens
tatacctgccttttt

SEQ ID NO: 1958234 - DNA, 15 bp, Homo sapiens
atacctgcctttttt

SEQ ID NO: 1958235 - DNA, 15 bp, Homo sapiens
tacctgccttttttg

SEQ ID NO: 1958236 - DNA, 15 bp, Homo sapiens
acctgccttttttgt

SEQ ID NO: 1958237 - DNA, 15 bp, Homo sapiens
cctgccttttttgtt

SEQ ID NO: 1958238 - DNA, 15 bp, Homo sapiens
ctgccttttttgttt

SEQ ID NO: 1958239 - DNA, 15 bp, Homo sapiens
tgccttttttgtttt

SEQ ID NO: 1958240 - DNA, 15 bp, Homo sapiens
gccttttttgttttt

SEQ ID NO: 1958241 - DNA, 15 bp, Homo sapiens
ccttttttgtttttc

SEQ ID NO: 1958242 - DNA, 15 bp, Homo sapiens
cttttttgtttttcc

SEQ ID NO: 1958243 - DNA, 15 bp, Homo sapiens
ttttttgtttttcct

SEQ ID NO: 1958244 - DNA, 15 bp, Homo sapiens
tttttgtttttcctg

SEQ ID NO: 1958245 - DNA, 15 bp, Homo sapiens
ttttgtttttcctga

SEQ ID NO: 1958246 - DNA, 15 bp, Homo sapiens
tttgtttttcctgaa

SEQ ID NO: 1958247 - DNA, 15 bp, Homo sapiens
ttgtttttcctgaat

SEQ ID NO: 1958248 - DNA, 15 bp, Homo sapiens
tgtttttcctgaatc

SEQ ID NO: 1958249 - DNA, 15 bp, Homo sapiens
gtttttcctgaatca

SEQ ID NO: 1958250 - DNA, 15 bp, Homo sapiens
tttttcctgaatcat

SEQ ID NO: 1958251 - DNA, 15 bp, Homo sapiens
ttttcctgaatcatc

SEQ ID NO: 1958252 - DNA, 15 bp, Homo sapiens
tttcctgaatcatct

SEQ ID NO: 1958253 - DNA, 15 bp, Homo sapiens
ttcctgaatcatctg

SEQ ID NO: 1958254 - DNA, 15 bp, Homo sapiens
tcctgaatcatctgt

SEQ ID NO: 1958255 - DNA, 15 bp, Homo sapiens
cctgaatcatctgta

SEQ ID NO: 1958256 - DNA, 15 bp, Homo sapiens
ctgaatcatctgtaa

SEQ ID NO: 1958257 - DNA, 15 bp, Homo sapiens
tgaatcatctgtaaa

SEQ ID NO: 1958258 - DNA, 15 bp, Homo sapiens
gaatcatctgtaaag

SEQ ID NO: 1958259 - DNA, 15 bp, Homo sapiens
aatcatctgtaaaga

SEQ ID NO: 1958260 - DNA, 15 bp, Homo sapiens
atcatctgtaaagac

SEQ ID NO: 1958261 - DNA, 15 bp, Homo sapiens
tcatctgtaaagaca

SEQ ID NO: 1958262 - DNA, 15 bp, Homo sapiens
catctgtaaagacag

SEQ ID NO: 1958263 - DNA, 15 bp, Homo sapiens
atctgtaaagacagt

SEQ ID NO: 1958264 - DNA, 15 bp, Homo sapiens
tctgtaaagacagta

SEQ ID NO: 1958265 - DNA, 15 bp, Homo sapiens
ctgtaaagacagtag

SEQ ID NO: 1958266 - DNA, 15 bp, Homo sapiens
tgtaaagacagtagt

SEQ ID NO: 1958267 - DNA, 15 bp, Homo sapiens
gtaaagacagtagtg

SEQ ID NO: 1958268 - DNA, 15 bp, Homo sapiens
taaagacagtagtgg

SEQ ID NO: 1958269 - DNA, 15 bp, Homo sapiens
aaagacagtagtggc

SEQ ID NO: 1958270 - DNA, 15 bp, Homo sapiens
aagacagtagtggcg

SEQ ID NO: 1958271 - DNA, 15 bp, Homo sapiens
agacagtagtggcgt

SEQ ID NO: 1958272 - DNA, 15 bp, Homo sapiens
gacagtagtggcgtg

SEQ ID NO: 1958273 - DNA, 15 bp, Homo sapiens
acagtagtggcgtga

SEQ ID NO: 1958274 - DNA, 15 bp, Homo sapiens
cagtagtggcgtgag

SEQ ID NO: 1958275 - DNA, 15 bp, Homo sapiens
agtagtggcgtgagg

SEQ ID NO: 1958276 - DNA, 15 bp, Homo sapiens
gtagtggcgtgaggc

SEQ ID NO: 1958277 - DNA, 15 bp, Homo sapiens
tagtggcgtgaggca

SEQ ID NO: 1958278 - DNA, 15 bp, Homo sapiens
agtggcgtgaggcaa

SEQ ID NO: 1958279 - DNA, 15 bp, Homo sapiens
gtggcgtgaggcaag

SEQ ID NO: 1958280 - DNA, 15 bp, Homo sapiens
tggcgtgaggcaagg

SEQ ID NO: 1958281 - DNA, 15 bp, Homo sapiens
ggcgtgaggcaaggg

SEQ ID NO: 1958282 - DNA, 15 bp, Homo sapiens
gcgtgaggcaagggc

SEQ ID NO: 1958283 - DNA, 15 bp, Homo sapiens
cgtgaggcaagggct

SEQ ID NO: 1958284 - DNA, 15 bp, Homo sapiens
gtgaggcaagggctc

SEQ ID NO: 1958285 - DNA, 15 bp, Homo sapiens
tgaggcaagggctca

SEQ ID NO: 1958286 - DNA, 15 bp, Homo sapiens
gaggcaagggctcag

SEQ ID NO: 1958287 - DNA, 15 bp, Homo sapiens
aggcaagggctcaga

SEQ ID NO: 1958288 - DNA, 15 bp, Homo sapiens
ggcaagggctcagaa

SEQ ID NO: 1958289 - DNA, 15 bp, Homo sapiens
gcaagggctcagaaa

SEQ ID NO: 1958290 - DNA, 15 bp, Homo sapiens
caagggctcagaaac

SEQ ID NO: 1958291 - DNA, 15 bp, Homo sapiens
aagggctcagaaaca

SEQ ID NO: 1958292 - DNA, 15 bp, Homo sapiens
agggctcagaaacaa

SEQ ID NO: 1958293 - DNA, 15 bp, Homo sapiens
gggctcagaaacaac

SEQ ID NO: 1958294 - DNA, 15 bp, Homo sapiens
ggctcagaaacaaca

SEQ ID NO: 1958295 - DNA, 15 bp, Homo sapiens
gctcagaaacaacaa

SEQ ID NO: 1958296 - DNA, 15 bp, Homo sapiens
ctcagaaacaacaat

SEQ ID NO: 1958297 - DNA, 15 bp, Homo sapiens
tcagaaacaacaata

SEQ ID NO: 1958298 - DNA, 15 bp, Homo sapiens
cagaaacaacaatag

SEQ ID NO: 1958299 - DNA, 15 bp, Homo sapiens
agaaacaacaataga

SEQ ID NO: 1958300 - DNA, 15 bp, Homo sapiens
ttgtgctgaactccc

SEQ ID NO: 1958301 - DNA, 15 bp, Homo sapiens
tgtgctgaactccca

SEQ ID NO: 1958302 - DNA, 15 bp, Homo sapiens
gtgctgaactcccaa

SEQ ID NO: 1958303 - DNA, 15 bp, Homo sapiens
tgctgaactcccaaa

SEQ ID NO: 1958304 - DNA, 15 bp, Homo sapiens
gctgaactcccaaaa

SEQ ID NO: 1958305 - DNA, 15 bp, Homo sapiens
ctgaactcccaaaat

SEQ ID NO: 1958306 - DNA, 15 bp, Homo sapiens
tgaactcccaaaatg

SEQ ID NO: 1958307 - DNA, 15 bp, Homo sapiens
gaactcccaaaatgt

SEQ ID NO: 1958308 - DNA, 15 bp, Homo sapiens
aactcccaaaatgta

SEQ ID NO: 1958309 - DNA, 15 bp, Homo sapiens
actcccaaaatgtag

SEQ ID NO: 1958310 - DNA, 15 bp, Homo sapiens
ctcccaaaatgtagc

SEQ ID NO: 1958311 - DNA, 15 bp, Homo sapiens
tcccaaaatgtagca

SEQ ID NO: 1958312 - DNA, 15 bp, Homo sapiens
cccaaaatgtagcaa

SEQ ID NO: 1958313 - DNA, 15 bp, Homo sapiens
ccaaaatgtagcaag

SEQ ID NO: 1958314 - DNA, 15 bp, Homo sapiens
caaaatgtagcaagt

SEQ ID NO: 1958315 - DNA, 15 bp, Homo sapiens
aaaatgtagcaagtc

SEQ ID NO: 1958316 - DNA, 15 bp, Homo sapiens
aaatgtagcaagtcc

SEQ ID NO: 1958317 - DNA, 15 bp, Homo sapiens
aatgtagcaagtcca

SEQ ID NO: 1958318 - DNA, 15 bp, Homo sapiens
atgtagcaagtccag

SEQ ID NO: 1958319 - DNA, 15 bp, Homo sapiens
tgtagcaagtccagc

SEQ ID NO: 1958320 - DNA, 15 bp, Homo sapiens
gtagcaagtccagcc

SEQ ID NO: 1958321 - DNA, 15 bp, Homo sapiens
tagcaagtccagccc

SEQ ID NO: 1958322 - DNA, 15 bp, Homo sapiens
agcaagtccagcccc

SEQ ID NO: 1958323 - DNA, 15 bp, Homo sapiens
gcaagtccagcccct

SEQ ID NO: 1958324 - DNA, 15 bp, Homo sapiens
caagtccagcccctg

SEQ ID NO: 1958325 - DNA, 15 bp, Homo sapiens
aagtccagcccctgc

SEQ ID NO: 1958326 - DNA, 15 bp, Homo sapiens
agtccagcccctgcc

SEQ ID NO: 1958327 - DNA, 15 bp, Homo sapiens
gtccagcccctgcca

SEQ ID NO: 1958328 - DNA, 15 bp, Homo sapiens
tccagcccctgccat

SEQ ID NO: 1958329 - DNA, 15 bp, Homo sapiens
ccagcccctgccata

SEQ ID NO: 1958330 - DNA, 15 bp, Homo sapiens
cagcccctgccatag

SEQ ID NO: 1958331 - DNA, 15 bp, Homo sapiens
agcccctgccatagg

SEQ ID NO: 1958332 - DNA, 15 bp, Homo sapiens
gcccctgccataggc

SEQ ID NO: 1958333 - DNA, 15 bp, Homo sapiens
cccctgccataggcc

SEQ ID NO: 1958334 - DNA, 15 bp, Homo sapiens
ccctgccataggccc

SEQ ID NO: 1958335 - DNA, 15 bp, Homo sapiens
cctgccataggccca

SEQ ID NO: 1958336 - DNA, 15 bp, Homo sapiens
ctgccataggcccag

SEQ ID NO: 1958337 - DNA, 15 bp, Homo sapiens
tgccataggcccagg

SEQ ID NO: 1958338 - DNA, 15 bp, Homo sapiens
gccataggcccaggc

SEQ ID NO: 1958339 - DNA, 15 bp, Homo sapiens
ccataggcccaggct

SEQ ID NO: 1958340 - DNA, 15 bp, Homo sapiens
cataggcccaggctt

SEQ ID NO: 1958341 - DNA, 15 bp, Homo sapiens
ataggcccaggcttc

SEQ ID NO: 1958342 - DNA, 15 bp, Homo sapiens
taggcccaggcttcg

SEQ ID NO: 1958343 - DNA, 15 bp, Homo sapiens
aggcccaggcttcgt

SEQ ID NO: 1958344 - DNA, 15 bp, Homo sapiens
ggcccaggcttcgtg

SEQ ID NO: 1958345 - DNA, 15 bp, Homo sapiens
gcccaggcttcgtgc

SEQ ID NO: 1958346 - DNA, 15 bp, Homo sapiens
cccaggcttcgtgct

SEQ ID NO: 1958347 - DNA, 15 bp, Homo sapiens
ccaggcttcgtgctc

SEQ ID NO: 1958348 - DNA, 15 bp, Homo sapiens
caggcttcgtgctcc

SEQ ID NO: 1958349 - DNA, 15 bp, Homo sapiens
aggcttcgtgctccc

SEQ ID NO: 1958350 - DNA, 15 bp, Homo sapiens
ggcttcgtgctcccc

SEQ ID NO: 1958351 - DNA, 15 bp, Homo sapiens
gcttcgtgctcccca

SEQ ID NO: 1958352 - DNA, 15 bp, Homo sapiens
cttcgtgctccccac

SEQ ID NO: 1958353 - DNA, 15 bp, Homo sapiens
ttcgtgctccccacc

SEQ ID NO: 1958354 - DNA, 15 bp, Homo sapiens
tcgtgctccccaccc

SEQ ID NO: 1958355 - DNA, 15 bp, Homo sapiens
cgtgctccccaccct

SEQ ID NO: 1958356 - DNA, 15 bp, Homo sapiens
gtgctccccaccctt

SEQ ID NO: 1958357 - DNA, 15 bp, Homo sapiens
tgctccccacccttg

SEQ ID NO: 1958358 - DNA, 15 bp, Homo sapiens
gctccccacccttgg

SEQ ID NO: 1958359 - DNA, 15 bp, Homo sapiens
ctccccacccttggc

SEQ ID NO: 1958360 - DNA, 15 bp, Homo sapiens
tccccacccttggca

SEQ ID NO: 1958361 - DNA, 15 bp, Homo sapiens
ccccacccttggcaa

SEQ ID NO: 1958362 - DNA, 15 bp, Homo sapiens
cccacccttggcaag

SEQ ID NO: 1958363 - DNA, 15 bp, Homo sapiens
ccacccttggcaagt

SEQ ID NO: 1958364 - DNA, 15 bp, Homo sapiens
cacccttggcaagtt

SEQ ID NO: 1958365 - DNA, 15 bp, Homo sapiens
acccttggcaagttc

SEQ ID NO: 1958366 - DNA, 15 bp, Homo sapiens
cccttggcaagttct

SEQ ID NO: 1958367 - DNA, 15 bp, Homo sapiens
ccttggcaagttctc

SEQ ID NO: 1958368 - DNA, 15 bp, Homo sapiens
cttggcaagttctcc

SEQ ID NO: 1958369 - DNA, 15 bp, Homo sapiens
ttggcaagttctccc

SEQ ID NO: 1958370 - DNA, 15 bp, Homo sapiens
tggcaagttctcccc

SEQ ID NO: 1958371 - DNA, 15 bp, Homo sapiens
ggcaagttctcccca

SEQ ID NO: 1958372 - DNA, 15 bp, Homo sapiens
gcaagttctccccac

SEQ ID NO: 1958373 - DNA, 15 bp, Homo sapiens
caagttctccccacc

SEQ ID NO: 1958374 - DNA, 15 bp, Homo sapiens
aagttctccccaccc

SEQ ID NO: 1958375 - DNA, 15 bp, Homo sapiens
agttctccccacccc

SEQ ID NO: 1958376 - DNA, 15 bp, Homo sapiens
gttctccccaccccc

SEQ ID NO: 1958377 - DNA, 15 bp, Homo sapiens
ttctccccaccccca

SEQ ID NO: 1958378 - DNA, 15 bp, Homo sapiens
tctccccacccccag

SEQ ID NO: 1958379 - DNA, 15 bp, Homo sapiens
ctccccacccccagc

SEQ ID NO: 1958380 - DNA, 15 bp, Homo sapiens
tccccacccccagcc

SEQ ID NO: 1958381 - DNA, 15 bp, Homo sapiens
ccccacccccagccc

SEQ ID NO: 1958382 - DNA, 15 bp, Homo sapiens
cccacccccagcccc

SEQ ID NO: 1958383 - DNA, 15 bp, Homo sapiens
ccacccccagcccca

SEQ ID NO: 1958384 - DNA, 15 bp, Homo sapiens
cacccccagccccac

SEQ ID NO: 1958385 - DNA, 15 bp, Homo sapiens
acccccagccccaca

SEQ ID NO: 1958386 - DNA, 15 bp, Homo sapiens
ccccagccccacagt

SEQ ID NO: 1958387 - DNA, 15 bp, Homo sapiens
cccagccccacagtt

SEQ ID NO: 1958388 - DNA, 15 bp, Homo sapiens
ccagccccacagttt

SEQ ID NO: 1958389 - DNA, 15 bp, Homo sapiens
cagccccacagttta

SEQ ID NO: 1958390 - DNA, 15 bp, Homo sapiens
agccccacagtttat

SEQ ID NO: 1958391 - DNA, 15 bp, Homo sapiens
gccccacagtttatt

SEQ ID NO: 1958392 - DNA, 15 bp, Homo sapiens
ccccacagtttatta

SEQ ID NO: 1958393 - DNA, 15 bp, Homo sapiens
cccacagtttattaa

SEQ ID NO: 1958394 - DNA, 15 bp, Homo sapiens
ccacagtttattaaa

SEQ ID NO: 1958395 - DNA, 15 bp, Homo sapiens
cacagtttattaaat

SEQ ID NO: 1958396 - DNA, 15 bp, Homo sapiens
acagtttattaaatg

SEQ ID NO: 1958397 - DNA, 15 bp, Homo sapiens
cagtttattaaatgt

SEQ ID NO: 1958398 - DNA, 15 bp, Homo sapiens
agtttattaaatgtt

SEQ ID NO: 1958399 - DNA, 15 bp, Homo sapiens
gtttattaaatgttt

SEQ ID NO: 1958400 - DNA, 15 bp, Homo sapiens
tttattaaatgtttg

SEQ ID NO: 1958401 - DNA, 15 bp, Homo sapiens
ttattaaatgtttga

SEQ ID NO: 1958402 - DNA, 15 bp, Homo sapiens
tattaaatgtttgat

SEQ ID NO: 1958403 - DNA, 15 bp, Homo sapiens
attaaatgtttgatt

SEQ ID NO: 1958404 - DNA, 15 bp, Homo sapiens
ttaaatgtttgattt

SEQ ID NO: 1958405 - DNA, 15 bp, Homo sapiens
taaatgtttgatttt

SEQ ID NO: 1958406 - DNA, 15 bp, Homo sapiens
aaatgtttgattttc

SEQ ID NO: 1958407 - DNA, 15 bp, Homo sapiens
aatgtttgattttca

SEQ ID NO: 1958408 - DNA, 15 bp, Homo sapiens
atgtttgattttcaa

SEQ ID NO: 1958409 - DNA, 15 bp, Homo sapiens
tgtttgattttcaac

SEQ ID NO: 1958410 - DNA, 15 bp, Homo sapiens
gtttgattttcaacc

SEQ ID NO: 1958411 - DNA, 15 bp, Homo sapiens
tttgattttcaacct

SEQ ID NO: 1958412 - DNA, 15 bp, Homo sapiens
ttgattttcaacctg

SEQ ID NO: 1958413 - DNA, 15 bp, Homo sapiens
tgattttcaacctgg

SEQ ID NO: 1958414 - DNA, 15 bp, Homo sapiens
gattttcaacctggc

SEQ ID NO: 1958415 - DNA, 15 bp, Homo sapiens
attttcaacctggcc

SEQ ID NO: 1958416 - DNA, 15 bp, Homo sapiens
ttttcaacctggcca

SEQ ID NO: 1958417 - DNA, 15 bp, Homo sapiens
tttcaacctggccac

SEQ ID NO: 1958418 - DNA, 15 bp, Homo sapiens
ttcaacctggccacg

SEQ ID NO: 1958419 - DNA, 15 bp, Homo sapiens
tcaacctggccacgc

SEQ ID NO: 1958420 - DNA, 15 bp, Homo sapiens
caacctggccacgct

SEQ ID NO: 1958421 - DNA, 15 bp, Homo sapiens
aacctggccacgctt

SEQ ID NO: 1958422 - DNA, 15 bp, Homo sapiens
acctggccacgcttc

SEQ ID NO: 1958423 - DNA, 15 bp, Homo sapiens
cctggccacgcttcc

SEQ ID NO: 1958424 - DNA, 15 bp, Homo sapiens
ctggccacgcttcct

SEQ ID NO: 1958425 - DNA, 15 bp, Homo sapiens
tggccacgcttcctt

SEQ ID NO: 1958426 - DNA, 15 bp, Homo sapiens
ggccacgcttccttg

SEQ ID NO: 1958427 - DNA, 15 bp, Homo sapiens
gccacgcttccttgc

SEQ ID NO: 1958428 - DNA, 15 bp, Homo sapiens
ccacgcttccttgcc

SEQ ID NO: 1958429 - DNA, 15 bp, Homo sapiens
cacgcttccttgcca

SEQ ID NO: 1958430 - DNA, 15 bp, Homo sapiens
acgcttccttgccac

SEQ ID NO: 1958431 - DNA, 15 bp, Homo sapiens
cgcttccttgccaca

SEQ ID NO: 1958432 - DNA, 15 bp, Homo sapiens
gcttccttgccacag

SEQ ID NO: 1958433 - DNA, 15 bp, Homo sapiens
cttccttgccacaga

SEQ ID NO: 1958434 - DNA, 15 bp, Homo sapiens
ttccttgccacagag

SEQ ID NO: 1958435 - DNA, 15 bp, Homo sapiens
tccttgccacagagg

SEQ ID NO: 1958436 - DNA, 15 bp, Homo sapiens
ccttgccacagaggc

SEQ ID NO: 1958437 - DNA, 15 bp, Homo sapiens
cttgccacagaggct

SEQ ID NO: 1958438 - DNA, 15 bp, Homo sapiens
ttgccacagaggctg

SEQ ID NO: 1958439 - DNA, 15 bp, Homo sapiens
tgccacagaggctga

SEQ ID NO: 1958440 - DNA, 15 bp, Homo sapiens
gccacagaggctgaa

SEQ ID NO: 1958441 - DNA, 15 bp, Homo sapiens
ccacagaggctgaaa

SEQ ID NO: 1958442 - DNA, 15 bp, Homo sapiens
cacagaggctgaaag

SEQ ID NO: 1958443 - DNA, 15 bp, Homo sapiens
acagaggctgaaagc

SEQ ID NO: 1958444 - DNA, 15 bp, Homo sapiens
cagaggctgaaagca

SEQ ID NO: 1958445 - DNA, 15 bp, Homo sapiens
agaggctgaaagcac

SEQ ID NO: 1958446 - DNA, 15 bp, Homo sapiens
gaggctgaaagcacc

SEQ ID NO: 1958447 - DNA, 15 bp, Homo sapiens
aggctgaaagcaccc

SEQ ID NO: 1958448 - DNA, 15 bp, Homo sapiens
ggctgaaagcacccc

SEQ ID NO: 1958449 - DNA, 15 bp, Homo sapiens
gctgaaagcacccct

SEQ ID NO: 1958450 - DNA, 15 bp, Homo sapiens
ctgaaagcacccctg

SEQ ID NO: 1958451 - DNA, 15 bp, Homo sapiens
tgaaagcacccctga

SEQ ID NO: 1958452 - DNA, 15 bp, Homo sapiens
gaaagcacccctgag

SEQ ID NO: 1958453 - DNA, 15 bp, Homo sapiens
aaagcacccctgagc

SEQ ID NO: 1958454 - DNA, 15 bp, Homo sapiens
aagcacccctgagct

SEQ ID NO: 1958455 - DNA, 15 bp, Homo sapiens
agcacccctgagctc

SEQ ID NO: 1958456 - DNA, 15 bp, Homo sapiens
gcacccctgagctcc

SEQ ID NO: 1958457 - DNA, 15 bp, Homo sapiens
cacccctgagctcca

SEQ ID NO: 1958458 - DNA, 15 bp, Homo sapiens
acccctgagctccaa

SEQ ID NO: 1958459 - DNA, 15 bp, Homo sapiens
cccctgagctccaag

SEQ ID NO: 1958460 - DNA, 15 bp, Homo sapiens
ccctgagctccaagg

SEQ ID NO: 1958461 - DNA, 15 bp, Homo sapiens
cctgagctccaagga

SEQ ID NO: 1958462 - DNA, 15 bp, Homo sapiens
ctgagctccaaggaa

SEQ ID NO: 1958463 - DNA, 15 bp, Homo sapiens
tgagctccaaggaaa

SEQ ID NO: 1958464 - DNA, 15 bp, Homo sapiens
gagctccaaggaaac

SEQ ID NO: 1958465 - DNA, 15 bp, Homo sapiens
agctccaaggaaaca

SEQ ID NO: 1958466 - DNA, 15 bp, Homo sapiens
gctccaaggaaacac

SEQ ID NO: 1958467 - DNA, 15 bp, Homo sapiens
ctccaaggaaacaca

SEQ ID NO: 1958468 - DNA, 15 bp, Homo sapiens
tccaaggaaacacag

SEQ ID NO: 1958469 - DNA, 15 bp, Homo sapiens
ccaaggaaacacagc

SEQ ID NO: 1958470 - DNA, 15 bp, Homo sapiens
caaggaaacacagca

SEQ ID NO: 1958471 - DNA, 15 bp, Homo sapiens
aaggaaacacagcaa

SEQ ID NO: 1958472 - DNA, 15 bp, Homo sapiens
aggaaacacagcaag

SEQ ID NO: 1958473 - DNA, 15 bp, Homo sapiens
ggaaacacagcaagc

SEQ ID NO: 1958474 - DNA, 15 bp, Homo sapiens
gaaacacagcaagcc

SEQ ID NO: 1958475 - DNA, 15 bp, Homo sapiens
aaacacagcaagccc

SEQ ID NO: 1958476 - DNA, 15 bp, Homo sapiens
aacacagcaagccct

SEQ ID NO: 1958477 - DNA, 15 bp, Homo sapiens
acacagcaagccctt

SEQ ID NO: 1958478 - DNA, 15 bp, Homo sapiens
cacagcaagcccttt

SEQ ID NO: 1958479 - DNA, 15 bp, Homo sapiens
acagcaagccctttc

SEQ ID NO: 1958480 - DNA, 15 bp, Homo sapiens
cagcaagccctttct

SEQ ID NO: 1958481 - DNA, 15 bp, Homo sapiens
agcaagccctttctt

SEQ ID NO: 1958482 - DNA, 15 bp, Homo sapiens
gcaagccctttctta

SEQ ID NO: 1958483 - DNA, 15 bp, Homo sapiens
caagccctttcttac

SEQ ID NO: 1958484 - DNA, 15 bp, Homo sapiens
aagccctttcttacc

SEQ ID NO: 1958485 - DNA, 15 bp, Homo sapiens
agccctttcttaccc

SEQ ID NO: 1958486 - DNA, 15 bp, Homo sapiens
gccctttcttaccct

SEQ ID NO: 1958487 - DNA, 15 bp, Homo sapiens
ccctttcttaccctc

SEQ ID NO: 1958488 - DNA, 15 bp, Homo sapiens
cctttcttaccctcg

SEQ ID NO: 1958489 - DNA, 15 bp, Homo sapiens
ctttcttaccctcgg

SEQ ID NO: 1958490 - DNA, 15 bp, Homo sapiens
tttcttaccctcggg

SEQ ID NO: 1958491 - DNA, 15 bp, Homo sapiens
ttcttaccctcggga

SEQ ID NO: 1958492 - DNA, 15 bp, Homo sapiens
tcttaccctcgggag

SEQ ID NO: 1958493 - DNA, 15 bp, Homo sapiens
cttaccctcgggagg

SEQ ID NO: 1958494 - DNA, 15 bp, Homo sapiens
ttaccctcgggaggg

SEQ ID NO: 1958495 - DNA, 15 bp, Homo sapiens
taccctcgggaggga

SEQ ID NO: 1958496 - DNA, 15 bp, Homo sapiens
accctcgggagggat

SEQ ID NO: 1958497 - DNA, 15 bp, Homo sapiens
ccctcgggagggata

SEQ ID NO: 1958498 - DNA, 15 bp, Homo sapiens
cctcgggagggatag

SEQ ID NO: 1958499 - DNA, 15 bp, Homo sapiens
ctcgggagggatagg

SEQ ID NO: 1958500 - DNA, 15 bp, Homo sapiens
tcgggagggatagga

SEQ ID NO: 1958501 - DNA, 15 bp, Homo sapiens
cgggagggataggag

SEQ ID NO: 1958502 - DNA, 15 bp, Homo sapiens
gggagggataggagg

SEQ ID NO: 1958503 - DNA, 15 bp, Homo sapiens
ggagggataggaggg

SEQ ID NO: 1958504 - DNA, 15 bp, Homo sapiens
gagggataggaggga

SEQ ID NO: 1958505 - DNA, 15 bp, Homo sapiens
agggataggagggac

SEQ ID NO: 1958506 - DNA, 15 bp, Homo sapiens
gggataggagggaca

SEQ ID NO: 1958507 - DNA, 15 bp, Homo sapiens
ggataggagggacag

SEQ ID NO: 1958508 - DNA, 15 bp, Homo sapiens
gataggagggacagc

SEQ ID NO: 1958509 - DNA, 15 bp, Homo sapiens
ataggagggacagca

SEQ ID NO: 1958510 - DNA, 15 bp, Homo sapiens
taggagggacagcac

SEQ ID NO: 1958511 - DNA, 15 bp, Homo sapiens
aggagggacagcaca

SEQ ID NO: 1958512 - DNA, 15 bp, Homo sapiens
ggagggacagcacat

SEQ ID NO: 1958513 - DNA, 15 bp, Homo sapiens
gagggacagcacatc

SEQ ID NO: 1958514 - DNA, 15 bp, Homo sapiens
agggacagcacatcg

SEQ ID NO: 1958515 - DNA, 15 bp, Homo sapiens
gggacagcacatcgg

SEQ ID NO: 1958516 - DNA, 15 bp, Homo sapiens
ggacagcacatcgga

SEQ ID NO: 1958517 - DNA, 15 bp, Homo sapiens
gacagcacatcggaa

SEQ ID NO: 1958518 - DNA, 15 bp, Homo sapiens
acagcacatcggaag

SEQ ID NO: 1958519 - DNA, 15 bp, Homo sapiens
cagcacatcggaaga

SEQ ID NO: 1958520 - DNA, 15 bp, Homo sapiens
agcacatcggaagag

SEQ ID NO: 1958521 - DNA, 15 bp, Homo sapiens
gcacatcggaagagc

SEQ ID NO: 1958522 - DNA, 15 bp, Homo sapiens
cacatcggaagagca

SEQ ID NO: 1958523 - DNA, 15 bp, Homo sapiens
acatcggaagagcag

SEQ ID NO: 1958524 - DNA, 15 bp, Homo sapiens
catcggaagagcagt

SEQ ID NO: 1958525 - DNA, 15 bp, Homo sapiens
atcggaagagcagtc

SEQ ID NO: 1958526 - DNA, 15 bp, Homo sapiens
tcggaagagcagtca

SEQ ID NO: 1958527 - DNA, 15 bp, Homo sapiens
cggaagagcagtcac

SEQ ID NO: 1958528 - DNA, 15 bp, Homo sapiens
ggaagagcagtcact

SEQ ID NO: 1958529 - DNA, 15 bp, Homo sapiens
gaagagcagtcactt

SEQ ID NO: 1958530 - DNA, 15 bp, Homo sapiens
aagagcagtcacttg

SEQ ID NO: 1958531 - DNA, 15 bp, Homo sapiens
agagcagtcacttgc

SEQ ID NO: 1958532 - DNA, 15 bp, Homo sapiens
gagcagtcacttgcc

SEQ ID NO: 1958533 - DNA, 15 bp, Homo sapiens
agcagtcacttgcct

SEQ ID NO: 1958534 - DNA, 15 bp, Homo sapiens
gcagtcacttgcctc

SEQ ID NO: 1958535 - DNA, 15 bp, Homo sapiens
cagtcacttgcctca

SEQ ID NO: 1958536 - DNA, 15 bp, Homo sapiens
agtcacttgcctcag

SEQ ID NO: 1958537 - DNA, 15 bp, Homo sapiens
gtcacttgcctcagc

SEQ ID NO: 1958538 - DNA, 15 bp, Homo sapiens
tcacttgcctcagct

SEQ ID NO: 1958539 - DNA, 15 bp, Homo sapiens
cacttgcctcagctg

SEQ ID NO: 1958540 - DNA, 15 bp, Homo sapiens
acttgcctcagctga

SEQ ID NO: 1958541 - DNA, 15 bp, Homo sapiens
cttgcctcagctgac

SEQ ID NO: 1958542 - DNA, 15 bp, Homo sapiens
ttgcctcagctgacc

SEQ ID NO: 1958543 - DNA, 15 bp, Homo sapiens
tgcctcagctgacct

SEQ ID NO: 1958544 - DNA, 15 bp, Homo sapiens
gcctcagctgacctc

SEQ ID NO: 1958545 - DNA, 15 bp, Homo sapiens
cctcagctgacctct

SEQ ID NO: 1958546 - DNA, 15 bp, Homo sapiens
ctcagctgacctctg

SEQ ID NO: 1958547 - DNA, 15 bp, Homo sapiens
tcagctgacctctgc

SEQ ID NO: 1958548 - DNA, 15 bp, Homo sapiens
cagctgacctctgcc

SEQ ID NO: 1958549 - DNA, 15 bp, Homo sapiens
agctgacctctgccc

SEQ ID NO: 1958550 - DNA, 15 bp, Homo sapiens
gctgacctctgccca

SEQ ID NO: 1958551 - DNA, 15 bp, Homo sapiens
ctgacctctgcccat

SEQ ID NO: 1958552 - DNA, 15 bp, Homo sapiens
tgacctctgcccatc

SEQ ID NO: 1958553 - DNA, 15 bp, Homo sapiens
gacctctgcccatct

SEQ ID NO: 1958554 - DNA, 15 bp, Homo sapiens
acctctgcccatctg

SEQ ID NO: 1958555 - DNA, 15 bp, Homo sapiens
cctctgcccatctga

SEQ ID NO: 1958556 - DNA, 15 bp, Homo sapiens
ctctgcccatctgaa

SEQ ID NO: 1958557 - DNA, 15 bp, Homo sapiens
tctgcccatctgaag

SEQ ID NO: 1958558 - DNA, 15 bp, Homo sapiens
ctgcccatctgaagc

SEQ ID NO: 1958559 - DNA, 15 bp, Homo sapiens
tgcccatctgaagcc

SEQ ID NO: 1958560 - DNA, 15 bp, Homo sapiens
gcccatctgaagccg

SEQ ID NO: 1958561 - DNA, 15 bp, Homo sapiens
cccatctgaagccgc

SEQ ID NO: 1958562 - DNA, 15 bp, Homo sapiens
ccatctgaagccgcc

SEQ ID NO: 1958563 - DNA, 15 bp, Homo sapiens
catctgaagccgcct

SEQ ID NO: 1958564 - DNA, 15 bp, Homo sapiens
atctgaagccgcctc

SEQ ID NO: 1958565 - DNA, 15 bp, Homo sapiens
tctgaagccgcctct

SEQ ID NO: 1958566 - DNA, 15 bp, Homo sapiens
ctgaagccgcctctc

SEQ ID NO: 1958567 - DNA, 15 bp, Homo sapiens
tgaagccgcctctcc

SEQ ID NO: 1958568 - DNA, 15 bp, Homo sapiens
gaagccgcctctccc

SEQ ID NO: 1958569 - DNA, 15 bp, Homo sapiens
aagccgcctctccca

SEQ ID NO: 1958570 - DNA, 15 bp, Homo sapiens
agccgcctctcccag

SEQ ID NO: 1958571 - DNA, 15 bp, Homo sapiens
gccgcctctcccaga

SEQ ID NO: 1958572 - DNA, 15 bp, Homo sapiens
ccgcctctcccagag

SEQ ID NO: 1958573 - DNA, 15 bp, Homo sapiens
cgcctctcccagaga

SEQ ID NO: 1958574 - DNA, 15 bp, Homo sapiens
gcctctcccagagaa

SEQ ID NO: 1958575 - DNA, 15 bp, Homo sapiens
cctctcccagagaat

SEQ ID NO: 1958576 - DNA, 15 bp, Homo sapiens
ctctcccagagaatc

SEQ ID NO: 1958577 - DNA, 15 bp, Homo sapiens
tctcccagagaatcc

SEQ ID NO: 1958578 - DNA, 15 bp, Homo sapiens
ctcccagagaatccc

SEQ ID NO: 1958579 - DNA, 15 bp, Homo sapiens
tcccagagaatccca

SEQ ID NO: 1958580 - DNA, 15 bp, Homo sapiens
cccagagaatcccac

SEQ ID NO: 1958581 - DNA, 15 bp, Homo sapiens
ccagagaatcccaca

SEQ ID NO: 1958582 - DNA, 15 bp, Homo sapiens
cagagaatcccacac

SEQ ID NO: 1958583 - DNA, 15 bp, Homo sapiens
agagaatcccacacc

SEQ ID NO: 1958584 - DNA, 15 bp, Homo sapiens
gagaatcccacaccc

SEQ ID NO: 1958585 - DNA, 15 bp, Homo sapiens
agaatcccacacccc

SEQ ID NO: 1958586 - DNA, 15 bp, Homo sapiens
gaatcccacacccca

SEQ ID NO: 1958587 - DNA, 15 bp, Homo sapiens
aatcccacaccccat

SEQ ID NO: 1958588 - DNA, 15 bp, Homo sapiens
atcccacaccccatg

SEQ ID NO: 1958589 - DNA, 15 bp, Homo sapiens
tcccacaccccatgc

SEQ ID NO: 1958590 - DNA, 15 bp, Homo sapiens
cccacaccccatgcc

SEQ ID NO: 1958591 - DNA, 15 bp, Homo sapiens
ccacaccccatgccc

SEQ ID NO: 1958592 - DNA, 15 bp, Homo sapiens
cacaccccatgccct

SEQ ID NO: 1958593 - DNA, 15 bp, Homo sapiens
acaccccatgccctg

SEQ ID NO: 1958594 - DNA, 15 bp, Homo sapiens
caccccatgccctgg

SEQ ID NO: 1958595 - DNA, 15 bp, Homo sapiens
accccatgccctggt

SEQ ID NO: 1958596 - DNA, 15 bp, Homo sapiens
ccccatgccctggtg

SEQ ID NO: 1958597 - DNA, 15 bp, Homo sapiens
cccatgccctggtgt

SEQ ID NO: 1958598 - DNA, 15 bp, Homo sapiens
ccatgccctggtgtc

SEQ ID NO: 1958599 - DNA, 15 bp, Homo sapiens
catgccctggtgtct

SEQ ID NO: 1958600 - DNA, 15 bp, Homo sapiens
atgccctggtgtctc

SEQ ID NO: 1958601 - DNA, 15 bp, Homo sapiens
tgccctggtgtctca

SEQ ID NO: 1958602 - DNA, 15 bp, Homo sapiens
gccctggtgtctcat

SEQ ID NO: 1958603 - DNA, 15 bp, Homo sapiens
ccctggtgtctcatc

SEQ ID NO: 1958604 - DNA, 15 bp, Homo sapiens
cctggtgtctcatcc

SEQ ID NO: 1958605 - DNA, 15 bp, Homo sapiens
ctggtgtctcatcct

SEQ ID NO: 1958606 - DNA, 15 bp, Homo sapiens
tggtgtctcatcctt

SEQ ID NO: 1958607 - DNA, 15 bp, Homo sapiens
ggtgtctcatccttt

SEQ ID NO: 1958608 - DNA, 15 bp, Homo sapiens
gtgtctcatcctttg

SEQ ID NO: 1958609 - DNA, 15 bp, Homo sapiens
tgtctcatcctttgc

SEQ ID NO: 1958610 - DNA, 15 bp, Homo sapiens
gtctcatcctttgct

SEQ ID NO: 1958611 - DNA, 15 bp, Homo sapiens
tctcatcctttgctc

SEQ ID NO: 1958612 - DNA, 15 bp, Homo sapiens
ctcatcctttgctcc

SEQ ID NO: 1958613 - DNA, 15 bp, Homo sapiens
tcatcctttgctcct

SEQ ID NO: 1958614 - DNA, 15 bp, Homo sapiens
catcctttgctcctc

SEQ ID NO: 1958615 - DNA, 15 bp, Homo sapiens
atcctttgctcctcc

SEQ ID NO: 1958616 - DNA, 15 bp, Homo sapiens
tcctttgctcctccc

SEQ ID NO: 1958617 - DNA, 15 bp, Homo sapiens
cctttgctcctcccc

SEQ ID NO: 1958618 - DNA, 15 bp, Homo sapiens
ctttgctcctcccca

SEQ ID NO: 1958619 - DNA, 15 bp, Homo sapiens
tttgctcctccccag

SEQ ID NO: 1958620 - DNA, 15 bp, Homo sapiens
ttgctcctccccagc

SEQ ID NO: 1958621 - DNA, 15 bp, Homo sapiens
tgctcctccccagct

SEQ ID NO: 1958622 - DNA, 15 bp, Homo sapiens
gctcctccccagctc

SEQ ID NO: 1958623 - DNA, 15 bp, Homo sapiens
ctcctccccagctcc

SEQ ID NO: 1958624 - DNA, 15 bp, Homo sapiens
tcctccccagctcct

SEQ ID NO: 1958625 - DNA, 15 bp, Homo sapiens
cctccccagctcctt

SEQ ID NO: 1958626 - DNA, 15 bp, Homo sapiens
ctccccagctccttg

SEQ ID NO: 1958627 - DNA, 15 bp, Homo sapiens
tccccagctccttga

SEQ ID NO: 1958628 - DNA, 15 bp, Homo sapiens
ccccagctccttgaa

SEQ ID NO: 1958629 - DNA, 15 bp, Homo sapiens
cccagctccttgaag

SEQ ID NO: 1958630 - DNA, 15 bp, Homo sapiens
ccagctccttgaagc

SEQ ID NO: 1958631 - DNA, 15 bp, Homo sapiens
cagctccttgaagca

SEQ ID NO: 1958632 - DNA, 15 bp, Homo sapiens
agctccttgaagcag

SEQ ID NO: 1958633 - DNA, 15 bp, Homo sapiens
gctccttgaagcaga

SEQ ID NO: 1958634 - DNA, 15 bp, Homo sapiens
ctccttgaagcagaa

SEQ ID NO: 1958635 - DNA, 15 bp, Homo sapiens
tccttgaagcagaag

SEQ ID NO: 1958636 - DNA, 15 bp, Homo sapiens
ccttgaagcagaagg

SEQ ID NO: 1958637 - DNA, 15 bp, Homo sapiens
cttgaagcagaaggc

SEQ ID NO: 1958638 - DNA, 15 bp, Homo sapiens
ttgaagcagaaggca

SEQ ID NO: 1958639 - DNA, 15 bp, Homo sapiens
tgaagcagaaggcag

SEQ ID NO: 1958640 - DNA, 15 bp, Homo sapiens
gaagcagaaggcaga

SEQ ID NO: 1958641 - DNA, 15 bp, Homo sapiens
aagcagaaggcagat

SEQ ID NO: 1958642 - DNA, 15 bp, Homo sapiens
agcagaaggcagatt

SEQ ID NO: 1958643 - DNA, 15 bp, Homo sapiens
gcagaaggcagattg

SEQ ID NO: 1958644 - DNA, 15 bp, Homo sapiens
cagaaggcagattgt

SEQ ID NO: 1958645 - DNA, 15 bp, Homo sapiens
agaaggcagattgta

SEQ ID NO: 1958646 - DNA, 15 bp, Homo sapiens
gaaggcagattgtag

SEQ ID NO: 1958647 - DNA, 15 bp, Homo sapiens
aaggcagattgtagc

SEQ ID NO: 1958648 - DNA, 15 bp, Homo sapiens
aggcagattgtagcc

SEQ ID NO: 1958649 - DNA, 15 bp, Homo sapiens
ggcagattgtagcct

SEQ ID NO: 1958650 - DNA, 15 bp, Homo sapiens
gcagattgtagcctc

SEQ ID NO: 1958651 - DNA, 15 bp, Homo sapiens
cagattgtagcctcc

SEQ ID NO: 1958652 - DNA, 15 bp, Homo sapiens
agattgtagcctcct

SEQ ID NO: 1958653 - DNA, 15 bp, Homo sapiens
gattgtagcctcctt

SEQ ID NO: 1958654 - DNA, 15 bp, Homo sapiens
attgtagcctccttt

SEQ ID NO: 1958655 - DNA, 15 bp, Homo sapiens
ttgtagcctcctttt

SEQ ID NO: 1958656 - DNA, 15 bp, Homo sapiens
tgtagcctccttttt

SEQ ID NO: 1958657 - DNA, 15 bp, Homo sapiens
gtagcctccttttta

SEQ ID NO: 1958658 - DNA, 15 bp, Homo sapiens
tagcctcctttttag

SEQ ID NO: 1958659 - DNA, 15 bp, Homo sapiens
agcctcctttttaga

SEQ ID NO: 1958660 - DNA, 15 bp, Homo sapiens
gcctcctttttagag

SEQ ID NO: 1958661 - DNA, 15 bp, Homo sapiens
cctcctttttagagc

SEQ ID NO: 1958662 - DNA, 15 bp, Homo sapiens
ctcctttttagagcc

SEQ ID NO: 1958663 - DNA, 15 bp, Homo sapiens
tcctttttagagcca

SEQ ID NO: 1958664 - DNA, 15 bp, Homo sapiens
cctttttagagccaa

SEQ ID NO: 1958665 - DNA, 15 bp, Homo sapiens
ctttttagagccaat

SEQ ID NO: 1958666 - DNA, 15 bp, Homo sapiens
tttttagagccaatt

SEQ ID NO: 1958667 - DNA, 15 bp, Homo sapiens
ttttagagccaattc

SEQ ID NO: 1958668 - DNA, 15 bp, Homo sapiens
tttagagccaattct

SEQ ID NO: 1958669 - DNA, 15 bp, Homo sapiens
ttagagccaattctg

SEQ ID NO: 1958670 - DNA, 15 bp, Homo sapiens
tagagccaattctgt

SEQ ID NO: 1958671 - DNA, 15 bp, Homo sapiens
agagccaattctgtt

SEQ ID NO: 1958672 - DNA, 15 bp, Homo sapiens
gagccaattctgttt

SEQ ID NO: 1958673 - DNA, 15 bp, Homo sapiens
agccaattctgttta

SEQ ID NO: 1958674 - DNA, 15 bp, Homo sapiens
gccaattctgtttac

SEQ ID NO: 1958675 - DNA, 15 bp, Homo sapiens
ccaattctgtttact

SEQ ID NO: 1958676 - DNA, 15 bp, Homo sapiens
caattctgtttactt

SEQ ID NO: 1958677 - DNA, 15 bp, Homo sapiens
aattctgtttacttc

SEQ ID NO: 1958678 - DNA, 15 bp, Homo sapiens
attctgtttacttcc

SEQ ID NO: 1958679 - DNA, 15 bp, Homo sapiens
ttctgtttacttcct

SEQ ID NO: 1958680 - DNA, 15 bp, Homo sapiens
tctgtttacttccta

SEQ ID NO: 1958681 - DNA, 15 bp, Homo sapiens
ctgtttacttcctaa

SEQ ID NO: 1958682 - DNA, 15 bp, Homo sapiens
tgtttacttcctaaa

SEQ ID NO: 1958683 - DNA, 15 bp, Homo sapiens
gtttacttcctaaag

SEQ ID NO: 1958684 - DNA, 15 bp, Homo sapiens
tttacttcctaaagt

SEQ ID NO: 1958685 - DNA, 15 bp, Homo sapiens
ttacttcctaaagta

SEQ ID NO: 1958686 - DNA, 15 bp, Homo sapiens
tacttcctaaagtac

SEQ ID NO: 1958687 - DNA, 15 bp, Homo sapiens
acttcctaaagtaca

SEQ ID NO: 1958688 - DNA, 15 bp, Homo sapiens
cttcctaaagtacaa

SEQ ID NO: 1958689 - DNA, 15 bp, Homo sapiens
ttcctaaagtacaaa

SEQ ID NO: 1958690 - DNA, 15 bp, Homo sapiens
tcctaaagtacaaac

SEQ ID NO: 1958691 - DNA, 15 bp, Homo sapiens
cctaaagtacaaacc

SEQ ID NO: 1958692 - DNA, 15 bp, Homo sapiens
ctaaagtacaaacct

SEQ ID NO: 1958693 - DNA, 15 bp, Homo sapiens
taaagtacaaaccta

SEQ ID NO: 1958694 - DNA, 15 bp, Homo sapiens
aaagtacaaacctat

SEQ ID NO: 1958695 - DNA, 15 bp, Homo sapiens
aagtacaaacctatt

SEQ ID NO: 1958696 - DNA, 15 bp, Homo sapiens
agtacaaacctattt

SEQ ID NO: 1958697 - DNA, 15 bp, Homo sapiens
gtacaaacctatttt

SEQ ID NO: 1958698 - DNA, 15 bp, Homo sapiens
tacaaacctattttt

SEQ ID NO: 1958699 - DNA, 15 bp, Homo sapiens
acaaacctatttttt

SEQ ID NO: 1958700 - DNA, 15 bp, Homo sapiens
caaacctattttttt

SEQ ID NO: 1958701 - DNA, 15 bp, Homo sapiens
aaacctatttttttt

SEQ ID NO: 1958702 - DNA, 15 bp, Homo sapiens
aacctatttttttta

SEQ ID NO: 1958703 - DNA, 15 bp, Homo sapiens
acctattttttttaa

SEQ ID NO: 1958704 - DNA, 15 bp, Homo sapiens
cctattttttttaaa

SEQ ID NO: 1958705 - DNA, 15 bp, Homo sapiens
ctattttttttaaat

SEQ ID NO: 1958706 - DNA, 15 bp, Homo sapiens
tattttttttaaata

SEQ ID NO: 1958707 - DNA, 15 bp, Homo sapiens
attttttttaaatat

SEQ ID NO: 1958708 - DNA, 15 bp, Homo sapiens
ttttttttaaatata

SEQ ID NO: 1958709 - DNA, 15 bp, Homo sapiens
tttttttaaatatag

SEQ ID NO: 1958710 - DNA, 15 bp, Homo sapiens
ttttttaaatataga

SEQ ID NO: 1958711 - DNA, 15 bp, Homo sapiens
tttttaaatatagat

SEQ ID NO: 1958712 - DNA, 15 bp, Homo sapiens
ttttaaatatagata

SEQ ID NO: 1958713 - DNA, 15 bp, Homo sapiens
tttaaatatagatag

SEQ ID NO: 1958714 - DNA, 15 bp, Homo sapiens
ttaaatatagatagg

SEQ ID NO: 1958715 - DNA, 15 bp, Homo sapiens
taaatatagataggg

SEQ ID NO: 1958716 - DNA, 15 bp, Homo sapiens
aaatatagatagggt

SEQ ID NO: 1958717 - DNA, 15 bp, Homo sapiens
aatatagatagggtc

SEQ ID NO: 1958718 - DNA, 15 bp, Homo sapiens
atatagatagggtct

SEQ ID NO: 1958719 - DNA, 15 bp, Homo sapiens
tatagatagggtctc

SEQ ID NO: 1958720 - DNA, 15 bp, Homo sapiens
atagatagggtctca

SEQ ID NO: 1958721 - DNA, 15 bp, Homo sapiens
tagatagggtctcac

SEQ ID NO: 1958722 - DNA, 15 bp, Homo sapiens
agatagggtctcact

SEQ ID NO: 1958723 - DNA, 15 bp, Homo sapiens
gatagggtctcactc

SEQ ID NO: 1958724 - DNA, 15 bp, Homo sapiens
atagggtctcactct

SEQ ID NO: 1958725 - DNA, 15 bp, Homo sapiens
tagggtctcactctg

SEQ ID NO: 1958726 - DNA, 15 bp, Homo sapiens
ctggagtgcagtggg

SEQ ID NO: 1958727 - DNA, 15 bp, Homo sapiens
tggagtgcagtgggg

SEQ ID NO: 1958728 - DNA, 15 bp, Homo sapiens
ggagtgcagtggggt

SEQ ID NO: 1958729 - DNA, 15 bp, Homo sapiens
gagtgcagtggggtg

SEQ ID NO: 1958730 - DNA, 15 bp, Homo sapiens
agtgcagtggggtga

SEQ ID NO: 1958731 - DNA, 15 bp, Homo sapiens
gtgcagtggggtgat

SEQ ID NO: 1958732 - DNA, 15 bp, Homo sapiens
tgcagtggggtgatc

SEQ ID NO: 1958733 - DNA, 15 bp, Homo sapiens
gcagtggggtgatca

SEQ ID NO: 1958734 - DNA, 15 bp, Homo sapiens
cagtggggtgatcat

SEQ ID NO: 1958735 - DNA, 15 bp, Homo sapiens
agtggggtgatcata

SEQ ID NO: 1958736 - DNA, 15 bp, Homo sapiens
gtggggtgatcatag

SEQ ID NO: 1958737 - DNA, 15 bp, Homo sapiens
tggggtgatcatagc

SEQ ID NO: 1958738 - DNA, 15 bp, Homo sapiens
ggggtgatcatagct

SEQ ID NO: 1958739 - DNA, 15 bp, Homo sapiens
gggtgatcatagctc

SEQ ID NO: 1958740 - DNA, 15 bp, Homo sapiens
ggtgatcatagctca

SEQ ID NO: 1958741 - DNA, 15 bp, Homo sapiens
gtgatcatagctcat

SEQ ID NO: 1958742 - DNA, 15 bp, Homo sapiens
tgatcatagctcatc

SEQ ID NO: 1958743 - DNA, 15 bp, Homo sapiens
gatcatagctcatca

SEQ ID NO: 1958744 - DNA, 15 bp, Homo sapiens
atcatagctcatcat

SEQ ID NO: 1958745 - DNA, 15 bp, Homo sapiens
tcatagctcatcata

SEQ ID NO: 1958746 - DNA, 15 bp, Homo sapiens
catagctcatcataa

SEQ ID NO: 1958747 - DNA, 15 bp, Homo sapiens
atagctcatcataac

SEQ ID NO: 1958748 - DNA, 15 bp, Homo sapiens
tagctcatcataact

SEQ ID NO: 1958749 - DNA, 15 bp, Homo sapiens
agctcatcataactt

SEQ ID NO: 1958750 - DNA, 15 bp, Homo sapiens
gctcatcataacttc

SEQ ID NO: 1958751 - DNA, 15 bp, Homo sapiens
ctcatcataacttct

SEQ ID NO: 1958752 - DNA, 15 bp, Homo sapiens
tcatcataacttcta

SEQ ID NO: 1958753 - DNA, 15 bp, Homo sapiens
catcataacttctaa

SEQ ID NO: 1958754 - DNA, 15 bp, Homo sapiens
atcataacttctaac

SEQ ID NO: 1958755 - DNA, 15 bp, Homo sapiens
tcataacttctaact

SEQ ID NO: 1958756 - DNA, 15 bp, Homo sapiens
cataacttctaactc

SEQ ID NO: 1958757 - DNA, 15 bp, Homo sapiens
ataacttctaactcc

SEQ ID NO: 1958758 - DNA, 15 bp, Homo sapiens
taacttctaactcct

SEQ ID NO: 1958759 - DNA, 15 bp, Homo sapiens
aacttctaactcctg

SEQ ID NO: 1958760 - DNA, 15 bp, Homo sapiens
acttctaactcctgg

SEQ ID NO: 1958761 - DNA, 15 bp, Homo sapiens
cttctaactcctggg

SEQ ID NO: 1958762 - DNA, 15 bp, Homo sapiens
ttctaactcctgggc

SEQ ID NO: 1958763 - DNA, 15 bp, Homo sapiens
tctaactcctgggct

SEQ ID NO: 1958764 - DNA, 15 bp, Homo sapiens
ctaactcctgggctc

SEQ ID NO: 1958765 - DNA, 15 bp, Homo sapiens
taactcctgggctca

SEQ ID NO: 1958766 - DNA, 15 bp, Homo sapiens
caatcctcctgcctt

SEQ ID NO: 1958767 - DNA, 15 bp, Homo sapiens
aatcctcctgcctta

SEQ ID NO: 1958768 - DNA, 15 bp, Homo sapiens
ctgccttagcctccc

SEQ ID NO: 1958769 - DNA, 15 bp, Homo sapiens
tgccttagcctccca

SEQ ID NO: 1958770 - DNA, 15 bp, Homo sapiens
gccttagcctcccaa

SEQ ID NO: 1958771 - DNA, 15 bp, Homo sapiens
ttagcctcccaaagc

SEQ ID NO: 1958772 - DNA, 15 bp, Homo sapiens
tagcctcccaaagcg

SEQ ID NO: 1958773 - DNA, 15 bp, Homo sapiens
gcctcccaaagcgct

SEQ ID NO: 1958774 - DNA, 15 bp, Homo sapiens
cctcccaaagcgctg

SEQ ID NO: 1958775 - DNA, 15 bp, Homo sapiens
ctcccaaagcgctgg

SEQ ID NO: 1958776 - DNA, 15 bp, Homo sapiens
tcccaaagcgctggg

SEQ ID NO: 1958777 - DNA, 15 bp, Homo sapiens
cccaaagcgctggga

SEQ ID NO: 1958778 - DNA, 15 bp, Homo sapiens
ccaaagcgctgggat

SEQ ID NO: 1958779 - DNA, 15 bp, Homo sapiens
caaagcgctgggatt

SEQ ID NO: 1958780 - DNA, 15 bp, Homo sapiens
aaagcgctgggatta

SEQ ID NO: 1958781 - DNA, 15 bp, Homo sapiens
aagcgctgggattac

SEQ ID NO: 1958782 - DNA, 15 bp, Homo sapiens
agcgctgggattaca

SEQ ID NO: 1958783 - DNA, 15 bp, Homo sapiens
gcgctgggattacag

SEQ ID NO: 1958784 - DNA, 15 bp, Homo sapiens
cgctgggattacagg

SEQ ID NO: 1958785 - DNA, 15 bp, Homo sapiens
gtgtgagccactgcg

SEQ ID NO: 1958786 - DNA, 15 bp, Homo sapiens
tgtgagccactgcgc

SEQ ID NO: 1958787 - DNA, 15 bp, Homo sapiens
gtgagccactgcgcc

SEQ ID NO: 1958788 - DNA, 15 bp, Homo sapiens
tgagccactgcgccg

SEQ ID NO: 1958789 - DNA, 15 bp, Homo sapiens
gagccactgcgccga

SEQ ID NO: 1958790 - DNA, 15 bp, Homo sapiens
agccactgcgccgag

SEQ ID NO: 1958791 - DNA, 15 bp, Homo sapiens
gccactgcgccgagc

SEQ ID NO: 1958792 - DNA, 15 bp, Homo sapiens
ccactgcgccgagcc

SEQ ID NO: 1958793 - DNA, 15 bp, Homo sapiens
cactgcgccgagccc

SEQ ID NO: 1958794 - DNA, 15 bp, Homo sapiens
actgcgccgagcccc

SEQ ID NO: 1958795 - DNA, 15 bp, Homo sapiens
ctgcgccgagcccct

SEQ ID NO: 1958796 - DNA, 15 bp, Homo sapiens
tgcgccgagccccta

SEQ ID NO: 1958797 - DNA, 15 bp, Homo sapiens
gcgccgagcccctaa

SEQ ID NO: 1958798 - DNA, 15 bp, Homo sapiens
cgccgagcccctaaa

SEQ ID NO: 1958799 - DNA, 15 bp, Homo sapiens
gccgagcccctaaag

SEQ ID NO: 1958800 - DNA, 15 bp, Homo sapiens
ccgagcccctaaagc

SEQ ID NO: 1958801 - DNA, 15 bp, Homo sapiens
cgagcccctaaagca

SEQ ID NO: 1958802 - DNA, 15 bp, Homo sapiens
gagcccctaaagcac

SEQ ID NO: 1958803 - DNA, 15 bp, Homo sapiens
agcccctaaagcacc

SEQ ID NO: 1958804 - DNA, 15 bp, Homo sapiens
gcccctaaagcacca

SEQ ID NO: 1958805 - DNA, 15 bp, Homo sapiens
cccctaaagcaccaa

SEQ ID NO: 1958806 - DNA, 15 bp, Homo sapiens
ccctaaagcaccaaa

SEQ ID NO: 1958807 - DNA, 15 bp, Homo sapiens
cctaaagcaccaaat

SEQ ID NO: 1958808 - DNA, 15 bp, Homo sapiens
ctaaagcaccaaatc

SEQ ID NO: 1958809 - DNA, 15 bp, Homo sapiens
taaagcaccaaatct

SEQ ID NO: 1958810 - DNA, 15 bp, Homo sapiens
aaagcaccaaatctg

SEQ ID NO: 1958811 - DNA, 15 bp, Homo sapiens
aagcaccaaatctga

SEQ ID NO: 1958812 - DNA, 15 bp, Homo sapiens
agcaccaaatctgac

SEQ ID NO: 1958813 - DNA, 15 bp, Homo sapiens
gcaccaaatctgact

SEQ ID NO: 1958814 - DNA, 15 bp, Homo sapiens
caccaaatctgactc

SEQ ID NO: 1958815 - DNA, 15 bp, Homo sapiens
accaaatctgactca

SEQ ID NO: 1958816 - DNA, 15 bp, Homo sapiens
ccaaatctgactcat

SEQ ID NO: 1958817 - DNA, 15 bp, Homo sapiens
caaatctgactcatc

SEQ ID NO: 1958818 - DNA, 15 bp, Homo sapiens
aaatctgactcatcc

SEQ ID NO: 1958819 - DNA, 15 bp, Homo sapiens
aatctgactcatccc

SEQ ID NO: 1958820 - DNA, 15 bp, Homo sapiens
atctgactcatccct

SEQ ID NO: 1958821 - DNA, 15 bp, Homo sapiens
tctgactcatccctt

SEQ ID NO: 1958822 - DNA, 15 bp, Homo sapiens
ctgactcatcccttc

SEQ ID NO: 1958823 - DNA, 15 bp, Homo sapiens
tgactcatcccttct

SEQ ID NO: 1958824 - DNA, 15 bp, Homo sapiens
gactcatcccttctc

SEQ ID NO: 1958825 - DNA, 15 bp, Homo sapiens
actcatcccttctct

SEQ ID NO: 1958826 - DNA, 15 bp, Homo sapiens
ctcatcccttctctg

SEQ ID NO: 1958827 - DNA, 15 bp, Homo sapiens
tcatcccttctctgc

SEQ ID NO: 1958828 - DNA, 15 bp, Homo sapiens
catcccttctctgca

SEQ ID NO: 1958829 - DNA, 15 bp, Homo sapiens
atcccttctctgcat

SEQ ID NO: 1958830 - DNA, 15 bp, Homo sapiens
tcccttctctgcata

SEQ ID NO: 1958831 - DNA, 15 bp, Homo sapiens
cccttctctgcataa

SEQ ID NO: 1958832 - DNA, 15 bp, Homo sapiens
ccttctctgcataaa

SEQ ID NO: 1958833 - DNA, 15 bp, Homo sapiens
cttctctgcataaaa

SEQ ID NO: 1958834 - DNA, 15 bp, Homo sapiens
ttctctgcataaaac

SEQ ID NO: 1958835 - DNA, 15 bp, Homo sapiens
tctctgcataaaacc

SEQ ID NO: 1958836 - DNA, 15 bp, Homo sapiens
ctctgcataaaacca

SEQ ID NO: 1958837 - DNA, 15 bp, Homo sapiens
tctgcataaaaccat

SEQ ID NO: 1958838 - DNA, 15 bp, Homo sapiens
ctgcataaaaccatc

SEQ ID NO: 1958839 - DNA, 15 bp, Homo sapiens
tgcataaaaccatct

SEQ ID NO: 1958840 - DNA, 15 bp, Homo sapiens
gcataaaaccatctc

SEQ ID NO: 1958841 - DNA, 15 bp, Homo sapiens
cataaaaccatctca

SEQ ID NO: 1958842 - DNA, 15 bp, Homo sapiens
ataaaaccatctcat

SEQ ID NO: 1958843 - DNA, 15 bp, Homo sapiens
taaaaccatctcatg

SEQ ID NO: 1958844 - DNA, 15 bp, Homo sapiens
aaaaccatctcatgg

SEQ ID NO: 1958845 - DNA, 15 bp, Homo sapiens
aaaccatctcatggc

SEQ ID NO: 1958846 - DNA, 15 bp, Homo sapiens
aaccatctcatggcg

SEQ ID NO: 1958847 - DNA, 15 bp, Homo sapiens
tcttaccttctttgt

SEQ ID NO: 1958848 - DNA, 15 bp, Homo sapiens
cttaccttctttgtt

SEQ ID NO: 1958849 - DNA, 15 bp, Homo sapiens
ttaccttctttgttt

SEQ ID NO: 1958850 - DNA, 15 bp, Homo sapiens
taccttctttgttta

SEQ ID NO: 1958851 - DNA, 15 bp, Homo sapiens
accttctttgtttaa

SEQ ID NO: 1958852 - DNA, 15 bp, Homo sapiens
ccttctttgtttaag

SEQ ID NO: 1958853 - DNA, 15 bp, Homo sapiens
cttctttgtttaagg

SEQ ID NO: 1958854 - DNA, 15 bp, Homo sapiens
ttctttgtttaaggg

SEQ ID NO: 1958855 - DNA, 15 bp, Homo sapiens
tctttgtttaagggc

SEQ ID NO: 1958856 - DNA, 15 bp, Homo sapiens
ctttgtttaagggct

SEQ ID NO: 1958857 - DNA, 15 bp, Homo sapiens
tttgtttaagggctt

SEQ ID NO: 1958858 - DNA, 15 bp, Homo sapiens
gagagactgaaaagt

SEQ ID NO: 1958859 - DNA, 15 bp, Homo sapiens
agagactgaaaagtt

SEQ ID NO: 1958860 - DNA, 15 bp, Homo sapiens
gagactgaaaagttt

SEQ ID NO: 1958861 - DNA, 15 bp, Homo sapiens
agactgaaaagttta

SEQ ID NO: 1958862 - DNA, 15 bp, Homo sapiens
gactgaaaagtttac

SEQ ID NO: 1958863 - DNA, 15 bp, Homo sapiens
actgaaaagtttacg

SEQ ID NO: 1958864 - DNA, 15 bp, Homo sapiens
ctgaaaagtttacgg

SEQ ID NO: 1958865 - DNA, 15 bp, Homo sapiens
tgaaaagtttacgga

SEQ ID NO: 1958866 - DNA, 15 bp, Homo sapiens
gaaaagtttacggat

SEQ ID NO: 1958867 - DNA, 15 bp, Homo sapiens
aaaagtttacggatt

SEQ ID NO: 1958868 - DNA, 15 bp, Homo sapiens
aaagtttacggattc

SEQ ID NO: 1958869 - DNA, 15 bp, Homo sapiens
aagtttacggattct

SEQ ID NO: 1958870 - DNA, 15 bp, Homo sapiens
agtttacggattctg

SEQ ID NO: 1958871 - DNA, 15 bp, Homo sapiens
gtttacggattctgc

SEQ ID NO: 1958872 - DNA, 15 bp, Homo sapiens
ttacggattctgcta

SEQ ID NO: 1958873 - DNA, 15 bp, Homo sapiens
tacggattctgctag

SEQ ID NO: 1958874 - DNA, 15 bp, Homo sapiens
acggattctgctagc

SEQ ID NO: 1958875 - DNA, 15 bp, Homo sapiens
cggattctgctagct

SEQ ID NO: 1958876 - DNA, 15 bp, Homo sapiens
ggattctgctagctg

SEQ ID NO: 1958877 - DNA, 15 bp, Homo sapiens
gattctgctagctgt

SEQ ID NO: 1958878 - DNA, 15 bp, Homo sapiens
attctgctagctgta

SEQ ID NO: 1958879 - DNA, 15 bp, Homo sapiens
ttctgctagctgtac

SEQ ID NO: 1958880 - DNA, 15 bp, Homo sapiens
tctgctagctgtact

SEQ ID NO: 1958881 - DNA, 15 bp, Homo sapiens
ctgctagctgtactg

SEQ ID NO: 1958882 - DNA, 15 bp, Homo sapiens
tgctagctgtactgg

SEQ ID NO: 1958883 - DNA, 15 bp, Homo sapiens
gctagctgtactggg

SEQ ID NO: 1958884 - DNA, 15 bp, Homo sapiens
ctagctgtactgggc

SEQ ID NO: 1958885 - DNA, 15 bp, Homo sapiens
tagctgtactgggcc

SEQ ID NO: 1958886 - DNA, 15 bp, Homo sapiens
agctgtactgggccc

SEQ ID NO: 1958887 - DNA, 15 bp, Homo sapiens
gctgtactgggcccc

SEQ ID NO: 1958888 - DNA, 15 bp, Homo sapiens
ctgtactgggcccca

SEQ ID NO: 1958889 - DNA, 15 bp, Homo sapiens
tgtactgggccccag

SEQ ID NO: 1958890 - DNA, 15 bp, Homo sapiens
gtactgggccccagg

SEQ ID NO: 1958891 - DNA, 15 bp, Homo sapiens
tactgggccccaggt

SEQ ID NO: 1958892 - DNA, 15 bp, Homo sapiens
actgggccccaggtg

SEQ ID NO: 1958893 - DNA, 15 bp, Homo sapiens
ctgggccccaggtga

SEQ ID NO: 1958894 - DNA, 15 bp, Homo sapiens
tgggccccaggtgac

SEQ ID NO: 1958895 - DNA, 15 bp, Homo sapiens
gggccccaggtgacg

SEQ ID NO: 1958896 - DNA, 15 bp, Homo sapiens
ggccccaggtgacga

SEQ ID NO: 1958897 - DNA, 15 bp, Homo sapiens
gccccaggtgacgag

SEQ ID NO: 1958898 - DNA, 15 bp, Homo sapiens
ccccaggtgacgagg

SEQ ID NO: 1958899 - DNA, 15 bp, Homo sapiens
cccaggtgacgaggc

SEQ ID NO: 1958900 - DNA, 15 bp, Homo sapiens
ccaggtgacgaggca

SEQ ID NO: 1958901 - DNA, 15 bp, Homo sapiens
caggtgacgaggcat

SEQ ID NO: 1958902 - DNA, 15 bp, Homo sapiens
aggtgacgaggcatc

SEQ ID NO: 1958903 - DNA, 15 bp, Homo sapiens
ggtgacgaggcatca

SEQ ID NO: 1958904 - DNA, 15 bp, Homo sapiens
gtgacgaggcatcat

SEQ ID NO: 1958905 - DNA, 15 bp, Homo sapiens
tgacgaggcatcata

SEQ ID NO: 1958906 - DNA, 15 bp, Homo sapiens
gacgaggcatcatag

SEQ ID NO: 1958907 - DNA, 15 bp, Homo sapiens
acgaggcatcatagt

SEQ ID NO: 1958908 - DNA, 15 bp, Homo sapiens
cgaggcatcatagtc

SEQ ID NO: 1958909 - DNA, 15 bp, Homo sapiens
gaggcatcatagtct

SEQ ID NO: 1958910 - DNA, 15 bp, Homo sapiens
aggcatcatagtctc

SEQ ID NO: 1958911 - DNA, 15 bp, Homo sapiens
ggcatcatagtctca

SEQ ID NO: 1958912 - DNA, 15 bp, Homo sapiens
gcatcatagtctcag

SEQ ID NO: 1958913 - DNA, 15 bp, Homo sapiens
catcatagtctcagt

SEQ ID NO: 1958914 - DNA, 15 bp, Homo sapiens
atcatagtctcagtc

SEQ ID NO: 1958915 - DNA, 15 bp, Homo sapiens
tcatagtctcagtca

SEQ ID NO: 1958916 - DNA, 15 bp, Homo sapiens
catagtctcagtcag

SEQ ID NO: 1958917 - DNA, 15 bp, Homo sapiens
atagtctcagtcagt

SEQ ID NO: 1958918 - DNA, 15 bp, Homo sapiens
tagtctcagtcagtc

SEQ ID NO: 1958919 - DNA, 15 bp, Homo sapiens
agtctcagtcagtcc

SEQ ID NO: 1958920 - DNA, 15 bp, Homo sapiens
gtctcagtcagtcca

SEQ ID NO: 1958921 - DNA, 15 bp, Homo sapiens
tctcagtcagtccag

SEQ ID NO: 1958922 - DNA, 15 bp, Homo sapiens
ctcagtcagtccagg

SEQ ID NO: 1958923 - DNA, 15 bp, Homo sapiens
tcagtcagtccagga

SEQ ID NO: 1958924 - DNA, 15 bp, Homo sapiens
cagtcagtccaggaa

SEQ ID NO: 1958925 - DNA, 15 bp, Homo sapiens
agtcagtccaggaat

SEQ ID NO: 1958926 - DNA, 15 bp, Homo sapiens
gtcagtccaggaata

SEQ ID NO: 1958927 - DNA, 15 bp, Homo sapiens
tcagtccaggaatac

SEQ ID NO: 1958928 - DNA, 15 bp, Homo sapiens
cagtccaggaatacc

SEQ ID NO: 1958929 - DNA, 15 bp, Homo sapiens
agtccaggaataccc

SEQ ID NO: 1958930 - DNA, 15 bp, Homo sapiens
gtccaggaataccct

SEQ ID NO: 1958931 - DNA, 15 bp, Homo sapiens
tccaggaataccctt

SEQ ID NO: 1958932 - DNA, 15 bp, Homo sapiens
ccaggaatacccttc

SEQ ID NO: 1958933 - DNA, 15 bp, Homo sapiens
caggaatacccttct

SEQ ID NO: 1958934 - DNA, 15 bp, Homo sapiens
aggaatacccttctc

SEQ ID NO: 1958935 - DNA, 15 bp, Homo sapiens
ggaatacccttctct

SEQ ID NO: 1958936 - DNA, 15 bp, Homo sapiens
gaatacccttctctc

SEQ ID NO: 1958937 - DNA, 15 bp, Homo sapiens
aatacccttctctcc

SEQ ID NO: 1958938 - DNA, 15 bp, Homo sapiens
atacccttctctcct

SEQ ID NO: 1958939 - DNA, 15 bp, Homo sapiens
tacccttctctcctt

SEQ ID NO: 1958940 - DNA, 15 bp, Homo sapiens
acccttctctccttt

SEQ ID NO: 1958941 - DNA, 15 bp, Homo sapiens
cccttctctcctttt

SEQ ID NO: 1958942 - DNA, 15 bp, Homo sapiens
ccttctctccttttt

SEQ ID NO: 1958943 - DNA, 15 bp, Homo sapiens
cttctctcctttttt

SEQ ID NO: 1958944 - DNA, 15 bp, Homo sapiens
ttctctccttttttt

SEQ ID NO: 1958945 - DNA, 15 bp, Homo sapiens
tctctcctttttttt

SEQ ID NO: 1958946 - DNA, 15 bp, Homo sapiens
ctctcctttttttta

SEQ ID NO: 1958947 - DNA, 15 bp, Homo sapiens
tctccttttttttac

SEQ ID NO: 1958948 - DNA, 15 bp, Homo sapiens
ctccttttttttaca

SEQ ID NO: 1958949 - DNA, 15 bp, Homo sapiens
tccttttttttacaa

SEQ ID NO: 1958950 - DNA, 15 bp, Homo sapiens
ccttttttttacaat

SEQ ID NO: 1958951 - DNA, 15 bp, Homo sapiens
cttttttttacaata

SEQ ID NO: 1958952 - DNA, 15 bp, Homo sapiens
gtcaagacaccctgt

SEQ ID NO: 1958953 - DNA, 15 bp, Homo sapiens
tcaagacaccctgtt

SEQ ID NO: 1958954 - DNA, 15 bp, Homo sapiens
caagacaccctgttt

SEQ ID NO: 1958955 - DNA, 15 bp, Homo sapiens
aagacaccctgtttc

SEQ ID NO: 1958956 - DNA, 15 bp, Homo sapiens
agacaccctgtttca

SEQ ID NO: 1958957 - DNA, 15 bp, Homo sapiens
gacaccctgtttcaa

SEQ ID NO: 1958958 - DNA, 15 bp, Homo sapiens
acaccctgtttcaag

SEQ ID NO: 1958959 - DNA, 15 bp, Homo sapiens
caccctgtttcaagg

SEQ ID NO: 1958960 - DNA, 15 bp, Homo sapiens
accctgtttcaaggg

SEQ ID NO: 1958961 - DNA, 15 bp, Homo sapiens
ccctgtttcaagggg

SEQ ID NO: 1958962 - DNA, 15 bp, Homo sapiens
cctgtttcaagggga

SEQ ID NO: 1958963 - DNA, 15 bp, Homo sapiens
ctgtttcaaggggaa

SEQ ID NO: 1958964 - DNA, 15 bp, Homo sapiens
tgtttcaaggggaaa

SEQ ID NO: 1958965 - DNA, 15 bp, Homo sapiens
gtttcaaggggaaac

SEQ ID NO: 1958966 - DNA, 15 bp, Homo sapiens
tttcaaggggaaacc

SEQ ID NO: 1958967 - DNA, 15 bp, Homo sapiens
ttcaaggggaaacct

SEQ ID NO: 1958968 - DNA, 15 bp, Homo sapiens
tcaaggggaaacctt

SEQ ID NO: 1958969 - DNA, 15 bp, Homo sapiens
caaggggaaaccttg

SEQ ID NO: 1958970 - DNA, 15 bp, Homo sapiens
aaggggaaaccttgt

SEQ ID NO: 1958971 - DNA, 15 bp, Homo sapiens
aggggaaaccttgtt

SEQ ID NO: 1958972 - DNA, 15 bp, Homo sapiens
ggggaaaccttgttt

SEQ ID NO: 1958973 - DNA, 15 bp, Homo sapiens
gggaaaccttgttta

SEQ ID NO: 1958974 - DNA, 15 bp, Homo sapiens
ggaaaccttgtttat

SEQ ID NO: 1958975 - DNA, 15 bp, Homo sapiens
gaaaccttgtttatt

SEQ ID NO: 1958976 - DNA, 15 bp, Homo sapiens
aaaccttgtttattg

SEQ ID NO: 1958977 - DNA, 15 bp, Homo sapiens
aaccttgtttattgt

SEQ ID NO: 1958978 - DNA, 15 bp, Homo sapiens
accttgtttattgtt

SEQ ID NO: 1958979 - DNA, 15 bp, Homo sapiens
ccttgtttattgttc

SEQ ID NO: 1958980 - DNA, 15 bp, Homo sapiens
cttgtttattgttcc

SEQ ID NO: 1958981 - DNA, 15 bp, Homo sapiens
ttgtttattgttccc

SEQ ID NO: 1958982 - DNA, 15 bp, Homo sapiens
tgtttattgttccca

SEQ ID NO: 1958983 - DNA, 15 bp, Homo sapiens
gtttattgttcccac

SEQ ID NO: 1958984 - DNA, 15 bp, Homo sapiens
tttattgttcccacc

SEQ ID NO: 1958985 - DNA, 15 bp, Homo sapiens
ttattgttcccacca

SEQ ID NO: 1958986 - DNA, 15 bp, Homo sapiens
tattgttcccaccac

SEQ ID NO: 1958987 - DNA, 15 bp, Homo sapiens
attgttcccaccact

SEQ ID NO: 1958988 - DNA, 15 bp, Homo sapiens
ttgttcccaccactg

SEQ ID NO: 1958989 - DNA, 15 bp, Homo sapiens
tgttcccaccactga

SEQ ID NO: 1958990 - DNA, 15 bp, Homo sapiens
gttcccaccactgat

SEQ ID NO: 1958991 - DNA, 15 bp, Homo sapiens
ttcccaccactgatt

SEQ ID NO: 1958992 - DNA, 15 bp, Homo sapiens
tcccaccactgattc

SEQ ID NO: 1958993 - DNA, 15 bp, Homo sapiens
cccaccactgattcc

SEQ ID NO: 1958994 - DNA, 15 bp, Homo sapiens
ccaccactgattccg

SEQ ID NO: 1958995 - DNA, 15 bp, Homo sapiens
caccactgattccga

SEQ ID NO: 1958996 - DNA, 15 bp, Homo sapiens
accactgattccgac

SEQ ID NO: 1958997 - DNA, 15 bp, Homo sapiens
ccactgattccgacc

SEQ ID NO: 1958998 - DNA, 15 bp, Homo sapiens
cactgattccgacca

SEQ ID NO: 1958999 - DNA, 15 bp, Homo sapiens
actgattccgaccac

SEQ ID NO: 1959000 - DNA, 15 bp, Homo sapiens
ctgattccgaccacg

SEQ ID NO: 1959001 - DNA, 15 bp, Homo sapiens
tgattccgaccacgt

SEQ ID NO: 1959002 - DNA, 15 bp, Homo sapiens
gattccgaccacgta

SEQ ID NO: 1959003 - DNA, 15 bp, Homo sapiens
attccgaccacgtaa

SEQ ID NO: 1959004 - DNA, 15 bp, Homo sapiens
ttccgaccacgtaac

SEQ ID NO: 1959005 - DNA, 15 bp, Homo sapiens
tccgaccacgtaacc

SEQ ID NO: 1959006 - DNA, 15 bp, Homo sapiens
ccgaccacgtaaccc

SEQ ID NO: 1959007 - DNA, 15 bp, Homo sapiens
cgaccacgtaaccct

SEQ ID NO: 1959008 - DNA, 15 bp, Homo sapiens
gaccacgtaaccctt

SEQ ID NO: 1959009 - DNA, 15 bp, Homo sapiens
accacgtaacccttc

SEQ ID NO: 1959010 - DNA, 15 bp, Homo sapiens
ccgctgttcctcgct

SEQ ID NO: 1959011 - DNA, 15 bp, Homo sapiens
cgctgttcctcgctg

SEQ ID NO: 1959012 - DNA, 15 bp, Homo sapiens
gctgttcctcgctgc

SEQ ID NO: 1959013 - DNA, 15 bp, Homo sapiens
ctgttcctcgctgcc

SEQ ID NO: 1959014 - DNA, 15 bp, Homo sapiens
tgttcctcgctgcca

SEQ ID NO: 1959015 - DNA, 15 bp, Homo sapiens
gttcctcgctgccat

SEQ ID NO: 1959016 - DNA, 15 bp, Homo sapiens
ttcctcgctgccata

SEQ ID NO: 1959017 - DNA, 15 bp, Homo sapiens
tcctcgctgccatag

SEQ ID NO: 1959018 - DNA, 15 bp, Homo sapiens
cctcgctgccatagg

SEQ ID NO: 1959019 - DNA, 15 bp, Homo sapiens
ctcgctgccataggc

SEQ ID NO: 1959020 - DNA, 15 bp, Homo sapiens
tcgctgccataggca

SEQ ID NO: 1959021 - DNA, 15 bp, Homo sapiens
cgctgccataggcat

SEQ ID NO: 1959022 - DNA, 15 bp, Homo sapiens
gctgccataggcata

SEQ ID NO: 1959023 - DNA, 15 bp, Homo sapiens
ctgccataggcatag

SEQ ID NO: 1959024 - DNA, 15 bp, Homo sapiens
tgccataggcataga

SEQ ID NO: 1959025 - DNA, 15 bp, Homo sapiens
gccataggcatagat

SEQ ID NO: 1959026 - DNA, 15 bp, Homo sapiens
ccataggcatagata

SEQ ID NO: 1959027 - DNA, 15 bp, Homo sapiens
cataggcatagatag

SEQ ID NO: 1959028 - DNA, 15 bp, Homo sapiens
ataggcatagatagg

SEQ ID NO: 1959029 - DNA, 15 bp, Homo sapiens
taggcatagataggg

SEQ ID NO: 1959030 - DNA, 15 bp, Homo sapiens
aggcatagatagggt

SEQ ID NO: 1959031 - DNA, 15 bp, Homo sapiens
ggcatagatagggtg

SEQ ID NO: 1959032 - DNA, 15 bp, Homo sapiens
gcatagatagggtgc

SEQ ID NO: 1959033 - DNA, 15 bp, Homo sapiens
catagatagggtgca

SEQ ID NO: 1959034 - DNA, 15 bp, Homo sapiens
atagatagggtgcat

SEQ ID NO: 1959035 - DNA, 15 bp, Homo sapiens
tagatagggtgcatg

SEQ ID NO: 1959036 - DNA, 15 bp, Homo sapiens
agatagggtgcatga

SEQ ID NO: 1959037 - DNA, 15 bp, Homo sapiens
gatagggtgcatgac

SEQ ID NO: 1959038 - DNA, 15 bp, Homo sapiens
atagggtgcatgacg

SEQ ID NO: 1959039 - DNA, 15 bp, Homo sapiens
tagggtgcatgacga

SEQ ID NO: 1959040 - DNA, 15 bp, Homo sapiens
agggtgcatgacgag

SEQ ID NO: 1959041 - DNA, 15 bp, Homo sapiens
gggtgcatgacgagg

SEQ ID NO: 1959042 - DNA, 15 bp, Homo sapiens
ggtgcatgacgaggg

SEQ ID NO: 1959043 - DNA, 15 bp, Homo sapiens
gtgcatgacgaggga

SEQ ID NO: 1959044 - DNA, 15 bp, Homo sapiens
tgcatgacgagggag

SEQ ID NO: 1959045 - DNA, 15 bp, Homo sapiens
gcatgacgagggagg

SEQ ID NO: 1959046 - DNA, 15 bp, Homo sapiens
catgacgagggagga

SEQ ID NO: 1959047 - DNA, 15 bp, Homo sapiens
atgacgagggaggac

SEQ ID NO: 1959048 - DNA, 15 bp, Homo sapiens
tgacgagggaggact

SEQ ID NO: 1959049 - DNA, 15 bp, Homo sapiens
gacgagggaggactg

SEQ ID NO: 1959050 - DNA, 15 bp, Homo sapiens
acgagggaggactgg

SEQ ID NO: 1959051 - DNA, 15 bp, Homo sapiens
cgagggaggactgga

SEQ ID NO: 1959052 - DNA, 15 bp, Homo sapiens
gagggaggactggac

SEQ ID NO: 1959053 - DNA, 15 bp, Homo sapiens
agggaggactggaca

SEQ ID NO: 1959054 - DNA, 15 bp, Homo sapiens
gggaggactggacac

SEQ ID NO: 1959055 - DNA, 15 bp, Homo sapiens
ggaggactggacact

SEQ ID NO: 1959056 - DNA, 15 bp, Homo sapiens
gaggactggacactc

SEQ ID NO: 1959057 - DNA, 15 bp, Homo sapiens
aggactggacactca

SEQ ID NO: 1959058 - DNA, 15 bp, Homo sapiens
ggactggacactcat

SEQ ID NO: 1959059 - DNA, 15 bp, Homo sapiens
gactggacactcatc

SEQ ID NO: 1959060 - DNA, 15 bp, Homo sapiens
actggacactcatcg

SEQ ID NO: 1959061 - DNA, 15 bp, Homo sapiens
ctggacactcatcgc

SEQ ID NO: 1959062 - DNA, 15 bp, Homo sapiens
tggacactcatcgcc

SEQ ID NO: 1959063 - DNA, 15 bp, Homo sapiens
ggacactcatcgccg

SEQ ID NO: 1959064 - DNA, 15 bp, Homo sapiens
gacactcatcgccga

SEQ ID NO: 1959065 - DNA, 15 bp, Homo sapiens
acactcatcgccgac

SEQ ID NO: 1959066 - DNA, 15 bp, Homo sapiens
cactcatcgccgacc

SEQ ID NO: 1959067 - DNA, 15 bp, Homo sapiens
actcatcgccgacct

SEQ ID NO: 1959068 - DNA, 15 bp, Homo sapiens
ctcatcgccgacctg

SEQ ID NO: 1959069 - DNA, 15 bp, Homo sapiens
tcatcgccgacctgt

SEQ ID NO: 1959070 - DNA, 15 bp, Homo sapiens
catcgccgacctgta

SEQ ID NO: 1959071 - DNA, 15 bp, Homo sapiens
atcgccgacctgtag

SEQ ID NO: 1959072 - DNA, 15 bp, Homo sapiens
tcgccgacctgtagc

SEQ ID NO: 1959073 - DNA, 15 bp, Homo sapiens
cgccgacctgtagcc

SEQ ID NO: 1959074 - DNA, 15 bp, Homo sapiens
ctggcatcctctccc

SEQ ID NO: 1959075 - DNA, 15 bp, Homo sapiens
tggcatcctctcccc

SEQ ID NO: 1959076 - DNA, 15 bp, Homo sapiens
ggcatcctctccccc

SEQ ID NO: 1959077 - DNA, 15 bp, Homo sapiens
gcatcctctcccccg

SEQ ID NO: 1959078 - DNA, 15 bp, Homo sapiens
catcctctcccccgt

SEQ ID NO: 1959079 - DNA, 15 bp, Homo sapiens
atcctctcccccgtc

SEQ ID NO: 1959080 - DNA, 15 bp, Homo sapiens
tcctctcccccgtcc

SEQ ID NO: 1959081 - DNA, 15 bp, Homo sapiens
cctctcccccgtccc

SEQ ID NO: 1959082 - DNA, 15 bp, Homo sapiens
ctctcccccgtcccc

SEQ ID NO: 1959083 - DNA, 15 bp, Homo sapiens
tctcccccgtcccct

SEQ ID NO: 1959084 - DNA, 15 bp, Homo sapiens
ctcccccgtcccctg

SEQ ID NO: 1959085 - DNA, 15 bp, Homo sapiens
tcccccgtcccctgc

SEQ ID NO: 1959086 - DNA, 15 bp, Homo sapiens
cccccgtcccctgcc

SEQ ID NO: 1959087 - DNA, 15 bp, Homo sapiens
ccccgtcccctgcca

SEQ ID NO: 1959088 - DNA, 15 bp, Homo sapiens
cccgtcccctgccag

SEQ ID NO: 1959089 - DNA, 15 bp, Homo sapiens
ccgtcccctgccagt

SEQ ID NO: 1959090 - DNA, 15 bp, Homo sapiens
cgtcccctgccagtt

SEQ ID NO: 1959091 - DNA, 15 bp, Homo sapiens
gtcccctgccagttt

SEQ ID NO: 1959092 - DNA, 15 bp, Homo sapiens
tcccctgccagtttt

SEQ ID NO: 1959093 - DNA, 15 bp, Homo sapiens
cccctgccagttttc

SEQ ID NO: 1959094 - DNA, 15 bp, Homo sapiens
ccctgccagttttcc

SEQ ID NO: 1959095 - DNA, 15 bp, Homo sapiens
cctgccagttttcca

SEQ ID NO: 1959096 - DNA, 15 bp, Homo sapiens
ctgccagttttccat

SEQ ID NO: 1959097 - DNA, 15 bp, Homo sapiens
tgccagttttccatc

SEQ ID NO: 1959098 - DNA, 15 bp, Homo sapiens
gccagttttccatct

SEQ ID NO: 1959099 - DNA, 15 bp, Homo sapiens
ccagttttccatctc

SEQ ID NO: 1959100 - DNA, 15 bp, Homo sapiens
cagttttccatctcc

SEQ ID NO: 1959101 - DNA, 15 bp, Homo sapiens
agttttccatctcca

SEQ ID NO: 1959102 - DNA, 15 bp, Homo sapiens
gttttccatctccag

SEQ ID NO: 1959103 - DNA, 15 bp, Homo sapiens
ttttccatctccagc

SEQ ID NO: 1959104 - DNA, 15 bp, Homo sapiens
tttccatctccagca

SEQ ID NO: 1959105 - DNA, 15 bp, Homo sapiens
ttccatctccagcag

SEQ ID NO: 1959106 - DNA, 15 bp, Homo sapiens
tccatctccagcagc

SEQ ID NO: 1959107 - DNA, 15 bp, Homo sapiens
ccatctccagcagct

SEQ ID NO: 1959108 - DNA, 15 bp, Homo sapiens
catctccagcagctc

SEQ ID NO: 1959109 - DNA, 15 bp, Homo sapiens
atctccagcagctct

SEQ ID NO: 1959110 - DNA, 15 bp, Homo sapiens
tctccagcagctctg

SEQ ID NO: 1959111 - DNA, 15 bp, Homo sapiens
ctccagcagctctgc

SEQ ID NO: 1959112 - DNA, 15 bp, Homo sapiens
tccagcagctctgct

SEQ ID NO: 1959113 - DNA, 15 bp, Homo sapiens
ccagcagctctgcta

SEQ ID NO: 1959114 - DNA, 15 bp, Homo sapiens
cagcagctctgctac

SEQ ID NO: 1959115 - DNA, 15 bp, Homo sapiens
agcagctctgctacc

SEQ ID NO: 1959116 - DNA, 15 bp, Homo sapiens
gcagctctgctaccc

SEQ ID NO: 1959117 - DNA, 15 bp, Homo sapiens
cagctctgctacccc

SEQ ID NO: 1959118 - DNA, 15 bp, Homo sapiens
agctctgctacccct

SEQ ID NO: 1959119 - DNA, 15 bp, Homo sapiens
gctctgctacccctt

SEQ ID NO: 1959120 - DNA, 15 bp, Homo sapiens
ctctgctaccccttc

SEQ ID NO: 1959121 - DNA, 15 bp, Homo sapiens
tctgctaccccttcc

SEQ ID NO: 1959122 - DNA, 15 bp, Homo sapiens
ctgctaccccttccc

SEQ ID NO: 1959123 - DNA, 15 bp, Homo sapiens
tgctaccccttcccc

SEQ ID NO: 1959124 - DNA, 15 bp, Homo sapiens
gctaccccttccccc

SEQ ID NO: 1959125 - DNA, 15 bp, Homo sapiens
ctaccccttccccca

SEQ ID NO: 1959126 - DNA, 15 bp, Homo sapiens
taccccttcccccat

SEQ ID NO: 1959127 - DNA, 15 bp, Homo sapiens
accccttcccccatc

SEQ ID NO: 1959128 - DNA, 15 bp, Homo sapiens
ccccttcccccatcc

SEQ ID NO: 1959129 - DNA, 15 bp, Homo sapiens
cccttcccccatccc

SEQ ID NO: 1959130 - DNA, 15 bp, Homo sapiens
ccttcccccatcccc

SEQ ID NO: 1959131 - DNA, 15 bp, Homo sapiens
cttcccccatccccg

SEQ ID NO: 1959132 - DNA, 15 bp, Homo sapiens
ttcccccatccccga

SEQ ID NO: 1959133 - DNA, 15 bp, Homo sapiens
tcccccatccccgag

SEQ ID NO: 1959134 - DNA, 15 bp, Homo sapiens
cccccatccccgagt

SEQ ID NO: 1959135 - DNA, 15 bp, Homo sapiens
ccccatccccgagtg

SEQ ID NO: 1959136 - DNA, 15 bp, Homo sapiens
cccatccccgagtgt

SEQ ID NO: 1959137 - DNA, 15 bp, Homo sapiens
ccatccccgagtgtg

SEQ ID NO: 1959138 - DNA, 15 bp, Homo sapiens
catccccgagtgtgg

SEQ ID NO: 1959139 - DNA, 15 bp, Homo sapiens
atccccgagtgtggt

SEQ ID NO: 1959140 - DNA, 15 bp, Homo sapiens
tccccgagtgtggtt

SEQ ID NO: 1959141 - DNA, 15 bp, Homo sapiens
ccccgagtgtggttc

SEQ ID NO: 1959142 - DNA, 15 bp, Homo sapiens
cccgagtgtggttcc

SEQ ID NO: 1959143 - DNA, 15 bp, Homo sapiens
ccgagtgtggttcca

SEQ ID NO: 1959144 - DNA, 15 bp, Homo sapiens
cgagtgtggttccag

SEQ ID NO: 1959145 - DNA, 15 bp, Homo sapiens
gagtgtggttccaga

SEQ ID NO: 1959146 - DNA, 15 bp, Homo sapiens
agtgtggttccagat

SEQ ID NO: 1959147 - DNA, 15 bp, Homo sapiens
gtgtggttccagata

SEQ ID NO: 1959148 - DNA, 15 bp, Homo sapiens
tgtggttccagatag

SEQ ID NO: 1959149 - DNA, 15 bp, Homo sapiens
gtggttccagatagt

SEQ ID NO: 1959150 - DNA, 15 bp, Homo sapiens
tggttccagatagtg

SEQ ID NO: 1959151 - DNA, 15 bp, Homo sapiens
ggttccagatagtgg

SEQ ID NO: 1959152 - DNA, 15 bp, Homo sapiens
gttccagatagtgga

SEQ ID NO: 1959153 - DNA, 15 bp, Homo sapiens
ttccagatagtggaa

SEQ ID NO: 1959154 - DNA, 15 bp, Homo sapiens
tccagatagtggaag

SEQ ID NO: 1959155 - DNA, 15 bp, Homo sapiens
ccagatagtggaagt

SEQ ID NO: 1959156 - DNA, 15 bp, Homo sapiens
cagatagtggaagtc

SEQ ID NO: 1959157 - DNA, 15 bp, Homo sapiens
agatagtggaagtct

SEQ ID NO: 1959158 - DNA, 15 bp, Homo sapiens
gatagtggaagtctt

SEQ ID NO: 1959159 - DNA, 15 bp, Homo sapiens
atagtggaagtctta

SEQ ID NO: 1959160 - DNA, 15 bp, Homo sapiens
tagtggaagtcttat

SEQ ID NO: 1959161 - DNA, 15 bp, Homo sapiens
agtggaagtcttatc

SEQ ID NO: 1959162 - DNA, 15 bp, Homo sapiens
gtggaagtcttatct

SEQ ID NO: 1959163 - DNA, 15 bp, Homo sapiens
tggaagtcttatctc

SEQ ID NO: 1959164 - DNA, 15 bp, Homo sapiens
ggaagtcttatctcc

SEQ ID NO: 1959165 - DNA, 15 bp, Homo sapiens
gaagtcttatctcct

SEQ ID NO: 1959166 - DNA, 15 bp, Homo sapiens
aagtcttatctcctg

SEQ ID NO: 1959167 - DNA, 15 bp, Homo sapiens
agtcttatctcctgt

SEQ ID NO: 1959168 - DNA, 15 bp, Homo sapiens
gtcttatctcctgtc

SEQ ID NO: 1959169 - DNA, 15 bp, Homo sapiens
tcttatctcctgtct

SEQ ID NO: 1959170 - DNA, 15 bp, Homo sapiens
cttatctcctgtctc

SEQ ID NO: 1959171 - DNA, 15 bp, Homo sapiens
ttatctcctgtctcc

SEQ ID NO: 1959172 - DNA, 15 bp, Homo sapiens
tatctcctgtctcca

SEQ ID NO: 1959173 - DNA, 15 bp, Homo sapiens
atctcctgtctccag

SEQ ID NO: 1959174 - DNA, 15 bp, Homo sapiens
tctcctgtctccagc

SEQ ID NO: 1959175 - DNA, 15 bp, Homo sapiens
ctcctgtctccagcc

SEQ ID NO: 1959176 - DNA, 15 bp, Homo sapiens
tcctgtctccagcca

SEQ ID NO: 1959177 - DNA, 15 bp, Homo sapiens
cctgtctccagccag

SEQ ID NO: 1959178 - DNA, 15 bp, Homo sapiens
ctgtctccagccaga

SEQ ID NO: 1959179 - DNA, 15 bp, Homo sapiens
tgtctccagccagac

SEQ ID NO: 1959180 - DNA, 15 bp, Homo sapiens
gtctccagccagacc

SEQ ID NO: 1959181 - DNA, 15 bp, Homo sapiens
tctccagccagacct

SEQ ID NO: 1959182 - DNA, 15 bp, Homo sapiens
ctccagccagacctg

SEQ ID NO: 1959183 - DNA, 15 bp, Homo sapiens
tccagccagacctga

SEQ ID NO: 1959184 - DNA, 15 bp, Homo sapiens
ccagccagacctgat

SEQ ID NO: 1959185 - DNA, 15 bp, Homo sapiens
cagccagacctgatc

SEQ ID NO: 1959186 - DNA, 15 bp, Homo sapiens
agccagacctgatcg

SEQ ID NO: 1959187 - DNA, 15 bp, Homo sapiens
gccagacctgatcgg

SEQ ID NO: 1959188 - DNA, 15 bp, Homo sapiens
ccagacctgatcggt

SEQ ID NO: 1959189 - DNA, 15 bp, Homo sapiens
cagacctgatcggtt

SEQ ID NO: 1959190 - DNA, 15 bp, Homo sapiens
agacctgatcggttt

SEQ ID NO: 1959191 - DNA, 15 bp, Homo sapiens
gacctgatcggtttc

SEQ ID NO: 1959192 - DNA, 15 bp, Homo sapiens
acctgatcggtttct

SEQ ID NO: 1959193 - DNA, 15 bp, Homo sapiens
cctgatcggtttctg

SEQ ID NO: 1959194 - DNA, 15 bp, Homo sapiens
ctgatcggtttctgt

SEQ ID NO: 1959195 - DNA, 15 bp, Homo sapiens
tgatcggtttctgtc

SEQ ID NO: 1959196 - DNA, 15 bp, Homo sapiens
gatcggtttctgtcc

SEQ ID NO: 1959197 - DNA, 15 bp, Homo sapiens
atcggtttctgtccc

SEQ ID NO: 1959198 - DNA, 15 bp, Homo sapiens
tcggtttctgtccct

SEQ ID NO: 1959199 - DNA, 15 bp, Homo sapiens
cggtttctgtccctg

SEQ ID NO: 1959200 - DNA, 15 bp, Homo sapiens
ggtttctgtccctgg

SEQ ID NO: 1959201 - DNA, 15 bp, Homo sapiens
gtttctgtccctgga

SEQ ID NO: 1959202 - DNA, 15 bp, Homo sapiens
tttctgtccctggag

SEQ ID NO: 1959203 - DNA, 15 bp, Homo sapiens
ttctgtccctggagc

SEQ ID NO: 1959204 - DNA, 15 bp, Homo sapiens
tctgtccctggagct

SEQ ID NO: 1959205 - DNA, 15 bp, Homo sapiens
ctgtccctggagctg

SEQ ID NO: 1959206 - DNA, 15 bp, Homo sapiens
tgtccctggagctgg

SEQ ID NO: 1959207 - DNA, 15 bp, Homo sapiens
gtccctggagctggg

SEQ ID NO: 1959208 - DNA, 15 bp, Homo sapiens
tccctggagctgggg

SEQ ID NO: 1959209 - DNA, 15 bp, Homo sapiens
ccctggagctggggg

SEQ ID NO: 1959210 - DNA, 15 bp, Homo sapiens
cctggagctgggggg

SEQ ID NO: 1959211 - DNA, 15 bp, Homo sapiens
ctggagctggggggg

SEQ ID NO: 1959212 - DNA, 15 bp, Homo sapiens
tggagctgggggggg

SEQ ID NO: 1959213 - DNA, 15 bp, Homo sapiens
ggagctgggggggga

SEQ ID NO: 1959214 - DNA, 15 bp, Homo sapiens
gagctggggggggag

SEQ ID NO: 1959215 - DNA, 15 bp, Homo sapiens
agctggggggggagc

SEQ ID NO: 1959216 - DNA, 15 bp, Homo sapiens
gctggggggggagcg

SEQ ID NO: 1959217 - DNA, 15 bp, Homo sapiens
ctggggggggagcgg

SEQ ID NO: 1959218 - DNA, 15 bp, Homo sapiens
tggggggggagcggg

SEQ ID NO: 1959219 - DNA, 15 bp, Homo sapiens
ggggggggagcgggg

SEQ ID NO: 1959220 - DNA, 15 bp, Homo sapiens
gggggggagcgggga

SEQ ID NO: 1959221 - DNA, 15 bp, Homo sapiens
ggggggagcggggag

SEQ ID NO: 1959222 - DNA, 15 bp, Homo sapiens
gggggagcggggaga

SEQ ID NO: 1959223 - DNA, 15 bp, Homo sapiens
ggggagcggggagag

SEQ ID NO: 1959224 - DNA, 15 bp, Homo sapiens
gggagcggggagagg

SEQ ID NO: 1959225 - DNA, 15 bp, Homo sapiens
ggagcggggagaggg

SEQ ID NO: 1959226 - DNA, 15 bp, Homo sapiens
gagcggggagagggg

SEQ ID NO: 1959227 - DNA, 15 bp, Homo sapiens
agcggggagaggggc

SEQ ID NO: 1959228 - DNA, 15 bp, Homo sapiens
gcggggagaggggcg

SEQ ID NO: 1959229 - DNA, 15 bp, Homo sapiens
cggggagaggggcgg

SEQ ID NO: 1959230 - DNA, 15 bp, Homo sapiens
ggggagaggggcggt

SEQ ID NO: 1959231 - DNA, 15 bp, Homo sapiens
gggagaggggcggtt

SEQ ID NO: 1959232 - DNA, 15 bp, Homo sapiens
ggagaggggcggtta

SEQ ID NO: 1959233 - DNA, 15 bp, Homo sapiens
gagaggggcggttag

SEQ ID NO: 1959234 - DNA, 15 bp, Homo sapiens
agaggggcggttaga

SEQ ID NO: 1959235 - DNA, 15 bp, Homo sapiens
gaggggcggttagag

SEQ ID NO: 1959236 - DNA, 15 bp, Homo sapiens
aggggcggttagagg

SEQ ID NO: 1959237 - DNA, 15 bp, Homo sapiens
ggggcggttagaggg

SEQ ID NO: 1959238 - DNA, 15 bp, Homo sapiens
gggcggttagagggg

SEQ ID NO: 1959239 - DNA, 15 bp, Homo sapiens
ggcggttagaggggc

SEQ ID NO: 1959240 - DNA, 15 bp, Homo sapiens
gcggttagaggggca

SEQ ID NO: 1959241 - DNA, 15 bp, Homo sapiens
cggttagaggggcag

SEQ ID NO: 1959242 - DNA, 15 bp, Homo sapiens
ggttagaggggcagt

SEQ ID NO: 1959243 - DNA, 15 bp, Homo sapiens
gttagaggggcagtg

SEQ ID NO: 1959244 - DNA, 15 bp, Homo sapiens
ttagaggggcagtgt

SEQ ID NO: 1959245 - DNA, 15 bp, Homo sapiens
tagaggggcagtgtt

SEQ ID NO: 1959246 - DNA, 15 bp, Homo sapiens
agaggggcagtgttg

SEQ ID NO: 1959247 - DNA, 15 bp, Homo sapiens
gaggggcagtgttgg

SEQ ID NO: 1959248 - DNA, 15 bp, Homo sapiens
aggggcagtgttggg

SEQ ID NO: 1959249 - DNA, 15 bp, Homo sapiens
ggggcagtgttgggg

SEQ ID NO: 1959250 - DNA, 15 bp, Homo sapiens
gggcagtgttgggga

SEQ ID NO: 1959251 - DNA, 15 bp, Homo sapiens
ggcagtgttggggaa

SEQ ID NO: 1959252 - DNA, 15 bp, Homo sapiens
gcagtgttggggaag

SEQ ID NO: 1959253 - DNA, 15 bp, Homo sapiens
cagtgttggggaagt

SEQ ID NO: 1959254 - DNA, 15 bp, Homo sapiens
agtgttggggaagtg

SEQ ID NO: 1959255 - DNA, 15 bp, Homo sapiens
gtgttggggaagtgg

SEQ ID NO: 1959256 - DNA, 15 bp, Homo sapiens
tgttggggaagtggg

SEQ ID NO: 1959257 - DNA, 15 bp, Homo sapiens
gttggggaagtggga

SEQ ID NO: 1959258 - DNA, 15 bp, Homo sapiens
ttggggaagtgggac

SEQ ID NO: 1959259 - DNA, 15 bp, Homo sapiens
tggggaagtgggaca

SEQ ID NO: 1959260 - DNA, 15 bp, Homo sapiens
ggggaagtgggacag

SEQ ID NO: 1959261 - DNA, 15 bp, Homo sapiens
gggaagtgggacaga

SEQ ID NO: 1959262 - DNA, 15 bp, Homo sapiens
ggaagtgggacagac

SEQ ID NO: 1959263 - DNA, 15 bp, Homo sapiens
gaagtgggacagaca

SEQ ID NO: 1959264 - DNA, 15 bp, Homo sapiens
aagtgggacagacag

SEQ ID NO: 1959265 - DNA, 15 bp, Homo sapiens
agtgggacagacaga

SEQ ID NO: 1959266 - DNA, 15 bp, Homo sapiens
gtgggacagacagac

SEQ ID NO: 1959267 - DNA, 15 bp, Homo sapiens
gggacagacagacag

SEQ ID NO: 1959268 - DNA, 15 bp, Homo sapiens
ggacagacagacagg

SEQ ID NO: 1959269 - DNA, 15 bp, Homo sapiens
gacagacagacaggc

SEQ ID NO: 1959270 - DNA, 15 bp, Homo sapiens
acagacagacaggca

SEQ ID NO: 1959271 - DNA, 15 bp, Homo sapiens
cagacagacaggcaa

SEQ ID NO: 1959272 - DNA, 15 bp, Homo sapiens
agacagacaggcaaa

SEQ ID NO: 1959273 - DNA, 15 bp, Homo sapiens
gacagacaggcaaac

SEQ ID NO: 1959274 - DNA, 15 bp, Homo sapiens
acagacaggcaaaca

SEQ ID NO: 1959275 - DNA, 15 bp, Homo sapiens
cagacaggcaaacaa

SEQ ID NO: 1959276 - DNA, 15 bp, Homo sapiens
agacaggcaaacaag

SEQ ID NO: 1959277 - DNA, 15 bp, Homo sapiens
gacaggcaaacaaga

SEQ ID NO: 1959278 - DNA, 15 bp, Homo sapiens
acaggcaaacaagac

SEQ ID NO: 1959279 - DNA, 15 bp, Homo sapiens
caggcaaacaagacc

SEQ ID NO: 1959280 - DNA, 15 bp, Homo sapiens
aggcaaacaagaccc

SEQ ID NO: 1959281 - DNA, 15 bp, Homo sapiens
ggcaaacaagacccc

SEQ ID NO: 1959282 - DNA, 15 bp, Homo sapiens
gcaaacaagacccct

SEQ ID NO: 1959283 - DNA, 15 bp, Homo sapiens
caaacaagacccctt

SEQ ID NO: 1959284 - DNA, 15 bp, Homo sapiens
aaacaagaccccttt

SEQ ID NO: 1959285 - DNA, 15 bp, Homo sapiens
aacaagacccctttc

SEQ ID NO: 1959286 - DNA, 15 bp, Homo sapiens
acaagacccctttcc

SEQ ID NO: 1959287 - DNA, 15 bp, Homo sapiens
caagacccctttcca

SEQ ID NO: 1959288 - DNA, 15 bp, Homo sapiens
aagacccctttccaa

SEQ ID NO: 1959289 - DNA, 15 bp, Homo sapiens
agacccctttccaaa

SEQ ID NO: 1959290 - DNA, 15 bp, Homo sapiens
gacccctttccaaag

SEQ ID NO: 1959291 - DNA, 15 bp, Homo sapiens
acccctttccaaagc

SEQ ID NO: 1959292 - DNA, 15 bp, Homo sapiens
cccctttccaaagcc

SEQ ID NO: 1959293 - DNA, 15 bp, Homo sapiens
ccctttccaaagcct

SEQ ID NO: 1959294 - DNA, 15 bp, Homo sapiens
ctttccaaagcctct

SEQ ID NO: 1959295 - DNA, 15 bp, Homo sapiens
tttccaaagcctctg

SEQ ID NO: 1959296 - DNA, 15 bp, Homo sapiens
ttccaaagcctctgc

SEQ ID NO: 1959297 - DNA, 15 bp, Homo sapiens
tccaaagcctctgcg

SEQ ID NO: 1959298 - DNA, 15 bp, Homo sapiens
ccaaagcctctgcgt

SEQ ID NO: 1959299 - DNA, 15 bp, Homo sapiens
caaagcctctgcgtc

SEQ ID NO: 1959300 - DNA, 15 bp, Homo sapiens
aaagcctctgcgtca

SEQ ID NO: 1959301 - DNA, 15 bp, Homo sapiens
aagcctctgcgtcag

SEQ ID NO: 1959302 - DNA, 15 bp, Homo sapiens
agcctctgcgtcaga

SEQ ID NO: 1959303 - DNA, 15 bp, Homo sapiens
gcctctgcgtcagag

SEQ ID NO: 1959304 - DNA, 15 bp, Homo sapiens
cctctgcgtcagagt

SEQ ID NO: 1959305 - DNA, 15 bp, Homo sapiens
ctctgcgtcagagtg

SEQ ID NO: 1959306 - DNA, 15 bp, Homo sapiens
tctgcgtcagagtgt

SEQ ID NO: 1959307 - DNA, 15 bp, Homo sapiens
ctgcgtcagagtgtc

SEQ ID NO: 1959308 - DNA, 15 bp, Homo sapiens
tgcgtcagagtgtcc

SEQ ID NO: 1959309 - DNA, 15 bp, Homo sapiens
gcgtcagagtgtcca

SEQ ID NO: 1959310 - DNA, 15 bp, Homo sapiens
cgtcagagtgtccag

SEQ ID NO: 1959311 - DNA, 15 bp, Homo sapiens
gtcagagtgtccagc

SEQ ID NO: 1959312 - DNA, 15 bp, Homo sapiens
tcagagtgtccagcc

SEQ ID NO: 1959313 - DNA, 15 bp, Homo sapiens
cagagtgtccagccc

SEQ ID NO: 1959314 - DNA, 15 bp, Homo sapiens
agagtgtccagcccg

SEQ ID NO: 1959315 - DNA, 15 bp, Homo sapiens
gagtgtccagcccgc

SEQ ID NO: 1959316 - DNA, 15 bp, Homo sapiens
agtgtccagcccgcg

SEQ ID NO: 1959317 - DNA, 15 bp, Homo sapiens
gtgtccagcccgcga

SEQ ID NO: 1959318 - DNA, 15 bp, Homo sapiens
tgtccagcccgcgat

SEQ ID NO: 1959319 - DNA, 15 bp, Homo sapiens
gtccagcccgcgatg

SEQ ID NO: 1959320 - DNA, 15 bp, Homo sapiens
tccagcccgcgatgt

SEQ ID NO: 1959321 - DNA, 15 bp, Homo sapiens
ccagcccgcgatgtc

SEQ ID NO: 1959322 - DNA, 15 bp, Homo sapiens
cagcccgcgatgtcc

SEQ ID NO: 1959323 - DNA, 15 bp, Homo sapiens
agcccgcgatgtccc

SEQ ID NO: 1959324 - DNA, 15 bp, Homo sapiens
gcccgcgatgtccct

SEQ ID NO: 1959325 - DNA, 15 bp, Homo sapiens
cccgcgatgtccctg

SEQ ID NO: 1959326 - DNA, 15 bp, Homo sapiens
ccgcgatgtccctgg

SEQ ID NO: 1959327 - DNA, 15 bp, Homo sapiens
cgcgatgtccctggg

SEQ ID NO: 1959328 - DNA, 15 bp, Homo sapiens
gcgatgtccctgggc

SEQ ID NO: 1959329 - DNA, 15 bp, Homo sapiens
cgatgtccctgggca

SEQ ID NO: 1959330 - DNA, 15 bp, Homo sapiens
gatgtccctgggcag

SEQ ID NO: 1959331 - DNA, 15 bp, Homo sapiens
atgtccctgggcagg

SEQ ID NO: 1959332 - DNA, 15 bp, Homo sapiens
tgtccctgggcaggg

SEQ ID NO: 1959333 - DNA, 15 bp, Homo sapiens
gtccctgggcagggc

SEQ ID NO: 1959334 - DNA, 15 bp, Homo sapiens
tccctgggcagggca

SEQ ID NO: 1959335 - DNA, 15 bp, Homo sapiens
ccctgggcagggcac

SEQ ID NO: 1959336 - DNA, 15 bp, Homo sapiens
cctgggcagggcacc

SEQ ID NO: 1959337 - DNA, 15 bp, Homo sapiens
ctgggcagggcaccc

SEQ ID NO: 1959338 - DNA, 15 bp, Homo sapiens
tgggcagggcacccc

SEQ ID NO: 1959339 - DNA, 15 bp, Homo sapiens
gggcagggcacccca

SEQ ID NO: 1959340 - DNA, 15 bp, Homo sapiens
ggcagggcaccccag

SEQ ID NO: 1959341 - DNA, 15 bp, Homo sapiens
gcagggcaccccagt

SEQ ID NO: 1959342 - DNA, 15 bp, Homo sapiens
cagggcaccccagtg

SEQ ID NO: 1959343 - DNA, 15 bp, Homo sapiens
agggcaccccagtgt

SEQ ID NO: 1959344 - DNA, 15 bp, Homo sapiens
gggcaccccagtgtc

SEQ ID NO: 1959345 - DNA, 15 bp, Homo sapiens
ggcaccccagtgtcc

SEQ ID NO: 1959346 - DNA, 15 bp, Homo sapiens
gcaccccagtgtcca

SEQ ID NO: 1959347 - DNA, 15 bp, Homo sapiens
caccccagtgtccac

SEQ ID NO: 1959348 - DNA, 15 bp, Homo sapiens
accccagtgtccacc

SEQ ID NO: 1959349 - DNA, 15 bp, Homo sapiens
ccccagtgtccaccg

SEQ ID NO: 1959350 - DNA, 15 bp, Homo sapiens
cccagtgtccaccga

SEQ ID NO: 1959351 - DNA, 15 bp, Homo sapiens
ccagtgtccaccgaa

SEQ ID NO: 1959352 - DNA, 15 bp, Homo sapiens
cagtgtccaccgaac

SEQ ID NO: 1959353 - DNA, 15 bp, Homo sapiens
agtgtccaccgaacc

SEQ ID NO: 1959354 - DNA, 15 bp, Homo sapiens
gtgtccaccgaacct

SEQ ID NO: 1959355 - DNA, 15 bp, Homo sapiens
tgtccaccgaacctc

SEQ ID NO: 1959356 - DNA, 15 bp, Homo sapiens
gtccaccgaacctcg

SEQ ID NO: 1959357 - DNA, 15 bp, Homo sapiens
tccaccgaacctcga

SEQ ID NO: 1959358 - DNA, 15 bp, Homo sapiens
ccaccgaacctcgag

SEQ ID NO: 1959359 - DNA, 15 bp, Homo sapiens
caccgaacctcgagc

SEQ ID NO: 1959360 - DNA, 15 bp, Homo sapiens
accgaacctcgagct

SEQ ID NO: 1959361 - DNA, 15 bp, Homo sapiens
ccgaacctcgagctg

SEQ ID NO: 1959362 - DNA, 15 bp, Homo sapiens
cgaacctcgagctgc

SEQ ID NO: 1959363 - DNA, 15 bp, Homo sapiens
gaacctcgagctgcc

SEQ ID NO: 1959364 - DNA, 15 bp, Homo sapiens
aacctcgagctgcct

SEQ ID NO: 1959365 - DNA, 15 bp, Homo sapiens
acctcgagctgcctg

SEQ ID NO: 1959366 - DNA, 15 bp, Homo sapiens
cctcgagctgcctgc

SEQ ID NO: 1959367 - DNA, 15 bp, Homo sapiens
ctcgagctgcctgct

SEQ ID NO: 1959368 - DNA, 15 bp, Homo sapiens
tcgagctgcctgctc

SEQ ID NO: 1959369 - DNA, 15 bp, Homo sapiens
cgagctgcctgctcc

SEQ ID NO: 1959370 - DNA, 15 bp, Homo sapiens
gagctgcctgctccc

SEQ ID NO: 1959371 - DNA, 15 bp, Homo sapiens
agctgcctgctccct

SEQ ID NO: 1959372 - DNA, 15 bp, Homo sapiens
gctgcctgctccctc

SEQ ID NO: 1959373 - DNA, 15 bp, Homo sapiens
ctgcctgctccctcc

SEQ ID NO: 1959374 - DNA, 15 bp, Homo sapiens
tgcctgctccctccc

SEQ ID NO: 1959375 - DNA, 15 bp, Homo sapiens
gcctgctccctcccg

SEQ ID NO: 1959376 - DNA, 15 bp, Homo sapiens
cctgctccctcccgc

SEQ ID NO: 1959377 - DNA, 15 bp, Homo sapiens
ctgctccctcccgca

SEQ ID NO: 1959378 - DNA, 15 bp, Homo sapiens
tgctccctcccgcag

SEQ ID NO: 1959379 - DNA, 15 bp, Homo sapiens
gctccctcccgcagt

SEQ ID NO: 1959380 - DNA, 15 bp, Homo sapiens
ctccctcccgcagtg

SEQ ID NO: 1959381 - DNA, 15 bp, Homo sapiens
tccctcccgcagtgg

SEQ ID NO: 1959382 - DNA, 15 bp, Homo sapiens
ccctcccgcagtggt

SEQ ID NO: 1959383 - DNA, 15 bp, Homo sapiens
cctcccgcagtggtg

SEQ ID NO: 1959384 - DNA, 15 bp, Homo sapiens
ctcccgcagtggtgg

SEQ ID NO: 1959385 - DNA, 15 bp, Homo sapiens
tcccgcagtggtggc

SEQ ID NO: 1959386 - DNA, 15 bp, Homo sapiens
cccgcagtggtggcg

SEQ ID NO: 1959387 - DNA, 15 bp, Homo sapiens
ccgcagtggtggcgc

SEQ ID NO: 1959388 - DNA, 15 bp, Homo sapiens
cgcagtggtggcgct

SEQ ID NO: 1959389 - DNA, 15 bp, Homo sapiens
gcagtggtggcgctc

SEQ ID NO: 1959390 - DNA, 15 bp, Homo sapiens
cagtggtggcgctcc

SEQ ID NO: 1959391 - DNA, 15 bp, Homo sapiens
agtggtggcgctccg

SEQ ID NO: 1959392 - DNA, 15 bp, Homo sapiens
gtggtggcgctccga

SEQ ID NO: 1959393 - DNA, 15 bp, Homo sapiens
tggtggcgctccgaa

SEQ ID NO: 1959394 - DNA, 15 bp, Homo sapiens
ggtggcgctccgaag

SEQ ID NO: 1959395 - DNA, 15 bp, Homo sapiens
gtggcgctccgaaga

SEQ ID NO: 1959396 - DNA, 15 bp, Homo sapiens
tggcgctccgaagag

SEQ ID NO: 1959397 - DNA, 15 bp, Homo sapiens
ggcgctccgaagagg

SEQ ID NO: 1959398 - DNA, 15 bp, Homo sapiens
gcgctccgaagaggc

SEQ ID NO: 1959399 - DNA, 15 bp, Homo sapiens
cgctccgaagaggcg

SEQ ID NO: 1959400 - DNA, 15 bp, Homo sapiens
gctccgaagaggcgc

SEQ ID NO: 1959401 - DNA, 15 bp, Homo sapiens
ctccgaagaggcgca

SEQ ID NO: 1959402 - DNA, 15 bp, Homo sapiens
tccgaagaggcgcag

SEQ ID NO: 1959403 - DNA, 15 bp, Homo sapiens
ccgaagaggcgcagg

SEQ ID NO: 1959404 - DNA, 15 bp, Homo sapiens
cgaagaggcgcagga

SEQ ID NO: 1959405 - DNA, 15 bp, Homo sapiens
gaagaggcgcaggac

SEQ ID NO: 1959406 - DNA, 15 bp, Homo sapiens
aagaggcgcaggaca

SEQ ID NO: 1959407 - DNA, 15 bp, Homo sapiens
agaggcgcaggacat

SEQ ID NO: 1959408 - DNA, 15 bp, Homo sapiens
gaggcgcaggacatg

SEQ ID NO: 1959409 - DNA, 15 bp, Homo sapiens
aggcgcaggacatgg

SEQ ID NO: 1959410 - DNA, 15 bp, Homo sapiens
ggcgcaggacatggg

SEQ ID NO: 1959411 - DNA, 15 bp, Homo sapiens
gcgcaggacatgggc

SEQ ID NO: 1959412 - DNA, 15 bp, Homo sapiens
cgcaggacatgggcc

SEQ ID NO: 1959413 - DNA, 15 bp, Homo sapiens
agagggtccggggag

SEQ ID NO: 1959414 - DNA, 15 bp, Homo sapiens
gagggtccggggagg

SEQ ID NO: 1959415 - DNA, 15 bp, Homo sapiens
agggtccggggaggc

SEQ ID NO: 1959416 - DNA, 15 bp, Homo sapiens
gggtccggggaggcg

SEQ ID NO: 1959417 - DNA, 15 bp, Homo sapiens
ggtccggggaggcgg

SEQ ID NO: 1959418 - DNA, 15 bp, Homo sapiens
gtccggggaggcggc

SEQ ID NO: 1959419 - DNA, 15 bp, Homo sapiens
tccggggaggcggcg

SEQ ID NO: 1959420 - DNA, 15 bp, Homo sapiens
ccggggaggcggcgc

SEQ ID NO: 1959421 - DNA, 15 bp, Homo sapiens
cggggaggcggcgca

SEQ ID NO: 1959422 - DNA, 15 bp, Homo sapiens
ggggaggcggcgcag

SEQ ID NO: 1959423 - DNA, 15 bp, Homo sapiens
gggaggcggcgcaga

SEQ ID NO: 1959424 - DNA, 15 bp, Homo sapiens
ggaggcggcgcagag

SEQ ID NO: 1959425 - DNA, 15 bp, Homo sapiens
gaggcggcgcagaga

SEQ ID NO: 1959426 - DNA, 15 bp, Homo sapiens
aggcggcgcagagag

SEQ ID NO: 1959427 - DNA, 15 bp, Homo sapiens
ggcggcgcagagagg

SEQ ID NO: 1959428 - DNA, 15 bp, Homo sapiens
gcggcgcagagaggg

SEQ ID NO: 1959429 - DNA, 15 bp, Homo sapiens
cggcgcagagagggc

SEQ ID NO: 1959430 - DNA, 15 bp, Homo sapiens
ggcgcagagagggct

SEQ ID NO: 1959431 - DNA, 15 bp, Homo sapiens
gcgcagagagggctg

SEQ ID NO: 1959432 - DNA, 15 bp, Homo sapiens
cgcagagagggctgc

SEQ ID NO: 1959433 - DNA, 15 bp, Homo sapiens
gcagagagggctgca

SEQ ID NO: 1959434 - DNA, 15 bp, Homo sapiens
cagagagggctgcag

SEQ ID NO: 1959435 - DNA, 15 bp, Homo sapiens
agagagggctgcagt

SEQ ID NO: 1959436 - DNA, 15 bp, Homo sapiens
gagagggctgcagta

SEQ ID NO: 1959437 - DNA, 15 bp, Homo sapiens
agagggctgcagtac

SEQ ID NO: 1959438 - DNA, 15 bp, Homo sapiens
gagggctgcagtaca

SEQ ID NO: 1959439 - DNA, 15 bp, Homo sapiens
agggctgcagtacaa

SEQ ID NO: 1959440 - DNA, 15 bp, Homo sapiens
gggctgcagtacaag

SEQ ID NO: 1959441 - DNA, 15 bp, Homo sapiens
ggctgcagtacaagt

SEQ ID NO: 1959442 - DNA, 15 bp, Homo sapiens
gctgcagtacaagta

SEQ ID NO: 1959443 - DNA, 15 bp, Homo sapiens
ctgcagtacaagtat

SEQ ID NO: 1959444 - DNA, 15 bp, Homo sapiens
tgcagtacaagtatc

SEQ ID NO: 1959445 - DNA, 15 bp, Homo sapiens
gcagtacaagtatct

SEQ ID NO: 1959446 - DNA, 15 bp, Homo sapiens
cagtacaagtatctg

SEQ ID NO: 1959447 - DNA, 15 bp, Homo sapiens
agtacaagtatctgg

SEQ ID NO: 1959448 - DNA, 15 bp, Homo sapiens
gtacaagtatctgga

SEQ ID NO: 1959449 - DNA, 15 bp, Homo sapiens
tacaagtatctggac

SEQ ID NO: 1959450 - DNA, 15 bp, Homo sapiens
acaagtatctggacg

SEQ ID NO: 1959451 - DNA, 15 bp, Homo sapiens
caagtatctggacga

SEQ ID NO: 1959452 - DNA, 15 bp, Homo sapiens
aagtatctggacgag

SEQ ID NO: 1959453 - DNA, 15 bp, Homo sapiens
agtatctggacgaga

SEQ ID NO: 1959454 - DNA, 15 bp, Homo sapiens
gtatctggacgagag

SEQ ID NO: 1959455 - DNA, 15 bp, Homo sapiens
tatctggacgagagc

SEQ ID NO: 1959456 - DNA, 15 bp, Homo sapiens
atctggacgagagct

SEQ ID NO: 1959457 - DNA, 15 bp, Homo sapiens
tctggacgagagctc

SEQ ID NO: 1959458 - DNA, 15 bp, Homo sapiens
ctggacgagagctcc

SEQ ID NO: 1959459 - DNA, 15 bp, Homo sapiens
tggacgagagctccg

SEQ ID NO: 1959460 - DNA, 15 bp, Homo sapiens
ggacgagagctccgg

SEQ ID NO: 1959461 - DNA, 15 bp, Homo sapiens
gacgagagctccgga

SEQ ID NO: 1959462 - DNA, 15 bp, Homo sapiens
acgagagctccggag

SEQ ID NO: 1959463 - DNA, 15 bp, Homo sapiens
cgagagctccggagg

SEQ ID NO: 1959464 - DNA, 15 bp, Homo sapiens
gagagctccggaggc

SEQ ID NO: 1959465 - DNA, 15 bp, Homo sapiens
agagctccggaggct

SEQ ID NO: 1959466 - DNA, 15 bp, Homo sapiens
gagctccggaggctg

SEQ ID NO: 1959467 - DNA, 15 bp, Homo sapiens
agctccggaggctgg

SEQ ID NO: 1959468 - DNA, 15 bp, Homo sapiens
gctccggaggctggc

SEQ ID NO: 1959469 - DNA, 15 bp, Homo sapiens
ctccggaggctggcg

SEQ ID NO: 1959470 - DNA, 15 bp, Homo sapiens
tccggaggctggcgg

SEQ ID NO: 1959471 - DNA, 15 bp, Homo sapiens
ccggaggctggcggg

SEQ ID NO: 1959472 - DNA, 15 bp, Homo sapiens
cggaggctggcggga

SEQ ID NO: 1959473 - DNA, 15 bp, Homo sapiens
ggaggctggcgggac

SEQ ID NO: 1959474 - DNA, 15 bp, Homo sapiens
gaggctggcgggacg

SEQ ID NO: 1959475 - DNA, 15 bp, Homo sapiens
aggctggcgggacgg

SEQ ID NO: 1959476 - DNA, 15 bp, Homo sapiens
ggctggcgggacggc

SEQ ID NO: 1959477 - DNA, 15 bp, Homo sapiens
gctggcgggacggca

SEQ ID NO: 1959478 - DNA, 15 bp, Homo sapiens
ctggcgggacggcag

SEQ ID NO: 1959479 - DNA, 15 bp, Homo sapiens
tggcgggacggcagg

SEQ ID NO: 1959480 - DNA, 15 bp, Homo sapiens
ggcgggacggcaggg

SEQ ID NO: 1959481 - DNA, 15 bp, Homo sapiens
gcgggacggcagggc

SEQ ID NO: 1959482 - DNA, 15 bp, Homo sapiens
cgggacggcagggca

SEQ ID NO: 1959483 - DNA, 15 bp, Homo sapiens
gggacggcagggcac

SEQ ID NO: 1959484 - DNA, 15 bp, Homo sapiens
ggacggcagggcact

SEQ ID NO: 1959485 - DNA, 15 bp, Homo sapiens
gacggcagggcactc

SEQ ID NO: 1959486 - DNA, 15 bp, Homo sapiens
acggcagggcactca

SEQ ID NO: 1959487 - DNA, 15 bp, Homo sapiens
cggcagggcactcat

SEQ ID NO: 1959488 - DNA, 15 bp, Homo sapiens
ggcagggcactcatc

SEQ ID NO: 1959489 - DNA, 15 bp, Homo sapiens
gcagggcactcatca

SEQ ID NO: 1959490 - DNA, 15 bp, Homo sapiens
cagggcactcatcaa

SEQ ID NO: 1959491 - DNA, 15 bp, Homo sapiens
agggcactcatcaac

SEQ ID NO: 1959492 - DNA, 15 bp, Homo sapiens
gggcactcatcaaca

SEQ ID NO: 1959493 - DNA, 15 bp, Homo sapiens
ggcactcatcaacag

SEQ ID NO: 1959494 - DNA, 15 bp, Homo sapiens
gcactcatcaacagc

SEQ ID NO: 1959495 - DNA, 15 bp, Homo sapiens
cactcatcaacagcc

SEQ ID NO: 1959496 - DNA, 15 bp, Homo sapiens
actcatcaacagccc

SEQ ID NO: 1959497 - DNA, 15 bp, Homo sapiens
ctcatcaacagcccg

SEQ ID NO: 1959498 - DNA, 15 bp, Homo sapiens
tcatcaacagcccgg

SEQ ID NO: 1959499 - DNA, 15 bp, Homo sapiens
catcaacagcccgga

SEQ ID NO: 1959500 - DNA, 15 bp, Homo sapiens
atcaacagcccggag

SEQ ID NO: 1959501 - DNA, 15 bp, Homo sapiens
tcaacagcccggagg

SEQ ID NO: 1959502 - DNA, 15 bp, Homo sapiens
caacagcccggaggg

SEQ ID NO: 1959503 - DNA, 15 bp, Homo sapiens
aacagcccggagggg

SEQ ID NO: 1959504 - DNA, 15 bp, Homo sapiens
acagcccggaggggg

SEQ ID NO: 1959505 - DNA, 15 bp, Homo sapiens
cagcccggagggggc

SEQ ID NO: 1959506 - DNA, 15 bp, Homo sapiens
agcccggagggggcc

SEQ ID NO: 1959507 - DNA, 15 bp, Homo sapiens
gcccggagggggccg

SEQ ID NO: 1959508 - DNA, 15 bp, Homo sapiens
cccggagggggccgt

SEQ ID NO: 1959509 - DNA, 15 bp, Homo sapiens
ccggagggggccgtg

SEQ ID NO: 1959510 - DNA, 15 bp, Homo sapiens
cggagggggccgtgg

SEQ ID NO: 1959511 - DNA, 15 bp, Homo sapiens
ggagggggccgtggg

SEQ ID NO: 1959512 - DNA, 15 bp, Homo sapiens
gagggggccgtgggc

SEQ ID NO: 1959513 - DNA, 15 bp, Homo sapiens
agggggccgtgggcc

SEQ ID NO: 1959514 - DNA, 15 bp, Homo sapiens
gggggccgtgggccg

SEQ ID NO: 1959515 - DNA, 15 bp, Homo sapiens
ggggccgtgggccga

SEQ ID NO: 1959516 - DNA, 15 bp, Homo sapiens
gggccgtgggccgaa

SEQ ID NO: 1959517 - DNA, 15 bp, Homo sapiens
ggccgtgggccgaag

SEQ ID NO: 1959518 - DNA, 15 bp, Homo sapiens
gccgtgggccgaagc

SEQ ID NO: 1959519 - DNA, 15 bp, Homo sapiens
ccgtgggccgaagcc

SEQ ID NO: 1959520 - DNA, 15 bp, Homo sapiens
cgtgggccgaagcct

SEQ ID NO: 1959521 - DNA, 15 bp, Homo sapiens
gtgggccgaagcctg

SEQ ID NO: 1959522 - DNA, 15 bp, Homo sapiens
tgggccgaagcctgc

SEQ ID NO: 1959523 - DNA, 15 bp, Homo sapiens
gggccgaagcctgca

SEQ ID NO: 1959524 - DNA, 15 bp, Homo sapiens
ggccgaagcctgcag

SEQ ID NO: 1959525 - DNA, 15 bp, Homo sapiens
gccgaagcctgcagc

SEQ ID NO: 1959526 - DNA, 15 bp, Homo sapiens
ccgaagcctgcagcc

SEQ ID NO: 1959527 - DNA, 15 bp, Homo sapiens
cgaagcctgcagccg

SEQ ID NO: 1959528 - DNA, 15 bp, Homo sapiens
gaagcctgcagccgc

SEQ ID NO: 1959529 - DNA, 15 bp, Homo sapiens
aagcctgcagccgct

SEQ ID NO: 1959530 - DNA, 15 bp, Homo sapiens
agcctgcagccgctg

SEQ ID NO: 1959531 - DNA, 15 bp, Homo sapiens
gcctgcagccgctgt

SEQ ID NO: 1959532 - DNA, 15 bp, Homo sapiens
cctgcagccgctgta

SEQ ID NO: 1959533 - DNA, 15 bp, Homo sapiens
ctgcagccgctgtac

SEQ ID NO: 1959534 - DNA, 15 bp, Homo sapiens
tgcagccgctgtacc

SEQ ID NO: 1959535 - DNA, 15 bp, Homo sapiens
gcagccgctgtaccg

SEQ ID NO: 1959536 - DNA, 15 bp, Homo sapiens
cagccgctgtaccgg

SEQ ID NO: 1959537 - DNA, 15 bp, Homo sapiens
agccgctgtaccgga

SEQ ID NO: 1959538 - DNA, 15 bp, Homo sapiens
gccgctgtaccggag

SEQ ID NO: 1959539 - DNA, 15 bp, Homo sapiens
ccgctgtaccggagc

SEQ ID NO: 1959540 - DNA, 15 bp, Homo sapiens
cgctgtaccggagca

SEQ ID NO: 1959541 - DNA, 15 bp, Homo sapiens
gctgtaccggagcaa

SEQ ID NO: 1959542 - DNA, 15 bp, Homo sapiens
ctgtaccggagcaac

SEQ ID NO: 1959543 - DNA, 15 bp, Homo sapiens
tgtaccggagcaaca

SEQ ID NO: 1959544 - DNA, 15 bp, Homo sapiens
gtaccggagcaacac

SEQ ID NO: 1959545 - DNA, 15 bp, Homo sapiens
taccggagcaacacc

SEQ ID NO: 1959546 - DNA, 15 bp, Homo sapiens
accggagcaacacca

SEQ ID NO: 1959547 - DNA, 15 bp, Homo sapiens
ccggagcaacaccag

SEQ ID NO: 1959548 - DNA, 15 bp, Homo sapiens
cggagcaacaccagc

SEQ ID NO: 1959549 - DNA, 15 bp, Homo sapiens
ggagcaacaccagcc

SEQ ID NO: 1959550 - DNA, 15 bp, Homo sapiens
gagcaacaccagcca

SEQ ID NO: 1959551 - DNA, 15 bp, Homo sapiens
agcaacaccagccag

SEQ ID NO: 1959552 - DNA, 15 bp, Homo sapiens
gcaacaccagccagg

SEQ ID NO: 1959553 - DNA, 15 bp, Homo sapiens
caacaccagccaggt

SEQ ID NO: 1959554 - DNA, 15 bp, Homo sapiens
aacaccagccaggtg

SEQ ID NO: 1959555 - DNA, 15 bp, Homo sapiens
acaccagccaggtga

SEQ ID NO: 1959556 - DNA, 15 bp, Homo sapiens
caccagccaggtgaa

SEQ ID NO: 1959557 - DNA, 15 bp, Homo sapiens
accagccaggtgaag

SEQ ID NO: 1959558 - DNA, 15 bp, Homo sapiens
ccagccaggtgaagg

SEQ ID NO: 1959559 - DNA, 15 bp, Homo sapiens
cagccaggtgaaggg

SEQ ID NO: 1959560 - DNA, 15 bp, Homo sapiens
agccaggtgaagggg

SEQ ID NO: 1959561 - DNA, 15 bp, Homo sapiens
gccaggtgaaggggg

SEQ ID NO: 1959562 - DNA, 15 bp, Homo sapiens
ccaggtgaagggggc

SEQ ID NO: 1959563 - DNA, 15 bp, Homo sapiens
caggtgaagggggcc

SEQ ID NO: 1959564 - DNA, 15 bp, Homo sapiens
aggtgaagggggccc

SEQ ID NO: 1959565 - DNA, 15 bp, Homo sapiens
ggtgaagggggcccc

SEQ ID NO: 1959566 - DNA, 15 bp, Homo sapiens
gtgaagggggccccg

SEQ ID NO: 1959567 - DNA, 15 bp, Homo sapiens
tgaagggggccccgg

SEQ ID NO: 1959568 - DNA, 15 bp, Homo sapiens
gaagggggccccggg

SEQ ID NO: 1959569 - DNA, 15 bp, Homo sapiens
aagggggccccgggc

SEQ ID NO: 1959570 - DNA, 15 bp, Homo sapiens
agggggccccgggcc

SEQ ID NO: 1959571 - DNA, 15 bp, Homo sapiens
gggggccccgggcca

SEQ ID NO: 1959572 - DNA, 15 bp, Homo sapiens
ggggccccgggccaa

SEQ ID NO: 1959573 - DNA, 15 bp, Homo sapiens
gggccccgggccaac

SEQ ID NO: 1959574 - DNA, 15 bp, Homo sapiens
ggccccgggccaact

SEQ ID NO: 1959575 - DNA, 15 bp, Homo sapiens
gccccgggccaacta

SEQ ID NO: 1959576 - DNA, 15 bp, Homo sapiens
ccccgggccaactag

SEQ ID NO: 1959577 - DNA, 15 bp, Homo sapiens
cccgggccaactagg

SEQ ID NO: 1959578 - DNA, 15 bp, Homo sapiens
ccgggccaactaggg

SEQ ID NO: 1959579 - DNA, 15 bp, Homo sapiens
cgggccaactagggg

SEQ ID NO: 1959580 - DNA, 15 bp, Homo sapiens
gggccaactaggggc

SEQ ID NO: 1959581 - DNA, 15 bp, Homo sapiens
ggccaactaggggcg

SEQ ID NO: 1959582 - DNA, 15 bp, Homo sapiens
gccaactaggggcga

SEQ ID NO: 1959583 - DNA, 15 bp, Homo sapiens
ccaactaggggcgaa

SEQ ID NO: 1959584 - DNA, 15 bp, Homo sapiens
caactaggggcgaaa

SEQ ID NO: 1959585 - DNA, 15 bp, Homo sapiens
aactaggggcgaaac

SEQ ID NO: 1959586 - DNA, 15 bp, Homo sapiens
actaggggcgaaact

SEQ ID NO: 1959587 - DNA, 15 bp, Homo sapiens
ctaggggcgaaactc

SEQ ID NO: 1959588 - DNA, 15 bp, Homo sapiens
taggggcgaaactct

SEQ ID NO: 1959589 - DNA, 15 bp, Homo sapiens
aggggcgaaactcta

SEQ ID NO: 1959590 - DNA, 15 bp, Homo sapiens
ggggcgaaactctag

SEQ ID NO: 1959591 - DNA, 15 bp, Homo sapiens
gggcgaaactctagg

SEQ ID NO: 1959592 - DNA, 15 bp, Homo sapiens
ggcgaaactctaggg

SEQ ID NO: 1959593 - DNA, 15 bp, Homo sapiens
gcgaaactctagggc

SEQ ID NO: 1959594 - DNA, 15 bp, Homo sapiens
cgaaactctagggct

SEQ ID NO: 1959595 - DNA, 15 bp, Homo sapiens
gaaactctagggctg

SEQ ID NO: 1959596 - DNA, 15 bp, Homo sapiens
aaactctagggctgc

SEQ ID NO: 1959597 - DNA, 15 bp, Homo sapiens
aactctagggctgcc

SEQ ID NO: 1959598 - DNA, 15 bp, Homo sapiens
actctagggctgccc

SEQ ID NO: 1959599 - DNA, 15 bp, Homo sapiens
ctctagggctgccct

SEQ ID NO: 1959600 - DNA, 15 bp, Homo sapiens
tctagggctgccctg

SEQ ID NO: 1959601 - DNA, 15 bp, Homo sapiens
ctagggctgccctgc

SEQ ID NO: 1959602 - DNA, 15 bp, Homo sapiens
tagggctgccctgcc

SEQ ID NO: 1959603 - DNA, 15 bp, Homo sapiens
agggctgccctgcct

SEQ ID NO: 1959604 - DNA, 15 bp, Homo sapiens
gggctgccctgcctg

SEQ ID NO: 1959605 - DNA, 15 bp, Homo sapiens
ggctgccctgcctgg

SEQ ID NO: 1959606 - DNA, 15 bp, Homo sapiens
gctgccctgcctggg

SEQ ID NO: 1959607 - DNA, 15 bp, Homo sapiens
ctgccctgcctggga

SEQ ID NO: 1959608 - DNA, 15 bp, Homo sapiens
tgccctgcctgggag

SEQ ID NO: 1959609 - DNA, 15 bp, Homo sapiens
gccctgcctgggagg

SEQ ID NO: 1959610 - DNA, 15 bp, Homo sapiens
ccctgcctgggagga

SEQ ID NO: 1959611 - DNA, 15 bp, Homo sapiens
cctgcctgggaggaa

SEQ ID NO: 1959612 - DNA, 15 bp, Homo sapiens
ctgcctgggaggaat

SEQ ID NO: 1959613 - DNA, 15 bp, Homo sapiens
tgcctgggaggaatt

SEQ ID NO: 1959614 - DNA, 15 bp, Homo sapiens
gcctgggaggaattt

SEQ ID NO: 1959615 - DNA, 15 bp, Homo sapiens
cctgggaggaatttc

SEQ ID NO: 1959616 - DNA, 15 bp, Homo sapiens
ctgggaggaatttca

SEQ ID NO: 1959617 - DNA, 15 bp, Homo sapiens
tgggaggaatttcac

SEQ ID NO: 1959618 - DNA, 15 bp, Homo sapiens
gggaggaatttcacg

SEQ ID NO: 1959619 - DNA, 15 bp, Homo sapiens
ggaggaatttcacgt

SEQ ID NO: 1959620 - DNA, 15 bp, Homo sapiens
gaggaatttcacgtt

SEQ ID NO: 1959621 - DNA, 15 bp, Homo sapiens
aggaatttcacgttg

SEQ ID NO: 1959622 - DNA, 15 bp, Homo sapiens
ggaatttcacgttgc

SEQ ID NO: 1959623 - DNA, 15 bp, Homo sapiens
gaatttcacgttgcc

SEQ ID NO: 1959624 - DNA, 15 bp, Homo sapiens
aatttcacgttgcct

SEQ ID NO: 1959625 - DNA, 15 bp, Homo sapiens
atttcacgttgcctc

SEQ ID NO: 1959626 - DNA, 15 bp, Homo sapiens
tttcacgttgcctcc

SEQ ID NO: 1959627 - DNA, 15 bp, Homo sapiens
ttcacgttgcctccg

SEQ ID NO: 1959628 - DNA, 15 bp, Homo sapiens
tcacgttgcctccgt

SEQ ID NO: 1959629 - DNA, 15 bp, Homo sapiens
cacgttgcctccgtt

SEQ ID NO: 1959630 - DNA, 15 bp, Homo sapiens
acgttgcctccgttt

SEQ ID NO: 1959631 - DNA, 15 bp, Homo sapiens
cgttgcctccgttta

SEQ ID NO: 1959632 - DNA, 15 bp, Homo sapiens
gttgcctccgtttat

SEQ ID NO: 1959633 - DNA, 15 bp, Homo sapiens
ttgcctccgtttatc

SEQ ID NO: 1959634 - DNA, 15 bp, Homo sapiens
tgcctccgtttatcc

SEQ ID NO: 1959635 - DNA, 15 bp, Homo sapiens
gcctccgtttatccg

SEQ ID NO: 1959636 - DNA, 15 bp, Homo sapiens
cctccgtttatccgc

SEQ ID NO: 1959637 - DNA, 15 bp, Homo sapiens
ctccgtttatccgcc

SEQ ID NO: 1959638 - DNA, 15 bp, Homo sapiens
tccgtttatccgccc

SEQ ID NO: 1959639 - DNA, 15 bp, Homo sapiens
ccgtttatccgcccg

SEQ ID NO: 1959640 - DNA, 15 bp, Homo sapiens
cgtttatccgcccgc

SEQ ID NO: 1959641 - DNA, 15 bp, Homo sapiens
gtttatccgcccgca

SEQ ID NO: 1959642 - DNA, 15 bp, Homo sapiens
tttatccgcccgcag

SEQ ID NO: 1959643 - DNA, 15 bp, Homo sapiens
ttatccgcccgcagc

SEQ ID NO: 1959644 - DNA, 15 bp, Homo sapiens
tatccgcccgcagct

SEQ ID NO: 1959645 - DNA, 15 bp, Homo sapiens
atccgcccgcagctc

SEQ ID NO: 1959646 - DNA, 15 bp, Homo sapiens
tccgcccgcagctcg

SEQ ID NO: 1959647 - DNA, 15 bp, Homo sapiens
ccgcccgcagctcgc

SEQ ID NO: 1959648 - DNA, 15 bp, Homo sapiens
cgcccgcagctcgcc

SEQ ID NO: 1959649 - DNA, 15 bp, Homo sapiens
gcccgcagctcgcct

SEQ ID NO: 1959650 - DNA, 15 bp, Homo sapiens
cccgcagctcgcctt

SEQ ID NO: 1959651 - DNA, 15 bp, Homo sapiens
ccgcagctcgccttc

SEQ ID NO: 1959652 - DNA, 15 bp, Homo sapiens
cgcagctcgccttcc

SEQ ID NO: 1959653 - DNA, 15 bp, Homo sapiens
gcagctcgccttcct

SEQ ID NO: 1959654 - DNA, 15 bp, Homo sapiens
cagctcgccttcctg

SEQ ID NO: 1959655 - DNA, 15 bp, Homo sapiens
agctcgccttcctgc

SEQ ID NO: 1959656 - DNA, 15 bp, Homo sapiens
gctcgccttcctgct

SEQ ID NO: 1959657 - DNA, 15 bp, Homo sapiens
ctcgccttcctgctc

SEQ ID NO: 1959658 - DNA, 15 bp, Homo sapiens
tcgccttcctgctct

SEQ ID NO: 1959659 - DNA, 15 bp, Homo sapiens
cgccttcctgctcta

SEQ ID NO: 1959660 - DNA, 15 bp, Homo sapiens
gccttcctgctctac

SEQ ID NO: 1959661 - DNA, 15 bp, Homo sapiens
ccttcctgctctaca

SEQ ID NO: 1959662 - DNA, 15 bp, Homo sapiens
cttcctgctctacaa

SEQ ID NO: 1959663 - DNA, 15 bp, Homo sapiens
ttcctgctctacaat

SEQ ID NO: 1959664 - DNA, 15 bp, Homo sapiens
tcctgctctacaatg

SEQ ID NO: 1959665 - DNA, 15 bp, Homo sapiens
cctgctctacaatga

SEQ ID NO: 1959666 - DNA, 15 bp, Homo sapiens
ctgctctacaatgac

SEQ ID NO: 1959667 - DNA, 15 bp, Homo sapiens
tgctctacaatgacc

SEQ ID NO: 1959668 - DNA, 15 bp, Homo sapiens
gctctacaatgacca

SEQ ID NO: 1959669 - DNA, 15 bp, Homo sapiens
ctctacaatgaccaa

SEQ ID NO: 1959670 - DNA, 15 bp, Homo sapiens
tctacaatgaccaac

SEQ ID NO: 1959671 - DNA, 15 bp, Homo sapiens
ctacaatgaccaacc

SEQ ID NO: 1959672 - DNA, 15 bp, Homo sapiens
tacaatgaccaaccg

SEQ ID NO: 1959673 - DNA, 15 bp, Homo sapiens
acaatgaccaaccgc

SEQ ID NO: 1959674 - DNA, 15 bp, Homo sapiens
caatgaccaaccgcc

SEQ ID NO: 1959675 - DNA, 15 bp, Homo sapiens
aatgaccaaccgcct

SEQ ID NO: 1959676 - DNA, 15 bp, Homo sapiens
atgaccaaccgcctc

SEQ ID NO: 1959677 - DNA, 15 bp, Homo sapiens
tgaccaaccgcctca

SEQ ID NO: 1959678 - DNA, 15 bp, Homo sapiens
gaccaaccgcctcaa

SEQ ID NO: 1959679 - DNA, 15 bp, Homo sapiens
accaaccgcctcaac

SEQ ID NO: 1959680 - DNA, 15 bp, Homo sapiens
ccaaccgcctcaacc

SEQ ID NO: 1959681 - DNA, 15 bp, Homo sapiens
caaccgcctcaaccc

SEQ ID NO: 1959682 - DNA, 15 bp, Homo sapiens
aaccgcctcaaccca

SEQ ID NO: 1959683 - DNA, 15 bp, Homo sapiens
accgcctcaacccag

SEQ ID NO: 1959684 - DNA, 15 bp, Homo sapiens
ccgcctcaacccagc

SEQ ID NO: 1959685 - DNA, 15 bp, Homo sapiens
cgcctcaacccagca

SEQ ID NO: 1959686 - DNA, 15 bp, Homo sapiens
gcctcaacccagcaa

SEQ ID NO: 1959687 - DNA, 15 bp, Homo sapiens
cctcaacccagcaag

SEQ ID NO: 1959688 - DNA, 15 bp, Homo sapiens
ctcaacccagcaagg

SEQ ID NO: 1959689 - DNA, 15 bp, Homo sapiens
tcaacccagcaaggc

SEQ ID NO: 1959690 - DNA, 15 bp, Homo sapiens
caacccagcaaggct

SEQ ID NO: 1959691 - DNA, 15 bp, Homo sapiens
aacccagcaaggctc

SEQ ID NO: 1959692 - DNA, 15 bp, Homo sapiens
acccagcaaggctca

SEQ ID NO: 1959693 - DNA, 15 bp, Homo sapiens
cccagcaaggctcag

SEQ ID NO: 1959694 - DNA, 15 bp, Homo sapiens
ccagcaaggctcagg

SEQ ID NO: 1959695 - DNA, 15 bp, Homo sapiens
cagcaaggctcagga

SEQ ID NO: 1959696 - DNA, 15 bp, Homo sapiens
agcaaggctcaggac

SEQ ID NO: 1959697 - DNA, 15 bp, Homo sapiens
gcaaggctcaggact

SEQ ID NO: 1959698 - DNA, 15 bp, Homo sapiens
caaggctcaggactc

SEQ ID NO: 1959699 - DNA, 15 bp, Homo sapiens
aaggctcaggactct

SEQ ID NO: 1959700 - DNA, 15 bp, Homo sapiens
aggctcaggactctt

SEQ ID NO: 1959701 - DNA, 15 bp, Homo sapiens
ggctcaggactcttc

SEQ ID NO: 1959702 - DNA, 15 bp, Homo sapiens
gctcaggactcttcc

SEQ ID NO: 1959703 - DNA, 15 bp, Homo sapiens
ctcaggactcttcca

SEQ ID NO: 1959704 - DNA, 15 bp, Homo sapiens
tcaggactcttccat

SEQ ID NO: 1959705 - DNA, 15 bp, Homo sapiens
caggactcttccatg

SEQ ID NO: 1959706 - DNA, 15 bp, Homo sapiens
aggactcttccatgc

SEQ ID NO: 1959707 - DNA, 15 bp, Homo sapiens
ggactcttccatgcg

SEQ ID NO: 1959708 - DNA, 15 bp, Homo sapiens
gactcttccatgcgt

SEQ ID NO: 1959709 - DNA, 15 bp, Homo sapiens
actcttccatgcgtg

SEQ ID NO: 1959710 - DNA, 15 bp, Homo sapiens
ctcttccatgcgtgg

SEQ ID NO: 1959711 - DNA, 15 bp, Homo sapiens
tcttccatgcgtggg

SEQ ID NO: 1959712 - DNA, 15 bp, Homo sapiens
cttccatgcgtgggc

SEQ ID NO: 1959713 - DNA, 15 bp, Homo sapiens
ttccatgcgtgggca

SEQ ID NO: 1959714 - DNA, 15 bp, Homo sapiens
tccatgcgtgggcac

SEQ ID NO: 1959715 - DNA, 15 bp, Homo sapiens
ccatgcgtgggcaca

SEQ ID NO: 1959716 - DNA, 15 bp, Homo sapiens
catgcgtgggcacac

SEQ ID NO: 1959717 - DNA, 15 bp, Homo sapiens
atgcgtgggcacacg

SEQ ID NO: 1959718 - DNA, 15 bp, Homo sapiens
tgcgtgggcacacga

SEQ ID NO: 1959719 - DNA, 15 bp, Homo sapiens
gcgtgggcacacgaa

SEQ ID NO: 1959720 - DNA, 15 bp, Homo sapiens
cgtgggcacacgaag

SEQ ID NO: 1959721 - DNA, 15 bp, Homo sapiens
gtgggcacacgaagg

SEQ ID NO: 1959722 - DNA, 15 bp, Homo sapiens
tgggcacacgaaggg

SEQ ID NO: 1959723 - DNA, 15 bp, Homo sapiens
gggcacacgaagggt

SEQ ID NO: 1959724 - DNA, 15 bp, Homo sapiens
ggcacacgaagggtg

SEQ ID NO: 1959725 - DNA, 15 bp, Homo sapiens
gcacacgaagggtga

SEQ ID NO: 1959726 - DNA, 15 bp, Homo sapiens
cacacgaagggtgag

SEQ ID NO: 1959727 - DNA, 15 bp, Homo sapiens
acacgaagggtgagg

SEQ ID NO: 1959728 - DNA, 15 bp, Homo sapiens
cacgaagggtgaggc

SEQ ID NO: 1959729 - DNA, 15 bp, Homo sapiens
acgaagggtgaggcc

SEQ ID NO: 1959730 - DNA, 15 bp, Homo sapiens
cgaagggtgaggcct

SEQ ID NO: 1959731 - DNA, 15 bp, Homo sapiens
gaagggtgaggcctg

SEQ ID NO: 1959732 - DNA, 15 bp, Homo sapiens
aagggtgaggcctgg

SEQ ID NO: 1959733 - DNA, 15 bp, Homo sapiens
agggtgaggcctgga

SEQ ID NO: 1959734 - DNA, 15 bp, Homo sapiens
gggtgaggcctggat

SEQ ID NO: 1959735 - DNA, 15 bp, Homo sapiens
ggtgaggcctggatt

SEQ ID NO: 1959736 - DNA, 15 bp, Homo sapiens
gtgaggcctggattg

SEQ ID NO: 1959737 - DNA, 15 bp, Homo sapiens
tgaggcctggattgg

SEQ ID NO: 1959738 - DNA, 15 bp, Homo sapiens
gaggcctggattggg

SEQ ID NO: 1959739 - DNA, 15 bp, Homo sapiens
aggcctggattgggg

SEQ ID NO: 1959740 - DNA, 15 bp, Homo sapiens
ggcctggattggggg

SEQ ID NO: 1959741 - DNA, 15 bp, Homo sapiens
gcctggattgggggc

SEQ ID NO: 1959742 - DNA, 15 bp, Homo sapiens
cctggattgggggct

SEQ ID NO: 1959743 - DNA, 15 bp, Homo sapiens
ctggattgggggctg

SEQ ID NO: 1959744 - DNA, 15 bp, Homo sapiens
tggattgggggctgg

SEQ ID NO: 1959745 - DNA, 15 bp, Homo sapiens
ggattgggggctggg

SEQ ID NO: 1959746 - DNA, 15 bp, Homo sapiens
gattgggggctgggg

SEQ ID NO: 1959747 - DNA, 15 bp, Homo sapiens
attgggggctgggga

SEQ ID NO: 1959748 - DNA, 15 bp, Homo sapiens
ttgggggctggggag

SEQ ID NO: 1959749 - DNA, 15 bp, Homo sapiens
tgggggctggggaga

SEQ ID NO: 1959750 - DNA, 15 bp, Homo sapiens
gggggctggggagag

SEQ ID NO: 1959751 - DNA, 15 bp, Homo sapiens
ggggctggggagaga

SEQ ID NO: 1959752 - DNA, 15 bp, Homo sapiens
gggctggggagagac

SEQ ID NO: 1959753 - DNA, 15 bp, Homo sapiens
ggctggggagagact

SEQ ID NO: 1959754 - DNA, 15 bp, Homo sapiens
gctggggagagactc

SEQ ID NO: 1959755 - DNA, 15 bp, Homo sapiens
ctggggagagactcg

SEQ ID NO: 1959756 - DNA, 15 bp, Homo sapiens
tggggagagactcgg

SEQ ID NO: 1959757 - DNA, 15 bp, Homo sapiens
ggggagagactcggg

SEQ ID NO: 1959758 - DNA, 15 bp, Homo sapiens
gggagagactcgggt

SEQ ID NO: 1959759 - DNA, 15 bp, Homo sapiens
ggagagactcgggtc

SEQ ID NO: 1959760 - DNA, 15 bp, Homo sapiens
gagagactcgggtcc

SEQ ID NO: 1959761 - DNA, 15 bp, Homo sapiens
agagactcgggtccc

SEQ ID NO: 1959762 - DNA, 15 bp, Homo sapiens
gagactcgggtccca

SEQ ID NO: 1959763 - DNA, 15 bp, Homo sapiens
agactcgggtcccat

SEQ ID NO: 1959764 - DNA, 15 bp, Homo sapiens
gactcgggtcccatt

SEQ ID NO: 1959765 - DNA, 15 bp, Homo sapiens
actcgggtcccattt

SEQ ID NO: 1959766 - DNA, 15 bp, Homo sapiens
ctcgggtcccatttt

SEQ ID NO: 1959767 - DNA, 15 bp, Homo sapiens
tcgggtcccattttt

SEQ ID NO: 1959768 - DNA, 15 bp, Homo sapiens
cgggtcccatttttc

SEQ ID NO: 1959769 - DNA, 15 bp, Homo sapiens
gggtcccatttttcc

SEQ ID NO: 1959770 - DNA, 15 bp, Homo sapiens
ggtcccatttttcca

SEQ ID NO: 1959771 - DNA, 15 bp, Homo sapiens
gtcccatttttccaa

SEQ ID NO: 1959772 - DNA, 15 bp, Homo sapiens
tcccatttttccaag

SEQ ID NO: 1959773 - DNA, 15 bp, Homo sapiens
cccatttttccaagg

SEQ ID NO: 1959774 - DNA, 15 bp, Homo sapiens
ccatttttccaaggt

SEQ ID NO: 1959775 - DNA, 15 bp, Homo sapiens
catttttccaaggta

SEQ ID NO: 1959776 - DNA, 15 bp, Homo sapiens
atttttccaaggtaa

SEQ ID NO: 1959777 - DNA, 15 bp, Homo sapiens
tttttccaaggtaac

SEQ ID NO: 1959778 - DNA, 15 bp, Homo sapiens
ttttccaaggtaacc

SEQ ID NO: 1959779 - DNA, 15 bp, Homo sapiens
tttccaaggtaaccc

SEQ ID NO: 1959780 - DNA, 15 bp, Homo sapiens
ttccaaggtaacccc

SEQ ID NO: 1959781 - DNA, 15 bp, Homo sapiens
tccaaggtaacccct

SEQ ID NO: 1959782 - DNA, 15 bp, Homo sapiens
ccaaggtaacccctg

SEQ ID NO: 1959783 - DNA, 15 bp, Homo sapiens
caaggtaacccctga

SEQ ID NO: 1959784 - DNA, 15 bp, Homo sapiens
aaggtaacccctgac

SEQ ID NO: 1959785 - DNA, 15 bp, Homo sapiens
aggtaacccctgacg

SEQ ID NO: 1959786 - DNA, 15 bp, Homo sapiens
ggtaacccctgacgt

SEQ ID NO: 1959787 - DNA, 15 bp, Homo sapiens
gtaacccctgacgtg

SEQ ID NO: 1959788 - DNA, 15 bp, Homo sapiens
taacccctgacgtgc

SEQ ID NO: 1959789 - DNA, 15 bp, Homo sapiens
aacccctgacgtgca

SEQ ID NO: 1959790 - DNA, 15 bp, Homo sapiens
acccctgacgtgcat

SEQ ID NO: 1959791 - DNA, 15 bp, Homo sapiens
cccctgacgtgcatg

SEQ ID NO: 1959792 - DNA, 15 bp, Homo sapiens
ccctgacgtgcatgg

SEQ ID NO: 1959793 - DNA, 15 bp, Homo sapiens
cctgacgtgcatggg

SEQ ID NO: 1959794 - DNA, 15 bp, Homo sapiens
ctgacgtgcatgggg

SEQ ID NO: 1959795 - DNA, 15 bp, Homo sapiens
tgacgtgcatggggt

SEQ ID NO: 1959796 - DNA, 15 bp, Homo sapiens
gacgtgcatggggtg

SEQ ID NO: 1959797 - DNA, 15 bp, Homo sapiens
acgtgcatggggtgg

SEQ ID NO: 1959798 - DNA, 15 bp, Homo sapiens
cgtgcatggggtggt

SEQ ID NO: 1959799 - DNA, 15 bp, Homo sapiens
gtgcatggggtggtc

SEQ ID NO: 1959800 - DNA, 15 bp, Homo sapiens
tgcatggggtggtcg

SEQ ID NO: 1959801 - DNA, 15 bp, Homo sapiens
gcatggggtggtcgg

SEQ ID NO: 1959802 - DNA, 15 bp, Homo sapiens
catggggtggtcggg

SEQ ID NO: 1959803 - DNA, 15 bp, Homo sapiens
atggggtggtcgggg

SEQ ID NO: 1959804 - DNA, 15 bp, Homo sapiens
tggggtggtcgggga

SEQ ID NO: 1959805 - DNA, 15 bp, Homo sapiens
ggggtggtcggggag

SEQ ID NO: 1959806 - DNA, 15 bp, Homo sapiens
gggtggtcggggaga

SEQ ID NO: 1959807 - DNA, 15 bp, Homo sapiens
ggtggtcggggagat

SEQ ID NO: 1959808 - DNA, 15 bp, Homo sapiens
gtggtcggggagatc

SEQ ID NO: 1959809 - DNA, 15 bp, Homo sapiens
tggtcggggagatct

SEQ ID NO: 1959810 - DNA, 15 bp, Homo sapiens
ggtcggggagatctg

SEQ ID NO: 1959811 - DNA, 15 bp, Homo sapiens
gtcggggagatctgc

SEQ ID NO: 1959812 - DNA, 15 bp, Homo sapiens
tcggggagatctgca

SEQ ID NO: 1959813 - DNA, 15 bp, Homo sapiens
cggggagatctgcac

SEQ ID NO: 1959814 - DNA, 15 bp, Homo sapiens
ggggagatctgcact

SEQ ID NO: 1959815 - DNA, 15 bp, Homo sapiens
gggagatctgcactg

SEQ ID NO: 1959816 - DNA, 15 bp, Homo sapiens
ggagatctgcactgt

SEQ ID NO: 1959817 - DNA, 15 bp, Homo sapiens
gagatctgcactgtc

SEQ ID NO: 1959818 - DNA, 15 bp, Homo sapiens
agatctgcactgtca

SEQ ID NO: 1959819 - DNA, 15 bp, Homo sapiens
gatctgcactgtcag

SEQ ID NO: 1959820 - DNA, 15 bp, Homo sapiens
atctgcactgtcaga

SEQ ID NO: 1959821 - DNA, 15 bp, Homo sapiens
tctgcactgtcagac

SEQ ID NO: 1959822 - DNA, 15 bp, Homo sapiens
ctgcactgtcagacc

SEQ ID NO: 1959823 - DNA, 15 bp, Homo sapiens
tgcactgtcagaccc

SEQ ID NO: 1959824 - DNA, 15 bp, Homo sapiens
gcactgtcagaccct

SEQ ID NO: 1959825 - DNA, 15 bp, Homo sapiens
cactgtcagaccctg

SEQ ID NO: 1959826 - DNA, 15 bp, Homo sapiens
actgtcagaccctgg

SEQ ID NO: 1959827 - DNA, 15 bp, Homo sapiens
ctgtcagaccctggg

SEQ ID NO: 1959828 - DNA, 15 bp, Homo sapiens
tgtcagaccctgggc

SEQ ID NO: 1959829 - DNA, 15 bp, Homo sapiens
gtcagaccctgggca

SEQ ID NO: 1959830 - DNA, 15 bp, Homo sapiens
tcagaccctgggcat

SEQ ID NO: 1959831 - DNA, 15 bp, Homo sapiens
cagaccctgggcatc

SEQ ID NO: 1959832 - DNA, 15 bp, Homo sapiens
agaccctgggcatct

SEQ ID NO: 1959833 - DNA, 15 bp, Homo sapiens
gaccctgggcatcta

SEQ ID NO: 1959834 - DNA, 15 bp, Homo sapiens
accctgggcatctat

SEQ ID NO: 1959835 - DNA, 15 bp, Homo sapiens
ccctgggcatctatt

SEQ ID NO: 1959836 - DNA, 15 bp, Homo sapiens
cctgggcatctattc

SEQ ID NO: 1959837 - DNA, 15 bp, Homo sapiens
ctgggcatctattcc

SEQ ID NO: 1959838 - DNA, 15 bp, Homo sapiens
tgggcatctattccc

SEQ ID NO: 1959839 - DNA, 15 bp, Homo sapiens
gggcatctattcccc

SEQ ID NO: 1959840 - DNA, 15 bp, Homo sapiens
ggcatctattccccc

SEQ ID NO: 1959841 - DNA, 15 bp, Homo sapiens
gcatctattcccccc

SEQ ID NO: 1959842 - DNA, 15 bp, Homo sapiens
catctattcccccca

SEQ ID NO: 1959843 - DNA, 15 bp, Homo sapiens
atctattccccccaa

SEQ ID NO: 1959844 - DNA, 15 bp, Homo sapiens
tctattccccccaac

SEQ ID NO: 1959845 - DNA, 15 bp, Homo sapiens
ctattccccccaact

SEQ ID NO: 1959846 - DNA, 15 bp, Homo sapiens
tattccccccaactt

SEQ ID NO: 1959847 - DNA, 15 bp, Homo sapiens
attccccccaacttt

SEQ ID NO: 1959848 - DNA, 15 bp, Homo sapiens
ttccccccaactttt

SEQ ID NO: 1959849 - DNA, 15 bp, Homo sapiens
tccccccaacttttt

SEQ ID NO: 1959850 - DNA, 15 bp, Homo sapiens
ccccccaactttttt

SEQ ID NO: 1959851 - DNA, 15 bp, Homo sapiens
cccccaacttttttt

SEQ ID NO: 1959852 - DNA, 15 bp, Homo sapiens
ccccaactttttttt

SEQ ID NO: 1959853 - DNA, 15 bp, Homo sapiens
caacttttttttttc

SEQ ID NO: 1959854 - DNA, 15 bp, Homo sapiens
aacttttttttttct

SEQ ID NO: 1959855 - DNA, 15 bp, Homo sapiens
ttttttttttctttg

SEQ ID NO: 1959856 - DNA, 15 bp, Homo sapiens
tttttttttctttgt

SEQ ID NO: 1959857 - DNA, 15 bp, Homo sapiens
ttttttttctttgtt

SEQ ID NO: 1959858 - DNA, 15 bp, Homo sapiens
tttttttctttgttt

SEQ ID NO: 1959859 - DNA, 15 bp, Homo sapiens
ttttttctttgtttt

SEQ ID NO: 1959860 - DNA, 15 bp, Homo sapiens
tttttctttgttttt

SEQ ID NO: 1959861 - DNA, 15 bp, Homo sapiens
ttttctttgtttttg

SEQ ID NO: 1959862 - DNA, 15 bp, Homo sapiens
tttctttgtttttga

SEQ ID NO: 1959863 - DNA, 15 bp, Homo sapiens
ttctttgtttttgag

SEQ ID NO: 1959864 - DNA, 15 bp, Homo sapiens
tctttgtttttgaga

SEQ ID NO: 1959865 - DNA, 15 bp, Homo sapiens
ctttgtttttgagac

SEQ ID NO: 1959866 - DNA, 15 bp, Homo sapiens
tgtttttgagacggt

SEQ ID NO: 1959867 - DNA, 15 bp, Homo sapiens
gtttttgagacggtg

SEQ ID NO: 1959868 - DNA, 15 bp, Homo sapiens
tttttgagacggtgg

SEQ ID NO: 1959869 - DNA, 15 bp, Homo sapiens
ttttgagacggtggg

SEQ ID NO: 1959870 - DNA, 15 bp, Homo sapiens
tttgagacggtggga

SEQ ID NO: 1959871 - DNA, 15 bp, Homo sapiens
ttgagacggtgggag

SEQ ID NO: 1959872 - DNA, 15 bp, Homo sapiens
tgagacggtgggagt

SEQ ID NO: 1959873 - DNA, 15 bp, Homo sapiens
gagacggtgggagtt

SEQ ID NO: 1959874 - DNA, 15 bp, Homo sapiens
agacggtgggagttc

SEQ ID NO: 1959875 - DNA, 15 bp, Homo sapiens
gacggtgggagttcg

SEQ ID NO: 1959876 - DNA, 15 bp, Homo sapiens
acggtgggagttcgc

SEQ ID NO: 1959877 - DNA, 15 bp, Homo sapiens
cggtgggagttcgct

SEQ ID NO: 1959878 - DNA, 15 bp, Homo sapiens
ggtgggagttcgctc

SEQ ID NO: 1959879 - DNA, 15 bp, Homo sapiens
gtgggagttcgctct

SEQ ID NO: 1959880 - DNA, 15 bp, Homo sapiens
tgggagttcgctctg

SEQ ID NO: 1959881 - DNA, 15 bp, Homo sapiens
gggagttcgctctgt

SEQ ID NO: 1959882 - DNA, 15 bp, Homo sapiens
ggagttcgctctgtc

SEQ ID NO: 1959883 - DNA, 15 bp, Homo sapiens
gagttcgctctgtca

SEQ ID NO: 1959884 - DNA, 15 bp, Homo sapiens
agttcgctctgtcac

SEQ ID NO: 1959885 - DNA, 15 bp, Homo sapiens
gttcgctctgtcacc

SEQ ID NO: 1959886 - DNA, 15 bp, Homo sapiens
ttcgctctgtcaccc

SEQ ID NO: 1959887 - DNA, 15 bp, Homo sapiens
cgctctgtcacccaa

SEQ ID NO: 1959888 - DNA, 15 bp, Homo sapiens
gctctgtcacccaag

SEQ ID NO: 1959889 - DNA, 15 bp, Homo sapiens
ttggctcactgcaat

SEQ ID NO: 1959890 - DNA, 15 bp, Homo sapiens
tggctcactgcaatc

SEQ ID NO: 1959891 - DNA, 15 bp, Homo sapiens
ggctcactgcaatct

SEQ ID NO: 1959892 - DNA, 15 bp, Homo sapiens
gctcactgcaatctc

SEQ ID NO: 1959893 - DNA, 15 bp, Homo sapiens
ctcactgcaatctct

SEQ ID NO: 1959894 - DNA, 15 bp, Homo sapiens
tcactgcaatctctg

SEQ ID NO: 1959895 - DNA, 15 bp, Homo sapiens
cactgcaatctctgc

SEQ ID NO: 1959896 - DNA, 15 bp, Homo sapiens
actgcaatctctgcc

SEQ ID NO: 1959897 - DNA, 15 bp, Homo sapiens
ctgcaatctctgcct

SEQ ID NO: 1959898 - DNA, 15 bp, Homo sapiens
tgcaatctctgcctc

SEQ ID NO: 1959899 - DNA, 15 bp, Homo sapiens
gcaatctctgcctct

SEQ ID NO: 1959900 - DNA, 15 bp, Homo sapiens
caatctctgcctctg

SEQ ID NO: 1959901 - DNA, 15 bp, Homo sapiens
aatctctgcctctgg

SEQ ID NO: 1959902 - DNA, 15 bp, Homo sapiens
atctctgcctctggg

SEQ ID NO: 1959903 - DNA, 15 bp, Homo sapiens
tctctgcctctgggg

SEQ ID NO: 1959904 - DNA, 15 bp, Homo sapiens
ctctgcctctggggt

SEQ ID NO: 1959905 - DNA, 15 bp, Homo sapiens
tctgcctctggggtt

SEQ ID NO: 1959906 - DNA, 15 bp, Homo sapiens
ctgcctctggggttg

SEQ ID NO: 1959907 - DNA, 15 bp, Homo sapiens
tgcctctggggttga

SEQ ID NO: 1959908 - DNA, 15 bp, Homo sapiens
gcctctggggttgaa

SEQ ID NO: 1959909 - DNA, 15 bp, Homo sapiens
cctctggggttgaag

SEQ ID NO: 1959910 - DNA, 15 bp, Homo sapiens
ctctggggttgaagc

SEQ ID NO: 1959911 - DNA, 15 bp, Homo sapiens
tctggggttgaagca

SEQ ID NO: 1959912 - DNA, 15 bp, Homo sapiens
ctggggttgaagcaa

SEQ ID NO: 1959913 - DNA, 15 bp, Homo sapiens
tggggttgaagcaat

SEQ ID NO: 1959914 - DNA, 15 bp, Homo sapiens
ggggttgaagcaatt

SEQ ID NO: 1959915 - DNA, 15 bp, Homo sapiens
gggttgaagcaattc

SEQ ID NO: 1959916 - DNA, 15 bp, Homo sapiens
ggttgaagcaattct

SEQ ID NO: 1959917 - DNA, 15 bp, Homo sapiens
gttgaagcaattctc

SEQ ID NO: 1959918 - DNA, 15 bp, Homo sapiens
ttgaagcaattctcc

SEQ ID NO: 1959919 - DNA, 15 bp, Homo sapiens
tgaagcaattctcct

SEQ ID NO: 1959920 - DNA, 15 bp, Homo sapiens
gaagcaattctcctg

SEQ ID NO: 1959921 - DNA, 15 bp, Homo sapiens
aagcaattctcctgt

SEQ ID NO: 1959922 - DNA, 15 bp, Homo sapiens
agcaattctcctgtc

SEQ ID NO: 1959923 - DNA, 15 bp, Homo sapiens
gcaattctcctgtct

SEQ ID NO: 1959924 - DNA, 15 bp, Homo sapiens
caattctcctgtctc

SEQ ID NO: 1959925 - DNA, 15 bp, Homo sapiens
aattctcctgtctca

SEQ ID NO: 1959926 - DNA, 15 bp, Homo sapiens
attctcctgtctcag

SEQ ID NO: 1959927 - DNA, 15 bp, Homo sapiens
ttctcctgtctcagc

SEQ ID NO: 1959928 - DNA, 15 bp, Homo sapiens
tctcctgtctcagcc

SEQ ID NO: 1959929 - DNA, 15 bp, Homo sapiens
tcctgtctcagcctc

SEQ ID NO: 1959930 - DNA, 15 bp, Homo sapiens
cctgtctcagcctcc

SEQ ID NO: 1959931 - DNA, 15 bp, Homo sapiens
ctgtctcagcctccc

SEQ ID NO: 1959932 - DNA, 15 bp, Homo sapiens
tgtctcagcctccca

SEQ ID NO: 1959933 - DNA, 15 bp, Homo sapiens
gtctcagcctcccaa

SEQ ID NO: 1959934 - DNA, 15 bp, Homo sapiens
tcccaagtagctggt

SEQ ID NO: 1959935 - DNA, 15 bp, Homo sapiens
cccaagtagctggta

SEQ ID NO: 1959936 - DNA, 15 bp, Homo sapiens
ccaagtagctggtat

SEQ ID NO: 1959937 - DNA, 15 bp, Homo sapiens
caagtagctggtatt

SEQ ID NO: 1959938 - DNA, 15 bp, Homo sapiens
aagtagctggtatta

SEQ ID NO: 1959939 - DNA, 15 bp, Homo sapiens
agtagctggtattaa

SEQ ID NO: 1959940 - DNA, 15 bp, Homo sapiens
gtagctggtattaaa

SEQ ID NO: 1959941 - DNA, 15 bp, Homo sapiens
tagctggtattaaag

SEQ ID NO: 1959942 - DNA, 15 bp, Homo sapiens
agctggtattaaagg

SEQ ID NO: 1959943 - DNA, 15 bp, Homo sapiens
gctggtattaaaggc

SEQ ID NO: 1959944 - DNA, 15 bp, Homo sapiens
ctggtattaaaggcg

SEQ ID NO: 1959945 - DNA, 15 bp, Homo sapiens
tggtattaaaggcgc

SEQ ID NO: 1959946 - DNA, 15 bp, Homo sapiens
ggtattaaaggcgca

SEQ ID NO: 1959947 - DNA, 15 bp, Homo sapiens
gtattaaaggcgcac

SEQ ID NO: 1959948 - DNA, 15 bp, Homo sapiens
tattaaaggcgcacc

SEQ ID NO: 1959949 - DNA, 15 bp, Homo sapiens
attaaaggcgcacca

SEQ ID NO: 1959950 - DNA, 15 bp, Homo sapiens
ttaaaggcgcaccat

SEQ ID NO: 1959951 - DNA, 15 bp, Homo sapiens
taaaggcgcaccatc

SEQ ID NO: 1959952 - DNA, 15 bp, Homo sapiens
aaaggcgcaccatca

SEQ ID NO: 1959953 - DNA, 15 bp, Homo sapiens
aaggcgcaccatcac

SEQ ID NO: 1959954 - DNA, 15 bp, Homo sapiens
aggcgcaccatcaca

SEQ ID NO: 1959955 - DNA, 15 bp, Homo sapiens
ggcgcaccatcacac

SEQ ID NO: 1959956 - DNA, 15 bp, Homo sapiens
gcgcaccatcacacc

SEQ ID NO: 1959957 - DNA, 15 bp, Homo sapiens
cgcaccatcacacca

SEQ ID NO: 1959958 - DNA, 15 bp, Homo sapiens
gcaccatcacaccag

SEQ ID NO: 1959959 - DNA, 15 bp, Homo sapiens
caccatcacaccagg

SEQ ID NO: 1959960 - DNA, 15 bp, Homo sapiens
accatcacaccaggc

SEQ ID NO: 1959961 - DNA, 15 bp, Homo sapiens
ccatcacaccaggct

SEQ ID NO: 1959962 - DNA, 15 bp, Homo sapiens
catcacaccaggcta

SEQ ID NO: 1959963 - DNA, 15 bp, Homo sapiens
atcacaccaggctaa

SEQ ID NO: 1959964 - DNA, 15 bp, Homo sapiens
tcacaccaggctaat

SEQ ID NO: 1959965 - DNA, 15 bp, Homo sapiens
accaggctaattttc

SEQ ID NO: 1959966 - DNA, 15 bp, Homo sapiens
ccaggctaattttca

SEQ ID NO: 1959967 - DNA, 15 bp, Homo sapiens
caggctaattttcat

SEQ ID NO: 1959968 - DNA, 15 bp, Homo sapiens
aggctaattttcata

SEQ ID NO: 1959969 - DNA, 15 bp, Homo sapiens
ggctaattttcatat

SEQ ID NO: 1959970 - DNA, 15 bp, Homo sapiens
gctaattttcatatt

SEQ ID NO: 1959971 - DNA, 15 bp, Homo sapiens
ctaattttcatattt

SEQ ID NO: 1959972 - DNA, 15 bp, Homo sapiens
taattttcatatttt

SEQ ID NO: 1959973 - DNA, 15 bp, Homo sapiens
aattttcatattttt

SEQ ID NO: 1959974 - DNA, 15 bp, Homo sapiens
attttcatattttta

SEQ ID NO: 1959975 - DNA, 15 bp, Homo sapiens
ttttcatatttttag

SEQ ID NO: 1959976 - DNA, 15 bp, Homo sapiens
tttcatatttttagt

SEQ ID NO: 1959977 - DNA, 15 bp, Homo sapiens
ttcatatttttagta

SEQ ID NO: 1959978 - DNA, 15 bp, Homo sapiens
tcatatttttagtac

SEQ ID NO: 1959979 - DNA, 15 bp, Homo sapiens
catatttttagtaca

SEQ ID NO: 1959980 - DNA, 15 bp, Homo sapiens
atatttttagtacag

SEQ ID NO: 1959981 - DNA, 15 bp, Homo sapiens
atttttagtacagac

SEQ ID NO: 1959982 - DNA, 15 bp, Homo sapiens
tttttagtacagacg

SEQ ID NO: 1959983 - DNA, 15 bp, Homo sapiens
ttttagtacagacga

SEQ ID NO: 1959984 - DNA, 15 bp, Homo sapiens
tttagtacagacgag

SEQ ID NO: 1959985 - DNA, 15 bp, Homo sapiens
ttagtacagacgagg

SEQ ID NO: 1959986 - DNA, 15 bp, Homo sapiens
tagtacagacgaggt

SEQ ID NO: 1959987 - DNA, 15 bp, Homo sapiens
agtacagacgaggtt

SEQ ID NO: 1959988 - DNA, 15 bp, Homo sapiens
gtacagacgaggttt

SEQ ID NO: 1959989 - DNA, 15 bp, Homo sapiens
tacagacgaggtttc

SEQ ID NO: 1959990 - DNA, 15 bp, Homo sapiens
acagacgaggtttca

SEQ ID NO: 1959991 - DNA, 15 bp, Homo sapiens
cagacgaggtttcac

SEQ ID NO: 1959992 - DNA, 15 bp, Homo sapiens
tctcgaactcctggt

SEQ ID NO: 1959993 - DNA, 15 bp, Homo sapiens
ctcgaactcctggtt

SEQ ID NO: 1959994 - DNA, 15 bp, Homo sapiens
tcgaactcctggttt

SEQ ID NO: 1959995 - DNA, 15 bp, Homo sapiens
cgaactcctggtttc

SEQ ID NO: 1959996 - DNA, 15 bp, Homo sapiens
gaactcctggtttct

SEQ ID NO: 1959997 - DNA, 15 bp, Homo sapiens
aactcctggtttcta

SEQ ID NO: 1959998 - DNA, 15 bp, Homo sapiens
actcctggtttctac

SEQ ID NO: 1959999 - DNA, 15 bp, Homo sapiens
ctcctggtttctacc

SEQ ID NO: 1960000 - DNA, 15 bp, Homo sapiens
tcctggtttctacct

SEQ ID NO: 1960001 - DNA, 15 bp, Homo sapiens
cctggtttctacctc

SEQ ID NO: 1960002 - DNA, 15 bp, Homo sapiens
ctggtttctacctca

SEQ ID NO: 1960003 - DNA, 15 bp, Homo sapiens
tggtttctacctcaa

SEQ ID NO: 1960004 - DNA, 15 bp, Homo sapiens
ggtttctacctcaag

SEQ ID NO: 1960005 - DNA, 15 bp, Homo sapiens
gtttctacctcaagt

SEQ ID NO: 1960006 - DNA, 15 bp, Homo sapiens
tttctacctcaagtg

SEQ ID NO: 1960007 - DNA, 15 bp, Homo sapiens
ttctacctcaagtga

SEQ ID NO: 1960008 - DNA, 15 bp, Homo sapiens
tctacctcaagtgat

SEQ ID NO: 1960009 - DNA, 15 bp, Homo sapiens
ctacctcaagtgatc

SEQ ID NO: 1960010 - DNA, 15 bp, Homo sapiens
tacctcaagtgatct

SEQ ID NO: 1960011 - DNA, 15 bp, Homo sapiens
acctcaagtgatcta

SEQ ID NO: 1960012 - DNA, 15 bp, Homo sapiens
cctcaagtgatctac

SEQ ID NO: 1960013 - DNA, 15 bp, Homo sapiens
ctcaagtgatctacc

SEQ ID NO: 1960014 - DNA, 15 bp, Homo sapiens
tcaagtgatctaccc

SEQ ID NO: 1960015 - DNA, 15 bp, Homo sapiens
caagtgatctacccg

SEQ ID NO: 1960016 - DNA, 15 bp, Homo sapiens
aagtgatctacccgc

SEQ ID NO: 1960017 - DNA, 15 bp, Homo sapiens
agtgatctacccgcc

SEQ ID NO: 1960018 - DNA, 15 bp, Homo sapiens
gtgatctacccgcct

SEQ ID NO: 1960019 - DNA, 15 bp, Homo sapiens
tgatctacccgcctt

SEQ ID NO: 1960020 - DNA, 15 bp, Homo sapiens
gatctacccgccttg

SEQ ID NO: 1960021 - DNA, 15 bp, Homo sapiens
atctacccgccttgg

SEQ ID NO: 1960022 - DNA, 15 bp, Homo sapiens
tctacccgccttggc

SEQ ID NO: 1960023 - DNA, 15 bp, Homo sapiens
ctacccgccttggcc

SEQ ID NO: 1960024 - DNA, 15 bp, Homo sapiens
tacccgccttggcct

SEQ ID NO: 1960025 - DNA, 15 bp, Homo sapiens
ctgggattacaggaa

SEQ ID NO: 1960026 - DNA, 15 bp, Homo sapiens
tgggattacaggaat

SEQ ID NO: 1960027 - DNA, 15 bp, Homo sapiens
gggattacaggaatg

SEQ ID NO: 1960028 - DNA, 15 bp, Homo sapiens
ggattacaggaatga

SEQ ID NO: 1960029 - DNA, 15 bp, Homo sapiens
gattacaggaatgag

SEQ ID NO: 1960030 - DNA, 15 bp, Homo sapiens
attacaggaatgagc

SEQ ID NO: 1960031 - DNA, 15 bp, Homo sapiens
ttacaggaatgagcc

SEQ ID NO: 1960032 - DNA, 15 bp, Homo sapiens
tacaggaatgagcca

SEQ ID NO: 1960033 - DNA, 15 bp, Homo sapiens
acaggaatgagccac

SEQ ID NO: 1960034 - DNA, 15 bp, Homo sapiens
caggaatgagccacc

SEQ ID NO: 1960035 - DNA, 15 bp, Homo sapiens
aggaatgagccaccc

SEQ ID NO: 1960036 - DNA, 15 bp, Homo sapiens
gaatgagccaccctg

SEQ ID NO: 1960037 - DNA, 15 bp, Homo sapiens
aatgagccaccctgc

SEQ ID NO: 1960038 - DNA, 15 bp, Homo sapiens
atgagccaccctgcc

SEQ ID NO: 1960039 - DNA, 15 bp, Homo sapiens
ccaccctgcccagcc

SEQ ID NO: 1960040 - DNA, 15 bp, Homo sapiens
caccctgcccagccg

SEQ ID NO: 1960041 - DNA, 15 bp, Homo sapiens
accctgcccagccga

SEQ ID NO: 1960042 - DNA, 15 bp, Homo sapiens
ccctgcccagccgag

SEQ ID NO: 1960043 - DNA, 15 bp, Homo sapiens
cctgcccagccgagt

SEQ ID NO: 1960044 - DNA, 15 bp, Homo sapiens
ctgcccagccgagtt

SEQ ID NO: 1960045 - DNA, 15 bp, Homo sapiens
tgcccagccgagttc

SEQ ID NO: 1960046 - DNA, 15 bp, Homo sapiens
gcccagccgagttcc

SEQ ID NO: 1960047 - DNA, 15 bp, Homo sapiens
cccagccgagttcct

SEQ ID NO: 1960048 - DNA, 15 bp, Homo sapiens
ccagccgagttccta

SEQ ID NO: 1960049 - DNA, 15 bp, Homo sapiens
cagccgagttcctat

SEQ ID NO: 1960050 - DNA, 15 bp, Homo sapiens
agccgagttcctatg

SEQ ID NO: 1960051 - DNA, 15 bp, Homo sapiens
gccgagttcctatgc

SEQ ID NO: 1960052 - DNA, 15 bp, Homo sapiens
ccgagttcctatgca

SEQ ID NO: 1960053 - DNA, 15 bp, Homo sapiens
cgagttcctatgcat

SEQ ID NO: 1960054 - DNA, 15 bp, Homo sapiens
gagttcctatgcatt

SEQ ID NO: 1960055 - DNA, 15 bp, Homo sapiens
agttcctatgcattt

SEQ ID NO: 1960056 - DNA, 15 bp, Homo sapiens
gttcctatgcatttt

SEQ ID NO: 1960057 - DNA, 15 bp, Homo sapiens
ttcctatgcattttt

SEQ ID NO: 1960058 - DNA, 15 bp, Homo sapiens
tcctatgcatttttc

SEQ ID NO: 1960059 - DNA, 15 bp, Homo sapiens
cctatgcatttttcc

SEQ ID NO: 1960060 - DNA, 15 bp, Homo sapiens
ctatgcatttttcca

SEQ ID NO: 1960061 - DNA, 15 bp, Homo sapiens
tatgcatttttccaa

SEQ ID NO: 1960062 - DNA, 15 bp, Homo sapiens
atgcatttttccaag

SEQ ID NO: 1960063 - DNA, 15 bp, Homo sapiens
tgcatttttccaagc

SEQ ID NO: 1960064 - DNA, 15 bp, Homo sapiens
gcatttttccaagct

SEQ ID NO: 1960065 - DNA, 15 bp, Homo sapiens
catttttccaagcta

SEQ ID NO: 1960066 - DNA, 15 bp, Homo sapiens
atttttccaagctaa

SEQ ID NO: 1960067 - DNA, 15 bp, Homo sapiens
tttttccaagctaac

SEQ ID NO: 1960068 - DNA, 15 bp, Homo sapiens
ttttccaagctaacc

SEQ ID NO: 1960069 - DNA, 15 bp, Homo sapiens
tttccaagctaaccc

SEQ ID NO: 1960070 - DNA, 15 bp, Homo sapiens
ttccaagctaacccc

SEQ ID NO: 1960071 - DNA, 15 bp, Homo sapiens
tccaagctaacccct

SEQ ID NO: 1960072 - DNA, 15 bp, Homo sapiens
ccaagctaacccctg

SEQ ID NO: 1960073 - DNA, 15 bp, Homo sapiens
caagctaacccctga

SEQ ID NO: 1960074 - DNA, 15 bp, Homo sapiens
aagctaacccctgac

SEQ ID NO: 1960075 - DNA, 15 bp, Homo sapiens
agctaacccctgacc

SEQ ID NO: 1960076 - DNA, 15 bp, Homo sapiens
gctaacccctgacct

SEQ ID NO: 1960077 - DNA, 15 bp, Homo sapiens
ctaacccctgacctc

SEQ ID NO: 1960078 - DNA, 15 bp, Homo sapiens
taacccctgacctcc

SEQ ID NO: 1960079 - DNA, 15 bp, Homo sapiens
aacccctgacctcca

SEQ ID NO: 1960080 - DNA, 15 bp, Homo sapiens
acccctgacctccat

SEQ ID NO: 1960081 - DNA, 15 bp, Homo sapiens
cccctgacctccata

SEQ ID NO: 1960082 - DNA, 15 bp, Homo sapiens
ccctgacctccatag

SEQ ID NO: 1960083 - DNA, 15 bp, Homo sapiens
cctgacctccatagt

SEQ ID NO: 1960084 - DNA, 15 bp, Homo sapiens
ctgacctccatagtg

SEQ ID NO: 1960085 - DNA, 15 bp, Homo sapiens
tgacctccatagtgg

SEQ ID NO: 1960086 - DNA, 15 bp, Homo sapiens
gacctccatagtggg

SEQ ID NO: 1960087 - DNA, 15 bp, Homo sapiens
acctccatagtgggg

SEQ ID NO: 1960088 - DNA, 15 bp, Homo sapiens
cctccatagtggggt

SEQ ID NO: 1960089 - DNA, 15 bp, Homo sapiens
ctccatagtggggtg

SEQ ID NO: 1960090 - DNA, 15 bp, Homo sapiens
tccatagtggggtgg

SEQ ID NO: 1960091 - DNA, 15 bp, Homo sapiens
ccatagtggggtggg

SEQ ID NO: 1960092 - DNA, 15 bp, Homo sapiens
catagtggggtggga

SEQ ID NO: 1960093 - DNA, 15 bp, Homo sapiens
atagtggggtgggag

SEQ ID NO: 1960094 - DNA, 15 bp, Homo sapiens
tagtggggtgggaga

SEQ ID NO: 1960095 - DNA, 15 bp, Homo sapiens
agtggggtgggagat

SEQ ID NO: 1960096 - DNA, 15 bp, Homo sapiens
gtggggtgggagatc

SEQ ID NO: 1960097 - DNA, 15 bp, Homo sapiens
tggggtgggagatct

SEQ ID NO: 1960098 - DNA, 15 bp, Homo sapiens
ggggtgggagatctc

SEQ ID NO: 1960099 - DNA, 15 bp, Homo sapiens
gggtgggagatctcc

SEQ ID NO: 1960100 - DNA, 15 bp, Homo sapiens
ggtgggagatctccc

SEQ ID NO: 1960101 - DNA, 15 bp, Homo sapiens
gtgggagatctcccc

SEQ ID NO: 1960102 - DNA, 15 bp, Homo sapiens
tgggagatctcccct

SEQ ID NO: 1960103 - DNA, 15 bp, Homo sapiens
gggagatctcccctg

SEQ ID NO: 1960104 - DNA, 15 bp, Homo sapiens
ggagatctcccctgt

SEQ ID NO: 1960105 - DNA, 15 bp, Homo sapiens
gagatctcccctgtc

SEQ ID NO: 1960106 - DNA, 15 bp, Homo sapiens
agatctcccctgtca

SEQ ID NO: 1960107 - DNA, 15 bp, Homo sapiens
gatctcccctgtcag

SEQ ID NO: 1960108 - DNA, 15 bp, Homo sapiens
atctcccctgtcaga

SEQ ID NO: 1960109 - DNA, 15 bp, Homo sapiens
tctcccctgtcagac

SEQ ID NO: 1960110 - DNA, 15 bp, Homo sapiens
ctcccctgtcagacc

SEQ ID NO: 1960111 - DNA, 15 bp, Homo sapiens
tcccctgtcagacct

SEQ ID NO: 1960112 - DNA, 15 bp, Homo sapiens
cccctgtcagacctt

SEQ ID NO: 1960113 - DNA, 15 bp, Homo sapiens
ccctgtcagaccttg

SEQ ID NO: 1960114 - DNA, 15 bp, Homo sapiens
cctgtcagaccttgg

SEQ ID NO: 1960115 - DNA, 15 bp, Homo sapiens
ctgtcagaccttggg

SEQ ID NO: 1960116 - DNA, 15 bp, Homo sapiens
tgtcagaccttgggc

SEQ ID NO: 1960117 - DNA, 15 bp, Homo sapiens
gtcagaccttgggca

SEQ ID NO: 1960118 - DNA, 15 bp, Homo sapiens
tcagaccttgggcat

SEQ ID NO: 1960119 - DNA, 15 bp, Homo sapiens
cagaccttgggcatc

SEQ ID NO: 1960120 - DNA, 15 bp, Homo sapiens
agaccttgggcatct

SEQ ID NO: 1960121 - DNA, 15 bp, Homo sapiens
gaccttgggcatcta

SEQ ID NO: 1960122 - DNA, 15 bp, Homo sapiens
accttgggcatctat

SEQ ID NO: 1960123 - DNA, 15 bp, Homo sapiens
ccttgggcatctatt

SEQ ID NO: 1960124 - DNA, 15 bp, Homo sapiens
cttgggcatctattt

SEQ ID NO: 1960125 - DNA, 15 bp, Homo sapiens
ttgggcatctatttc

SEQ ID NO: 1960126 - DNA, 15 bp, Homo sapiens
tgggcatctatttcc

SEQ ID NO: 1960127 - DNA, 15 bp, Homo sapiens
gggcatctatttccc

SEQ ID NO: 1960128 - DNA, 15 bp, Homo sapiens
ggcatctatttcccc

SEQ ID NO: 1960129 - DNA, 15 bp, Homo sapiens
gcatctatttcccct

SEQ ID NO: 1960130 - DNA, 15 bp, Homo sapiens
catctatttccccta

SEQ ID NO: 1960131 - DNA, 15 bp, Homo sapiens
atctatttcccctat

SEQ ID NO: 1960132 - DNA, 15 bp, Homo sapiens
tctatttcccctatt

SEQ ID NO: 1960133 - DNA, 15 bp, Homo sapiens
ctatttcccctattt

SEQ ID NO: 1960134 - DNA, 15 bp, Homo sapiens
tatttcccctatttt

SEQ ID NO: 1960135 - DNA, 15 bp, Homo sapiens
atttcccctatttta

SEQ ID NO: 1960136 - DNA, 15 bp, Homo sapiens
tttcccctattttat

SEQ ID NO: 1960137 - DNA, 15 bp, Homo sapiens
ttcccctattttatt

SEQ ID NO: 1960138 - DNA, 15 bp, Homo sapiens
tcccctattttattt

SEQ ID NO: 1960139 - DNA, 15 bp, Homo sapiens
cccctattttatttt

SEQ ID NO: 1960140 - DNA, 15 bp, Homo sapiens
ccctattttattttc

SEQ ID NO: 1960141 - DNA, 15 bp, Homo sapiens
cctattttattttct

SEQ ID NO: 1960142 - DNA, 15 bp, Homo sapiens
ctattttattttctt

SEQ ID NO: 1960143 - DNA, 15 bp, Homo sapiens
tattttattttcttt

SEQ ID NO: 1960144 - DNA, 15 bp, Homo sapiens
tttattttcttttag

SEQ ID NO: 1960145 - DNA, 15 bp, Homo sapiens
ttattttcttttaga

SEQ ID NO: 1960146 - DNA, 15 bp, Homo sapiens
tattttcttttagac

SEQ ID NO: 1960147 - DNA, 15 bp, Homo sapiens
attttcttttagaca

SEQ ID NO: 1960148 - DNA, 15 bp, Homo sapiens
ttttcttttagacaa

SEQ ID NO: 1960149 - DNA, 15 bp, Homo sapiens
tttcttttagacaag

SEQ ID NO: 1960150 - DNA, 15 bp, Homo sapiens
ttcttttagacaagg

SEQ ID NO: 1960151 - DNA, 15 bp, Homo sapiens
tcttttagacaaggt

SEQ ID NO: 1960152 - DNA, 15 bp, Homo sapiens
cttttagacaaggtc

SEQ ID NO: 1960153 - DNA, 15 bp, Homo sapiens
ttttagacaaggtct

SEQ ID NO: 1960154 - DNA, 15 bp, Homo sapiens
tttagacaaggtctc

SEQ ID NO: 1960155 - DNA, 15 bp, Homo sapiens
ttagacaaggtctca

SEQ ID NO: 1960156 - DNA, 15 bp, Homo sapiens
tagacaaggtctcac

SEQ ID NO: 1960157 - DNA, 15 bp, Homo sapiens
agacaaggtctcacc

SEQ ID NO: 1960158 - DNA, 15 bp, Homo sapiens
gacaaggtctcaccc

SEQ ID NO: 1960159 - DNA, 15 bp, Homo sapiens
acaaggtctcaccca

SEQ ID NO: 1960160 - DNA, 15 bp, Homo sapiens
caaggtctcacccag

SEQ ID NO: 1960161 - DNA, 15 bp, Homo sapiens
aaggtctcacccagt

SEQ ID NO: 1960162 - DNA, 15 bp, Homo sapiens
aggtctcacccagtc

SEQ ID NO: 1960163 - DNA, 15 bp, Homo sapiens
ggtctcacccagtca

SEQ ID NO: 1960164 - DNA, 15 bp, Homo sapiens
gtctcacccagtcac

SEQ ID NO: 1960165 - DNA, 15 bp, Homo sapiens
tctcacccagtcacc

SEQ ID NO: 1960166 - DNA, 15 bp, Homo sapiens
ctcacccagtcacct

SEQ ID NO: 1960167 - DNA, 15 bp, Homo sapiens
tcacccagtcaccta

SEQ ID NO: 1960168 - DNA, 15 bp, Homo sapiens
cacccagtcacctag

SEQ ID NO: 1960169 - DNA, 15 bp, Homo sapiens
acccagtcacctagg

SEQ ID NO: 1960170 - DNA, 15 bp, Homo sapiens
cccagtcacctaggc

SEQ ID NO: 1960171 - DNA, 15 bp, Homo sapiens
ccagtcacctaggct

SEQ ID NO: 1960172 - DNA, 15 bp, Homo sapiens
cagtcacctaggctg

SEQ ID NO: 1960173 - DNA, 15 bp, Homo sapiens
agtcacctaggctgg

SEQ ID NO: 1960174 - DNA, 15 bp, Homo sapiens
gtcacctaggctgga

SEQ ID NO: 1960175 - DNA, 15 bp, Homo sapiens
tcacctaggctggag

SEQ ID NO: 1960176 - DNA, 15 bp, Homo sapiens
cacctaggctggagt

SEQ ID NO: 1960177 - DNA, 15 bp, Homo sapiens
acctaggctggagtg

SEQ ID NO: 1960178 - DNA, 15 bp, Homo sapiens
cctaggctggagtgc

SEQ ID NO: 1960179 - DNA, 15 bp, Homo sapiens
ctaggctggagtgca

SEQ ID NO: 1960180 - DNA, 15 bp, Homo sapiens
taggctggagtgcag

SEQ ID NO: 1960181 - DNA, 15 bp, Homo sapiens
gctggagtgcagtat

SEQ ID NO: 1960182 - DNA, 15 bp, Homo sapiens
ctggagtgcagtatc

SEQ ID NO: 1960183 - DNA, 15 bp, Homo sapiens
tggagtgcagtatca

SEQ ID NO: 1960184 - DNA, 15 bp, Homo sapiens
ggagtgcagtatcac

SEQ ID NO: 1960185 - DNA, 15 bp, Homo sapiens
gagtgcagtatcaca

SEQ ID NO: 1960186 - DNA, 15 bp, Homo sapiens
agtgcagtatcacag

SEQ ID NO: 1960187 - DNA, 15 bp, Homo sapiens
gtgcagtatcacagc

SEQ ID NO: 1960188 - DNA, 15 bp, Homo sapiens
tgcagtatcacagct

SEQ ID NO: 1960189 - DNA, 15 bp, Homo sapiens
gcagtatcacagctc

SEQ ID NO: 1960190 - DNA, 15 bp, Homo sapiens
cagtatcacagctca

SEQ ID NO: 1960191 - DNA, 15 bp, Homo sapiens
agtatcacagctcac

SEQ ID NO: 1960192 - DNA, 15 bp, Homo sapiens
gtatcacagctcact

SEQ ID NO: 1960193 - DNA, 15 bp, Homo sapiens
tatcacagctcactg

SEQ ID NO: 1960194 - DNA, 15 bp, Homo sapiens
cactgcagccttgac

SEQ ID NO: 1960195 - DNA, 15 bp, Homo sapiens
actgcagccttgacc

SEQ ID NO: 1960196 - DNA, 15 bp, Homo sapiens
ctgcagccttgacct

SEQ ID NO: 1960197 - DNA, 15 bp, Homo sapiens
cagccttgacctccc

SEQ ID NO: 1960198 - DNA, 15 bp, Homo sapiens
agccttgacctccca

SEQ ID NO: 1960199 - DNA, 15 bp, Homo sapiens
gccttgacctcccag

SEQ ID NO: 1960200 - DNA, 15 bp, Homo sapiens
ccttgacctcccagg

SEQ ID NO: 1960201 - DNA, 15 bp, Homo sapiens
cttgacctcccaggg

SEQ ID NO: 1960202 - DNA, 15 bp, Homo sapiens
ttgacctcccagggc

SEQ ID NO: 1960203 - DNA, 15 bp, Homo sapiens
tgacctcccagggct

SEQ ID NO: 1960204 - DNA, 15 bp, Homo sapiens
gacctcccagggctc

SEQ ID NO: 1960205 - DNA, 15 bp, Homo sapiens
acctcccagggctca

SEQ ID NO: 1960206 - DNA, 15 bp, Homo sapiens
cctcccagggctcag

SEQ ID NO: 1960207 - DNA, 15 bp, Homo sapiens
ctcccagggctcagg

SEQ ID NO: 1960208 - DNA, 15 bp, Homo sapiens
tcccagggctcaggt

SEQ ID NO: 1960209 - DNA, 15 bp, Homo sapiens
cccagggctcaggtg

SEQ ID NO: 1960210 - DNA, 15 bp, Homo sapiens
ccagggctcaggtga

SEQ ID NO: 1960211 - DNA, 15 bp, Homo sapiens
cagggctcaggtgat

SEQ ID NO: 1960212 - DNA, 15 bp, Homo sapiens
agggctcaggtgatc

SEQ ID NO: 1960213 - DNA, 15 bp, Homo sapiens
caggtgatcctccta

SEQ ID NO: 1960214 - DNA, 15 bp, Homo sapiens
aggtgatcctcctac

SEQ ID NO: 1960215 - DNA, 15 bp, Homo sapiens
gatcctcctacctca

SEQ ID NO: 1960216 - DNA, 15 bp, Homo sapiens
atcctcctacctcag

SEQ ID NO: 1960217 - DNA, 15 bp, Homo sapiens
tcctcctacctcagc

SEQ ID NO: 1960218 - DNA, 15 bp, Homo sapiens
cctcctacctcagcc

SEQ ID NO: 1960219 - DNA, 15 bp, Homo sapiens
ctcctacctcagcct

SEQ ID NO: 1960220 - DNA, 15 bp, Homo sapiens
tcctacctcagcctc

SEQ ID NO: 1960221 - DNA, 15 bp, Homo sapiens
cctacctcagcctcc

SEQ ID NO: 1960222 - DNA, 15 bp, Homo sapiens
ctacctcagcctccc

SEQ ID NO: 1960223 - DNA, 15 bp, Homo sapiens
tacctcagcctccca

SEQ ID NO: 1960224 - DNA, 15 bp, Homo sapiens
cagcctcccaagtac

SEQ ID NO: 1960225 - DNA, 15 bp, Homo sapiens
agcctcccaagtact

SEQ ID NO: 1960226 - DNA, 15 bp, Homo sapiens
gcctcccaagtactg

SEQ ID NO: 1960227 - DNA, 15 bp, Homo sapiens
cctcccaagtactgg

SEQ ID NO: 1960228 - DNA, 15 bp, Homo sapiens
ctcccaagtactggg

SEQ ID NO: 1960229 - DNA, 15 bp, Homo sapiens
tcccaagtactgggc

SEQ ID NO: 1960230 - DNA, 15 bp, Homo sapiens
cccaagtactgggcc

SEQ ID NO: 1960231 - DNA, 15 bp, Homo sapiens
ccaagtactgggcct

SEQ ID NO: 1960232 - DNA, 15 bp, Homo sapiens
caagtactgggcctg

SEQ ID NO: 1960233 - DNA, 15 bp, Homo sapiens
aagtactgggcctgc

SEQ ID NO: 1960234 - DNA, 15 bp, Homo sapiens
agtactgggcctgcc

SEQ ID NO: 1960235 - DNA, 15 bp, Homo sapiens
gtactgggcctgccg

SEQ ID NO: 1960236 - DNA, 15 bp, Homo sapiens
tactgggcctgccgg

SEQ ID NO: 1960237 - DNA, 15 bp, Homo sapiens
actgggcctgccggt

SEQ ID NO: 1960238 - DNA, 15 bp, Homo sapiens
ctgggcctgccggta

SEQ ID NO: 1960239 - DNA, 15 bp, Homo sapiens
tgggcctgccggtac

SEQ ID NO: 1960240 - DNA, 15 bp, Homo sapiens
gggcctgccggtacc

SEQ ID NO: 1960241 - DNA, 15 bp, Homo sapiens
ggcctgccggtaccc

SEQ ID NO: 1960242 - DNA, 15 bp, Homo sapiens
gcctgccggtacccc

SEQ ID NO: 1960243 - DNA, 15 bp, Homo sapiens
cctgccggtaccccc

SEQ ID NO: 1960244 - DNA, 15 bp, Homo sapiens
ctgccggtacccccc

SEQ ID NO: 1960245 - DNA, 15 bp, Homo sapiens
tgccggtacccccca

SEQ ID NO: 1960246 - DNA, 15 bp, Homo sapiens
gccggtaccccccac

SEQ ID NO: 1960247 - DNA, 15 bp, Homo sapiens
ccggtaccccccacc

SEQ ID NO: 1960248 - DNA, 15 bp, Homo sapiens
cggtaccccccacca

SEQ ID NO: 1960249 - DNA, 15 bp, Homo sapiens
ggtaccccccaccac

SEQ ID NO: 1960250 - DNA, 15 bp, Homo sapiens
gtaccccccaccacg

SEQ ID NO: 1960251 - DNA, 15 bp, Homo sapiens
taccccccaccacgc

SEQ ID NO: 1960252 - DNA, 15 bp, Homo sapiens
accccccaccacgcc

SEQ ID NO: 1960253 - DNA, 15 bp, Homo sapiens
ccccccaccacgcct

SEQ ID NO: 1960254 - DNA, 15 bp, Homo sapiens
cccccaccacgcctg

SEQ ID NO: 1960255 - DNA, 15 bp, Homo sapiens
ccccaccacgcctgg

SEQ ID NO: 1960256 - DNA, 15 bp, Homo sapiens
cccaccacgcctggc

SEQ ID NO: 1960257 - DNA, 15 bp, Homo sapiens
caccacgcctggctt

SEQ ID NO: 1960258 - DNA, 15 bp, Homo sapiens
accacgcctggcttt

SEQ ID NO: 1960259 - DNA, 15 bp, Homo sapiens
ccacgcctggctttt

SEQ ID NO: 1960260 - DNA, 15 bp, Homo sapiens
cacgcctggcttttt

SEQ ID NO: 1960261 - DNA, 15 bp, Homo sapiens
acgcctggctttttt

SEQ ID NO: 1960262 - DNA, 15 bp, Homo sapiens
cgcctggcttttttt

SEQ ID NO: 1960263 - DNA, 15 bp, Homo sapiens
gcctggctttttttt

SEQ ID NO: 1960264 - DNA, 15 bp, Homo sapiens
cctggcttttttttt

SEQ ID NO: 1960265 - DNA, 15 bp, Homo sapiens
ctggctttttttttt

SEQ ID NO: 1960266 - DNA, 15 bp, Homo sapiens
tggcttttttttttt

SEQ ID NO: 1960267 - DNA, 15 bp, Homo sapiens
ttttttttttgcggc

SEQ ID NO: 1960268 - DNA, 15 bp, Homo sapiens
tttttttttgcggca

SEQ ID NO: 1960269 - DNA, 15 bp, Homo sapiens
ttttttttgcggcac

SEQ ID NO: 1960270 - DNA, 15 bp, Homo sapiens
tttttttgcggcact

SEQ ID NO: 1960271 - DNA, 15 bp, Homo sapiens
ttttttgcggcactc

SEQ ID NO: 1960272 - DNA, 15 bp, Homo sapiens
tttttgcggcactct

SEQ ID NO: 1960273 - DNA, 15 bp, Homo sapiens
ttttgcggcactctc

SEQ ID NO: 1960274 - DNA, 15 bp, Homo sapiens
tttgcggcactctct

SEQ ID NO: 1960275 - DNA, 15 bp, Homo sapiens
ttgcggcactctctc

SEQ ID NO: 1960276 - DNA, 15 bp, Homo sapiens
tgcggcactctctct

SEQ ID NO: 1960277 - DNA, 15 bp, Homo sapiens
gcggcactctctctc

SEQ ID NO: 1960278 - DNA, 15 bp, Homo sapiens
cggcactctctctcc

SEQ ID NO: 1960279 - DNA, 15 bp, Homo sapiens
ggcactctctctcca

SEQ ID NO: 1960280 - DNA, 15 bp, Homo sapiens
gcactctctctccat

SEQ ID NO: 1960281 - DNA, 15 bp, Homo sapiens
cactctctctccatc

SEQ ID NO: 1960282 - DNA, 15 bp, Homo sapiens
actctctctccatca

SEQ ID NO: 1960283 - DNA, 15 bp, Homo sapiens
ctctctctccatcac

SEQ ID NO: 1960284 - DNA, 15 bp, Homo sapiens
tctctctccatcacc

SEQ ID NO: 1960285 - DNA, 15 bp, Homo sapiens
ctctctccatcaccc

SEQ ID NO: 1960286 - DNA, 15 bp, Homo sapiens
tctctccatcaccca

SEQ ID NO: 1960287 - DNA, 15 bp, Homo sapiens
ctctccatcacccag

SEQ ID NO: 1960288 - DNA, 15 bp, Homo sapiens
tctccatcacccagg

SEQ ID NO: 1960289 - DNA, 15 bp, Homo sapiens
catcacccaggctgg

SEQ ID NO: 1960290 - DNA, 15 bp, Homo sapiens
atcacccaggctgga

SEQ ID NO: 1960291 - DNA, 15 bp, Homo sapiens
ccaggctggagttcg

SEQ ID NO: 1960292 - DNA, 15 bp, Homo sapiens
aggctggagttcggt

SEQ ID NO: 1960293 - DNA, 15 bp, Homo sapiens
ggctggagttcggtg

SEQ ID NO: 1960294 - DNA, 15 bp, Homo sapiens
gctggagttcggtgg

SEQ ID NO: 1960295 - DNA, 15 bp, Homo sapiens
ctggagttcggtggt

SEQ ID NO: 1960296 - DNA, 15 bp, Homo sapiens
tggagttcggtggtg

SEQ ID NO: 1960297 - DNA, 15 bp, Homo sapiens
ggagttcggtggtgc

SEQ ID NO: 1960298 - DNA, 15 bp, Homo sapiens
gagttcggtggtgca

SEQ ID NO: 1960299 - DNA, 15 bp, Homo sapiens
agttcggtggtgcaa

SEQ ID NO: 1960300 - DNA, 15 bp, Homo sapiens
gttcggtggtgcaat

SEQ ID NO: 1960301 - DNA, 15 bp, Homo sapiens
ttcggtggtgcaatc

SEQ ID NO: 1960302 - DNA, 15 bp, Homo sapiens
tcggtggtgcaatct

SEQ ID NO: 1960303 - DNA, 15 bp, Homo sapiens
cggtggtgcaatctc

SEQ ID NO: 1960304 - DNA, 15 bp, Homo sapiens
ggtggtgcaatctca

SEQ ID NO: 1960305 - DNA, 15 bp, Homo sapiens
gtggtgcaatctcag

SEQ ID NO: 1960306 - DNA, 15 bp, Homo sapiens
tcagctcactgcaat

SEQ ID NO: 1960307 - DNA, 15 bp, Homo sapiens
cagctcactgcaatc

SEQ ID NO: 1960308 - DNA, 15 bp, Homo sapiens
agctcactgcaatct

SEQ ID NO: 1960309 - DNA, 15 bp, Homo sapiens
ctcactgcaatctcc

SEQ ID NO: 1960310 - DNA, 15 bp, Homo sapiens
tcactgcaatctcca

SEQ ID NO: 1960311 - DNA, 15 bp, Homo sapiens
cactgcaatctccat

SEQ ID NO: 1960312 - DNA, 15 bp, Homo sapiens
actgcaatctccatc

SEQ ID NO: 1960313 - DNA, 15 bp, Homo sapiens
ctgcaatctccatct

SEQ ID NO: 1960314 - DNA, 15 bp, Homo sapiens
tgcaatctccatctc

SEQ ID NO: 1960315 - DNA, 15 bp, Homo sapiens
gcaatctccatctcc

SEQ ID NO: 1960316 - DNA, 15 bp, Homo sapiens
caatctccatctccc

SEQ ID NO: 1960317 - DNA, 15 bp, Homo sapiens
aatctccatctcccc

SEQ ID NO: 1960318 - DNA, 15 bp, Homo sapiens
atctccatctcccca

SEQ ID NO: 1960319 - DNA, 15 bp, Homo sapiens
tctccatctccccag

SEQ ID NO: 1960320 - DNA, 15 bp, Homo sapiens
ctccatctccccagt

SEQ ID NO: 1960321 - DNA, 15 bp, Homo sapiens
tccatctccccagtt

SEQ ID NO: 1960322 - DNA, 15 bp, Homo sapiens
ccatctccccagttc

SEQ ID NO: 1960323 - DNA, 15 bp, Homo sapiens
catctccccagttca

SEQ ID NO: 1960324 - DNA, 15 bp, Homo sapiens
atctccccagttcaa

SEQ ID NO: 1960325 - DNA, 15 bp, Homo sapiens
tctccccagttcaag

SEQ ID NO: 1960326 - DNA, 15 bp, Homo sapiens
ctccccagttcaagc

SEQ ID NO: 1960327 - DNA, 15 bp, Homo sapiens
tccccagttcaagcg

SEQ ID NO: 1960328 - DNA, 15 bp, Homo sapiens
ccccagttcaagcga

SEQ ID NO: 1960329 - DNA, 15 bp, Homo sapiens
cccagttcaagcgat

SEQ ID NO: 1960330 - DNA, 15 bp, Homo sapiens
ccagttcaagcgatt

SEQ ID NO: 1960331 - DNA, 15 bp, Homo sapiens
cagttcaagcgattc

SEQ ID NO: 1960332 - DNA, 15 bp, Homo sapiens
agttcaagcgattct

SEQ ID NO: 1960333 - DNA, 15 bp, Homo sapiens
gttcaagcgattctt

SEQ ID NO: 1960334 - DNA, 15 bp, Homo sapiens
ttcaagcgattcttc

SEQ ID NO: 1960335 - DNA, 15 bp, Homo sapiens
tcaagcgattcttct

SEQ ID NO: 1960336 - DNA, 15 bp, Homo sapiens
caagcgattcttctg

SEQ ID NO: 1960337 - DNA, 15 bp, Homo sapiens
aagcgattcttctgc

SEQ ID NO: 1960338 - DNA, 15 bp, Homo sapiens
agcgattcttctgcc

SEQ ID NO: 1960339 - DNA, 15 bp, Homo sapiens
gcgattcttctgcct

SEQ ID NO: 1960340 - DNA, 15 bp, Homo sapiens
cgattcttctgcctc

SEQ ID NO: 1960341 - DNA, 15 bp, Homo sapiens
gattcttctgcctca

SEQ ID NO: 1960342 - DNA, 15 bp, Homo sapiens
attcttctgcctcag

SEQ ID NO: 1960343 - DNA, 15 bp, Homo sapiens
ttcttctgcctcagc

SEQ ID NO: 1960344 - DNA, 15 bp, Homo sapiens
tcttctgcctcagcc

SEQ ID NO: 1960345 - DNA, 15 bp, Homo sapiens
tctgcctcagcctct

SEQ ID NO: 1960346 - DNA, 15 bp, Homo sapiens
tgcctcagcctctgg

SEQ ID NO: 1960347 - DNA, 15 bp, Homo sapiens
gcctcagcctctgga

SEQ ID NO: 1960348 - DNA, 15 bp, Homo sapiens
cctcagcctctggag

SEQ ID NO: 1960349 - DNA, 15 bp, Homo sapiens
ctcagcctctggagt

SEQ ID NO: 1960350 - DNA, 15 bp, Homo sapiens
tcagcctctggagta

SEQ ID NO: 1960351 - DNA, 15 bp, Homo sapiens
cagcctctggagtag

SEQ ID NO: 1960352 - DNA, 15 bp, Homo sapiens
agcctctggagtagc

SEQ ID NO: 1960353 - DNA, 15 bp, Homo sapiens
gcctctggagtagct

SEQ ID NO: 1960354 - DNA, 15 bp, Homo sapiens
cctctggagtagctg

SEQ ID NO: 1960355 - DNA, 15 bp, Homo sapiens
ctctggagtagctgg

SEQ ID NO: 1960356 - DNA, 15 bp, Homo sapiens
tctggagtagctggg

SEQ ID NO: 1960357 - DNA, 15 bp, Homo sapiens
ctggagtagctggga

SEQ ID NO: 1960358 - DNA, 15 bp, Homo sapiens
tggagtagctgggat

SEQ ID NO: 1960359 - DNA, 15 bp, Homo sapiens
ggtgtgcgccaccat

SEQ ID NO: 1960360 - DNA, 15 bp, Homo sapiens
gtgtgcgccaccatg

SEQ ID NO: 1960361 - DNA, 15 bp, Homo sapiens
tgtgcgccaccatgc

SEQ ID NO: 1960362 - DNA, 15 bp, Homo sapiens
gtgcgccaccatgcc

SEQ ID NO: 1960363 - DNA, 15 bp, Homo sapiens
ccatgcccagctaaa

SEQ ID NO: 1960364 - DNA, 15 bp, Homo sapiens
catgcccagctaaat

SEQ ID NO: 1960365 - DNA, 15 bp, Homo sapiens
atgcccagctaaatg

SEQ ID NO: 1960366 - DNA, 15 bp, Homo sapiens
tgcccagctaaatgt

SEQ ID NO: 1960367 - DNA, 15 bp, Homo sapiens
gcccagctaaatgtt

SEQ ID NO: 1960368 - DNA, 15 bp, Homo sapiens
cccagctaaatgttg

SEQ ID NO: 1960369 - DNA, 15 bp, Homo sapiens
ccagctaaatgttgt

SEQ ID NO: 1960370 - DNA, 15 bp, Homo sapiens
cagctaaatgttgta

SEQ ID NO: 1960371 - DNA, 15 bp, Homo sapiens
agctaaatgttgtat

SEQ ID NO: 1960372 - DNA, 15 bp, Homo sapiens
gctaaatgttgtatg

SEQ ID NO: 1960373 - DNA, 15 bp, Homo sapiens
ctaaatgttgtatgt

SEQ ID NO: 1960374 - DNA, 15 bp, Homo sapiens
taaatgttgtatgtt

SEQ ID NO: 1960375 - DNA, 15 bp, Homo sapiens
aaatgttgtatgttt

SEQ ID NO: 1960376 - DNA, 15 bp, Homo sapiens
aatgttgtatgtttt

SEQ ID NO: 1960377 - DNA, 15 bp, Homo sapiens
atgttgtatgtttta

SEQ ID NO: 1960378 - DNA, 15 bp, Homo sapiens
tgttgtatgttttag

SEQ ID NO: 1960379 - DNA, 15 bp, Homo sapiens
gttgtatgttttagt

SEQ ID NO: 1960380 - DNA, 15 bp, Homo sapiens
ttgtatgttttagta

SEQ ID NO: 1960381 - DNA, 15 bp, Homo sapiens
tgtatgttttagtag

SEQ ID NO: 1960382 - DNA, 15 bp, Homo sapiens
gtatgttttagtaga

SEQ ID NO: 1960383 - DNA, 15 bp, Homo sapiens
tatgttttagtagag

SEQ ID NO: 1960384 - DNA, 15 bp, Homo sapiens
atgttttagtagaga

SEQ ID NO: 1960385 - DNA, 15 bp, Homo sapiens
tgttttagtagagat

SEQ ID NO: 1960386 - DNA, 15 bp, Homo sapiens
gttttagtagagatg

SEQ ID NO: 1960387 - DNA, 15 bp, Homo sapiens
atggggttttaccag

SEQ ID NO: 1960388 - DNA, 15 bp, Homo sapiens
tggggttttaccagg

SEQ ID NO: 1960389 - DNA, 15 bp, Homo sapiens
ggggttttaccaggt

SEQ ID NO: 1960390 - DNA, 15 bp, Homo sapiens
gggttttaccaggtt

SEQ ID NO: 1960391 - DNA, 15 bp, Homo sapiens
ggttttaccaggttg

SEQ ID NO: 1960392 - DNA, 15 bp, Homo sapiens
gttttaccaggttgg

SEQ ID NO: 1960393 - DNA, 15 bp, Homo sapiens
ttttaccaggttgga

SEQ ID NO: 1960394 - DNA, 15 bp, Homo sapiens
tttaccaggttggac

SEQ ID NO: 1960395 - DNA, 15 bp, Homo sapiens
ttaccaggttggaca

SEQ ID NO: 1960396 - DNA, 15 bp, Homo sapiens
taccaggttggacag

SEQ ID NO: 1960397 - DNA, 15 bp, Homo sapiens
accaggttggacagg

SEQ ID NO: 1960398 - DNA, 15 bp, Homo sapiens
ccaggttggacaggc

SEQ ID NO: 1960399 - DNA, 15 bp, Homo sapiens
caggttggacaggct

SEQ ID NO: 1960400 - DNA, 15 bp, Homo sapiens
aggttggacaggctg

SEQ ID NO: 1960401 - DNA, 15 bp, Homo sapiens
ggttggacaggctga

SEQ ID NO: 1960402 - DNA, 15 bp, Homo sapiens
gttggacaggctgat

SEQ ID NO: 1960403 - DNA, 15 bp, Homo sapiens
ttggacaggctgata

SEQ ID NO: 1960404 - DNA, 15 bp, Homo sapiens
tggacaggctgatat

SEQ ID NO: 1960405 - DNA, 15 bp, Homo sapiens
ggacaggctgatatt

SEQ ID NO: 1960406 - DNA, 15 bp, Homo sapiens
gacaggctgatattg

SEQ ID NO: 1960407 - DNA, 15 bp, Homo sapiens
acaggctgatattga

SEQ ID NO: 1960408 - DNA, 15 bp, Homo sapiens
caggctgatattgaa

SEQ ID NO: 1960409 - DNA, 15 bp, Homo sapiens
aggctgatattgaac

SEQ ID NO: 1960410 - DNA, 15 bp, Homo sapiens
ggctgatattgaact

SEQ ID NO: 1960411 - DNA, 15 bp, Homo sapiens
gctgatattgaactc

SEQ ID NO: 1960412 - DNA, 15 bp, Homo sapiens
ctgatattgaactcc

SEQ ID NO: 1960413 - DNA, 15 bp, Homo sapiens
tgatattgaactcct

SEQ ID NO: 1960414 - DNA, 15 bp, Homo sapiens
gatattgaactcctg

SEQ ID NO: 1960415 - DNA, 15 bp, Homo sapiens
atattgaactcctga

SEQ ID NO: 1960416 - DNA, 15 bp, Homo sapiens
tattgaactcctgac

SEQ ID NO: 1960417 - DNA, 15 bp, Homo sapiens
attgaactcctgacc

SEQ ID NO: 1960418 - DNA, 15 bp, Homo sapiens
tgatccacctgcctt

SEQ ID NO: 1960419 - DNA, 15 bp, Homo sapiens
gatccacctgccttg

SEQ ID NO: 1960420 - DNA, 15 bp, Homo sapiens
atccacctgccttgg

SEQ ID NO: 1960421 - DNA, 15 bp, Homo sapiens
tccacctgccttggc

SEQ ID NO: 1960422 - DNA, 15 bp, Homo sapiens
ccacctgccttggcc

SEQ ID NO: 1960423 - DNA, 15 bp, Homo sapiens
cacctgccttggcct

SEQ ID NO: 1960424 - DNA, 15 bp, Homo sapiens
acctgccttggcctc

SEQ ID NO: 1960425 - DNA, 15 bp, Homo sapiens
agccaccacacctgg

SEQ ID NO: 1960426 - DNA, 15 bp, Homo sapiens
ccaccacacctggcc

SEQ ID NO: 1960427 - DNA, 15 bp, Homo sapiens
caccacacctggcct

SEQ ID NO: 1960428 - DNA, 15 bp, Homo sapiens
accacacctggccta

SEQ ID NO: 1960429 - DNA, 15 bp, Homo sapiens
ccacacctggcctac

SEQ ID NO: 1960430 - DNA, 15 bp, Homo sapiens
cacacctggcctact

SEQ ID NO: 1960431 - DNA, 15 bp, Homo sapiens
acacctggcctactt

SEQ ID NO: 1960432 - DNA, 15 bp, Homo sapiens
cacctggcctacttt

SEQ ID NO: 1960433 - DNA, 15 bp, Homo sapiens
acctggcctactttt

SEQ ID NO: 1960434 - DNA, 15 bp, Homo sapiens
cctggcctacttttt

SEQ ID NO: 1960435 - DNA, 15 bp, Homo sapiens
ctggcctactttttg

SEQ ID NO: 1960436 - DNA, 15 bp, Homo sapiens
tggcctactttttgt

SEQ ID NO: 1960437 - DNA, 15 bp, Homo sapiens
ggcctactttttgta

SEQ ID NO: 1960438 - DNA, 15 bp, Homo sapiens
gcctactttttgtat

SEQ ID NO: 1960439 - DNA, 15 bp, Homo sapiens
cctactttttgtatt

SEQ ID NO: 1960440 - DNA, 15 bp, Homo sapiens
ctttttgtatttttg

SEQ ID NO: 1960441 - DNA, 15 bp, Homo sapiens
gtatttttgtagagt

SEQ ID NO: 1960442 - DNA, 15 bp, Homo sapiens
tatttttgtagagtg

SEQ ID NO: 1960443 - DNA, 15 bp, Homo sapiens
atttttgtagagtgg

SEQ ID NO: 1960444 - DNA, 15 bp, Homo sapiens
tttttgtagagtggg

SEQ ID NO: 1960445 - DNA, 15 bp, Homo sapiens
ttttgtagagtgggc

SEQ ID NO: 1960446 - DNA, 15 bp, Homo sapiens
tttgtagagtgggct

SEQ ID NO: 1960447 - DNA, 15 bp, Homo sapiens
ttgtagagtgggctt

SEQ ID NO: 1960448 - DNA, 15 bp, Homo sapiens
tgtagagtgggcttt

SEQ ID NO: 1960449 - DNA, 15 bp, Homo sapiens
gtagagtgggctttt

SEQ ID NO: 1960450 - DNA, 15 bp, Homo sapiens
tagagtgggcttttg

SEQ ID NO: 1960451 - DNA, 15 bp, Homo sapiens
agagtgggcttttgc

SEQ ID NO: 1960452 - DNA, 15 bp, Homo sapiens
gagtgggcttttgcc

SEQ ID NO: 1960453 - DNA, 15 bp, Homo sapiens
agtgggcttttgcca

SEQ ID NO: 1960454 - DNA, 15 bp, Homo sapiens
gtgggcttttgccat

SEQ ID NO: 1960455 - DNA, 15 bp, Homo sapiens
tgggcttttgccatg

SEQ ID NO: 1960456 - DNA, 15 bp, Homo sapiens
gggcttttgccatgt

SEQ ID NO: 1960457 - DNA, 15 bp, Homo sapiens
ggcttttgccatgtt

SEQ ID NO: 1960458 - DNA, 15 bp, Homo sapiens
gcttttgccatgttg

SEQ ID NO: 1960459 - DNA, 15 bp, Homo sapiens
cttttgccatgttgc

SEQ ID NO: 1960460 - DNA, 15 bp, Homo sapiens
tttgccatgttgcct

SEQ ID NO: 1960461 - DNA, 15 bp, Homo sapiens
ttgccatgttgccta

SEQ ID NO: 1960462 - DNA, 15 bp, Homo sapiens
tgccatgttgcctag

SEQ ID NO: 1960463 - DNA, 15 bp, Homo sapiens
gccatgttgcctagg

SEQ ID NO: 1960464 - DNA, 15 bp, Homo sapiens
ccatgttgcctaggc

SEQ ID NO: 1960465 - DNA, 15 bp, Homo sapiens
catgttgcctaggct

SEQ ID NO: 1960466 - DNA, 15 bp, Homo sapiens
atgttgcctaggctg

SEQ ID NO: 1960467 - DNA, 15 bp, Homo sapiens
tgttgcctaggctgg

SEQ ID NO: 1960468 - DNA, 15 bp, Homo sapiens
gttgcctaggctggt

SEQ ID NO: 1960469 - DNA, 15 bp, Homo sapiens
ttgcctaggctggtc

SEQ ID NO: 1960470 - DNA, 15 bp, Homo sapiens
tgcctaggctggtct

SEQ ID NO: 1960471 - DNA, 15 bp, Homo sapiens
gcctaggctggtctc

SEQ ID NO: 1960472 - DNA, 15 bp, Homo sapiens
cctaggctggtctct

SEQ ID NO: 1960473 - DNA, 15 bp, Homo sapiens
ctaggctggtctcta

SEQ ID NO: 1960474 - DNA, 15 bp, Homo sapiens
taggctggtctctaa

SEQ ID NO: 1960475 - DNA, 15 bp, Homo sapiens
aggctggtctctaag

SEQ ID NO: 1960476 - DNA, 15 bp, Homo sapiens
ggctggtctctaagt

SEQ ID NO: 1960477 - DNA, 15 bp, Homo sapiens
gctggtctctaagtc

SEQ ID NO: 1960478 - DNA, 15 bp, Homo sapiens
ctggtctctaagtcc

SEQ ID NO: 1960479 - DNA, 15 bp, Homo sapiens
tggtctctaagtcct

SEQ ID NO: 1960480 - DNA, 15 bp, Homo sapiens
ggtctctaagtcctg

SEQ ID NO: 1960481 - DNA, 15 bp, Homo sapiens
gtctctaagtcctgg

SEQ ID NO: 1960482 - DNA, 15 bp, Homo sapiens
tctctaagtcctggt

SEQ ID NO: 1960483 - DNA, 15 bp, Homo sapiens
ctctaagtcctggtt

SEQ ID NO: 1960484 - DNA, 15 bp, Homo sapiens
tctaagtcctggttc

SEQ ID NO: 1960485 - DNA, 15 bp, Homo sapiens
ctaagtcctggttca

SEQ ID NO: 1960486 - DNA, 15 bp, Homo sapiens
taagtcctggttcaa

SEQ ID NO: 1960487 - DNA, 15 bp, Homo sapiens
aagtcctggttcaag

SEQ ID NO: 1960488 - DNA, 15 bp, Homo sapiens
agtcctggttcaagc

SEQ ID NO: 1960489 - DNA, 15 bp, Homo sapiens
gtcctggttcaagca

SEQ ID NO: 1960490 - DNA, 15 bp, Homo sapiens
tcctggttcaagcaa

SEQ ID NO: 1960491 - DNA, 15 bp, Homo sapiens
cctggttcaagcaat

SEQ ID NO: 1960492 - DNA, 15 bp, Homo sapiens
ctggttcaagcaatc

SEQ ID NO: 1960493 - DNA, 15 bp, Homo sapiens
tggttcaagcaatcc

SEQ ID NO: 1960494 - DNA, 15 bp, Homo sapiens
ggttcaagcaatcca

SEQ ID NO: 1960495 - DNA, 15 bp, Homo sapiens
gttcaagcaatccac

SEQ ID NO: 1960496 - DNA, 15 bp, Homo sapiens
ttcaagcaatccacc

SEQ ID NO: 1960497 - DNA, 15 bp, Homo sapiens
tcaagcaatccaccc

SEQ ID NO: 1960498 - DNA, 15 bp, Homo sapiens
caagcaatccaccca

SEQ ID NO: 1960499 - DNA, 15 bp, Homo sapiens
aagcaatccacccac

SEQ ID NO: 1960500 - DNA, 15 bp, Homo sapiens
agcaatccacccacc

SEQ ID NO: 1960501 - DNA, 15 bp, Homo sapiens
gcaatccacccacct

SEQ ID NO: 1960502 - DNA, 15 bp, Homo sapiens
caatccacccacctt

SEQ ID NO: 1960503 - DNA, 15 bp, Homo sapiens
cccaccttggcctct

SEQ ID NO: 1960504 - DNA, 15 bp, Homo sapiens
ccaccttggcctctt

SEQ ID NO: 1960505 - DNA, 15 bp, Homo sapiens
caccttggcctctta

SEQ ID NO: 1960506 - DNA, 15 bp, Homo sapiens
accttggcctcttaa

SEQ ID NO: 1960507 - DNA, 15 bp, Homo sapiens
ccttggcctcttaat

SEQ ID NO: 1960508 - DNA, 15 bp, Homo sapiens
cttggcctcttaatg

SEQ ID NO: 1960509 - DNA, 15 bp, Homo sapiens
ttggcctcttaatgt

SEQ ID NO: 1960510 - DNA, 15 bp, Homo sapiens
tggcctcttaatgtg

SEQ ID NO: 1960511 - DNA, 15 bp, Homo sapiens
ggcctcttaatgtgc

SEQ ID NO: 1960512 - DNA, 15 bp, Homo sapiens
gcctcttaatgtgct

SEQ ID NO: 1960513 - DNA, 15 bp, Homo sapiens
cctcttaatgtgctg

SEQ ID NO: 1960514 - DNA, 15 bp, Homo sapiens
ctcttaatgtgctgc

SEQ ID NO: 1960515 - DNA, 15 bp, Homo sapiens
tcttaatgtgctgcg

SEQ ID NO: 1960516 - DNA, 15 bp, Homo sapiens
cttaatgtgctgcga

SEQ ID NO: 1960517 - DNA, 15 bp, Homo sapiens
ttaatgtgctgcgat

SEQ ID NO: 1960518 - DNA, 15 bp, Homo sapiens
taatgtgctgcgatt

SEQ ID NO: 1960519 - DNA, 15 bp, Homo sapiens
aatgtgctgcgatta

SEQ ID NO: 1960520 - DNA, 15 bp, Homo sapiens
atgtgctgcgattac

SEQ ID NO: 1960521 - DNA, 15 bp, Homo sapiens
tgtgctgcgattacc

SEQ ID NO: 1960522 - DNA, 15 bp, Homo sapiens
gtgctgcgattaccg

SEQ ID NO: 1960523 - DNA, 15 bp, Homo sapiens
tgctgcgattaccgg

SEQ ID NO: 1960524 - DNA, 15 bp, Homo sapiens
gctgcgattaccggc

SEQ ID NO: 1960525 - DNA, 15 bp, Homo sapiens
ctgcgattaccggca

SEQ ID NO: 1960526 - DNA, 15 bp, Homo sapiens
tgcgattaccggcat

SEQ ID NO: 1960527 - DNA, 15 bp, Homo sapiens
gcgattaccggcatg

SEQ ID NO: 1960528 - DNA, 15 bp, Homo sapiens
cgattaccggcatga

SEQ ID NO: 1960529 - DNA, 15 bp, Homo sapiens
gattaccggcatgag

SEQ ID NO: 1960530 - DNA, 15 bp, Homo sapiens
attaccggcatgagc

SEQ ID NO: 1960531 - DNA, 15 bp, Homo sapiens
ttaccggcatgagcc

SEQ ID NO: 1960532 - DNA, 15 bp, Homo sapiens
taccggcatgagccg

SEQ ID NO: 1960533 - DNA, 15 bp, Homo sapiens
accggcatgagccgc

SEQ ID NO: 1960534 - DNA, 15 bp, Homo sapiens
ccggcatgagccgcc

SEQ ID NO: 1960535 - DNA, 15 bp, Homo sapiens
cggcatgagccgcca

SEQ ID NO: 1960536 - DNA, 15 bp, Homo sapiens
ggcatgagccgccac

SEQ ID NO: 1960537 - DNA, 15 bp, Homo sapiens
gcatgagccgccaca

SEQ ID NO: 1960538 - DNA, 15 bp, Homo sapiens
catgagccgccacac

SEQ ID NO: 1960539 - DNA, 15 bp, Homo sapiens
atgagccgccacacc

SEQ ID NO: 1960540 - DNA, 15 bp, Homo sapiens
tgagccgccacacct

SEQ ID NO: 1960541 - DNA, 15 bp, Homo sapiens
gagccgccacacctg

SEQ ID NO: 1960542 - DNA, 15 bp, Homo sapiens
agccgccacacctgg

SEQ ID NO: 1960543 - DNA, 15 bp, Homo sapiens
gccgccacacctggc

SEQ ID NO: 1960544 - DNA, 15 bp, Homo sapiens
ccgccacacctggcc

SEQ ID NO: 1960545 - DNA, 15 bp, Homo sapiens
cgccacacctggcct

SEQ ID NO: 1960546 - DNA, 15 bp, Homo sapiens
gccacacctggcctg

SEQ ID NO: 1960547 - DNA, 15 bp, Homo sapiens
ccacacctggcctgt

SEQ ID NO: 1960548 - DNA, 15 bp, Homo sapiens
cacacctggcctgtt

SEQ ID NO: 1960549 - DNA, 15 bp, Homo sapiens
acacctggcctgttt

SEQ ID NO: 1960550 - DNA, 15 bp, Homo sapiens
cacctggcctgtttc

SEQ ID NO: 1960551 - DNA, 15 bp, Homo sapiens
acctggcctgtttcc

SEQ ID NO: 1960552 - DNA, 15 bp, Homo sapiens
cctggcctgtttccc

SEQ ID NO: 1960553 - DNA, 15 bp, Homo sapiens
ctggcctgtttccct

SEQ ID NO: 1960554 - DNA, 15 bp, Homo sapiens
tggcctgtttcccta

SEQ ID NO: 1960555 - DNA, 15 bp, Homo sapiens
ggcctgtttccctac

SEQ ID NO: 1960556 - DNA, 15 bp, Homo sapiens
gcctgtttccctacc

SEQ ID NO: 1960557 - DNA, 15 bp, Homo sapiens
cctgtttccctacct

SEQ ID NO: 1960558 - DNA, 15 bp, Homo sapiens
ctgtttccctacctt

SEQ ID NO: 1960559 - DNA, 15 bp, Homo sapiens
tgtttccctacctta

SEQ ID NO: 1960560 - DNA, 15 bp, Homo sapiens
gtttccctaccttac

SEQ ID NO: 1960561 - DNA, 15 bp, Homo sapiens
tttccctaccttaca

SEQ ID NO: 1960562 - DNA, 15 bp, Homo sapiens
ttccctaccttacat

SEQ ID NO: 1960563 - DNA, 15 bp, Homo sapiens
tccctaccttacatt

SEQ ID NO: 1960564 - DNA, 15 bp, Homo sapiens
ccctaccttacatta

SEQ ID NO: 1960565 - DNA, 15 bp, Homo sapiens
cctaccttacattac

SEQ ID NO: 1960566 - DNA, 15 bp, Homo sapiens
ctaccttacattact

SEQ ID NO: 1960567 - DNA, 15 bp, Homo sapiens
taccttacattactc

SEQ ID NO: 1960568 - DNA, 15 bp, Homo sapiens
accttacattactct

SEQ ID NO: 1960569 - DNA, 15 bp, Homo sapiens
ccttacattactctt

SEQ ID NO: 1960570 - DNA, 15 bp, Homo sapiens
cttacattactcttg

SEQ ID NO: 1960571 - DNA, 15 bp, Homo sapiens
ttacattactcttgg

SEQ ID NO: 1960572 - DNA, 15 bp, Homo sapiens
tacattactcttggc

SEQ ID NO: 1960573 - DNA, 15 bp, Homo sapiens
acattactcttggcg

SEQ ID NO: 1960574 - DNA, 15 bp, Homo sapiens
cattactcttggcgt

SEQ ID NO: 1960575 - DNA, 15 bp, Homo sapiens
attactcttggcgtt

SEQ ID NO: 1960576 - DNA, 15 bp, Homo sapiens
ttactcttggcgtta

SEQ ID NO: 1960577 - DNA, 15 bp, Homo sapiens
tactcttggcgttat

SEQ ID NO: 1960578 - DNA, 15 bp, Homo sapiens
actcttggcgttatt

SEQ ID NO: 1960579 - DNA, 15 bp, Homo sapiens
ctcttggcgttattc

SEQ ID NO: 1960580 - DNA, 15 bp, Homo sapiens
tcttggcgttattct

SEQ ID NO: 1960581 - DNA, 15 bp, Homo sapiens
cttggcgttattctg

SEQ ID NO: 1960582 - DNA, 15 bp, Homo sapiens
ttggcgttattctgg

SEQ ID NO: 1960583 - DNA, 15 bp, Homo sapiens
tggcgttattctgga

SEQ ID NO: 1960584 - DNA, 15 bp, Homo sapiens
ggcgttattctggac

SEQ ID NO: 1960585 - DNA, 15 bp, Homo sapiens
gcgttattctggact

SEQ ID NO: 1960586 - DNA, 15 bp, Homo sapiens
cgttattctggacta

SEQ ID NO: 1960587 - DNA, 15 bp, Homo sapiens
gttattctggactat

SEQ ID NO: 1960588 - DNA, 15 bp, Homo sapiens
ttattctggactata

SEQ ID NO: 1960589 - DNA, 15 bp, Homo sapiens
tattctggactataa

SEQ ID NO: 1960590 - DNA, 15 bp, Homo sapiens
attctggactataag

SEQ ID NO: 1960591 - DNA, 15 bp, Homo sapiens
ttctggactataaga

SEQ ID NO: 1960592 - DNA, 15 bp, Homo sapiens
tctggactataagaa

SEQ ID NO: 1960593 - DNA, 15 bp, Homo sapiens
ctggactataagaat

SEQ ID NO: 1960594 - DNA, 15 bp, Homo sapiens
tggactataagaatt

SEQ ID NO: 1960595 - DNA, 15 bp, Homo sapiens
ggactataagaattt

SEQ ID NO: 1960596 - DNA, 15 bp, Homo sapiens
gactataagaattta

SEQ ID NO: 1960597 - DNA, 15 bp, Homo sapiens
actataagaatttat

SEQ ID NO: 1960598 - DNA, 15 bp, Homo sapiens
ctataagaatttatg

SEQ ID NO: 1960599 - DNA, 15 bp, Homo sapiens
tataagaatttatgc

SEQ ID NO: 1960600 - DNA, 15 bp, Homo sapiens
ataagaatttatgcc

SEQ ID NO: 1960601 - DNA, 15 bp, Homo sapiens
taagaatttatgcct

SEQ ID NO: 1960602 - DNA, 15 bp, Homo sapiens
aagaatttatgcctg

SEQ ID NO: 1960603 - DNA, 15 bp, Homo sapiens
agaatttatgcctgc

SEQ ID NO: 1960604 - DNA, 15 bp, Homo sapiens
gaatttatgcctgca

SEQ ID NO: 1960605 - DNA, 15 bp, Homo sapiens
aatttatgcctgcaa

SEQ ID NO: 1960606 - DNA, 15 bp, Homo sapiens
atttatgcctgcaaa

SEQ ID NO: 1960607 - DNA, 15 bp, Homo sapiens
tttatgcctgcaaaa

SEQ ID NO: 1960608 - DNA, 15 bp, Homo sapiens
ttatgcctgcaaaaa

SEQ ID NO: 1960609 - DNA, 15 bp, Homo sapiens
tatgcctgcaaaaac

SEQ ID NO: 1960610 - DNA, 15 bp, Homo sapiens
atgcctgcaaaaact

SEQ ID NO: 1960611 - DNA, 15 bp, Homo sapiens
tgcctgcaaaaactg

SEQ ID NO: 1960612 - DNA, 15 bp, Homo sapiens
gcctgcaaaaactga

SEQ ID NO: 1960613 - DNA, 15 bp, Homo sapiens
cctgcaaaaactgag

SEQ ID NO: 1960614 - DNA, 15 bp, Homo sapiens
ctgcaaaaactgagc

SEQ ID NO: 1960615 - DNA, 15 bp, Homo sapiens
tgcaaaaactgagct

SEQ ID NO: 1960616 - DNA, 15 bp, Homo sapiens
gcaaaaactgagctc

SEQ ID NO: 1960617 - DNA, 15 bp, Homo sapiens
caaaaactgagctca

SEQ ID NO: 1960618 - DNA, 15 bp, Homo sapiens
aaaaactgagctcag

SEQ ID NO: 1960619 - DNA, 15 bp, Homo sapiens
aaaactgagctcagc

SEQ ID NO: 1960620 - DNA, 15 bp, Homo sapiens
aaactgagctcagct

SEQ ID NO: 1960621 - DNA, 15 bp, Homo sapiens
aactgagctcagctg

SEQ ID NO: 1960622 - DNA, 15 bp, Homo sapiens
actgagctcagctgt

SEQ ID NO: 1960623 - DNA, 15 bp, Homo sapiens
ctgagctcagctgtg

SEQ ID NO: 1960624 - DNA, 15 bp, Homo sapiens
tgagctcagctgtgg

SEQ ID NO: 1960625 - DNA, 15 bp, Homo sapiens
gagctcagctgtggt

SEQ ID NO: 1960626 - DNA, 15 bp, Homo sapiens
agctcagctgtggtt

SEQ ID NO: 1960627 - DNA, 15 bp, Homo sapiens
gctcagctgtggttc

SEQ ID NO: 1960628 - DNA, 15 bp, Homo sapiens
ctcagctgtggttct

SEQ ID NO: 1960629 - DNA, 15 bp, Homo sapiens
tcagctgtggttcta

SEQ ID NO: 1960630 - DNA, 15 bp, Homo sapiens
cagctgtggttctaa

SEQ ID NO: 1960631 - DNA, 15 bp, Homo sapiens
agctgtggttctaac

SEQ ID NO: 1960632 - DNA, 15 bp, Homo sapiens
gctgtggttctaaca

SEQ ID NO: 1960633 - DNA, 15 bp, Homo sapiens
ctgtggttctaacac

SEQ ID NO: 1960634 - DNA, 15 bp, Homo sapiens
tgtggttctaacact

SEQ ID NO: 1960635 - DNA, 15 bp, Homo sapiens
gtggttctaacactg

SEQ ID NO: 1960636 - DNA, 15 bp, Homo sapiens
tggttctaacactgc

SEQ ID NO: 1960637 - DNA, 15 bp, Homo sapiens
ggttctaacactgct

SEQ ID NO: 1960638 - DNA, 15 bp, Homo sapiens
gttctaacactgctg

SEQ ID NO: 1960639 - DNA, 15 bp, Homo sapiens
ttctaacactgctgg

SEQ ID NO: 1960640 - DNA, 15 bp, Homo sapiens
tctaacactgctggc

SEQ ID NO: 1960641 - DNA, 15 bp, Homo sapiens
ctaacactgctggca

SEQ ID NO: 1960642 - DNA, 15 bp, Homo sapiens
taacactgctggcac

SEQ ID NO: 1960643 - DNA, 15 bp, Homo sapiens
aacactgctggcacc

SEQ ID NO: 1960644 - DNA, 15 bp, Homo sapiens
acactgctggcaccc

SEQ ID NO: 1960645 - DNA, 15 bp, Homo sapiens
cactgctggcaccct

SEQ ID NO: 1960646 - DNA, 15 bp, Homo sapiens
actgctggcaccctc

SEQ ID NO: 1960647 - DNA, 15 bp, Homo sapiens
ctgctggcaccctct

SEQ ID NO: 1960648 - DNA, 15 bp, Homo sapiens
tgctggcaccctctc

SEQ ID NO: 1960649 - DNA, 15 bp, Homo sapiens
gctggcaccctctct

SEQ ID NO: 1960650 - DNA, 15 bp, Homo sapiens
ctggcaccctctcta

SEQ ID NO: 1960651 - DNA, 15 bp, Homo sapiens
tggcaccctctctaa

SEQ ID NO: 1960652 - DNA, 15 bp, Homo sapiens
ggcaccctctctaag

SEQ ID NO: 1960653 - DNA, 15 bp, Homo sapiens
gcaccctctctaagc

SEQ ID NO: 1960654 - DNA, 15 bp, Homo sapiens
caccctctctaagcc

SEQ ID NO: 1960655 - DNA, 15 bp, Homo sapiens
accctctctaagccc

SEQ ID NO: 1960656 - DNA, 15 bp, Homo sapiens
ccctctctaagcccc

SEQ ID NO: 1960657 - DNA, 15 bp, Homo sapiens
cctctctaagccccg

SEQ ID NO: 1960658 - DNA, 15 bp, Homo sapiens
ctctctaagccccgc

SEQ ID NO: 1960659 - DNA, 15 bp, Homo sapiens
tctctaagccccgct

SEQ ID NO: 1960660 - DNA, 15 bp, Homo sapiens
ctctaagccccgctg

SEQ ID NO: 1960661 - DNA, 15 bp, Homo sapiens
tctaagccccgctgc

SEQ ID NO: 1960662 - DNA, 15 bp, Homo sapiens
ctaagccccgctgca

SEQ ID NO: 1960663 - DNA, 15 bp, Homo sapiens
taagccccgctgcaa

SEQ ID NO: 1960664 - DNA, 15 bp, Homo sapiens
aagccccgctgcaaa

SEQ ID NO: 1960665 - DNA, 15 bp, Homo sapiens
agccccgctgcaaac

SEQ ID NO: 1960666 - DNA, 15 bp, Homo sapiens
gccccgctgcaaact

SEQ ID NO: 1960667 - DNA, 15 bp, Homo sapiens
ccccgctgcaaactg

SEQ ID NO: 1960668 - DNA, 15 bp, Homo sapiens
cccgctgcaaactga

SEQ ID NO: 1960669 - DNA, 15 bp, Homo sapiens
ccgctgcaaactgag

SEQ ID NO: 1960670 - DNA, 15 bp, Homo sapiens
cgctgcaaactgagg

SEQ ID NO: 1960671 - DNA, 15 bp, Homo sapiens
gctgcaaactgaggg

SEQ ID NO: 1960672 - DNA, 15 bp, Homo sapiens
ctgcaaactgagggt

SEQ ID NO: 1960673 - DNA, 15 bp, Homo sapiens
tgcaaactgagggtg

SEQ ID NO: 1960674 - DNA, 15 bp, Homo sapiens
gcaaactgagggtgt

SEQ ID NO: 1960675 - DNA, 15 bp, Homo sapiens
caaactgagggtgtt

SEQ ID NO: 1960676 - DNA, 15 bp, Homo sapiens
aaactgagggtgttc

SEQ ID NO: 1960677 - DNA, 15 bp, Homo sapiens
aactgagggtgttcc

SEQ ID NO: 1960678 - DNA, 15 bp, Homo sapiens
actgagggtgttcct

SEQ ID NO: 1960679 - DNA, 15 bp, Homo sapiens
ctgagggtgttcctg

SEQ ID NO: 1960680 - DNA, 15 bp, Homo sapiens
tgagggtgttcctga

SEQ ID NO: 1960681 - DNA, 15 bp, Homo sapiens
gagggtgttcctgat

SEQ ID NO: 1960682 - DNA, 15 bp, Homo sapiens
agggtgttcctgatt

SEQ ID NO: 1960683 - DNA, 15 bp, Homo sapiens
gggtgttcctgattg

SEQ ID NO: 1960684 - DNA, 15 bp, Homo sapiens
ggtgttcctgattgc

SEQ ID NO: 1960685 - DNA, 15 bp, Homo sapiens
gtgttcctgattgca

SEQ ID NO: 1960686 - DNA, 15 bp, Homo sapiens
tgttcctgattgcag

SEQ ID NO: 1960687 - DNA, 15 bp, Homo sapiens
gttcctgattgcaga

SEQ ID NO: 1960688 - DNA, 15 bp, Homo sapiens
ttcctgattgcagat

SEQ ID NO: 1960689 - DNA, 15 bp, Homo sapiens
tcctgattgcagatg

SEQ ID NO: 1960690 - DNA, 15 bp, Homo sapiens
cctgattgcagatga

SEQ ID NO: 1960691 - DNA, 15 bp, Homo sapiens
ctgattgcagatgag

SEQ ID NO: 1960692 - DNA, 15 bp, Homo sapiens
tgattgcagatgagc

SEQ ID NO: 1960693 - DNA, 15 bp, Homo sapiens
gattgcagatgagct

SEQ ID NO: 1960694 - DNA, 15 bp, Homo sapiens
attgcagatgagctt

SEQ ID NO: 1960695 - DNA, 15 bp, Homo sapiens
ttgcagatgagcttg

SEQ ID NO: 1960696 - DNA, 15 bp, Homo sapiens
tgcagatgagcttgc

SEQ ID NO: 1960697 - DNA, 15 bp, Homo sapiens
gcagatgagcttgct

SEQ ID NO: 1960698 - DNA, 15 bp, Homo sapiens
cagatgagcttgctg

SEQ ID NO: 1960699 - DNA, 15 bp, Homo sapiens
agatgagcttgctgg

SEQ ID NO: 1960700 - DNA, 15 bp, Homo sapiens
gatgagcttgctggg

SEQ ID NO: 1960701 - DNA, 15 bp, Homo sapiens
atgagcttgctggga

SEQ ID NO: 1960702 - DNA, 15 bp, Homo sapiens
tgagcttgctgggag

SEQ ID NO: 1960703 - DNA, 15 bp, Homo sapiens
gagcttgctgggagg

SEQ ID NO: 1960704 - DNA, 15 bp, Homo sapiens
agcttgctgggaggc

SEQ ID NO: 1960705 - DNA, 15 bp, Homo sapiens
gcttgctgggaggcc

SEQ ID NO: 1960706 - DNA, 15 bp, Homo sapiens
cttgctgggaggcct

SEQ ID NO: 1960707 - DNA, 15 bp, Homo sapiens
ttgctgggaggcctg

SEQ ID NO: 1960708 - DNA, 15 bp, Homo sapiens
tgctgggaggcctgg

SEQ ID NO: 1960709 - DNA, 15 bp, Homo sapiens
gctgggaggcctgga

SEQ ID NO: 1960710 - DNA, 15 bp, Homo sapiens
ctgggaggcctggag

SEQ ID NO: 1960711 - DNA, 15 bp, Homo sapiens
tgggaggcctggagc

SEQ ID NO: 1960712 - DNA, 15 bp, Homo sapiens
gggaggcctggagca

SEQ ID NO: 1960713 - DNA, 15 bp, Homo sapiens
ggaggcctggagcaa

SEQ ID NO: 1960714 - DNA, 15 bp, Homo sapiens
gaggcctggagcaat

SEQ ID NO: 1960715 - DNA, 15 bp, Homo sapiens
aggcctggagcaata

SEQ ID NO: 1960716 - DNA, 15 bp, Homo sapiens
ggcctggagcaatac

SEQ ID NO: 1960717 - DNA, 15 bp, Homo sapiens
gcctggagcaatacc

SEQ ID NO: 1960718 - DNA, 15 bp, Homo sapiens
cctggagcaataccc

SEQ ID NO: 1960719 - DNA, 15 bp, Homo sapiens
ctggagcaataccct

SEQ ID NO: 1960720 - DNA, 15 bp, Homo sapiens
tggagcaataccctc

SEQ ID NO: 1960721 - DNA, 15 bp, Homo sapiens
ggagcaataccctct

SEQ ID NO: 1960722 - DNA, 15 bp, Homo sapiens
gagcaataccctcta

SEQ ID NO: 1960723 - DNA, 15 bp, Homo sapiens
agcaataccctctaa

SEQ ID NO: 1960724 - DNA, 15 bp, Homo sapiens
gcaataccctctaat

SEQ ID NO: 1960725 - DNA, 15 bp, Homo sapiens
caataccctctaatt

SEQ ID NO: 1960726 - DNA, 15 bp, Homo sapiens
aataccctctaattg

SEQ ID NO: 1960727 - DNA, 15 bp, Homo sapiens
ataccctctaattgc

SEQ ID NO: 1960728 - DNA, 15 bp, Homo sapiens
taccctctaattgcc

SEQ ID NO: 1960729 - DNA, 15 bp, Homo sapiens
accctctaattgcct

SEQ ID NO: 1960730 - DNA, 15 bp, Homo sapiens
ccctctaattgcctt

SEQ ID NO: 1960731 - DNA, 15 bp, Homo sapiens
cctctaattgccttt

SEQ ID NO: 1960732 - DNA, 15 bp, Homo sapiens
ctctaattgcctttt

SEQ ID NO: 1960733 - DNA, 15 bp, Homo sapiens
tctaattgccttttt

SEQ ID NO: 1960734 - DNA, 15 bp, Homo sapiens
ctaattgcctttttt

SEQ ID NO: 1960735 - DNA, 15 bp, Homo sapiens
taattgccttttttt

SEQ ID NO: 1960736 - DNA, 15 bp, Homo sapiens
aattgcctttttttt

SEQ ID NO: 1960737 - DNA, 15 bp, Homo sapiens
attgccttttttttt

SEQ ID NO: 1960738 - DNA, 15 bp, Homo sapiens
ttgcctttttttttt

SEQ ID NO: 1960739 - DNA, 15 bp, Homo sapiens
tgccttttttttttt

SEQ ID NO: 1960740 - DNA, 15 bp, Homo sapiens
gcctttttttttttt

SEQ ID NO: 1960741 - DNA, 15 bp, Homo sapiens
tttttttttgagaag

SEQ ID NO: 1960742 - DNA, 15 bp, Homo sapiens
ttttttttgagaagg

SEQ ID NO: 1960743 - DNA, 15 bp, Homo sapiens
tttttttgagaagga

SEQ ID NO: 1960744 - DNA, 15 bp, Homo sapiens
ttttttgagaaggag

SEQ ID NO: 1960745 - DNA, 15 bp, Homo sapiens
tttttgagaaggagt

SEQ ID NO: 1960746 - DNA, 15 bp, Homo sapiens
ttttgagaaggagtt

SEQ ID NO: 1960747 - DNA, 15 bp, Homo sapiens
tttgagaaggagttt

SEQ ID NO: 1960748 - DNA, 15 bp, Homo sapiens
ttgagaaggagtttt

SEQ ID NO: 1960749 - DNA, 15 bp, Homo sapiens
tgagaaggagttttg

SEQ ID NO: 1960750 - DNA, 15 bp, Homo sapiens
gagaaggagttttgc

SEQ ID NO: 1960751 - DNA, 15 bp, Homo sapiens
agaaggagttttgct

SEQ ID NO: 1960752 - DNA, 15 bp, Homo sapiens
gaaggagttttgctc

SEQ ID NO: 1960753 - DNA, 15 bp, Homo sapiens
aaggagttttgctct

SEQ ID NO: 1960754 - DNA, 15 bp, Homo sapiens
aggagttttgctctt

SEQ ID NO: 1960755 - DNA, 15 bp, Homo sapiens
gagttttgctcttgc

SEQ ID NO: 1960756 - DNA, 15 bp, Homo sapiens
agttttgctcttgct

SEQ ID NO: 1960757 - DNA, 15 bp, Homo sapiens
gttttgctcttgcta

SEQ ID NO: 1960758 - DNA, 15 bp, Homo sapiens
ttttgctcttgctac

SEQ ID NO: 1960759 - DNA, 15 bp, Homo sapiens
tttgctcttgctacc

SEQ ID NO: 1960760 - DNA, 15 bp, Homo sapiens
ttgctcttgctaccc

SEQ ID NO: 1960761 - DNA, 15 bp, Homo sapiens
tgctcttgctaccca

SEQ ID NO: 1960762 - DNA, 15 bp, Homo sapiens
gctcttgctacccag

SEQ ID NO: 1960763 - DNA, 15 bp, Homo sapiens
ctcttgctacccagg

SEQ ID NO: 1960764 - DNA, 15 bp, Homo sapiens
tcttgctacccaggc

SEQ ID NO: 1960765 - DNA, 15 bp, Homo sapiens
cttgctacccaggct

SEQ ID NO: 1960766 - DNA, 15 bp, Homo sapiens
ttgctacccaggctg

SEQ ID NO: 1960767 - DNA, 15 bp, Homo sapiens
tgctacccaggctgg

SEQ ID NO: 1960768 - DNA, 15 bp, Homo sapiens
gctacccaggctgga

SEQ ID NO: 1960769 - DNA, 15 bp, Homo sapiens
ctacccaggctggag

SEQ ID NO: 1960770 - DNA, 15 bp, Homo sapiens
tacccaggctggagt

SEQ ID NO: 1960771 - DNA, 15 bp, Homo sapiens
ctcactgcaacctcc

SEQ ID NO: 1960772 - DNA, 15 bp, Homo sapiens
cctccgcctcctggg

SEQ ID NO: 1960773 - DNA, 15 bp, Homo sapiens
agtgattctcctgca

SEQ ID NO: 1960774 - DNA, 15 bp, Homo sapiens
gtgattctcctgcat

SEQ ID NO: 1960775 - DNA, 15 bp, Homo sapiens
tgattctcctgcatc

SEQ ID NO: 1960776 - DNA, 15 bp, Homo sapiens
gattctcctgcatca

SEQ ID NO: 1960777 - DNA, 15 bp, Homo sapiens
attctcctgcatcag

SEQ ID NO: 1960778 - DNA, 15 bp, Homo sapiens
ttctcctgcatcagc

SEQ ID NO: 1960779 - DNA, 15 bp, Homo sapiens
tctcctgcatcagcc

SEQ ID NO: 1960780 - DNA, 15 bp, Homo sapiens
tcctgcatcagcctc

SEQ ID NO: 1960781 - DNA, 15 bp, Homo sapiens
cctgcatcagcctcc

SEQ ID NO: 1960782 - DNA, 15 bp, Homo sapiens
ctgcatcagcctccc

SEQ ID NO: 1960783 - DNA, 15 bp, Homo sapiens
tgcatcagcctcccg

SEQ ID NO: 1960784 - DNA, 15 bp, Homo sapiens
gcatcagcctcccga

SEQ ID NO: 1960785 - DNA, 15 bp, Homo sapiens
catcagcctcccgag

SEQ ID NO: 1960786 - DNA, 15 bp, Homo sapiens
atcagcctcccgagt

SEQ ID NO: 1960787 - DNA, 15 bp, Homo sapiens
gcaccaccatgcccg

SEQ ID NO: 1960788 - DNA, 15 bp, Homo sapiens
catgcccggctaatg

SEQ ID NO: 1960789 - DNA, 15 bp, Homo sapiens
atgcccggctaatgt

SEQ ID NO: 1960790 - DNA, 15 bp, Homo sapiens
tgcccggctaatgtt

SEQ ID NO: 1960791 - DNA, 15 bp, Homo sapiens
gcccggctaatgttg

SEQ ID NO: 1960792 - DNA, 15 bp, Homo sapiens
cccggctaatgttgt

SEQ ID NO: 1960793 - DNA, 15 bp, Homo sapiens
ccggctaatgttgta

SEQ ID NO: 1960794 - DNA, 15 bp, Homo sapiens
cggctaatgttgtat

SEQ ID NO: 1960795 - DNA, 15 bp, Homo sapiens
ggctaatgttgtatt

SEQ ID NO: 1960796 - DNA, 15 bp, Homo sapiens
gctaatgttgtattt

SEQ ID NO: 1960797 - DNA, 15 bp, Homo sapiens
ctaatgttgtatttt

SEQ ID NO: 1960798 - DNA, 15 bp, Homo sapiens
taatgttgtattttt

SEQ ID NO: 1960799 - DNA, 15 bp, Homo sapiens
aatgttgtattttta

SEQ ID NO: 1960800 - DNA, 15 bp, Homo sapiens
atgttgtatttttag

SEQ ID NO: 1960801 - DNA, 15 bp, Homo sapiens
tgttgtatttttagt

SEQ ID NO: 1960802 - DNA, 15 bp, Homo sapiens
tgtatttttagtagt

SEQ ID NO: 1960803 - DNA, 15 bp, Homo sapiens
gtatttttagtagtg

SEQ ID NO: 1960804 - DNA, 15 bp, Homo sapiens
tatttttagtagtga

SEQ ID NO: 1960805 - DNA, 15 bp, Homo sapiens
atttttagtagtgat

SEQ ID NO: 1960806 - DNA, 15 bp, Homo sapiens
tttttagtagtgatg

SEQ ID NO: 1960807 - DNA, 15 bp, Homo sapiens
ttttagtagtgatga

SEQ ID NO: 1960808 - DNA, 15 bp, Homo sapiens
tttagtagtgatgag

SEQ ID NO: 1960809 - DNA, 15 bp, Homo sapiens
ttagtagtgatgagg

SEQ ID NO: 1960810 - DNA, 15 bp, Homo sapiens
tagtagtgatgaggt

SEQ ID NO: 1960811 - DNA, 15 bp, Homo sapiens
agtagtgatgaggtt

SEQ ID NO: 1960812 - DNA, 15 bp, Homo sapiens
gtagtgatgaggttt

SEQ ID NO: 1960813 - DNA, 15 bp, Homo sapiens
tagtgatgaggtttc

SEQ ID NO: 1960814 - DNA, 15 bp, Homo sapiens
agtgatgaggtttct

SEQ ID NO: 1960815 - DNA, 15 bp, Homo sapiens
gtgatgaggtttctc

SEQ ID NO: 1960816 - DNA, 15 bp, Homo sapiens
tgatgaggtttctcc

SEQ ID NO: 1960817 - DNA, 15 bp, Homo sapiens
gatgaggtttctcca

SEQ ID NO: 1960818 - DNA, 15 bp, Homo sapiens
atgaggtttctccat

SEQ ID NO: 1960819 - DNA, 15 bp, Homo sapiens
tgaggtttctccatg

SEQ ID NO: 1960820 - DNA, 15 bp, Homo sapiens
tggtcttgaactccc

SEQ ID NO: 1960821 - DNA, 15 bp, Homo sapiens
ggtcttgaactcccg

SEQ ID NO: 1960822 - DNA, 15 bp, Homo sapiens
gtcttgaactcccga

SEQ ID NO: 1960823 - DNA, 15 bp, Homo sapiens
tcttgaactcccgac

SEQ ID NO: 1960824 - DNA, 15 bp, Homo sapiens
cttgaactcccgacc

SEQ ID NO: 1960825 - DNA, 15 bp, Homo sapiens
ttgaactcccgacct

SEQ ID NO: 1960826 - DNA, 15 bp, Homo sapiens
tgaactcccgacctc

SEQ ID NO: 1960827 - DNA, 15 bp, Homo sapiens
caggtgatccgccct

SEQ ID NO: 1960828 - DNA, 15 bp, Homo sapiens
aggtgatccgccctc

SEQ ID NO: 1960829 - DNA, 15 bp, Homo sapiens
ggtgatccgccctcc

SEQ ID NO: 1960830 - DNA, 15 bp, Homo sapiens
gtgatccgccctcct

SEQ ID NO: 1960831 - DNA, 15 bp, Homo sapiens
tgatccgccctcctc

SEQ ID NO: 1960832 - DNA, 15 bp, Homo sapiens
gatccgccctcctcg

SEQ ID NO: 1960833 - DNA, 15 bp, Homo sapiens
atccgccctcctcgg

SEQ ID NO: 1960834 - DNA, 15 bp, Homo sapiens
tccgccctcctcggc

SEQ ID NO: 1960835 - DNA, 15 bp, Homo sapiens
ccgccctcctcggct

SEQ ID NO: 1960836 - DNA, 15 bp, Homo sapiens
cgccctcctcggctt

SEQ ID NO: 1960837 - DNA, 15 bp, Homo sapiens
gccctcctcggcttc

SEQ ID NO: 1960838 - DNA, 15 bp, Homo sapiens
ccctcctcggcttcc

SEQ ID NO: 1960839 - DNA, 15 bp, Homo sapiens
cctcctcggcttccc

SEQ ID NO: 1960840 - DNA, 15 bp, Homo sapiens
ctcctcggcttccca

SEQ ID NO: 1960841 - DNA, 15 bp, Homo sapiens
tcctcggcttcccaa

SEQ ID NO: 1960842 - DNA, 15 bp, Homo sapiens
cctcggcttcccaaa

SEQ ID NO: 1960843 - DNA, 15 bp, Homo sapiens
gtgctgggattacac

SEQ ID NO: 1960844 - DNA, 15 bp, Homo sapiens
tgctgggattacact

SEQ ID NO: 1960845 - DNA, 15 bp, Homo sapiens
gctgggattacactg

SEQ ID NO: 1960846 - DNA, 15 bp, Homo sapiens
ctgggattacactgc

SEQ ID NO: 1960847 - DNA, 15 bp, Homo sapiens
tgggattacactgcg

SEQ ID NO: 1960848 - DNA, 15 bp, Homo sapiens
gggattacactgcgt

SEQ ID NO: 1960849 - DNA, 15 bp, Homo sapiens
ggattacactgcgtg

SEQ ID NO: 1960850 - DNA, 15 bp, Homo sapiens
gattacactgcgtgg

SEQ ID NO: 1960851 - DNA, 15 bp, Homo sapiens
attacactgcgtggg

SEQ ID NO: 1960852 - DNA, 15 bp, Homo sapiens
ttacactgcgtgggg

SEQ ID NO: 1960853 - DNA, 15 bp, Homo sapiens
tacactgcgtggggc

SEQ ID NO: 1960854 - DNA, 15 bp, Homo sapiens
acactgcgtggggcc

SEQ ID NO: 1960855 - DNA, 15 bp, Homo sapiens
cactgcgtggggcct

SEQ ID NO: 1960856 - DNA, 15 bp, Homo sapiens
actgcgtggggcctg

SEQ ID NO: 1960857 - DNA, 15 bp, Homo sapiens
ctgcgtggggcctgc

SEQ ID NO: 1960858 - DNA, 15 bp, Homo sapiens
tgcgtggggcctgcc

SEQ ID NO: 1960859 - DNA, 15 bp, Homo sapiens
gcgtggggcctgcct

SEQ ID NO: 1960860 - DNA, 15 bp, Homo sapiens
cgtggggcctgcctt

SEQ ID NO: 1960861 - DNA, 15 bp, Homo sapiens
gtggggcctgccttc

SEQ ID NO: 1960862 - DNA, 15 bp, Homo sapiens
tggggcctgccttct

SEQ ID NO: 1960863 - DNA, 15 bp, Homo sapiens
ggggcctgccttctt

SEQ ID NO: 1960864 - DNA, 15 bp, Homo sapiens
gggcctgccttcttt

SEQ ID NO: 1960865 - DNA, 15 bp, Homo sapiens
ggcctgccttctttt

SEQ ID NO: 1960866 - DNA, 15 bp, Homo sapiens
gcctgccttcttttt

SEQ ID NO: 1960867 - DNA, 15 bp, Homo sapiens
cctgccttctttttt

SEQ ID NO: 1960868 - DNA, 15 bp, Homo sapiens
ctgccttcttttttt

SEQ ID NO: 1960869 - DNA, 15 bp, Homo sapiens
tgccttcttttttta

SEQ ID NO: 1960870 - DNA, 15 bp, Homo sapiens
gccttctttttttaa

SEQ ID NO: 1960871 - DNA, 15 bp, Homo sapiens
ccttctttttttaaa

SEQ ID NO: 1960872 - DNA, 15 bp, Homo sapiens
cttctttttttaaat

SEQ ID NO: 1960873 - DNA, 15 bp, Homo sapiens
ttctttttttaaatt

SEQ ID NO: 1960874 - DNA, 15 bp, Homo sapiens
tctttttttaaattt

SEQ ID NO: 1960875 - DNA, 15 bp, Homo sapiens
ctttttttaaatttt

SEQ ID NO: 1960876 - DNA, 15 bp, Homo sapiens
tttttttaaattttt

SEQ ID NO: 1960877 - DNA, 15 bp, Homo sapiens
tttttaaatttttat

SEQ ID NO: 1960878 - DNA, 15 bp, Homo sapiens
tatttatttatttac

SEQ ID NO: 1960879 - DNA, 15 bp, Homo sapiens
atttatttatttact

SEQ ID NO: 1960880 - DNA, 15 bp, Homo sapiens
tttatttatttactt

SEQ ID NO: 1960881 - DNA, 15 bp, Homo sapiens
ttatttatttactta

SEQ ID NO: 1960882 - DNA, 15 bp, Homo sapiens
tatttatttacttac

SEQ ID NO: 1960883 - DNA, 15 bp, Homo sapiens
atttatttacttact

SEQ ID NO: 1960884 - DNA, 15 bp, Homo sapiens
tttatttacttactt

SEQ ID NO: 1960885 - DNA, 15 bp, Homo sapiens
ttatttacttactta

SEQ ID NO: 1960886 - DNA, 15 bp, Homo sapiens
tatttacttacttac

SEQ ID NO: 1960887 - DNA, 15 bp, Homo sapiens
atttacttacttact

SEQ ID NO: 1960888 - DNA, 15 bp, Homo sapiens
tttacttacttactt

SEQ ID NO: 1960889 - DNA, 15 bp, Homo sapiens
ttacttacttactta

SEQ ID NO: 1960890 - DNA, 15 bp, Homo sapiens
tacttacttacttac

SEQ ID NO: 1960891 - DNA, 15 bp, Homo sapiens
acttacttacttact

SEQ ID NO: 1960892 - DNA, 15 bp, Homo sapiens
cttacttacttactt

SEQ ID NO: 1960893 - DNA, 15 bp, Homo sapiens
tacttacttacttat

SEQ ID NO: 1960894 - DNA, 15 bp, Homo sapiens
acttacttacttatg

SEQ ID NO: 1960895 - DNA, 15 bp, Homo sapiens
cttacttacttatgt

SEQ ID NO: 1960896 - DNA, 15 bp, Homo sapiens
ttacttacttatgtt

SEQ ID NO: 1960897 - DNA, 15 bp, Homo sapiens
tacttacttatgttt

SEQ ID NO: 1960898 - DNA, 15 bp, Homo sapiens
acttacttatgtttg

SEQ ID NO: 1960899 - DNA, 15 bp, Homo sapiens
cttacttatgtttga

SEQ ID NO: 1960900 - DNA, 15 bp, Homo sapiens
ttacttatgtttgag

SEQ ID NO: 1960901 - DNA, 15 bp, Homo sapiens
tacttatgtttgaga

SEQ ID NO: 1960902 - DNA, 15 bp, Homo sapiens
acttatgtttgagat

SEQ ID NO: 1960903 - DNA, 15 bp, Homo sapiens
cttatgtttgagatg

SEQ ID NO: 1960904 - DNA, 15 bp, Homo sapiens
ttatgtttgagatga

SEQ ID NO: 1960905 - DNA, 15 bp, Homo sapiens
tatgtttgagatgaa

SEQ ID NO: 1960906 - DNA, 15 bp, Homo sapiens
atgtttgagatgaaa

SEQ ID NO: 1960907 - DNA, 15 bp, Homo sapiens
tgtttgagatgaaat

SEQ ID NO: 1960908 - DNA, 15 bp, Homo sapiens
gtttgagatgaaatt

SEQ ID NO: 1960909 - DNA, 15 bp, Homo sapiens
tttgagatgaaattt

SEQ ID NO: 1960910 - DNA, 15 bp, Homo sapiens
ttgagatgaaatttt

SEQ ID NO: 1960911 - DNA, 15 bp, Homo sapiens
tgagatgaaattttg

SEQ ID NO: 1960912 - DNA, 15 bp, Homo sapiens
gagatgaaattttgc

SEQ ID NO: 1960913 - DNA, 15 bp, Homo sapiens
agatgaaattttgct

SEQ ID NO: 1960914 - DNA, 15 bp, Homo sapiens
gatgaaattttgctc

SEQ ID NO: 1960915 - DNA, 15 bp, Homo sapiens
atgaaattttgctct

SEQ ID NO: 1960916 - DNA, 15 bp, Homo sapiens
tgaaattttgctctg

SEQ ID NO: 1960917 - DNA, 15 bp, Homo sapiens
gaaattttgctctgt

SEQ ID NO: 1960918 - DNA, 15 bp, Homo sapiens
aaattttgctctgtg

SEQ ID NO: 1960919 - DNA, 15 bp, Homo sapiens
aattttgctctgtgg

SEQ ID NO: 1960920 - DNA, 15 bp, Homo sapiens
attttgctctgtggc

SEQ ID NO: 1960921 - DNA, 15 bp, Homo sapiens
cttgagcccaggagg

SEQ ID NO: 1960922 - DNA, 15 bp, Homo sapiens
ttgagcccaggaggt

SEQ ID NO: 1960923 - DNA, 15 bp, Homo sapiens
tgagcccaggaggtc

SEQ ID NO: 1960924 - DNA, 15 bp, Homo sapiens
gagcccaggaggtcg

SEQ ID NO: 1960925 - DNA, 15 bp, Homo sapiens
agcccaggaggtcga

SEQ ID NO: 1960926 - DNA, 15 bp, Homo sapiens
gcccaggaggtcgag

SEQ ID NO: 1960927 - DNA, 15 bp, Homo sapiens
cccaggaggtcgagg

SEQ ID NO: 1960928 - DNA, 15 bp, Homo sapiens
ccaggaggtcgaggc

SEQ ID NO: 1960929 - DNA, 15 bp, Homo sapiens
caggaggtcgaggct

SEQ ID NO: 1960930 - DNA, 15 bp, Homo sapiens
aggaggtcgaggctg

SEQ ID NO: 1960931 - DNA, 15 bp, Homo sapiens
aggtcgaggctgcaa

SEQ ID NO: 1960932 - DNA, 15 bp, Homo sapiens
ggtcgaggctgcaag

SEQ ID NO: 1960933 - DNA, 15 bp, Homo sapiens
gtcgaggctgcaagt

SEQ ID NO: 1960934 - DNA, 15 bp, Homo sapiens
tcgaggctgcaagtg

SEQ ID NO: 1960935 - DNA, 15 bp, Homo sapiens
cgaggctgcaagtga

SEQ ID NO: 1960936 - DNA, 15 bp, Homo sapiens
gaggctgcaagtgag

SEQ ID NO: 1960937 - DNA, 15 bp, Homo sapiens
aggctgcaagtgagt

SEQ ID NO: 1960938 - DNA, 15 bp, Homo sapiens
ggctgcaagtgagtc

SEQ ID NO: 1960939 - DNA, 15 bp, Homo sapiens
gctgcaagtgagtca

SEQ ID NO: 1960940 - DNA, 15 bp, Homo sapiens
ctgcaagtgagtcat

SEQ ID NO: 1960941 - DNA, 15 bp, Homo sapiens
tgcaagtgagtcatg

SEQ ID NO: 1960942 - DNA, 15 bp, Homo sapiens
gcaagtgagtcatga

SEQ ID NO: 1960943 - DNA, 15 bp, Homo sapiens
caagtgagtcatgat

SEQ ID NO: 1960944 - DNA, 15 bp, Homo sapiens
aagtgagtcatgatc

SEQ ID NO: 1960945 - DNA, 15 bp, Homo sapiens
agtgagtcatgatcc

SEQ ID NO: 1960946 - DNA, 15 bp, Homo sapiens
gtgagtcatgatcct

SEQ ID NO: 1960947 - DNA, 15 bp, Homo sapiens
tgagtcatgatcctg

SEQ ID NO: 1960948 - DNA, 15 bp, Homo sapiens
gagtcatgatcctgc

SEQ ID NO: 1960949 - DNA, 15 bp, Homo sapiens
agtcatgatcctgcc

SEQ ID NO: 1960950 - DNA, 15 bp, Homo sapiens
gtcatgatcctgcca

SEQ ID NO: 1960951 - DNA, 15 bp, Homo sapiens
tcatgatcctgccac

SEQ ID NO: 1960952 - DNA, 15 bp, Homo sapiens
catgatcctgccact

SEQ ID NO: 1960953 - DNA, 15 bp, Homo sapiens
atgatcctgccactg

SEQ ID NO: 1960954 - DNA, 15 bp, Homo sapiens
tgatcctgccactgc

SEQ ID NO: 1960955 - DNA, 15 bp, Homo sapiens
cctgccactgcactc

SEQ ID NO: 1960956 - DNA, 15 bp, Homo sapiens
ctgccactgcactcc

SEQ ID NO: 1960957 - DNA, 15 bp, Homo sapiens
actgcactccagctg

SEQ ID NO: 1960958 - DNA, 15 bp, Homo sapiens
ctgcactccagctgg

SEQ ID NO: 1960959 - DNA, 15 bp, Homo sapiens
tgcactccagctggg

SEQ ID NO: 1960960 - DNA, 15 bp, Homo sapiens
gcactccagctgggg

SEQ ID NO: 1960961 - DNA, 15 bp, Homo sapiens
cactccagctggggt

SEQ ID NO: 1960962 - DNA, 15 bp, Homo sapiens
actccagctggggtg

SEQ ID NO: 1960963 - DNA, 15 bp, Homo sapiens
ctccagctggggtgt

SEQ ID NO: 1960964 - DNA, 15 bp, Homo sapiens
tccagctggggtgtc

SEQ ID NO: 1960965 - DNA, 15 bp, Homo sapiens
ccagctggggtgtca

SEQ ID NO: 1960966 - DNA, 15 bp, Homo sapiens
cagctggggtgtcaa

SEQ ID NO: 1960967 - DNA, 15 bp, Homo sapiens
agctggggtgtcaaa

SEQ ID NO: 1960968 - DNA, 15 bp, Homo sapiens
gctggggtgtcaaaa

SEQ ID NO: 1960969 - DNA, 15 bp, Homo sapiens
ctggggtgtcaaaat

SEQ ID NO: 1960970 - DNA, 15 bp, Homo sapiens
tggggtgtcaaaatg

SEQ ID NO: 1960971 - DNA, 15 bp, Homo sapiens
ggggtgtcaaaatga

SEQ ID NO: 1960972 - DNA, 15 bp, Homo sapiens
gggtgtcaaaatgag

SEQ ID NO: 1960973 - DNA, 15 bp, Homo sapiens
ggtgtcaaaatgaga

SEQ ID NO: 1960974 - DNA, 15 bp, Homo sapiens
gtgtcaaaatgagac

SEQ ID NO: 1960975 - DNA, 15 bp, Homo sapiens
tgtcaaaatgagacc

SEQ ID NO: 1960976 - DNA, 15 bp, Homo sapiens
gtcaaaatgagaccc

SEQ ID NO: 1960977 - DNA, 15 bp, Homo sapiens
tcaaaatgagaccca

SEQ ID NO: 1960978 - DNA, 15 bp, Homo sapiens
caaaatgagacccag

SEQ ID NO: 1960979 - DNA, 15 bp, Homo sapiens
aaaatgagacccagt

SEQ ID NO: 1960980 - DNA, 15 bp, Homo sapiens
aaatgagacccagtc

SEQ ID NO: 1960981 - DNA, 15 bp, Homo sapiens
aatgagacccagtct

SEQ ID NO: 1960982 - DNA, 15 bp, Homo sapiens
atgagacccagtctc

SEQ ID NO: 1960983 - DNA, 15 bp, Homo sapiens
acccagtctcaaaat

SEQ ID NO: 1960984 - DNA, 15 bp, Homo sapiens
cccagtctcaaaata

SEQ ID NO: 1960985 - DNA, 15 bp, Homo sapiens
ccagtctcaaaataa

SEQ ID NO: 1960986 - DNA, 15 bp, Homo sapiens
cagtctcaaaataaa

SEQ ID NO: 1960987 - DNA, 15 bp, Homo sapiens
agtctcaaaataaat

SEQ ID NO: 1960988 - DNA, 15 bp, Homo sapiens
ctcaaaataaataag

SEQ ID NO: 1960989 - DNA, 15 bp, Homo sapiens
tcaaaataaataagt

SEQ ID NO: 1960990 - DNA, 15 bp, Homo sapiens
caaaataaataagtt

SEQ ID NO: 1960991 - DNA, 15 bp, Homo sapiens
aaaataaataagtta

SEQ ID NO: 1960992 - DNA, 15 bp, Homo sapiens
aaataaataagttaa

SEQ ID NO: 1960993 - DNA, 15 bp, Homo sapiens
aataaataagttaat

SEQ ID NO: 1960994 - DNA, 15 bp, Homo sapiens
ataaataagttaatt

SEQ ID NO: 1960995 - DNA, 15 bp, Homo sapiens
taaataagttaatta

SEQ ID NO: 1960996 - DNA, 15 bp, Homo sapiens
aaataagttaattaa

SEQ ID NO: 1960997 - DNA, 15 bp, Homo sapiens
aataagttaattaat

SEQ ID NO: 1960998 - DNA, 15 bp, Homo sapiens
ataagttaattaatt

SEQ ID NO: 1960999 - DNA, 15 bp, Homo sapiens
taagttaattaatta

SEQ ID NO: 1961000 - DNA, 15 bp, Homo sapiens
aagttaattaattaa

SEQ ID NO: 1961001 - DNA, 15 bp, Homo sapiens
agttaattaattaaa

SEQ ID NO: 1961002 - DNA, 15 bp, Homo sapiens
gttaattaattaaaa

SEQ ID NO: 1961003 - DNA, 15 bp, Homo sapiens
ttaattaattaaaaa

SEQ ID NO: 1961004 - DNA, 15 bp, Homo sapiens
taattaattaaaaac

SEQ ID NO: 1961005 - DNA, 15 bp, Homo sapiens
aattaattaaaaaca

SEQ ID NO: 1961006 - DNA, 15 bp, Homo sapiens
attaattaaaaacac

SEQ ID NO: 1961007 - DNA, 15 bp, Homo sapiens
ttaattaaaaacact

SEQ ID NO: 1961008 - DNA, 15 bp, Homo sapiens
taattaaaaacactc

SEQ ID NO: 1961009 - DNA, 15 bp, Homo sapiens
aattaaaaacactca

SEQ ID NO: 1961010 - DNA, 15 bp, Homo sapiens
attaaaaacactcag

SEQ ID NO: 1961011 - DNA, 15 bp, Homo sapiens
ttaaaaacactcagg

SEQ ID NO: 1961012 - DNA, 15 bp, Homo sapiens
taaaaacactcaggg

SEQ ID NO: 1961013 - DNA, 15 bp, Homo sapiens
aaaaacactcagggc

SEQ ID NO: 1961014 - DNA, 15 bp, Homo sapiens
aaaacactcagggcc

SEQ ID NO: 1961015 - DNA, 15 bp, Homo sapiens
aaacactcagggccg

SEQ ID NO: 1961016 - DNA, 15 bp, Homo sapiens
aacactcagggccgg

SEQ ID NO: 1961017 - DNA, 15 bp, Homo sapiens
acactcagggccgga

SEQ ID NO: 1961018 - DNA, 15 bp, Homo sapiens
cactcagggccggac

SEQ ID NO: 1961019 - DNA, 15 bp, Homo sapiens
actcagggccggacg

SEQ ID NO: 1961020 - DNA, 15 bp, Homo sapiens
ctcagggccggacgc

SEQ ID NO: 1961021 - DNA, 15 bp, Homo sapiens
tcagggccggacgcg

SEQ ID NO: 1961022 - DNA, 15 bp, Homo sapiens
cagggccggacgcgg

SEQ ID NO: 1961023 - DNA, 15 bp, Homo sapiens
agggccggacgcggt

SEQ ID NO: 1961024 - DNA, 15 bp, Homo sapiens
gggccggacgcggtg

SEQ ID NO: 1961025 - DNA, 15 bp, Homo sapiens
ggccggacgcggtgg

SEQ ID NO: 1961026 - DNA, 15 bp, Homo sapiens
gccggacgcggtggc

SEQ ID NO: 1961027 - DNA, 15 bp, Homo sapiens
ccggacgcggtggct

SEQ ID NO: 1961028 - DNA, 15 bp, Homo sapiens
cggacgcggtggctc

SEQ ID NO: 1961029 - DNA, 15 bp, Homo sapiens
ggacgcggtggctca

SEQ ID NO: 1961030 - DNA, 15 bp, Homo sapiens
gacgcggtggctcac

SEQ ID NO: 1961031 - DNA, 15 bp, Homo sapiens
acgcggtggctcacc

SEQ ID NO: 1961032 - DNA, 15 bp, Homo sapiens
cgcggtggctcacct

SEQ ID NO: 1961033 - DNA, 15 bp, Homo sapiens
gcggtggctcacctg

SEQ ID NO: 1961034 - DNA, 15 bp, Homo sapiens
cggtggctcacctgt

SEQ ID NO: 1961035 - DNA, 15 bp, Homo sapiens
ggtggctcacctgta

SEQ ID NO: 1961036 - DNA, 15 bp, Homo sapiens
gtggctcacctgtaa

SEQ ID NO: 1961037 - DNA, 15 bp, Homo sapiens
tggctcacctgtaat

SEQ ID NO: 1961038 - DNA, 15 bp, Homo sapiens
ggctcacctgtaatc

SEQ ID NO: 1961039 - DNA, 15 bp, Homo sapiens
tcacctgtaatcccc

SEQ ID NO: 1961040 - DNA, 15 bp, Homo sapiens
cacctgtaatcccca

SEQ ID NO: 1961041 - DNA, 15 bp, Homo sapiens
acctgtaatccccac

SEQ ID NO: 1961042 - DNA, 15 bp, Homo sapiens
cctgtaatccccaca

SEQ ID NO: 1961043 - DNA, 15 bp, Homo sapiens
ctgtaatccccacat

SEQ ID NO: 1961044 - DNA, 15 bp, Homo sapiens
tgtaatccccacatt

SEQ ID NO: 1961045 - DNA, 15 bp, Homo sapiens
gtaatccccacattt

SEQ ID NO: 1961046 - DNA, 15 bp, Homo sapiens
taatccccacatttt

SEQ ID NO: 1961047 - DNA, 15 bp, Homo sapiens
aatccccacattttg

SEQ ID NO: 1961048 - DNA, 15 bp, Homo sapiens
atccccacattttgg

SEQ ID NO: 1961049 - DNA, 15 bp, Homo sapiens
tccccacattttggg

SEQ ID NO: 1961050 - DNA, 15 bp, Homo sapiens
ccccacattttggga

SEQ ID NO: 1961051 - DNA, 15 bp, Homo sapiens
cccacattttgggag

SEQ ID NO: 1961052 - DNA, 15 bp, Homo sapiens
ccacattttgggaga

SEQ ID NO: 1961053 - DNA, 15 bp, Homo sapiens
cacattttgggagac

SEQ ID NO: 1961054 - DNA, 15 bp, Homo sapiens
acattttgggagacc

SEQ ID NO: 1961055 - DNA, 15 bp, Homo sapiens
cattttgggagacca

SEQ ID NO: 1961056 - DNA, 15 bp, Homo sapiens
attttgggagaccaa

SEQ ID NO: 1961057 - DNA, 15 bp, Homo sapiens
ttttgggagaccaag

SEQ ID NO: 1961058 - DNA, 15 bp, Homo sapiens
tttgggagaccaagg

SEQ ID NO: 1961059 - DNA, 15 bp, Homo sapiens
ttgggagaccaaggc

SEQ ID NO: 1961060 - DNA, 15 bp, Homo sapiens
tgggagaccaaggcg

SEQ ID NO: 1961061 - DNA, 15 bp, Homo sapiens
gggagaccaaggcgg

SEQ ID NO: 1961062 - DNA, 15 bp, Homo sapiens
ggagaccaaggcggg

SEQ ID NO: 1961063 - DNA, 15 bp, Homo sapiens
gagaccaaggcgggt

SEQ ID NO: 1961064 - DNA, 15 bp, Homo sapiens
agaccaaggcgggtg

SEQ ID NO: 1961065 - DNA, 15 bp, Homo sapiens
gaccaaggcgggtgg

SEQ ID NO: 1961066 - DNA, 15 bp, Homo sapiens
accaaggcgggtggg

SEQ ID NO: 1961067 - DNA, 15 bp, Homo sapiens
ccaaggcgggtgggt

SEQ ID NO: 1961068 - DNA, 15 bp, Homo sapiens
caaggcgggtgggtc

SEQ ID NO: 1961069 - DNA, 15 bp, Homo sapiens
aaggcgggtgggtca

SEQ ID NO: 1961070 - DNA, 15 bp, Homo sapiens
aggcgggtgggtcac

SEQ ID NO: 1961071 - DNA, 15 bp, Homo sapiens
ggcgggtgggtcact

SEQ ID NO: 1961072 - DNA, 15 bp, Homo sapiens
gcgggtgggtcactt

SEQ ID NO: 1961073 - DNA, 15 bp, Homo sapiens
cgggtgggtcacttg

SEQ ID NO: 1961074 - DNA, 15 bp, Homo sapiens
gggtgggtcacttga

SEQ ID NO: 1961075 - DNA, 15 bp, Homo sapiens
ggtgggtcacttgag

SEQ ID NO: 1961076 - DNA, 15 bp, Homo sapiens
gtgggtcacttgagc

SEQ ID NO: 1961077 - DNA, 15 bp, Homo sapiens
tgggtcacttgagcc

SEQ ID NO: 1961078 - DNA, 15 bp, Homo sapiens
gggtcacttgagccc

SEQ ID NO: 1961079 - DNA, 15 bp, Homo sapiens
ggtcacttgagccca

SEQ ID NO: 1961080 - DNA, 15 bp, Homo sapiens
gtcacttgagcccag

SEQ ID NO: 1961081 - DNA, 15 bp, Homo sapiens
cccaggagttcaaga

SEQ ID NO: 1961082 - DNA, 15 bp, Homo sapiens
gagttcaagaccagt

SEQ ID NO: 1961083 - DNA, 15 bp, Homo sapiens
agttcaagaccagtc

SEQ ID NO: 1961084 - DNA, 15 bp, Homo sapiens
gttcaagaccagtct

SEQ ID NO: 1961085 - DNA, 15 bp, Homo sapiens
ttcaagaccagtctg

SEQ ID NO: 1961086 - DNA, 15 bp, Homo sapiens
tcaagaccagtctgg

SEQ ID NO: 1961087 - DNA, 15 bp, Homo sapiens
caagaccagtctggc

SEQ ID NO: 1961088 - DNA, 15 bp, Homo sapiens
aagaccagtctggcc

SEQ ID NO: 1961089 - DNA, 15 bp, Homo sapiens
agaccagtctggcca

SEQ ID NO: 1961090 - DNA, 15 bp, Homo sapiens
gaccagtctggccaa

SEQ ID NO: 1961091 - DNA, 15 bp, Homo sapiens
accagtctggccaac

SEQ ID NO: 1961092 - DNA, 15 bp, Homo sapiens
ccagtctggccaaca

SEQ ID NO: 1961093 - DNA, 15 bp, Homo sapiens
catggtgaaactcca

SEQ ID NO: 1961094 - DNA, 15 bp, Homo sapiens
catctctactaaaag

SEQ ID NO: 1961095 - DNA, 15 bp, Homo sapiens
atctctactaaaagt

SEQ ID NO: 1961096 - DNA, 15 bp, Homo sapiens
aagtacaaaaattat

SEQ ID NO: 1961097 - DNA, 15 bp, Homo sapiens
agtacaaaaattatc

SEQ ID NO: 1961098 - DNA, 15 bp, Homo sapiens
gtacaaaaattatct

SEQ ID NO: 1961099 - DNA, 15 bp, Homo sapiens
tacaaaaattatctg

SEQ ID NO: 1961100 - DNA, 15 bp, Homo sapiens
acaaaaattatctgg

SEQ ID NO: 1961101 - DNA, 15 bp, Homo sapiens
caaaaattatctggg

SEQ ID NO: 1961102 - DNA, 15 bp, Homo sapiens
aaaaattatctgggc

SEQ ID NO: 1961103 - DNA, 15 bp, Homo sapiens
aaaattatctgggca

SEQ ID NO: 1961104 - DNA, 15 bp, Homo sapiens
aaattatctgggcat

SEQ ID NO: 1961105 - DNA, 15 bp, Homo sapiens
aattatctgggcatg

SEQ ID NO: 1961106 - DNA, 15 bp, Homo sapiens
attatctgggcatgg

SEQ ID NO: 1961107 - DNA, 15 bp, Homo sapiens
ttatctgggcatggt

SEQ ID NO: 1961108 - DNA, 15 bp, Homo sapiens
tatctgggcatggtg

SEQ ID NO: 1961109 - DNA, 15 bp, Homo sapiens
atctgggcatggtgg

SEQ ID NO: 1961110 - DNA, 15 bp, Homo sapiens
tctgggcatggtgga

SEQ ID NO: 1961111 - DNA, 15 bp, Homo sapiens
ctgggcatggtggag

SEQ ID NO: 1961112 - DNA, 15 bp, Homo sapiens
tgggcatggtggagg

SEQ ID NO: 1961113 - DNA, 15 bp, Homo sapiens
gggcatggtggaggg

SEQ ID NO: 1961114 - DNA, 15 bp, Homo sapiens
ggcatggtggagggc

SEQ ID NO: 1961115 - DNA, 15 bp, Homo sapiens
gcatggtggagggcg

SEQ ID NO: 1961116 - DNA, 15 bp, Homo sapiens
catggtggagggcgc

SEQ ID NO: 1961117 - DNA, 15 bp, Homo sapiens
atggtggagggcgct

SEQ ID NO: 1961118 - DNA, 15 bp, Homo sapiens
tggtggagggcgctg

SEQ ID NO: 1961119 - DNA, 15 bp, Homo sapiens
ggtggagggcgctgg

SEQ ID NO: 1961120 - DNA, 15 bp, Homo sapiens
gtggagggcgctggc

SEQ ID NO: 1961121 - DNA, 15 bp, Homo sapiens
tggagggcgctggct

SEQ ID NO: 1961122 - DNA, 15 bp, Homo sapiens
ggagggcgctggctg

SEQ ID NO: 1961123 - DNA, 15 bp, Homo sapiens
gagggcgctggctga

SEQ ID NO: 1961124 - DNA, 15 bp, Homo sapiens
agggcgctggctgat

SEQ ID NO: 1961125 - DNA, 15 bp, Homo sapiens
gggcgctggctgatt

SEQ ID NO: 1961126 - DNA, 15 bp, Homo sapiens
ggcgctggctgatta

SEQ ID NO: 1961127 - DNA, 15 bp, Homo sapiens
gcgctggctgattac

SEQ ID NO: 1961128 - DNA, 15 bp, Homo sapiens
cgctggctgattaca

SEQ ID NO: 1961129 - DNA, 15 bp, Homo sapiens
gctggctgattacac

SEQ ID NO: 1961130 - DNA, 15 bp, Homo sapiens
ctggctgattacacg

SEQ ID NO: 1961131 - DNA, 15 bp, Homo sapiens
tggctgattacacgg

SEQ ID NO: 1961132 - DNA, 15 bp, Homo sapiens
ggctgattacacggt

SEQ ID NO: 1961133 - DNA, 15 bp, Homo sapiens
gctgattacacggtc

SEQ ID NO: 1961134 - DNA, 15 bp, Homo sapiens
ctgattacacggtca

SEQ ID NO: 1961135 - DNA, 15 bp, Homo sapiens
tgattacacggtcag

SEQ ID NO: 1961136 - DNA, 15 bp, Homo sapiens
gattacacggtcagg

SEQ ID NO: 1961137 - DNA, 15 bp, Homo sapiens
attacacggtcagga

SEQ ID NO: 1961138 - DNA, 15 bp, Homo sapiens
ttacacggtcaggag

SEQ ID NO: 1961139 - DNA, 15 bp, Homo sapiens
tacacggtcaggagt

SEQ ID NO: 1961140 - DNA, 15 bp, Homo sapiens
acacggtcaggagtt

SEQ ID NO: 1961141 - DNA, 15 bp, Homo sapiens
cacggtcaggagttt

SEQ ID NO: 1961142 - DNA, 15 bp, Homo sapiens
acggtcaggagtttg

SEQ ID NO: 1961143 - DNA, 15 bp, Homo sapiens
cggtcaggagtttga

SEQ ID NO: 1961144 - DNA, 15 bp, Homo sapiens
agtttgagaacagcc

SEQ ID NO: 1961145 - DNA, 15 bp, Homo sapiens
gtttgagaacagcct

SEQ ID NO: 1961146 - DNA, 15 bp, Homo sapiens
tttgagaacagcctg

SEQ ID NO: 1961147 - DNA, 15 bp, Homo sapiens
tgagaacagcctggc

SEQ ID NO: 1961148 - DNA, 15 bp, Homo sapiens
gagaacagcctggcc

SEQ ID NO: 1961149 - DNA, 15 bp, Homo sapiens
agaacagcctggcca

SEQ ID NO: 1961150 - DNA, 15 bp, Homo sapiens
gaacagcctggccaa

SEQ ID NO: 1961151 - DNA, 15 bp, Homo sapiens
aacagcctggccaac

SEQ ID NO: 1961152 - DNA, 15 bp, Homo sapiens
acagcctggccaaca

SEQ ID NO: 1961153 - DNA, 15 bp, Homo sapiens
tggccaacatggtgg

SEQ ID NO: 1961154 - DNA, 15 bp, Homo sapiens
ggccaacatggtgga

SEQ ID NO: 1961155 - DNA, 15 bp, Homo sapiens
gccaacatggtggaa

SEQ ID NO: 1961156 - DNA, 15 bp, Homo sapiens
ccaacatggtggaac

SEQ ID NO: 1961157 - DNA, 15 bp, Homo sapiens
caacatggtggaacc

SEQ ID NO: 1961158 - DNA, 15 bp, Homo sapiens
aacatggtggaaccc

SEQ ID NO: 1961159 - DNA, 15 bp, Homo sapiens
acatggtggaacccc

SEQ ID NO: 1961160 - DNA, 15 bp, Homo sapiens
catggtggaacccca

SEQ ID NO: 1961161 - DNA, 15 bp, Homo sapiens
atggtggaaccccat

SEQ ID NO: 1961162 - DNA, 15 bp, Homo sapiens
tggtggaaccccatc

SEQ ID NO: 1961163 - DNA, 15 bp, Homo sapiens
ggtggaaccccatct

SEQ ID NO: 1961164 - DNA, 15 bp, Homo sapiens
gtggaaccccatctc

SEQ ID NO: 1961165 - DNA, 15 bp, Homo sapiens
tggaaccccatctct

SEQ ID NO: 1961166 - DNA, 15 bp, Homo sapiens
ggaaccccatctcta

SEQ ID NO: 1961167 - DNA, 15 bp, Homo sapiens
gaaccccatctctac

SEQ ID NO: 1961168 - DNA, 15 bp, Homo sapiens
cgggtgtggtggcgg

SEQ ID NO: 1961169 - DNA, 15 bp, Homo sapiens
gtgtggtggcgggca

SEQ ID NO: 1961170 - DNA, 15 bp, Homo sapiens
tgtggtggcgggcac

SEQ ID NO: 1961171 - DNA, 15 bp, Homo sapiens
gtggtggcgggcacc

SEQ ID NO: 1961172 - DNA, 15 bp, Homo sapiens
aggaggctgaggcat

SEQ ID NO: 1961173 - DNA, 15 bp, Homo sapiens
ggaggctgaggcatg

SEQ ID NO: 1961174 - DNA, 15 bp, Homo sapiens
gaggctgaggcatga

SEQ ID NO: 1961175 - DNA, 15 bp, Homo sapiens
aggctgaggcatgag

SEQ ID NO: 1961176 - DNA, 15 bp, Homo sapiens
ggctgaggcatgaga

SEQ ID NO: 1961177 - DNA, 15 bp, Homo sapiens
gctgaggcatgagaa

SEQ ID NO: 1961178 - DNA, 15 bp, Homo sapiens
ctgaggcatgagaat

SEQ ID NO: 1961179 - DNA, 15 bp, Homo sapiens
tgaggcatgagaatc

SEQ ID NO: 1961180 - DNA, 15 bp, Homo sapiens
gaggcatgagaatcg

SEQ ID NO: 1961181 - DNA, 15 bp, Homo sapiens
aggcatgagaatcgc

SEQ ID NO: 1961182 - DNA, 15 bp, Homo sapiens
ggcatgagaatcgct

SEQ ID NO: 1961183 - DNA, 15 bp, Homo sapiens
gcatgagaatcgctt

SEQ ID NO: 1961184 - DNA, 15 bp, Homo sapiens
catgagaatcgcttg

SEQ ID NO: 1961185 - DNA, 15 bp, Homo sapiens
atgagaatcgcttga

SEQ ID NO: 1961186 - DNA, 15 bp, Homo sapiens
tgagaatcgcttgaa

SEQ ID NO: 1961187 - DNA, 15 bp, Homo sapiens
gagaatcgcttgaaa

SEQ ID NO: 1961188 - DNA, 15 bp, Homo sapiens
agaatcgcttgaaac

SEQ ID NO: 1961189 - DNA, 15 bp, Homo sapiens
tcgcttgaaaccagg

SEQ ID NO: 1961190 - DNA, 15 bp, Homo sapiens
cgcttgaaaccagga

SEQ ID NO: 1961191 - DNA, 15 bp, Homo sapiens
gcttgaaaccaggag

SEQ ID NO: 1961192 - DNA, 15 bp, Homo sapiens
cttgaaaccaggagg

SEQ ID NO: 1961193 - DNA, 15 bp, Homo sapiens
ttgaaaccaggaggc

SEQ ID NO: 1961194 - DNA, 15 bp, Homo sapiens
tgaaaccaggaggca

SEQ ID NO: 1961195 - DNA, 15 bp, Homo sapiens
gaaaccaggaggcag

SEQ ID NO: 1961196 - DNA, 15 bp, Homo sapiens
aaaccaggaggcaga

SEQ ID NO: 1961197 - DNA, 15 bp, Homo sapiens
cagaggttgcagtgt

SEQ ID NO: 1961198 - DNA, 15 bp, Homo sapiens
agaggttgcagtgtg

SEQ ID NO: 1961199 - DNA, 15 bp, Homo sapiens
gaggttgcagtgtgc

SEQ ID NO: 1961200 - DNA, 15 bp, Homo sapiens
aggttgcagtgtgcc

SEQ ID NO: 1961201 - DNA, 15 bp, Homo sapiens
ggttgcagtgtgccg

SEQ ID NO: 1961202 - DNA, 15 bp, Homo sapiens
gttgcagtgtgccga

SEQ ID NO: 1961203 - DNA, 15 bp, Homo sapiens
ttgcagtgtgccgag

SEQ ID NO: 1961204 - DNA, 15 bp, Homo sapiens
tgcagtgtgccgaga

SEQ ID NO: 1961205 - DNA, 15 bp, Homo sapiens
gcagtgtgccgagat

SEQ ID NO: 1961206 - DNA, 15 bp, Homo sapiens
cagtgtgccgagatt

SEQ ID NO: 1961207 - DNA, 15 bp, Homo sapiens
agtgtgccgagatta

SEQ ID NO: 1961208 - DNA, 15 bp, Homo sapiens
gtgtgccgagattac

SEQ ID NO: 1961209 - DNA, 15 bp, Homo sapiens
tgtgccgagattaca

SEQ ID NO: 1961210 - DNA, 15 bp, Homo sapiens
gtgccgagattacac

SEQ ID NO: 1961211 - DNA, 15 bp, Homo sapiens
tgccgagattacacc

SEQ ID NO: 1961212 - DNA, 15 bp, Homo sapiens
gccgagattacacca

SEQ ID NO: 1961213 - DNA, 15 bp, Homo sapiens
ccgagattacaccac

SEQ ID NO: 1961214 - DNA, 15 bp, Homo sapiens
cgagattacaccact

SEQ ID NO: 1961215 - DNA, 15 bp, Homo sapiens
gagattacaccactg

SEQ ID NO: 1961216 - DNA, 15 bp, Homo sapiens
agattacaccactgc

SEQ ID NO: 1961217 - DNA, 15 bp, Homo sapiens
gattacaccactgca

SEQ ID NO: 1961218 - DNA, 15 bp, Homo sapiens
attacaccactgcac

SEQ ID NO: 1961219 - DNA, 15 bp, Homo sapiens
ttacaccactgcact

SEQ ID NO: 1961220 - DNA, 15 bp, Homo sapiens
tacaccactgcactc

SEQ ID NO: 1961221 - DNA, 15 bp, Homo sapiens
ctctgtctcaaaaac

SEQ ID NO: 1961222 - DNA, 15 bp, Homo sapiens
tctgtctcaaaaaca

SEQ ID NO: 1961223 - DNA, 15 bp, Homo sapiens
ctgtctcaaaaacaa

SEQ ID NO: 1961224 - DNA, 15 bp, Homo sapiens
tgtctcaaaaacaaa

SEQ ID NO: 1961225 - DNA, 15 bp, Homo sapiens
gtctcaaaaacaaat

SEQ ID NO: 1961226 - DNA, 15 bp, Homo sapiens
tctcaaaaacaaatt

SEQ ID NO: 1961227 - DNA, 15 bp, Homo sapiens
ctcaaaaacaaattt

SEQ ID NO: 1961228 - DNA, 15 bp, Homo sapiens
tcaaaaacaaatttg

SEQ ID NO: 1961229 - DNA, 15 bp, Homo sapiens
caaaaacaaatttgg

SEQ ID NO: 1961230 - DNA, 15 bp, Homo sapiens
aaaaacaaatttggg

SEQ ID NO: 1961231 - DNA, 15 bp, Homo sapiens
aaaacaaatttggga

SEQ ID NO: 1961232 - DNA, 15 bp, Homo sapiens
aaacaaatttgggaa

SEQ ID NO: 1961233 - DNA, 15 bp, Homo sapiens
aacaaatttgggaag

SEQ ID NO: 1961234 - DNA, 15 bp, Homo sapiens
acaaatttgggaagg

SEQ ID NO: 1961235 - DNA, 15 bp, Homo sapiens
caaatttgggaaggg

SEQ ID NO: 1961236 - DNA, 15 bp, Homo sapiens
aaatttgggaagggc

SEQ ID NO: 1961237 - DNA, 15 bp, Homo sapiens
aatttgggaagggca

SEQ ID NO: 1961238 - DNA, 15 bp, Homo sapiens
atttgggaagggcaa

SEQ ID NO: 1961239 - DNA, 15 bp, Homo sapiens
tttgggaagggcaat

SEQ ID NO: 1961240 - DNA, 15 bp, Homo sapiens
ttgggaagggcaatt

SEQ ID NO: 1961241 - DNA, 15 bp, Homo sapiens
tgggaagggcaatta

SEQ ID NO: 1961242 - DNA, 15 bp, Homo sapiens
gggaagggcaattaa

SEQ ID NO: 1961243 - DNA, 15 bp, Homo sapiens
ggaagggcaattaat

SEQ ID NO: 1961244 - DNA, 15 bp, Homo sapiens
gaagggcaattaata

SEQ ID NO: 1961245 - DNA, 15 bp, Homo sapiens
aagggcaattaatat

SEQ ID NO: 1961246 - DNA, 15 bp, Homo sapiens
agggcaattaatatt

SEQ ID NO: 1961247 - DNA, 15 bp, Homo sapiens
gggcaattaatatta

SEQ ID NO: 1961248 - DNA, 15 bp, Homo sapiens
ggcaattaatattaa

SEQ ID NO: 1961249 - DNA, 15 bp, Homo sapiens
gcaattaatattaat

SEQ ID NO: 1961250 - DNA, 15 bp, Homo sapiens
caattaatattaatg

SEQ ID NO: 1961251 - DNA, 15 bp, Homo sapiens
aattaatattaatgt

SEQ ID NO: 1961252 - DNA, 15 bp, Homo sapiens
attaatattaatgtc

SEQ ID NO: 1961253 - DNA, 15 bp, Homo sapiens
ttaatattaatgtca

SEQ ID NO: 1961254 - DNA, 15 bp, Homo sapiens
taatattaatgtcat

SEQ ID NO: 1961255 - DNA, 15 bp, Homo sapiens
aatattaatgtcatc

SEQ ID NO: 1961256 - DNA, 15 bp, Homo sapiens
atattaatgtcatca

SEQ ID NO: 1961257 - DNA, 15 bp, Homo sapiens
tattaatgtcatcat

SEQ ID NO: 1961258 - DNA, 15 bp, Homo sapiens
attaatgtcatcatt

SEQ ID NO: 1961259 - DNA, 15 bp, Homo sapiens
ttaatgtcatcattc

SEQ ID NO: 1961260 - DNA, 15 bp, Homo sapiens
taatgtcatcattcc

SEQ ID NO: 1961261 - DNA, 15 bp, Homo sapiens
aatgtcatcattccc

SEQ ID NO: 1961262 - DNA, 15 bp, Homo sapiens
atgtcatcattccca

SEQ ID NO: 1961263 - DNA, 15 bp, Homo sapiens
tgtcatcattcccag

SEQ ID NO: 1961264 - DNA, 15 bp, Homo sapiens
gtcatcattcccagg

SEQ ID NO: 1961265 - DNA, 15 bp, Homo sapiens
tcatcattcccagga

SEQ ID NO: 1961266 - DNA, 15 bp, Homo sapiens
catcattcccaggac

SEQ ID NO: 1961267 - DNA, 15 bp, Homo sapiens
atcattcccaggact

SEQ ID NO: 1961268 - DNA, 15 bp, Homo sapiens
tcattcccaggactg

SEQ ID NO: 1961269 - DNA, 15 bp, Homo sapiens
cattcccaggactgg

SEQ ID NO: 1961270 - DNA, 15 bp, Homo sapiens
attcccaggactggg

SEQ ID NO: 1961271 - DNA, 15 bp, Homo sapiens
ttcccaggactggga

SEQ ID NO: 1961272 - DNA, 15 bp, Homo sapiens
tcccaggactgggaa

SEQ ID NO: 1961273 - DNA, 15 bp, Homo sapiens
cccaggactgggaat

SEQ ID NO: 1961274 - DNA, 15 bp, Homo sapiens
ccaggactgggaatt

SEQ ID NO: 1961275 - DNA, 15 bp, Homo sapiens
caggactgggaattg

SEQ ID NO: 1961276 - DNA, 15 bp, Homo sapiens
aggactgggaattga

SEQ ID NO: 1961277 - DNA, 15 bp, Homo sapiens
ggactgggaattgac

SEQ ID NO: 1961278 - DNA, 15 bp, Homo sapiens
gactgggaattgaca

SEQ ID NO: 1961279 - DNA, 15 bp, Homo sapiens
actgggaattgacaa

SEQ ID NO: 1961280 - DNA, 15 bp, Homo sapiens
ctgggaattgacaac

SEQ ID NO: 1961281 - DNA, 15 bp, Homo sapiens
tgggaattgacaact

SEQ ID NO: 1961282 - DNA, 15 bp, Homo sapiens
gggaattgacaactg

SEQ ID NO: 1961283 - DNA, 15 bp, Homo sapiens
ggaattgacaactga

SEQ ID NO: 1961284 - DNA, 15 bp, Homo sapiens
gaattgacaactgag

SEQ ID NO: 1961285 - DNA, 15 bp, Homo sapiens
aattgacaactgagc

SEQ ID NO: 1961286 - DNA, 15 bp, Homo sapiens
attgacaactgagct

SEQ ID NO: 1961287 - DNA, 15 bp, Homo sapiens
ttgacaactgagctc

SEQ ID NO: 1961288 - DNA, 15 bp, Homo sapiens
tgacaactgagctca

SEQ ID NO: 1961289 - DNA, 15 bp, Homo sapiens
gacaactgagctcag

SEQ ID NO: 1961290 - DNA, 15 bp, Homo sapiens
acaactgagctcaga

SEQ ID NO: 1961291 - DNA, 15 bp, Homo sapiens
caactgagctcagaa

SEQ ID NO: 1961292 - DNA, 15 bp, Homo sapiens
aactgagctcagaaa

SEQ ID NO: 1961293 - DNA, 15 bp, Homo sapiens
actgagctcagaaat

SEQ ID NO: 1961294 - DNA, 15 bp, Homo sapiens
ctgagctcagaaata

SEQ ID NO: 1961295 - DNA, 15 bp, Homo sapiens
tgagctcagaaatat

SEQ ID NO: 1961296 - DNA, 15 bp, Homo sapiens
gagctcagaaatatg

SEQ ID NO: 1961297 - DNA, 15 bp, Homo sapiens
agctcagaaatatgg

SEQ ID NO: 1961298 - DNA, 15 bp, Homo sapiens
gctcagaaatatgga

SEQ ID NO: 1961299 - DNA, 15 bp, Homo sapiens
ctcagaaatatggaa

SEQ ID NO: 1961300 - DNA, 15 bp, Homo sapiens
tcagaaatatggaaa

SEQ ID NO: 1961301 - DNA, 15 bp, Homo sapiens
cagaaatatggaaac

SEQ ID NO: 1961302 - DNA, 15 bp, Homo sapiens
agaaatatggaaact

SEQ ID NO: 1961303 - DNA, 15 bp, Homo sapiens
gaaatatggaaactg

SEQ ID NO: 1961304 - DNA, 15 bp, Homo sapiens
aaatatggaaactgt

SEQ ID NO: 1961305 - DNA, 15 bp, Homo sapiens
aatatggaaactgtg

SEQ ID NO: 1961306 - DNA, 15 bp, Homo sapiens
atatggaaactgtgg

SEQ ID NO: 1961307 - DNA, 15 bp, Homo sapiens
tatggaaactgtggc

SEQ ID NO: 1961308 - DNA, 15 bp, Homo sapiens
atggaaactgtggca

SEQ ID NO: 1961309 - DNA, 15 bp, Homo sapiens
tggaaactgtggcag

SEQ ID NO: 1961310 - DNA, 15 bp, Homo sapiens
ggaaactgtggcagg

SEQ ID NO: 1961311 - DNA, 15 bp, Homo sapiens
gaaactgtggcaggg

SEQ ID NO: 1961312 - DNA, 15 bp, Homo sapiens
aaactgtggcagggc

SEQ ID NO: 1961313 - DNA, 15 bp, Homo sapiens
aactgtggcagggcg

SEQ ID NO: 1961314 - DNA, 15 bp, Homo sapiens
actgtggcagggcgc

SEQ ID NO: 1961315 - DNA, 15 bp, Homo sapiens
ctgtggcagggcgcg

SEQ ID NO: 1961316 - DNA, 15 bp, Homo sapiens
tgtggcagggcgcgg

SEQ ID NO: 1961317 - DNA, 15 bp, Homo sapiens
gtggcagggcgcggt

SEQ ID NO: 1961318 - DNA, 15 bp, Homo sapiens
ggcagggcgcggtga

SEQ ID NO: 1961319 - DNA, 15 bp, Homo sapiens
gcagggcgcggtgac

SEQ ID NO: 1961320 - DNA, 15 bp, Homo sapiens
cagggcgcggtgaca

SEQ ID NO: 1961321 - DNA, 15 bp, Homo sapiens
agggcgcggtgacac

SEQ ID NO: 1961322 - DNA, 15 bp, Homo sapiens
gggcgcggtgacaca

SEQ ID NO: 1961323 - DNA, 15 bp, Homo sapiens
ggcgcggtgacacac

SEQ ID NO: 1961324 - DNA, 15 bp, Homo sapiens
gcgcggtgacacaca

SEQ ID NO: 1961325 - DNA, 15 bp, Homo sapiens
cgcggtgacacacac

SEQ ID NO: 1961326 - DNA, 15 bp, Homo sapiens
gcggtgacacacacc

SEQ ID NO: 1961327 - DNA, 15 bp, Homo sapiens
cggtgacacacacct

SEQ ID NO: 1961328 - DNA, 15 bp, Homo sapiens
ggtgacacacacctg

SEQ ID NO: 1961329 - DNA, 15 bp, Homo sapiens
gtgacacacacctgt

SEQ ID NO: 1961330 - DNA, 15 bp, Homo sapiens
tgacacacacctgta

SEQ ID NO: 1961331 - DNA, 15 bp, Homo sapiens
gacacacacctgtag

SEQ ID NO: 1961332 - DNA, 15 bp, Homo sapiens
acacacacctgtagt

SEQ ID NO: 1961333 - DNA, 15 bp, Homo sapiens
cacacacctgtagtc

SEQ ID NO: 1961334 - DNA, 15 bp, Homo sapiens
acacacctgtagtcc

SEQ ID NO: 1961335 - DNA, 15 bp, Homo sapiens
cacacctgtagtccc

SEQ ID NO: 1961336 - DNA, 15 bp, Homo sapiens
cctgtagtcccagca

SEQ ID NO: 1961337 - DNA, 15 bp, Homo sapiens
ctgtagtcccagcat

SEQ ID NO: 1961338 - DNA, 15 bp, Homo sapiens
tgtagtcccagcatt

SEQ ID NO: 1961339 - DNA, 15 bp, Homo sapiens
gtagtcccagcattt

SEQ ID NO: 1961340 - DNA, 15 bp, Homo sapiens
tagtcccagcatttt

SEQ ID NO: 1961341 - DNA, 15 bp, Homo sapiens
agtcccagcattttg

SEQ ID NO: 1961342 - DNA, 15 bp, Homo sapiens
gtcccagcattttgg

SEQ ID NO: 1961343 - DNA, 15 bp, Homo sapiens
tcccagcattttgga

SEQ ID NO: 1961344 - DNA, 15 bp, Homo sapiens
cccagcattttggaa

SEQ ID NO: 1961345 - DNA, 15 bp, Homo sapiens
ccagcattttggaag

SEQ ID NO: 1961346 - DNA, 15 bp, Homo sapiens
cagcattttggaaga

SEQ ID NO: 1961347 - DNA, 15 bp, Homo sapiens
agcattttggaagac

SEQ ID NO: 1961348 - DNA, 15 bp, Homo sapiens
gcattttggaagacc

SEQ ID NO: 1961349 - DNA, 15 bp, Homo sapiens
cattttggaagaccg

SEQ ID NO: 1961350 - DNA, 15 bp, Homo sapiens
attttggaagaccga

SEQ ID NO: 1961351 - DNA, 15 bp, Homo sapiens
ttttggaagaccgag

SEQ ID NO: 1961352 - DNA, 15 bp, Homo sapiens
tttggaagaccgagg

SEQ ID NO: 1961353 - DNA, 15 bp, Homo sapiens
ttggaagaccgaggt

SEQ ID NO: 1961354 - DNA, 15 bp, Homo sapiens
tggaagaccgaggtg

SEQ ID NO: 1961355 - DNA, 15 bp, Homo sapiens
ggaagaccgaggtgg

SEQ ID NO: 1961356 - DNA, 15 bp, Homo sapiens
gaagaccgaggtggg

SEQ ID NO: 1961357 - DNA, 15 bp, Homo sapiens
aagaccgaggtgggc

SEQ ID NO: 1961358 - DNA, 15 bp, Homo sapiens
agaccgaggtgggcg

SEQ ID NO: 1961359 - DNA, 15 bp, Homo sapiens
gaccgaggtgggcgg

SEQ ID NO: 1961360 - DNA, 15 bp, Homo sapiens
accgaggtgggcgga

SEQ ID NO: 1961361 - DNA, 15 bp, Homo sapiens
ccgaggtgggcggat

SEQ ID NO: 1961362 - DNA, 15 bp, Homo sapiens
cgaggtgggcggatt

SEQ ID NO: 1961363 - DNA, 15 bp, Homo sapiens
gaggtgggcggattg

SEQ ID NO: 1961364 - DNA, 15 bp, Homo sapiens
aggtgggcggattgc

SEQ ID NO: 1961365 - DNA, 15 bp, Homo sapiens
ggtgggcggattgct

SEQ ID NO: 1961366 - DNA, 15 bp, Homo sapiens
gtgggcggattgctt

SEQ ID NO: 1961367 - DNA, 15 bp, Homo sapiens
tgggcggattgcttg

SEQ ID NO: 1961368 - DNA, 15 bp, Homo sapiens
gggcggattgcttga

SEQ ID NO: 1961369 - DNA, 15 bp, Homo sapiens
ggcggattgcttgag

SEQ ID NO: 1961370 - DNA, 15 bp, Homo sapiens
gcggattgcttgaga

SEQ ID NO: 1961371 - DNA, 15 bp, Homo sapiens
cggattgcttgagat

SEQ ID NO: 1961372 - DNA, 15 bp, Homo sapiens
ggattgcttgagatc

SEQ ID NO: 1961373 - DNA, 15 bp, Homo sapiens
gattgcttgagatca

SEQ ID NO: 1961374 - DNA, 15 bp, Homo sapiens
attgcttgagatcag

SEQ ID NO: 1961375 - DNA, 15 bp, Homo sapiens
ttgcttgagatcagg

SEQ ID NO: 1961376 - DNA, 15 bp, Homo sapiens
tgcttgagatcagga

SEQ ID NO: 1961377 - DNA, 15 bp, Homo sapiens
gcttgagatcaggag

SEQ ID NO: 1961378 - DNA, 15 bp, Homo sapiens
cttgagatcaggagt

SEQ ID NO: 1961379 - DNA, 15 bp, Homo sapiens
ttgagatcaggagtt

SEQ ID NO: 1961380 - DNA, 15 bp, Homo sapiens
tgagatcaggagttt

SEQ ID NO: 1961381 - DNA, 15 bp, Homo sapiens
gagatcaggagtttg

SEQ ID NO: 1961382 - DNA, 15 bp, Homo sapiens
agatcaggagtttga

SEQ ID NO: 1961383 - DNA, 15 bp, Homo sapiens
gatcaggagtttgag

SEQ ID NO: 1961384 - DNA, 15 bp, Homo sapiens
atcaggagtttgaga

SEQ ID NO: 1961385 - DNA, 15 bp, Homo sapiens
tgagaccagcctggt

SEQ ID NO: 1961386 - DNA, 15 bp, Homo sapiens
accagcctggtcaat

SEQ ID NO: 1961387 - DNA, 15 bp, Homo sapiens
ccagcctggtcaata

SEQ ID NO: 1961388 - DNA, 15 bp, Homo sapiens
cagcctggtcaatat

SEQ ID NO: 1961389 - DNA, 15 bp, Homo sapiens
agcctggtcaatatg

SEQ ID NO: 1961390 - DNA, 15 bp, Homo sapiens
gcctggtcaatatgg

SEQ ID NO: 1961391 - DNA, 15 bp, Homo sapiens
cctggtcaatatggt

SEQ ID NO: 1961392 - DNA, 15 bp, Homo sapiens
ctggtcaatatggtg

SEQ ID NO: 1961393 - DNA, 15 bp, Homo sapiens
tggtcaatatggtga

SEQ ID NO: 1961394 - DNA, 15 bp, Homo sapiens
ggtcaatatggtgaa

SEQ ID NO: 1961395 - DNA, 15 bp, Homo sapiens
gtcaatatggtgaaa

SEQ ID NO: 1961396 - DNA, 15 bp, Homo sapiens
tcaatatggtgaaac

SEQ ID NO: 1961397 - DNA, 15 bp, Homo sapiens
tatggtgaaacccct

SEQ ID NO: 1961398 - DNA, 15 bp, Homo sapiens
atggtgaaacccctc

SEQ ID NO: 1961399 - DNA, 15 bp, Homo sapiens
tggtgaaacccctct

SEQ ID NO: 1961400 - DNA, 15 bp, Homo sapiens
ggtgaaacccctctt

SEQ ID NO: 1961401 - DNA, 15 bp, Homo sapiens
gtgaaacccctcttt

SEQ ID NO: 1961402 - DNA, 15 bp, Homo sapiens
tgaaacccctcttta

SEQ ID NO: 1961403 - DNA, 15 bp, Homo sapiens
gaaacccctctttat

SEQ ID NO: 1961404 - DNA, 15 bp, Homo sapiens
aaacccctctttatt

SEQ ID NO: 1961405 - DNA, 15 bp, Homo sapiens
aacccctctttatta

SEQ ID NO: 1961406 - DNA, 15 bp, Homo sapiens
acccctctttattaa

SEQ ID NO: 1961407 - DNA, 15 bp, Homo sapiens
cccctctttattaaa

SEQ ID NO: 1961408 - DNA, 15 bp, Homo sapiens
ccctctttattaaaa

SEQ ID NO: 1961409 - DNA, 15 bp, Homo sapiens
cctctttattaaaaa

SEQ ID NO: 1961410 - DNA, 15 bp, Homo sapiens
ctctttattaaaaaa

SEQ ID NO: 1961411 - DNA, 15 bp, Homo sapiens
tctttattaaaaaat

SEQ ID NO: 1961412 - DNA, 15 bp, Homo sapiens
ctttattaaaaaatt

SEQ ID NO: 1961413 - DNA, 15 bp, Homo sapiens
tttattaaaaaatta

SEQ ID NO: 1961414 - DNA, 15 bp, Homo sapiens
ttattaaaaaattag

SEQ ID NO: 1961415 - DNA, 15 bp, Homo sapiens
tattaaaaaattagc

SEQ ID NO: 1961416 - DNA, 15 bp, Homo sapiens
attaaaaaattagcc

SEQ ID NO: 1961417 - DNA, 15 bp, Homo sapiens
ttaaaaaattagccg

SEQ ID NO: 1961418 - DNA, 15 bp, Homo sapiens
taaaaaattagccgg

SEQ ID NO: 1961419 - DNA, 15 bp, Homo sapiens
aaaattagccgggta

SEQ ID NO: 1961420 - DNA, 15 bp, Homo sapiens
aaattagccgggtat

SEQ ID NO: 1961421 - DNA, 15 bp, Homo sapiens
aattagccgggtatg

SEQ ID NO: 1961422 - DNA, 15 bp, Homo sapiens
attagccgggtatgg

SEQ ID NO: 1961423 - DNA, 15 bp, Homo sapiens
ttagccgggtatggt

SEQ ID NO: 1961424 - DNA, 15 bp, Homo sapiens
tagccgggtatggtt

SEQ ID NO: 1961425 - DNA, 15 bp, Homo sapiens
agccgggtatggttg

SEQ ID NO: 1961426 - DNA, 15 bp, Homo sapiens
gccgggtatggttgt

SEQ ID NO: 1961427 - DNA, 15 bp, Homo sapiens
ccgggtatggttgtg

SEQ ID NO: 1961428 - DNA, 15 bp, Homo sapiens
cgggtatggttgtgc

SEQ ID NO: 1961429 - DNA, 15 bp, Homo sapiens
gggtatggttgtgca

SEQ ID NO: 1961430 - DNA, 15 bp, Homo sapiens
ggtatggttgtgcat

SEQ ID NO: 1961431 - DNA, 15 bp, Homo sapiens
gtatggttgtgcatg

SEQ ID NO: 1961432 - DNA, 15 bp, Homo sapiens
tatggttgtgcatgc

SEQ ID NO: 1961433 - DNA, 15 bp, Homo sapiens
atggttgtgcatgcc

SEQ ID NO: 1961434 - DNA, 15 bp, Homo sapiens
tggttgtgcatgcct

SEQ ID NO: 1961435 - DNA, 15 bp, Homo sapiens
ggttgtgcatgcctg

SEQ ID NO: 1961436 - DNA, 15 bp, Homo sapiens
gttgtgcatgcctgt

SEQ ID NO: 1961437 - DNA, 15 bp, Homo sapiens
ttgtgcatgcctgta

SEQ ID NO: 1961438 - DNA, 15 bp, Homo sapiens
tgtgcatgcctgtag

SEQ ID NO: 1961439 - DNA, 15 bp, Homo sapiens
gtgcatgcctgtagt

SEQ ID NO: 1961440 - DNA, 15 bp, Homo sapiens
tgcatgcctgtagtc

SEQ ID NO: 1961441 - DNA, 15 bp, Homo sapiens
tcagaaggctgaggc

SEQ ID NO: 1961442 - DNA, 15 bp, Homo sapiens
cagaaggctgaggca

SEQ ID NO: 1961443 - DNA, 15 bp, Homo sapiens
agaaggctgaggcag

SEQ ID NO: 1961444 - DNA, 15 bp, Homo sapiens
aaggctgaggcagga

SEQ ID NO: 1961445 - DNA, 15 bp, Homo sapiens
aatcacttgaacctc

SEQ ID NO: 1961446 - DNA, 15 bp, Homo sapiens
atcacttgaacctcg

SEQ ID NO: 1961447 - DNA, 15 bp, Homo sapiens
tcacttgaacctcgg

SEQ ID NO: 1961448 - DNA, 15 bp, Homo sapiens
cacttgaacctcgga

SEQ ID NO: 1961449 - DNA, 15 bp, Homo sapiens
acttgaacctcggag

SEQ ID NO: 1961450 - DNA, 15 bp, Homo sapiens
cttgaacctcggagg

SEQ ID NO: 1961451 - DNA, 15 bp, Homo sapiens
ttgaacctcggaggc

SEQ ID NO: 1961452 - DNA, 15 bp, Homo sapiens
tgaacctcggaggca

SEQ ID NO: 1961453 - DNA, 15 bp, Homo sapiens
gaacctcggaggcag

SEQ ID NO: 1961454 - DNA, 15 bp, Homo sapiens
aacctcggaggcaga

SEQ ID NO: 1961455 - DNA, 15 bp, Homo sapiens
acctcggaggcagag

SEQ ID NO: 1961456 - DNA, 15 bp, Homo sapiens
cctcggaggcagagg

SEQ ID NO: 1961457 - DNA, 15 bp, Homo sapiens
ctcggaggcagaggt

SEQ ID NO: 1961458 - DNA, 15 bp, Homo sapiens
tcggaggcagaggtt

SEQ ID NO: 1961459 - DNA, 15 bp, Homo sapiens
cggaggcagaggttg

SEQ ID NO: 1961460 - DNA, 15 bp, Homo sapiens
aggcagaggttgcaa

SEQ ID NO: 1961461 - DNA, 15 bp, Homo sapiens
ggcagaggttgcaat

SEQ ID NO: 1961462 - DNA, 15 bp, Homo sapiens
gcagaggttgcaatg

SEQ ID NO: 1961463 - DNA, 15 bp, Homo sapiens
cagaggttgcaatga

SEQ ID NO: 1961464 - DNA, 15 bp, Homo sapiens
agaggttgcaatgag

SEQ ID NO: 1961465 - DNA, 15 bp, Homo sapiens
gaggttgcaatgagc

SEQ ID NO: 1961466 - DNA, 15 bp, Homo sapiens
aggttgcaatgagcc

SEQ ID NO: 1961467 - DNA, 15 bp, Homo sapiens
ggttgcaatgagcct

SEQ ID NO: 1961468 - DNA, 15 bp, Homo sapiens
gttgcaatgagccta

SEQ ID NO: 1961469 - DNA, 15 bp, Homo sapiens
ttgcaatgagcctag

SEQ ID NO: 1961470 - DNA, 15 bp, Homo sapiens
tgcaatgagcctaga

SEQ ID NO: 1961471 - DNA, 15 bp, Homo sapiens
gcaatgagcctagat

SEQ ID NO: 1961472 - DNA, 15 bp, Homo sapiens
caatgagcctagatt

SEQ ID NO: 1961473 - DNA, 15 bp, Homo sapiens
aatgagcctagattg

SEQ ID NO: 1961474 - DNA, 15 bp, Homo sapiens
atgagcctagattgc

SEQ ID NO: 1961475 - DNA, 15 bp, Homo sapiens
tgagcctagattgca

SEQ ID NO: 1961476 - DNA, 15 bp, Homo sapiens
gagcctagattgcac

SEQ ID NO: 1961477 - DNA, 15 bp, Homo sapiens
agcctagattgcacc

SEQ ID NO: 1961478 - DNA, 15 bp, Homo sapiens
gcctagattgcacca

SEQ ID NO: 1961479 - DNA, 15 bp, Homo sapiens
cctagattgcaccaa

SEQ ID NO: 1961480 - DNA, 15 bp, Homo sapiens
ctagattgcaccaat

SEQ ID NO: 1961481 - DNA, 15 bp, Homo sapiens
tagattgcaccaatg

SEQ ID NO: 1961482 - DNA, 15 bp, Homo sapiens
agattgcaccaatgc

SEQ ID NO: 1961483 - DNA, 15 bp, Homo sapiens
gattgcaccaatgca

SEQ ID NO: 1961484 - DNA, 15 bp, Homo sapiens
attgcaccaatgcac

SEQ ID NO: 1961485 - DNA, 15 bp, Homo sapiens
ttgcaccaatgcact

SEQ ID NO: 1961486 - DNA, 15 bp, Homo sapiens
tgcaccaatgcactc

SEQ ID NO: 1961487 - DNA, 15 bp, Homo sapiens
gcaccaatgcactct

SEQ ID NO: 1961488 - DNA, 15 bp, Homo sapiens
caccaatgcactcta

SEQ ID NO: 1961489 - DNA, 15 bp, Homo sapiens
accaatgcactctag

SEQ ID NO: 1961490 - DNA, 15 bp, Homo sapiens
ccaatgcactctagc

SEQ ID NO: 1961491 - DNA, 15 bp, Homo sapiens
caatgcactctagcc

SEQ ID NO: 1961492 - DNA, 15 bp, Homo sapiens
aatgcactctagcct

SEQ ID NO: 1961493 - DNA, 15 bp, Homo sapiens
atgcactctagcctg

SEQ ID NO: 1961494 - DNA, 15 bp, Homo sapiens
actctagcctgggcg

SEQ ID NO: 1961495 - DNA, 15 bp, Homo sapiens
ctctagcctgggcga

SEQ ID NO: 1961496 - DNA, 15 bp, Homo sapiens
tctagcctgggcgac

SEQ ID NO: 1961497 - DNA, 15 bp, Homo sapiens
ctagcctgggcgaca

SEQ ID NO: 1961498 - DNA, 15 bp, Homo sapiens
tagcctgggcgacag

SEQ ID NO: 1961499 - DNA, 15 bp, Homo sapiens
gagcaagactccatg

SEQ ID NO: 1961500 - DNA, 15 bp, Homo sapiens
agcaagactccatgt

SEQ ID NO: 1961501 - DNA, 15 bp, Homo sapiens
gcaagactccatgtc

SEQ ID NO: 1961502 - DNA, 15 bp, Homo sapiens
caagactccatgtca

SEQ ID NO: 1961503 - DNA, 15 bp, Homo sapiens
aagactccatgtcaa

SEQ ID NO: 1961504 - DNA, 15 bp, Homo sapiens
agactccatgtcaaa

SEQ ID NO: 1961505 - DNA, 15 bp, Homo sapiens
gactccatgtcaaaa

SEQ ID NO: 1961506 - DNA, 15 bp, Homo sapiens
actccatgtcaaaaa

SEQ ID NO: 1961507 - DNA, 15 bp, Homo sapiens
ctccatgtcaaaaaa

SEQ ID NO: 1961508 - DNA, 15 bp, Homo sapiens
tccatgtcaaaaaaa

SEQ ID NO: 1961509 - DNA, 15 bp, Homo sapiens
ccatgtcaaaaaaaa

SEQ ID NO: 1961510 - DNA, 15 bp, Homo sapiens
catgtcaaaaaaaaa

SEQ ID NO: 1961511 - DNA, 15 bp, Homo sapiens
atgtcaaaaaaaaaa

SEQ ID NO: 1961512 - DNA, 15 bp, Homo sapiens
aaaaaaaaaggaaat

SEQ ID NO: 1961513 - DNA, 15 bp, Homo sapiens
aaaaaaaaggaaata

SEQ ID NO: 1961514 - DNA, 15 bp, Homo sapiens
aaaaaaaggaaatat

SEQ ID NO: 1961515 - DNA, 15 bp, Homo sapiens
aaaaaaggaaatatg

SEQ ID NO: 1961516 - DNA, 15 bp, Homo sapiens
aaaaaggaaatatgg

SEQ ID NO: 1961517 - DNA, 15 bp, Homo sapiens
aaaaggaaatatgga

SEQ ID NO: 1961518 - DNA, 15 bp, Homo sapiens
aaaggaaatatggaa

SEQ ID NO: 1961519 - DNA, 15 bp, Homo sapiens
aaggaaatatggaaa

SEQ ID NO: 1961520 - DNA, 15 bp, Homo sapiens
aggaaatatggaaac

SEQ ID NO: 1961521 - DNA, 15 bp, Homo sapiens
ggaaatatggaaact

SEQ ID NO: 1961522 - DNA, 15 bp, Homo sapiens
aaatatggaaactga

SEQ ID NO: 1961523 - DNA, 15 bp, Homo sapiens
aatatggaaactgag

SEQ ID NO: 1961524 - DNA, 15 bp, Homo sapiens
atatggaaactgagc

SEQ ID NO: 1961525 - DNA, 15 bp, Homo sapiens
tatggaaactgagct

SEQ ID NO: 1961526 - DNA, 15 bp, Homo sapiens
atggaaactgagctg

SEQ ID NO: 1961527 - DNA, 15 bp, Homo sapiens
tggaaactgagctga

SEQ ID NO: 1961528 - DNA, 15 bp, Homo sapiens
ggaaactgagctgag

SEQ ID NO: 1961529 - DNA, 15 bp, Homo sapiens
gaaactgagctgaga

SEQ ID NO: 1961530 - DNA, 15 bp, Homo sapiens
aaactgagctgagag

SEQ ID NO: 1961531 - DNA, 15 bp, Homo sapiens
aactgagctgagaga

SEQ ID NO: 1961532 - DNA, 15 bp, Homo sapiens
actgagctgagagag

SEQ ID NO: 1961533 - DNA, 15 bp, Homo sapiens
ctgagctgagagagg

SEQ ID NO: 1961534 - DNA, 15 bp, Homo sapiens
tgagctgagagaggg

SEQ ID NO: 1961535 - DNA, 15 bp, Homo sapiens
gagctgagagagggg

SEQ ID NO: 1961536 - DNA, 15 bp, Homo sapiens
agctgagagagggga

SEQ ID NO: 1961537 - DNA, 15 bp, Homo sapiens
gctgagagaggggaa

SEQ ID NO: 1961538 - DNA, 15 bp, Homo sapiens
ctgagagaggggaag

SEQ ID NO: 1961539 - DNA, 15 bp, Homo sapiens
tgagagaggggaagt

SEQ ID NO: 1961540 - DNA, 15 bp, Homo sapiens
gagagaggggaagtg

SEQ ID NO: 1961541 - DNA, 15 bp, Homo sapiens
agagaggggaagtgg

SEQ ID NO: 1961542 - DNA, 15 bp, Homo sapiens
gagaggggaagtgga

SEQ ID NO: 1961543 - DNA, 15 bp, Homo sapiens
agaggggaagtggac

SEQ ID NO: 1961544 - DNA, 15 bp, Homo sapiens
gaggggaagtggact

SEQ ID NO: 1961545 - DNA, 15 bp, Homo sapiens
aggggaagtggacta

SEQ ID NO: 1961546 - DNA, 15 bp, Homo sapiens
ggggaagtggactag

SEQ ID NO: 1961547 - DNA, 15 bp, Homo sapiens
gggaagtggactagg

SEQ ID NO: 1961548 - DNA, 15 bp, Homo sapiens
ggaagtggactaggg

SEQ ID NO: 1961549 - DNA, 15 bp, Homo sapiens
gaagtggactaggga

SEQ ID NO: 1961550 - DNA, 15 bp, Homo sapiens
aagtggactagggac

SEQ ID NO: 1961551 - DNA, 15 bp, Homo sapiens
agtggactagggact

SEQ ID NO: 1961552 - DNA, 15 bp, Homo sapiens
gtggactagggactc

SEQ ID NO: 1961553 - DNA, 15 bp, Homo sapiens
tggactagggactcc

SEQ ID NO: 1961554 - DNA, 15 bp, Homo sapiens
ggactagggactccc

SEQ ID NO: 1961555 - DNA, 15 bp, Homo sapiens
gactagggactccct

SEQ ID NO: 1961556 - DNA, 15 bp, Homo sapiens
actagggactccctc

SEQ ID NO: 1961557 - DNA, 15 bp, Homo sapiens
ctagggactccctcg

SEQ ID NO: 1961558 - DNA, 15 bp, Homo sapiens
tagggactccctcgc

SEQ ID NO: 1961559 - DNA, 15 bp, Homo sapiens
agggactccctcgca

SEQ ID NO: 1961560 - DNA, 15 bp, Homo sapiens
gggactccctcgcag

SEQ ID NO: 1961561 - DNA, 15 bp, Homo sapiens
ggactccctcgcagt

SEQ ID NO: 1961562 - DNA, 15 bp, Homo sapiens
gactccctcgcagtg

SEQ ID NO: 1961563 - DNA, 15 bp, Homo sapiens
actccctcgcagtgg

SEQ ID NO: 1961564 - DNA, 15 bp, Homo sapiens
ctccctcgcagtggc

SEQ ID NO: 1961565 - DNA, 15 bp, Homo sapiens
tccctcgcagtggcc

SEQ ID NO: 1961566 - DNA, 15 bp, Homo sapiens
ccctcgcagtggccc

SEQ ID NO: 1961567 - DNA, 15 bp, Homo sapiens
cctcgcagtggccct

SEQ ID NO: 1961568 - DNA, 15 bp, Homo sapiens
ctcgcagtggccctg

SEQ ID NO: 1961569 - DNA, 15 bp, Homo sapiens
tcgcagtggccctga

SEQ ID NO: 1961570 - DNA, 15 bp, Homo sapiens
cgcagtggccctgac

SEQ ID NO: 1961571 - DNA, 15 bp, Homo sapiens
gcagtggccctgacc

SEQ ID NO: 1961572 - DNA, 15 bp, Homo sapiens
cagtggccctgaccc

SEQ ID NO: 1961573 - DNA, 15 bp, Homo sapiens
agtggccctgaccct

SEQ ID NO: 1961574 - DNA, 15 bp, Homo sapiens
gtggccctgacccta

SEQ ID NO: 1961575 - DNA, 15 bp, Homo sapiens
tggccctgaccctac

SEQ ID NO: 1961576 - DNA, 15 bp, Homo sapiens
ggccctgaccctacc

SEQ ID NO: 1961577 - DNA, 15 bp, Homo sapiens
gccctgaccctacct

SEQ ID NO: 1961578 - DNA, 15 bp, Homo sapiens
ccctgaccctacctg

SEQ ID NO: 1961579 - DNA, 15 bp, Homo sapiens
cctgaccctacctgt

SEQ ID NO: 1961580 - DNA, 15 bp, Homo sapiens
ctgaccctacctgtg

SEQ ID NO: 1961581 - DNA, 15 bp, Homo sapiens
tgaccctacctgtgc

SEQ ID NO: 1961582 - DNA, 15 bp, Homo sapiens
gaccctacctgtgcc

SEQ ID NO: 1961583 - DNA, 15 bp, Homo sapiens
accctacctgtgccc

SEQ ID NO: 1961584 - DNA, 15 bp, Homo sapiens
ccctacctgtgccct

SEQ ID NO: 1961585 - DNA, 15 bp, Homo sapiens
cctacctgtgccctc

SEQ ID NO: 1961586 - DNA, 15 bp, Homo sapiens
ctacctgtgccctct

SEQ ID NO: 1961587 - DNA, 15 bp, Homo sapiens
tacctgtgccctctc

SEQ ID NO: 1961588 - DNA, 15 bp, Homo sapiens
acctgtgccctctct

SEQ ID NO: 1961589 - DNA, 15 bp, Homo sapiens
cctgtgccctctctc

SEQ ID NO: 1961590 - DNA, 15 bp, Homo sapiens
ctgtgccctctctcc

SEQ ID NO: 1961591 - DNA, 15 bp, Homo sapiens
tgtgccctctctcca

SEQ ID NO: 1961592 - DNA, 15 bp, Homo sapiens
gtgccctctctccat

SEQ ID NO: 1961593 - DNA, 15 bp, Homo sapiens
tgccctctctccatc

SEQ ID NO: 1961594 - DNA, 15 bp, Homo sapiens
gccctctctccatcc

SEQ ID NO: 1961595 - DNA, 15 bp, Homo sapiens
ctctctccatccttt

SEQ ID NO: 1961596 - DNA, 15 bp, Homo sapiens
tctctccatcctttg

SEQ ID NO: 1961597 - DNA, 15 bp, Homo sapiens
ctctccatcctttgc

SEQ ID NO: 1961598 - DNA, 15 bp, Homo sapiens
tctccatcctttgca

SEQ ID NO: 1961599 - DNA, 15 bp, Homo sapiens
ctccatcctttgcag

SEQ ID NO: 1961600 - DNA, 15 bp, Homo sapiens
tccatcctttgcaga

SEQ ID NO: 1961601 - DNA, 15 bp, Homo sapiens
ccatcctttgcagac

SEQ ID NO: 1961602 - DNA, 15 bp, Homo sapiens
catcctttgcagacc

SEQ ID NO: 1961603 - DNA, 15 bp, Homo sapiens
atcctttgcagacct

SEQ ID NO: 1961604 - DNA, 15 bp, Homo sapiens
tcctttgcagacctg

SEQ ID NO: 1961605 - DNA, 15 bp, Homo sapiens
cctttgcagacctgt

SEQ ID NO: 1961606 - DNA, 15 bp, Homo sapiens
ctttgcagacctgta

SEQ ID NO: 1961607 - DNA, 15 bp, Homo sapiens
tttgcagacctgtac

SEQ ID NO: 1961608 - DNA, 15 bp, Homo sapiens
ttgcagacctgtact

SEQ ID NO: 1961609 - DNA, 15 bp, Homo sapiens
tgcagacctgtactc

SEQ ID NO: 1961610 - DNA, 15 bp, Homo sapiens
gcagacctgtactcc

SEQ ID NO: 1961611 - DNA, 15 bp, Homo sapiens
cagacctgtactccg

SEQ ID NO: 1961612 - DNA, 15 bp, Homo sapiens
agacctgtactccgg

SEQ ID NO: 1961613 - DNA, 15 bp, Homo sapiens
gacctgtactccggc

SEQ ID NO: 1961614 - DNA, 15 bp, Homo sapiens
acctgtactccggct

SEQ ID NO: 1961615 - DNA, 15 bp, Homo sapiens
cctgtactccggctg

SEQ ID NO: 1961616 - DNA, 15 bp, Homo sapiens
ctgtactccggctgg

SEQ ID NO: 1961617 - DNA, 15 bp, Homo sapiens
tgtactccggctggt

SEQ ID NO: 1961618 - DNA, 15 bp, Homo sapiens
gtactccggctggtt

SEQ ID NO: 1961619 - DNA, 15 bp, Homo sapiens
tactccggctggttg

SEQ ID NO: 1961620 - DNA, 15 bp, Homo sapiens
actccggctggttgg

SEQ ID NO: 1961621 - DNA, 15 bp, Homo sapiens
ctccggctggttggc

SEQ ID NO: 1961622 - DNA, 15 bp, Homo sapiens
tccggctggttggca

SEQ ID NO: 1961623 - DNA, 15 bp, Homo sapiens
ccggctggttggcag

SEQ ID NO: 1961624 - DNA, 15 bp, Homo sapiens
cggctggttggcagc

SEQ ID NO: 1961625 - DNA, 15 bp, Homo sapiens
ggctggttggcagca

SEQ ID NO: 1961626 - DNA, 15 bp, Homo sapiens
gctggttggcagcag

SEQ ID NO: 1961627 - DNA, 15 bp, Homo sapiens
ctggttggcagcagc

SEQ ID NO: 1961628 - DNA, 15 bp, Homo sapiens
tggttggcagcagcc

SEQ ID NO: 1961629 - DNA, 15 bp, Homo sapiens
ggttggcagcagccc

SEQ ID NO: 1961630 - DNA, 15 bp, Homo sapiens
gttggcagcagccct

SEQ ID NO: 1961631 - DNA, 15 bp, Homo sapiens
ttggcagcagccctt

SEQ ID NO: 1961632 - DNA, 15 bp, Homo sapiens
tggcagcagcccttg

SEQ ID NO: 1961633 - DNA, 15 bp, Homo sapiens
ggcagcagcccttgg

SEQ ID NO: 1961634 - DNA, 15 bp, Homo sapiens
gcagcagcccttggt

SEQ ID NO: 1961635 - DNA, 15 bp, Homo sapiens
cagcagcccttggta

SEQ ID NO: 1961636 - DNA, 15 bp, Homo sapiens
agcagcccttggtac

SEQ ID NO: 1961637 - DNA, 15 bp, Homo sapiens
gcagcccttggtacc

SEQ ID NO: 1961638 - DNA, 15 bp, Homo sapiens
cagcccttggtacca

SEQ ID NO: 1961639 - DNA, 15 bp, Homo sapiens
agcccttggtaccaa

SEQ ID NO: 1961640 - DNA, 15 bp, Homo sapiens
gcccttggtaccaac

SEQ ID NO: 1961641 - DNA, 15 bp, Homo sapiens
cccttggtaccaacc

SEQ ID NO: 1961642 - DNA, 15 bp, Homo sapiens
ccttggtaccaacct

SEQ ID NO: 1961643 - DNA, 15 bp, Homo sapiens
cttggtaccaacctg

SEQ ID NO: 1961644 - DNA, 15 bp, Homo sapiens
ttggtaccaacctgc

SEQ ID NO: 1961645 - DNA, 15 bp, Homo sapiens
tggtaccaacctgca

SEQ ID NO: 1961646 - DNA, 15 bp, Homo sapiens
ggtaccaacctgcag

SEQ ID NO: 1961647 - DNA, 15 bp, Homo sapiens
gtaccaacctgcagg

SEQ ID NO: 1961648 - DNA, 15 bp, Homo sapiens
taccaacctgcaggt

SEQ ID NO: 1961649 - DNA, 15 bp, Homo sapiens
accaacctgcaggtc

SEQ ID NO: 1961650 - DNA, 15 bp, Homo sapiens
ccaacctgcaggtcc

SEQ ID NO: 1961651 - DNA, 15 bp, Homo sapiens
caacctgcaggtcca

SEQ ID NO: 1961652 - DNA, 15 bp, Homo sapiens
aacctgcaggtccag

SEQ ID NO: 1961653 - DNA, 15 bp, Homo sapiens
acctgcaggtccagt

SEQ ID NO: 1961654 - DNA, 15 bp, Homo sapiens
cctgcaggtccagtt

SEQ ID NO: 1961655 - DNA, 15 bp, Homo sapiens
ctgcaggtccagttc

SEQ ID NO: 1961656 - DNA, 15 bp, Homo sapiens
tgcaggtccagttct

SEQ ID NO: 1961657 - DNA, 15 bp, Homo sapiens
gcaggtccagttctg

SEQ ID NO: 1961658 - DNA, 15 bp, Homo sapiens
caggtccagttctgg

SEQ ID NO: 1961659 - DNA, 15 bp, Homo sapiens
aggtccagttctggc

SEQ ID NO: 1961660 - DNA, 15 bp, Homo sapiens
ggtccagttctggca

SEQ ID NO: 1961661 - DNA, 15 bp, Homo sapiens
gtccagttctggcac

SEQ ID NO: 1961662 - DNA, 15 bp, Homo sapiens
tccagttctggcaca

SEQ ID NO: 1961663 - DNA, 15 bp, Homo sapiens
ccagttctggcacaa

SEQ ID NO: 1961664 - DNA, 15 bp, Homo sapiens
cagttctggcacaaa

SEQ ID NO: 1961665 - DNA, 15 bp, Homo sapiens
agttctggcacaaaa

SEQ ID NO: 1961666 - DNA, 15 bp, Homo sapiens
gttctggcacaaaac

SEQ ID NO: 1961667 - DNA, 15 bp, Homo sapiens
ttctggcacaaaact

SEQ ID NO: 1961668 - DNA, 15 bp, Homo sapiens
tctggcacaaaactg

SEQ ID NO: 1961669 - DNA, 15 bp, Homo sapiens
ctggcacaaaactgt

SEQ ID NO: 1961670 - DNA, 15 bp, Homo sapiens
tggcacaaaactgta

SEQ ID NO: 1961671 - DNA, 15 bp, Homo sapiens
ggcacaaaactgtag

SEQ ID NO: 1961672 - DNA, 15 bp, Homo sapiens
gcacaaaactgtagg

SEQ ID NO: 1961673 - DNA, 15 bp, Homo sapiens
cacaaaactgtaggc

SEQ ID NO: 1961674 - DNA, 15 bp, Homo sapiens
acaaaactgtaggca

SEQ ID NO: 1961675 - DNA, 15 bp, Homo sapiens
caaaactgtaggcat

SEQ ID NO: 1961676 - DNA, 15 bp, Homo sapiens
aaaactgtaggcatc

SEQ ID NO: 1961677 - DNA, 15 bp, Homo sapiens
aaactgtaggcatcc

SEQ ID NO: 1961678 - DNA, 15 bp, Homo sapiens
aactgtaggcatcct

SEQ ID NO: 1961679 - DNA, 15 bp, Homo sapiens
actgtaggcatcctg

SEQ ID NO: 1961680 - DNA, 15 bp, Homo sapiens
ctgtaggcatcctgc

SEQ ID NO: 1961681 - DNA, 15 bp, Homo sapiens
tgtaggcatcctgcc

SEQ ID NO: 1961682 - DNA, 15 bp, Homo sapiens
gtaggcatcctgccc

SEQ ID NO: 1961683 - DNA, 15 bp, Homo sapiens
taggcatcctgccct

SEQ ID NO: 1961684 - DNA, 15 bp, Homo sapiens
aggcatcctgccctc

SEQ ID NO: 1961685 - DNA, 15 bp, Homo sapiens
ggcatcctgccctct

SEQ ID NO: 1961686 - DNA, 15 bp, Homo sapiens
gcatcctgccctcta

SEQ ID NO: 1961687 - DNA, 15 bp, Homo sapiens
catcctgccctctaa

SEQ ID NO: 1961688 - DNA, 15 bp, Homo sapiens
atcctgccctctaac

SEQ ID NO: 1961689 - DNA, 15 bp, Homo sapiens
tcctgccctctaact

SEQ ID NO: 1961690 - DNA, 15 bp, Homo sapiens
cctgccctctaactg

SEQ ID NO: 1961691 - DNA, 15 bp, Homo sapiens
ctgccctctaactgc

SEQ ID NO: 1961692 - DNA, 15 bp, Homo sapiens
tgccctctaactgct

SEQ ID NO: 1961693 - DNA, 15 bp, Homo sapiens
gccctctaactgctc

SEQ ID NO: 1961694 - DNA, 15 bp, Homo sapiens
ccctctaactgctcg

SEQ ID NO: 1961695 - DNA, 15 bp, Homo sapiens
cctctaactgctcgg

SEQ ID NO: 1961696 - DNA, 15 bp, Homo sapiens
ctctaactgctcgga

SEQ ID NO: 1961697 - DNA, 15 bp, Homo sapiens
tctaactgctcggat

SEQ ID NO: 1961698 - DNA, 15 bp, Homo sapiens
ctaactgctcggata

SEQ ID NO: 1961699 - DNA, 15 bp, Homo sapiens
taactgctcggatat

SEQ ID NO: 1961700 - DNA, 15 bp, Homo sapiens
aactgctcggatatc

SEQ ID NO: 1961701 - DNA, 15 bp, Homo sapiens
actgctcggatatct

SEQ ID NO: 1961702 - DNA, 15 bp, Homo sapiens
ctgctcggatatctg

SEQ ID NO: 1961703 - DNA, 15 bp, Homo sapiens
tgctcggatatctgg

SEQ ID NO: 1961704 - DNA, 15 bp, Homo sapiens
gctcggatatctggc

SEQ ID NO: 1961705 - DNA, 15 bp, Homo sapiens
ctcggatatctggca

SEQ ID NO: 1961706 - DNA, 15 bp, Homo sapiens
tcggatatctggcag

SEQ ID NO: 1961707 - DNA, 15 bp, Homo sapiens
cggatatctggcagg

SEQ ID NO: 1961708 - DNA, 15 bp, Homo sapiens
ggatatctggcaggt

SEQ ID NO: 1961709 - DNA, 15 bp, Homo sapiens
gatatctggcaggtt

SEQ ID NO: 1961710 - DNA, 15 bp, Homo sapiens
atatctggcaggttc

SEQ ID NO: 1961711 - DNA, 15 bp, Homo sapiens
tatctggcaggttct

SEQ ID NO: 1961712 - DNA, 15 bp, Homo sapiens
atctggcaggttctg

SEQ ID NO: 1961713 - DNA, 15 bp, Homo sapiens
tctggcaggttctga

SEQ ID NO: 1961714 - DNA, 15 bp, Homo sapiens
ctggcaggttctgaa

SEQ ID NO: 1961715 - DNA, 15 bp, Homo sapiens
tggcaggttctgaat

SEQ ID NO: 1961716 - DNA, 15 bp, Homo sapiens
ggcaggttctgaatg

SEQ ID NO: 1961717 - DNA, 15 bp, Homo sapiens
gcaggttctgaatgt

SEQ ID NO: 1961718 - DNA, 15 bp, Homo sapiens
caggttctgaatgtg

SEQ ID NO: 1961719 - DNA, 15 bp, Homo sapiens
aggttctgaatgtga

SEQ ID NO: 1961720 - DNA, 15 bp, Homo sapiens
ggttctgaatgtgaa

SEQ ID NO: 1961721 - DNA, 15 bp, Homo sapiens
gttctgaatgtgaac

SEQ ID NO: 1961722 - DNA, 15 bp, Homo sapiens
ttctgaatgtgaacc

SEQ ID NO: 1961723 - DNA, 15 bp, Homo sapiens
tctgaatgtgaacca

SEQ ID NO: 1961724 - DNA, 15 bp, Homo sapiens
ctgaatgtgaaccag

SEQ ID NO: 1961725 - DNA, 15 bp, Homo sapiens
tgaatgtgaaccaga

SEQ ID NO: 1961726 - DNA, 15 bp, Homo sapiens
gaatgtgaaccagat

SEQ ID NO: 1961727 - DNA, 15 bp, Homo sapiens
aatgtgaaccagata

SEQ ID NO: 1961728 - DNA, 15 bp, Homo sapiens
atgtgaaccagatag

SEQ ID NO: 1961729 - DNA, 15 bp, Homo sapiens
tgtgaaccagatagc

SEQ ID NO: 1961730 - DNA, 15 bp, Homo sapiens
gtgaaccagatagct

SEQ ID NO: 1961731 - DNA, 15 bp, Homo sapiens
tgaaccagatagctt

SEQ ID NO: 1961732 - DNA, 15 bp, Homo sapiens
gaaccagatagcttt

SEQ ID NO: 1961733 - DNA, 15 bp, Homo sapiens
aaccagatagctttc

SEQ ID NO: 1961734 - DNA, 15 bp, Homo sapiens
accagatagctttcc

SEQ ID NO: 1961735 - DNA, 15 bp, Homo sapiens
ccagatagctttccc

SEQ ID NO: 1961736 - DNA, 15 bp, Homo sapiens
cagatagctttccct

SEQ ID NO: 1961737 - DNA, 15 bp, Homo sapiens
agatagctttccctg

SEQ ID NO: 1961738 - DNA, 15 bp, Homo sapiens
gatagctttccctgg

SEQ ID NO: 1961739 - DNA, 15 bp, Homo sapiens
atagctttccctgga

SEQ ID NO: 1961740 - DNA, 15 bp, Homo sapiens
tagctttccctggac

SEQ ID NO: 1961741 - DNA, 15 bp, Homo sapiens
agctttccctggacc

SEQ ID NO: 1961742 - DNA, 15 bp, Homo sapiens
gctttccctggacca

SEQ ID NO: 1961743 - DNA, 15 bp, Homo sapiens
ctttccctggaccag

SEQ ID NO: 1961744 - DNA, 15 bp, Homo sapiens
tttccctggaccagc

SEQ ID NO: 1961745 - DNA, 15 bp, Homo sapiens
ttccctggaccagcc

SEQ ID NO: 1961746 - DNA, 15 bp, Homo sapiens
tccctggaccagccg

SEQ ID NO: 1961747 - DNA, 15 bp, Homo sapiens
ccctggaccagccgg

SEQ ID NO: 1961748 - DNA, 15 bp, Homo sapiens
cctggaccagccggc

SEQ ID NO: 1961749 - DNA, 15 bp, Homo sapiens
ctggaccagccggcc

SEQ ID NO: 1961750 - DNA, 15 bp, Homo sapiens
tggaccagccggccc

SEQ ID NO: 1961751 - DNA, 15 bp, Homo sapiens
ggaccagccggccca

SEQ ID NO: 1961752 - DNA, 15 bp, Homo sapiens
gaccagccggcccaa

SEQ ID NO: 1961753 - DNA, 15 bp, Homo sapiens
accagccggcccaag

SEQ ID NO: 1961754 - DNA, 15 bp, Homo sapiens
ccagccggcccaagc

SEQ ID NO: 1961755 - DNA, 15 bp, Homo sapiens
cagccggcccaagct

SEQ ID NO: 1961756 - DNA, 15 bp, Homo sapiens
agccggcccaagctt

SEQ ID NO: 1961757 - DNA, 15 bp, Homo sapiens
gccggcccaagcttc

SEQ ID NO: 1961758 - DNA, 15 bp, Homo sapiens
ccggcccaagcttca

SEQ ID NO: 1961759 - DNA, 15 bp, Homo sapiens
cggcccaagcttcaa

SEQ ID NO: 1961760 - DNA, 15 bp, Homo sapiens
ggcccaagcttcaac

SEQ ID NO: 1961761 - DNA, 15 bp, Homo sapiens
gcccaagcttcaaca

SEQ ID NO: 1961762 - DNA, 15 bp, Homo sapiens
cccaagcttcaacag

SEQ ID NO: 1961763 - DNA, 15 bp, Homo sapiens
ccaagcttcaacagc

SEQ ID NO: 1961764 - DNA, 15 bp, Homo sapiens
caagcttcaacagca

SEQ ID NO: 1961765 - DNA, 15 bp, Homo sapiens
aagcttcaacagcac

SEQ ID NO: 1961766 - DNA, 15 bp, Homo sapiens
agcttcaacagcaca

SEQ ID NO: 1961767 - DNA, 15 bp, Homo sapiens
gcttcaacagcacag

SEQ ID NO: 1961768 - DNA, 15 bp, Homo sapiens
cttcaacagcacaga

SEQ ID NO: 1961769 - DNA, 15 bp, Homo sapiens
ttcaacagcacagag

SEQ ID NO: 1961770 - DNA, 15 bp, Homo sapiens
tcaacagcacagagg

SEQ ID NO: 1961771 - DNA, 15 bp, Homo sapiens
caacagcacagagga

SEQ ID NO: 1961772 - DNA, 15 bp, Homo sapiens
aacagcacagaggac

SEQ ID NO: 1961773 - DNA, 15 bp, Homo sapiens
acagcacagaggacc

SEQ ID NO: 1961774 - DNA, 15 bp, Homo sapiens
cagcacagaggacca

SEQ ID NO: 1961775 - DNA, 15 bp, Homo sapiens
agcacagaggaccac

SEQ ID NO: 1961776 - DNA, 15 bp, Homo sapiens
gcacagaggaccact

SEQ ID NO: 1961777 - DNA, 15 bp, Homo sapiens
cacagaggaccactc

SEQ ID NO: 1961778 - DNA, 15 bp, Homo sapiens
acagaggaccactcc

SEQ ID NO: 1961779 - DNA, 15 bp, Homo sapiens
cagaggaccactcca

SEQ ID NO: 1961780 - DNA, 15 bp, Homo sapiens
agaggaccactccaa

SEQ ID NO: 1961781 - DNA, 15 bp, Homo sapiens
gaggaccactccaaa

SEQ ID NO: 1961782 - DNA, 15 bp, Homo sapiens
aggaccactccaaat

SEQ ID NO: 1961783 - DNA, 15 bp, Homo sapiens
ggaccactccaaatg

SEQ ID NO: 1961784 - DNA, 15 bp, Homo sapiens
gaccactccaaatgg

SEQ ID NO: 1961785 - DNA, 15 bp, Homo sapiens
accactccaaatggt

SEQ ID NO: 1961786 - DNA, 15 bp, Homo sapiens
ccactccaaatggtg

SEQ ID NO: 1961787 - DNA, 15 bp, Homo sapiens
cactccaaatggtgc

SEQ ID NO: 1961788 - DNA, 15 bp, Homo sapiens
actccaaatggtgcg

SEQ ID NO: 1961789 - DNA, 15 bp, Homo sapiens
ctccaaatggtgcgt

SEQ ID NO: 1961790 - DNA, 15 bp, Homo sapiens
tccaaatggtgcgtg

SEQ ID NO: 1961791 - DNA, 15 bp, Homo sapiens
ccaaatggtgcgtgt

SEQ ID NO: 1961792 - DNA, 15 bp, Homo sapiens
caaatggtgcgtgtc

SEQ ID NO: 1961793 - DNA, 15 bp, Homo sapiens
aaatggtgcgtgtcc

SEQ ID NO: 1961794 - DNA, 15 bp, Homo sapiens
aatggtgcgtgtccc

SEQ ID NO: 1961795 - DNA, 15 bp, Homo sapiens
atggtgcgtgtcccc

SEQ ID NO: 1961796 - DNA, 15 bp, Homo sapiens
tggtgcgtgtcccca

SEQ ID NO: 1961797 - DNA, 15 bp, Homo sapiens
ggtgcgtgtccccaa

SEQ ID NO: 1961798 - DNA, 15 bp, Homo sapiens
gtgcgtgtccccaaa

SEQ ID NO: 1961799 - DNA, 15 bp, Homo sapiens
tgcgtgtccccaaaa

SEQ ID NO: 1961800 - DNA, 15 bp, Homo sapiens
gcgtgtccccaaaag

SEQ ID NO: 1961801 - DNA, 15 bp, Homo sapiens
cgtgtccccaaaagg

SEQ ID NO: 1961802 - DNA, 15 bp, Homo sapiens
gtgtccccaaaaggg

SEQ ID NO: 1961803 - DNA, 15 bp, Homo sapiens
tgtccccaaaagggc

SEQ ID NO: 1961804 - DNA, 15 bp, Homo sapiens
gtccccaaaagggcc

SEQ ID NO: 1961805 - DNA, 15 bp, Homo sapiens
tccccaaaagggccc

SEQ ID NO: 1961806 - DNA, 15 bp, Homo sapiens
ccccaaaagggccct

SEQ ID NO: 1961807 - DNA, 15 bp, Homo sapiens
cccaaaagggccctg

SEQ ID NO: 1961808 - DNA, 15 bp, Homo sapiens
ccaaaagggccctgg

SEQ ID NO: 1961809 - DNA, 15 bp, Homo sapiens
caaaagggccctgga

SEQ ID NO: 1961810 - DNA, 15 bp, Homo sapiens
aaaagggccctggac

SEQ ID NO: 1961811 - DNA, 15 bp, Homo sapiens
aaagggccctggacc

SEQ ID NO: 1961812 - DNA, 15 bp, Homo sapiens
aagggccctggacct

SEQ ID NO: 1961813 - DNA, 15 bp, Homo sapiens
agggccctggacctg

SEQ ID NO: 1961814 - DNA, 15 bp, Homo sapiens
gggccctggacctgc

SEQ ID NO: 1961815 - DNA, 15 bp, Homo sapiens
ggccctggacctgcg

SEQ ID NO: 1961816 - DNA, 15 bp, Homo sapiens
gccctggacctgcgt

SEQ ID NO: 1961817 - DNA, 15 bp, Homo sapiens
ccctggacctgcgtg

SEQ ID NO: 1961818 - DNA, 15 bp, Homo sapiens
cctggacctgcgtgg

SEQ ID NO: 1961819 - DNA, 15 bp, Homo sapiens
ctggacctgcgtggg

SEQ ID NO: 1961820 - DNA, 15 bp, Homo sapiens
tggacctgcgtgggt

SEQ ID NO: 1961821 - DNA, 15 bp, Homo sapiens
ggacctgcgtgggtg

SEQ ID NO: 1961822 - DNA, 15 bp, Homo sapiens
gacctgcgtgggtga

SEQ ID NO: 1961823 - DNA, 15 bp, Homo sapiens
acctgcgtgggtgac

SEQ ID NO: 1961824 - DNA, 15 bp, Homo sapiens
cctgcgtgggtgaca

SEQ ID NO: 1961825 - DNA, 15 bp, Homo sapiens
ctgcgtgggtgacat

SEQ ID NO: 1961826 - DNA, 15 bp, Homo sapiens
tgcgtgggtgacatg

SEQ ID NO: 1961827 - DNA, 15 bp, Homo sapiens
gcgtgggtgacatga

SEQ ID NO: 1961828 - DNA, 15 bp, Homo sapiens
cgtgggtgacatgaa

SEQ ID NO: 1961829 - DNA, 15 bp, Homo sapiens
gtgggtgacatgaat

SEQ ID NO: 1961830 - DNA, 15 bp, Homo sapiens
tgggtgacatgaatc

SEQ ID NO: 1961831 - DNA, 15 bp, Homo sapiens
gggtgacatgaatcg

SEQ ID NO: 1961832 - DNA, 15 bp, Homo sapiens
ggtgacatgaatcgg

SEQ ID NO: 1961833 - DNA, 15 bp, Homo sapiens
gtgacatgaatcgga

SEQ ID NO: 1961834 - DNA, 15 bp, Homo sapiens
tgacatgaatcggaa

SEQ ID NO: 1961835 - DNA, 15 bp, Homo sapiens
gacatgaatcggaac

SEQ ID NO: 1961836 - DNA, 15 bp, Homo sapiens
acatgaatcggaacc

SEQ ID NO: 1961837 - DNA, 15 bp, Homo sapiens
catgaatcggaacca

SEQ ID NO: 1961838 - DNA, 15 bp, Homo sapiens
atgaatcggaaccag

SEQ ID NO: 1961839 - DNA, 15 bp, Homo sapiens
tgaatcggaaccagg

SEQ ID NO: 1961840 - DNA, 15 bp, Homo sapiens
gaatcggaaccaggg

SEQ ID NO: 1961841 - DNA, 15 bp, Homo sapiens
aatcggaaccaggga

SEQ ID NO: 1961842 - DNA, 15 bp, Homo sapiens
atcggaaccagggag

SEQ ID NO: 1961843 - DNA, 15 bp, Homo sapiens
tcggaaccagggaga

SEQ ID NO: 1961844 - DNA, 15 bp, Homo sapiens
cggaaccagggagag

SEQ ID NO: 1961845 - DNA, 15 bp, Homo sapiens
ggaaccagggagagg

SEQ ID NO: 1961846 - DNA, 15 bp, Homo sapiens
gaaccagggagagga

SEQ ID NO: 1961847 - DNA, 15 bp, Homo sapiens
aaccagggagaggag

SEQ ID NO: 1961848 - DNA, 15 bp, Homo sapiens
accagggagaggagc

SEQ ID NO: 1961849 - DNA, 15 bp, Homo sapiens
ccagggagaggagca

SEQ ID NO: 1961850 - DNA, 15 bp, Homo sapiens
cagggagaggagcaa

SEQ ID NO: 1961851 - DNA, 15 bp, Homo sapiens
agggagaggagcaac

SEQ ID NO: 1961852 - DNA, 15 bp, Homo sapiens
gggagaggagcaacg

SEQ ID NO: 1961853 - DNA, 15 bp, Homo sapiens
ggagaggagcaacgg

SEQ ID NO: 1961854 - DNA, 15 bp, Homo sapiens
gagaggagcaacggg

SEQ ID NO: 1961855 - DNA, 15 bp, Homo sapiens
agaggagcaacgggg

SEQ ID NO: 1961856 - DNA, 15 bp, Homo sapiens
gaggagcaacggggt

SEQ ID NO: 1961857 - DNA, 15 bp, Homo sapiens
aggagcaacggggtg

SEQ ID NO: 1961858 - DNA, 15 bp, Homo sapiens
ggagcaacggggtgg

SEQ ID NO: 1961859 - DNA, 15 bp, Homo sapiens
gagcaacggggtggg

SEQ ID NO: 1961860 - DNA, 15 bp, Homo sapiens
agcaacggggtgggg

SEQ ID NO: 1961861 - DNA, 15 bp, Homo sapiens
gcaacggggtggggg

SEQ ID NO: 1961862 - DNA, 15 bp, Homo sapiens
caacggggtgggggc

SEQ ID NO: 1961863 - DNA, 15 bp, Homo sapiens
aacggggtgggggca

SEQ ID NO: 1961864 - DNA, 15 bp, Homo sapiens
acggggtgggggcac

SEQ ID NO: 1961865 - DNA, 15 bp, Homo sapiens
cggggtgggggcaca

SEQ ID NO: 1961866 - DNA, 15 bp, Homo sapiens
ggggtgggggcacac

SEQ ID NO: 1961867 - DNA, 15 bp, Homo sapiens
gggtgggggcacact

SEQ ID NO: 1961868 - DNA, 15 bp, Homo sapiens
ggtgggggcacactg

SEQ ID NO: 1961869 - DNA, 15 bp, Homo sapiens
gtgggggcacactgt

SEQ ID NO: 1961870 - DNA, 15 bp, Homo sapiens
tgggggcacactgtg

SEQ ID NO: 1961871 - DNA, 15 bp, Homo sapiens
gggggcacactgtgt

SEQ ID NO: 1961872 - DNA, 15 bp, Homo sapiens
ggggcacactgtgtg

SEQ ID NO: 1961873 - DNA, 15 bp, Homo sapiens
gggcacactgtgtgc

SEQ ID NO: 1961874 - DNA, 15 bp, Homo sapiens
ggcacactgtgtgcc

SEQ ID NO: 1961875 - DNA, 15 bp, Homo sapiens
gcacactgtgtgccc

SEQ ID NO: 1961876 - DNA, 15 bp, Homo sapiens
cacactgtgtgccca

SEQ ID NO: 1961877 - DNA, 15 bp, Homo sapiens
acactgtgtgcccag

SEQ ID NO: 1961878 - DNA, 15 bp, Homo sapiens
cactgtgtgcccagc

SEQ ID NO: 1961879 - DNA, 15 bp, Homo sapiens
actgtgtgcccagct

SEQ ID NO: 1961880 - DNA, 15 bp, Homo sapiens
ctgtgtgcccagctg

SEQ ID NO: 1961881 - DNA, 15 bp, Homo sapiens
tgtgtgcccagctgc

SEQ ID NO: 1961882 - DNA, 15 bp, Homo sapiens
gtgtgcccagctgcc

SEQ ID NO: 1961883 - DNA, 15 bp, Homo sapiens
tgtgcccagctgcca

SEQ ID NO: 1961884 - DNA, 15 bp, Homo sapiens
gtgcccagctgccag

SEQ ID NO: 1961885 - DNA, 15 bp, Homo sapiens
tgcccagctgccagc

SEQ ID NO: 1961886 - DNA, 15 bp, Homo sapiens
gcccagctgccagcc

SEQ ID NO: 1961887 - DNA, 15 bp, Homo sapiens
cccagctgccagccc

SEQ ID NO: 1961888 - DNA, 15 bp, Homo sapiens
ccagctgccagccct

SEQ ID NO: 1961889 - DNA, 15 bp, Homo sapiens
cagctgccagccctc

SEQ ID NO: 1961890 - DNA, 15 bp, Homo sapiens
agctgccagccctct

SEQ ID NO: 1961891 - DNA, 15 bp, Homo sapiens
gctgccagccctctg

SEQ ID NO: 1961892 - DNA, 15 bp, Homo sapiens
ctgccagccctctgg

SEQ ID NO: 1961893 - DNA, 15 bp, Homo sapiens
tgccagccctctgga

SEQ ID NO: 1961894 - DNA, 15 bp, Homo sapiens
gccagccctctggaa

SEQ ID NO: 1961895 - DNA, 15 bp, Homo sapiens
ccagccctctggaaa

SEQ ID NO: 1961896 - DNA, 15 bp, Homo sapiens
cagccctctggaaag

SEQ ID NO: 1961897 - DNA, 15 bp, Homo sapiens
agccctctggaaagc

SEQ ID NO: 1961898 - DNA, 15 bp, Homo sapiens
gccctctggaaagcc

SEQ ID NO: 1961899 - DNA, 15 bp, Homo sapiens
ccctctggaaagcct

SEQ ID NO: 1961900 - DNA, 15 bp, Homo sapiens
cctctggaaagcctt

SEQ ID NO: 1961901 - DNA, 15 bp, Homo sapiens
ctctggaaagccttc

SEQ ID NO: 1961902 - DNA, 15 bp, Homo sapiens
tctggaaagccttcc

SEQ ID NO: 1961903 - DNA, 15 bp, Homo sapiens
ctggaaagccttcca

SEQ ID NO: 1961904 - DNA, 15 bp, Homo sapiens
tggaaagccttccag

SEQ ID NO: 1961905 - DNA, 15 bp, Homo sapiens
ggaaagccttccagc

SEQ ID NO: 1961906 - DNA, 15 bp, Homo sapiens
gaaagccttccagcc

SEQ ID NO: 1961907 - DNA, 15 bp, Homo sapiens
aaagccttccagccg

SEQ ID NO: 1961908 - DNA, 15 bp, Homo sapiens
aagccttccagccgc

SEQ ID NO: 1961909 - DNA, 15 bp, Homo sapiens
agccttccagccgct

SEQ ID NO: 1961910 - DNA, 15 bp, Homo sapiens
gccttccagccgctg

SEQ ID NO: 1961911 - DNA, 15 bp, Homo sapiens
ccttccagccgctgg

SEQ ID NO: 1961912 - DNA, 15 bp, Homo sapiens
cttccagccgctggt

SEQ ID NO: 1961913 - DNA, 15 bp, Homo sapiens
ttccagccgctggtg

SEQ ID NO: 1961914 - DNA, 15 bp, Homo sapiens
tccagccgctggtga

SEQ ID NO: 1961915 - DNA, 15 bp, Homo sapiens
ccagccgctggtgaa

SEQ ID NO: 1961916 - DNA, 15 bp, Homo sapiens
cagccgctggtgaag

SEQ ID NO: 1961917 - DNA, 15 bp, Homo sapiens
agccgctggtgaaga

SEQ ID NO: 1961918 - DNA, 15 bp, Homo sapiens
gccgctggtgaagaa

SEQ ID NO: 1961919 - DNA, 15 bp, Homo sapiens
ccgctggtgaagaac

SEQ ID NO: 1961920 - DNA, 15 bp, Homo sapiens
cgctggtgaagaact

SEQ ID NO: 1961921 - DNA, 15 bp, Homo sapiens
gctggtgaagaacta

SEQ ID NO: 1961922 - DNA, 15 bp, Homo sapiens
ctggtgaagaactac

SEQ ID NO: 1961923 - DNA, 15 bp, Homo sapiens
tggtgaagaactacc

SEQ ID NO: 1961924 - DNA, 15 bp, Homo sapiens
ggtgaagaactacca

SEQ ID NO: 1961925 - DNA, 15 bp, Homo sapiens
gtgaagaactaccag

SEQ ID NO: 1961926 - DNA, 15 bp, Homo sapiens
tgaagaactaccagc

SEQ ID NO: 1961927 - DNA, 15 bp, Homo sapiens
gaagaactaccagcc

SEQ ID NO: 1961928 - DNA, 15 bp, Homo sapiens
aagaactaccagccc

SEQ ID NO: 1961929 - DNA, 15 bp, Homo sapiens
agaactaccagccct

SEQ ID NO: 1961930 - DNA, 15 bp, Homo sapiens
gaactaccagccctg

SEQ ID NO: 1961931 - DNA, 15 bp, Homo sapiens
aactaccagccctgt

SEQ ID NO: 1961932 - DNA, 15 bp, Homo sapiens
actaccagccctgta

SEQ ID NO: 1961933 - DNA, 15 bp, Homo sapiens
ctaccagccctgtaa

SEQ ID NO: 1961934 - DNA, 15 bp, Homo sapiens
taccagccctgtaat

SEQ ID NO: 1961935 - DNA, 15 bp, Homo sapiens
accagccctgtaatg

SEQ ID NO: 1961936 - DNA, 15 bp, Homo sapiens
ccagccctgtaatgg

SEQ ID NO: 1961937 - DNA, 15 bp, Homo sapiens
cagccctgtaatggc

SEQ ID NO: 1961938 - DNA, 15 bp, Homo sapiens
agccctgtaatggca

SEQ ID NO: 1961939 - DNA, 15 bp, Homo sapiens
gccctgtaatggcat

SEQ ID NO: 1961940 - DNA, 15 bp, Homo sapiens
ccctgtaatggcatg

SEQ ID NO: 1961941 - DNA, 15 bp, Homo sapiens
cctgtaatggcatgg

SEQ ID NO: 1961942 - DNA, 15 bp, Homo sapiens
ctgtaatggcatggc

SEQ ID NO: 1961943 - DNA, 15 bp, Homo sapiens
tgtaatggcatggcc

SEQ ID NO: 1961944 - DNA, 15 bp, Homo sapiens
gtaatggcatggcca

SEQ ID NO: 1961945 - DNA, 15 bp, Homo sapiens
taatggcatggccag

SEQ ID NO: 1961946 - DNA, 15 bp, Homo sapiens
aatggcatggccagg

SEQ ID NO: 1961947 - DNA, 15 bp, Homo sapiens
atggcatggccagga

SEQ ID NO: 1961948 - DNA, 15 bp, Homo sapiens
tggcatggccaggaa

SEQ ID NO: 1961949 - DNA, 15 bp, Homo sapiens
ggcatggccaggaag

SEQ ID NO: 1961950 - DNA, 15 bp, Homo sapiens
gcatggccaggaagc

SEQ ID NO: 1961951 - DNA, 15 bp, Homo sapiens
catggccaggaagcc

SEQ ID NO: 1961952 - DNA, 15 bp, Homo sapiens
atggccaggaagccc

SEQ ID NO: 1961953 - DNA, 15 bp, Homo sapiens
tggccaggaagccca

SEQ ID NO: 1961954 - DNA, 15 bp, Homo sapiens
ggccaggaagcccag

SEQ ID NO: 1961955 - DNA, 15 bp, Homo sapiens
gccaggaagcccagc

SEQ ID NO: 1961956 - DNA, 15 bp, Homo sapiens
ccaggaagcccagca

SEQ ID NO: 1961957 - DNA, 15 bp, Homo sapiens
caggaagcccagcag

SEQ ID NO: 1961958 - DNA, 15 bp, Homo sapiens
aggaagcccagcaga

SEQ ID NO: 1961959 - DNA, 15 bp, Homo sapiens
ggaagcccagcagag

SEQ ID NO: 1961960 - DNA, 15 bp, Homo sapiens
gaagcccagcagagc

SEQ ID NO: 1961961 - DNA, 15 bp, Homo sapiens
aagcccagcagagct

SEQ ID NO: 1961962 - DNA, 15 bp, Homo sapiens
agcccagcagagctt

SEQ ID NO: 1961963 - DNA, 15 bp, Homo sapiens
gcccagcagagctta

SEQ ID NO: 1961964 - DNA, 15 bp, Homo sapiens
cccagcagagcttat

SEQ ID NO: 1961965 - DNA, 15 bp, Homo sapiens
ccagcagagcttata

SEQ ID NO: 1961966 - DNA, 15 bp, Homo sapiens
cagcagagcttataa

SEQ ID NO: 1961967 - DNA, 15 bp, Homo sapiens
agcagagcttataag

SEQ ID NO: 1961968 - DNA, 15 bp, Homo sapiens
gcagagcttataaga

SEQ ID NO: 1961969 - DNA, 15 bp, Homo sapiens
cagagcttataagat

SEQ ID NO: 1961970 - DNA, 15 bp, Homo sapiens
agagcttataagatc

SEQ ID NO: 1961971 - DNA, 15 bp, Homo sapiens
gagcttataagatct

SEQ ID NO: 1961972 - DNA, 15 bp, Homo sapiens
agcttataagatcta

SEQ ID NO: 1961973 - DNA, 15 bp, Homo sapiens
gcttataagatctaa

SEQ ID NO: 1961974 - DNA, 15 bp, Homo sapiens
cttataagatctaac

SEQ ID NO: 1961975 - DNA, 15 bp, Homo sapiens
ttataagatctaacc

SEQ ID NO: 1961976 - DNA, 15 bp, Homo sapiens
tataagatctaaccc

SEQ ID NO: 1961977 - DNA, 15 bp, Homo sapiens
ataagatctaaccct

SEQ ID NO: 1961978 - DNA, 15 bp, Homo sapiens
taagatctaaccctt

SEQ ID NO: 1961979 - DNA, 15 bp, Homo sapiens
aagatctaaccctta

SEQ ID NO: 1961980 - DNA, 15 bp, Homo sapiens
agatctaacccttat

SEQ ID NO: 1961981 - DNA, 15 bp, Homo sapiens
gatctaacccttatg

SEQ ID NO: 1961982 - DNA, 15 bp, Homo sapiens
atctaacccttatgg

SEQ ID NO: 1961983 - DNA, 15 bp, Homo sapiens
tctaacccttatggc

SEQ ID NO: 1961984 - DNA, 15 bp, Homo sapiens
ctaacccttatggcc

SEQ ID NO: 1961985 - DNA, 15 bp, Homo sapiens
taacccttatggcca

SEQ ID NO: 1961986 - DNA, 15 bp, Homo sapiens
aacccttatggccag

SEQ ID NO: 1961987 - DNA, 15 bp, Homo sapiens
acccttatggccagg

SEQ ID NO: 1961988 - DNA, 15 bp, Homo sapiens
cccttatggccaggt

SEQ ID NO: 1961989 - DNA, 15 bp, Homo sapiens
ccttatggccaggtg

SEQ ID NO: 1961990 - DNA, 15 bp, Homo sapiens
cttatggccaggtgc

SEQ ID NO: 1961991 - DNA, 15 bp, Homo sapiens
ttatggccaggtgca

SEQ ID NO: 1961992 - DNA, 15 bp, Homo sapiens
tatggccaggtgcag

SEQ ID NO: 1961993 - DNA, 15 bp, Homo sapiens
atggccaggtgcagt

SEQ ID NO: 1961994 - DNA, 15 bp, Homo sapiens
tggccaggtgcagtg

SEQ ID NO: 1961995 - DNA, 15 bp, Homo sapiens
caggtgcagtggctc

SEQ ID NO: 1961996 - DNA, 15 bp, Homo sapiens
tgcagtggctcacgt

SEQ ID NO: 1961997 - DNA, 15 bp, Homo sapiens
gcagtggctcacgta

SEQ ID NO: 1961998 - DNA, 15 bp, Homo sapiens
cagtggctcacgtat

SEQ ID NO: 1961999 - DNA, 15 bp, Homo sapiens
agtggctcacgtatg

SEQ ID NO: 1962000 - DNA, 15 bp, Homo sapiens
gtggctcacgtatgt

SEQ ID NO: 1962001 - DNA, 15 bp, Homo sapiens
tggctcacgtatgta

SEQ ID NO: 1962002 - DNA, 15 bp, Homo sapiens
ggctcacgtatgtaa

SEQ ID NO: 1962003 - DNA, 15 bp, Homo sapiens
gctcacgtatgtaat

SEQ ID NO: 1962004 - DNA, 15 bp, Homo sapiens
ctcacgtatgtaatc

SEQ ID NO: 1962005 - DNA, 15 bp, Homo sapiens
tcacgtatgtaatcc

SEQ ID NO: 1962006 - DNA, 15 bp, Homo sapiens
cacgtatgtaatccc

SEQ ID NO: 1962007 - DNA, 15 bp, Homo sapiens
acgtatgtaatccca

SEQ ID NO: 1962008 - DNA, 15 bp, Homo sapiens
cgtatgtaatcccag

SEQ ID NO: 1962009 - DNA, 15 bp, Homo sapiens
gtatgtaatcccagc

SEQ ID NO: 1962010 - DNA, 15 bp, Homo sapiens
tatgtaatcccagca

SEQ ID NO: 1962011 - DNA, 15 bp, Homo sapiens
atgtaatcccagcac

SEQ ID NO: 1962012 - DNA, 15 bp, Homo sapiens
ttgggaagccaagga

SEQ ID NO: 1962013 - DNA, 15 bp, Homo sapiens
tgggaagccaaggag

SEQ ID NO: 1962014 - DNA, 15 bp, Homo sapiens
gggaagccaaggagg

SEQ ID NO: 1962015 - DNA, 15 bp, Homo sapiens
ggaagccaaggaggg

SEQ ID NO: 1962016 - DNA, 15 bp, Homo sapiens
gaagccaaggaggga

SEQ ID NO: 1962017 - DNA, 15 bp, Homo sapiens
aagccaaggagggag

SEQ ID NO: 1962018 - DNA, 15 bp, Homo sapiens
agccaaggagggagg

SEQ ID NO: 1962019 - DNA, 15 bp, Homo sapiens
gccaaggagggagga

SEQ ID NO: 1962020 - DNA, 15 bp, Homo sapiens
ccaaggagggaggat

SEQ ID NO: 1962021 - DNA, 15 bp, Homo sapiens
caaggagggaggatc

SEQ ID NO: 1962022 - DNA, 15 bp, Homo sapiens
aaggagggaggatca

SEQ ID NO: 1962023 - DNA, 15 bp, Homo sapiens
aggagggaggatcac

SEQ ID NO: 1962024 - DNA, 15 bp, Homo sapiens
ggagggaggatcact

SEQ ID NO: 1962025 - DNA, 15 bp, Homo sapiens
aggatcacttgaact

SEQ ID NO: 1962026 - DNA, 15 bp, Homo sapiens
ggatcacttgaactc

SEQ ID NO: 1962027 - DNA, 15 bp, Homo sapiens
gatcacttgaactca

SEQ ID NO: 1962028 - DNA, 15 bp, Homo sapiens
atcacttgaactcag

SEQ ID NO: 1962029 - DNA, 15 bp, Homo sapiens
tcacttgaactcagg

SEQ ID NO: 1962030 - DNA, 15 bp, Homo sapiens
cacttgaactcagga

SEQ ID NO: 1962031 - DNA, 15 bp, Homo sapiens
acttgaactcaggaa

SEQ ID NO: 1962032 - DNA, 15 bp, Homo sapiens
cttgaactcaggaat

SEQ ID NO: 1962033 - DNA, 15 bp, Homo sapiens
ttgaactcaggaatt

SEQ ID NO: 1962034 - DNA, 15 bp, Homo sapiens
tgaactcaggaattc

SEQ ID NO: 1962035 - DNA, 15 bp, Homo sapiens
gaactcaggaattcg

SEQ ID NO: 1962036 - DNA, 15 bp, Homo sapiens
aactcaggaattcga

SEQ ID NO: 1962037 - DNA, 15 bp, Homo sapiens
actcaggaattcgag

SEQ ID NO: 1962038 - DNA, 15 bp, Homo sapiens
ctcaggaattcgaga

SEQ ID NO: 1962039 - DNA, 15 bp, Homo sapiens
agaccagcctgggct

SEQ ID NO: 1962040 - DNA, 15 bp, Homo sapiens
gaccagcctgggcta

SEQ ID NO: 1962041 - DNA, 15 bp, Homo sapiens
accagcctgggctac

SEQ ID NO: 1962042 - DNA, 15 bp, Homo sapiens
ccagcctgggctaca

SEQ ID NO: 1962043 - DNA, 15 bp, Homo sapiens
cagcctgggctacat

SEQ ID NO: 1962044 - DNA, 15 bp, Homo sapiens
agcctgggctacata

SEQ ID NO: 1962045 - DNA, 15 bp, Homo sapiens
gcctgggctacatag

SEQ ID NO: 1962046 - DNA, 15 bp, Homo sapiens
cctgggctacatagt

SEQ ID NO: 1962047 - DNA, 15 bp, Homo sapiens
ctgggctacatagtg

SEQ ID NO: 1962048 - DNA, 15 bp, Homo sapiens
tgggctacatagtga

SEQ ID NO: 1962049 - DNA, 15 bp, Homo sapiens
gggctacatagtgag

SEQ ID NO: 1962050 - DNA, 15 bp, Homo sapiens
ggctacatagtgaga

SEQ ID NO: 1962051 - DNA, 15 bp, Homo sapiens
gctacatagtgagac

SEQ ID NO: 1962052 - DNA, 15 bp, Homo sapiens
ctacatagtgagacc

SEQ ID NO: 1962053 - DNA, 15 bp, Homo sapiens
tacatagtgagacca

SEQ ID NO: 1962054 - DNA, 15 bp, Homo sapiens
acatagtgagaccac

SEQ ID NO: 1962055 - DNA, 15 bp, Homo sapiens
catagtgagaccaca

SEQ ID NO: 1962056 - DNA, 15 bp, Homo sapiens
atagtgagaccacat

SEQ ID NO: 1962057 - DNA, 15 bp, Homo sapiens
tagtgagaccacatc

SEQ ID NO: 1962058 - DNA, 15 bp, Homo sapiens
agtgagaccacatct

SEQ ID NO: 1962059 - DNA, 15 bp, Homo sapiens
gtgagaccacatctc

SEQ ID NO: 1962060 - DNA, 15 bp, Homo sapiens
tgagaccacatctct

SEQ ID NO: 1962061 - DNA, 15 bp, Homo sapiens
gagaccacatctcta

SEQ ID NO: 1962062 - DNA, 15 bp, Homo sapiens
agaccacatctctac

SEQ ID NO: 1962063 - DNA, 15 bp, Homo sapiens
gaccacatctctact

SEQ ID NO: 1962064 - DNA, 15 bp, Homo sapiens
accacatctctacta

SEQ ID NO: 1962065 - DNA, 15 bp, Homo sapiens
ccacatctctactag

SEQ ID NO: 1962066 - DNA, 15 bp, Homo sapiens
cacatctctactaga

SEQ ID NO: 1962067 - DNA, 15 bp, Homo sapiens
acatctctactagaa

SEQ ID NO: 1962068 - DNA, 15 bp, Homo sapiens
catctctactagaac

SEQ ID NO: 1962069 - DNA, 15 bp, Homo sapiens
atctctactagaact

SEQ ID NO: 1962070 - DNA, 15 bp, Homo sapiens
tctctactagaactt

SEQ ID NO: 1962071 - DNA, 15 bp, Homo sapiens
ctctactagaactta

SEQ ID NO: 1962072 - DNA, 15 bp, Homo sapiens
tctactagaacttaa

SEQ ID NO: 1962073 - DNA, 15 bp, Homo sapiens
ctactagaacttaaa

SEQ ID NO: 1962074 - DNA, 15 bp, Homo sapiens
tactagaacttaaaa

SEQ ID NO: 1962075 - DNA, 15 bp, Homo sapiens
actagaacttaaaaa

SEQ ID NO: 1962076 - DNA, 15 bp, Homo sapiens
ctagaacttaaaaaa

SEQ ID NO: 1962077 - DNA, 15 bp, Homo sapiens
tagaacttaaaaaaa

SEQ ID NO: 1962078 - DNA, 15 bp, Homo sapiens
agaacttaaaaaaag

SEQ ID NO: 1962079 - DNA, 15 bp, Homo sapiens
gaacttaaaaaaagt

SEQ ID NO: 1962080 - DNA, 15 bp, Homo sapiens
aacttaaaaaaagtt

SEQ ID NO: 1962081 - DNA, 15 bp, Homo sapiens
cttaaaaaaagttag

SEQ ID NO: 1962082 - DNA, 15 bp, Homo sapiens
ttaaaaaaagttagc

SEQ ID NO: 1962083 - DNA, 15 bp, Homo sapiens
taaaaaaagttagcc

SEQ ID NO: 1962084 - DNA, 15 bp, Homo sapiens
aaaaaaagttagcca

SEQ ID NO: 1962085 - DNA, 15 bp, Homo sapiens
aaaaaagttagccag

SEQ ID NO: 1962086 - DNA, 15 bp, Homo sapiens
aaaagttagccaggc

SEQ ID NO: 1962087 - DNA, 15 bp, Homo sapiens
aaagttagccaggca

SEQ ID NO: 1962088 - DNA, 15 bp, Homo sapiens
aagttagccaggcac

SEQ ID NO: 1962089 - DNA, 15 bp, Homo sapiens
agttagccaggcacg

SEQ ID NO: 1962090 - DNA, 15 bp, Homo sapiens
gttagccaggcacgg

SEQ ID NO: 1962091 - DNA, 15 bp, Homo sapiens
agccaggcacggtga

SEQ ID NO: 1962092 - DNA, 15 bp, Homo sapiens
gccaggcacggtgat

SEQ ID NO: 1962093 - DNA, 15 bp, Homo sapiens
ccaggcacggtgata

SEQ ID NO: 1962094 - DNA, 15 bp, Homo sapiens
caggcacggtgataa

SEQ ID NO: 1962095 - DNA, 15 bp, Homo sapiens
aggcacggtgataaa

SEQ ID NO: 1962096 - DNA, 15 bp, Homo sapiens
ggcacggtgataaat

SEQ ID NO: 1962097 - DNA, 15 bp, Homo sapiens
gcacggtgataaatg

SEQ ID NO: 1962098 - DNA, 15 bp, Homo sapiens
cacggtgataaatgc

SEQ ID NO: 1962099 - DNA, 15 bp, Homo sapiens
acggtgataaatgcc

SEQ ID NO: 1962100 - DNA, 15 bp, Homo sapiens
cggtgataaatgcct

SEQ ID NO: 1962101 - DNA, 15 bp, Homo sapiens
ggtgataaatgcctg

SEQ ID NO: 1962102 - DNA, 15 bp, Homo sapiens
gtgataaatgcctgt

SEQ ID NO: 1962103 - DNA, 15 bp, Homo sapiens
tgataaatgcctgta

SEQ ID NO: 1962104 - DNA, 15 bp, Homo sapiens
gataaatgcctgtag

SEQ ID NO: 1962105 - DNA, 15 bp, Homo sapiens
ataaatgcctgtagt

SEQ ID NO: 1962106 - DNA, 15 bp, Homo sapiens
taaatgcctgtagtc

SEQ ID NO: 1962107 - DNA, 15 bp, Homo sapiens
aaatgcctgtagtcc

SEQ ID NO: 1962108 - DNA, 15 bp, Homo sapiens
aatgcctgtagtccc

SEQ ID NO: 1962109 - DNA, 15 bp, Homo sapiens
cctgtagtcccagcc

SEQ ID NO: 1962110 - DNA, 15 bp, Homo sapiens
ctgtagtcccagcca

SEQ ID NO: 1962111 - DNA, 15 bp, Homo sapiens
tgtagtcccagccac

SEQ ID NO: 1962112 - DNA, 15 bp, Homo sapiens
gtagtcccagccact

SEQ ID NO: 1962113 - DNA, 15 bp, Homo sapiens
tagtcccagccactg

SEQ ID NO: 1962114 - DNA, 15 bp, Homo sapiens
agtcccagccactga

SEQ ID NO: 1962115 - DNA, 15 bp, Homo sapiens
gtcccagccactgaa

SEQ ID NO: 1962116 - DNA, 15 bp, Homo sapiens
tcccagccactgaag

SEQ ID NO: 1962117 - DNA, 15 bp, Homo sapiens
cccagccactgaagc

SEQ ID NO: 1962118 - DNA, 15 bp, Homo sapiens
ccagccactgaagcc

SEQ ID NO: 1962119 - DNA, 15 bp, Homo sapiens
cagccactgaagcca

SEQ ID NO: 1962120 - DNA, 15 bp, Homo sapiens
agccactgaagccag

SEQ ID NO: 1962121 - DNA, 15 bp, Homo sapiens
gccactgaagccaga

SEQ ID NO: 1962122 - DNA, 15 bp, Homo sapiens
ccactgaagccagag

SEQ ID NO: 1962123 - DNA, 15 bp, Homo sapiens
cactgaagccagagg

SEQ ID NO: 1962124 - DNA, 15 bp, Homo sapiens
actgaagccagagga

SEQ ID NO: 1962125 - DNA, 15 bp, Homo sapiens
ctgaagccagaggat

SEQ ID NO: 1962126 - DNA, 15 bp, Homo sapiens
tgaagccagaggatc

SEQ ID NO: 1962127 - DNA, 15 bp, Homo sapiens
gaagccagaggatcg

SEQ ID NO: 1962128 - DNA, 15 bp, Homo sapiens
aagccagaggatcga

SEQ ID NO: 1962129 - DNA, 15 bp, Homo sapiens
agccagaggatcgat

SEQ ID NO: 1962130 - DNA, 15 bp, Homo sapiens
gccagaggatcgatt

SEQ ID NO: 1962131 - DNA, 15 bp, Homo sapiens
ccagaggatcgattg

SEQ ID NO: 1962132 - DNA, 15 bp, Homo sapiens
cagaggatcgattga

SEQ ID NO: 1962133 - DNA, 15 bp, Homo sapiens
agaggatcgattgaa

SEQ ID NO: 1962134 - DNA, 15 bp, Homo sapiens
gaggatcgattgaac

SEQ ID NO: 1962135 - DNA, 15 bp, Homo sapiens
aggatcgattgaacc

SEQ ID NO: 1962136 - DNA, 15 bp, Homo sapiens
ggatcgattgaacca

SEQ ID NO: 1962137 - DNA, 15 bp, Homo sapiens
gatcgattgaaccag

SEQ ID NO: 1962138 - DNA, 15 bp, Homo sapiens
atcgattgaaccagg

SEQ ID NO: 1962139 - DNA, 15 bp, Homo sapiens
tcgattgaaccaggg

SEQ ID NO: 1962140 - DNA, 15 bp, Homo sapiens
cgattgaaccaggga

SEQ ID NO: 1962141 - DNA, 15 bp, Homo sapiens
gattgaaccagggag

SEQ ID NO: 1962142 - DNA, 15 bp, Homo sapiens
attgaaccagggaga

SEQ ID NO: 1962143 - DNA, 15 bp, Homo sapiens
ttgaaccagggagat

SEQ ID NO: 1962144 - DNA, 15 bp, Homo sapiens
tgaaccagggagatc

SEQ ID NO: 1962145 - DNA, 15 bp, Homo sapiens
gaaccagggagatca

SEQ ID NO: 1962146 - DNA, 15 bp, Homo sapiens
aaccagggagatcat

SEQ ID NO: 1962147 - DNA, 15 bp, Homo sapiens
accagggagatcatg

SEQ ID NO: 1962148 - DNA, 15 bp, Homo sapiens
ccagggagatcatgg

SEQ ID NO: 1962149 - DNA, 15 bp, Homo sapiens
cagggagatcatggt

SEQ ID NO: 1962150 - DNA, 15 bp, Homo sapiens
agggagatcatggtc

SEQ ID NO: 1962151 - DNA, 15 bp, Homo sapiens
gggagatcatggtca

SEQ ID NO: 1962152 - DNA, 15 bp, Homo sapiens
ggagatcatggtcac

SEQ ID NO: 1962153 - DNA, 15 bp, Homo sapiens
gagatcatggtcaca

SEQ ID NO: 1962154 - DNA, 15 bp, Homo sapiens
agatcatggtcacag

SEQ ID NO: 1962155 - DNA, 15 bp, Homo sapiens
gatcatggtcacagt

SEQ ID NO: 1962156 - DNA, 15 bp, Homo sapiens
atcatggtcacagtg

SEQ ID NO: 1962157 - DNA, 15 bp, Homo sapiens
tcatggtcacagtga

SEQ ID NO: 1962158 - DNA, 15 bp, Homo sapiens
catggtcacagtgaa

SEQ ID NO: 1962159 - DNA, 15 bp, Homo sapiens
atggtcacagtgaac

SEQ ID NO: 1962160 - DNA, 15 bp, Homo sapiens
tggtcacagtgaact

SEQ ID NO: 1962161 - DNA, 15 bp, Homo sapiens
ggtcacagtgaacta

SEQ ID NO: 1962162 - DNA, 15 bp, Homo sapiens
gtcacagtgaactat

SEQ ID NO: 1962163 - DNA, 15 bp, Homo sapiens
tcacagtgaactatg

SEQ ID NO: 1962164 - DNA, 15 bp, Homo sapiens
cacagtgaactatga

SEQ ID NO: 1962165 - DNA, 15 bp, Homo sapiens
acagtgaactatgat

SEQ ID NO: 1962166 - DNA, 15 bp, Homo sapiens
cagtgaactatgatt

SEQ ID NO: 1962167 - DNA, 15 bp, Homo sapiens
agtgaactatgatta

SEQ ID NO: 1962168 - DNA, 15 bp, Homo sapiens
gtgaactatgattac

SEQ ID NO: 1962169 - DNA, 15 bp, Homo sapiens
tgaactatgattacg

SEQ ID NO: 1962170 - DNA, 15 bp, Homo sapiens
gaactatgattacgc

SEQ ID NO: 1962171 - DNA, 15 bp, Homo sapiens
aactatgattacgcc

SEQ ID NO: 1962172 - DNA, 15 bp, Homo sapiens
actatgattacgcca

SEQ ID NO: 1962173 - DNA, 15 bp, Homo sapiens
ctatgattacgccaa

SEQ ID NO: 1962174 - DNA, 15 bp, Homo sapiens
tatgattacgccaac

SEQ ID NO: 1962175 - DNA, 15 bp, Homo sapiens
atgattacgccaacc

SEQ ID NO: 1962176 - DNA, 15 bp, Homo sapiens
tgattacgccaacct

SEQ ID NO: 1962177 - DNA, 15 bp, Homo sapiens
gattacgccaacctg

SEQ ID NO: 1962178 - DNA, 15 bp, Homo sapiens
attacgccaacctgg

SEQ ID NO: 1962179 - DNA, 15 bp, Homo sapiens
ttacgccaacctggg

SEQ ID NO: 1962180 - DNA, 15 bp, Homo sapiens
tacgccaacctgggt

SEQ ID NO: 1962181 - DNA, 15 bp, Homo sapiens
acgccaacctgggtc

SEQ ID NO: 1962182 - DNA, 15 bp, Homo sapiens
cgccaacctgggtca

SEQ ID NO: 1962183 - DNA, 15 bp, Homo sapiens
gccaacctgggtcac

SEQ ID NO: 1962184 - DNA, 15 bp, Homo sapiens
ccaacctgggtcaca

SEQ ID NO: 1962185 - DNA, 15 bp, Homo sapiens
caacctgggtcacat

SEQ ID NO: 1962186 - DNA, 15 bp, Homo sapiens
aacctgggtcacata

SEQ ID NO: 1962187 - DNA, 15 bp, Homo sapiens
acctgggtcacatag

SEQ ID NO: 1962188 - DNA, 15 bp, Homo sapiens
cctgggtcacatagc

SEQ ID NO: 1962189 - DNA, 15 bp, Homo sapiens
ctgggtcacatagca

SEQ ID NO: 1962190 - DNA, 15 bp, Homo sapiens
tgggtcacatagcaa

SEQ ID NO: 1962191 - DNA, 15 bp, Homo sapiens
gggtcacatagcaag

SEQ ID NO: 1962192 - DNA, 15 bp, Homo sapiens
ggtcacatagcaaga

SEQ ID NO: 1962193 - DNA, 15 bp, Homo sapiens
gtcacatagcaagac

SEQ ID NO: 1962194 - DNA, 15 bp, Homo sapiens
tcacatagcaagact

SEQ ID NO: 1962195 - DNA, 15 bp, Homo sapiens
cacatagcaagactc

SEQ ID NO: 1962196 - DNA, 15 bp, Homo sapiens
tagcaagactctgtt

SEQ ID NO: 1962197 - DNA, 15 bp, Homo sapiens
agcaagactctgttt

SEQ ID NO: 1962198 - DNA, 15 bp, Homo sapiens
gcaagactctgtttc

SEQ ID NO: 1962199 - DNA, 15 bp, Homo sapiens
caagactctgtttca

SEQ ID NO: 1962200 - DNA, 15 bp, Homo sapiens
aagactctgtttcaa

SEQ ID NO: 1962201 - DNA, 15 bp, Homo sapiens
agactctgtttcaaa

SEQ ID NO: 1962202 - DNA, 15 bp, Homo sapiens
gactctgtttcaaaa

SEQ ID NO: 1962203 - DNA, 15 bp, Homo sapiens
actctgtttcaaaaa

SEQ ID NO: 1962204 - DNA, 15 bp, Homo sapiens
ctctgtttcaaaaaa

SEQ ID NO: 1962205 - DNA, 15 bp, Homo sapiens
tctgtttcaaaaaaa

SEQ ID NO: 1962206 - DNA, 15 bp, Homo sapiens
ctgtttcaaaaaaaa

SEQ ID NO: 1962207 - DNA, 15 bp, Homo sapiens
gtttcaaaaaaaaag

SEQ ID NO: 1962208 - DNA, 15 bp, Homo sapiens
tttcaaaaaaaaagg

SEQ ID NO: 1962209 - DNA, 15 bp, Homo sapiens
ttcaaaaaaaaaggg

SEQ ID NO: 1962210 - DNA, 15 bp, Homo sapiens
tcaaaaaaaaagggg

SEQ ID NO: 1962211 - DNA, 15 bp, Homo sapiens
caaaaaaaaaggggg

SEQ ID NO: 1962212 - DNA, 15 bp, Homo sapiens
aaaaaaagggggggc

SEQ ID NO: 1962213 - DNA, 15 bp, Homo sapiens
aaaaaagggggggcg

SEQ ID NO: 1962214 - DNA, 15 bp, Homo sapiens
aaaaagggggggcgg

SEQ ID NO: 1962215 - DNA, 15 bp, Homo sapiens
aaaagggggggcggg

SEQ ID NO: 1962216 - DNA, 15 bp, Homo sapiens
aaagggggggcgggg

SEQ ID NO: 1962217 - DNA, 15 bp, Homo sapiens
aagggggggcggggg

SEQ ID NO: 1962218 - DNA, 15 bp, Homo sapiens
agggggggcggggga

SEQ ID NO: 1962219 - DNA, 15 bp, Homo sapiens
gggggggcgggggac

SEQ ID NO: 1962220 - DNA, 15 bp, Homo sapiens
ggggggcgggggacg

SEQ ID NO: 1962221 - DNA, 15 bp, Homo sapiens
gggggcgggggacgg

SEQ ID NO: 1962222 - DNA, 15 bp, Homo sapiens
ggggcgggggacggg

SEQ ID NO: 1962223 - DNA, 15 bp, Homo sapiens
gggcgggggacgggt

SEQ ID NO: 1962224 - DNA, 15 bp, Homo sapiens
ggcgggggacgggtg

SEQ ID NO: 1962225 - DNA, 15 bp, Homo sapiens
gcgggggacgggtgg

SEQ ID NO: 1962226 - DNA, 15 bp, Homo sapiens
cgggggacgggtggg

SEQ ID NO: 1962227 - DNA, 15 bp, Homo sapiens
gggggacgggtgggt

SEQ ID NO: 1962228 - DNA, 15 bp, Homo sapiens
ggggacgggtgggtg

SEQ ID NO: 1962229 - DNA, 15 bp, Homo sapiens
gggacgggtgggtgc

SEQ ID NO: 1962230 - DNA, 15 bp, Homo sapiens
ggacgggtgggtgca

SEQ ID NO: 1962231 - DNA, 15 bp, Homo sapiens
gacgggtgggtgcag

SEQ ID NO: 1962232 - DNA, 15 bp, Homo sapiens
acgggtgggtgcagt

SEQ ID NO: 1962233 - DNA, 15 bp, Homo sapiens
cgggtgggtgcagtg

SEQ ID NO: 1962234 - DNA, 15 bp, Homo sapiens
gggtgggtgcagtgg

SEQ ID NO: 1962235 - DNA, 15 bp, Homo sapiens
ggtgggtgcagtggc

SEQ ID NO: 1962236 - DNA, 15 bp, Homo sapiens
gtgggtgcagtggct

SEQ ID NO: 1962237 - DNA, 15 bp, Homo sapiens
tgggtgcagtggctc

SEQ ID NO: 1962238 - DNA, 15 bp, Homo sapiens
ggggtcgtgtgatgt

SEQ ID NO: 1962239 - DNA, 15 bp, Homo sapiens
gggtcgtgtgatgtc

SEQ ID NO: 1962240 - DNA, 15 bp, Homo sapiens
ggtcgtgtgatgtct

SEQ ID NO: 1962241 - DNA, 15 bp, Homo sapiens
gtcgtgtgatgtctc

SEQ ID NO: 1962242 - DNA, 15 bp, Homo sapiens
tcgtgtgatgtctcg

SEQ ID NO: 1962243 - DNA, 15 bp, Homo sapiens
cgtgtgatgtctcgc

SEQ ID NO: 1962244 - DNA, 15 bp, Homo sapiens
gtgtgatgtctcgcc

SEQ ID NO: 1962245 - DNA, 15 bp, Homo sapiens
tgtgatgtctcgcct

SEQ ID NO: 1962246 - DNA, 15 bp, Homo sapiens
gtgatgtctcgcctt

SEQ ID NO: 1962247 - DNA, 15 bp, Homo sapiens
tgatgtctcgccttg

SEQ ID NO: 1962248 - DNA, 15 bp, Homo sapiens
gatgtctcgccttgc

SEQ ID NO: 1962249 - DNA, 15 bp, Homo sapiens
atgtctcgccttgcc

SEQ ID NO: 1962250 - DNA, 15 bp, Homo sapiens
tgtctcgccttgcct

SEQ ID NO: 1962251 - DNA, 15 bp, Homo sapiens
gtctcgccttgcctg

SEQ ID NO: 1962252 - DNA, 15 bp, Homo sapiens
tctcgccttgcctgg

SEQ ID NO: 1962253 - DNA, 15 bp, Homo sapiens
ctcgccttgcctgga

SEQ ID NO: 1962254 - DNA, 15 bp, Homo sapiens
tcgccttgcctggag

SEQ ID NO: 1962255 - DNA, 15 bp, Homo sapiens
cgccttgcctggaga

SEQ ID NO: 1962256 - DNA, 15 bp, Homo sapiens
gccttgcctggagag

SEQ ID NO: 1962257 - DNA, 15 bp, Homo sapiens
ccttgcctggagagg

SEQ ID NO: 1962258 - DNA, 15 bp, Homo sapiens
cttgcctggagagga

SEQ ID NO: 1962259 - DNA, 15 bp, Homo sapiens
ttgcctggagaggag

SEQ ID NO: 1962260 - DNA, 15 bp, Homo sapiens
tgcctggagaggagt

SEQ ID NO: 1962261 - DNA, 15 bp, Homo sapiens
gcctggagaggagtg

SEQ ID NO: 1962262 - DNA, 15 bp, Homo sapiens
cctggagaggagtga

SEQ ID NO: 1962263 - DNA, 15 bp, Homo sapiens
ctggagaggagtgag

SEQ ID NO: 1962264 - DNA, 15 bp, Homo sapiens
tggagaggagtgagc

SEQ ID NO: 1962265 - DNA, 15 bp, Homo sapiens
ggagaggagtgagcc

SEQ ID NO: 1962266 - DNA, 15 bp, Homo sapiens
gagaggagtgagccc

SEQ ID NO: 1962267 - DNA, 15 bp, Homo sapiens
agaggagtgagcccc

SEQ ID NO: 1962268 - DNA, 15 bp, Homo sapiens
gaggagtgagcccca

SEQ ID NO: 1962269 - DNA, 15 bp, Homo sapiens
aggagtgagccccag

SEQ ID NO: 1962270 - DNA, 15 bp, Homo sapiens
ggagtgagccccaga

SEQ ID NO: 1962271 - DNA, 15 bp, Homo sapiens
gagtgagccccagaa

SEQ ID NO: 1962272 - DNA, 15 bp, Homo sapiens
agtgagccccagaaa

SEQ ID NO: 1962273 - DNA, 15 bp, Homo sapiens
gtgagccccagaaaa

SEQ ID NO: 1962274 - DNA, 15 bp, Homo sapiens
tgagccccagaaaac

SEQ ID NO: 1962275 - DNA, 15 bp, Homo sapiens
gagccccagaaaact

SEQ ID NO: 1962276 - DNA, 15 bp, Homo sapiens
agccccagaaaactc

SEQ ID NO: 1962277 - DNA, 15 bp, Homo sapiens
gccccagaaaactca

SEQ ID NO: 1962278 - DNA, 15 bp, Homo sapiens
ccccagaaaactcac

SEQ ID NO: 1962279 - DNA, 15 bp, Homo sapiens
cccagaaaactcacg

SEQ ID NO: 1962280 - DNA, 15 bp, Homo sapiens
ccagaaaactcacgc

SEQ ID NO: 1962281 - DNA, 15 bp, Homo sapiens
cagaaaactcacgca

SEQ ID NO: 1962282 - DNA, 15 bp, Homo sapiens
agaaaactcacgcag

SEQ ID NO: 1962283 - DNA, 15 bp, Homo sapiens
gaaaactcacgcagc

SEQ ID NO: 1962284 - DNA, 15 bp, Homo sapiens
aaaactcacgcagca

SEQ ID NO: 1962285 - DNA, 15 bp, Homo sapiens
aaactcacgcagcac

SEQ ID NO: 1962286 - DNA, 15 bp, Homo sapiens
aactcacgcagcacg

SEQ ID NO: 1962287 - DNA, 15 bp, Homo sapiens
actcacgcagcacgg

SEQ ID NO: 1962288 - DNA, 15 bp, Homo sapiens
ctcacgcagcacgga

SEQ ID NO: 1962289 - DNA, 15 bp, Homo sapiens
tcacgcagcacggac

SEQ ID NO: 1962290 - DNA, 15 bp, Homo sapiens
cacgcagcacggacg

SEQ ID NO: 1962291 - DNA, 15 bp, Homo sapiens
acgcagcacggacgc

SEQ ID NO: 1962292 - DNA, 15 bp, Homo sapiens
cgcagcacggacgca

SEQ ID NO: 1962293 - DNA, 15 bp, Homo sapiens
gcagcacggacgcac

SEQ ID NO: 1962294 - DNA, 15 bp, Homo sapiens
cagcacggacgcact

SEQ ID NO: 1962295 - DNA, 15 bp, Homo sapiens
agcacggacgcactt

SEQ ID NO: 1962296 - DNA, 15 bp, Homo sapiens
gcacggacgcacttt

SEQ ID NO: 1962297 - DNA, 15 bp, Homo sapiens
cacggacgcacttta

SEQ ID NO: 1962298 - DNA, 15 bp, Homo sapiens
acggacgcactttat

SEQ ID NO: 1962299 - DNA, 15 bp, Homo sapiens
cggacgcactttatt

SEQ ID NO: 1962300 - DNA, 15 bp, Homo sapiens
ggacgcactttattt

SEQ ID NO: 1962301 - DNA, 15 bp, Homo sapiens
gacgcactttattta

SEQ ID NO: 1962302 - DNA, 15 bp, Homo sapiens
acgcactttatttat

SEQ ID NO: 1962303 - DNA, 15 bp, Homo sapiens
cgcactttatttata

SEQ ID NO: 1962304 - DNA, 15 bp, Homo sapiens
gcactttatttatat

SEQ ID NO: 1962305 - DNA, 15 bp, Homo sapiens
cactttatttatatg

SEQ ID NO: 1962306 - DNA, 15 bp, Homo sapiens
actttatttatatgt

SEQ ID NO: 1962307 - DNA, 15 bp, Homo sapiens
ctttatttatatgtg

SEQ ID NO: 1962308 - DNA, 15 bp, Homo sapiens
tttatttatatgtgt

SEQ ID NO: 1962309 - DNA, 15 bp, Homo sapiens
ttatttatatgtgta

SEQ ID NO: 1962310 - DNA, 15 bp, Homo sapiens
tatttatatgtgtac

SEQ ID NO: 1962311 - DNA, 15 bp, Homo sapiens
atttatatgtgtaca

SEQ ID NO: 1962312 - DNA, 15 bp, Homo sapiens
tttatatgtgtacat

SEQ ID NO: 1962313 - DNA, 15 bp, Homo sapiens
ttatatgtgtacata

SEQ ID NO: 1962314 - DNA, 15 bp, Homo sapiens
tatatgtgtacatat

SEQ ID NO: 1962315 - DNA, 15 bp, Homo sapiens
atatgtgtacatatg

SEQ ID NO: 1962316 - DNA, 15 bp, Homo sapiens
tatgtgtacatatgt

SEQ ID NO: 1962317 - DNA, 15 bp, Homo sapiens
atgtgtacatatgta

SEQ ID NO: 1962318 - DNA, 15 bp, Homo sapiens
tgtgtacatatgtat

SEQ ID NO: 1962319 - DNA, 15 bp, Homo sapiens
gtgtacatatgtata

SEQ ID NO: 1962320 - DNA, 15 bp, Homo sapiens
tgtacatatgtatac

SEQ ID NO: 1962321 - DNA, 15 bp, Homo sapiens
gtacatatgtatacg

SEQ ID NO: 1962322 - DNA, 15 bp, Homo sapiens
tacatatgtatacgg

SEQ ID NO: 1962323 - DNA, 15 bp, Homo sapiens
acatatgtatacgga

SEQ ID NO: 1962324 - DNA, 15 bp, Homo sapiens
catatgtatacggag

SEQ ID NO: 1962325 - DNA, 15 bp, Homo sapiens
atatgtatacggagg

SEQ ID NO: 1962326 - DNA, 15 bp, Homo sapiens
tatgtatacggaggc

SEQ ID NO: 1962327 - DNA, 15 bp, Homo sapiens
atgtatacggaggct

SEQ ID NO: 1962328 - DNA, 15 bp, Homo sapiens
tgtatacggaggctg

SEQ ID NO: 1962329 - DNA, 15 bp, Homo sapiens
gtatacggaggctgt

SEQ ID NO: 1962330 - DNA, 15 bp, Homo sapiens
tatacggaggctgta

SEQ ID NO: 1962331 - DNA, 15 bp, Homo sapiens
atacggaggctgtac

SEQ ID NO: 1962332 - DNA, 15 bp, Homo sapiens
tacggaggctgtaca

SEQ ID NO: 1962333 - DNA, 15 bp, Homo sapiens
acggaggctgtacag

SEQ ID NO: 1962334 - DNA, 15 bp, Homo sapiens
cggaggctgtacagc

SEQ ID NO: 1962335 - DNA, 15 bp, Homo sapiens
ggaggctgtacagcg

SEQ ID NO: 1962336 - DNA, 15 bp, Homo sapiens
gaggctgtacagcgc

SEQ ID NO: 1962337 - DNA, 15 bp, Homo sapiens
aggctgtacagcgcg

SEQ ID NO: 1962338 - DNA, 15 bp, Homo sapiens
ggctgtacagcgcgg

SEQ ID NO: 1962339 - DNA, 15 bp, Homo sapiens
gctgtacagcgcggg

SEQ ID NO: 1962340 - DNA, 15 bp, Homo sapiens
ctgtacagcgcgggg

SEQ ID NO: 1962341 - DNA, 15 bp, Homo sapiens
tgtacagcgcggggc

SEQ ID NO: 1962342 - DNA, 15 bp, Homo sapiens
gtacagcgcggggcc

SEQ ID NO: 1962343 - DNA, 15 bp, Homo sapiens
tacagcgcggggccg

SEQ ID NO: 1962344 - DNA, 15 bp, Homo sapiens
acagcgcggggccga

SEQ ID NO: 1962345 - DNA, 15 bp, Homo sapiens
cagcgcggggccgat

SEQ ID NO: 1962346 - DNA, 15 bp, Homo sapiens
agcgcggggccgatg

SEQ ID NO: 1962347 - DNA, 15 bp, Homo sapiens
gcgcggggccgatga

SEQ ID NO: 1962348 - DNA, 15 bp, Homo sapiens
cgcggggccgatgac

SEQ ID NO: 1962349 - DNA, 15 bp, Homo sapiens
gcggggccgatgacc

SEQ ID NO: 1962350 - DNA, 15 bp, Homo sapiens
cggggccgatgaccc

SEQ ID NO: 1962351 - DNA, 15 bp, Homo sapiens
ggggccgatgacccc

SEQ ID NO: 1962352 - DNA, 15 bp, Homo sapiens
gggccgatgaccccc

SEQ ID NO: 1962353 - DNA, 15 bp, Homo sapiens
ggccgatgaccccct

SEQ ID NO: 1962354 - DNA, 15 bp, Homo sapiens
gccgatgaccccctt

SEQ ID NO: 1962355 - DNA, 15 bp, Homo sapiens
ccgatgacccccttg

SEQ ID NO: 1962356 - DNA, 15 bp, Homo sapiens
cgatgacccccttgg

SEQ ID NO: 1962357 - DNA, 15 bp, Homo sapiens
gatgacccccttggc

SEQ ID NO: 1962358 - DNA, 15 bp, Homo sapiens
atgacccccttggct

SEQ ID NO: 1962359 - DNA, 15 bp, Homo sapiens
tgacccccttggcta

SEQ ID NO: 1962360 - DNA, 15 bp, Homo sapiens
gacccccttggctat

SEQ ID NO: 1962361 - DNA, 15 bp, Homo sapiens
acccccttggctatg

SEQ ID NO: 1962362 - DNA, 15 bp, Homo sapiens
cccccttggctatgg

SEQ ID NO: 1962363 - DNA, 15 bp, Homo sapiens
ccccttggctatggt

SEQ ID NO: 1962364 - DNA, 15 bp, Homo sapiens
cccttggctatggtc

SEQ ID NO: 1962365 - DNA, 15 bp, Homo sapiens
ccttggctatggtcc

SEQ ID NO: 1962366 - DNA, 15 bp, Homo sapiens
cttggctatggtccc

SEQ ID NO: 1962367 - DNA, 15 bp, Homo sapiens
ttggctatggtcccg

SEQ ID NO: 1962368 - DNA, 15 bp, Homo sapiens
tggctatggtcccgg

SEQ ID NO: 1962369 - DNA, 15 bp, Homo sapiens
ggctatggtcccggg

SEQ ID NO: 1962370 - DNA, 15 bp, Homo sapiens
gctatggtcccgggg

SEQ ID NO: 1962371 - DNA, 15 bp, Homo sapiens
ctatggtcccggggg

SEQ ID NO: 1962372 - DNA, 15 bp, Homo sapiens
tatggtcccgggggt

SEQ ID NO: 1962373 - DNA, 15 bp, Homo sapiens
atggtcccgggggtg

SEQ ID NO: 1962374 - DNA, 15 bp, Homo sapiens
tggtcccgggggtgc

SEQ ID NO: 1962375 - DNA, 15 bp, Homo sapiens
ggtcccgggggtgcg

SEQ ID NO: 1962376 - DNA, 15 bp, Homo sapiens
gtcccgggggtgcgg

SEQ ID NO: 1962377 - DNA, 15 bp, Homo sapiens
tcccgggggtgcggg

SEQ ID NO: 1962378 - DNA, 15 bp, Homo sapiens
cccgggggtgcggga

SEQ ID NO: 1962379 - DNA, 15 bp, Homo sapiens
ccgggggtgcgggac

SEQ ID NO: 1962380 - DNA, 15 bp, Homo sapiens
cgggggtgcgggact

SEQ ID NO: 1962381 - DNA, 15 bp, Homo sapiens
gggggtgcgggactg

SEQ ID NO: 1962382 - DNA, 15 bp, Homo sapiens
ggggtgcgggactgg

SEQ ID NO: 1962383 - DNA, 15 bp, Homo sapiens
gggtgcgggactgga

SEQ ID NO: 1962384 - DNA, 15 bp, Homo sapiens
ggtgcgggactggac

SEQ ID NO: 1962385 - DNA, 15 bp, Homo sapiens
gtgcgggactggaca

SEQ ID NO: 1962386 - DNA, 15 bp, Homo sapiens
tgcgggactggacac

SEQ ID NO: 1962387 - DNA, 15 bp, Homo sapiens
gcgggactggacact

SEQ ID NO: 1962388 - DNA, 15 bp, Homo sapiens
cgggactggacactc

SEQ ID NO: 1962389 - DNA, 15 bp, Homo sapiens
gggactggacactcc

SEQ ID NO: 1962390 - DNA, 15 bp, Homo sapiens
ggactggacactcct

SEQ ID NO: 1962391 - DNA, 15 bp, Homo sapiens
gactggacactcctt

SEQ ID NO: 1962392 - DNA, 15 bp, Homo sapiens
actggacactccttt

SEQ ID NO: 1962393 - DNA, 15 bp, Homo sapiens
ctggacactcctttt

SEQ ID NO: 1962394 - DNA, 15 bp, Homo sapiens
tggacactccttttt

SEQ ID NO: 1962395 - DNA, 15 bp, Homo sapiens
ggacactcctttttt

SEQ ID NO: 1962396 - DNA, 15 bp, Homo sapiens
gacactccttttttg

SEQ ID NO: 1962397 - DNA, 15 bp, Homo sapiens
acactccttttttgg

SEQ ID NO: 1962398 - DNA, 15 bp, Homo sapiens
cactccttttttggt

SEQ ID NO: 1962399 - DNA, 15 bp, Homo sapiens
actccttttttggtc

SEQ ID NO: 1962400 - DNA, 15 bp, Homo sapiens
ctccttttttggtca

SEQ ID NO: 1962401 - DNA, 15 bp, Homo sapiens
tccttttttggtcag

SEQ ID NO: 1962402 - DNA, 15 bp, Homo sapiens
ccttttttggtcagg

SEQ ID NO: 1962403 - DNA, 15 bp, Homo sapiens
cttttttggtcaggc

SEQ ID NO: 1962404 - DNA, 15 bp, Homo sapiens
ttttttggtcaggcc

SEQ ID NO: 1962405 - DNA, 15 bp, Homo sapiens
tttttggtcaggcct

SEQ ID NO: 1962406 - DNA, 15 bp, Homo sapiens
ttttggtcaggcctg

SEQ ID NO: 1962407 - DNA, 15 bp, Homo sapiens
tttggtcaggcctgc

SEQ ID NO: 1962408 - DNA, 15 bp, Homo sapiens
ttggtcaggcctgct

SEQ ID NO: 1962409 - DNA, 15 bp, Homo sapiens
tggtcaggcctgctg

SEQ ID NO: 1962410 - DNA, 15 bp, Homo sapiens
ggtcaggcctgctgg

SEQ ID NO: 1962411 - DNA, 15 bp, Homo sapiens
gtcaggcctgctggg

SEQ ID NO: 1962412 - DNA, 15 bp, Homo sapiens
tcaggcctgctgggg

SEQ ID NO: 1962413 - DNA, 15 bp, Homo sapiens
caggcctgctggggg

SEQ ID NO: 1962414 - DNA, 15 bp, Homo sapiens
aggcctgctgggggc

SEQ ID NO: 1962415 - DNA, 15 bp, Homo sapiens
ggcctgctgggggca

SEQ ID NO: 1962416 - DNA, 15 bp, Homo sapiens
gcctgctgggggcac

SEQ ID NO: 1962417 - DNA, 15 bp, Homo sapiens
cctgctgggggcaca

SEQ ID NO: 1962418 - DNA, 15 bp, Homo sapiens
ctgctgggggcacag

SEQ ID NO: 1962419 - DNA, 15 bp, Homo sapiens
tgctgggggcacagc

SEQ ID NO: 1962420 - DNA, 15 bp, Homo sapiens
gctgggggcacagct

SEQ ID NO: 1962421 - DNA, 15 bp, Homo sapiens
ctgggggcacagctt

SEQ ID NO: 1962422 - DNA, 15 bp, Homo sapiens
tgggggcacagcttc

SEQ ID NO: 1962423 - DNA, 15 bp, Homo sapiens
gggggcacagcttca

SEQ ID NO: 1962424 - DNA, 15 bp, Homo sapiens
ggggcacagcttcag

SEQ ID NO: 1962425 - DNA, 15 bp, Homo sapiens
gggcacagcttcagc

SEQ ID NO: 1962426 - DNA, 15 bp, Homo sapiens
ggcacagcttcagca

SEQ ID NO: 1962427 - DNA, 15 bp, Homo sapiens
gcacagcttcagcag

SEQ ID NO: 1962428 - DNA, 15 bp, Homo sapiens
cacagcttcagcagg

SEQ ID NO: 1962429 - DNA, 15 bp, Homo sapiens
acagcttcagcaggg

SEQ ID NO: 1962430 - DNA, 15 bp, Homo sapiens
cagcttcagcagggc

SEQ ID NO: 1962431 - DNA, 15 bp, Homo sapiens
agcttcagcagggca

SEQ ID NO: 1962432 - DNA, 15 bp, Homo sapiens
gcttcagcagggcac

SEQ ID NO: 1962433 - DNA, 15 bp, Homo sapiens
cttcagcagggcacc

SEQ ID NO: 1962434 - DNA, 15 bp, Homo sapiens
ttcagcagggcaccg

SEQ ID NO: 1962435 - DNA, 15 bp, Homo sapiens
tcagcagggcaccgg

SEQ ID NO: 1962436 - DNA, 15 bp, Homo sapiens
cagcagggcaccggg

SEQ ID NO: 1962437 - DNA, 15 bp, Homo sapiens
agcagggcaccggga

SEQ ID NO: 1962438 - DNA, 15 bp, Homo sapiens
gcagggcaccgggag

SEQ ID NO: 1962439 - DNA, 15 bp, Homo sapiens
cagggcaccgggagg

SEQ ID NO: 1962440 - DNA, 15 bp, Homo sapiens
agggcaccgggaggt

SEQ ID NO: 1962441 - DNA, 15 bp, Homo sapiens
gggcaccgggaggtc

SEQ ID NO: 1962442 - DNA, 15 bp, Homo sapiens
ggcaccgggaggtca

SEQ ID NO: 1962443 - DNA, 15 bp, Homo sapiens
gcaccgggaggtcag

SEQ ID NO: 1962444 - DNA, 15 bp, Homo sapiens
caccgggaggtcagc

SEQ ID NO: 1962445 - DNA, 15 bp, Homo sapiens
accgggaggtcagcc

SEQ ID NO: 1962446 - DNA, 15 bp, Homo sapiens
ccgggaggtcagccc

SEQ ID NO: 1962447 - DNA, 15 bp, Homo sapiens
cgggaggtcagcccc

SEQ ID NO: 1962448 - DNA, 15 bp, Homo sapiens
gggaggtcagcccca

SEQ ID NO: 1962449 - DNA, 15 bp, Homo sapiens
ggaggtcagccccac

SEQ ID NO: 1962450 - DNA, 15 bp, Homo sapiens
gaggtcagccccact

SEQ ID NO: 1962451 - DNA, 15 bp, Homo sapiens
aggtcagccccactt

SEQ ID NO: 1962452 - DNA, 15 bp, Homo sapiens
ggtcagccccacttg

SEQ ID NO: 1962453 - DNA, 15 bp, Homo sapiens
gtcagccccacttga

SEQ ID NO: 1962454 - DNA, 15 bp, Homo sapiens
tcagccccacttgag

SEQ ID NO: 1962455 - DNA, 15 bp, Homo sapiens
cagccccacttgagg

SEQ ID NO: 1962456 - DNA, 15 bp, Homo sapiens
agccccacttgaggc

SEQ ID NO: 1962457 - DNA, 15 bp, Homo sapiens
gccccacttgaggct

SEQ ID NO: 1962458 - DNA, 15 bp, Homo sapiens
ccccacttgaggctt

SEQ ID NO: 1962459 - DNA, 15 bp, Homo sapiens
cccacttgaggcttg

SEQ ID NO: 1962460 - DNA, 15 bp, Homo sapiens
ccacttgaggcttgg

SEQ ID NO: 1962461 - DNA, 15 bp, Homo sapiens
cacttgaggcttggt

SEQ ID NO: 1962462 - DNA, 15 bp, Homo sapiens
acttgaggcttggtg

SEQ ID NO: 1962463 - DNA, 15 bp, Homo sapiens
cttgaggcttggtgc

SEQ ID NO: 1962464 - DNA, 15 bp, Homo sapiens
ttgaggcttggtgcc

SEQ ID NO: 1962465 - DNA, 15 bp, Homo sapiens
tgaggcttggtgcct

SEQ ID NO: 1962466 - DNA, 15 bp, Homo sapiens
gaggcttggtgcctg

SEQ ID NO: 1962467 - DNA, 15 bp, Homo sapiens
aggcttggtgcctga

SEQ ID NO: 1962468 - DNA, 15 bp, Homo sapiens
ggcttggtgcctgag

SEQ ID NO: 1962469 - DNA, 15 bp, Homo sapiens
gcttggtgcctgagc

SEQ ID NO: 1962470 - DNA, 15 bp, Homo sapiens
cttggtgcctgagcc

SEQ ID NO: 1962471 - DNA, 15 bp, Homo sapiens
ttggtgcctgagccc

SEQ ID NO: 1962472 - DNA, 15 bp, Homo sapiens
tggtgcctgagccca

SEQ ID NO: 1962473 - DNA, 15 bp, Homo sapiens
ggtgcctgagcccaa

SEQ ID NO: 1962474 - DNA, 15 bp, Homo sapiens
gtgcctgagcccaag

SEQ ID NO: 1962475 - DNA, 15 bp, Homo sapiens
tgcctgagcccaaga

SEQ ID NO: 1962476 - DNA, 15 bp, Homo sapiens
gcctgagcccaagag

SEQ ID NO: 1962477 - DNA, 15 bp, Homo sapiens
cctgagcccaagagg

SEQ ID NO: 1962478 - DNA, 15 bp, Homo sapiens
ctgagcccaagaggg

SEQ ID NO: 1962479 - DNA, 15 bp, Homo sapiens
tgagcccaagaggga

SEQ ID NO: 1962480 - DNA, 15 bp, Homo sapiens
gagcccaagagggat

SEQ ID NO: 1962481 - DNA, 15 bp, Homo sapiens
agcccaagagggatg

SEQ ID NO: 1962482 - DNA, 15 bp, Homo sapiens
gcccaagagggatgc

SEQ ID NO: 1962483 - DNA, 15 bp, Homo sapiens
cccaagagggatgcg

SEQ ID NO: 1962484 - DNA, 15 bp, Homo sapiens
ccaagagggatgcgg

SEQ ID NO: 1962485 - DNA, 15 bp, Homo sapiens
caagagggatgcggg

SEQ ID NO: 1962486 - DNA, 15 bp, Homo sapiens
aagagggatgcgggt

SEQ ID NO: 1962487 - DNA, 15 bp, Homo sapiens
agagggatgcgggtg

SEQ ID NO: 1962488 - DNA, 15 bp, Homo sapiens
gagggatgcgggtgg

SEQ ID NO: 1962489 - DNA, 15 bp, Homo sapiens
agggatgcgggtggg

SEQ ID NO: 1962490 - DNA, 15 bp, Homo sapiens
gggatgcgggtggga

SEQ ID NO: 1962491 - DNA, 15 bp, Homo sapiens
ggatgcgggtgggac

SEQ ID NO: 1962492 - DNA, 15 bp, Homo sapiens
gatgcgggtgggact

SEQ ID NO: 1962493 - DNA, 15 bp, Homo sapiens
atgcgggtgggactg

SEQ ID NO: 1962494 - DNA, 15 bp, Homo sapiens
tgcgggtgggactgg

SEQ ID NO: 1962495 - DNA, 15 bp, Homo sapiens
gcgggtgggactggg

SEQ ID NO: 1962496 - DNA, 15 bp, Homo sapiens
cgggtgggactgggg

SEQ ID NO: 1962497 - DNA, 15 bp, Homo sapiens
gggtgggactggggt

SEQ ID NO: 1962498 - DNA, 15 bp, Homo sapiens
ggtgggactggggtc

SEQ ID NO: 1962499 - DNA, 15 bp, Homo sapiens
gtgggactggggtca

SEQ ID NO: 1962500 - DNA, 15 bp, Homo sapiens
tgggactggggtcac

SEQ ID NO: 1962501 - DNA, 15 bp, Homo sapiens
gggactggggtcact

SEQ ID NO: 1962502 - DNA, 15 bp, Homo sapiens
ggactggggtcactg

SEQ ID NO: 1962503 - DNA, 15 bp, Homo sapiens
gactggggtcactgc

SEQ ID NO: 1962504 - DNA, 15 bp, Homo sapiens
actggggtcactgca

SEQ ID NO: 1962505 - DNA, 15 bp, Homo sapiens
ctggggtcactgcac

SEQ ID NO: 1962506 - DNA, 15 bp, Homo sapiens
tggggtcactgcact

SEQ ID NO: 1962507 - DNA, 15 bp, Homo sapiens
ggggtcactgcactg

SEQ ID NO: 1962508 - DNA, 15 bp, Homo sapiens
gggtcactgcactgc

SEQ ID NO: 1962509 - DNA, 15 bp, Homo sapiens
ggtcactgcactgct

SEQ ID NO: 1962510 - DNA, 15 bp, Homo sapiens
gtcactgcactgctg

SEQ ID NO: 1962511 - DNA, 15 bp, Homo sapiens
tcactgcactgctgg

SEQ ID NO: 1962512 - DNA, 15 bp, Homo sapiens
cactgcactgctggg

SEQ ID NO: 1962513 - DNA, 15 bp, Homo sapiens
actgcactgctgggt

SEQ ID NO: 1962514 - DNA, 15 bp, Homo sapiens
ctgcactgctgggtg

SEQ ID NO: 1962515 - DNA, 15 bp, Homo sapiens
tgcactgctgggtgc

SEQ ID NO: 1962516 - DNA, 15 bp, Homo sapiens
gcactgctgggtgca

SEQ ID NO: 1962517 - DNA, 15 bp, Homo sapiens
cactgctgggtgcac

SEQ ID NO: 1962518 - DNA, 15 bp, Homo sapiens
actgctgggtgcact

SEQ ID NO: 1962519 - DNA, 15 bp, Homo sapiens
ctgctgggtgcactg

SEQ ID NO: 1962520 - DNA, 15 bp, Homo sapiens
tgctgggtgcactgc

SEQ ID NO: 1962521 - DNA, 15 bp, Homo sapiens
gctgggtgcactgca

SEQ ID NO: 1962522 - DNA, 15 bp, Homo sapiens
ctgggtgcactgcac

SEQ ID NO: 1962523 - DNA, 15 bp, Homo sapiens
tgggtgcactgcact

SEQ ID NO: 1962524 - DNA, 15 bp, Homo sapiens
gggtgcactgcactt

SEQ ID NO: 1962525 - DNA, 15 bp, Homo sapiens
ggtgcactgcacttc

SEQ ID NO: 1962526 - DNA, 15 bp, Homo sapiens
gtgcactgcacttcg

SEQ ID NO: 1962527 - DNA, 15 bp, Homo sapiens
tgcactgcacttcgc

SEQ ID NO: 1962528 - DNA, 15 bp, Homo sapiens
gcactgcacttcgct

SEQ ID NO: 1962529 - DNA, 15 bp, Homo sapiens
cactgcacttcgctg

SEQ ID NO: 1962530 - DNA, 15 bp, Homo sapiens
actgcacttcgctgg

SEQ ID NO: 1962531 - DNA, 15 bp, Homo sapiens
ctgcacttcgctggg

SEQ ID NO: 1962532 - DNA, 15 bp, Homo sapiens
tgcacttcgctgggg

SEQ ID NO: 1962533 - DNA, 15 bp, Homo sapiens
gcacttcgctggggc

SEQ ID NO: 1962534 - DNA, 15 bp, Homo sapiens
cacttcgctggggct

SEQ ID NO: 1962535 - DNA, 15 bp, Homo sapiens
acttcgctggggcta

SEQ ID NO: 1962536 - DNA, 15 bp, Homo sapiens
cttcgctggggctag

SEQ ID NO: 1962537 - DNA, 15 bp, Homo sapiens
ttcgctggggctagg

SEQ ID NO: 1962538 - DNA, 15 bp, Homo sapiens
tcgctggggctaggg

SEQ ID NO: 1962539 - DNA, 15 bp, Homo sapiens
cgctggggctaggga

SEQ ID NO: 1962540 - DNA, 15 bp, Homo sapiens
gctggggctagggag

SEQ ID NO: 1962541 - DNA, 15 bp, Homo sapiens
ctggggctagggagg

SEQ ID NO: 1962542 - DNA, 15 bp, Homo sapiens
tggggctagggaggg

SEQ ID NO: 1962543 - DNA, 15 bp, Homo sapiens
ggggctagggagggt

SEQ ID NO: 1962544 - DNA, 15 bp, Homo sapiens
gggctagggagggtg

SEQ ID NO: 1962545 - DNA, 15 bp, Homo sapiens
ggctagggagggtgt

SEQ ID NO: 1962546 - DNA, 15 bp, Homo sapiens
gctagggagggtgtc

SEQ ID NO: 1962547 - DNA, 15 bp, Homo sapiens
ctagggagggtgtct

SEQ ID NO: 1962548 - DNA, 15 bp, Homo sapiens
tagggagggtgtctg

SEQ ID NO: 1962549 - DNA, 15 bp, Homo sapiens
agggagggtgtctgg

SEQ ID NO: 1962550 - DNA, 15 bp, Homo sapiens
ggagggtgtctgggg

SEQ ID NO: 1962551 - DNA, 15 bp, Homo sapiens
gagggtgtctggggc

SEQ ID NO: 1962552 - DNA, 15 bp, Homo sapiens
agggtgtctggggct

SEQ ID NO: 1962553 - DNA, 15 bp, Homo sapiens
gggtgtctggggctc

SEQ ID NO: 1962554 - DNA, 15 bp, Homo sapiens
ggtgtctggggctcc

SEQ ID NO: 1962555 - DNA, 15 bp, Homo sapiens
gtgtctggggctccg

SEQ ID NO: 1962556 - DNA, 15 bp, Homo sapiens
tgtctggggctccgg

SEQ ID NO: 1962557 - DNA, 15 bp, Homo sapiens
gtctggggctccggg

SEQ ID NO: 1962558 - DNA, 15 bp, Homo sapiens
tctggggctccgggg

SEQ ID NO: 1962559 - DNA, 15 bp, Homo sapiens
ctggggctccgggga

SEQ ID NO: 1962560 - DNA, 15 bp, Homo sapiens
tggggctccggggag

SEQ ID NO: 1962561 - DNA, 15 bp, Homo sapiens
ggggctccggggaga

SEQ ID NO: 1962562 - DNA, 15 bp, Homo sapiens
gggctccggggagag

SEQ ID NO: 1962563 - DNA, 15 bp, Homo sapiens
ggctccggggagagc

SEQ ID NO: 1962564 - DNA, 15 bp, Homo sapiens
gctccggggagagct

SEQ ID NO: 1962565 - DNA, 15 bp, Homo sapiens
ctccggggagagctt

SEQ ID NO: 1962566 - DNA, 15 bp, Homo sapiens
tccggggagagcttt

SEQ ID NO: 1962567 - DNA, 15 bp, Homo sapiens
ccggggagagctttg

SEQ ID NO: 1962568 - DNA, 15 bp, Homo sapiens
cggggagagctttgg

SEQ ID NO: 1962569 - DNA, 15 bp, Homo sapiens
ggggagagctttggg

SEQ ID NO: 1962570 - DNA, 15 bp, Homo sapiens
gggagagctttgggg

SEQ ID NO: 1962571 - DNA, 15 bp, Homo sapiens
ggagagctttgggga

SEQ ID NO: 1962572 - DNA, 15 bp, Homo sapiens
gagagctttggggag

SEQ ID NO: 1962573 - DNA, 15 bp, Homo sapiens
agagctttggggagg

SEQ ID NO: 1962574 - DNA, 15 bp, Homo sapiens
gagctttggggaggc

SEQ ID NO: 1962575 - DNA, 15 bp, Homo sapiens
agctttggggaggcg

SEQ ID NO: 1962576 - DNA, 15 bp, Homo sapiens
gctttggggaggcgg

SEQ ID NO: 1962577 - DNA, 15 bp, Homo sapiens
ctttggggaggcggg

SEQ ID NO: 1962578 - DNA, 15 bp, Homo sapiens
tttggggaggcgggc

SEQ ID NO: 1962579 - DNA, 15 bp, Homo sapiens
ttggggaggcgggct

SEQ ID NO: 1962580 - DNA, 15 bp, Homo sapiens
tggggaggcgggctt

SEQ ID NO: 1962581 - DNA, 15 bp, Homo sapiens
ggggaggcgggcttg

SEQ ID NO: 1962582 - DNA, 15 bp, Homo sapiens
gggaggcgggcttgg

SEQ ID NO: 1962583 - DNA, 15 bp, Homo sapiens
ggaggcgggcttgga

SEQ ID NO: 1962584 - DNA, 15 bp, Homo sapiens
gaggcgggcttggag

SEQ ID NO: 1962585 - DNA, 15 bp, Homo sapiens
aggcgggcttggagc

SEQ ID NO: 1962586 - DNA, 15 bp, Homo sapiens
ggcgggcttggagcg

SEQ ID NO: 1962587 - DNA, 15 bp, Homo sapiens
gcgggcttggagcga

SEQ ID NO: 1962588 - DNA, 15 bp, Homo sapiens
cgggcttggagcgag

SEQ ID NO: 1962589 - DNA, 15 bp, Homo sapiens
gggcttggagcgagg

SEQ ID NO: 1962590 - DNA, 15 bp, Homo sapiens
ggcttggagcgagga

SEQ ID NO: 1962591 - DNA, 15 bp, Homo sapiens
gcttggagcgaggac

SEQ ID NO: 1962592 - DNA, 15 bp, Homo sapiens
cttggagcgaggacc

SEQ ID NO: 1962593 - DNA, 15 bp, Homo sapiens
ttggagcgaggaccg

SEQ ID NO: 1962594 - DNA, 15 bp, Homo sapiens
tggagcgaggaccgc

SEQ ID NO: 1962595 - DNA, 15 bp, Homo sapiens
ggagcgaggaccgct

SEQ ID NO: 1962596 - DNA, 15 bp, Homo sapiens
gagcgaggaccgctc

SEQ ID NO: 1962597 - DNA, 15 bp, Homo sapiens
ccacctatcaagaca

SEQ ID NO: 1962598 - DNA, 15 bp, Homo sapiens
cacctatcaagacag

SEQ ID NO: 1962599 - DNA, 15 bp, Homo sapiens
acctatcaagacaga

SEQ ID NO: 1962600 - DNA, 15 bp, Homo sapiens
cctatcaagacagaa

SEQ ID NO: 1962601 - DNA, 15 bp, Homo sapiens
ctatcaagacagaac

SEQ ID NO: 1962602 - DNA, 15 bp, Homo sapiens
tatcaagacagaact

SEQ ID NO: 1962603 - DNA, 15 bp, Homo sapiens
atcaagacagaactt

SEQ ID NO: 1962604 - DNA, 15 bp, Homo sapiens
tcaagacagaacttc

SEQ ID NO: 1962605 - DNA, 15 bp, Homo sapiens
caagacagaacttcc

SEQ ID NO: 1962606 - DNA, 15 bp, Homo sapiens
aagacagaacttccc

SEQ ID NO: 1962607 - DNA, 15 bp, Homo sapiens
agacagaacttccct

SEQ ID NO: 1962608 - DNA, 15 bp, Homo sapiens
gacagaacttccctt

SEQ ID NO: 1962609 - DNA, 15 bp, Homo sapiens
acagaacttccctta

SEQ ID NO: 1962610 - DNA, 15 bp, Homo sapiens
cagaacttcccttaa

SEQ ID NO: 1962611 - DNA, 15 bp, Homo sapiens
agaacttcccttaac

SEQ ID NO: 1962612 - DNA, 15 bp, Homo sapiens
gaacttcccttaact

SEQ ID NO: 1962613 - DNA, 15 bp, Homo sapiens
aacttcccttaactc

SEQ ID NO: 1962614 - DNA, 15 bp, Homo sapiens
acttcccttaactca

SEQ ID NO: 1962615 - DNA, 15 bp, Homo sapiens
cttcccttaactcag

SEQ ID NO: 1962616 - DNA, 15 bp, Homo sapiens
ttcccttaactcagt

SEQ ID NO: 1962617 - DNA, 15 bp, Homo sapiens
tcccttaactcagtg

SEQ ID NO: 1962618 - DNA, 15 bp, Homo sapiens
cccttaactcagtgc

SEQ ID NO: 1962619 - DNA, 15 bp, Homo sapiens
ccttaactcagtgct

SEQ ID NO: 1962620 - DNA, 15 bp, Homo sapiens
cttaactcagtgctg

SEQ ID NO: 1962621 - DNA, 15 bp, Homo sapiens
ttaactcagtgctgc

SEQ ID NO: 1962622 - DNA, 15 bp, Homo sapiens
taactcagtgctgct

SEQ ID NO: 1962623 - DNA, 15 bp, Homo sapiens
aactcagtgctgctt

SEQ ID NO: 1962624 - DNA, 15 bp, Homo sapiens
actcagtgctgcttg

SEQ ID NO: 1962625 - DNA, 15 bp, Homo sapiens
gcttggctcctccct

SEQ ID NO: 1962626 - DNA, 15 bp, Homo sapiens
cttggctcctccctc

SEQ ID NO: 1962627 - DNA, 15 bp, Homo sapiens
ttggctcctccctcc

SEQ ID NO: 1962628 - DNA, 15 bp, Homo sapiens
tggctcctccctcct

SEQ ID NO: 1962629 - DNA, 15 bp, Homo sapiens
ggctcctccctcctc

SEQ ID NO: 1962630 - DNA, 15 bp, Homo sapiens
gctcctccctcctcc

SEQ ID NO: 1962631 - DNA, 15 bp, Homo sapiens
tcctccctcctccca

SEQ ID NO: 1962632 - DNA, 15 bp, Homo sapiens
cctccctcctcccac

SEQ ID NO: 1962633 - DNA, 15 bp, Homo sapiens
ctccctcctcccact

SEQ ID NO: 1962634 - DNA, 15 bp, Homo sapiens
tccctcctcccactt

SEQ ID NO: 1962635 - DNA, 15 bp, Homo sapiens
ccctcctcccacttc

SEQ ID NO: 1962636 - DNA, 15 bp, Homo sapiens
cctcctcccacttca

SEQ ID NO: 1962637 - DNA, 15 bp, Homo sapiens
tcctcccacttcagg

SEQ ID NO: 1962638 - DNA, 15 bp, Homo sapiens
cctcccacttcaggt

SEQ ID NO: 1962639 - DNA, 15 bp, Homo sapiens
ctcccacttcaggtc

SEQ ID NO: 1962640 - DNA, 15 bp, Homo sapiens
tcccacttcaggtcc

SEQ ID NO: 1962641 - DNA, 15 bp, Homo sapiens
cccacttcaggtcct

SEQ ID NO: 1962642 - DNA, 15 bp, Homo sapiens
ccacttcaggtcctg

SEQ ID NO: 1962643 - DNA, 15 bp, Homo sapiens
cacttcaggtcctgc

SEQ ID NO: 1962644 - DNA, 15 bp, Homo sapiens
acttcaggtcctgcc

SEQ ID NO: 1962645 - DNA, 15 bp, Homo sapiens
cttcaggtcctgccc

SEQ ID NO: 1962646 - DNA, 15 bp, Homo sapiens
ttcaggtcctgccca

SEQ ID NO: 1962647 - DNA, 15 bp, Homo sapiens
tcaggtcctgcccaa

SEQ ID NO: 1962648 - DNA, 15 bp, Homo sapiens
caggtcctgcccaac

SEQ ID NO: 1962649 - DNA, 15 bp, Homo sapiens
aggtcctgcccaacc

SEQ ID NO: 1962650 - DNA, 15 bp, Homo sapiens
ggtcctgcccaacct

SEQ ID NO: 1962651 - DNA, 15 bp, Homo sapiens
gtcctgcccaacctt

SEQ ID NO: 1962652 - DNA, 15 bp, Homo sapiens
tcctgcccaaccttt

SEQ ID NO: 1962653 - DNA, 15 bp, Homo sapiens
cctgcccaacctttt

SEQ ID NO: 1962654 - DNA, 15 bp, Homo sapiens
ctgcccaaccttttg

SEQ ID NO: 1962655 - DNA, 15 bp, Homo sapiens
tgcccaaccttttgg

SEQ ID NO: 1962656 - DNA, 15 bp, Homo sapiens
gcccaaccttttggc

SEQ ID NO: 1962657 - DNA, 15 bp, Homo sapiens
cccaaccttttggcc

SEQ ID NO: 1962658 - DNA, 15 bp, Homo sapiens
ccaaccttttggcca

SEQ ID NO: 1962659 - DNA, 15 bp, Homo sapiens
caaccttttggccac

SEQ ID NO: 1962660 - DNA, 15 bp, Homo sapiens
aaccttttggccact

SEQ ID NO: 1962661 - DNA, 15 bp, Homo sapiens
accttttggccactc

SEQ ID NO: 1962662 - DNA, 15 bp, Homo sapiens
ccttttggccactcc

SEQ ID NO: 1962663 - DNA, 15 bp, Homo sapiens
cttttggccactccc

SEQ ID NO: 1962664 - DNA, 15 bp, Homo sapiens
ttttggccactccca

SEQ ID NO: 1962665 - DNA, 15 bp, Homo sapiens
tttggccactcccag

SEQ ID NO: 1962666 - DNA, 15 bp, Homo sapiens
ttggccactcccagt

SEQ ID NO: 1962667 - DNA, 15 bp, Homo sapiens
tggccactcccagtc

SEQ ID NO: 1962668 - DNA, 15 bp, Homo sapiens
ggccactcccagtcc

SEQ ID NO: 1962669 - DNA, 15 bp, Homo sapiens
gccactcccagtcca

SEQ ID NO: 1962670 - DNA, 15 bp, Homo sapiens
ccactcccagtccag

SEQ ID NO: 1962671 - DNA, 15 bp, Homo sapiens
cactcccagtccagg

SEQ ID NO: 1962672 - DNA, 15 bp, Homo sapiens
actcccagtccaggc

SEQ ID NO: 1962673 - DNA, 15 bp, Homo sapiens
ctcccagtccaggct

SEQ ID NO: 1962674 - DNA, 15 bp, Homo sapiens
tcccagtccaggcta

SEQ ID NO: 1962675 - DNA, 15 bp, Homo sapiens
cccagtccaggctag

SEQ ID NO: 1962676 - DNA, 15 bp, Homo sapiens
ccagtccaggctaga

SEQ ID NO: 1962677 - DNA, 15 bp, Homo sapiens
cagtccaggctagaa

SEQ ID NO: 1962678 - DNA, 15 bp, Homo sapiens
agtccaggctagaaa

SEQ ID NO: 1962679 - DNA, 15 bp, Homo sapiens
gtccaggctagaaac

SEQ ID NO: 1962680 - DNA, 15 bp, Homo sapiens
tccaggctagaaaca

SEQ ID NO: 1962681 - DNA, 15 bp, Homo sapiens
ccaggctagaaacac

SEQ ID NO: 1962682 - DNA, 15 bp, Homo sapiens
caggctagaaacaca

SEQ ID NO: 1962683 - DNA, 15 bp, Homo sapiens
aggctagaaacacat

SEQ ID NO: 1962684 - DNA, 15 bp, Homo sapiens
ggctagaaacacatc

SEQ ID NO: 1962685 - DNA, 15 bp, Homo sapiens
gctagaaacacatcc

SEQ ID NO: 1962686 - DNA, 15 bp, Homo sapiens
ctagaaacacatcca

SEQ ID NO: 1962687 - DNA, 15 bp, Homo sapiens
tagaaacacatccaa

SEQ ID NO: 1962688 - DNA, 15 bp, Homo sapiens
agaaacacatccaaa

SEQ ID NO: 1962689 - DNA, 15 bp, Homo sapiens
gaaacacatccaaac

SEQ ID NO: 1962690 - DNA, 15 bp, Homo sapiens
aaacacatccaaaca

SEQ ID NO: 1962691 - DNA, 15 bp, Homo sapiens
aacacatccaaacaa

SEQ ID NO: 1962692 - DNA, 15 bp, Homo sapiens
acacatccaaacaaa

SEQ ID NO: 1962693 - DNA, 15 bp, Homo sapiens
cacatccaaacaaaa

SEQ ID NO: 1962694 - DNA, 15 bp, Homo sapiens
acatccaaacaaaac

SEQ ID NO: 1962695 - DNA, 15 bp, Homo sapiens
caaacaaaaccaact

SEQ ID NO: 1962696 - DNA, 15 bp, Homo sapiens
aaacaaaaccaactt

SEQ ID NO: 1962697 - DNA, 15 bp, Homo sapiens
ttttgggttttggct

SEQ ID NO: 1962698 - DNA, 15 bp, Homo sapiens
tttgggttttggctt

SEQ ID NO: 1962699 - DNA, 15 bp, Homo sapiens
ttgggttttggcttc

SEQ ID NO: 1962700 - DNA, 15 bp, Homo sapiens
tgggttttggcttcg

SEQ ID NO: 1962701 - DNA, 15 bp, Homo sapiens
gggttttggcttcgt

SEQ ID NO: 1962702 - DNA, 15 bp, Homo sapiens
ggttttggcttcgtt

SEQ ID NO: 1962703 - DNA, 15 bp, Homo sapiens
gttttggcttcgttt

SEQ ID NO: 1962704 - DNA, 15 bp, Homo sapiens
ttttggcttcgtttc

SEQ ID NO: 1962705 - DNA, 15 bp, Homo sapiens
tttggcttcgtttct

SEQ ID NO: 1962706 - DNA, 15 bp, Homo sapiens
ttggcttcgtttctt

SEQ ID NO: 1962707 - DNA, 15 bp, Homo sapiens
tggcttcgtttcttc

SEQ ID NO: 1962708 - DNA, 15 bp, Homo sapiens
ggcttcgtttcttct

SEQ ID NO: 1962709 - DNA, 15 bp, Homo sapiens
gcttcgtttcttctc

SEQ ID NO: 1962710 - DNA, 15 bp, Homo sapiens
cttcgtttcttctct

SEQ ID NO: 1962711 - DNA, 15 bp, Homo sapiens
ttcgtttcttctctt

SEQ ID NO: 1962712 - DNA, 15 bp, Homo sapiens
tcgtttcttctcttc

SEQ ID NO: 1962713 - DNA, 15 bp, Homo sapiens
cgtttcttctcttcg

SEQ ID NO: 1962714 - DNA, 15 bp, Homo sapiens
gtttcttctcttcgt

SEQ ID NO: 1962715 - DNA, 15 bp, Homo sapiens
tttcttctcttcgtt

SEQ ID NO: 1962716 - DNA, 15 bp, Homo sapiens
ttcttctcttcgttg

SEQ ID NO: 1962717 - DNA, 15 bp, Homo sapiens
tcttctcttcgttga

SEQ ID NO: 1962718 - DNA, 15 bp, Homo sapiens
cttctcttcgttgac

SEQ ID NO: 1962719 - DNA, 15 bp, Homo sapiens
ttctcttcgttgact

SEQ ID NO: 1962720 - DNA, 15 bp, Homo sapiens
tctcttcgttgactt

SEQ ID NO: 1962721 - DNA, 15 bp, Homo sapiens
ctcttcgttgacttt

SEQ ID NO: 1962722 - DNA, 15 bp, Homo sapiens
tcttcgttgactttg

SEQ ID NO: 1962723 - DNA, 15 bp, Homo sapiens
cttcgttgactttgg

SEQ ID NO: 1962724 - DNA, 15 bp, Homo sapiens
ttcgttgactttggg

SEQ ID NO: 1962725 - DNA, 15 bp, Homo sapiens
tcgttgactttgggg

SEQ ID NO: 1962726 - DNA, 15 bp, Homo sapiens
cgttgactttggggt

SEQ ID NO: 1962727 - DNA, 15 bp, Homo sapiens
gttgactttggggtt

SEQ ID NO: 1962728 - DNA, 15 bp, Homo sapiens
ttgactttggggttc

SEQ ID NO: 1962729 - DNA, 15 bp, Homo sapiens
tgactttggggttca

SEQ ID NO: 1962730 - DNA, 15 bp, Homo sapiens
gactttggggttcag

SEQ ID NO: 1962731 - DNA, 15 bp, Homo sapiens
actttggggttcagg

SEQ ID NO: 1962732 - DNA, 15 bp, Homo sapiens
ctttggggttcaggt

SEQ ID NO: 1962733 - DNA, 15 bp, Homo sapiens
tttggggttcaggtg

SEQ ID NO: 1962734 - DNA, 15 bp, Homo sapiens
ttggggttcaggtgc

SEQ ID NO: 1962735 - DNA, 15 bp, Homo sapiens
tggggttcaggtgcc

SEQ ID NO: 1962736 - DNA, 15 bp, Homo sapiens
ggggttcaggtgccc

SEQ ID NO: 1962737 - DNA, 15 bp, Homo sapiens
gggttcaggtgcccc

SEQ ID NO: 1962738 - DNA, 15 bp, Homo sapiens
ggttcaggtgcccca

SEQ ID NO: 1962739 - DNA, 15 bp, Homo sapiens
gttcaggtgccccag

SEQ ID NO: 1962740 - DNA, 15 bp, Homo sapiens
ttcaggtgccccagc

SEQ ID NO: 1962741 - DNA, 15 bp, Homo sapiens
tcaggtgccccagct

SEQ ID NO: 1962742 - DNA, 15 bp, Homo sapiens
caggtgccccagctg

SEQ ID NO: 1962743 - DNA, 15 bp, Homo sapiens
aggtgccccagctgc

SEQ ID NO: 1962744 - DNA, 15 bp, Homo sapiens
ggtgccccagctgct

SEQ ID NO: 1962745 - DNA, 15 bp, Homo sapiens
gtgccccagctgctt

SEQ ID NO: 1962746 - DNA, 15 bp, Homo sapiens
tgccccagctgcttc

SEQ ID NO: 1962747 - DNA, 15 bp, Homo sapiens
gccccagctgcttcg

SEQ ID NO: 1962748 - DNA, 15 bp, Homo sapiens
ccccagctgcttcgg

SEQ ID NO: 1962749 - DNA, 15 bp, Homo sapiens
cccagctgcttcggg

SEQ ID NO: 1962750 - DNA, 15 bp, Homo sapiens
ccagctgcttcgggc

SEQ ID NO: 1962751 - DNA, 15 bp, Homo sapiens
cagctgcttcgggct

SEQ ID NO: 1962752 - DNA, 15 bp, Homo sapiens
agctgcttcgggctg

SEQ ID NO: 1962753 - DNA, 15 bp, Homo sapiens
gctgcttcgggctgc

SEQ ID NO: 1962754 - DNA, 15 bp, Homo sapiens
ctgcttcgggctgcc

SEQ ID NO: 1962755 - DNA, 15 bp, Homo sapiens
tgcttcgggctgccg

SEQ ID NO: 1962756 - DNA, 15 bp, Homo sapiens
gcttcgggctgccga

SEQ ID NO: 1962757 - DNA, 15 bp, Homo sapiens
cttcgggctgccgag

SEQ ID NO: 1962758 - DNA, 15 bp, Homo sapiens
ttcgggctgccgagg

SEQ ID NO: 1962759 - DNA, 15 bp, Homo sapiens
tcgggctgccgagga

SEQ ID NO: 1962760 - DNA, 15 bp, Homo sapiens
cgggctgccgaggac

SEQ ID NO: 1962761 - DNA, 15 bp, Homo sapiens
gggctgccgaggacc

SEQ ID NO: 1962762 - DNA, 15 bp, Homo sapiens
ggctgccgaggacct

SEQ ID NO: 1962763 - DNA, 15 bp, Homo sapiens
gctgccgaggacctt

SEQ ID NO: 1962764 - DNA, 15 bp, Homo sapiens
ctgccgaggaccttc

SEQ ID NO: 1962765 - DNA, 15 bp, Homo sapiens
tgccgaggaccttct

SEQ ID NO: 1962766 - DNA, 15 bp, Homo sapiens
gccgaggaccttctg

SEQ ID NO: 1962767 - DNA, 15 bp, Homo sapiens
ccgaggaccttctgg

SEQ ID NO: 1962768 - DNA, 15 bp, Homo sapiens
cgaggaccttctggg

SEQ ID NO: 1962769 - DNA, 15 bp, Homo sapiens
gaggaccttctgggc

SEQ ID NO: 1962770 - DNA, 15 bp, Homo sapiens
aggaccttctgggcc

SEQ ID NO: 1962771 - DNA, 15 bp, Homo sapiens
ggaccttctgggccc

SEQ ID NO: 1962772 - DNA, 15 bp, Homo sapiens
gaccttctgggcccc

SEQ ID NO: 1962773 - DNA, 15 bp, Homo sapiens
accttctgggccccc

SEQ ID NO: 1962774 - DNA, 15 bp, Homo sapiens
ccttctgggccccca

SEQ ID NO: 1962775 - DNA, 15 bp, Homo sapiens
cttctgggcccccac

SEQ ID NO: 1962776 - DNA, 15 bp, Homo sapiens
ttctgggcccccaca

SEQ ID NO: 1962777 - DNA, 15 bp, Homo sapiens
tctgggcccccacat

SEQ ID NO: 1962778 - DNA, 15 bp, Homo sapiens
ctgggcccccacatt

SEQ ID NO: 1962779 - DNA, 15 bp, Homo sapiens
tgggcccccacatta

SEQ ID NO: 1962780 - DNA, 15 bp, Homo sapiens
gggcccccacattaa

SEQ ID NO: 1962781 - DNA, 15 bp, Homo sapiens
ggcccccacattaat

SEQ ID NO: 1962782 - DNA, 15 bp, Homo sapiens
gcccccacattaatg

SEQ ID NO: 1962783 - DNA, 15 bp, Homo sapiens
cccccacattaatga

SEQ ID NO: 1962784 - DNA, 15 bp, Homo sapiens
ccccacattaatgag

SEQ ID NO: 1962785 - DNA, 15 bp, Homo sapiens
cccacattaatgagg

SEQ ID NO: 1962786 - DNA, 15 bp, Homo sapiens
ccacattaatgaggt

SEQ ID NO: 1962787 - DNA, 15 bp, Homo sapiens
cacattaatgaggta

SEQ ID NO: 1962788 - DNA, 15 bp, Homo sapiens
acattaatgaggtag

SEQ ID NO: 1962789 - DNA, 15 bp, Homo sapiens
cattaatgaggtagg

SEQ ID NO: 1962790 - DNA, 15 bp, Homo sapiens
attaatgaggtaggt

SEQ ID NO: 1962791 - DNA, 15 bp, Homo sapiens
ttaatgaggtaggtg

SEQ ID NO: 1962792 - DNA, 15 bp, Homo sapiens
taatgaggtaggtga

SEQ ID NO: 1962793 - DNA, 15 bp, Homo sapiens
aatgaggtaggtgag

SEQ ID NO: 1962794 - DNA, 15 bp, Homo sapiens
atgaggtaggtgagg

SEQ ID NO: 1962795 - DNA, 15 bp, Homo sapiens
tgaggtaggtgaggc

SEQ ID NO: 1962796 - DNA, 15 bp, Homo sapiens
gaggtaggtgaggcg

SEQ ID NO: 1962797 - DNA, 15 bp, Homo sapiens
aggtaggtgaggcgc

SEQ ID NO: 1962798 - DNA, 15 bp, Homo sapiens
ggtaggtgaggcgcg

SEQ ID NO: 1962799 - DNA, 15 bp, Homo sapiens
gtaggtgaggcgcgc

SEQ ID NO: 1962800 - DNA, 15 bp, Homo sapiens
taggtgaggcgcgcg

SEQ ID NO: 1962801 - DNA, 15 bp, Homo sapiens
aggtgaggcgcgcgg

SEQ ID NO: 1962802 - DNA, 15 bp, Homo sapiens
ggtgaggcgcgcggc

SEQ ID NO: 1962803 - DNA, 15 bp, Homo sapiens
gtgaggcgcgcggcg

SEQ ID NO: 1962804 - DNA, 15 bp, Homo sapiens
tgaggcgcgcggcgc

SEQ ID NO: 1962805 - DNA, 15 bp, Homo sapiens
gaggcgcgcggcgct

SEQ ID NO: 1962806 - DNA, 15 bp, Homo sapiens
aggcgcgcggcgctg

SEQ ID NO: 1962807 - DNA, 15 bp, Homo sapiens
ggcgcgcggcgctgg

SEQ ID NO: 1962808 - DNA, 15 bp, Homo sapiens
gcgcgcggcgctggg

SEQ ID NO: 1962809 - DNA, 15 bp, Homo sapiens
cgcgcggcgctggga

SEQ ID NO: 1962810 - DNA, 15 bp, Homo sapiens
gcgcggcgctgggag

SEQ ID NO: 1962811 - DNA, 15 bp, Homo sapiens
cgcggcgctgggagc

SEQ ID NO: 1962812 - DNA, 15 bp, Homo sapiens
gcggcgctgggagca

SEQ ID NO: 1962813 - DNA, 15 bp, Homo sapiens
cggcgctgggagcag

SEQ ID NO: 1962814 - DNA, 15 bp, Homo sapiens
ggcgctgggagcagg

SEQ ID NO: 1962815 - DNA, 15 bp, Homo sapiens
gcgctgggagcaggg

SEQ ID NO: 1962816 - DNA, 15 bp, Homo sapiens
cgctgggagcaggga

SEQ ID NO: 1962817 - DNA, 15 bp, Homo sapiens
gctgggagcagggag

SEQ ID NO: 1962818 - DNA, 15 bp, Homo sapiens
ctgggagcagggagg

SEQ ID NO: 1962819 - DNA, 15 bp, Homo sapiens
tgggagcagggaggg

SEQ ID NO: 1962820 - DNA, 15 bp, Homo sapiens
gggagcagggagggg

SEQ ID NO: 1962821 - DNA, 15 bp, Homo sapiens
ggagcagggaggggt

SEQ ID NO: 1962822 - DNA, 15 bp, Homo sapiens
gagcagggaggggtg

SEQ ID NO: 1962823 - DNA, 15 bp, Homo sapiens
agcagggaggggtga

SEQ ID NO: 1962824 - DNA, 15 bp, Homo sapiens
gcagggaggggtgag

SEQ ID NO: 1962825 - DNA, 15 bp, Homo sapiens
cagggaggggtgagg

SEQ ID NO: 1962826 - DNA, 15 bp, Homo sapiens
agggaggggtgagga

SEQ ID NO: 1962827 - DNA, 15 bp, Homo sapiens
gggaggggtgaggac

SEQ ID NO: 1962828 - DNA, 15 bp, Homo sapiens
ggaggggtgaggacc

SEQ ID NO: 1962829 - DNA, 15 bp, Homo sapiens
gaggggtgaggaccg

SEQ ID NO: 1962830 - DNA, 15 bp, Homo sapiens
aggggtgaggaccgg

SEQ ID NO: 1962831 - DNA, 15 bp, Homo sapiens
ggggtgaggaccggt

SEQ ID NO: 1962832 - DNA, 15 bp, Homo sapiens
gggtgaggaccggtg

SEQ ID NO: 1962833 - DNA, 15 bp, Homo sapiens
ggtgaggaccggtgg

SEQ ID NO: 1962834 - DNA, 15 bp, Homo sapiens
gtgaggaccggtggg

SEQ ID NO: 1962835 - DNA, 15 bp, Homo sapiens
tgaggaccggtggga

SEQ ID NO: 1962836 - DNA, 15 bp, Homo sapiens
gaggaccggtgggac

SEQ ID NO: 1962837 - DNA, 15 bp, Homo sapiens
aggaccggtgggacg

SEQ ID NO: 1962838 - DNA, 15 bp, Homo sapiens
ggaccggtgggacgc

SEQ ID NO: 1962839 - DNA, 15 bp, Homo sapiens
gaccggtgggacgcg

SEQ ID NO: 1962840 - DNA, 15 bp, Homo sapiens
accggtgggacgcgc

SEQ ID NO: 1962841 - DNA, 15 bp, Homo sapiens
ccggtgggacgcgcc

SEQ ID NO: 1962842 - DNA, 15 bp, Homo sapiens
cggtgggacgcgccg

SEQ ID NO: 1962843 - DNA, 15 bp, Homo sapiens
ggtgggacgcgccgg

SEQ ID NO: 1962844 - DNA, 15 bp, Homo sapiens
gtgggacgcgccgga

SEQ ID NO: 1962845 - DNA, 15 bp, Homo sapiens
tgggacgcgccggaa

SEQ ID NO: 1962846 - DNA, 15 bp, Homo sapiens
gggacgcgccggaac

SEQ ID NO: 1962847 - DNA, 15 bp, Homo sapiens
ggacgcgccggaacg

SEQ ID NO: 1962848 - DNA, 15 bp, Homo sapiens
gacgcgccggaacga

SEQ ID NO: 1962849 - DNA, 15 bp, Homo sapiens
acgcgccggaacgac

SEQ ID NO: 1962850 - DNA, 15 bp, Homo sapiens
cgcgccggaacgacg

SEQ ID NO: 1962851 - DNA, 15 bp, Homo sapiens
gcgccggaacgacgg

SEQ ID NO: 1962852 - DNA, 15 bp, Homo sapiens
cgccggaacgacggc

SEQ ID NO: 1962853 - DNA, 15 bp, Homo sapiens
gccggaacgacggcc

SEQ ID NO: 1962854 - DNA, 15 bp, Homo sapiens
ccggaacgacggccg

SEQ ID NO: 1962855 - DNA, 15 bp, Homo sapiens
cggaacgacggccga

SEQ ID NO: 1962856 - DNA, 15 bp, Homo sapiens
ggaacgacggccgaa

SEQ ID NO: 1962857 - DNA, 15 bp, Homo sapiens
gaacgacggccgaaa

SEQ ID NO: 1962858 - DNA, 15 bp, Homo sapiens
aacgacggccgaaag

SEQ ID NO: 1962859 - DNA, 15 bp, Homo sapiens
acgacggccgaaagc

SEQ ID NO: 1962860 - DNA, 15 bp, Homo sapiens
cgacggccgaaagcc

SEQ ID NO: 1962861 - DNA, 15 bp, Homo sapiens
gacggccgaaagccg

SEQ ID NO: 1962862 - DNA, 15 bp, Homo sapiens
acggccgaaagccgc

SEQ ID NO: 1962863 - DNA, 15 bp, Homo sapiens
cggccgaaagccgcc

SEQ ID NO: 1962864 - DNA, 15 bp, Homo sapiens
ggccgaaagccgccc

SEQ ID NO: 1962865 - DNA, 15 bp, Homo sapiens
gccgaaagccgcccc

SEQ ID NO: 1962866 - DNA, 15 bp, Homo sapiens
ccgaaagccgcccct

SEQ ID NO: 1962867 - DNA, 15 bp, Homo sapiens
cgaaagccgcccctg

SEQ ID NO: 1962868 - DNA, 15 bp, Homo sapiens
gaaagccgcccctga

SEQ ID NO: 1962869 - DNA, 15 bp, Homo sapiens
aaagccgcccctgac

SEQ ID NO: 1962870 - DNA, 15 bp, Homo sapiens
aagccgcccctgact

SEQ ID NO: 1962871 - DNA, 15 bp, Homo sapiens
agccgcccctgactc

SEQ ID NO: 1962872 - DNA, 15 bp, Homo sapiens
gccgcccctgactct

SEQ ID NO: 1962873 - DNA, 15 bp, Homo sapiens
ccgcccctgactctc

SEQ ID NO: 1962874 - DNA, 15 bp, Homo sapiens
cgcccctgactctcc

SEQ ID NO: 1962875 - DNA, 15 bp, Homo sapiens
gcccctgactctcct

SEQ ID NO: 1962876 - DNA, 15 bp, Homo sapiens
cccctgactctcctg

SEQ ID NO: 1962877 - DNA, 15 bp, Homo sapiens
ccctgactctcctgt

SEQ ID NO: 1962878 - DNA, 15 bp, Homo sapiens
cctgactctcctgtc

SEQ ID NO: 1962879 - DNA, 15 bp, Homo sapiens
ctgactctcctgtct

SEQ ID NO: 1962880 - DNA, 15 bp, Homo sapiens
tgactctcctgtctc

SEQ ID NO: 1962881 - DNA, 15 bp, Homo sapiens
gactctcctgtctcc

SEQ ID NO: 1962882 - DNA, 15 bp, Homo sapiens
actctcctgtctccg

SEQ ID NO: 1962883 - DNA, 15 bp, Homo sapiens
ctctcctgtctccgc

SEQ ID NO: 1962884 - DNA, 15 bp, Homo sapiens
tctcctgtctccgct

SEQ ID NO: 1962885 - DNA, 15 bp, Homo sapiens
ctcctgtctccgctc

SEQ ID NO: 1962886 - DNA, 15 bp, Homo sapiens
tcctgtctccgctcc

SEQ ID NO: 1962887 - DNA, 15 bp, Homo sapiens
cctgtctccgctccc

SEQ ID NO: 1962888 - DNA, 15 bp, Homo sapiens
ctgtctccgctccct

SEQ ID NO: 1962889 - DNA, 15 bp, Homo sapiens
tgtctccgctccctg

SEQ ID NO: 1962890 - DNA, 15 bp, Homo sapiens
gtctccgctccctgc

SEQ ID NO: 1962891 - DNA, 15 bp, Homo sapiens
tctccgctccctgcc

SEQ ID NO: 1962892 - DNA, 15 bp, Homo sapiens
ctccgctccctgcct

SEQ ID NO: 1962893 - DNA, 15 bp, Homo sapiens
tccgctccctgcctt

SEQ ID NO: 1962894 - DNA, 15 bp, Homo sapiens
ccgctccctgccttg

SEQ ID NO: 1962895 - DNA, 15 bp, Homo sapiens
cgctccctgccttgc

SEQ ID NO: 1962896 - DNA, 15 bp, Homo sapiens
gctccctgccttgct

SEQ ID NO: 1962897 - DNA, 15 bp, Homo sapiens
ctccctgccttgctc

SEQ ID NO: 1962898 - DNA, 15 bp, Homo sapiens
tccctgccttgctcg

SEQ ID NO: 1962899 - DNA, 15 bp, Homo sapiens
ccctgccttgctcgc

SEQ ID NO: 1962900 - DNA, 15 bp, Homo sapiens
cctgccttgctcgca

SEQ ID NO: 1962901 - DNA, 15 bp, Homo sapiens
ctgccttgctcgcag

SEQ ID NO: 1962902 - DNA, 15 bp, Homo sapiens
tgccttgctcgcagg

SEQ ID NO: 1962903 - DNA, 15 bp, Homo sapiens
gccttgctcgcaggc

SEQ ID NO: 1962904 - DNA, 15 bp, Homo sapiens
ccttgctcgcaggca

SEQ ID NO: 1962905 - DNA, 15 bp, Homo sapiens
cttgctcgcaggcag

SEQ ID NO: 1962906 - DNA, 15 bp, Homo sapiens
ttgctcgcaggcagc

SEQ ID NO: 1962907 - DNA, 15 bp, Homo sapiens
tgctcgcaggcagcc

SEQ ID NO: 1962908 - DNA, 15 bp, Homo sapiens
gctcgcaggcagcca

SEQ ID NO: 1962909 - DNA, 15 bp, Homo sapiens
ctcgcaggcagccac

SEQ ID NO: 1962910 - DNA, 15 bp, Homo sapiens
tcgcaggcagccacc

SEQ ID NO: 1962911 - DNA, 15 bp, Homo sapiens
cgcaggcagccacct

SEQ ID NO: 1962912 - DNA, 15 bp, Homo sapiens
gcaggcagccacctg

SEQ ID NO: 1962913 - DNA, 15 bp, Homo sapiens
caggcagccacctgg

SEQ ID NO: 1962914 - DNA, 15 bp, Homo sapiens
aggcagccacctggc

SEQ ID NO: 1962915 - DNA, 15 bp, Homo sapiens
ggcagccacctggcg

SEQ ID NO: 1962916 - DNA, 15 bp, Homo sapiens
gcagccacctggcga

SEQ ID NO: 1962917 - DNA, 15 bp, Homo sapiens
cagccacctggcgag

SEQ ID NO: 1962918 - DNA, 15 bp, Homo sapiens
agccacctggcgagt

SEQ ID NO: 1962919 - DNA, 15 bp, Homo sapiens
gccacctggcgagtc

SEQ ID NO: 1962920 - DNA, 15 bp, Homo sapiens
ccacctggcgagtct

SEQ ID NO: 1962921 - DNA, 15 bp, Homo sapiens
cacctggcgagtctg

SEQ ID NO: 1962922 - DNA, 15 bp, Homo sapiens
acctggcgagtctga

SEQ ID NO: 1962923 - DNA, 15 bp, Homo sapiens
cctggcgagtctgac

SEQ ID NO: 1962924 - DNA, 15 bp, Homo sapiens
ctggcgagtctgaca

SEQ ID NO: 1962925 - DNA, 15 bp, Homo sapiens
tggcgagtctgacat

SEQ ID NO: 1962926 - DNA, 15 bp, Homo sapiens
ggcgagtctgacatg

SEQ ID NO: 1962927 - DNA, 15 bp, Homo sapiens
gcgagtctgacatgg

SEQ ID NO: 1962928 - DNA, 15 bp, Homo sapiens
cgagtctgacatggc

SEQ ID NO: 1962929 - DNA, 15 bp, Homo sapiens
gagtctgacatggct

SEQ ID NO: 1962930 - DNA, 15 bp, Homo sapiens
agtctgacatggctg

SEQ ID NO: 1962931 - DNA, 15 bp, Homo sapiens
gtctgacatggctgt

SEQ ID NO: 1962932 - DNA, 15 bp, Homo sapiens
tctgacatggctgtc

SEQ ID NO: 1962933 - DNA, 15 bp, Homo sapiens
ctgacatggctgtca

SEQ ID NO: 1962934 - DNA, 15 bp, Homo sapiens
tgacatggctgtcag

SEQ ID NO: 1962935 - DNA, 15 bp, Homo sapiens
gacatggctgtcagc

SEQ ID NO: 1962936 - DNA, 15 bp, Homo sapiens
acatggctgtcagcg

SEQ ID NO: 1962937 - DNA, 15 bp, Homo sapiens
catggctgtcagcga

SEQ ID NO: 1962938 - DNA, 15 bp, Homo sapiens
atggctgtcagcgac

SEQ ID NO: 1962939 - DNA, 15 bp, Homo sapiens
tggctgtcagcgacg

SEQ ID NO: 1962940 - DNA, 15 bp, Homo sapiens
ggctgtcagcgacgc

SEQ ID NO: 1962941 - DNA, 15 bp, Homo sapiens
gctgtcagcgacgcg

SEQ ID NO: 1962942 - DNA, 15 bp, Homo sapiens
ctgtcagcgacgcgc

SEQ ID NO: 1962943 - DNA, 15 bp, Homo sapiens
tgtcagcgacgcgct

SEQ ID NO: 1962944 - DNA, 15 bp, Homo sapiens
gtcagcgacgcgctg

SEQ ID NO: 1962945 - DNA, 15 bp, Homo sapiens
tcagcgacgcgctgc

SEQ ID NO: 1962946 - DNA, 15 bp, Homo sapiens
cagcgacgcgctgct

SEQ ID NO: 1962947 - DNA, 15 bp, Homo sapiens
agcgacgcgctgctc

SEQ ID NO: 1962948 - DNA, 15 bp, Homo sapiens
gcgacgcgctgctcc

SEQ ID NO: 1962949 - DNA, 15 bp, Homo sapiens
cgacgcgctgctccc

SEQ ID NO: 1962950 - DNA, 15 bp, Homo sapiens
gacgcgctgctccca

SEQ ID NO: 1962951 - DNA, 15 bp, Homo sapiens
acgcgctgctcccat

SEQ ID NO: 1962952 - DNA, 15 bp, Homo sapiens
cgcgctgctcccatc

SEQ ID NO: 1962953 - DNA, 15 bp, Homo sapiens
gcgctgctcccatct

SEQ ID NO: 1962954 - DNA, 15 bp, Homo sapiens
cgctgctcccatctt

SEQ ID NO: 1962955 - DNA, 15 bp, Homo sapiens
gctgctcccatcttt

SEQ ID NO: 1962956 - DNA, 15 bp, Homo sapiens
ctgctcccatctttc

SEQ ID NO: 1962957 - DNA, 15 bp, Homo sapiens
tgctcccatctttct

SEQ ID NO: 1962958 - DNA, 15 bp, Homo sapiens
gctcccatctttctc

SEQ ID NO: 1962959 - DNA, 15 bp, Homo sapiens
ctcccatctttctcc

SEQ ID NO: 1962960 - DNA, 15 bp, Homo sapiens
tcccatctttctcca

SEQ ID NO: 1962961 - DNA, 15 bp, Homo sapiens
cccatctttctccac

SEQ ID NO: 1962962 - DNA, 15 bp, Homo sapiens
ccatctttctccacg

SEQ ID NO: 1962963 - DNA, 15 bp, Homo sapiens
catctttctccacgt

SEQ ID NO: 1962964 - DNA, 15 bp, Homo sapiens
atctttctccacgtt

SEQ ID NO: 1962965 - DNA, 15 bp, Homo sapiens
tctttctccacgttc

SEQ ID NO: 1962966 - DNA, 15 bp, Homo sapiens
ctttctccacgttcg

SEQ ID NO: 1962967 - DNA, 15 bp, Homo sapiens
tttctccacgttcgc

SEQ ID NO: 1962968 - DNA, 15 bp, Homo sapiens
ttctccacgttcgcg

SEQ ID NO: 1962969 - DNA, 15 bp, Homo sapiens
tctccacgttcgcgt

SEQ ID NO: 1962970 - DNA, 15 bp, Homo sapiens
ctccacgttcgcgtc

SEQ ID NO: 1962971 - DNA, 15 bp, Homo sapiens
tccacgttcgcgtct

SEQ ID NO: 1962972 - DNA, 15 bp, Homo sapiens
ccacgttcgcgtctg

SEQ ID NO: 1962973 - DNA, 15 bp, Homo sapiens
cacgttcgcgtctgg

SEQ ID NO: 1962974 - DNA, 15 bp, Homo sapiens
acgttcgcgtctggc

SEQ ID NO: 1962975 - DNA, 15 bp, Homo sapiens
cgttcgcgtctggcc

SEQ ID NO: 1962976 - DNA, 15 bp, Homo sapiens
gttcgcgtctggccc

SEQ ID NO: 1962977 - DNA, 15 bp, Homo sapiens
ttcgcgtctggcccg

SEQ ID NO: 1962978 - DNA, 15 bp, Homo sapiens
tcgcgtctggcccgg

SEQ ID NO: 1962979 - DNA, 15 bp, Homo sapiens
cgcgtctggcccggc

SEQ ID NO: 1962980 - DNA, 15 bp, Homo sapiens
gcgtctggcccggcg

SEQ ID NO: 1962981 - DNA, 15 bp, Homo sapiens
cgtctggcccggcgg

SEQ ID NO: 1962982 - DNA, 15 bp, Homo sapiens
gtctggcccggcggg

SEQ ID NO: 1962983 - DNA, 15 bp, Homo sapiens
tctggcccggcggga

SEQ ID NO: 1962984 - DNA, 15 bp, Homo sapiens
ctggcccggcgggaa

SEQ ID NO: 1962985 - DNA, 15 bp, Homo sapiens
tggcccggcgggaag

SEQ ID NO: 1962986 - DNA, 15 bp, Homo sapiens
ggcccggcgggaagg

SEQ ID NO: 1962987 - DNA, 15 bp, Homo sapiens
gcccggcgggaaggg

SEQ ID NO: 1962988 - DNA, 15 bp, Homo sapiens
cccggcgggaaggga

SEQ ID NO: 1962989 - DNA, 15 bp, Homo sapiens
ccggcgggaagggag

SEQ ID NO: 1962990 - DNA, 15 bp, Homo sapiens
cggcgggaagggaga

SEQ ID NO: 1962991 - DNA, 15 bp, Homo sapiens
ggcgggaagggagaa

SEQ ID NO: 1962992 - DNA, 15 bp, Homo sapiens
gcgggaagggagaag

SEQ ID NO: 1962993 - DNA, 15 bp, Homo sapiens
cgggaagggagaaga

SEQ ID NO: 1962994 - DNA, 15 bp, Homo sapiens
gggaagggagaagac

SEQ ID NO: 1962995 - DNA, 15 bp, Homo sapiens
ggaagggagaagaca

SEQ ID NO: 1962996 - DNA, 15 bp, Homo sapiens
gaagggagaagacac

SEQ ID NO: 1962997 - DNA, 15 bp, Homo sapiens
aagggagaagacact

SEQ ID NO: 1962998 - DNA, 15 bp, Homo sapiens
agggagaagacactg

SEQ ID NO: 1962999 - DNA, 15 bp, Homo sapiens
gggagaagacactgc

SEQ ID NO: 1963000 - DNA, 15 bp, Homo sapiens
ggagaagacactgcg

SEQ ID NO: 1963001 - DNA, 15 bp, Homo sapiens
gagaagacactgcgt

SEQ ID NO: 1963002 - DNA, 15 bp, Homo sapiens
agaagacactgcgtc

SEQ ID NO: 1963003 - DNA, 15 bp, Homo sapiens
gaagacactgcgtca

SEQ ID NO: 1963004 - DNA, 15 bp, Homo sapiens
aagacactgcgtcaa

SEQ ID NO: 1963005 - DNA, 15 bp, Homo sapiens
agacactgcgtcaag

SEQ ID NO: 1963006 - DNA, 15 bp, Homo sapiens
gacactgcgtcaagc

SEQ ID NO: 1963007 - DNA, 15 bp, Homo sapiens
acactgcgtcaagca

SEQ ID NO: 1963008 - DNA, 15 bp, Homo sapiens
cactgcgtcaagcag

SEQ ID NO: 1963009 - DNA, 15 bp, Homo sapiens
actgcgtcaagcagg

SEQ ID NO: 1963010 - DNA, 15 bp, Homo sapiens
ctgcgtcaagcaggt

SEQ ID NO: 1963011 - DNA, 15 bp, Homo sapiens
tgcgtcaagcaggtg

SEQ ID NO: 1963012 - DNA, 15 bp, Homo sapiens
gcgtcaagcaggtgc

SEQ ID NO: 1963013 - DNA, 15 bp, Homo sapiens
cgtcaagcaggtgcc

SEQ ID NO: 1963014 - DNA, 15 bp, Homo sapiens
gtcaagcaggtgccc

SEQ ID NO: 1963015 - DNA, 15 bp, Homo sapiens
tcaagcaggtgcccc

SEQ ID NO: 1963016 - DNA, 15 bp, Homo sapiens
caagcaggtgccccg

SEQ ID NO: 1963017 - DNA, 15 bp, Homo sapiens
aagcaggtgccccga

SEQ ID NO: 1963018 - DNA, 15 bp, Homo sapiens
agcaggtgccccgaa

SEQ ID NO: 1963019 - DNA, 15 bp, Homo sapiens
gcaggtgccccgaat

SEQ ID NO: 1963020 - DNA, 15 bp, Homo sapiens
caggtgccccgaata

SEQ ID NO: 1963021 - DNA, 15 bp, Homo sapiens
aggtgccccgaataa

SEQ ID NO: 1963022 - DNA, 15 bp, Homo sapiens
ggtgccccgaataac

SEQ ID NO: 1963023 - DNA, 15 bp, Homo sapiens
gtgccccgaataacg

SEQ ID NO: 1963024 - DNA, 15 bp, Homo sapiens
tgccccgaataacgt

SEQ ID NO: 1963025 - DNA, 15 bp, Homo sapiens
gccccgaataacgtg

SEQ ID NO: 1963026 - DNA, 15 bp, Homo sapiens
ccccgaataacgtga

SEQ ID NO: 1963027 - DNA, 15 bp, Homo sapiens
cccgaataacgtgag

SEQ ID NO: 1963028 - DNA, 15 bp, Homo sapiens
ccgaataacgtgagt

SEQ ID NO: 1963029 - DNA, 15 bp, Homo sapiens
cgaataacgtgagta

SEQ ID NO: 1963030 - DNA, 15 bp, Homo sapiens
gaataacgtgagtat

SEQ ID NO: 1963031 - DNA, 15 bp, Homo sapiens
aataacgtgagtatc

SEQ ID NO: 1963032 - DNA, 15 bp, Homo sapiens
ataacgtgagtatcg

SEQ ID NO: 1963033 - DNA, 15 bp, Homo sapiens
taacgtgagtatcgc

SEQ ID NO: 1963034 - DNA, 15 bp, Homo sapiens
aacgtgagtatcgct

SEQ ID NO: 1963035 - DNA, 15 bp, Homo sapiens
acgtgagtatcgctc

SEQ ID NO: 1963036 - DNA, 15 bp, Homo sapiens
cgtgagtatcgctcc

SEQ ID NO: 1963037 - DNA, 15 bp, Homo sapiens
gtgagtatcgctccg

SEQ ID NO: 1963038 - DNA, 15 bp, Homo sapiens
tgagtatcgctccgg

SEQ ID NO: 1963039 - DNA, 15 bp, Homo sapiens
gagtatcgctccggg

SEQ ID NO: 1963040 - DNA, 15 bp, Homo sapiens
agtatcgctccgggc

SEQ ID NO: 1963041 - DNA, 15 bp, Homo sapiens
gtatcgctccgggcc

SEQ ID NO: 1963042 - DNA, 15 bp, Homo sapiens
tatcgctccgggccg

SEQ ID NO: 1963043 - DNA, 15 bp, Homo sapiens
atcgctccgggccgc

SEQ ID NO: 1963044 - DNA, 15 bp, Homo sapiens
tcgctccgggccgcc

SEQ ID NO: 1963045 - DNA, 15 bp, Homo sapiens
cgctccgggccgccg

SEQ ID NO: 1963046 - DNA, 15 bp, Homo sapiens
gctccgggccgccgg

SEQ ID NO: 1963047 - DNA, 15 bp, Homo sapiens
ctccgggccgccggg

SEQ ID NO: 1963048 - DNA, 15 bp, Homo sapiens
tccgggccgccggga

SEQ ID NO: 1963049 - DNA, 15 bp, Homo sapiens
ccgggccgccgggaa

SEQ ID NO: 1963050 - DNA, 15 bp, Homo sapiens
cgggccgccgggaac

SEQ ID NO: 1963051 - DNA, 15 bp, Homo sapiens
gggccgccgggaacg

SEQ ID NO: 1963052 - DNA, 15 bp, Homo sapiens
ggccgccgggaacgc

SEQ ID NO: 1963053 - DNA, 15 bp, Homo sapiens
gccgccgggaacgcc

SEQ ID NO: 1963054 - DNA, 15 bp, Homo sapiens
ccgccgggaacgccc

SEQ ID NO: 1963055 - DNA, 15 bp, Homo sapiens
cgccgggaacgcccg

SEQ ID NO: 1963056 - DNA, 15 bp, Homo sapiens
gccgggaacgcccgg

SEQ ID NO: 1963057 - DNA, 15 bp, Homo sapiens
ccgggaacgcccggt

SEQ ID NO: 1963058 - DNA, 15 bp, Homo sapiens
cgggaacgcccggtg

SEQ ID NO: 1963059 - DNA, 15 bp, Homo sapiens
gggaacgcccggtgg

SEQ ID NO: 1963060 - DNA, 15 bp, Homo sapiens
ggaacgcccggtggg

SEQ ID NO: 1963061 - DNA, 15 bp, Homo sapiens
gaacgcccggtgggt

SEQ ID NO: 1963062 - DNA, 15 bp, Homo sapiens
aacgcccggtgggtt

SEQ ID NO: 1963063 - DNA, 15 bp, Homo sapiens
acgcccggtgggttt

SEQ ID NO: 1963064 - DNA, 15 bp, Homo sapiens
cgcccggtgggtttt

SEQ ID NO: 1963065 - DNA, 15 bp, Homo sapiens
gcccggtgggttttc

SEQ ID NO: 1963066 - DNA, 15 bp, Homo sapiens
cccggtgggttttcg

SEQ ID NO: 1963067 - DNA, 15 bp, Homo sapiens
ccggtgggttttcgt

SEQ ID NO: 1963068 - DNA, 15 bp, Homo sapiens
cggtgggttttcgtg

SEQ ID NO: 1963069 - DNA, 15 bp, Homo sapiens
ggtgggttttcgtgg

SEQ ID NO: 1963070 - DNA, 15 bp, Homo sapiens
gtgggttttcgtggg

SEQ ID NO: 1963071 - DNA, 15 bp, Homo sapiens
tgggttttcgtgggt

SEQ ID NO: 1963072 - DNA, 15 bp, Homo sapiens
gggttttcgtgggtg

SEQ ID NO: 1963073 - DNA, 15 bp, Homo sapiens
ggttttcgtgggtgt

SEQ ID NO: 1963074 - DNA, 15 bp, Homo sapiens
gttttcgtgggtgtg

SEQ ID NO: 1963075 - DNA, 15 bp, Homo sapiens
ttttcgtgggtgtgg

SEQ ID NO: 1963076 - DNA, 15 bp, Homo sapiens
tttcgtgggtgtggt

SEQ ID NO: 1963077 - DNA, 15 bp, Homo sapiens
ttcgtgggtgtggtg

SEQ ID NO: 1963078 - DNA, 15 bp, Homo sapiens
tcgtgggtgtggtgg

SEQ ID NO: 1963079 - DNA, 15 bp, Homo sapiens
cgtgggtgtggtggg

SEQ ID NO: 1963080 - DNA, 15 bp, Homo sapiens
gtgggtgtggtgggg

SEQ ID NO: 1963081 - DNA, 15 bp, Homo sapiens
tgggtgtggtggggg

SEQ ID NO: 1963082 - DNA, 15 bp, Homo sapiens
gggtgtggtgggggc

SEQ ID NO: 1963083 - DNA, 15 bp, Homo sapiens
ggtgtggtgggggcg

SEQ ID NO: 1963084 - DNA, 15 bp, Homo sapiens
gtgtggtgggggcgg

SEQ ID NO: 1963085 - DNA, 15 bp, Homo sapiens
tgtggtgggggcggg

SEQ ID NO: 1963086 - DNA, 15 bp, Homo sapiens
gtggtgggggcgggc

SEQ ID NO: 1963087 - DNA, 15 bp, Homo sapiens
tggtgggggcgggcg

SEQ ID NO: 1963088 - DNA, 15 bp, Homo sapiens
ggtgggggcgggcgg

SEQ ID NO: 1963089 - DNA, 15 bp, Homo sapiens
gtgggggcgggcgga

SEQ ID NO: 1963090 - DNA, 15 bp, Homo sapiens
tgggggcgggcggag

SEQ ID NO: 1963091 - DNA, 15 bp, Homo sapiens
gggggcgggcggagc

SEQ ID NO: 1963092 - DNA, 15 bp, Homo sapiens
ggggcgggcggagcc

SEQ ID NO: 1963093 - DNA, 15 bp, Homo sapiens
gggcgggcggagcct

SEQ ID NO: 1963094 - DNA, 15 bp, Homo sapiens
ggcgggcggagcctt

SEQ ID NO: 1963095 - DNA, 15 bp, Homo sapiens
gcgggcggagccttg

SEQ ID NO: 1963096 - DNA, 15 bp, Homo sapiens
cgggcggagccttgg

SEQ ID NO: 1963097 - DNA, 15 bp, Homo sapiens
gggcggagccttggg

SEQ ID NO: 1963098 - DNA, 15 bp, Homo sapiens
ggcggagccttgggg

SEQ ID NO: 1963099 - DNA, 15 bp, Homo sapiens
gcggagccttggggt

SEQ ID NO: 1963100 - DNA, 15 bp, Homo sapiens
cggagccttggggtc

SEQ ID NO: 1963101 - DNA, 15 bp, Homo sapiens
ggagccttggggtca

SEQ ID NO: 1963102 - DNA, 15 bp, Homo sapiens
gagccttggggtcac

SEQ ID NO: 1963103 - DNA, 15 bp, Homo sapiens
agccttggggtcacc

SEQ ID NO: 1963104 - DNA, 15 bp, Homo sapiens
gccttggggtcacca

SEQ ID NO: 1963105 - DNA, 15 bp, Homo sapiens
ccttggggtcaccaa

SEQ ID NO: 1963106 - DNA, 15 bp, Homo sapiens
cttggggtcaccaag

SEQ ID NO: 1963107 - DNA, 15 bp, Homo sapiens
ttggggtcaccaaga

SEQ ID NO: 1963108 - DNA, 15 bp, Homo sapiens
tggggtcaccaagag

SEQ ID NO: 1963109 - DNA, 15 bp, Homo sapiens
ggggtcaccaagagc

SEQ ID NO: 1963110 - DNA, 15 bp, Homo sapiens
gggtcaccaagagcc

SEQ ID NO: 1963111 - DNA, 15 bp, Homo sapiens
ggtcaccaagagcca

SEQ ID NO: 1963112 - DNA, 15 bp, Homo sapiens
gtcaccaagagccac

SEQ ID NO: 1963113 - DNA, 15 bp, Homo sapiens
tcaccaagagccact

SEQ ID NO: 1963114 - DNA, 15 bp, Homo sapiens
caccaagagccactg

SEQ ID NO: 1963115 - DNA, 15 bp, Homo sapiens
accaagagccactga

SEQ ID NO: 1963116 - DNA, 15 bp, Homo sapiens
ccaagagccactgaa

SEQ ID NO: 1963117 - DNA, 15 bp, Homo sapiens
caagagccactgaac

SEQ ID NO: 1963118 - DNA, 15 bp, Homo sapiens
aagagccactgaacg

SEQ ID NO: 1963119 - DNA, 15 bp, Homo sapiens
agagccactgaacga

SEQ ID NO: 1963120 - DNA, 15 bp, Homo sapiens
gagccactgaacgag

SEQ ID NO: 1963121 - DNA, 15 bp, Homo sapiens
agccactgaacgagg

SEQ ID NO: 1963122 - DNA, 15 bp, Homo sapiens
gccactgaacgaggg

SEQ ID NO: 1963123 - DNA, 15 bp, Homo sapiens
ccactgaacgagggt

SEQ ID NO: 1963124 - DNA, 15 bp, Homo sapiens
cactgaacgagggta

SEQ ID NO: 1963125 - DNA, 15 bp, Homo sapiens
actgaacgagggtaa

SEQ ID NO: 1963126 - DNA, 15 bp, Homo sapiens
ctgaacgagggtaag

SEQ ID NO: 1963127 - DNA, 15 bp, Homo sapiens
tgaacgagggtaagg

SEQ ID NO: 1963128 - DNA, 15 bp, Homo sapiens
gaacgagggtaagga

SEQ ID NO: 1963129 - DNA, 15 bp, Homo sapiens
aacgagggtaaggag

SEQ ID NO: 1963130 - DNA, 15 bp, Homo sapiens
acgagggtaaggagc

SEQ ID NO: 1963131 - DNA, 15 bp, Homo sapiens
cgagggtaaggagcg

SEQ ID NO: 1963132 - DNA, 15 bp, Homo sapiens
gagggtaaggagcgg

SEQ ID NO: 1963133 - DNA, 15 bp, Homo sapiens
agggtaaggagcggc

SEQ ID NO: 1963134 - DNA, 15 bp, Homo sapiens
gggtaaggagcggcc

SEQ ID NO: 1963135 - DNA, 15 bp, Homo sapiens
ggtaaggagcggcca

SEQ ID NO: 1963136 - DNA, 15 bp, Homo sapiens
gtaaggagcggccac

SEQ ID NO: 1963137 - DNA, 15 bp, Homo sapiens
taaggagcggccacc

SEQ ID NO: 1963138 - DNA, 15 bp, Homo sapiens
aaggagcggccaccg

SEQ ID NO: 1963139 - DNA, 15 bp, Homo sapiens
aggagcggccaccgc

SEQ ID NO: 1963140 - DNA, 15 bp, Homo sapiens
ggagcggccaccgcg

SEQ ID NO: 1963141 - DNA, 15 bp, Homo sapiens
gagcggccaccgcgc

SEQ ID NO: 1963142 - DNA, 15 bp, Homo sapiens
agcggccaccgcgcg

SEQ ID NO: 1963143 - DNA, 15 bp, Homo sapiens
gcggccaccgcgcgg

SEQ ID NO: 1963144 - DNA, 15 bp, Homo sapiens
cggccaccgcgcgga

SEQ ID NO: 1963145 - DNA, 15 bp, Homo sapiens
ggccaccgcgcggac

SEQ ID NO: 1963146 - DNA, 15 bp, Homo sapiens
gccaccgcgcggact

SEQ ID NO: 1963147 - DNA, 15 bp, Homo sapiens
ccaccgcgcggactc

SEQ ID NO: 1963148 - DNA, 15 bp, Homo sapiens
caccgcgcggactcc

SEQ ID NO: 1963149 - DNA, 15 bp, Homo sapiens
accgcgcggactccg

SEQ ID NO: 1963150 - DNA, 15 bp, Homo sapiens
ccgcgcggactccgc

SEQ ID NO: 1963151 - DNA, 15 bp, Homo sapiens
cgcgcggactccgca

SEQ ID NO: 1963152 - DNA, 15 bp, Homo sapiens
gcgcggactccgcaa

SEQ ID NO: 1963153 - DNA, 15 bp, Homo sapiens
cgcggactccgcaac

SEQ ID NO: 1963154 - DNA, 15 bp, Homo sapiens
gcggactccgcaacc

SEQ ID NO: 1963155 - DNA, 15 bp, Homo sapiens
cggactccgcaacct

SEQ ID NO: 1963156 - DNA, 15 bp, Homo sapiens
ggactccgcaacctt

SEQ ID NO: 1963157 - DNA, 15 bp, Homo sapiens
gactccgcaaccttc

SEQ ID NO: 1963158 - DNA, 15 bp, Homo sapiens
actccgcaaccttcc

SEQ ID NO: 1963159 - DNA, 15 bp, Homo sapiens
ctccgcaaccttccc

SEQ ID NO: 1963160 - DNA, 15 bp, Homo sapiens
tccgcaaccttcccg

SEQ ID NO: 1963161 - DNA, 15 bp, Homo sapiens
ccgcaaccttcccgg

SEQ ID NO: 1963162 - DNA, 15 bp, Homo sapiens
cgcaaccttcccggg

SEQ ID NO: 1963163 - DNA, 15 bp, Homo sapiens
gcaaccttcccggga

SEQ ID NO: 1963164 - DNA, 15 bp, Homo sapiens
caaccttcccgggat

SEQ ID NO: 1963165 - DNA, 15 bp, Homo sapiens
aaccttcccgggata

SEQ ID NO: 1963166 - DNA, 15 bp, Homo sapiens
accttcccgggatag

SEQ ID NO: 1963167 - DNA, 15 bp, Homo sapiens
ccttcccgggatagc

SEQ ID NO: 1963168 - DNA, 15 bp, Homo sapiens
cttcccgggatagct

SEQ ID NO: 1963169 - DNA, 15 bp, Homo sapiens
ttcccgggatagctt

SEQ ID NO: 1963170 - DNA, 15 bp, Homo sapiens
tcccgggatagcttc

SEQ ID NO: 1963171 - DNA, 15 bp, Homo sapiens
cccgggatagcttcc

SEQ ID NO: 1963172 - DNA, 15 bp, Homo sapiens
ccgggatagcttccg

SEQ ID NO: 1963173 - DNA, 15 bp, Homo sapiens
cgggatagcttccgt

SEQ ID NO: 1963174 - DNA, 15 bp, Homo sapiens
gggatagcttccgtg

SEQ ID NO: 1963175 - DNA, 15 bp, Homo sapiens
ggatagcttccgtgt

SEQ ID NO: 1963176 - DNA, 15 bp, Homo sapiens
gatagcttccgtgtc

SEQ ID NO: 1963177 - DNA, 15 bp, Homo sapiens
atagcttccgtgtcc

SEQ ID NO: 1963178 - DNA, 15 bp, Homo sapiens
tagcttccgtgtcct

SEQ ID NO: 1963179 - DNA, 15 bp, Homo sapiens
agcttccgtgtcctt

SEQ ID NO: 1963180 - DNA, 15 bp, Homo sapiens
gcttccgtgtccttg

SEQ ID NO: 1963181 - DNA, 15 bp, Homo sapiens
cttccgtgtccttgg

SEQ ID NO: 1963182 - DNA, 15 bp, Homo sapiens
ttccgtgtccttggc

SEQ ID NO: 1963183 - DNA, 15 bp, Homo sapiens
tccgtgtccttggct

SEQ ID NO: 1963184 - DNA, 15 bp, Homo sapiens
ccgtgtccttggctc

SEQ ID NO: 1963185 - DNA, 15 bp, Homo sapiens
cgtgtccttggctca

SEQ ID NO: 1963186 - DNA, 15 bp, Homo sapiens
gtgtccttggctcag

SEQ ID NO: 1963187 - DNA, 15 bp, Homo sapiens
tgtccttggctcagc

SEQ ID NO: 1963188 - DNA, 15 bp, Homo sapiens
gtccttggctcagct

SEQ ID NO: 1963189 - DNA, 15 bp, Homo sapiens
tccttggctcagctg

SEQ ID NO: 1963190 - DNA, 15 bp, Homo sapiens
ccttggctcagctgt

SEQ ID NO: 1963191 - DNA, 15 bp, Homo sapiens
cttggctcagctgtg

SEQ ID NO: 1963192 - DNA, 15 bp, Homo sapiens
ttggctcagctgtgt

SEQ ID NO: 1963193 - DNA, 15 bp, Homo sapiens
tggctcagctgtgta

SEQ ID NO: 1963194 - DNA, 15 bp, Homo sapiens
ggctcagctgtgtat

SEQ ID NO: 1963195 - DNA, 15 bp, Homo sapiens
gctcagctgtgtatg

SEQ ID NO: 1963196 - DNA, 15 bp, Homo sapiens
ctcagctgtgtatgc

SEQ ID NO: 1963197 - DNA, 15 bp, Homo sapiens
tcagctgtgtatgcc

SEQ ID NO: 1963198 - DNA, 15 bp, Homo sapiens
cagctgtgtatgccc

SEQ ID NO: 1963199 - DNA, 15 bp, Homo sapiens
agctgtgtatgcccg

SEQ ID NO: 1963200 - DNA, 15 bp, Homo sapiens
gctgtgtatgcccgt

SEQ ID NO: 1963201 - DNA, 15 bp, Homo sapiens
ctgtgtatgcccgtg

SEQ ID NO: 1963202 - DNA, 15 bp, Homo sapiens
tgtgtatgcccgtgg

SEQ ID NO: 1963203 - DNA, 15 bp, Homo sapiens
gtgtatgcccgtggt

SEQ ID NO: 1963204 - DNA, 15 bp, Homo sapiens
tgtatgcccgtggtg

SEQ ID NO: 1963205 - DNA, 15 bp, Homo sapiens
gtatgcccgtggtgc

SEQ ID NO: 1963206 - DNA, 15 bp, Homo sapiens
tatgcccgtggtgcg

SEQ ID NO: 1963207 - DNA, 15 bp, Homo sapiens
atgcccgtggtgcga

SEQ ID NO: 1963208 - DNA, 15 bp, Homo sapiens
tgcccgtggtgcgag

SEQ ID NO: 1963209 - DNA, 15 bp, Homo sapiens
gcccgtggtgcgagc

SEQ ID NO: 1963210 - DNA, 15 bp, Homo sapiens
cccgtggtgcgagca

SEQ ID NO: 1963211 - DNA, 15 bp, Homo sapiens
ccgtggtgcgagcac

SEQ ID NO: 1963212 - DNA, 15 bp, Homo sapiens
cgtggtgcgagcact

SEQ ID NO: 1963213 - DNA, 15 bp, Homo sapiens
gtggtgcgagcactg

SEQ ID NO: 1963214 - DNA, 15 bp, Homo sapiens
tggtgcgagcactgc

SEQ ID NO: 1963215 - DNA, 15 bp, Homo sapiens
ggtgcgagcactgcg

SEQ ID NO: 1963216 - DNA, 15 bp, Homo sapiens
gtgcgagcactgcgg

SEQ ID NO: 1963217 - DNA, 15 bp, Homo sapiens
tgcgagcactgcgga

SEQ ID NO: 1963218 - DNA, 15 bp, Homo sapiens
gcgagcactgcggag

SEQ ID NO: 1963219 - DNA, 15 bp, Homo sapiens
cgagcactgcggagc

SEQ ID NO: 1963220 - DNA, 15 bp, Homo sapiens
gagcactgcggagcc

SEQ ID NO: 1963221 - DNA, 15 bp, Homo sapiens
agcactgcggagccg

SEQ ID NO: 1963222 - DNA, 15 bp, Homo sapiens
gcactgcggagccgc

SEQ ID NO: 1963223 - DNA, 15 bp, Homo sapiens
cactgcggagccgcc

SEQ ID NO: 1963224 - DNA, 15 bp, Homo sapiens
actgcggagccgcct

SEQ ID NO: 1963225 - DNA, 15 bp, Homo sapiens
ctgcggagccgcctg

SEQ ID NO: 1963226 - DNA, 15 bp, Homo sapiens
tgcggagccgcctgg

SEQ ID NO: 1963227 - DNA, 15 bp, Homo sapiens
gcggagccgcctggg

SEQ ID NO: 1963228 - DNA, 15 bp, Homo sapiens
cggagccgcctgggg

SEQ ID NO: 1963229 - DNA, 15 bp, Homo sapiens
ggagccgcctggggc

SEQ ID NO: 1963230 - DNA, 15 bp, Homo sapiens
gagccgcctggggcg

SEQ ID NO: 1963231 - DNA, 15 bp, Homo sapiens
agccgcctggggcgc

SEQ ID NO: 1963232 - DNA, 15 bp, Homo sapiens
gccgcctggggcgca

SEQ ID NO: 1963233 - DNA, 15 bp, Homo sapiens
ccgcctggggcgcaa

SEQ ID NO: 1963234 - DNA, 15 bp, Homo sapiens
cgcctggggcgcaag

SEQ ID NO: 1963235 - DNA, 15 bp, Homo sapiens
gcctggggcgcaagc

SEQ ID NO: 1963236 - DNA, 15 bp, Homo sapiens
cctggggcgcaagcc

SEQ ID NO: 1963237 - DNA, 15 bp, Homo sapiens
ctggggcgcaagccg

SEQ ID NO: 1963238 - DNA, 15 bp, Homo sapiens
tggggcgcaagccgg

SEQ ID NO: 1963239 - DNA, 15 bp, Homo sapiens
ggggcgcaagccggg

SEQ ID NO: 1963240 - DNA, 15 bp, Homo sapiens
gggcgcaagccgggt

SEQ ID NO: 1963241 - DNA, 15 bp, Homo sapiens
ggcgcaagccgggtc

SEQ ID NO: 1963242 - DNA, 15 bp, Homo sapiens
gcgcaagccgggtct

SEQ ID NO: 1963243 - DNA, 15 bp, Homo sapiens
cgcaagccgggtctt

SEQ ID NO: 1963244 - DNA, 15 bp, Homo sapiens
gcaagccgggtcttc

SEQ ID NO: 1963245 - DNA, 15 bp, Homo sapiens
caagccgggtcttca

SEQ ID NO: 1963246 - DNA, 15 bp, Homo sapiens
aagccgggtcttcac

SEQ ID NO: 1963247 - DNA, 15 bp, Homo sapiens
agccgggtcttcacc

SEQ ID NO: 1963248 - DNA, 15 bp, Homo sapiens
gccgggtcttcacca

SEQ ID NO: 1963249 - DNA, 15 bp, Homo sapiens
ccgggtcttcaccag

SEQ ID NO: 1963250 - DNA, 15 bp, Homo sapiens
cgggtcttcaccagt

SEQ ID NO: 1963251 - DNA, 15 bp, Homo sapiens
gggtcttcaccagtc

SEQ ID NO: 1963252 - DNA, 15 bp, Homo sapiens
ggtcttcaccagtcc

SEQ ID NO: 1963253 - DNA, 15 bp, Homo sapiens
gtcttcaccagtccc

SEQ ID NO: 1963254 - DNA, 15 bp, Homo sapiens
tcttcaccagtcccc

SEQ ID NO: 1963255 - DNA, 15 bp, Homo sapiens
cttcaccagtccccg

SEQ ID NO: 1963256 - DNA, 15 bp, Homo sapiens
ttcaccagtccccgg

SEQ ID NO: 1963257 - DNA, 15 bp, Homo sapiens
tcaccagtccccggg

SEQ ID NO: 1963258 - DNA, 15 bp, Homo sapiens
caccagtccccgggc

SEQ ID NO: 1963259 - DNA, 15 bp, Homo sapiens
accagtccccgggcg

SEQ ID NO: 1963260 - DNA, 15 bp, Homo sapiens
ccagtccccgggcgc

SEQ ID NO: 1963261 - DNA, 15 bp, Homo sapiens
cagtccccgggcgcg

SEQ ID NO: 1963262 - DNA, 15 bp, Homo sapiens
agtccccgggcgcgc

SEQ ID NO: 1963263 - DNA, 15 bp, Homo sapiens
gtccccgggcgcgct

SEQ ID NO: 1963264 - DNA, 15 bp, Homo sapiens
tccccgggcgcgctg

SEQ ID NO: 1963265 - DNA, 15 bp, Homo sapiens
ccccgggcgcgctgt

SEQ ID NO: 1963266 - DNA, 15 bp, Homo sapiens
cccgggcgcgctgtc

SEQ ID NO: 1963267 - DNA, 15 bp, Homo sapiens
ccgggcgcgctgtcg

SEQ ID NO: 1963268 - DNA, 15 bp, Homo sapiens
cgggcgcgctgtcgg

SEQ ID NO: 1963269 - DNA, 15 bp, Homo sapiens
gggcgcgctgtcggt

SEQ ID NO: 1963270 - DNA, 15 bp, Homo sapiens
ggcgcgctgtcggta

SEQ ID NO: 1963271 - DNA, 15 bp, Homo sapiens
gcgcgctgtcggtag

SEQ ID NO: 1963272 - DNA, 15 bp, Homo sapiens
cgcgctgtcggtagg

SEQ ID NO: 1963273 - DNA, 15 bp, Homo sapiens
gcgctgtcggtaggg

SEQ ID NO: 1963274 - DNA, 15 bp, Homo sapiens
cgctgtcggtagggc

SEQ ID NO: 1963275 - DNA, 15 bp, Homo sapiens
gctgtcggtagggcg

SEQ ID NO: 1963276 - DNA, 15 bp, Homo sapiens
ctgtcggtagggcgg

SEQ ID NO: 1963277 - DNA, 15 bp, Homo sapiens
tgtcggtagggcggg

SEQ ID NO: 1963278 - DNA, 15 bp, Homo sapiens
gtcggtagggcgggc

SEQ ID NO: 1963279 - DNA, 15 bp, Homo sapiens
tcggtagggcgggcg

SEQ ID NO: 1963280 - DNA, 15 bp, Homo sapiens
cggtagggcgggcgc

SEQ ID NO: 1963281 - DNA, 15 bp, Homo sapiens
ggtagggcgggcgct

SEQ ID NO: 1963282 - DNA, 15 bp, Homo sapiens
gtagggcgggcgctc

SEQ ID NO: 1963283 - DNA, 15 bp, Homo sapiens
tagggcgggcgctct

SEQ ID NO: 1963284 - DNA, 15 bp, Homo sapiens
agggcgggcgctctc

SEQ ID NO: 1963285 - DNA, 15 bp, Homo sapiens
gggcgggcgctctcg

SEQ ID NO: 1963286 - DNA, 15 bp, Homo sapiens
ggcgggcgctctcgg

SEQ ID NO: 1963287 - DNA, 15 bp, Homo sapiens
gcgggcgctctcggg

SEQ ID NO: 1963288 - DNA, 15 bp, Homo sapiens
cgggcgctctcgggc

SEQ ID NO: 1963289 - DNA, 15 bp, Homo sapiens
gggcgctctcgggcc

SEQ ID NO: 1963290 - DNA, 15 bp, Homo sapiens
ggcgctctcgggcca

SEQ ID NO: 1963291 - DNA, 15 bp, Homo sapiens
gcgctctcgggccac

SEQ ID NO: 1963292 - DNA, 15 bp, Homo sapiens
cgctctcgggccacc

SEQ ID NO: 1963293 - DNA, 15 bp, Homo sapiens
gctctcgggccaccg

SEQ ID NO: 1963294 - DNA, 15 bp, Homo sapiens
ctctcgggccaccgg

SEQ ID NO: 1963295 - DNA, 15 bp, Homo sapiens
tctcgggccaccggg

SEQ ID NO: 1963296 - DNA, 15 bp, Homo sapiens
ctcgggccaccgggc

SEQ ID NO: 1963297 - DNA, 15 bp, Homo sapiens
tcgggccaccgggcg

SEQ ID NO: 1963298 - DNA, 15 bp, Homo sapiens
cgggccaccgggcgg

SEQ ID NO: 1963299 - DNA, 15 bp, Homo sapiens
gggccaccgggcggg

SEQ ID NO: 1963300 - DNA, 15 bp, Homo sapiens
ggccaccgggcggga

SEQ ID NO: 1963301 - DNA, 15 bp, Homo sapiens
gccaccgggcgggag

SEQ ID NO: 1963302 - DNA, 15 bp, Homo sapiens
ccaccgggcgggagg

SEQ ID NO: 1963303 - DNA, 15 bp, Homo sapiens
caccgggcgggaggt

SEQ ID NO: 1963304 - DNA, 15 bp, Homo sapiens
accgggcgggaggtg

SEQ ID NO: 1963305 - DNA, 15 bp, Homo sapiens
ccgggcgggaggtgg

SEQ ID NO: 1963306 - DNA, 15 bp, Homo sapiens
cgggcgggaggtggc

SEQ ID NO: 1963307 - DNA, 15 bp, Homo sapiens
gggcgggaggtggcc

SEQ ID NO: 1963308 - DNA, 15 bp, Homo sapiens
ggcgggaggtggccg

SEQ ID NO: 1963309 - DNA, 15 bp, Homo sapiens
gcgggaggtggccgc

SEQ ID NO: 1963310 - DNA, 15 bp, Homo sapiens
cgggaggtggccgcg

SEQ ID NO: 1963311 - DNA, 15 bp, Homo sapiens
gggaggtggccgcgt

SEQ ID NO: 1963312 - DNA, 15 bp, Homo sapiens
ggaggtggccgcgtc

SEQ ID NO: 1963313 - DNA, 15 bp, Homo sapiens
gaggtggccgcgtcc

SEQ ID NO: 1963314 - DNA, 15 bp, Homo sapiens
aggtggccgcgtccc

SEQ ID NO: 1963315 - DNA, 15 bp, Homo sapiens
ggtggccgcgtcccc

SEQ ID NO: 1963316 - DNA, 15 bp, Homo sapiens
gtggccgcgtcccca

SEQ ID NO: 1963317 - DNA, 15 bp, Homo sapiens
tggccgcgtccccag

SEQ ID NO: 1963318 - DNA, 15 bp, Homo sapiens
ggccgcgtccccaga

SEQ ID NO: 1963319 - DNA, 15 bp, Homo sapiens
gccgcgtccccagac

SEQ ID NO: 1963320 - DNA, 15 bp, Homo sapiens
ccgcgtccccagaca

SEQ ID NO: 1963321 - DNA, 15 bp, Homo sapiens
cgcgtccccagacac

SEQ ID NO: 1963322 - DNA, 15 bp, Homo sapiens
gcgtccccagacact

SEQ ID NO: 1963323 - DNA, 15 bp, Homo sapiens
cgtccccagacactg

SEQ ID NO: 1963324 - DNA, 15 bp, Homo sapiens
tccccagacactggc

SEQ ID NO: 1963325 - DNA, 15 bp, Homo sapiens
ccccagacactggct

SEQ ID NO: 1963326 - DNA, 15 bp, Homo sapiens
cccagacactggctg

SEQ ID NO: 1963327 - DNA, 15 bp, Homo sapiens
ccagacactggctgg

SEQ ID NO: 1963328 - DNA, 15 bp, Homo sapiens
cagacactggctggg

SEQ ID NO: 1963329 - DNA, 15 bp, Homo sapiens
agacactggctgggc

SEQ ID NO: 1963330 - DNA, 15 bp, Homo sapiens
gacactggctgggcc

SEQ ID NO: 1963331 - DNA, 15 bp, Homo sapiens
acactggctgggcca

SEQ ID NO: 1963332 - DNA, 15 bp, Homo sapiens
cactggctgggccag

SEQ ID NO: 1963333 - DNA, 15 bp, Homo sapiens
actggctgggccaga

SEQ ID NO: 1963334 - DNA, 15 bp, Homo sapiens
ctggctgggccagag

SEQ ID NO: 1963335 - DNA, 15 bp, Homo sapiens
tggctgggccagagt

SEQ ID NO: 1963336 - DNA, 15 bp, Homo sapiens
ggctgggccagagtg

SEQ ID NO: 1963337 - DNA, 15 bp, Homo sapiens
gctgggccagagtga

SEQ ID NO: 1963338 - DNA, 15 bp, Homo sapiens
ctgggccagagtgag

SEQ ID NO: 1963339 - DNA, 15 bp, Homo sapiens
tgggccagagtgagt

SEQ ID NO: 1963340 - DNA, 15 bp, Homo sapiens
gggccagagtgagtt

SEQ ID NO: 1963341 - DNA, 15 bp, Homo sapiens
ggccagagtgagttt

SEQ ID NO: 1963342 - DNA, 15 bp, Homo sapiens
gccagagtgagttta

SEQ ID NO: 1963343 - DNA, 15 bp, Homo sapiens
ccagagtgagtttag

SEQ ID NO: 1963344 - DNA, 15 bp, Homo sapiens
cagagtgagtttagc

SEQ ID NO: 1963345 - DNA, 15 bp, Homo sapiens
agagtgagtttagcg

SEQ ID NO: 1963346 - DNA, 15 bp, Homo sapiens
gagtgagtttagcgc

SEQ ID NO: 1963347 - DNA, 15 bp, Homo sapiens
agtgagtttagcgcg

SEQ ID NO: 1963348 - DNA, 15 bp, Homo sapiens
gtgagtttagcgcgt

SEQ ID NO: 1963349 - DNA, 15 bp, Homo sapiens
tgagtttagcgcgta

SEQ ID NO: 1963350 - DNA, 15 bp, Homo sapiens
gagtttagcgcgtag

SEQ ID NO: 1963351 - DNA, 15 bp, Homo sapiens
agtttagcgcgtagg

SEQ ID NO: 1963352 - DNA, 15 bp, Homo sapiens
gtttagcgcgtaggc

SEQ ID NO: 1963353 - DNA, 15 bp, Homo sapiens
tttagcgcgtaggcg

SEQ ID NO: 1963354 - DNA, 15 bp, Homo sapiens
ttagcgcgtaggcgg

SEQ ID NO: 1963355 - DNA, 15 bp, Homo sapiens
tagcgcgtaggcggc

SEQ ID NO: 1963356 - DNA, 15 bp, Homo sapiens
agcgcgtaggcggcc

SEQ ID NO: 1963357 - DNA, 15 bp, Homo sapiens
gcgcgtaggcggccc

SEQ ID NO: 1963358 - DNA, 15 bp, Homo sapiens
cgcgtaggcggcccc

SEQ ID NO: 1963359 - DNA, 15 bp, Homo sapiens
gcgtaggcggccccg

SEQ ID NO: 1963360 - DNA, 15 bp, Homo sapiens
cgtaggcggccccgt

SEQ ID NO: 1963361 - DNA, 15 bp, Homo sapiens
gtaggcggccccgtg

SEQ ID NO: 1963362 - DNA, 15 bp, Homo sapiens
taggcggccccgtgg

SEQ ID NO: 1963363 - DNA, 15 bp, Homo sapiens
aggcggccccgtggc

SEQ ID NO: 1963364 - DNA, 15 bp, Homo sapiens
ggcggccccgtggcg

SEQ ID NO: 1963365 - DNA, 15 bp, Homo sapiens
gcggccccgtggcga

SEQ ID NO: 1963366 - DNA, 15 bp, Homo sapiens
cggccccgtggcgag

SEQ ID NO: 1963367 - DNA, 15 bp, Homo sapiens
ggccccgtggcgaga

SEQ ID NO: 1963368 - DNA, 15 bp, Homo sapiens
gccccgtggcgagag

SEQ ID NO: 1963369 - DNA, 15 bp, Homo sapiens
ccccgtggcgagagc

SEQ ID NO: 1963370 - DNA, 15 bp, Homo sapiens
cccgtggcgagagcg

SEQ ID NO: 1963371 - DNA, 15 bp, Homo sapiens
ccgtggcgagagcgc

SEQ ID NO: 1963372 - DNA, 15 bp, Homo sapiens
cgtggcgagagcgca

SEQ ID NO: 1963373 - DNA, 15 bp, Homo sapiens
gtggcgagagcgcac

SEQ ID NO: 1963374 - DNA, 15 bp, Homo sapiens
tggcgagagcgcacc

SEQ ID NO: 1963375 - DNA, 15 bp, Homo sapiens
ggcgagagcgcaccg

SEQ ID NO: 1963376 - DNA, 15 bp, Homo sapiens
gcgagagcgcaccga

SEQ ID NO: 1963377 - DNA, 15 bp, Homo sapiens
cgagagcgcaccgag

SEQ ID NO: 1963378 - DNA, 15 bp, Homo sapiens
gagagcgcaccgaga

SEQ ID NO: 1963379 - DNA, 15 bp, Homo sapiens
agagcgcaccgagag

SEQ ID NO: 1963380 - DNA, 15 bp, Homo sapiens
gagcgcaccgagaga

SEQ ID NO: 1963381 - DNA, 15 bp, Homo sapiens
agcgcaccgagagag

SEQ ID NO: 1963382 - DNA, 15 bp, Homo sapiens
gcgcaccgagagagc

SEQ ID NO: 1963383 - DNA, 15 bp, Homo sapiens
cgcaccgagagagcc

SEQ ID NO: 1963384 - DNA, 15 bp, Homo sapiens
gcaccgagagagcct

SEQ ID NO: 1963385 - DNA, 15 bp, Homo sapiens
caccgagagagcctc

SEQ ID NO: 1963386 - DNA, 15 bp, Homo sapiens
accgagagagcctcg

SEQ ID NO: 1963387 - DNA, 15 bp, Homo sapiens
ccgagagagcctcgg

SEQ ID NO: 1963388 - DNA, 15 bp, Homo sapiens
cgagagagcctcggt

SEQ ID NO: 1963389 - DNA, 15 bp, Homo sapiens
gagagagcctcggtg

SEQ ID NO: 1963390 - DNA, 15 bp, Homo sapiens
agagagcctcggtgt

SEQ ID NO: 1963391 - DNA, 15 bp, Homo sapiens
gagagcctcggtgtg

SEQ ID NO: 1963392 - DNA, 15 bp, Homo sapiens
agagcctcggtgtgc

SEQ ID NO: 1963393 - DNA, 15 bp, Homo sapiens
gagcctcggtgtgcc

SEQ ID NO: 1963394 - DNA, 15 bp, Homo sapiens
agcctcggtgtgcca

SEQ ID NO: 1963395 - DNA, 15 bp, Homo sapiens
gcctcggtgtgccaa

SEQ ID NO: 1963396 - DNA, 15 bp, Homo sapiens
cctcggtgtgccaat

SEQ ID NO: 1963397 - DNA, 15 bp, Homo sapiens
ctcggtgtgccaatt

SEQ ID NO: 1963398 - DNA, 15 bp, Homo sapiens
tcggtgtgccaattc

SEQ ID NO: 1963399 - DNA, 15 bp, Homo sapiens
cggtgtgccaattcc

SEQ ID NO: 1963400 - DNA, 15 bp, Homo sapiens
ggtgtgccaattccg

SEQ ID NO: 1963401 - DNA, 15 bp, Homo sapiens
gtgtgccaattccgg

SEQ ID NO: 1963402 - DNA, 15 bp, Homo sapiens
tgtgccaattccggg

SEQ ID NO: 1963403 - DNA, 15 bp, Homo sapiens
gtgccaattccgggg

SEQ ID NO: 1963404 - DNA, 15 bp, Homo sapiens
tgccaattccgggga

SEQ ID NO: 1963405 - DNA, 15 bp, Homo sapiens
gccaattccggggac

SEQ ID NO: 1963406 - DNA, 15 bp, Homo sapiens
ccaattccggggacg

SEQ ID NO: 1963407 - DNA, 15 bp, Homo sapiens
caattccggggacgt

SEQ ID NO: 1963408 - DNA, 15 bp, Homo sapiens
aattccggggacgtc

SEQ ID NO: 1963409 - DNA, 15 bp, Homo sapiens
attccggggacgtcc

SEQ ID NO: 1963410 - DNA, 15 bp, Homo sapiens
ttccggggacgtcca

SEQ ID NO: 1963411 - DNA, 15 bp, Homo sapiens
tccggggacgtccac

SEQ ID NO: 1963412 - DNA, 15 bp, Homo sapiens
ccggggacgtccacg

SEQ ID NO: 1963413 - DNA, 15 bp, Homo sapiens
cggggacgtccacgg

SEQ ID NO: 1963414 - DNA, 15 bp, Homo sapiens
ggggacgtccacggg

SEQ ID NO: 1963415 - DNA, 15 bp, Homo sapiens
gggacgtccacggga

SEQ ID NO: 1963416 - DNA, 15 bp, Homo sapiens
ggacgtccacgggac

SEQ ID NO: 1963417 - DNA, 15 bp, Homo sapiens
gacgtccacgggacc

SEQ ID NO: 1963418 - DNA, 15 bp, Homo sapiens
acgtccacgggacct

SEQ ID NO: 1963419 - DNA, 15 bp, Homo sapiens
cgtccacgggacctg

SEQ ID NO: 1963420 - DNA, 15 bp, Homo sapiens
gtccacgggacctgg

SEQ ID NO: 1963421 - DNA, 15 bp, Homo sapiens
tccacgggacctgga

SEQ ID NO: 1963422 - DNA, 15 bp, Homo sapiens
ccacgggacctggag

SEQ ID NO: 1963423 - DNA, 15 bp, Homo sapiens
cacgggacctggagg

SEQ ID NO: 1963424 - DNA, 15 bp, Homo sapiens
acgggacctggaggg

SEQ ID NO: 1963425 - DNA, 15 bp, Homo sapiens
cgggacctggagggg

SEQ ID NO: 1963426 - DNA, 15 bp, Homo sapiens
gggacctggaggggg

SEQ ID NO: 1963427 - DNA, 15 bp, Homo sapiens
ggacctggaggggga

SEQ ID NO: 1963428 - DNA, 15 bp, Homo sapiens
gacctggagggggag

SEQ ID NO: 1963429 - DNA, 15 bp, Homo sapiens
acctggagggggagg

SEQ ID NO: 1963430 - DNA, 15 bp, Homo sapiens
cctggagggggaggg

SEQ ID NO: 1963431 - DNA, 15 bp, Homo sapiens
ctggagggggaggga

SEQ ID NO: 1963432 - DNA, 15 bp, Homo sapiens
tggagggggagggac

SEQ ID NO: 1963433 - DNA, 15 bp, Homo sapiens
ggagggggagggacc

SEQ ID NO: 1963434 - DNA, 15 bp, Homo sapiens
gagggggagggacca

SEQ ID NO: 1963435 - DNA, 15 bp, Homo sapiens
agggggagggaccag

SEQ ID NO: 1963436 - DNA, 15 bp, Homo sapiens
gggggagggaccagc

SEQ ID NO: 1963437 - DNA, 15 bp, Homo sapiens
ggggagggaccagcc

SEQ ID NO: 1963438 - DNA, 15 bp, Homo sapiens
gggagggaccagccg

SEQ ID NO: 1963439 - DNA, 15 bp, Homo sapiens
ggagggaccagccgc

SEQ ID NO: 1963440 - DNA, 15 bp, Homo sapiens
gagggaccagccgcg

SEQ ID NO: 1963441 - DNA, 15 bp, Homo sapiens
agggaccagccgcgg

SEQ ID NO: 1963442 - DNA, 15 bp, Homo sapiens
gggaccagccgcggc

SEQ ID NO: 1963443 - DNA, 15 bp, Homo sapiens
ggaccagccgcggcg

SEQ ID NO: 1963444 - DNA, 15 bp, Homo sapiens
gaccagccgcggcgc

SEQ ID NO: 1963445 - DNA, 15 bp, Homo sapiens
accagccgcggcgct

SEQ ID NO: 1963446 - DNA, 15 bp, Homo sapiens
ccagccgcggcgctc

SEQ ID NO: 1963447 - DNA, 15 bp, Homo sapiens
cagccgcggcgctcg

SEQ ID NO: 1963448 - DNA, 15 bp, Homo sapiens
agccgcggcgctcgc

SEQ ID NO: 1963449 - DNA, 15 bp, Homo sapiens
gccgcggcgctcgct

SEQ ID NO: 1963450 - DNA, 15 bp, Homo sapiens
ccgcggcgctcgctc

SEQ ID NO: 1963451 - DNA, 15 bp, Homo sapiens
cgcggcgctcgctca

SEQ ID NO: 1963452 - DNA, 15 bp, Homo sapiens
gcggcgctcgctcac

SEQ ID NO: 1963453 - DNA, 15 bp, Homo sapiens
cggcgctcgctcaca

SEQ ID NO: 1963454 - DNA, 15 bp, Homo sapiens
ggcgctcgctcacac

SEQ ID NO: 1963455 - DNA, 15 bp, Homo sapiens
gcgctcgctcacacg

SEQ ID NO: 1963456 - DNA, 15 bp, Homo sapiens
cgctcgctcacacgc

SEQ ID NO: 1963457 - DNA, 15 bp, Homo sapiens
gctcgctcacacgca

SEQ ID NO: 1963458 - DNA, 15 bp, Homo sapiens
ctcgctcacacgcaa

SEQ ID NO: 1963459 - DNA, 15 bp, Homo sapiens
tcgctcacacgcaat

SEQ ID NO: 1963460 - DNA, 15 bp, Homo sapiens
cgctcacacgcaatt

SEQ ID NO: 1963461 - DNA, 15 bp, Homo sapiens
gctcacacgcaattg

SEQ ID NO: 1963462 - DNA, 15 bp, Homo sapiens
ctcacacgcaattgg

SEQ ID NO: 1963463 - DNA, 15 bp, Homo sapiens
tcacacgcaattggg

SEQ ID NO: 1963464 - DNA, 15 bp, Homo sapiens
cacacgcaattgggc

SEQ ID NO: 1963465 - DNA, 15 bp, Homo sapiens
acacgcaattgggca

SEQ ID NO: 1963466 - DNA, 15 bp, Homo sapiens
cacgcaattgggcag

SEQ ID NO: 1963467 - DNA, 15 bp, Homo sapiens
acgcaattgggcaga

SEQ ID NO: 1963468 - DNA, 15 bp, Homo sapiens
cgcaattgggcagac

SEQ ID NO: 1963469 - DNA, 15 bp, Homo sapiens
gcaattgggcagaca

SEQ ID NO: 1963470 - DNA, 15 bp, Homo sapiens
caattgggcagacag

SEQ ID NO: 1963471 - DNA, 15 bp, Homo sapiens
aattgggcagacagg

SEQ ID NO: 1963472 - DNA, 15 bp, Homo sapiens
attgggcagacagga

SEQ ID NO: 1963473 - DNA, 15 bp, Homo sapiens
ttgggcagacaggac

SEQ ID NO: 1963474 - DNA, 15 bp, Homo sapiens
tgggcagacaggaca

SEQ ID NO: 1963475 - DNA, 15 bp, Homo sapiens
gggcagacaggacat

SEQ ID NO: 1963476 - DNA, 15 bp, Homo sapiens
ggcagacaggacata

SEQ ID NO: 1963477 - DNA, 15 bp, Homo sapiens
gcagacaggacataa

SEQ ID NO: 1963478 - DNA, 15 bp, Homo sapiens
cagacaggacataac

SEQ ID NO: 1963479 - DNA, 15 bp, Homo sapiens
agacaggacataaca

SEQ ID NO: 1963480 - DNA, 15 bp, Homo sapiens
gacaggacataacac

SEQ ID NO: 1963481 - DNA, 15 bp, Homo sapiens
acaggacataacacc

SEQ ID NO: 1963482 - DNA, 15 bp, Homo sapiens
caggacataacaccc

SEQ ID NO: 1963483 - DNA, 15 bp, Homo sapiens
aggacataacacccg

SEQ ID NO: 1963484 - DNA, 15 bp, Homo sapiens
ggacataacacccgc

SEQ ID NO: 1963485 - DNA, 15 bp, Homo sapiens
gacataacacccgca

SEQ ID NO: 1963486 - DNA, 15 bp, Homo sapiens
acataacacccgcaa

SEQ ID NO: 1963487 - DNA, 15 bp, Homo sapiens
cataacacccgcaat

SEQ ID NO: 1963488 - DNA, 15 bp, Homo sapiens
ataacacccgcaata

SEQ ID NO: 1963489 - DNA, 15 bp, Homo sapiens
taacacccgcaatac

SEQ ID NO: 1963490 - DNA, 15 bp, Homo sapiens
aacacccgcaataca

SEQ ID NO: 1963491 - DNA, 15 bp, Homo sapiens
acacccgcaatacag

SEQ ID NO: 1963492 - DNA, 15 bp, Homo sapiens
cacccgcaatacaga

SEQ ID NO: 1963493 - DNA, 15 bp, Homo sapiens
acccgcaatacagac

SEQ ID NO: 1963494 - DNA, 15 bp, Homo sapiens
cccgcaatacagacg

SEQ ID NO: 1963495 - DNA, 15 bp, Homo sapiens
ccgcaatacagacgc

SEQ ID NO: 1963496 - DNA, 15 bp, Homo sapiens
cgcaatacagacgca

SEQ ID NO: 1963497 - DNA, 15 bp, Homo sapiens
gcaatacagacgcat

SEQ ID NO: 1963498 - DNA, 15 bp, Homo sapiens
caatacagacgcatc

SEQ ID NO: 1963499 - DNA, 15 bp, Homo sapiens
aatacagacgcatca

SEQ ID NO: 1963500 - DNA, 15 bp, Homo sapiens
atacagacgcatcac

SEQ ID NO: 1963501 - DNA, 15 bp, Homo sapiens
tacagacgcatcacc

SEQ ID NO: 1963502 - DNA, 15 bp, Homo sapiens
acagacgcatcacct

SEQ ID NO: 1963503 - DNA, 15 bp, Homo sapiens
cagacgcatcacctc

SEQ ID NO: 1963504 - DNA, 15 bp, Homo sapiens
agacgcatcacctct

SEQ ID NO: 1963505 - DNA, 15 bp, Homo sapiens
gacgcatcacctctt

SEQ ID NO: 1963506 - DNA, 15 bp, Homo sapiens
acgcatcacctcttc

SEQ ID NO: 1963507 - DNA, 15 bp, Homo sapiens
cgcatcacctcttct

SEQ ID NO: 1963508 - DNA, 15 bp, Homo sapiens
gcatcacctcttctt

SEQ ID NO: 1963509 - DNA, 15 bp, Homo sapiens
catcacctcttcttc

SEQ ID NO: 1963510 - DNA, 15 bp, Homo sapiens
atcacctcttcttcg

SEQ ID NO: 1963511 - DNA, 15 bp, Homo sapiens
tcacctcttcttcga

SEQ ID NO: 1963512 - DNA, 15 bp, Homo sapiens
cacctcttcttcgac

SEQ ID NO: 1963513 - DNA, 15 bp, Homo sapiens
acctcttcttcgacc

SEQ ID NO: 1963514 - DNA, 15 bp, Homo sapiens
cctcttcttcgaccc

SEQ ID NO: 1963515 - DNA, 15 bp, Homo sapiens
ctcttcttcgacccg

SEQ ID NO: 1963516 - DNA, 15 bp, Homo sapiens
tcttcttcgacccgg

SEQ ID NO: 1963517 - DNA, 15 bp, Homo sapiens
cttcttcgacccggg

SEQ ID NO: 1963518 - DNA, 15 bp, Homo sapiens
ttcttcgacccggga

SEQ ID NO: 1963519 - DNA, 15 bp, Homo sapiens
tcttcgacccgggag

SEQ ID NO: 1963520 - DNA, 15 bp, Homo sapiens
cttcgacccgggagt

SEQ ID NO: 1963521 - DNA, 15 bp, Homo sapiens
ttcgacccgggagtg

SEQ ID NO: 1963522 - DNA, 15 bp, Homo sapiens
tcgacccgggagtgg

SEQ ID NO: 1963523 - DNA, 15 bp, Homo sapiens
cgacccgggagtggg

SEQ ID NO: 1963524 - DNA, 15 bp, Homo sapiens
gacccgggagtgggc

SEQ ID NO: 1963525 - DNA, 15 bp, Homo sapiens
acccgggagtgggcc

SEQ ID NO: 1963526 - DNA, 15 bp, Homo sapiens
cccgggagtgggccg

SEQ ID NO: 1963527 - DNA, 15 bp, Homo sapiens
ccgggagtgggccga

SEQ ID NO: 1963528 - DNA, 15 bp, Homo sapiens
cgggagtgggccgag

SEQ ID NO: 1963529 - DNA, 15 bp, Homo sapiens
gggagtgggccgaga

SEQ ID NO: 1963530 - DNA, 15 bp, Homo sapiens
ggagtgggccgagat

SEQ ID NO: 1963531 - DNA, 15 bp, Homo sapiens
gagtgggccgagatt

SEQ ID NO: 1963532 - DNA, 15 bp, Homo sapiens
agtgggccgagattg

SEQ ID NO: 1963533 - DNA, 15 bp, Homo sapiens
gtgggccgagattgc

SEQ ID NO: 1963534 - DNA, 15 bp, Homo sapiens
tgggccgagattgca

SEQ ID NO: 1963535 - DNA, 15 bp, Homo sapiens
gggccgagattgcag

SEQ ID NO: 1963536 - DNA, 15 bp, Homo sapiens
ggccgagattgcagc

SEQ ID NO: 1963537 - DNA, 15 bp, Homo sapiens
gccgagattgcagcg

SEQ ID NO: 1963538 - DNA, 15 bp, Homo sapiens
ccgagattgcagcgc

SEQ ID NO: 1963539 - DNA, 15 bp, Homo sapiens
cgagattgcagcgct

SEQ ID NO: 1963540 - DNA, 15 bp, Homo sapiens
gagattgcagcgctg

SEQ ID NO: 1963541 - DNA, 15 bp, Homo sapiens
agattgcagcgctgg

SEQ ID NO: 1963542 - DNA, 15 bp, Homo sapiens
gattgcagcgctggc

SEQ ID NO: 1963543 - DNA, 15 bp, Homo sapiens
attgcagcgctggcg

SEQ ID NO: 1963544 - DNA, 15 bp, Homo sapiens
ttgcagcgctggcgc

SEQ ID NO: 1963545 - DNA, 15 bp, Homo sapiens
tgcagcgctggcgcc

SEQ ID NO: 1963546 - DNA, 15 bp, Homo sapiens
gcagcgctggcgccc

SEQ ID NO: 1963547 - DNA, 15 bp, Homo sapiens
cagcgctggcgccct

SEQ ID NO: 1963548 - DNA, 15 bp, Homo sapiens
agcgctggcgccctg

SEQ ID NO: 1963549 - DNA, 15 bp, Homo sapiens
gcgctggcgccctgg

SEQ ID NO: 1963550 - DNA, 15 bp, Homo sapiens
cgctggcgccctggg

SEQ ID NO: 1963551 - DNA, 15 bp, Homo sapiens
gctggcgccctgggt

SEQ ID NO: 1963552 - DNA, 15 bp, Homo sapiens
ctggcgccctgggtt

SEQ ID NO: 1963553 - DNA, 15 bp, Homo sapiens
tggcgccctgggttc

SEQ ID NO: 1963554 - DNA, 15 bp, Homo sapiens
ggcgccctgggttcc

SEQ ID NO: 1963555 - DNA, 15 bp, Homo sapiens
gcgccctgggttccc

SEQ ID NO: 1963556 - DNA, 15 bp, Homo sapiens
cgccctgggttcccg

SEQ ID NO: 1963557 - DNA, 15 bp, Homo sapiens
gccctgggttcccgg

SEQ ID NO: 1963558 - DNA, 15 bp, Homo sapiens
ccctgggttcccggg

SEQ ID NO: 1963559 - DNA, 15 bp, Homo sapiens
cctgggttcccgggt

SEQ ID NO: 1963560 - DNA, 15 bp, Homo sapiens
ctgggttcccgggtg

SEQ ID NO: 1963561 - DNA, 15 bp, Homo sapiens
tgggttcccgggtgc

SEQ ID NO: 1963562 - DNA, 15 bp, Homo sapiens
gggttcccgggtgct

SEQ ID NO: 1963563 - DNA, 15 bp, Homo sapiens
ggttcccgggtgctt

SEQ ID NO: 1963564 - DNA, 15 bp, Homo sapiens
gttcccgggtgcttc

SEQ ID NO: 1963565 - DNA, 15 bp, Homo sapiens
ttcccgggtgcttcc

SEQ ID NO: 1963566 - DNA, 15 bp, Homo sapiens
tcccgggtgcttcct

SEQ ID NO: 1963567 - DNA, 15 bp, Homo sapiens
cccgggtgcttcctg

SEQ ID NO: 1963568 - DNA, 15 bp, Homo sapiens
ccgggtgcttcctgc

SEQ ID NO: 1963569 - DNA, 15 bp, Homo sapiens
cgggtgcttcctgcc

SEQ ID NO: 1963570 - DNA, 15 bp, Homo sapiens
gggtgcttcctgcct

SEQ ID NO: 1963571 - DNA, 15 bp, Homo sapiens
ggtgcttcctgcctg

SEQ ID NO: 1963572 - DNA, 15 bp, Homo sapiens
gtgcttcctgcctga

SEQ ID NO: 1963573 - DNA, 15 bp, Homo sapiens
tgcttcctgcctgac

SEQ ID NO: 1963574 - DNA, 15 bp, Homo sapiens
gcttcctgcctgacc

SEQ ID NO: 1963575 - DNA, 15 bp, Homo sapiens
cttcctgcctgacca

SEQ ID NO: 1963576 - DNA, 15 bp, Homo sapiens
ttcctgcctgaccag

SEQ ID NO: 1963577 - DNA, 15 bp, Homo sapiens
tcctgcctgaccagt

SEQ ID NO: 1963578 - DNA, 15 bp, Homo sapiens
cctgcctgaccagtc

SEQ ID NO: 1963579 - DNA, 15 bp, Homo sapiens
ctgcctgaccagtcc

SEQ ID NO: 1963580 - DNA, 15 bp, Homo sapiens
tgcctgaccagtccc

SEQ ID NO: 1963581 - DNA, 15 bp, Homo sapiens
gcctgaccagtcccc

SEQ ID NO: 1963582 - DNA, 15 bp, Homo sapiens
cctgaccagtcccca

SEQ ID NO: 1963583 - DNA, 15 bp, Homo sapiens
ctgaccagtccccat

SEQ ID NO: 1963584 - DNA, 15 bp, Homo sapiens
tgaccagtccccatg

SEQ ID NO: 1963585 - DNA, 15 bp, Homo sapiens
gaccagtccccatgt

SEQ ID NO: 1963586 - DNA, 15 bp, Homo sapiens
accagtccccatgtc

SEQ ID NO: 1963587 - DNA, 15 bp, Homo sapiens
ccagtccccatgtct

SEQ ID NO: 1963588 - DNA, 15 bp, Homo sapiens
cagtccccatgtctg

SEQ ID NO: 1963589 - DNA, 15 bp, Homo sapiens
agtccccatgtctgg

SEQ ID NO: 1963590 - DNA, 15 bp, Homo sapiens
gtccccatgtctggg

SEQ ID NO: 1963591 - DNA, 15 bp, Homo sapiens
tccccatgtctgggc

SEQ ID NO: 1963592 - DNA, 15 bp, Homo sapiens
ccccatgtctgggcg

SEQ ID NO: 1963593 - DNA, 15 bp, Homo sapiens
cccatgtctgggcgg

SEQ ID NO: 1963594 - DNA, 15 bp, Homo sapiens
ccatgtctgggcggt

SEQ ID NO: 1963595 - DNA, 15 bp, Homo sapiens
catgtctgggcggtg

SEQ ID NO: 1963596 - DNA, 15 bp, Homo sapiens
atgtctgggcggtgc

SEQ ID NO: 1963597 - DNA, 15 bp, Homo sapiens
tgtctgggcggtgca

SEQ ID NO: 1963598 - DNA, 15 bp, Homo sapiens
gtctgggcggtgcag

SEQ ID NO: 1963599 - DNA, 15 bp, Homo sapiens
tctgggcggtgcagt

SEQ ID NO: 1963600 - DNA, 15 bp, Homo sapiens
ctgggcggtgcagtc

SEQ ID NO: 1963601 - DNA, 15 bp, Homo sapiens
tgggcggtgcagtcg

SEQ ID NO: 1963602 - DNA, 15 bp, Homo sapiens
gggcggtgcagtcgc

SEQ ID NO: 1963603 - DNA, 15 bp, Homo sapiens
ggcggtgcagtcgcg

SEQ ID NO: 1963604 - DNA, 15 bp, Homo sapiens
gcggtgcagtcgcgc

SEQ ID NO: 1963605 - DNA, 15 bp, Homo sapiens
cggtgcagtcgcgcg

SEQ ID NO: 1963606 - DNA, 15 bp, Homo sapiens
ggtgcagtcgcgcgt

SEQ ID NO: 1963607 - DNA, 15 bp, Homo sapiens
gtgcagtcgcgcgtg

SEQ ID NO: 1963608 - DNA, 15 bp, Homo sapiens
tgcagtcgcgcgtgg

SEQ ID NO: 1963609 - DNA, 15 bp, Homo sapiens
gcagtcgcgcgtggc

SEQ ID NO: 1963610 - DNA, 15 bp, Homo sapiens
cagtcgcgcgtggcc

SEQ ID NO: 1963611 - DNA, 15 bp, Homo sapiens
agtcgcgcgtggccc

SEQ ID NO: 1963612 - DNA, 15 bp, Homo sapiens
gtcgcgcgtggcccg

SEQ ID NO: 1963613 - DNA, 15 bp, Homo sapiens
tcgcgcgtggcccgc

SEQ ID NO: 1963614 - DNA, 15 bp, Homo sapiens
cgcgcgtggcccgcc

SEQ ID NO: 1963615 - DNA, 15 bp, Homo sapiens
gcgcgtggcccgcca

SEQ ID NO: 1963616 - DNA, 15 bp, Homo sapiens
cgcgtggcccgccag

SEQ ID NO: 1963617 - DNA, 15 bp, Homo sapiens
gcgtggcccgccagc

SEQ ID NO: 1963618 - DNA, 15 bp, Homo sapiens
cgtggcccgccagca

SEQ ID NO: 1963619 - DNA, 15 bp, Homo sapiens
gtggcccgccagcac

SEQ ID NO: 1963620 - DNA, 15 bp, Homo sapiens
tggcccgccagcacg

SEQ ID NO: 1963621 - DNA, 15 bp, Homo sapiens
ggcccgccagcacgt

SEQ ID NO: 1963622 - DNA, 15 bp, Homo sapiens
gcccgccagcacgtc

SEQ ID NO: 1963623 - DNA, 15 bp, Homo sapiens
cccgccagcacgtca

SEQ ID NO: 1963624 - DNA, 15 bp, Homo sapiens
ccgccagcacgtcag

SEQ ID NO: 1963625 - DNA, 15 bp, Homo sapiens
cgccagcacgtcagt

SEQ ID NO: 1963626 - DNA, 15 bp, Homo sapiens
gccagcacgtcagta

SEQ ID NO: 1963627 - DNA, 15 bp, Homo sapiens
ccagcacgtcagtat

SEQ ID NO: 1963628 - DNA, 15 bp, Homo sapiens
cagcacgtcagtatg

SEQ ID NO: 1963629 - DNA, 15 bp, Homo sapiens
agcacgtcagtatgt

SEQ ID NO: 1963630 - DNA, 15 bp, Homo sapiens
gcacgtcagtatgtc

SEQ ID NO: 1963631 - DNA, 15 bp, Homo sapiens
cacgtcagtatgtcg

SEQ ID NO: 1963632 - DNA, 15 bp, Homo sapiens
acgtcagtatgtcgg

SEQ ID NO: 1963633 - DNA, 15 bp, Homo sapiens
cgtcagtatgtcggg

SEQ ID NO: 1963634 - DNA, 15 bp, Homo sapiens
gtcagtatgtcgggt

SEQ ID NO: 1963635 - DNA, 15 bp, Homo sapiens
tcagtatgtcgggtg

SEQ ID NO: 1963636 - DNA, 15 bp, Homo sapiens
cagtatgtcgggtgg

SEQ ID NO: 1963637 - DNA, 15 bp, Homo sapiens
agtatgtcgggtggc

SEQ ID NO: 1963638 - DNA, 15 bp, Homo sapiens
gtatgtcgggtggca

SEQ ID NO: 1963639 - DNA, 15 bp, Homo sapiens
tatgtcgggtggcaa

SEQ ID NO: 1963640 - DNA, 15 bp, Homo sapiens
atgtcgggtggcaac

SEQ ID NO: 1963641 - DNA, 15 bp, Homo sapiens
tgtcgggtggcaaca

SEQ ID NO: 1963642 - DNA, 15 bp, Homo sapiens
gtcgggtggcaacag

SEQ ID NO: 1963643 - DNA, 15 bp, Homo sapiens
tcgggtggcaacagg

SEQ ID NO: 1963644 - DNA, 15 bp, Homo sapiens
cgggtggcaacaggg

SEQ ID NO: 1963645 - DNA, 15 bp, Homo sapiens
gggtggcaacagggg

SEQ ID NO: 1963646 - DNA, 15 bp, Homo sapiens
ggtggcaacagggga

SEQ ID NO: 1963647 - DNA, 15 bp, Homo sapiens
gtggcaacaggggac

SEQ ID NO: 1963648 - DNA, 15 bp, Homo sapiens
tggcaacaggggacc

SEQ ID NO: 1963649 - DNA, 15 bp, Homo sapiens
ggcaacaggggacca

SEQ ID NO: 1963650 - DNA, 15 bp, Homo sapiens
gcaacaggggaccac

SEQ ID NO: 1963651 - DNA, 15 bp, Homo sapiens
caacaggggaccacc

SEQ ID NO: 1963652 - DNA, 15 bp, Homo sapiens
aacaggggaccacca

SEQ ID NO: 1963653 - DNA, 15 bp, Homo sapiens
acaggggaccaccac

SEQ ID NO: 1963654 - DNA, 15 bp, Homo sapiens
caggggaccaccact

SEQ ID NO: 1963655 - DNA, 15 bp, Homo sapiens
aggggaccaccactg

SEQ ID NO: 1963656 - DNA, 15 bp, Homo sapiens
ggggaccaccactga

SEQ ID NO: 1963657 - DNA, 15 bp, Homo sapiens
gggaccaccactgac

SEQ ID NO: 1963658 - DNA, 15 bp, Homo sapiens
ggaccaccactgaca

SEQ ID NO: 1963659 - DNA, 15 bp, Homo sapiens
gaccaccactgacag

SEQ ID NO: 1963660 - DNA, 15 bp, Homo sapiens
accaccactgacagg

SEQ ID NO: 1963661 - DNA, 15 bp, Homo sapiens
ccaccactgacaggt

SEQ ID NO: 1963662 - DNA, 15 bp, Homo sapiens
caccactgacaggtc

SEQ ID NO: 1963663 - DNA, 15 bp, Homo sapiens
accactgacaggtct

SEQ ID NO: 1963664 - DNA, 15 bp, Homo sapiens
ccactgacaggtctc

SEQ ID NO: 1963665 - DNA, 15 bp, Homo sapiens
cactgacaggtctct

SEQ ID NO: 1963666 - DNA, 15 bp, Homo sapiens
actgacaggtctctc

SEQ ID NO: 1963667 - DNA, 15 bp, Homo sapiens
ctgacaggtctctcc

SEQ ID NO: 1963668 - DNA, 15 bp, Homo sapiens
tgacaggtctctccc

SEQ ID NO: 1963669 - DNA, 15 bp, Homo sapiens
gacaggtctctcccg

SEQ ID NO: 1963670 - DNA, 15 bp, Homo sapiens
acaggtctctcccgc

SEQ ID NO: 1963671 - DNA, 15 bp, Homo sapiens
caggtctctcccgcc

SEQ ID NO: 1963672 - DNA, 15 bp, Homo sapiens
aggtctctcccgccc

SEQ ID NO: 1963673 - DNA, 15 bp, Homo sapiens
ggtctctcccgccct

SEQ ID NO: 1963674 - DNA, 15 bp, Homo sapiens
gtctctcccgccctg

SEQ ID NO: 1963675 - DNA, 15 bp, Homo sapiens
tctctcccgccctgt

SEQ ID NO: 1963676 - DNA, 15 bp, Homo sapiens
ctctcccgccctgtc

SEQ ID NO: 1963677 - DNA, 15 bp, Homo sapiens
tctcccgccctgtcc

SEQ ID NO: 1963678 - DNA, 15 bp, Homo sapiens
ctcccgccctgtccc

SEQ ID NO: 1963679 - DNA, 15 bp, Homo sapiens
tcccgccctgtcccc

SEQ ID NO: 1963680 - DNA, 15 bp, Homo sapiens
cccgccctgtccccg

SEQ ID NO: 1963681 - DNA, 15 bp, Homo sapiens
ccgccctgtccccgc

SEQ ID NO: 1963682 - DNA, 15 bp, Homo sapiens
cgccctgtccccgca

SEQ ID NO: 1963683 - DNA, 15 bp, Homo sapiens
gccctgtccccgcag

SEQ ID NO: 1963684 - DNA, 15 bp, Homo sapiens
ccctgtccccgcagc

SEQ ID NO: 1963685 - DNA, 15 bp, Homo sapiens
cctgtccccgcagcg

SEQ ID NO: 1963686 - DNA, 15 bp, Homo sapiens
ctgtccccgcagcgc

SEQ ID NO: 1963687 - DNA, 15 bp, Homo sapiens
tgtccccgcagcgct

SEQ ID NO: 1963688 - DNA, 15 bp, Homo sapiens
gtccccgcagcgctg

SEQ ID NO: 1963689 - DNA, 15 bp, Homo sapiens
tccccgcagcgctgg

SEQ ID NO: 1963690 - DNA, 15 bp, Homo sapiens
ccccgcagcgctggc

SEQ ID NO: 1963691 - DNA, 15 bp, Homo sapiens
cccgcagcgctggcg

SEQ ID NO: 1963692 - DNA, 15 bp, Homo sapiens
ccgcagcgctggcgg

SEQ ID NO: 1963693 - DNA, 15 bp, Homo sapiens
cgcagcgctggcggg

SEQ ID NO: 1963694 - DNA, 15 bp, Homo sapiens
gcagcgctggcggga

SEQ ID NO: 1963695 - DNA, 15 bp, Homo sapiens
cagcgctggcgggag

SEQ ID NO: 1963696 - DNA, 15 bp, Homo sapiens
agcgctggcgggagg

SEQ ID NO: 1963697 - DNA, 15 bp, Homo sapiens
gcgctggcgggagga

SEQ ID NO: 1963698 - DNA, 15 bp, Homo sapiens
cgctggcgggaggag

SEQ ID NO: 1963699 - DNA, 15 bp, Homo sapiens
gctggcgggaggagc

SEQ ID NO: 1963700 - DNA, 15 bp, Homo sapiens
ctggcgggaggagct

SEQ ID NO: 1963701 - DNA, 15 bp, Homo sapiens
tggcgggaggagctc

SEQ ID NO: 1963702 - DNA, 15 bp, Homo sapiens
ggcgggaggagctct

SEQ ID NO: 1963703 - DNA, 15 bp, Homo sapiens
gcgggaggagctctc

SEQ ID NO: 1963704 - DNA, 15 bp, Homo sapiens
cgggaggagctctcc

SEQ ID NO: 1963705 - DNA, 15 bp, Homo sapiens
gggaggagctctccc

SEQ ID NO: 1963706 - DNA, 15 bp, Homo sapiens
ggaggagctctccca

SEQ ID NO: 1963707 - DNA, 15 bp, Homo sapiens
gaggagctctcccac

SEQ ID NO: 1963708 - DNA, 15 bp, Homo sapiens
aggagctctcccaca

SEQ ID NO: 1963709 - DNA, 15 bp, Homo sapiens
ggagctctcccacat

SEQ ID NO: 1963710 - DNA, 15 bp, Homo sapiens
gagctctcccacatg

SEQ ID NO: 1963711 - DNA, 15 bp, Homo sapiens
agctctcccacatga

SEQ ID NO: 1963712 - DNA, 15 bp, Homo sapiens
gctctcccacatgaa

SEQ ID NO: 1963713 - DNA, 15 bp, Homo sapiens
ctctcccacatgaag

SEQ ID NO: 1963714 - DNA, 15 bp, Homo sapiens
tctcccacatgaagc

SEQ ID NO: 1963715 - DNA, 15 bp, Homo sapiens
ctcccacatgaagcg

SEQ ID NO: 1963716 - DNA, 15 bp, Homo sapiens
tcccacatgaagcga

SEQ ID NO: 1963717 - DNA, 15 bp, Homo sapiens
cccacatgaagcgac

SEQ ID NO: 1963718 - DNA, 15 bp, Homo sapiens
ccacatgaagcgact

SEQ ID NO: 1963719 - DNA, 15 bp, Homo sapiens
cacatgaagcgactt

SEQ ID NO: 1963720 - DNA, 15 bp, Homo sapiens
acatgaagcgacttc

SEQ ID NO: 1963721 - DNA, 15 bp, Homo sapiens
catgaagcgacttcc

SEQ ID NO: 1963722 - DNA, 15 bp, Homo sapiens
atgaagcgacttccc

SEQ ID NO: 1963723 - DNA, 15 bp, Homo sapiens
tgaagcgacttcccc

SEQ ID NO: 1963724 - DNA, 15 bp, Homo sapiens
gaagcgacttccccc

SEQ ID NO: 1963725 - DNA, 15 bp, Homo sapiens
aagcgacttccccca

SEQ ID NO: 1963726 - DNA, 15 bp, Homo sapiens
agcgacttcccccag

SEQ ID NO: 1963727 - DNA, 15 bp, Homo sapiens
gcgacttcccccagt

SEQ ID NO: 1963728 - DNA, 15 bp, Homo sapiens
cgacttcccccagtg

SEQ ID NO: 1963729 - DNA, 15 bp, Homo sapiens
gacttcccccagtgc

SEQ ID NO: 1963730 - DNA, 15 bp, Homo sapiens
acttcccccagtgct

SEQ ID NO: 1963731 - DNA, 15 bp, Homo sapiens
cttcccccagtgctt

SEQ ID NO: 1963732 - DNA, 15 bp, Homo sapiens
ttcccccagtgcttc

SEQ ID NO: 1963733 - DNA, 15 bp, Homo sapiens
tcccccagtgcttcc

SEQ ID NO: 1963734 - DNA, 15 bp, Homo sapiens
cccccagtgcttccc

SEQ ID NO: 1963735 - DNA, 15 bp, Homo sapiens
ccccagtgcttcccg

SEQ ID NO: 1963736 - DNA, 15 bp, Homo sapiens
cccagtgcttcccgg

SEQ ID NO: 1963737 - DNA, 15 bp, Homo sapiens
ccagtgcttcccggc

SEQ ID NO: 1963738 - DNA, 15 bp, Homo sapiens
cagtgcttcccggcc

SEQ ID NO: 1963739 - DNA, 15 bp, Homo sapiens
agtgcttcccggccg

SEQ ID NO: 1963740 - DNA, 15 bp, Homo sapiens
gtgcttcccggccgc

SEQ ID NO: 1963741 - DNA, 15 bp, Homo sapiens
tgcttcccggccgcc

SEQ ID NO: 1963742 - DNA, 15 bp, Homo sapiens
gcttcccggccgccc

SEQ ID NO: 1963743 - DNA, 15 bp, Homo sapiens
cttcccggccgcccc

SEQ ID NO: 1963744 - DNA, 15 bp, Homo sapiens
ttcccggccgcccct

SEQ ID NO: 1963745 - DNA, 15 bp, Homo sapiens
tcccggccgccccta

SEQ ID NO: 1963746 - DNA, 15 bp, Homo sapiens
cccggccgcccctat

SEQ ID NO: 1963747 - DNA, 15 bp, Homo sapiens
ccggccgcccctatg

SEQ ID NO: 1963748 - DNA, 15 bp, Homo sapiens
cggccgcccctatga

SEQ ID NO: 1963749 - DNA, 15 bp, Homo sapiens
ggccgcccctatgac

SEQ ID NO: 1963750 - DNA, 15 bp, Homo sapiens
gccgcccctatgacc

SEQ ID NO: 1963751 - DNA, 15 bp, Homo sapiens
ccgcccctatgacct

SEQ ID NO: 1963752 - DNA, 15 bp, Homo sapiens
cgcccctatgacctg

SEQ ID NO: 1963753 - DNA, 15 bp, Homo sapiens
gcccctatgacctgg

SEQ ID NO: 1963754 - DNA, 15 bp, Homo sapiens
cccctatgacctggc

SEQ ID NO: 1963755 - DNA, 15 bp, Homo sapiens
ccctatgacctggcg

SEQ ID NO: 1963756 - DNA, 15 bp, Homo sapiens
cctatgacctggcgg

SEQ ID NO: 1963757 - DNA, 15 bp, Homo sapiens
ctatgacctggcggc

SEQ ID NO: 1963758 - DNA, 15 bp, Homo sapiens
tatgacctggcggcg

SEQ ID NO: 1963759 - DNA, 15 bp, Homo sapiens
atgacctggcggcgg

SEQ ID NO: 1963760 - DNA, 15 bp, Homo sapiens
tgacctggcggcggc

SEQ ID NO: 1963761 - DNA, 15 bp, Homo sapiens
gacctggcggcggcg

SEQ ID NO: 1963762 - DNA, 15 bp, Homo sapiens
acctggcggcggcga

SEQ ID NO: 1963763 - DNA, 15 bp, Homo sapiens
cctggcggcggcgac

SEQ ID NO: 1963764 - DNA, 15 bp, Homo sapiens
ctggcggcggcgacc

SEQ ID NO: 1963765 - DNA, 15 bp, Homo sapiens
tggcggcggcgaccg

SEQ ID NO: 1963766 - DNA, 15 bp, Homo sapiens
ggcggcggcgaccgt

SEQ ID NO: 1963767 - DNA, 15 bp, Homo sapiens
gcggcggcgaccgtg

SEQ ID NO: 1963768 - DNA, 15 bp, Homo sapiens
cggcggcgaccgtgg

SEQ ID NO: 1963769 - DNA, 15 bp, Homo sapiens
ggcggcgaccgtggc

SEQ ID NO: 1963770 - DNA, 15 bp, Homo sapiens
gcggcgaccgtggcc

SEQ ID NO: 1963771 - DNA, 15 bp, Homo sapiens
cggcgaccgtggcca

SEQ ID NO: 1963772 - DNA, 15 bp, Homo sapiens
ggcgaccgtggccac

SEQ ID NO: 1963773 - DNA, 15 bp, Homo sapiens
gcgaccgtggccaca

SEQ ID NO: 1963774 - DNA, 15 bp, Homo sapiens
cgaccgtggccacag

SEQ ID NO: 1963775 - DNA, 15 bp, Homo sapiens
gaccgtggccacaga

SEQ ID NO: 1963776 - DNA, 15 bp, Homo sapiens
accgtggccacagac

SEQ ID NO: 1963777 - DNA, 15 bp, Homo sapiens
ccgtggccacagacc

SEQ ID NO: 1963778 - DNA, 15 bp, Homo sapiens
cgtggccacagacct

SEQ ID NO: 1963779 - DNA, 15 bp, Homo sapiens
gtggccacagacctg

SEQ ID NO: 1963780 - DNA, 15 bp, Homo sapiens
tggccacagacctgg

SEQ ID NO: 1963781 - DNA, 15 bp, Homo sapiens
ggccacagacctgga

SEQ ID NO: 1963782 - DNA, 15 bp, Homo sapiens
gccacagacctggag

SEQ ID NO: 1963783 - DNA, 15 bp, Homo sapiens
ccacagacctggaga

SEQ ID NO: 1963784 - DNA, 15 bp, Homo sapiens
cacagacctggagag

SEQ ID NO: 1963785 - DNA, 15 bp, Homo sapiens
acagacctggagagc

SEQ ID NO: 1963786 - DNA, 15 bp, Homo sapiens
cagacctggagagcg

SEQ ID NO: 1963787 - DNA, 15 bp, Homo sapiens
agacctggagagcgg

SEQ ID NO: 1963788 - DNA, 15 bp, Homo sapiens
gacctggagagcggc

SEQ ID NO: 1963789 - DNA, 15 bp, Homo sapiens
acctggagagcggcg

SEQ ID NO: 1963790 - DNA, 15 bp, Homo sapiens
cctggagagcggcgg

SEQ ID NO: 1963791 - DNA, 15 bp, Homo sapiens
ctggagagcggcgga

SEQ ID NO: 1963792 - DNA, 15 bp, Homo sapiens
tggagagcggcggag

SEQ ID NO: 1963793 - DNA, 15 bp, Homo sapiens
ggagagcggcggagc

SEQ ID NO: 1963794 - DNA, 15 bp, Homo sapiens
gagagcggcggagcc

SEQ ID NO: 1963795 - DNA, 15 bp, Homo sapiens
agagcggcggagccg

SEQ ID NO: 1963796 - DNA, 15 bp, Homo sapiens
gagcggcggagccgg

SEQ ID NO: 1963797 - DNA, 15 bp, Homo sapiens
agcggcggagccggt

SEQ ID NO: 1963798 - DNA, 15 bp, Homo sapiens
gcggcggagccggtg

SEQ ID NO: 1963799 - DNA, 15 bp, Homo sapiens
cggcggagccggtgc

SEQ ID NO: 1963800 - DNA, 15 bp, Homo sapiens
ggcggagccggtgcg

SEQ ID NO: 1963801 - DNA, 15 bp, Homo sapiens
gcggagccggtgcgg

SEQ ID NO: 1963802 - DNA, 15 bp, Homo sapiens
cggagccggtgcggc

SEQ ID NO: 1963803 - DNA, 15 bp, Homo sapiens
ggagccggtgcggct

SEQ ID NO: 1963804 - DNA, 15 bp, Homo sapiens
gagccggtgcggctt

SEQ ID NO: 1963805 - DNA, 15 bp, Homo sapiens
agccggtgcggcttg

SEQ ID NO: 1963806 - DNA, 15 bp, Homo sapiens
gccggtgcggcttgc

SEQ ID NO: 1963807 - DNA, 15 bp, Homo sapiens
ccggtgcggcttgcg

SEQ ID NO: 1963808 - DNA, 15 bp, Homo sapiens
cggtgcggcttgcgg

SEQ ID NO: 1963809 - DNA, 15 bp, Homo sapiens
ggtgcggcttgcggc

SEQ ID NO: 1963810 - DNA, 15 bp, Homo sapiens
gtgcggcttgcggcg

SEQ ID NO: 1963811 - DNA, 15 bp, Homo sapiens
tgcggcttgcggcgg

SEQ ID NO: 1963812 - DNA, 15 bp, Homo sapiens
gcggcttgcggcggt

SEQ ID NO: 1963813 - DNA, 15 bp, Homo sapiens
cggcttgcggcggta

SEQ ID NO: 1963814 - DNA, 15 bp, Homo sapiens
ggcttgcggcggtag

SEQ ID NO: 1963815 - DNA, 15 bp, Homo sapiens
gcttgcggcggtagc

SEQ ID NO: 1963816 - DNA, 15 bp, Homo sapiens
cttgcggcggtagca

SEQ ID NO: 1963817 - DNA, 15 bp, Homo sapiens
ttgcggcggtagcaa

SEQ ID NO: 1963818 - DNA, 15 bp, Homo sapiens
tgcggcggtagcaac

SEQ ID NO: 1963819 - DNA, 15 bp, Homo sapiens
gcggcggtagcaacc

SEQ ID NO: 1963820 - DNA, 15 bp, Homo sapiens
cggcggtagcaacct

SEQ ID NO: 1963821 - DNA, 15 bp, Homo sapiens
ggcggtagcaacctg

SEQ ID NO: 1963822 - DNA, 15 bp, Homo sapiens
gcggtagcaacctgg

SEQ ID NO: 1963823 - DNA, 15 bp, Homo sapiens
cggtagcaacctggc

SEQ ID NO: 1963824 - DNA, 15 bp, Homo sapiens
ggtagcaacctggcg

SEQ ID NO: 1963825 - DNA, 15 bp, Homo sapiens
gtagcaacctggcgc

SEQ ID NO: 1963826 - DNA, 15 bp, Homo sapiens
tagcaacctggcgcc

SEQ ID NO: 1963827 - DNA, 15 bp, Homo sapiens
agcaacctggcgccc

SEQ ID NO: 1963828 - DNA, 15 bp, Homo sapiens
gcaacctggcgcccc

SEQ ID NO: 1963829 - DNA, 15 bp, Homo sapiens
caacctggcgcccct

SEQ ID NO: 1963830 - DNA, 15 bp, Homo sapiens
aacctggcgccccta

SEQ ID NO: 1963831 - DNA, 15 bp, Homo sapiens
acctggcgcccctac

SEQ ID NO: 1963832 - DNA, 15 bp, Homo sapiens
cctggcgcccctacc

SEQ ID NO: 1963833 - DNA, 15 bp, Homo sapiens
ctggcgcccctacct

SEQ ID NO: 1963834 - DNA, 15 bp, Homo sapiens
tggcgcccctacctc

SEQ ID NO: 1963835 - DNA, 15 bp, Homo sapiens
ggcgcccctacctcg

SEQ ID NO: 1963836 - DNA, 15 bp, Homo sapiens
gcgcccctacctcgg

SEQ ID NO: 1963837 - DNA, 15 bp, Homo sapiens
cgcccctacctcgga

SEQ ID NO: 1963838 - DNA, 15 bp, Homo sapiens
gcccctacctcggag

SEQ ID NO: 1963839 - DNA, 15 bp, Homo sapiens
cccctacctcggaga

SEQ ID NO: 1963840 - DNA, 15 bp, Homo sapiens
ccctacctcggagag

SEQ ID NO: 1963841 - DNA, 15 bp, Homo sapiens
cctacctcggagaga

SEQ ID NO: 1963842 - DNA, 15 bp, Homo sapiens
ctacctcggagagag

SEQ ID NO: 1963843 - DNA, 15 bp, Homo sapiens
tacctcggagagaga

SEQ ID NO: 1963844 - DNA, 15 bp, Homo sapiens
acctcggagagagac

SEQ ID NO: 1963845 - DNA, 15 bp, Homo sapiens
cctcggagagagacc

SEQ ID NO: 1963846 - DNA, 15 bp, Homo sapiens
ctcggagagagaccg

SEQ ID NO: 1963847 - DNA, 15 bp, Homo sapiens
tcggagagagaccga

SEQ ID NO: 1963848 - DNA, 15 bp, Homo sapiens
cggagagagaccgag

SEQ ID NO: 1963849 - DNA, 15 bp, Homo sapiens
ggagagagaccgagg

SEQ ID NO: 1963850 - DNA, 15 bp, Homo sapiens
gagagagaccgagga

SEQ ID NO: 1963851 - DNA, 15 bp, Homo sapiens
agagagaccgaggag

SEQ ID NO: 1963852 - DNA, 15 bp, Homo sapiens
gagagaccgaggagt

SEQ ID NO: 1963853 - DNA, 15 bp, Homo sapiens
agagaccgaggagtt

SEQ ID NO: 1963854 - DNA, 15 bp, Homo sapiens
gagaccgaggagttc

SEQ ID NO: 1963855 - DNA, 15 bp, Homo sapiens
agaccgaggagttca

SEQ ID NO: 1963856 - DNA, 15 bp, Homo sapiens
gaccgaggagttcaa

SEQ ID NO: 1963857 - DNA, 15 bp, Homo sapiens
accgaggagttcaac

SEQ ID NO: 1963858 - DNA, 15 bp, Homo sapiens
ccgaggagttcaacg

SEQ ID NO: 1963859 - DNA, 15 bp, Homo sapiens
cgaggagttcaacga

SEQ ID NO: 1963860 - DNA, 15 bp, Homo sapiens
gaggagttcaacgat

SEQ ID NO: 1963861 - DNA, 15 bp, Homo sapiens
aggagttcaacgatc

SEQ ID NO: 1963862 - DNA, 15 bp, Homo sapiens
ggagttcaacgatct

SEQ ID NO: 1963863 - DNA, 15 bp, Homo sapiens
gagttcaacgatctc

SEQ ID NO: 1963864 - DNA, 15 bp, Homo sapiens
agttcaacgatctcc

SEQ ID NO: 1963865 - DNA, 15 bp, Homo sapiens
gttcaacgatctcct

SEQ ID NO: 1963866 - DNA, 15 bp, Homo sapiens
ttcaacgatctcctg

SEQ ID NO: 1963867 - DNA, 15 bp, Homo sapiens
tcaacgatctcctgg

SEQ ID NO: 1963868 - DNA, 15 bp, Homo sapiens
caacgatctcctgga

SEQ ID NO: 1963869 - DNA, 15 bp, Homo sapiens
aacgatctcctggac

SEQ ID NO: 1963870 - DNA, 15 bp, Homo sapiens
acgatctcctggacc

SEQ ID NO: 1963871 - DNA, 15 bp, Homo sapiens
cgatctcctggacct

SEQ ID NO: 1963872 - DNA, 15 bp, Homo sapiens
gatctcctggacctg

SEQ ID NO: 1963873 - DNA, 15 bp, Homo sapiens
atctcctggacctgg

SEQ ID NO: 1963874 - DNA, 15 bp, Homo sapiens
tctcctggacctgga

SEQ ID NO: 1963875 - DNA, 15 bp, Homo sapiens
ctcctggacctggac

SEQ ID NO: 1963876 - DNA, 15 bp, Homo sapiens
tcctggacctggact

SEQ ID NO: 1963877 - DNA, 15 bp, Homo sapiens
cctggacctggactt

SEQ ID NO: 1963878 - DNA, 15 bp, Homo sapiens
ctggacctggacttt

SEQ ID NO: 1963879 - DNA, 15 bp, Homo sapiens
tggacctggacttta

SEQ ID NO: 1963880 - DNA, 15 bp, Homo sapiens
ggacctggactttat

SEQ ID NO: 1963881 - DNA, 15 bp, Homo sapiens
gacctggactttatt

SEQ ID NO: 1963882 - DNA, 15 bp, Homo sapiens
acctggactttattc

SEQ ID NO: 1963883 - DNA, 15 bp, Homo sapiens
cctggactttattct

SEQ ID NO: 1963884 - DNA, 15 bp, Homo sapiens
ctggactttattctc

SEQ ID NO: 1963885 - DNA, 15 bp, Homo sapiens
tggactttattctct

SEQ ID NO: 1963886 - DNA, 15 bp, Homo sapiens
ggactttattctctc

SEQ ID NO: 1963887 - DNA, 15 bp, Homo sapiens
gactttattctctcc

SEQ ID NO: 1963888 - DNA, 15 bp, Homo sapiens
actttattctctcca

SEQ ID NO: 1963889 - DNA, 15 bp, Homo sapiens
ctttattctctccaa

SEQ ID NO: 1963890 - DNA, 15 bp, Homo sapiens
tttattctctccaat

SEQ ID NO: 1963891 - DNA, 15 bp, Homo sapiens
ttattctctccaatt

SEQ ID NO: 1963892 - DNA, 15 bp, Homo sapiens
tattctctccaattc

SEQ ID NO: 1963893 - DNA, 15 bp, Homo sapiens
attctctccaattcg

SEQ ID NO: 1963894 - DNA, 15 bp, Homo sapiens
ttctctccaattcgc

SEQ ID NO: 1963895 - DNA, 15 bp, Homo sapiens
tctctccaattcgct

SEQ ID NO: 1963896 - DNA, 15 bp, Homo sapiens
ctctccaattcgctg

SEQ ID NO: 1963897 - DNA, 15 bp, Homo sapiens
tctccaattcgctga

SEQ ID NO: 1963898 - DNA, 15 bp, Homo sapiens
ctccaattcgctgac

SEQ ID NO: 1963899 - DNA, 15 bp, Homo sapiens
tccaattcgctgacc

SEQ ID NO: 1963900 - DNA, 15 bp, Homo sapiens
ccaattcgctgaccc

SEQ ID NO: 1963901 - DNA, 15 bp, Homo sapiens
caattcgctgaccca

SEQ ID NO: 1963902 - DNA, 15 bp, Homo sapiens
aattcgctgacccat

SEQ ID NO: 1963903 - DNA, 15 bp, Homo sapiens
attcgctgacccatc

SEQ ID NO: 1963904 - DNA, 15 bp, Homo sapiens
ttcgctgacccatcc

SEQ ID NO: 1963905 - DNA, 15 bp, Homo sapiens
tcgctgacccatcct

SEQ ID NO: 1963906 - DNA, 15 bp, Homo sapiens
cgctgacccatcctc

SEQ ID NO: 1963907 - DNA, 15 bp, Homo sapiens
gctgacccatcctcc

SEQ ID NO: 1963908 - DNA, 15 bp, Homo sapiens
ctgacccatcctccg

SEQ ID NO: 1963909 - DNA, 15 bp, Homo sapiens
tgacccatcctccgg

SEQ ID NO: 1963910 - DNA, 15 bp, Homo sapiens
gacccatcctccgga

SEQ ID NO: 1963911 - DNA, 15 bp, Homo sapiens
acccatcctccggag

SEQ ID NO: 1963912 - DNA, 15 bp, Homo sapiens
gctccccctccgacg

SEQ ID NO: 1963913 - DNA, 15 bp, Homo sapiens
ctccccctccgacgg

SEQ ID NO: 1963914 - DNA, 15 bp, Homo sapiens
tccccctccgacggc

SEQ ID NO: 1963915 - DNA, 15 bp, Homo sapiens
ccccctccgacggct

SEQ ID NO: 1963916 - DNA, 15 bp, Homo sapiens
cccctccgacggctc

SEQ ID NO: 1963917 - DNA, 15 bp, Homo sapiens
ccctccgacggctcc

SEQ ID NO: 1963918 - DNA, 15 bp, Homo sapiens
cctccgacggctccc

SEQ ID NO: 1963919 - DNA, 15 bp, Homo sapiens
ctccgacggctccct

SEQ ID NO: 1963920 - DNA, 15 bp, Homo sapiens
tccgacggctccctt

SEQ ID NO: 1963921 - DNA, 15 bp, Homo sapiens
ccgacggctcccttc

SEQ ID NO: 1963922 - DNA, 15 bp, Homo sapiens
cgacggctcccttca

SEQ ID NO: 1963923 - DNA, 15 bp, Homo sapiens
gacggctcccttcaa

SEQ ID NO: 1963924 - DNA, 15 bp, Homo sapiens
acggctcccttcaac

SEQ ID NO: 1963925 - DNA, 15 bp, Homo sapiens
cggctcccttcaacc

SEQ ID NO: 1963926 - DNA, 15 bp, Homo sapiens
ggctcccttcaacct

SEQ ID NO: 1963927 - DNA, 15 bp, Homo sapiens
gctcccttcaacctg

SEQ ID NO: 1963928 - DNA, 15 bp, Homo sapiens
ctcccttcaacctgg

SEQ ID NO: 1963929 - DNA, 15 bp, Homo sapiens
tcccttcaacctggc

SEQ ID NO: 1963930 - DNA, 15 bp, Homo sapiens
cccttcaacctggcg

SEQ ID NO: 1963931 - DNA, 15 bp, Homo sapiens
ccttcaacctggcgg

SEQ ID NO: 1963932 - DNA, 15 bp, Homo sapiens
cttcaacctggcgga

SEQ ID NO: 1963933 - DNA, 15 bp, Homo sapiens
ttcaacctggcggac

SEQ ID NO: 1963934 - DNA, 15 bp, Homo sapiens
tcaacctggcggaca

SEQ ID NO: 1963935 - DNA, 15 bp, Homo sapiens
caacctggcggacat

SEQ ID NO: 1963936 - DNA, 15 bp, Homo sapiens
aacctggcggacatc

SEQ ID NO: 1963937 - DNA, 15 bp, Homo sapiens
acctggcggacatca

SEQ ID NO: 1963938 - DNA, 15 bp, Homo sapiens
cctggcggacatcaa

SEQ ID NO: 1963939 - DNA, 15 bp, Homo sapiens
ctggcggacatcaac

SEQ ID NO: 1963940 - DNA, 15 bp, Homo sapiens
tggcggacatcaacg

SEQ ID NO: 1963941 - DNA, 15 bp, Homo sapiens
ggcggacatcaacga

SEQ ID NO: 1963942 - DNA, 15 bp, Homo sapiens
gcggacatcaacgac

SEQ ID NO: 1963943 - DNA, 15 bp, Homo sapiens
cggacatcaacgacg

SEQ ID NO: 1963944 - DNA, 15 bp, Homo sapiens
ggacatcaacgacgt

SEQ ID NO: 1963945 - DNA, 15 bp, Homo sapiens
gacatcaacgacgtg

SEQ ID NO: 1963946 - DNA, 15 bp, Homo sapiens
acatcaacgacgtga

SEQ ID NO: 1963947 - DNA, 15 bp, Homo sapiens
catcaacgacgtgag

SEQ ID NO: 1963948 - DNA, 15 bp, Homo sapiens
atcaacgacgtgagc

SEQ ID NO: 1963949 - DNA, 15 bp, Homo sapiens
tcaacgacgtgagcc

SEQ ID NO: 1963950 - DNA, 15 bp, Homo sapiens
caacgacgtgagccc

SEQ ID NO: 1963951 - DNA, 15 bp, Homo sapiens
aacgacgtgagcccc

SEQ ID NO: 1963952 - DNA, 15 bp, Homo sapiens
acgacgtgagcccct

SEQ ID NO: 1963953 - DNA, 15 bp, Homo sapiens
cgacgtgagcccctc

SEQ ID NO: 1963954 - DNA, 15 bp, Homo sapiens
gacgtgagcccctcg

SEQ ID NO: 1963955 - DNA, 15 bp, Homo sapiens
acgtgagcccctcgg

SEQ ID NO: 1963956 - DNA, 15 bp, Homo sapiens
cgtgagcccctcggg

SEQ ID NO: 1963957 - DNA, 15 bp, Homo sapiens
gtgagcccctcgggc

SEQ ID NO: 1963958 - DNA, 15 bp, Homo sapiens
tgagcccctcgggcg

SEQ ID NO: 1963959 - DNA, 15 bp, Homo sapiens
gagcccctcgggcgg

SEQ ID NO: 1963960 - DNA, 15 bp, Homo sapiens
agcccctcgggcggc

SEQ ID NO: 1963961 - DNA, 15 bp, Homo sapiens
gcccctcgggcggct

SEQ ID NO: 1963962 - DNA, 15 bp, Homo sapiens
cccctcgggcggctt

SEQ ID NO: 1963963 - DNA, 15 bp, Homo sapiens
ccctcgggcggcttc

SEQ ID NO: 1963964 - DNA, 15 bp, Homo sapiens
cctcgggcggcttcg

SEQ ID NO: 1963965 - DNA, 15 bp, Homo sapiens
ctcgggcggcttcgt

SEQ ID NO: 1963966 - DNA, 15 bp, Homo sapiens
tcgggcggcttcgtg

SEQ ID NO: 1963967 - DNA, 15 bp, Homo sapiens
cgggcggcttcgtgg

SEQ ID NO: 1963968 - DNA, 15 bp, Homo sapiens
gggcggcttcgtggc

SEQ ID NO: 1963969 - DNA, 15 bp, Homo sapiens
ggcggcttcgtggcc

SEQ ID NO: 1963970 - DNA, 15 bp, Homo sapiens
gcggcttcgtggccg

SEQ ID NO: 1963971 - DNA, 15 bp, Homo sapiens
cggcttcgtggccga

SEQ ID NO: 1963972 - DNA, 15 bp, Homo sapiens
ggcttcgtggccgag

SEQ ID NO: 1963973 - DNA, 15 bp, Homo sapiens
gcttcgtggccgagc

SEQ ID NO: 1963974 - DNA, 15 bp, Homo sapiens
cttcgtggccgagct

SEQ ID NO: 1963975 - DNA, 15 bp, Homo sapiens
ttcgtggccgagctc

SEQ ID NO: 1963976 - DNA, 15 bp, Homo sapiens
tcgtggccgagctcc

SEQ ID NO: 1963977 - DNA, 15 bp, Homo sapiens
cgtggccgagctcct

SEQ ID NO: 1963978 - DNA, 15 bp, Homo sapiens
gtggccgagctcctg

SEQ ID NO: 1963979 - DNA, 15 bp, Homo sapiens
tggccgagctcctgc

SEQ ID NO: 1963980 - DNA, 15 bp, Homo sapiens
ggccgagctcctgcg

SEQ ID NO: 1963981 - DNA, 15 bp, Homo sapiens
gccgagctcctgcgg

SEQ ID NO: 1963982 - DNA, 15 bp, Homo sapiens
ccgagctcctgcggc

SEQ ID NO: 1963983 - DNA, 15 bp, Homo sapiens
cgagctcctgcggcc

SEQ ID NO: 1963984 - DNA, 15 bp, Homo sapiens
gagctcctgcggcca

SEQ ID NO: 1963985 - DNA, 15 bp, Homo sapiens
agctcctgcggccag

SEQ ID NO: 1963986 - DNA, 15 bp, Homo sapiens
gctcctgcggccaga

SEQ ID NO: 1963987 - DNA, 15 bp, Homo sapiens
ctcctgcggccagaa

SEQ ID NO: 1963988 - DNA, 15 bp, Homo sapiens
tcctgcggccagaat

SEQ ID NO: 1963989 - DNA, 15 bp, Homo sapiens
cctgcggccagaatt

SEQ ID NO: 1963990 - DNA, 15 bp, Homo sapiens
ctgcggccagaattg

SEQ ID NO: 1963991 - DNA, 15 bp, Homo sapiens
tgcggccagaattgg

SEQ ID NO: 1963992 - DNA, 15 bp, Homo sapiens
gcggccagaattgga

SEQ ID NO: 1963993 - DNA, 15 bp, Homo sapiens
cggccagaattggac

SEQ ID NO: 1963994 - DNA, 15 bp, Homo sapiens
ggccagaattggacc

SEQ ID NO: 1963995 - DNA, 15 bp, Homo sapiens
gccagaattggaccc

SEQ ID NO: 1963996 - DNA, 15 bp, Homo sapiens
ccagaattggacccg

SEQ ID NO: 1963997 - DNA, 15 bp, Homo sapiens
cagaattggacccgg

SEQ ID NO: 1963998 - DNA, 15 bp, Homo sapiens
agaattggacccggt

SEQ ID NO: 1963999 - DNA, 15 bp, Homo sapiens
gaattggacccggtg

SEQ ID NO: 1964000 - DNA, 15 bp, Homo sapiens
aattggacccggtgt

SEQ ID NO: 1964001 - DNA, 15 bp, Homo sapiens
attggacccggtgta

SEQ ID NO: 1964002 - DNA, 15 bp, Homo sapiens
ttggacccggtgtac

SEQ ID NO: 1964003 - DNA, 15 bp, Homo sapiens
tggacccggtgtaca

SEQ ID NO: 1964004 - DNA, 15 bp, Homo sapiens
ggacccggtgtacat

SEQ ID NO: 1964005 - DNA, 15 bp, Homo sapiens
gacccggtgtacatt

SEQ ID NO: 1964006 - DNA, 15 bp, Homo sapiens
acccggtgtacattc

SEQ ID NO: 1964007 - DNA, 15 bp, Homo sapiens
cccggtgtacattcc

SEQ ID NO: 1964008 - DNA, 15 bp, Homo sapiens
ccggtgtacattccg

SEQ ID NO: 1964009 - DNA, 15 bp, Homo sapiens
cggtgtacattccgc

SEQ ID NO: 1964010 - DNA, 15 bp, Homo sapiens
ggtgtacattccgcc

SEQ ID NO: 1964011 - DNA, 15 bp, Homo sapiens
gtgtacattccgccg

SEQ ID NO: 1964012 - DNA, 15 bp, Homo sapiens
tgtacattccgccgc

SEQ ID NO: 1964013 - DNA, 15 bp, Homo sapiens
gtacattccgccgca

SEQ ID NO: 1964014 - DNA, 15 bp, Homo sapiens
tacattccgccgcag

SEQ ID NO: 1964015 - DNA, 15 bp, Homo sapiens
acattccgccgcagc

SEQ ID NO: 1964016 - DNA, 15 bp, Homo sapiens
cattccgccgcagca

SEQ ID NO: 1964017 - DNA, 15 bp, Homo sapiens
attccgccgcagcag

SEQ ID NO: 1964018 - DNA, 15 bp, Homo sapiens
ttccgccgcagcagc

SEQ ID NO: 1964019 - DNA, 15 bp, Homo sapiens
tccgccgcagcagcc

SEQ ID NO: 1964020 - DNA, 15 bp, Homo sapiens
ccgccgcagcagccg

SEQ ID NO: 1964021 - DNA, 15 bp, Homo sapiens
cgccgcagcagccgc

SEQ ID NO: 1964022 - DNA, 15 bp, Homo sapiens
gccgcagcagccgca

SEQ ID NO: 1964023 - DNA, 15 bp, Homo sapiens
ccgcagcagccgcag

SEQ ID NO: 1964024 - DNA, 15 bp, Homo sapiens
cgcagcagccgcagc

SEQ ID NO: 1964025 - DNA, 15 bp, Homo sapiens
gcagcagccgcagcc

SEQ ID NO: 1964026 - DNA, 15 bp, Homo sapiens
cagcagccgcagccg

SEQ ID NO: 1964027 - DNA, 15 bp, Homo sapiens
agcagccgcagccgc

SEQ ID NO: 1964028 - DNA, 15 bp, Homo sapiens
gcagccgcagccgcc

SEQ ID NO: 1964029 - DNA, 15 bp, Homo sapiens
cagccgcagccgcca

SEQ ID NO: 1964030 - DNA, 15 bp, Homo sapiens
agccgcagccgccag

SEQ ID NO: 1964031 - DNA, 15 bp, Homo sapiens
gccgcagccgccagg

SEQ ID NO: 1964032 - DNA, 15 bp, Homo sapiens
ccgcagccgccaggt

SEQ ID NO: 1964033 - DNA, 15 bp, Homo sapiens
cgcagccgccaggtg

SEQ ID NO: 1964034 - DNA, 15 bp, Homo sapiens
gcagccgccaggtgg

SEQ ID NO: 1964035 - DNA, 15 bp, Homo sapiens
cagccgccaggtggc

SEQ ID NO: 1964036 - DNA, 15 bp, Homo sapiens
agccgccaggtggcg

SEQ ID NO: 1964037 - DNA, 15 bp, Homo sapiens
gccgccaggtggcgg

SEQ ID NO: 1964038 - DNA, 15 bp, Homo sapiens
ccgccaggtggcggg

SEQ ID NO: 1964039 - DNA, 15 bp, Homo sapiens
cgccaggtggcgggc

SEQ ID NO: 1964040 - DNA, 15 bp, Homo sapiens
gccaggtggcgggct

SEQ ID NO: 1964041 - DNA, 15 bp, Homo sapiens
ccaggtggcgggctg

SEQ ID NO: 1964042 - DNA, 15 bp, Homo sapiens
caggtggcgggctga

SEQ ID NO: 1964043 - DNA, 15 bp, Homo sapiens
aggtggcgggctgat

SEQ ID NO: 1964044 - DNA, 15 bp, Homo sapiens
ggtggcgggctgatg

SEQ ID NO: 1964045 - DNA, 15 bp, Homo sapiens
gtggcgggctgatgg

SEQ ID NO: 1964046 - DNA, 15 bp, Homo sapiens
tggcgggctgatggg

SEQ ID NO: 1964047 - DNA, 15 bp, Homo sapiens
ggcgggctgatgggc

SEQ ID NO: 1964048 - DNA, 15 bp, Homo sapiens
gcgggctgatgggca

SEQ ID NO: 1964049 - DNA, 15 bp, Homo sapiens
cgggctgatgggcaa

SEQ ID NO: 1964050 - DNA, 15 bp, Homo sapiens
gggctgatgggcaag

SEQ ID NO: 1964051 - DNA, 15 bp, Homo sapiens
ggctgatgggcaagt

SEQ ID NO: 1964052 - DNA, 15 bp, Homo sapiens
gctgatgggcaagtt

SEQ ID NO: 1964053 - DNA, 15 bp, Homo sapiens
ctgatgggcaagttc

SEQ ID NO: 1964054 - DNA, 15 bp, Homo sapiens
tgatgggcaagttcg

SEQ ID NO: 1964055 - DNA, 15 bp, Homo sapiens
gatgggcaagttcgt

SEQ ID NO: 1964056 - DNA, 15 bp, Homo sapiens
atgggcaagttcgtg

SEQ ID NO: 1964057 - DNA, 15 bp, Homo sapiens
tgggcaagttcgtgc

SEQ ID NO: 1964058 - DNA, 15 bp, Homo sapiens
gggcaagttcgtgct

SEQ ID NO: 1964059 - DNA, 15 bp, Homo sapiens
ggcaagttcgtgctg

SEQ ID NO: 1964060 - DNA, 15 bp, Homo sapiens
gcaagttcgtgctga

SEQ ID NO: 1964061 - DNA, 15 bp, Homo sapiens
caagttcgtgctgaa

SEQ ID NO: 1964062 - DNA, 15 bp, Homo sapiens
aagttcgtgctgaag

SEQ ID NO: 1964063 - DNA, 15 bp, Homo sapiens
agttcgtgctgaagg

SEQ ID NO: 1964064 - DNA, 15 bp, Homo sapiens
gttcgtgctgaaggc

SEQ ID NO: 1964065 - DNA, 15 bp, Homo sapiens
ttcgtgctgaaggcg

SEQ ID NO: 1964066 - DNA, 15 bp, Homo sapiens
tcgtgctgaaggcgt

SEQ ID NO: 1964067 - DNA, 15 bp, Homo sapiens
cgtgctgaaggcgtc

SEQ ID NO: 1964068 - DNA, 15 bp, Homo sapiens
gtgctgaaggcgtcg

SEQ ID NO: 1964069 - DNA, 15 bp, Homo sapiens
tgctgaaggcgtcgc

SEQ ID NO: 1964070 - DNA, 15 bp, Homo sapiens
gctgaaggcgtcgct

SEQ ID NO: 1964071 - DNA, 15 bp, Homo sapiens
ctgaaggcgtcgctg

SEQ ID NO: 1964072 - DNA, 15 bp, Homo sapiens
tgaaggcgtcgctga

SEQ ID NO: 1964073 - DNA, 15 bp, Homo sapiens
gaaggcgtcgctgag

SEQ ID NO: 1964074 - DNA, 15 bp, Homo sapiens
aaggcgtcgctgagc

SEQ ID NO: 1964075 - DNA, 15 bp, Homo sapiens
aggcgtcgctgagcg

SEQ ID NO: 1964076 - DNA, 15 bp, Homo sapiens
ggcgtcgctgagcgc

SEQ ID NO: 1964077 - DNA, 15 bp, Homo sapiens
gcgtcgctgagcgcc

SEQ ID NO: 1964078 - DNA, 15 bp, Homo sapiens
cgtcgctgagcgccc

SEQ ID NO: 1964079 - DNA, 15 bp, Homo sapiens
gtcgctgagcgcccc

SEQ ID NO: 1964080 - DNA, 15 bp, Homo sapiens
tcgctgagcgcccct

SEQ ID NO: 1964081 - DNA, 15 bp, Homo sapiens
cgctgagcgcccctg

SEQ ID NO: 1964082 - DNA, 15 bp, Homo sapiens
gctgagcgcccctgg

SEQ ID NO: 1964083 - DNA, 15 bp, Homo sapiens
ctgagcgcccctggc

SEQ ID NO: 1964084 - DNA, 15 bp, Homo sapiens
tgagcgcccctggca

SEQ ID NO: 1964085 - DNA, 15 bp, Homo sapiens
gagcgcccctggcag

SEQ ID NO: 1964086 - DNA, 15 bp, Homo sapiens
agcgcccctggcagc

SEQ ID NO: 1964087 - DNA, 15 bp, Homo sapiens
gcgcccctggcagcg

SEQ ID NO: 1964088 - DNA, 15 bp, Homo sapiens
cgcccctggcagcga

SEQ ID NO: 1964089 - DNA, 15 bp, Homo sapiens
gcccctggcagcgag

SEQ ID NO: 1964090 - DNA, 15 bp, Homo sapiens
cccctggcagcgagt

SEQ ID NO: 1964091 - DNA, 15 bp, Homo sapiens
ccctggcagcgagta

SEQ ID NO: 1964092 - DNA, 15 bp, Homo sapiens
gacggcagccacccg

SEQ ID NO: 1964093 - DNA, 15 bp, Homo sapiens
acggcagccacccgg

SEQ ID NO: 1964094 - DNA, 15 bp, Homo sapiens
cggcagccacccggt

SEQ ID NO: 1964095 - DNA, 15 bp, Homo sapiens
ggcagccacccggtg

SEQ ID NO: 1964096 - DNA, 15 bp, Homo sapiens
gcagccacccggtgg

SEQ ID NO: 1964097 - DNA, 15 bp, Homo sapiens
cagccacccggtggt

SEQ ID NO: 1964098 - DNA, 15 bp, Homo sapiens
agccacccggtggtg

SEQ ID NO: 1964099 - DNA, 15 bp, Homo sapiens
gccacccggtggtgg

SEQ ID NO: 1964100 - DNA, 15 bp, Homo sapiens
ccacccggtggtggt

SEQ ID NO: 1964101 - DNA, 15 bp, Homo sapiens
cacccggtggtggtg

SEQ ID NO: 1964102 - DNA, 15 bp, Homo sapiens
acccggtggtggtgg

SEQ ID NO: 1964103 - DNA, 15 bp, Homo sapiens
cccggtggtggtggc

SEQ ID NO: 1964104 - DNA, 15 bp, Homo sapiens
ccggtggtggtggcg

SEQ ID NO: 1964105 - DNA, 15 bp, Homo sapiens
cggtggtggtggcgc

SEQ ID NO: 1964106 - DNA, 15 bp, Homo sapiens
ggtggtggtggcgcc

SEQ ID NO: 1964107 - DNA, 15 bp, Homo sapiens
gtggtggtggcgccc

SEQ ID NO: 1964108 - DNA, 15 bp, Homo sapiens
tggtggtggcgccct

SEQ ID NO: 1964109 - DNA, 15 bp, Homo sapiens
ggtggtggcgcccta

SEQ ID NO: 1964110 - DNA, 15 bp, Homo sapiens
gtggtggcgccctac

SEQ ID NO: 1964111 - DNA, 15 bp, Homo sapiens
tggtggcgccctaca

SEQ ID NO: 1964112 - DNA, 15 bp, Homo sapiens
ggtggcgccctacaa

SEQ ID NO: 1964113 - DNA, 15 bp, Homo sapiens
gtggcgccctacaac

SEQ ID NO: 1964114 - DNA, 15 bp, Homo sapiens
tggcgccctacaacg

SEQ ID NO: 1964115 - DNA, 15 bp, Homo sapiens
ggcgccctacaacgg

SEQ ID NO: 1964116 - DNA, 15 bp, Homo sapiens
gcgccctacaacggc

SEQ ID NO: 1964117 - DNA, 15 bp, Homo sapiens
cgccctacaacggcg

SEQ ID NO: 1964118 - DNA, 15 bp, Homo sapiens
gccctacaacggcgg

SEQ ID NO: 1964119 - DNA, 15 bp, Homo sapiens
ccctacaacggcggg

SEQ ID NO: 1964120 - DNA, 15 bp, Homo sapiens
cctacaacggcgggc

SEQ ID NO: 1964121 - DNA, 15 bp, Homo sapiens
ctacaacggcgggcc

SEQ ID NO: 1964122 - DNA, 15 bp, Homo sapiens
tacaacggcgggccg

SEQ ID NO: 1964123 - DNA, 15 bp, Homo sapiens
acaacggcgggccgc

SEQ ID NO: 1964124 - DNA, 15 bp, Homo sapiens
caacggcgggccgcc

SEQ ID NO: 1964125 - DNA, 15 bp, Homo sapiens
aacggcgggccgccg

SEQ ID NO: 1964126 - DNA, 15 bp, Homo sapiens
acggcgggccgccgc

SEQ ID NO: 1964127 - DNA, 15 bp, Homo sapiens
cggcgggccgccgcg

SEQ ID NO: 1964128 - DNA, 15 bp, Homo sapiens
ggcgggccgccgcgc

SEQ ID NO: 1964129 - DNA, 15 bp, Homo sapiens
gcgggccgccgcgca

SEQ ID NO: 1964130 - DNA, 15 bp, Homo sapiens
cgggccgccgcgcac

SEQ ID NO: 1964131 - DNA, 15 bp, Homo sapiens
gggccgccgcgcacg

SEQ ID NO: 1964132 - DNA, 15 bp, Homo sapiens
ggccgccgcgcacgt

SEQ ID NO: 1964133 - DNA, 15 bp, Homo sapiens
gccgccgcgcacgtg

SEQ ID NO: 1964134 - DNA, 15 bp, Homo sapiens
ccgccgcgcacgtgc

SEQ ID NO: 1964135 - DNA, 15 bp, Homo sapiens
cgccgcgcacgtgcc

SEQ ID NO: 1964136 - DNA, 15 bp, Homo sapiens
gccgcgcacgtgccc

SEQ ID NO: 1964137 - DNA, 15 bp, Homo sapiens
ccgcgcacgtgcccc

SEQ ID NO: 1964138 - DNA, 15 bp, Homo sapiens
cgcgcacgtgcccca

SEQ ID NO: 1964139 - DNA, 15 bp, Homo sapiens
gcgcacgtgccccaa

SEQ ID NO: 1964140 - DNA, 15 bp, Homo sapiens
cgcacgtgccccaag

SEQ ID NO: 1964141 - DNA, 15 bp, Homo sapiens
gcacgtgccccaaga

SEQ ID NO: 1964142 - DNA, 15 bp, Homo sapiens
cacgtgccccaagat

SEQ ID NO: 1964143 - DNA, 15 bp, Homo sapiens
acgtgccccaagatc

SEQ ID NO: 1964144 - DNA, 15 bp, Homo sapiens
cgtgccccaagatca

SEQ ID NO: 1964145 - DNA, 15 bp, Homo sapiens
gtgccccaagatcaa

SEQ ID NO: 1964146 - DNA, 15 bp, Homo sapiens
tgccccaagatcaag

SEQ ID NO: 1964147 - DNA, 15 bp, Homo sapiens
gccccaagatcaagc

SEQ ID NO: 1964148 - DNA, 15 bp, Homo sapiens
ccccaagatcaagca

SEQ ID NO: 1964149 - DNA, 15 bp, Homo sapiens
cccaagatcaagcag

SEQ ID NO: 1964150 - DNA, 15 bp, Homo sapiens
ccaagatcaagcagg

SEQ ID NO: 1964151 - DNA, 15 bp, Homo sapiens
caagatcaagcagga

SEQ ID NO: 1964152 - DNA, 15 bp, Homo sapiens
aagatcaagcaggag

SEQ ID NO: 1964153 - DNA, 15 bp, Homo sapiens
agatcaagcaggagg

SEQ ID NO: 1964154 - DNA, 15 bp, Homo sapiens
gatcaagcaggaggc

SEQ ID NO: 1964155 - DNA, 15 bp, Homo sapiens
atcaagcaggaggcg

SEQ ID NO: 1964156 - DNA, 15 bp, Homo sapiens
tcaagcaggaggcgg

SEQ ID NO: 1964157 - DNA, 15 bp, Homo sapiens
caagcaggaggcggt

SEQ ID NO: 1964158 - DNA, 15 bp, Homo sapiens
aagcaggaggcggtc

SEQ ID NO: 1964159 - DNA, 15 bp, Homo sapiens
agcaggaggcggtct

SEQ ID NO: 1964160 - DNA, 15 bp, Homo sapiens
gcaggaggcggtctc

SEQ ID NO: 1964161 - DNA, 15 bp, Homo sapiens
caggaggcggtctct

SEQ ID NO: 1964162 - DNA, 15 bp, Homo sapiens
aggaggcggtctctt

SEQ ID NO: 1964163 - DNA, 15 bp, Homo sapiens
ggaggcggtctcttc

SEQ ID NO: 1964164 - DNA, 15 bp, Homo sapiens
gaggcggtctcttcg

SEQ ID NO: 1964165 - DNA, 15 bp, Homo sapiens
aggcggtctcttcgt

SEQ ID NO: 1964166 - DNA, 15 bp, Homo sapiens
ggcggtctcttcgtg

SEQ ID NO: 1964167 - DNA, 15 bp, Homo sapiens
gcggtctcttcgtgc

SEQ ID NO: 1964168 - DNA, 15 bp, Homo sapiens
cggtctcttcgtgca

SEQ ID NO: 1964169 - DNA, 15 bp, Homo sapiens
ggtctcttcgtgcac

SEQ ID NO: 1964170 - DNA, 15 bp, Homo sapiens
gtctcttcgtgcacc

SEQ ID NO: 1964171 - DNA, 15 bp, Homo sapiens
tctcttcgtgcaccc

SEQ ID NO: 1964172 - DNA, 15 bp, Homo sapiens
ctcttcgtgcaccca

SEQ ID NO: 1964173 - DNA, 15 bp, Homo sapiens
tcttcgtgcacccac

SEQ ID NO: 1964174 - DNA, 15 bp, Homo sapiens
cttcgtgcacccact

SEQ ID NO: 1964175 - DNA, 15 bp, Homo sapiens
ttcgtgcacccactt

SEQ ID NO: 1964176 - DNA, 15 bp, Homo sapiens
tcgtgcacccacttg

SEQ ID NO: 1964177 - DNA, 15 bp, Homo sapiens
cgtgcacccacttgg

SEQ ID NO: 1964178 - DNA, 15 bp, Homo sapiens
gtgcacccacttggg

SEQ ID NO: 1964179 - DNA, 15 bp, Homo sapiens
tgcacccacttgggc

SEQ ID NO: 1964180 - DNA, 15 bp, Homo sapiens
gcacccacttgggcg

SEQ ID NO: 1964181 - DNA, 15 bp, Homo sapiens
cacccacttgggcgc

SEQ ID NO: 1964182 - DNA, 15 bp, Homo sapiens
acccacttgggcgct

SEQ ID NO: 1964183 - DNA, 15 bp, Homo sapiens
cccacttgggcgctg

SEQ ID NO: 1964184 - DNA, 15 bp, Homo sapiens
ccacttgggcgctgg

SEQ ID NO: 1964185 - DNA, 15 bp, Homo sapiens
cacttgggcgctgga

SEQ ID NO: 1964186 - DNA, 15 bp, Homo sapiens
acttgggcgctggac

SEQ ID NO: 1964187 - DNA, 15 bp, Homo sapiens
cttgggcgctggacc

SEQ ID NO: 1964188 - DNA, 15 bp, Homo sapiens
ttgggcgctggaccc

SEQ ID NO: 1964189 - DNA, 15 bp, Homo sapiens
tgggcgctggacccc

SEQ ID NO: 1964190 - DNA, 15 bp, Homo sapiens
gggcgctggaccccc

SEQ ID NO: 1964191 - DNA, 15 bp, Homo sapiens
ggcgctggaccccct

SEQ ID NO: 1964192 - DNA, 15 bp, Homo sapiens
gcgctggaccccctc

SEQ ID NO: 1964193 - DNA, 15 bp, Homo sapiens
cgctggaccccctct

SEQ ID NO: 1964194 - DNA, 15 bp, Homo sapiens
gctggaccccctctc

SEQ ID NO: 1964195 - DNA, 15 bp, Homo sapiens
ctggaccccctctca

SEQ ID NO: 1964196 - DNA, 15 bp, Homo sapiens
tggaccccctctcag

SEQ ID NO: 1964197 - DNA, 15 bp, Homo sapiens
ggaccccctctcagc

SEQ ID NO: 1964198 - DNA, 15 bp, Homo sapiens
gaccccctctcagca

SEQ ID NO: 1964199 - DNA, 15 bp, Homo sapiens
accccctctcagcaa

SEQ ID NO: 1964200 - DNA, 15 bp, Homo sapiens
ccccctctcagcaat

SEQ ID NO: 1964201 - DNA, 15 bp, Homo sapiens
cccctctcagcaatg

SEQ ID NO: 1964202 - DNA, 15 bp, Homo sapiens
ccctctcagcaatgg

SEQ ID NO: 1964203 - DNA, 15 bp, Homo sapiens
cctctcagcaatggc

SEQ ID NO: 1964204 - DNA, 15 bp, Homo sapiens
ctctcagcaatggcc

SEQ ID NO: 1964205 - DNA, 15 bp, Homo sapiens
tctcagcaatggcca

SEQ ID NO: 1964206 - DNA, 15 bp, Homo sapiens
ctcagcaatggccac

SEQ ID NO: 1964207 - DNA, 15 bp, Homo sapiens
tcagcaatggccacc

SEQ ID NO: 1964208 - DNA, 15 bp, Homo sapiens
cagcaatggccaccg

SEQ ID NO: 1964209 - DNA, 15 bp, Homo sapiens
agcaatggccaccgg

SEQ ID NO: 1964210 - DNA, 15 bp, Homo sapiens
gcaatggccaccggc

SEQ ID NO: 1964211 - DNA, 15 bp, Homo sapiens
caatggccaccggcc

SEQ ID NO: 1964212 - DNA, 15 bp, Homo sapiens
aatggccaccggccg

SEQ ID NO: 1964213 - DNA, 15 bp, Homo sapiens
atggccaccggccgg

SEQ ID NO: 1964214 - DNA, 15 bp, Homo sapiens
tggccaccggccggc

SEQ ID NO: 1964215 - DNA, 15 bp, Homo sapiens
ggccaccggccggct

SEQ ID NO: 1964216 - DNA, 15 bp, Homo sapiens
gccaccggccggctg

SEQ ID NO: 1964217 - DNA, 15 bp, Homo sapiens
ccaccggccggctgc

SEQ ID NO: 1964218 - DNA, 15 bp, Homo sapiens
caccggccggctgca

SEQ ID NO: 1964219 - DNA, 15 bp, Homo sapiens
accggccggctgcac

SEQ ID NO: 1964220 - DNA, 15 bp, Homo sapiens
ccggccggctgcaca

SEQ ID NO: 1964221 - DNA, 15 bp, Homo sapiens
cggccggctgcacac

SEQ ID NO: 1964222 - DNA, 15 bp, Homo sapiens
ggccggctgcacacg

SEQ ID NO: 1964223 - DNA, 15 bp, Homo sapiens
gccggctgcacacga

SEQ ID NO: 1964224 - DNA, 15 bp, Homo sapiens
ccggctgcacacgac

SEQ ID NO: 1964225 - DNA, 15 bp, Homo sapiens
cggctgcacacgact

SEQ ID NO: 1964226 - DNA, 15 bp, Homo sapiens
ggctgcacacgactt

SEQ ID NO: 1964227 - DNA, 15 bp, Homo sapiens
gctgcacacgacttc

SEQ ID NO: 1964228 - DNA, 15 bp, Homo sapiens
ctgcacacgacttcc

SEQ ID NO: 1964229 - DNA, 15 bp, Homo sapiens
tgcacacgacttccc

SEQ ID NO: 1964230 - DNA, 15 bp, Homo sapiens
gcacacgacttcccc

SEQ ID NO: 1964231 - DNA, 15 bp, Homo sapiens
cacacgacttccccc

SEQ ID NO: 1964232 - DNA, 15 bp, Homo sapiens
acacgacttccccct

SEQ ID NO: 1964233 - DNA, 15 bp, Homo sapiens
cacgacttccccctg

SEQ ID NO: 1964234 - DNA, 15 bp, Homo sapiens
acgacttccccctgg

SEQ ID NO: 1964235 - DNA, 15 bp, Homo sapiens
cgacttccccctggg

SEQ ID NO: 1964236 - DNA, 15 bp, Homo sapiens
gacttccccctgggg

SEQ ID NO: 1964237 - DNA, 15 bp, Homo sapiens
acttccccctggggc

SEQ ID NO: 1964238 - DNA, 15 bp, Homo sapiens
cttccccctggggcg

SEQ ID NO: 1964239 - DNA, 15 bp, Homo sapiens
ttccccctggggcgg

SEQ ID NO: 1964240 - DNA, 15 bp, Homo sapiens
tccccctggggcggc

SEQ ID NO: 1964241 - DNA, 15 bp, Homo sapiens
ccccctggggcggca

SEQ ID NO: 1964242 - DNA, 15 bp, Homo sapiens
cccctggggcggcag

SEQ ID NO: 1964243 - DNA, 15 bp, Homo sapiens
ccctggggcggcagc

SEQ ID NO: 1964244 - DNA, 15 bp, Homo sapiens
cctggggcggcagct

SEQ ID NO: 1964245 - DNA, 15 bp, Homo sapiens
ctggggcggcagctc

SEQ ID NO: 1964246 - DNA, 15 bp, Homo sapiens
tggggcggcagctcc

SEQ ID NO: 1964247 - DNA, 15 bp, Homo sapiens
ggggcggcagctccc

SEQ ID NO: 1964248 - DNA, 15 bp, Homo sapiens
gggcggcagctcccc

SEQ ID NO: 1964249 - DNA, 15 bp, Homo sapiens
ggcggcagctcccca

SEQ ID NO: 1964250 - DNA, 15 bp, Homo sapiens
gcggcagctccccag

SEQ ID NO: 1964251 - DNA, 15 bp, Homo sapiens
cggcagctccccagc

SEQ ID NO: 1964252 - DNA, 15 bp, Homo sapiens
ggcagctccccagca

SEQ ID NO: 1964253 - DNA, 15 bp, Homo sapiens
gcagctccccagcag

SEQ ID NO: 1964254 - DNA, 15 bp, Homo sapiens
cagctccccagcagg

SEQ ID NO: 1964255 - DNA, 15 bp, Homo sapiens
agctccccagcagga

SEQ ID NO: 1964256 - DNA, 15 bp, Homo sapiens
gctccccagcaggac

SEQ ID NO: 1964257 - DNA, 15 bp, Homo sapiens
ctccccagcaggact

SEQ ID NO: 1964258 - DNA, 15 bp, Homo sapiens
tccccagcaggacta

SEQ ID NO: 1964259 - DNA, 15 bp, Homo sapiens
ccccagcaggactac

SEQ ID NO: 1964260 - DNA, 15 bp, Homo sapiens
cccagcaggactacc

SEQ ID NO: 1964261 - DNA, 15 bp, Homo sapiens
ccagcaggactaccc

SEQ ID NO: 1964262 - DNA, 15 bp, Homo sapiens
cagcaggactacccc

SEQ ID NO: 1964263 - DNA, 15 bp, Homo sapiens
agcaggactaccccg

SEQ ID NO: 1964264 - DNA, 15 bp, Homo sapiens
gcaggactaccccga

SEQ ID NO: 1964265 - DNA, 15 bp, Homo sapiens
caggactaccccgac

SEQ ID NO: 1964266 - DNA, 15 bp, Homo sapiens
aggactaccccgacc

SEQ ID NO: 1964267 - DNA, 15 bp, Homo sapiens
ggactaccccgaccc

SEQ ID NO: 1964268 - DNA, 15 bp, Homo sapiens
gactaccccgaccct

SEQ ID NO: 1964269 - DNA, 15 bp, Homo sapiens
actaccccgaccctg

SEQ ID NO: 1964270 - DNA, 15 bp, Homo sapiens
ctaccccgaccctgg

SEQ ID NO: 1964271 - DNA, 15 bp, Homo sapiens
taccccgaccctggg

SEQ ID NO: 1964272 - DNA, 15 bp, Homo sapiens
accccgaccctgggt

SEQ ID NO: 1964273 - DNA, 15 bp, Homo sapiens
ccccgaccctgggtc

SEQ ID NO: 1964274 - DNA, 15 bp, Homo sapiens
cccgaccctgggtct

SEQ ID NO: 1964275 - DNA, 15 bp, Homo sapiens
ccgaccctgggtctt

SEQ ID NO: 1964276 - DNA, 15 bp, Homo sapiens
cgaccctgggtcttg

SEQ ID NO: 1964277 - DNA, 15 bp, Homo sapiens
gaccctgggtcttga

SEQ ID NO: 1964278 - DNA, 15 bp, Homo sapiens
accctgggtcttgag

SEQ ID NO: 1964279 - DNA, 15 bp, Homo sapiens
ccctgggtcttgagg

SEQ ID NO: 1964280 - DNA, 15 bp, Homo sapiens
cctgggtcttgagga

SEQ ID NO: 1964281 - DNA, 15 bp, Homo sapiens
ctgggtcttgaggaa

SEQ ID NO: 1964282 - DNA, 15 bp, Homo sapiens
tgggtcttgaggaag

SEQ ID NO: 1964283 - DNA, 15 bp, Homo sapiens
gggtcttgaggaagt

SEQ ID NO: 1964284 - DNA, 15 bp, Homo sapiens
ggtcttgaggaagtg

SEQ ID NO: 1964285 - DNA, 15 bp, Homo sapiens
gtcttgaggaagtgc

SEQ ID NO: 1964286 - DNA, 15 bp, Homo sapiens
tcttgaggaagtgct

SEQ ID NO: 1964287 - DNA, 15 bp, Homo sapiens
cttgaggaagtgctg

SEQ ID NO: 1964288 - DNA, 15 bp, Homo sapiens
ttgaggaagtgctga

SEQ ID NO: 1964289 - DNA, 15 bp, Homo sapiens
tgaggaagtgctgag

SEQ ID NO: 1964290 - DNA, 15 bp, Homo sapiens
gaggaagtgctgagc

SEQ ID NO: 1964291 - DNA, 15 bp, Homo sapiens
aggaagtgctgagca

SEQ ID NO: 1964292 - DNA, 15 bp, Homo sapiens
ggaagtgctgagcag

SEQ ID NO: 1964293 - DNA, 15 bp, Homo sapiens
gaagtgctgagcagc

SEQ ID NO: 1964294 - DNA, 15 bp, Homo sapiens
aagtgctgagcagca

SEQ ID NO: 1964295 - DNA, 15 bp, Homo sapiens
agtgctgagcagcag

SEQ ID NO: 1964296 - DNA, 15 bp, Homo sapiens
gtgctgagcagcagg

SEQ ID NO: 1964297 - DNA, 15 bp, Homo sapiens
tgctgagcagcaggg

SEQ ID NO: 1964298 - DNA, 15 bp, Homo sapiens
gctgagcagcaggga

SEQ ID NO: 1964299 - DNA, 15 bp, Homo sapiens
ctgagcagcagggac

SEQ ID NO: 1964300 - DNA, 15 bp, Homo sapiens
tgagcagcagggact

SEQ ID NO: 1964301 - DNA, 15 bp, Homo sapiens
gagcagcagggactg

SEQ ID NO: 1964302 - DNA, 15 bp, Homo sapiens
agcagcagggactgt

SEQ ID NO: 1964303 - DNA, 15 bp, Homo sapiens
gcagcagggactgtc

SEQ ID NO: 1964304 - DNA, 15 bp, Homo sapiens
cagcagggactgtca

SEQ ID NO: 1964305 - DNA, 15 bp, Homo sapiens
agcagggactgtcac

SEQ ID NO: 1964306 - DNA, 15 bp, Homo sapiens
gcagggactgtcacc

SEQ ID NO: 1964307 - DNA, 15 bp, Homo sapiens
cagggactgtcaccc

SEQ ID NO: 1964308 - DNA, 15 bp, Homo sapiens
agggactgtcaccct

SEQ ID NO: 1964309 - DNA, 15 bp, Homo sapiens
gggactgtcaccctg

SEQ ID NO: 1964310 - DNA, 15 bp, Homo sapiens
ggactgtcaccctgc

SEQ ID NO: 1964311 - DNA, 15 bp, Homo sapiens
gactgtcaccctgcc

SEQ ID NO: 1964312 - DNA, 15 bp, Homo sapiens
actgtcaccctgccc

SEQ ID NO: 1964313 - DNA, 15 bp, Homo sapiens
ctgtcaccctgccct

SEQ ID NO: 1964314 - DNA, 15 bp, Homo sapiens
tgtcaccctgccctg

SEQ ID NO: 1964315 - DNA, 15 bp, Homo sapiens
gtcaccctgccctgc

SEQ ID NO: 1964316 - DNA, 15 bp, Homo sapiens
tcaccctgccctgcc

SEQ ID NO: 1964317 - DNA, 15 bp, Homo sapiens
caccctgccctgccg

SEQ ID NO: 1964318 - DNA, 15 bp, Homo sapiens
accctgccctgccgc

SEQ ID NO: 1964319 - DNA, 15 bp, Homo sapiens
ccctgccctgccgct

SEQ ID NO: 1964320 - DNA, 15 bp, Homo sapiens
cctgccctgccgctt

SEQ ID NO: 1964321 - DNA, 15 bp, Homo sapiens
ctgccctgccgcttc

SEQ ID NO: 1964322 - DNA, 15 bp, Homo sapiens
tgccctgccgcttcc

SEQ ID NO: 1964323 - DNA, 15 bp, Homo sapiens
gccctgccgcttcct

SEQ ID NO: 1964324 - DNA, 15 bp, Homo sapiens
ccctgccgcttcctc

SEQ ID NO: 1964325 - DNA, 15 bp, Homo sapiens
cctgccgcttcctcc

SEQ ID NO: 1964326 - DNA, 15 bp, Homo sapiens
ctgccgcttcctccc

SEQ ID NO: 1964327 - DNA, 15 bp, Homo sapiens
tgccgcttcctcccg

SEQ ID NO: 1964328 - DNA, 15 bp, Homo sapiens
gccgcttcctcccgg

SEQ ID NO: 1964329 - DNA, 15 bp, Homo sapiens
ccgcttcctcccggc

SEQ ID NO: 1964330 - DNA, 15 bp, Homo sapiens
cgcttcctcccggct

SEQ ID NO: 1964331 - DNA, 15 bp, Homo sapiens
gcttcctcccggctt

SEQ ID NO: 1964332 - DNA, 15 bp, Homo sapiens
cttcctcccggcttc

SEQ ID NO: 1964333 - DNA, 15 bp, Homo sapiens
ttcctcccggcttcc

SEQ ID NO: 1964334 - DNA, 15 bp, Homo sapiens
tcctcccggcttcca

SEQ ID NO: 1964335 - DNA, 15 bp, Homo sapiens
cctcccggcttccat

SEQ ID NO: 1964336 - DNA, 15 bp, Homo sapiens
ctcccggcttccatc

SEQ ID NO: 1964337 - DNA, 15 bp, Homo sapiens
tcccggcttccatcc

SEQ ID NO: 1964338 - DNA, 15 bp, Homo sapiens
cccggcttccatccc

SEQ ID NO: 1964339 - DNA, 15 bp, Homo sapiens
ccggcttccatcccc

SEQ ID NO: 1964340 - DNA, 15 bp, Homo sapiens
cggcttccatcccca

SEQ ID NO: 1964341 - DNA, 15 bp, Homo sapiens
ggcttccatccccac

SEQ ID NO: 1964342 - DNA, 15 bp, Homo sapiens
gcttccatccccacc

SEQ ID NO: 1964343 - DNA, 15 bp, Homo sapiens
cttccatccccaccc

SEQ ID NO: 1964344 - DNA, 15 bp, Homo sapiens
ttccatccccacccg

SEQ ID NO: 1964345 - DNA, 15 bp, Homo sapiens
tccatccccacccgg

SEQ ID NO: 1964346 - DNA, 15 bp, Homo sapiens
ccatccccacccggg

SEQ ID NO: 1964347 - DNA, 15 bp, Homo sapiens
catccccacccgggg

SEQ ID NO: 1964348 - DNA, 15 bp, Homo sapiens
atccccacccggggc

SEQ ID NO: 1964349 - DNA, 15 bp, Homo sapiens
tccccacccggggcc

SEQ ID NO: 1964350 - DNA, 15 bp, Homo sapiens
ccccacccggggccc

SEQ ID NO: 1964351 - DNA, 15 bp, Homo sapiens
cccacccggggccca

SEQ ID NO: 1964352 - DNA, 15 bp, Homo sapiens
ccacccggggcccaa

SEQ ID NO: 1964353 - DNA, 15 bp, Homo sapiens
cacccggggcccaat

SEQ ID NO: 1964354 - DNA, 15 bp, Homo sapiens
acccggggcccaatt

SEQ ID NO: 1964355 - DNA, 15 bp, Homo sapiens
cccggggcccaatta

SEQ ID NO: 1964356 - DNA, 15 bp, Homo sapiens
ccctgtgtgtgctgg

SEQ ID NO: 1964357 - DNA, 15 bp, Homo sapiens
cctgtgtgtgctggc

SEQ ID NO: 1964358 - DNA, 15 bp, Homo sapiens
ctgtgtgtgctggcc

SEQ ID NO: 1964359 - DNA, 15 bp, Homo sapiens
tgtgtgtgctggccc

SEQ ID NO: 1964360 - DNA, 15 bp, Homo sapiens
gtgtgtgctggcccc

SEQ ID NO: 1964361 - DNA, 15 bp, Homo sapiens
tgtgtgctggcccca

SEQ ID NO: 1964362 - DNA, 15 bp, Homo sapiens
gtgtgctggccccac

SEQ ID NO: 1964363 - DNA, 15 bp, Homo sapiens
tgtgctggccccact

SEQ ID NO: 1964364 - DNA, 15 bp, Homo sapiens
gtgctggccccactt

SEQ ID NO: 1964365 - DNA, 15 bp, Homo sapiens
tgctggccccacttc

SEQ ID NO: 1964366 - DNA, 15 bp, Homo sapiens
gctggccccacttcg

SEQ ID NO: 1964367 - DNA, 15 bp, Homo sapiens
ctggccccacttcgg

SEQ ID NO: 1964368 - DNA, 15 bp, Homo sapiens
tggccccacttcggg

SEQ ID NO: 1964369 - DNA, 15 bp, Homo sapiens
ggccccacttcggga

SEQ ID NO: 1964370 - DNA, 15 bp, Homo sapiens
gccccacttcgggac

SEQ ID NO: 1964371 - DNA, 15 bp, Homo sapiens
ccccacttcgggaca

SEQ ID NO: 1964372 - DNA, 15 bp, Homo sapiens
cccacttcgggacac

SEQ ID NO: 1964373 - DNA, 15 bp, Homo sapiens
ccacttcgggacaca

SEQ ID NO: 1964374 - DNA, 15 bp, Homo sapiens
cacttcgggacacac

SEQ ID NO: 1964375 - DNA, 15 bp, Homo sapiens
acttcgggacacacg

SEQ ID NO: 1964376 - DNA, 15 bp, Homo sapiens
cttcgggacacacgg

SEQ ID NO: 1964377 - DNA, 15 bp, Homo sapiens
ttcgggacacacggg

SEQ ID NO: 1964378 - DNA, 15 bp, Homo sapiens
tcgggacacacggga

SEQ ID NO: 1964379 - DNA, 15 bp, Homo sapiens
cgggacacacgggat

SEQ ID NO: 1964380 - DNA, 15 bp, Homo sapiens
gggacacacgggatg

SEQ ID NO: 1964381 - DNA, 15 bp, Homo sapiens
ggacacacgggatga

SEQ ID NO: 1964382 - DNA, 15 bp, Homo sapiens
gacacacgggatgat

SEQ ID NO: 1964383 - DNA, 15 bp, Homo sapiens
acacacgggatgatg

SEQ ID NO: 1964384 - DNA, 15 bp, Homo sapiens
cacacgggatgatgc

SEQ ID NO: 1964385 - DNA, 15 bp, Homo sapiens
acacgggatgatgct

SEQ ID NO: 1964386 - DNA, 15 bp, Homo sapiens
cacgggatgatgctc

SEQ ID NO: 1964387 - DNA, 15 bp, Homo sapiens
acgggatgatgctca

SEQ ID NO: 1964388 - DNA, 15 bp, Homo sapiens
cgggatgatgctcac

SEQ ID NO: 1964389 - DNA, 15 bp, Homo sapiens
gggatgatgctcacc

SEQ ID NO: 1964390 - DNA, 15 bp, Homo sapiens
ggatgatgctcaccc

SEQ ID NO: 1964391 - DNA, 15 bp, Homo sapiens
gatgatgctcacccc

SEQ ID NO: 1964392 - DNA, 15 bp, Homo sapiens
atgatgctcacccca

SEQ ID NO: 1964393 - DNA, 15 bp, Homo sapiens
tgatgctcaccccac

SEQ ID NO: 1964394 - DNA, 15 bp, Homo sapiens
gatgctcaccccacc

SEQ ID NO: 1964395 - DNA, 15 bp, Homo sapiens
atgctcaccccacct

SEQ ID NO: 1964396 - DNA, 15 bp, Homo sapiens
tgctcaccccacctt

SEQ ID NO: 1964397 - DNA, 15 bp, Homo sapiens
gctcaccccaccttc

SEQ ID NO: 1964398 - DNA, 15 bp, Homo sapiens
ctcaccccaccttct

SEQ ID NO: 1964399 - DNA, 15 bp, Homo sapiens
tcaccccaccttctt

SEQ ID NO: 1964400 - DNA, 15 bp, Homo sapiens
caccccaccttcttc

SEQ ID NO: 1964401 - DNA, 15 bp, Homo sapiens
accccaccttcttca

SEQ ID NO: 1964402 - DNA, 15 bp, Homo sapiens
ccccaccttcttcac

SEQ ID NO: 1964403 - DNA, 15 bp, Homo sapiens
cccaccttcttcacc

SEQ ID NO: 1964404 - DNA, 15 bp, Homo sapiens
ccaccttcttcaccc

SEQ ID NO: 1964405 - DNA, 15 bp, Homo sapiens
caccttcttcacccc

SEQ ID NO: 1964406 - DNA, 15 bp, Homo sapiens
accttcttcacccct

SEQ ID NO: 1964407 - DNA, 15 bp, Homo sapiens
ccttcttcaccccta

SEQ ID NO: 1964408 - DNA, 15 bp, Homo sapiens
cttcttcacccctag

SEQ ID NO: 1964409 - DNA, 15 bp, Homo sapiens
ttcttcacccctaga

SEQ ID NO: 1964410 - DNA, 15 bp, Homo sapiens
tcttcacccctagag

SEQ ID NO: 1964411 - DNA, 15 bp, Homo sapiens
cttcacccctagagc

SEQ ID NO: 1964412 - DNA, 15 bp, Homo sapiens
ttcacccctagagct

SEQ ID NO: 1964413 - DNA, 15 bp, Homo sapiens
tcacccctagagctc

SEQ ID NO: 1964414 - DNA, 15 bp, Homo sapiens
cacccctagagctca

SEQ ID NO: 1964415 - DNA, 15 bp, Homo sapiens
acccctagagctcat

SEQ ID NO: 1964416 - DNA, 15 bp, Homo sapiens
cccctagagctcatg

SEQ ID NO: 1964417 - DNA, 15 bp, Homo sapiens
ccctagagctcatgc

SEQ ID NO: 1964418 - DNA, 15 bp, Homo sapiens
cctagagctcatgcc

SEQ ID NO: 1964419 - DNA, 15 bp, Homo sapiens
ctagagctcatgcca

SEQ ID NO: 1964420 - DNA, 15 bp, Homo sapiens
tagagctcatgccac

SEQ ID NO: 1964421 - DNA, 15 bp, Homo sapiens
agagctcatgccacc

SEQ ID NO: 1964422 - DNA, 15 bp, Homo sapiens
gagctcatgccaccc

SEQ ID NO: 1964423 - DNA, 15 bp, Homo sapiens
agctcatgccacccg

SEQ ID NO: 1964424 - DNA, 15 bp, Homo sapiens
gctcatgccacccgg

SEQ ID NO: 1964425 - DNA, 15 bp, Homo sapiens
ctcatgccacccggt

SEQ ID NO: 1964426 - DNA, 15 bp, Homo sapiens
tcatgccacccggtt

SEQ ID NO: 1964427 - DNA, 15 bp, Homo sapiens
catgccacccggttc

SEQ ID NO: 1964428 - DNA, 15 bp, Homo sapiens
atgccacccggttcc

SEQ ID NO: 1964429 - DNA, 15 bp, Homo sapiens
tgccacccggttcct

SEQ ID NO: 1964430 - DNA, 15 bp, Homo sapiens
gccacccggttcctg

SEQ ID NO: 1964431 - DNA, 15 bp, Homo sapiens
ccacccggttcctgc

SEQ ID NO: 1964432 - DNA, 15 bp, Homo sapiens
cacccggttcctgca

SEQ ID NO: 1964433 - DNA, 15 bp, Homo sapiens
acccggttcctgcat

SEQ ID NO: 1964434 - DNA, 15 bp, Homo sapiens
cccggttcctgcatg

SEQ ID NO: 1964435 - DNA, 15 bp, Homo sapiens
ccggttcctgcatgc

SEQ ID NO: 1964436 - DNA, 15 bp, Homo sapiens
cggttcctgcatgcc

SEQ ID NO: 1964437 - DNA, 15 bp, Homo sapiens
ggttcctgcatgcca

SEQ ID NO: 1964438 - DNA, 15 bp, Homo sapiens
gttcctgcatgccag

SEQ ID NO: 1964439 - DNA, 15 bp, Homo sapiens
ttcctgcatgccaga

SEQ ID NO: 1964440 - DNA, 15 bp, Homo sapiens
tcctgcatgccagag

SEQ ID NO: 1964441 - DNA, 15 bp, Homo sapiens
cctgcatgccagagg

SEQ ID NO: 1964442 - DNA, 15 bp, Homo sapiens
ctgcatgccagagga

SEQ ID NO: 1964443 - DNA, 15 bp, Homo sapiens
tgcatgccagaggag

SEQ ID NO: 1964444 - DNA, 15 bp, Homo sapiens
gcatgccagaggagc

SEQ ID NO: 1964445 - DNA, 15 bp, Homo sapiens
catgccagaggagcc

SEQ ID NO: 1964446 - DNA, 15 bp, Homo sapiens
atgccagaggagccc

SEQ ID NO: 1964447 - DNA, 15 bp, Homo sapiens
tgccagaggagccca

SEQ ID NO: 1964448 - DNA, 15 bp, Homo sapiens
gccagaggagcccaa

SEQ ID NO: 1964449 - DNA, 15 bp, Homo sapiens
ccagaggagcccaag

SEQ ID NO: 1964450 - DNA, 15 bp, Homo sapiens
cagaggagcccaagc

SEQ ID NO: 1964451 - DNA, 15 bp, Homo sapiens
agaggagcccaagcc

SEQ ID NO: 1964452 - DNA, 15 bp, Homo sapiens
gaggagcccaagcca

SEQ ID NO: 1964453 - DNA, 15 bp, Homo sapiens
aggagcccaagccaa

SEQ ID NO: 1964454 - DNA, 15 bp, Homo sapiens
ggagcccaagccaaa

SEQ ID NO: 1964455 - DNA, 15 bp, Homo sapiens
gagcccaagccaaag

SEQ ID NO: 1964456 - DNA, 15 bp, Homo sapiens
agcccaagccaaaga

SEQ ID NO: 1964457 - DNA, 15 bp, Homo sapiens
gcccaagccaaagag

SEQ ID NO: 1964458 - DNA, 15 bp, Homo sapiens
cccaagccaaagagg

SEQ ID NO: 1964459 - DNA, 15 bp, Homo sapiens
ccaagccaaagaggg

SEQ ID NO: 1964460 - DNA, 15 bp, Homo sapiens
caagccaaagagggg

SEQ ID NO: 1964461 - DNA, 15 bp, Homo sapiens
aagccaaagagggga

SEQ ID NO: 1964462 - DNA, 15 bp, Homo sapiens
agccaaagaggggaa

SEQ ID NO: 1964463 - DNA, 15 bp, Homo sapiens
gccaaagaggggaag

SEQ ID NO: 1964464 - DNA, 15 bp, Homo sapiens
ccaaagaggggaaga

SEQ ID NO: 1964465 - DNA, 15 bp, Homo sapiens
caaagaggggaagac

SEQ ID NO: 1964466 - DNA, 15 bp, Homo sapiens
aaagaggggaagacg

SEQ ID NO: 1964467 - DNA, 15 bp, Homo sapiens
aagaggggaagacga

SEQ ID NO: 1964468 - DNA, 15 bp, Homo sapiens
agaggggaagacgat

SEQ ID NO: 1964469 - DNA, 15 bp, Homo sapiens
gaggggaagacgatc

SEQ ID NO: 1964470 - DNA, 15 bp, Homo sapiens
aggggaagacgatcg

SEQ ID NO: 1964471 - DNA, 15 bp, Homo sapiens
ggggaagacgatcgt

SEQ ID NO: 1964472 - DNA, 15 bp, Homo sapiens
gggaagacgatcgtg

SEQ ID NO: 1964473 - DNA, 15 bp, Homo sapiens
ggaagacgatcgtgg

SEQ ID NO: 1964474 - DNA, 15 bp, Homo sapiens
gaagacgatcgtggc

SEQ ID NO: 1964475 - DNA, 15 bp, Homo sapiens
aagacgatcgtggcc

SEQ ID NO: 1964476 - DNA, 15 bp, Homo sapiens
agacgatcgtggccc

SEQ ID NO: 1964477 - DNA, 15 bp, Homo sapiens
gacgatcgtggcccc

SEQ ID NO: 1964478 - DNA, 15 bp, Homo sapiens
acgatcgtggccccg

SEQ ID NO: 1964479 - DNA, 15 bp, Homo sapiens
cgatcgtggccccgg

SEQ ID NO: 1964480 - DNA, 15 bp, Homo sapiens
gatcgtggccccgga

SEQ ID NO: 1964481 - DNA, 15 bp, Homo sapiens
atcgtggccccggaa

SEQ ID NO: 1964482 - DNA, 15 bp, Homo sapiens
tcgtggccccggaaa

SEQ ID NO: 1964483 - DNA, 15 bp, Homo sapiens
cacacttgtgattac

SEQ ID NO: 1964484 - DNA, 15 bp, Homo sapiens
acacttgtgattacg

SEQ ID NO: 1964485 - DNA, 15 bp, Homo sapiens
cacttgtgattacgc

SEQ ID NO: 1964486 - DNA, 15 bp, Homo sapiens
acttgtgattacgcg

SEQ ID NO: 1964487 - DNA, 15 bp, Homo sapiens
cttgtgattacgcgg

SEQ ID NO: 1964488 - DNA, 15 bp, Homo sapiens
ttgtgattacgcggg

SEQ ID NO: 1964489 - DNA, 15 bp, Homo sapiens
tgtgattacgcgggc

SEQ ID NO: 1964490 - DNA, 15 bp, Homo sapiens
gtgattacgcgggct

SEQ ID NO: 1964491 - DNA, 15 bp, Homo sapiens
tgattacgcgggctg

SEQ ID NO: 1964492 - DNA, 15 bp, Homo sapiens
gattacgcgggctgc

SEQ ID NO: 1964493 - DNA, 15 bp, Homo sapiens
attacgcgggctgcg

SEQ ID NO: 1964494 - DNA, 15 bp, Homo sapiens
ttacgcgggctgcgg

SEQ ID NO: 1964495 - DNA, 15 bp, Homo sapiens
tacgcgggctgcggc

SEQ ID NO: 1964496 - DNA, 15 bp, Homo sapiens
acgcgggctgcggca

SEQ ID NO: 1964497 - DNA, 15 bp, Homo sapiens
cgcgggctgcggcaa

SEQ ID NO: 1964498 - DNA, 15 bp, Homo sapiens
gcgggctgcggcaaa

SEQ ID NO: 1964499 - DNA, 15 bp, Homo sapiens
cgggctgcggcaaaa

SEQ ID NO: 1964500 - DNA, 15 bp, Homo sapiens
gggctgcggcaaaac

SEQ ID NO: 1964501 - DNA, 15 bp, Homo sapiens
ggctgcggcaaaacc

SEQ ID NO: 1964502 - DNA, 15 bp, Homo sapiens
gctgcggcaaaacct

SEQ ID NO: 1964503 - DNA, 15 bp, Homo sapiens
ctgcggcaaaaccta

SEQ ID NO: 1964504 - DNA, 15 bp, Homo sapiens
tgcggcaaaacctac

SEQ ID NO: 1964505 - DNA, 15 bp, Homo sapiens
gcggcaaaacctaca

SEQ ID NO: 1964506 - DNA, 15 bp, Homo sapiens
cggcaaaacctacac

SEQ ID NO: 1964507 - DNA, 15 bp, Homo sapiens
ggcaaaacctacaca

SEQ ID NO: 1964508 - DNA, 15 bp, Homo sapiens
gcaaaacctacacaa

SEQ ID NO: 1964509 - DNA, 15 bp, Homo sapiens
caaaacctacacaaa

SEQ ID NO: 1964510 - DNA, 15 bp, Homo sapiens
aaaacctacacaaag

SEQ ID NO: 1964511 - DNA, 15 bp, Homo sapiens
aaacctacacaaaga

SEQ ID NO: 1964512 - DNA, 15 bp, Homo sapiens
aacctacacaaagag

SEQ ID NO: 1964513 - DNA, 15 bp, Homo sapiens
acctacacaaagagt

SEQ ID NO: 1964514 - DNA, 15 bp, Homo sapiens
cctacacaaagagtt

SEQ ID NO: 1964515 - DNA, 15 bp, Homo sapiens
ctacacaaagagttc

SEQ ID NO: 1964516 - DNA, 15 bp, Homo sapiens
tacacaaagagttcc

SEQ ID NO: 1964517 - DNA, 15 bp, Homo sapiens
acacaaagagttccc

SEQ ID NO: 1964518 - DNA, 15 bp, Homo sapiens
cacaaagagttccca

SEQ ID NO: 1964519 - DNA, 15 bp, Homo sapiens
acaaagagttcccat

SEQ ID NO: 1964520 - DNA, 15 bp, Homo sapiens
caaagagttcccatc

SEQ ID NO: 1964521 - DNA, 15 bp, Homo sapiens
aaagagttcccatct

SEQ ID NO: 1964522 - DNA, 15 bp, Homo sapiens
aagagttcccatctc

SEQ ID NO: 1964523 - DNA, 15 bp, Homo sapiens
agagttcccatctca

SEQ ID NO: 1964524 - DNA, 15 bp, Homo sapiens
gagttcccatctcaa

SEQ ID NO: 1964525 - DNA, 15 bp, Homo sapiens
agttcccatctcaag

SEQ ID NO: 1964526 - DNA, 15 bp, Homo sapiens
gttcccatctcaagg

SEQ ID NO: 1964527 - DNA, 15 bp, Homo sapiens
ttcccatctcaaggc

SEQ ID NO: 1964528 - DNA, 15 bp, Homo sapiens
tcccatctcaaggca

SEQ ID NO: 1964529 - DNA, 15 bp, Homo sapiens
cccatctcaaggcac

SEQ ID NO: 1964530 - DNA, 15 bp, Homo sapiens
ccatctcaaggcaca

SEQ ID NO: 1964531 - DNA, 15 bp, Homo sapiens
catctcaaggcacac

SEQ ID NO: 1964532 - DNA, 15 bp, Homo sapiens
atctcaaggcacacc

SEQ ID NO: 1964533 - DNA, 15 bp, Homo sapiens
tctcaaggcacacct

SEQ ID NO: 1964534 - DNA, 15 bp, Homo sapiens
ctcaaggcacacctg

SEQ ID NO: 1964535 - DNA, 15 bp, Homo sapiens
tcaaggcacacctgc

SEQ ID NO: 1964536 - DNA, 15 bp, Homo sapiens
caaggcacacctgcg

SEQ ID NO: 1964537 - DNA, 15 bp, Homo sapiens
aaggcacacctgcga

SEQ ID NO: 1964538 - DNA, 15 bp, Homo sapiens
aggcacacctgcgaa

SEQ ID NO: 1964539 - DNA, 15 bp, Homo sapiens
ggcacacctgcgaac

SEQ ID NO: 1964540 - DNA, 15 bp, Homo sapiens
gcacacctgcgaacc

SEQ ID NO: 1964541 - DNA, 15 bp, Homo sapiens
cacacctgcgaaccc

SEQ ID NO: 1964542 - DNA, 15 bp, Homo sapiens
acacctgcgaaccca

SEQ ID NO: 1964543 - DNA, 15 bp, Homo sapiens
cacctgcgaacccac

SEQ ID NO: 1964544 - DNA, 15 bp, Homo sapiens
acctgcgaacccaca

SEQ ID NO: 1964545 - DNA, 15 bp, Homo sapiens
cctgcgaacccacac

SEQ ID NO: 1964546 - DNA, 15 bp, Homo sapiens
ctgcgaacccacaca

SEQ ID NO: 1964547 - DNA, 15 bp, Homo sapiens
tgcgaacccacacag

SEQ ID NO: 1964548 - DNA, 15 bp, Homo sapiens
gcgaacccacacagg

SEQ ID NO: 1964549 - DNA, 15 bp, Homo sapiens
cgaacccacacaggt

SEQ ID NO: 1964550 - DNA, 15 bp, Homo sapiens
gaacccacacaggta

SEQ ID NO: 1964551 - DNA, 15 bp, Homo sapiens
aacccacacaggtag

SEQ ID NO: 1964552 - DNA, 15 bp, Homo sapiens
acccacacaggtagg

SEQ ID NO: 1964553 - DNA, 15 bp, Homo sapiens
cccacacaggtaggg

SEQ ID NO: 1964554 - DNA, 15 bp, Homo sapiens
ccacacaggtagggg

SEQ ID NO: 1964555 - DNA, 15 bp, Homo sapiens
cacacaggtaggggg

SEQ ID NO: 1964556 - DNA, 15 bp, Homo sapiens
acacaggtaggggga

SEQ ID NO: 1964557 - DNA, 15 bp, Homo sapiens
cacaggtagggggac

SEQ ID NO: 1964558 - DNA, 15 bp, Homo sapiens
acaggtagggggaca

SEQ ID NO: 1964559 - DNA, 15 bp, Homo sapiens
caggtagggggacaa

SEQ ID NO: 1964560 - DNA, 15 bp, Homo sapiens
aggtagggggacaaa

SEQ ID NO: 1964561 - DNA, 15 bp, Homo sapiens
ggtagggggacaaac

SEQ ID NO: 1964562 - DNA, 15 bp, Homo sapiens
gtagggggacaaact

SEQ ID NO: 1964563 - DNA, 15 bp, Homo sapiens
tagggggacaaactg

SEQ ID NO: 1964564 - DNA, 15 bp, Homo sapiens
agggggacaaactgc

SEQ ID NO: 1964565 - DNA, 15 bp, Homo sapiens
gggggacaaactgca

SEQ ID NO: 1964566 - DNA, 15 bp, Homo sapiens
ggggacaaactgcag

SEQ ID NO: 1964567 - DNA, 15 bp, Homo sapiens
gggacaaactgcaga

SEQ ID NO: 1964568 - DNA, 15 bp, Homo sapiens
ggacaaactgcagaa

SEQ ID NO: 1964569 - DNA, 15 bp, Homo sapiens
gacaaactgcagaag

SEQ ID NO: 1964570 - DNA, 15 bp, Homo sapiens
acaaactgcagaagg

SEQ ID NO: 1964571 - DNA, 15 bp, Homo sapiens
caaactgcagaaggg

SEQ ID NO: 1964572 - DNA, 15 bp, Homo sapiens
aaactgcagaaggga

SEQ ID NO: 1964573 - DNA, 15 bp, Homo sapiens
aactgcagaagggag

SEQ ID NO: 1964574 - DNA, 15 bp, Homo sapiens
actgcagaagggagg

SEQ ID NO: 1964575 - DNA, 15 bp, Homo sapiens
ctgcagaagggaggg

SEQ ID NO: 1964576 - DNA, 15 bp, Homo sapiens
tgcagaagggagggg

SEQ ID NO: 1964577 - DNA, 15 bp, Homo sapiens
gcagaagggaggggg

SEQ ID NO: 1964578 - DNA, 15 bp, Homo sapiens
cagaagggagggggg

SEQ ID NO: 1964579 - DNA, 15 bp, Homo sapiens
agaagggaggggggt

SEQ ID NO: 1964580 - DNA, 15 bp, Homo sapiens
gaagggaggggggtt

SEQ ID NO: 1964581 - DNA, 15 bp, Homo sapiens
aagggaggggggtta

SEQ ID NO: 1964582 - DNA, 15 bp, Homo sapiens
agggaggggggttag

SEQ ID NO: 1964583 - DNA, 15 bp, Homo sapiens
gggaggggggttagc

SEQ ID NO: 1964584 - DNA, 15 bp, Homo sapiens
ggaggggggttagct

SEQ ID NO: 1964585 - DNA, 15 bp, Homo sapiens
gaggggggttagctt

SEQ ID NO: 1964586 - DNA, 15 bp, Homo sapiens
aggggggttagcttc

SEQ ID NO: 1964587 - DNA, 15 bp, Homo sapiens
ggggggttagcttcc

SEQ ID NO: 1964588 - DNA, 15 bp, Homo sapiens
gggggttagcttcca

SEQ ID NO: 1964589 - DNA, 15 bp, Homo sapiens
ggggttagcttccag

SEQ ID NO: 1964590 - DNA, 15 bp, Homo sapiens
gggttagcttccagc

SEQ ID NO: 1964591 - DNA, 15 bp, Homo sapiens
ggttagcttccagcc

SEQ ID NO: 1964592 - DNA, 15 bp, Homo sapiens
gttagcttccagccc

SEQ ID NO: 1964593 - DNA, 15 bp, Homo sapiens
ttagcttccagcccc

SEQ ID NO: 1964594 - DNA, 15 bp, Homo sapiens
tagcttccagcccca

SEQ ID NO: 1964595 - DNA, 15 bp, Homo sapiens
agcttccagccccat

SEQ ID NO: 1964596 - DNA, 15 bp, Homo sapiens
gcttccagccccata

SEQ ID NO: 1964597 - DNA, 15 bp, Homo sapiens
cttccagccccatag

SEQ ID NO: 1964598 - DNA, 15 bp, Homo sapiens
ttccagccccatagg

SEQ ID NO: 1964599 - DNA, 15 bp, Homo sapiens
tccagccccataggc

SEQ ID NO: 1964600 - DNA, 15 bp, Homo sapiens
ccagccccataggct

SEQ ID NO: 1964601 - DNA, 15 bp, Homo sapiens
cagccccataggcta

SEQ ID NO: 1964602 - DNA, 15 bp, Homo sapiens
agccccataggctac

SEQ ID NO: 1964603 - DNA, 15 bp, Homo sapiens
gccccataggctacc

SEQ ID NO: 1964604 - DNA, 15 bp, Homo sapiens
ccccataggctacca

SEQ ID NO: 1964605 - DNA, 15 bp, Homo sapiens
cccataggctaccag

SEQ ID NO: 1964606 - DNA, 15 bp, Homo sapiens
ccataggctaccagt

SEQ ID NO: 1964607 - DNA, 15 bp, Homo sapiens
cataggctaccagtg

SEQ ID NO: 1964608 - DNA, 15 bp, Homo sapiens
ataggctaccagtgg

SEQ ID NO: 1964609 - DNA, 15 bp, Homo sapiens
taggctaccagtgga

SEQ ID NO: 1964610 - DNA, 15 bp, Homo sapiens
aggctaccagtggac

SEQ ID NO: 1964611 - DNA, 15 bp, Homo sapiens
ggctaccagtggaca

SEQ ID NO: 1964612 - DNA, 15 bp, Homo sapiens
gctaccagtggacac

SEQ ID NO: 1964613 - DNA, 15 bp, Homo sapiens
ctaccagtggacact

SEQ ID NO: 1964614 - DNA, 15 bp, Homo sapiens
taccagtggacactc

SEQ ID NO: 1964615 - DNA, 15 bp, Homo sapiens
accagtggacactcc

SEQ ID NO: 1964616 - DNA, 15 bp, Homo sapiens
ccagtggacactcct

SEQ ID NO: 1964617 - DNA, 15 bp, Homo sapiens
cagtggacactcctc

SEQ ID NO: 1964618 - DNA, 15 bp, Homo sapiens
agtggacactcctca

SEQ ID NO: 1964619 - DNA, 15 bp, Homo sapiens
gtggacactcctcag

SEQ ID NO: 1964620 - DNA, 15 bp, Homo sapiens
tggacactcctcagt

SEQ ID NO: 1964621 - DNA, 15 bp, Homo sapiens
ggacactcctcagtg

SEQ ID NO: 1964622 - DNA, 15 bp, Homo sapiens
gacactcctcagtgc

SEQ ID NO: 1964623 - DNA, 15 bp, Homo sapiens
acactcctcagtgcc

SEQ ID NO: 1964624 - DNA, 15 bp, Homo sapiens
ctttttatccccagt

SEQ ID NO: 1964625 - DNA, 15 bp, Homo sapiens
tttttatccccagtc

SEQ ID NO: 1964626 - DNA, 15 bp, Homo sapiens
ttttatccccagtcg

SEQ ID NO: 1964627 - DNA, 15 bp, Homo sapiens
tttatccccagtcgt

SEQ ID NO: 1964628 - DNA, 15 bp, Homo sapiens
ttatccccagtcgta

SEQ ID NO: 1964629 - DNA, 15 bp, Homo sapiens
tatccccagtcgtag

SEQ ID NO: 1964630 - DNA, 15 bp, Homo sapiens
atccccagtcgtagt

SEQ ID NO: 1964631 - DNA, 15 bp, Homo sapiens
tccccagtcgtagta

SEQ ID NO: 1964632 - DNA, 15 bp, Homo sapiens
ccccagtcgtagtag

SEQ ID NO: 1964633 - DNA, 15 bp, Homo sapiens
cccagtcgtagtagg

SEQ ID NO: 1964634 - DNA, 15 bp, Homo sapiens
ccagtcgtagtagga

SEQ ID NO: 1964635 - DNA, 15 bp, Homo sapiens
cagtcgtagtaggaa

SEQ ID NO: 1964636 - DNA, 15 bp, Homo sapiens
agtcgtagtaggaat

SEQ ID NO: 1964637 - DNA, 15 bp, Homo sapiens
gtcgtagtaggaata

SEQ ID NO: 1964638 - DNA, 15 bp, Homo sapiens
tcgtagtaggaataa

SEQ ID NO: 1964639 - DNA, 15 bp, Homo sapiens
cgtagtaggaataag

SEQ ID NO: 1964640 - DNA, 15 bp, Homo sapiens
gtagtaggaataaga

SEQ ID NO: 1964641 - DNA, 15 bp, Homo sapiens
tagtaggaataagat

SEQ ID NO: 1964642 - DNA, 15 bp, Homo sapiens
agtaggaataagatt

SEQ ID NO: 1964643 - DNA, 15 bp, Homo sapiens
gtaggaataagattg

SEQ ID NO: 1964644 - DNA, 15 bp, Homo sapiens
taggaataagattgc

SEQ ID NO: 1964645 - DNA, 15 bp, Homo sapiens
aggaataagattgca

SEQ ID NO: 1964646 - DNA, 15 bp, Homo sapiens
ggaataagattgcat

SEQ ID NO: 1964647 - DNA, 15 bp, Homo sapiens
gaataagattgcatg

SEQ ID NO: 1964648 - DNA, 15 bp, Homo sapiens
aataagattgcatgg

SEQ ID NO: 1964649 - DNA, 15 bp, Homo sapiens
ataagattgcatggt

SEQ ID NO: 1964650 - DNA, 15 bp, Homo sapiens
taagattgcatggtt

SEQ ID NO: 1964651 - DNA, 15 bp, Homo sapiens
aagattgcatggttt

SEQ ID NO: 1964652 - DNA, 15 bp, Homo sapiens
agattgcatggtttg

SEQ ID NO: 1964653 - DNA, 15 bp, Homo sapiens
gattgcatggtttgg

SEQ ID NO: 1964654 - DNA, 15 bp, Homo sapiens
attgcatggtttggg

SEQ ID NO: 1964655 - DNA, 15 bp, Homo sapiens
ttgcatggtttgggc

SEQ ID NO: 1964656 - DNA, 15 bp, Homo sapiens
tgcatggtttgggca

SEQ ID NO: 1964657 - DNA, 15 bp, Homo sapiens
gcatggtttgggcac

SEQ ID NO: 1964658 - DNA, 15 bp, Homo sapiens
catggtttgggcaca

SEQ ID NO: 1964659 - DNA, 15 bp, Homo sapiens
atggtttgggcacac

SEQ ID NO: 1964660 - DNA, 15 bp, Homo sapiens
tggtttgggcacact

SEQ ID NO: 1964661 - DNA, 15 bp, Homo sapiens
ggtttgggcacacta

SEQ ID NO: 1964662 - DNA, 15 bp, Homo sapiens
gtttgggcacactac

SEQ ID NO: 1964663 - DNA, 15 bp, Homo sapiens
tttgggcacactacc

SEQ ID NO: 1964664 - DNA, 15 bp, Homo sapiens
ttgggcacactacca

SEQ ID NO: 1964665 - DNA, 15 bp, Homo sapiens
tgggcacactaccaa

SEQ ID NO: 1964666 - DNA, 15 bp, Homo sapiens
gggcacactaccaat

SEQ ID NO: 1964667 - DNA, 15 bp, Homo sapiens
ggcacactaccaatc

SEQ ID NO: 1964668 - DNA, 15 bp, Homo sapiens
gcacactaccaatca

SEQ ID NO: 1964669 - DNA, 15 bp, Homo sapiens
cacactaccaatcac

SEQ ID NO: 1964670 - DNA, 15 bp, Homo sapiens
acactaccaatcaca

SEQ ID NO: 1964671 - DNA, 15 bp, Homo sapiens
cactaccaatcacaa

SEQ ID NO: 1964672 - DNA, 15 bp, Homo sapiens
actaccaatcacaat

SEQ ID NO: 1964673 - DNA, 15 bp, Homo sapiens
ctaccaatcacaatt

SEQ ID NO: 1964674 - DNA, 15 bp, Homo sapiens
taccaatcacaattt

SEQ ID NO: 1964675 - DNA, 15 bp, Homo sapiens
accaatcacaatttc

SEQ ID NO: 1964676 - DNA, 15 bp, Homo sapiens
ccaatcacaatttcc

SEQ ID NO: 1964677 - DNA, 15 bp, Homo sapiens
caatcacaatttcca

SEQ ID NO: 1964678 - DNA, 15 bp, Homo sapiens
aatcacaatttccaa

SEQ ID NO: 1964679 - DNA, 15 bp, Homo sapiens
atcacaatttccaaa

SEQ ID NO: 1964680 - DNA, 15 bp, Homo sapiens
tcacaatttccaaat

SEQ ID NO: 1964681 - DNA, 15 bp, Homo sapiens
cacaatttccaaatt

SEQ ID NO: 1964682 - DNA, 15 bp, Homo sapiens
acaatttccaaattt

SEQ ID NO: 1964683 - DNA, 15 bp, Homo sapiens
caatttccaaatttc

SEQ ID NO: 1964684 - DNA, 15 bp, Homo sapiens
aatttccaaatttca

SEQ ID NO: 1964685 - DNA, 15 bp, Homo sapiens
atttccaaatttcat

SEQ ID NO: 1964686 - DNA, 15 bp, Homo sapiens
tttccaaatttcatt

SEQ ID NO: 1964687 - DNA, 15 bp, Homo sapiens
ttccaaatttcattt

SEQ ID NO: 1964688 - DNA, 15 bp, Homo sapiens
tccaaatttcatttc

SEQ ID NO: 1964689 - DNA, 15 bp, Homo sapiens
ccaaatttcatttcc

SEQ ID NO: 1964690 - DNA, 15 bp, Homo sapiens
caaatttcatttcca

SEQ ID NO: 1964691 - DNA, 15 bp, Homo sapiens
aaatttcatttccac

SEQ ID NO: 1964692 - DNA, 15 bp, Homo sapiens
aatttcatttccacc

SEQ ID NO: 1964693 - DNA, 15 bp, Homo sapiens
atttcatttccacca

SEQ ID NO: 1964694 - DNA, 15 bp, Homo sapiens
tttcatttccaccac

SEQ ID NO: 1964695 - DNA, 15 bp, Homo sapiens
ttcatttccaccact

SEQ ID NO: 1964696 - DNA, 15 bp, Homo sapiens
tcatttccaccactg

SEQ ID NO: 1964697 - DNA, 15 bp, Homo sapiens
catttccaccactga

SEQ ID NO: 1964698 - DNA, 15 bp, Homo sapiens
atttccaccactgag

SEQ ID NO: 1964699 - DNA, 15 bp, Homo sapiens
tttccaccactgaga

SEQ ID NO: 1964700 - DNA, 15 bp, Homo sapiens
ttccaccactgagat

SEQ ID NO: 1964701 - DNA, 15 bp, Homo sapiens
tccaccactgagatg

SEQ ID NO: 1964702 - DNA, 15 bp, Homo sapiens
ccaccactgagatgc

SEQ ID NO: 1964703 - DNA, 15 bp, Homo sapiens
caccactgagatgcc

SEQ ID NO: 1964704 - DNA, 15 bp, Homo sapiens
accactgagatgcct

SEQ ID NO: 1964705 - DNA, 15 bp, Homo sapiens
ccactgagatgcctt

SEQ ID NO: 1964706 - DNA, 15 bp, Homo sapiens
cactgagatgccttg

SEQ ID NO: 1964707 - DNA, 15 bp, Homo sapiens
actgagatgccttga

SEQ ID NO: 1964708 - DNA, 15 bp, Homo sapiens
ctgagatgccttgac

SEQ ID NO: 1964709 - DNA, 15 bp, Homo sapiens
tgagatgccttgact

SEQ ID NO: 1964710 - DNA, 15 bp, Homo sapiens
gagatgccttgactc

SEQ ID NO: 1964711 - DNA, 15 bp, Homo sapiens
agatgccttgactca

SEQ ID NO: 1964712 - DNA, 15 bp, Homo sapiens
gatgccttgactcaa

SEQ ID NO: 1964713 - DNA, 15 bp, Homo sapiens
atgccttgactcaaa

SEQ ID NO: 1964714 - DNA, 15 bp, Homo sapiens
tgccttgactcaaat

SEQ ID NO: 1964715 - DNA, 15 bp, Homo sapiens
gccttgactcaaatg

SEQ ID NO: 1964716 - DNA, 15 bp, Homo sapiens
ccttgactcaaatga

SEQ ID NO: 1964717 - DNA, 15 bp, Homo sapiens
cttgactcaaatgaa

SEQ ID NO: 1964718 - DNA, 15 bp, Homo sapiens
ttgactcaaatgaaa

SEQ ID NO: 1964719 - DNA, 15 bp, Homo sapiens
tgactcaaatgaaac

SEQ ID NO: 1964720 - DNA, 15 bp, Homo sapiens
gactcaaatgaaaca

SEQ ID NO: 1964721 - DNA, 15 bp, Homo sapiens
actcaaatgaaacat

SEQ ID NO: 1964722 - DNA, 15 bp, Homo sapiens
ctcaaatgaaacatt

SEQ ID NO: 1964723 - DNA, 15 bp, Homo sapiens
tcaaatgaaacatta

SEQ ID NO: 1964724 - DNA, 15 bp, Homo sapiens
caaatgaaacattag

SEQ ID NO: 1964725 - DNA, 15 bp, Homo sapiens
aaatgaaacattagt

SEQ ID NO: 1964726 - DNA, 15 bp, Homo sapiens
aatgaaacattagta

SEQ ID NO: 1964727 - DNA, 15 bp, Homo sapiens
atgaaacattagtat

SEQ ID NO: 1964728 - DNA, 15 bp, Homo sapiens
tgaaacattagtata

SEQ ID NO: 1964729 - DNA, 15 bp, Homo sapiens
gaaacattagtatag

SEQ ID NO: 1964730 - DNA, 15 bp, Homo sapiens
aaacattagtatagg

SEQ ID NO: 1964731 - DNA, 15 bp, Homo sapiens
aacattagtataggt

SEQ ID NO: 1964732 - DNA, 15 bp, Homo sapiens
acattagtataggtt

SEQ ID NO: 1964733 - DNA, 15 bp, Homo sapiens
cattagtataggttt

SEQ ID NO: 1964734 - DNA, 15 bp, Homo sapiens
attagtataggttta

SEQ ID NO: 1964735 - DNA, 15 bp, Homo sapiens
ttagtataggtttag

SEQ ID NO: 1964736 - DNA, 15 bp, Homo sapiens
tagtataggtttagg

SEQ ID NO: 1964737 - DNA, 15 bp, Homo sapiens
agtataggtttaggt

SEQ ID NO: 1964738 - DNA, 15 bp, Homo sapiens
gtataggtttaggtg

SEQ ID NO: 1964739 - DNA, 15 bp, Homo sapiens
tataggtttaggtgg

SEQ ID NO: 1964740 - DNA, 15 bp, Homo sapiens
ataggtttaggtggt

SEQ ID NO: 1964741 - DNA, 15 bp, Homo sapiens
taggtttaggtggtg

SEQ ID NO: 1964742 - DNA, 15 bp, Homo sapiens
aggtttaggtggtgt

SEQ ID NO: 1964743 - DNA, 15 bp, Homo sapiens
ggtttaggtggtgtt

SEQ ID NO: 1964744 - DNA, 15 bp, Homo sapiens
gtttaggtggtgttt

SEQ ID NO: 1964745 - DNA, 15 bp, Homo sapiens
tttaggtggtgtttg

SEQ ID NO: 1964746 - DNA, 15 bp, Homo sapiens
ttaggtggtgtttgt

SEQ ID NO: 1964747 - DNA, 15 bp, Homo sapiens
taggtggtgtttgtg

SEQ ID NO: 1964748 - DNA, 15 bp, Homo sapiens
aggtggtgtttgtgt

SEQ ID NO: 1964749 - DNA, 15 bp, Homo sapiens
ggtggtgtttgtgtg

SEQ ID NO: 1964750 - DNA, 15 bp, Homo sapiens
gtggtgtttgtgtgt

SEQ ID NO: 1964751 - DNA, 15 bp, Homo sapiens
tggtgtttgtgtgtt

SEQ ID NO: 1964752 - DNA, 15 bp, Homo sapiens
ggtgtttgtgtgttt

SEQ ID NO: 1964753 - DNA, 15 bp, Homo sapiens
gtgtttgtgtgtttt

SEQ ID NO: 1964754 - DNA, 15 bp, Homo sapiens
tgtttgtgtgttttt

SEQ ID NO: 1964755 - DNA, 15 bp, Homo sapiens
gtttgtgtgtttttg

SEQ ID NO: 1964756 - DNA, 15 bp, Homo sapiens
tttgtgtgtttttgg

SEQ ID NO: 1964757 - DNA, 15 bp, Homo sapiens
ttgtgtgtttttggt

SEQ ID NO: 1964758 - DNA, 15 bp, Homo sapiens
tgtgtgtttttggtg

SEQ ID NO: 1964759 - DNA, 15 bp, Homo sapiens
gtgtgtttttggtga

SEQ ID NO: 1964760 - DNA, 15 bp, Homo sapiens
tgtgtttttggtgaa

SEQ ID NO: 1964761 - DNA, 15 bp, Homo sapiens
gtgtttttggtgaaa

SEQ ID NO: 1964762 - DNA, 15 bp, Homo sapiens
tgtttttggtgaaac

SEQ ID NO: 1964763 - DNA, 15 bp, Homo sapiens
gtttttggtgaaaca

SEQ ID NO: 1964764 - DNA, 15 bp, Homo sapiens
tttttggtgaaacat

SEQ ID NO: 1964765 - DNA, 15 bp, Homo sapiens
ttttggtgaaacatt

SEQ ID NO: 1964766 - DNA, 15 bp, Homo sapiens
tttggtgaaacatta

SEQ ID NO: 1964767 - DNA, 15 bp, Homo sapiens
ttggtgaaacattag

SEQ ID NO: 1964768 - DNA, 15 bp, Homo sapiens
tggtgaaacattagt

SEQ ID NO: 1964769 - DNA, 15 bp, Homo sapiens
ggtgaaacattagta

SEQ ID NO: 1964770 - DNA, 15 bp, Homo sapiens
gtgaaacattagtat

SEQ ID NO: 1964771 - DNA, 15 bp, Homo sapiens
acattagtataggtg

SEQ ID NO: 1964772 - DNA, 15 bp, Homo sapiens
cattagtataggtgt

SEQ ID NO: 1964773 - DNA, 15 bp, Homo sapiens
attagtataggtgta

SEQ ID NO: 1964774 - DNA, 15 bp, Homo sapiens
ttagtataggtgtag

SEQ ID NO: 1964775 - DNA, 15 bp, Homo sapiens
tagtataggtgtagg

SEQ ID NO: 1964776 - DNA, 15 bp, Homo sapiens
agtataggtgtaggt

SEQ ID NO: 1964777 - DNA, 15 bp, Homo sapiens
gtataggtgtaggtg

SEQ ID NO: 1964778 - DNA, 15 bp, Homo sapiens
tataggtgtaggtgg

SEQ ID NO: 1964779 - DNA, 15 bp, Homo sapiens
ataggtgtaggtggt

SEQ ID NO: 1964780 - DNA, 15 bp, Homo sapiens
taggtgtaggtggtg

SEQ ID NO: 1964781 - DNA, 15 bp, Homo sapiens
aggtgtaggtggtgg

SEQ ID NO: 1964782 - DNA, 15 bp, Homo sapiens
ggtgtaggtggtggt

SEQ ID NO: 1964783 - DNA, 15 bp, Homo sapiens
gtgtaggtggtggtt

SEQ ID NO: 1964784 - DNA, 15 bp, Homo sapiens
tgtaggtggtggttg

SEQ ID NO: 1964785 - DNA, 15 bp, Homo sapiens
gtaggtggtggttgt

SEQ ID NO: 1964786 - DNA, 15 bp, Homo sapiens
taggtggtggttgtg

SEQ ID NO: 1964787 - DNA, 15 bp, Homo sapiens
aggtggtggttgtgt

SEQ ID NO: 1964788 - DNA, 15 bp, Homo sapiens
ggtggtggttgtgtg

SEQ ID NO: 1964789 - DNA, 15 bp, Homo sapiens
gtggtggttgtgtgc

SEQ ID NO: 1964790 - DNA, 15 bp, Homo sapiens
tggtggttgtgtgct

SEQ ID NO: 1964791 - DNA, 15 bp, Homo sapiens
ggtggttgtgtgctt

SEQ ID NO: 1964792 - DNA, 15 bp, Homo sapiens
gtggttgtgtgctta

SEQ ID NO: 1964793 - DNA, 15 bp, Homo sapiens
tggttgtgtgcttaa

SEQ ID NO: 1964794 - DNA, 15 bp, Homo sapiens
ggttgtgtgcttaac

SEQ ID NO: 1964795 - DNA, 15 bp, Homo sapiens
gttgtgtgcttaact

SEQ ID NO: 1964796 - DNA, 15 bp, Homo sapiens
ttgtgtgcttaactg

SEQ ID NO: 1964797 - DNA, 15 bp, Homo sapiens
tgtgtgcttaactga

SEQ ID NO: 1964798 - DNA, 15 bp, Homo sapiens
gtgtgcttaactgac

SEQ ID NO: 1964799 - DNA, 15 bp, Homo sapiens
tgtgcttaactgacc

SEQ ID NO: 1964800 - DNA, 15 bp, Homo sapiens
gtgcttaactgaccc

SEQ ID NO: 1964801 - DNA, 15 bp, Homo sapiens
tgcttaactgacccc

SEQ ID NO: 1964802 - DNA, 15 bp, Homo sapiens
gcttaactgaccccc

SEQ ID NO: 1964803 - DNA, 15 bp, Homo sapiens
cttaactgaccccct

SEQ ID NO: 1964804 - DNA, 15 bp, Homo sapiens
ttaactgacccccta

SEQ ID NO: 1964805 - DNA, 15 bp, Homo sapiens
taactgaccccctaa

SEQ ID NO: 1964806 - DNA, 15 bp, Homo sapiens
aactgaccccctaaa

SEQ ID NO: 1964807 - DNA, 15 bp, Homo sapiens
actgaccccctaaaa

SEQ ID NO: 1964808 - DNA, 15 bp, Homo sapiens
ctgaccccctaaaaa

SEQ ID NO: 1964809 - DNA, 15 bp, Homo sapiens
tgaccccctaaaaac

SEQ ID NO: 1964810 - DNA, 15 bp, Homo sapiens
gaccccctaaaaaca

SEQ ID NO: 1964811 - DNA, 15 bp, Homo sapiens
accccctaaaaacaa

SEQ ID NO: 1964812 - DNA, 15 bp, Homo sapiens
ccccctaaaaacaag

SEQ ID NO: 1964813 - DNA, 15 bp, Homo sapiens
cccctaaaaacaaga

SEQ ID NO: 1964814 - DNA, 15 bp, Homo sapiens
ccctaaaaacaagac

SEQ ID NO: 1964815 - DNA, 15 bp, Homo sapiens
cctaaaaacaagacc

SEQ ID NO: 1964816 - DNA, 15 bp, Homo sapiens
ctaaaaacaagacca

SEQ ID NO: 1964817 - DNA, 15 bp, Homo sapiens
taaaaacaagaccaa

SEQ ID NO: 1964818 - DNA, 15 bp, Homo sapiens
aaaaacaagaccaaa

SEQ ID NO: 1964819 - DNA, 15 bp, Homo sapiens
aaaacaagaccaaat

SEQ ID NO: 1964820 - DNA, 15 bp, Homo sapiens
aaacaagaccaaata

SEQ ID NO: 1964821 - DNA, 15 bp, Homo sapiens
aacaagaccaaatac

SEQ ID NO: 1964822 - DNA, 15 bp, Homo sapiens
acaagaccaaatact

SEQ ID NO: 1964823 - DNA, 15 bp, Homo sapiens
caagaccaaatactt

SEQ ID NO: 1964824 - DNA, 15 bp, Homo sapiens
aagaccaaatactta

SEQ ID NO: 1964825 - DNA, 15 bp, Homo sapiens
agaccaaatacttaa

SEQ ID NO: 1964826 - DNA, 15 bp, Homo sapiens
gaccaaatacttaag

SEQ ID NO: 1964827 - DNA, 15 bp, Homo sapiens
accaaatacttaagc

SEQ ID NO: 1964828 - DNA, 15 bp, Homo sapiens
ccaaatacttaagca

SEQ ID NO: 1964829 - DNA, 15 bp, Homo sapiens
caaatacttaagcac

SEQ ID NO: 1964830 - DNA, 15 bp, Homo sapiens
aaatacttaagcacg

SEQ ID NO: 1964831 - DNA, 15 bp, Homo sapiens
aatacttaagcacgg

SEQ ID NO: 1964832 - DNA, 15 bp, Homo sapiens
atacttaagcacgga

SEQ ID NO: 1964833 - DNA, 15 bp, Homo sapiens
tacttaagcacggaa

SEQ ID NO: 1964834 - DNA, 15 bp, Homo sapiens
acttaagcacggaat

SEQ ID NO: 1964835 - DNA, 15 bp, Homo sapiens
cttaagcacggaatg

SEQ ID NO: 1964836 - DNA, 15 bp, Homo sapiens
ttaagcacggaatgt

SEQ ID NO: 1964837 - DNA, 15 bp, Homo sapiens
taagcacggaatgta

SEQ ID NO: 1964838 - DNA, 15 bp, Homo sapiens
aagcacggaatgtat

SEQ ID NO: 1964839 - DNA, 15 bp, Homo sapiens
agcacggaatgtatt

SEQ ID NO: 1964840 - DNA, 15 bp, Homo sapiens
gcacggaatgtattt

SEQ ID NO: 1964841 - DNA, 15 bp, Homo sapiens
cacggaatgtatttc

SEQ ID NO: 1964842 - DNA, 15 bp, Homo sapiens
acggaatgtatttct

SEQ ID NO: 1964843 - DNA, 15 bp, Homo sapiens
cggaatgtatttctg

SEQ ID NO: 1964844 - DNA, 15 bp, Homo sapiens
ggaatgtatttctgt

SEQ ID NO: 1964845 - DNA, 15 bp, Homo sapiens
gaatgtatttctgtt

SEQ ID NO: 1964846 - DNA, 15 bp, Homo sapiens
aatgtatttctgttt

SEQ ID NO: 1964847 - DNA, 15 bp, Homo sapiens
atgtatttctgttta

SEQ ID NO: 1964848 - DNA, 15 bp, Homo sapiens
tgtatttctgtttat

SEQ ID NO: 1964849 - DNA, 15 bp, Homo sapiens
gtatttctgtttatg

SEQ ID NO: 1964850 - DNA, 15 bp, Homo sapiens
tatttctgtttatga

SEQ ID NO: 1964851 - DNA, 15 bp, Homo sapiens
atttctgtttatgat

SEQ ID NO: 1964852 - DNA, 15 bp, Homo sapiens
tttctgtttatgata

SEQ ID NO: 1964853 - DNA, 15 bp, Homo sapiens
ttctgtttatgatat

SEQ ID NO: 1964854 - DNA, 15 bp, Homo sapiens
tctgtttatgatatg

SEQ ID NO: 1964855 - DNA, 15 bp, Homo sapiens
ctgtttatgatatgg

SEQ ID NO: 1964856 - DNA, 15 bp, Homo sapiens
tgtttatgatatgga

SEQ ID NO: 1964857 - DNA, 15 bp, Homo sapiens
gtttatgatatggaa

SEQ ID NO: 1964858 - DNA, 15 bp, Homo sapiens
tttatgatatggaat

SEQ ID NO: 1964859 - DNA, 15 bp, Homo sapiens
ttatgatatggaatt

SEQ ID NO: 1964860 - DNA, 15 bp, Homo sapiens
tatgatatggaattc

SEQ ID NO: 1964861 - DNA, 15 bp, Homo sapiens
atgatatggaattca

SEQ ID NO: 1964862 - DNA, 15 bp, Homo sapiens
tgatatggaattcaa

SEQ ID NO: 1964863 - DNA, 15 bp, Homo sapiens
gatatggaattcaat

SEQ ID NO: 1964864 - DNA, 15 bp, Homo sapiens
atatggaattcaata

SEQ ID NO: 1964865 - DNA, 15 bp, Homo sapiens
tatggaattcaatac

SEQ ID NO: 1964866 - DNA, 15 bp, Homo sapiens
atggaattcaataca

SEQ ID NO: 1964867 - DNA, 15 bp, Homo sapiens
tggaattcaatacac

SEQ ID NO: 1964868 - DNA, 15 bp, Homo sapiens
ggaattcaatacacc

SEQ ID NO: 1964869 - DNA, 15 bp, Homo sapiens
gaattcaatacaccc

SEQ ID NO: 1964870 - DNA, 15 bp, Homo sapiens
aattcaatacacccc

SEQ ID NO: 1964871 - DNA, 15 bp, Homo sapiens
attcaatacacccct

SEQ ID NO: 1964872 - DNA, 15 bp, Homo sapiens
ttcaatacacccctt

SEQ ID NO: 1964873 - DNA, 15 bp, Homo sapiens
tcaatacaccccttc

SEQ ID NO: 1964874 - DNA, 15 bp, Homo sapiens
caatacaccccttca

SEQ ID NO: 1964875 - DNA, 15 bp, Homo sapiens
aatacaccccttcag

SEQ ID NO: 1964876 - DNA, 15 bp, Homo sapiens
atacaccccttcagt

SEQ ID NO: 1964877 - DNA, 15 bp, Homo sapiens
tacaccccttcagtg

SEQ ID NO: 1964878 - DNA, 15 bp, Homo sapiens
acaccccttcagtgg

SEQ ID NO: 1964879 - DNA, 15 bp, Homo sapiens
caccccttcagtggt

SEQ ID NO: 1964880 - DNA, 15 bp, Homo sapiens
accccttcagtggta

SEQ ID NO: 1964881 - DNA, 15 bp, Homo sapiens
ccccttcagtggtat

SEQ ID NO: 1964882 - DNA, 15 bp, Homo sapiens
cccttcagtggtata

SEQ ID NO: 1964883 - DNA, 15 bp, Homo sapiens
ccttcagtggtataa

SEQ ID NO: 1964884 - DNA, 15 bp, Homo sapiens
cttcagtggtataaa

SEQ ID NO: 1964885 - DNA, 15 bp, Homo sapiens
ttcagtggtataaag

SEQ ID NO: 1964886 - DNA, 15 bp, Homo sapiens
tcagtggtataaaga

SEQ ID NO: 1964887 - DNA, 15 bp, Homo sapiens
cagtggtataaagac

SEQ ID NO: 1964888 - DNA, 15 bp, Homo sapiens
agtggtataaagaca

SEQ ID NO: 1964889 - DNA, 15 bp, Homo sapiens
gtggtataaagacat

SEQ ID NO: 1964890 - DNA, 15 bp, Homo sapiens
tggtataaagacatt

SEQ ID NO: 1964891 - DNA, 15 bp, Homo sapiens
ggtataaagacattc

SEQ ID NO: 1964892 - DNA, 15 bp, Homo sapiens
gtataaagacattcc

SEQ ID NO: 1964893 - DNA, 15 bp, Homo sapiens
tataaagacattcct

SEQ ID NO: 1964894 - DNA, 15 bp, Homo sapiens
ataaagacattcctg

SEQ ID NO: 1964895 - DNA, 15 bp, Homo sapiens
taaagacattcctgg

SEQ ID NO: 1964896 - DNA, 15 bp, Homo sapiens
aaagacattcctgga

SEQ ID NO: 1964897 - DNA, 15 bp, Homo sapiens
aagacattcctggat

SEQ ID NO: 1964898 - DNA, 15 bp, Homo sapiens
agacattcctggatt

SEQ ID NO: 1964899 - DNA, 15 bp, Homo sapiens
gacattcctggattt

SEQ ID NO: 1964900 - DNA, 15 bp, Homo sapiens
acattcctggatttc

SEQ ID NO: 1964901 - DNA, 15 bp, Homo sapiens
cattcctggatttct

SEQ ID NO: 1964902 - DNA, 15 bp, Homo sapiens
attcctggatttctt

SEQ ID NO: 1964903 - DNA, 15 bp, Homo sapiens
ttcctggatttcttt

SEQ ID NO: 1964904 - DNA, 15 bp, Homo sapiens
tcctggatttcttta

SEQ ID NO: 1964905 - DNA, 15 bp, Homo sapiens
cctggatttctttag

SEQ ID NO: 1964906 - DNA, 15 bp, Homo sapiens
ctggatttctttagg

SEQ ID NO: 1964907 - DNA, 15 bp, Homo sapiens
tggatttctttagga

SEQ ID NO: 1964908 - DNA, 15 bp, Homo sapiens
ggatttctttaggat

SEQ ID NO: 1964909 - DNA, 15 bp, Homo sapiens
gatttctttaggata

SEQ ID NO: 1964910 - DNA, 15 bp, Homo sapiens
atttctttaggatag

SEQ ID NO: 1964911 - DNA, 15 bp, Homo sapiens
tttctttaggatagg

SEQ ID NO: 1964912 - DNA, 15 bp, Homo sapiens
ttctttaggataggg

SEQ ID NO: 1964913 - DNA, 15 bp, Homo sapiens
tctttaggatagggt

SEQ ID NO: 1964914 - DNA, 15 bp, Homo sapiens
ctttaggatagggtc

SEQ ID NO: 1964915 - DNA, 15 bp, Homo sapiens
tttaggatagggtca

SEQ ID NO: 1964916 - DNA, 15 bp, Homo sapiens
ttaggatagggtcag

SEQ ID NO: 1964917 - DNA, 15 bp, Homo sapiens
taggatagggtcaga

SEQ ID NO: 1964918 - DNA, 15 bp, Homo sapiens
aggatagggtcagag

SEQ ID NO: 1964919 - DNA, 15 bp, Homo sapiens
ggatagggtcagagt

SEQ ID NO: 1964920 - DNA, 15 bp, Homo sapiens
gatagggtcagagtt

SEQ ID NO: 1964921 - DNA, 15 bp, Homo sapiens
atagggtcagagttg

SEQ ID NO: 1964922 - DNA, 15 bp, Homo sapiens
tagggtcagagttgg

SEQ ID NO: 1964923 - DNA, 15 bp, Homo sapiens
agggtcagagttggt

SEQ ID NO: 1964924 - DNA, 15 bp, Homo sapiens
gggtcagagttggtt

SEQ ID NO: 1964925 - DNA, 15 bp, Homo sapiens
ggtcagagttggttt

SEQ ID NO: 1964926 - DNA, 15 bp, Homo sapiens
gtcagagttggttta

SEQ ID NO: 1964927 - DNA, 15 bp, Homo sapiens
tcagagttggtttac

SEQ ID NO: 1964928 - DNA, 15 bp, Homo sapiens
cagagttggtttact

SEQ ID NO: 1964929 - DNA, 15 bp, Homo sapiens
agagttggtttacta

SEQ ID NO: 1964930 - DNA, 15 bp, Homo sapiens
gagttggtttactat

SEQ ID NO: 1964931 - DNA, 15 bp, Homo sapiens
agttggtttactatc

SEQ ID NO: 1964932 - DNA, 15 bp, Homo sapiens
gttggtttactatct

SEQ ID NO: 1964933 - DNA, 15 bp, Homo sapiens
ttggtttactatctg

SEQ ID NO: 1964934 - DNA, 15 bp, Homo sapiens
tggtttactatctgg

SEQ ID NO: 1964935 - DNA, 15 bp, Homo sapiens
ggtttactatctggc

SEQ ID NO: 1964936 - DNA, 15 bp, Homo sapiens
gtttactatctggcc

SEQ ID NO: 1964937 - DNA, 15 bp, Homo sapiens
tactatctggccttc

SEQ ID NO: 1964938 - DNA, 15 bp, Homo sapiens
actatctggccttca

SEQ ID NO: 1964939 - DNA, 15 bp, Homo sapiens
ctatctggccttcag

SEQ ID NO: 1964940 - DNA, 15 bp, Homo sapiens
tatctggccttcagt

SEQ ID NO: 1964941 - DNA, 15 bp, Homo sapiens
atctggccttcagtt

SEQ ID NO: 1964942 - DNA, 15 bp, Homo sapiens
tctggccttcagttt

SEQ ID NO: 1964943 - DNA, 15 bp, Homo sapiens
ctggccttcagtttt

SEQ ID NO: 1964944 - DNA, 15 bp, Homo sapiens
tggccttcagttttt

SEQ ID NO: 1964945 - DNA, 15 bp, Homo sapiens
ggccttcagttttta

SEQ ID NO: 1964946 - DNA, 15 bp, Homo sapiens
gccttcagtttttaa

SEQ ID NO: 1964947 - DNA, 15 bp, Homo sapiens
ccttcagtttttaaa

SEQ ID NO: 1964948 - DNA, 15 bp, Homo sapiens
cttcagtttttaaaa

SEQ ID NO: 1964949 - DNA, 15 bp, Homo sapiens
ttcagtttttaaaag

SEQ ID NO: 1964950 - DNA, 15 bp, Homo sapiens
tcagtttttaaaagg

SEQ ID NO: 1964951 - DNA, 15 bp, Homo sapiens
cagtttttaaaaggg

SEQ ID NO: 1964952 - DNA, 15 bp, Homo sapiens
agtttttaaaagggg

SEQ ID NO: 1964953 - DNA, 15 bp, Homo sapiens
gtttttaaaaggggc

SEQ ID NO: 1964954 - DNA, 15 bp, Homo sapiens
tttttaaaaggggcg

SEQ ID NO: 1964955 - DNA, 15 bp, Homo sapiens
ttttaaaaggggcga

SEQ ID NO: 1964956 - DNA, 15 bp, Homo sapiens
tttaaaaggggcgat

SEQ ID NO: 1964957 - DNA, 15 bp, Homo sapiens
ttaaaaggggcgatt

SEQ ID NO: 1964958 - DNA, 15 bp, Homo sapiens
taaaaggggcgattc

SEQ ID NO: 1964959 - DNA, 15 bp, Homo sapiens
aaaaggggcgattct

SEQ ID NO: 1964960 - DNA, 15 bp, Homo sapiens
aaaggggcgattctt

SEQ ID NO: 1964961 - DNA, 15 bp, Homo sapiens
aaggggcgattcttt

SEQ ID NO: 1964962 - DNA, 15 bp, Homo sapiens
aggggcgattctttg

SEQ ID NO: 1964963 - DNA, 15 bp, Homo sapiens
ggggcgattctttga

SEQ ID NO: 1964964 - DNA, 15 bp, Homo sapiens
gggcgattctttgat

SEQ ID NO: 1964965 - DNA, 15 bp, Homo sapiens
ggcgattctttgata

SEQ ID NO: 1964966 - DNA, 15 bp, Homo sapiens
gcgattctttgatat

SEQ ID NO: 1964967 - DNA, 15 bp, Homo sapiens
cgattctttgatata

SEQ ID NO: 1964968 - DNA, 15 bp, Homo sapiens
gattctttgatatag

SEQ ID NO: 1964969 - DNA, 15 bp, Homo sapiens
attctttgatatagc

SEQ ID NO: 1964970 - DNA, 15 bp, Homo sapiens
ttctttgatatagca

SEQ ID NO: 1964971 - DNA, 15 bp, Homo sapiens
tctttgatatagcaa

SEQ ID NO: 1964972 - DNA, 15 bp, Homo sapiens
ctttgatatagcaat

SEQ ID NO: 1964973 - DNA, 15 bp, Homo sapiens
tttgatatagcaata

SEQ ID NO: 1964974 - DNA, 15 bp, Homo sapiens
ttgatatagcaatag

SEQ ID NO: 1964975 - DNA, 15 bp, Homo sapiens
tgatatagcaatagc

SEQ ID NO: 1964976 - DNA, 15 bp, Homo sapiens
gatatagcaatagcg

SEQ ID NO: 1964977 - DNA, 15 bp, Homo sapiens
atatagcaatagcgt

SEQ ID NO: 1964978 - DNA, 15 bp, Homo sapiens
tatagcaatagcgtc

SEQ ID NO: 1964979 - DNA, 15 bp, Homo sapiens
atagcaatagcgtca

SEQ ID NO: 1964980 - DNA, 15 bp, Homo sapiens
tagcaatagcgtcaa

SEQ ID NO: 1964981 - DNA, 15 bp, Homo sapiens
agcaatagcgtcaat

SEQ ID NO: 1964982 - DNA, 15 bp, Homo sapiens
gcaatagcgtcaatt

SEQ ID NO: 1964983 - DNA, 15 bp, Homo sapiens
caatagcgtcaattt

SEQ ID NO: 1964984 - DNA, 15 bp, Homo sapiens
aatagcgtcaatttt

SEQ ID NO: 1964985 - DNA, 15 bp, Homo sapiens
atagcgtcaattttt

SEQ ID NO: 1964986 - DNA, 15 bp, Homo sapiens
tagcgtcaatttttt

SEQ ID NO: 1964987 - DNA, 15 bp, Homo sapiens
agcgtcaattttttt

SEQ ID NO: 1964988 - DNA, 15 bp, Homo sapiens
gcgtcaatttttttt

SEQ ID NO: 1964989 - DNA, 15 bp, Homo sapiens
cgtcaattttttttt

SEQ ID NO: 1964990 - DNA, 15 bp, Homo sapiens
gtcaatttttttttt

SEQ ID NO: 1964991 - DNA, 15 bp, Homo sapiens
tcaattttttttttc

SEQ ID NO: 1964992 - DNA, 15 bp, Homo sapiens
caattttttttttct

SEQ ID NO: 1964993 - DNA, 15 bp, Homo sapiens
aattttttttttctt

SEQ ID NO: 1964994 - DNA, 15 bp, Homo sapiens
attttttttttcttt

SEQ ID NO: 1964995 - DNA, 15 bp, Homo sapiens
tttttttttctttta

SEQ ID NO: 1964996 - DNA, 15 bp, Homo sapiens
ttttttttcttttac

SEQ ID NO: 1964997 - DNA, 15 bp, Homo sapiens
tttttttcttttacc

SEQ ID NO: 1964998 - DNA, 15 bp, Homo sapiens
ttttttcttttacct

SEQ ID NO: 1964999 - DNA, 15 bp, Homo sapiens
tttttcttttacctt

SEQ ID NO: 1965000 - DNA, 15 bp, Homo sapiens
ttttcttttaccttt

SEQ ID NO: 1965001 - DNA, 15 bp, Homo sapiens
tttcttttaccttta

SEQ ID NO: 1965002 - DNA, 15 bp, Homo sapiens
ttcttttacctttac

SEQ ID NO: 1965003 - DNA, 15 bp, Homo sapiens
tcttttacctttaca

SEQ ID NO: 1965004 - DNA, 15 bp, Homo sapiens
cttttacctttacag

SEQ ID NO: 1965005 - DNA, 15 bp, Homo sapiens
ttttacctttacagg

SEQ ID NO: 1965006 - DNA, 15 bp, Homo sapiens
tttacctttacaggt

SEQ ID NO: 1965007 - DNA, 15 bp, Homo sapiens
ttacctttacaggtg

SEQ ID NO: 1965008 - DNA, 15 bp, Homo sapiens
tacctttacaggtga

SEQ ID NO: 1965009 - DNA, 15 bp, Homo sapiens
acctttacaggtgag

SEQ ID NO: 1965010 - DNA, 15 bp, Homo sapiens
cctttacaggtgaga

SEQ ID NO: 1965011 - DNA, 15 bp, Homo sapiens
ttacaggtgagaaac

SEQ ID NO: 1965012 - DNA, 15 bp, Homo sapiens
tacaggtgagaaacc

SEQ ID NO: 1965013 - DNA, 15 bp, Homo sapiens
acaggtgagaaacct

SEQ ID NO: 1965014 - DNA, 15 bp, Homo sapiens
caggtgagaaacctt

SEQ ID NO: 1965015 - DNA, 15 bp, Homo sapiens
aggtgagaaacctta

SEQ ID NO: 1965016 - DNA, 15 bp, Homo sapiens
ggtgagaaaccttac

SEQ ID NO: 1965017 - DNA, 15 bp, Homo sapiens
gtgagaaaccttacc

SEQ ID NO: 1965018 - DNA, 15 bp, Homo sapiens
tgagaaaccttacca

SEQ ID NO: 1965019 - DNA, 15 bp, Homo sapiens
gagaaaccttaccac

SEQ ID NO: 1965020 - DNA, 15 bp, Homo sapiens
agaaaccttaccact

SEQ ID NO: 1965021 - DNA, 15 bp, Homo sapiens
gaaaccttaccactg

SEQ ID NO: 1965022 - DNA, 15 bp, Homo sapiens
aaaccttaccactgt

SEQ ID NO: 1965023 - DNA, 15 bp, Homo sapiens
aaccttaccactgtg

SEQ ID NO: 1965024 - DNA, 15 bp, Homo sapiens
accttaccactgtga

SEQ ID NO: 1965025 - DNA, 15 bp, Homo sapiens
ccttaccactgtgac

SEQ ID NO: 1965026 - DNA, 15 bp, Homo sapiens
cttaccactgtgact

SEQ ID NO: 1965027 - DNA, 15 bp, Homo sapiens
ttaccactgtgactg

SEQ ID NO: 1965028 - DNA, 15 bp, Homo sapiens
taccactgtgactgg

SEQ ID NO: 1965029 - DNA, 15 bp, Homo sapiens
accactgtgactggg

SEQ ID NO: 1965030 - DNA, 15 bp, Homo sapiens
ccactgtgactggga

SEQ ID NO: 1965031 - DNA, 15 bp, Homo sapiens
cactgtgactgggac

SEQ ID NO: 1965032 - DNA, 15 bp, Homo sapiens
actgtgactgggacg

SEQ ID NO: 1965033 - DNA, 15 bp, Homo sapiens
ctgtgactgggacgg

SEQ ID NO: 1965034 - DNA, 15 bp, Homo sapiens
tgtgactgggacggc

SEQ ID NO: 1965035 - DNA, 15 bp, Homo sapiens
gtgactgggacggct

SEQ ID NO: 1965036 - DNA, 15 bp, Homo sapiens
tgactgggacggctg

SEQ ID NO: 1965037 - DNA, 15 bp, Homo sapiens
gactgggacggctgt

SEQ ID NO: 1965038 - DNA, 15 bp, Homo sapiens
actgggacggctgtg

SEQ ID NO: 1965039 - DNA, 15 bp, Homo sapiens
ctgggacggctgtgg

SEQ ID NO: 1965040 - DNA, 15 bp, Homo sapiens
tgggacggctgtgga

SEQ ID NO: 1965041 - DNA, 15 bp, Homo sapiens
gggacggctgtggat

SEQ ID NO: 1965042 - DNA, 15 bp, Homo sapiens
ggacggctgtggatg

SEQ ID NO: 1965043 - DNA, 15 bp, Homo sapiens
gacggctgtggatgg

SEQ ID NO: 1965044 - DNA, 15 bp, Homo sapiens
acggctgtggatgga

SEQ ID NO: 1965045 - DNA, 15 bp, Homo sapiens
cggctgtggatggaa

SEQ ID NO: 1965046 - DNA, 15 bp, Homo sapiens
ggctgtggatggaaa

SEQ ID NO: 1965047 - DNA, 15 bp, Homo sapiens
gctgtggatggaaat

SEQ ID NO: 1965048 - DNA, 15 bp, Homo sapiens
ctgtggatggaaatt

SEQ ID NO: 1965049 - DNA, 15 bp, Homo sapiens
tgtggatggaaattc

SEQ ID NO: 1965050 - DNA, 15 bp, Homo sapiens
gtggatggaaattcg

SEQ ID NO: 1965051 - DNA, 15 bp, Homo sapiens
tggatggaaattcgc

SEQ ID NO: 1965052 - DNA, 15 bp, Homo sapiens
ggatggaaattcgcc

SEQ ID NO: 1965053 - DNA, 15 bp, Homo sapiens
gatggaaattcgccc

SEQ ID NO: 1965054 - DNA, 15 bp, Homo sapiens
atggaaattcgcccg

SEQ ID NO: 1965055 - DNA, 15 bp, Homo sapiens
tggaaattcgcccgc

SEQ ID NO: 1965056 - DNA, 15 bp, Homo sapiens
ggaaattcgcccgct

SEQ ID NO: 1965057 - DNA, 15 bp, Homo sapiens
gaaattcgcccgctc

SEQ ID NO: 1965058 - DNA, 15 bp, Homo sapiens
aaattcgcccgctca

SEQ ID NO: 1965059 - DNA, 15 bp, Homo sapiens
aattcgcccgctcag

SEQ ID NO: 1965060 - DNA, 15 bp, Homo sapiens
attcgcccgctcaga

SEQ ID NO: 1965061 - DNA, 15 bp, Homo sapiens
ttcgcccgctcagat

SEQ ID NO: 1965062 - DNA, 15 bp, Homo sapiens
tcgcccgctcagatg

SEQ ID NO: 1965063 - DNA, 15 bp, Homo sapiens
cgcccgctcagatga

SEQ ID NO: 1965064 - DNA, 15 bp, Homo sapiens
gcccgctcagatgaa

SEQ ID NO: 1965065 - DNA, 15 bp, Homo sapiens
cccgctcagatgaac

SEQ ID NO: 1965066 - DNA, 15 bp, Homo sapiens
ccgctcagatgaact

SEQ ID NO: 1965067 - DNA, 15 bp, Homo sapiens
cgctcagatgaactg

SEQ ID NO: 1965068 - DNA, 15 bp, Homo sapiens
gctcagatgaactga

SEQ ID NO: 1965069 - DNA, 15 bp, Homo sapiens
ctcagatgaactgac

SEQ ID NO: 1965070 - DNA, 15 bp, Homo sapiens
tcagatgaactgacc

SEQ ID NO: 1965071 - DNA, 15 bp, Homo sapiens
cagatgaactgacca

SEQ ID NO: 1965072 - DNA, 15 bp, Homo sapiens
agatgaactgaccag

SEQ ID NO: 1965073 - DNA, 15 bp, Homo sapiens
gatgaactgaccagg

SEQ ID NO: 1965074 - DNA, 15 bp, Homo sapiens
atgaactgaccaggc

SEQ ID NO: 1965075 - DNA, 15 bp, Homo sapiens
tgaactgaccaggca

SEQ ID NO: 1965076 - DNA, 15 bp, Homo sapiens
gaactgaccaggcac

SEQ ID NO: 1965077 - DNA, 15 bp, Homo sapiens
aactgaccaggcact

SEQ ID NO: 1965078 - DNA, 15 bp, Homo sapiens
actgaccaggcacta

SEQ ID NO: 1965079 - DNA, 15 bp, Homo sapiens
ctgaccaggcactac

SEQ ID NO: 1965080 - DNA, 15 bp, Homo sapiens
tgaccaggcactacc

SEQ ID NO: 1965081 - DNA, 15 bp, Homo sapiens
gaccaggcactaccg

SEQ ID NO: 1965082 - DNA, 15 bp, Homo sapiens
accaggcactaccgt

SEQ ID NO: 1965083 - DNA, 15 bp, Homo sapiens
ccaggcactaccgta

SEQ ID NO: 1965084 - DNA, 15 bp, Homo sapiens
caggcactaccgtaa

SEQ ID NO: 1965085 - DNA, 15 bp, Homo sapiens
aggcactaccgtaaa

SEQ ID NO: 1965086 - DNA, 15 bp, Homo sapiens
ggcactaccgtaaac

SEQ ID NO: 1965087 - DNA, 15 bp, Homo sapiens
gcactaccgtaaaca

SEQ ID NO: 1965088 - DNA, 15 bp, Homo sapiens
cactaccgtaaacac

SEQ ID NO: 1965089 - DNA, 15 bp, Homo sapiens
actaccgtaaacaca

SEQ ID NO: 1965090 - DNA, 15 bp, Homo sapiens
ctaccgtaaacacac

SEQ ID NO: 1965091 - DNA, 15 bp, Homo sapiens
taccgtaaacacacg

SEQ ID NO: 1965092 - DNA, 15 bp, Homo sapiens
accgtaaacacacgg

SEQ ID NO: 1965093 - DNA, 15 bp, Homo sapiens
ccgtaaacacacggg

SEQ ID NO: 1965094 - DNA, 15 bp, Homo sapiens
cgtaaacacacgggg

SEQ ID NO: 1965095 - DNA, 15 bp, Homo sapiens
gtaaacacacggggc

SEQ ID NO: 1965096 - DNA, 15 bp, Homo sapiens
taaacacacggggca

SEQ ID NO: 1965097 - DNA, 15 bp, Homo sapiens
aaacacacggggcac

SEQ ID NO: 1965098 - DNA, 15 bp, Homo sapiens
aacacacggggcacc

SEQ ID NO: 1965099 - DNA, 15 bp, Homo sapiens
acacacggggcaccg

SEQ ID NO: 1965100 - DNA, 15 bp, Homo sapiens
cacacggggcaccgc

SEQ ID NO: 1965101 - DNA, 15 bp, Homo sapiens
acacggggcaccgcc

SEQ ID NO: 1965102 - DNA, 15 bp, Homo sapiens
cacggggcaccgccc

SEQ ID NO: 1965103 - DNA, 15 bp, Homo sapiens
acggggcaccgcccg

SEQ ID NO: 1965104 - DNA, 15 bp, Homo sapiens
cggggcaccgcccgt

SEQ ID NO: 1965105 - DNA, 15 bp, Homo sapiens
ggggcaccgcccgtt

SEQ ID NO: 1965106 - DNA, 15 bp, Homo sapiens
gggcaccgcccgttc

SEQ ID NO: 1965107 - DNA, 15 bp, Homo sapiens
ggcaccgcccgttcc

SEQ ID NO: 1965108 - DNA, 15 bp, Homo sapiens
gcaccgcccgttcca

SEQ ID NO: 1965109 - DNA, 15 bp, Homo sapiens
caccgcccgttccag

SEQ ID NO: 1965110 - DNA, 15 bp, Homo sapiens
accgcccgttccagt

SEQ ID NO: 1965111 - DNA, 15 bp, Homo sapiens
ccgcccgttccagtg

SEQ ID NO: 1965112 - DNA, 15 bp, Homo sapiens
cgcccgttccagtgc

SEQ ID NO: 1965113 - DNA, 15 bp, Homo sapiens
gcccgttccagtgcc

SEQ ID NO: 1965114 - DNA, 15 bp, Homo sapiens
cccgttccagtgcca

SEQ ID NO: 1965115 - DNA, 15 bp, Homo sapiens
ccgttccagtgccaa

SEQ ID NO: 1965116 - DNA, 15 bp, Homo sapiens
cgttccagtgccaaa

SEQ ID NO: 1965117 - DNA, 15 bp, Homo sapiens
gttccagtgccaaaa

SEQ ID NO: 1965118 - DNA, 15 bp, Homo sapiens
ttccagtgccaaaaa

SEQ ID NO: 1965119 - DNA, 15 bp, Homo sapiens
tccagtgccaaaaat

SEQ ID NO: 1965120 - DNA, 15 bp, Homo sapiens
ccagtgccaaaaatg

SEQ ID NO: 1965121 - DNA, 15 bp, Homo sapiens
cagtgccaaaaatgc

SEQ ID NO: 1965122 - DNA, 15 bp, Homo sapiens
agtgccaaaaatgcg

SEQ ID NO: 1965123 - DNA, 15 bp, Homo sapiens
gtgccaaaaatgcga

SEQ ID NO: 1965124 - DNA, 15 bp, Homo sapiens
tgccaaaaatgcgac

SEQ ID NO: 1965125 - DNA, 15 bp, Homo sapiens
gccaaaaatgcgacc

SEQ ID NO: 1965126 - DNA, 15 bp, Homo sapiens
ccaaaaatgcgaccg

SEQ ID NO: 1965127 - DNA, 15 bp, Homo sapiens
caaaaatgcgaccga

SEQ ID NO: 1965128 - DNA, 15 bp, Homo sapiens
aaaaatgcgaccgag

SEQ ID NO: 1965129 - DNA, 15 bp, Homo sapiens
aaaatgcgaccgagc

SEQ ID NO: 1965130 - DNA, 15 bp, Homo sapiens
aaatgcgaccgagca

SEQ ID NO: 1965131 - DNA, 15 bp, Homo sapiens
aatgcgaccgagcat

SEQ ID NO: 1965132 - DNA, 15 bp, Homo sapiens
atgcgaccgagcatt

SEQ ID NO: 1965133 - DNA, 15 bp, Homo sapiens
tgcgaccgagcattt

SEQ ID NO: 1965134 - DNA, 15 bp, Homo sapiens
gcgaccgagcatttt

SEQ ID NO: 1965135 - DNA, 15 bp, Homo sapiens
cgaccgagcattttc

SEQ ID NO: 1965136 - DNA, 15 bp, Homo sapiens
gaccgagcattttcc

SEQ ID NO: 1965137 - DNA, 15 bp, Homo sapiens
accgagcattttcca

SEQ ID NO: 1965138 - DNA, 15 bp, Homo sapiens
ccgagcattttccag

SEQ ID NO: 1965139 - DNA, 15 bp, Homo sapiens
cgagcattttccagg

SEQ ID NO: 1965140 - DNA, 15 bp, Homo sapiens
gagcattttccaggt

SEQ ID NO: 1965141 - DNA, 15 bp, Homo sapiens
agcattttccaggtc

SEQ ID NO: 1965142 - DNA, 15 bp, Homo sapiens
gcattttccaggtcg

SEQ ID NO: 1965143 - DNA, 15 bp, Homo sapiens
cattttccaggtcgg

SEQ ID NO: 1965144 - DNA, 15 bp, Homo sapiens
attttccaggtcgga

SEQ ID NO: 1965145 - DNA, 15 bp, Homo sapiens
ttttccaggtcggac

SEQ ID NO: 1965146 - DNA, 15 bp, Homo sapiens
tttccaggtcggacc

SEQ ID NO: 1965147 - DNA, 15 bp, Homo sapiens
ttccaggtcggacca

SEQ ID NO: 1965148 - DNA, 15 bp, Homo sapiens
tccaggtcggaccac

SEQ ID NO: 1965149 - DNA, 15 bp, Homo sapiens
ccaggtcggaccacc

SEQ ID NO: 1965150 - DNA, 15 bp, Homo sapiens
caggtcggaccacct

SEQ ID NO: 1965151 - DNA, 15 bp, Homo sapiens
aggtcggaccacctc

SEQ ID NO: 1965152 - DNA, 15 bp, Homo sapiens
ggtcggaccacctcg

SEQ ID NO: 1965153 - DNA, 15 bp, Homo sapiens
gtcggaccacctcgc

SEQ ID NO: 1965154 - DNA, 15 bp, Homo sapiens
tcggaccacctcgcc

SEQ ID NO: 1965155 - DNA, 15 bp, Homo sapiens
cggaccacctcgcct

SEQ ID NO: 1965156 - DNA, 15 bp, Homo sapiens
ggaccacctcgcctt

SEQ ID NO: 1965157 - DNA, 15 bp, Homo sapiens
gaccacctcgcctta

SEQ ID NO: 1965158 - DNA, 15 bp, Homo sapiens
accacctcgccttac

SEQ ID NO: 1965159 - DNA, 15 bp, Homo sapiens
ccacctcgccttaca

SEQ ID NO: 1965160 - DNA, 15 bp, Homo sapiens
cacctcgccttacac

SEQ ID NO: 1965161 - DNA, 15 bp, Homo sapiens
acctcgccttacaca

SEQ ID NO: 1965162 - DNA, 15 bp, Homo sapiens
cctcgccttacacat

SEQ ID NO: 1965163 - DNA, 15 bp, Homo sapiens
ctcgccttacacatg

SEQ ID NO: 1965164 - DNA, 15 bp, Homo sapiens
tcgccttacacatga

SEQ ID NO: 1965165 - DNA, 15 bp, Homo sapiens
cgccttacacatgaa

SEQ ID NO: 1965166 - DNA, 15 bp, Homo sapiens
gccttacacatgaag

SEQ ID NO: 1965167 - DNA, 15 bp, Homo sapiens
ccttacacatgaaga

SEQ ID NO: 1965168 - DNA, 15 bp, Homo sapiens
cttacacatgaagag

SEQ ID NO: 1965169 - DNA, 15 bp, Homo sapiens
ttacacatgaagagg

SEQ ID NO: 1965170 - DNA, 15 bp, Homo sapiens
tacacatgaagaggc

SEQ ID NO: 1965171 - DNA, 15 bp, Homo sapiens
acacatgaagaggca

SEQ ID NO: 1965172 - DNA, 15 bp, Homo sapiens
cacatgaagaggcat

SEQ ID NO: 1965173 - DNA, 15 bp, Homo sapiens
acatgaagaggcatt

SEQ ID NO: 1965174 - DNA, 15 bp, Homo sapiens
catgaagaggcattt

SEQ ID NO: 1965175 - DNA, 15 bp, Homo sapiens
atgaagaggcatttt

SEQ ID NO: 1965176 - DNA, 15 bp, Homo sapiens
tgaagaggcattttt

SEQ ID NO: 1965177 - DNA, 15 bp, Homo sapiens
gaagaggcattttta

SEQ ID NO: 1965178 - DNA, 15 bp, Homo sapiens
aagaggcatttttaa

SEQ ID NO: 1965179 - DNA, 15 bp, Homo sapiens
agaggcatttttaaa

SEQ ID NO: 1965180 - DNA, 15 bp, Homo sapiens
gaggcatttttaaat

SEQ ID NO: 1965181 - DNA, 15 bp, Homo sapiens
aggcatttttaaatc

SEQ ID NO: 1965182 - DNA, 15 bp, Homo sapiens
ggcatttttaaatcc

SEQ ID NO: 1965183 - DNA, 15 bp, Homo sapiens
gcatttttaaatccc

SEQ ID NO: 1965184 - DNA, 15 bp, Homo sapiens
catttttaaatccca

SEQ ID NO: 1965185 - DNA, 15 bp, Homo sapiens
atttttaaatcccag

SEQ ID NO: 1965186 - DNA, 15 bp, Homo sapiens
tttttaaatcccaga

SEQ ID NO: 1965187 - DNA, 15 bp, Homo sapiens
ttttaaatcccagac

SEQ ID NO: 1965188 - DNA, 15 bp, Homo sapiens
tttaaatcccagaca

SEQ ID NO: 1965189 - DNA, 15 bp, Homo sapiens
ttaaatcccagacag

SEQ ID NO: 1965190 - DNA, 15 bp, Homo sapiens
taaatcccagacagt

SEQ ID NO: 1965191 - DNA, 15 bp, Homo sapiens
aaatcccagacagtg

SEQ ID NO: 1965192 - DNA, 15 bp, Homo sapiens
aatcccagacagtgg

SEQ ID NO: 1965193 - DNA, 15 bp, Homo sapiens
atcccagacagtgga

SEQ ID NO: 1965194 - DNA, 15 bp, Homo sapiens
tcccagacagtggat

SEQ ID NO: 1965195 - DNA, 15 bp, Homo sapiens
cccagacagtggata

SEQ ID NO: 1965196 - DNA, 15 bp, Homo sapiens
ccagacagtggatat

SEQ ID NO: 1965197 - DNA, 15 bp, Homo sapiens
cagacagtggatatg

SEQ ID NO: 1965198 - DNA, 15 bp, Homo sapiens
agacagtggatatga

SEQ ID NO: 1965199 - DNA, 15 bp, Homo sapiens
gacagtggatatgac

SEQ ID NO: 1965200 - DNA, 15 bp, Homo sapiens
acagtggatatgacc

SEQ ID NO: 1965201 - DNA, 15 bp, Homo sapiens
cagtggatatgaccc

SEQ ID NO: 1965202 - DNA, 15 bp, Homo sapiens
agtggatatgaccca

SEQ ID NO: 1965203 - DNA, 15 bp, Homo sapiens
gtggatatgacccac

SEQ ID NO: 1965204 - DNA, 15 bp, Homo sapiens
tggatatgacccaca

SEQ ID NO: 1965205 - DNA, 15 bp, Homo sapiens
ggatatgacccacac

SEQ ID NO: 1965206 - DNA, 15 bp, Homo sapiens
gatatgacccacact

SEQ ID NO: 1965207 - DNA, 15 bp, Homo sapiens
atatgacccacactg

SEQ ID NO: 1965208 - DNA, 15 bp, Homo sapiens
tatgacccacactgc

SEQ ID NO: 1965209 - DNA, 15 bp, Homo sapiens
atgacccacactgcc

SEQ ID NO: 1965210 - DNA, 15 bp, Homo sapiens
tgacccacactgcca

SEQ ID NO: 1965211 - DNA, 15 bp, Homo sapiens
gacccacactgccag

SEQ ID NO: 1965212 - DNA, 15 bp, Homo sapiens
acccacactgccaga

SEQ ID NO: 1965213 - DNA, 15 bp, Homo sapiens
cccacactgccagaa

SEQ ID NO: 1965214 - DNA, 15 bp, Homo sapiens
ccacactgccagaag

SEQ ID NO: 1965215 - DNA, 15 bp, Homo sapiens
cacactgccagaaga

SEQ ID NO: 1965216 - DNA, 15 bp, Homo sapiens
acactgccagaagag

SEQ ID NO: 1965217 - DNA, 15 bp, Homo sapiens
cactgccagaagaga

SEQ ID NO: 1965218 - DNA, 15 bp, Homo sapiens
actgccagaagagaa

SEQ ID NO: 1965219 - DNA, 15 bp, Homo sapiens
ctgccagaagagaat

SEQ ID NO: 1965220 - DNA, 15 bp, Homo sapiens
tgccagaagagaatt

SEQ ID NO: 1965221 - DNA, 15 bp, Homo sapiens
gccagaagagaattc

SEQ ID NO: 1965222 - DNA, 15 bp, Homo sapiens
ccagaagagaattca

SEQ ID NO: 1965223 - DNA, 15 bp, Homo sapiens
cagaagagaattcag

SEQ ID NO: 1965224 - DNA, 15 bp, Homo sapiens
agaagagaattcagt

SEQ ID NO: 1965225 - DNA, 15 bp, Homo sapiens
gaagagaattcagta

SEQ ID NO: 1965226 - DNA, 15 bp, Homo sapiens
aagagaattcagtat

SEQ ID NO: 1965227 - DNA, 15 bp, Homo sapiens
agagaattcagtatt

SEQ ID NO: 1965228 - DNA, 15 bp, Homo sapiens
gagaattcagtattt

SEQ ID NO: 1965229 - DNA, 15 bp, Homo sapiens
agaattcagtatttt

SEQ ID NO: 1965230 - DNA, 15 bp, Homo sapiens
gaattcagtattttt

SEQ ID NO: 1965231 - DNA, 15 bp, Homo sapiens
aattcagtatttttt

SEQ ID NO: 1965232 - DNA, 15 bp, Homo sapiens
attcagtatttttta

SEQ ID NO: 1965233 - DNA, 15 bp, Homo sapiens
ttcagtattttttac

SEQ ID NO: 1965234 - DNA, 15 bp, Homo sapiens
tcagtattttttact

SEQ ID NO: 1965235 - DNA, 15 bp, Homo sapiens
cagtattttttactt

SEQ ID NO: 1965236 - DNA, 15 bp, Homo sapiens
agtattttttacttt

SEQ ID NO: 1965237 - DNA, 15 bp, Homo sapiens
gtattttttactttt

SEQ ID NO: 1965238 - DNA, 15 bp, Homo sapiens
tattttttacttttc

SEQ ID NO: 1965239 - DNA, 15 bp, Homo sapiens
attttttacttttca

SEQ ID NO: 1965240 - DNA, 15 bp, Homo sapiens
ttttttacttttcac

SEQ ID NO: 1965241 - DNA, 15 bp, Homo sapiens
tttttacttttcaca

SEQ ID NO: 1965242 - DNA, 15 bp, Homo sapiens
ttttacttttcacac

SEQ ID NO: 1965243 - DNA, 15 bp, Homo sapiens
tttacttttcacact

SEQ ID NO: 1965244 - DNA, 15 bp, Homo sapiens
ttacttttcacactg

SEQ ID NO: 1965245 - DNA, 15 bp, Homo sapiens
tacttttcacactgt

SEQ ID NO: 1965246 - DNA, 15 bp, Homo sapiens
acttttcacactgtc

SEQ ID NO: 1965247 - DNA, 15 bp, Homo sapiens
cttttcacactgtct

SEQ ID NO: 1965248 - DNA, 15 bp, Homo sapiens
ttttcacactgtctt

SEQ ID NO: 1965249 - DNA, 15 bp, Homo sapiens
tttcacactgtcttc

SEQ ID NO: 1965250 - DNA, 15 bp, Homo sapiens
ttcacactgtcttcc

SEQ ID NO: 1965251 - DNA, 15 bp, Homo sapiens
tcacactgtcttccc

SEQ ID NO: 1965252 - DNA, 15 bp, Homo sapiens
cacactgtcttcccg

SEQ ID NO: 1965253 - DNA, 15 bp, Homo sapiens
acactgtcttcccga

SEQ ID NO: 1965254 - DNA, 15 bp, Homo sapiens
cactgtcttcccgat

SEQ ID NO: 1965255 - DNA, 15 bp, Homo sapiens
actgtcttcccgatg

SEQ ID NO: 1965256 - DNA, 15 bp, Homo sapiens
ctgtcttcccgatga

SEQ ID NO: 1965257 - DNA, 15 bp, Homo sapiens
tgtcttcccgatgag

SEQ ID NO: 1965258 - DNA, 15 bp, Homo sapiens
gtcttcccgatgagg

SEQ ID NO: 1965259 - DNA, 15 bp, Homo sapiens
tcttcccgatgaggg

SEQ ID NO: 1965260 - DNA, 15 bp, Homo sapiens
cttcccgatgaggga

SEQ ID NO: 1965261 - DNA, 15 bp, Homo sapiens
ttcccgatgagggaa

SEQ ID NO: 1965262 - DNA, 15 bp, Homo sapiens
tcccgatgagggaag

SEQ ID NO: 1965263 - DNA, 15 bp, Homo sapiens
cccgatgagggaagg

SEQ ID NO: 1965264 - DNA, 15 bp, Homo sapiens
ccgatgagggaagga

SEQ ID NO: 1965265 - DNA, 15 bp, Homo sapiens
cgatgagggaaggag

SEQ ID NO: 1965266 - DNA, 15 bp, Homo sapiens
gatgagggaaggagc

SEQ ID NO: 1965267 - DNA, 15 bp, Homo sapiens
atgagggaaggagcc

SEQ ID NO: 1965268 - DNA, 15 bp, Homo sapiens
tgagggaaggagccc

SEQ ID NO: 1965269 - DNA, 15 bp, Homo sapiens
gagggaaggagccca

SEQ ID NO: 1965270 - DNA, 15 bp, Homo sapiens
agggaaggagcccag

SEQ ID NO: 1965271 - DNA, 15 bp, Homo sapiens
gggaaggagcccagc

SEQ ID NO: 1965272 - DNA, 15 bp, Homo sapiens
ggaaggagcccagcc

SEQ ID NO: 1965273 - DNA, 15 bp, Homo sapiens
gaaggagcccagcca

SEQ ID NO: 1965274 - DNA, 15 bp, Homo sapiens
aaggagcccagccag

SEQ ID NO: 1965275 - DNA, 15 bp, Homo sapiens
aggagcccagccaga

SEQ ID NO: 1965276 - DNA, 15 bp, Homo sapiens
ggagcccagccagaa

SEQ ID NO: 1965277 - DNA, 15 bp, Homo sapiens
gagcccagccagaaa

SEQ ID NO: 1965278 - DNA, 15 bp, Homo sapiens
agcccagccagaaag

SEQ ID NO: 1965279 - DNA, 15 bp, Homo sapiens
gcccagccagaaagc

SEQ ID NO: 1965280 - DNA, 15 bp, Homo sapiens
cccagccagaaagca

SEQ ID NO: 1965281 - DNA, 15 bp, Homo sapiens
ccagccagaaagcac

SEQ ID NO: 1965282 - DNA, 15 bp, Homo sapiens
cagccagaaagcact

SEQ ID NO: 1965283 - DNA, 15 bp, Homo sapiens
agccagaaagcacta

SEQ ID NO: 1965284 - DNA, 15 bp, Homo sapiens
gccagaaagcactac

SEQ ID NO: 1965285 - DNA, 15 bp, Homo sapiens
ccagaaagcactaca

SEQ ID NO: 1965286 - DNA, 15 bp, Homo sapiens
cagaaagcactacaa

SEQ ID NO: 1965287 - DNA, 15 bp, Homo sapiens
agaaagcactacaat

SEQ ID NO: 1965288 - DNA, 15 bp, Homo sapiens
gaaagcactacaatc

SEQ ID NO: 1965289 - DNA, 15 bp, Homo sapiens
aaagcactacaatca

SEQ ID NO: 1965290 - DNA, 15 bp, Homo sapiens
aagcactacaatcat

SEQ ID NO: 1965291 - DNA, 15 bp, Homo sapiens
agcactacaatcatg

SEQ ID NO: 1965292 - DNA, 15 bp, Homo sapiens
gcactacaatcatgg

SEQ ID NO: 1965293 - DNA, 15 bp, Homo sapiens
cactacaatcatggt

SEQ ID NO: 1965294 - DNA, 15 bp, Homo sapiens
actacaatcatggtc

SEQ ID NO: 1965295 - DNA, 15 bp, Homo sapiens
ctacaatcatggtca

SEQ ID NO: 1965296 - DNA, 15 bp, Homo sapiens
tacaatcatggtcaa

SEQ ID NO: 1965297 - DNA, 15 bp, Homo sapiens
acaatcatggtcaag

SEQ ID NO: 1965298 - DNA, 15 bp, Homo sapiens
caatcatggtcaagt

SEQ ID NO: 1965299 - DNA, 15 bp, Homo sapiens
aatcatggtcaagtt

SEQ ID NO: 1965300 - DNA, 15 bp, Homo sapiens
atcatggtcaagttc

SEQ ID NO: 1965301 - DNA, 15 bp, Homo sapiens
tcatggtcaagttcc

SEQ ID NO: 1965302 - DNA, 15 bp, Homo sapiens
catggtcaagttccc

SEQ ID NO: 1965303 - DNA, 15 bp, Homo sapiens
atggtcaagttccca

SEQ ID NO: 1965304 - DNA, 15 bp, Homo sapiens
tggtcaagttcccaa

SEQ ID NO: 1965305 - DNA, 15 bp, Homo sapiens
ggtcaagttcccaac

SEQ ID NO: 1965306 - DNA, 15 bp, Homo sapiens
gtcaagttcccaact

SEQ ID NO: 1965307 - DNA, 15 bp, Homo sapiens
tcaagttcccaactg

SEQ ID NO: 1965308 - DNA, 15 bp, Homo sapiens
caagttcccaactga

SEQ ID NO: 1965309 - DNA, 15 bp, Homo sapiens
aagttcccaactgag

SEQ ID NO: 1965310 - DNA, 15 bp, Homo sapiens
agttcccaactgagt

SEQ ID NO: 1965311 - DNA, 15 bp, Homo sapiens
gttcccaactgagtc

SEQ ID NO: 1965312 - DNA, 15 bp, Homo sapiens
ttcccaactgagtca

SEQ ID NO: 1965313 - DNA, 15 bp, Homo sapiens
tcccaactgagtcat

SEQ ID NO: 1965314 - DNA, 15 bp, Homo sapiens
cccaactgagtcatc

SEQ ID NO: 1965315 - DNA, 15 bp, Homo sapiens
ccaactgagtcatct

SEQ ID NO: 1965316 - DNA, 15 bp, Homo sapiens
caactgagtcatctt

SEQ ID NO: 1965317 - DNA, 15 bp, Homo sapiens
aactgagtcatcttg

SEQ ID NO: 1965318 - DNA, 15 bp, Homo sapiens
actgagtcatcttgt

SEQ ID NO: 1965319 - DNA, 15 bp, Homo sapiens
ctgagtcatcttgtg

SEQ ID NO: 1965320 - DNA, 15 bp, Homo sapiens
tgagtcatcttgtga

SEQ ID NO: 1965321 - DNA, 15 bp, Homo sapiens
gagtcatcttgtgag

SEQ ID NO: 1965322 - DNA, 15 bp, Homo sapiens
agtcatcttgtgagt

SEQ ID NO: 1965323 - DNA, 15 bp, Homo sapiens
gtcatcttgtgagtg

SEQ ID NO: 1965324 - DNA, 15 bp, Homo sapiens
tcatcttgtgagtgg

SEQ ID NO: 1965325 - DNA, 15 bp, Homo sapiens
catcttgtgagtgga

SEQ ID NO: 1965326 - DNA, 15 bp, Homo sapiens
atcttgtgagtggat

SEQ ID NO: 1965327 - DNA, 15 bp, Homo sapiens
tcttgtgagtggata

SEQ ID NO: 1965328 - DNA, 15 bp, Homo sapiens
cttgtgagtggataa

SEQ ID NO: 1965329 - DNA, 15 bp, Homo sapiens
ttgtgagtggataat

SEQ ID NO: 1965330 - DNA, 15 bp, Homo sapiens
tgtgagtggataatc

SEQ ID NO: 1965331 - DNA, 15 bp, Homo sapiens
gtgagtggataatca

SEQ ID NO: 1965332 - DNA, 15 bp, Homo sapiens
tgagtggataatcag

SEQ ID NO: 1965333 - DNA, 15 bp, Homo sapiens
gagtggataatcagg

SEQ ID NO: 1965334 - DNA, 15 bp, Homo sapiens
agtggataatcagga

SEQ ID NO: 1965335 - DNA, 15 bp, Homo sapiens
gtggataatcaggaa

SEQ ID NO: 1965336 - DNA, 15 bp, Homo sapiens
tggataatcaggaaa

SEQ ID NO: 1965337 - DNA, 15 bp, Homo sapiens
ggataatcaggaaaa

SEQ ID NO: 1965338 - DNA, 15 bp, Homo sapiens
gataatcaggaaaaa

SEQ ID NO: 1965339 - DNA, 15 bp, Homo sapiens
ataatcaggaaaaat

SEQ ID NO: 1965340 - DNA, 15 bp, Homo sapiens
taatcaggaaaaatg

SEQ ID NO: 1965341 - DNA, 15 bp, Homo sapiens
aatcaggaaaaatga

SEQ ID NO: 1965342 - DNA, 15 bp, Homo sapiens
atcaggaaaaatgag

SEQ ID NO: 1965343 - DNA, 15 bp, Homo sapiens
tcaggaaaaatgagg

SEQ ID NO: 1965344 - DNA, 15 bp, Homo sapiens
caggaaaaatgagga

SEQ ID NO: 1965345 - DNA, 15 bp, Homo sapiens
aggaaaaatgaggaa

SEQ ID NO: 1965346 - DNA, 15 bp, Homo sapiens
ggaaaaatgaggaat

SEQ ID NO: 1965347 - DNA, 15 bp, Homo sapiens
gaaaaatgaggaatc

SEQ ID NO: 1965348 - DNA, 15 bp, Homo sapiens
aaaaatgaggaatcc

SEQ ID NO: 1965349 - DNA, 15 bp, Homo sapiens
aaaatgaggaatcca

SEQ ID NO: 1965350 - DNA, 15 bp, Homo sapiens
aaatgaggaatccaa

SEQ ID NO: 1965351 - DNA, 15 bp, Homo sapiens
aatgaggaatccaaa

SEQ ID NO: 1965352 - DNA, 15 bp, Homo sapiens
atgaggaatccaaaa

SEQ ID NO: 1965353 - DNA, 15 bp, Homo sapiens
tgaggaatccaaaag

SEQ ID NO: 1965354 - DNA, 15 bp, Homo sapiens
gaggaatccaaaaga

SEQ ID NO: 1965355 - DNA, 15 bp, Homo sapiens
aggaatccaaaagac

SEQ ID NO: 1965356 - DNA, 15 bp, Homo sapiens
ggaatccaaaagaca

SEQ ID NO: 1965357 - DNA, 15 bp, Homo sapiens
gaatccaaaagacaa

SEQ ID NO: 1965358 - DNA, 15 bp, Homo sapiens
aatccaaaagacaaa

SEQ ID NO: 1965359 - DNA, 15 bp, Homo sapiens
atccaaaagacaaaa

SEQ ID NO: 1965360 - DNA, 15 bp, Homo sapiens
tccaaaagacaaaaa

SEQ ID NO: 1965361 - DNA, 15 bp, Homo sapiens
ccaaaagacaaaaat

SEQ ID NO: 1965362 - DNA, 15 bp, Homo sapiens
caaaagacaaaaatc

SEQ ID NO: 1965363 - DNA, 15 bp, Homo sapiens
aaaagacaaaaatca

SEQ ID NO: 1965364 - DNA, 15 bp, Homo sapiens
aaagacaaaaatcaa

SEQ ID NO: 1965365 - DNA, 15 bp, Homo sapiens
aagacaaaaatcaaa

SEQ ID NO: 1965366 - DNA, 15 bp, Homo sapiens
agacaaaaatcaaag

SEQ ID NO: 1965367 - DNA, 15 bp, Homo sapiens
gacaaaaatcaaaga

SEQ ID NO: 1965368 - DNA, 15 bp, Homo sapiens
acaaaaatcaaagaa

SEQ ID NO: 1965369 - DNA, 15 bp, Homo sapiens
caaaaatcaaagaac

SEQ ID NO: 1965370 - DNA, 15 bp, Homo sapiens
aaaaatcaaagaaca

SEQ ID NO: 1965371 - DNA, 15 bp, Homo sapiens
aaaatcaaagaacag

SEQ ID NO: 1965372 - DNA, 15 bp, Homo sapiens
aaatcaaagaacaga

SEQ ID NO: 1965373 - DNA, 15 bp, Homo sapiens
aatcaaagaacagat

SEQ ID NO: 1965374 - DNA, 15 bp, Homo sapiens
atcaaagaacagatg

SEQ ID NO: 1965375 - DNA, 15 bp, Homo sapiens
tcaaagaacagatgg

SEQ ID NO: 1965376 - DNA, 15 bp, Homo sapiens
caaagaacagatggg

SEQ ID NO: 1965377 - DNA, 15 bp, Homo sapiens
aaagaacagatgggg

SEQ ID NO: 1965378 - DNA, 15 bp, Homo sapiens
aagaacagatggggt

SEQ ID NO: 1965379 - DNA, 15 bp, Homo sapiens
agaacagatggggtc

SEQ ID NO: 1965380 - DNA, 15 bp, Homo sapiens
gaacagatggggtct

SEQ ID NO: 1965381 - DNA, 15 bp, Homo sapiens
aacagatggggtctg

SEQ ID NO: 1965382 - DNA, 15 bp, Homo sapiens
acagatggggtctgt

SEQ ID NO: 1965383 - DNA, 15 bp, Homo sapiens
cagatggggtctgtg

SEQ ID NO: 1965384 - DNA, 15 bp, Homo sapiens
agatggggtctgtga

SEQ ID NO: 1965385 - DNA, 15 bp, Homo sapiens
gatggggtctgtgac

SEQ ID NO: 1965386 - DNA, 15 bp, Homo sapiens
atggggtctgtgact

SEQ ID NO: 1965387 - DNA, 15 bp, Homo sapiens
tggggtctgtgactg

SEQ ID NO: 1965388 - DNA, 15 bp, Homo sapiens
ggggtctgtgactgg

SEQ ID NO: 1965389 - DNA, 15 bp, Homo sapiens
gggtctgtgactgga

SEQ ID NO: 1965390 - DNA, 15 bp, Homo sapiens
ggtctgtgactggat

SEQ ID NO: 1965391 - DNA, 15 bp, Homo sapiens
gtctgtgactggatc

SEQ ID NO: 1965392 - DNA, 15 bp, Homo sapiens
tctgtgactggatct

SEQ ID NO: 1965393 - DNA, 15 bp, Homo sapiens
ctgtgactggatctt

SEQ ID NO: 1965394 - DNA, 15 bp, Homo sapiens
tgtgactggatcttc

SEQ ID NO: 1965395 - DNA, 15 bp, Homo sapiens
gtgactggatcttct

SEQ ID NO: 1965396 - DNA, 15 bp, Homo sapiens
tgactggatcttcta

SEQ ID NO: 1965397 - DNA, 15 bp, Homo sapiens
gactggatcttctat

SEQ ID NO: 1965398 - DNA, 15 bp, Homo sapiens
actggatcttctatc

SEQ ID NO: 1965399 - DNA, 15 bp, Homo sapiens
ctggatcttctatca

SEQ ID NO: 1965400 - DNA, 15 bp, Homo sapiens
tggatcttctatcat

SEQ ID NO: 1965401 - DNA, 15 bp, Homo sapiens
ggatcttctatcatt

SEQ ID NO: 1965402 - DNA, 15 bp, Homo sapiens
gatcttctatcattc

SEQ ID NO: 1965403 - DNA, 15 bp, Homo sapiens
atcttctatcattcc

SEQ ID NO: 1965404 - DNA, 15 bp, Homo sapiens
tcttctatcattcca

SEQ ID NO: 1965405 - DNA, 15 bp, Homo sapiens
cttctatcattccaa

SEQ ID NO: 1965406 - DNA, 15 bp, Homo sapiens
ttctatcattccaat

SEQ ID NO: 1965407 - DNA, 15 bp, Homo sapiens
tctatcattccaatt

SEQ ID NO: 1965408 - DNA, 15 bp, Homo sapiens
ctatcattccaattc

SEQ ID NO: 1965409 - DNA, 15 bp, Homo sapiens
tatcattccaattct

SEQ ID NO: 1965410 - DNA, 15 bp, Homo sapiens
atcattccaattcta

SEQ ID NO: 1965411 - DNA, 15 bp, Homo sapiens
tcattccaattctaa

SEQ ID NO: 1965412 - DNA, 15 bp, Homo sapiens
cattccaattctaaa

SEQ ID NO: 1965413 - DNA, 15 bp, Homo sapiens
attccaattctaaat

SEQ ID NO: 1965414 - DNA, 15 bp, Homo sapiens
ttccaattctaaatc

SEQ ID NO: 1965415 - DNA, 15 bp, Homo sapiens
tccaattctaaatcc

SEQ ID NO: 1965416 - DNA, 15 bp, Homo sapiens
ccaattctaaatccg

SEQ ID NO: 1965417 - DNA, 15 bp, Homo sapiens
caattctaaatccga

SEQ ID NO: 1965418 - DNA, 15 bp, Homo sapiens
aattctaaatccgac

SEQ ID NO: 1965419 - DNA, 15 bp, Homo sapiens
attctaaatccgact

SEQ ID NO: 1965420 - DNA, 15 bp, Homo sapiens
ttctaaatccgactt

SEQ ID NO: 1965421 - DNA, 15 bp, Homo sapiens
tctaaatccgacttg

SEQ ID NO: 1965422 - DNA, 15 bp, Homo sapiens
ctaaatccgacttga

SEQ ID NO: 1965423 - DNA, 15 bp, Homo sapiens
taaatccgacttgaa

SEQ ID NO: 1965424 - DNA, 15 bp, Homo sapiens
aaatccgacttgaat

SEQ ID NO: 1965425 - DNA, 15 bp, Homo sapiens
aatccgacttgaata

SEQ ID NO: 1965426 - DNA, 15 bp, Homo sapiens
atccgacttgaatat

SEQ ID NO: 1965427 - DNA, 15 bp, Homo sapiens
tccgacttgaatatt

SEQ ID NO: 1965428 - DNA, 15 bp, Homo sapiens
ccgacttgaatattc

SEQ ID NO: 1965429 - DNA, 15 bp, Homo sapiens
cgacttgaatattcc

SEQ ID NO: 1965430 - DNA, 15 bp, Homo sapiens
gacttgaatattcct

SEQ ID NO: 1965431 - DNA, 15 bp, Homo sapiens
acttgaatattcctg

SEQ ID NO: 1965432 - DNA, 15 bp, Homo sapiens
cttgaatattcctgg

SEQ ID NO: 1965433 - DNA, 15 bp, Homo sapiens
ttgaatattcctgga

SEQ ID NO: 1965434 - DNA, 15 bp, Homo sapiens
tgaatattcctggac

SEQ ID NO: 1965435 - DNA, 15 bp, Homo sapiens
gaatattcctggact

SEQ ID NO: 1965436 - DNA, 15 bp, Homo sapiens
aatattcctggactt

SEQ ID NO: 1965437 - DNA, 15 bp, Homo sapiens
atattcctggactta

SEQ ID NO: 1965438 - DNA, 15 bp, Homo sapiens
tattcctggacttac

SEQ ID NO: 1965439 - DNA, 15 bp, Homo sapiens
attcctggacttaca

SEQ ID NO: 1965440 - DNA, 15 bp, Homo sapiens
ttcctggacttacaa

SEQ ID NO: 1965441 - DNA, 15 bp, Homo sapiens
tcctggacttacaaa

SEQ ID NO: 1965442 - DNA, 15 bp, Homo sapiens
cctggacttacaaaa

SEQ ID NO: 1965443 - DNA, 15 bp, Homo sapiens
ctggacttacaaaat

SEQ ID NO: 1965444 - DNA, 15 bp, Homo sapiens
tggacttacaaaatg

SEQ ID NO: 1965445 - DNA, 15 bp, Homo sapiens
ggacttacaaaatgc

SEQ ID NO: 1965446 - DNA, 15 bp, Homo sapiens
gacttacaaaatgcc

SEQ ID NO: 1965447 - DNA, 15 bp, Homo sapiens
acttacaaaatgcca

SEQ ID NO: 1965448 - DNA, 15 bp, Homo sapiens
cttacaaaatgccaa

SEQ ID NO: 1965449 - DNA, 15 bp, Homo sapiens
ttacaaaatgccaag

SEQ ID NO: 1965450 - DNA, 15 bp, Homo sapiens
tacaaaatgccaagg

SEQ ID NO: 1965451 - DNA, 15 bp, Homo sapiens
acaaaatgccaaggg

SEQ ID NO: 1965452 - DNA, 15 bp, Homo sapiens
caaaatgccaagggg

SEQ ID NO: 1965453 - DNA, 15 bp, Homo sapiens
aaaatgccaaggggg

SEQ ID NO: 1965454 - DNA, 15 bp, Homo sapiens
aaatgccaagggggt

SEQ ID NO: 1965455 - DNA, 15 bp, Homo sapiens
aatgccaagggggtg

SEQ ID NO: 1965456 - DNA, 15 bp, Homo sapiens
atgccaagggggtga

SEQ ID NO: 1965457 - DNA, 15 bp, Homo sapiens
tgccaagggggtgac

SEQ ID NO: 1965458 - DNA, 15 bp, Homo sapiens
gccaagggggtgact

SEQ ID NO: 1965459 - DNA, 15 bp, Homo sapiens
ccaagggggtgactg

SEQ ID NO: 1965460 - DNA, 15 bp, Homo sapiens
caagggggtgactgg

SEQ ID NO: 1965461 - DNA, 15 bp, Homo sapiens
aagggggtgactgga

SEQ ID NO: 1965462 - DNA, 15 bp, Homo sapiens
agggggtgactggaa

SEQ ID NO: 1965463 - DNA, 15 bp, Homo sapiens
gggggtgactggaag

SEQ ID NO: 1965464 - DNA, 15 bp, Homo sapiens
ggggtgactggaagt

SEQ ID NO: 1965465 - DNA, 15 bp, Homo sapiens
gggtgactggaagtt

SEQ ID NO: 1965466 - DNA, 15 bp, Homo sapiens
ggtgactggaagttg

SEQ ID NO: 1965467 - DNA, 15 bp, Homo sapiens
gtgactggaagttgt

SEQ ID NO: 1965468 - DNA, 15 bp, Homo sapiens
tgactggaagttgtg

SEQ ID NO: 1965469 - DNA, 15 bp, Homo sapiens
gactggaagttgtgg

SEQ ID NO: 1965470 - DNA, 15 bp, Homo sapiens
actggaagttgtgga

SEQ ID NO: 1965471 - DNA, 15 bp, Homo sapiens
ctggaagttgtggat

SEQ ID NO: 1965472 - DNA, 15 bp, Homo sapiens
tggaagttgtggata

SEQ ID NO: 1965473 - DNA, 15 bp, Homo sapiens
ggaagttgtggatat

SEQ ID NO: 1965474 - DNA, 15 bp, Homo sapiens
gaagttgtggatatc

SEQ ID NO: 1965475 - DNA, 15 bp, Homo sapiens
aagttgtggatatca

SEQ ID NO: 1965476 - DNA, 15 bp, Homo sapiens
agttgtggatatcag

SEQ ID NO: 1965477 - DNA, 15 bp, Homo sapiens
gttgtggatatcagg

SEQ ID NO: 1965478 - DNA, 15 bp, Homo sapiens
ttgtggatatcaggg

SEQ ID NO: 1965479 - DNA, 15 bp, Homo sapiens
tgtggatatcagggt

SEQ ID NO: 1965480 - DNA, 15 bp, Homo sapiens
gtggatatcagggta

SEQ ID NO: 1965481 - DNA, 15 bp, Homo sapiens
tggatatcagggtat

SEQ ID NO: 1965482 - DNA, 15 bp, Homo sapiens
ggatatcagggtata

SEQ ID NO: 1965483 - DNA, 15 bp, Homo sapiens
gatatcagggtataa

SEQ ID NO: 1965484 - DNA, 15 bp, Homo sapiens
atatcagggtataaa

SEQ ID NO: 1965485 - DNA, 15 bp, Homo sapiens
tatcagggtataaat

SEQ ID NO: 1965486 - DNA, 15 bp, Homo sapiens
atcagggtataaatt

SEQ ID NO: 1965487 - DNA, 15 bp, Homo sapiens
tcagggtataaatta

SEQ ID NO: 1965488 - DNA, 15 bp, Homo sapiens
cagggtataaattat

SEQ ID NO: 1965489 - DNA, 15 bp, Homo sapiens
agggtataaattata

SEQ ID NO: 1965490 - DNA, 15 bp, Homo sapiens
gggtataaattatat

SEQ ID NO: 1965491 - DNA, 15 bp, Homo sapiens
ggtataaattatatc

SEQ ID NO: 1965492 - DNA, 15 bp, Homo sapiens
gtataaattatatcc

SEQ ID NO: 1965493 - DNA, 15 bp, Homo sapiens
tataaattatatccg

SEQ ID NO: 1965494 - DNA, 15 bp, Homo sapiens
ataaattatatccgt

SEQ ID NO: 1965495 - DNA, 15 bp, Homo sapiens
taaattatatccgtg

SEQ ID NO: 1965496 - DNA, 15 bp, Homo sapiens
aaattatatccgtga

SEQ ID NO: 1965497 - DNA, 15 bp, Homo sapiens
aattatatccgtgag

SEQ ID NO: 1965498 - DNA, 15 bp, Homo sapiens
attatatccgtgagt

SEQ ID NO: 1965499 - DNA, 15 bp, Homo sapiens
ttatatccgtgagtt

SEQ ID NO: 1965500 - DNA, 15 bp, Homo sapiens
tatatccgtgagttg

SEQ ID NO: 1965501 - DNA, 15 bp, Homo sapiens
atatccgtgagttgg

SEQ ID NO: 1965502 - DNA, 15 bp, Homo sapiens
tatccgtgagttggg

SEQ ID NO: 1965503 - DNA, 15 bp, Homo sapiens
atccgtgagttgggg

SEQ ID NO: 1965504 - DNA, 15 bp, Homo sapiens
tccgtgagttggggg

SEQ ID NO: 1965505 - DNA, 15 bp, Homo sapiens
ccgtgagttggggga

SEQ ID NO: 1965506 - DNA, 15 bp, Homo sapiens
cgtgagttgggggag

SEQ ID NO: 1965507 - DNA, 15 bp, Homo sapiens
gtgagttgggggagg

SEQ ID NO: 1965508 - DNA, 15 bp, Homo sapiens
tgagttgggggaggg

SEQ ID NO: 1965509 - DNA, 15 bp, Homo sapiens
gagttgggggaggga

SEQ ID NO: 1965510 - DNA, 15 bp, Homo sapiens
agttgggggagggaa

SEQ ID NO: 1965511 - DNA, 15 bp, Homo sapiens
gttgggggagggaag

SEQ ID NO: 1965512 - DNA, 15 bp, Homo sapiens
ttgggggagggaaga

SEQ ID NO: 1965513 - DNA, 15 bp, Homo sapiens
tgggggagggaagac

SEQ ID NO: 1965514 - DNA, 15 bp, Homo sapiens
gggggagggaagacc

SEQ ID NO: 1965515 - DNA, 15 bp, Homo sapiens
ggggagggaagacca

SEQ ID NO: 1965516 - DNA, 15 bp, Homo sapiens
gggagggaagaccag

SEQ ID NO: 1965517 - DNA, 15 bp, Homo sapiens
ggagggaagaccaga

SEQ ID NO: 1965518 - DNA, 15 bp, Homo sapiens
gagggaagaccagaa

SEQ ID NO: 1965519 - DNA, 15 bp, Homo sapiens
agggaagaccagaat

SEQ ID NO: 1965520 - DNA, 15 bp, Homo sapiens
gggaagaccagaatt

SEQ ID NO: 1965521 - DNA, 15 bp, Homo sapiens
ggaagaccagaattc

SEQ ID NO: 1965522 - DNA, 15 bp, Homo sapiens
gaagaccagaattcc

SEQ ID NO: 1965523 - DNA, 15 bp, Homo sapiens
aagaccagaattccc

SEQ ID NO: 1965524 - DNA, 15 bp, Homo sapiens
agaccagaattccct

SEQ ID NO: 1965525 - DNA, 15 bp, Homo sapiens
gaccagaattccctt

SEQ ID NO: 1965526 - DNA, 15 bp, Homo sapiens
accagaattcccttg

SEQ ID NO: 1965527 - DNA, 15 bp, Homo sapiens
ccagaattcccttga

SEQ ID NO: 1965528 - DNA, 15 bp, Homo sapiens
cagaattcccttgaa

SEQ ID NO: 1965529 - DNA, 15 bp, Homo sapiens
agaattcccttgaat

SEQ ID NO: 1965530 - DNA, 15 bp, Homo sapiens
gaattcccttgaatt

SEQ ID NO: 1965531 - DNA, 15 bp, Homo sapiens
aattcccttgaattg

SEQ ID NO: 1965532 - DNA, 15 bp, Homo sapiens
attcccttgaattgt

SEQ ID NO: 1965533 - DNA, 15 bp, Homo sapiens
ttcccttgaattgtg

SEQ ID NO: 1965534 - DNA, 15 bp, Homo sapiens
tcccttgaattgtgt

SEQ ID NO: 1965535 - DNA, 15 bp, Homo sapiens
cccttgaattgtgta

SEQ ID NO: 1965536 - DNA, 15 bp, Homo sapiens
ccttgaattgtgtat

SEQ ID NO: 1965537 - DNA, 15 bp, Homo sapiens
cttgaattgtgtatt

SEQ ID NO: 1965538 - DNA, 15 bp, Homo sapiens
ttgaattgtgtattg

SEQ ID NO: 1965539 - DNA, 15 bp, Homo sapiens
tgaattgtgtattga

SEQ ID NO: 1965540 - DNA, 15 bp, Homo sapiens
gaattgtgtattgat

SEQ ID NO: 1965541 - DNA, 15 bp, Homo sapiens
aattgtgtattgatg

SEQ ID NO: 1965542 - DNA, 15 bp, Homo sapiens
attgtgtattgatgc

SEQ ID NO: 1965543 - DNA, 15 bp, Homo sapiens
ttgtgtattgatgca

SEQ ID NO: 1965544 - DNA, 15 bp, Homo sapiens
tgtgtattgatgcaa

SEQ ID NO: 1965545 - DNA, 15 bp, Homo sapiens
gtgtattgatgcaat

SEQ ID NO: 1965546 - DNA, 15 bp, Homo sapiens
tgtattgatgcaata

SEQ ID NO: 1965547 - DNA, 15 bp, Homo sapiens
gtattgatgcaatat

SEQ ID NO: 1965548 - DNA, 15 bp, Homo sapiens
tattgatgcaatata

SEQ ID NO: 1965549 - DNA, 15 bp, Homo sapiens
attgatgcaatataa

SEQ ID NO: 1965550 - DNA, 15 bp, Homo sapiens
ttgatgcaatataag

SEQ ID NO: 1965551 - DNA, 15 bp, Homo sapiens
tgatgcaatataagc

SEQ ID NO: 1965552 - DNA, 15 bp, Homo sapiens
gatgcaatataagca

SEQ ID NO: 1965553 - DNA, 15 bp, Homo sapiens
atgcaatataagcat

SEQ ID NO: 1965554 - DNA, 15 bp, Homo sapiens
tgcaatataagcata

SEQ ID NO: 1965555 - DNA, 15 bp, Homo sapiens
gcaatataagcataa

SEQ ID NO: 1965556 - DNA, 15 bp, Homo sapiens
caatataagcataaa

SEQ ID NO: 1965557 - DNA, 15 bp, Homo sapiens
aatataagcataaaa

SEQ ID NO: 1965558 - DNA, 15 bp, Homo sapiens
atataagcataaaag

SEQ ID NO: 1965559 - DNA, 15 bp, Homo sapiens
tataagcataaaaga

SEQ ID NO: 1965560 - DNA, 15 bp, Homo sapiens
ataagcataaaagat

SEQ ID NO: 1965561 - DNA, 15 bp, Homo sapiens
taagcataaaagatc

SEQ ID NO: 1965562 - DNA, 15 bp, Homo sapiens
aagcataaaagatca

SEQ ID NO: 1965563 - DNA, 15 bp, Homo sapiens
agcataaaagatcac

SEQ ID NO: 1965564 - DNA, 15 bp, Homo sapiens
gcataaaagatcacc

SEQ ID NO: 1965565 - DNA, 15 bp, Homo sapiens
cataaaagatcacct

SEQ ID NO: 1965566 - DNA, 15 bp, Homo sapiens
ataaaagatcacctt

SEQ ID NO: 1965567 - DNA, 15 bp, Homo sapiens
taaaagatcaccttg

SEQ ID NO: 1965568 - DNA, 15 bp, Homo sapiens
aaaagatcaccttgt

SEQ ID NO: 1965569 - DNA, 15 bp, Homo sapiens
aaagatcaccttgta

SEQ ID NO: 1965570 - DNA, 15 bp, Homo sapiens
aagatcaccttgtat

SEQ ID NO: 1965571 - DNA, 15 bp, Homo sapiens
agatcaccttgtatt

SEQ ID NO: 1965572 - DNA, 15 bp, Homo sapiens
gatcaccttgtattc

SEQ ID NO: 1965573 - DNA, 15 bp, Homo sapiens
atcaccttgtattct

SEQ ID NO: 1965574 - DNA, 15 bp, Homo sapiens
tcaccttgtattctc

SEQ ID NO: 1965575 - DNA, 15 bp, Homo sapiens
caccttgtattctct

SEQ ID NO: 1965576 - DNA, 15 bp, Homo sapiens
accttgtattctctt

SEQ ID NO: 1965577 - DNA, 15 bp, Homo sapiens
ccttgtattctcttt

SEQ ID NO: 1965578 - DNA, 15 bp, Homo sapiens
cttgtattctcttta

SEQ ID NO: 1965579 - DNA, 15 bp, Homo sapiens
ttgtattctctttac

SEQ ID NO: 1965580 - DNA, 15 bp, Homo sapiens
tgtattctctttacc

SEQ ID NO: 1965581 - DNA, 15 bp, Homo sapiens
gtattctctttacct

SEQ ID NO: 1965582 - DNA, 15 bp, Homo sapiens
tattctctttacctt

SEQ ID NO: 1965583 - DNA, 15 bp, Homo sapiens
attctctttaccttc

SEQ ID NO: 1965584 - DNA, 15 bp, Homo sapiens
ttctctttaccttct

SEQ ID NO: 1965585 - DNA, 15 bp, Homo sapiens
tctctttaccttcta

SEQ ID NO: 1965586 - DNA, 15 bp, Homo sapiens
ctctttaccttctaa

SEQ ID NO: 1965587 - DNA, 15 bp, Homo sapiens
tctttaccttctaaa

SEQ ID NO: 1965588 - DNA, 15 bp, Homo sapiens
ctttaccttctaaaa

SEQ ID NO: 1965589 - DNA, 15 bp, Homo sapiens
tttaccttctaaaag

SEQ ID NO: 1965590 - DNA, 15 bp, Homo sapiens
ttaccttctaaaagc

SEQ ID NO: 1965591 - DNA, 15 bp, Homo sapiens
taccttctaaaagcc

SEQ ID NO: 1965592 - DNA, 15 bp, Homo sapiens
accttctaaaagcca

SEQ ID NO: 1965593 - DNA, 15 bp, Homo sapiens
ccttctaaaagccat

SEQ ID NO: 1965594 - DNA, 15 bp, Homo sapiens
cttctaaaagccatt

SEQ ID NO: 1965595 - DNA, 15 bp, Homo sapiens
ttctaaaagccatta

SEQ ID NO: 1965596 - DNA, 15 bp, Homo sapiens
tctaaaagccattat

SEQ ID NO: 1965597 - DNA, 15 bp, Homo sapiens
ctaaaagccattatt

SEQ ID NO: 1965598 - DNA, 15 bp, Homo sapiens
taaaagccattatta

SEQ ID NO: 1965599 - DNA, 15 bp, Homo sapiens
aaaagccattattat

SEQ ID NO: 1965600 - DNA, 15 bp, Homo sapiens
aaagccattattatg

SEQ ID NO: 1965601 - DNA, 15 bp, Homo sapiens
aagccattattatga

SEQ ID NO: 1965602 - DNA, 15 bp, Homo sapiens
agccattattatgat

SEQ ID NO: 1965603 - DNA, 15 bp, Homo sapiens
gccattattatgatg

SEQ ID NO: 1965604 - DNA, 15 bp, Homo sapiens
ccattattatgatgt

SEQ ID NO: 1965605 - DNA, 15 bp, Homo sapiens
cattattatgatgtt

SEQ ID NO: 1965606 - DNA, 15 bp, Homo sapiens
attattatgatgtta

SEQ ID NO: 1965607 - DNA, 15 bp, Homo sapiens
ttattatgatgttag

SEQ ID NO: 1965608 - DNA, 15 bp, Homo sapiens
tattatgatgttaga

SEQ ID NO: 1965609 - DNA, 15 bp, Homo sapiens
attatgatgttagaa

SEQ ID NO: 1965610 - DNA, 15 bp, Homo sapiens
ttatgatgttagaag

SEQ ID NO: 1965611 - DNA, 15 bp, Homo sapiens
tatgatgttagaaga

SEQ ID NO: 1965612 - DNA, 15 bp, Homo sapiens
atgatgttagaagaa

SEQ ID NO: 1965613 - DNA, 15 bp, Homo sapiens
tgatgttagaagaag

SEQ ID NO: 1965614 - DNA, 15 bp, Homo sapiens
gatgttagaagaaga

SEQ ID NO: 1965615 - DNA, 15 bp, Homo sapiens
atgttagaagaagag

SEQ ID NO: 1965616 - DNA, 15 bp, Homo sapiens
tgttagaagaagagg

SEQ ID NO: 1965617 - DNA, 15 bp, Homo sapiens
gttagaagaagagga

SEQ ID NO: 1965618 - DNA, 15 bp, Homo sapiens
tagaagaagaggaag

SEQ ID NO: 1965619 - DNA, 15 bp, Homo sapiens
agaagaagaggaaga

SEQ ID NO: 1965620 - DNA, 15 bp, Homo sapiens
gaagaagaggaagaa

SEQ ID NO: 1965621 - DNA, 15 bp, Homo sapiens
aagaagaggaagaaa

SEQ ID NO: 1965622 - DNA, 15 bp, Homo sapiens
agaagaggaagaaat

SEQ ID NO: 1965623 - DNA, 15 bp, Homo sapiens
gaagaggaagaaatt

SEQ ID NO: 1965624 - DNA, 15 bp, Homo sapiens
aagaggaagaaattc

SEQ ID NO: 1965625 - DNA, 15 bp, Homo sapiens
agaggaagaaattca

SEQ ID NO: 1965626 - DNA, 15 bp, Homo sapiens
gaggaagaaattcag

SEQ ID NO: 1965627 - DNA, 15 bp, Homo sapiens
aggaagaaattcagg

SEQ ID NO: 1965628 - DNA, 15 bp, Homo sapiens
ggaagaaattcaggt

SEQ ID NO: 1965629 - DNA, 15 bp, Homo sapiens
gaagaaattcaggta

SEQ ID NO: 1965630 - DNA, 15 bp, Homo sapiens
aagaaattcaggtac

SEQ ID NO: 1965631 - DNA, 15 bp, Homo sapiens
agaaattcaggtaca

SEQ ID NO: 1965632 - DNA, 15 bp, Homo sapiens
gaaattcaggtacag

SEQ ID NO: 1965633 - DNA, 15 bp, Homo sapiens
aaattcaggtacaga

SEQ ID NO: 1965634 - DNA, 15 bp, Homo sapiens
aattcaggtacagaa

SEQ ID NO: 1965635 - DNA, 15 bp, Homo sapiens
attcaggtacagaaa

SEQ ID NO: 1965636 - DNA, 15 bp, Homo sapiens
ttcaggtacagaaaa

SEQ ID NO: 1965637 - DNA, 15 bp, Homo sapiens
tcaggtacagaaaac

SEQ ID NO: 1965638 - DNA, 15 bp, Homo sapiens
caggtacagaaaaca

SEQ ID NO: 1965639 - DNA, 15 bp, Homo sapiens
aggtacagaaaacat

SEQ ID NO: 1965640 - DNA, 15 bp, Homo sapiens
ggtacagaaaacatg

SEQ ID NO: 1965641 - DNA, 15 bp, Homo sapiens
gtacagaaaacatgt

SEQ ID NO: 1965642 - DNA, 15 bp, Homo sapiens
tacagaaaacatgtt

SEQ ID NO: 1965643 - DNA, 15 bp, Homo sapiens
acagaaaacatgttt

SEQ ID NO: 1965644 - DNA, 15 bp, Homo sapiens
cagaaaacatgttta

SEQ ID NO: 1965645 - DNA, 15 bp, Homo sapiens
agaaaacatgtttaa

SEQ ID NO: 1965646 - DNA, 15 bp, Homo sapiens
gaaaacatgtttaaa

SEQ ID NO: 1965647 - DNA, 15 bp, Homo sapiens
aaaacatgtttaaat

SEQ ID NO: 1965648 - DNA, 15 bp, Homo sapiens
aaacatgtttaaata

SEQ ID NO: 1965649 - DNA, 15 bp, Homo sapiens
aacatgtttaaatag

SEQ ID NO: 1965650 - DNA, 15 bp, Homo sapiens
acatgtttaaatagc

SEQ ID NO: 1965651 - DNA, 15 bp, Homo sapiens
catgtttaaatagcc

SEQ ID NO: 1965652 - DNA, 15 bp, Homo sapiens
atgtttaaatagcct

SEQ ID NO: 1965653 - DNA, 15 bp, Homo sapiens
tgtttaaatagccta

SEQ ID NO: 1965654 - DNA, 15 bp, Homo sapiens
gtttaaatagcctaa

SEQ ID NO: 1965655 - DNA, 15 bp, Homo sapiens
tttaaatagcctaaa

SEQ ID NO: 1965656 - DNA, 15 bp, Homo sapiens
ttaaatagcctaaat

SEQ ID NO: 1965657 - DNA, 15 bp, Homo sapiens
taaatagcctaaatg

SEQ ID NO: 1965658 - DNA, 15 bp, Homo sapiens
aaatagcctaaatga

SEQ ID NO: 1965659 - DNA, 15 bp, Homo sapiens
aatagcctaaatgat

SEQ ID NO: 1965660 - DNA, 15 bp, Homo sapiens
atagcctaaatgatg

SEQ ID NO: 1965661 - DNA, 15 bp, Homo sapiens
tagcctaaatgatgg

SEQ ID NO: 1965662 - DNA, 15 bp, Homo sapiens
agcctaaatgatggt

SEQ ID NO: 1965663 - DNA, 15 bp, Homo sapiens
gcctaaatgatggtg

SEQ ID NO: 1965664 - DNA, 15 bp, Homo sapiens
cctaaatgatggtgc

SEQ ID NO: 1965665 - DNA, 15 bp, Homo sapiens
ctaaatgatggtgct

SEQ ID NO: 1965666 - DNA, 15 bp, Homo sapiens
taaatgatggtgctt

SEQ ID NO: 1965667 - DNA, 15 bp, Homo sapiens
aaatgatggtgcttg

SEQ ID NO: 1965668 - DNA, 15 bp, Homo sapiens
aatgatggtgcttgg

SEQ ID NO: 1965669 - DNA, 15 bp, Homo sapiens
atgatggtgcttggt

SEQ ID NO: 1965670 - DNA, 15 bp, Homo sapiens
tgatggtgcttggtg

SEQ ID NO: 1965671 - DNA, 15 bp, Homo sapiens
gatggtgcttggtga

SEQ ID NO: 1965672 - DNA, 15 bp, Homo sapiens
atggtgcttggtgag

SEQ ID NO: 1965673 - DNA, 15 bp, Homo sapiens
tggtgcttggtgagt

SEQ ID NO: 1965674 - DNA, 15 bp, Homo sapiens
ggtgcttggtgagtc

SEQ ID NO: 1965675 - DNA, 15 bp, Homo sapiens
gtgcttggtgagtct

SEQ ID NO: 1965676 - DNA, 15 bp, Homo sapiens
tgcttggtgagtctt

SEQ ID NO: 1965677 - DNA, 15 bp, Homo sapiens
gcttggtgagtcttg

SEQ ID NO: 1965678 - DNA, 15 bp, Homo sapiens
cttggtgagtcttgg

SEQ ID NO: 1965679 - DNA, 15 bp, Homo sapiens
ttggtgagtcttggt

SEQ ID NO: 1965680 - DNA, 15 bp, Homo sapiens
tggtgagtcttggtt

SEQ ID NO: 1965681 - DNA, 15 bp, Homo sapiens
ggtgagtcttggttc

SEQ ID NO: 1965682 - DNA, 15 bp, Homo sapiens
gtgagtcttggttct

SEQ ID NO: 1965683 - DNA, 15 bp, Homo sapiens
tgagtcttggttcta

SEQ ID NO: 1965684 - DNA, 15 bp, Homo sapiens
gagtcttggttctaa

SEQ ID NO: 1965685 - DNA, 15 bp, Homo sapiens
agtcttggttctaaa

SEQ ID NO: 1965686 - DNA, 15 bp, Homo sapiens
gtcttggttctaaag

SEQ ID NO: 1965687 - DNA, 15 bp, Homo sapiens
tcttggttctaaagg

SEQ ID NO: 1965688 - DNA, 15 bp, Homo sapiens
cttggttctaaaggt

SEQ ID NO: 1965689 - DNA, 15 bp, Homo sapiens
ttggttctaaaggta

SEQ ID NO: 1965690 - DNA, 15 bp, Homo sapiens
tggttctaaaggtac

SEQ ID NO: 1965691 - DNA, 15 bp, Homo sapiens
ggttctaaaggtacc

SEQ ID NO: 1965692 - DNA, 15 bp, Homo sapiens
gttctaaaggtacca

SEQ ID NO: 1965693 - DNA, 15 bp, Homo sapiens
ttctaaaggtaccaa

SEQ ID NO: 1965694 - DNA, 15 bp, Homo sapiens
tctaaaggtaccaaa

SEQ ID NO: 1965695 - DNA, 15 bp, Homo sapiens
ctaaaggtaccaaac

SEQ ID NO: 1965696 - DNA, 15 bp, Homo sapiens
taaaggtaccaaaca

SEQ ID NO: 1965697 - DNA, 15 bp, Homo sapiens
aaaggtaccaaacaa

SEQ ID NO: 1965698 - DNA, 15 bp, Homo sapiens
aaggtaccaaacaag

SEQ ID NO: 1965699 - DNA, 15 bp, Homo sapiens
aggtaccaaacaagg

SEQ ID NO: 1965700 - DNA, 15 bp, Homo sapiens
ggtaccaaacaagga

SEQ ID NO: 1965701 - DNA, 15 bp, Homo sapiens
gtaccaaacaaggaa

SEQ ID NO: 1965702 - DNA, 15 bp, Homo sapiens
taccaaacaaggaag

SEQ ID NO: 1965703 - DNA, 15 bp, Homo sapiens
accaaacaaggaagc

SEQ ID NO: 1965704 - DNA, 15 bp, Homo sapiens
ccaaacaaggaagcc

SEQ ID NO: 1965705 - DNA, 15 bp, Homo sapiens
caaacaaggaagcca

SEQ ID NO: 1965706 - DNA, 15 bp, Homo sapiens
aaacaaggaagccaa

SEQ ID NO: 1965707 - DNA, 15 bp, Homo sapiens
aacaaggaagccaaa

SEQ ID NO: 1965708 - DNA, 15 bp, Homo sapiens
acaaggaagccaaag

SEQ ID NO: 1965709 - DNA, 15 bp, Homo sapiens
caaggaagccaaagt

SEQ ID NO: 1965710 - DNA, 15 bp, Homo sapiens
aaggaagccaaagtt

SEQ ID NO: 1965711 - DNA, 15 bp, Homo sapiens
aggaagccaaagttt

SEQ ID NO: 1965712 - DNA, 15 bp, Homo sapiens
ggaagccaaagtttt

SEQ ID NO: 1965713 - DNA, 15 bp, Homo sapiens
gaagccaaagttttc

SEQ ID NO: 1965714 - DNA, 15 bp, Homo sapiens
aagccaaagttttca

SEQ ID NO: 1965715 - DNA, 15 bp, Homo sapiens
agccaaagttttcaa

SEQ ID NO: 1965716 - DNA, 15 bp, Homo sapiens
gccaaagttttcaaa

SEQ ID NO: 1965717 - DNA, 15 bp, Homo sapiens
ccaaagttttcaaac

SEQ ID NO: 1965718 - DNA, 15 bp, Homo sapiens
caaagttttcaaact

SEQ ID NO: 1965719 - DNA, 15 bp, Homo sapiens
aaagttttcaaactg

SEQ ID NO: 1965720 - DNA, 15 bp, Homo sapiens
aagttttcaaactgc

SEQ ID NO: 1965721 - DNA, 15 bp, Homo sapiens
agttttcaaactgct

SEQ ID NO: 1965722 - DNA, 15 bp, Homo sapiens
gttttcaaactgctg

SEQ ID NO: 1965723 - DNA, 15 bp, Homo sapiens
ttttcaaactgctgc

SEQ ID NO: 1965724 - DNA, 15 bp, Homo sapiens
tttcaaactgctgca

SEQ ID NO: 1965725 - DNA, 15 bp, Homo sapiens
ttcaaactgctgcat

SEQ ID NO: 1965726 - DNA, 15 bp, Homo sapiens
tcaaactgctgcata

SEQ ID NO: 1965727 - DNA, 15 bp, Homo sapiens
caaactgctgcatac

SEQ ID NO: 1965728 - DNA, 15 bp, Homo sapiens
aaactgctgcatact

SEQ ID NO: 1965729 - DNA, 15 bp, Homo sapiens
aactgctgcatactt

SEQ ID NO: 1965730 - DNA, 15 bp, Homo sapiens
actgctgcatacttt

SEQ ID NO: 1965731 - DNA, 15 bp, Homo sapiens
ctgctgcatactttg

SEQ ID NO: 1965732 - DNA, 15 bp, Homo sapiens
tgctgcatactttga

SEQ ID NO: 1965733 - DNA, 15 bp, Homo sapiens
gctgcatactttgac

SEQ ID NO: 1965734 - DNA, 15 bp, Homo sapiens
ctgcatactttgaca

SEQ ID NO: 1965735 - DNA, 15 bp, Homo sapiens
tgcatactttgacaa

SEQ ID NO: 1965736 - DNA, 15 bp, Homo sapiens
gcatactttgacaag

SEQ ID NO: 1965737 - DNA, 15 bp, Homo sapiens
catactttgacaagg

SEQ ID NO: 1965738 - DNA, 15 bp, Homo sapiens
atactttgacaagga

SEQ ID NO: 1965739 - DNA, 15 bp, Homo sapiens
tactttgacaaggaa

SEQ ID NO: 1965740 - DNA, 15 bp, Homo sapiens
actttgacaaggaaa

SEQ ID NO: 1965741 - DNA, 15 bp, Homo sapiens
ctttgacaaggaaaa

SEQ ID NO: 1965742 - DNA, 15 bp, Homo sapiens
tttgacaaggaaaat

SEQ ID NO: 1965743 - DNA, 15 bp, Homo sapiens
ttgacaaggaaaatc

SEQ ID NO: 1965744 - DNA, 15 bp, Homo sapiens
acaaggaaaatctat

SEQ ID NO: 1965745 - DNA, 15 bp, Homo sapiens
caaggaaaatctata

SEQ ID NO: 1965746 - DNA, 15 bp, Homo sapiens
aaggaaaatctatat

SEQ ID NO: 1965747 - DNA, 15 bp, Homo sapiens
aggaaaatctatatt

SEQ ID NO: 1965748 - DNA, 15 bp, Homo sapiens
ggaaaatctatattt

SEQ ID NO: 1965749 - DNA, 15 bp, Homo sapiens
gaaaatctatatttg

SEQ ID NO: 1965750 - DNA, 15 bp, Homo sapiens
aaaatctatatttgt

SEQ ID NO: 1965751 - DNA, 15 bp, Homo sapiens
aaatctatatttgtc

SEQ ID NO: 1965752 - DNA, 15 bp, Homo sapiens
aatctatatttgtct

SEQ ID NO: 1965753 - DNA, 15 bp, Homo sapiens
atctatatttgtctt

SEQ ID NO: 1965754 - DNA, 15 bp, Homo sapiens
tctatatttgtcttc

SEQ ID NO: 1965755 - DNA, 15 bp, Homo sapiens
tcagatgtgcaataa

SEQ ID NO: 1965756 - DNA, 15 bp, Homo sapiens
cagatgtgcaataat

SEQ ID NO: 1965757 - DNA, 15 bp, Homo sapiens
agatgtgcaataatt

SEQ ID NO: 1965758 - DNA, 15 bp, Homo sapiens
gatgtgcaataattt

SEQ ID NO: 1965759 - DNA, 15 bp, Homo sapiens
atgtgcaataatttg

SEQ ID NO: 1965760 - DNA, 15 bp, Homo sapiens
tgtgcaataatttgt

SEQ ID NO: 1965761 - DNA, 15 bp, Homo sapiens
gtgcaataatttgta

SEQ ID NO: 1965762 - DNA, 15 bp, Homo sapiens
tgcaataatttgtac

SEQ ID NO: 1965763 - DNA, 15 bp, Homo sapiens
gcaataatttgtaca

SEQ ID NO: 1965764 - DNA, 15 bp, Homo sapiens
caataatttgtacaa

SEQ ID NO: 1965765 - DNA, 15 bp, Homo sapiens
aataatttgtacaat

SEQ ID NO: 1965766 - DNA, 15 bp, Homo sapiens
ataatttgtacaatg

SEQ ID NO: 1965767 - DNA, 15 bp, Homo sapiens
taatttgtacaatgg

SEQ ID NO: 1965768 - DNA, 15 bp, Homo sapiens
aatttgtacaatggt

SEQ ID NO: 1965769 - DNA, 15 bp, Homo sapiens
atttgtacaatggtt

SEQ ID NO: 1965770 - DNA, 15 bp, Homo sapiens
tttgtacaatggttt

SEQ ID NO: 1965771 - DNA, 15 bp, Homo sapiens
ttgtacaatggttta

SEQ ID NO: 1965772 - DNA, 15 bp, Homo sapiens
tgtacaatggtttat

SEQ ID NO: 1965773 - DNA, 15 bp, Homo sapiens
gtacaatggtttatt

SEQ ID NO: 1965774 - DNA, 15 bp, Homo sapiens
tacaatggtttattc

SEQ ID NO: 1965775 - DNA, 15 bp, Homo sapiens
acaatggtttattcc

SEQ ID NO: 1965776 - DNA, 15 bp, Homo sapiens
caatggtttattccc

SEQ ID NO: 1965777 - DNA, 15 bp, Homo sapiens
aatggtttattccca

SEQ ID NO: 1965778 - DNA, 15 bp, Homo sapiens
atggtttattcccaa

SEQ ID NO: 1965779 - DNA, 15 bp, Homo sapiens
tggtttattcccaag

SEQ ID NO: 1965780 - DNA, 15 bp, Homo sapiens
ggtttattcccaagt

SEQ ID NO: 1965781 - DNA, 15 bp, Homo sapiens
gtttattcccaagta

SEQ ID NO: 1965782 - DNA, 15 bp, Homo sapiens
tttattcccaagtat

SEQ ID NO: 1965783 - DNA, 15 bp, Homo sapiens
ttattcccaagtatg

SEQ ID NO: 1965784 - DNA, 15 bp, Homo sapiens
tattcccaagtatgc

SEQ ID NO: 1965785 - DNA, 15 bp, Homo sapiens
attcccaagtatgcc

SEQ ID NO: 1965786 - DNA, 15 bp, Homo sapiens
ttcccaagtatgcct

SEQ ID NO: 1965787 - DNA, 15 bp, Homo sapiens
tcccaagtatgcctt

SEQ ID NO: 1965788 - DNA, 15 bp, Homo sapiens
cccaagtatgcctta

SEQ ID NO: 1965789 - DNA, 15 bp, Homo sapiens
ccaagtatgccttaa

SEQ ID NO: 1965790 - DNA, 15 bp, Homo sapiens
caagtatgccttaag

SEQ ID NO: 1965791 - DNA, 15 bp, Homo sapiens
aagtatgccttaagc

SEQ ID NO: 1965792 - DNA, 15 bp, Homo sapiens
agtatgccttaagca

SEQ ID NO: 1965793 - DNA, 15 bp, Homo sapiens
gtatgccttaagcag

SEQ ID NO: 1965794 - DNA, 15 bp, Homo sapiens
tatgccttaagcaga

SEQ ID NO: 1965795 - DNA, 15 bp, Homo sapiens
atgccttaagcagaa

SEQ ID NO: 1965796 - DNA, 15 bp, Homo sapiens
tgccttaagcagaac

SEQ ID NO: 1965797 - DNA, 15 bp, Homo sapiens
gccttaagcagaaca

SEQ ID NO: 1965798 - DNA, 15 bp, Homo sapiens
ccttaagcagaacaa

SEQ ID NO: 1965799 - DNA, 15 bp, Homo sapiens
cttaagcagaacaaa

SEQ ID NO: 1965800 - DNA, 15 bp, Homo sapiens
ttaagcagaacaaat

SEQ ID NO: 1965801 - DNA, 15 bp, Homo sapiens
taagcagaacaaatg

SEQ ID NO: 1965802 - DNA, 15 bp, Homo sapiens
aagcagaacaaatgt

SEQ ID NO: 1965803 - DNA, 15 bp, Homo sapiens
agcagaacaaatgtg

SEQ ID NO: 1965804 - DNA, 15 bp, Homo sapiens
gcagaacaaatgtgt

SEQ ID NO: 1965805 - DNA, 15 bp, Homo sapiens
cagaacaaatgtgtt

SEQ ID NO: 1965806 - DNA, 15 bp, Homo sapiens
agaacaaatgtgttt

SEQ ID NO: 1965807 - DNA, 15 bp, Homo sapiens
gaacaaatgtgtttt

SEQ ID NO: 1965808 - DNA, 15 bp, Homo sapiens
aacaaatgtgttttt

SEQ ID NO: 1965809 - DNA, 15 bp, Homo sapiens
acaaatgtgtttttc

SEQ ID NO: 1965810 - DNA, 15 bp, Homo sapiens
caaatgtgtttttct

SEQ ID NO: 1965811 - DNA, 15 bp, Homo sapiens
aaatgtgtttttcta

SEQ ID NO: 1965812 - DNA, 15 bp, Homo sapiens
aatgtgtttttctat

SEQ ID NO: 1965813 - DNA, 15 bp, Homo sapiens
atgtgtttttctata

SEQ ID NO: 1965814 - DNA, 15 bp, Homo sapiens
tgtgtttttctatat

SEQ ID NO: 1965815 - DNA, 15 bp, Homo sapiens
gtgtttttctatata

SEQ ID NO: 1965816 - DNA, 15 bp, Homo sapiens
tgtttttctatatag

SEQ ID NO: 1965817 - DNA, 15 bp, Homo sapiens
gtttttctatatagt

SEQ ID NO: 1965818 - DNA, 15 bp, Homo sapiens
tttttctatatagtt

SEQ ID NO: 1965819 - DNA, 15 bp, Homo sapiens
ttttctatatagttc

SEQ ID NO: 1965820 - DNA, 15 bp, Homo sapiens
tttctatatagttcc

SEQ ID NO: 1965821 - DNA, 15 bp, Homo sapiens
ttctatatagttcct

SEQ ID NO: 1965822 - DNA, 15 bp, Homo sapiens
tctatatagttcctt

SEQ ID NO: 1965823 - DNA, 15 bp, Homo sapiens
ctatatagttccttg

SEQ ID NO: 1965824 - DNA, 15 bp, Homo sapiens
tatatagttccttgc

SEQ ID NO: 1965825 - DNA, 15 bp, Homo sapiens
atatagttccttgcc

SEQ ID NO: 1965826 - DNA, 15 bp, Homo sapiens
tatagttccttgcct

SEQ ID NO: 1965827 - DNA, 15 bp, Homo sapiens
atagttccttgcctt

SEQ ID NO: 1965828 - DNA, 15 bp, Homo sapiens
tagttccttgcctta

SEQ ID NO: 1965829 - DNA, 15 bp, Homo sapiens
agttccttgccttaa

SEQ ID NO: 1965830 - DNA, 15 bp, Homo sapiens
gttccttgccttaat

SEQ ID NO: 1965831 - DNA, 15 bp, Homo sapiens
ttccttgccttaata

SEQ ID NO: 1965832 - DNA, 15 bp, Homo sapiens
tccttgccttaataa

SEQ ID NO: 1965833 - DNA, 15 bp, Homo sapiens
ccttgccttaataaa

SEQ ID NO: 1965834 - DNA, 15 bp, Homo sapiens
cttgccttaataaat

SEQ ID NO: 1965835 - DNA, 15 bp, Homo sapiens
ttgccttaataaata

SEQ ID NO: 1965836 - DNA, 15 bp, Homo sapiens
tgccttaataaatat

SEQ ID NO: 1965837 - DNA, 15 bp, Homo sapiens
gccttaataaatatg

SEQ ID NO: 1965838 - DNA, 15 bp, Homo sapiens
ccttaataaatatgt

SEQ ID NO: 1965839 - DNA, 15 bp, Homo sapiens
cttaataaatatgta

SEQ ID NO: 1965840 - DNA, 15 bp, Homo sapiens
ttaataaatatgtaa

SEQ ID NO: 1965841 - DNA, 15 bp, Homo sapiens
taataaatatgtaat

SEQ ID NO: 1965842 - DNA, 15 bp, Homo sapiens
aataaatatgtaata

SEQ ID NO: 1965843 - DNA, 15 bp, Homo sapiens
ataaatatgtaatat

SEQ ID NO: 1965844 - DNA, 15 bp, Homo sapiens
taaatatgtaatata

SEQ ID NO: 1965845 - DNA, 15 bp, Homo sapiens
aaatatgtaatataa

SEQ ID NO: 1965846 - DNA, 15 bp, Homo sapiens
aatatgtaatataaa

SEQ ID NO: 1965847 - DNA, 15 bp, Homo sapiens
atatgtaatataaat

SEQ ID NO: 1965848 - DNA, 15 bp, Homo sapiens
tatgtaatataaatt

SEQ ID NO: 1965849 - DNA, 15 bp, Homo sapiens
atgtaatataaattt

SEQ ID NO: 1965850 - DNA, 15 bp, Homo sapiens
tgtaatataaattta

SEQ ID NO: 1965851 - DNA, 15 bp, Homo sapiens
gtaatataaatttaa

SEQ ID NO: 1965852 - DNA, 15 bp, Homo sapiens
taatataaatttaag

SEQ ID NO: 1965853 - DNA, 15 bp, Homo sapiens
aatataaatttaagc

SEQ ID NO: 1965854 - DNA, 15 bp, Homo sapiens
atataaatttaagca

SEQ ID NO: 1965855 - DNA, 15 bp, Homo sapiens
tataaatttaagcaa

SEQ ID NO: 1965856 - DNA, 15 bp, Homo sapiens
ataaatttaagcaaa

SEQ ID NO: 1965857 - DNA, 15 bp, Homo sapiens
taaatttaagcaaac

SEQ ID NO: 1965858 - DNA, 15 bp, Homo sapiens
aaatttaagcaaacg

SEQ ID NO: 1965859 - DNA, 15 bp, Homo sapiens
aatttaagcaaacgt

SEQ ID NO: 1965860 - DNA, 15 bp, Homo sapiens
atttaagcaaacgtc

SEQ ID NO: 1965861 - DNA, 15 bp, Homo sapiens
tttaagcaaacgtct

SEQ ID NO: 1965862 - DNA, 15 bp, Homo sapiens
ttaagcaaacgtcta

SEQ ID NO: 1965863 - DNA, 15 bp, Homo sapiens
taagcaaacgtctat

SEQ ID NO: 1965864 - DNA, 15 bp, Homo sapiens
aagcaaacgtctatt

SEQ ID NO: 1965865 - DNA, 15 bp, Homo sapiens
agcaaacgtctattt

SEQ ID NO: 1965866 - DNA, 15 bp, Homo sapiens
gcaaacgtctatttt

SEQ ID NO: 1965867 - DNA, 15 bp, Homo sapiens
caaacgtctattttg

SEQ ID NO: 1965868 - DNA, 15 bp, Homo sapiens
aaacgtctattttgt

SEQ ID NO: 1965869 - DNA, 15 bp, Homo sapiens
aacgtctattttgta

SEQ ID NO: 1965870 - DNA, 15 bp, Homo sapiens
acgtctattttgtat

SEQ ID NO: 1965871 - DNA, 15 bp, Homo sapiens
cgtctattttgtata

SEQ ID NO: 1965872 - DNA, 15 bp, Homo sapiens
gtctattttgtatat

SEQ ID NO: 1965873 - DNA, 15 bp, Homo sapiens
tctattttgtatatt

SEQ ID NO: 1965874 - DNA, 15 bp, Homo sapiens
ctattttgtatattt

SEQ ID NO: 1965875 - DNA, 15 bp, Homo sapiens
tattttgtatatttg

SEQ ID NO: 1965876 - DNA, 15 bp, Homo sapiens
attttgtatatttgt

SEQ ID NO: 1965877 - DNA, 15 bp, Homo sapiens
ttttgtatatttgta

SEQ ID NO: 1965878 - DNA, 15 bp, Homo sapiens
tttgtatatttgtaa

SEQ ID NO: 1965879 - DNA, 15 bp, Homo sapiens
ttgtatatttgtaaa

SEQ ID NO: 1965880 - DNA, 15 bp, Homo sapiens
tgtatatttgtaaac

SEQ ID NO: 1965881 - DNA, 15 bp, Homo sapiens
gtatatttgtaaact

SEQ ID NO: 1965882 - DNA, 15 bp, Homo sapiens
tatatttgtaaacta

SEQ ID NO: 1965883 - DNA, 15 bp, Homo sapiens
atatttgtaaactac

SEQ ID NO: 1965884 - DNA, 15 bp, Homo sapiens
tatttgtaaactaca

SEQ ID NO: 1965885 - DNA, 15 bp, Homo sapiens
atttgtaaactacaa

SEQ ID NO: 1965886 - DNA, 15 bp, Homo sapiens
tttgtaaactacaaa

SEQ ID NO: 1965887 - DNA, 15 bp, Homo sapiens
ttgtaaactacaaag

SEQ ID NO: 1965888 - DNA, 15 bp, Homo sapiens
tgtaaactacaaagt

SEQ ID NO: 1965889 - DNA, 15 bp, Homo sapiens
gtaaactacaaagta

SEQ ID NO: 1965890 - DNA, 15 bp, Homo sapiens
taaactacaaagtaa

SEQ ID NO: 1965891 - DNA, 15 bp, Homo sapiens
aaactacaaagtaaa

SEQ ID NO: 1965892 - DNA, 15 bp, Homo sapiens
aactacaaagtaaaa

SEQ ID NO: 1965893 - DNA, 15 bp, Homo sapiens
actacaaagtaaaat

SEQ ID NO: 1965894 - DNA, 15 bp, Homo sapiens
ctacaaagtaaaatg

SEQ ID NO: 1965895 - DNA, 15 bp, Homo sapiens
tacaaagtaaaatga

SEQ ID NO: 1965896 - DNA, 15 bp, Homo sapiens
acaaagtaaaatgaa

SEQ ID NO: 1965897 - DNA, 15 bp, Homo sapiens
caaagtaaaatgaac

SEQ ID NO: 1965898 - DNA, 15 bp, Homo sapiens
aaagtaaaatgaaca

SEQ ID NO: 1965899 - DNA, 15 bp, Homo sapiens
aagtaaaatgaacat

SEQ ID NO: 1965900 - DNA, 15 bp, Homo sapiens
agtaaaatgaacatt

SEQ ID NO: 1965901 - DNA, 15 bp, Homo sapiens
gtaaaatgaacattt

SEQ ID NO: 1965902 - DNA, 15 bp, Homo sapiens
taaaatgaacatttt

SEQ ID NO: 1965903 - DNA, 15 bp, Homo sapiens
aaaatgaacattttg

SEQ ID NO: 1965904 - DNA, 15 bp, Homo sapiens
aaatgaacattttgt

SEQ ID NO: 1965905 - DNA, 15 bp, Homo sapiens
aatgaacattttgtg

SEQ ID NO: 1965906 - DNA, 15 bp, Homo sapiens
atgaacattttgtgg

SEQ ID NO: 1965907 - DNA, 15 bp, Homo sapiens
tgaacattttgtgga

SEQ ID NO: 1965908 - DNA, 15 bp, Homo sapiens
gaacattttgtggag

SEQ ID NO: 1965909 - DNA, 15 bp, Homo sapiens
aacattttgtggagt

SEQ ID NO: 1965910 - DNA, 15 bp, Homo sapiens
acattttgtggagtt

SEQ ID NO: 1965911 - DNA, 15 bp, Homo sapiens
cattttgtggagttt

SEQ ID NO: 1965912 - DNA, 15 bp, Homo sapiens
attttgtggagtttg

SEQ ID NO: 1965913 - DNA, 15 bp, Homo sapiens
ttttgtggagtttgt

SEQ ID NO: 1965914 - DNA, 15 bp, Homo sapiens
tttgtggagtttgta

SEQ ID NO: 1965915 - DNA, 15 bp, Homo sapiens
ttgtggagtttgtat

SEQ ID NO: 1965916 - DNA, 15 bp, Homo sapiens
tgtggagtttgtatt

SEQ ID NO: 1965917 - DNA, 15 bp, Homo sapiens
gtggagtttgtattt

SEQ ID NO: 1965918 - DNA, 15 bp, Homo sapiens
tggagtttgtatttt

SEQ ID NO: 1965919 - DNA, 15 bp, Homo sapiens
ggagtttgtattttg

SEQ ID NO: 1965920 - DNA, 15 bp, Homo sapiens
gagtttgtattttgc

SEQ ID NO: 1965921 - DNA, 15 bp, Homo sapiens
agtttgtattttgca

SEQ ID NO: 1965922 - DNA, 15 bp, Homo sapiens
gtttgtattttgcat

SEQ ID NO: 1965923 - DNA, 15 bp, Homo sapiens
tttgtattttgcata

SEQ ID NO: 1965924 - DNA, 15 bp, Homo sapiens
ttgtattttgcatac

SEQ ID NO: 1965925 - DNA, 15 bp, Homo sapiens
tgtattttgcatact

SEQ ID NO: 1965926 - DNA, 15 bp, Homo sapiens
gtattttgcatactc

SEQ ID NO: 1965927 - DNA, 15 bp, Homo sapiens
tattttgcatactca

SEQ ID NO: 1965928 - DNA, 15 bp, Homo sapiens
attttgcatactcaa

SEQ ID NO: 1965929 - DNA, 15 bp, Homo sapiens
ttttgcatactcaag

SEQ ID NO: 1965930 - DNA, 15 bp, Homo sapiens
tttgcatactcaagg

SEQ ID NO: 1965931 - DNA, 15 bp, Homo sapiens
ttgcatactcaaggt

SEQ ID NO: 1965932 - DNA, 15 bp, Homo sapiens
tgcatactcaaggtg

SEQ ID NO: 1965933 - DNA, 15 bp, Homo sapiens
gcatactcaaggtga

SEQ ID NO: 1965934 - DNA, 15 bp, Homo sapiens
catactcaaggtgag

SEQ ID NO: 1965935 - DNA, 15 bp, Homo sapiens
atactcaaggtgaga

SEQ ID NO: 1965936 - DNA, 15 bp, Homo sapiens
tactcaaggtgagaa

SEQ ID NO: 1965937 - DNA, 15 bp, Homo sapiens
actcaaggtgagaat

SEQ ID NO: 1965938 - DNA, 15 bp, Homo sapiens
ctcaaggtgagaatt

SEQ ID NO: 1965939 - DNA, 15 bp, Homo sapiens
tcaaggtgagaatta

SEQ ID NO: 1965940 - DNA, 15 bp, Homo sapiens
caaggtgagaattaa

SEQ ID NO: 1965941 - DNA, 15 bp, Homo sapiens
aaggtgagaattaag

SEQ ID NO: 1965942 - DNA, 15 bp, Homo sapiens
aggtgagaattaagt

SEQ ID NO: 1965943 - DNA, 15 bp, Homo sapiens
ggtgagaattaagtt

SEQ ID NO: 1965944 - DNA, 15 bp, Homo sapiens
gtgagaattaagttt

SEQ ID NO: 1965945 - DNA, 15 bp, Homo sapiens
tgagaattaagtttt

SEQ ID NO: 1965946 - DNA, 15 bp, Homo sapiens
gagaattaagtttta

SEQ ID NO: 1965947 - DNA, 15 bp, Homo sapiens
agaattaagttttaa

SEQ ID NO: 1965948 - DNA, 15 bp, Homo sapiens
gaattaagttttaaa

SEQ ID NO: 1965949 - DNA, 15 bp, Homo sapiens
aattaagttttaaat

SEQ ID NO: 1965950 - DNA, 15 bp, Homo sapiens
attaagttttaaata

SEQ ID NO: 1965951 - DNA, 15 bp, Homo sapiens
ttaagttttaaataa

SEQ ID NO: 1965952 - DNA, 15 bp, Homo sapiens
taagttttaaataaa

SEQ ID NO: 1965953 - DNA, 15 bp, Homo sapiens
aagttttaaataaac

SEQ ID NO: 1965954 - DNA, 15 bp, Homo sapiens
agttttaaataaacc

SEQ ID NO: 1965955 - DNA, 15 bp, Homo sapiens
gttttaaataaacct

SEQ ID NO: 1965956 - DNA, 15 bp, Homo sapiens
ttttaaataaaccta

SEQ ID NO: 1965957 - DNA, 15 bp, Homo sapiens
tttaaataaacctat

SEQ ID NO: 1965958 - DNA, 15 bp, Homo sapiens
ttaaataaacctata

SEQ ID NO: 1965959 - DNA, 15 bp, Homo sapiens
taaataaacctataa

SEQ ID NO: 1965960 - DNA, 15 bp, Homo sapiens
aaataaacctataat

SEQ ID NO: 1965961 - DNA, 15 bp, Homo sapiens
aataaacctataata

SEQ ID NO: 1965962 - DNA, 15 bp, Homo sapiens
ataaacctataatat

SEQ ID NO: 1965963 - DNA, 15 bp, Homo sapiens
taaacctataatatt

SEQ ID NO: 1965964 - DNA, 15 bp, Homo sapiens
aaacctataatattt

SEQ ID NO: 1965965 - DNA, 15 bp, Homo sapiens
aacctataatatttt

SEQ ID NO: 1965966 - DNA, 15 bp, Homo sapiens
acctataatatttta

SEQ ID NO: 1965967 - DNA, 15 bp, Homo sapiens
cctataatattttat

SEQ ID NO: 1965968 - DNA, 15 bp, Homo sapiens
ctataatattttatc

SEQ ID NO: 1965969 - DNA, 15 bp, Homo sapiens
tataatattttatct

SEQ ID NO: 1965970 - DNA, 15 bp, Homo sapiens
ataatattttatctg

SEQ ID NO: 1965971 - DNA, 15 bp, Homo sapiens
taatattttatctga

SEQ ID NO: 1965972 - DNA, 15 bp, Homo sapiens
aatattttatctgaa

SEQ ID NO: 1965973 - DNA, 15 bp, Homo sapiens
atattttatctgaat

SEQ ID NO: 1965974 - DNA, 15 bp, Homo sapiens
tattttatctgaata

SEQ ID NO: 1965975 - DNA, 15 bp, Homo sapiens
attttatctgaataa

SEQ ID NO: 1965976 - DNA, 15 bp, Homo sapiens
ttttatctgaataat

SEQ ID NO: 1965977 - DNA, 15 bp, Homo sapiens
tttatctgaataatg

SEQ ID NO: 1965978 - DNA, 15 bp, Homo sapiens
ttatctgaataatgt

SEQ ID NO: 1965979 - DNA, 15 bp, Homo sapiens
tatctgaataatgtt

SEQ ID NO: 1965980 - DNA, 15 bp, Homo sapiens
atctgaataatgttt

SEQ ID NO: 1965981 - DNA, 15 bp, Homo sapiens
tctgaataatgtttt

SEQ ID NO: 1965982 - DNA, 15 bp, Homo sapiens
ctgaataatgttttt

SEQ ID NO: 1965983 - DNA, 15 bp, Homo sapiens
tgaataatgtttttt

SEQ ID NO: 1965984 - DNA, 15 bp, Homo sapiens
gaataatgtttttta

SEQ ID NO: 1965985 - DNA, 15 bp, Homo sapiens
aataatgttttttat

SEQ ID NO: 1965986 - DNA, 15 bp, Homo sapiens
ataatgttttttatt

SEQ ID NO: 1965987 - DNA, 15 bp, Homo sapiens
taatgttttttattg

SEQ ID NO: 1965988 - DNA, 15 bp, Homo sapiens
aatgttttttattgt

SEQ ID NO: 1965989 - DNA, 15 bp, Homo sapiens
atgttttttattgtt

SEQ ID NO: 1965990 - DNA, 15 bp, Homo sapiens
tgttttttattgttt

SEQ ID NO: 1965991 - DNA, 15 bp, Homo sapiens
gttttttattgtttt

SEQ ID NO: 1965992 - DNA, 15 bp, Homo sapiens
ttttttattgttttg

SEQ ID NO: 1965993 - DNA, 15 bp, Homo sapiens
tttttattgttttgt

SEQ ID NO: 1965994 - DNA, 15 bp, Homo sapiens
ttttattgttttgtt

SEQ ID NO: 1965995 - DNA, 15 bp, Homo sapiens
tttattgttttgttt

SEQ ID NO: 1965996 - DNA, 15 bp, Homo sapiens
ttattgttttgtttt

SEQ ID NO: 1965997 - DNA, 15 bp, Homo sapiens
tattgttttgttttc

SEQ ID NO: 1965998 - DNA, 15 bp, Homo sapiens
attgttttgttttcc

SEQ ID NO: 1965999 - DNA, 15 bp, Homo sapiens
tgttttgttttcctc

SEQ ID NO: 1966000 - DNA, 15 bp, Homo sapiens
gttttgttttcctcc

SEQ ID NO: 1966001 - DNA, 15 bp, Homo sapiens
ttttgttttcctcct

SEQ ID NO: 1966002 - DNA, 15 bp, Homo sapiens
tttgttttcctcctg

SEQ ID NO: 1966003 - DNA, 15 bp, Homo sapiens
ttgttttcctcctgg

SEQ ID NO: 1966004 - DNA, 15 bp, Homo sapiens
tgttttcctcctgga

SEQ ID NO: 1966005 - DNA, 15 bp, Homo sapiens
gttttcctcctggaa

SEQ ID NO: 1966006 - DNA, 15 bp, Homo sapiens
ttttcctcctggaaa

SEQ ID NO: 1966007 - DNA, 15 bp, Homo sapiens
tttcctcctggaaaa

SEQ ID NO: 1966008 - DNA, 15 bp, Homo sapiens
ttcctcctggaaaaa

SEQ ID NO: 1966009 - DNA, 15 bp, Homo sapiens
tcctcctggaaaaat

SEQ ID NO: 1966010 - DNA, 15 bp, Homo sapiens
cctcctggaaaaata

SEQ ID NO: 1966011 - DNA, 15 bp, Homo sapiens
ctcctggaaaaatat

SEQ ID NO: 1966012 - DNA, 15 bp, Homo sapiens
tcctggaaaaatatg

SEQ ID NO: 1966013 - DNA, 15 bp, Homo sapiens
cctggaaaaatatga

SEQ ID NO: 1966014 - DNA, 15 bp, Homo sapiens
ctggaaaaatatgaa

SEQ ID NO: 1966015 - DNA, 15 bp, Homo sapiens
tggaaaaatatgaac

SEQ ID NO: 1966016 - DNA, 15 bp, Homo sapiens
ggaaaaatatgaaca

SEQ ID NO: 1966017 - DNA, 15 bp, Homo sapiens
gaaaaatatgaacag

SEQ ID NO: 1966018 - DNA, 15 bp, Homo sapiens
aaaaatatgaacagt

SEQ ID NO: 1966019 - DNA, 15 bp, Homo sapiens
aaaatatgaacagtg

SEQ ID NO: 1966020 - DNA, 15 bp, Homo sapiens
aaatatgaacagtgt

SEQ ID NO: 1966021 - DNA, 15 bp, Homo sapiens
aatatgaacagtgtt

SEQ ID NO: 1966022 - DNA, 15 bp, Homo sapiens
atatgaacagtgttt

SEQ ID NO: 1966023 - DNA, 15 bp, Homo sapiens
tatgaacagtgtttg

SEQ ID NO: 1966024 - DNA, 15 bp, Homo sapiens
atgaacagtgtttgg

SEQ ID NO: 1966025 - DNA, 15 bp, Homo sapiens
tgaacagtgtttggt

SEQ ID NO: 1966026 - DNA, 15 bp, Homo sapiens
gaacagtgtttggtt

SEQ ID NO: 1966027 - DNA, 15 bp, Homo sapiens
aacagtgtttggttt

SEQ ID NO: 1966028 - DNA, 15 bp, Homo sapiens
acagtgtttggttta

SEQ ID NO: 1966029 - DNA, 15 bp, Homo sapiens
cagtgtttggtttaa

SEQ ID NO: 1966030 - DNA, 15 bp, Homo sapiens
agtgtttggtttaaa

SEQ ID NO: 1966031 - DNA, 15 bp, Homo sapiens
gtgtttggtttaaac

SEQ ID NO: 1966032 - DNA, 15 bp, Homo sapiens
tgtttggtttaaaca

SEQ ID NO: 1966033 - DNA, 15 bp, Homo sapiens
gtttggtttaaacac

SEQ ID NO: 1966034 - DNA, 15 bp, Homo sapiens
tttggtttaaacaca

SEQ ID NO: 1966035 - DNA, 15 bp, Homo sapiens
ttggtttaaacacac

SEQ ID NO: 1966036 - DNA, 15 bp, Homo sapiens
tggtttaaacacacc

SEQ ID NO: 1966037 - DNA, 15 bp, Homo sapiens
ggtttaaacacaccg

SEQ ID NO: 1966038 - DNA, 15 bp, Homo sapiens
gtttaaacacaccgg

SEQ ID NO: 1966039 - DNA, 15 bp, Homo sapiens
tttaaacacaccggg

SEQ ID NO: 1966040 - DNA, 15 bp, Homo sapiens
ttaaacacaccgggt

SEQ ID NO: 1966041 - DNA, 15 bp, Homo sapiens
taaacacaccgggtt

SEQ ID NO: 1966042 - DNA, 15 bp, Homo sapiens
aaacacaccgggtta

SEQ ID NO: 1966043 - DNA, 15 bp, Homo sapiens
aacacaccgggttaa

SEQ ID NO: 1966044 - DNA, 15 bp, Homo sapiens
acacaccgggttaat

SEQ ID NO: 1966045 - DNA, 15 bp, Homo sapiens
cacaccgggttaata

SEQ ID NO: 1966046 - DNA, 15 bp, Homo sapiens
acaccgggttaataa

SEQ ID NO: 1966047 - DNA, 15 bp, Homo sapiens
caccgggttaataag

SEQ ID NO: 1966048 - DNA, 15 bp, Homo sapiens
accgggttaataagg

SEQ ID NO: 1966049 - DNA, 15 bp, Homo sapiens
ccgggttaataaggc

SEQ ID NO: 1966050 - DNA, 15 bp, Homo sapiens
cgggttaataaggca

SEQ ID NO: 1966051 - DNA, 15 bp, Homo sapiens
gggttaataaggcat

SEQ ID NO: 1966052 - DNA, 15 bp, Homo sapiens
ggttaataaggcatg

SEQ ID NO: 1966053 - DNA, 15 bp, Homo sapiens
gttaataaggcatgt

SEQ ID NO: 1966054 - DNA, 15 bp, Homo sapiens
ttaataaggcatgta

SEQ ID NO: 1966055 - DNA, 15 bp, Homo sapiens
taataaggcatgtaa

SEQ ID NO: 1966056 - DNA, 15 bp, Homo sapiens
aataaggcatgtaag

SEQ ID NO: 1966057 - DNA, 15 bp, Homo sapiens
ataaggcatgtaaga

SEQ ID NO: 1966058 - DNA, 15 bp, Homo sapiens
taaggcatgtaagaa

SEQ ID NO: 1966059 - DNA, 15 bp, Homo sapiens
aaggcatgtaagaag

SEQ ID NO: 1966060 - DNA, 15 bp, Homo sapiens
aggcatgtaagaagc

SEQ ID NO: 1966061 - DNA, 15 bp, Homo sapiens
ggcatgtaagaagca

SEQ ID NO: 1966062 - DNA, 15 bp, Homo sapiens
gcatgtaagaagcac

SEQ ID NO: 1966063 - DNA, 15 bp, Homo sapiens
catgtaagaagcacg

SEQ ID NO: 1966064 - DNA, 15 bp, Homo sapiens
atgtaagaagcacgc

SEQ ID NO: 1966065 - DNA, 15 bp, Homo sapiens
tgtaagaagcacgca

SEQ ID NO: 1966066 - DNA, 15 bp, Homo sapiens
gtaagaagcacgcac

SEQ ID NO: 1966067 - DNA, 15 bp, Homo sapiens
taagaagcacgcaca

SEQ ID NO: 1966068 - DNA, 15 bp, Homo sapiens
aagaagcacgcacaa

SEQ ID NO: 1966069 - DNA, 15 bp, Homo sapiens
agaagcacgcacaaa

SEQ ID NO: 1966070 - DNA, 15 bp, Homo sapiens
gaagcacgcacaaaa

SEQ ID NO: 1966071 - DNA, 15 bp, Homo sapiens
aagcacgcacaaaaa

SEQ ID NO: 1966072 - DNA, 15 bp, Homo sapiens
agcacgcacaaaaaa

SEQ ID NO: 1966073 - DNA, 15 bp, Homo sapiens
gcacgcacaaaaaag

SEQ ID NO: 1966074 - DNA, 15 bp, Homo sapiens
cacgcacaaaaaagc

SEQ ID NO: 1966075 - DNA, 15 bp, Homo sapiens
acgcacaaaaaagcc

SEQ ID NO: 1966076 - DNA, 15 bp, Homo sapiens
cgcacaaaaaagcca

SEQ ID NO: 1966077 - DNA, 15 bp, Homo sapiens
gcacaaaaaagccaa

SEQ ID NO: 1966078 - DNA, 15 bp, Homo sapiens
cacaaaaaagccaac

SEQ ID NO: 1966079 - DNA, 15 bp, Homo sapiens
acaaaaaagccaact

SEQ ID NO: 1966080 - DNA, 15 bp, Homo sapiens
caaaaaagccaactt

SEQ ID NO: 1966081 - DNA, 15 bp, Homo sapiens
aaaaaagccaacttt

SEQ ID NO: 1966082 - DNA, 15 bp, Homo sapiens
aaaaagccaacttta

SEQ ID NO: 1966083 - DNA, 15 bp, Homo sapiens
aaaagccaactttat

SEQ ID NO: 1966084 - DNA, 15 bp, Homo sapiens
aaagccaactttatg

SEQ ID NO: 1966085 - DNA, 15 bp, Homo sapiens
aagccaactttatgt

SEQ ID NO: 1966086 - DNA, 15 bp, Homo sapiens
agccaactttatgtc

SEQ ID NO: 1966087 - DNA, 15 bp, Homo sapiens
gccaactttatgtca

SEQ ID NO: 1966088 - DNA, 15 bp, Homo sapiens
ccaactttatgtcaa

SEQ ID NO: 1966089 - DNA, 15 bp, Homo sapiens
caactttatgtcaac

SEQ ID NO: 1966090 - DNA, 15 bp, Homo sapiens
aactttatgtcaaca

SEQ ID NO: 1966091 - DNA, 15 bp, Homo sapiens
actttatgtcaacaa

SEQ ID NO: 1966092 - DNA, 15 bp, Homo sapiens
ctttatgtcaacaaa

SEQ ID NO: 1966093 - DNA, 15 bp, Homo sapiens
tttatgtcaacaaat

SEQ ID NO: 1966094 - DNA, 15 bp, Homo sapiens
ttatgtcaacaaatt

SEQ ID NO: 1966095 - DNA, 15 bp, Homo sapiens
tatgtcaacaaatta

SEQ ID NO: 1966096 - DNA, 15 bp, Homo sapiens
atgtcaacaaattaa

SEQ ID NO: 1966097 - DNA, 15 bp, Homo sapiens
tgtcaacaaattaaa

SEQ ID NO: 1966098 - DNA, 15 bp, Homo sapiens
gtcaacaaattaaaa

SEQ ID NO: 1966099 - DNA, 15 bp, Homo sapiens
tcaacaaattaaaat

SEQ ID NO: 1966100 - DNA, 15 bp, Homo sapiens
caacaaattaaaata

SEQ ID NO: 1966101 - DNA, 15 bp, Homo sapiens
aacaaattaaaatac

SEQ ID NO: 1966102 - DNA, 15 bp, Homo sapiens
acaaattaaaatacc

SEQ ID NO: 1966103 - DNA, 15 bp, Homo sapiens
caaattaaaatacct

SEQ ID NO: 1966104 - DNA, 15 bp, Homo sapiens
aaattaaaatacctt

SEQ ID NO: 1966105 - DNA, 15 bp, Homo sapiens
aattaaaataccttt

SEQ ID NO: 1966106 - DNA, 15 bp, Homo sapiens
attaaaatacctttt

SEQ ID NO: 1966107 - DNA, 15 bp, Homo sapiens
ttaaaataccttttt

SEQ ID NO: 1966108 - DNA, 15 bp, Homo sapiens
taaaatacctttttt

SEQ ID NO: 1966109 - DNA, 15 bp, Homo sapiens
aaaataccttttttt

SEQ ID NO: 1966110 - DNA, 15 bp, Homo sapiens
aaataccttttttta

SEQ ID NO: 1966111 - DNA, 15 bp, Homo sapiens
aatacctttttttat

SEQ ID NO: 1966112 - DNA, 15 bp, Homo sapiens
atacctttttttatt

SEQ ID NO: 1966113 - DNA, 15 bp, Homo sapiens
tacctttttttatta

SEQ ID NO: 1966114 - DNA, 15 bp, Homo sapiens
acctttttttattaa

SEQ ID NO: 1966115 - DNA, 15 bp, Homo sapiens
cctttttttattaaa

SEQ ID NO: 1966116 - DNA, 15 bp, Homo sapiens
ctttttttattaaaa

SEQ ID NO: 1966117 - DNA, 15 bp, Homo sapiens
tttttttattaaaaa

SEQ ID NO: 1966118 - DNA, 15 bp, Homo sapiens
ttttttattaaaaaa

SEQ ID NO: 1966119 - DNA, 15 bp, Homo sapiens
tttttattaaaaaaa

SEQ ID NO: 1966120 - DNA, 15 bp, Homo sapiens
ttttattaaaaaaaa

SEQ ID NO: 1966121 - DNA, 15 bp, Homo sapiens
tttattaaaaaaaaa

SEQ ID NO: 1966122 - DNA, 15 bp, Homo sapiens
ttattaaaaaaaaac

SEQ ID NO: 1966123 - DNA, 15 bp, Homo sapiens
tattaaaaaaaaact

SEQ ID NO: 1966124 - DNA, 15 bp, Homo sapiens
attaaaaaaaaacta

SEQ ID NO: 1966125 - DNA, 15 bp, Homo sapiens
ttaaaaaaaaactat

SEQ ID NO: 1966126 - DNA, 15 bp, Homo sapiens
taaaaaaaaactatt

SEQ ID NO: 1966127 - DNA, 15 bp, Homo sapiens
aaaaaaaaactattt

SEQ ID NO: 1966128 - DNA, 15 bp, Homo sapiens
aaaaaaaactattta

SEQ ID NO: 1966129 - DNA, 15 bp, Homo sapiens
aaaaaaactatttag

SEQ ID NO: 1966130 - DNA, 15 bp, Homo sapiens
aaaaaactatttagt

SEQ ID NO: 1966131 - DNA, 15 bp, Homo sapiens
aaaaactatttagtt

SEQ ID NO: 1966132 - DNA, 15 bp, Homo sapiens
aaaactatttagttt

SEQ ID NO: 1966133 - DNA, 15 bp, Homo sapiens
aaactatttagtttt

SEQ ID NO: 1966134 - DNA, 15 bp, Homo sapiens
aactatttagtttta

SEQ ID NO: 1966135 - DNA, 15 bp, Homo sapiens
actatttagttttac

SEQ ID NO: 1966136 - DNA, 15 bp, Homo sapiens
ctatttagttttacc

SEQ ID NO: 1966137 - DNA, 15 bp, Homo sapiens
tatttagttttacca

SEQ ID NO: 1966138 - DNA, 15 bp, Homo sapiens
atttagttttaccat

SEQ ID NO: 1966139 - DNA, 15 bp, Homo sapiens
tttagttttaccata

SEQ ID NO: 1966140 - DNA, 15 bp, Homo sapiens
ttagttttaccataa

SEQ ID NO: 1966141 - DNA, 15 bp, Homo sapiens
tagttttaccataaa

SEQ ID NO: 1966142 - DNA, 15 bp, Homo sapiens
agttttaccataaat

SEQ ID NO: 1966143 - DNA, 15 bp, Homo sapiens
gttttaccataaata

SEQ ID NO: 1966144 - DNA, 15 bp, Homo sapiens
ttttaccataaatac

SEQ ID NO: 1966145 - DNA, 15 bp, Homo sapiens
tttaccataaatact

SEQ ID NO: 1966146 - DNA, 15 bp, Homo sapiens
ttaccataaatacta

SEQ ID NO: 1966147 - DNA, 15 bp, Homo sapiens
taccataaatactat

SEQ ID NO: 1966148 - DNA, 15 bp, Homo sapiens
accataaatactatc

SEQ ID NO: 1966149 - DNA, 15 bp, Homo sapiens
ccataaatactatca

SEQ ID NO: 1966150 - DNA, 15 bp, Homo sapiens
cataaatactatcaa

SEQ ID NO: 1966151 - DNA, 15 bp, Homo sapiens
ataaatactatcaat

SEQ ID NO: 1966152 - DNA, 15 bp, Homo sapiens
taaatactatcaata

SEQ ID NO: 1966153 - DNA, 15 bp, Homo sapiens
aaatactatcaatat

SEQ ID NO: 1966154 - DNA, 15 bp, Homo sapiens
aatactatcaatata

SEQ ID NO: 1966155 - DNA, 15 bp, Homo sapiens
atactatcaatatag

SEQ ID NO: 1966156 - DNA, 15 bp, Homo sapiens
tactatcaatatagg

SEQ ID NO: 1966157 - DNA, 15 bp, Homo sapiens
actatcaatataggg

SEQ ID NO: 1966158 - DNA, 15 bp, Homo sapiens
ctatcaatatagggc

SEQ ID NO: 1966159 - DNA, 15 bp, Homo sapiens
tatcaatatagggct

SEQ ID NO: 1966160 - DNA, 15 bp, Homo sapiens
atcaatatagggctg

SEQ ID NO: 1966161 - DNA, 15 bp, Homo sapiens
tcaatatagggctga

SEQ ID NO: 1966162 - DNA, 15 bp, Homo sapiens
caatatagggctgag

SEQ ID NO: 1966163 - DNA, 15 bp, Homo sapiens
aatatagggctgaga

SEQ ID NO: 1966164 - DNA, 15 bp, Homo sapiens
atatagggctgagaa

SEQ ID NO: 1966165 - DNA, 15 bp, Homo sapiens
tatagggctgagaac

SEQ ID NO: 1966166 - DNA, 15 bp, Homo sapiens
atagggctgagaact

SEQ ID NO: 1966167 - DNA, 15 bp, Homo sapiens
tagggctgagaactc

SEQ ID NO: 1966168 - DNA, 15 bp, Homo sapiens
agggctgagaactct

SEQ ID NO: 1966169 - DNA, 15 bp, Homo sapiens
gggctgagaactctt

SEQ ID NO: 1966170 - DNA, 15 bp, Homo sapiens
ggctgagaactcttg

SEQ ID NO: 1966171 - DNA, 15 bp, Homo sapiens
gctgagaactcttga

SEQ ID NO: 1966172 - DNA, 15 bp, Homo sapiens
ctgagaactcttgat

SEQ ID NO: 1966173 - DNA, 15 bp, Homo sapiens
tgagaactcttgatt

SEQ ID NO: 1966174 - DNA, 15 bp, Homo sapiens
gagaactcttgatta

SEQ ID NO: 1966175 - DNA, 15 bp, Homo sapiens
agaactcttgattat

SEQ ID NO: 1966176 - DNA, 15 bp, Homo sapiens
gaactcttgattatt

SEQ ID NO: 1966177 - DNA, 15 bp, Homo sapiens
aactcttgattattg

SEQ ID NO: 1966178 - DNA, 15 bp, Homo sapiens
actcttgattattgt

SEQ ID NO: 1966179 - DNA, 15 bp, Homo sapiens
ctcttgattattgta

SEQ ID NO: 1966180 - DNA, 15 bp, Homo sapiens
tcttgattattgtac

SEQ ID NO: 1966181 - DNA, 15 bp, Homo sapiens
cttgattattgtacg

SEQ ID NO: 1966182 - DNA, 15 bp, Homo sapiens
ttgattattgtacgt

SEQ ID NO: 1966183 - DNA, 15 bp, Homo sapiens
tgattattgtacgtt

SEQ ID NO: 1966184 - DNA, 15 bp, Homo sapiens
gattattgtacgttt

SEQ ID NO: 1966185 - DNA, 15 bp, Homo sapiens
attattgtacgttta

SEQ ID NO: 1966186 - DNA, 15 bp, Homo sapiens
ttattgtacgtttaa

SEQ ID NO: 1966187 - DNA, 15 bp, Homo sapiens
tattgtacgtttaaa

SEQ ID NO: 1966188 - DNA, 15 bp, Homo sapiens
attgtacgtttaaaa

SEQ ID NO: 1966189 - DNA, 15 bp, Homo sapiens
ttgtacgtttaaaaa

SEQ ID NO: 1966190 - DNA, 15 bp, Homo sapiens
tgtacgtttaaaaat

SEQ ID NO: 1966191 - DNA, 15 bp, Homo sapiens
gtacgtttaaaaatt

SEQ ID NO: 1966192 - DNA, 15 bp, Homo sapiens
tacgtttaaaaatta

SEQ ID NO: 1966193 - DNA, 15 bp, Homo sapiens
acgtttaaaaattac

SEQ ID NO: 1966194 - DNA, 15 bp, Homo sapiens
cgtttaaaaattaca

SEQ ID NO: 1966195 - DNA, 15 bp, Homo sapiens
gtttaaaaattacaa

SEQ ID NO: 1966196 - DNA, 15 bp, Homo sapiens
tttaaaaattacaag

SEQ ID NO: 1966197 - DNA, 15 bp, Homo sapiens
ttaaaaattacaaga

SEQ ID NO: 1966198 - DNA, 15 bp, Homo sapiens
taaaaattacaagat

SEQ ID NO: 1966199 - DNA, 15 bp, Homo sapiens
aaaaattacaagatt

SEQ ID NO: 1966200 - DNA, 15 bp, Homo sapiens
aaaattacaagatta

SEQ ID NO: 1966201 - DNA, 15 bp, Homo sapiens
aaattacaagattaa

SEQ ID NO: 1966202 - DNA, 15 bp, Homo sapiens
aattacaagattaaa

SEQ ID NO: 1966203 - DNA, 15 bp, Homo sapiens
attacaagattaaaa

SEQ ID NO: 1966204 - DNA, 15 bp, Homo sapiens
ttacaagattaaaaa

SEQ ID NO: 1966205 - DNA, 15 bp, Homo sapiens
tacaagattaaaaac

SEQ ID NO: 1966206 - DNA, 15 bp, Homo sapiens
acaagattaaaaacc

SEQ ID NO: 1966207 - DNA, 15 bp, Homo sapiens
caagattaaaaaccc

SEQ ID NO: 1966208 - DNA, 15 bp, Homo sapiens
aagattaaaaaccca

SEQ ID NO: 1966209 - DNA, 15 bp, Homo sapiens
agattaaaaacccag

SEQ ID NO: 1966210 - DNA, 15 bp, Homo sapiens
gattaaaaacccagt

SEQ ID NO: 1966211 - DNA, 15 bp, Homo sapiens
attaaaaacccagtt

SEQ ID NO: 1966212 - DNA, 15 bp, Homo sapiens
ttaaaaacccagttc

SEQ ID NO: 1966213 - DNA, 15 bp, Homo sapiens
taaaaacccagttca

SEQ ID NO: 1966214 - DNA, 15 bp, Homo sapiens
aaaaacccagttcag

SEQ ID NO: 1966215 - DNA, 15 bp, Homo sapiens
aaaacccagttcagg

SEQ ID NO: 1966216 - DNA, 15 bp, Homo sapiens
aaacccagttcaggt

SEQ ID NO: 1966217 - DNA, 15 bp, Homo sapiens
aacccagttcaggtt

SEQ ID NO: 1966218 - DNA, 15 bp, Homo sapiens
acccagttcaggttt

SEQ ID NO: 1966219 - DNA, 15 bp, Homo sapiens
cccagttcaggtttg

SEQ ID NO: 1966220 - DNA, 15 bp, Homo sapiens
ccagttcaggtttgc

SEQ ID NO: 1966221 - DNA, 15 bp, Homo sapiens
cagttcaggtttgct

SEQ ID NO: 1966222 - DNA, 15 bp, Homo sapiens
agttcaggtttgctc

SEQ ID NO: 1966223 - DNA, 15 bp, Homo sapiens
gttcaggtttgctct

SEQ ID NO: 1966224 - DNA, 15 bp, Homo sapiens
ttcaggtttgctctt

SEQ ID NO: 1966225 - DNA, 15 bp, Homo sapiens
tcaggtttgctcttt

SEQ ID NO: 1966226 - DNA, 15 bp, Homo sapiens
caggtttgctctttc

SEQ ID NO: 1966227 - DNA, 15 bp, Homo sapiens
aggtttgctctttcc

SEQ ID NO: 1966228 - DNA, 15 bp, Homo sapiens
ggtttgctctttcca

SEQ ID NO: 1966229 - DNA, 15 bp, Homo sapiens
gtttgctctttccaa

SEQ ID NO: 1966230 - DNA, 15 bp, Homo sapiens
tttgctctttccaaa

SEQ ID NO: 1966231 - DNA, 15 bp, Homo sapiens
ttgctctttccaaat

SEQ ID NO: 1966232 - DNA, 15 bp, Homo sapiens
tgctctttccaaatg

SEQ ID NO: 1966233 - DNA, 15 bp, Homo sapiens
gctctttccaaatgt

SEQ ID NO: 1966234 - DNA, 15 bp, Homo sapiens
ctctttccaaatgta

SEQ ID NO: 1966235 - DNA, 15 bp, Homo sapiens
tctttccaaatgtac

SEQ ID NO: 1966236 - DNA, 15 bp, Homo sapiens
ctttccaaatgtacg

SEQ ID NO: 1966237 - DNA, 15 bp, Homo sapiens
tttccaaatgtacgt

SEQ ID NO: 1966238 - DNA, 15 bp, Homo sapiens
ttccaaatgtacgta

SEQ ID NO: 1966239 - DNA, 15 bp, Homo sapiens
tccaaatgtacgtaa

SEQ ID NO: 1966240 - DNA, 15 bp, Homo sapiens
ccaaatgtacgtaaa

SEQ ID NO: 1966241 - DNA, 15 bp, Homo sapiens
caaatgtacgtaaag

SEQ ID NO: 1966242 - DNA, 15 bp, Homo sapiens
aaatgtacgtaaagc

SEQ ID NO: 1966243 - DNA, 15 bp, Homo sapiens
aatgtacgtaaagct

SEQ ID NO: 1966244 - DNA, 15 bp, Homo sapiens
atgtacgtaaagcta

SEQ ID NO: 1966245 - DNA, 15 bp, Homo sapiens
tgtacgtaaagctac

SEQ ID NO: 1966246 - DNA, 15 bp, Homo sapiens
gtacgtaaagctacg

SEQ ID NO: 1966247 - DNA, 15 bp, Homo sapiens
tacgtaaagctacgt

SEQ ID NO: 1966248 - DNA, 15 bp, Homo sapiens
acgtaaagctacgtg

SEQ ID NO: 1966249 - DNA, 15 bp, Homo sapiens
cgtaaagctacgtga

SEQ ID NO: 1966250 - DNA, 15 bp, Homo sapiens
gtaaagctacgtgaa

SEQ ID NO: 1966251 - DNA, 15 bp, Homo sapiens
taaagctacgtgaaa

SEQ ID NO: 1966252 - DNA, 15 bp, Homo sapiens
aaagctacgtgaaag

SEQ ID NO: 1966253 - DNA, 15 bp, Homo sapiens
aagctacgtgaaagc

SEQ ID NO: 1966254 - DNA, 15 bp, Homo sapiens
agctacgtgaaagca

SEQ ID NO: 1966255 - DNA, 15 bp, Homo sapiens
gctacgtgaaagcag

SEQ ID NO: 1966256 - DNA, 15 bp, Homo sapiens
ctacgtgaaagcagt

SEQ ID NO: 1966257 - DNA, 15 bp, Homo sapiens
tacgtgaaagcagtt

SEQ ID NO: 1966258 - DNA, 15 bp, Homo sapiens
acgtgaaagcagttt

SEQ ID NO: 1966259 - DNA, 15 bp, Homo sapiens
cgtgaaagcagtttc

SEQ ID NO: 1966260 - DNA, 15 bp, Homo sapiens
gtgaaagcagtttcc

SEQ ID NO: 1966261 - DNA, 15 bp, Homo sapiens
tgaaagcagtttcct

SEQ ID NO: 1966262 - DNA, 15 bp, Homo sapiens
gaaagcagtttcctt

SEQ ID NO: 1966263 - DNA, 15 bp, Homo sapiens
aaagcagtttcctta

SEQ ID NO: 1966264 - DNA, 15 bp, Homo sapiens
aagcagtttccttac

SEQ ID NO: 1966265 - DNA, 15 bp, Homo sapiens
agcagtttccttacc

SEQ ID NO: 1966266 - DNA, 15 bp, Homo sapiens
gcagtttccttacct

SEQ ID NO: 1966267 - DNA, 15 bp, Homo sapiens
cagtttccttaccta

SEQ ID NO: 1966268 - DNA, 15 bp, Homo sapiens
agtttccttacctat

SEQ ID NO: 1966269 - DNA, 15 bp, Homo sapiens
gtttccttacctatg

SEQ ID NO: 1966270 - DNA, 15 bp, Homo sapiens
tttccttacctatga

SEQ ID NO: 1966271 - DNA, 15 bp, Homo sapiens
ttccttacctatgat

SEQ ID NO: 1966272 - DNA, 15 bp, Homo sapiens
tccttacctatgatt

SEQ ID NO: 1966273 - DNA, 15 bp, Homo sapiens
ccttacctatgattt

SEQ ID NO: 1966274 - DNA, 15 bp, Homo sapiens
cttacctatgatttt

SEQ ID NO: 1966275 - DNA, 15 bp, Homo sapiens
ttacctatgattttc

SEQ ID NO: 1966276 - DNA, 15 bp, Homo sapiens
tacctatgattttcc

SEQ ID NO: 1966277 - DNA, 15 bp, Homo sapiens
acctatgattttccc

SEQ ID NO: 1966278 - DNA, 15 bp, Homo sapiens
cctatgattttccca

SEQ ID NO: 1966279 - DNA, 15 bp, Homo sapiens
ctatgattttcccag

SEQ ID NO: 1966280 - DNA, 15 bp, Homo sapiens
tatgattttcccagt

SEQ ID NO: 1966281 - DNA, 15 bp, Homo sapiens
atgattttcccagta

SEQ ID NO: 1966282 - DNA, 15 bp, Homo sapiens
tgattttcccagtag

SEQ ID NO: 1966283 - DNA, 15 bp, Homo sapiens
gattttcccagtaga

SEQ ID NO: 1966284 - DNA, 15 bp, Homo sapiens
attttcccagtagaa

SEQ ID NO: 1966285 - DNA, 15 bp, Homo sapiens
ttttcccagtagaaa

SEQ ID NO: 1966286 - DNA, 15 bp, Homo sapiens
tttcccagtagaaac

SEQ ID NO: 1966287 - DNA, 15 bp, Homo sapiens
ttcccagtagaaaca

SEQ ID NO: 1966288 - DNA, 15 bp, Homo sapiens
tcccagtagaaacag

SEQ ID NO: 1966289 - DNA, 15 bp, Homo sapiens
cccagtagaaacagc

SEQ ID NO: 1966290 - DNA, 15 bp, Homo sapiens
ccagtagaaacagct

SEQ ID NO: 1966291 - DNA, 15 bp, Homo sapiens
cagtagaaacagctt

SEQ ID NO: 1966292 - DNA, 15 bp, Homo sapiens
agtagaaacagctta

SEQ ID NO: 1966293 - DNA, 15 bp, Homo sapiens
gtagaaacagcttaa

SEQ ID NO: 1966294 - DNA, 15 bp, Homo sapiens
tagaaacagcttaat

SEQ ID NO: 1966295 - DNA, 15 bp, Homo sapiens
agaaacagcttaatc

SEQ ID NO: 1966296 - DNA, 15 bp, Homo sapiens
gaaacagcttaatca

SEQ ID NO: 1966297 - DNA, 15 bp, Homo sapiens
aaacagcttaatcat

SEQ ID NO: 1966298 - DNA, 15 bp, Homo sapiens
aacagcttaatcatc

SEQ ID NO: 1966299 - DNA, 15 bp, Homo sapiens
acagcttaatcatcc

SEQ ID NO: 1966300 - DNA, 15 bp, Homo sapiens
cagcttaatcatcct

SEQ ID NO: 1966301 - DNA, 15 bp, Homo sapiens
agcttaatcatcctt

SEQ ID NO: 1966302 - DNA, 15 bp, Homo sapiens
gcttaatcatcctta

SEQ ID NO: 1966303 - DNA, 15 bp, Homo sapiens
cttaatcatccttaa

SEQ ID NO: 1966304 - DNA, 15 bp, Homo sapiens
ttaatcatccttaaa

SEQ ID NO: 1966305 - DNA, 15 bp, Homo sapiens
taatcatccttaaat

SEQ ID NO: 1966306 - DNA, 15 bp, Homo sapiens
aatcatccttaaatt

SEQ ID NO: 1966307 - DNA, 15 bp, Homo sapiens
atcatccttaaattt

SEQ ID NO: 1966308 - DNA, 15 bp, Homo sapiens
tcatccttaaatttg

SEQ ID NO: 1966309 - DNA, 15 bp, Homo sapiens
catccttaaatttgc

SEQ ID NO: 1966310 - DNA, 15 bp, Homo sapiens
atccttaaatttgct

SEQ ID NO: 1966311 - DNA, 15 bp, Homo sapiens
tccttaaatttgctc

SEQ ID NO: 1966312 - DNA, 15 bp, Homo sapiens
ccttaaatttgctca

SEQ ID NO: 1966313 - DNA, 15 bp, Homo sapiens
cttaaatttgctcag

SEQ ID NO: 1966314 - DNA, 15 bp, Homo sapiens
ttaaatttgctcagt

SEQ ID NO: 1966315 - DNA, 15 bp, Homo sapiens
taaatttgctcagtt

SEQ ID NO: 1966316 - DNA, 15 bp, Homo sapiens
aaatttgctcagttt

SEQ ID NO: 1966317 - DNA, 15 bp, Homo sapiens
aatttgctcagttta

SEQ ID NO: 1966318 - DNA, 15 bp, Homo sapiens
atttgctcagtttag

SEQ ID NO: 1966319 - DNA, 15 bp, Homo sapiens
tttgctcagtttagt

SEQ ID NO: 1966320 - DNA, 15 bp, Homo sapiens
ttgctcagtttagta

SEQ ID NO: 1966321 - DNA, 15 bp, Homo sapiens
tgctcagtttagtat

SEQ ID NO: 1966322 - DNA, 15 bp, Homo sapiens
gctcagtttagtatg

SEQ ID NO: 1966323 - DNA, 15 bp, Homo sapiens
ctcagtttagtatga

SEQ ID NO: 1966324 - DNA, 15 bp, Homo sapiens
tcagtttagtatgaa

SEQ ID NO: 1966325 - DNA, 15 bp, Homo sapiens
cagtttagtatgaaa

SEQ ID NO: 1966326 - DNA, 15 bp, Homo sapiens
agtttagtatgaaaa

SEQ ID NO: 1966327 - DNA, 15 bp, Homo sapiens
gtttagtatgaaaat

SEQ ID NO: 1966328 - DNA, 15 bp, Homo sapiens
tttagtatgaaaata

SEQ ID NO: 1966329 - DNA, 15 bp, Homo sapiens
ttagtatgaaaatat

SEQ ID NO: 1966330 - DNA, 15 bp, Homo sapiens
tagtatgaaaatatt

SEQ ID NO: 1966331 - DNA, 15 bp, Homo sapiens
agtatgaaaatattt

SEQ ID NO: 1966332 - DNA, 15 bp, Homo sapiens
gtatgaaaatattta

SEQ ID NO: 1966333 - DNA, 15 bp, Homo sapiens
tatgaaaatatttat

SEQ ID NO: 1966334 - DNA, 15 bp, Homo sapiens
atgaaaatatttatg

SEQ ID NO: 1966335 - DNA, 15 bp, Homo sapiens
tgaaaatatttatga

SEQ ID NO: 1966336 - DNA, 15 bp, Homo sapiens
gaaaatatttatgaa

SEQ ID NO: 1966337 - DNA, 15 bp, Homo sapiens
aaaatatttatgaaa

SEQ ID NO: 1966338 - DNA, 15 bp, Homo sapiens
aaatatttatgaaat

SEQ ID NO: 1966339 - DNA, 15 bp, Homo sapiens
aatatttatgaaata

SEQ ID NO: 1966340 - DNA, 15 bp, Homo sapiens
atatttatgaaatat

SEQ ID NO: 1966341 - DNA, 15 bp, Homo sapiens
tatttatgaaatata

SEQ ID NO: 1966342 - DNA, 15 bp, Homo sapiens
atttatgaaatatat

SEQ ID NO: 1966343 - DNA, 15 bp, Homo sapiens
tttatgaaatatata

SEQ ID NO: 1966344 - DNA, 15 bp, Homo sapiens
ttatgaaatatatac

SEQ ID NO: 1966345 - DNA, 15 bp, Homo sapiens
tatgaaatatataca

SEQ ID NO: 1966346 - DNA, 15 bp, Homo sapiens
atgaaatatatacat

SEQ ID NO: 1966347 - DNA, 15 bp, Homo sapiens
tgaaatatatacatt

SEQ ID NO: 1966348 - DNA, 15 bp, Homo sapiens
gaaatatatacattt

SEQ ID NO: 1966349 - DNA, 15 bp, Homo sapiens
aaatatatacatttc

SEQ ID NO: 1966350 - DNA, 15 bp, Homo sapiens
aatatatacatttca

SEQ ID NO: 1966351 - DNA, 15 bp, Homo sapiens
atatatacatttcag

SEQ ID NO: 1966352 - DNA, 15 bp, Homo sapiens
tatatacatttcagt

SEQ ID NO: 1966353 - DNA, 15 bp, Homo sapiens
atatacatttcagtt

SEQ ID NO: 1966354 - DNA, 15 bp, Homo sapiens
tatacatttcagttt

SEQ ID NO: 1966355 - DNA, 15 bp, Homo sapiens
atacatttcagtttc

SEQ ID NO: 1966356 - DNA, 15 bp, Homo sapiens
tacatttcagtttca

SEQ ID NO: 1966357 - DNA, 15 bp, Homo sapiens
acatttcagtttcat

SEQ ID NO: 1966358 - DNA, 15 bp, Homo sapiens
catttcagtttcata

SEQ ID NO: 1966359 - DNA, 15 bp, Homo sapiens
atttcagtttcatat

SEQ ID NO: 1966360 - DNA, 15 bp, Homo sapiens
tttcagtttcatatt

SEQ ID NO: 1966361 - DNA, 15 bp, Homo sapiens
ttcagtttcatattt

SEQ ID NO: 1966362 - DNA, 15 bp, Homo sapiens
tcagtttcatatttg

SEQ ID NO: 1966363 - DNA, 15 bp, Homo sapiens
cagtttcatatttga

SEQ ID NO: 1966364 - DNA, 15 bp, Homo sapiens
agtttcatatttgaa

SEQ ID NO: 1966365 - DNA, 15 bp, Homo sapiens
gtttcatatttgaaa

SEQ ID NO: 1966366 - DNA, 15 bp, Homo sapiens
tttcatatttgaaaa

SEQ ID NO: 1966367 - DNA, 15 bp, Homo sapiens
ttcatatttgaaaaa

SEQ ID NO: 1966368 - DNA, 15 bp, Homo sapiens
tcatatttgaaaaaa

SEQ ID NO: 1966369 - DNA, 15 bp, Homo sapiens
catatttgaaaaaaa

SEQ ID NO: 1966370 - DNA, 15 bp, Homo sapiens
atatttgaaaaaaat

SEQ ID NO: 1966371 - DNA, 15 bp, Homo sapiens
tatttgaaaaaaatc

SEQ ID NO: 1966372 - DNA, 15 bp, Homo sapiens
atttgaaaaaaatct

SEQ ID NO: 1966373 - DNA, 15 bp, Homo sapiens
tttgaaaaaaatctt

SEQ ID NO: 1966374 - DNA, 15 bp, Homo sapiens
ttgaaaaaaatcttt

SEQ ID NO: 1966375 - DNA, 15 bp, Homo sapiens
tgaaaaaaatcttta

SEQ ID NO: 1966376 - DNA, 15 bp, Homo sapiens
gaaaaaaatctttat

SEQ ID NO: 1966377 - DNA, 15 bp, Homo sapiens
aaaaaaatctttatg

SEQ ID NO: 1966378 - DNA, 15 bp, Homo sapiens
aaaaaatctttatgg

SEQ ID NO: 1966379 - DNA, 15 bp, Homo sapiens
aaaaatctttatggt

SEQ ID NO: 1966380 - DNA, 15 bp, Homo sapiens
aaaatctttatggtt

SEQ ID NO: 1966381 - DNA, 15 bp, Homo sapiens
aaatctttatggttt

SEQ ID NO: 1966382 - DNA, 15 bp, Homo sapiens
aatctttatggtttg

SEQ ID NO: 1966383 - DNA, 15 bp, Homo sapiens
atctttatggtttgt

SEQ ID NO: 1966384 - DNA, 15 bp, Homo sapiens
tctttatggtttgtc

SEQ ID NO: 1966385 - DNA, 15 bp, Homo sapiens
ctttatggtttgtct

SEQ ID NO: 1966386 - DNA, 15 bp, Homo sapiens
tttatggtttgtctt

SEQ ID NO: 1966387 - DNA, 15 bp, Homo sapiens
ttatggtttgtcttt

SEQ ID NO: 1966388 - DNA, 15 bp, Homo sapiens
tatggtttgtctttt

SEQ ID NO: 1966389 - DNA, 15 bp, Homo sapiens
atggtttgtctttta

SEQ ID NO: 1966390 - DNA, 15 bp, Homo sapiens
tggtttgtcttttaa

SEQ ID NO: 1966391 - DNA, 15 bp, Homo sapiens
ggtttgtcttttaaa

SEQ ID NO: 1966392 - DNA, 15 bp, Homo sapiens
gtttgtcttttaaag

SEQ ID NO: 1966393 - DNA, 15 bp, Homo sapiens
tttgtcttttaaagt

SEQ ID NO: 1966394 - DNA, 15 bp, Homo sapiens
ttgtcttttaaagta

SEQ ID NO: 1966395 - DNA, 15 bp, Homo sapiens
tgtcttttaaagtaa

SEQ ID NO: 1966396 - DNA, 15 bp, Homo sapiens
gtcttttaaagtaaa

SEQ ID NO: 1966397 - DNA, 15 bp, Homo sapiens
tcttttaaagtaaat

SEQ ID NO: 1966398 - DNA, 15 bp, Homo sapiens
cttttaaagtaaata

SEQ ID NO: 1966399 - DNA, 15 bp, Homo sapiens
ttttaaagtaaataa

SEQ ID NO: 1966400 - DNA, 15 bp, Homo sapiens
tttaaagtaaataaa

SEQ ID NO: 1966401 - DNA, 15 bp, Homo sapiens
ttaaagtaaataaaa

SEQ ID NO: 1966402 - DNA, 15 bp, Homo sapiens
taaagtaaataaaaa

SEQ ID NO: 1966403 - DNA, 15 bp, Homo sapiens
aaagtaaataaaaat

SEQ ID NO: 1966404 - DNA, 15 bp, Homo sapiens
aagtaaataaaaata

SEQ ID NO: 1966405 - DNA, 15 bp, Homo sapiens
agtaaataaaaataa

SEQ ID NO: 1966406 - DNA, 15 bp, Homo sapiens
gtaaataaaaataaa

SEQ ID NO: 1966407 - DNA, 15 bp, Homo sapiens
taaataaaaataaaa

SEQ ID NO: 1966408 - DNA, 15 bp, Homo sapiens
ataaaaataaaaaag

SEQ ID NO: 1966409 - DNA, 15 bp, Homo sapiens
taaaaataaaaaagt

SEQ ID NO: 1966410 - DNA, 15 bp, Homo sapiens
aaaaataaaaaagtt

SEQ ID NO: 1966411 - DNA, 15 bp, Homo sapiens
aaaataaaaaagttt

SEQ ID NO: 1966412 - DNA, 15 bp, Homo sapiens
aaataaaaaagtttt

SEQ ID NO: 1966413 - DNA, 15 bp, Homo sapiens
aataaaaaagttttc

SEQ ID NO: 1966414 - DNA, 15 bp, Homo sapiens
ataaaaaagttttct

SEQ ID NO: 1966415 - DNA, 15 bp, Homo sapiens
taaaaaagttttctg

SEQ ID NO: 1966416 - DNA, 15 bp, Homo sapiens
aaaaaagttttctgt

SEQ ID NO: 1966417 - DNA, 15 bp, Homo sapiens
aaaaagttttctgtg

SEQ ID NO: 1966418 - DNA, 15 bp, Homo sapiens
aaaagttttctgtgg

SEQ ID NO: 1966419 - DNA, 15 bp, Homo sapiens
aaagttttctgtgga

SEQ ID NO: 1966420 - DNA, 15 bp, Homo sapiens
aagttttctgtggag

SEQ ID NO: 1966421 - DNA, 15 bp, Homo sapiens
agttttctgtggagg

SEQ ID NO: 1966422 - DNA, 15 bp, Homo sapiens
gttttctgtggaggc

SEQ ID NO: 1966423 - DNA, 15 bp, Homo sapiens
ttttctgtggaggcc

SEQ ID NO: 1966424 - DNA, 15 bp, Homo sapiens
tttctgtggaggcct

SEQ ID NO: 1966425 - DNA, 15 bp, Homo sapiens
ttctgtggaggcctg

SEQ ID NO: 1966426 - DNA, 15 bp, Homo sapiens
tctgtggaggcctgt

SEQ ID NO: 1966427 - DNA, 15 bp, Homo sapiens
ctgtggaggcctgtc

SEQ ID NO: 1966428 - DNA, 15 bp, Homo sapiens
tgtggaggcctgtcc

SEQ ID NO: 1966429 - DNA, 15 bp, Homo sapiens
gtggaggcctgtccc

SEQ ID NO: 1966430 - DNA, 15 bp, Homo sapiens
tggaggcctgtccca

SEQ ID NO: 1966431 - DNA, 15 bp, Homo sapiens
ggaggcctgtcccag

SEQ ID NO: 1966432 - DNA, 15 bp, Homo sapiens
gaggcctgtcccagc

SEQ ID NO: 1966433 - DNA, 15 bp, Homo sapiens
aggcctgtcccagca

SEQ ID NO: 1966434 - DNA, 15 bp, Homo sapiens
ggcctgtcccagcac

SEQ ID NO: 1966435 - DNA, 15 bp, Homo sapiens
gcctgtcccagcacc

SEQ ID NO: 1966436 - DNA, 15 bp, Homo sapiens
cctgtcccagcaccc

SEQ ID NO: 1966437 - DNA, 15 bp, Homo sapiens
ctgtcccagcacccc

SEQ ID NO: 1966438 - DNA, 15 bp, Homo sapiens
tgtcccagcacccct

SEQ ID NO: 1966439 - DNA, 15 bp, Homo sapiens
gtcccagcacccctc

SEQ ID NO: 1966440 - DNA, 15 bp, Homo sapiens
tcccagcacccctca

SEQ ID NO: 1966441 - DNA, 15 bp, Homo sapiens
cccagcacccctcac

SEQ ID NO: 1966442 - DNA, 15 bp, Homo sapiens
ccagcacccctcaca

SEQ ID NO: 1966443 - DNA, 15 bp, Homo sapiens
cagcacccctcacat

SEQ ID NO: 1966444 - DNA, 15 bp, Homo sapiens
agcacccctcacatc

SEQ ID NO: 1966445 - DNA, 15 bp, Homo sapiens
gcacccctcacatct

SEQ ID NO: 1966446 - DNA, 15 bp, Homo sapiens
cacccctcacatctg

SEQ ID NO: 1966447 - DNA, 15 bp, Homo sapiens
acccctcacatctga

SEQ ID NO: 1966448 - DNA, 15 bp, Homo sapiens
cccctcacatctgag

SEQ ID NO: 1966449 - DNA, 15 bp, Homo sapiens
ccctcacatctgagt

SEQ ID NO: 1966450 - DNA, 15 bp, Homo sapiens
cctcacatctgagta

SEQ ID NO: 1966451 - DNA, 15 bp, Homo sapiens
ctcacatctgagtaa

SEQ ID NO: 1966452 - DNA, 15 bp, Homo sapiens
tcacatctgagtaac

SEQ ID NO: 1966453 - DNA, 15 bp, Homo sapiens
cacatctgagtaaca

SEQ ID NO: 1966454 - DNA, 15 bp, Homo sapiens
acatctgagtaacaa

SEQ ID NO: 1966455 - DNA, 15 bp, Homo sapiens
catctgagtaacaaa

SEQ ID NO: 1966456 - DNA, 15 bp, Homo sapiens
atctgagtaacaaaa

SEQ ID NO: 1966457 - DNA, 15 bp, Homo sapiens
tctgagtaacaaaag

SEQ ID NO: 1966458 - DNA, 15 bp, Homo sapiens
ctgagtaacaaaaga

SEQ ID NO: 1966459 - DNA, 15 bp, Homo sapiens
tgagtaacaaaagaa

SEQ ID NO: 1966460 - DNA, 15 bp, Homo sapiens
gagtaacaaaagaac

SEQ ID NO: 1966461 - DNA, 15 bp, Homo sapiens
agtaacaaaagaacc

SEQ ID NO: 1966462 - DNA, 15 bp, Homo sapiens
gtaacaaaagaacct

SEQ ID NO: 1966463 - DNA, 15 bp, Homo sapiens
taacaaaagaacctt

SEQ ID NO: 1966464 - DNA, 15 bp, Homo sapiens
aacaaaagaaccttc

SEQ ID NO: 1966465 - DNA, 15 bp, Homo sapiens
acaaaagaaccttcc

SEQ ID NO: 1966466 - DNA, 15 bp, Homo sapiens
caaaagaaccttcct

SEQ ID NO: 1966467 - DNA, 15 bp, Homo sapiens
aaaagaaccttccta

SEQ ID NO: 1966468 - DNA, 15 bp, Homo sapiens
aaagaaccttcctac

SEQ ID NO: 1966469 - DNA, 15 bp, Homo sapiens
aagaaccttcctaca

SEQ ID NO: 1966470 - DNA, 15 bp, Homo sapiens
agaaccttcctacag

SEQ ID NO: 1966471 - DNA, 15 bp, Homo sapiens
gaaccttcctacagc

SEQ ID NO: 1966472 - DNA, 15 bp, Homo sapiens
aaccttcctacagca

SEQ ID NO: 1966473 - DNA, 15 bp, Homo sapiens
accttcctacagcag

SEQ ID NO: 1966474 - DNA, 15 bp, Homo sapiens
ccttcctacagcaga

SEQ ID NO: 1966475 - DNA, 15 bp, Homo sapiens
cttcctacagcagac

SEQ ID NO: 1966476 - DNA, 15 bp, Homo sapiens
ttcctacagcagaca

SEQ ID NO: 1966477 - DNA, 15 bp, Homo sapiens
tcctacagcagacaa

SEQ ID NO: 1966478 - DNA, 15 bp, Homo sapiens
cctacagcagacaac

SEQ ID NO: 1966479 - DNA, 15 bp, Homo sapiens
ctacagcagacaacc

SEQ ID NO: 1966480 - DNA, 15 bp, Homo sapiens
tacagcagacaaccc

SEQ ID NO: 1966481 - DNA, 15 bp, Homo sapiens
acagcagacaaccct

SEQ ID NO: 1966482 - DNA, 15 bp, Homo sapiens
cagcagacaacccta

SEQ ID NO: 1966483 - DNA, 15 bp, Homo sapiens
agcagacaaccctaa

SEQ ID NO: 1966484 - DNA, 15 bp, Homo sapiens
gcagacaaccctaag

SEQ ID NO: 1966485 - DNA, 15 bp, Homo sapiens
cagacaaccctaaga

SEQ ID NO: 1966486 - DNA, 15 bp, Homo sapiens
agacaaccctaagaa

SEQ ID NO: 1966487 - DNA, 15 bp, Homo sapiens
gacaaccctaagaac

SEQ ID NO: 1966488 - DNA, 15 bp, Homo sapiens
acaaccctaagaacg

SEQ ID NO: 1966489 - DNA, 15 bp, Homo sapiens
caaccctaagaacgt

SEQ ID NO: 1966490 - DNA, 15 bp, Homo sapiens
aaccctaagaacgta

SEQ ID NO: 1966491 - DNA, 15 bp, Homo sapiens
accctaagaacgtag

SEQ ID NO: 1966492 - DNA, 15 bp, Homo sapiens
ccctaagaacgtagt

SEQ ID NO: 1966493 - DNA, 15 bp, Homo sapiens
cctaagaacgtagtt

SEQ ID NO: 1966494 - DNA, 15 bp, Homo sapiens
ctaagaacgtagttc

SEQ ID NO: 1966495 - DNA, 15 bp, Homo sapiens
taagaacgtagttcc

SEQ ID NO: 1966496 - DNA, 15 bp, Homo sapiens
aagaacgtagttcca

SEQ ID NO: 1966497 - DNA, 15 bp, Homo sapiens
agaacgtagttccac

SEQ ID NO: 1966498 - DNA, 15 bp, Homo sapiens
gaacgtagttccaca

SEQ ID NO: 1966499 - DNA, 15 bp, Homo sapiens
aacgtagttccacag

SEQ ID NO: 1966500 - DNA, 15 bp, Homo sapiens
acgtagttccacagt

SEQ ID NO: 1966501 - DNA, 15 bp, Homo sapiens
cgtagttccacagtg

SEQ ID NO: 1966502 - DNA, 15 bp, Homo sapiens
gtagttccacagtgc

SEQ ID NO: 1966503 - DNA, 15 bp, Homo sapiens
tagttccacagtgcc

SEQ ID NO: 1966504 - DNA, 15 bp, Homo sapiens
agttccacagtgccc

SEQ ID NO: 1966505 - DNA, 15 bp, Homo sapiens
gttccacagtgccct

SEQ ID NO: 1966506 - DNA, 15 bp, Homo sapiens
ttccacagtgccctc

SEQ ID NO: 1966507 - DNA, 15 bp, Homo sapiens
tccacagtgccctcc

SEQ ID NO: 1966508 - DNA, 15 bp, Homo sapiens
ccacagtgccctcct

SEQ ID NO: 1966509 - DNA, 15 bp, Homo sapiens
cacagtgccctcctg

SEQ ID NO: 1966510 - DNA, 15 bp, Homo sapiens
acagtgccctcctga

SEQ ID NO: 1966511 - DNA, 15 bp, Homo sapiens
cagtgccctcctgag

SEQ ID NO: 1966512 - DNA, 15 bp, Homo sapiens
agtgccctcctgagg

SEQ ID NO: 1966513 - DNA, 15 bp, Homo sapiens
gtgccctcctgagga

SEQ ID NO: 1966514 - DNA, 15 bp, Homo sapiens
tgccctcctgaggat

SEQ ID NO: 1966515 - DNA, 15 bp, Homo sapiens
gccctcctgaggatt

SEQ ID NO: 1966516 - DNA, 15 bp, Homo sapiens
ccctcctgaggatta

SEQ ID NO: 1966517 - DNA, 15 bp, Homo sapiens
cctcctgaggattaa

SEQ ID NO: 1966518 - DNA, 15 bp, Homo sapiens
ctcctgaggattaaa

SEQ ID NO: 1966519 - DNA, 15 bp, Homo sapiens
tcctgaggattaaag

SEQ ID NO: 1966520 - DNA, 15 bp, Homo sapiens
cctgaggattaaagg

SEQ ID NO: 1966521 - DNA, 15 bp, Homo sapiens
ctgaggattaaaggg

SEQ ID NO: 1966522 - DNA, 15 bp, Homo sapiens
tgaggattaaagggt

SEQ ID NO: 1966523 - DNA, 15 bp, Homo sapiens
gaggattaaagggtt

SEQ ID NO: 1966524 - DNA, 15 bp, Homo sapiens
aggattaaagggttc

SEQ ID NO: 1966525 - DNA, 15 bp, Homo sapiens
ggattaaagggttca

SEQ ID NO: 1966526 - DNA, 15 bp, Homo sapiens
gattaaagggttcat

SEQ ID NO: 1966527 - DNA, 15 bp, Homo sapiens
attaaagggttcatt

SEQ ID NO: 1966528 - DNA, 15 bp, Homo sapiens
ttaaagggttcattt

SEQ ID NO: 1966529 - DNA, 15 bp, Homo sapiens
taaagggttcattta

SEQ ID NO: 1966530 - DNA, 15 bp, Homo sapiens
aaagggttcatttat

SEQ ID NO: 1966531 - DNA, 15 bp, Homo sapiens
aagggttcatttatg

SEQ ID NO: 1966532 - DNA, 15 bp, Homo sapiens
agggttcatttatgc

SEQ ID NO: 1966533 - DNA, 15 bp, Homo sapiens
gggttcatttatgct

SEQ ID NO: 1966534 - DNA, 15 bp, Homo sapiens
ggttcatttatgctt

SEQ ID NO: 1966535 - DNA, 15 bp, Homo sapiens
gttcatttatgcttg

SEQ ID NO: 1966536 - DNA, 15 bp, Homo sapiens
ttcatttatgcttgg

SEQ ID NO: 1966537 - DNA, 15 bp, Homo sapiens
tcatttatgcttggt

SEQ ID NO: 1966538 - DNA, 15 bp, Homo sapiens
catttatgcttggtg

SEQ ID NO: 1966539 - DNA, 15 bp, Homo sapiens
atttatgcttggtgt

SEQ ID NO: 1966540 - DNA, 15 bp, Homo sapiens
tttatgcttggtgtg

SEQ ID NO: 1966541 - DNA, 15 bp, Homo sapiens
ttatgcttggtgtgt

SEQ ID NO: 1966542 - DNA, 15 bp, Homo sapiens
tatgcttggtgtgtg

SEQ ID NO: 1966543 - DNA, 15 bp, Homo sapiens
atgcttggtgtgtgt

SEQ ID NO: 1966544 - DNA, 15 bp, Homo sapiens
tgcttggtgtgtgtt

SEQ ID NO: 1966545 - DNA, 15 bp, Homo sapiens
gcttggtgtgtgtta

SEQ ID NO: 1966546 - DNA, 15 bp, Homo sapiens
cttggtgtgtgttaa

SEQ ID NO: 1966547 - DNA, 15 bp, Homo sapiens
ttggtgtgtgttaaa

SEQ ID NO: 1966548 - DNA, 15 bp, Homo sapiens
tggtgtgtgttaaag

SEQ ID NO: 1966549 - DNA, 15 bp, Homo sapiens
ggtgtgtgttaaaga

SEQ ID NO: 1966550 - DNA, 15 bp, Homo sapiens
gtgtgtgttaaagat

SEQ ID NO: 1966551 - DNA, 15 bp, Homo sapiens
tgtgtgttaaagata

SEQ ID NO: 1966552 - DNA, 15 bp, Homo sapiens
gtgtgttaaagatac

SEQ ID NO: 1966553 - DNA, 15 bp, Homo sapiens
tgtgttaaagataca

SEQ ID NO: 1966554 - DNA, 15 bp, Homo sapiens
gtgttaaagatacat

SEQ ID NO: 1966555 - DNA, 15 bp, Homo sapiens
tgttaaagatacatc

SEQ ID NO: 1966556 - DNA, 15 bp, Homo sapiens
gttaaagatacatca

SEQ ID NO: 1966557 - DNA, 15 bp, Homo sapiens
ttaaagatacatcac

SEQ ID NO: 1966558 - DNA, 15 bp, Homo sapiens
taaagatacatcact

SEQ ID NO: 1966559 - DNA, 15 bp, Homo sapiens
aaagatacatcactt

SEQ ID NO: 1966560 - DNA, 15 bp, Homo sapiens
aagatacatcacttc

SEQ ID NO: 1966561 - DNA, 15 bp, Homo sapiens
agatacatcacttct

SEQ ID NO: 1966562 - DNA, 15 bp, Homo sapiens
gatacatcacttcta

SEQ ID NO: 1966563 - DNA, 15 bp, Homo sapiens
atacatcacttctac

SEQ ID NO: 1966564 - DNA, 15 bp, Homo sapiens
tacatcacttctact

SEQ ID NO: 1966565 - DNA, 15 bp, Homo sapiens
acatcacttctacta

SEQ ID NO: 1966566 - DNA, 15 bp, Homo sapiens
catcacttctactag

SEQ ID NO: 1966567 - DNA, 15 bp, Homo sapiens
atcacttctactagt

SEQ ID NO: 1966568 - DNA, 15 bp, Homo sapiens
tcacttctactagtt

SEQ ID NO: 1966569 - DNA, 15 bp, Homo sapiens
cacttctactagtta

SEQ ID NO: 1966570 - DNA, 15 bp, Homo sapiens
acttctactagttac

SEQ ID NO: 1966571 - DNA, 15 bp, Homo sapiens
cttctactagttaca

SEQ ID NO: 1966572 - DNA, 15 bp, Homo sapiens
ttctactagttacag

SEQ ID NO: 1966573 - DNA, 15 bp, Homo sapiens
tctactagttacagc

SEQ ID NO: 1966574 - DNA, 15 bp, Homo sapiens
ctactagttacagcc

SEQ ID NO: 1966575 - DNA, 15 bp, Homo sapiens
tactagttacagcct

SEQ ID NO: 1966576 - DNA, 15 bp, Homo sapiens
actagttacagcctt

SEQ ID NO: 1966577 - DNA, 15 bp, Homo sapiens
ctagttacagcctta

SEQ ID NO: 1966578 - DNA, 15 bp, Homo sapiens
tagttacagccttaa

SEQ ID NO: 1966579 - DNA, 15 bp, Homo sapiens
agttacagccttaaa

SEQ ID NO: 1966580 - DNA, 15 bp, Homo sapiens
gttacagccttaaag

SEQ ID NO: 1966581 - DNA, 15 bp, Homo sapiens
ttacagccttaaaga

SEQ ID NO: 1966582 - DNA, 15 bp, Homo sapiens
tacagccttaaagag

SEQ ID NO: 1966583 - DNA, 15 bp, Homo sapiens
acagccttaaagagg

SEQ ID NO: 1966584 - DNA, 15 bp, Homo sapiens
cagccttaaagaggt

SEQ ID NO: 1966585 - DNA, 15 bp, Homo sapiens
agccttaaagaggtc

SEQ ID NO: 1966586 - DNA, 15 bp, Homo sapiens
gccttaaagaggtca

SEQ ID NO: 1966587 - DNA, 15 bp, Homo sapiens
ccttaaagaggtcag

SEQ ID NO: 1966588 - DNA, 15 bp, Homo sapiens
cttaaagaggtcaga

SEQ ID NO: 1966589 - DNA, 15 bp, Homo sapiens
ttaaagaggtcagaa

SEQ ID NO: 1966590 - DNA, 15 bp, Homo sapiens
taaagaggtcagaac

SEQ ID NO: 1966591 - DNA, 15 bp, Homo sapiens
aaagaggtcagaacc

SEQ ID NO: 1966592 - DNA, 15 bp, Homo sapiens
aagaggtcagaacca

SEQ ID NO: 1966593 - DNA, 15 bp, Homo sapiens
agaggtcagaaccaa

SEQ ID NO: 1966594 - DNA, 15 bp, Homo sapiens
gaggtcagaaccaaa

SEQ ID NO: 1966595 - DNA, 15 bp, Homo sapiens
aggtcagaaccaaag

SEQ ID NO: 1966596 - DNA, 15 bp, Homo sapiens
ggtcagaaccaaagt

SEQ ID NO: 1966597 - DNA, 15 bp, Homo sapiens
gtcagaaccaaagtt

SEQ ID NO: 1966598 - DNA, 15 bp, Homo sapiens
tcagaaccaaagttt

SEQ ID NO: 1966599 - DNA, 15 bp, Homo sapiens
cagaaccaaagtttc

SEQ ID NO: 1966600 - DNA, 15 bp, Homo sapiens
agaaccaaagtttct

SEQ ID NO: 1966601 - DNA, 15 bp, Homo sapiens
gaaccaaagtttctg

SEQ ID NO: 1966602 - DNA, 15 bp, Homo sapiens
aaccaaagtttctgg

SEQ ID NO: 1966603 - DNA, 15 bp, Homo sapiens
accaaagtttctggc

SEQ ID NO: 1966604 - DNA, 15 bp, Homo sapiens
ccaaagtttctggca

SEQ ID NO: 1966605 - DNA, 15 bp, Homo sapiens
caaagtttctggcag

SEQ ID NO: 1966606 - DNA, 15 bp, Homo sapiens
aaagtttctggcaga

SEQ ID NO: 1966607 - DNA, 15 bp, Homo sapiens
aagtttctggcagat

SEQ ID NO: 1966608 - DNA, 15 bp, Homo sapiens
agtttctggcagatt

SEQ ID NO: 1966609 - DNA, 15 bp, Homo sapiens
gtttctggcagattg

SEQ ID NO: 1966610 - DNA, 15 bp, Homo sapiens
tttctggcagattgt

SEQ ID NO: 1966611 - DNA, 15 bp, Homo sapiens
ttctggcagattgtt

SEQ ID NO: 1966612 - DNA, 15 bp, Homo sapiens
tctggcagattgttt

SEQ ID NO: 1966613 - DNA, 15 bp, Homo sapiens
ctggcagattgtttt

SEQ ID NO: 1966614 - DNA, 15 bp, Homo sapiens
tggcagattgtttta

SEQ ID NO: 1966615 - DNA, 15 bp, Homo sapiens
ggcagattgttttaa

SEQ ID NO: 1966616 - DNA, 15 bp, Homo sapiens
gcagattgttttaaa

SEQ ID NO: 1966617 - DNA, 15 bp, Homo sapiens
cagattgttttaaag

SEQ ID NO: 1966618 - DNA, 15 bp, Homo sapiens
agattgttttaaagc

SEQ ID NO: 1966619 - DNA, 15 bp, Homo sapiens
gattgttttaaagct

SEQ ID NO: 1966620 - DNA, 15 bp, Homo sapiens
attgttttaaagcta

SEQ ID NO: 1966621 - DNA, 15 bp, Homo sapiens
ttgttttaaagctaa

SEQ ID NO: 1966622 - DNA, 15 bp, Homo sapiens
tgttttaaagctaaa

SEQ ID NO: 1966623 - DNA, 15 bp, Homo sapiens
gttttaaagctaaat

SEQ ID NO: 1966624 - DNA, 15 bp, Homo sapiens
ttttaaagctaaatc

SEQ ID NO: 1966625 - DNA, 15 bp, Homo sapiens
tttaaagctaaatca

SEQ ID NO: 1966626 - DNA, 15 bp, Homo sapiens
ttaaagctaaatcag

SEQ ID NO: 1966627 - DNA, 15 bp, Homo sapiens
taaagctaaatcagt

SEQ ID NO: 1966628 - DNA, 15 bp, Homo sapiens
aaagctaaatcagtt

SEQ ID NO: 1966629 - DNA, 15 bp, Homo sapiens
aagctaaatcagttc

SEQ ID NO: 1966630 - DNA, 15 bp, Homo sapiens
agctaaatcagttcc

SEQ ID NO: 1966631 - DNA, 15 bp, Homo sapiens
gctaaatcagttccc

SEQ ID NO: 1966632 - DNA, 15 bp, Homo sapiens
ctaaatcagttcccc

SEQ ID NO: 1966633 - DNA, 15 bp, Homo sapiens
taaatcagttcccct

SEQ ID NO: 1966634 - DNA, 15 bp, Homo sapiens
aaatcagttcccctg

SEQ ID NO: 1966635 - DNA, 15 bp, Homo sapiens
aatcagttcccctga

SEQ ID NO: 1966636 - DNA, 15 bp, Homo sapiens
atcagttcccctgac

SEQ ID NO: 1966637 - DNA, 15 bp, Homo sapiens
tcagttcccctgact

SEQ ID NO: 1966638 - DNA, 15 bp, Homo sapiens
cagttcccctgactg

SEQ ID NO: 1966639 - DNA, 15 bp, Homo sapiens
agttcccctgactga

SEQ ID NO: 1966640 - DNA, 15 bp, Homo sapiens
gttcccctgactgaa

SEQ ID NO: 1966641 - DNA, 15 bp, Homo sapiens
ttcccctgactgaag

SEQ ID NO: 1966642 - DNA, 15 bp, Homo sapiens
tcccctgactgaagg

SEQ ID NO: 1966643 - DNA, 15 bp, Homo sapiens
cccctgactgaaggt

SEQ ID NO: 1966644 - DNA, 15 bp, Homo sapiens
ccctgactgaaggtg

SEQ ID NO: 1966645 - DNA, 15 bp, Homo sapiens
cctgactgaaggtgg

SEQ ID NO: 1966646 - DNA, 15 bp, Homo sapiens
ctgactgaaggtggg

SEQ ID NO: 1966647 - DNA, 15 bp, Homo sapiens
tgactgaaggtggga

SEQ ID NO: 1966648 - DNA, 15 bp, Homo sapiens
gactgaaggtgggaa

SEQ ID NO: 1966649 - DNA, 15 bp, Homo sapiens
actgaaggtgggaaa

SEQ ID NO: 1966650 - DNA, 15 bp, Homo sapiens
ctgaaggtgggaaaa

SEQ ID NO: 1966651 - DNA, 15 bp, Homo sapiens
tgaaggtgggaaaac

SEQ ID NO: 1966652 - DNA, 15 bp, Homo sapiens
gaaggtgggaaaaca

SEQ ID NO: 1966653 - DNA, 15 bp, Homo sapiens
aaggtgggaaaacaa

SEQ ID NO: 1966654 - DNA, 15 bp, Homo sapiens
aggtgggaaaacaaa

SEQ ID NO: 1966655 - DNA, 15 bp, Homo sapiens
ggtgggaaaacaaac

SEQ ID NO: 1966656 - DNA, 15 bp, Homo sapiens
gtgggaaaacaaact

SEQ ID NO: 1966657 - DNA, 15 bp, Homo sapiens
tgggaaaacaaactg

SEQ ID NO: 1966658 - DNA, 15 bp, Homo sapiens
gggaaaacaaactga

SEQ ID NO: 1966659 - DNA, 15 bp, Homo sapiens
ggaaaacaaactgaa

SEQ ID NO: 1966660 - DNA, 15 bp, Homo sapiens
gaaaacaaactgaaa

SEQ ID NO: 1966661 - DNA, 15 bp, Homo sapiens
aaaacaaactgaaat

SEQ ID NO: 1966662 - DNA, 15 bp, Homo sapiens
aaacaaactgaaata

SEQ ID NO: 1966663 - DNA, 15 bp, Homo sapiens
aacaaactgaaataa

SEQ ID NO: 1966664 - DNA, 15 bp, Homo sapiens
acaaactgaaataaa

SEQ ID NO: 1966665 - DNA, 15 bp, Homo sapiens
caaactgaaataaaa

SEQ ID NO: 1966666 - DNA, 15 bp, Homo sapiens
aaactgaaataaaat

SEQ ID NO: 1966667 - DNA, 15 bp, Homo sapiens
aactgaaataaaata

SEQ ID NO: 1966668 - DNA, 15 bp, Homo sapiens
actgaaataaaataa

SEQ ID NO: 1966669 - DNA, 15 bp, Homo sapiens
ctgaaataaaataat

SEQ ID NO: 1966670 - DNA, 15 bp, Homo sapiens
tgaaataaaataatt

SEQ ID NO: 1966671 - DNA, 15 bp, Homo sapiens
gaaataaaataattt

SEQ ID NO: 1966672 - DNA, 15 bp, Homo sapiens
aaataaaataattta

SEQ ID NO: 1966673 - DNA, 15 bp, Homo sapiens
aataaaataatttaa

SEQ ID NO: 1966674 - DNA, 15 bp, Homo sapiens
ataaaataatttaaa

SEQ ID NO: 1966675 - DNA, 15 bp, Homo sapiens
taaaataatttaaaa

SEQ ID NO: 1966676 - DNA, 15 bp, Homo sapiens
aaaataatttaaaaa

SEQ ID NO: 1966677 - DNA, 15 bp, Homo sapiens
aaataatttaaaaat

SEQ ID NO: 1966678 - DNA, 15 bp, Homo sapiens
aataatttaaaaatt

SEQ ID NO: 1966679 - DNA, 15 bp, Homo sapiens
ataatttaaaaatta

SEQ ID NO: 1966680 - DNA, 15 bp, Homo sapiens
taatttaaaaattat

SEQ ID NO: 1966681 - DNA, 15 bp, Homo sapiens
aatttaaaaattatt

SEQ ID NO: 1966682 - DNA, 15 bp, Homo sapiens
atttaaaaattattc

SEQ ID NO: 1966683 - DNA, 15 bp, Homo sapiens
taaaaattattcaaa

SEQ ID NO: 1966684 - DNA, 15 bp, Homo sapiens
aaaaattattcaaat

SEQ ID NO: 1966685 - DNA, 15 bp, Homo sapiens
aaaattattcaaatt

SEQ ID NO: 1966686 - DNA, 15 bp, Homo sapiens
aaattattcaaattc

SEQ ID NO: 1966687 - DNA, 15 bp, Homo sapiens
aattattcaaattca

SEQ ID NO: 1966688 - DNA, 15 bp, Homo sapiens
attattcaaattcat

SEQ ID NO: 1966689 - DNA, 15 bp, Homo sapiens
ttattcaaattcata

SEQ ID NO: 1966690 - DNA, 15 bp, Homo sapiens
tattcaaattcataa

SEQ ID NO: 1966691 - DNA, 15 bp, Homo sapiens
attcaaattcataaa

SEQ ID NO: 1966692 - DNA, 15 bp, Homo sapiens
ttcaaattcataaaa

SEQ ID NO: 1966693 - DNA, 15 bp, Homo sapiens
tcaaattcataaaac

SEQ ID NO: 1966694 - DNA, 15 bp, Homo sapiens
caaattcataaaact

SEQ ID NO: 1966695 - DNA, 15 bp, Homo sapiens
aaattcataaaacta

SEQ ID NO: 1966696 - DNA, 15 bp, Homo sapiens
aattcataaaactaa

SEQ ID NO: 1966697 - DNA, 15 bp, Homo sapiens
attcataaaactaag

SEQ ID NO: 1966698 - DNA, 15 bp, Homo sapiens
ttcataaaactaagt

SEQ ID NO: 1966699 - DNA, 15 bp, Homo sapiens
tcataaaactaagtg

SEQ ID NO: 1966700 - DNA, 15 bp, Homo sapiens
cataaaactaagtgt

SEQ ID NO: 1966701 - DNA, 15 bp, Homo sapiens
ataaaactaagtgta

SEQ ID NO: 1966702 - DNA, 15 bp, Homo sapiens
taaaactaagtgtaa

SEQ ID NO: 1966703 - DNA, 15 bp, Homo sapiens
aaaactaagtgtaaa

SEQ ID NO: 1966704 - DNA, 15 bp, Homo sapiens
aaactaagtgtaaag

SEQ ID NO: 1966705 - DNA, 15 bp, Homo sapiens
aactaagtgtaaagt

SEQ ID NO: 1966706 - DNA, 15 bp, Homo sapiens
actaagtgtaaagta

SEQ ID NO: 1966707 - DNA, 15 bp, Homo sapiens
ctaagtgtaaagtaa

SEQ ID NO: 1966708 - DNA, 15 bp, Homo sapiens
taagtgtaaagtaag

SEQ ID NO: 1966709 - DNA, 15 bp, Homo sapiens
aagtgtaaagtaaga

SEQ ID NO: 1966710 - DNA, 15 bp, Homo sapiens
agtgtaaagtaagat

SEQ ID NO: 1966711 - DNA, 15 bp, Homo sapiens
gtgtaaagtaagatg

SEQ ID NO: 1966712 - DNA, 15 bp, Homo sapiens
tgtaaagtaagatgg

SEQ ID NO: 1966713 - DNA, 15 bp, Homo sapiens
gtaaagtaagatggt

SEQ ID NO: 1966714 - DNA, 15 bp, Homo sapiens
taaagtaagatggtg

SEQ ID NO: 1966715 - DNA, 15 bp, Homo sapiens
aaagtaagatggtgt

SEQ ID NO: 1966716 - DNA, 15 bp, Homo sapiens
aagtaagatggtgtt

SEQ ID NO: 1966717 - DNA, 15 bp, Homo sapiens
agtaagatggtgtta

SEQ ID NO: 1966718 - DNA, 15 bp, Homo sapiens
taagatggtgttatg

SEQ ID NO: 1966719 - DNA, 15 bp, Homo sapiens
aagatggtgttatgg

SEQ ID NO: 1966720 - DNA, 15 bp, Homo sapiens
agatggtgttatggt

SEQ ID NO: 1966721 - DNA, 15 bp, Homo sapiens
gatggtgttatggta

SEQ ID NO: 1966722 - DNA, 15 bp, Homo sapiens
atggtgttatggtaa

SEQ ID NO: 1966723 - DNA, 15 bp, Homo sapiens
tggtgttatggtaag

SEQ ID NO: 1966724 - DNA, 15 bp, Homo sapiens
ggtgttatggtaagt

SEQ ID NO: 1966725 - DNA, 15 bp, Homo sapiens
gtgttatggtaagtt

SEQ ID NO: 1966726 - DNA, 15 bp, Homo sapiens
tgttatggtaagttt

SEQ ID NO: 1966727 - DNA, 15 bp, Homo sapiens
gttatggtaagtttg

SEQ ID NO: 1966728 - DNA, 15 bp, Homo sapiens
ttatggtaagtttgt

SEQ ID NO: 1966729 - DNA, 15 bp, Homo sapiens
tatggtaagtttgta

SEQ ID NO: 1966730 - DNA, 15 bp, Homo sapiens
atggtaagtttgtag

SEQ ID NO: 1966731 - DNA, 15 bp, Homo sapiens
tggtaagtttgtagc

SEQ ID NO: 1966732 - DNA, 15 bp, Homo sapiens
ggtaagtttgtagcg

SEQ ID NO: 1966733 - DNA, 15 bp, Homo sapiens
gtaagtttgtagcgt

SEQ ID NO: 1966734 - DNA, 15 bp, Homo sapiens
taagtttgtagcgtt

SEQ ID NO: 1966735 - DNA, 15 bp, Homo sapiens
aagtttgtagcgttt

SEQ ID NO: 1966736 - DNA, 15 bp, Homo sapiens
agtttgtagcgttta

SEQ ID NO: 1966737 - DNA, 15 bp, Homo sapiens
gtttgtagcgtttat

SEQ ID NO: 1966738 - DNA, 15 bp, Homo sapiens
tttgtagcgtttata

SEQ ID NO: 1966739 - DNA, 15 bp, Homo sapiens
ttgtagcgtttatat

SEQ ID NO: 1966740 - DNA, 15 bp, Homo sapiens
tgtagcgtttatatt

SEQ ID NO: 1966741 - DNA, 15 bp, Homo sapiens
gtagcgtttatatta

SEQ ID NO: 1966742 - DNA, 15 bp, Homo sapiens
tagcgtttatattag

SEQ ID NO: 1966743 - DNA, 15 bp, Homo sapiens
agcgtttatattaga

SEQ ID NO: 1966744 - DNA, 15 bp, Homo sapiens
gcgtttatattagaa

SEQ ID NO: 1966745 - DNA, 15 bp, Homo sapiens
cgtttatattagaag

SEQ ID NO: 1966746 - DNA, 15 bp, Homo sapiens
gtttatattagaagt

SEQ ID NO: 1966747 - DNA, 15 bp, Homo sapiens
tttatattagaagtt

SEQ ID NO: 1966748 - DNA, 15 bp, Homo sapiens
ttatattagaagttt

SEQ ID NO: 1966749 - DNA, 15 bp, Homo sapiens
tatattagaagtttt

SEQ ID NO: 1966750 - DNA, 15 bp, Homo sapiens
atattagaagtttta

SEQ ID NO: 1966751 - DNA, 15 bp, Homo sapiens
tattagaagttttaa

SEQ ID NO: 1966752 - DNA, 15 bp, Homo sapiens
attagaagttttaat

SEQ ID NO: 1966753 - DNA, 15 bp, Homo sapiens
ttagaagttttaata

SEQ ID NO: 1966754 - DNA, 15 bp, Homo sapiens
tagaagttttaatat

SEQ ID NO: 1966755 - DNA, 15 bp, Homo sapiens
agaagttttaatatt

SEQ ID NO: 1966756 - DNA, 15 bp, Homo sapiens
gaagttttaatatta

SEQ ID NO: 1966757 - DNA, 15 bp, Homo sapiens
aagttttaatattaa

SEQ ID NO: 1966758 - DNA, 15 bp, Homo sapiens
ttaatattaaaactc

SEQ ID NO: 1966759 - DNA, 15 bp, Homo sapiens
taatattaaaactca

SEQ ID NO: 1966760 - DNA, 15 bp, Homo sapiens
aatattaaaactcaa

SEQ ID NO: 1966761 - DNA, 15 bp, Homo sapiens
atattaaaactcaaa

SEQ ID NO: 1966762 - DNA, 15 bp, Homo sapiens
tattaaaactcaaaa

SEQ ID NO: 1966763 - DNA, 15 bp, Homo sapiens
attaaaactcaaaac

SEQ ID NO: 1966764 - DNA, 15 bp, Homo sapiens
ttaaaactcaaaact

SEQ ID NO: 1966765 - DNA, 15 bp, Homo sapiens
taaaactcaaaactg

SEQ ID NO: 1966766 - DNA, 15 bp, Homo sapiens
aaaactcaaaactgc

SEQ ID NO: 1966767 - DNA, 15 bp, Homo sapiens
aaactcaaaactgcc

SEQ ID NO: 1966768 - DNA, 15 bp, Homo sapiens
aactcaaaactgccc

SEQ ID NO: 1966769 - DNA, 15 bp, Homo sapiens
actcaaaactgccct

SEQ ID NO: 1966770 - DNA, 15 bp, Homo sapiens
ctcaaaactgccctg

SEQ ID NO: 1966771 - DNA, 15 bp, Homo sapiens
tcaaaactgccctgt

SEQ ID NO: 1966772 - DNA, 15 bp, Homo sapiens
caaaactgccctgtt

SEQ ID NO: 1966773 - DNA, 15 bp, Homo sapiens
aaaactgccctgtta

SEQ ID NO: 1966774 - DNA, 15 bp, Homo sapiens
aaactgccctgttag

SEQ ID NO: 1966775 - DNA, 15 bp, Homo sapiens
aactgccctgttaga

SEQ ID NO: 1966776 - DNA, 15 bp, Homo sapiens
actgccctgttagaa

SEQ ID NO: 1966777 - DNA, 15 bp, Homo sapiens
ctgccctgttagaat

SEQ ID NO: 1966778 - DNA, 15 bp, Homo sapiens
tgccctgttagaatc

SEQ ID NO: 1966779 - DNA, 15 bp, Homo sapiens
gccctgttagaatct

SEQ ID NO: 1966780 - DNA, 15 bp, Homo sapiens
ccctgttagaatctg

SEQ ID NO: 1966781 - DNA, 15 bp, Homo sapiens
cctgttagaatctga

SEQ ID NO: 1966782 - DNA, 15 bp, Homo sapiens
ctgttagaatctgaa

SEQ ID NO: 1966783 - DNA, 15 bp, Homo sapiens
tgttagaatctgaag

SEQ ID NO: 1966784 - DNA, 15 bp, Homo sapiens
gttagaatctgaagt

SEQ ID NO: 1966785 - DNA, 15 bp, Homo sapiens
ttagaatctgaagtt

SEQ ID NO: 1966786 - DNA, 15 bp, Homo sapiens
tagaatctgaagttc

SEQ ID NO: 1966787 - DNA, 15 bp, Homo sapiens
agaatctgaagttct

SEQ ID NO: 1966788 - DNA, 15 bp, Homo sapiens
gaatctgaagttctt

SEQ ID NO: 1966789 - DNA, 15 bp, Homo sapiens
aatctgaagttcttg

SEQ ID NO: 1966790 - DNA, 15 bp, Homo sapiens
atctgaagttcttga

SEQ ID NO: 1966791 - DNA, 15 bp, Homo sapiens
tctgaagttcttgag

SEQ ID NO: 1966792 - DNA, 15 bp, Homo sapiens
ctgaagttcttgaga

SEQ ID NO: 1966793 - DNA, 15 bp, Homo sapiens
tgaagttcttgagat

SEQ ID NO: 1966794 - DNA, 15 bp, Homo sapiens
gaagttcttgagatg

SEQ ID NO: 1966795 - DNA, 15 bp, Homo sapiens
aagttcttgagatgg

SEQ ID NO: 1966796 - DNA, 15 bp, Homo sapiens
agttcttgagatggg

SEQ ID NO: 1966797 - DNA, 15 bp, Homo sapiens
gttcttgagatgggt

SEQ ID NO: 1966798 - DNA, 15 bp, Homo sapiens
ttcttgagatgggtg

SEQ ID NO: 1966799 - DNA, 15 bp, Homo sapiens
tcttgagatgggtgc

SEQ ID NO: 1966800 - DNA, 15 bp, Homo sapiens
cttgagatgggtgcc

SEQ ID NO: 1966801 - DNA, 15 bp, Homo sapiens
ttgagatgggtgcct

SEQ ID NO: 1966802 - DNA, 15 bp, Homo sapiens
tgagatgggtgcctg

SEQ ID NO: 1966803 - DNA, 15 bp, Homo sapiens
gagatgggtgcctga

SEQ ID NO: 1966804 - DNA, 15 bp, Homo sapiens
agatgggtgcctgaa

SEQ ID NO: 1966805 - DNA, 15 bp, Homo sapiens
gatgggtgcctgaaa

SEQ ID NO: 1966806 - DNA, 15 bp, Homo sapiens
atgggtgcctgaaag

SEQ ID NO: 1966807 - DNA, 15 bp, Homo sapiens
tgggtgcctgaaaga

SEQ ID NO: 1966808 - DNA, 15 bp, Homo sapiens
gggtgcctgaaagat

SEQ ID NO: 1966809 - DNA, 15 bp, Homo sapiens
ggtgcctgaaagatt

SEQ ID NO: 1966810 - DNA, 15 bp, Homo sapiens
gtgcctgaaagattg

SEQ ID NO: 1966811 - DNA, 15 bp, Homo sapiens
tgcctgaaagattga

SEQ ID NO: 1966812 - DNA, 15 bp, Homo sapiens
gcctgaaagattgaa

SEQ ID NO: 1966813 - DNA, 15 bp, Homo sapiens
cctgaaagattgaaa

SEQ ID NO: 1966814 - DNA, 15 bp, Homo sapiens
ctgaaagattgaaat

SEQ ID NO: 1966815 - DNA, 15 bp, Homo sapiens
tgaaagattgaaatt

SEQ ID NO: 1966816 - DNA, 15 bp, Homo sapiens
gaaagattgaaattc

SEQ ID NO: 1966817 - DNA, 15 bp, Homo sapiens
aaagattgaaattca

SEQ ID NO: 1966818 - DNA, 15 bp, Homo sapiens
aagattgaaattcat

SEQ ID NO: 1966819 - DNA, 15 bp, Homo sapiens
agattgaaattcatt

SEQ ID NO: 1966820 - DNA, 15 bp, Homo sapiens
gattgaaattcattt

SEQ ID NO: 1966821 - DNA, 15 bp, Homo sapiens
attgaaattcatttg

SEQ ID NO: 1966822 - DNA, 15 bp, Homo sapiens
ttgaaattcatttgg

SEQ ID NO: 1966823 - DNA, 15 bp, Homo sapiens
tgaaattcatttggg

SEQ ID NO: 1966824 - DNA, 15 bp, Homo sapiens
gaaattcatttgggg

SEQ ID NO: 1966825 - DNA, 15 bp, Homo sapiens
aaattcatttggggc

SEQ ID NO: 1966826 - DNA, 15 bp, Homo sapiens
aattcatttggggct

SEQ ID NO: 1966827 - DNA, 15 bp, Homo sapiens
attcatttggggcta

SEQ ID NO: 1966828 - DNA, 15 bp, Homo sapiens
ttcatttggggctat

SEQ ID NO: 1966829 - DNA, 15 bp, Homo sapiens
tcatttggggctatc

SEQ ID NO: 1966830 - DNA, 15 bp, Homo sapiens
catttggggctatcg

SEQ ID NO: 1966831 - DNA, 15 bp, Homo sapiens
atttggggctatcgc

SEQ ID NO: 1966832 - DNA, 15 bp, Homo sapiens
tttggggctatcgca

SEQ ID NO: 1966833 - DNA, 15 bp, Homo sapiens
ttggggctatcgcaa

SEQ ID NO: 1966834 - DNA, 15 bp, Homo sapiens
tggggctatcgcaaa

SEQ ID NO: 1966835 - DNA, 15 bp, Homo sapiens
ggggctatcgcaaaa

SEQ ID NO: 1966836 - DNA, 15 bp, Homo sapiens
gggctatcgcaaaat

SEQ ID NO: 1966837 - DNA, 15 bp, Homo sapiens
ggctatcgcaaaatg

SEQ ID NO: 1966838 - DNA, 15 bp, Homo sapiens
gctatcgcaaaatgg

SEQ ID NO: 1966839 - DNA, 15 bp, Homo sapiens
ctatcgcaaaatgga

SEQ ID NO: 1966840 - DNA, 15 bp, Homo sapiens
tatcgcaaaatggaa

SEQ ID NO: 1966841 - DNA, 15 bp, Homo sapiens
atcgcaaaatggaaa

SEQ ID NO: 1966842 - DNA, 15 bp, Homo sapiens
tcgcaaaatggaaaa

SEQ ID NO: 1966843 - DNA, 15 bp, Homo sapiens
cgcaaaatggaaaaa

SEQ ID NO: 1966844 - DNA, 15 bp, Homo sapiens
gcaaaatggaaaaag

SEQ ID NO: 1966845 - DNA, 15 bp, Homo sapiens
caaaatggaaaaagc

SEQ ID NO: 1966846 - DNA, 15 bp, Homo sapiens
aaaatggaaaaagca

SEQ ID NO: 1966847 - DNA, 15 bp, Homo sapiens
aaatggaaaaagcat

SEQ ID NO: 1966848 - DNA, 15 bp, Homo sapiens
aatggaaaaagcatt

SEQ ID NO: 1966849 - DNA, 15 bp, Homo sapiens
atggaaaaagcattt

SEQ ID NO: 1966850 - DNA, 15 bp, Homo sapiens
tggaaaaagcatttg

SEQ ID NO: 1966851 - DNA, 15 bp, Homo sapiens
ggaaaaagcatttgt

SEQ ID NO: 1966852 - DNA, 15 bp, Homo sapiens
gaaaaagcatttgtg

SEQ ID NO: 1966853 - DNA, 15 bp, Homo sapiens
aaaagcatttgtgac

SEQ ID NO: 1966854 - DNA, 15 bp, Homo sapiens
aaagcatttgtgaca

SEQ ID NO: 1966855 - DNA, 15 bp, Homo sapiens
aagcatttgtgacac

SEQ ID NO: 1966856 - DNA, 15 bp, Homo sapiens
agcatttgtgacact

SEQ ID NO: 1966857 - DNA, 15 bp, Homo sapiens
gcatttgtgacactt

SEQ ID NO: 1966858 - DNA, 15 bp, Homo sapiens
catttgtgacacttg

SEQ ID NO: 1966859 - DNA, 15 bp, Homo sapiens
atttgtgacacttgt

SEQ ID NO: 1966860 - DNA, 15 bp, Homo sapiens
tttgtgacacttgtt

SEQ ID NO: 1966861 - DNA, 15 bp, Homo sapiens
ttgtgacacttgttg

SEQ ID NO: 1966862 - DNA, 15 bp, Homo sapiens
tgtgacacttgttga

SEQ ID NO: 1966863 - DNA, 15 bp, Homo sapiens
gtgacacttgttgac

SEQ ID NO: 1966864 - DNA, 15 bp, Homo sapiens
tgacacttgttgaca

SEQ ID NO: 1966865 - DNA, 15 bp, Homo sapiens
gacacttgttgacac

SEQ ID NO: 1966866 - DNA, 15 bp, Homo sapiens
acacttgttgacacc

SEQ ID NO: 1966867 - DNA, 15 bp, Homo sapiens
cacttgttgacacct

SEQ ID NO: 1966868 - DNA, 15 bp, Homo sapiens
acttgttgacacctt

SEQ ID NO: 1966869 - DNA, 15 bp, Homo sapiens
cttgttgacacctta

SEQ ID NO: 1966870 - DNA, 15 bp, Homo sapiens
ttgttgacaccttat

SEQ ID NO: 1966871 - DNA, 15 bp, Homo sapiens
tgttgacaccttata

SEQ ID NO: 1966872 - DNA, 15 bp, Homo sapiens
gttgacaccttatat

SEQ ID NO: 1966873 - DNA, 15 bp, Homo sapiens
ttgacaccttatata

SEQ ID NO: 1966874 - DNA, 15 bp, Homo sapiens
tgacaccttatatac

SEQ ID NO: 1966875 - DNA, 15 bp, Homo sapiens
gacaccttatatact

SEQ ID NO: 1966876 - DNA, 15 bp, Homo sapiens
acaccttatatactt

SEQ ID NO: 1966877 - DNA, 15 bp, Homo sapiens
caccttatatacttg

SEQ ID NO: 1966878 - DNA, 15 bp, Homo sapiens
accttatatacttgt

SEQ ID NO: 1966879 - DNA, 15 bp, Homo sapiens
ccttatatacttgta

SEQ ID NO: 1966880 - DNA, 15 bp, Homo sapiens
cttatatacttgtaa

SEQ ID NO: 1966881 - DNA, 15 bp, Homo sapiens
ttatatacttgtaat

SEQ ID NO: 1966882 - DNA, 15 bp, Homo sapiens
tatatacttgtaata

SEQ ID NO: 1966883 - DNA, 15 bp, Homo sapiens
atatacttgtaatag

SEQ ID NO: 1966884 - DNA, 15 bp, Homo sapiens
tatacttgtaatagt

SEQ ID NO: 1966885 - DNA, 15 bp, Homo sapiens
atacttgtaatagtg

SEQ ID NO: 1966886 - DNA, 15 bp, Homo sapiens
tacttgtaatagtga

SEQ ID NO: 1966887 - DNA, 15 bp, Homo sapiens
acttgtaatagtgat

SEQ ID NO: 1966888 - DNA, 15 bp, Homo sapiens
cttgtaatagtgatg

SEQ ID NO: 1966889 - DNA, 15 bp, Homo sapiens
ttgtaatagtgatgt

SEQ ID NO: 1966890 - DNA, 15 bp, Homo sapiens
tgtaatagtgatgtg

SEQ ID NO: 1966891 - DNA, 15 bp, Homo sapiens
gtaatagtgatgtgg

SEQ ID NO: 1966892 - DNA, 15 bp, Homo sapiens
taatagtgatgtggg

SEQ ID NO: 1966893 - DNA, 15 bp, Homo sapiens
aatagtgatgtgggt

SEQ ID NO: 1966894 - DNA, 15 bp, Homo sapiens
atagtgatgtgggtg

SEQ ID NO: 1966895 - DNA, 15 bp, Homo sapiens
tagtgatgtgggtga

SEQ ID NO: 1966896 - DNA, 15 bp, Homo sapiens
agtgatgtgggtgac

SEQ ID NO: 1966897 - DNA, 15 bp, Homo sapiens
gtgatgtgggtgact

SEQ ID NO: 1966898 - DNA, 15 bp, Homo sapiens
tgatgtgggtgacta

SEQ ID NO: 1966899 - DNA, 15 bp, Homo sapiens
gatgtgggtgactaa

SEQ ID NO: 1966900 - DNA, 15 bp, Homo sapiens
atgtgggtgactaaa

SEQ ID NO: 1966901 - DNA, 15 bp, Homo sapiens
tgtgggtgactaaac

SEQ ID NO: 1966902 - DNA, 15 bp, Homo sapiens
gtgggtgactaaaca

SEQ ID NO: 1966903 - DNA, 15 bp, Homo sapiens
tgggtgactaaacat

SEQ ID NO: 1966904 - DNA, 15 bp, Homo sapiens
gggtgactaaacatc

SEQ ID NO: 1966905 - DNA, 15 bp, Homo sapiens
ggtgactaaacatca

SEQ ID NO: 1966906 - DNA, 15 bp, Homo sapiens
gtgactaaacatcat

SEQ ID NO: 1966907 - DNA, 15 bp, Homo sapiens
tgactaaacatcatc

SEQ ID NO: 1966908 - DNA, 15 bp, Homo sapiens
gactaaacatcatca

SEQ ID NO: 1966909 - DNA, 15 bp, Homo sapiens
actaaacatcatcaa

SEQ ID NO: 1966910 - DNA, 15 bp, Homo sapiens
ctaaacatcatcaag

SEQ ID NO: 1966911 - DNA, 15 bp, Homo sapiens
taaacatcatcaagg

SEQ ID NO: 1966912 - DNA, 15 bp, Homo sapiens
aaacatcatcaaggg

SEQ ID NO: 1966913 - DNA, 15 bp, Homo sapiens
aacatcatcaagggg

SEQ ID NO: 1966914 - DNA, 15 bp, Homo sapiens
acatcatcaagggga

SEQ ID NO: 1966915 - DNA, 15 bp, Homo sapiens
catcatcaaggggac

SEQ ID NO: 1966916 - DNA, 15 bp, Homo sapiens
atcatcaaggggaca

SEQ ID NO: 1966917 - DNA, 15 bp, Homo sapiens
tcatcaaggggacag

SEQ ID NO: 1966918 - DNA, 15 bp, Homo sapiens
catcaaggggacaga

SEQ ID NO: 1966919 - DNA, 15 bp, Homo sapiens
atcaaggggacagag

SEQ ID NO: 1966920 - DNA, 15 bp, Homo sapiens
tcaaggggacagagc

SEQ ID NO: 1966921 - DNA, 15 bp, Homo sapiens
caaggggacagagct

SEQ ID NO: 1966922 - DNA, 15 bp, Homo sapiens
aaggggacagagctc

SEQ ID NO: 1966923 - DNA, 15 bp, Homo sapiens
aggggacagagctca

SEQ ID NO: 1966924 - DNA, 15 bp, Homo sapiens
ggggacagagctcac

SEQ ID NO: 1966925 - DNA, 15 bp, Homo sapiens
gggacagagctcact

SEQ ID NO: 1966926 - DNA, 15 bp, Homo sapiens
ggacagagctcactg

SEQ ID NO: 1966927 - DNA, 15 bp, Homo sapiens
gacagagctcactgc

SEQ ID NO: 1966928 - DNA, 15 bp, Homo sapiens
acagagctcactgct

SEQ ID NO: 1966929 - DNA, 15 bp, Homo sapiens
cagagctcactgctc

SEQ ID NO: 1966930 - DNA, 15 bp, Homo sapiens
agagctcactgctca

SEQ ID NO: 1966931 - DNA, 15 bp, Homo sapiens
gagctcactgctcac

SEQ ID NO: 1966932 - DNA, 15 bp, Homo sapiens
agctcactgctcact

SEQ ID NO: 1966933 - DNA, 15 bp, Homo sapiens
gctcactgctcactg

SEQ ID NO: 1966934 - DNA, 15 bp, Homo sapiens
ctcactgctcactgg

SEQ ID NO: 1966935 - DNA, 15 bp, Homo sapiens
tcactgctcactggc

SEQ ID NO: 1966936 - DNA, 15 bp, Homo sapiens
cactgctcactggca

SEQ ID NO: 1966937 - DNA, 15 bp, Homo sapiens
actgctcactggcat

SEQ ID NO: 1966938 - DNA, 15 bp, Homo sapiens
ctgctcactggcatt

SEQ ID NO: 1966939 - DNA, 15 bp, Homo sapiens
tgctcactggcattt

SEQ ID NO: 1966940 - DNA, 15 bp, Homo sapiens
gctcactggcatttt

SEQ ID NO: 1966941 - DNA, 15 bp, Homo sapiens
ctcactggcattttt

SEQ ID NO: 1966942 - DNA, 15 bp, Homo sapiens
tcactggcatttttt

SEQ ID NO: 1966943 - DNA, 15 bp, Homo sapiens
cactggcattttttt

SEQ ID NO: 1966944 - DNA, 15 bp, Homo sapiens
actggcatttttttt

SEQ ID NO: 1966945 - DNA, 15 bp, Homo sapiens
ctggcatttttttta

SEQ ID NO: 1966946 - DNA, 15 bp, Homo sapiens
tggcattttttttag

SEQ ID NO: 1966947 - DNA, 15 bp, Homo sapiens
ggcattttttttaga

SEQ ID NO: 1966948 - DNA, 15 bp, Homo sapiens
gcattttttttagag

SEQ ID NO: 1966949 - DNA, 15 bp, Homo sapiens
cattttttttagagt

SEQ ID NO: 1966950 - DNA, 15 bp, Homo sapiens
attttttttagagtg

SEQ ID NO: 1966951 - DNA, 15 bp, Homo sapiens
ttttttttagagtgc

SEQ ID NO: 1966952 - DNA, 15 bp, Homo sapiens
tttttttagagtgct

SEQ ID NO: 1966953 - DNA, 15 bp, Homo sapiens
ttttttagagtgctt

SEQ ID NO: 1966954 - DNA, 15 bp, Homo sapiens
tttttagagtgctta

SEQ ID NO: 1966955 - DNA, 15 bp, Homo sapiens
ttttagagtgcttat

SEQ ID NO: 1966956 - DNA, 15 bp, Homo sapiens
tttagagtgcttatt

SEQ ID NO: 1966957 - DNA, 15 bp, Homo sapiens
ttagagtgcttatta

SEQ ID NO: 1966958 - DNA, 15 bp, Homo sapiens
tagagtgcttattaa

SEQ ID NO: 1966959 - DNA, 15 bp, Homo sapiens
agagtgcttattaac

SEQ ID NO: 1966960 - DNA, 15 bp, Homo sapiens
gagtgcttattaact

SEQ ID NO: 1966961 - DNA, 15 bp, Homo sapiens
agtgcttattaacta

SEQ ID NO: 1966962 - DNA, 15 bp, Homo sapiens
gtgcttattaactat

SEQ ID NO: 1966963 - DNA, 15 bp, Homo sapiens
tgcttattaactatt

SEQ ID NO: 1966964 - DNA, 15 bp, Homo sapiens
gcttattaactattg

SEQ ID NO: 1966965 - DNA, 15 bp, Homo sapiens
cttattaactattga

SEQ ID NO: 1966966 - DNA, 15 bp, Homo sapiens
ttattaactattgat

SEQ ID NO: 1966967 - DNA, 15 bp, Homo sapiens
tattaactattgatt

SEQ ID NO: 1966968 - DNA, 15 bp, Homo sapiens
attaactattgattg

SEQ ID NO: 1966969 - DNA, 15 bp, Homo sapiens
ttaactattgattgt

SEQ ID NO: 1966970 - DNA, 15 bp, Homo sapiens
taactattgattgta

SEQ ID NO: 1966971 - DNA, 15 bp, Homo sapiens
aactattgattgtat

SEQ ID NO: 1966972 - DNA, 15 bp, Homo sapiens
actattgattgtatc

SEQ ID NO: 1966973 - DNA, 15 bp, Homo sapiens
ctattgattgtatct

SEQ ID NO: 1966974 - DNA, 15 bp, Homo sapiens
tattgattgtatcta

SEQ ID NO: 1966975 - DNA, 15 bp, Homo sapiens
attgattgtatctag

SEQ ID NO: 1966976 - DNA, 15 bp, Homo sapiens
ttgattgtatctagt

SEQ ID NO: 1966977 - DNA, 15 bp, Homo sapiens
tgattgtatctagtg

SEQ ID NO: 1966978 - DNA, 15 bp, Homo sapiens
gattgtatctagtgt

SEQ ID NO: 1966979 - DNA, 15 bp, Homo sapiens
attgtatctagtgtc

SEQ ID NO: 1966980 - DNA, 15 bp, Homo sapiens
ttgtatctagtgtcc

SEQ ID NO: 1966981 - DNA, 15 bp, Homo sapiens
tgtatctagtgtcca

SEQ ID NO: 1966982 - DNA, 15 bp, Homo sapiens
gtatctagtgtccag

SEQ ID NO: 1966983 - DNA, 15 bp, Homo sapiens
tatctagtgtccaga

SEQ ID NO: 1966984 - DNA, 15 bp, Homo sapiens
atctagtgtccagag

SEQ ID NO: 1966985 - DNA, 15 bp, Homo sapiens
tctagtgtccagagg

SEQ ID NO: 1966986 - DNA, 15 bp, Homo sapiens
ctagtgtccagaggt

SEQ ID NO: 1966987 - DNA, 15 bp, Homo sapiens
tagtgtccagaggtg

SEQ ID NO: 1966988 - DNA, 15 bp, Homo sapiens
agtgtccagaggtgc

SEQ ID NO: 1966989 - DNA, 15 bp, Homo sapiens
gtgtccagaggtgcg

SEQ ID NO: 1966990 - DNA, 15 bp, Homo sapiens
tgtccagaggtgcgt

SEQ ID NO: 1966991 - DNA, 15 bp, Homo sapiens
gtccagaggtgcgtt

SEQ ID NO: 1966992 - DNA, 15 bp, Homo sapiens
tccagaggtgcgttt

SEQ ID NO: 1966993 - DNA, 15 bp, Homo sapiens
ccagaggtgcgtttg

SEQ ID NO: 1966994 - DNA, 15 bp, Homo sapiens
cagaggtgcgtttgt

SEQ ID NO: 1966995 - DNA, 15 bp, Homo sapiens
agaggtgcgtttgta

SEQ ID NO: 1966996 - DNA, 15 bp, Homo sapiens
gaggtgcgtttgtac

SEQ ID NO: 1966997 - DNA, 15 bp, Homo sapiens
aggtgcgtttgtacc

SEQ ID NO: 1966998 - DNA, 15 bp, Homo sapiens
ggtgcgtttgtacca

SEQ ID NO: 1966999 - DNA, 15 bp, Homo sapiens
gtgcgtttgtaccat

SEQ ID NO: 1967000 - DNA, 15 bp, Homo sapiens
tgcgtttgtaccatg

SEQ ID NO: 1967001 - DNA, 15 bp, Homo sapiens
gcgtttgtaccatgg

SEQ ID NO: 1967002 - DNA, 15 bp, Homo sapiens
cgtttgtaccatggg

SEQ ID NO: 1967003 - DNA, 15 bp, Homo sapiens
gtttgtaccatgggt

SEQ ID NO: 1967004 - DNA, 15 bp, Homo sapiens
tttgtaccatgggta

SEQ ID NO: 1967005 - DNA, 15 bp, Homo sapiens
ttgtaccatgggtac

SEQ ID NO: 1967006 - DNA, 15 bp, Homo sapiens
tgtaccatgggtaca

SEQ ID NO: 1967007 - DNA, 15 bp, Homo sapiens
gtaccatgggtacat

SEQ ID NO: 1967008 - DNA, 15 bp, Homo sapiens
taccatgggtacatg

SEQ ID NO: 1967009 - DNA, 15 bp, Homo sapiens
accatgggtacatgt

SEQ ID NO: 1967010 - DNA, 15 bp, Homo sapiens
ccatgggtacatgta

SEQ ID NO: 1967011 - DNA, 15 bp, Homo sapiens
catgggtacatgtaa

SEQ ID NO: 1967012 - DNA, 15 bp, Homo sapiens
atgggtacatgtaat

SEQ ID NO: 1967013 - DNA, 15 bp, Homo sapiens
tgggtacatgtaata

SEQ ID NO: 1967014 - DNA, 15 bp, Homo sapiens
gggtacatgtaataa

SEQ ID NO: 1967015 - DNA, 15 bp, Homo sapiens
ggtacatgtaataaa

SEQ ID NO: 1967016 - DNA, 15 bp, Homo sapiens
gtacatgtaataaat

SEQ ID NO: 1967017 - DNA, 15 bp, Homo sapiens
tacatgtaataaatg

SEQ ID NO: 1967018 - DNA, 15 bp, Homo sapiens
acatgtaataaatga

SEQ ID NO: 1967019 - DNA, 15 bp, Homo sapiens
catgtaataaatgaa

SEQ ID NO: 1967020 - DNA, 15 bp, Homo sapiens
atgtaataaatgaaa

SEQ ID NO: 1967021 - DNA, 15 bp, Homo sapiens
tgtaataaatgaaat

SEQ ID NO: 1967022 - DNA, 15 bp, Homo sapiens
gtaataaatgaaata

SEQ ID NO: 1967023 - DNA, 15 bp, Homo sapiens
taataaatgaaataa

SEQ ID NO: 1967024 - DNA, 15 bp, Homo sapiens
aataaatgaaataaa

SEQ ID NO: 1967025 - DNA, 15 bp, Homo sapiens
ataaatgaaataaaa

SEQ ID NO: 1967026 - DNA, 15 bp, Homo sapiens
taaatgaaataaaaa

SEQ ID NO: 1967027 - DNA, 15 bp, Homo sapiens
aaatgaaataaaaaa

SEQ ID NO: 1967028 - DNA, 15 bp, Homo sapiens
aatgaaataaaaaat

SEQ ID NO: 1967029 - DNA, 15 bp, Homo sapiens
atgaaataaaaaatg

SEQ ID NO: 1967030 - DNA, 15 bp, Homo sapiens
tgaaataaaaaatgg

SEQ ID NO: 1967031 - DNA, 15 bp, Homo sapiens
gaaataaaaaatgga

SEQ ID NO: 1967032 - DNA, 15 bp, Homo sapiens
aaataaaaaatggat

SEQ ID NO: 1967033 - DNA, 15 bp, Homo sapiens
aataaaaaatggatg

SEQ ID NO: 1967034 - DNA, 15 bp, Homo sapiens
ataaaaaatggatgt

SEQ ID NO: 1967035 - DNA, 15 bp, Homo sapiens
taaaaaatggatgtt

SEQ ID NO: 1967036 - DNA, 15 bp, Homo sapiens
aaaaaatggatgttt

SEQ ID NO: 1967037 - DNA, 15 bp, Homo sapiens
aaaaatggatgttta

SEQ ID NO: 1967038 - DNA, 15 bp, Homo sapiens
aaaatggatgtttat

SEQ ID NO: 1967039 - DNA, 15 bp, Homo sapiens
aaatggatgtttata

SEQ ID NO: 1967040 - DNA, 15 bp, Homo sapiens
aatggatgtttataa

SEQ ID NO: 1967041 - DNA, 15 bp, Homo sapiens
atggatgtttataag

SEQ ID NO: 1967042 - DNA, 15 bp, Homo sapiens
tggatgtttataaga

SEQ ID NO: 1967043 - DNA, 15 bp, Homo sapiens
ggatgtttataagag

SEQ ID NO: 1967044 - DNA, 15 bp, Homo sapiens
gatgtttataagagg

SEQ ID NO: 1967045 - DNA, 15 bp, Homo sapiens
atgtttataagaggc

SEQ ID NO: 1967046 - DNA, 15 bp, Homo sapiens
tgtttataagaggct

SEQ ID NO: 1967047 - DNA, 15 bp, Homo sapiens
gtttataagaggctt

SEQ ID NO: 1967048 - DNA, 15 bp, Homo sapiens
tttataagaggctta

SEQ ID NO: 1967049 - DNA, 15 bp, Homo sapiens
ttataagaggcttat

SEQ ID NO: 1967050 - DNA, 15 bp, Homo sapiens
tataagaggcttatg

SEQ ID NO: 1967051 - DNA, 15 bp, Homo sapiens
ataagaggcttatgg

SEQ ID NO: 1967052 - DNA, 15 bp, Homo sapiens
taagaggcttatggt

SEQ ID NO: 1967053 - DNA, 15 bp, Homo sapiens
aagaggcttatggta

SEQ ID NO: 1967054 - DNA, 15 bp, Homo sapiens
agaggcttatggtag

SEQ ID NO: 1967055 - DNA, 15 bp, Homo sapiens
gaggcttatggtaga

SEQ ID NO: 1967056 - DNA, 15 bp, Homo sapiens
aggcttatggtagat

SEQ ID NO: 1967057 - DNA, 15 bp, Homo sapiens
ggcttatggtagatc

SEQ ID NO: 1967058 - DNA, 15 bp, Homo sapiens
gcttatggtagatca

SEQ ID NO: 1967059 - DNA, 15 bp, Homo sapiens
cttatggtagatcag

SEQ ID NO: 1967060 - DNA, 15 bp, Homo sapiens
ttatggtagatcagc

SEQ ID NO: 1967061 - DNA, 15 bp, Homo sapiens
tatggtagatcagca

SEQ ID NO: 1967062 - DNA, 15 bp, Homo sapiens
atggtagatcagcac

SEQ ID NO: 1967063 - DNA, 15 bp, Homo sapiens
tggtagatcagcaca

SEQ ID NO: 1967064 - DNA, 15 bp, Homo sapiens
ggtagatcagcacaa

SEQ ID NO: 1967065 - DNA, 15 bp, Homo sapiens
gtagatcagcacaag

SEQ ID NO: 1967066 - DNA, 15 bp, Homo sapiens
tagatcagcacaagg

SEQ ID NO: 1967067 - DNA, 15 bp, Homo sapiens
agatcagcacaaggt

SEQ ID NO: 1967068 - DNA, 15 bp, Homo sapiens
gatcagcacaaggta

SEQ ID NO: 1967069 - DNA, 15 bp, Homo sapiens
atcagcacaaggtat

SEQ ID NO: 1967070 - DNA, 15 bp, Homo sapiens
tcagcacaaggtatt

SEQ ID NO: 1967071 - DNA, 15 bp, Homo sapiens
cagcacaaggtattt

SEQ ID NO: 1967072 - DNA, 15 bp, Homo sapiens
agcacaaggtatttt

SEQ ID NO: 1967073 - DNA, 15 bp, Homo sapiens
gcacaaggtattttc

SEQ ID NO: 1967074 - DNA, 15 bp, Homo sapiens
cacaaggtattttct

SEQ ID NO: 1967075 - DNA, 15 bp, Homo sapiens
acaaggtattttctt

SEQ ID NO: 1967076 - DNA, 15 bp, Homo sapiens
caaggtattttcttt

SEQ ID NO: 1967077 - DNA, 15 bp, Homo sapiens
aaggtattttctttg

SEQ ID NO: 1967078 - DNA, 15 bp, Homo sapiens
aggtattttctttgg

SEQ ID NO: 1967079 - DNA, 15 bp, Homo sapiens
ggtattttctttggc

SEQ ID NO: 1967080 - DNA, 15 bp, Homo sapiens
tattttctttggctt

SEQ ID NO: 1967081 - DNA, 15 bp, Homo sapiens
attttctttggcttt

SEQ ID NO: 1967082 - DNA, 15 bp, Homo sapiens
ttttctttggctttt

SEQ ID NO: 1967083 - DNA, 15 bp, Homo sapiens
tttctttggcttttg

SEQ ID NO: 1967084 - DNA, 15 bp, Homo sapiens
ttctttggcttttga

SEQ ID NO: 1967085 - DNA, 15 bp, Homo sapiens
tctttggcttttgag

SEQ ID NO: 1967086 - DNA, 15 bp, Homo sapiens
ctttggcttttgaga

SEQ ID NO: 1967087 - DNA, 15 bp, Homo sapiens
tttggcttttgagag

SEQ ID NO: 1967088 - DNA, 15 bp, Homo sapiens
ttggcttttgagagt

SEQ ID NO: 1967089 - DNA, 15 bp, Homo sapiens
tggcttttgagagtc

SEQ ID NO: 1967090 - DNA, 15 bp, Homo sapiens
ggcttttgagagtcc

SEQ ID NO: 1967091 - DNA, 15 bp, Homo sapiens
gcttttgagagtcca

SEQ ID NO: 1967092 - DNA, 15 bp, Homo sapiens
cttttgagagtccac

SEQ ID NO: 1967093 - DNA, 15 bp, Homo sapiens
ttttgagagtccacc

SEQ ID NO: 1967094 - DNA, 15 bp, Homo sapiens
tttgagagtccacca

SEQ ID NO: 1967095 - DNA, 15 bp, Homo sapiens
ttgagagtccaccat

SEQ ID NO: 1967096 - DNA, 15 bp, Homo sapiens
tgagagtccaccatg

SEQ ID NO: 1967097 - DNA, 15 bp, Homo sapiens
gagagtccaccatga

SEQ ID NO: 1967098 - DNA, 15 bp, Homo sapiens
agagtccaccatgac

SEQ ID NO: 1967099 - DNA, 15 bp, Homo sapiens
gagtccaccatgact

SEQ ID NO: 1967100 - DNA, 15 bp, Homo sapiens
agtccaccatgactg

SEQ ID NO: 1967101 - DNA, 15 bp, Homo sapiens
gtccaccatgactgg

SEQ ID NO: 1967102 - DNA, 15 bp, Homo sapiens
tccaccatgactgga

SEQ ID NO: 1967103 - DNA, 15 bp, Homo sapiens
ccaccatgactggaa

SEQ ID NO: 1967104 - DNA, 15 bp, Homo sapiens
caccatgactggaaa

SEQ ID NO: 1967105 - DNA, 15 bp, Homo sapiens
accatgactggaaag

SEQ ID NO: 1967106 - DNA, 15 bp, Homo sapiens
ccatgactggaaagc

SEQ ID NO: 1967107 - DNA, 15 bp, Homo sapiens
catgactggaaagca

SEQ ID NO: 1967108 - DNA, 15 bp, Homo sapiens
atgactggaaagcat

SEQ ID NO: 1967109 - DNA, 15 bp, Homo sapiens
tgactggaaagcata

SEQ ID NO: 1967110 - DNA, 15 bp, Homo sapiens
gactggaaagcatag

SEQ ID NO: 1967111 - DNA, 15 bp, Homo sapiens
actggaaagcatagc

SEQ ID NO: 1967112 - DNA, 15 bp, Homo sapiens
ctggaaagcatagca

SEQ ID NO: 1967113 - DNA, 15 bp, Homo sapiens
tggaaagcatagcat

SEQ ID NO: 1967114 - DNA, 15 bp, Homo sapiens
ggaaagcatagcatg

SEQ ID NO: 1967115 - DNA, 15 bp, Homo sapiens
gaaagcatagcatgt

SEQ ID NO: 1967116 - DNA, 15 bp, Homo sapiens
aaagcatagcatgtg

SEQ ID NO: 1967117 - DNA, 15 bp, Homo sapiens
aagcatagcatgtgt

SEQ ID NO: 1967118 - DNA, 15 bp, Homo sapiens
agcatagcatgtgtc

SEQ ID NO: 1967119 - DNA, 15 bp, Homo sapiens
gcatagcatgtgtct

SEQ ID NO: 1967120 - DNA, 15 bp, Homo sapiens
catagcatgtgtctc

SEQ ID NO: 1967121 - DNA, 15 bp, Homo sapiens
atagcatgtgtctct

SEQ ID NO: 1967122 - DNA, 15 bp, Homo sapiens
tagcatgtgtctctg

SEQ ID NO: 1967123 - DNA, 15 bp, Homo sapiens
agcatgtgtctctgc

SEQ ID NO: 1967124 - DNA, 15 bp, Homo sapiens
gcatgtgtctctgct

SEQ ID NO: 1967125 - DNA, 15 bp, Homo sapiens
catgtgtctctgctt

SEQ ID NO: 1967126 - DNA, 15 bp, Homo sapiens
atgtgtctctgctta

SEQ ID NO: 1967127 - DNA, 15 bp, Homo sapiens
tgtgtctctgcttaa

SEQ ID NO: 1967128 - DNA, 15 bp, Homo sapiens
gtgtctctgcttaaa

SEQ ID NO: 1967129 - DNA, 15 bp, Homo sapiens
tgtctctgcttaaaa

SEQ ID NO: 1967130 - DNA, 15 bp, Homo sapiens
gtctctgcttaaaag

SEQ ID NO: 1967131 - DNA, 15 bp, Homo sapiens
tctctgcttaaaaga

SEQ ID NO: 1967132 - DNA, 15 bp, Homo sapiens
ctctgcttaaaagaa

SEQ ID NO: 1967133 - DNA, 15 bp, Homo sapiens
tctgcttaaaagaaa

SEQ ID NO: 1967134 - DNA, 15 bp, Homo sapiens
ctgcttaaaagaaaa

SEQ ID NO: 1967135 - DNA, 15 bp, Homo sapiens
tgcttaaaagaaaac

SEQ ID NO: 1967136 - DNA, 15 bp, Homo sapiens
gcttaaaagaaaaca

SEQ ID NO: 1967137 - DNA, 15 bp, Homo sapiens
cttaaaagaaaacag

SEQ ID NO: 1967138 - DNA, 15 bp, Homo sapiens
ttaaaagaaaacagg

SEQ ID NO: 1967139 - DNA, 15 bp, Homo sapiens
taaaagaaaacaggt

SEQ ID NO: 1967140 - DNA, 15 bp, Homo sapiens
aaaagaaaacaggtg

SEQ ID NO: 1967141 - DNA, 15 bp, Homo sapiens
aaagaaaacaggtgc

SEQ ID NO: 1967142 - DNA, 15 bp, Homo sapiens
aagaaaacaggtgca

SEQ ID NO: 1967143 - DNA, 15 bp, Homo sapiens
agaaaacaggtgcat

SEQ ID NO: 1967144 - DNA, 15 bp, Homo sapiens
gaaaacaggtgcatc

SEQ ID NO: 1967145 - DNA, 15 bp, Homo sapiens
aaaacaggtgcatca

SEQ ID NO: 1967146 - DNA, 15 bp, Homo sapiens
aaacaggtgcatcaa

SEQ ID NO: 1967147 - DNA, 15 bp, Homo sapiens
aacaggtgcatcaat

SEQ ID NO: 1967148 - DNA, 15 bp, Homo sapiens
acaggtgcatcaata

SEQ ID NO: 1967149 - DNA, 15 bp, Homo sapiens
caggtgcatcaatag

SEQ ID NO: 1967150 - DNA, 15 bp, Homo sapiens
aggtgcatcaatagg

SEQ ID NO: 1967151 - DNA, 15 bp, Homo sapiens
ggtgcatcaatagga

SEQ ID NO: 1967152 - DNA, 15 bp, Homo sapiens
gtgcatcaataggat

SEQ ID NO: 1967153 - DNA, 15 bp, Homo sapiens
tgcatcaataggatg

SEQ ID NO: 1967154 - DNA, 15 bp, Homo sapiens
gcatcaataggatgg

SEQ ID NO: 1967155 - DNA, 15 bp, Homo sapiens
catcaataggatgga

SEQ ID NO: 1967156 - DNA, 15 bp, Homo sapiens
atcaataggatggaa

SEQ ID NO: 1967157 - DNA, 15 bp, Homo sapiens
tcaataggatggaat

SEQ ID NO: 1967158 - DNA, 15 bp, Homo sapiens
caataggatggaatt

SEQ ID NO: 1967159 - DNA, 15 bp, Homo sapiens
aataggatggaattt

SEQ ID NO: 1967160 - DNA, 15 bp, Homo sapiens
ataggatggaatttt

SEQ ID NO: 1967161 - DNA, 15 bp, Homo sapiens
taggatggaatttta

SEQ ID NO: 1967162 - DNA, 15 bp, Homo sapiens
aggatggaattttat

SEQ ID NO: 1967163 - DNA, 15 bp, Homo sapiens
ggatggaattttatg

SEQ ID NO: 1967164 - DNA, 15 bp, Homo sapiens
gatggaattttatgt

SEQ ID NO: 1967165 - DNA, 15 bp, Homo sapiens
atggaattttatgtg

SEQ ID NO: 1967166 - DNA, 15 bp, Homo sapiens
tggaattttatgtgg

SEQ ID NO: 1967167 - DNA, 15 bp, Homo sapiens
ggaattttatgtggc

SEQ ID NO: 1967168 - DNA, 15 bp, Homo sapiens
gaattttatgtggcc

SEQ ID NO: 1967169 - DNA, 15 bp, Homo sapiens
aattttatgtggcca

SEQ ID NO: 1967170 - DNA, 15 bp, Homo sapiens
attttatgtggccaa

SEQ ID NO: 1967171 - DNA, 15 bp, Homo sapiens
ttttatgtggccaag

SEQ ID NO: 1967172 - DNA, 15 bp, Homo sapiens
tttatgtggccaaga

SEQ ID NO: 1967173 - DNA, 15 bp, Homo sapiens
ttatgtggccaagaa

SEQ ID NO: 1967174 - DNA, 15 bp, Homo sapiens
tatgtggccaagaac

SEQ ID NO: 1967175 - DNA, 15 bp, Homo sapiens
atgtggccaagaaca

SEQ ID NO: 1967176 - DNA, 15 bp, Homo sapiens
tgtggccaagaacat

SEQ ID NO: 1967177 - DNA, 15 bp, Homo sapiens
gtggccaagaacata

SEQ ID NO: 1967178 - DNA, 15 bp, Homo sapiens
tggccaagaacatat

SEQ ID NO: 1967179 - DNA, 15 bp, Homo sapiens
ggccaagaacatatt

SEQ ID NO: 1967180 - DNA, 15 bp, Homo sapiens
gccaagaacatattc

SEQ ID NO: 1967181 - DNA, 15 bp, Homo sapiens
ccaagaacatattca

SEQ ID NO: 1967182 - DNA, 15 bp, Homo sapiens
caagaacatattcaa

SEQ ID NO: 1967183 - DNA, 15 bp, Homo sapiens
aagaacatattcaaa

SEQ ID NO: 1967184 - DNA, 15 bp, Homo sapiens
agaacatattcaaag

SEQ ID NO: 1967185 - DNA, 15 bp, Homo sapiens
gaacatattcaaagc

SEQ ID NO: 1967186 - DNA, 15 bp, Homo sapiens
aacatattcaaagca

SEQ ID NO: 1967187 - DNA, 15 bp, Homo sapiens
acatattcaaagcat

SEQ ID NO: 1967188 - DNA, 15 bp, Homo sapiens
catattcaaagcata

SEQ ID NO: 1967189 - DNA, 15 bp, Homo sapiens
atattcaaagcatat

SEQ ID NO: 1967190 - DNA, 15 bp, Homo sapiens
tattcaaagcatatt

SEQ ID NO: 1967191 - DNA, 15 bp, Homo sapiens
attcaaagcatattt

SEQ ID NO: 1967192 - DNA, 15 bp, Homo sapiens
ttcaaagcatattta

SEQ ID NO: 1967193 - DNA, 15 bp, Homo sapiens
tcaaagcatatttaa

SEQ ID NO: 1967194 - DNA, 15 bp, Homo sapiens
caaagcatatttaat

SEQ ID NO: 1967195 - DNA, 15 bp, Homo sapiens
aaagcatatttaatg

SEQ ID NO: 1967196 - DNA, 15 bp, Homo sapiens
aagcatatttaatga

SEQ ID NO: 1967197 - DNA, 15 bp, Homo sapiens
agcatatttaatgac

SEQ ID NO: 1967198 - DNA, 15 bp, Homo sapiens
gcatatttaatgaca

SEQ ID NO: 1967199 - DNA, 15 bp, Homo sapiens
catatttaatgacat

SEQ ID NO: 1967200 - DNA, 15 bp, Homo sapiens
atatttaatgacatg

SEQ ID NO: 1967201 - DNA, 15 bp, Homo sapiens
tatttaatgacatgg

SEQ ID NO: 1967202 - DNA, 15 bp, Homo sapiens
atttaatgacatgga

SEQ ID NO: 1967203 - DNA, 15 bp, Homo sapiens
tttaatgacatggaa

SEQ ID NO: 1967204 - DNA, 15 bp, Homo sapiens
ttaatgacatggaaa

SEQ ID NO: 1967205 - DNA, 15 bp, Homo sapiens
taatgacatggaaaa

SEQ ID NO: 1967206 - DNA, 15 bp, Homo sapiens
aatgacatggaaaaa

SEQ ID NO: 1967207 - DNA, 15 bp, Homo sapiens
atgacatggaaaaat

SEQ ID NO: 1967208 - DNA, 15 bp, Homo sapiens
tgacatggaaaaatg

SEQ ID NO: 1967209 - DNA, 15 bp, Homo sapiens
gacatggaaaaatgc

SEQ ID NO: 1967210 - DNA, 15 bp, Homo sapiens
acatggaaaaatgct

SEQ ID NO: 1967211 - DNA, 15 bp, Homo sapiens
catggaaaaatgctc

SEQ ID NO: 1967212 - DNA, 15 bp, Homo sapiens
atggaaaaatgctca

SEQ ID NO: 1967213 - DNA, 15 bp, Homo sapiens
tggaaaaatgctcat

SEQ ID NO: 1967214 - DNA, 15 bp, Homo sapiens
ggaaaaatgctcata

SEQ ID NO: 1967215 - DNA, 15 bp, Homo sapiens
gaaaaatgctcatag

SEQ ID NO: 1967216 - DNA, 15 bp, Homo sapiens
aaaaatgctcatagt

SEQ ID NO: 1967217 - DNA, 15 bp, Homo sapiens
aaaatgctcatagta

SEQ ID NO: 1967218 - DNA, 15 bp, Homo sapiens
aaatgctcatagtaa

SEQ ID NO: 1967219 - DNA, 15 bp, Homo sapiens
aatgctcatagtaat

SEQ ID NO: 1967220 - DNA, 15 bp, Homo sapiens
atgctcatagtaatg

SEQ ID NO: 1967221 - DNA, 15 bp, Homo sapiens
tgctcatagtaatgt

SEQ ID NO: 1967222 - DNA, 15 bp, Homo sapiens
gctcatagtaatgtt

SEQ ID NO: 1967223 - DNA, 15 bp, Homo sapiens
ctcatagtaatgtta

SEQ ID NO: 1967224 - DNA, 15 bp, Homo sapiens
tcatagtaatgttaa

SEQ ID NO: 1967225 - DNA, 15 bp, Homo sapiens
catagtaatgttaag

SEQ ID NO: 1967226 - DNA, 15 bp, Homo sapiens
atagtaatgttaagt

SEQ ID NO: 1967227 - DNA, 15 bp, Homo sapiens
tagtaatgttaagtg

SEQ ID NO: 1967228 - DNA, 15 bp, Homo sapiens
agtaatgttaagtgg

SEQ ID NO: 1967229 - DNA, 15 bp, Homo sapiens
gtaatgttaagtgga

SEQ ID NO: 1967230 - DNA, 15 bp, Homo sapiens
taatgttaagtggaa

SEQ ID NO: 1967231 - DNA, 15 bp, Homo sapiens
aatgttaagtggaaa

SEQ ID NO: 1967232 - DNA, 15 bp, Homo sapiens
atgttaagtggaaaa

SEQ ID NO: 1967233 - DNA, 15 bp, Homo sapiens
tgttaagtggaaaaa

SEQ ID NO: 1967234 - DNA, 15 bp, Homo sapiens
gttaagtggaaaaag

SEQ ID NO: 1967235 - DNA, 15 bp, Homo sapiens
ttaagtggaaaaagc

SEQ ID NO: 1967236 - DNA, 15 bp, Homo sapiens
taagtggaaaaagca

SEQ ID NO: 1967237 - DNA, 15 bp, Homo sapiens
aagtggaaaaagcag

SEQ ID NO: 1967238 - DNA, 15 bp, Homo sapiens
agtggaaaaagcagg

SEQ ID NO: 1967239 - DNA, 15 bp, Homo sapiens
gtggaaaaagcagga

SEQ ID NO: 1967240 - DNA, 15 bp, Homo sapiens
tggaaaaagcaggat

SEQ ID NO: 1967241 - DNA, 15 bp, Homo sapiens
ggaaaaagcaggata

SEQ ID NO: 1967242 - DNA, 15 bp, Homo sapiens
gaaaaagcaggatat

SEQ ID NO: 1967243 - DNA, 15 bp, Homo sapiens
aaaaagcaggatata

SEQ ID NO: 1967244 - DNA, 15 bp, Homo sapiens
aaaagcaggatataa

SEQ ID NO: 1967245 - DNA, 15 bp, Homo sapiens
aaagcaggatataag

SEQ ID NO: 1967246 - DNA, 15 bp, Homo sapiens
aagcaggatataaga

SEQ ID NO: 1967247 - DNA, 15 bp, Homo sapiens
agcaggatataagac

SEQ ID NO: 1967248 - DNA, 15 bp, Homo sapiens
gcaggatataagact

SEQ ID NO: 1967249 - DNA, 15 bp, Homo sapiens
caggatataagacta

SEQ ID NO: 1967250 - DNA, 15 bp, Homo sapiens
aggatataagactat

SEQ ID NO: 1967251 - DNA, 15 bp, Homo sapiens
ggatataagactatc

SEQ ID NO: 1967252 - DNA, 15 bp, Homo sapiens
gatataagactatca

SEQ ID NO: 1967253 - DNA, 15 bp, Homo sapiens
atataagactatcaa

SEQ ID NO: 1967254 - DNA, 15 bp, Homo sapiens
tataagactatcaac

SEQ ID NO: 1967255 - DNA, 15 bp, Homo sapiens
ataagactatcaaca

SEQ ID NO: 1967256 - DNA, 15 bp, Homo sapiens
taagactatcaacag

SEQ ID NO: 1967257 - DNA, 15 bp, Homo sapiens
aagactatcaacagt

SEQ ID NO: 1967258 - DNA, 15 bp, Homo sapiens
agactatcaacagta

SEQ ID NO: 1967259 - DNA, 15 bp, Homo sapiens
gactatcaacagtac

SEQ ID NO: 1967260 - DNA, 15 bp, Homo sapiens
actatcaacagtacc

SEQ ID NO: 1967261 - DNA, 15 bp, Homo sapiens
ctatcaacagtacca

SEQ ID NO: 1967262 - DNA, 15 bp, Homo sapiens
tatcaacagtaccaa

SEQ ID NO: 1967263 - DNA, 15 bp, Homo sapiens
atcaacagtaccaat

SEQ ID NO: 1967264 - DNA, 15 bp, Homo sapiens
tcaacagtaccaatt

SEQ ID NO: 1967265 - DNA, 15 bp, Homo sapiens
caacagtaccaattc

SEQ ID NO: 1967266 - DNA, 15 bp, Homo sapiens
aacagtaccaattca

SEQ ID NO: 1967267 - DNA, 15 bp, Homo sapiens
acagtaccaattcaa

SEQ ID NO: 1967268 - DNA, 15 bp, Homo sapiens
cagtaccaattcaac

SEQ ID NO: 1967269 - DNA, 15 bp, Homo sapiens
agtaccaattcaact

SEQ ID NO: 1967270 - DNA, 15 bp, Homo sapiens
gtaccaattcaactg

SEQ ID NO: 1967271 - DNA, 15 bp, Homo sapiens
taccaattcaactgt

SEQ ID NO: 1967272 - DNA, 15 bp, Homo sapiens
accaattcaactgtg

SEQ ID NO: 1967273 - DNA, 15 bp, Homo sapiens
ccaattcaactgtgt

SEQ ID NO: 1967274 - DNA, 15 bp, Homo sapiens
caattcaactgtgta

SEQ ID NO: 1967275 - DNA, 15 bp, Homo sapiens
aattcaactgtgtac

SEQ ID NO: 1967276 - DNA, 15 bp, Homo sapiens
attcaactgtgtaca

SEQ ID NO: 1967277 - DNA, 15 bp, Homo sapiens
ttcaactgtgtacat

SEQ ID NO: 1967278 - DNA, 15 bp, Homo sapiens
tcaactgtgtacatt

SEQ ID NO: 1967279 - DNA, 15 bp, Homo sapiens
caactgtgtacattt

SEQ ID NO: 1967280 - DNA, 15 bp, Homo sapiens
aactgtgtacattta

SEQ ID NO: 1967281 - DNA, 15 bp, Homo sapiens
actgtgtacatttaa

SEQ ID NO: 1967282 - DNA, 15 bp, Homo sapiens
ctgtgtacatttaag

SEQ ID NO: 1967283 - DNA, 15 bp, Homo sapiens
tgtgtacatttaagt

SEQ ID NO: 1967284 - DNA, 15 bp, Homo sapiens
gtgtacatttaagtg

SEQ ID NO: 1967285 - DNA, 15 bp, Homo sapiens
tgtacatttaagtgt

SEQ ID NO: 1967286 - DNA, 15 bp, Homo sapiens
gtacatttaagtgta

SEQ ID NO: 1967287 - DNA, 15 bp, Homo sapiens
tacatttaagtgtat

SEQ ID NO: 1967288 - DNA, 15 bp, Homo sapiens
acatttaagtgtatg

SEQ ID NO: 1967289 - DNA, 15 bp, Homo sapiens
catttaagtgtatgt

SEQ ID NO: 1967290 - DNA, 15 bp, Homo sapiens
atttaagtgtatgtg

SEQ ID NO: 1967291 - DNA, 15 bp, Homo sapiens
tttaagtgtatgtgt

SEQ ID NO: 1967292 - DNA, 15 bp, Homo sapiens
ttaagtgtatgtgtg

SEQ ID NO: 1967293 - DNA, 15 bp, Homo sapiens
taagtgtatgtgtgc

SEQ ID NO: 1967294 - DNA, 15 bp, Homo sapiens
aagtgtatgtgtgct

SEQ ID NO: 1967295 - DNA, 15 bp, Homo sapiens
agtgtatgtgtgctt

SEQ ID NO: 1967296 - DNA, 15 bp, Homo sapiens
gtgtatgtgtgcttt

SEQ ID NO: 1967297 - DNA, 15 bp, Homo sapiens
tgtatgtgtgctttg

SEQ ID NO: 1967298 - DNA, 15 bp, Homo sapiens
gtatgtgtgctttga

SEQ ID NO: 1967299 - DNA, 15 bp, Homo sapiens
tatgtgtgctttgaa

SEQ ID NO: 1967300 - DNA, 15 bp, Homo sapiens
atgtgtgctttgaag

SEQ ID NO: 1967301 - DNA, 15 bp, Homo sapiens
tgtgtgctttgaagg

SEQ ID NO: 1967302 - DNA, 15 bp, Homo sapiens
gtgtgctttgaagga

SEQ ID NO: 1967303 - DNA, 15 bp, Homo sapiens
tgtgctttgaaggag

SEQ ID NO: 1967304 - DNA, 15 bp, Homo sapiens
gtgctttgaaggaga

SEQ ID NO: 1967305 - DNA, 15 bp, Homo sapiens
tgctttgaaggagag

SEQ ID NO: 1967306 - DNA, 15 bp, Homo sapiens
gctttgaaggagaga

SEQ ID NO: 1967307 - DNA, 15 bp, Homo sapiens
ctttgaaggagagag

SEQ ID NO: 1967308 - DNA, 15 bp, Homo sapiens
tttgaaggagagaga

SEQ ID NO: 1967309 - DNA, 15 bp, Homo sapiens
ttgaaggagagagag

SEQ ID NO: 1967310 - DNA, 15 bp, Homo sapiens
tgaaggagagagaga

SEQ ID NO: 1967311 - DNA, 15 bp, Homo sapiens
gaaggagagagagag

SEQ ID NO: 1967312 - DNA, 15 bp, Homo sapiens
aggagagagagagaa

SEQ ID NO: 1967313 - DNA, 15 bp, Homo sapiens
gagagagagagaaac

SEQ ID NO: 1967314 - DNA, 15 bp, Homo sapiens
agagagagagaaaca

SEQ ID NO: 1967315 - DNA, 15 bp, Homo sapiens
gagagagagaaacaa

SEQ ID NO: 1967316 - DNA, 15 bp, Homo sapiens
agagagagaaacaaa

SEQ ID NO: 1967317 - DNA, 15 bp, Homo sapiens
gagagagaaacaaaa

SEQ ID NO: 1967318 - DNA, 15 bp, Homo sapiens
agagagaaacaaaag

SEQ ID NO: 1967319 - DNA, 15 bp, Homo sapiens
gagagaaacaaaagg

SEQ ID NO: 1967320 - DNA, 15 bp, Homo sapiens
agagaaacaaaagga

SEQ ID NO: 1967321 - DNA, 15 bp, Homo sapiens
gagaaacaaaaggaa

SEQ ID NO: 1967322 - DNA, 15 bp, Homo sapiens
agaaacaaaaggaaa

SEQ ID NO: 1967323 - DNA, 15 bp, Homo sapiens
gaaacaaaaggaaat

SEQ ID NO: 1967324 - DNA, 15 bp, Homo sapiens
aaacaaaaggaaatt

SEQ ID NO: 1967325 - DNA, 15 bp, Homo sapiens
aacaaaaggaaatta

SEQ ID NO: 1967326 - DNA, 15 bp, Homo sapiens
acaaaaggaaattaa

SEQ ID NO: 1967327 - DNA, 15 bp, Homo sapiens
caaaaggaaattaag

SEQ ID NO: 1967328 - DNA, 15 bp, Homo sapiens
aaaaggaaattaaga

SEQ ID NO: 1967329 - DNA, 15 bp, Homo sapiens
aaaggaaattaagag

SEQ ID NO: 1967330 - DNA, 15 bp, Homo sapiens
aaggaaattaagaga

SEQ ID NO: 1967331 - DNA, 15 bp, Homo sapiens
aggaaattaagagaa

SEQ ID NO: 1967332 - DNA, 15 bp, Homo sapiens
ggaaattaagagaaa

SEQ ID NO: 1967333 - DNA, 15 bp, Homo sapiens
gaaattaagagaaaa

SEQ ID NO: 1967334 - DNA, 15 bp, Homo sapiens
aaattaagagaaaac

SEQ ID NO: 1967335 - DNA, 15 bp, Homo sapiens
aattaagagaaaacc

SEQ ID NO: 1967336 - DNA, 15 bp, Homo sapiens
attaagagaaaaccc

SEQ ID NO: 1967337 - DNA, 15 bp, Homo sapiens
ttaagagaaaaccct

SEQ ID NO: 1967338 - DNA, 15 bp, Homo sapiens
taagagaaaacccta

SEQ ID NO: 1967339 - DNA, 15 bp, Homo sapiens
aagagaaaaccctag

SEQ ID NO: 1967340 - DNA, 15 bp, Homo sapiens
agagaaaaccctaga

SEQ ID NO: 1967341 - DNA, 15 bp, Homo sapiens
gagaaaaccctagaa

SEQ ID NO: 1967342 - DNA, 15 bp, Homo sapiens
agaaaaccctagaag

SEQ ID NO: 1967343 - DNA, 15 bp, Homo sapiens
gaaaaccctagaagg

SEQ ID NO: 1967344 - DNA, 15 bp, Homo sapiens
aaaaccctagaagga

SEQ ID NO: 1967345 - DNA, 15 bp, Homo sapiens
aaaccctagaaggaa

SEQ ID NO: 1967346 - DNA, 15 bp, Homo sapiens
aaccctagaaggaac

SEQ ID NO: 1967347 - DNA, 15 bp, Homo sapiens
accctagaaggaact

SEQ ID NO: 1967348 - DNA, 15 bp, Homo sapiens
ccctagaaggaactg

SEQ ID NO: 1967349 - DNA, 15 bp, Homo sapiens
cctagaaggaactgc

SEQ ID NO: 1967350 - DNA, 15 bp, Homo sapiens
ctagaaggaactgcc

SEQ ID NO: 1967351 - DNA, 15 bp, Homo sapiens
tagaaggaactgcca

SEQ ID NO: 1967352 - DNA, 15 bp, Homo sapiens
agaaggaactgccaa

SEQ ID NO: 1967353 - DNA, 15 bp, Homo sapiens
gaaggaactgccaaa

SEQ ID NO: 1967354 - DNA, 15 bp, Homo sapiens
aaggaactgccaaaa

SEQ ID NO: 1967355 - DNA, 15 bp, Homo sapiens
aggaactgccaaaat

SEQ ID NO: 1967356 - DNA, 15 bp, Homo sapiens
ggaactgccaaaata

SEQ ID NO: 1967357 - DNA, 15 bp, Homo sapiens
gaactgccaaaatat

SEQ ID NO: 1967358 - DNA, 15 bp, Homo sapiens
aactgccaaaatatt

SEQ ID NO: 1967359 - DNA, 15 bp, Homo sapiens
actgccaaaatattc

SEQ ID NO: 1967360 - DNA, 15 bp, Homo sapiens
ctgccaaaatattca

SEQ ID NO: 1967361 - DNA, 15 bp, Homo sapiens
tgccaaaatattcat

SEQ ID NO: 1967362 - DNA, 15 bp, Homo sapiens
gccaaaatattcata

SEQ ID NO: 1967363 - DNA, 15 bp, Homo sapiens
ccaaaatattcatac

SEQ ID NO: 1967364 - DNA, 15 bp, Homo sapiens
caaaatattcatact

SEQ ID NO: 1967365 - DNA, 15 bp, Homo sapiens
aaaatattcatactg

SEQ ID NO: 1967366 - DNA, 15 bp, Homo sapiens
aaatattcatactgg

SEQ ID NO: 1967367 - DNA, 15 bp, Homo sapiens
aatattcatactggt

SEQ ID NO: 1967368 - DNA, 15 bp, Homo sapiens
atattcatactggtt

SEQ ID NO: 1967369 - DNA, 15 bp, Homo sapiens
tattcatactggttt

SEQ ID NO: 1967370 - DNA, 15 bp, Homo sapiens
attcatactggtttt

SEQ ID NO: 1967371 - DNA, 15 bp, Homo sapiens
ttcatactggttttc

SEQ ID NO: 1967372 - DNA, 15 bp, Homo sapiens
tcatactggttttct

SEQ ID NO: 1967373 - DNA, 15 bp, Homo sapiens
catactggttttctc

SEQ ID NO: 1967374 - DNA, 15 bp, Homo sapiens
atactggttttctca

SEQ ID NO: 1967375 - DNA, 15 bp, Homo sapiens
tactggttttctcag

SEQ ID NO: 1967376 - DNA, 15 bp, Homo sapiens
actggttttctcagt

SEQ ID NO: 1967377 - DNA, 15 bp, Homo sapiens
ctggttttctcagtt

SEQ ID NO: 1967378 - DNA, 15 bp, Homo sapiens
tggttttctcagttt

SEQ ID NO: 1967379 - DNA, 15 bp, Homo sapiens
ggttttctcagtttt

SEQ ID NO: 1967380 - DNA, 15 bp, Homo sapiens
gttttctcagtttta

SEQ ID NO: 1967381 - DNA, 15 bp, Homo sapiens
ttttctcagttttaa

SEQ ID NO: 1967382 - DNA, 15 bp, Homo sapiens
tttctcagttttaat

SEQ ID NO: 1967383 - DNA, 15 bp, Homo sapiens
ttctcagttttaatt

SEQ ID NO: 1967384 - DNA, 15 bp, Homo sapiens
tctcagttttaattt

SEQ ID NO: 1967385 - DNA, 15 bp, Homo sapiens
ctcagttttaatttt

SEQ ID NO: 1967386 - DNA, 15 bp, Homo sapiens
tcagttttaattttc

SEQ ID NO: 1967387 - DNA, 15 bp, Homo sapiens
cagttttaattttct

SEQ ID NO: 1967388 - DNA, 15 bp, Homo sapiens
agttttaattttctt

SEQ ID NO: 1967389 - DNA, 15 bp, Homo sapiens
gttttaattttcttt

SEQ ID NO: 1967390 - DNA, 15 bp, Homo sapiens
tttaattttcttttc

SEQ ID NO: 1967391 - DNA, 15 bp, Homo sapiens
ttaattttcttttct

SEQ ID NO: 1967392 - DNA, 15 bp, Homo sapiens
taattttcttttctt

SEQ ID NO: 1967393 - DNA, 15 bp, Homo sapiens
ttttctttttttttg

SEQ ID NO: 1967394 - DNA, 15 bp, Homo sapiens
tttctttttttttga

SEQ ID NO: 1967395 - DNA, 15 bp, Homo sapiens
ttctttttttttgag

SEQ ID NO: 1967396 - DNA, 15 bp, Homo sapiens
tctttttttttgaga

SEQ ID NO: 1967397 - DNA, 15 bp, Homo sapiens
ctttttttttgagat

SEQ ID NO: 1967398 - DNA, 15 bp, Homo sapiens
ttttttgagatggat

SEQ ID NO: 1967399 - DNA, 15 bp, Homo sapiens
tttttgagatggatt

SEQ ID NO: 1967400 - DNA, 15 bp, Homo sapiens
ttttgagatggattc

SEQ ID NO: 1967401 - DNA, 15 bp, Homo sapiens
tttgagatggattct

SEQ ID NO: 1967402 - DNA, 15 bp, Homo sapiens
ttgagatggattctt

SEQ ID NO: 1967403 - DNA, 15 bp, Homo sapiens
tgagatggattcttg

SEQ ID NO: 1967404 - DNA, 15 bp, Homo sapiens
gagatggattcttgc

SEQ ID NO: 1967405 - DNA, 15 bp, Homo sapiens
agatggattcttgct

SEQ ID NO: 1967406 - DNA, 15 bp, Homo sapiens
gatggattcttgctt

SEQ ID NO: 1967407 - DNA, 15 bp, Homo sapiens
atggattcttgcttg

SEQ ID NO: 1967408 - DNA, 15 bp, Homo sapiens
tggattcttgcttgt

SEQ ID NO: 1967409 - DNA, 15 bp, Homo sapiens
ggattcttgcttgtc

SEQ ID NO: 1967410 - DNA, 15 bp, Homo sapiens
gattcttgcttgtca

SEQ ID NO: 1967411 - DNA, 15 bp, Homo sapiens
attcttgcttgtcac

SEQ ID NO: 1967412 - DNA, 15 bp, Homo sapiens
ttcttgcttgtcacc

SEQ ID NO: 1967413 - DNA, 15 bp, Homo sapiens
tcttgcttgtcacca

SEQ ID NO: 1967414 - DNA, 15 bp, Homo sapiens
cttgcttgtcaccaa

SEQ ID NO: 1967415 - DNA, 15 bp, Homo sapiens
ttgcttgtcaccaag

SEQ ID NO: 1967416 - DNA, 15 bp, Homo sapiens
tgcttgtcaccaagg

SEQ ID NO: 1967417 - DNA, 15 bp, Homo sapiens
gcttgtcaccaaggc

SEQ ID NO: 1967418 - DNA, 15 bp, Homo sapiens
cttgtcaccaaggct

SEQ ID NO: 1967419 - DNA, 15 bp, Homo sapiens
ttgtcaccaaggctg

SEQ ID NO: 1967420 - DNA, 15 bp, Homo sapiens
tgtcaccaaggctgg

SEQ ID NO: 1967421 - DNA, 15 bp, Homo sapiens
gtcaccaaggctgga

SEQ ID NO: 1967422 - DNA, 15 bp, Homo sapiens
tcaccaaggctggag

SEQ ID NO: 1967423 - DNA, 15 bp, Homo sapiens
caccaaggctggagt

SEQ ID NO: 1967424 - DNA, 15 bp, Homo sapiens
accaaggctggagtg

SEQ ID NO: 1967425 - DNA, 15 bp, Homo sapiens
cggctcactgcaatc

SEQ ID NO: 1967426 - DNA, 15 bp, Homo sapiens
ggctcactgcaatct

SEQ ID NO: 1967427 - DNA, 15 bp, Homo sapiens
gctcactgcaatctc

SEQ ID NO: 1967428 - DNA, 15 bp, Homo sapiens
ctcactgcaatctcc

SEQ ID NO: 1967429 - DNA, 15 bp, Homo sapiens
tcactgcaatctcca

SEQ ID NO: 1967430 - DNA, 15 bp, Homo sapiens
cactgcaatctccac

SEQ ID NO: 1967431 - DNA, 15 bp, Homo sapiens
actgcaatctccact

SEQ ID NO: 1967432 - DNA, 15 bp, Homo sapiens
ctgcaatctccactt

SEQ ID NO: 1967433 - DNA, 15 bp, Homo sapiens
tgcaatctccacttc

SEQ ID NO: 1967434 - DNA, 15 bp, Homo sapiens
gcaatctccacttca

SEQ ID NO: 1967435 - DNA, 15 bp, Homo sapiens
caatctccacttcac

SEQ ID NO: 1967436 - DNA, 15 bp, Homo sapiens
aatctccacttcaca

SEQ ID NO: 1967437 - DNA, 15 bp, Homo sapiens
atctccacttcacag

SEQ ID NO: 1967438 - DNA, 15 bp, Homo sapiens
tctccacttcacagg

SEQ ID NO: 1967439 - DNA, 15 bp, Homo sapiens
ctccacttcacaggt

SEQ ID NO: 1967440 - DNA, 15 bp, Homo sapiens
tccacttcacaggtt

SEQ ID NO: 1967441 - DNA, 15 bp, Homo sapiens
ccacttcacaggttc

SEQ ID NO: 1967442 - DNA, 15 bp, Homo sapiens
cacttcacaggttca

SEQ ID NO: 1967443 - DNA, 15 bp, Homo sapiens
acttcacaggttcaa

SEQ ID NO: 1967444 - DNA, 15 bp, Homo sapiens
cttcacaggttcaaa

SEQ ID NO: 1967445 - DNA, 15 bp, Homo sapiens
ttcacaggttcaaac

SEQ ID NO: 1967446 - DNA, 15 bp, Homo sapiens
tcacaggttcaaacg

SEQ ID NO: 1967447 - DNA, 15 bp, Homo sapiens
cacaggttcaaacga

SEQ ID NO: 1967448 - DNA, 15 bp, Homo sapiens
acaggttcaaacgat

SEQ ID NO: 1967449 - DNA, 15 bp, Homo sapiens
caaacgattctcctg

SEQ ID NO: 1967450 - DNA, 15 bp, Homo sapiens
aaacgattctcctgc

SEQ ID NO: 1967451 - DNA, 15 bp, Homo sapiens
aacgattctcctgcc

SEQ ID NO: 1967452 - DNA, 15 bp, Homo sapiens
acgattctcctgcct

SEQ ID NO: 1967453 - DNA, 15 bp, Homo sapiens
ggcgcccaccaccac

SEQ ID NO: 1967454 - DNA, 15 bp, Homo sapiens
gcgcccaccaccaca

SEQ ID NO: 1967455 - DNA, 15 bp, Homo sapiens
cgcccaccaccacac

SEQ ID NO: 1967456 - DNA, 15 bp, Homo sapiens
gcccaccaccacacc

SEQ ID NO: 1967457 - DNA, 15 bp, Homo sapiens
ccaccaccacacccg

SEQ ID NO: 1967458 - DNA, 15 bp, Homo sapiens
caccaccacacccga

SEQ ID NO: 1967459 - DNA, 15 bp, Homo sapiens
accaccacacccgac

SEQ ID NO: 1967460 - DNA, 15 bp, Homo sapiens
ccaccacacccgacg

SEQ ID NO: 1967461 - DNA, 15 bp, Homo sapiens
caccacacccgacga

SEQ ID NO: 1967462 - DNA, 15 bp, Homo sapiens
accacacccgacgaa

SEQ ID NO: 1967463 - DNA, 15 bp, Homo sapiens
ccacacccgacgaat

SEQ ID NO: 1967464 - DNA, 15 bp, Homo sapiens
cacacccgacgaatt

SEQ ID NO: 1967465 - DNA, 15 bp, Homo sapiens
acacccgacgaattt

SEQ ID NO: 1967466 - DNA, 15 bp, Homo sapiens
cacccgacgaatttt

SEQ ID NO: 1967467 - DNA, 15 bp, Homo sapiens
acccgacgaattttt

SEQ ID NO: 1967468 - DNA, 15 bp, Homo sapiens
cccgacgaatttttg

SEQ ID NO: 1967469 - DNA, 15 bp, Homo sapiens
ccgacgaatttttgt

SEQ ID NO: 1967470 - DNA, 15 bp, Homo sapiens
cgacgaatttttgta

SEQ ID NO: 1967471 - DNA, 15 bp, Homo sapiens
gacgaatttttgtat

SEQ ID NO: 1967472 - DNA, 15 bp, Homo sapiens
acgaatttttgtata

SEQ ID NO: 1967473 - DNA, 15 bp, Homo sapiens
cgaatttttgtatat

SEQ ID NO: 1967474 - DNA, 15 bp, Homo sapiens
gaatttttgtatatt

SEQ ID NO: 1967475 - DNA, 15 bp, Homo sapiens
aatttttgtatattc

SEQ ID NO: 1967476 - DNA, 15 bp, Homo sapiens
atttttgtatattca

SEQ ID NO: 1967477 - DNA, 15 bp, Homo sapiens
tttttgtatattcag

SEQ ID NO: 1967478 - DNA, 15 bp, Homo sapiens
ttttgtatattcagt

SEQ ID NO: 1967479 - DNA, 15 bp, Homo sapiens
tttgtatattcagta

SEQ ID NO: 1967480 - DNA, 15 bp, Homo sapiens
ttgtatattcagtag

SEQ ID NO: 1967481 - DNA, 15 bp, Homo sapiens
tgtatattcagtaga

SEQ ID NO: 1967482 - DNA, 15 bp, Homo sapiens
gtatattcagtagag

SEQ ID NO: 1967483 - DNA, 15 bp, Homo sapiens
tatattcagtagaga

SEQ ID NO: 1967484 - DNA, 15 bp, Homo sapiens
atattcagtagagac

SEQ ID NO: 1967485 - DNA, 15 bp, Homo sapiens
tattcagtagagaca

SEQ ID NO: 1967486 - DNA, 15 bp, Homo sapiens
attcagtagagacag

SEQ ID NO: 1967487 - DNA, 15 bp, Homo sapiens
gacagggtctcacca

SEQ ID NO: 1967488 - DNA, 15 bp, Homo sapiens
acagggtctcaccat

SEQ ID NO: 1967489 - DNA, 15 bp, Homo sapiens
cagggtctcaccatg

SEQ ID NO: 1967490 - DNA, 15 bp, Homo sapiens
agggtctcaccatgt

SEQ ID NO: 1967491 - DNA, 15 bp, Homo sapiens
gggtctcaccatgtt

SEQ ID NO: 1967492 - DNA, 15 bp, Homo sapiens
gtctcaccatgttgg

SEQ ID NO: 1967493 - DNA, 15 bp, Homo sapiens
tctcaccatgttggc

SEQ ID NO: 1967494 - DNA, 15 bp, Homo sapiens
ctcaccatgttggcc

SEQ ID NO: 1967495 - DNA, 15 bp, Homo sapiens
ttggccaggctggtt

SEQ ID NO: 1967496 - DNA, 15 bp, Homo sapiens
gctggtttcgaactg

SEQ ID NO: 1967497 - DNA, 15 bp, Homo sapiens
ctggtttcgaactgc

SEQ ID NO: 1967498 - DNA, 15 bp, Homo sapiens
tggtttcgaactgct

SEQ ID NO: 1967499 - DNA, 15 bp, Homo sapiens
ggtttcgaactgctg

SEQ ID NO: 1967500 - DNA, 15 bp, Homo sapiens
gtttcgaactgctga

SEQ ID NO: 1967501 - DNA, 15 bp, Homo sapiens
tttcgaactgctgac

SEQ ID NO: 1967502 - DNA, 15 bp, Homo sapiens
ttcgaactgctgacc

SEQ ID NO: 1967503 - DNA, 15 bp, Homo sapiens
tcgaactgctgacct

SEQ ID NO: 1967504 - DNA, 15 bp, Homo sapiens
cgaactgctgacctc

SEQ ID NO: 1967505 - DNA, 15 bp, Homo sapiens
gaactgctgacctca

SEQ ID NO: 1967506 - DNA, 15 bp, Homo sapiens
aactgctgacctcaa

SEQ ID NO: 1967507 - DNA, 15 bp, Homo sapiens
actgctgacctcaag

SEQ ID NO: 1967508 - DNA, 15 bp, Homo sapiens
ctgctgacctcaagt

SEQ ID NO: 1967509 - DNA, 15 bp, Homo sapiens
tgctgacctcaagtg

SEQ ID NO: 1967510 - DNA, 15 bp, Homo sapiens
gctgacctcaagtga

SEQ ID NO: 1967511 - DNA, 15 bp, Homo sapiens
cctcaagtgatccgt

SEQ ID NO: 1967512 - DNA, 15 bp, Homo sapiens
ctcaagtgatccgtc

SEQ ID NO: 1967513 - DNA, 15 bp, Homo sapiens
tcaagtgatccgtcc

SEQ ID NO: 1967514 - DNA, 15 bp, Homo sapiens
caagtgatccgtcca

SEQ ID NO: 1967515 - DNA, 15 bp, Homo sapiens
aagtgatccgtccac

SEQ ID NO: 1967516 - DNA, 15 bp, Homo sapiens
agtgatccgtccacc

SEQ ID NO: 1967517 - DNA, 15 bp, Homo sapiens
gtgatccgtccacct

SEQ ID NO: 1967518 - DNA, 15 bp, Homo sapiens
tgatccgtccaccta

SEQ ID NO: 1967519 - DNA, 15 bp, Homo sapiens
gatccgtccacctag

SEQ ID NO: 1967520 - DNA, 15 bp, Homo sapiens
atccgtccacctagg

SEQ ID NO: 1967521 - DNA, 15 bp, Homo sapiens
tccgtccacctaggc

SEQ ID NO: 1967522 - DNA, 15 bp, Homo sapiens
ccgtccacctaggcc

SEQ ID NO: 1967523 - DNA, 15 bp, Homo sapiens
cgtccacctaggcct

SEQ ID NO: 1967524 - DNA, 15 bp, Homo sapiens
gtccacctaggcctc

SEQ ID NO: 1967525 - DNA, 15 bp, Homo sapiens
tccacctaggcctcc

SEQ ID NO: 1967526 - DNA, 15 bp, Homo sapiens
ccacctaggcctccc

SEQ ID NO: 1967527 - DNA, 15 bp, Homo sapiens
cacctaggcctccca

SEQ ID NO: 1967528 - DNA, 15 bp, Homo sapiens
acctaggcctcccaa

SEQ ID NO: 1967529 - DNA, 15 bp, Homo sapiens
cctaggcctcccaaa

SEQ ID NO: 1967530 - DNA, 15 bp, Homo sapiens
ctaggcctcccaaag

SEQ ID NO: 1967531 - DNA, 15 bp, Homo sapiens
taggcctcccaaagt

SEQ ID NO: 1967532 - DNA, 15 bp, Homo sapiens
gggattacaggcata

SEQ ID NO: 1967533 - DNA, 15 bp, Homo sapiens
ggattacaggcataa

SEQ ID NO: 1967534 - DNA, 15 bp, Homo sapiens
gattacaggcataag

SEQ ID NO: 1967535 - DNA, 15 bp, Homo sapiens
attacaggcataagc

SEQ ID NO: 1967536 - DNA, 15 bp, Homo sapiens
ttacaggcataagcc

SEQ ID NO: 1967537 - DNA, 15 bp, Homo sapiens
tacaggcataagcca

SEQ ID NO: 1967538 - DNA, 15 bp, Homo sapiens
acaggcataagccac

SEQ ID NO: 1967539 - DNA, 15 bp, Homo sapiens
caggcataagccacc

SEQ ID NO: 1967540 - DNA, 15 bp, Homo sapiens
aggcataagccaccg

SEQ ID NO: 1967541 - DNA, 15 bp, Homo sapiens
ggcataagccaccgt

SEQ ID NO: 1967542 - DNA, 15 bp, Homo sapiens
gcataagccaccgtg

SEQ ID NO: 1967543 - DNA, 15 bp, Homo sapiens
cataagccaccgtgc

SEQ ID NO: 1967544 - DNA, 15 bp, Homo sapiens
ataagccaccgtgcc

SEQ ID NO: 1967545 - DNA, 15 bp, Homo sapiens
taagccaccgtgccc

SEQ ID NO: 1967546 - DNA, 15 bp, Homo sapiens
aagccaccgtgccca

SEQ ID NO: 1967547 - DNA, 15 bp, Homo sapiens
accgtgcccagccta

SEQ ID NO: 1967548 - DNA, 15 bp, Homo sapiens
ccgtgcccagcctaa

SEQ ID NO: 1967549 - DNA, 15 bp, Homo sapiens
cgtgcccagcctaaa

SEQ ID NO: 1967550 - DNA, 15 bp, Homo sapiens
gtgcccagcctaaat

SEQ ID NO: 1967551 - DNA, 15 bp, Homo sapiens
tgcccagcctaaatt

SEQ ID NO: 1967552 - DNA, 15 bp, Homo sapiens
gcccagcctaaattt

SEQ ID NO: 1967553 - DNA, 15 bp, Homo sapiens
cccagcctaaatttt

SEQ ID NO: 1967554 - DNA, 15 bp, Homo sapiens
ccagcctaaattttc

SEQ ID NO: 1967555 - DNA, 15 bp, Homo sapiens
cagcctaaattttct

SEQ ID NO: 1967556 - DNA, 15 bp, Homo sapiens
agcctaaattttctt

SEQ ID NO: 1967557 - DNA, 15 bp, Homo sapiens
gcctaaattttcttt

SEQ ID NO: 1967558 - DNA, 15 bp, Homo sapiens
cctaaattttctttt

SEQ ID NO: 1967559 - DNA, 15 bp, Homo sapiens
ctaaattttcttttt

SEQ ID NO: 1967560 - DNA, 15 bp, Homo sapiens
aaattttcttttttg

SEQ ID NO: 1967561 - DNA, 15 bp, Homo sapiens
aattttcttttttga

SEQ ID NO: 1967562 - DNA, 15 bp, Homo sapiens
attttcttttttgaa

SEQ ID NO: 1967563 - DNA, 15 bp, Homo sapiens
ttttcttttttgaag

SEQ ID NO: 1967564 - DNA, 15 bp, Homo sapiens
tttcttttttgaagt

SEQ ID NO: 1967565 - DNA, 15 bp, Homo sapiens
ttcttttttgaagtt

SEQ ID NO: 1967566 - DNA, 15 bp, Homo sapiens
cgctttaaataatcg

SEQ ID NO: 1967567 - DNA, 15 bp, Homo sapiens
gctttaaataatcgc

SEQ ID NO: 1967568 - DNA, 15 bp, Homo sapiens
ctttaaataatcgct

SEQ ID NO: 1967569 - DNA, 15 bp, Homo sapiens
tttaaataatcgctc

SEQ ID NO: 1967570 - DNA, 15 bp, Homo sapiens
ttaaataatcgctct

SEQ ID NO: 1967571 - DNA, 15 bp, Homo sapiens
taaataatcgctctt

SEQ ID NO: 1967572 - DNA, 15 bp, Homo sapiens
aaataatcgctctta

SEQ ID NO: 1967573 - DNA, 15 bp, Homo sapiens
aataatcgctcttaa

SEQ ID NO: 1967574 - DNA, 15 bp, Homo sapiens
ataatcgctcttaat

SEQ ID NO: 1967575 - DNA, 15 bp, Homo sapiens
taatcgctcttaatt

SEQ ID NO: 1967576 - DNA, 15 bp, Homo sapiens
aatcgctcttaatta

SEQ ID NO: 1967577 - DNA, 15 bp, Homo sapiens
atcgctcttaattag

SEQ ID NO: 1967578 - DNA, 15 bp, Homo sapiens
tcgctcttaattagg

SEQ ID NO: 1967579 - DNA, 15 bp, Homo sapiens
cgctcttaattaggt

SEQ ID NO: 1967580 - DNA, 15 bp, Homo sapiens
gctcttaattaggtc

SEQ ID NO: 1967581 - DNA, 15 bp, Homo sapiens
ctcttaattaggtct

SEQ ID NO: 1967582 - DNA, 15 bp, Homo sapiens
tcttaattaggtctc

SEQ ID NO: 1967583 - DNA, 15 bp, Homo sapiens
cttaattaggtctcg

SEQ ID NO: 1967584 - DNA, 15 bp, Homo sapiens
ttaattaggtctcgg

SEQ ID NO: 1967585 - DNA, 15 bp, Homo sapiens
taattaggtctcggg

SEQ ID NO: 1967586 - DNA, 15 bp, Homo sapiens
aattaggtctcgggc

SEQ ID NO: 1967587 - DNA, 15 bp, Homo sapiens
attaggtctcgggct

SEQ ID NO: 1967588 - DNA, 15 bp, Homo sapiens
ttaggtctcgggctt

SEQ ID NO: 1967589 - DNA, 15 bp, Homo sapiens
taggtctcgggcttt

SEQ ID NO: 1967590 - DNA, 15 bp, Homo sapiens
aggtctcgggctttt

SEQ ID NO: 1967591 - DNA, 15 bp, Homo sapiens
ggtctcgggcttttc

SEQ ID NO: 1967592 - DNA, 15 bp, Homo sapiens
gtctcgggcttttca

SEQ ID NO: 1967593 - DNA, 15 bp, Homo sapiens
tctcgggcttttcag

SEQ ID NO: 1967594 - DNA, 15 bp, Homo sapiens
ctcgggcttttcagt

SEQ ID NO: 1967595 - DNA, 15 bp, Homo sapiens
tcgggcttttcagtt

SEQ ID NO: 1967596 - DNA, 15 bp, Homo sapiens
cgggcttttcagttt

SEQ ID NO: 1967597 - DNA, 15 bp, Homo sapiens
gggcttttcagtttc

SEQ ID NO: 1967598 - DNA, 15 bp, Homo sapiens
ggcttttcagtttcg

SEQ ID NO: 1967599 - DNA, 15 bp, Homo sapiens
gcttttcagtttcgg

SEQ ID NO: 1967600 - DNA, 15 bp, Homo sapiens
cttttcagtttcggc

SEQ ID NO: 1967601 - DNA, 15 bp, Homo sapiens
ttttcagtttcggcg

SEQ ID NO: 1967602 - DNA, 15 bp, Homo sapiens
tttcagtttcggcgt

SEQ ID NO: 1967603 - DNA, 15 bp, Homo sapiens
ttcagtttcggcgtg

SEQ ID NO: 1967604 - DNA, 15 bp, Homo sapiens
tcagtttcggcgtga

SEQ ID NO: 1967605 - DNA, 15 bp, Homo sapiens
cagtttcggcgtgat

SEQ ID NO: 1967606 - DNA, 15 bp, Homo sapiens
agtttcggcgtgatt

SEQ ID NO: 1967607 - DNA, 15 bp, Homo sapiens
gtttcggcgtgatta

SEQ ID NO: 1967608 - DNA, 15 bp, Homo sapiens
tttcggcgtgattat

SEQ ID NO: 1967609 - DNA, 15 bp, Homo sapiens
ttcggcgtgattata

SEQ ID NO: 1967610 - DNA, 15 bp, Homo sapiens
tcggcgtgattataa

SEQ ID NO: 1967611 - DNA, 15 bp, Homo sapiens
cggcgtgattataac

SEQ ID NO: 1967612 - DNA, 15 bp, Homo sapiens
ggcgtgattataacc

SEQ ID NO: 1967613 - DNA, 15 bp, Homo sapiens
gcgtgattataaccc

SEQ ID NO: 1967614 - DNA, 15 bp, Homo sapiens
cgtgattataaccct

SEQ ID NO: 1967615 - DNA, 15 bp, Homo sapiens
gtgattataaccctt

SEQ ID NO: 1967616 - DNA, 15 bp, Homo sapiens
tgattataacccttc

SEQ ID NO: 1967617 - DNA, 15 bp, Homo sapiens
gattataacccttca

SEQ ID NO: 1967618 - DNA, 15 bp, Homo sapiens
attataacccttcag

SEQ ID NO: 1967619 - DNA, 15 bp, Homo sapiens
ttataacccttcagg

SEQ ID NO: 1967620 - DNA, 15 bp, Homo sapiens
tataacccttcaggg

SEQ ID NO: 1967621 - DNA, 15 bp, Homo sapiens
ataacccttcaggga

SEQ ID NO: 1967622 - DNA, 15 bp, Homo sapiens
taacccttcagggat

SEQ ID NO: 1967623 - DNA, 15 bp, Homo sapiens
aacccttcagggatc

SEQ ID NO: 1967624 - DNA, 15 bp, Homo sapiens
acccttcagggatcg

SEQ ID NO: 1967625 - DNA, 15 bp, Homo sapiens
cccttcagggatcgc

SEQ ID NO: 1967626 - DNA, 15 bp, Homo sapiens
ccttcagggatcgcc

SEQ ID NO: 1967627 - DNA, 15 bp, Homo sapiens
cttcagggatcgcct

SEQ ID NO: 1967628 - DNA, 15 bp, Homo sapiens
ttcagggatcgccta

SEQ ID NO: 1967629 - DNA, 15 bp, Homo sapiens
tcagggatcgcctaa

SEQ ID NO: 1967630 - DNA, 15 bp, Homo sapiens
cagggatcgcctaat

SEQ ID NO: 1967631 - DNA, 15 bp, Homo sapiens
agggatcgcctaata

SEQ ID NO: 1967632 - DNA, 15 bp, Homo sapiens
gggatcgcctaataa

SEQ ID NO: 1967633 - DNA, 15 bp, Homo sapiens
ggatcgcctaataac

SEQ ID NO: 1967634 - DNA, 15 bp, Homo sapiens
gatcgcctaataaca

SEQ ID NO: 1967635 - DNA, 15 bp, Homo sapiens
atcgcctaataacaa

SEQ ID NO: 1967636 - DNA, 15 bp, Homo sapiens
tcgcctaataacaac

SEQ ID NO: 1967637 - DNA, 15 bp, Homo sapiens
cgcctaataacaact

SEQ ID NO: 1967638 - DNA, 15 bp, Homo sapiens
gcctaataacaactc

SEQ ID NO: 1967639 - DNA, 15 bp, Homo sapiens
cctaataacaactct

SEQ ID NO: 1967640 - DNA, 15 bp, Homo sapiens
ctaataacaactctg

SEQ ID NO: 1967641 - DNA, 15 bp, Homo sapiens
taataacaactctgc

SEQ ID NO: 1967642 - DNA, 15 bp, Homo sapiens
aataacaactctgct

SEQ ID NO: 1967643 - DNA, 15 bp, Homo sapiens
ataacaactctgctg

SEQ ID NO: 1967644 - DNA, 15 bp, Homo sapiens
taacaactctgctga

SEQ ID NO: 1967645 - DNA, 15 bp, Homo sapiens
aacaactctgctgac

SEQ ID NO: 1967646 - DNA, 15 bp, Homo sapiens
acaactctgctgact

SEQ ID NO: 1967647 - DNA, 15 bp, Homo sapiens
caactctgctgactg

SEQ ID NO: 1967648 - DNA, 15 bp, Homo sapiens
aactctgctgactgc

SEQ ID NO: 1967649 - DNA, 15 bp, Homo sapiens
actctgctgactgct

SEQ ID NO: 1967650 - DNA, 15 bp, Homo sapiens
ctctgctgactgctc

SEQ ID NO: 1967651 - DNA, 15 bp, Homo sapiens
tctgctgactgctcc

SEQ ID NO: 1967652 - DNA, 15 bp, Homo sapiens
ctgctgactgctcct

SEQ ID NO: 1967653 - DNA, 15 bp, Homo sapiens
tgctgactgctcctg

SEQ ID NO: 1967654 - DNA, 15 bp, Homo sapiens
gctgactgctcctgt

SEQ ID NO: 1967655 - DNA, 15 bp, Homo sapiens
ctgactgctcctgta

SEQ ID NO: 1967656 - DNA, 15 bp, Homo sapiens
tgactgctcctgtaa

SEQ ID NO: 1967657 - DNA, 15 bp, Homo sapiens
gactgctcctgtaat

SEQ ID NO: 1967658 - DNA, 15 bp, Homo sapiens
actgctcctgtaatt

SEQ ID NO: 1967659 - DNA, 15 bp, Homo sapiens
ctgctcctgtaatta

SEQ ID NO: 1967660 - DNA, 15 bp, Homo sapiens
tgctcctgtaattaa

SEQ ID NO: 1967661 - DNA, 15 bp, Homo sapiens
gctcctgtaattaac

SEQ ID NO: 1967662 - DNA, 15 bp, Homo sapiens
ctcctgtaattaact

SEQ ID NO: 1967663 - DNA, 15 bp, Homo sapiens
tcctgtaattaactc

SEQ ID NO: 1967664 - DNA, 15 bp, Homo sapiens
cctgtaattaactcc

SEQ ID NO: 1967665 - DNA, 15 bp, Homo sapiens
ctgtaattaactcct

SEQ ID NO: 1967666 - DNA, 15 bp, Homo sapiens
tgtaattaactccta

SEQ ID NO: 1967667 - DNA, 15 bp, Homo sapiens
gtaattaactcctaa

SEQ ID NO: 1967668 - DNA, 15 bp, Homo sapiens
taattaactcctaat

SEQ ID NO: 1967669 - DNA, 15 bp, Homo sapiens
aattaactcctaatt

SEQ ID NO: 1967670 - DNA, 15 bp, Homo sapiens
attaactcctaattt

SEQ ID NO: 1967671 - DNA, 15 bp, Homo sapiens
ttaactcctaattta

SEQ ID NO: 1967672 - DNA, 15 bp, Homo sapiens
taactcctaatttat

SEQ ID NO: 1967673 - DNA, 15 bp, Homo sapiens
aactcctaatttatt

SEQ ID NO: 1967674 - DNA, 15 bp, Homo sapiens
actcctaatttattt

SEQ ID NO: 1967675 - DNA, 15 bp, Homo sapiens
ctcctaatttatttc

SEQ ID NO: 1967676 - DNA, 15 bp, Homo sapiens
tcctaatttatttca

SEQ ID NO: 1967677 - DNA, 15 bp, Homo sapiens
cctaatttatttcaa

SEQ ID NO: 1967678 - DNA, 15 bp, Homo sapiens
ctaatttatttcaaa

SEQ ID NO: 1967679 - DNA, 15 bp, Homo sapiens
taatttatttcaaac

SEQ ID NO: 1967680 - DNA, 15 bp, Homo sapiens
aatttatttcaaaca

SEQ ID NO: 1967681 - DNA, 15 bp, Homo sapiens
atttatttcaaacag

SEQ ID NO: 1967682 - DNA, 15 bp, Homo sapiens
tttatttcaaacagg

SEQ ID NO: 1967683 - DNA, 15 bp, Homo sapiens
ttatttcaaacagga

SEQ ID NO: 1967684 - DNA, 15 bp, Homo sapiens
tatttcaaacaggaa

SEQ ID NO: 1967685 - DNA, 15 bp, Homo sapiens
atttcaaacaggaaa

SEQ ID NO: 1967686 - DNA, 15 bp, Homo sapiens
tttcaaacaggaaaa

SEQ ID NO: 1967687 - DNA, 15 bp, Homo sapiens
ttcaaacaggaaaaa

SEQ ID NO: 1967688 - DNA, 15 bp, Homo sapiens
tcaaacaggaaaaaa

SEQ ID NO: 1967689 - DNA, 15 bp, Homo sapiens
caaacaggaaaaaaa

SEQ ID NO: 1967690 - DNA, 15 bp, Homo sapiens
aaacaggaaaaaaaa

SEQ ID NO: 1967691 - DNA, 15 bp, Homo sapiens
aacaggaaaaaaaaa

SEQ ID NO: 1967692 - DNA, 15 bp, Homo sapiens
acaggaaaaaaaaaa

SEQ ID NO: 1967693 - DNA, 15 bp, Homo sapiens
caggaaaaaaaaaaa

SEQ ID NO: 1967694 - DNA, 15 bp, Homo sapiens
aaaaaaaaaaaggag

SEQ ID NO: 1967695 - DNA, 15 bp, Homo sapiens
aaaaaaaaaaggagg

SEQ ID NO: 1967696 - DNA, 15 bp, Homo sapiens
aaaaaaaaaggaggg

SEQ ID NO: 1967697 - DNA, 15 bp, Homo sapiens
aaaaaaaaggagggg

SEQ ID NO: 1967698 - DNA, 15 bp, Homo sapiens
aaaaaaaggaggggg

SEQ ID NO: 1967699 - DNA, 15 bp, Homo sapiens
aaaaaaggagggggg

SEQ ID NO: 1967700 - DNA, 15 bp, Homo sapiens
aaaaaggaggggggg

SEQ ID NO: 1967701 - DNA, 15 bp, Homo sapiens
aaaaggagggggggc

SEQ ID NO: 1967702 - DNA, 15 bp, Homo sapiens
aaaggagggggggca

SEQ ID NO: 1967703 - DNA, 15 bp, Homo sapiens
aaggagggggggcag

SEQ ID NO: 1967704 - DNA, 15 bp, Homo sapiens
aggagggggggcagc

SEQ ID NO: 1967705 - DNA, 15 bp, Homo sapiens
ggagggggggcagcc

SEQ ID NO: 1967706 - DNA, 15 bp, Homo sapiens
gagggggggcagccc

SEQ ID NO: 1967707 - DNA, 15 bp, Homo sapiens
agggggggcagcccc

SEQ ID NO: 1967708 - DNA, 15 bp, Homo sapiens
gggggggcagcccct

SEQ ID NO: 1967709 - DNA, 15 bp, Homo sapiens
ggggggcagcccctt

SEQ ID NO: 1967710 - DNA, 15 bp, Homo sapiens
gggggcagccccttc

SEQ ID NO: 1967711 - DNA, 15 bp, Homo sapiens
ggggcagccccttcg

SEQ ID NO: 1967712 - DNA, 15 bp, Homo sapiens
gggcagccccttcgg

SEQ ID NO: 1967713 - DNA, 15 bp, Homo sapiens
ggcagccccttcggg

SEQ ID NO: 1967714 - DNA, 15 bp, Homo sapiens
gcagccccttcggga

SEQ ID NO: 1967715 - DNA, 15 bp, Homo sapiens
cagccccttcgggaa

SEQ ID NO: 1967716 - DNA, 15 bp, Homo sapiens
agccccttcgggaag

SEQ ID NO: 1967717 - DNA, 15 bp, Homo sapiens
gccccttcgggaaga

SEQ ID NO: 1967718 - DNA, 15 bp, Homo sapiens
ccccttcgggaagag

SEQ ID NO: 1967719 - DNA, 15 bp, Homo sapiens
cccttcgggaagagc

SEQ ID NO: 1967720 - DNA, 15 bp, Homo sapiens
ccttcgggaagagcc

SEQ ID NO: 1967721 - DNA, 15 bp, Homo sapiens
cttcgggaagagcca

SEQ ID NO: 1967722 - DNA, 15 bp, Homo sapiens
ttcgggaagagccaa

SEQ ID NO: 1967723 - DNA, 15 bp, Homo sapiens
tcgggaagagccaat

SEQ ID NO: 1967724 - DNA, 15 bp, Homo sapiens
cgggaagagccaatc

SEQ ID NO: 1967725 - DNA, 15 bp, Homo sapiens
gggaagagccaatca

SEQ ID NO: 1967726 - DNA, 15 bp, Homo sapiens
ggaagagccaatcag

SEQ ID NO: 1967727 - DNA, 15 bp, Homo sapiens
gaagagccaatcagg

SEQ ID NO: 1967728 - DNA, 15 bp, Homo sapiens
aagagccaatcaggg

SEQ ID NO: 1967729 - DNA, 15 bp, Homo sapiens
agagccaatcagggg

SEQ ID NO: 1967730 - DNA, 15 bp, Homo sapiens
gagccaatcaggggc

SEQ ID NO: 1967731 - DNA, 15 bp, Homo sapiens
agccaatcaggggcg

SEQ ID NO: 1967732 - DNA, 15 bp, Homo sapiens
gccaatcaggggcga

SEQ ID NO: 1967733 - DNA, 15 bp, Homo sapiens
ccaatcaggggcgag

SEQ ID NO: 1967734 - DNA, 15 bp, Homo sapiens
caatcaggggcgagc

SEQ ID NO: 1967735 - DNA, 15 bp, Homo sapiens
aatcaggggcgagcg

SEQ ID NO: 1967736 - DNA, 15 bp, Homo sapiens
atcaggggcgagcgt

SEQ ID NO: 1967737 - DNA, 15 bp, Homo sapiens
tcaggggcgagcgtc

SEQ ID NO: 1967738 - DNA, 15 bp, Homo sapiens
caggggcgagcgtct

SEQ ID NO: 1967739 - DNA, 15 bp, Homo sapiens
aggggcgagcgtctc

SEQ ID NO: 1967740 - DNA, 15 bp, Homo sapiens
ggggcgagcgtctct

SEQ ID NO: 1967741 - DNA, 15 bp, Homo sapiens
gggcgagcgtctctg

SEQ ID NO: 1967742 - DNA, 15 bp, Homo sapiens
ggcgagcgtctctgg

SEQ ID NO: 1967743 - DNA, 15 bp, Homo sapiens
gcgagcgtctctggc

SEQ ID NO: 1967744 - DNA, 15 bp, Homo sapiens
cgagcgtctctggcg

SEQ ID NO: 1967745 - DNA, 15 bp, Homo sapiens
gagcgtctctggcgt

SEQ ID NO: 1967746 - DNA, 15 bp, Homo sapiens
agcgtctctggcgtc

SEQ ID NO: 1967747 - DNA, 15 bp, Homo sapiens
gcgtctctggcgtca

SEQ ID NO: 1967748 - DNA, 15 bp, Homo sapiens
cgtctctggcgtcag

SEQ ID NO: 1967749 - DNA, 15 bp, Homo sapiens
gtctctggcgtcagc

SEQ ID NO: 1967750 - DNA, 15 bp, Homo sapiens
tctctggcgtcagcg

SEQ ID NO: 1967751 - DNA, 15 bp, Homo sapiens
ctctggcgtcagcgc

SEQ ID NO: 1967752 - DNA, 15 bp, Homo sapiens
tctggcgtcagcgcc

SEQ ID NO: 1967753 - DNA, 15 bp, Homo sapiens
ctggcgtcagcgcca

SEQ ID NO: 1967754 - DNA, 15 bp, Homo sapiens
tggcgtcagcgccag

SEQ ID NO: 1967755 - DNA, 15 bp, Homo sapiens
ggcgtcagcgccagg

SEQ ID NO: 1967756 - DNA, 15 bp, Homo sapiens
gcgtcagcgccaggc

SEQ ID NO: 1967757 - DNA, 15 bp, Homo sapiens
cgtcagcgccaggcc

SEQ ID NO: 1967758 - DNA, 15 bp, Homo sapiens
gtcagcgccaggccc

SEQ ID NO: 1967759 - DNA, 15 bp, Homo sapiens
tcagcgccaggcccg

SEQ ID NO: 1967760 - DNA, 15 bp, Homo sapiens
cagcgccaggcccgg

SEQ ID NO: 1967761 - DNA, 15 bp, Homo sapiens
agcgccaggcccggc

SEQ ID NO: 1967762 - DNA, 15 bp, Homo sapiens
gcgccaggcccggcg

SEQ ID NO: 1967763 - DNA, 15 bp, Homo sapiens
cgccaggcccggcgc

SEQ ID NO: 1967764 - DNA, 15 bp, Homo sapiens
gccaggcccggcgcg

SEQ ID NO: 1967765 - DNA, 15 bp, Homo sapiens
ccaggcccggcgcgg

SEQ ID NO: 1967766 - DNA, 15 bp, Homo sapiens
caggcccggcgcgga

SEQ ID NO: 1967767 - DNA, 15 bp, Homo sapiens
aggcccggcgcggat

SEQ ID NO: 1967768 - DNA, 15 bp, Homo sapiens
ggcccggcgcggatt

SEQ ID NO: 1967769 - DNA, 15 bp, Homo sapiens
gcccggcgcggattg

SEQ ID NO: 1967770 - DNA, 15 bp, Homo sapiens
cccggcgcggattgg

SEQ ID NO: 1967771 - DNA, 15 bp, Homo sapiens
ccggcgcggattggc

SEQ ID NO: 1967772 - DNA, 15 bp, Homo sapiens
cggcgcggattggcg

SEQ ID NO: 1967773 - DNA, 15 bp, Homo sapiens
ggcgcggattggcgg

SEQ ID NO: 1967774 - DNA, 15 bp, Homo sapiens
gcgcggattggcggc

SEQ ID NO: 1967775 - DNA, 15 bp, Homo sapiens
cgcggattggcggcg

SEQ ID NO: 1967776 - DNA, 15 bp, Homo sapiens
gcggattggcggcgc

SEQ ID NO: 1967777 - DNA, 15 bp, Homo sapiens
cggattggcggcgcg

SEQ ID NO: 1967778 - DNA, 15 bp, Homo sapiens
ggattggcggcgcgc

SEQ ID NO: 1967779 - DNA, 15 bp, Homo sapiens
gattggcggcgcgcg

SEQ ID NO: 1967780 - DNA, 15 bp, Homo sapiens
attggcggcgcgcgt

SEQ ID NO: 1967781 - DNA, 15 bp, Homo sapiens
ttggcggcgcgcgtc

SEQ ID NO: 1967782 - DNA, 15 bp, Homo sapiens
tggcggcgcgcgtct

SEQ ID NO: 1967783 - DNA, 15 bp, Homo sapiens
ggcggcgcgcgtctc

SEQ ID NO: 1967784 - DNA, 15 bp, Homo sapiens
gcggcgcgcgtctcc

SEQ ID NO: 1967785 - DNA, 15 bp, Homo sapiens
cggcgcgcgtctccc

SEQ ID NO: 1967786 - DNA, 15 bp, Homo sapiens
ggcgcgcgtctccca

SEQ ID NO: 1967787 - DNA, 15 bp, Homo sapiens
gcgcgcgtctcccac

SEQ ID NO: 1967788 - DNA, 15 bp, Homo sapiens
cgcgcgtctcccact

SEQ ID NO: 1967789 - DNA, 15 bp, Homo sapiens
gcgcgtctcccactt

SEQ ID NO: 1967790 - DNA, 15 bp, Homo sapiens
cgcgtctcccacttc

SEQ ID NO: 1967791 - DNA, 15 bp, Homo sapiens
gcgtctcccacttcc

SEQ ID NO: 1967792 - DNA, 15 bp, Homo sapiens
cgtctcccacttccc

SEQ ID NO: 1967793 - DNA, 15 bp, Homo sapiens
gtctcccacttcccc

SEQ ID NO: 1967794 - DNA, 15 bp, Homo sapiens
tctcccacttcccct

SEQ ID NO: 1967795 - DNA, 15 bp, Homo sapiens
ctcccacttcccctc

SEQ ID NO: 1967796 - DNA, 15 bp, Homo sapiens
tcccacttcccctcg

SEQ ID NO: 1967797 - DNA, 15 bp, Homo sapiens
cccacttcccctcgg

SEQ ID NO: 1967798 - DNA, 15 bp, Homo sapiens
ccacttcccctcgga

SEQ ID NO: 1967799 - DNA, 15 bp, Homo sapiens
cacttcccctcggag

SEQ ID NO: 1967800 - DNA, 15 bp, Homo sapiens
acttcccctcggagg

SEQ ID NO: 1967801 - DNA, 15 bp, Homo sapiens
cttcccctcggagga

SEQ ID NO: 1967802 - DNA, 15 bp, Homo sapiens
ttcccctcggaggaa

SEQ ID NO: 1967803 - DNA, 15 bp, Homo sapiens
tcccctcggaggaaa

SEQ ID NO: 1967804 - DNA, 15 bp, Homo sapiens
cccctcggaggaaag

SEQ ID NO: 1967805 - DNA, 15 bp, Homo sapiens
ccctcggaggaaagg

SEQ ID NO: 1967806 - DNA, 15 bp, Homo sapiens
cctcggaggaaaggc

SEQ ID NO: 1967807 - DNA, 15 bp, Homo sapiens
ctcggaggaaaggct

SEQ ID NO: 1967808 - DNA, 15 bp, Homo sapiens
tcggaggaaaggctc

SEQ ID NO: 1967809 - DNA, 15 bp, Homo sapiens
cggaggaaaggctca

SEQ ID NO: 1967810 - DNA, 15 bp, Homo sapiens
ggaggaaaggctcag

SEQ ID NO: 1967811 - DNA, 15 bp, Homo sapiens
gaggaaaggctcagc

SEQ ID NO: 1967812 - DNA, 15 bp, Homo sapiens
aggaaaggctcagct

SEQ ID NO: 1967813 - DNA, 15 bp, Homo sapiens
ggaaaggctcagctc

SEQ ID NO: 1967814 - DNA, 15 bp, Homo sapiens
gaaaggctcagctcc

SEQ ID NO: 1967815 - DNA, 15 bp, Homo sapiens
aaaggctcagctccc

SEQ ID NO: 1967816 - DNA, 15 bp, Homo sapiens
aaggctcagctccca

SEQ ID NO: 1967817 - DNA, 15 bp, Homo sapiens
aggctcagctcccag

SEQ ID NO: 1967818 - DNA, 15 bp, Homo sapiens
ggctcagctcccagc

SEQ ID NO: 1967819 - DNA, 15 bp, Homo sapiens
gctcagctcccagcg

SEQ ID NO: 1967820 - DNA, 15 bp, Homo sapiens
ctcagctcccagcgc

SEQ ID NO: 1967821 - DNA, 15 bp, Homo sapiens
tcagctcccagcgcg

SEQ ID NO: 1967822 - DNA, 15 bp, Homo sapiens
cagctcccagcgcgc

SEQ ID NO: 1967823 - DNA, 15 bp, Homo sapiens
agctcccagcgcgcc

SEQ ID NO: 1967824 - DNA, 15 bp, Homo sapiens
gctcccagcgcgccc

SEQ ID NO: 1967825 - DNA, 15 bp, Homo sapiens
ctcccagcgcgcccc

SEQ ID NO: 1967826 - DNA, 15 bp, Homo sapiens
tcccagcgcgcccct

SEQ ID NO: 1967827 - DNA, 15 bp, Homo sapiens
cccagcgcgcccctc

SEQ ID NO: 1967828 - DNA, 15 bp, Homo sapiens
ccagcgcgcccctcc

SEQ ID NO: 1967829 - DNA, 15 bp, Homo sapiens
cagcgcgcccctccc

SEQ ID NO: 1967830 - DNA, 15 bp, Homo sapiens
agcgcgcccctcccg

SEQ ID NO: 1967831 - DNA, 15 bp, Homo sapiens
gcgcgcccctcccgt

SEQ ID NO: 1967832 - DNA, 15 bp, Homo sapiens
cgcgcccctcccgtc

SEQ ID NO: 1967833 - DNA, 15 bp, Homo sapiens
gcgcccctcccgtct

SEQ ID NO: 1967834 - DNA, 15 bp, Homo sapiens
cgcccctcccgtctc

SEQ ID NO: 1967835 - DNA, 15 bp, Homo sapiens
gcccctcccgtctcc

SEQ ID NO: 1967836 - DNA, 15 bp, Homo sapiens
cccctcccgtctccg

SEQ ID NO: 1967837 - DNA, 15 bp, Homo sapiens
ccctcccgtctccgc

SEQ ID NO: 1967838 - DNA, 15 bp, Homo sapiens
cctcccgtctccgca

SEQ ID NO: 1967839 - DNA, 15 bp, Homo sapiens
ctcccgtctccgcag

SEQ ID NO: 1967840 - DNA, 15 bp, Homo sapiens
tcccgtctccgcagc

SEQ ID NO: 1967841 - DNA, 15 bp, Homo sapiens
cccgtctccgcagca

SEQ ID NO: 1967842 - DNA, 15 bp, Homo sapiens
ccgtctccgcagcaa

SEQ ID NO: 1967843 - DNA, 15 bp, Homo sapiens
cgtctccgcagcaaa

SEQ ID NO: 1967844 - DNA, 15 bp, Homo sapiens
gtctccgcagcaaaa

SEQ ID NO: 1967845 - DNA, 15 bp, Homo sapiens
tctccgcagcaaaaa

SEQ ID NO: 1967846 - DNA, 15 bp, Homo sapiens
ctccgcagcaaaaaa

SEQ ID NO: 1967847 - DNA, 15 bp, Homo sapiens
tccgcagcaaaaaag

SEQ ID NO: 1967848 - DNA, 15 bp, Homo sapiens
ccgcagcaaaaaagt

SEQ ID NO: 1967849 - DNA, 15 bp, Homo sapiens
cgcagcaaaaaagtt

SEQ ID NO: 1967850 - DNA, 15 bp, Homo sapiens
gcagcaaaaaagttt

SEQ ID NO: 1967851 - DNA, 15 bp, Homo sapiens
cagcaaaaaagtttg

SEQ ID NO: 1967852 - DNA, 15 bp, Homo sapiens
agcaaaaaagtttga

SEQ ID NO: 1967853 - DNA, 15 bp, Homo sapiens
gcaaaaaagtttgag

SEQ ID NO: 1967854 - DNA, 15 bp, Homo sapiens
caaaaaagtttgagt

SEQ ID NO: 1967855 - DNA, 15 bp, Homo sapiens
aaaaaagtttgagtc

SEQ ID NO: 1967856 - DNA, 15 bp, Homo sapiens
aaaaagtttgagtcg

SEQ ID NO: 1967857 - DNA, 15 bp, Homo sapiens
aaaagtttgagtcgc

SEQ ID NO: 1967858 - DNA, 15 bp, Homo sapiens
aaagtttgagtcgcc

SEQ ID NO: 1967859 - DNA, 15 bp, Homo sapiens
aagtttgagtcgccg

SEQ ID NO: 1967860 - DNA, 15 bp, Homo sapiens
agtttgagtcgccgc

SEQ ID NO: 1967861 - DNA, 15 bp, Homo sapiens
gtttgagtcgccgct

SEQ ID NO: 1967862 - DNA, 15 bp, Homo sapiens
tttgagtcgccgctg

SEQ ID NO: 1967863 - DNA, 15 bp, Homo sapiens
ttgagtcgccgctgc

SEQ ID NO: 1967864 - DNA, 15 bp, Homo sapiens
tgagtcgccgctgcc

SEQ ID NO: 1967865 - DNA, 15 bp, Homo sapiens
gagtcgccgctgccg

SEQ ID NO: 1967866 - DNA, 15 bp, Homo sapiens
agtcgccgctgccgg

SEQ ID NO: 1967867 - DNA, 15 bp, Homo sapiens
gtcgccgctgccggg

SEQ ID NO: 1967868 - DNA, 15 bp, Homo sapiens
tcgccgctgccgggt

SEQ ID NO: 1967869 - DNA, 15 bp, Homo sapiens
cgccgctgccgggtt

SEQ ID NO: 1967870 - DNA, 15 bp, Homo sapiens
gccgctgccgggttg

SEQ ID NO: 1967871 - DNA, 15 bp, Homo sapiens
ccgctgccgggttgc

SEQ ID NO: 1967872 - DNA, 15 bp, Homo sapiens
cgctgccgggttgcc

SEQ ID NO: 1967873 - DNA, 15 bp, Homo sapiens
gctgccgggttgcca

SEQ ID NO: 1967874 - DNA, 15 bp, Homo sapiens
ctgccgggttgccag

SEQ ID NO: 1967875 - DNA, 15 bp, Homo sapiens
tgccgggttgccagc

SEQ ID NO: 1967876 - DNA, 15 bp, Homo sapiens
gccgggttgccagcg

SEQ ID NO: 1967877 - DNA, 15 bp, Homo sapiens
ccgggttgccagcgg

SEQ ID NO: 1967878 - DNA, 15 bp, Homo sapiens
cgggttgccagcgga

SEQ ID NO: 1967879 - DNA, 15 bp, Homo sapiens
gggttgccagcggag

SEQ ID NO: 1967880 - DNA, 15 bp, Homo sapiens
ggttgccagcggagt

SEQ ID NO: 1967881 - DNA, 15 bp, Homo sapiens
gttgccagcggagtc

SEQ ID NO: 1967882 - DNA, 15 bp, Homo sapiens
ttgccagcggagtcg

SEQ ID NO: 1967883 - DNA, 15 bp, Homo sapiens
tgccagcggagtcgc

SEQ ID NO: 1967884 - DNA, 15 bp, Homo sapiens
gccagcggagtcgcg

SEQ ID NO: 1967885 - DNA, 15 bp, Homo sapiens
ccagcggagtcgcgc

SEQ ID NO: 1967886 - DNA, 15 bp, Homo sapiens
cagcggagtcgcgcg

SEQ ID NO: 1967887 - DNA, 15 bp, Homo sapiens
agcggagtcgcgcgt

SEQ ID NO: 1967888 - DNA, 15 bp, Homo sapiens
gcggagtcgcgcgtc

SEQ ID NO: 1967889 - DNA, 15 bp, Homo sapiens
cggagtcgcgcgtcg

SEQ ID NO: 1967890 - DNA, 15 bp, Homo sapiens
ggagtcgcgcgtcgg

SEQ ID NO: 1967891 - DNA, 15 bp, Homo sapiens
gagtcgcgcgtcggg

SEQ ID NO: 1967892 - DNA, 15 bp, Homo sapiens
agtcgcgcgtcggga

SEQ ID NO: 1967893 - DNA, 15 bp, Homo sapiens
gtcgcgcgtcgggag

SEQ ID NO: 1967894 - DNA, 15 bp, Homo sapiens
tcgcgcgtcgggagc

SEQ ID NO: 1967895 - DNA, 15 bp, Homo sapiens
cgcgcgtcgggagct

SEQ ID NO: 1967896 - DNA, 15 bp, Homo sapiens
gcgcgtcgggagcta

SEQ ID NO: 1967897 - DNA, 15 bp, Homo sapiens
cgcgtcgggagctac

SEQ ID NO: 1967898 - DNA, 15 bp, Homo sapiens
gcgtcgggagctacg

SEQ ID NO: 1967899 - DNA, 15 bp, Homo sapiens
cgtcgggagctacgt

SEQ ID NO: 1967900 - DNA, 15 bp, Homo sapiens
gtcgggagctacgta

SEQ ID NO: 1967901 - DNA, 15 bp, Homo sapiens
tcgggagctacgtag

SEQ ID NO: 1967902 - DNA, 15 bp, Homo sapiens
cgggagctacgtagg

SEQ ID NO: 1967903 - DNA, 15 bp, Homo sapiens
gggagctacgtaggg

SEQ ID NO: 1967904 - DNA, 15 bp, Homo sapiens
ggagctacgtagggc

SEQ ID NO: 1967905 - DNA, 15 bp, Homo sapiens
gagctacgtagggca

SEQ ID NO: 1967906 - DNA, 15 bp, Homo sapiens
agctacgtagggcag

SEQ ID NO: 1967907 - DNA, 15 bp, Homo sapiens
gctacgtagggcaga

SEQ ID NO: 1967908 - DNA, 15 bp, Homo sapiens
ctacgtagggcagag

SEQ ID NO: 1967909 - DNA, 15 bp, Homo sapiens
tacgtagggcagaga

SEQ ID NO: 1967910 - DNA, 15 bp, Homo sapiens
acgtagggcagagaa

SEQ ID NO: 1967911 - DNA, 15 bp, Homo sapiens
cgtagggcagagaag

SEQ ID NO: 1967912 - DNA, 15 bp, Homo sapiens
gtagggcagagaagt

SEQ ID NO: 1967913 - DNA, 15 bp, Homo sapiens
tagggcagagaagtc

SEQ ID NO: 1967914 - DNA, 15 bp, Homo sapiens
agggcagagaagtca

SEQ ID NO: 1967915 - DNA, 15 bp, Homo sapiens
gggcagagaagtcat

SEQ ID NO: 1967916 - DNA, 15 bp, Homo sapiens
ggcagagaagtcatg

SEQ ID NO: 1967917 - DNA, 15 bp, Homo sapiens
gcagagaagtcatgg

SEQ ID NO: 1967918 - DNA, 15 bp, Homo sapiens
cagagaagtcatggc

SEQ ID NO: 1967919 - DNA, 15 bp, Homo sapiens
agagaagtcatggct

SEQ ID NO: 1967920 - DNA, 15 bp, Homo sapiens
gagaagtcatggctt

SEQ ID NO: 1967921 - DNA, 15 bp, Homo sapiens
agaagtcatggcttc

SEQ ID NO: 1967922 - DNA, 15 bp, Homo sapiens
gaagtcatggcttct

SEQ ID NO: 1967923 - DNA, 15 bp, Homo sapiens
aagtcatggcttctc

SEQ ID NO: 1967924 - DNA, 15 bp, Homo sapiens
agtcatggcttctcc

SEQ ID NO: 1967925 - DNA, 15 bp, Homo sapiens
gtcatggcttctccg

SEQ ID NO: 1967926 - DNA, 15 bp, Homo sapiens
tcatggcttctccgt

SEQ ID NO: 1967927 - DNA, 15 bp, Homo sapiens
catggcttctccgtc

SEQ ID NO: 1967928 - DNA, 15 bp, Homo sapiens
atggcttctccgtcc

SEQ ID NO: 1967929 - DNA, 15 bp, Homo sapiens
tggcttctccgtcca

SEQ ID NO: 1967930 - DNA, 15 bp, Homo sapiens
ggcttctccgtccaa

SEQ ID NO: 1967931 - DNA, 15 bp, Homo sapiens
gcttctccgtccaaa

SEQ ID NO: 1967932 - DNA, 15 bp, Homo sapiens
cttctccgtccaaag

SEQ ID NO: 1967933 - DNA, 15 bp, Homo sapiens
ttctccgtccaaagg

SEQ ID NO: 1967934 - DNA, 15 bp, Homo sapiens
tctccgtccaaaggc

SEQ ID NO: 1967935 - DNA, 15 bp, Homo sapiens
ctccgtccaaaggca

SEQ ID NO: 1967936 - DNA, 15 bp, Homo sapiens
tccgtccaaaggcaa

SEQ ID NO: 1967937 - DNA, 15 bp, Homo sapiens
ccgtccaaaggcaat

SEQ ID NO: 1967938 - DNA, 15 bp, Homo sapiens
cgtccaaaggcaatg

SEQ ID NO: 1967939 - DNA, 15 bp, Homo sapiens
gtccaaaggcaatga

SEQ ID NO: 1967940 - DNA, 15 bp, Homo sapiens
tccaaaggcaatgac

SEQ ID NO: 1967941 - DNA, 15 bp, Homo sapiens
ccaaaggcaatgact

SEQ ID NO: 1967942 - DNA, 15 bp, Homo sapiens
caaaggcaatgactt

SEQ ID NO: 1967943 - DNA, 15 bp, Homo sapiens
aaaggcaatgacttg

SEQ ID NO: 1967944 - DNA, 15 bp, Homo sapiens
aaggcaatgacttgt

SEQ ID NO: 1967945 - DNA, 15 bp, Homo sapiens
aggcaatgacttgtt

SEQ ID NO: 1967946 - DNA, 15 bp, Homo sapiens
ggcaatgacttgttt

SEQ ID NO: 1967947 - DNA, 15 bp, Homo sapiens
gcaatgacttgtttt

SEQ ID NO: 1967948 - DNA, 15 bp, Homo sapiens
caatgacttgttttc

SEQ ID NO: 1967949 - DNA, 15 bp, Homo sapiens
aatgacttgttttcg

SEQ ID NO: 1967950 - DNA, 15 bp, Homo sapiens
atgacttgttttcgc

SEQ ID NO: 1967951 - DNA, 15 bp, Homo sapiens
tgacttgttttcgcc

SEQ ID NO: 1967952 - DNA, 15 bp, Homo sapiens
gacttgttttcgccc

SEQ ID NO: 1967953 - DNA, 15 bp, Homo sapiens
acttgttttcgcccg

SEQ ID NO: 1967954 - DNA, 15 bp, Homo sapiens
cttgttttcgcccga

SEQ ID NO: 1967955 - DNA, 15 bp, Homo sapiens
ttgttttcgcccgac

SEQ ID NO: 1967956 - DNA, 15 bp, Homo sapiens
tgttttcgcccgacg

SEQ ID NO: 1967957 - DNA, 15 bp, Homo sapiens
gttttcgcccgacga

SEQ ID NO: 1967958 - DNA, 15 bp, Homo sapiens
ttttcgcccgacgag

SEQ ID NO: 1967959 - DNA, 15 bp, Homo sapiens
tttcgcccgacgagg

SEQ ID NO: 1967960 - DNA, 15 bp, Homo sapiens
ttcgcccgacgagga

SEQ ID NO: 1967961 - DNA, 15 bp, Homo sapiens
tcgcccgacgaggag

SEQ ID NO: 1967962 - DNA, 15 bp, Homo sapiens
cgcccgacgaggagg

SEQ ID NO: 1967963 - DNA, 15 bp, Homo sapiens
gcccgacgaggaggg

SEQ ID NO: 1967964 - DNA, 15 bp, Homo sapiens
cccgacgaggagggc

SEQ ID NO: 1967965 - DNA, 15 bp, Homo sapiens
ccgacgaggagggcc

SEQ ID NO: 1967966 - DNA, 15 bp, Homo sapiens
cgacgaggagggccc

SEQ ID NO: 1967967 - DNA, 15 bp, Homo sapiens
gacgaggagggccca

SEQ ID NO: 1967968 - DNA, 15 bp, Homo sapiens
acgaggagggcccag

SEQ ID NO: 1967969 - DNA, 15 bp, Homo sapiens
cgaggagggcccagc

SEQ ID NO: 1967970 - DNA, 15 bp, Homo sapiens
gaggagggcccagca

SEQ ID NO: 1967971 - DNA, 15 bp, Homo sapiens
aggagggcccagcag

SEQ ID NO: 1967972 - DNA, 15 bp, Homo sapiens
ggagggcccagcagt

SEQ ID NO: 1967973 - DNA, 15 bp, Homo sapiens
gagggcccagcagtg

SEQ ID NO: 1967974 - DNA, 15 bp, Homo sapiens
agggcccagcagtgg

SEQ ID NO: 1967975 - DNA, 15 bp, Homo sapiens
gggcccagcagtggt

SEQ ID NO: 1967976 - DNA, 15 bp, Homo sapiens
ggcccagcagtggtg

SEQ ID NO: 1967977 - DNA, 15 bp, Homo sapiens
gcccagcagtggtgg

SEQ ID NO: 1967978 - DNA, 15 bp, Homo sapiens
cccagcagtggtggc

SEQ ID NO: 1967979 - DNA, 15 bp, Homo sapiens
ccagcagtggtggcc

SEQ ID NO: 1967980 - DNA, 15 bp, Homo sapiens
cagcagtggtggccg

SEQ ID NO: 1967981 - DNA, 15 bp, Homo sapiens
agcagtggtggccgg

SEQ ID NO: 1967982 - DNA, 15 bp, Homo sapiens
gcagtggtggccgga

SEQ ID NO: 1967983 - DNA, 15 bp, Homo sapiens
cagtggtggccggac

SEQ ID NO: 1967984 - DNA, 15 bp, Homo sapiens
agtggtggccggacc

SEQ ID NO: 1967985 - DNA, 15 bp, Homo sapiens
gtggtggccggacca

SEQ ID NO: 1967986 - DNA, 15 bp, Homo sapiens
tggtggccggaccag

SEQ ID NO: 1967987 - DNA, 15 bp, Homo sapiens
ggtggccggaccagg

SEQ ID NO: 1967988 - DNA, 15 bp, Homo sapiens
gtggccggaccaggc

SEQ ID NO: 1967989 - DNA, 15 bp, Homo sapiens
tggccggaccaggcc

SEQ ID NO: 1967990 - DNA, 15 bp, Homo sapiens
ggccggaccaggccc

SEQ ID NO: 1967991 - DNA, 15 bp, Homo sapiens
gccggaccaggcccg

SEQ ID NO: 1967992 - DNA, 15 bp, Homo sapiens
ccggaccaggcccgg

SEQ ID NO: 1967993 - DNA, 15 bp, Homo sapiens
cggaccaggcccggg

SEQ ID NO: 1967994 - DNA, 15 bp, Homo sapiens
ggaccaggcccgggg

SEQ ID NO: 1967995 - DNA, 15 bp, Homo sapiens
gaccaggcccggggc

SEQ ID NO: 1967996 - DNA, 15 bp, Homo sapiens
accaggcccggggcc

SEQ ID NO: 1967997 - DNA, 15 bp, Homo sapiens
ccaggcccggggcct

SEQ ID NO: 1967998 - DNA, 15 bp, Homo sapiens
caggcccggggcctg

SEQ ID NO: 1967999 - DNA, 15 bp, Homo sapiens
aggcccggggcctgg

SEQ ID NO: 1968000 - DNA, 15 bp, Homo sapiens
ggcccggggcctggg

SEQ ID NO: 1968001 - DNA, 15 bp, Homo sapiens
gcccggggcctgggg

SEQ ID NO: 1968002 - DNA, 15 bp, Homo sapiens
cccggggcctggggg

SEQ ID NO: 1968003 - DNA, 15 bp, Homo sapiens
ccggggcctgggggc

SEQ ID NO: 1968004 - DNA, 15 bp, Homo sapiens
cggggcctgggggcg

SEQ ID NO: 1968005 - DNA, 15 bp, Homo sapiens
ggggcctgggggcgc

SEQ ID NO: 1968006 - DNA, 15 bp, Homo sapiens
gggcctgggggcgcc

SEQ ID NO: 1968007 - DNA, 15 bp, Homo sapiens
ggcctgggggcgccg

SEQ ID NO: 1968008 - DNA, 15 bp, Homo sapiens
gcctgggggcgccga

SEQ ID NO: 1968009 - DNA, 15 bp, Homo sapiens
cctgggggcgccgag

SEQ ID NO: 1968010 - DNA, 15 bp, Homo sapiens
ctgggggcgccgagg

SEQ ID NO: 1968011 - DNA, 15 bp, Homo sapiens
tgggggcgccgaggg

SEQ ID NO: 1968012 - DNA, 15 bp, Homo sapiens
gggggcgccgagggg

SEQ ID NO: 1968013 - DNA, 15 bp, Homo sapiens
ggggcgccgaggggg

SEQ ID NO: 1968014 - DNA, 15 bp, Homo sapiens
gggcgccgagggggc

SEQ ID NO: 1968015 - DNA, 15 bp, Homo sapiens
ggcgccgagggggcc

SEQ ID NO: 1968016 - DNA, 15 bp, Homo sapiens
gcgccgagggggccg

SEQ ID NO: 1968017 - DNA, 15 bp, Homo sapiens
cgccgagggggccgc

SEQ ID NO: 1968018 - DNA, 15 bp, Homo sapiens
gccgagggggccgcg

SEQ ID NO: 1968019 - DNA, 15 bp, Homo sapiens
ccgagggggccgcgg

SEQ ID NO: 1968020 - DNA, 15 bp, Homo sapiens
cgagggggccgcgga

SEQ ID NO: 1968021 - DNA, 15 bp, Homo sapiens
gagggggccgcggag

SEQ ID NO: 1968022 - DNA, 15 bp, Homo sapiens
agggggccgcggagg

SEQ ID NO: 1968023 - DNA, 15 bp, Homo sapiens
gggggccgcggagga

SEQ ID NO: 1968024 - DNA, 15 bp, Homo sapiens
ggggccgcggaggag

SEQ ID NO: 1968025 - DNA, 15 bp, Homo sapiens
gggccgcggaggagc

SEQ ID NO: 1968026 - DNA, 15 bp, Homo sapiens
ggccgcggaggagcg

SEQ ID NO: 1968027 - DNA, 15 bp, Homo sapiens
gccgcggaggagcgc

SEQ ID NO: 1968028 - DNA, 15 bp, Homo sapiens
ccgcggaggagcgcc

SEQ ID NO: 1968029 - DNA, 15 bp, Homo sapiens
cgcggaggagcgccg

SEQ ID NO: 1968030 - DNA, 15 bp, Homo sapiens
gcggaggagcgccgc

SEQ ID NO: 1968031 - DNA, 15 bp, Homo sapiens
cggaggagcgccgcg

SEQ ID NO: 1968032 - DNA, 15 bp, Homo sapiens
ggaggagcgccgcgt

SEQ ID NO: 1968033 - DNA, 15 bp, Homo sapiens
gaggagcgccgcgtc

SEQ ID NO: 1968034 - DNA, 15 bp, Homo sapiens
aggagcgccgcgtca

SEQ ID NO: 1968035 - DNA, 15 bp, Homo sapiens
ggagcgccgcgtcaa

SEQ ID NO: 1968036 - DNA, 15 bp, Homo sapiens
gagcgccgcgtcaag

SEQ ID NO: 1968037 - DNA, 15 bp, Homo sapiens
agcgccgcgtcaagg

SEQ ID NO: 1968038 - DNA, 15 bp, Homo sapiens
gcgccgcgtcaaggt

SEQ ID NO: 1968039 - DNA, 15 bp, Homo sapiens
cgccgcgtcaaggtc

SEQ ID NO: 1968040 - DNA, 15 bp, Homo sapiens
gccgcgtcaaggtct

SEQ ID NO: 1968041 - DNA, 15 bp, Homo sapiens
ccgcgtcaaggtctc

SEQ ID NO: 1968042 - DNA, 15 bp, Homo sapiens
cgcgtcaaggtctcc

SEQ ID NO: 1968043 - DNA, 15 bp, Homo sapiens
gcgtcaaggtctcca

SEQ ID NO: 1968044 - DNA, 15 bp, Homo sapiens
cgtcaaggtctccag

SEQ ID NO: 1968045 - DNA, 15 bp, Homo sapiens
gtcaaggtctccagc

SEQ ID NO: 1968046 - DNA, 15 bp, Homo sapiens
tcaaggtctccagcc

SEQ ID NO: 1968047 - DNA, 15 bp, Homo sapiens
caaggtctccagcct

SEQ ID NO: 1968048 - DNA, 15 bp, Homo sapiens
aaggtctccagcctg

SEQ ID NO: 1968049 - DNA, 15 bp, Homo sapiens
aggtctccagcctgc

SEQ ID NO: 1968050 - DNA, 15 bp, Homo sapiens
ggtctccagcctgcc

SEQ ID NO: 1968051 - DNA, 15 bp, Homo sapiens
gtctccagcctgccc

SEQ ID NO: 1968052 - DNA, 15 bp, Homo sapiens
tctccagcctgccct

SEQ ID NO: 1968053 - DNA, 15 bp, Homo sapiens
ctccagcctgccctt

SEQ ID NO: 1968054 - DNA, 15 bp, Homo sapiens
tccagcctgcccttc

SEQ ID NO: 1968055 - DNA, 15 bp, Homo sapiens
ccagcctgcccttca

SEQ ID NO: 1968056 - DNA, 15 bp, Homo sapiens
cagcctgcccttcag

SEQ ID NO: 1968057 - DNA, 15 bp, Homo sapiens
agcctgcccttcagc

SEQ ID NO: 1968058 - DNA, 15 bp, Homo sapiens
gcctgcccttcagcg

SEQ ID NO: 1968059 - DNA, 15 bp, Homo sapiens
cctgcccttcagcgt

SEQ ID NO: 1968060 - DNA, 15 bp, Homo sapiens
ctgcccttcagcgtg

SEQ ID NO: 1968061 - DNA, 15 bp, Homo sapiens
tgcccttcagcgtgg

SEQ ID NO: 1968062 - DNA, 15 bp, Homo sapiens
gcccttcagcgtgga

SEQ ID NO: 1968063 - DNA, 15 bp, Homo sapiens
cccttcagcgtggag

SEQ ID NO: 1968064 - DNA, 15 bp, Homo sapiens
ccttcagcgtggagg

SEQ ID NO: 1968065 - DNA, 15 bp, Homo sapiens
cttcagcgtggaggc

SEQ ID NO: 1968066 - DNA, 15 bp, Homo sapiens
ttcagcgtggaggcg

SEQ ID NO: 1968067 - DNA, 15 bp, Homo sapiens
tcagcgtggaggcgc

SEQ ID NO: 1968068 - DNA, 15 bp, Homo sapiens
cagcgtggaggcgct

SEQ ID NO: 1968069 - DNA, 15 bp, Homo sapiens
agcgtggaggcgctc

SEQ ID NO: 1968070 - DNA, 15 bp, Homo sapiens
gcgtggaggcgctca

SEQ ID NO: 1968071 - DNA, 15 bp, Homo sapiens
cgtggaggcgctcat

SEQ ID NO: 1968072 - DNA, 15 bp, Homo sapiens
gtggaggcgctcatg

SEQ ID NO: 1968073 - DNA, 15 bp, Homo sapiens
tggaggcgctcatgt

SEQ ID NO: 1968074 - DNA, 15 bp, Homo sapiens
ggaggcgctcatgtc

SEQ ID NO: 1968075 - DNA, 15 bp, Homo sapiens
gaggcgctcatgtcc

SEQ ID NO: 1968076 - DNA, 15 bp, Homo sapiens
aggcgctcatgtccg

SEQ ID NO: 1968077 - DNA, 15 bp, Homo sapiens
ggcgctcatgtccga

SEQ ID NO: 1968078 - DNA, 15 bp, Homo sapiens
gcgctcatgtccgac

SEQ ID NO: 1968079 - DNA, 15 bp, Homo sapiens
cgctcatgtccgaca

SEQ ID NO: 1968080 - DNA, 15 bp, Homo sapiens
gctcatgtccgacaa

SEQ ID NO: 1968081 - DNA, 15 bp, Homo sapiens
ctcatgtccgacaag

SEQ ID NO: 1968082 - DNA, 15 bp, Homo sapiens
tcatgtccgacaaga

SEQ ID NO: 1968083 - DNA, 15 bp, Homo sapiens
catgtccgacaagaa

SEQ ID NO: 1968084 - DNA, 15 bp, Homo sapiens
atgtccgacaagaag

SEQ ID NO: 1968085 - DNA, 15 bp, Homo sapiens
tgtccgacaagaagc

SEQ ID NO: 1968086 - DNA, 15 bp, Homo sapiens
gtccgacaagaagcc

SEQ ID NO: 1968087 - DNA, 15 bp, Homo sapiens
tccgacaagaagccg

SEQ ID NO: 1968088 - DNA, 15 bp, Homo sapiens
ccgacaagaagccgc

SEQ ID NO: 1968089 - DNA, 15 bp, Homo sapiens
cgacaagaagccgcc

SEQ ID NO: 1968090 - DNA, 15 bp, Homo sapiens
gacaagaagccgccc

SEQ ID NO: 1968091 - DNA, 15 bp, Homo sapiens
acaagaagccgccca

SEQ ID NO: 1968092 - DNA, 15 bp, Homo sapiens
caagaagccgcccaa

SEQ ID NO: 1968093 - DNA, 15 bp, Homo sapiens
aagaagccgcccaag

SEQ ID NO: 1968094 - DNA, 15 bp, Homo sapiens
agaagccgcccaagg

SEQ ID NO: 1968095 - DNA, 15 bp, Homo sapiens
gaagccgcccaagga

SEQ ID NO: 1968096 - DNA, 15 bp, Homo sapiens
aagccgcccaaggag

SEQ ID NO: 1968097 - DNA, 15 bp, Homo sapiens
agccgcccaaggagg

SEQ ID NO: 1968098 - DNA, 15 bp, Homo sapiens
gccgcccaaggaggc

SEQ ID NO: 1968099 - DNA, 15 bp, Homo sapiens
ccgcccaaggaggcg

SEQ ID NO: 1968100 - DNA, 15 bp, Homo sapiens
cgcccaaggaggcgt

SEQ ID NO: 1968101 - DNA, 15 bp, Homo sapiens
gcccaaggaggcgtc

SEQ ID NO: 1968102 - DNA, 15 bp, Homo sapiens
cccaaggaggcgtcc

SEQ ID NO: 1968103 - DNA, 15 bp, Homo sapiens
ccaaggaggcgtccc

SEQ ID NO: 1968104 - DNA, 15 bp, Homo sapiens
caaggaggcgtcccc

SEQ ID NO: 1968105 - DNA, 15 bp, Homo sapiens
aaggaggcgtccccg

SEQ ID NO: 1968106 - DNA, 15 bp, Homo sapiens
aggaggcgtccccgc

SEQ ID NO: 1968107 - DNA, 15 bp, Homo sapiens
ggaggcgtccccgct

SEQ ID NO: 1968108 - DNA, 15 bp, Homo sapiens
gaggcgtccccgctg

SEQ ID NO: 1968109 - DNA, 15 bp, Homo sapiens
aggcgtccccgctgc

SEQ ID NO: 1968110 - DNA, 15 bp, Homo sapiens
ggcgtccccgctgcc

SEQ ID NO: 1968111 - DNA, 15 bp, Homo sapiens
gcgtccccgctgccg

SEQ ID NO: 1968112 - DNA, 15 bp, Homo sapiens
cgtccccgctgccgg

SEQ ID NO: 1968113 - DNA, 15 bp, Homo sapiens
gtccccgctgccggc

SEQ ID NO: 1968114 - DNA, 15 bp, Homo sapiens
tccccgctgccggcc

SEQ ID NO: 1968115 - DNA, 15 bp, Homo sapiens
ccccgctgccggccg

SEQ ID NO: 1968116 - DNA, 15 bp, Homo sapiens
cccgctgccggccga

SEQ ID NO: 1968117 - DNA, 15 bp, Homo sapiens
ccgctgccggccgaa

SEQ ID NO: 1968118 - DNA, 15 bp, Homo sapiens
cgctgccggccgaaa

SEQ ID NO: 1968119 - DNA, 15 bp, Homo sapiens
gctgccggccgaaag

SEQ ID NO: 1968120 - DNA, 15 bp, Homo sapiens
ctgccggccgaaagc

SEQ ID NO: 1968121 - DNA, 15 bp, Homo sapiens
tgccggccgaaagcg

SEQ ID NO: 1968122 - DNA, 15 bp, Homo sapiens
gccggccgaaagcgc

SEQ ID NO: 1968123 - DNA, 15 bp, Homo sapiens
ccggccgaaagcgcc

SEQ ID NO: 1968124 - DNA, 15 bp, Homo sapiens
cggccgaaagcgcct

SEQ ID NO: 1968125 - DNA, 15 bp, Homo sapiens
ggccgaaagcgcctc

SEQ ID NO: 1968126 - DNA, 15 bp, Homo sapiens
gccgaaagcgcctcg

SEQ ID NO: 1968127 - DNA, 15 bp, Homo sapiens
ccgaaagcgcctcgg

SEQ ID NO: 1968128 - DNA, 15 bp, Homo sapiens
cgaaagcgcctcggc

SEQ ID NO: 1968129 - DNA, 15 bp, Homo sapiens
gaaagcgcctcggcc

SEQ ID NO: 1968130 - DNA, 15 bp, Homo sapiens
aaagcgcctcggccg

SEQ ID NO: 1968131 - DNA, 15 bp, Homo sapiens
aagcgcctcggccgg

SEQ ID NO: 1968132 - DNA, 15 bp, Homo sapiens
agcgcctcggccggg

SEQ ID NO: 1968133 - DNA, 15 bp, Homo sapiens
gcgcctcggccgggg

SEQ ID NO: 1968134 - DNA, 15 bp, Homo sapiens
cgcctcggccggggc

SEQ ID NO: 1968135 - DNA, 15 bp, Homo sapiens
gcctcggccggggcc

SEQ ID NO: 1968136 - DNA, 15 bp, Homo sapiens
cctcggccggggcca

SEQ ID NO: 1968137 - DNA, 15 bp, Homo sapiens
ctcggccggggccac

SEQ ID NO: 1968138 - DNA, 15 bp, Homo sapiens
tcggccggggccacc

SEQ ID NO: 1968139 - DNA, 15 bp, Homo sapiens
cggccggggccaccc

SEQ ID NO: 1968140 - DNA, 15 bp, Homo sapiens
ggccggggccaccct

SEQ ID NO: 1968141 - DNA, 15 bp, Homo sapiens
gccggggccaccctg

SEQ ID NO: 1968142 - DNA, 15 bp, Homo sapiens
ccggggccaccctgc

SEQ ID NO: 1968143 - DNA, 15 bp, Homo sapiens
cggggccaccctgcg

SEQ ID NO: 1968144 - DNA, 15 bp, Homo sapiens
ggggccaccctgcgg

SEQ ID NO: 1968145 - DNA, 15 bp, Homo sapiens
gggccaccctgcggc

SEQ ID NO: 1968146 - DNA, 15 bp, Homo sapiens
ggccaccctgcggcc

SEQ ID NO: 1968147 - DNA, 15 bp, Homo sapiens
gccaccctgcggcca

SEQ ID NO: 1968148 - DNA, 15 bp, Homo sapiens
ccaccctgcggccac

SEQ ID NO: 1968149 - DNA, 15 bp, Homo sapiens
caccctgcggccact

SEQ ID NO: 1968150 - DNA, 15 bp, Homo sapiens
accctgcggccactg

SEQ ID NO: 1968151 - DNA, 15 bp, Homo sapiens
ccctgcggccactgc

SEQ ID NO: 1968152 - DNA, 15 bp, Homo sapiens
cctgcggccactgct

SEQ ID NO: 1968153 - DNA, 15 bp, Homo sapiens
ctgcggccactgctg

SEQ ID NO: 1968154 - DNA, 15 bp, Homo sapiens
tgcggccactgctgc

SEQ ID NO: 1968155 - DNA, 15 bp, Homo sapiens
gcggccactgctgct

SEQ ID NO: 1968156 - DNA, 15 bp, Homo sapiens
cggccactgctgctg

SEQ ID NO: 1968157 - DNA, 15 bp, Homo sapiens
ggccactgctgctgt

SEQ ID NO: 1968158 - DNA, 15 bp, Homo sapiens
gccactgctgctgtc

SEQ ID NO: 1968159 - DNA, 15 bp, Homo sapiens
ccactgctgctgtcg

SEQ ID NO: 1968160 - DNA, 15 bp, Homo sapiens
cactgctgctgtcgg

SEQ ID NO: 1968161 - DNA, 15 bp, Homo sapiens
actgctgctgtcggg

SEQ ID NO: 1968162 - DNA, 15 bp, Homo sapiens
ctgctgctgtcgggg

SEQ ID NO: 1968163 - DNA, 15 bp, Homo sapiens
tgctgctgtcggggc

SEQ ID NO: 1968164 - DNA, 15 bp, Homo sapiens
gctgctgtcggggca

SEQ ID NO: 1968165 - DNA, 15 bp, Homo sapiens
ctgctgtcggggcac

SEQ ID NO: 1968166 - DNA, 15 bp, Homo sapiens
tgctgtcggggcacg

SEQ ID NO: 1968167 - DNA, 15 bp, Homo sapiens
gctgtcggggcacgg

SEQ ID NO: 1968168 - DNA, 15 bp, Homo sapiens
ctgtcggggcacggc

SEQ ID NO: 1968169 - DNA, 15 bp, Homo sapiens
tgtcggggcacggcg

SEQ ID NO: 1968170 - DNA, 15 bp, Homo sapiens
gtcggggcacggcgc

SEQ ID NO: 1968171 - DNA, 15 bp, Homo sapiens
tcggggcacggcgct

SEQ ID NO: 1968172 - DNA, 15 bp, Homo sapiens
cggggcacggcgctc

SEQ ID NO: 1968173 - DNA, 15 bp, Homo sapiens
ggggcacggcgctcg

SEQ ID NO: 1968174 - DNA, 15 bp, Homo sapiens
gggcacggcgctcgg

SEQ ID NO: 1968175 - DNA, 15 bp, Homo sapiens
ggcacggcgctcggg

SEQ ID NO: 1968176 - DNA, 15 bp, Homo sapiens
gcacggcgctcggga

SEQ ID NO: 1968177 - DNA, 15 bp, Homo sapiens
cacggcgctcgggaa

SEQ ID NO: 1968178 - DNA, 15 bp, Homo sapiens
acggcgctcgggaag

SEQ ID NO: 1968179 - DNA, 15 bp, Homo sapiens
cggcgctcgggaagc

SEQ ID NO: 1968180 - DNA, 15 bp, Homo sapiens
ggcgctcgggaagcg

SEQ ID NO: 1968181 - DNA, 15 bp, Homo sapiens
gcgctcgggaagcgc

SEQ ID NO: 1968182 - DNA, 15 bp, Homo sapiens
cgctcgggaagcgca

SEQ ID NO: 1968183 - DNA, 15 bp, Homo sapiens
gctcgggaagcgcac

SEQ ID NO: 1968184 - DNA, 15 bp, Homo sapiens
ctcgggaagcgcaca

SEQ ID NO: 1968185 - DNA, 15 bp, Homo sapiens
tcgggaagcgcacag

SEQ ID NO: 1968186 - DNA, 15 bp, Homo sapiens
cgggaagcgcacagc

SEQ ID NO: 1968187 - DNA, 15 bp, Homo sapiens
gggaagcgcacagcc

SEQ ID NO: 1968188 - DNA, 15 bp, Homo sapiens
ggaagcgcacagccc

SEQ ID NO: 1968189 - DNA, 15 bp, Homo sapiens
gaagcgcacagcccc

SEQ ID NO: 1968190 - DNA, 15 bp, Homo sapiens
aagcgcacagccccg

SEQ ID NO: 1968191 - DNA, 15 bp, Homo sapiens
agcgcacagccccgg

SEQ ID NO: 1968192 - DNA, 15 bp, Homo sapiens
gcgcacagccccggg

SEQ ID NO: 1968193 - DNA, 15 bp, Homo sapiens
cgcacagccccgggc

SEQ ID NO: 1968194 - DNA, 15 bp, Homo sapiens
gcacagccccgggcc

SEQ ID NO: 1968195 - DNA, 15 bp, Homo sapiens
cacagccccgggccg

SEQ ID NO: 1968196 - DNA, 15 bp, Homo sapiens
acagccccgggccgc

SEQ ID NO: 1968197 - DNA, 15 bp, Homo sapiens
cagccccgggccgct

SEQ ID NO: 1968198 - DNA, 15 bp, Homo sapiens
agccccgggccgctg

SEQ ID NO: 1968199 - DNA, 15 bp, Homo sapiens
gccccgggccgctgg

SEQ ID NO: 1968200 - DNA, 15 bp, Homo sapiens
ccccgggccgctggt

SEQ ID NO: 1968201 - DNA, 15 bp, Homo sapiens
cccgggccgctggtg

SEQ ID NO: 1968202 - DNA, 15 bp, Homo sapiens
ccgggccgctggtga

SEQ ID NO: 1968203 - DNA, 15 bp, Homo sapiens
cgggccgctggtgaa

SEQ ID NO: 1968204 - DNA, 15 bp, Homo sapiens
gggccgctggtgaag

SEQ ID NO: 1968205 - DNA, 15 bp, Homo sapiens
ggccgctggtgaagc

SEQ ID NO: 1968206 - DNA, 15 bp, Homo sapiens
gccgctggtgaagcc

SEQ ID NO: 1968207 - DNA, 15 bp, Homo sapiens
ccgctggtgaagccc

SEQ ID NO: 1968208 - DNA, 15 bp, Homo sapiens
cgctggtgaagccct

SEQ ID NO: 1968209 - DNA, 15 bp, Homo sapiens
gctggtgaagccctt

SEQ ID NO: 1968210 - DNA, 15 bp, Homo sapiens
ctggtgaagcccttc

SEQ ID NO: 1968211 - DNA, 15 bp, Homo sapiens
tggtgaagcccttcg

SEQ ID NO: 1968212 - DNA, 15 bp, Homo sapiens
ggtgaagcccttcga

SEQ ID NO: 1968213 - DNA, 15 bp, Homo sapiens
gtgaagcccttcgag

SEQ ID NO: 1968214 - DNA, 15 bp, Homo sapiens
tgaagcccttcgaga

SEQ ID NO: 1968215 - DNA, 15 bp, Homo sapiens
gaagcccttcgagac

SEQ ID NO: 1968216 - DNA, 15 bp, Homo sapiens
aagcccttcgagacc

SEQ ID NO: 1968217 - DNA, 15 bp, Homo sapiens
agcccttcgagaccg

SEQ ID NO: 1968218 - DNA, 15 bp, Homo sapiens
gcccttcgagaccgc

SEQ ID NO: 1968219 - DNA, 15 bp, Homo sapiens
cccttcgagaccgcc

SEQ ID NO: 1968220 - DNA, 15 bp, Homo sapiens
ccttcgagaccgcct

SEQ ID NO: 1968221 - DNA, 15 bp, Homo sapiens
cttcgagaccgcctc

SEQ ID NO: 1968222 - DNA, 15 bp, Homo sapiens
ttcgagaccgcctcg

SEQ ID NO: 1968223 - DNA, 15 bp, Homo sapiens
tcgagaccgcctcgg

SEQ ID NO: 1968224 - DNA, 15 bp, Homo sapiens
cgagaccgcctcggt

SEQ ID NO: 1968225 - DNA, 15 bp, Homo sapiens
gagaccgcctcggtc

SEQ ID NO: 1968226 - DNA, 15 bp, Homo sapiens
agaccgcctcggtca

SEQ ID NO: 1968227 - DNA, 15 bp, Homo sapiens
gaccgcctcggtcaa

SEQ ID NO: 1968228 - DNA, 15 bp, Homo sapiens
accgcctcggtcaag

SEQ ID NO: 1968229 - DNA, 15 bp, Homo sapiens
ccgcctcggtcaagt

SEQ ID NO: 1968230 - DNA, 15 bp, Homo sapiens
cgcctcggtcaagtc

SEQ ID NO: 1968231 - DNA, 15 bp, Homo sapiens
gcctcggtcaagtcg

SEQ ID NO: 1968232 - DNA, 15 bp, Homo sapiens
cctcggtcaagtcgg

SEQ ID NO: 1968233 - DNA, 15 bp, Homo sapiens
ctcggtcaagtcgga

SEQ ID NO: 1968234 - DNA, 15 bp, Homo sapiens
tcggtcaagtcggaa

SEQ ID NO: 1968235 - DNA, 15 bp, Homo sapiens
cggtcaagtcggaaa

SEQ ID NO: 1968236 - DNA, 15 bp, Homo sapiens
ggtcaagtcggaaaa

SEQ ID NO: 1968237 - DNA, 15 bp, Homo sapiens
gtcaagtcggaaaat

SEQ ID NO: 1968238 - DNA, 15 bp, Homo sapiens
tcaagtcggaaaatt

SEQ ID NO: 1968239 - DNA, 15 bp, Homo sapiens
caagtcggaaaattc

SEQ ID NO: 1968240 - DNA, 15 bp, Homo sapiens
aagtcggaaaattca

SEQ ID NO: 1968241 - DNA, 15 bp, Homo sapiens
agtcggaaaattcag

SEQ ID NO: 1968242 - DNA, 15 bp, Homo sapiens
gtcggaaaattcaga

SEQ ID NO: 1968243 - DNA, 15 bp, Homo sapiens
tcggaaaattcagaa

SEQ ID NO: 1968244 - DNA, 15 bp, Homo sapiens
cggaaaattcagaag

SEQ ID NO: 1968245 - DNA, 15 bp, Homo sapiens
aaaattcagaagatg

SEQ ID NO: 1968246 - DNA, 15 bp, Homo sapiens
aaattcagaagatgg

SEQ ID NO: 1968247 - DNA, 15 bp, Homo sapiens
aattcagaagatgga

SEQ ID NO: 1968248 - DNA, 15 bp, Homo sapiens
attcagaagatggag

SEQ ID NO: 1968249 - DNA, 15 bp, Homo sapiens
ttcagaagatggagc

SEQ ID NO: 1968250 - DNA, 15 bp, Homo sapiens
tcagaagatggagcg

SEQ ID NO: 1968251 - DNA, 15 bp, Homo sapiens
cagaagatggagcgg

SEQ ID NO: 1968252 - DNA, 15 bp, Homo sapiens
agaagatggagcggc

SEQ ID NO: 1968253 - DNA, 15 bp, Homo sapiens
gaagatggagcggcg

SEQ ID NO: 1968254 - DNA, 15 bp, Homo sapiens
aagatggagcggcgt

SEQ ID NO: 1968255 - DNA, 15 bp, Homo sapiens
agatggagcggcgtg

SEQ ID NO: 1968256 - DNA, 15 bp, Homo sapiens
gatggagcggcgtgg

SEQ ID NO: 1968257 - DNA, 15 bp, Homo sapiens
atggagcggcgtgga

SEQ ID NO: 1968258 - DNA, 15 bp, Homo sapiens
tggagcggcgtggat

SEQ ID NO: 1968259 - DNA, 15 bp, Homo sapiens
ggagcggcgtggatg

SEQ ID NO: 1968260 - DNA, 15 bp, Homo sapiens
gagcggcgtggatgc

SEQ ID NO: 1968261 - DNA, 15 bp, Homo sapiens
agcggcgtggatgca

SEQ ID NO: 1968262 - DNA, 15 bp, Homo sapiens
gcggcgtggatgcag

SEQ ID NO: 1968263 - DNA, 15 bp, Homo sapiens
cggcgtggatgcagg

SEQ ID NO: 1968264 - DNA, 15 bp, Homo sapiens
ggcgtggatgcagga

SEQ ID NO: 1968265 - DNA, 15 bp, Homo sapiens
gcgtggatgcaggaa

SEQ ID NO: 1968266 - DNA, 15 bp, Homo sapiens
cgtggatgcaggaac

SEQ ID NO: 1968267 - DNA, 15 bp, Homo sapiens
gtggatgcaggaacc

SEQ ID NO: 1968268 - DNA, 15 bp, Homo sapiens
tggatgcaggaaccc

SEQ ID NO: 1968269 - DNA, 15 bp, Homo sapiens
ggatgcaggaacccg

SEQ ID NO: 1968270 - DNA, 15 bp, Homo sapiens
gatgcaggaacccgg

SEQ ID NO: 1968271 - DNA, 15 bp, Homo sapiens
atgcaggaacccggc

SEQ ID NO: 1968272 - DNA, 15 bp, Homo sapiens
tgcaggaacccggcc

SEQ ID NO: 1968273 - DNA, 15 bp, Homo sapiens
gcaggaacccggccg

SEQ ID NO: 1968274 - DNA, 15 bp, Homo sapiens
caggaacccggccga

SEQ ID NO: 1968275 - DNA, 15 bp, Homo sapiens
aggaacccggccgat

SEQ ID NO: 1968276 - DNA, 15 bp, Homo sapiens
ggaacccggccgata

SEQ ID NO: 1968277 - DNA, 15 bp, Homo sapiens
gaacccggccgatat

SEQ ID NO: 1968278 - DNA, 15 bp, Homo sapiens
aacccggccgatatt

SEQ ID NO: 1968279 - DNA, 15 bp, Homo sapiens
acccggccgatattc

SEQ ID NO: 1968280 - DNA, 15 bp, Homo sapiens
cccggccgatattcg

SEQ ID NO: 1968281 - DNA, 15 bp, Homo sapiens
ccggccgatattcgc

SEQ ID NO: 1968282 - DNA, 15 bp, Homo sapiens
cggccgatattcgcc

SEQ ID NO: 1968283 - DNA, 15 bp, Homo sapiens
ggccgatattcgccg

SEQ ID NO: 1968284 - DNA, 15 bp, Homo sapiens
gccgatattcgccgc

SEQ ID NO: 1968285 - DNA, 15 bp, Homo sapiens
ccgatattcgccgcc

SEQ ID NO: 1968286 - DNA, 15 bp, Homo sapiens
cgatattcgccgccg

SEQ ID NO: 1968287 - DNA, 15 bp, Homo sapiens
gatattcgccgccgc

SEQ ID NO: 1968288 - DNA, 15 bp, Homo sapiens
atattcgccgccgcc

SEQ ID NO: 1968289 - DNA, 15 bp, Homo sapiens
tattcgccgccgcca

SEQ ID NO: 1968290 - DNA, 15 bp, Homo sapiens
attcgccgccgccaa

SEQ ID NO: 1968291 - DNA, 15 bp, Homo sapiens
ttcgccgccgccaag

SEQ ID NO: 1968292 - DNA, 15 bp, Homo sapiens
tcgccgccgccaagt

SEQ ID NO: 1968293 - DNA, 15 bp, Homo sapiens
cgccgccgccaagtg

SEQ ID NO: 1968294 - DNA, 15 bp, Homo sapiens
gccgccgccaagtga

SEQ ID NO: 1968295 - DNA, 15 bp, Homo sapiens
ccgccgccaagtgag

SEQ ID NO: 1968296 - DNA, 15 bp, Homo sapiens
cgccgccaagtgagt

SEQ ID NO: 1968297 - DNA, 15 bp, Homo sapiens
gccgccaagtgagtg

SEQ ID NO: 1968298 - DNA, 15 bp, Homo sapiens
ccgccaagtgagtgc

SEQ ID NO: 1968299 - DNA, 15 bp, Homo sapiens
cgccaagtgagtgcg

SEQ ID NO: 1968300 - DNA, 15 bp, Homo sapiens
gccaagtgagtgcgc

SEQ ID NO: 1968301 - DNA, 15 bp, Homo sapiens
ccaagtgagtgcgcg

SEQ ID NO: 1968302 - DNA, 15 bp, Homo sapiens
caagtgagtgcgcgc

SEQ ID NO: 1968303 - DNA, 15 bp, Homo sapiens
aagtgagtgcgcgcc

SEQ ID NO: 1968304 - DNA, 15 bp, Homo sapiens
agtgagtgcgcgccg

SEQ ID NO: 1968305 - DNA, 15 bp, Homo sapiens
gtgagtgcgcgccgg

SEQ ID NO: 1968306 - DNA, 15 bp, Homo sapiens
tgagtgcgcgccggg

SEQ ID NO: 1968307 - DNA, 15 bp, Homo sapiens
gagtgcgcgccgggg

SEQ ID NO: 1968308 - DNA, 15 bp, Homo sapiens
agtgcgcgccggggc

SEQ ID NO: 1968309 - DNA, 15 bp, Homo sapiens
gtgcgcgccggggca

SEQ ID NO: 1968310 - DNA, 15 bp, Homo sapiens
tgcgcgccggggcag

SEQ ID NO: 1968311 - DNA, 15 bp, Homo sapiens
gcgcgccggggcagg

SEQ ID NO: 1968312 - DNA, 15 bp, Homo sapiens
cgcgccggggcagga

SEQ ID NO: 1968313 - DNA, 15 bp, Homo sapiens
gcgccggggcaggag

SEQ ID NO: 1968314 - DNA, 15 bp, Homo sapiens
cgccggggcaggagt

SEQ ID NO: 1968315 - DNA, 15 bp, Homo sapiens
gccggggcaggagta

SEQ ID NO: 1968316 - DNA, 15 bp, Homo sapiens
ccggggcaggagtag

SEQ ID NO: 1968317 - DNA, 15 bp, Homo sapiens
cggggcaggagtagg

SEQ ID NO: 1968318 - DNA, 15 bp, Homo sapiens
ggggcaggagtagga

SEQ ID NO: 1968319 - DNA, 15 bp, Homo sapiens
gggcaggagtaggag

SEQ ID NO: 1968320 - DNA, 15 bp, Homo sapiens
ggcaggagtaggagg

SEQ ID NO: 1968321 - DNA, 15 bp, Homo sapiens
gcaggagtaggaggt

SEQ ID NO: 1968322 - DNA, 15 bp, Homo sapiens
caggagtaggaggta

SEQ ID NO: 1968323 - DNA, 15 bp, Homo sapiens
aggagtaggaggtag

SEQ ID NO: 1968324 - DNA, 15 bp, Homo sapiens
ggagtaggaggtagc

SEQ ID NO: 1968325 - DNA, 15 bp, Homo sapiens
gagtaggaggtagcg

SEQ ID NO: 1968326 - DNA, 15 bp, Homo sapiens
agtaggaggtagcgc

SEQ ID NO: 1968327 - DNA, 15 bp, Homo sapiens
gtaggaggtagcgcg

SEQ ID NO: 1968328 - DNA, 15 bp, Homo sapiens
taggaggtagcgcgg

SEQ ID NO: 1968329 - DNA, 15 bp, Homo sapiens
aggaggtagcgcggg

SEQ ID NO: 1968330 - DNA, 15 bp, Homo sapiens
ggaggtagcgcgggg

SEQ ID NO: 1968331 - DNA, 15 bp, Homo sapiens
gaggtagcgcggggt

SEQ ID NO: 1968332 - DNA, 15 bp, Homo sapiens
aggtagcgcggggta

SEQ ID NO: 1968333 - DNA, 15 bp, Homo sapiens
ggtagcgcggggtac

SEQ ID NO: 1968334 - DNA, 15 bp, Homo sapiens
gtagcgcggggtact

SEQ ID NO: 1968335 - DNA, 15 bp, Homo sapiens
tagcgcggggtactg

SEQ ID NO: 1968336 - DNA, 15 bp, Homo sapiens
agcgcggggtactgg

SEQ ID NO: 1968337 - DNA, 15 bp, Homo sapiens
gcgcggggtactgga

SEQ ID NO: 1968338 - DNA, 15 bp, Homo sapiens
cgcggggtactggag

SEQ ID NO: 1968339 - DNA, 15 bp, Homo sapiens
gcggggtactggagg

SEQ ID NO: 1968340 - DNA, 15 bp, Homo sapiens
cggggtactggaggg

SEQ ID NO: 1968341 - DNA, 15 bp, Homo sapiens
ggggtactggaggga

SEQ ID NO: 1968342 - DNA, 15 bp, Homo sapiens
gggtactggagggag

SEQ ID NO: 1968343 - DNA, 15 bp, Homo sapiens
ggtactggagggagc

SEQ ID NO: 1968344 - DNA, 15 bp, Homo sapiens
gtactggagggagcg

SEQ ID NO: 1968345 - DNA, 15 bp, Homo sapiens
tactggagggagcgg

SEQ ID NO: 1968346 - DNA, 15 bp, Homo sapiens
actggagggagcggg

SEQ ID NO: 1968347 - DNA, 15 bp, Homo sapiens
ctggagggagcgggg

SEQ ID NO: 1968348 - DNA, 15 bp, Homo sapiens
tggagggagcggggg

SEQ ID NO: 1968349 - DNA, 15 bp, Homo sapiens
ggagggagcgggggg

SEQ ID NO: 1968350 - DNA, 15 bp, Homo sapiens
gagggagcggggggc

SEQ ID NO: 1968351 - DNA, 15 bp, Homo sapiens
agggagcggggggcg

SEQ ID NO: 1968352 - DNA, 15 bp, Homo sapiens
gggagcggggggcgg

SEQ ID NO: 1968353 - DNA, 15 bp, Homo sapiens
ggagcggggggcggg

SEQ ID NO: 1968354 - DNA, 15 bp, Homo sapiens
gagcggggggcgggt

SEQ ID NO: 1968355 - DNA, 15 bp, Homo sapiens
agcggggggcgggtg

SEQ ID NO: 1968356 - DNA, 15 bp, Homo sapiens
gcggggggcgggtgt

SEQ ID NO: 1968357 - DNA, 15 bp, Homo sapiens
cggggggcgggtgtt

SEQ ID NO: 1968358 - DNA, 15 bp, Homo sapiens
ggggggcgggtgttc

SEQ ID NO: 1968359 - DNA, 15 bp, Homo sapiens
gggggcgggtgttcc

SEQ ID NO: 1968360 - DNA, 15 bp, Homo sapiens
ggggcgggtgttcca

SEQ ID NO: 1968361 - DNA, 15 bp, Homo sapiens
gggcgggtgttccag

SEQ ID NO: 1968362 - DNA, 15 bp, Homo sapiens
ggcgggtgttccagg

SEQ ID NO: 1968363 - DNA, 15 bp, Homo sapiens
gcgggtgttccaggg

SEQ ID NO: 1968364 - DNA, 15 bp, Homo sapiens
cgggtgttccagggc

SEQ ID NO: 1968365 - DNA, 15 bp, Homo sapiens
gggtgttccagggct

SEQ ID NO: 1968366 - DNA, 15 bp, Homo sapiens
ggtgttccagggctg

SEQ ID NO: 1968367 - DNA, 15 bp, Homo sapiens
gtgttccagggctga

SEQ ID NO: 1968368 - DNA, 15 bp, Homo sapiens
tgttccagggctgag

SEQ ID NO: 1968369 - DNA, 15 bp, Homo sapiens
gttccagggctgagg

SEQ ID NO: 1968370 - DNA, 15 bp, Homo sapiens
ttccagggctgaggg

SEQ ID NO: 1968371 - DNA, 15 bp, Homo sapiens
tccagggctgagggt

SEQ ID NO: 1968372 - DNA, 15 bp, Homo sapiens
ccagggctgagggta

SEQ ID NO: 1968373 - DNA, 15 bp, Homo sapiens
cagggctgagggtac

SEQ ID NO: 1968374 - DNA, 15 bp, Homo sapiens
agggctgagggtacc

SEQ ID NO: 1968375 - DNA, 15 bp, Homo sapiens
gggctgagggtaccg

SEQ ID NO: 1968376 - DNA, 15 bp, Homo sapiens
ggctgagggtaccga

SEQ ID NO: 1968377 - DNA, 15 bp, Homo sapiens
gctgagggtaccgag

SEQ ID NO: 1968378 - DNA, 15 bp, Homo sapiens
ctgagggtaccgaga

SEQ ID NO: 1968379 - DNA, 15 bp, Homo sapiens
tgagggtaccgagac

SEQ ID NO: 1968380 - DNA, 15 bp, Homo sapiens
gagggtaccgagacc

SEQ ID NO: 1968381 - DNA, 15 bp, Homo sapiens
agggtaccgagaccc

SEQ ID NO: 1968382 - DNA, 15 bp, Homo sapiens
gggtaccgagaccct

SEQ ID NO: 1968383 - DNA, 15 bp, Homo sapiens
ggtaccgagaccctt

SEQ ID NO: 1968384 - DNA, 15 bp, Homo sapiens
gtaccgagacccttc

SEQ ID NO: 1968385 - DNA, 15 bp, Homo sapiens
taccgagacccttct

SEQ ID NO: 1968386 - DNA, 15 bp, Homo sapiens
accgagacccttctg

SEQ ID NO: 1968387 - DNA, 15 bp, Homo sapiens
ccgagacccttctgc

SEQ ID NO: 1968388 - DNA, 15 bp, Homo sapiens
cgagacccttctgcg

SEQ ID NO: 1968389 - DNA, 15 bp, Homo sapiens
gagacccttctgcgt

SEQ ID NO: 1968390 - DNA, 15 bp, Homo sapiens
agacccttctgcgtg

SEQ ID NO: 1968391 - DNA, 15 bp, Homo sapiens
gacccttctgcgtgc

SEQ ID NO: 1968392 - DNA, 15 bp, Homo sapiens
acccttctgcgtgcg

SEQ ID NO: 1968393 - DNA, 15 bp, Homo sapiens
cccttctgcgtgcgc

SEQ ID NO: 1968394 - DNA, 15 bp, Homo sapiens
ccttctgcgtgcgct

SEQ ID NO: 1968395 - DNA, 15 bp, Homo sapiens
cttctgcgtgcgcta

SEQ ID NO: 1968396 - DNA, 15 bp, Homo sapiens
ttctgcgtgcgctac

SEQ ID NO: 1968397 - DNA, 15 bp, Homo sapiens
tctgcgtgcgctaca

SEQ ID NO: 1968398 - DNA, 15 bp, Homo sapiens
ctgcgtgcgctacac

SEQ ID NO: 1968399 - DNA, 15 bp, Homo sapiens
tgcgtgcgctacact

SEQ ID NO: 1968400 - DNA, 15 bp, Homo sapiens
gcgtgcgctacactc

SEQ ID NO: 1968401 - DNA, 15 bp, Homo sapiens
cgtgcgctacactcc

SEQ ID NO: 1968402 - DNA, 15 bp, Homo sapiens
gtgcgctacactccc

SEQ ID NO: 1968403 - DNA, 15 bp, Homo sapiens
tgcgctacactcccg

SEQ ID NO: 1968404 - DNA, 15 bp, Homo sapiens
gcgctacactcccgg

SEQ ID NO: 1968405 - DNA, 15 bp, Homo sapiens
cgctacactcccggg

SEQ ID NO: 1968406 - DNA, 15 bp, Homo sapiens
gctacactcccggga

SEQ ID NO: 1968407 - DNA, 15 bp, Homo sapiens
ctacactcccgggaa

SEQ ID NO: 1968408 - DNA, 15 bp, Homo sapiens
tacactcccgggaaa

SEQ ID NO: 1968409 - DNA, 15 bp, Homo sapiens
acactcccgggaaag

SEQ ID NO: 1968410 - DNA, 15 bp, Homo sapiens
cactcccgggaaagc

SEQ ID NO: 1968411 - DNA, 15 bp, Homo sapiens
actcccgggaaagca

SEQ ID NO: 1968412 - DNA, 15 bp, Homo sapiens
ctcccgggaaagcaa

SEQ ID NO: 1968413 - DNA, 15 bp, Homo sapiens
tcccgggaaagcaag

SEQ ID NO: 1968414 - DNA, 15 bp, Homo sapiens
cccgggaaagcaagc

SEQ ID NO: 1968415 - DNA, 15 bp, Homo sapiens
ccgggaaagcaagcc

SEQ ID NO: 1968416 - DNA, 15 bp, Homo sapiens
cgggaaagcaagccc

SEQ ID NO: 1968417 - DNA, 15 bp, Homo sapiens
gggaaagcaagccca

SEQ ID NO: 1968418 - DNA, 15 bp, Homo sapiens
ggaaagcaagcccag

SEQ ID NO: 1968419 - DNA, 15 bp, Homo sapiens
gaaagcaagcccagg

SEQ ID NO: 1968420 - DNA, 15 bp, Homo sapiens
aaagcaagcccaggg

SEQ ID NO: 1968421 - DNA, 15 bp, Homo sapiens
aagcaagcccagggc

SEQ ID NO: 1968422 - DNA, 15 bp, Homo sapiens
agcaagcccagggcc

SEQ ID NO: 1968423 - DNA, 15 bp, Homo sapiens
gcaagcccagggcct

SEQ ID NO: 1968424 - DNA, 15 bp, Homo sapiens
caagcccagggcctc

SEQ ID NO: 1968425 - DNA, 15 bp, Homo sapiens
aagcccagggcctct

SEQ ID NO: 1968426 - DNA, 15 bp, Homo sapiens
agcccagggcctctg

SEQ ID NO: 1968427 - DNA, 15 bp, Homo sapiens
gcccagggcctctgg

SEQ ID NO: 1968428 - DNA, 15 bp, Homo sapiens
cccagggcctctgga

SEQ ID NO: 1968429 - DNA, 15 bp, Homo sapiens
ccagggcctctggac

SEQ ID NO: 1968430 - DNA, 15 bp, Homo sapiens
cagggcctctggact

SEQ ID NO: 1968431 - DNA, 15 bp, Homo sapiens
agggcctctggactc

SEQ ID NO: 1968432 - DNA, 15 bp, Homo sapiens
gggcctctggactcc

SEQ ID NO: 1968433 - DNA, 15 bp, Homo sapiens
ggcctctggactcct

SEQ ID NO: 1968434 - DNA, 15 bp, Homo sapiens
gcctctggactcctg

SEQ ID NO: 1968435 - DNA, 15 bp, Homo sapiens
cctctggactcctgg

SEQ ID NO: 1968436 - DNA, 15 bp, Homo sapiens
ctctggactcctggg

SEQ ID NO: 1968437 - DNA, 15 bp, Homo sapiens
tctggactcctgggt

SEQ ID NO: 1968438 - DNA, 15 bp, Homo sapiens
ctggactcctgggtg

SEQ ID NO: 1968439 - DNA, 15 bp, Homo sapiens
tggactcctgggtgc

SEQ ID NO: 1968440 - DNA, 15 bp, Homo sapiens
ggactcctgggtgcc

SEQ ID NO: 1968441 - DNA, 15 bp, Homo sapiens
gactcctgggtgccc

SEQ ID NO: 1968442 - DNA, 15 bp, Homo sapiens
actcctgggtgcccg

SEQ ID NO: 1968443 - DNA, 15 bp, Homo sapiens
ctcctgggtgcccgg

SEQ ID NO: 1968444 - DNA, 15 bp, Homo sapiens
tcctgggtgcccggg

SEQ ID NO: 1968445 - DNA, 15 bp, Homo sapiens
cctgggtgcccgggg

SEQ ID NO: 1968446 - DNA, 15 bp, Homo sapiens
ctgggtgcccggggc

SEQ ID NO: 1968447 - DNA, 15 bp, Homo sapiens
tgggtgcccggggcg

SEQ ID NO: 1968448 - DNA, 15 bp, Homo sapiens
gggtgcccggggcgt

SEQ ID NO: 1968449 - DNA, 15 bp, Homo sapiens
ggtgcccggggcgtt

SEQ ID NO: 1968450 - DNA, 15 bp, Homo sapiens
gtgcccggggcgttc

SEQ ID NO: 1968451 - DNA, 15 bp, Homo sapiens
tgcccggggcgttcg

SEQ ID NO: 1968452 - DNA, 15 bp, Homo sapiens
gcccggggcgttcgg

SEQ ID NO: 1968453 - DNA, 15 bp, Homo sapiens
cccggggcgttcggc

SEQ ID NO: 1968454 - DNA, 15 bp, Homo sapiens
ccggggcgttcggcg

SEQ ID NO: 1968455 - DNA, 15 bp, Homo sapiens
cggggcgttcggcgc

SEQ ID NO: 1968456 - DNA, 15 bp, Homo sapiens
ggggcgttcggcgcg

SEQ ID NO: 1968457 - DNA, 15 bp, Homo sapiens
gggcgttcggcgcgc

SEQ ID NO: 1968458 - DNA, 15 bp, Homo sapiens
ggcgttcggcgcgcc

SEQ ID NO: 1968459 - DNA, 15 bp, Homo sapiens
gcgttcggcgcgccc

SEQ ID NO: 1968460 - DNA, 15 bp, Homo sapiens
cgttcggcgcgccca

SEQ ID NO: 1968461 - DNA, 15 bp, Homo sapiens
gttcggcgcgcccag

SEQ ID NO: 1968462 - DNA, 15 bp, Homo sapiens
ttcggcgcgcccagt

SEQ ID NO: 1968463 - DNA, 15 bp, Homo sapiens
tcggcgcgcccagtg

SEQ ID NO: 1968464 - DNA, 15 bp, Homo sapiens
cggcgcgcccagtgc

SEQ ID NO: 1968465 - DNA, 15 bp, Homo sapiens
ggcgcgcccagtgcg

SEQ ID NO: 1968466 - DNA, 15 bp, Homo sapiens
gcgcgcccagtgcgc

SEQ ID NO: 1968467 - DNA, 15 bp, Homo sapiens
cgcgcccagtgcgcc

SEQ ID NO: 1968468 - DNA, 15 bp, Homo sapiens
gcgcccagtgcgccg

SEQ ID NO: 1968469 - DNA, 15 bp, Homo sapiens
cgcccagtgcgccgt

SEQ ID NO: 1968470 - DNA, 15 bp, Homo sapiens
gcccagtgcgccgtc

SEQ ID NO: 1968471 - DNA, 15 bp, Homo sapiens
cccagtgcgccgtcc

SEQ ID NO: 1968472 - DNA, 15 bp, Homo sapiens
ccagtgcgccgtccg

SEQ ID NO: 1968473 - DNA, 15 bp, Homo sapiens
cagtgcgccgtccgc

SEQ ID NO: 1968474 - DNA, 15 bp, Homo sapiens
agtgcgccgtccgca

SEQ ID NO: 1968475 - DNA, 15 bp, Homo sapiens
gtgcgccgtccgcat

SEQ ID NO: 1968476 - DNA, 15 bp, Homo sapiens
tgcgccgtccgcatc

SEQ ID NO: 1968477 - DNA, 15 bp, Homo sapiens
gcgccgtccgcatcc

SEQ ID NO: 1968478 - DNA, 15 bp, Homo sapiens
cgccgtccgcatcca

SEQ ID NO: 1968479 - DNA, 15 bp, Homo sapiens
gccgtccgcatccaa

SEQ ID NO: 1968480 - DNA, 15 bp, Homo sapiens
ccgtccgcatccaag

SEQ ID NO: 1968481 - DNA, 15 bp, Homo sapiens
cgtccgcatccaaga

SEQ ID NO: 1968482 - DNA, 15 bp, Homo sapiens
gtccgcatccaagac

SEQ ID NO: 1968483 - DNA, 15 bp, Homo sapiens
tccgcatccaagaca

SEQ ID NO: 1968484 - DNA, 15 bp, Homo sapiens
ccgcatccaagacac

SEQ ID NO: 1968485 - DNA, 15 bp, Homo sapiens
cgcatccaagacacc

SEQ ID NO: 1968486 - DNA, 15 bp, Homo sapiens
gcatccaagacaccc

SEQ ID NO: 1968487 - DNA, 15 bp, Homo sapiens
catccaagacaccct

SEQ ID NO: 1968488 - DNA, 15 bp, Homo sapiens
atccaagacaccctc

SEQ ID NO: 1968489 - DNA, 15 bp, Homo sapiens
tccaagacaccctct

SEQ ID NO: 1968490 - DNA, 15 bp, Homo sapiens
ccaagacaccctctg

SEQ ID NO: 1968491 - DNA, 15 bp, Homo sapiens
caagacaccctctgg

SEQ ID NO: 1968492 - DNA, 15 bp, Homo sapiens
aagacaccctctggg

SEQ ID NO: 1968493 - DNA, 15 bp, Homo sapiens
agacaccctctgggt

SEQ ID NO: 1968494 - DNA, 15 bp, Homo sapiens
gacaccctctgggta

SEQ ID NO: 1968495 - DNA, 15 bp, Homo sapiens
acaccctctgggtaa

SEQ ID NO: 1968496 - DNA, 15 bp, Homo sapiens
caccctctgggtaat

SEQ ID NO: 1968497 - DNA, 15 bp, Homo sapiens
accctctgggtaata

SEQ ID NO: 1968498 - DNA, 15 bp, Homo sapiens
ccctctgggtaataa

SEQ ID NO: 1968499 - DNA, 15 bp, Homo sapiens
cctctgggtaataac

SEQ ID NO: 1968500 - DNA, 15 bp, Homo sapiens
ctctgggtaataacc

SEQ ID NO: 1968501 - DNA, 15 bp, Homo sapiens
tctgggtaataaccg

SEQ ID NO: 1968502 - DNA, 15 bp, Homo sapiens
ctgggtaataaccgc

SEQ ID NO: 1968503 - DNA, 15 bp, Homo sapiens
tgggtaataaccgcg

SEQ ID NO: 1968504 - DNA, 15 bp, Homo sapiens
gggtaataaccgcgc

SEQ ID NO: 1968505 - DNA, 15 bp, Homo sapiens
ggtaataaccgcgct

SEQ ID NO: 1968506 - DNA, 15 bp, Homo sapiens
gtaataaccgcgctg

SEQ ID NO: 1968507 - DNA, 15 bp, Homo sapiens
taataaccgcgctgt

SEQ ID NO: 1968508 - DNA, 15 bp, Homo sapiens
aataaccgcgctgtg

SEQ ID NO: 1968509 - DNA, 15 bp, Homo sapiens
ataaccgcgctgtgt

SEQ ID NO: 1968510 - DNA, 15 bp, Homo sapiens
taaccgcgctgtgtg

SEQ ID NO: 1968511 - DNA, 15 bp, Homo sapiens
aaccgcgctgtgtgt

SEQ ID NO: 1968512 - DNA, 15 bp, Homo sapiens
accgcgctgtgtgtg

SEQ ID NO: 1968513 - DNA, 15 bp, Homo sapiens
ccgcgctgtgtgtgt

SEQ ID NO: 1968514 - DNA, 15 bp, Homo sapiens
cgcgctgtgtgtgtc

SEQ ID NO: 1968515 - DNA, 15 bp, Homo sapiens
gcgctgtgtgtgtct

SEQ ID NO: 1968516 - DNA, 15 bp, Homo sapiens
cgctgtgtgtgtctg

SEQ ID NO: 1968517 - DNA, 15 bp, Homo sapiens
gctgtgtgtgtctga

SEQ ID NO: 1968518 - DNA, 15 bp, Homo sapiens
ctgtgtgtgtctgag

SEQ ID NO: 1968519 - DNA, 15 bp, Homo sapiens
tgtgtgtgtctgaga

SEQ ID NO: 1968520 - DNA, 15 bp, Homo sapiens
gtgtgtgtctgagac

SEQ ID NO: 1968521 - DNA, 15 bp, Homo sapiens
tgtgtgtctgagact

SEQ ID NO: 1968522 - DNA, 15 bp, Homo sapiens
gtgtgtctgagactc

SEQ ID NO: 1968523 - DNA, 15 bp, Homo sapiens
tgtgtctgagactcc

SEQ ID NO: 1968524 - DNA, 15 bp, Homo sapiens
gtgtctgagactccc

SEQ ID NO: 1968525 - DNA, 15 bp, Homo sapiens
tgtctgagactccct

SEQ ID NO: 1968526 - DNA, 15 bp, Homo sapiens
gtctgagactccctc

SEQ ID NO: 1968527 - DNA, 15 bp, Homo sapiens
tctgagactccctcg

SEQ ID NO: 1968528 - DNA, 15 bp, Homo sapiens
ctgagactccctcga

SEQ ID NO: 1968529 - DNA, 15 bp, Homo sapiens
tgagactccctcgac

SEQ ID NO: 1968530 - DNA, 15 bp, Homo sapiens
gagactccctcgaca

SEQ ID NO: 1968531 - DNA, 15 bp, Homo sapiens
agactccctcgacat

SEQ ID NO: 1968532 - DNA, 15 bp, Homo sapiens
gactccctcgacata

SEQ ID NO: 1968533 - DNA, 15 bp, Homo sapiens
actccctcgacatac

SEQ ID NO: 1968534 - DNA, 15 bp, Homo sapiens
ctccctcgacataca

SEQ ID NO: 1968535 - DNA, 15 bp, Homo sapiens
tccctcgacatacag

SEQ ID NO: 1968536 - DNA, 15 bp, Homo sapiens
ccctcgacatacaga

SEQ ID NO: 1968537 - DNA, 15 bp, Homo sapiens
cctcgacatacagat

SEQ ID NO: 1968538 - DNA, 15 bp, Homo sapiens
ctcgacatacagatt

SEQ ID NO: 1968539 - DNA, 15 bp, Homo sapiens
tcgacatacagattg

SEQ ID NO: 1968540 - DNA, 15 bp, Homo sapiens
cgacatacagattgt

SEQ ID NO: 1968541 - DNA, 15 bp, Homo sapiens
gacatacagattgtt

SEQ ID NO: 1968542 - DNA, 15 bp, Homo sapiens
acatacagattgttt

SEQ ID NO: 1968543 - DNA, 15 bp, Homo sapiens
catacagattgtttt

SEQ ID NO: 1968544 - DNA, 15 bp, Homo sapiens
atacagattgttttt

SEQ ID NO: 1968545 - DNA, 15 bp, Homo sapiens
tacagattgtttttt

SEQ ID NO: 1968546 - DNA, 15 bp, Homo sapiens
acagattgttttttc

SEQ ID NO: 1968547 - DNA, 15 bp, Homo sapiens
cagattgttttttca

SEQ ID NO: 1968548 - DNA, 15 bp, Homo sapiens
agattgttttttcaa

SEQ ID NO: 1968549 - DNA, 15 bp, Homo sapiens
gattgttttttcaag

SEQ ID NO: 1968550 - DNA, 15 bp, Homo sapiens
attgttttttcaaga

SEQ ID NO: 1968551 - DNA, 15 bp, Homo sapiens
ttgttttttcaagag

SEQ ID NO: 1968552 - DNA, 15 bp, Homo sapiens
tgttttttcaagagc

SEQ ID NO: 1968553 - DNA, 15 bp, Homo sapiens
gttttttcaagagcg

SEQ ID NO: 1968554 - DNA, 15 bp, Homo sapiens
ttttttcaagagcga

SEQ ID NO: 1968555 - DNA, 15 bp, Homo sapiens
tttttcaagagcgaa

SEQ ID NO: 1968556 - DNA, 15 bp, Homo sapiens
ttttcaagagcgaac

SEQ ID NO: 1968557 - DNA, 15 bp, Homo sapiens
tttcaagagcgaacc

SEQ ID NO: 1968558 - DNA, 15 bp, Homo sapiens
ttcaagagcgaaccc

SEQ ID NO: 1968559 - DNA, 15 bp, Homo sapiens
tcaagagcgaacccc

SEQ ID NO: 1968560 - DNA, 15 bp, Homo sapiens
caagagcgaacccca

SEQ ID NO: 1968561 - DNA, 15 bp, Homo sapiens
aagagcgaaccccag

SEQ ID NO: 1968562 - DNA, 15 bp, Homo sapiens
agagcgaaccccagc

SEQ ID NO: 1968563 - DNA, 15 bp, Homo sapiens
gagcgaaccccagct

SEQ ID NO: 1968564 - DNA, 15 bp, Homo sapiens
agcgaaccccagctg

SEQ ID NO: 1968565 - DNA, 15 bp, Homo sapiens
gcgaaccccagctgg

SEQ ID NO: 1968566 - DNA, 15 bp, Homo sapiens
cgaaccccagctggg

SEQ ID NO: 1968567 - DNA, 15 bp, Homo sapiens
gaaccccagctgggt

SEQ ID NO: 1968568 - DNA, 15 bp, Homo sapiens
aaccccagctgggtt

SEQ ID NO: 1968569 - DNA, 15 bp, Homo sapiens
accccagctgggttt

SEQ ID NO: 1968570 - DNA, 15 bp, Homo sapiens
ccccagctgggttta

SEQ ID NO: 1968571 - DNA, 15 bp, Homo sapiens
cccagctgggtttac

SEQ ID NO: 1968572 - DNA, 15 bp, Homo sapiens
ccagctgggtttacg

SEQ ID NO: 1968573 - DNA, 15 bp, Homo sapiens
cagctgggtttacgg

SEQ ID NO: 1968574 - DNA, 15 bp, Homo sapiens
agctgggtttacggg

SEQ ID NO: 1968575 - DNA, 15 bp, Homo sapiens
gctgggtttacgggg

SEQ ID NO: 1968576 - DNA, 15 bp, Homo sapiens
ctgggtttacggggt

SEQ ID NO: 1968577 - DNA, 15 bp, Homo sapiens
tgggtttacggggtc

SEQ ID NO: 1968578 - DNA, 15 bp, Homo sapiens
gggtttacggggtcg

SEQ ID NO: 1968579 - DNA, 15 bp, Homo sapiens
ggtttacggggtcgc

SEQ ID NO: 1968580 - DNA, 15 bp, Homo sapiens
gtttacggggtcgct

SEQ ID NO: 1968581 - DNA, 15 bp, Homo sapiens
tttacggggtcgctc

SEQ ID NO: 1968582 - DNA, 15 bp, Homo sapiens
ttacggggtcgctcg

SEQ ID NO: 1968583 - DNA, 15 bp, Homo sapiens
tacggggtcgctcgg

SEQ ID NO: 1968584 - DNA, 15 bp, Homo sapiens
acggggtcgctcggt

SEQ ID NO: 1968585 - DNA, 15 bp, Homo sapiens
cggggtcgctcggtg

SEQ ID NO: 1968586 - DNA, 15 bp, Homo sapiens
ggggtcgctcggtgg

SEQ ID NO: 1968587 - DNA, 15 bp, Homo sapiens
gggtcgctcggtggt

SEQ ID NO: 1968588 - DNA, 15 bp, Homo sapiens
ggtcgctcggtggtc

SEQ ID NO: 1968589 - DNA, 15 bp, Homo sapiens
gtcgctcggtggtcc

SEQ ID NO: 1968590 - DNA, 15 bp, Homo sapiens
tcgctcggtggtccg

SEQ ID NO: 1968591 - DNA, 15 bp, Homo sapiens
cgctcggtggtccgt

SEQ ID NO: 1968592 - DNA, 15 bp, Homo sapiens
gctcggtggtccgtt

SEQ ID NO: 1968593 - DNA, 15 bp, Homo sapiens
ctcggtggtccgttt

SEQ ID NO: 1968594 - DNA, 15 bp, Homo sapiens
tcggtggtccgtttc

SEQ ID NO: 1968595 - DNA, 15 bp, Homo sapiens
cggtggtccgtttct

SEQ ID NO: 1968596 - DNA, 15 bp, Homo sapiens
ggtggtccgtttcta

SEQ ID NO: 1968597 - DNA, 15 bp, Homo sapiens
gtggtccgtttctac

SEQ ID NO: 1968598 - DNA, 15 bp, Homo sapiens
tggtccgtttctaca

SEQ ID NO: 1968599 - DNA, 15 bp, Homo sapiens
ggtccgtttctacag

SEQ ID NO: 1968600 - DNA, 15 bp, Homo sapiens
gtccgtttctacagc

SEQ ID NO: 1968601 - DNA, 15 bp, Homo sapiens
tccgtttctacagcc

SEQ ID NO: 1968602 - DNA, 15 bp, Homo sapiens
ccgtttctacagccc

SEQ ID NO: 1968603 - DNA, 15 bp, Homo sapiens
cgtttctacagccct

SEQ ID NO: 1968604 - DNA, 15 bp, Homo sapiens
gtttctacagccctc

SEQ ID NO: 1968605 - DNA, 15 bp, Homo sapiens
tttctacagccctcg

SEQ ID NO: 1968606 - DNA, 15 bp, Homo sapiens
ttctacagccctcgg

SEQ ID NO: 1968607 - DNA, 15 bp, Homo sapiens
tctacagccctcggc

SEQ ID NO: 1968608 - DNA, 15 bp, Homo sapiens
ctacagccctcggcc

SEQ ID NO: 1968609 - DNA, 15 bp, Homo sapiens
tacagccctcggccc

SEQ ID NO: 1968610 - DNA, 15 bp, Homo sapiens
acagccctcggccct

SEQ ID NO: 1968611 - DNA, 15 bp, Homo sapiens
cagccctcggccctg

SEQ ID NO: 1968612 - DNA, 15 bp, Homo sapiens
agccctcggccctgc

SEQ ID NO: 1968613 - DNA, 15 bp, Homo sapiens
gccctcggccctgcg

SEQ ID NO: 1968614 - DNA, 15 bp, Homo sapiens
ccctcggccctgcgc

SEQ ID NO: 1968615 - DNA, 15 bp, Homo sapiens
cctcggccctgcgct

SEQ ID NO: 1968616 - DNA, 15 bp, Homo sapiens
ctcggccctgcgctc

SEQ ID NO: 1968617 - DNA, 15 bp, Homo sapiens
tcggccctgcgctct

SEQ ID NO: 1968618 - DNA, 15 bp, Homo sapiens
cggccctgcgctctg

SEQ ID NO: 1968619 - DNA, 15 bp, Homo sapiens
ggccctgcgctctgg

SEQ ID NO: 1968620 - DNA, 15 bp, Homo sapiens
gccctgcgctctggc

SEQ ID NO: 1968621 - DNA, 15 bp, Homo sapiens
ccctgcgctctggcc

SEQ ID NO: 1968622 - DNA, 15 bp, Homo sapiens
cctgcgctctggcca

SEQ ID NO: 1968623 - DNA, 15 bp, Homo sapiens
ctgcgctctggccac

SEQ ID NO: 1968624 - DNA, 15 bp, Homo sapiens
tgcgctctggccact

SEQ ID NO: 1968625 - DNA, 15 bp, Homo sapiens
gcgctctggccactt

SEQ ID NO: 1968626 - DNA, 15 bp, Homo sapiens
cgctctggccacttg

SEQ ID NO: 1968627 - DNA, 15 bp, Homo sapiens
gctctggccacttgg

SEQ ID NO: 1968628 - DNA, 15 bp, Homo sapiens
ctctggccacttggc

SEQ ID NO: 1968629 - DNA, 15 bp, Homo sapiens
tctggccacttggct

SEQ ID NO: 1968630 - DNA, 15 bp, Homo sapiens
ctggccacttggctt

SEQ ID NO: 1968631 - DNA, 15 bp, Homo sapiens
tggccacttggcttg

SEQ ID NO: 1968632 - DNA, 15 bp, Homo sapiens
ggccacttggcttgt

SEQ ID NO: 1968633 - DNA, 15 bp, Homo sapiens
gccacttggcttgtt

SEQ ID NO: 1968634 - DNA, 15 bp, Homo sapiens
ccacttggcttgttt

SEQ ID NO: 1968635 - DNA, 15 bp, Homo sapiens
cacttggcttgtttt

SEQ ID NO: 1968636 - DNA, 15 bp, Homo sapiens
acttggcttgttttt

SEQ ID NO: 1968637 - DNA, 15 bp, Homo sapiens
cttggcttgtttttg

SEQ ID NO: 1968638 - DNA, 15 bp, Homo sapiens
ttggcttgtttttgt

SEQ ID NO: 1968639 - DNA, 15 bp, Homo sapiens
tggcttgtttttgtt

SEQ ID NO: 1968640 - DNA, 15 bp, Homo sapiens
ggcttgtttttgttt

SEQ ID NO: 1968641 - DNA, 15 bp, Homo sapiens
gcttgtttttgtttc

SEQ ID NO: 1968642 - DNA, 15 bp, Homo sapiens
cttgtttttgtttca

SEQ ID NO: 1968643 - DNA, 15 bp, Homo sapiens
ttgtttttgtttcac

SEQ ID NO: 1968644 - DNA, 15 bp, Homo sapiens
tgtttttgtttcact

SEQ ID NO: 1968645 - DNA, 15 bp, Homo sapiens
gtttttgtttcactg

SEQ ID NO: 1968646 - DNA, 15 bp, Homo sapiens
tttttgtttcactgt

SEQ ID NO: 1968647 - DNA, 15 bp, Homo sapiens
ttttgtttcactgtt

SEQ ID NO: 1968648 - DNA, 15 bp, Homo sapiens
tttgtttcactgttc

SEQ ID NO: 1968649 - DNA, 15 bp, Homo sapiens
ttgtttcactgttcc

SEQ ID NO: 1968650 - DNA, 15 bp, Homo sapiens
tgtttcactgttccc

SEQ ID NO: 1968651 - DNA, 15 bp, Homo sapiens
gtttcactgttcccc

SEQ ID NO: 1968652 - DNA, 15 bp, Homo sapiens
tttcactgttccccg

SEQ ID NO: 1968653 - DNA, 15 bp, Homo sapiens
ttcactgttccccgg

SEQ ID NO: 1968654 - DNA, 15 bp, Homo sapiens
tcactgttccccgga

SEQ ID NO: 1968655 - DNA, 15 bp, Homo sapiens
cactgttccccggag

SEQ ID NO: 1968656 - DNA, 15 bp, Homo sapiens
actgttccccggagt

SEQ ID NO: 1968657 - DNA, 15 bp, Homo sapiens
ctgttccccggagtc

SEQ ID NO: 1968658 - DNA, 15 bp, Homo sapiens
tgttccccggagtct

SEQ ID NO: 1968659 - DNA, 15 bp, Homo sapiens
gttccccggagtctc

SEQ ID NO: 1968660 - DNA, 15 bp, Homo sapiens
ttccccggagtctct

SEQ ID NO: 1968661 - DNA, 15 bp, Homo sapiens
tccccggagtctctg

SEQ ID NO: 1968662 - DNA, 15 bp, Homo sapiens
ccccggagtctctgc

SEQ ID NO: 1968663 - DNA, 15 bp, Homo sapiens
cccggagtctctgcc

SEQ ID NO: 1968664 - DNA, 15 bp, Homo sapiens
ccggagtctctgcct

SEQ ID NO: 1968665 - DNA, 15 bp, Homo sapiens
cggagtctctgcctg

SEQ ID NO: 1968666 - DNA, 15 bp, Homo sapiens
ggagtctctgcctgg

SEQ ID NO: 1968667 - DNA, 15 bp, Homo sapiens
gagtctctgcctggg

SEQ ID NO: 1968668 - DNA, 15 bp, Homo sapiens
agtctctgcctgggg

SEQ ID NO: 1968669 - DNA, 15 bp, Homo sapiens
gtctctgcctgggga

SEQ ID NO: 1968670 - DNA, 15 bp, Homo sapiens
tctctgcctggggag

SEQ ID NO: 1968671 - DNA, 15 bp, Homo sapiens
ctctgcctggggagt

SEQ ID NO: 1968672 - DNA, 15 bp, Homo sapiens
tctgcctggggagtg

SEQ ID NO: 1968673 - DNA, 15 bp, Homo sapiens
ctgcctggggagtga

SEQ ID NO: 1968674 - DNA, 15 bp, Homo sapiens
tgcctggggagtgaa

SEQ ID NO: 1968675 - DNA, 15 bp, Homo sapiens
gcctggggagtgaag

SEQ ID NO: 1968676 - DNA, 15 bp, Homo sapiens
cctggggagtgaagg

SEQ ID NO: 1968677 - DNA, 15 bp, Homo sapiens
ctggggagtgaagga

SEQ ID NO: 1968678 - DNA, 15 bp, Homo sapiens
tggggagtgaaggag

SEQ ID NO: 1968679 - DNA, 15 bp, Homo sapiens
ggggagtgaaggagt

SEQ ID NO: 1968680 - DNA, 15 bp, Homo sapiens
gggagtgaaggagtt

SEQ ID NO: 1968681 - DNA, 15 bp, Homo sapiens
ggagtgaaggagttg

SEQ ID NO: 1968682 - DNA, 15 bp, Homo sapiens
gagtgaaggagttgg

SEQ ID NO: 1968683 - DNA, 15 bp, Homo sapiens
agtgaaggagttgga

SEQ ID NO: 1968684 - DNA, 15 bp, Homo sapiens
gtgaaggagttggat

SEQ ID NO: 1968685 - DNA, 15 bp, Homo sapiens
tgaaggagttggatc

SEQ ID NO: 1968686 - DNA, 15 bp, Homo sapiens
gaaggagttggatcc

SEQ ID NO: 1968687 - DNA, 15 bp, Homo sapiens
aaggagttggatcca

SEQ ID NO: 1968688 - DNA, 15 bp, Homo sapiens
aggagttggatccat

SEQ ID NO: 1968689 - DNA, 15 bp, Homo sapiens
ggagttggatccatg

SEQ ID NO: 1968690 - DNA, 15 bp, Homo sapiens
gagttggatccatgt

SEQ ID NO: 1968691 - DNA, 15 bp, Homo sapiens
agttggatccatgtt

SEQ ID NO: 1968692 - DNA, 15 bp, Homo sapiens
gttggatccatgttc

SEQ ID NO: 1968693 - DNA, 15 bp, Homo sapiens
ttggatccatgttca

SEQ ID NO: 1968694 - DNA, 15 bp, Homo sapiens
tggatccatgttcag

SEQ ID NO: 1968695 - DNA, 15 bp, Homo sapiens
ggatccatgttcagt

SEQ ID NO: 1968696 - DNA, 15 bp, Homo sapiens
gatccatgttcagtg

SEQ ID NO: 1968697 - DNA, 15 bp, Homo sapiens
atccatgttcagtga

SEQ ID NO: 1968698 - DNA, 15 bp, Homo sapiens
tccatgttcagtgag

SEQ ID NO: 1968699 - DNA, 15 bp, Homo sapiens
ccatgttcagtgagc

SEQ ID NO: 1968700 - DNA, 15 bp, Homo sapiens
catgttcagtgagca

SEQ ID NO: 1968701 - DNA, 15 bp, Homo sapiens
atgttcagtgagcac

SEQ ID NO: 1968702 - DNA, 15 bp, Homo sapiens
tgttcagtgagcact

SEQ ID NO: 1968703 - DNA, 15 bp, Homo sapiens
gttcagtgagcactt

SEQ ID NO: 1968704 - DNA, 15 bp, Homo sapiens
ttcagtgagcacttg

SEQ ID NO: 1968705 - DNA, 15 bp, Homo sapiens
tcagtgagcacttgg

SEQ ID NO: 1968706 - DNA, 15 bp, Homo sapiens
cagtgagcacttgga

SEQ ID NO: 1968707 - DNA, 15 bp, Homo sapiens
agtgagcacttggat

SEQ ID NO: 1968708 - DNA, 15 bp, Homo sapiens
gtgagcacttggatg

SEQ ID NO: 1968709 - DNA, 15 bp, Homo sapiens
tgagcacttggatgt

SEQ ID NO: 1968710 - DNA, 15 bp, Homo sapiens
gagcacttggatgta

SEQ ID NO: 1968711 - DNA, 15 bp, Homo sapiens
agcacttggatgtac

SEQ ID NO: 1968712 - DNA, 15 bp, Homo sapiens
gcacttggatgtacc

SEQ ID NO: 1968713 - DNA, 15 bp, Homo sapiens
cacttggatgtacca

SEQ ID NO: 1968714 - DNA, 15 bp, Homo sapiens
acttggatgtaccag

SEQ ID NO: 1968715 - DNA, 15 bp, Homo sapiens
cttggatgtaccagg

SEQ ID NO: 1968716 - DNA, 15 bp, Homo sapiens
ttggatgtaccagga

SEQ ID NO: 1968717 - DNA, 15 bp, Homo sapiens
tggatgtaccaggaa

SEQ ID NO: 1968718 - DNA, 15 bp, Homo sapiens
ggatgtaccaggaac

SEQ ID NO: 1968719 - DNA, 15 bp, Homo sapiens
gatgtaccaggaacg

SEQ ID NO: 1968720 - DNA, 15 bp, Homo sapiens
atgtaccaggaacga

SEQ ID NO: 1968721 - DNA, 15 bp, Homo sapiens
tgtaccaggaacgag

SEQ ID NO: 1968722 - DNA, 15 bp, Homo sapiens
gtaccaggaacgaga

SEQ ID NO: 1968723 - DNA, 15 bp, Homo sapiens
taccaggaacgagac

SEQ ID NO: 1968724 - DNA, 15 bp, Homo sapiens
accaggaacgagaca

SEQ ID NO: 1968725 - DNA, 15 bp, Homo sapiens
ccaggaacgagacag

SEQ ID NO: 1968726 - DNA, 15 bp, Homo sapiens
caggaacgagacagg

SEQ ID NO: 1968727 - DNA, 15 bp, Homo sapiens
aggaacgagacaggt

SEQ ID NO: 1968728 - DNA, 15 bp, Homo sapiens
ggaacgagacaggtt

SEQ ID NO: 1968729 - DNA, 15 bp, Homo sapiens
gaacgagacaggttc

SEQ ID NO: 1968730 - DNA, 15 bp, Homo sapiens
aacgagacaggttca

SEQ ID NO: 1968731 - DNA, 15 bp, Homo sapiens
acgagacaggttcaa

SEQ ID NO: 1968732 - DNA, 15 bp, Homo sapiens
cgagacaggttcaaa

SEQ ID NO: 1968733 - DNA, 15 bp, Homo sapiens
gagacaggttcaaaa

SEQ ID NO: 1968734 - DNA, 15 bp, Homo sapiens
agacaggttcaaaac

SEQ ID NO: 1968735 - DNA, 15 bp, Homo sapiens
gacaggttcaaaact

SEQ ID NO: 1968736 - DNA, 15 bp, Homo sapiens
acaggttcaaaactc

SEQ ID NO: 1968737 - DNA, 15 bp, Homo sapiens
caggttcaaaactca

SEQ ID NO: 1968738 - DNA, 15 bp, Homo sapiens
aggttcaaaactcaa

SEQ ID NO: 1968739 - DNA, 15 bp, Homo sapiens
ggttcaaaactcaac

SEQ ID NO: 1968740 - DNA, 15 bp, Homo sapiens
gttcaaaactcaacc

SEQ ID NO: 1968741 - DNA, 15 bp, Homo sapiens
ttcaaaactcaaccc

SEQ ID NO: 1968742 - DNA, 15 bp, Homo sapiens
tcaaaactcaaccct

SEQ ID NO: 1968743 - DNA, 15 bp, Homo sapiens
caaaactcaaccctg

SEQ ID NO: 1968744 - DNA, 15 bp, Homo sapiens
aaaactcaaccctga

SEQ ID NO: 1968745 - DNA, 15 bp, Homo sapiens
aaactcaaccctgag

SEQ ID NO: 1968746 - DNA, 15 bp, Homo sapiens
aactcaaccctgaga

SEQ ID NO: 1968747 - DNA, 15 bp, Homo sapiens
actcaaccctgagag

SEQ ID NO: 1968748 - DNA, 15 bp, Homo sapiens
ctcaaccctgagagt

SEQ ID NO: 1968749 - DNA, 15 bp, Homo sapiens
tcaaccctgagagtt

SEQ ID NO: 1968750 - DNA, 15 bp, Homo sapiens
caaccctgagagttg

SEQ ID NO: 1968751 - DNA, 15 bp, Homo sapiens
aaccctgagagttgt

SEQ ID NO: 1968752 - DNA, 15 bp, Homo sapiens
accctgagagttgtg

SEQ ID NO: 1968753 - DNA, 15 bp, Homo sapiens
ccctgagagttgtgc

SEQ ID NO: 1968754 - DNA, 15 bp, Homo sapiens
cctgagagttgtgcc

SEQ ID NO: 1968755 - DNA, 15 bp, Homo sapiens
ctgagagttgtgccc

SEQ ID NO: 1968756 - DNA, 15 bp, Homo sapiens
tgagagttgtgcccc

SEQ ID NO: 1968757 - DNA, 15 bp, Homo sapiens
gagagttgtgccccc

SEQ ID NO: 1968758 - DNA, 15 bp, Homo sapiens
agagttgtgccccca

SEQ ID NO: 1968759 - DNA, 15 bp, Homo sapiens
gagttgtgcccccat

SEQ ID NO: 1968760 - DNA, 15 bp, Homo sapiens
agttgtgcccccatt

SEQ ID NO: 1968761 - DNA, 15 bp, Homo sapiens
gttgtgcccccattt

SEQ ID NO: 1968762 - DNA, 15 bp, Homo sapiens
ttgtgcccccatttt

SEQ ID NO: 1968763 - DNA, 15 bp, Homo sapiens
tgtgcccccatttta

SEQ ID NO: 1968764 - DNA, 15 bp, Homo sapiens
gtgcccccattttaa

SEQ ID NO: 1968765 - DNA, 15 bp, Homo sapiens
tgcccccattttaaa

SEQ ID NO: 1968766 - DNA, 15 bp, Homo sapiens
gcccccattttaaag

SEQ ID NO: 1968767 - DNA, 15 bp, Homo sapiens
cccccattttaaaga

SEQ ID NO: 1968768 - DNA, 15 bp, Homo sapiens
ccccattttaaagat

SEQ ID NO: 1968769 - DNA, 15 bp, Homo sapiens
cccattttaaagatg

SEQ ID NO: 1968770 - DNA, 15 bp, Homo sapiens
ccattttaaagatga

SEQ ID NO: 1968771 - DNA, 15 bp, Homo sapiens
attttaaagatgagc

SEQ ID NO: 1968772 - DNA, 15 bp, Homo sapiens
ttttaaagatgagct

SEQ ID NO: 1968773 - DNA, 15 bp, Homo sapiens
tttaaagatgagcta

SEQ ID NO: 1968774 - DNA, 15 bp, Homo sapiens
ttaaagatgagctaa

SEQ ID NO: 1968775 - DNA, 15 bp, Homo sapiens
taaagatgagctaac

SEQ ID NO: 1968776 - DNA, 15 bp, Homo sapiens
aaagatgagctaact

SEQ ID NO: 1968777 - DNA, 15 bp, Homo sapiens
aagatgagctaactg

SEQ ID NO: 1968778 - DNA, 15 bp, Homo sapiens
agatgagctaactgg

SEQ ID NO: 1968779 - DNA, 15 bp, Homo sapiens
gatgagctaactggg

SEQ ID NO: 1968780 - DNA, 15 bp, Homo sapiens
atgagctaactgggc

SEQ ID NO: 1968781 - DNA, 15 bp, Homo sapiens
tgagctaactgggct

SEQ ID NO: 1968782 - DNA, 15 bp, Homo sapiens
gagctaactgggctt

SEQ ID NO: 1968783 - DNA, 15 bp, Homo sapiens
agctaactgggctta

SEQ ID NO: 1968784 - DNA, 15 bp, Homo sapiens
gctaactgggcttag

SEQ ID NO: 1968785 - DNA, 15 bp, Homo sapiens
ctaactgggcttagc

SEQ ID NO: 1968786 - DNA, 15 bp, Homo sapiens
taactgggcttagcc

SEQ ID NO: 1968787 - DNA, 15 bp, Homo sapiens
aactgggcttagcca

SEQ ID NO: 1968788 - DNA, 15 bp, Homo sapiens
actgggcttagccag

SEQ ID NO: 1968789 - DNA, 15 bp, Homo sapiens
ctgggcttagccaga

SEQ ID NO: 1968790 - DNA, 15 bp, Homo sapiens
tgggcttagccagac

SEQ ID NO: 1968791 - DNA, 15 bp, Homo sapiens
gggcttagccagaca

SEQ ID NO: 1968792 - DNA, 15 bp, Homo sapiens
ggcttagccagacat

SEQ ID NO: 1968793 - DNA, 15 bp, Homo sapiens
gcttagccagacatt

SEQ ID NO: 1968794 - DNA, 15 bp, Homo sapiens
cttagccagacattg

SEQ ID NO: 1968795 - DNA, 15 bp, Homo sapiens
ttagccagacattga

SEQ ID NO: 1968796 - DNA, 15 bp, Homo sapiens
tagccagacattgag

SEQ ID NO: 1968797 - DNA, 15 bp, Homo sapiens
agccagacattgagg

SEQ ID NO: 1968798 - DNA, 15 bp, Homo sapiens
gccagacattgagga

SEQ ID NO: 1968799 - DNA, 15 bp, Homo sapiens
ccagacattgaggag

SEQ ID NO: 1968800 - DNA, 15 bp, Homo sapiens
cagacattgaggaga

SEQ ID NO: 1968801 - DNA, 15 bp, Homo sapiens
agacattgaggagaa

SEQ ID NO: 1968802 - DNA, 15 bp, Homo sapiens
gacattgaggagaaa

SEQ ID NO: 1968803 - DNA, 15 bp, Homo sapiens
acattgaggagaaac

SEQ ID NO: 1968804 - DNA, 15 bp, Homo sapiens
cattgaggagaaacc

SEQ ID NO: 1968805 - DNA, 15 bp, Homo sapiens
attgaggagaaacca

SEQ ID NO: 1968806 - DNA, 15 bp, Homo sapiens
ttgaggagaaaccat

SEQ ID NO: 1968807 - DNA, 15 bp, Homo sapiens
tgaggagaaaccatt

SEQ ID NO: 1968808 - DNA, 15 bp, Homo sapiens
gaggagaaaccattt

SEQ ID NO: 1968809 - DNA, 15 bp, Homo sapiens
aggagaaaccatttt

SEQ ID NO: 1968810 - DNA, 15 bp, Homo sapiens
ggagaaaccattttc

SEQ ID NO: 1968811 - DNA, 15 bp, Homo sapiens
gagaaaccattttct

SEQ ID NO: 1968812 - DNA, 15 bp, Homo sapiens
agaaaccattttctt

SEQ ID NO: 1968813 - DNA, 15 bp, Homo sapiens
gaaaccattttcttt

SEQ ID NO: 1968814 - DNA, 15 bp, Homo sapiens
aaaccattttctttc

SEQ ID NO: 1968815 - DNA, 15 bp, Homo sapiens
aaccattttctttcg

SEQ ID NO: 1968816 - DNA, 15 bp, Homo sapiens
accattttctttcgt

SEQ ID NO: 1968817 - DNA, 15 bp, Homo sapiens
ccattttctttcgtg

SEQ ID NO: 1968818 - DNA, 15 bp, Homo sapiens
cattttctttcgtga

SEQ ID NO: 1968819 - DNA, 15 bp, Homo sapiens
attttctttcgtgag

SEQ ID NO: 1968820 - DNA, 15 bp, Homo sapiens
ttttctttcgtgagt

SEQ ID NO: 1968821 - DNA, 15 bp, Homo sapiens
tttctttcgtgagtc

SEQ ID NO: 1968822 - DNA, 15 bp, Homo sapiens
ttctttcgtgagtcc

SEQ ID NO: 1968823 - DNA, 15 bp, Homo sapiens
tctttcgtgagtccc

SEQ ID NO: 1968824 - DNA, 15 bp, Homo sapiens
ctttcgtgagtcccg

SEQ ID NO: 1968825 - DNA, 15 bp, Homo sapiens
tttcgtgagtcccgc

SEQ ID NO: 1968826 - DNA, 15 bp, Homo sapiens
ttcgtgagtcccgcg

SEQ ID NO: 1968827 - DNA, 15 bp, Homo sapiens
tcgtgagtcccgcgg

SEQ ID NO: 1968828 - DNA, 15 bp, Homo sapiens
cgtgagtcccgcggg

SEQ ID NO: 1968829 - DNA, 15 bp, Homo sapiens
gtgagtcccgcgggt

SEQ ID NO: 1968830 - DNA, 15 bp, Homo sapiens
tgagtcccgcgggtg

SEQ ID NO: 1968831 - DNA, 15 bp, Homo sapiens
gagtcccgcgggtgt

SEQ ID NO: 1968832 - DNA, 15 bp, Homo sapiens
agtcccgcgggtgtc

SEQ ID NO: 1968833 - DNA, 15 bp, Homo sapiens
gtcccgcgggtgtcg

SEQ ID NO: 1968834 - DNA, 15 bp, Homo sapiens
tcccgcgggtgtcga

SEQ ID NO: 1968835 - DNA, 15 bp, Homo sapiens
cccgcgggtgtcgaa

SEQ ID NO: 1968836 - DNA, 15 bp, Homo sapiens
ccgcgggtgtcgaag

SEQ ID NO: 1968837 - DNA, 15 bp, Homo sapiens
cgcgggtgtcgaagc

SEQ ID NO: 1968838 - DNA, 15 bp, Homo sapiens
gcgggtgtcgaagcc

SEQ ID NO: 1968839 - DNA, 15 bp, Homo sapiens
cgggtgtcgaagccg

SEQ ID NO: 1968840 - DNA, 15 bp, Homo sapiens
gggtgtcgaagccgg

SEQ ID NO: 1968841 - DNA, 15 bp, Homo sapiens
ggtgtcgaagccgga

SEQ ID NO: 1968842 - DNA, 15 bp, Homo sapiens
gtgtcgaagccggat

SEQ ID NO: 1968843 - DNA, 15 bp, Homo sapiens
tgtcgaagccggatc

SEQ ID NO: 1968844 - DNA, 15 bp, Homo sapiens
gtcgaagccggatcc

SEQ ID NO: 1968845 - DNA, 15 bp, Homo sapiens
tcgaagccggatccc

SEQ ID NO: 1968846 - DNA, 15 bp, Homo sapiens
cgaagccggatccca

SEQ ID NO: 1968847 - DNA, 15 bp, Homo sapiens
gaagccggatcccac

SEQ ID NO: 1968848 - DNA, 15 bp, Homo sapiens
aagccggatcccacg

SEQ ID NO: 1968849 - DNA, 15 bp, Homo sapiens
agccggatcccacga

SEQ ID NO: 1968850 - DNA, 15 bp, Homo sapiens
gccggatcccacgaa

SEQ ID NO: 1968851 - DNA, 15 bp, Homo sapiens
ccggatcccacgaag

SEQ ID NO: 1968852 - DNA, 15 bp, Homo sapiens
cggatcccacgaagg

SEQ ID NO: 1968853 - DNA, 15 bp, Homo sapiens
ggatcccacgaaggg

SEQ ID NO: 1968854 - DNA, 15 bp, Homo sapiens
gatcccacgaaggga

SEQ ID NO: 1968855 - DNA, 15 bp, Homo sapiens
atcccacgaagggat

SEQ ID NO: 1968856 - DNA, 15 bp, Homo sapiens
tcccacgaagggatg

SEQ ID NO: 1968857 - DNA, 15 bp, Homo sapiens
cccacgaagggatgg

SEQ ID NO: 1968858 - DNA, 15 bp, Homo sapiens
ccacgaagggatggt

SEQ ID NO: 1968859 - DNA, 15 bp, Homo sapiens
cacgaagggatggtg

SEQ ID NO: 1968860 - DNA, 15 bp, Homo sapiens
acgaagggatggtgg

SEQ ID NO: 1968861 - DNA, 15 bp, Homo sapiens
cgaagggatggtggc

SEQ ID NO: 1968862 - DNA, 15 bp, Homo sapiens
gaagggatggtggca

SEQ ID NO: 1968863 - DNA, 15 bp, Homo sapiens
aagggatggtggcac

SEQ ID NO: 1968864 - DNA, 15 bp, Homo sapiens
agggatggtggcacc

SEQ ID NO: 1968865 - DNA, 15 bp, Homo sapiens
gggatggtggcacca

SEQ ID NO: 1968866 - DNA, 15 bp, Homo sapiens
ggatggtggcaccag

SEQ ID NO: 1968867 - DNA, 15 bp, Homo sapiens
gatggtggcaccagg

SEQ ID NO: 1968868 - DNA, 15 bp, Homo sapiens
atggtggcaccaggg

SEQ ID NO: 1968869 - DNA, 15 bp, Homo sapiens
tggtggcaccaggga

SEQ ID NO: 1968870 - DNA, 15 bp, Homo sapiens
ggtggcaccagggat

SEQ ID NO: 1968871 - DNA, 15 bp, Homo sapiens
gtggcaccagggatg

SEQ ID NO: 1968872 - DNA, 15 bp, Homo sapiens
tggcaccagggatgg

SEQ ID NO: 1968873 - DNA, 15 bp, Homo sapiens
ggcaccagggatggt

SEQ ID NO: 1968874 - DNA, 15 bp, Homo sapiens
gcaccagggatggtg

SEQ ID NO: 1968875 - DNA, 15 bp, Homo sapiens
caccagggatggtgg

SEQ ID NO: 1968876 - DNA, 15 bp, Homo sapiens
accagggatggtggc

SEQ ID NO: 1968877 - DNA, 15 bp, Homo sapiens
ccagggatggtggca

SEQ ID NO: 1968878 - DNA, 15 bp, Homo sapiens
cagggatggtggcat

SEQ ID NO: 1968879 - DNA, 15 bp, Homo sapiens
agggatggtggcatc

SEQ ID NO: 1968880 - DNA, 15 bp, Homo sapiens
gggatggtggcatca

SEQ ID NO: 1968881 - DNA, 15 bp, Homo sapiens
ggatggtggcatcag

SEQ ID NO: 1968882 - DNA, 15 bp, Homo sapiens
gatggtggcatcaga

SEQ ID NO: 1968883 - DNA, 15 bp, Homo sapiens
atggtggcatcagag

SEQ ID NO: 1968884 - DNA, 15 bp, Homo sapiens
tggtggcatcagagt

SEQ ID NO: 1968885 - DNA, 15 bp, Homo sapiens
ggtggcatcagagtc

SEQ ID NO: 1968886 - DNA, 15 bp, Homo sapiens
gtggcatcagagtct

SEQ ID NO: 1968887 - DNA, 15 bp, Homo sapiens
tggcatcagagtctg

SEQ ID NO: 1968888 - DNA, 15 bp, Homo sapiens
ggcatcagagtctgg

SEQ ID NO: 1968889 - DNA, 15 bp, Homo sapiens
gcatcagagtctggt

SEQ ID NO: 1968890 - DNA, 15 bp, Homo sapiens
catcagagtctggtg

SEQ ID NO: 1968891 - DNA, 15 bp, Homo sapiens
atcagagtctggtgc

SEQ ID NO: 1968892 - DNA, 15 bp, Homo sapiens
tcagagtctggtgcg

SEQ ID NO: 1968893 - DNA, 15 bp, Homo sapiens
cagagtctggtgcgg

SEQ ID NO: 1968894 - DNA, 15 bp, Homo sapiens
agagtctggtgcggg

SEQ ID NO: 1968895 - DNA, 15 bp, Homo sapiens
gagtctggtgcgggg

SEQ ID NO: 1968896 - DNA, 15 bp, Homo sapiens
agtctggtgcgggga

SEQ ID NO: 1968897 - DNA, 15 bp, Homo sapiens
gtctggtgcggggag

SEQ ID NO: 1968898 - DNA, 15 bp, Homo sapiens
tctggtgcggggagg

SEQ ID NO: 1968899 - DNA, 15 bp, Homo sapiens
ctggtgcggggagga

SEQ ID NO: 1968900 - DNA, 15 bp, Homo sapiens
tggtgcggggaggaa

SEQ ID NO: 1968901 - DNA, 15 bp, Homo sapiens
ggtgcggggaggaaa

SEQ ID NO: 1968902 - DNA, 15 bp, Homo sapiens
gtgcggggaggaaat

SEQ ID NO: 1968903 - DNA, 15 bp, Homo sapiens
tgcggggaggaaatg

SEQ ID NO: 1968904 - DNA, 15 bp, Homo sapiens
cggggaggaaatgtc

SEQ ID NO: 1968905 - DNA, 15 bp, Homo sapiens
ggggaggaaatgtct

SEQ ID NO: 1968906 - DNA, 15 bp, Homo sapiens
gggaggaaatgtctc

SEQ ID NO: 1968907 - DNA, 15 bp, Homo sapiens
ggaggaaatgtctct

SEQ ID NO: 1968908 - DNA, 15 bp, Homo sapiens
gaggaaatgtctctc

SEQ ID NO: 1968909 - DNA, 15 bp, Homo sapiens
aggaaatgtctctct

SEQ ID NO: 1968910 - DNA, 15 bp, Homo sapiens
ggaaatgtctctctg

SEQ ID NO: 1968911 - DNA, 15 bp, Homo sapiens
gaaatgtctctctgt

SEQ ID NO: 1968912 - DNA, 15 bp, Homo sapiens
aaatgtctctctgtg

SEQ ID NO: 1968913 - DNA, 15 bp, Homo sapiens
aatgtctctctgtgg

SEQ ID NO: 1968914 - DNA, 15 bp, Homo sapiens
atgtctctctgtggt

SEQ ID NO: 1968915 - DNA, 15 bp, Homo sapiens
tgtctctctgtggtc

SEQ ID NO: 1968916 - DNA, 15 bp, Homo sapiens
gtctctctgtggtct

SEQ ID NO: 1968917 - DNA, 15 bp, Homo sapiens
tctctctgtggtctc

SEQ ID NO: 1968918 - DNA, 15 bp, Homo sapiens
ctctctgtggtctcc

SEQ ID NO: 1968919 - DNA, 15 bp, Homo sapiens
tctctgtggtctccg

SEQ ID NO: 1968920 - DNA, 15 bp, Homo sapiens
ctctgtggtctccgc

SEQ ID NO: 1968921 - DNA, 15 bp, Homo sapiens
tctgtggtctccgca

SEQ ID NO: 1968922 - DNA, 15 bp, Homo sapiens
ctgtggtctccgcag

SEQ ID NO: 1968923 - DNA, 15 bp, Homo sapiens
tgtggtctccgcagc

SEQ ID NO: 1968924 - DNA, 15 bp, Homo sapiens
gtggtctccgcagcc

SEQ ID NO: 1968925 - DNA, 15 bp, Homo sapiens
tggtctccgcagcca

SEQ ID NO: 1968926 - DNA, 15 bp, Homo sapiens
ggtctccgcagccag

SEQ ID NO: 1968927 - DNA, 15 bp, Homo sapiens
gtctccgcagccagc

SEQ ID NO: 1968928 - DNA, 15 bp, Homo sapiens
tctccgcagccagca

SEQ ID NO: 1968929 - DNA, 15 bp, Homo sapiens
ctccgcagccagcac

SEQ ID NO: 1968930 - DNA, 15 bp, Homo sapiens
tccgcagccagcacc

SEQ ID NO: 1968931 - DNA, 15 bp, Homo sapiens
ccgcagccagcacct

SEQ ID NO: 1968932 - DNA, 15 bp, Homo sapiens
cgcagccagcacctc

SEQ ID NO: 1968933 - DNA, 15 bp, Homo sapiens
gcagccagcacctcc

SEQ ID NO: 1968934 - DNA, 15 bp, Homo sapiens
cagccagcacctccc

SEQ ID NO: 1968935 - DNA, 15 bp, Homo sapiens
agccagcacctcccc

SEQ ID NO: 1968936 - DNA, 15 bp, Homo sapiens
gccagcacctccccg

SEQ ID NO: 1968937 - DNA, 15 bp, Homo sapiens
ccagcacctccccgg

SEQ ID NO: 1968938 - DNA, 15 bp, Homo sapiens
cagcacctccccggc

SEQ ID NO: 1968939 - DNA, 15 bp, Homo sapiens
agcacctccccggca

SEQ ID NO: 1968940 - DNA, 15 bp, Homo sapiens
gcacctccccggcaa

SEQ ID NO: 1968941 - DNA, 15 bp, Homo sapiens
cacctccccggcaag

SEQ ID NO: 1968942 - DNA, 15 bp, Homo sapiens
acctccccggcaagg

SEQ ID NO: 1968943 - DNA, 15 bp, Homo sapiens
cctccccggcaaggt

SEQ ID NO: 1968944 - DNA, 15 bp, Homo sapiens
ctccccggcaaggtt

SEQ ID NO: 1968945 - DNA, 15 bp, Homo sapiens
tccccggcaaggttc

SEQ ID NO: 1968946 - DNA, 15 bp, Homo sapiens
ccccggcaaggttct

SEQ ID NO: 1968947 - DNA, 15 bp, Homo sapiens
cccggcaaggttctg

SEQ ID NO: 1968948 - DNA, 15 bp, Homo sapiens
ccggcaaggttctga

SEQ ID NO: 1968949 - DNA, 15 bp, Homo sapiens
cggcaaggttctgag

SEQ ID NO: 1968950 - DNA, 15 bp, Homo sapiens
ggcaaggttctgagc

SEQ ID NO: 1968951 - DNA, 15 bp, Homo sapiens
gcaaggttctgagct

SEQ ID NO: 1968952 - DNA, 15 bp, Homo sapiens
caaggttctgagctt

SEQ ID NO: 1968953 - DNA, 15 bp, Homo sapiens
aaggttctgagcttc

SEQ ID NO: 1968954 - DNA, 15 bp, Homo sapiens
aggttctgagcttcg

SEQ ID NO: 1968955 - DNA, 15 bp, Homo sapiens
ggttctgagcttcgc

SEQ ID NO: 1968956 - DNA, 15 bp, Homo sapiens
gttctgagcttcgcc

SEQ ID NO: 1968957 - DNA, 15 bp, Homo sapiens
ttctgagcttcgccg

SEQ ID NO: 1968958 - DNA, 15 bp, Homo sapiens
tctgagcttcgccgg

SEQ ID NO: 1968959 - DNA, 15 bp, Homo sapiens
ctgagcttcgccggg

SEQ ID NO: 1968960 - DNA, 15 bp, Homo sapiens
tgagcttcgccggga

SEQ ID NO: 1968961 - DNA, 15 bp, Homo sapiens
gagcttcgccgggag

SEQ ID NO: 1968962 - DNA, 15 bp, Homo sapiens
agcttcgccgggagc

SEQ ID NO: 1968963 - DNA, 15 bp, Homo sapiens
gcttcgccgggagcg

SEQ ID NO: 1968964 - DNA, 15 bp, Homo sapiens
cttcgccgggagcgg

SEQ ID NO: 1968965 - DNA, 15 bp, Homo sapiens
ttcgccgggagcggg

SEQ ID NO: 1968966 - DNA, 15 bp, Homo sapiens
tcgccgggagcgggc

SEQ ID NO: 1968967 - DNA, 15 bp, Homo sapiens
cgccgggagcgggct

SEQ ID NO: 1968968 - DNA, 15 bp, Homo sapiens
gccgggagcgggctg

SEQ ID NO: 1968969 - DNA, 15 bp, Homo sapiens
ccgggagcgggctgg

SEQ ID NO: 1968970 - DNA, 15 bp, Homo sapiens
cgggagcgggctggg

SEQ ID NO: 1968971 - DNA, 15 bp, Homo sapiens
gggagcgggctgggg

SEQ ID NO: 1968972 - DNA, 15 bp, Homo sapiens
ggagcgggctggggc

SEQ ID NO: 1968973 - DNA, 15 bp, Homo sapiens
gagcgggctggggcc

SEQ ID NO: 1968974 - DNA, 15 bp, Homo sapiens
agcgggctggggcca

SEQ ID NO: 1968975 - DNA, 15 bp, Homo sapiens
gcgggctggggccag

SEQ ID NO: 1968976 - DNA, 15 bp, Homo sapiens
cgggctggggccaga

SEQ ID NO: 1968977 - DNA, 15 bp, Homo sapiens
gggctggggccagaa

SEQ ID NO: 1968978 - DNA, 15 bp, Homo sapiens
ggctggggccagaag

SEQ ID NO: 1968979 - DNA, 15 bp, Homo sapiens
gctggggccagaagc

SEQ ID NO: 1968980 - DNA, 15 bp, Homo sapiens
ctggggccagaagcg

SEQ ID NO: 1968981 - DNA, 15 bp, Homo sapiens
tggggccagaagcgc

SEQ ID NO: 1968982 - DNA, 15 bp, Homo sapiens
ggggccagaagcgca

SEQ ID NO: 1968983 - DNA, 15 bp, Homo sapiens
gggccagaagcgcac

SEQ ID NO: 1968984 - DNA, 15 bp, Homo sapiens
ggccagaagcgcacg

SEQ ID NO: 1968985 - DNA, 15 bp, Homo sapiens
gccagaagcgcacgg

SEQ ID NO: 1968986 - DNA, 15 bp, Homo sapiens
ccagaagcgcacggg

SEQ ID NO: 1968987 - DNA, 15 bp, Homo sapiens
cagaagcgcacgggc

SEQ ID NO: 1968988 - DNA, 15 bp, Homo sapiens
agaagcgcacgggct

SEQ ID NO: 1968989 - DNA, 15 bp, Homo sapiens
gaagcgcacgggctc

SEQ ID NO: 1968990 - DNA, 15 bp, Homo sapiens
aagcgcacgggctct

SEQ ID NO: 1968991 - DNA, 15 bp, Homo sapiens
agcgcacgggctctt

SEQ ID NO: 1968992 - DNA, 15 bp, Homo sapiens
gcgcacgggctcttc

SEQ ID NO: 1968993 - DNA, 15 bp, Homo sapiens
cgcacgggctcttct

SEQ ID NO: 1968994 - DNA, 15 bp, Homo sapiens
gcacgggctcttctt

SEQ ID NO: 1968995 - DNA, 15 bp, Homo sapiens
cacgggctcttcttg

SEQ ID NO: 1968996 - DNA, 15 bp, Homo sapiens
acgggctcttcttgg

SEQ ID NO: 1968997 - DNA, 15 bp, Homo sapiens
cgggctcttcttggc

SEQ ID NO: 1968998 - DNA, 15 bp, Homo sapiens
gggctcttcttggct

SEQ ID NO: 1968999 - DNA, 15 bp, Homo sapiens
ggctcttcttggctc

SEQ ID NO: 1969000 - DNA, 15 bp, Homo sapiens
gctcttcttggctca

SEQ ID NO: 1969001 - DNA, 15 bp, Homo sapiens
ctcttcttggctcac

SEQ ID NO: 1969002 - DNA, 15 bp, Homo sapiens
tcttcttggctcaca

SEQ ID NO: 1969003 - DNA, 15 bp, Homo sapiens
cttcttggctcacag

SEQ ID NO: 1969004 - DNA, 15 bp, Homo sapiens
ttcttggctcacagt

SEQ ID NO: 1969005 - DNA, 15 bp, Homo sapiens
tcttggctcacagta

SEQ ID NO: 1969006 - DNA, 15 bp, Homo sapiens
cttggctcacagtaa

SEQ ID NO: 1969007 - DNA, 15 bp, Homo sapiens
ttggctcacagtaat

SEQ ID NO: 1969008 - DNA, 15 bp, Homo sapiens
tggctcacagtaata

SEQ ID NO: 1969009 - DNA, 15 bp, Homo sapiens
ggctcacagtaataa

SEQ ID NO: 1969010 - DNA, 15 bp, Homo sapiens
gctcacagtaataat

SEQ ID NO: 1969011 - DNA, 15 bp, Homo sapiens
ctcacagtaataatt

SEQ ID NO: 1969012 - DNA, 15 bp, Homo sapiens
tcacagtaataatta

SEQ ID NO: 1969013 - DNA, 15 bp, Homo sapiens
cacagtaataattaa

SEQ ID NO: 1969014 - DNA, 15 bp, Homo sapiens
acagtaataattaac

SEQ ID NO: 1969015 - DNA, 15 bp, Homo sapiens
cagtaataattaacc

SEQ ID NO: 1969016 - DNA, 15 bp, Homo sapiens
agtaataattaaccg

SEQ ID NO: 1969017 - DNA, 15 bp, Homo sapiens
gtaataattaaccgc

SEQ ID NO: 1969018 - DNA, 15 bp, Homo sapiens
taataattaaccgca

SEQ ID NO: 1969019 - DNA, 15 bp, Homo sapiens
aataattaaccgcat

SEQ ID NO: 1969020 - DNA, 15 bp, Homo sapiens
ataattaaccgcatt

SEQ ID NO: 1969021 - DNA, 15 bp, Homo sapiens
taattaaccgcattc

SEQ ID NO: 1969022 - DNA, 15 bp, Homo sapiens
aattaaccgcattcc

SEQ ID NO: 1969023 - DNA, 15 bp, Homo sapiens
attaaccgcattcca

SEQ ID NO: 1969024 - DNA, 15 bp, Homo sapiens
ttaaccgcattccag

SEQ ID NO: 1969025 - DNA, 15 bp, Homo sapiens
taaccgcattccagc

SEQ ID NO: 1969026 - DNA, 15 bp, Homo sapiens
aaccgcattccagca

SEQ ID NO: 1969027 - DNA, 15 bp, Homo sapiens
accgcattccagcag

SEQ ID NO: 1969028 - DNA, 15 bp, Homo sapiens
ccgcattccagcagg

SEQ ID NO: 1969029 - DNA, 15 bp, Homo sapiens
cgcattccagcaggg

SEQ ID NO: 1969030 - DNA, 15 bp, Homo sapiens
gcattccagcagggc

SEQ ID NO: 1969031 - DNA, 15 bp, Homo sapiens
cattccagcagggct

SEQ ID NO: 1969032 - DNA, 15 bp, Homo sapiens
attccagcagggctt

SEQ ID NO: 1969033 - DNA, 15 bp, Homo sapiens
ttccagcagggcttg

SEQ ID NO: 1969034 - DNA, 15 bp, Homo sapiens
tccagcagggcttga

SEQ ID NO: 1969035 - DNA, 15 bp, Homo sapiens
ccagcagggcttgag

SEQ ID NO: 1969036 - DNA, 15 bp, Homo sapiens
cagcagggcttgaga

SEQ ID NO: 1969037 - DNA, 15 bp, Homo sapiens
agcagggcttgagag

SEQ ID NO: 1969038 - DNA, 15 bp, Homo sapiens
gcagggcttgagagt

SEQ ID NO: 1969039 - DNA, 15 bp, Homo sapiens
cagggcttgagagtt

SEQ ID NO: 1969040 - DNA, 15 bp, Homo sapiens
agggcttgagagttt

SEQ ID NO: 1969041 - DNA, 15 bp, Homo sapiens
gggcttgagagtttg

SEQ ID NO: 1969042 - DNA, 15 bp, Homo sapiens
ggcttgagagtttgc

SEQ ID NO: 1969043 - DNA, 15 bp, Homo sapiens
gcttgagagtttgca

SEQ ID NO: 1969044 - DNA, 15 bp, Homo sapiens
cttgagagtttgcag

SEQ ID NO: 1969045 - DNA, 15 bp, Homo sapiens
ttgagagtttgcaga

SEQ ID NO: 1969046 - DNA, 15 bp, Homo sapiens
tgagagtttgcagag

SEQ ID NO: 1969047 - DNA, 15 bp, Homo sapiens
gagagtttgcagagt

SEQ ID NO: 1969048 - DNA, 15 bp, Homo sapiens
agagtttgcagagtg

SEQ ID NO: 1969049 - DNA, 15 bp, Homo sapiens
gagtttgcagagtga

SEQ ID NO: 1969050 - DNA, 15 bp, Homo sapiens
agtttgcagagtgat

SEQ ID NO: 1969051 - DNA, 15 bp, Homo sapiens
gtttgcagagtgatg

SEQ ID NO: 1969052 - DNA, 15 bp, Homo sapiens
tttgcagagtgatgt

SEQ ID NO: 1969053 - DNA, 15 bp, Homo sapiens
ttgcagagtgatgtt

SEQ ID NO: 1969054 - DNA, 15 bp, Homo sapiens
tgcagagtgatgttc

SEQ ID NO: 1969055 - DNA, 15 bp, Homo sapiens
gcagagtgatgttca

SEQ ID NO: 1969056 - DNA, 15 bp, Homo sapiens
cagagtgatgttcac

SEQ ID NO: 1969057 - DNA, 15 bp, Homo sapiens
agagtgatgttcact

SEQ ID NO: 1969058 - DNA, 15 bp, Homo sapiens
gagtgatgttcacta

SEQ ID NO: 1969059 - DNA, 15 bp, Homo sapiens
agtgatgttcactag

SEQ ID NO: 1969060 - DNA, 15 bp, Homo sapiens
gtgatgttcactagc

SEQ ID NO: 1969061 - DNA, 15 bp, Homo sapiens
tgatgttcactagct

SEQ ID NO: 1969062 - DNA, 15 bp, Homo sapiens
gatgttcactagctc

SEQ ID NO: 1969063 - DNA, 15 bp, Homo sapiens
atgttcactagctca

SEQ ID NO: 1969064 - DNA, 15 bp, Homo sapiens
tgttcactagctcac

SEQ ID NO: 1969065 - DNA, 15 bp, Homo sapiens
gttcactagctcacc

SEQ ID NO: 1969066 - DNA, 15 bp, Homo sapiens
ttcactagctcacca

SEQ ID NO: 1969067 - DNA, 15 bp, Homo sapiens
tcactagctcaccag

SEQ ID NO: 1969068 - DNA, 15 bp, Homo sapiens
cactagctcaccaga

SEQ ID NO: 1969069 - DNA, 15 bp, Homo sapiens
actagctcaccagat

SEQ ID NO: 1969070 - DNA, 15 bp, Homo sapiens
ctagctcaccagatc

SEQ ID NO: 1969071 - DNA, 15 bp, Homo sapiens
tagctcaccagatcg

SEQ ID NO: 1969072 - DNA, 15 bp, Homo sapiens
agctcaccagatcga

SEQ ID NO: 1969073 - DNA, 15 bp, Homo sapiens
gctcaccagatcgag

SEQ ID NO: 1969074 - DNA, 15 bp, Homo sapiens
ctcaccagatcgaga

SEQ ID NO: 1969075 - DNA, 15 bp, Homo sapiens
tcaccagatcgagat

SEQ ID NO: 1969076 - DNA, 15 bp, Homo sapiens
caccagatcgagatc

SEQ ID NO: 1969077 - DNA, 15 bp, Homo sapiens
accagatcgagatcc

SEQ ID NO: 1969078 - DNA, 15 bp, Homo sapiens
ccagatcgagatcct

SEQ ID NO: 1969079 - DNA, 15 bp, Homo sapiens
cagatcgagatcctc

SEQ ID NO: 1969080 - DNA, 15 bp, Homo sapiens
agatcgagatcctca

SEQ ID NO: 1969081 - DNA, 15 bp, Homo sapiens
gatcgagatcctcac

SEQ ID NO: 1969082 - DNA, 15 bp, Homo sapiens
atcgagatcctcact

SEQ ID NO: 1969083 - DNA, 15 bp, Homo sapiens
tcgagatcctcacta

SEQ ID NO: 1969084 - DNA, 15 bp, Homo sapiens
cgagatcctcactag

SEQ ID NO: 1969085 - DNA, 15 bp, Homo sapiens
gagatcctcactaga

SEQ ID NO: 1969086 - DNA, 15 bp, Homo sapiens
agatcctcactagaa

SEQ ID NO: 1969087 - DNA, 15 bp, Homo sapiens
gatcctcactagaac

SEQ ID NO: 1969088 - DNA, 15 bp, Homo sapiens
atcctcactagaacc

SEQ ID NO: 1969089 - DNA, 15 bp, Homo sapiens
tcctcactagaaccc

SEQ ID NO: 1969090 - DNA, 15 bp, Homo sapiens
cctcactagaacccc

SEQ ID NO: 1969091 - DNA, 15 bp, Homo sapiens
ctcactagaaccccc

SEQ ID NO: 1969092 - DNA, 15 bp, Homo sapiens
tcactagaaccccca

SEQ ID NO: 1969093 - DNA, 15 bp, Homo sapiens
cactagaacccccaa

SEQ ID NO: 1969094 - DNA, 15 bp, Homo sapiens
actagaacccccaag

SEQ ID NO: 1969095 - DNA, 15 bp, Homo sapiens
ctagaacccccaagt

SEQ ID NO: 1969096 - DNA, 15 bp, Homo sapiens
tagaacccccaagtg

SEQ ID NO: 1969097 - DNA, 15 bp, Homo sapiens
agaacccccaagtgt

SEQ ID NO: 1969098 - DNA, 15 bp, Homo sapiens
gaacccccaagtgta

SEQ ID NO: 1969099 - DNA, 15 bp, Homo sapiens
aacccccaagtgtag

SEQ ID NO: 1969100 - DNA, 15 bp, Homo sapiens
acccccaagtgtaga

SEQ ID NO: 1969101 - DNA, 15 bp, Homo sapiens
cccccaagtgtagac

SEQ ID NO: 1969102 - DNA, 15 bp, Homo sapiens
ccccaagtgtagaca

SEQ ID NO: 1969103 - DNA, 15 bp, Homo sapiens
cccaagtgtagacac

SEQ ID NO: 1969104 - DNA, 15 bp, Homo sapiens
ccaagtgtagacact

SEQ ID NO: 1969105 - DNA, 15 bp, Homo sapiens
caagtgtagacactg

SEQ ID NO: 1969106 - DNA, 15 bp, Homo sapiens
aagtgtagacactgg

SEQ ID NO: 1969107 - DNA, 15 bp, Homo sapiens
agtgtagacactgga

SEQ ID NO: 1969108 - DNA, 15 bp, Homo sapiens
gtgtagacactggac

SEQ ID NO: 1969109 - DNA, 15 bp, Homo sapiens
tgtagacactggact

SEQ ID NO: 1969110 - DNA, 15 bp, Homo sapiens
gtagacactggactt

SEQ ID NO: 1969111 - DNA, 15 bp, Homo sapiens
tagacactggacttg

SEQ ID NO: 1969112 - DNA, 15 bp, Homo sapiens
agacactggacttgt

SEQ ID NO: 1969113 - DNA, 15 bp, Homo sapiens
gacactggacttgtg

SEQ ID NO: 1969114 - DNA, 15 bp, Homo sapiens
acactggacttgtga

SEQ ID NO: 1969115 - DNA, 15 bp, Homo sapiens
cactggacttgtgac

SEQ ID NO: 1969116 - DNA, 15 bp, Homo sapiens
actggacttgtgact

SEQ ID NO: 1969117 - DNA, 15 bp, Homo sapiens
ctggacttgtgacta

SEQ ID NO: 1969118 - DNA, 15 bp, Homo sapiens
tggacttgtgactac

SEQ ID NO: 1969119 - DNA, 15 bp, Homo sapiens
ggacttgtgactacc

SEQ ID NO: 1969120 - DNA, 15 bp, Homo sapiens
gacttgtgactaccc

SEQ ID NO: 1969121 - DNA, 15 bp, Homo sapiens
acttgtgactaccct

SEQ ID NO: 1969122 - DNA, 15 bp, Homo sapiens
cttgtgactacccta

SEQ ID NO: 1969123 - DNA, 15 bp, Homo sapiens
ttgtgactaccctat

SEQ ID NO: 1969124 - DNA, 15 bp, Homo sapiens
tgtgactaccctatt

SEQ ID NO: 1969125 - DNA, 15 bp, Homo sapiens
gtgactaccctattt

SEQ ID NO: 1969126 - DNA, 15 bp, Homo sapiens
tgactaccctatttt

SEQ ID NO: 1969127 - DNA, 15 bp, Homo sapiens
gactaccctattttt

SEQ ID NO: 1969128 - DNA, 15 bp, Homo sapiens
actaccctatttttc

SEQ ID NO: 1969129 - DNA, 15 bp, Homo sapiens
ctaccctatttttca

SEQ ID NO: 1969130 - DNA, 15 bp, Homo sapiens
taccctatttttcag

SEQ ID NO: 1969131 - DNA, 15 bp, Homo sapiens
accctatttttcaga

SEQ ID NO: 1969132 - DNA, 15 bp, Homo sapiens
ccctatttttcagac

SEQ ID NO: 1969133 - DNA, 15 bp, Homo sapiens
cctatttttcagacg

SEQ ID NO: 1969134 - DNA, 15 bp, Homo sapiens
ctatttttcagacgt

SEQ ID NO: 1969135 - DNA, 15 bp, Homo sapiens
tatttttcagacgtg

SEQ ID NO: 1969136 - DNA, 15 bp, Homo sapiens
atttttcagacgtgg

SEQ ID NO: 1969137 - DNA, 15 bp, Homo sapiens
tttttcagacgtgga

SEQ ID NO: 1969138 - DNA, 15 bp, Homo sapiens
ttttcagacgtggac

SEQ ID NO: 1969139 - DNA, 15 bp, Homo sapiens
tttcagacgtggacg

SEQ ID NO: 1969140 - DNA, 15 bp, Homo sapiens
ttcagacgtggacgc

SEQ ID NO: 1969141 - DNA, 15 bp, Homo sapiens
tcagacgtggacgct

SEQ ID NO: 1969142 - DNA, 15 bp, Homo sapiens
cagacgtggacgctg

SEQ ID NO: 1969143 - DNA, 15 bp, Homo sapiens
agacgtggacgctga

SEQ ID NO: 1969144 - DNA, 15 bp, Homo sapiens
gacgtggacgctgag

SEQ ID NO: 1969145 - DNA, 15 bp, Homo sapiens
acgtggacgctgagg

SEQ ID NO: 1969146 - DNA, 15 bp, Homo sapiens
cgtggacgctgaggc

SEQ ID NO: 1969147 - DNA, 15 bp, Homo sapiens
gtggacgctgaggct

SEQ ID NO: 1969148 - DNA, 15 bp, Homo sapiens
tggacgctgaggctt

SEQ ID NO: 1969149 - DNA, 15 bp, Homo sapiens
ggacgctgaggcttt

SEQ ID NO: 1969150 - DNA, 15 bp, Homo sapiens
gacgctgaggctttt

SEQ ID NO: 1969151 - DNA, 15 bp, Homo sapiens
acgctgaggctttta

SEQ ID NO: 1969152 - DNA, 15 bp, Homo sapiens
cgctgaggcttttaa

SEQ ID NO: 1969153 - DNA, 15 bp, Homo sapiens
gctgaggcttttaaa

SEQ ID NO: 1969154 - DNA, 15 bp, Homo sapiens
ctgaggcttttaaag

SEQ ID NO: 1969155 - DNA, 15 bp, Homo sapiens
tgaggcttttaaaga

SEQ ID NO: 1969156 - DNA, 15 bp, Homo sapiens
gaggcttttaaagaa

SEQ ID NO: 1969157 - DNA, 15 bp, Homo sapiens
aggcttttaaagaag

SEQ ID NO: 1969158 - DNA, 15 bp, Homo sapiens
ggcttttaaagaaga

SEQ ID NO: 1969159 - DNA, 15 bp, Homo sapiens
gcttttaaagaagac

SEQ ID NO: 1969160 - DNA, 15 bp, Homo sapiens
cttttaaagaagacg

SEQ ID NO: 1969161 - DNA, 15 bp, Homo sapiens
ttttaaagaagacgg

SEQ ID NO: 1969162 - DNA, 15 bp, Homo sapiens
tttaaagaagacggc

SEQ ID NO: 1969163 - DNA, 15 bp, Homo sapiens
ttaaagaagacggcc

SEQ ID NO: 1969164 - DNA, 15 bp, Homo sapiens
taaagaagacggcct

SEQ ID NO: 1969165 - DNA, 15 bp, Homo sapiens
aaagaagacggcctt

SEQ ID NO: 1969166 - DNA, 15 bp, Homo sapiens
aagaagacggccttt

SEQ ID NO: 1969167 - DNA, 15 bp, Homo sapiens
agaagacggcctttg

SEQ ID NO: 1969168 - DNA, 15 bp, Homo sapiens
gaagacggcctttgc

SEQ ID NO: 1969169 - DNA, 15 bp, Homo sapiens
aagacggcctttgct

SEQ ID NO: 1969170 - DNA, 15 bp, Homo sapiens
agacggcctttgctt

SEQ ID NO: 1969171 - DNA, 15 bp, Homo sapiens
gacggcctttgcttg

SEQ ID NO: 1969172 - DNA, 15 bp, Homo sapiens
acggcctttgcttgt

SEQ ID NO: 1969173 - DNA, 15 bp, Homo sapiens
cggcctttgcttgtc

SEQ ID NO: 1969174 - DNA, 15 bp, Homo sapiens
ggcctttgcttgtcc

SEQ ID NO: 1969175 - DNA, 15 bp, Homo sapiens
gcctttgcttgtccc

SEQ ID NO: 1969176 - DNA, 15 bp, Homo sapiens
cctttgcttgtccca

SEQ ID NO: 1969177 - DNA, 15 bp, Homo sapiens
ctttgcttgtcccag

SEQ ID NO: 1969178 - DNA, 15 bp, Homo sapiens
tttgcttgtcccagg

SEQ ID NO: 1969179 - DNA, 15 bp, Homo sapiens
ttgcttgtcccaggt

SEQ ID NO: 1969180 - DNA, 15 bp, Homo sapiens
tgcttgtcccaggtt

SEQ ID NO: 1969181 - DNA, 15 bp, Homo sapiens
gcttgtcccaggtta

SEQ ID NO: 1969182 - DNA, 15 bp, Homo sapiens
cttgtcccaggttac

SEQ ID NO: 1969183 - DNA, 15 bp, Homo sapiens
ttgtcccaggttacc

SEQ ID NO: 1969184 - DNA, 15 bp, Homo sapiens
tgtcccaggttacca

SEQ ID NO: 1969185 - DNA, 15 bp, Homo sapiens
gtcccaggttaccaa

SEQ ID NO: 1969186 - DNA, 15 bp, Homo sapiens
tcccaggttaccaac

SEQ ID NO: 1969187 - DNA, 15 bp, Homo sapiens
cccaggttaccaaca

SEQ ID NO: 1969188 - DNA, 15 bp, Homo sapiens
ccaggttaccaacaa

SEQ ID NO: 1969189 - DNA, 15 bp, Homo sapiens
caggttaccaacaac

SEQ ID NO: 1969190 - DNA, 15 bp, Homo sapiens
aggttaccaacaacc

SEQ ID NO: 1969191 - DNA, 15 bp, Homo sapiens
ggttaccaacaacca

SEQ ID NO: 1969192 - DNA, 15 bp, Homo sapiens
gttaccaacaaccac

SEQ ID NO: 1969193 - DNA, 15 bp, Homo sapiens
ttaccaacaaccact

SEQ ID NO: 1969194 - DNA, 15 bp, Homo sapiens
taccaacaaccactg

SEQ ID NO: 1969195 - DNA, 15 bp, Homo sapiens
accaacaaccactga

SEQ ID NO: 1969196 - DNA, 15 bp, Homo sapiens
ccaacaaccactgat

SEQ ID NO: 1969197 - DNA, 15 bp, Homo sapiens
caacaaccactgatt

SEQ ID NO: 1969198 - DNA, 15 bp, Homo sapiens
aacaaccactgattg

SEQ ID NO: 1969199 - DNA, 15 bp, Homo sapiens
acaaccactgattgg

SEQ ID NO: 1969200 - DNA, 15 bp, Homo sapiens
caaccactgattggc

SEQ ID NO: 1969201 - DNA, 15 bp, Homo sapiens
aaccactgattggcc

SEQ ID NO: 1969202 - DNA, 15 bp, Homo sapiens
accactgattggcca

SEQ ID NO: 1969203 - DNA, 15 bp, Homo sapiens
ccactgattggccag

SEQ ID NO: 1969204 - DNA, 15 bp, Homo sapiens
cactgattggccagg

SEQ ID NO: 1969205 - DNA, 15 bp, Homo sapiens
actgattggccaggg

SEQ ID NO: 1969206 - DNA, 15 bp, Homo sapiens
ctgattggccagggg

SEQ ID NO: 1969207 - DNA, 15 bp, Homo sapiens
tgattggccaggggc

SEQ ID NO: 1969208 - DNA, 15 bp, Homo sapiens
gattggccaggggca

SEQ ID NO: 1969209 - DNA, 15 bp, Homo sapiens
attggccaggggcac

SEQ ID NO: 1969210 - DNA, 15 bp, Homo sapiens
ttggccaggggcacc

SEQ ID NO: 1969211 - DNA, 15 bp, Homo sapiens
tggccaggggcacct

SEQ ID NO: 1969212 - DNA, 15 bp, Homo sapiens
ggccaggggcacctg

SEQ ID NO: 1969213 - DNA, 15 bp, Homo sapiens
gccaggggcacctgt

SEQ ID NO: 1969214 - DNA, 15 bp, Homo sapiens
ccaggggcacctgtt

SEQ ID NO: 1969215 - DNA, 15 bp, Homo sapiens
caggggcacctgttg

SEQ ID NO: 1969216 - DNA, 15 bp, Homo sapiens
aggggcacctgttgc

SEQ ID NO: 1969217 - DNA, 15 bp, Homo sapiens
ggggcacctgttgcc

SEQ ID NO: 1969218 - DNA, 15 bp, Homo sapiens
gggcacctgttgccc

SEQ ID NO: 1969219 - DNA, 15 bp, Homo sapiens
ggcacctgttgccca

SEQ ID NO: 1969220 - DNA, 15 bp, Homo sapiens
gcacctgttgcccac

SEQ ID NO: 1969221 - DNA, 15 bp, Homo sapiens
cacctgttgcccacg

SEQ ID NO: 1969222 - DNA, 15 bp, Homo sapiens
acctgttgcccacgc

SEQ ID NO: 1969223 - DNA, 15 bp, Homo sapiens
cctgttgcccacgcc

SEQ ID NO: 1969224 - DNA, 15 bp, Homo sapiens
ctgttgcccacgccc

SEQ ID NO: 1969225 - DNA, 15 bp, Homo sapiens
tgttgcccacgccct

SEQ ID NO: 1969226 - DNA, 15 bp, Homo sapiens
gttgcccacgccctg

SEQ ID NO: 1969227 - DNA, 15 bp, Homo sapiens
ttgcccacgccctgc

SEQ ID NO: 1969228 - DNA, 15 bp, Homo sapiens
tgcccacgccctgct

SEQ ID NO: 1969229 - DNA, 15 bp, Homo sapiens
gcccacgccctgctc

SEQ ID NO: 1969230 - DNA, 15 bp, Homo sapiens
cccacgccctgctcc

SEQ ID NO: 1969231 - DNA, 15 bp, Homo sapiens
ccacgccctgctcct

SEQ ID NO: 1969232 - DNA, 15 bp, Homo sapiens
cacgccctgctcctc

SEQ ID NO: 1969233 - DNA, 15 bp, Homo sapiens
acgccctgctcctct

SEQ ID NO: 1969234 - DNA, 15 bp, Homo sapiens
cgccctgctcctctg

SEQ ID NO: 1969235 - DNA, 15 bp, Homo sapiens
gccctgctcctctgt

SEQ ID NO: 1969236 - DNA, 15 bp, Homo sapiens
ccctgctcctctgtt

SEQ ID NO: 1969237 - DNA, 15 bp, Homo sapiens
cctgctcctctgttt

SEQ ID NO: 1969238 - DNA, 15 bp, Homo sapiens
ctgctcctctgtttg

SEQ ID NO: 1969239 - DNA, 15 bp, Homo sapiens
tgctcctctgtttga

SEQ ID NO: 1969240 - DNA, 15 bp, Homo sapiens
gctcctctgtttgat

SEQ ID NO: 1969241 - DNA, 15 bp, Homo sapiens
ctcctctgtttgata

SEQ ID NO: 1969242 - DNA, 15 bp, Homo sapiens
tcctctgtttgatat

SEQ ID NO: 1969243 - DNA, 15 bp, Homo sapiens
cctctgtttgatatg

SEQ ID NO: 1969244 - DNA, 15 bp, Homo sapiens
ctctgtttgatatgc

SEQ ID NO: 1969245 - DNA, 15 bp, Homo sapiens
tctgtttgatatgcc

SEQ ID NO: 1969246 - DNA, 15 bp, Homo sapiens
ctgtttgatatgccc

SEQ ID NO: 1969247 - DNA, 15 bp, Homo sapiens
tgtttgatatgccct

SEQ ID NO: 1969248 - DNA, 15 bp, Homo sapiens
gtttgatatgccctg

SEQ ID NO: 1969249 - DNA, 15 bp, Homo sapiens
tttgatatgccctga

SEQ ID NO: 1969250 - DNA, 15 bp, Homo sapiens
ttgatatgccctgac

SEQ ID NO: 1969251 - DNA, 15 bp, Homo sapiens
tgatatgccctgacc

SEQ ID NO: 1969252 - DNA, 15 bp, Homo sapiens
gatatgccctgacca

SEQ ID NO: 1969253 - DNA, 15 bp, Homo sapiens
atatgccctgaccac

SEQ ID NO: 1969254 - DNA, 15 bp, Homo sapiens
tatgccctgaccact

SEQ ID NO: 1969255 - DNA, 15 bp, Homo sapiens
atgccctgaccactt

SEQ ID NO: 1969256 - DNA, 15 bp, Homo sapiens
tgccctgaccacttt

SEQ ID NO: 1969257 - DNA, 15 bp, Homo sapiens
gccctgaccactttt

SEQ ID NO: 1969258 - DNA, 15 bp, Homo sapiens
ccctgaccacttttg

SEQ ID NO: 1969259 - DNA, 15 bp, Homo sapiens
cctgaccacttttgc

SEQ ID NO: 1969260 - DNA, 15 bp, Homo sapiens
ctgaccacttttgcg

SEQ ID NO: 1969261 - DNA, 15 bp, Homo sapiens
tgaccacttttgcgt

SEQ ID NO: 1969262 - DNA, 15 bp, Homo sapiens
gaccacttttgcgtc

SEQ ID NO: 1969263 - DNA, 15 bp, Homo sapiens
accacttttgcgtcc

SEQ ID NO: 1969264 - DNA, 15 bp, Homo sapiens
ccacttttgcgtcct

SEQ ID NO: 1969265 - DNA, 15 bp, Homo sapiens
cacttttgcgtcctc

SEQ ID NO: 1969266 - DNA, 15 bp, Homo sapiens
acttttgcgtcctct

SEQ ID NO: 1969267 - DNA, 15 bp, Homo sapiens
cttttgcgtcctctc

SEQ ID NO: 1969268 - DNA, 15 bp, Homo sapiens
ttttgcgtcctctcc

SEQ ID NO: 1969269 - DNA, 15 bp, Homo sapiens
tttgcgtcctctccc

SEQ ID NO: 1969270 - DNA, 15 bp, Homo sapiens
ttgcgtcctctcccc

SEQ ID NO: 1969271 - DNA, 15 bp, Homo sapiens
tgcgtcctctcccca

SEQ ID NO: 1969272 - DNA, 15 bp, Homo sapiens
gcgtcctctccccag

SEQ ID NO: 1969273 - DNA, 15 bp, Homo sapiens
cgtcctctccccaga

SEQ ID NO: 1969274 - DNA, 15 bp, Homo sapiens
gtcctctccccagag

SEQ ID NO: 1969275 - DNA, 15 bp, Homo sapiens
tcctctccccagaga

SEQ ID NO: 1969276 - DNA, 15 bp, Homo sapiens
cctctccccagagag

SEQ ID NO: 1969277 - DNA, 15 bp, Homo sapiens
ctctccccagagaga

SEQ ID NO: 1969278 - DNA, 15 bp, Homo sapiens
tctccccagagagac

SEQ ID NO: 1969279 - DNA, 15 bp, Homo sapiens
ctccccagagagact

SEQ ID NO: 1969280 - DNA, 15 bp, Homo sapiens
tccccagagagacta

SEQ ID NO: 1969281 - DNA, 15 bp, Homo sapiens
ccccagagagactag

SEQ ID NO: 1969282 - DNA, 15 bp, Homo sapiens
cccagagagactagg

SEQ ID NO: 1969283 - DNA, 15 bp, Homo sapiens
ccagagagactaggt

SEQ ID NO: 1969284 - DNA, 15 bp, Homo sapiens
cagagagactaggta

SEQ ID NO: 1969285 - DNA, 15 bp, Homo sapiens
agagagactaggtag

SEQ ID NO: 1969286 - DNA, 15 bp, Homo sapiens
gagagactaggtaga

SEQ ID NO: 1969287 - DNA, 15 bp, Homo sapiens
agagactaggtagag

SEQ ID NO: 1969288 - DNA, 15 bp, Homo sapiens
gagactaggtagaga

SEQ ID NO: 1969289 - DNA, 15 bp, Homo sapiens
agactaggtagagat

SEQ ID NO: 1969290 - DNA, 15 bp, Homo sapiens
gactaggtagagatc

SEQ ID NO: 1969291 - DNA, 15 bp, Homo sapiens
actaggtagagatcc

SEQ ID NO: 1969292 - DNA, 15 bp, Homo sapiens
ctaggtagagatccg

SEQ ID NO: 1969293 - DNA, 15 bp, Homo sapiens
taggtagagatccgc

SEQ ID NO: 1969294 - DNA, 15 bp, Homo sapiens
aggtagagatccgca

SEQ ID NO: 1969295 - DNA, 15 bp, Homo sapiens
ggtagagatccgcac

SEQ ID NO: 1969296 - DNA, 15 bp, Homo sapiens
gtagagatccgcacc

SEQ ID NO: 1969297 - DNA, 15 bp, Homo sapiens
tagagatccgcacct

SEQ ID NO: 1969298 - DNA, 15 bp, Homo sapiens
agagatccgcacctg

SEQ ID NO: 1969299 - DNA, 15 bp, Homo sapiens
gagatccgcacctgc

SEQ ID NO: 1969300 - DNA, 15 bp, Homo sapiens
agatccgcacctgca

SEQ ID NO: 1969301 - DNA, 15 bp, Homo sapiens
gatccgcacctgcac

SEQ ID NO: 1969302 - DNA, 15 bp, Homo sapiens
atccgcacctgcacc

SEQ ID NO: 1969303 - DNA, 15 bp, Homo sapiens
tccgcacctgcaccc

SEQ ID NO: 1969304 - DNA, 15 bp, Homo sapiens
ccgcacctgcacccc

SEQ ID NO: 1969305 - DNA, 15 bp, Homo sapiens
cgcacctgcacccca

SEQ ID NO: 1969306 - DNA, 15 bp, Homo sapiens
gcacctgcaccccac

SEQ ID NO: 1969307 - DNA, 15 bp, Homo sapiens
cacctgcaccccact

SEQ ID NO: 1969308 - DNA, 15 bp, Homo sapiens
acctgcaccccactt

SEQ ID NO: 1969309 - DNA, 15 bp, Homo sapiens
cctgcaccccacttg

SEQ ID NO: 1969310 - DNA, 15 bp, Homo sapiens
ctgcaccccacttga

SEQ ID NO: 1969311 - DNA, 15 bp, Homo sapiens
tgcaccccacttgag

SEQ ID NO: 1969312 - DNA, 15 bp, Homo sapiens
gcaccccacttgaga

SEQ ID NO: 1969313 - DNA, 15 bp, Homo sapiens
caccccacttgagaa

SEQ ID NO: 1969314 - DNA, 15 bp, Homo sapiens
accccacttgagaat

SEQ ID NO: 1969315 - DNA, 15 bp, Homo sapiens
ccccacttgagaatt

SEQ ID NO: 1969316 - DNA, 15 bp, Homo sapiens
cccacttgagaattg

SEQ ID NO: 1969317 - DNA, 15 bp, Homo sapiens
ccacttgagaattga

SEQ ID NO: 1969318 - DNA, 15 bp, Homo sapiens
cacttgagaattgag

SEQ ID NO: 1969319 - DNA, 15 bp, Homo sapiens
acttgagaattgagg

SEQ ID NO: 1969320 - DNA, 15 bp, Homo sapiens
cttgagaattgaggc

SEQ ID NO: 1969321 - DNA, 15 bp, Homo sapiens
ttgagaattgaggct

SEQ ID NO: 1969322 - DNA, 15 bp, Homo sapiens
tgagaattgaggctg

SEQ ID NO: 1969323 - DNA, 15 bp, Homo sapiens
gagaattgaggctgc

SEQ ID NO: 1969324 - DNA, 15 bp, Homo sapiens
agaattgaggctgca

SEQ ID NO: 1969325 - DNA, 15 bp, Homo sapiens
gaattgaggctgcag

SEQ ID NO: 1969326 - DNA, 15 bp, Homo sapiens
aattgaggctgcaga

SEQ ID NO: 1969327 - DNA, 15 bp, Homo sapiens
attgaggctgcagag

SEQ ID NO: 1969328 - DNA, 15 bp, Homo sapiens
ttgaggctgcagaga

SEQ ID NO: 1969329 - DNA, 15 bp, Homo sapiens
tgaggctgcagagaa

SEQ ID NO: 1969330 - DNA, 15 bp, Homo sapiens
gaggctgcagagaat

SEQ ID NO: 1969331 - DNA, 15 bp, Homo sapiens
aggctgcagagaatt

SEQ ID NO: 1969332 - DNA, 15 bp, Homo sapiens
ggctgcagagaattc

SEQ ID NO: 1969333 - DNA, 15 bp, Homo sapiens
gctgcagagaattct

SEQ ID NO: 1969334 - DNA, 15 bp, Homo sapiens
ctgcagagaattctc

SEQ ID NO: 1969335 - DNA, 15 bp, Homo sapiens
tgcagagaattctcc

SEQ ID NO: 1969336 - DNA, 15 bp, Homo sapiens
gcagagaattctccg

SEQ ID NO: 1969337 - DNA, 15 bp, Homo sapiens
cagagaattctccgc

SEQ ID NO: 1969338 - DNA, 15 bp, Homo sapiens
agagaattctccgct

SEQ ID NO: 1969339 - DNA, 15 bp, Homo sapiens
gagaattctccgctt

SEQ ID NO: 1969340 - DNA, 15 bp, Homo sapiens
agaattctccgcttc

SEQ ID NO: 1969341 - DNA, 15 bp, Homo sapiens
gaattctccgcttca

SEQ ID NO: 1969342 - DNA, 15 bp, Homo sapiens
aattctccgcttcag

SEQ ID NO: 1969343 - DNA, 15 bp, Homo sapiens
attctccgcttcagc

SEQ ID NO: 1969344 - DNA, 15 bp, Homo sapiens
ttctccgcttcagca

SEQ ID NO: 1969345 - DNA, 15 bp, Homo sapiens
tctccgcttcagcat

SEQ ID NO: 1969346 - DNA, 15 bp, Homo sapiens
ctccgcttcagcatc

SEQ ID NO: 1969347 - DNA, 15 bp, Homo sapiens
tccgcttcagcatcc

SEQ ID NO: 1969348 - DNA, 15 bp, Homo sapiens
ccgcttcagcatcca

SEQ ID NO: 1969349 - DNA, 15 bp, Homo sapiens
cgcttcagcatccat

SEQ ID NO: 1969350 - DNA, 15 bp, Homo sapiens
gcttcagcatccatt

SEQ ID NO: 1969351 - DNA, 15 bp, Homo sapiens
cttcagcatccattt

SEQ ID NO: 1969352 - DNA, 15 bp, Homo sapiens
ttcagcatccatttt

SEQ ID NO: 1969353 - DNA, 15 bp, Homo sapiens
tcagcatccattttt

SEQ ID NO: 1969354 - DNA, 15 bp, Homo sapiens
cagcatccatttttg

SEQ ID NO: 1969355 - DNA, 15 bp, Homo sapiens
agcatccatttttgg

SEQ ID NO: 1969356 - DNA, 15 bp, Homo sapiens
gcatccatttttggt

SEQ ID NO: 1969357 - DNA, 15 bp, Homo sapiens
catccatttttggtc

SEQ ID NO: 1969358 - DNA, 15 bp, Homo sapiens
atccatttttggtcc

SEQ ID NO: 1969359 - DNA, 15 bp, Homo sapiens
tccatttttggtccc

SEQ ID NO: 1969360 - DNA, 15 bp, Homo sapiens
ccatttttggtccct

SEQ ID NO: 1969361 - DNA, 15 bp, Homo sapiens
catttttggtccctg

SEQ ID NO: 1969362 - DNA, 15 bp, Homo sapiens
atttttggtccctga

SEQ ID NO: 1969363 - DNA, 15 bp, Homo sapiens
tttttggtccctgag

SEQ ID NO: 1969364 - DNA, 15 bp, Homo sapiens
ttttggtccctgagt

SEQ ID NO: 1969365 - DNA, 15 bp, Homo sapiens
tttggtccctgagtc

SEQ ID NO: 1969366 - DNA, 15 bp, Homo sapiens
ttggtccctgagtcc

SEQ ID NO: 1969367 - DNA, 15 bp, Homo sapiens
tggtccctgagtcct

SEQ ID NO: 1969368 - DNA, 15 bp, Homo sapiens
ggtccctgagtcctt

SEQ ID NO: 1969369 - DNA, 15 bp, Homo sapiens
gtccctgagtccttt

SEQ ID NO: 1969370 - DNA, 15 bp, Homo sapiens
tccctgagtcctttt

SEQ ID NO: 1969371 - DNA, 15 bp, Homo sapiens
ccctgagtcctttta

SEQ ID NO: 1969372 - DNA, 15 bp, Homo sapiens
cctgagtccttttac

SEQ ID NO: 1969373 - DNA, 15 bp, Homo sapiens
ctgagtccttttaca

SEQ ID NO: 1969374 - DNA, 15 bp, Homo sapiens
tgagtccttttacaa

SEQ ID NO: 1969375 - DNA, 15 bp, Homo sapiens
gagtccttttacaat

SEQ ID NO: 1969376 - DNA, 15 bp, Homo sapiens
agtccttttacaatt

SEQ ID NO: 1969377 - DNA, 15 bp, Homo sapiens
gtccttttacaattt

SEQ ID NO: 1969378 - DNA, 15 bp, Homo sapiens
tccttttacaatttg

SEQ ID NO: 1969379 - DNA, 15 bp, Homo sapiens
ccttttacaatttgg

SEQ ID NO: 1969380 - DNA, 15 bp, Homo sapiens
cttttacaatttgga

SEQ ID NO: 1969381 - DNA, 15 bp, Homo sapiens
ttttacaatttggag

SEQ ID NO: 1969382 - DNA, 15 bp, Homo sapiens
tttacaatttggaga

SEQ ID NO: 1969383 - DNA, 15 bp, Homo sapiens
ttacaatttggagac

SEQ ID NO: 1969384 - DNA, 15 bp, Homo sapiens
tacaatttggagacg

SEQ ID NO: 1969385 - DNA, 15 bp, Homo sapiens
acaatttggagacgt

SEQ ID NO: 1969386 - DNA, 15 bp, Homo sapiens
caatttggagacgtc

SEQ ID NO: 1969387 - DNA, 15 bp, Homo sapiens
aatttggagacgtca

SEQ ID NO: 1969388 - DNA, 15 bp, Homo sapiens
atttggagacgtcat

SEQ ID NO: 1969389 - DNA, 15 bp, Homo sapiens
tttggagacgtcatc

SEQ ID NO: 1969390 - DNA, 15 bp, Homo sapiens
ttggagacgtcatcc

SEQ ID NO: 1969391 - DNA, 15 bp, Homo sapiens
tggagacgtcatcct

SEQ ID NO: 1969392 - DNA, 15 bp, Homo sapiens
ggagacgtcatcctt

SEQ ID NO: 1969393 - DNA, 15 bp, Homo sapiens
gagacgtcatccttt

SEQ ID NO: 1969394 - DNA, 15 bp, Homo sapiens
agacgtcatccttta

SEQ ID NO: 1969395 - DNA, 15 bp, Homo sapiens
gacgtcatcctttac

SEQ ID NO: 1969396 - DNA, 15 bp, Homo sapiens
acgtcatcctttaca

SEQ ID NO: 1969397 - DNA, 15 bp, Homo sapiens
cgtcatcctttacag

SEQ ID NO: 1969398 - DNA, 15 bp, Homo sapiens
gtcatcctttacagc

SEQ ID NO: 1969399 - DNA, 15 bp, Homo sapiens
tcatcctttacagcc

SEQ ID NO: 1969400 - DNA, 15 bp, Homo sapiens
catcctttacagcct

SEQ ID NO: 1969401 - DNA, 15 bp, Homo sapiens
atcctttacagcctc

SEQ ID NO: 1969402 - DNA, 15 bp, Homo sapiens
tcctttacagcctct

SEQ ID NO: 1969403 - DNA, 15 bp, Homo sapiens
cctttacagcctctt

SEQ ID NO: 1969404 - DNA, 15 bp, Homo sapiens
ctttacagcctcttt

SEQ ID NO: 1969405 - DNA, 15 bp, Homo sapiens
tttacagcctctttt

SEQ ID NO: 1969406 - DNA, 15 bp, Homo sapiens
ttacagcctctttta

SEQ ID NO: 1969407 - DNA, 15 bp, Homo sapiens
tacagcctcttttac

SEQ ID NO: 1969408 - DNA, 15 bp, Homo sapiens
acagcctcttttact

SEQ ID NO: 1969409 - DNA, 15 bp, Homo sapiens
cagcctcttttactt

SEQ ID NO: 1969410 - DNA, 15 bp, Homo sapiens
agcctcttttacttt

SEQ ID NO: 1969411 - DNA, 15 bp, Homo sapiens
gcctcttttactttt

SEQ ID NO: 1969412 - DNA, 15 bp, Homo sapiens
cctcttttactttta

SEQ ID NO: 1969413 - DNA, 15 bp, Homo sapiens
ctcttttacttttat

SEQ ID NO: 1969414 - DNA, 15 bp, Homo sapiens
tcttttacttttatc

SEQ ID NO: 1969415 - DNA, 15 bp, Homo sapiens
cttttacttttatct

SEQ ID NO: 1969416 - DNA, 15 bp, Homo sapiens
ttttacttttatctc

SEQ ID NO: 1969417 - DNA, 15 bp, Homo sapiens
tttacttttatctct

SEQ ID NO: 1969418 - DNA, 15 bp, Homo sapiens
ttacttttatctctt

SEQ ID NO: 1969419 - DNA, 15 bp, Homo sapiens
tacttttatctcttg

SEQ ID NO: 1969420 - DNA, 15 bp, Homo sapiens
acttttatctcttgg

SEQ ID NO: 1969421 - DNA, 15 bp, Homo sapiens
cttttatctcttggc

SEQ ID NO: 1969422 - DNA, 15 bp, Homo sapiens
ttttatctcttggct

SEQ ID NO: 1969423 - DNA, 15 bp, Homo sapiens
tttatctcttggctt

SEQ ID NO: 1969424 - DNA, 15 bp, Homo sapiens
ttatctcttggcttt

SEQ ID NO: 1969425 - DNA, 15 bp, Homo sapiens
tatctcttggctttt

SEQ ID NO: 1969426 - DNA, 15 bp, Homo sapiens
atctcttggctttta

SEQ ID NO: 1969427 - DNA, 15 bp, Homo sapiens
tctcttggcttttat

SEQ ID NO: 1969428 - DNA, 15 bp, Homo sapiens
ctcttggcttttatg

SEQ ID NO: 1969429 - DNA, 15 bp, Homo sapiens
tcttggcttttatgg

SEQ ID NO: 1969430 - DNA, 15 bp, Homo sapiens
cttggcttttatggt

SEQ ID NO: 1969431 - DNA, 15 bp, Homo sapiens
ttggcttttatggtt

SEQ ID NO: 1969432 - DNA, 15 bp, Homo sapiens
tggcttttatggttt

SEQ ID NO: 1969433 - DNA, 15 bp, Homo sapiens
ggcttttatggtttc

SEQ ID NO: 1969434 - DNA, 15 bp, Homo sapiens
gcttttatggtttct

SEQ ID NO: 1969435 - DNA, 15 bp, Homo sapiens
cttttatggtttctc

SEQ ID NO: 1969436 - DNA, 15 bp, Homo sapiens
ttttatggtttctct

SEQ ID NO: 1969437 - DNA, 15 bp, Homo sapiens
tttatggtttctcta

SEQ ID NO: 1969438 - DNA, 15 bp, Homo sapiens
ttatggtttctctac

SEQ ID NO: 1969439 - DNA, 15 bp, Homo sapiens
tatggtttctctacc

SEQ ID NO: 1969440 - DNA, 15 bp, Homo sapiens
atggtttctctaccc

SEQ ID NO: 1969441 - DNA, 15 bp, Homo sapiens
tggtttctctacccc

SEQ ID NO: 1969442 - DNA, 15 bp, Homo sapiens
ggtttctctaccccc

SEQ ID NO: 1969443 - DNA, 15 bp, Homo sapiens
gtttctctaccccct

SEQ ID NO: 1969444 - DNA, 15 bp, Homo sapiens
tttctctacccccta

SEQ ID NO: 1969445 - DNA, 15 bp, Homo sapiens
ttctctaccccctaa

SEQ ID NO: 1969446 - DNA, 15 bp, Homo sapiens
tctctaccccctaat

SEQ ID NO: 1969447 - DNA, 15 bp, Homo sapiens
ctctaccccctaatt

SEQ ID NO: 1969448 - DNA, 15 bp, Homo sapiens
tctaccccctaattt

SEQ ID NO: 1969449 - DNA, 15 bp, Homo sapiens
ctaccccctaatttc

SEQ ID NO: 1969450 - DNA, 15 bp, Homo sapiens
taccccctaatttcc

SEQ ID NO: 1969451 - DNA, 15 bp, Homo sapiens
accccctaatttccc

SEQ ID NO: 1969452 - DNA, 15 bp, Homo sapiens
ccccctaatttccca

SEQ ID NO: 1969453 - DNA, 15 bp, Homo sapiens
cccctaatttcccac

SEQ ID NO: 1969454 - DNA, 15 bp, Homo sapiens
ccctaatttcccacc

SEQ ID NO: 1969455 - DNA, 15 bp, Homo sapiens
cctaatttcccacca

SEQ ID NO: 1969456 - DNA, 15 bp, Homo sapiens
ctaatttcccaccac

SEQ ID NO: 1969457 - DNA, 15 bp, Homo sapiens
taatttcccaccacg

SEQ ID NO: 1969458 - DNA, 15 bp, Homo sapiens
aatttcccaccacgc

SEQ ID NO: 1969459 - DNA, 15 bp, Homo sapiens
atttcccaccacgcc

SEQ ID NO: 1969460 - DNA, 15 bp, Homo sapiens
tttcccaccacgcca

SEQ ID NO: 1969461 - DNA, 15 bp, Homo sapiens
ttcccaccacgccat

SEQ ID NO: 1969462 - DNA, 15 bp, Homo sapiens
tcccaccacgccatc

SEQ ID NO: 1969463 - DNA, 15 bp, Homo sapiens
cccaccacgccatcc

SEQ ID NO: 1969464 - DNA, 15 bp, Homo sapiens
ccaccacgccatccc

SEQ ID NO: 1969465 - DNA, 15 bp, Homo sapiens
caccacgccatcccc

SEQ ID NO: 1969466 - DNA, 15 bp, Homo sapiens
accacgccatcccct

SEQ ID NO: 1969467 - DNA, 15 bp, Homo sapiens
ccacgccatccccta

SEQ ID NO: 1969468 - DNA, 15 bp, Homo sapiens
cacgccatcccctac

SEQ ID NO: 1969469 - DNA, 15 bp, Homo sapiens
acgccatcccctacc

SEQ ID NO: 1969470 - DNA, 15 bp, Homo sapiens
cgccatcccctacct

SEQ ID NO: 1969471 - DNA, 15 bp, Homo sapiens
gccatcccctacctg

SEQ ID NO: 1969472 - DNA, 15 bp, Homo sapiens
ccatcccctacctgt

SEQ ID NO: 1969473 - DNA, 15 bp, Homo sapiens
catcccctacctgta

SEQ ID NO: 1969474 - DNA, 15 bp, Homo sapiens
atcccctacctgtag

SEQ ID NO: 1969475 - DNA, 15 bp, Homo sapiens
tcccctacctgtagg

SEQ ID NO: 1969476 - DNA, 15 bp, Homo sapiens
cccctacctgtagga

SEQ ID NO: 1969477 - DNA, 15 bp, Homo sapiens
ccctacctgtaggaa

SEQ ID NO: 1969478 - DNA, 15 bp, Homo sapiens
cctacctgtaggaaa

SEQ ID NO: 1969479 - DNA, 15 bp, Homo sapiens
ctacctgtaggaaag

SEQ ID NO: 1969480 - DNA, 15 bp, Homo sapiens
tacctgtaggaaagg

SEQ ID NO: 1969481 - DNA, 15 bp, Homo sapiens
acctgtaggaaaggt

SEQ ID NO: 1969482 - DNA, 15 bp, Homo sapiens
cctgtaggaaaggtg

SEQ ID NO: 1969483 - DNA, 15 bp, Homo sapiens
ctgtaggaaaggtga

SEQ ID NO: 1969484 - DNA, 15 bp, Homo sapiens
tgtaggaaaggtgag

SEQ ID NO: 1969485 - DNA, 15 bp, Homo sapiens
gtaggaaaggtgagg

SEQ ID NO: 1969486 - DNA, 15 bp, Homo sapiens
taggaaaggtgaggg

SEQ ID NO: 1969487 - DNA, 15 bp, Homo sapiens
aggaaaggtgagggt

SEQ ID NO: 1969488 - DNA, 15 bp, Homo sapiens
ggaaaggtgagggtg

SEQ ID NO: 1969489 - DNA, 15 bp, Homo sapiens
gaaaggtgagggtgg

SEQ ID NO: 1969490 - DNA, 15 bp, Homo sapiens
aaaggtgagggtggg

SEQ ID NO: 1969491 - DNA, 15 bp, Homo sapiens
aaggtgagggtgggg

SEQ ID NO: 1969492 - DNA, 15 bp, Homo sapiens
aggtgagggtggggg

SEQ ID NO: 1969493 - DNA, 15 bp, Homo sapiens
gtgagggtgggggct

SEQ ID NO: 1969494 - DNA, 15 bp, Homo sapiens
tgagggtgggggctg

SEQ ID NO: 1969495 - DNA, 15 bp, Homo sapiens
gagggtgggggctgt

SEQ ID NO: 1969496 - DNA, 15 bp, Homo sapiens
agggtgggggctgtg

SEQ ID NO: 1969497 - DNA, 15 bp, Homo sapiens
gggtgggggctgtgg

SEQ ID NO: 1969498 - DNA, 15 bp, Homo sapiens
ggtgggggctgtgga

SEQ ID NO: 1969499 - DNA, 15 bp, Homo sapiens
gtgggggctgtggag

SEQ ID NO: 1969500 - DNA, 15 bp, Homo sapiens
tgggggctgtggagg

SEQ ID NO: 1969501 - DNA, 15 bp, Homo sapiens
gggggctgtggaggg

SEQ ID NO: 1969502 - DNA, 15 bp, Homo sapiens
ggggctgtggaggga

SEQ ID NO: 1969503 - DNA, 15 bp, Homo sapiens
gggctgtggagggac

SEQ ID NO: 1969504 - DNA, 15 bp, Homo sapiens
ggctgtggagggact

SEQ ID NO: 1969505 - DNA, 15 bp, Homo sapiens
gctgtggagggactt

SEQ ID NO: 1969506 - DNA, 15 bp, Homo sapiens
ctgtggagggacttt

SEQ ID NO: 1969507 - DNA, 15 bp, Homo sapiens
tgtggagggactttc

SEQ ID NO: 1969508 - DNA, 15 bp, Homo sapiens
gtggagggactttct

SEQ ID NO: 1969509 - DNA, 15 bp, Homo sapiens
tggagggactttctc

SEQ ID NO: 1969510 - DNA, 15 bp, Homo sapiens
ggagggactttctcc

SEQ ID NO: 1969511 - DNA, 15 bp, Homo sapiens
gagggactttctcca

SEQ ID NO: 1969512 - DNA, 15 bp, Homo sapiens
agggactttctccaa

SEQ ID NO: 1969513 - DNA, 15 bp, Homo sapiens
gggactttctccaaa

SEQ ID NO: 1969514 - DNA, 15 bp, Homo sapiens
ggactttctccaaag

SEQ ID NO: 1969515 - DNA, 15 bp, Homo sapiens
gactttctccaaagc

SEQ ID NO: 1969516 - DNA, 15 bp, Homo sapiens
actttctccaaagct

SEQ ID NO: 1969517 - DNA, 15 bp, Homo sapiens
ctttctccaaagctg

SEQ ID NO: 1969518 - DNA, 15 bp, Homo sapiens
tttctccaaagctga

SEQ ID NO: 1969519 - DNA, 15 bp, Homo sapiens
ttctccaaagctgag

SEQ ID NO: 1969520 - DNA, 15 bp, Homo sapiens
tctccaaagctgaga

SEQ ID NO: 1969521 - DNA, 15 bp, Homo sapiens
ctccaaagctgagag

SEQ ID NO: 1969522 - DNA, 15 bp, Homo sapiens
tccaaagctgagaga

SEQ ID NO: 1969523 - DNA, 15 bp, Homo sapiens
ccaaagctgagagag

SEQ ID NO: 1969524 - DNA, 15 bp, Homo sapiens
caaagctgagagaga

SEQ ID NO: 1969525 - DNA, 15 bp, Homo sapiens
aaagctgagagagat

SEQ ID NO: 1969526 - DNA, 15 bp, Homo sapiens
aagctgagagagatc

SEQ ID NO: 1969527 - DNA, 15 bp, Homo sapiens
agctgagagagatcc

SEQ ID NO: 1969528 - DNA, 15 bp, Homo sapiens
gctgagagagatcct

SEQ ID NO: 1969529 - DNA, 15 bp, Homo sapiens
ctgagagagatcctt

SEQ ID NO: 1969530 - DNA, 15 bp, Homo sapiens
tgagagagatccttt

SEQ ID NO: 1969531 - DNA, 15 bp, Homo sapiens
gagagagatcctttc

SEQ ID NO: 1969532 - DNA, 15 bp, Homo sapiens
agagagatcctttca

SEQ ID NO: 1969533 - DNA, 15 bp, Homo sapiens
gagagatcctttcac

SEQ ID NO: 1969534 - DNA, 15 bp, Homo sapiens
agagatcctttcact

SEQ ID NO: 1969535 - DNA, 15 bp, Homo sapiens
gagatcctttcacta

SEQ ID NO: 1969536 - DNA, 15 bp, Homo sapiens
agatcctttcactat

SEQ ID NO: 1969537 - DNA, 15 bp, Homo sapiens
gatcctttcactatt

SEQ ID NO: 1969538 - DNA, 15 bp, Homo sapiens
atcctttcactattt

SEQ ID NO: 1969539 - DNA, 15 bp, Homo sapiens
tcctttcactattta

SEQ ID NO: 1969540 - DNA, 15 bp, Homo sapiens
cctttcactatttac

SEQ ID NO: 1969541 - DNA, 15 bp, Homo sapiens
ctttcactatttaca

SEQ ID NO: 1969542 - DNA, 15 bp, Homo sapiens
tttcactatttacat

SEQ ID NO: 1969543 - DNA, 15 bp, Homo sapiens
ttcactatttacatc

SEQ ID NO: 1969544 - DNA, 15 bp, Homo sapiens
tcactatttacatca

SEQ ID NO: 1969545 - DNA, 15 bp, Homo sapiens
cactatttacatcat

SEQ ID NO: 1969546 - DNA, 15 bp, Homo sapiens
actatttacatcatt

SEQ ID NO: 1969547 - DNA, 15 bp, Homo sapiens
ctatttacatcattc

SEQ ID NO: 1969548 - DNA, 15 bp, Homo sapiens
tatttacatcattca

SEQ ID NO: 1969549 - DNA, 15 bp, Homo sapiens
atttacatcattcag

SEQ ID NO: 1969550 - DNA, 15 bp, Homo sapiens
tttacatcattcagc

SEQ ID NO: 1969551 - DNA, 15 bp, Homo sapiens
ttacatcattcagcc

SEQ ID NO: 1969552 - DNA, 15 bp, Homo sapiens
tacatcattcagccc

SEQ ID NO: 1969553 - DNA, 15 bp, Homo sapiens
acatcattcagccct

SEQ ID NO: 1969554 - DNA, 15 bp, Homo sapiens
catcattcagccctc

SEQ ID NO: 1969555 - DNA, 15 bp, Homo sapiens
atcattcagccctca

SEQ ID NO: 1969556 - DNA, 15 bp, Homo sapiens
tcattcagccctcaa

SEQ ID NO: 1969557 - DNA, 15 bp, Homo sapiens
cattcagccctcaag

SEQ ID NO: 1969558 - DNA, 15 bp, Homo sapiens
attcagccctcaaga

SEQ ID NO: 1969559 - DNA, 15 bp, Homo sapiens
gagggagttcttgag

SEQ ID NO: 1969560 - DNA, 15 bp, Homo sapiens
agggagttcttgagg

SEQ ID NO: 1969561 - DNA, 15 bp, Homo sapiens
gggagttcttgaggg

SEQ ID NO: 1969562 - DNA, 15 bp, Homo sapiens
ggagttcttgagggg

SEQ ID NO: 1969563 - DNA, 15 bp, Homo sapiens
gagttcttgaggggg

SEQ ID NO: 1969564 - DNA, 15 bp, Homo sapiens
agttcttgagggggt

SEQ ID NO: 1969565 - DNA, 15 bp, Homo sapiens
gttcttgagggggtt

SEQ ID NO: 1969566 - DNA, 15 bp, Homo sapiens
ttcttgagggggttg

SEQ ID NO: 1969567 - DNA, 15 bp, Homo sapiens
tcttgagggggttga

SEQ ID NO: 1969568 - DNA, 15 bp, Homo sapiens
cttgagggggttgac

SEQ ID NO: 1969569 - DNA, 15 bp, Homo sapiens
ttgagggggttgacg

SEQ ID NO: 1969570 - DNA, 15 bp, Homo sapiens
tgagggggttgacga

SEQ ID NO: 1969571 - DNA, 15 bp, Homo sapiens
gagggggttgacgag

SEQ ID NO: 1969572 - DNA, 15 bp, Homo sapiens
agggggttgacgagg

SEQ ID NO: 1969573 - DNA, 15 bp, Homo sapiens
gggggttgacgagga

SEQ ID NO: 1969574 - DNA, 15 bp, Homo sapiens
ggggttgacgaggac

SEQ ID NO: 1969575 - DNA, 15 bp, Homo sapiens
gggttgacgaggacg

SEQ ID NO: 1969576 - DNA, 15 bp, Homo sapiens
ggttgacgaggacgt

SEQ ID NO: 1969577 - DNA, 15 bp, Homo sapiens
gttgacgaggacgtg

SEQ ID NO: 1969578 - DNA, 15 bp, Homo sapiens
ttgacgaggacgtgg

SEQ ID NO: 1969579 - DNA, 15 bp, Homo sapiens
tgacgaggacgtggc

SEQ ID NO: 1969580 - DNA, 15 bp, Homo sapiens
gacgaggacgtggcc

SEQ ID NO: 1969581 - DNA, 15 bp, Homo sapiens
acgaggacgtggcct

SEQ ID NO: 1969582 - DNA, 15 bp, Homo sapiens
cgaggacgtggcctc

SEQ ID NO: 1969583 - DNA, 15 bp, Homo sapiens
gaggacgtggcctct

SEQ ID NO: 1969584 - DNA, 15 bp, Homo sapiens
aggacgtggcctctg

SEQ ID NO: 1969585 - DNA, 15 bp, Homo sapiens
ggacgtggcctctga

SEQ ID NO: 1969586 - DNA, 15 bp, Homo sapiens
gacgtggcctctgag

SEQ ID NO: 1969587 - DNA, 15 bp, Homo sapiens
acgtggcctctgagc

SEQ ID NO: 1969588 - DNA, 15 bp, Homo sapiens
cgtggcctctgagcc

SEQ ID NO: 1969589 - DNA, 15 bp, Homo sapiens
gtggcctctgagccc

SEQ ID NO: 1969590 - DNA, 15 bp, Homo sapiens
tggcctctgagcccc

SEQ ID NO: 1969591 - DNA, 15 bp, Homo sapiens
ggcctctgagcccca

SEQ ID NO: 1969592 - DNA, 15 bp, Homo sapiens
gcctctgagccccag

SEQ ID NO: 1969593 - DNA, 15 bp, Homo sapiens
cctctgagccccagg

SEQ ID NO: 1969594 - DNA, 15 bp, Homo sapiens
ctctgagccccagga

SEQ ID NO: 1969595 - DNA, 15 bp, Homo sapiens
tctgagccccaggac

SEQ ID NO: 1969596 - DNA, 15 bp, Homo sapiens
ctgagccccaggaca

SEQ ID NO: 1969597 - DNA, 15 bp, Homo sapiens
tgagccccaggacag

SEQ ID NO: 1969598 - DNA, 15 bp, Homo sapiens
gagccccaggacagg

SEQ ID NO: 1969599 - DNA, 15 bp, Homo sapiens
agccccaggacaggg

SEQ ID NO: 1969600 - DNA, 15 bp, Homo sapiens
gccccaggacagggg

SEQ ID NO: 1969601 - DNA, 15 bp, Homo sapiens
ccccaggacaggggc

SEQ ID NO: 1969602 - DNA, 15 bp, Homo sapiens
cccaggacaggggca

SEQ ID NO: 1969603 - DNA, 15 bp, Homo sapiens
ccaggacaggggcag

SEQ ID NO: 1969604 - DNA, 15 bp, Homo sapiens
caggacaggggcagc

SEQ ID NO: 1969605 - DNA, 15 bp, Homo sapiens
aggacaggggcagcc

SEQ ID NO: 1969606 - DNA, 15 bp, Homo sapiens
ggacaggggcagcca

SEQ ID NO: 1969607 - DNA, 15 bp, Homo sapiens
gacaggggcagccag

SEQ ID NO: 1969608 - DNA, 15 bp, Homo sapiens
acaggggcagccagt

SEQ ID NO: 1969609 - DNA, 15 bp, Homo sapiens
caggggcagccagtc

SEQ ID NO: 1969610 - DNA, 15 bp, Homo sapiens
aggggcagccagtcc

SEQ ID NO: 1969611 - DNA, 15 bp, Homo sapiens
ggggcagccagtcct

SEQ ID NO: 1969612 - DNA, 15 bp, Homo sapiens
gggcagccagtcctc

SEQ ID NO: 1969613 - DNA, 15 bp, Homo sapiens
ggcagccagtcctcc

SEQ ID NO: 1969614 - DNA, 15 bp, Homo sapiens
gcagccagtcctcca

SEQ ID NO: 1969615 - DNA, 15 bp, Homo sapiens
cagccagtcctccag

SEQ ID NO: 1969616 - DNA, 15 bp, Homo sapiens
agccagtcctccagg

SEQ ID NO: 1969617 - DNA, 15 bp, Homo sapiens
gccagtcctccaggg

SEQ ID NO: 1969618 - DNA, 15 bp, Homo sapiens
ccagtcctccagggt

SEQ ID NO: 1969619 - DNA, 15 bp, Homo sapiens
cagtcctccagggtc

SEQ ID NO: 1969620 - DNA, 15 bp, Homo sapiens
agtcctccagggtcc

SEQ ID NO: 1969621 - DNA, 15 bp, Homo sapiens
gtcctccagggtcct

SEQ ID NO: 1969622 - DNA, 15 bp, Homo sapiens
tcctccagggtcctt

SEQ ID NO: 1969623 - DNA, 15 bp, Homo sapiens
cctccagggtccttt

SEQ ID NO: 1969624 - DNA, 15 bp, Homo sapiens
ctccagggtcctttt

SEQ ID NO: 1969625 - DNA, 15 bp, Homo sapiens
tccagggtccttttt

SEQ ID NO: 1969626 - DNA, 15 bp, Homo sapiens
ccagggtcctttttt

SEQ ID NO: 1969627 - DNA, 15 bp, Homo sapiens
cagggtccttttttg

SEQ ID NO: 1969628 - DNA, 15 bp, Homo sapiens
agggtccttttttga

SEQ ID NO: 1969629 - DNA, 15 bp, Homo sapiens
gggtccttttttgat

SEQ ID NO: 1969630 - DNA, 15 bp, Homo sapiens
ggtccttttttgatt

SEQ ID NO: 1969631 - DNA, 15 bp, Homo sapiens
gtccttttttgattc

SEQ ID NO: 1969632 - DNA, 15 bp, Homo sapiens
tccttttttgattct

SEQ ID NO: 1969633 - DNA, 15 bp, Homo sapiens
ccttttttgattctc

SEQ ID NO: 1969634 - DNA, 15 bp, Homo sapiens
cttttttgattctcg

SEQ ID NO: 1969635 - DNA, 15 bp, Homo sapiens
ttttttgattctcgg

SEQ ID NO: 1969636 - DNA, 15 bp, Homo sapiens
tttttgattctcggt

SEQ ID NO: 1969637 - DNA, 15 bp, Homo sapiens
ttttgattctcggtt

SEQ ID NO: 1969638 - DNA, 15 bp, Homo sapiens
tttgattctcggttt

SEQ ID NO: 1969639 - DNA, 15 bp, Homo sapiens
ttgattctcggtttc

SEQ ID NO: 1969640 - DNA, 15 bp, Homo sapiens
tgattctcggtttct

SEQ ID NO: 1969641 - DNA, 15 bp, Homo sapiens
gattctcggtttctt

SEQ ID NO: 1969642 - DNA, 15 bp, Homo sapiens
attctcggtttcttt

SEQ ID NO: 1969643 - DNA, 15 bp, Homo sapiens
ttctcggtttctttt

SEQ ID NO: 1969644 - DNA, 15 bp, Homo sapiens
tctcggtttcttttt

SEQ ID NO: 1969645 - DNA, 15 bp, Homo sapiens
ctcggtttctttttc

SEQ ID NO: 1969646 - DNA, 15 bp, Homo sapiens
tcggtttctttttcc

SEQ ID NO: 1969647 - DNA, 15 bp, Homo sapiens
cggtttctttttccc

SEQ ID NO: 1969648 - DNA, 15 bp, Homo sapiens
ggtttctttttccca

SEQ ID NO: 1969649 - DNA, 15 bp, Homo sapiens
gtttctttttcccat

SEQ ID NO: 1969650 - DNA, 15 bp, Homo sapiens
tttctttttcccatc

SEQ ID NO: 1969651 - DNA, 15 bp, Homo sapiens
ttctttttcccatcc

SEQ ID NO: 1969652 - DNA, 15 bp, Homo sapiens
tctttttcccatccc

SEQ ID NO: 1969653 - DNA, 15 bp, Homo sapiens
ctttttcccatccct

SEQ ID NO: 1969654 - DNA, 15 bp, Homo sapiens
tttttcccatccctc

SEQ ID NO: 1969655 - DNA, 15 bp, Homo sapiens
ttttcccatccctct

SEQ ID NO: 1969656 - DNA, 15 bp, Homo sapiens
tttcccatccctctg

SEQ ID NO: 1969657 - DNA, 15 bp, Homo sapiens
ttcccatccctctga

SEQ ID NO: 1969658 - DNA, 15 bp, Homo sapiens
tcccatccctctgat

SEQ ID NO: 1969659 - DNA, 15 bp, Homo sapiens
cccatccctctgatg

SEQ ID NO: 1969660 - DNA, 15 bp, Homo sapiens
ccatccctctgatga

SEQ ID NO: 1969661 - DNA, 15 bp, Homo sapiens
catccctctgatgag

SEQ ID NO: 1969662 - DNA, 15 bp, Homo sapiens
atccctctgatgaga

SEQ ID NO: 1969663 - DNA, 15 bp, Homo sapiens
tccctctgatgagag

SEQ ID NO: 1969664 - DNA, 15 bp, Homo sapiens
ccctctgatgagagg

SEQ ID NO: 1969665 - DNA, 15 bp, Homo sapiens
cctctgatgagaggt

SEQ ID NO: 1969666 - DNA, 15 bp, Homo sapiens
ctctgatgagaggtg

SEQ ID NO: 1969667 - DNA, 15 bp, Homo sapiens
tctgatgagaggtga

SEQ ID NO: 1969668 - DNA, 15 bp, Homo sapiens
ctgatgagaggtgaa

SEQ ID NO: 1969669 - DNA, 15 bp, Homo sapiens
tgatgagaggtgaag

SEQ ID NO: 1969670 - DNA, 15 bp, Homo sapiens
gatgagaggtgaagg

SEQ ID NO: 1969671 - DNA, 15 bp, Homo sapiens
atgagaggtgaaggt

SEQ ID NO: 1969672 - DNA, 15 bp, Homo sapiens
tgagaggtgaaggta

SEQ ID NO: 1969673 - DNA, 15 bp, Homo sapiens
gagaggtgaaggtaa

SEQ ID NO: 1969674 - DNA, 15 bp, Homo sapiens
agaggtgaaggtaaa

SEQ ID NO: 1969675 - DNA, 15 bp, Homo sapiens
gaggtgaaggtaaac

SEQ ID NO: 1969676 - DNA, 15 bp, Homo sapiens
aggtgaaggtaaacc

SEQ ID NO: 1969677 - DNA, 15 bp, Homo sapiens
ggtgaaggtaaaccc

SEQ ID NO: 1969678 - DNA, 15 bp, Homo sapiens
gtgaaggtaaaccca

SEQ ID NO: 1969679 - DNA, 15 bp, Homo sapiens
tgaaggtaaacccaa

SEQ ID NO: 1969680 - DNA, 15 bp, Homo sapiens
gaaggtaaacccaag

SEQ ID NO: 1969681 - DNA, 15 bp, Homo sapiens
aaggtaaacccaagg

SEQ ID NO: 1969682 - DNA, 15 bp, Homo sapiens
aggtaaacccaaggt

SEQ ID NO: 1969683 - DNA, 15 bp, Homo sapiens
ggtaaacccaaggtc

SEQ ID NO: 1969684 - DNA, 15 bp, Homo sapiens
gtaaacccaaggtca

SEQ ID NO: 1969685 - DNA, 15 bp, Homo sapiens
taaacccaaggtcag

SEQ ID NO: 1969686 - DNA, 15 bp, Homo sapiens
aaacccaaggtcagg

SEQ ID NO: 1969687 - DNA, 15 bp, Homo sapiens
aacccaaggtcaggg

SEQ ID NO: 1969688 - DNA, 15 bp, Homo sapiens
acccaaggtcaggga

SEQ ID NO: 1969689 - DNA, 15 bp, Homo sapiens
cccaaggtcagggac

SEQ ID NO: 1969690 - DNA, 15 bp, Homo sapiens
ccaaggtcagggacg

SEQ ID NO: 1969691 - DNA, 15 bp, Homo sapiens
caaggtcagggacgc

SEQ ID NO: 1969692 - DNA, 15 bp, Homo sapiens
aaggtcagggacgca

SEQ ID NO: 1969693 - DNA, 15 bp, Homo sapiens
aggtcagggacgcag

SEQ ID NO: 1969694 - DNA, 15 bp, Homo sapiens
ggtcagggacgcaga

SEQ ID NO: 1969695 - DNA, 15 bp, Homo sapiens
gtcagggacgcagag

SEQ ID NO: 1969696 - DNA, 15 bp, Homo sapiens
tcagggacgcagaga

SEQ ID NO: 1969697 - DNA, 15 bp, Homo sapiens
cagggacgcagagag

SEQ ID NO: 1969698 - DNA, 15 bp, Homo sapiens
agggacgcagagagg

SEQ ID NO: 1969699 - DNA, 15 bp, Homo sapiens
gggacgcagagaggg

SEQ ID NO: 1969700 - DNA, 15 bp, Homo sapiens
ggacgcagagagggg

SEQ ID NO: 1969701 - DNA, 15 bp, Homo sapiens
gacgcagagagggga

SEQ ID NO: 1969702 - DNA, 15 bp, Homo sapiens
acgcagagaggggac

SEQ ID NO: 1969703 - DNA, 15 bp, Homo sapiens
cgcagagaggggaca

SEQ ID NO: 1969704 - DNA, 15 bp, Homo sapiens
gcagagaggggacac

SEQ ID NO: 1969705 - DNA, 15 bp, Homo sapiens
cagagaggggacaca

SEQ ID NO: 1969706 - DNA, 15 bp, Homo sapiens
agagaggggacacag

SEQ ID NO: 1969707 - DNA, 15 bp, Homo sapiens
gagaggggacacagc

SEQ ID NO: 1969708 - DNA, 15 bp, Homo sapiens
agaggggacacagcc

SEQ ID NO: 1969709 - DNA, 15 bp, Homo sapiens
gaggggacacagcca

SEQ ID NO: 1969710 - DNA, 15 bp, Homo sapiens
aggggacacagccaa

SEQ ID NO: 1969711 - DNA, 15 bp, Homo sapiens
ggggacacagccaag

SEQ ID NO: 1969712 - DNA, 15 bp, Homo sapiens
gggacacagccaaga

SEQ ID NO: 1969713 - DNA, 15 bp, Homo sapiens
ggacacagccaagac

SEQ ID NO: 1969714 - DNA, 15 bp, Homo sapiens
gacacagccaagaca

SEQ ID NO: 1969715 - DNA, 15 bp, Homo sapiens
acacagccaagacag

SEQ ID NO: 1969716 - DNA, 15 bp, Homo sapiens
cacagccaagacagg

SEQ ID NO: 1969717 - DNA, 15 bp, Homo sapiens
acagccaagacagga

SEQ ID NO: 1969718 - DNA, 15 bp, Homo sapiens
cagccaagacaggaa

SEQ ID NO: 1969719 - DNA, 15 bp, Homo sapiens
agccaagacaggaag

SEQ ID NO: 1969720 - DNA, 15 bp, Homo sapiens
gccaagacaggaagc

SEQ ID NO: 1969721 - DNA, 15 bp, Homo sapiens
ccaagacaggaagca

SEQ ID NO: 1969722 - DNA, 15 bp, Homo sapiens
caagacaggaagcac

SEQ ID NO: 1969723 - DNA, 15 bp, Homo sapiens
aagacaggaagcacc

SEQ ID NO: 1969724 - DNA, 15 bp, Homo sapiens
agacaggaagcaccc

SEQ ID NO: 1969725 - DNA, 15 bp, Homo sapiens
gacaggaagcacccg

SEQ ID NO: 1969726 - DNA, 15 bp, Homo sapiens
acaggaagcacccgg

SEQ ID NO: 1969727 - DNA, 15 bp, Homo sapiens
aggaagcacccgggg

SEQ ID NO: 1969728 - DNA, 15 bp, Homo sapiens
ggaagcacccggggt

SEQ ID NO: 1969729 - DNA, 15 bp, Homo sapiens
gaagcacccggggtc

SEQ ID NO: 1969730 - DNA, 15 bp, Homo sapiens
aagcacccggggtca

SEQ ID NO: 1969731 - DNA, 15 bp, Homo sapiens
agcacccggggtcaa

SEQ ID NO: 1969732 - DNA, 15 bp, Homo sapiens
gcacccggggtcaac

SEQ ID NO: 1969733 - DNA, 15 bp, Homo sapiens
cacccggggtcaacc

SEQ ID NO: 1969734 - DNA, 15 bp, Homo sapiens
acccggggtcaaccc

SEQ ID NO: 1969735 - DNA, 15 bp, Homo sapiens
cccggggtcaaccca

SEQ ID NO: 1969736 - DNA, 15 bp, Homo sapiens
ccggggtcaacccat

SEQ ID NO: 1969737 - DNA, 15 bp, Homo sapiens
cggggtcaacccatt

SEQ ID NO: 1969738 - DNA, 15 bp, Homo sapiens
ggggtcaacccattc

SEQ ID NO: 1969739 - DNA, 15 bp, Homo sapiens
gggtcaacccattct

SEQ ID NO: 1969740 - DNA, 15 bp, Homo sapiens
ggtcaacccattctg

SEQ ID NO: 1969741 - DNA, 15 bp, Homo sapiens
gtcaacccattctga

SEQ ID NO: 1969742 - DNA, 15 bp, Homo sapiens
tcaacccattctgag

SEQ ID NO: 1969743 - DNA, 15 bp, Homo sapiens
caacccattctgaga

SEQ ID NO: 1969744 - DNA, 15 bp, Homo sapiens
aacccattctgagaa

SEQ ID NO: 1969745 - DNA, 15 bp, Homo sapiens
acccattctgagaat

SEQ ID NO: 1969746 - DNA, 15 bp, Homo sapiens
cccattctgagaatg

SEQ ID NO: 1969747 - DNA, 15 bp, Homo sapiens
ccattctgagaatgc

SEQ ID NO: 1969748 - DNA, 15 bp, Homo sapiens
cattctgagaatgca

SEQ ID NO: 1969749 - DNA, 15 bp, Homo sapiens
attctgagaatgcaa

SEQ ID NO: 1969750 - DNA, 15 bp, Homo sapiens
ttctgagaatgcaaa

SEQ ID NO: 1969751 - DNA, 15 bp, Homo sapiens
tctgagaatgcaaag

SEQ ID NO: 1969752 - DNA, 15 bp, Homo sapiens
ctgagaatgcaaagg

SEQ ID NO: 1969753 - DNA, 15 bp, Homo sapiens
tgagaatgcaaaggg

SEQ ID NO: 1969754 - DNA, 15 bp, Homo sapiens
gagaatgcaaaggga

SEQ ID NO: 1969755 - DNA, 15 bp, Homo sapiens
agaatgcaaagggac

SEQ ID NO: 1969756 - DNA, 15 bp, Homo sapiens
gaatgcaaagggacc

SEQ ID NO: 1969757 - DNA, 15 bp, Homo sapiens
aatgcaaagggaccc

SEQ ID NO: 1969758 - DNA, 15 bp, Homo sapiens
atgcaaagggacccc

SEQ ID NO: 1969759 - DNA, 15 bp, Homo sapiens
tgcaaagggacccct

SEQ ID NO: 1969760 - DNA, 15 bp, Homo sapiens
gcaaagggacccctt

SEQ ID NO: 1969761 - DNA, 15 bp, Homo sapiens
caaagggaccccttc

SEQ ID NO: 1969762 - DNA, 15 bp, Homo sapiens
aaagggaccccttcc

SEQ ID NO: 1969763 - DNA, 15 bp, Homo sapiens
aagggaccccttccc

SEQ ID NO: 1969764 - DNA, 15 bp, Homo sapiens
agggaccccttccct

SEQ ID NO: 1969765 - DNA, 15 bp, Homo sapiens
gggaccccttccctg

SEQ ID NO: 1969766 - DNA, 15 bp, Homo sapiens
ggaccccttccctgt

SEQ ID NO: 1969767 - DNA, 15 bp, Homo sapiens
gaccccttccctgtc

SEQ ID NO: 1969768 - DNA, 15 bp, Homo sapiens
accccttccctgtcc

SEQ ID NO: 1969769 - DNA, 15 bp, Homo sapiens
ccccttccctgtccc

SEQ ID NO: 1969770 - DNA, 15 bp, Homo sapiens
cccttccctgtccca

SEQ ID NO: 1969771 - DNA, 15 bp, Homo sapiens
ccttccctgtcccat

SEQ ID NO: 1969772 - DNA, 15 bp, Homo sapiens
cttccctgtcccatt

SEQ ID NO: 1969773 - DNA, 15 bp, Homo sapiens
ttccctgtcccattg

SEQ ID NO: 1969774 - DNA, 15 bp, Homo sapiens
tccctgtcccattgc

SEQ ID NO: 1969775 - DNA, 15 bp, Homo sapiens
ccctgtcccattgcc

SEQ ID NO: 1969776 - DNA, 15 bp, Homo sapiens
cctgtcccattgcct

SEQ ID NO: 1969777 - DNA, 15 bp, Homo sapiens
ctgtcccattgcctt

SEQ ID NO: 1969778 - DNA, 15 bp, Homo sapiens
tgtcccattgccttc

SEQ ID NO: 1969779 - DNA, 15 bp, Homo sapiens
gtcccattgccttca

SEQ ID NO: 1969780 - DNA, 15 bp, Homo sapiens
tcccattgccttcac

SEQ ID NO: 1969781 - DNA, 15 bp, Homo sapiens
cccattgccttcacc

SEQ ID NO: 1969782 - DNA, 15 bp, Homo sapiens
ccattgccttcacct

SEQ ID NO: 1969783 - DNA, 15 bp, Homo sapiens
cattgccttcacctt

SEQ ID NO: 1969784 - DNA, 15 bp, Homo sapiens
attgccttcaccttc

SEQ ID NO: 1969785 - DNA, 15 bp, Homo sapiens
ttgccttcaccttcc

SEQ ID NO: 1969786 - DNA, 15 bp, Homo sapiens
tgccttcaccttcca

SEQ ID NO: 1969787 - DNA, 15 bp, Homo sapiens
gccttcaccttccac

SEQ ID NO: 1969788 - DNA, 15 bp, Homo sapiens
ccttcaccttccaca

SEQ ID NO: 1969789 - DNA, 15 bp, Homo sapiens
cttcaccttccacag

SEQ ID NO: 1969790 - DNA, 15 bp, Homo sapiens
ttcaccttccacagc

SEQ ID NO: 1969791 - DNA, 15 bp, Homo sapiens
tcaccttccacagca

SEQ ID NO: 1969792 - DNA, 15 bp, Homo sapiens
caccttccacagcaa

SEQ ID NO: 1969793 - DNA, 15 bp, Homo sapiens
accttccacagcaag

SEQ ID NO: 1969794 - DNA, 15 bp, Homo sapiens
ccttccacagcaagg

SEQ ID NO: 1969795 - DNA, 15 bp, Homo sapiens
cttccacagcaaggt

SEQ ID NO: 1969796 - DNA, 15 bp, Homo sapiens
ttccacagcaaggtt

SEQ ID NO: 1969797 - DNA, 15 bp, Homo sapiens
tccacagcaaggttc

SEQ ID NO: 1969798 - DNA, 15 bp, Homo sapiens
ccacagcaaggttcc

SEQ ID NO: 1969799 - DNA, 15 bp, Homo sapiens
cacagcaaggttccc

SEQ ID NO: 1969800 - DNA, 15 bp, Homo sapiens
acagcaaggttcccc

SEQ ID NO: 1969801 - DNA, 15 bp, Homo sapiens
cagcaaggttccccg

SEQ ID NO: 1969802 - DNA, 15 bp, Homo sapiens
agcaaggttccccgc

SEQ ID NO: 1969803 - DNA, 15 bp, Homo sapiens
gcaaggttccccgcg

SEQ ID NO: 1969804 - DNA, 15 bp, Homo sapiens
caaggttccccgcgg

SEQ ID NO: 1969805 - DNA, 15 bp, Homo sapiens
aaggttccccgcgga

SEQ ID NO: 1969806 - DNA, 15 bp, Homo sapiens
aggttccccgcggac

SEQ ID NO: 1969807 - DNA, 15 bp, Homo sapiens
ggttccccgcggaca

SEQ ID NO: 1969808 - DNA, 15 bp, Homo sapiens
gttccccgcggacag

SEQ ID NO: 1969809 - DNA, 15 bp, Homo sapiens
ttccccgcggacaga

SEQ ID NO: 1969810 - DNA, 15 bp, Homo sapiens
tccccgcggacagag

SEQ ID NO: 1969811 - DNA, 15 bp, Homo sapiens
ccccgcggacagagc

SEQ ID NO: 1969812 - DNA, 15 bp, Homo sapiens
cccgcggacagagcc

SEQ ID NO: 1969813 - DNA, 15 bp, Homo sapiens
ccgcggacagagccc

SEQ ID NO: 1969814 - DNA, 15 bp, Homo sapiens
cgcggacagagccca

SEQ ID NO: 1969815 - DNA, 15 bp, Homo sapiens
gcggacagagcccac

SEQ ID NO: 1969816 - DNA, 15 bp, Homo sapiens
cggacagagcccacg

SEQ ID NO: 1969817 - DNA, 15 bp, Homo sapiens
ggacagagcccacgt

SEQ ID NO: 1969818 - DNA, 15 bp, Homo sapiens
gacagagcccacgtt

SEQ ID NO: 1969819 - DNA, 15 bp, Homo sapiens
acagagcccacgttt

SEQ ID NO: 1969820 - DNA, 15 bp, Homo sapiens
cagagcccacgttta

SEQ ID NO: 1969821 - DNA, 15 bp, Homo sapiens
agagcccacgtttag

SEQ ID NO: 1969822 - DNA, 15 bp, Homo sapiens
gagcccacgtttagt

SEQ ID NO: 1969823 - DNA, 15 bp, Homo sapiens
agcccacgtttagta

SEQ ID NO: 1969824 - DNA, 15 bp, Homo sapiens
gcccacgtttagtat

SEQ ID NO: 1969825 - DNA, 15 bp, Homo sapiens
cccacgtttagtatg

SEQ ID NO: 1969826 - DNA, 15 bp, Homo sapiens
ccacgtttagtatgg

SEQ ID NO: 1969827 - DNA, 15 bp, Homo sapiens
cacgtttagtatgga

SEQ ID NO: 1969828 - DNA, 15 bp, Homo sapiens
acgtttagtatggag

SEQ ID NO: 1969829 - DNA, 15 bp, Homo sapiens
cgtttagtatggagc

SEQ ID NO: 1969830 - DNA, 15 bp, Homo sapiens
gtttagtatggagct

SEQ ID NO: 1969831 - DNA, 15 bp, Homo sapiens
tttagtatggagctg

SEQ ID NO: 1969832 - DNA, 15 bp, Homo sapiens
ttagtatggagctga

SEQ ID NO: 1969833 - DNA, 15 bp, Homo sapiens
tagtatggagctgag

SEQ ID NO: 1969834 - DNA, 15 bp, Homo sapiens
agtatggagctgagc

SEQ ID NO: 1969835 - DNA, 15 bp, Homo sapiens
gtatggagctgagcc

SEQ ID NO: 1969836 - DNA, 15 bp, Homo sapiens
tatggagctgagcca

SEQ ID NO: 1969837 - DNA, 15 bp, Homo sapiens
atggagctgagccag

SEQ ID NO: 1969838 - DNA, 15 bp, Homo sapiens
tggagctgagccagg

SEQ ID NO: 1969839 - DNA, 15 bp, Homo sapiens
ggagctgagccaggc

SEQ ID NO: 1969840 - DNA, 15 bp, Homo sapiens
gagctgagccaggct

SEQ ID NO: 1969841 - DNA, 15 bp, Homo sapiens
agctgagccaggctc

SEQ ID NO: 1969842 - DNA, 15 bp, Homo sapiens
gctgagccaggctca

SEQ ID NO: 1969843 - DNA, 15 bp, Homo sapiens
ctgagccaggctcac

SEQ ID NO: 1969844 - DNA, 15 bp, Homo sapiens
tgagccaggctcacg

SEQ ID NO: 1969845 - DNA, 15 bp, Homo sapiens
gagccaggctcacgg

SEQ ID NO: 1969846 - DNA, 15 bp, Homo sapiens
agccaggctcacggc

SEQ ID NO: 1969847 - DNA, 15 bp, Homo sapiens
gccaggctcacggca

SEQ ID NO: 1969848 - DNA, 15 bp, Homo sapiens
ccaggctcacggcat

SEQ ID NO: 1969849 - DNA, 15 bp, Homo sapiens
caggctcacggcatg

SEQ ID NO: 1969850 - DNA, 15 bp, Homo sapiens
aggctcacggcatgc

SEQ ID NO: 1969851 - DNA, 15 bp, Homo sapiens
ggctcacggcatgcc

SEQ ID NO: 1969852 - DNA, 15 bp, Homo sapiens
gctcacggcatgcct

SEQ ID NO: 1969853 - DNA, 15 bp, Homo sapiens
ctcacggcatgcctt

SEQ ID NO: 1969854 - DNA, 15 bp, Homo sapiens
tcacggcatgccttc

SEQ ID NO: 1969855 - DNA, 15 bp, Homo sapiens
cacggcatgccttca

SEQ ID NO: 1969856 - DNA, 15 bp, Homo sapiens
acggcatgccttcag

SEQ ID NO: 1969857 - DNA, 15 bp, Homo sapiens
cggcatgccttcaga

SEQ ID NO: 1969858 - DNA, 15 bp, Homo sapiens
ggcatgccttcagac

SEQ ID NO: 1969859 - DNA, 15 bp, Homo sapiens
gcatgccttcagacc

SEQ ID NO: 1969860 - DNA, 15 bp, Homo sapiens
catgccttcagacca

SEQ ID NO: 1969861 - DNA, 15 bp, Homo sapiens
atgccttcagaccag

SEQ ID NO: 1969862 - DNA, 15 bp, Homo sapiens
tgccttcagaccagt

SEQ ID NO: 1969863 - DNA, 15 bp, Homo sapiens
gccttcagaccagtc

SEQ ID NO: 1969864 - DNA, 15 bp, Homo sapiens
ccttcagaccagtct

SEQ ID NO: 1969865 - DNA, 15 bp, Homo sapiens
cttcagaccagtctc

SEQ ID NO: 1969866 - DNA, 15 bp, Homo sapiens
ttcagaccagtctct

SEQ ID NO: 1969867 - DNA, 15 bp, Homo sapiens
tcagaccagtctcta

SEQ ID NO: 1969868 - DNA, 15 bp, Homo sapiens
cagaccagtctctac

SEQ ID NO: 1969869 - DNA, 15 bp, Homo sapiens
agaccagtctctacc

SEQ ID NO: 1969870 - DNA, 15 bp, Homo sapiens
gaccagtctctaccc

SEQ ID NO: 1969871 - DNA, 15 bp, Homo sapiens
accagtctctaccca

SEQ ID NO: 1969872 - DNA, 15 bp, Homo sapiens
ccagtctctacccac

SEQ ID NO: 1969873 - DNA, 15 bp, Homo sapiens
cagtctctacccact

SEQ ID NO: 1969874 - DNA, 15 bp, Homo sapiens
agtctctacccacta

SEQ ID NO: 1969875 - DNA, 15 bp, Homo sapiens
gtctctacccactat

SEQ ID NO: 1969876 - DNA, 15 bp, Homo sapiens
tctctacccactatg

SEQ ID NO: 1969877 - DNA, 15 bp, Homo sapiens
ctctacccactatgg

SEQ ID NO: 1969878 - DNA, 15 bp, Homo sapiens
tctacccactatggg

SEQ ID NO: 1969879 - DNA, 15 bp, Homo sapiens
ctacccactatgggt

SEQ ID NO: 1969880 - DNA, 15 bp, Homo sapiens
tacccactatgggtc

SEQ ID NO: 1969881 - DNA, 15 bp, Homo sapiens
acccactatgggtct

SEQ ID NO: 1969882 - DNA, 15 bp, Homo sapiens
cccactatgggtctc

SEQ ID NO: 1969883 - DNA, 15 bp, Homo sapiens
ccactatgggtctca

SEQ ID NO: 1969884 - DNA, 15 bp, Homo sapiens
cactatgggtctcag

SEQ ID NO: 1969885 - DNA, 15 bp, Homo sapiens
actatgggtctcagt

SEQ ID NO: 1969886 - DNA, 15 bp, Homo sapiens
ctatgggtctcagtc

SEQ ID NO: 1969887 - DNA, 15 bp, Homo sapiens
tatgggtctcagtct

SEQ ID NO: 1969888 - DNA, 15 bp, Homo sapiens
atgggtctcagtctc

SEQ ID NO: 1969889 - DNA, 15 bp, Homo sapiens
tgggtctcagtctcc

SEQ ID NO: 1969890 - DNA, 15 bp, Homo sapiens
gggtctcagtctccc

SEQ ID NO: 1969891 - DNA, 15 bp, Homo sapiens
ggtctcagtctccca

SEQ ID NO: 1969892 - DNA, 15 bp, Homo sapiens
gtctcagtctcccaa

SEQ ID NO: 1969893 - DNA, 15 bp, Homo sapiens
tctcagtctcccaac

SEQ ID NO: 1969894 - DNA, 15 bp, Homo sapiens
ctcagtctcccaacc

SEQ ID NO: 1969895 - DNA, 15 bp, Homo sapiens
tcagtctcccaacct

SEQ ID NO: 1969896 - DNA, 15 bp, Homo sapiens
cagtctcccaacctg

SEQ ID NO: 1969897 - DNA, 15 bp, Homo sapiens
agtctcccaacctgg

SEQ ID NO: 1969898 - DNA, 15 bp, Homo sapiens
gtctcccaacctggg

SEQ ID NO: 1969899 - DNA, 15 bp, Homo sapiens
tctcccaacctgggg

SEQ ID NO: 1969900 - DNA, 15 bp, Homo sapiens
ctcccaacctggggt

SEQ ID NO: 1969901 - DNA, 15 bp, Homo sapiens
tcccaacctggggtg

SEQ ID NO: 1969902 - DNA, 15 bp, Homo sapiens
cccaacctggggtgc

SEQ ID NO: 1969903 - DNA, 15 bp, Homo sapiens
ccaacctggggtgcc

SEQ ID NO: 1969904 - DNA, 15 bp, Homo sapiens
caacctggggtgccg

SEQ ID NO: 1969905 - DNA, 15 bp, Homo sapiens
aacctggggtgccgg

SEQ ID NO: 1969906 - DNA, 15 bp, Homo sapiens
tggggtgccgggggt

SEQ ID NO: 1969907 - DNA, 15 bp, Homo sapiens
ggggtgccgggggtg

SEQ ID NO: 1969908 - DNA, 15 bp, Homo sapiens
gggtgccgggggtgg

SEQ ID NO: 1969909 - DNA, 15 bp, Homo sapiens
ggtgccgggggtggt

SEQ ID NO: 1969910 - DNA, 15 bp, Homo sapiens
gtgccgggggtggtg

SEQ ID NO: 1969911 - DNA, 15 bp, Homo sapiens
tgccgggggtggtgg

SEQ ID NO: 1969912 - DNA, 15 bp, Homo sapiens
gccgggggtggtggt

SEQ ID NO: 1969913 - DNA, 15 bp, Homo sapiens
ccgggggtggtggtg

SEQ ID NO: 1969914 - DNA, 15 bp, Homo sapiens
cgggggtggtggtgg

SEQ ID NO: 1969915 - DNA, 15 bp, Homo sapiens
gggggtggtggtggc

SEQ ID NO: 1969916 - DNA, 15 bp, Homo sapiens
ggggtggtggtggca

SEQ ID NO: 1969917 - DNA, 15 bp, Homo sapiens
gggtggtggtggcat

SEQ ID NO: 1969918 - DNA, 15 bp, Homo sapiens
ggtggtggtggcatt

SEQ ID NO: 1969919 - DNA, 15 bp, Homo sapiens
gtggtggtggcattg

SEQ ID NO: 1969920 - DNA, 15 bp, Homo sapiens
tggtggtggcattgg

SEQ ID NO: 1969921 - DNA, 15 bp, Homo sapiens
ggtggtggcattggg

SEQ ID NO: 1969922 - DNA, 15 bp, Homo sapiens
gtggtggcattgggt

SEQ ID NO: 1969923 - DNA, 15 bp, Homo sapiens
tggtggcattgggtt

SEQ ID NO: 1969924 - DNA, 15 bp, Homo sapiens
ggtggcattgggttg

SEQ ID NO: 1969925 - DNA, 15 bp, Homo sapiens
gtggcattgggttgg

SEQ ID NO: 1969926 - DNA, 15 bp, Homo sapiens
tggcattgggttggt

SEQ ID NO: 1969927 - DNA, 15 bp, Homo sapiens
ggcattgggttggtt

SEQ ID NO: 1969928 - DNA, 15 bp, Homo sapiens
gcattgggttggttc

SEQ ID NO: 1969929 - DNA, 15 bp, Homo sapiens
cattgggttggttcc

SEQ ID NO: 1969930 - DNA, 15 bp, Homo sapiens
attgggttggttcct

SEQ ID NO: 1969931 - DNA, 15 bp, Homo sapiens
ttgggttggttcctc

SEQ ID NO: 1969932 - DNA, 15 bp, Homo sapiens
tgggttggttcctcc

SEQ ID NO: 1969933 - DNA, 15 bp, Homo sapiens
gggttggttcctcct

SEQ ID NO: 1969934 - DNA, 15 bp, Homo sapiens
ggttggttcctcctg

SEQ ID NO: 1969935 - DNA, 15 bp, Homo sapiens
gttggttcctcctgg

SEQ ID NO: 1969936 - DNA, 15 bp, Homo sapiens
ttggttcctcctggc

SEQ ID NO: 1969937 - DNA, 15 bp, Homo sapiens
tggttcctcctggct

SEQ ID NO: 1969938 - DNA, 15 bp, Homo sapiens
ggttcctcctggctg

SEQ ID NO: 1969939 - DNA, 15 bp, Homo sapiens
gttcctcctggctgt

SEQ ID NO: 1969940 - DNA, 15 bp, Homo sapiens
ttcctcctggctgtg

SEQ ID NO: 1969941 - DNA, 15 bp, Homo sapiens
tcctcctggctgtga

SEQ ID NO: 1969942 - DNA, 15 bp, Homo sapiens
cctcctggctgtgac

SEQ ID NO: 1969943 - DNA, 15 bp, Homo sapiens
ctcctggctgtgaca

SEQ ID NO: 1969944 - DNA, 15 bp, Homo sapiens
tcctggctgtgacat

SEQ ID NO: 1969945 - DNA, 15 bp, Homo sapiens
cctggctgtgacatt

SEQ ID NO: 1969946 - DNA, 15 bp, Homo sapiens
ctggctgtgacatta

SEQ ID NO: 1969947 - DNA, 15 bp, Homo sapiens
tggctgtgacattat

SEQ ID NO: 1969948 - DNA, 15 bp, Homo sapiens
ggctgtgacattatc

SEQ ID NO: 1969949 - DNA, 15 bp, Homo sapiens
gctgtgacattatct

SEQ ID NO: 1969950 - DNA, 15 bp, Homo sapiens
ctgtgacattatctg

SEQ ID NO: 1969951 - DNA, 15 bp, Homo sapiens
tgtgacattatctgc

SEQ ID NO: 1969952 - DNA, 15 bp, Homo sapiens
gtgacattatctgct

SEQ ID NO: 1969953 - DNA, 15 bp, Homo sapiens
tgacattatctgctt

SEQ ID NO: 1969954 - DNA, 15 bp, Homo sapiens
gacattatctgcttc

SEQ ID NO: 1969955 - DNA, 15 bp, Homo sapiens
acattatctgcttca

SEQ ID NO: 1969956 - DNA, 15 bp, Homo sapiens
cattatctgcttcat

SEQ ID NO: 1969957 - DNA, 15 bp, Homo sapiens
attatctgcttcatg

SEQ ID NO: 1969958 - DNA, 15 bp, Homo sapiens
ttatctgcttcatga

SEQ ID NO: 1969959 - DNA, 15 bp, Homo sapiens
tatctgcttcatgag

SEQ ID NO: 1969960 - DNA, 15 bp, Homo sapiens
atctgcttcatgagc

SEQ ID NO: 1969961 - DNA, 15 bp, Homo sapiens
tctgcttcatgagcc

SEQ ID NO: 1969962 - DNA, 15 bp, Homo sapiens
ctgcttcatgagcct

SEQ ID NO: 1969963 - DNA, 15 bp, Homo sapiens
tgcttcatgagcctg

SEQ ID NO: 1969964 - DNA, 15 bp, Homo sapiens
gcttcatgagcctgt

SEQ ID NO: 1969965 - DNA, 15 bp, Homo sapiens
cttcatgagcctgta

SEQ ID NO: 1969966 - DNA, 15 bp, Homo sapiens
ttcatgagcctgtac

SEQ ID NO: 1969967 - DNA, 15 bp, Homo sapiens
tcatgagcctgtacg

SEQ ID NO: 1969968 - DNA, 15 bp, Homo sapiens
catgagcctgtacgg

SEQ ID NO: 1969969 - DNA, 15 bp, Homo sapiens
atgagcctgtacggt

SEQ ID NO: 1969970 - DNA, 15 bp, Homo sapiens
tgagcctgtacggtg

SEQ ID NO: 1969971 - DNA, 15 bp, Homo sapiens
gagcctgtacggtgt

SEQ ID NO: 1969972 - DNA, 15 bp, Homo sapiens
agcctgtacggtgtg

SEQ ID NO: 1969973 - DNA, 15 bp, Homo sapiens
gcctgtacggtgtgg

SEQ ID NO: 1969974 - DNA, 15 bp, Homo sapiens
cctgtacggtgtggc

SEQ ID NO: 1969975 - DNA, 15 bp, Homo sapiens
ctgtacggtgtggcc

SEQ ID NO: 1969976 - DNA, 15 bp, Homo sapiens
tgtacggtgtggccc

SEQ ID NO: 1969977 - DNA, 15 bp, Homo sapiens
gtacggtgtggcccc

SEQ ID NO: 1969978 - DNA, 15 bp, Homo sapiens
tacggtgtggccccc

SEQ ID NO: 1969979 - DNA, 15 bp, Homo sapiens
acggtgtggccccca

SEQ ID NO: 1969980 - DNA, 15 bp, Homo sapiens
cggtgtggcccccat

SEQ ID NO: 1969981 - DNA, 15 bp, Homo sapiens
ggtgtggcccccatg

SEQ ID NO: 1969982 - DNA, 15 bp, Homo sapiens
gtgtggcccccatgt

SEQ ID NO: 1969983 - DNA, 15 bp, Homo sapiens
tgtggcccccatgtt

SEQ ID NO: 1969984 - DNA, 15 bp, Homo sapiens
gtggcccccatgttg

SEQ ID NO: 1969985 - DNA, 15 bp, Homo sapiens
tggcccccatgttga

SEQ ID NO: 1969986 - DNA, 15 bp, Homo sapiens
ggcccccatgttgag

SEQ ID NO: 1969987 - DNA, 15 bp, Homo sapiens
gcccccatgttgagg

SEQ ID NO: 1969988 - DNA, 15 bp, Homo sapiens
cccccatgttgaggg

SEQ ID NO: 1969989 - DNA, 15 bp, Homo sapiens
ccccatgttgagggt

SEQ ID NO: 1969990 - DNA, 15 bp, Homo sapiens
cccatgttgagggtg

SEQ ID NO: 1969991 - DNA, 15 bp, Homo sapiens
ccatgttgagggtga

SEQ ID NO: 1969992 - DNA, 15 bp, Homo sapiens
catgttgagggtgac

SEQ ID NO: 1969993 - DNA, 15 bp, Homo sapiens
atgttgagggtgaca

SEQ ID NO: 1969994 - DNA, 15 bp, Homo sapiens
tgttgagggtgacac

SEQ ID NO: 1969995 - DNA, 15 bp, Homo sapiens
gttgagggtgacaca

SEQ ID NO: 1969996 - DNA, 15 bp, Homo sapiens
ttgagggtgacacag

SEQ ID NO: 1969997 - DNA, 15 bp, Homo sapiens
tgagggtgacacagc

SEQ ID NO: 1969998 - DNA, 15 bp, Homo sapiens
gagggtgacacagcc

SEQ ID NO: 1969999 - DNA, 15 bp, Homo sapiens
agggtgacacagccc

SEQ ID NO: 1970000 - DNA, 15 bp, Homo sapiens
gggtgacacagcccc

SEQ ID NO: 1970001 - DNA, 15 bp, Homo sapiens
ggtgacacagcccct

SEQ ID NO: 1970002 - DNA, 15 bp, Homo sapiens
gtgacacagcccctc

SEQ ID NO: 1970003 - DNA, 15 bp, Homo sapiens
tgacacagcccctct

SEQ ID NO: 1970004 - DNA, 15 bp, Homo sapiens
gacacagcccctctt

SEQ ID NO: 1970005 - DNA, 15 bp, Homo sapiens
acacagcccctcttc

SEQ ID NO: 1970006 - DNA, 15 bp, Homo sapiens
cacagcccctcttct

SEQ ID NO: 1970007 - DNA, 15 bp, Homo sapiens
acagcccctcttctc

SEQ ID NO: 1970008 - DNA, 15 bp, Homo sapiens
cagcccctcttctct

SEQ ID NO: 1970009 - DNA, 15 bp, Homo sapiens
agcccctcttctctg

SEQ ID NO: 1970010 - DNA, 15 bp, Homo sapiens
gcccctcttctctga

SEQ ID NO: 1970011 - DNA, 15 bp, Homo sapiens
cccctcttctctgag

SEQ ID NO: 1970012 - DNA, 15 bp, Homo sapiens
ccctcttctctgaga

SEQ ID NO: 1970013 - DNA, 15 bp, Homo sapiens
cctcttctctgagag

SEQ ID NO: 1970014 - DNA, 15 bp, Homo sapiens
ctcttctctgagaga

SEQ ID NO: 1970015 - DNA, 15 bp, Homo sapiens
tcttctctgagagag

SEQ ID NO: 1970016 - DNA, 15 bp, Homo sapiens
cttctctgagagagg

SEQ ID NO: 1970017 - DNA, 15 bp, Homo sapiens
ttctctgagagagga

SEQ ID NO: 1970018 - DNA, 15 bp, Homo sapiens
tctctgagagaggac

SEQ ID NO: 1970019 - DNA, 15 bp, Homo sapiens
ctctgagagaggaca

SEQ ID NO: 1970020 - DNA, 15 bp, Homo sapiens
tctgagagaggacag

SEQ ID NO: 1970021 - DNA, 15 bp, Homo sapiens
ctgagagaggacagt

SEQ ID NO: 1970022 - DNA, 15 bp, Homo sapiens
tgagagaggacagtc

SEQ ID NO: 1970023 - DNA, 15 bp, Homo sapiens
gagagaggacagtca

SEQ ID NO: 1970024 - DNA, 15 bp, Homo sapiens
agagaggacagtcag

SEQ ID NO: 1970025 - DNA, 15 bp, Homo sapiens
gagaggacagtcagg

SEQ ID NO: 1970026 - DNA, 15 bp, Homo sapiens
agaggacagtcagga

SEQ ID NO: 1970027 - DNA, 15 bp, Homo sapiens
gaggacagtcaggag

SEQ ID NO: 1970028 - DNA, 15 bp, Homo sapiens
aggacagtcaggagc

SEQ ID NO: 1970029 - DNA, 15 bp, Homo sapiens
ggacagtcaggagcc

SEQ ID NO: 1970030 - DNA, 15 bp, Homo sapiens
gacagtcaggagccc

SEQ ID NO: 1970031 - DNA, 15 bp, Homo sapiens
acagtcaggagcccc

SEQ ID NO: 1970032 - DNA, 15 bp, Homo sapiens
cagtcaggagcccct

SEQ ID NO: 1970033 - DNA, 15 bp, Homo sapiens
agtcaggagcccctg

SEQ ID NO: 1970034 - DNA, 15 bp, Homo sapiens
gtcaggagcccctga

SEQ ID NO: 1970035 - DNA, 15 bp, Homo sapiens
tcaggagcccctgaa

SEQ ID NO: 1970036 - DNA, 15 bp, Homo sapiens
caggagcccctgaac

SEQ ID NO: 1970037 - DNA, 15 bp, Homo sapiens
aggagcccctgaacc

SEQ ID NO: 1970038 - DNA, 15 bp, Homo sapiens
ggagcccctgaaccc

SEQ ID NO: 1970039 - DNA, 15 bp, Homo sapiens
gagcccctgaaccca

SEQ ID NO: 1970040 - DNA, 15 bp, Homo sapiens
agcccctgaacccag

SEQ ID NO: 1970041 - DNA, 15 bp, Homo sapiens
gcccctgaacccagg

SEQ ID NO: 1970042 - DNA, 15 bp, Homo sapiens
cccctgaacccaggc

SEQ ID NO: 1970043 - DNA, 15 bp, Homo sapiens
ccctgaacccaggcc

SEQ ID NO: 1970044 - DNA, 15 bp, Homo sapiens
cctgaacccaggcca

SEQ ID NO: 1970045 - DNA, 15 bp, Homo sapiens
ctgaacccaggccaa

SEQ ID NO: 1970046 - DNA, 15 bp, Homo sapiens
tgaacccaggccaag

SEQ ID NO: 1970047 - DNA, 15 bp, Homo sapiens
gaacccaggccaagg

SEQ ID NO: 1970048 - DNA, 15 bp, Homo sapiens
aacccaggccaaggg

SEQ ID NO: 1970049 - DNA, 15 bp, Homo sapiens
acccaggccaagggc

SEQ ID NO: 1970050 - DNA, 15 bp, Homo sapiens
cccaggccaagggca

SEQ ID NO: 1970051 - DNA, 15 bp, Homo sapiens
ccaggccaagggcag

SEQ ID NO: 1970052 - DNA, 15 bp, Homo sapiens
caggccaagggcagg

SEQ ID NO: 1970053 - DNA, 15 bp, Homo sapiens
aggccaagggcaggg

SEQ ID NO: 1970054 - DNA, 15 bp, Homo sapiens
ggccaagggcaggga

SEQ ID NO: 1970055 - DNA, 15 bp, Homo sapiens
gccaagggcagggaa

SEQ ID NO: 1970056 - DNA, 15 bp, Homo sapiens
ccaagggcagggaaa

SEQ ID NO: 1970057 - DNA, 15 bp, Homo sapiens
caagggcagggaaaa

SEQ ID NO: 1970058 - DNA, 15 bp, Homo sapiens
aagggcagggaaaat

SEQ ID NO: 1970059 - DNA, 15 bp, Homo sapiens
agggcagggaaaatc

SEQ ID NO: 1970060 - DNA, 15 bp, Homo sapiens
gggcagggaaaatca

SEQ ID NO: 1970061 - DNA, 15 bp, Homo sapiens
ggcagggaaaatcac

SEQ ID NO: 1970062 - DNA, 15 bp, Homo sapiens
gcagggaaaatcaca

SEQ ID NO: 1970063 - DNA, 15 bp, Homo sapiens
cagggaaaatcacag

SEQ ID NO: 1970064 - DNA, 15 bp, Homo sapiens
agggaaaatcacagc

SEQ ID NO: 1970065 - DNA, 15 bp, Homo sapiens
gggaaaatcacagcc

SEQ ID NO: 1970066 - DNA, 15 bp, Homo sapiens
ggaaaatcacagccc

SEQ ID NO: 1970067 - DNA, 15 bp, Homo sapiens
gaaaatcacagccca

SEQ ID NO: 1970068 - DNA, 15 bp, Homo sapiens
aaaatcacagcccag

SEQ ID NO: 1970069 - DNA, 15 bp, Homo sapiens
aaatcacagcccagg

SEQ ID NO: 1970070 - DNA, 15 bp, Homo sapiens
aatcacagcccaggg

SEQ ID NO: 1970071 - DNA, 15 bp, Homo sapiens
atcacagcccaggga

SEQ ID NO: 1970072 - DNA, 15 bp, Homo sapiens
tcacagcccagggac

SEQ ID NO: 1970073 - DNA, 15 bp, Homo sapiens
cacagcccagggacc

SEQ ID NO: 1970074 - DNA, 15 bp, Homo sapiens
acagcccagggacct

SEQ ID NO: 1970075 - DNA, 15 bp, Homo sapiens
cagcccagggacctg

SEQ ID NO: 1970076 - DNA, 15 bp, Homo sapiens
agcccagggacctgg

SEQ ID NO: 1970077 - DNA, 15 bp, Homo sapiens
gcccagggacctggg

SEQ ID NO: 1970078 - DNA, 15 bp, Homo sapiens
cccagggacctgggc

SEQ ID NO: 1970079 - DNA, 15 bp, Homo sapiens
ccagggacctgggcc

SEQ ID NO: 1970080 - DNA, 15 bp, Homo sapiens
cagggacctgggcct

SEQ ID NO: 1970081 - DNA, 15 bp, Homo sapiens
agggacctgggcctg

SEQ ID NO: 1970082 - DNA, 15 bp, Homo sapiens
gggacctgggcctgg

SEQ ID NO: 1970083 - DNA, 15 bp, Homo sapiens
ggacctgggcctggg

SEQ ID NO: 1970084 - DNA, 15 bp, Homo sapiens
gacctgggcctgggc

SEQ ID NO: 1970085 - DNA, 15 bp, Homo sapiens
acctgggcctgggct

SEQ ID NO: 1970086 - DNA, 15 bp, Homo sapiens
cctgggcctgggctg

SEQ ID NO: 1970087 - DNA, 15 bp, Homo sapiens
ctgggcctgggctgt

SEQ ID NO: 1970088 - DNA, 15 bp, Homo sapiens
tgggcctgggctgtg

SEQ ID NO: 1970089 - DNA, 15 bp, Homo sapiens
gggcctgggctgtgc

SEQ ID NO: 1970090 - DNA, 15 bp, Homo sapiens
ggcctgggctgtgcc

SEQ ID NO: 1970091 - DNA, 15 bp, Homo sapiens
gcctgggctgtgccc

SEQ ID NO: 1970092 - DNA, 15 bp, Homo sapiens
ctgggctgtgccctt

SEQ ID NO: 1970093 - DNA, 15 bp, Homo sapiens
tgggctgtgccctta

SEQ ID NO: 1970094 - DNA, 15 bp, Homo sapiens
gggctgtgcccttat

SEQ ID NO: 1970095 - DNA, 15 bp, Homo sapiens
ggctgtgcccttatg

SEQ ID NO: 1970096 - DNA, 15 bp, Homo sapiens
gctgtgcccttatga

SEQ ID NO: 1970097 - DNA, 15 bp, Homo sapiens
ctgtgcccttatgaa

SEQ ID NO: 1970098 - DNA, 15 bp, Homo sapiens
tgtgcccttatgaag

SEQ ID NO: 1970099 - DNA, 15 bp, Homo sapiens
gtgcccttatgaagg

SEQ ID NO: 1970100 - DNA, 15 bp, Homo sapiens
tgcccttatgaaggt

SEQ ID NO: 1970101 - DNA, 15 bp, Homo sapiens
gcccttatgaaggtt

SEQ ID NO: 1970102 - DNA, 15 bp, Homo sapiens
cccttatgaaggttg

SEQ ID NO: 1970103 - DNA, 15 bp, Homo sapiens
ccttatgaaggttgt

SEQ ID NO: 1970104 - DNA, 15 bp, Homo sapiens
cttatgaaggttgtc

SEQ ID NO: 1970105 - DNA, 15 bp, Homo sapiens
ttatgaaggttgtcc

SEQ ID NO: 1970106 - DNA, 15 bp, Homo sapiens
tatgaaggttgtcca

SEQ ID NO: 1970107 - DNA, 15 bp, Homo sapiens
atgaaggttgtccag

SEQ ID NO: 1970108 - DNA, 15 bp, Homo sapiens
tgaaggttgtccagg

SEQ ID NO: 1970109 - DNA, 15 bp, Homo sapiens
gaaggttgtccaggg

SEQ ID NO: 1970110 - DNA, 15 bp, Homo sapiens
aaggttgtccagggc

SEQ ID NO: 1970111 - DNA, 15 bp, Homo sapiens
aggttgtccagggca

SEQ ID NO: 1970112 - DNA, 15 bp, Homo sapiens
ggttgtccagggcag

SEQ ID NO: 1970113 - DNA, 15 bp, Homo sapiens
gttgtccagggcaga

SEQ ID NO: 1970114 - DNA, 15 bp, Homo sapiens
ttgtccagggcagag

SEQ ID NO: 1970115 - DNA, 15 bp, Homo sapiens
tgtccagggcagaga

SEQ ID NO: 1970116 - DNA, 15 bp, Homo sapiens
gtccagggcagagat

SEQ ID NO: 1970117 - DNA, 15 bp, Homo sapiens
tccagggcagagatc

SEQ ID NO: 1970118 - DNA, 15 bp, Homo sapiens
ccagggcagagatcc

SEQ ID NO: 1970119 - DNA, 15 bp, Homo sapiens
cagggcagagatcca

SEQ ID NO: 1970120 - DNA, 15 bp, Homo sapiens
agggcagagatccag

SEQ ID NO: 1970121 - DNA, 15 bp, Homo sapiens
gggcagagatccagg

SEQ ID NO: 1970122 - DNA, 15 bp, Homo sapiens
ggcagagatccaggt

SEQ ID NO: 1970123 - DNA, 15 bp, Homo sapiens
gcagagatccaggtc

SEQ ID NO: 1970124 - DNA, 15 bp, Homo sapiens
cagagatccaggtcc

SEQ ID NO: 1970125 - DNA, 15 bp, Homo sapiens
agagatccaggtccc

SEQ ID NO: 1970126 - DNA, 15 bp, Homo sapiens
gagatccaggtcccc

SEQ ID NO: 1970127 - DNA, 15 bp, Homo sapiens
agatccaggtcccca

SEQ ID NO: 1970128 - DNA, 15 bp, Homo sapiens
gatccaggtccccat

SEQ ID NO: 1970129 - DNA, 15 bp, Homo sapiens
atccaggtccccatc

SEQ ID NO: 1970130 - DNA, 15 bp, Homo sapiens
tccaggtccccatcc

SEQ ID NO: 1970131 - DNA, 15 bp, Homo sapiens
ccaggtccccatccc

SEQ ID NO: 1970132 - DNA, 15 bp, Homo sapiens
caggtccccatcccc

SEQ ID NO: 1970133 - DNA, 15 bp, Homo sapiens
aggtccccatccccc

SEQ ID NO: 1970134 - DNA, 15 bp, Homo sapiens
ggtccccatccccca

SEQ ID NO: 1970135 - DNA, 15 bp, Homo sapiens
gtccccatcccccag

SEQ ID NO: 1970136 - DNA, 15 bp, Homo sapiens
tccccatcccccagc

SEQ ID NO: 1970137 - DNA, 15 bp, Homo sapiens
ccccatcccccagcg

SEQ ID NO: 1970138 - DNA, 15 bp, Homo sapiens
cccatcccccagcgc

SEQ ID NO: 1970139 - DNA, 15 bp, Homo sapiens
ccatcccccagcgcc

SEQ ID NO: 1970140 - DNA, 15 bp, Homo sapiens
catcccccagcgccc

SEQ ID NO: 1970141 - DNA, 15 bp, Homo sapiens
atcccccagcgccct

SEQ ID NO: 1970142 - DNA, 15 bp, Homo sapiens
tcccccagcgccctc

SEQ ID NO: 1970143 - DNA, 15 bp, Homo sapiens
cccccagcgccctcc

SEQ ID NO: 1970144 - DNA, 15 bp, Homo sapiens
ccccagcgccctccc

SEQ ID NO: 1970145 - DNA, 15 bp, Homo sapiens
cccagcgccctccca

SEQ ID NO: 1970146 - DNA, 15 bp, Homo sapiens
ccagcgccctcccag

SEQ ID NO: 1970147 - DNA, 15 bp, Homo sapiens
cagcgccctcccagg

SEQ ID NO: 1970148 - DNA, 15 bp, Homo sapiens
agcgccctcccaggc

SEQ ID NO: 1970149 - DNA, 15 bp, Homo sapiens
gcgccctcccaggcc

SEQ ID NO: 1970150 - DNA, 15 bp, Homo sapiens
cgccctcccaggcca

SEQ ID NO: 1970151 - DNA, 15 bp, Homo sapiens
gccctcccaggccag

SEQ ID NO: 1970152 - DNA, 15 bp, Homo sapiens
ccctcccaggccagc

SEQ ID NO: 1970153 - DNA, 15 bp, Homo sapiens
cctcccaggccagct

SEQ ID NO: 1970154 - DNA, 15 bp, Homo sapiens
ctcccaggccagctt

SEQ ID NO: 1970155 - DNA, 15 bp, Homo sapiens
tcccaggccagcttt

SEQ ID NO: 1970156 - DNA, 15 bp, Homo sapiens
cccaggccagcttta

SEQ ID NO: 1970157 - DNA, 15 bp, Homo sapiens
ccaggccagctttat

SEQ ID NO: 1970158 - DNA, 15 bp, Homo sapiens
caggccagctttatc

SEQ ID NO: 1970159 - DNA, 15 bp, Homo sapiens
aggccagctttatct

SEQ ID NO: 1970160 - DNA, 15 bp, Homo sapiens
ggccagctttatctc

SEQ ID NO: 1970161 - DNA, 15 bp, Homo sapiens
gccagctttatctca

SEQ ID NO: 1970162 - DNA, 15 bp, Homo sapiens
ccagctttatctcag

SEQ ID NO: 1970163 - DNA, 15 bp, Homo sapiens
cagctttatctcagt

SEQ ID NO: 1970164 - DNA, 15 bp, Homo sapiens
agctttatctcagtt

SEQ ID NO: 1970165 - DNA, 15 bp, Homo sapiens
gctttatctcagttg

SEQ ID NO: 1970166 - DNA, 15 bp, Homo sapiens
ctttatctcagttgc

SEQ ID NO: 1970167 - DNA, 15 bp, Homo sapiens
tttatctcagttgct

SEQ ID NO: 1970168 - DNA, 15 bp, Homo sapiens
ttatctcagttgctg

SEQ ID NO: 1970169 - DNA, 15 bp, Homo sapiens
tatctcagttgctga

SEQ ID NO: 1970170 - DNA, 15 bp, Homo sapiens
atctcagttgctgat

SEQ ID NO: 1970171 - DNA, 15 bp, Homo sapiens
tctcagttgctgata

SEQ ID NO: 1970172 - DNA, 15 bp, Homo sapiens
ctcagttgctgatac

SEQ ID NO: 1970173 - DNA, 15 bp, Homo sapiens
tcagttgctgatacc

SEQ ID NO: 1970174 - DNA, 15 bp, Homo sapiens
cagttgctgataccc

SEQ ID NO: 1970175 - DNA, 15 bp, Homo sapiens
agttgctgataccca

SEQ ID NO: 1970176 - DNA, 15 bp, Homo sapiens
gttgctgatacccag

SEQ ID NO: 1970177 - DNA, 15 bp, Homo sapiens
ttgctgatacccagc

SEQ ID NO: 1970178 - DNA, 15 bp, Homo sapiens
tgctgatacccagcc

SEQ ID NO: 1970179 - DNA, 15 bp, Homo sapiens
gctgatacccagcct

SEQ ID NO: 1970180 - DNA, 15 bp, Homo sapiens
ctgatacccagcctg

SEQ ID NO: 1970181 - DNA, 15 bp, Homo sapiens
tgatacccagcctga

SEQ ID NO: 1970182 - DNA, 15 bp, Homo sapiens
gatacccagcctgag

SEQ ID NO: 1970183 - DNA, 15 bp, Homo sapiens
atacccagcctgagg

SEQ ID NO: 1970184 - DNA, 15 bp, Homo sapiens
tacccagcctgaggt

SEQ ID NO: 1970185 - DNA, 15 bp, Homo sapiens
acccagcctgaggtc

SEQ ID NO: 1970186 - DNA, 15 bp, Homo sapiens
cccagcctgaggtcc

SEQ ID NO: 1970187 - DNA, 15 bp, Homo sapiens
ccagcctgaggtcct

SEQ ID NO: 1970188 - DNA, 15 bp, Homo sapiens
cagcctgaggtcctt

SEQ ID NO: 1970189 - DNA, 15 bp, Homo sapiens
agcctgaggtccttg

SEQ ID NO: 1970190 - DNA, 15 bp, Homo sapiens
gcctgaggtccttgg

SEQ ID NO: 1970191 - DNA, 15 bp, Homo sapiens
cctgaggtccttgga

SEQ ID NO: 1970192 - DNA, 15 bp, Homo sapiens
ctgaggtccttggag

SEQ ID NO: 1970193 - DNA, 15 bp, Homo sapiens
tgaggtccttggagg

SEQ ID NO: 1970194 - DNA, 15 bp, Homo sapiens
gaggtccttggagga

SEQ ID NO: 1970195 - DNA, 15 bp, Homo sapiens
aggtccttggaggac

SEQ ID NO: 1970196 - DNA, 15 bp, Homo sapiens
ggtccttggaggaca

SEQ ID NO: 1970197 - DNA, 15 bp, Homo sapiens
gtccttggaggacaa

SEQ ID NO: 1970198 - DNA, 15 bp, Homo sapiens
tccttggaggacaaa

SEQ ID NO: 1970199 - DNA, 15 bp, Homo sapiens
ccttggaggacaaat

SEQ ID NO: 1970200 - DNA, 15 bp, Homo sapiens
cttggaggacaaatt

SEQ ID NO: 1970201 - DNA, 15 bp, Homo sapiens
ttggaggacaaattt

SEQ ID NO: 1970202 - DNA, 15 bp, Homo sapiens
tggaggacaaatttg

SEQ ID NO: 1970203 - DNA, 15 bp, Homo sapiens
ggaggacaaatttgg

SEQ ID NO: 1970204 - DNA, 15 bp, Homo sapiens
gaggacaaatttggc

SEQ ID NO: 1970205 - DNA, 15 bp, Homo sapiens
aggacaaatttggcc

SEQ ID NO: 1970206 - DNA, 15 bp, Homo sapiens
ggacaaatttggcca

SEQ ID NO: 1970207 - DNA, 15 bp, Homo sapiens
gacaaatttggccac

SEQ ID NO: 1970208 - DNA, 15 bp, Homo sapiens
acaaatttggccaca

SEQ ID NO: 1970209 - DNA, 15 bp, Homo sapiens
caaatttggccacat

SEQ ID NO: 1970210 - DNA, 15 bp, Homo sapiens
aaatttggccacatt

SEQ ID NO: 1970211 - DNA, 15 bp, Homo sapiens
aatttggccacattc

SEQ ID NO: 1970212 - DNA, 15 bp, Homo sapiens
atttggccacattcc

SEQ ID NO: 1970213 - DNA, 15 bp, Homo sapiens
tttggccacattcca

SEQ ID NO: 1970214 - DNA, 15 bp, Homo sapiens
ttggccacattccaa

SEQ ID NO: 1970215 - DNA, 15 bp, Homo sapiens
tggccacattccaag

SEQ ID NO: 1970216 - DNA, 15 bp, Homo sapiens
ggccacattccaagt

SEQ ID NO: 1970217 - DNA, 15 bp, Homo sapiens
gccacattccaagta

SEQ ID NO: 1970218 - DNA, 15 bp, Homo sapiens
ccacattccaagtag

SEQ ID NO: 1970219 - DNA, 15 bp, Homo sapiens
cacattccaagtagg

SEQ ID NO: 1970220 - DNA, 15 bp, Homo sapiens
acattccaagtaggc

SEQ ID NO: 1970221 - DNA, 15 bp, Homo sapiens
cattccaagtaggca

SEQ ID NO: 1970222 - DNA, 15 bp, Homo sapiens
attccaagtaggcag

SEQ ID NO: 1970223 - DNA, 15 bp, Homo sapiens
ttccaagtaggcaga

SEQ ID NO: 1970224 - DNA, 15 bp, Homo sapiens
tccaagtaggcagac

SEQ ID NO: 1970225 - DNA, 15 bp, Homo sapiens
ccaagtaggcagact

SEQ ID NO: 1970226 - DNA, 15 bp, Homo sapiens
caagtaggcagactt

SEQ ID NO: 1970227 - DNA, 15 bp, Homo sapiens
aagtaggcagacttc

SEQ ID NO: 1970228 - DNA, 15 bp, Homo sapiens
agtaggcagacttcc

SEQ ID NO: 1970229 - DNA, 15 bp, Homo sapiens
gtaggcagacttccc

SEQ ID NO: 1970230 - DNA, 15 bp, Homo sapiens
taggcagacttcccc

SEQ ID NO: 1970231 - DNA, 15 bp, Homo sapiens
aggcagacttccccg

SEQ ID NO: 1970232 - DNA, 15 bp, Homo sapiens
ggcagacttccccgc

SEQ ID NO: 1970233 - DNA, 15 bp, Homo sapiens
gcagacttccccgcc

SEQ ID NO: 1970234 - DNA, 15 bp, Homo sapiens
cagacttccccgccc

SEQ ID NO: 1970235 - DNA, 15 bp, Homo sapiens
agacttccccgcccc

SEQ ID NO: 1970236 - DNA, 15 bp, Homo sapiens
gacttccccgccccc

SEQ ID NO: 1970237 - DNA, 15 bp, Homo sapiens
acttccccgccccct

SEQ ID NO: 1970238 - DNA, 15 bp, Homo sapiens
cttccccgccccctg

SEQ ID NO: 1970239 - DNA, 15 bp, Homo sapiens
ttccccgccccctgc

SEQ ID NO: 1970240 - DNA, 15 bp, Homo sapiens
tccccgccccctgcc

SEQ ID NO: 1970241 - DNA, 15 bp, Homo sapiens
ccccgccccctgcca

SEQ ID NO: 1970242 - DNA, 15 bp, Homo sapiens
cccgccccctgccaa

SEQ ID NO: 1970243 - DNA, 15 bp, Homo sapiens
ccgccccctgccaag

SEQ ID NO: 1970244 - DNA, 15 bp, Homo sapiens
cgccccctgccaagg

SEQ ID NO: 1970245 - DNA, 15 bp, Homo sapiens
gccccctgccaaggg

SEQ ID NO: 1970246 - DNA, 15 bp, Homo sapiens
ccccctgccaagggc

SEQ ID NO: 1970247 - DNA, 15 bp, Homo sapiens
cccctgccaagggcc

SEQ ID NO: 1970248 - DNA, 15 bp, Homo sapiens
ccctgccaagggccc

SEQ ID NO: 1970249 - DNA, 15 bp, Homo sapiens
cctgccaagggcccg

SEQ ID NO: 1970250 - DNA, 15 bp, Homo sapiens
ctgccaagggcccga

SEQ ID NO: 1970251 - DNA, 15 bp, Homo sapiens
tgccaagggcccgaa

SEQ ID NO: 1970252 - DNA, 15 bp, Homo sapiens
gccaagggcccgaaa

SEQ ID NO: 1970253 - DNA, 15 bp, Homo sapiens
ccaagggcccgaaat

SEQ ID NO: 1970254 - DNA, 15 bp, Homo sapiens
caagggcccgaaatg

SEQ ID NO: 1970255 - DNA, 15 bp, Homo sapiens
aagggcccgaaatgg

SEQ ID NO: 1970256 - DNA, 15 bp, Homo sapiens
agggcccgaaatggt

SEQ ID NO: 1970257 - DNA, 15 bp, Homo sapiens
gggcccgaaatggtt

SEQ ID NO: 1970258 - DNA, 15 bp, Homo sapiens
ggcccgaaatggttg

SEQ ID NO: 1970259 - DNA, 15 bp, Homo sapiens
gcccgaaatggttgg

SEQ ID NO: 1970260 - DNA, 15 bp, Homo sapiens
cccgaaatggttggg

SEQ ID NO: 1970261 - DNA, 15 bp, Homo sapiens
ccgaaatggttgggg

SEQ ID NO: 1970262 - DNA, 15 bp, Homo sapiens
cgaaatggttggggg

SEQ ID NO: 1970263 - DNA, 15 bp, Homo sapiens
gaaatggttggggga

SEQ ID NO: 1970264 - DNA, 15 bp, Homo sapiens
aaatggttgggggaa

SEQ ID NO: 1970265 - DNA, 15 bp, Homo sapiens
aatggttgggggaaa

SEQ ID NO: 1970266 - DNA, 15 bp, Homo sapiens
atggttgggggaaag

SEQ ID NO: 1970267 - DNA, 15 bp, Homo sapiens
tggttgggggaaagg

SEQ ID NO: 1970268 - DNA, 15 bp, Homo sapiens
ggttgggggaaaggg

SEQ ID NO: 1970269 - DNA, 15 bp, Homo sapiens
gttgggggaaaggga

SEQ ID NO: 1970270 - DNA, 15 bp, Homo sapiens
ttgggggaaagggag

SEQ ID NO: 1970271 - DNA, 15 bp, Homo sapiens
tgggggaaagggagc

SEQ ID NO: 1970272 - DNA, 15 bp, Homo sapiens
gggggaaagggagct

SEQ ID NO: 1970273 - DNA, 15 bp, Homo sapiens
ggggaaagggagctg

SEQ ID NO: 1970274 - DNA, 15 bp, Homo sapiens
gggaaagggagctgg

SEQ ID NO: 1970275 - DNA, 15 bp, Homo sapiens
ggaaagggagctggg

SEQ ID NO: 1970276 - DNA, 15 bp, Homo sapiens
gaaagggagctgggt

SEQ ID NO: 1970277 - DNA, 15 bp, Homo sapiens
aaagggagctgggtt

SEQ ID NO: 1970278 - DNA, 15 bp, Homo sapiens
aagggagctgggttc

SEQ ID NO: 1970279 - DNA, 15 bp, Homo sapiens
agggagctgggttca

SEQ ID NO: 1970280 - DNA, 15 bp, Homo sapiens
gggagctgggttcat

SEQ ID NO: 1970281 - DNA, 15 bp, Homo sapiens
ggagctgggttcatc

SEQ ID NO: 1970282 - DNA, 15 bp, Homo sapiens
gagctgggttcatca

SEQ ID NO: 1970283 - DNA, 15 bp, Homo sapiens
agctgggttcatcac

SEQ ID NO: 1970284 - DNA, 15 bp, Homo sapiens
gctgggttcatcacg

SEQ ID NO: 1970285 - DNA, 15 bp, Homo sapiens
ctgggttcatcacgg

SEQ ID NO: 1970286 - DNA, 15 bp, Homo sapiens
tgggttcatcacggg

SEQ ID NO: 1970287 - DNA, 15 bp, Homo sapiens
gggttcatcacgggt

SEQ ID NO: 1970288 - DNA, 15 bp, Homo sapiens
ggttcatcacgggtg

SEQ ID NO: 1970289 - DNA, 15 bp, Homo sapiens
gttcatcacgggtgt

SEQ ID NO: 1970290 - DNA, 15 bp, Homo sapiens
ttcatcacgggtgtc

SEQ ID NO: 1970291 - DNA, 15 bp, Homo sapiens
tcatcacgggtgtct

SEQ ID NO: 1970292 - DNA, 15 bp, Homo sapiens
catcacgggtgtctc

SEQ ID NO: 1970293 - DNA, 15 bp, Homo sapiens
atcacgggtgtctcc

SEQ ID NO: 1970294 - DNA, 15 bp, Homo sapiens
tcacgggtgtctcca

SEQ ID NO: 1970295 - DNA, 15 bp, Homo sapiens
cacgggtgtctccaa

SEQ ID NO: 1970296 - DNA, 15 bp, Homo sapiens
acgggtgtctccaag

SEQ ID NO: 1970297 - DNA, 15 bp, Homo sapiens
cgggtgtctccaagc

SEQ ID NO: 1970298 - DNA, 15 bp, Homo sapiens
gggtgtctccaagca

SEQ ID NO: 1970299 - DNA, 15 bp, Homo sapiens
ggtgtctccaagcag

SEQ ID NO: 1970300 - DNA, 15 bp, Homo sapiens
gtgtctccaagcagg

SEQ ID NO: 1970301 - DNA, 15 bp, Homo sapiens
tgtctccaagcaggg

SEQ ID NO: 1970302 - DNA, 15 bp, Homo sapiens
gtctccaagcaggga

SEQ ID NO: 1970303 - DNA, 15 bp, Homo sapiens
tctccaagcagggaa

SEQ ID NO: 1970304 - DNA, 15 bp, Homo sapiens
ctccaagcagggaaa

SEQ ID NO: 1970305 - DNA, 15 bp, Homo sapiens
tccaagcagggaaag

SEQ ID NO: 1970306 - DNA, 15 bp, Homo sapiens
ccaagcagggaaagt

SEQ ID NO: 1970307 - DNA, 15 bp, Homo sapiens
caagcagggaaagtg

SEQ ID NO: 1970308 - DNA, 15 bp, Homo sapiens
aagcagggaaagtgg

SEQ ID NO: 1970309 - DNA, 15 bp, Homo sapiens
agcagggaaagtgga

SEQ ID NO: 1970310 - DNA, 15 bp, Homo sapiens
gcagggaaagtggac

SEQ ID NO: 1970311 - DNA, 15 bp, Homo sapiens
cagggaaagtggaca

SEQ ID NO: 1970312 - DNA, 15 bp, Homo sapiens
agggaaagtggacac

SEQ ID NO: 1970313 - DNA, 15 bp, Homo sapiens
gggaaagtggacaca

SEQ ID NO: 1970314 - DNA, 15 bp, Homo sapiens
ggaaagtggacacat

SEQ ID NO: 1970315 - DNA, 15 bp, Homo sapiens
gaaagtggacacatg

SEQ ID NO: 1970316 - DNA, 15 bp, Homo sapiens
aaagtggacacatgc

SEQ ID NO: 1970317 - DNA, 15 bp, Homo sapiens
aagtggacacatgca

SEQ ID NO: 1970318 - DNA, 15 bp, Homo sapiens
agtggacacatgcag

SEQ ID NO: 1970319 - DNA, 15 bp, Homo sapiens
gtggacacatgcaga

SEQ ID NO: 1970320 - DNA, 15 bp, Homo sapiens
tggacacatgcagaa

SEQ ID NO: 1970321 - DNA, 15 bp, Homo sapiens
ggacacatgcagaaa

SEQ ID NO: 1970322 - DNA, 15 bp, Homo sapiens
gacacatgcagaaaa

SEQ ID NO: 1970323 - DNA, 15 bp, Homo sapiens
acacatgcagaaaaa

SEQ ID NO: 1970324 - DNA, 15 bp, Homo sapiens
cacatgcagaaaaag

SEQ ID NO: 1970325 - DNA, 15 bp, Homo sapiens
acatgcagaaaaagt

SEQ ID NO: 1970326 - DNA, 15 bp, Homo sapiens
catgcagaaaaagtc

SEQ ID NO: 1970327 - DNA, 15 bp, Homo sapiens
atgcagaaaaagtct

SEQ ID NO: 1970328 - DNA, 15 bp, Homo sapiens
tgcagaaaaagtctt

SEQ ID NO: 1970329 - DNA, 15 bp, Homo sapiens
gcagaaaaagtcttg

SEQ ID NO: 1970330 - DNA, 15 bp, Homo sapiens
cagaaaaagtcttgt

SEQ ID NO: 1970331 - DNA, 15 bp, Homo sapiens
agaaaaagtcttgtt

SEQ ID NO: 1970332 - DNA, 15 bp, Homo sapiens
gaaaaagtcttgttg

SEQ ID NO: 1970333 - DNA, 15 bp, Homo sapiens
aaaaagtcttgttgg

SEQ ID NO: 1970334 - DNA, 15 bp, Homo sapiens
aaaagtcttgttggg

SEQ ID NO: 1970335 - DNA, 15 bp, Homo sapiens
aaagtcttgttggga

SEQ ID NO: 1970336 - DNA, 15 bp, Homo sapiens
aagtcttgttgggag

SEQ ID NO: 1970337 - DNA, 15 bp, Homo sapiens
agtcttgttgggagg

SEQ ID NO: 1970338 - DNA, 15 bp, Homo sapiens
gtcttgttgggaggt

SEQ ID NO: 1970339 - DNA, 15 bp, Homo sapiens
tcttgttgggaggtc

SEQ ID NO: 1970340 - DNA, 15 bp, Homo sapiens
cttgttgggaggtca

SEQ ID NO: 1970341 - DNA, 15 bp, Homo sapiens
ttgttgggaggtcag

SEQ ID NO: 1970342 - DNA, 15 bp, Homo sapiens
tgttgggaggtcagg

SEQ ID NO: 1970343 - DNA, 15 bp, Homo sapiens
gttgggaggtcagga

SEQ ID NO: 1970344 - DNA, 15 bp, Homo sapiens
ttgggaggtcaggac

SEQ ID NO: 1970345 - DNA, 15 bp, Homo sapiens
tgggaggtcaggacc

SEQ ID NO: 1970346 - DNA, 15 bp, Homo sapiens
gggaggtcaggacca

SEQ ID NO: 1970347 - DNA, 15 bp, Homo sapiens
ggaggtcaggaccac

SEQ ID NO: 1970348 - DNA, 15 bp, Homo sapiens
gaggtcaggaccaca

SEQ ID NO: 1970349 - DNA, 15 bp, Homo sapiens
aggtcaggaccacag

SEQ ID NO: 1970350 - DNA, 15 bp, Homo sapiens
ggtcaggaccacagc

SEQ ID NO: 1970351 - DNA, 15 bp, Homo sapiens
gtcaggaccacagcc

SEQ ID NO: 1970352 - DNA, 15 bp, Homo sapiens
tcaggaccacagccc

SEQ ID NO: 1970353 - DNA, 15 bp, Homo sapiens
caggaccacagccct

SEQ ID NO: 1970354 - DNA, 15 bp, Homo sapiens
aggaccacagccctg

SEQ ID NO: 1970355 - DNA, 15 bp, Homo sapiens
ggaccacagccctgg

SEQ ID NO: 1970356 - DNA, 15 bp, Homo sapiens
gaccacagccctggc

SEQ ID NO: 1970357 - DNA, 15 bp, Homo sapiens
accacagccctggct

SEQ ID NO: 1970358 - DNA, 15 bp, Homo sapiens
ccacagccctggctc

SEQ ID NO: 1970359 - DNA, 15 bp, Homo sapiens
cacagccctggctct

SEQ ID NO: 1970360 - DNA, 15 bp, Homo sapiens
acagccctggctctc

SEQ ID NO: 1970361 - DNA, 15 bp, Homo sapiens
cagccctggctctcc

SEQ ID NO: 1970362 - DNA, 15 bp, Homo sapiens
agccctggctctccc

SEQ ID NO: 1970363 - DNA, 15 bp, Homo sapiens
gccctggctctcccg

SEQ ID NO: 1970364 - DNA, 15 bp, Homo sapiens
ccctggctctcccga

SEQ ID NO: 1970365 - DNA, 15 bp, Homo sapiens
cctggctctcccgac

SEQ ID NO: 1970366 - DNA, 15 bp, Homo sapiens
ctggctctcccgact

SEQ ID NO: 1970367 - DNA, 15 bp, Homo sapiens
tggctctcccgactg

SEQ ID NO: 1970368 - DNA, 15 bp, Homo sapiens
ggctctcccgactgc

SEQ ID NO: 1970369 - DNA, 15 bp, Homo sapiens
gctctcccgactgct

SEQ ID NO: 1970370 - DNA, 15 bp, Homo sapiens
ctctcccgactgcta

SEQ ID NO: 1970371 - DNA, 15 bp, Homo sapiens
tctcccgactgctag

SEQ ID NO: 1970372 - DNA, 15 bp, Homo sapiens
ctcccgactgctagc

SEQ ID NO: 1970373 - DNA, 15 bp, Homo sapiens
tcccgactgctagct

SEQ ID NO: 1970374 - DNA, 15 bp, Homo sapiens
cccgactgctagctg

SEQ ID NO: 1970375 - DNA, 15 bp, Homo sapiens
ccgactgctagctgt

SEQ ID NO: 1970376 - DNA, 15 bp, Homo sapiens
cgactgctagctgtg

SEQ ID NO: 1970377 - DNA, 15 bp, Homo sapiens
gactgctagctgtgt

SEQ ID NO: 1970378 - DNA, 15 bp, Homo sapiens
actgctagctgtgtg

SEQ ID NO: 1970379 - DNA, 15 bp, Homo sapiens
ctgctagctgtgtga

SEQ ID NO: 1970380 - DNA, 15 bp, Homo sapiens
tgctagctgtgtgat

SEQ ID NO: 1970381 - DNA, 15 bp, Homo sapiens
gctagctgtgtgatc

SEQ ID NO: 1970382 - DNA, 15 bp, Homo sapiens
ctagctgtgtgatct

SEQ ID NO: 1970383 - DNA, 15 bp, Homo sapiens
tagctgtgtgatctt

SEQ ID NO: 1970384 - DNA, 15 bp, Homo sapiens
agctgtgtgatcttg

SEQ ID NO: 1970385 - DNA, 15 bp, Homo sapiens
gctgtgtgatcttgg

SEQ ID NO: 1970386 - DNA, 15 bp, Homo sapiens
ctgtgtgatcttgga

SEQ ID NO: 1970387 - DNA, 15 bp, Homo sapiens
tgtgtgatcttggag

SEQ ID NO: 1970388 - DNA, 15 bp, Homo sapiens
gtgtgatcttggagg

SEQ ID NO: 1970389 - DNA, 15 bp, Homo sapiens
tgtgatcttggagga

SEQ ID NO: 1970390 - DNA, 15 bp, Homo sapiens
gtgatcttggaggag

SEQ ID NO: 1970391 - DNA, 15 bp, Homo sapiens
tgatcttggaggagc

SEQ ID NO: 1970392 - DNA, 15 bp, Homo sapiens
gatcttggaggagcc

SEQ ID NO: 1970393 - DNA, 15 bp, Homo sapiens
atcttggaggagccg

SEQ ID NO: 1970394 - DNA, 15 bp, Homo sapiens
tcttggaggagccgc

SEQ ID NO: 1970395 - DNA, 15 bp, Homo sapiens
cttggaggagccgct

SEQ ID NO: 1970396 - DNA, 15 bp, Homo sapiens
ttggaggagccgctt

SEQ ID NO: 1970397 - DNA, 15 bp, Homo sapiens
tggaggagccgctta

SEQ ID NO: 1970398 - DNA, 15 bp, Homo sapiens
ggaggagccgcttag

SEQ ID NO: 1970399 - DNA, 15 bp, Homo sapiens
gaggagccgcttagc

SEQ ID NO: 1970400 - DNA, 15 bp, Homo sapiens
aggagccgcttagct

SEQ ID NO: 1970401 - DNA, 15 bp, Homo sapiens
ggagccgcttagctt

SEQ ID NO: 1970402 - DNA, 15 bp, Homo sapiens
gagccgcttagcttc

SEQ ID NO: 1970403 - DNA, 15 bp, Homo sapiens
agccgcttagcttct

SEQ ID NO: 1970404 - DNA, 15 bp, Homo sapiens
gccgcttagcttctc

SEQ ID NO: 1970405 - DNA, 15 bp, Homo sapiens
ccgcttagcttctct

SEQ ID NO: 1970406 - DNA, 15 bp, Homo sapiens
cgcttagcttctctg

SEQ ID NO: 1970407 - DNA, 15 bp, Homo sapiens
gcttagcttctctga

SEQ ID NO: 1970408 - DNA, 15 bp, Homo sapiens
cttagcttctctgag

SEQ ID NO: 1970409 - DNA, 15 bp, Homo sapiens
ttagcttctctgagc

SEQ ID NO: 1970410 - DNA, 15 bp, Homo sapiens
tagcttctctgagcc

SEQ ID NO: 1970411 - DNA, 15 bp, Homo sapiens
agcttctctgagcct

SEQ ID NO: 1970412 - DNA, 15 bp, Homo sapiens
gcttctctgagcctc

SEQ ID NO: 1970413 - DNA, 15 bp, Homo sapiens
cttctctgagcctca

SEQ ID NO: 1970414 - DNA, 15 bp, Homo sapiens
ttctctgagcctcag

SEQ ID NO: 1970415 - DNA, 15 bp, Homo sapiens
tctctgagcctcagt

SEQ ID NO: 1970416 - DNA, 15 bp, Homo sapiens
ctctgagcctcagtg

SEQ ID NO: 1970417 - DNA, 15 bp, Homo sapiens
tctgagcctcagtgt

SEQ ID NO: 1970418 - DNA, 15 bp, Homo sapiens
ctgagcctcagtgtc

SEQ ID NO: 1970419 - DNA, 15 bp, Homo sapiens
tgagcctcagtgtcc

SEQ ID NO: 1970420 - DNA, 15 bp, Homo sapiens
gagcctcagtgtcct

SEQ ID NO: 1970421 - DNA, 15 bp, Homo sapiens
gcctcagtgtcctcc

SEQ ID NO: 1970422 - DNA, 15 bp, Homo sapiens
cctcagtgtcctcct

SEQ ID NO: 1970423 - DNA, 15 bp, Homo sapiens
ctcagtgtcctcctc

SEQ ID NO: 1970424 - DNA, 15 bp, Homo sapiens
tcagtgtcctcctct

SEQ ID NO: 1970425 - DNA, 15 bp, Homo sapiens
cagtgtcctcctctg

SEQ ID NO: 1970426 - DNA, 15 bp, Homo sapiens
agtgtcctcctctga

SEQ ID NO: 1970427 - DNA, 15 bp, Homo sapiens
gtgtcctcctctgag

SEQ ID NO: 1970428 - DNA, 15 bp, Homo sapiens
tgtcctcctctgaga

SEQ ID NO: 1970429 - DNA, 15 bp, Homo sapiens
gtcctcctctgagaa

SEQ ID NO: 1970430 - DNA, 15 bp, Homo sapiens
tcctcctctgagaaa

SEQ ID NO: 1970431 - DNA, 15 bp, Homo sapiens
cctcctctgagaaat

SEQ ID NO: 1970432 - DNA, 15 bp, Homo sapiens
ctcctctgagaaatg

SEQ ID NO: 1970433 - DNA, 15 bp, Homo sapiens
tcctctgagaaatga

SEQ ID NO: 1970434 - DNA, 15 bp, Homo sapiens
cctctgagaaatgaa

SEQ ID NO: 1970435 - DNA, 15 bp, Homo sapiens
ctctgagaaatgaac

SEQ ID NO: 1970436 - DNA, 15 bp, Homo sapiens
tctgagaaatgaaca

SEQ ID NO: 1970437 - DNA, 15 bp, Homo sapiens
ctgagaaatgaacag

SEQ ID NO: 1970438 - DNA, 15 bp, Homo sapiens
tgagaaatgaacaga

SEQ ID NO: 1970439 - DNA, 15 bp, Homo sapiens
gagaaatgaacagaa

SEQ ID NO: 1970440 - DNA, 15 bp, Homo sapiens
agaaatgaacagaat

SEQ ID NO: 1970441 - DNA, 15 bp, Homo sapiens
gaaatgaacagaata

SEQ ID NO: 1970442 - DNA, 15 bp, Homo sapiens
aaatgaacagaataa

SEQ ID NO: 1970443 - DNA, 15 bp, Homo sapiens
aatgaacagaataac

SEQ ID NO: 1970444 - DNA, 15 bp, Homo sapiens
atgaacagaataact

SEQ ID NO: 1970445 - DNA, 15 bp, Homo sapiens
tgaacagaataactg

SEQ ID NO: 1970446 - DNA, 15 bp, Homo sapiens
gaacagaataactgc

SEQ ID NO: 1970447 - DNA, 15 bp, Homo sapiens
aacagaataactgca

SEQ ID NO: 1970448 - DNA, 15 bp, Homo sapiens
acagaataactgcaa

SEQ ID NO: 1970449 - DNA, 15 bp, Homo sapiens
cagaataactgcaac

SEQ ID NO: 1970450 - DNA, 15 bp, Homo sapiens
agaataactgcaact

SEQ ID NO: 1970451 - DNA, 15 bp, Homo sapiens
gaataactgcaacta

SEQ ID NO: 1970452 - DNA, 15 bp, Homo sapiens
aataactgcaactac

SEQ ID NO: 1970453 - DNA, 15 bp, Homo sapiens
ataactgcaactacc

SEQ ID NO: 1970454 - DNA, 15 bp, Homo sapiens
taactgcaactacct

SEQ ID NO: 1970455 - DNA, 15 bp, Homo sapiens
aactgcaactacctc

SEQ ID NO: 1970456 - DNA, 15 bp, Homo sapiens
actgcaactacctca

SEQ ID NO: 1970457 - DNA, 15 bp, Homo sapiens
ctgcaactacctcag

SEQ ID NO: 1970458 - DNA, 15 bp, Homo sapiens
tgcaactacctcaga

SEQ ID NO: 1970459 - DNA, 15 bp, Homo sapiens
gcaactacctcagag

SEQ ID NO: 1970460 - DNA, 15 bp, Homo sapiens
caactacctcagaga

SEQ ID NO: 1970461 - DNA, 15 bp, Homo sapiens
aactacctcagagaa

SEQ ID NO: 1970462 - DNA, 15 bp, Homo sapiens
actacctcagagaac

SEQ ID NO: 1970463 - DNA, 15 bp, Homo sapiens
ctacctcagagaact

SEQ ID NO: 1970464 - DNA, 15 bp, Homo sapiens
tacctcagagaactg

SEQ ID NO: 1970465 - DNA, 15 bp, Homo sapiens
acctcagagaactgg

SEQ ID NO: 1970466 - DNA, 15 bp, Homo sapiens
cctcagagaactggt

SEQ ID NO: 1970467 - DNA, 15 bp, Homo sapiens
ctcagagaactggta

SEQ ID NO: 1970468 - DNA, 15 bp, Homo sapiens
tcagagaactggtag

SEQ ID NO: 1970469 - DNA, 15 bp, Homo sapiens
cagagaactggtaga

SEQ ID NO: 1970470 - DNA, 15 bp, Homo sapiens
agagaactggtagag

SEQ ID NO: 1970471 - DNA, 15 bp, Homo sapiens
gagaactggtagagt

SEQ ID NO: 1970472 - DNA, 15 bp, Homo sapiens
agaactggtagagta

SEQ ID NO: 1970473 - DNA, 15 bp, Homo sapiens
gaactggtagagtat

SEQ ID NO: 1970474 - DNA, 15 bp, Homo sapiens
aactggtagagtatt

SEQ ID NO: 1970475 - DNA, 15 bp, Homo sapiens
actggtagagtatta

SEQ ID NO: 1970476 - DNA, 15 bp, Homo sapiens
ctggtagagtattac

SEQ ID NO: 1970477 - DNA, 15 bp, Homo sapiens
tggtagagtattacg

SEQ ID NO: 1970478 - DNA, 15 bp, Homo sapiens
ggtagagtattacgt

SEQ ID NO: 1970479 - DNA, 15 bp, Homo sapiens
gtagagtattacgtg

SEQ ID NO: 1970480 - DNA, 15 bp, Homo sapiens
tagagtattacgtga

SEQ ID NO: 1970481 - DNA, 15 bp, Homo sapiens
agagtattacgtgag

SEQ ID NO: 1970482 - DNA, 15 bp, Homo sapiens
gagtattacgtgagg

SEQ ID NO: 1970483 - DNA, 15 bp, Homo sapiens
agtattacgtgaggg

SEQ ID NO: 1970484 - DNA, 15 bp, Homo sapiens
gtattacgtgagggg

SEQ ID NO: 1970485 - DNA, 15 bp, Homo sapiens
tattacgtgagggga

SEQ ID NO: 1970486 - DNA, 15 bp, Homo sapiens
attacgtgaggggat

SEQ ID NO: 1970487 - DNA, 15 bp, Homo sapiens
ttacgtgaggggatg

SEQ ID NO: 1970488 - DNA, 15 bp, Homo sapiens
tacgtgaggggatgc

SEQ ID NO: 1970489 - DNA, 15 bp, Homo sapiens
acgtgaggggatgca

SEQ ID NO: 1970490 - DNA, 15 bp, Homo sapiens
cgtgaggggatgcat

SEQ ID NO: 1970491 - DNA, 15 bp, Homo sapiens
gtgaggggatgcata

SEQ ID NO: 1970492 - DNA, 15 bp, Homo sapiens
tgaggggatgcatag

SEQ ID NO: 1970493 - DNA, 15 bp, Homo sapiens
gaggggatgcataga

SEQ ID NO: 1970494 - DNA, 15 bp, Homo sapiens
aggggatgcatagaa

SEQ ID NO: 1970495 - DNA, 15 bp, Homo sapiens
ggggatgcatagaaa

SEQ ID NO: 1970496 - DNA, 15 bp, Homo sapiens
gggatgcatagaaag

SEQ ID NO: 1970497 - DNA, 15 bp, Homo sapiens
ggatgcatagaaagt

SEQ ID NO: 1970498 - DNA, 15 bp, Homo sapiens
gatgcatagaaagtg

SEQ ID NO: 1970499 - DNA, 15 bp, Homo sapiens
atgcatagaaagtgc

SEQ ID NO: 1970500 - DNA, 15 bp, Homo sapiens
tgcatagaaagtgct

SEQ ID NO: 1970501 - DNA, 15 bp, Homo sapiens
gcatagaaagtgcta

SEQ ID NO: 1970502 - DNA, 15 bp, Homo sapiens
catagaaagtgctag

SEQ ID NO: 1970503 - DNA, 15 bp, Homo sapiens
atagaaagtgctagc

SEQ ID NO: 1970504 - DNA, 15 bp, Homo sapiens
tagaaagtgctagca

SEQ ID NO: 1970505 - DNA, 15 bp, Homo sapiens
agaaagtgctagcac

SEQ ID NO: 1970506 - DNA, 15 bp, Homo sapiens
gaaagtgctagcaca

SEQ ID NO: 1970507 - DNA, 15 bp, Homo sapiens
aaagtgctagcacag

SEQ ID NO: 1970508 - DNA, 15 bp, Homo sapiens
aagtgctagcacagt

SEQ ID NO: 1970509 - DNA, 15 bp, Homo sapiens
agtgctagcacagta

SEQ ID NO: 1970510 - DNA, 15 bp, Homo sapiens
gtgctagcacagtat

SEQ ID NO: 1970511 - DNA, 15 bp, Homo sapiens
tgctagcacagtatt

SEQ ID NO: 1970512 - DNA, 15 bp, Homo sapiens
gctagcacagtattt

SEQ ID NO: 1970513 - DNA, 15 bp, Homo sapiens
ctagcacagtattta

SEQ ID NO: 1970514 - DNA, 15 bp, Homo sapiens
tagcacagtatttac

SEQ ID NO: 1970515 - DNA, 15 bp, Homo sapiens
agcacagtatttact

SEQ ID NO: 1970516 - DNA, 15 bp, Homo sapiens
gcacagtatttactg

SEQ ID NO: 1970517 - DNA, 15 bp, Homo sapiens
cacagtatttactga

SEQ ID NO: 1970518 - DNA, 15 bp, Homo sapiens
acagtatttactgag

SEQ ID NO: 1970519 - DNA, 15 bp, Homo sapiens
cagtatttactgaga

SEQ ID NO: 1970520 - DNA, 15 bp, Homo sapiens
gtatttactgagagg

SEQ ID NO: 1970521 - DNA, 15 bp, Homo sapiens
tatttactgagaggg

SEQ ID NO: 1970522 - DNA, 15 bp, Homo sapiens
atttactgagagggg

SEQ ID NO: 1970523 - DNA, 15 bp, Homo sapiens
tttactgagaggggc

SEQ ID NO: 1970524 - DNA, 15 bp, Homo sapiens
ttactgagaggggct

SEQ ID NO: 1970525 - DNA, 15 bp, Homo sapiens
tactgagaggggctg

SEQ ID NO: 1970526 - DNA, 15 bp, Homo sapiens
actgagaggggctgc

SEQ ID NO: 1970527 - DNA, 15 bp, Homo sapiens
ctgagaggggctgca

SEQ ID NO: 1970528 - DNA, 15 bp, Homo sapiens
tgagaggggctgcag

SEQ ID NO: 1970529 - DNA, 15 bp, Homo sapiens
gagaggggctgcagg

SEQ ID NO: 1970530 - DNA, 15 bp, Homo sapiens
agaggggctgcaggg

SEQ ID NO: 1970531 - DNA, 15 bp, Homo sapiens
gaggggctgcagggg

SEQ ID NO: 1970532 - DNA, 15 bp, Homo sapiens
aggggctgcaggggc

SEQ ID NO: 1970533 - DNA, 15 bp, Homo sapiens
ggggctgcaggggcg

SEQ ID NO: 1970534 - DNA, 15 bp, Homo sapiens
gggctgcaggggcgg

SEQ ID NO: 1970535 - DNA, 15 bp, Homo sapiens
ggctgcaggggcggg

SEQ ID NO: 1970536 - DNA, 15 bp, Homo sapiens
gctgcaggggcgggg

SEQ ID NO: 1970537 - DNA, 15 bp, Homo sapiens
ctgcaggggcggggt

SEQ ID NO: 1970538 - DNA, 15 bp, Homo sapiens
tgcaggggcggggtg

SEQ ID NO: 1970539 - DNA, 15 bp, Homo sapiens
gcaggggcggggtgc

SEQ ID NO: 1970540 - DNA, 15 bp, Homo sapiens
caggggcggggtgca

SEQ ID NO: 1970541 - DNA, 15 bp, Homo sapiens
aggggcggggtgcac

SEQ ID NO: 1970542 - DNA, 15 bp, Homo sapiens
ggggcggggtgcacg

SEQ ID NO: 1970543 - DNA, 15 bp, Homo sapiens
gggcggggtgcacgc

SEQ ID NO: 1970544 - DNA, 15 bp, Homo sapiens
ggcggggtgcacgct

SEQ ID NO: 1970545 - DNA, 15 bp, Homo sapiens
gcggggtgcacgctc

SEQ ID NO: 1970546 - DNA, 15 bp, Homo sapiens
cggggtgcacgctcc

SEQ ID NO: 1970547 - DNA, 15 bp, Homo sapiens
ggggtgcacgctcca

SEQ ID NO: 1970548 - DNA, 15 bp, Homo sapiens
gggtgcacgctccaa

SEQ ID NO: 1970549 - DNA, 15 bp, Homo sapiens
ggtgcacgctccaac

SEQ ID NO: 1970550 - DNA, 15 bp, Homo sapiens
gtgcacgctccaacc

SEQ ID NO: 1970551 - DNA, 15 bp, Homo sapiens
tgcacgctccaacca

SEQ ID NO: 1970552 - DNA, 15 bp, Homo sapiens
gcacgctccaaccag

SEQ ID NO: 1970553 - DNA, 15 bp, Homo sapiens
cacgctccaaccagg

SEQ ID NO: 1970554 - DNA, 15 bp, Homo sapiens
acgctccaaccaggg

SEQ ID NO: 1970555 - DNA, 15 bp, Homo sapiens
cgctccaaccagggg

SEQ ID NO: 1970556 - DNA, 15 bp, Homo sapiens
gctccaaccaggggc

SEQ ID NO: 1970557 - DNA, 15 bp, Homo sapiens
ctccaaccaggggcc

SEQ ID NO: 1970558 - DNA, 15 bp, Homo sapiens
tccaaccaggggccg

SEQ ID NO: 1970559 - DNA, 15 bp, Homo sapiens
ccaaccaggggccgc

SEQ ID NO: 1970560 - DNA, 15 bp, Homo sapiens
caaccaggggccgct

SEQ ID NO: 1970561 - DNA, 15 bp, Homo sapiens
aaccaggggccgctg

SEQ ID NO: 1970562 - DNA, 15 bp, Homo sapiens
accaggggccgctgt

SEQ ID NO: 1970563 - DNA, 15 bp, Homo sapiens
ccaggggccgctgta

SEQ ID NO: 1970564 - DNA, 15 bp, Homo sapiens
caggggccgctgtag

SEQ ID NO: 1970565 - DNA, 15 bp, Homo sapiens
aggggccgctgtagc

SEQ ID NO: 1970566 - DNA, 15 bp, Homo sapiens
ggggccgctgtagcc

SEQ ID NO: 1970567 - DNA, 15 bp, Homo sapiens
gggccgctgtagcct

SEQ ID NO: 1970568 - DNA, 15 bp, Homo sapiens
ggccgctgtagcctc

SEQ ID NO: 1970569 - DNA, 15 bp, Homo sapiens
gccgctgtagcctcc

SEQ ID NO: 1970570 - DNA, 15 bp, Homo sapiens
ccgctgtagcctcca

SEQ ID NO: 1970571 - DNA, 15 bp, Homo sapiens
cgctgtagcctccac

SEQ ID NO: 1970572 - DNA, 15 bp, Homo sapiens
gctgtagcctccacc

SEQ ID NO: 1970573 - DNA, 15 bp, Homo sapiens
ctgtagcctccacct

SEQ ID NO: 1970574 - DNA, 15 bp, Homo sapiens
tgtagcctccacctg

SEQ ID NO: 1970575 - DNA, 15 bp, Homo sapiens
gtagcctccacctgg

SEQ ID NO: 1970576 - DNA, 15 bp, Homo sapiens
tagcctccacctggc

SEQ ID NO: 1970577 - DNA, 15 bp, Homo sapiens
agcctccacctggcc

SEQ ID NO: 1970578 - DNA, 15 bp, Homo sapiens
gcctccacctggccc

SEQ ID NO: 1970579 - DNA, 15 bp, Homo sapiens
cctccacctggccct

SEQ ID NO: 1970580 - DNA, 15 bp, Homo sapiens
ctccacctggccctt

SEQ ID NO: 1970581 - DNA, 15 bp, Homo sapiens
tccacctggcccttc

SEQ ID NO: 1970582 - DNA, 15 bp, Homo sapiens
ccacctggcccttca

SEQ ID NO: 1970583 - DNA, 15 bp, Homo sapiens
cacctggcccttcag

SEQ ID NO: 1970584 - DNA, 15 bp, Homo sapiens
acctggcccttcagt

SEQ ID NO: 1970585 - DNA, 15 bp, Homo sapiens
cctggcccttcagtc

SEQ ID NO: 1970586 - DNA, 15 bp, Homo sapiens
ctggcccttcagtct

SEQ ID NO: 1970587 - DNA, 15 bp, Homo sapiens
tggcccttcagtctc

SEQ ID NO: 1970588 - DNA, 15 bp, Homo sapiens
ggcccttcagtctca

SEQ ID NO: 1970589 - DNA, 15 bp, Homo sapiens
gcccttcagtctcag

SEQ ID NO: 1970590 - DNA, 15 bp, Homo sapiens
cccttcagtctcagc

SEQ ID NO: 1970591 - DNA, 15 bp, Homo sapiens
ccttcagtctcagct

SEQ ID NO: 1970592 - DNA, 15 bp, Homo sapiens
cttcagtctcagctt

SEQ ID NO: 1970593 - DNA, 15 bp, Homo sapiens
ttcagtctcagcttt

SEQ ID NO: 1970594 - DNA, 15 bp, Homo sapiens
tcagtctcagctttt

SEQ ID NO: 1970595 - DNA, 15 bp, Homo sapiens
cagtctcagctttta

SEQ ID NO: 1970596 - DNA, 15 bp, Homo sapiens
agtctcagcttttag

SEQ ID NO: 1970597 - DNA, 15 bp, Homo sapiens
gtctcagcttttagc

SEQ ID NO: 1970598 - DNA, 15 bp, Homo sapiens
tctcagcttttagca

SEQ ID NO: 1970599 - DNA, 15 bp, Homo sapiens
ctcagcttttagcaa

SEQ ID NO: 1970600 - DNA, 15 bp, Homo sapiens
tcagcttttagcaag

SEQ ID NO: 1970601 - DNA, 15 bp, Homo sapiens
cagcttttagcaaga

SEQ ID NO: 1970602 - DNA, 15 bp, Homo sapiens
agcttttagcaagaa

SEQ ID NO: 1970603 - DNA, 15 bp, Homo sapiens
gcttttagcaagaag

SEQ ID NO: 1970604 - DNA, 15 bp, Homo sapiens
cttttagcaagaagc

SEQ ID NO: 1970605 - DNA, 15 bp, Homo sapiens
ttttagcaagaagcc

SEQ ID NO: 1970606 - DNA, 15 bp, Homo sapiens
tttagcaagaagcca

SEQ ID NO: 1970607 - DNA, 15 bp, Homo sapiens
ttagcaagaagccac

SEQ ID NO: 1970608 - DNA, 15 bp, Homo sapiens
tagcaagaagccacg

SEQ ID NO: 1970609 - DNA, 15 bp, Homo sapiens
agcaagaagccacgg

SEQ ID NO: 1970610 - DNA, 15 bp, Homo sapiens
gcaagaagccacggt

SEQ ID NO: 1970611 - DNA, 15 bp, Homo sapiens
caagaagccacggtc

SEQ ID NO: 1970612 - DNA, 15 bp, Homo sapiens
aagaagccacggtca

SEQ ID NO: 1970613 - DNA, 15 bp, Homo sapiens
agaagccacggtcag

SEQ ID NO: 1970614 - DNA, 15 bp, Homo sapiens
gaagccacggtcagt

SEQ ID NO: 1970615 - DNA, 15 bp, Homo sapiens
aagccacggtcagtg

SEQ ID NO: 1970616 - DNA, 15 bp, Homo sapiens
agccacggtcagtgg

SEQ ID NO: 1970617 - DNA, 15 bp, Homo sapiens
gccacggtcagtgga

SEQ ID NO: 1970618 - DNA, 15 bp, Homo sapiens
ccacggtcagtggaa

SEQ ID NO: 1970619 - DNA, 15 bp, Homo sapiens
cacggtcagtggaag

SEQ ID NO: 1970620 - DNA, 15 bp, Homo sapiens
acggtcagtggaagt

SEQ ID NO: 1970621 - DNA, 15 bp, Homo sapiens
cggtcagtggaagtg

SEQ ID NO: 1970622 - DNA, 15 bp, Homo sapiens
ggtcagtggaagtgg

SEQ ID NO: 1970623 - DNA, 15 bp, Homo sapiens
gtcagtggaagtggc

SEQ ID NO: 1970624 - DNA, 15 bp, Homo sapiens
tcagtggaagtggcc

SEQ ID NO: 1970625 - DNA, 15 bp, Homo sapiens
cagtggaagtggccg

SEQ ID NO: 1970626 - DNA, 15 bp, Homo sapiens
agtggaagtggccgc

SEQ ID NO: 1970627 - DNA, 15 bp, Homo sapiens
gtggaagtggccgca

SEQ ID NO: 1970628 - DNA, 15 bp, Homo sapiens
tggaagtggccgcag

SEQ ID NO: 1970629 - DNA, 15 bp, Homo sapiens
ggaagtggccgcagg

SEQ ID NO: 1970630 - DNA, 15 bp, Homo sapiens
aagtggccgcaggca

SEQ ID NO: 1970631 - DNA, 15 bp, Homo sapiens
agtggccgcaggcag

SEQ ID NO: 1970632 - DNA, 15 bp, Homo sapiens
gtggccgcaggcagc

SEQ ID NO: 1970633 - DNA, 15 bp, Homo sapiens
tggccgcaggcagcc

SEQ ID NO: 1970634 - DNA, 15 bp, Homo sapiens
ggccgcaggcagccc

SEQ ID NO: 1970635 - DNA, 15 bp, Homo sapiens
gccgcaggcagccct

SEQ ID NO: 1970636 - DNA, 15 bp, Homo sapiens
ccgcaggcagccctg

SEQ ID NO: 1970637 - DNA, 15 bp, Homo sapiens
cgcaggcagccctgc

SEQ ID NO: 1970638 - DNA, 15 bp, Homo sapiens
gcaggcagccctgcc

SEQ ID NO: 1970639 - DNA, 15 bp, Homo sapiens
caggcagccctgccg

SEQ ID NO: 1970640 - DNA, 15 bp, Homo sapiens
aggcagccctgccgt

SEQ ID NO: 1970641 - DNA, 15 bp, Homo sapiens
ggcagccctgccgtg

SEQ ID NO: 1970642 - DNA, 15 bp, Homo sapiens
gcagccctgccgtgt

SEQ ID NO: 1970643 - DNA, 15 bp, Homo sapiens
cagccctgccgtgtt

SEQ ID NO: 1970644 - DNA, 15 bp, Homo sapiens
agccctgccgtgttc

SEQ ID NO: 1970645 - DNA, 15 bp, Homo sapiens
gccctgccgtgttcg

SEQ ID NO: 1970646 - DNA, 15 bp, Homo sapiens
ccctgccgtgttcga

SEQ ID NO: 1970647 - DNA, 15 bp, Homo sapiens
cctgccgtgttcgag

SEQ ID NO: 1970648 - DNA, 15 bp, Homo sapiens
ctgccgtgttcgagg

SEQ ID NO: 1970649 - DNA, 15 bp, Homo sapiens
tgccgtgttcgaggc

SEQ ID NO: 1970650 - DNA, 15 bp, Homo sapiens
gccgtgttcgaggcc

SEQ ID NO: 1970651 - DNA, 15 bp, Homo sapiens
ccgtgttcgaggccg

SEQ ID NO: 1970652 - DNA, 15 bp, Homo sapiens
cgtgttcgaggccga

SEQ ID NO: 1970653 - DNA, 15 bp, Homo sapiens
gtgttcgaggccgag

SEQ ID NO: 1970654 - DNA, 15 bp, Homo sapiens
tgttcgaggccgaga

SEQ ID NO: 1970655 - DNA, 15 bp, Homo sapiens
gttcgaggccgagac

SEQ ID NO: 1970656 - DNA, 15 bp, Homo sapiens
ttcgaggccgagaca

SEQ ID NO: 1970657 - DNA, 15 bp, Homo sapiens
tcgaggccgagacag

SEQ ID NO: 1970658 - DNA, 15 bp, Homo sapiens
cgaggccgagacaga

SEQ ID NO: 1970659 - DNA, 15 bp, Homo sapiens
gaggccgagacagag

SEQ ID NO: 1970660 - DNA, 15 bp, Homo sapiens
aggccgagacagagc

SEQ ID NO: 1970661 - DNA, 15 bp, Homo sapiens
ggccgagacagagcg

SEQ ID NO: 1970662 - DNA, 15 bp, Homo sapiens
gccgagacagagcgg

SEQ ID NO: 1970663 - DNA, 15 bp, Homo sapiens
ccgagacagagcggg

SEQ ID NO: 1970664 - DNA, 15 bp, Homo sapiens
cgagacagagcgggc

SEQ ID NO: 1970665 - DNA, 15 bp, Homo sapiens
gagacagagcgggca

SEQ ID NO: 1970666 - DNA, 15 bp, Homo sapiens
agacagagcgggcag

SEQ ID NO: 1970667 - DNA, 15 bp, Homo sapiens
gacagagcgggcagg

SEQ ID NO: 1970668 - DNA, 15 bp, Homo sapiens
acagagcgggcagga

SEQ ID NO: 1970669 - DNA, 15 bp, Homo sapiens
cagagcgggcaggag

SEQ ID NO: 1970670 - DNA, 15 bp, Homo sapiens
agagcgggcaggagt

SEQ ID NO: 1970671 - DNA, 15 bp, Homo sapiens
gagcgggcaggagtg

SEQ ID NO: 1970672 - DNA, 15 bp, Homo sapiens
agcgggcaggagtga

SEQ ID NO: 1970673 - DNA, 15 bp, Homo sapiens
gcgggcaggagtgaa

SEQ ID NO: 1970674 - DNA, 15 bp, Homo sapiens
cgggcaggagtgaag

SEQ ID NO: 1970675 - DNA, 15 bp, Homo sapiens
gggcaggagtgaagg

SEQ ID NO: 1970676 - DNA, 15 bp, Homo sapiens
ggcaggagtgaaggt

SEQ ID NO: 1970677 - DNA, 15 bp, Homo sapiens
gcaggagtgaaggtg

SEQ ID NO: 1970678 - DNA, 15 bp, Homo sapiens
caggagtgaaggtgc

SEQ ID NO: 1970679 - DNA, 15 bp, Homo sapiens
aggagtgaaggtgcg

SEQ ID NO: 1970680 - DNA, 15 bp, Homo sapiens
ggagtgaaggtgcgc

SEQ ID NO: 1970681 - DNA, 15 bp, Homo sapiens
gagtgaaggtgcgct

SEQ ID NO: 1970682 - DNA, 15 bp, Homo sapiens
agtgaaggtgcgctg

SEQ ID NO: 1970683 - DNA, 15 bp, Homo sapiens
gtgaaggtgcgctgg

SEQ ID NO: 1970684 - DNA, 15 bp, Homo sapiens
tgaaggtgcgctggc

SEQ ID NO: 1970685 - DNA, 15 bp, Homo sapiens
gaaggtgcgctggca

SEQ ID NO: 1970686 - DNA, 15 bp, Homo sapiens
aaggtgcgctggcag

SEQ ID NO: 1970687 - DNA, 15 bp, Homo sapiens
aggtgcgctggcagc

SEQ ID NO: 1970688 - DNA, 15 bp, Homo sapiens
ggtgcgctggcagcg

SEQ ID NO: 1970689 - DNA, 15 bp, Homo sapiens
gtgcgctggcagcgc

SEQ ID NO: 1970690 - DNA, 15 bp, Homo sapiens
tgcgctggcagcgcg

SEQ ID NO: 1970691 - DNA, 15 bp, Homo sapiens
gcgctggcagcgcgg

SEQ ID NO: 1970692 - DNA, 15 bp, Homo sapiens
cgctggcagcgcgga

SEQ ID NO: 1970693 - DNA, 15 bp, Homo sapiens
ggcagcgcggaggca

SEQ ID NO: 1970694 - DNA, 15 bp, Homo sapiens
gcagcgcggaggcag

SEQ ID NO: 1970695 - DNA, 15 bp, Homo sapiens
cagcgcggaggcagt

SEQ ID NO: 1970696 - DNA, 15 bp, Homo sapiens
agcgcggaggcagtg

SEQ ID NO: 1970697 - DNA, 15 bp, Homo sapiens
gcgcggaggcagtga

SEQ ID NO: 1970698 - DNA, 15 bp, Homo sapiens
cgcggaggcagtgac

SEQ ID NO: 1970699 - DNA, 15 bp, Homo sapiens
gcggaggcagtgaca

SEQ ID NO: 1970700 - DNA, 15 bp, Homo sapiens
cggaggcagtgacat

SEQ ID NO: 1970701 - DNA, 15 bp, Homo sapiens
ggaggcagtgacatc

SEQ ID NO: 1970702 - DNA, 15 bp, Homo sapiens
gaggcagtgacatca

SEQ ID NO: 1970703 - DNA, 15 bp, Homo sapiens
aggcagtgacatcag

SEQ ID NO: 1970704 - DNA, 15 bp, Homo sapiens
ggcagtgacatcagc

SEQ ID NO: 1970705 - DNA, 15 bp, Homo sapiens
gcagtgacatcagcg

SEQ ID NO: 1970706 - DNA, 15 bp, Homo sapiens
cagtgacatcagcgc

SEQ ID NO: 1970707 - DNA, 15 bp, Homo sapiens
agtgacatcagcgcc

SEQ ID NO: 1970708 - DNA, 15 bp, Homo sapiens
gtgacatcagcgcca

SEQ ID NO: 1970709 - DNA, 15 bp, Homo sapiens
tgacatcagcgccag

SEQ ID NO: 1970710 - DNA, 15 bp, Homo sapiens
gacatcagcgccagc

SEQ ID NO: 1970711 - DNA, 15 bp, Homo sapiens
acatcagcgccagca

SEQ ID NO: 1970712 - DNA, 15 bp, Homo sapiens
catcagcgccagcaa

SEQ ID NO: 1970713 - DNA, 15 bp, Homo sapiens
atcagcgccagcaac

SEQ ID NO: 1970714 - DNA, 15 bp, Homo sapiens
tcagcgccagcaaca

SEQ ID NO: 1970715 - DNA, 15 bp, Homo sapiens
cagcgccagcaacaa

SEQ ID NO: 1970716 - DNA, 15 bp, Homo sapiens
agcgccagcaacaag

SEQ ID NO: 1970717 - DNA, 15 bp, Homo sapiens
gcgccagcaacaagt

SEQ ID NO: 1970718 - DNA, 15 bp, Homo sapiens
cgccagcaacaagta

SEQ ID NO: 1970719 - DNA, 15 bp, Homo sapiens
gccagcaacaagtac

SEQ ID NO: 1970720 - DNA, 15 bp, Homo sapiens
ccagcaacaagtacg

SEQ ID NO: 1970721 - DNA, 15 bp, Homo sapiens
cagcaacaagtacgg

SEQ ID NO: 1970722 - DNA, 15 bp, Homo sapiens
agcaacaagtacggc

SEQ ID NO: 1970723 - DNA, 15 bp, Homo sapiens
gcaacaagtacggcc

SEQ ID NO: 1970724 - DNA, 15 bp, Homo sapiens
caacaagtacggcct

SEQ ID NO: 1970725 - DNA, 15 bp, Homo sapiens
aacaagtacggcctg

SEQ ID NO: 1970726 - DNA, 15 bp, Homo sapiens
acaagtacggcctgg

SEQ ID NO: 1970727 - DNA, 15 bp, Homo sapiens
caagtacggcctggc

SEQ ID NO: 1970728 - DNA, 15 bp, Homo sapiens
aagtacggcctggcc

SEQ ID NO: 1970729 - DNA, 15 bp, Homo sapiens
agtacggcctggcca

SEQ ID NO: 1970730 - DNA, 15 bp, Homo sapiens
gtacggcctggccac

SEQ ID NO: 1970731 - DNA, 15 bp, Homo sapiens
tacggcctggccaca

SEQ ID NO: 1970732 - DNA, 15 bp, Homo sapiens
acggcctggccacag

SEQ ID NO: 1970733 - DNA, 15 bp, Homo sapiens
cggcctggccacaga

SEQ ID NO: 1970734 - DNA, 15 bp, Homo sapiens
ggcctggccacagag

SEQ ID NO: 1970735 - DNA, 15 bp, Homo sapiens
gcctggccacagagg

SEQ ID NO: 1970736 - DNA, 15 bp, Homo sapiens
cctggccacagaggg

SEQ ID NO: 1970737 - DNA, 15 bp, Homo sapiens
ctggccacagagggc

SEQ ID NO: 1970738 - DNA, 15 bp, Homo sapiens
tggccacagagggca

SEQ ID NO: 1970739 - DNA, 15 bp, Homo sapiens
ggccacagagggcac

SEQ ID NO: 1970740 - DNA, 15 bp, Homo sapiens
gccacagagggcaca

SEQ ID NO: 1970741 - DNA, 15 bp, Homo sapiens
ccacagagggcacac

SEQ ID NO: 1970742 - DNA, 15 bp, Homo sapiens
cacagagggcacacg

SEQ ID NO: 1970743 - DNA, 15 bp, Homo sapiens
acagagggcacacgg

SEQ ID NO: 1970744 - DNA, 15 bp, Homo sapiens
cagagggcacacggc

SEQ ID NO: 1970745 - DNA, 15 bp, Homo sapiens
agagggcacacggca

SEQ ID NO: 1970746 - DNA, 15 bp, Homo sapiens
gagggcacacggcat

SEQ ID NO: 1970747 - DNA, 15 bp, Homo sapiens
agggcacacggcata

SEQ ID NO: 1970748 - DNA, 15 bp, Homo sapiens
gggcacacggcatac

SEQ ID NO: 1970749 - DNA, 15 bp, Homo sapiens
ggcacacggcatacg

SEQ ID NO: 1970750 - DNA, 15 bp, Homo sapiens
gcacacggcatacgc

SEQ ID NO: 1970751 - DNA, 15 bp, Homo sapiens
cacacggcatacgct

SEQ ID NO: 1970752 - DNA, 15 bp, Homo sapiens
acacggcatacgctg

SEQ ID NO: 1970753 - DNA, 15 bp, Homo sapiens
cacggcatacgctga

SEQ ID NO: 1970754 - DNA, 15 bp, Homo sapiens
acggcatacgctgac

SEQ ID NO: 1970755 - DNA, 15 bp, Homo sapiens
cggcatacgctgaca

SEQ ID NO: 1970756 - DNA, 15 bp, Homo sapiens
ggcatacgctgacag

SEQ ID NO: 1970757 - DNA, 15 bp, Homo sapiens
gcatacgctgacagt

SEQ ID NO: 1970758 - DNA, 15 bp, Homo sapiens
catacgctgacagtg

SEQ ID NO: 1970759 - DNA, 15 bp, Homo sapiens
atacgctgacagtgc

SEQ ID NO: 1970760 - DNA, 15 bp, Homo sapiens
tacgctgacagtgcg

SEQ ID NO: 1970761 - DNA, 15 bp, Homo sapiens
acgctgacagtgcgg

SEQ ID NO: 1970762 - DNA, 15 bp, Homo sapiens
cgctgacagtgcggg

SEQ ID NO: 1970763 - DNA, 15 bp, Homo sapiens
gctgacagtgcggga

SEQ ID NO: 1970764 - DNA, 15 bp, Homo sapiens
ctgacagtgcgggaa

SEQ ID NO: 1970765 - DNA, 15 bp, Homo sapiens
tgacagtgcgggaag

SEQ ID NO: 1970766 - DNA, 15 bp, Homo sapiens
gacagtgcgggaagt

SEQ ID NO: 1970767 - DNA, 15 bp, Homo sapiens
acagtgcgggaagtg

SEQ ID NO: 1970768 - DNA, 15 bp, Homo sapiens
cagtgcgggaagtgg

SEQ ID NO: 1970769 - DNA, 15 bp, Homo sapiens
agtgcgggaagtggg

SEQ ID NO: 1970770 - DNA, 15 bp, Homo sapiens
gtgcgggaagtgggc

SEQ ID NO: 1970771 - DNA, 15 bp, Homo sapiens
tgcgggaagtgggcc

SEQ ID NO: 1970772 - DNA, 15 bp, Homo sapiens
gcgggaagtgggccc

SEQ ID NO: 1970773 - DNA, 15 bp, Homo sapiens
cgggaagtgggccct

SEQ ID NO: 1970774 - DNA, 15 bp, Homo sapiens
gggaagtgggccctg

SEQ ID NO: 1970775 - DNA, 15 bp, Homo sapiens
ggaagtgggccctgc

SEQ ID NO: 1970776 - DNA, 15 bp, Homo sapiens
gaagtgggccctgcc

SEQ ID NO: 1970777 - DNA, 15 bp, Homo sapiens
aagtgggccctgccg

SEQ ID NO: 1970778 - DNA, 15 bp, Homo sapiens
agtgggccctgccga

SEQ ID NO: 1970779 - DNA, 15 bp, Homo sapiens
gtgggccctgccgac

SEQ ID NO: 1970780 - DNA, 15 bp, Homo sapiens
tgggccctgccgacc

SEQ ID NO: 1970781 - DNA, 15 bp, Homo sapiens
gggccctgccgacca

SEQ ID NO: 1970782 - DNA, 15 bp, Homo sapiens
ggccctgccgaccag

SEQ ID NO: 1970783 - DNA, 15 bp, Homo sapiens
gccctgccgaccagg

SEQ ID NO: 1970784 - DNA, 15 bp, Homo sapiens
ccctgccgaccaggg

SEQ ID NO: 1970785 - DNA, 15 bp, Homo sapiens
cctgccgaccaggga

SEQ ID NO: 1970786 - DNA, 15 bp, Homo sapiens
ctgccgaccagggat

SEQ ID NO: 1970787 - DNA, 15 bp, Homo sapiens
tgccgaccagggatc

SEQ ID NO: 1970788 - DNA, 15 bp, Homo sapiens
gccgaccagggatct

SEQ ID NO: 1970789 - DNA, 15 bp, Homo sapiens
ccgaccagggatctt

SEQ ID NO: 1970790 - DNA, 15 bp, Homo sapiens
cgaccagggatctta

SEQ ID NO: 1970791 - DNA, 15 bp, Homo sapiens
gaccagggatcttac

SEQ ID NO: 1970792 - DNA, 15 bp, Homo sapiens
accagggatcttacg

SEQ ID NO: 1970793 - DNA, 15 bp, Homo sapiens
ccagggatcttacgc

SEQ ID NO: 1970794 - DNA, 15 bp, Homo sapiens
cagggatcttacgca

SEQ ID NO: 1970795 - DNA, 15 bp, Homo sapiens
agggatcttacgcag

SEQ ID NO: 1970796 - DNA, 15 bp, Homo sapiens
gggatcttacgcagt

SEQ ID NO: 1970797 - DNA, 15 bp, Homo sapiens
ggatcttacgcagtc

SEQ ID NO: 1970798 - DNA, 15 bp, Homo sapiens
gatcttacgcagtca

SEQ ID NO: 1970799 - DNA, 15 bp, Homo sapiens
atcttacgcagtcat

SEQ ID NO: 1970800 - DNA, 15 bp, Homo sapiens
tcttacgcagtcatt

SEQ ID NO: 1970801 - DNA, 15 bp, Homo sapiens
cttacgcagtcattg

SEQ ID NO: 1970802 - DNA, 15 bp, Homo sapiens
ttacgcagtcattgc

SEQ ID NO: 1970803 - DNA, 15 bp, Homo sapiens
tacgcagtcattgct

SEQ ID NO: 1970804 - DNA, 15 bp, Homo sapiens
acgcagtcattgctg

SEQ ID NO: 1970805 - DNA, 15 bp, Homo sapiens
cgcagtcattgctgg

SEQ ID NO: 1970806 - DNA, 15 bp, Homo sapiens
gcagtcattgctggc

SEQ ID NO: 1970807 - DNA, 15 bp, Homo sapiens
cagtcattgctggct

SEQ ID NO: 1970808 - DNA, 15 bp, Homo sapiens
agtcattgctggctc

SEQ ID NO: 1970809 - DNA, 15 bp, Homo sapiens
gtcattgctggctcc

SEQ ID NO: 1970810 - DNA, 15 bp, Homo sapiens
tcattgctggctcct

SEQ ID NO: 1970811 - DNA, 15 bp, Homo sapiens
cattgctggctcctc

SEQ ID NO: 1970812 - DNA, 15 bp, Homo sapiens
attgctggctcctcc

SEQ ID NO: 1970813 - DNA, 15 bp, Homo sapiens
ttgctggctcctcca

SEQ ID NO: 1970814 - DNA, 15 bp, Homo sapiens
tgctggctcctccaa

SEQ ID NO: 1970815 - DNA, 15 bp, Homo sapiens
gctggctcctccaag

SEQ ID NO: 1970816 - DNA, 15 bp, Homo sapiens
ctggctcctccaagg

SEQ ID NO: 1970817 - DNA, 15 bp, Homo sapiens
tggctcctccaaggt

SEQ ID NO: 1970818 - DNA, 15 bp, Homo sapiens
ggctcctccaaggtc

SEQ ID NO: 1970819 - DNA, 15 bp, Homo sapiens
gctcctccaaggtca

SEQ ID NO: 1970820 - DNA, 15 bp, Homo sapiens
ctcctccaaggtcaa

SEQ ID NO: 1970821 - DNA, 15 bp, Homo sapiens
tcctccaaggtcaag

SEQ ID NO: 1970822 - DNA, 15 bp, Homo sapiens
cctccaaggtcaagt

SEQ ID NO: 1970823 - DNA, 15 bp, Homo sapiens
ctccaaggtcaagtt

SEQ ID NO: 1970824 - DNA, 15 bp, Homo sapiens
tccaaggtcaagttc

SEQ ID NO: 1970825 - DNA, 15 bp, Homo sapiens
ccaaggtcaagttcg

SEQ ID NO: 1970826 - DNA, 15 bp, Homo sapiens
caaggtcaagttcga

SEQ ID NO: 1970827 - DNA, 15 bp, Homo sapiens
aaggtcaagttcgac

SEQ ID NO: 1970828 - DNA, 15 bp, Homo sapiens
aggtcaagttcgacc

SEQ ID NO: 1970829 - DNA, 15 bp, Homo sapiens
ggtcaagttcgacct

SEQ ID NO: 1970830 - DNA, 15 bp, Homo sapiens
gtcaagttcgacctc

SEQ ID NO: 1970831 - DNA, 15 bp, Homo sapiens
tcaagttcgacctca

SEQ ID NO: 1970832 - DNA, 15 bp, Homo sapiens
caagttcgacctcaa

SEQ ID NO: 1970833 - DNA, 15 bp, Homo sapiens
aagttcgacctcaag

SEQ ID NO: 1970834 - DNA, 15 bp, Homo sapiens
agttcgacctcaagg

SEQ ID NO: 1970835 - DNA, 15 bp, Homo sapiens
gttcgacctcaaggt

SEQ ID NO: 1970836 - DNA, 15 bp, Homo sapiens
ttcgacctcaaggtc

SEQ ID NO: 1970837 - DNA, 15 bp, Homo sapiens
tcgacctcaaggtca

SEQ ID NO: 1970838 - DNA, 15 bp, Homo sapiens
cgacctcaaggtcat

SEQ ID NO: 1970839 - DNA, 15 bp, Homo sapiens
gacctcaaggtcata

SEQ ID NO: 1970840 - DNA, 15 bp, Homo sapiens
acctcaaggtcatag

SEQ ID NO: 1970841 - DNA, 15 bp, Homo sapiens
cctcaaggtcataga

SEQ ID NO: 1970842 - DNA, 15 bp, Homo sapiens
ctcaaggtcatagag

SEQ ID NO: 1970843 - DNA, 15 bp, Homo sapiens
tcaaggtcatagagg

SEQ ID NO: 1970844 - DNA, 15 bp, Homo sapiens
caaggtcatagaggc

SEQ ID NO: 1970845 - DNA, 15 bp, Homo sapiens
aaggtcatagaggca

SEQ ID NO: 1970846 - DNA, 15 bp, Homo sapiens
aggtcatagaggcag

SEQ ID NO: 1970847 - DNA, 15 bp, Homo sapiens
ggtcatagaggcagg

SEQ ID NO: 1970848 - DNA, 15 bp, Homo sapiens
gtcatagaggcaggt

SEQ ID NO: 1970849 - DNA, 15 bp, Homo sapiens
tcatagaggcaggta

SEQ ID NO: 1970850 - DNA, 15 bp, Homo sapiens
catagaggcaggtaa

SEQ ID NO: 1970851 - DNA, 15 bp, Homo sapiens
atagaggcaggtaag

SEQ ID NO: 1970852 - DNA, 15 bp, Homo sapiens
tagaggcaggtaaga

SEQ ID NO: 1970853 - DNA, 15 bp, Homo sapiens
agaggcaggtaagat

SEQ ID NO: 1970854 - DNA, 15 bp, Homo sapiens
gaggcaggtaagatc

SEQ ID NO: 1970855 - DNA, 15 bp, Homo sapiens
aggcaggtaagatcc

SEQ ID NO: 1970856 - DNA, 15 bp, Homo sapiens
ggcaggtaagatcct

SEQ ID NO: 1970857 - DNA, 15 bp, Homo sapiens
gcaggtaagatcctg

SEQ ID NO: 1970858 - DNA, 15 bp, Homo sapiens
caggtaagatcctga

SEQ ID NO: 1970859 - DNA, 15 bp, Homo sapiens
aggtaagatcctgat

SEQ ID NO: 1970860 - DNA, 15 bp, Homo sapiens
ggtaagatcctgatc

SEQ ID NO: 1970861 - DNA, 15 bp, Homo sapiens
gtaagatcctgatca

SEQ ID NO: 1970862 - DNA, 15 bp, Homo sapiens
taagatcctgatcag

SEQ ID NO: 1970863 - DNA, 15 bp, Homo sapiens
aagatcctgatcagc

SEQ ID NO: 1970864 - DNA, 15 bp, Homo sapiens
agatcctgatcagcc

SEQ ID NO: 1970865 - DNA, 15 bp, Homo sapiens
gatcctgatcagcct

SEQ ID NO: 1970866 - DNA, 15 bp, Homo sapiens
atcctgatcagcctt

SEQ ID NO: 1970867 - DNA, 15 bp, Homo sapiens
tcctgatcagccttc

SEQ ID NO: 1970868 - DNA, 15 bp, Homo sapiens
cctgatcagccttcc

SEQ ID NO: 1970869 - DNA, 15 bp, Homo sapiens
ctgatcagccttccc

SEQ ID NO: 1970870 - DNA, 15 bp, Homo sapiens
tgatcagccttccct

SEQ ID NO: 1970871 - DNA, 15 bp, Homo sapiens
gatcagccttccctg

SEQ ID NO: 1970872 - DNA, 15 bp, Homo sapiens
atcagccttccctga

SEQ ID NO: 1970873 - DNA, 15 bp, Homo sapiens
tcagccttccctgag

SEQ ID NO: 1970874 - DNA, 15 bp, Homo sapiens
cagccttccctgagg

SEQ ID NO: 1970875 - DNA, 15 bp, Homo sapiens
agccttccctgaggt

SEQ ID NO: 1970876 - DNA, 15 bp, Homo sapiens
gccttccctgaggtt

SEQ ID NO: 1970877 - DNA, 15 bp, Homo sapiens
ccttccctgaggttt

SEQ ID NO: 1970878 - DNA, 15 bp, Homo sapiens
cttccctgaggtttg

SEQ ID NO: 1970879 - DNA, 15 bp, Homo sapiens
ttccctgaggtttgg

SEQ ID NO: 1970880 - DNA, 15 bp, Homo sapiens
tccctgaggtttggg

SEQ ID NO: 1970881 - DNA, 15 bp, Homo sapiens
ccctgaggtttgggc

SEQ ID NO: 1970882 - DNA, 15 bp, Homo sapiens
cctgaggtttgggct

SEQ ID NO: 1970883 - DNA, 15 bp, Homo sapiens
ctgaggtttgggctg

SEQ ID NO: 1970884 - DNA, 15 bp, Homo sapiens
tgaggtttgggctgc

SEQ ID NO: 1970885 - DNA, 15 bp, Homo sapiens
gaggtttgggctgct

SEQ ID NO: 1970886 - DNA, 15 bp, Homo sapiens
aggtttgggctgctg

SEQ ID NO: 1970887 - DNA, 15 bp, Homo sapiens
ggtttgggctgctgg

SEQ ID NO: 1970888 - DNA, 15 bp, Homo sapiens
gtttgggctgctggg

SEQ ID NO: 1970889 - DNA, 15 bp, Homo sapiens
tttgggctgctgggg

SEQ ID NO: 1970890 - DNA, 15 bp, Homo sapiens
ttgggctgctggggg

SEQ ID NO: 1970891 - DNA, 15 bp, Homo sapiens
tgggctgctggggga

SEQ ID NO: 1970892 - DNA, 15 bp, Homo sapiens
gggctgctgggggag

SEQ ID NO: 1970893 - DNA, 15 bp, Homo sapiens
ggctgctgggggagg

SEQ ID NO: 1970894 - DNA, 15 bp, Homo sapiens
gctgctgggggaggg

SEQ ID NO: 1970895 - DNA, 15 bp, Homo sapiens
ctgctgggggagggg

SEQ ID NO: 1970896 - DNA, 15 bp, Homo sapiens
tgctgggggaggggc

SEQ ID NO: 1970897 - DNA, 15 bp, Homo sapiens
gctgggggaggggca

SEQ ID NO: 1970898 - DNA, 15 bp, Homo sapiens
ctgggggaggggcag

SEQ ID NO: 1970899 - DNA, 15 bp, Homo sapiens
tgggggaggggcagc

SEQ ID NO: 1970900 - DNA, 15 bp, Homo sapiens
gggggaggggcagcc

SEQ ID NO: 1970901 - DNA, 15 bp, Homo sapiens
ggggaggggcagccc

SEQ ID NO: 1970902 - DNA, 15 bp, Homo sapiens
gggaggggcagccca

SEQ ID NO: 1970903 - DNA, 15 bp, Homo sapiens
ggaggggcagcccag

SEQ ID NO: 1970904 - DNA, 15 bp, Homo sapiens
gaggggcagcccagc

SEQ ID NO: 1970905 - DNA, 15 bp, Homo sapiens
aggggcagcccagcg

SEQ ID NO: 1970906 - DNA, 15 bp, Homo sapiens
ggggcagcccagcga

SEQ ID NO: 1970907 - DNA, 15 bp, Homo sapiens
gggcagcccagcgac

SEQ ID NO: 1970908 - DNA, 15 bp, Homo sapiens
ggcagcccagcgact

SEQ ID NO: 1970909 - DNA, 15 bp, Homo sapiens
gcagcccagcgactc

SEQ ID NO: 1970910 - DNA, 15 bp, Homo sapiens
cagcccagcgactct

SEQ ID NO: 1970911 - DNA, 15 bp, Homo sapiens
agcccagcgactctc

SEQ ID NO: 1970912 - DNA, 15 bp, Homo sapiens
gcccagcgactctcc

SEQ ID NO: 1970913 - DNA, 15 bp, Homo sapiens
cccagcgactctcca

SEQ ID NO: 1970914 - DNA, 15 bp, Homo sapiens
ccagcgactctccat

SEQ ID NO: 1970915 - DNA, 15 bp, Homo sapiens
cagcgactctccatc

SEQ ID NO: 1970916 - DNA, 15 bp, Homo sapiens
agcgactctccatcc

SEQ ID NO: 1970917 - DNA, 15 bp, Homo sapiens
gcgactctccatcca

SEQ ID NO: 1970918 - DNA, 15 bp, Homo sapiens
cgactctccatccat

SEQ ID NO: 1970919 - DNA, 15 bp, Homo sapiens
gactctccatccatc

SEQ ID NO: 1970920 - DNA, 15 bp, Homo sapiens
actctccatccatcc

SEQ ID NO: 1970921 - DNA, 15 bp, Homo sapiens
ctctccatccatcca

SEQ ID NO: 1970922 - DNA, 15 bp, Homo sapiens
tctccatccatccag

SEQ ID NO: 1970923 - DNA, 15 bp, Homo sapiens
ctccatccatccagg

SEQ ID NO: 1970924 - DNA, 15 bp, Homo sapiens
tccatccatccaggg

SEQ ID NO: 1970925 - DNA, 15 bp, Homo sapiens
ccatccatccaggga

SEQ ID NO: 1970926 - DNA, 15 bp, Homo sapiens
catccatccagggaa

SEQ ID NO: 1970927 - DNA, 15 bp, Homo sapiens
atccatccagggaac

SEQ ID NO: 1970928 - DNA, 15 bp, Homo sapiens
tccatccagggaaca

SEQ ID NO: 1970929 - DNA, 15 bp, Homo sapiens
ccatccagggaacag

SEQ ID NO: 1970930 - DNA, 15 bp, Homo sapiens
catccagggaacagg

SEQ ID NO: 1970931 - DNA, 15 bp, Homo sapiens
atccagggaacagga

SEQ ID NO: 1970932 - DNA, 15 bp, Homo sapiens
tccagggaacaggag

SEQ ID NO: 1970933 - DNA, 15 bp, Homo sapiens
ccagggaacaggagg

SEQ ID NO: 1970934 - DNA, 15 bp, Homo sapiens
cagggaacaggaggt

SEQ ID NO: 1970935 - DNA, 15 bp, Homo sapiens
agggaacaggaggtg

SEQ ID NO: 1970936 - DNA, 15 bp, Homo sapiens
gggaacaggaggtgc

SEQ ID NO: 1970937 - DNA, 15 bp, Homo sapiens
ggaacaggaggtgct

SEQ ID NO: 1970938 - DNA, 15 bp, Homo sapiens
gaacaggaggtgctt

SEQ ID NO: 1970939 - DNA, 15 bp, Homo sapiens
aacaggaggtgcttt

SEQ ID NO: 1970940 - DNA, 15 bp, Homo sapiens
acaggaggtgctttc

SEQ ID NO: 1970941 - DNA, 15 bp, Homo sapiens
caggaggtgctttca

SEQ ID NO: 1970942 - DNA, 15 bp, Homo sapiens
aggaggtgctttcac

SEQ ID NO: 1970943 - DNA, 15 bp, Homo sapiens
ggaggtgctttcaca

SEQ ID NO: 1970944 - DNA, 15 bp, Homo sapiens
gaggtgctttcacac

SEQ ID NO: 1970945 - DNA, 15 bp, Homo sapiens
aggtgctttcacact

SEQ ID NO: 1970946 - DNA, 15 bp, Homo sapiens
ggtgctttcacactt

SEQ ID NO: 1970947 - DNA, 15 bp, Homo sapiens
gtgctttcacacttt

SEQ ID NO: 1970948 - DNA, 15 bp, Homo sapiens
tgctttcacactttc

SEQ ID NO: 1970949 - DNA, 15 bp, Homo sapiens
gctttcacactttct

SEQ ID NO: 1970950 - DNA, 15 bp, Homo sapiens
ctttcacactttctt

SEQ ID NO: 1970951 - DNA, 15 bp, Homo sapiens
tttcacactttcttg

SEQ ID NO: 1970952 - DNA, 15 bp, Homo sapiens
ttcacactttcttgc

SEQ ID NO: 1970953 - DNA, 15 bp, Homo sapiens
tcacactttcttgcc

SEQ ID NO: 1970954 - DNA, 15 bp, Homo sapiens
cacactttcttgcct

SEQ ID NO: 1970955 - DNA, 15 bp, Homo sapiens
acactttcttgcctt

SEQ ID NO: 1970956 - DNA, 15 bp, Homo sapiens
cactttcttgccttt

SEQ ID NO: 1970957 - DNA, 15 bp, Homo sapiens
actttcttgcctttg

SEQ ID NO: 1970958 - DNA, 15 bp, Homo sapiens
ctttcttgcctttgc

SEQ ID NO: 1970959 - DNA, 15 bp, Homo sapiens
tttcttgcctttgct

SEQ ID NO: 1970960 - DNA, 15 bp, Homo sapiens
ttcttgcctttgctg

SEQ ID NO: 1970961 - DNA, 15 bp, Homo sapiens
tcttgcctttgctgt

SEQ ID NO: 1970962 - DNA, 15 bp, Homo sapiens
cttgcctttgctgtg

SEQ ID NO: 1970963 - DNA, 15 bp, Homo sapiens
ttgcctttgctgtgg

SEQ ID NO: 1970964 - DNA, 15 bp, Homo sapiens
tgcctttgctgtggc

SEQ ID NO: 1970965 - DNA, 15 bp, Homo sapiens
gcctttgctgtggct

SEQ ID NO: 1970966 - DNA, 15 bp, Homo sapiens
cctttgctgtggctg

SEQ ID NO: 1970967 - DNA, 15 bp, Homo sapiens
ctttgctgtggctgt

SEQ ID NO: 1970968 - DNA, 15 bp, Homo sapiens
tttgctgtggctgtg

SEQ ID NO: 1970969 - DNA, 15 bp, Homo sapiens
ttgctgtggctgtgc

SEQ ID NO: 1970970 - DNA, 15 bp, Homo sapiens
tgctgtggctgtgcc

SEQ ID NO: 1970971 - DNA, 15 bp, Homo sapiens
gctgtggctgtgccc

SEQ ID NO: 1970972 - DNA, 15 bp, Homo sapiens
ctgtggctgtgcccc

SEQ ID NO: 1970973 - DNA, 15 bp, Homo sapiens
tgtggctgtgccccc

SEQ ID NO: 1970974 - DNA, 15 bp, Homo sapiens
gtggctgtgcccccc

SEQ ID NO: 1970975 - DNA, 15 bp, Homo sapiens
tggctgtgccccccg

SEQ ID NO: 1970976 - DNA, 15 bp, Homo sapiens
ggctgtgccccccgc

SEQ ID NO: 1970977 - DNA, 15 bp, Homo sapiens
gctgtgccccccgcc

SEQ ID NO: 1970978 - DNA, 15 bp, Homo sapiens
ctgtgccccccgcca

SEQ ID NO: 1970979 - DNA, 15 bp, Homo sapiens
tgtgccccccgccag

SEQ ID NO: 1970980 - DNA, 15 bp, Homo sapiens
tgccccccgccagga

SEQ ID NO: 1970981 - DNA, 15 bp, Homo sapiens
gccccccgccaggaa

SEQ ID NO: 1970982 - DNA, 15 bp, Homo sapiens
ccccccgccaggaac

SEQ ID NO: 1970983 - DNA, 15 bp, Homo sapiens
cccccgccaggaacg

SEQ ID NO: 1970984 - DNA, 15 bp, Homo sapiens
ccccgccaggaacgc

SEQ ID NO: 1970985 - DNA, 15 bp, Homo sapiens
cccgccaggaacgcc

SEQ ID NO: 1970986 - DNA, 15 bp, Homo sapiens
ccgccaggaacgccc

SEQ ID NO: 1970987 - DNA, 15 bp, Homo sapiens
cgccaggaacgccct

SEQ ID NO: 1970988 - DNA, 15 bp, Homo sapiens
gccaggaacgccctt

SEQ ID NO: 1970989 - DNA, 15 bp, Homo sapiens
ccaggaacgcccttt

SEQ ID NO: 1970990 - DNA, 15 bp, Homo sapiens
caggaacgccctttc

SEQ ID NO: 1970991 - DNA, 15 bp, Homo sapiens
aggaacgccctttcc

SEQ ID NO: 1970992 - DNA, 15 bp, Homo sapiens
ggaacgccctttccc

SEQ ID NO: 1970993 - DNA, 15 bp, Homo sapiens
gaacgccctttcccc

SEQ ID NO: 1970994 - DNA, 15 bp, Homo sapiens
aacgccctttccccc

SEQ ID NO: 1970995 - DNA, 15 bp, Homo sapiens
acgccctttccccct

SEQ ID NO: 1970996 - DNA, 15 bp, Homo sapiens
cgccctttccccctt

SEQ ID NO: 1970997 - DNA, 15 bp, Homo sapiens
gccctttcccccttt

SEQ ID NO: 1970998 - DNA, 15 bp, Homo sapiens
ccctttccccctttt

SEQ ID NO: 1970999 - DNA, 15 bp, Homo sapiens
cctttcccccttttc

SEQ ID NO: 1971000 - DNA, 15 bp, Homo sapiens
tttcccccttttctg

SEQ ID NO: 1971001 - DNA, 15 bp, Homo sapiens
ttcccccttttctgc

SEQ ID NO: 1971002 - DNA, 15 bp, Homo sapiens
tcccccttttctgca

SEQ ID NO: 1971003 - DNA, 15 bp, Homo sapiens
cccccttttctgcac

SEQ ID NO: 1971004 - DNA, 15 bp, Homo sapiens
ccccttttctgcaca

SEQ ID NO: 1971005 - DNA, 15 bp, Homo sapiens
cccttttctgcacat

SEQ ID NO: 1971006 - DNA, 15 bp, Homo sapiens
ccttttctgcacatg

SEQ ID NO: 1971007 - DNA, 15 bp, Homo sapiens
cttttctgcacatga

SEQ ID NO: 1971008 - DNA, 15 bp, Homo sapiens
ttttctgcacatgac

SEQ ID NO: 1971009 - DNA, 15 bp, Homo sapiens
tttctgcacatgacc

SEQ ID NO: 1971010 - DNA, 15 bp, Homo sapiens
ttctgcacatgacct

SEQ ID NO: 1971011 - DNA, 15 bp, Homo sapiens
tctgcacatgacctc

SEQ ID NO: 1971012 - DNA, 15 bp, Homo sapiens
ctgcacatgacctct

SEQ ID NO: 1971013 - DNA, 15 bp, Homo sapiens
tgcacatgacctctc

SEQ ID NO: 1971014 - DNA, 15 bp, Homo sapiens
gcacatgacctctct

SEQ ID NO: 1971015 - DNA, 15 bp, Homo sapiens
cacatgacctctctg

SEQ ID NO: 1971016 - DNA, 15 bp, Homo sapiens
acatgacctctctga

SEQ ID NO: 1971017 - DNA, 15 bp, Homo sapiens
catgacctctctgag

SEQ ID NO: 1971018 - DNA, 15 bp, Homo sapiens
atgacctctctgagt

SEQ ID NO: 1971019 - DNA, 15 bp, Homo sapiens
tgacctctctgagta

SEQ ID NO: 1971020 - DNA, 15 bp, Homo sapiens
gacctctctgagtac

SEQ ID NO: 1971021 - DNA, 15 bp, Homo sapiens
acctctctgagtacc

SEQ ID NO: 1971022 - DNA, 15 bp, Homo sapiens
cctctctgagtaccc

SEQ ID NO: 1971023 - DNA, 15 bp, Homo sapiens
ctctctgagtacccc

SEQ ID NO: 1971024 - DNA, 15 bp, Homo sapiens
tctctgagtaccccc

SEQ ID NO: 1971025 - DNA, 15 bp, Homo sapiens
ctctgagtaccccca

SEQ ID NO: 1971026 - DNA, 15 bp, Homo sapiens
tctgagtacccccat

SEQ ID NO: 1971027 - DNA, 15 bp, Homo sapiens
ctgagtacccccatg

SEQ ID NO: 1971028 - DNA, 15 bp, Homo sapiens
tgagtacccccatgt

SEQ ID NO: 1971029 - DNA, 15 bp, Homo sapiens
gagtacccccatgtg

SEQ ID NO: 1971030 - DNA, 15 bp, Homo sapiens
agtacccccatgtgc

SEQ ID NO: 1971031 - DNA, 15 bp, Homo sapiens
gtacccccatgtgcc

SEQ ID NO: 1971032 - DNA, 15 bp, Homo sapiens
tacccccatgtgcca

SEQ ID NO: 1971033 - DNA, 15 bp, Homo sapiens
acccccatgtgccat

SEQ ID NO: 1971034 - DNA, 15 bp, Homo sapiens
cccccatgtgccatc

SEQ ID NO: 1971035 - DNA, 15 bp, Homo sapiens
ccccatgtgccatcc

SEQ ID NO: 1971036 - DNA, 15 bp, Homo sapiens
cccatgtgccatcct

SEQ ID NO: 1971037 - DNA, 15 bp, Homo sapiens
ccatgtgccatcctg

SEQ ID NO: 1971038 - DNA, 15 bp, Homo sapiens
catgtgccatcctgg

SEQ ID NO: 1971039 - DNA, 15 bp, Homo sapiens
atgtgccatcctggc

SEQ ID NO: 1971040 - DNA, 15 bp, Homo sapiens
tgtgccatcctggct

SEQ ID NO: 1971041 - DNA, 15 bp, Homo sapiens
gtgccatcctggctt

SEQ ID NO: 1971042 - DNA, 15 bp, Homo sapiens
tgccatcctggcttg

SEQ ID NO: 1971043 - DNA, 15 bp, Homo sapiens
gccatcctggcttgt

SEQ ID NO: 1971044 - DNA, 15 bp, Homo sapiens
ccatcctggcttgtt

SEQ ID NO: 1971045 - DNA, 15 bp, Homo sapiens
catcctggcttgttc

SEQ ID NO: 1971046 - DNA, 15 bp, Homo sapiens
atcctggcttgttcc

SEQ ID NO: 1971047 - DNA, 15 bp, Homo sapiens
tcctggcttgttcca

SEQ ID NO: 1971048 - DNA, 15 bp, Homo sapiens
cctggcttgttccag

SEQ ID NO: 1971049 - DNA, 15 bp, Homo sapiens
ctggcttgttccagc

SEQ ID NO: 1971050 - DNA, 15 bp, Homo sapiens
tggcttgttccagcc

SEQ ID NO: 1971051 - DNA, 15 bp, Homo sapiens
ggcttgttccagcca

SEQ ID NO: 1971052 - DNA, 15 bp, Homo sapiens
gcttgttccagccat

SEQ ID NO: 1971053 - DNA, 15 bp, Homo sapiens
cttgttccagccatg

SEQ ID NO: 1971054 - DNA, 15 bp, Homo sapiens
ttgttccagccatgg

SEQ ID NO: 1971055 - DNA, 15 bp, Homo sapiens
tgttccagccatggg

SEQ ID NO: 1971056 - DNA, 15 bp, Homo sapiens
gttccagccatgggg

SEQ ID NO: 1971057 - DNA, 15 bp, Homo sapiens
ttccagccatggggt

SEQ ID NO: 1971058 - DNA, 15 bp, Homo sapiens
tccagccatggggta

SEQ ID NO: 1971059 - DNA, 15 bp, Homo sapiens
ccagccatggggtag

SEQ ID NO: 1971060 - DNA, 15 bp, Homo sapiens
cagccatggggtagg

SEQ ID NO: 1971061 - DNA, 15 bp, Homo sapiens
agccatggggtaggt

SEQ ID NO: 1971062 - DNA, 15 bp, Homo sapiens
gccatggggtaggtg

SEQ ID NO: 1971063 - DNA, 15 bp, Homo sapiens
ccatggggtaggtgg

SEQ ID NO: 1971064 - DNA, 15 bp, Homo sapiens
catggggtaggtggg

SEQ ID NO: 1971065 - DNA, 15 bp, Homo sapiens
atggggtaggtggga

SEQ ID NO: 1971066 - DNA, 15 bp, Homo sapiens
tggggtaggtgggag

SEQ ID NO: 1971067 - DNA, 15 bp, Homo sapiens
ggggtaggtgggaga

SEQ ID NO: 1971068 - DNA, 15 bp, Homo sapiens
gggtaggtgggagag

SEQ ID NO: 1971069 - DNA, 15 bp, Homo sapiens
ggtaggtgggagaga

SEQ ID NO: 1971070 - DNA, 15 bp, Homo sapiens
gtaggtgggagagat

SEQ ID NO: 1971071 - DNA, 15 bp, Homo sapiens
taggtgggagagatg

SEQ ID NO: 1971072 - DNA, 15 bp, Homo sapiens
aggtgggagagatga

SEQ ID NO: 1971073 - DNA, 15 bp, Homo sapiens
ggtgggagagatgaa

SEQ ID NO: 1971074 - DNA, 15 bp, Homo sapiens
gtgggagagatgaac

SEQ ID NO: 1971075 - DNA, 15 bp, Homo sapiens
tgggagagatgaaca

SEQ ID NO: 1971076 - DNA, 15 bp, Homo sapiens
gggagagatgaacaa

SEQ ID NO: 1971077 - DNA, 15 bp, Homo sapiens
ggagagatgaacaag

SEQ ID NO: 1971078 - DNA, 15 bp, Homo sapiens
gagagatgaacaaga

SEQ ID NO: 1971079 - DNA, 15 bp, Homo sapiens
agagatgaacaagac

SEQ ID NO: 1971080 - DNA, 15 bp, Homo sapiens
gagatgaacaagaca

SEQ ID NO: 1971081 - DNA, 15 bp, Homo sapiens
agatgaacaagacac

SEQ ID NO: 1971082 - DNA, 15 bp, Homo sapiens
gatgaacaagacaca

SEQ ID NO: 1971083 - DNA, 15 bp, Homo sapiens
atgaacaagacacaa

SEQ ID NO: 1971084 - DNA, 15 bp, Homo sapiens
tgaacaagacacaac

SEQ ID NO: 1971085 - DNA, 15 bp, Homo sapiens
caagacacaacccca

SEQ ID NO: 1971086 - DNA, 15 bp, Homo sapiens
aagacacaaccccac

SEQ ID NO: 1971087 - DNA, 15 bp, Homo sapiens
agacacaaccccact

SEQ ID NO: 1971088 - DNA, 15 bp, Homo sapiens
gacacaaccccactc

SEQ ID NO: 1971089 - DNA, 15 bp, Homo sapiens
acacaaccccactct

SEQ ID NO: 1971090 - DNA, 15 bp, Homo sapiens
cacaaccccactctc

SEQ ID NO: 1971091 - DNA, 15 bp, Homo sapiens
acaaccccactctcc

SEQ ID NO: 1971092 - DNA, 15 bp, Homo sapiens
caaccccactctccc

SEQ ID NO: 1971093 - DNA, 15 bp, Homo sapiens
aaccccactctcccc

SEQ ID NO: 1971094 - DNA, 15 bp, Homo sapiens
accccactctccccc

SEQ ID NO: 1971095 - DNA, 15 bp, Homo sapiens
ccccactctccccct

SEQ ID NO: 1971096 - DNA, 15 bp, Homo sapiens
cccactctccccctg

SEQ ID NO: 1971097 - DNA, 15 bp, Homo sapiens
ccactctccccctgc

SEQ ID NO: 1971098 - DNA, 15 bp, Homo sapiens
cactctccccctgca

SEQ ID NO: 1971099 - DNA, 15 bp, Homo sapiens
actctccccctgcag

SEQ ID NO: 1971100 - DNA, 15 bp, Homo sapiens
ctctccccctgcaga

SEQ ID NO: 1971101 - DNA, 15 bp, Homo sapiens
tctccccctgcagac

SEQ ID NO: 1971102 - DNA, 15 bp, Homo sapiens
ctccccctgcagacc

SEQ ID NO: 1971103 - DNA, 15 bp, Homo sapiens
tccccctgcagacct

SEQ ID NO: 1971104 - DNA, 15 bp, Homo sapiens
ccccctgcagacctc

SEQ ID NO: 1971105 - DNA, 15 bp, Homo sapiens
cccctgcagacctcc

SEQ ID NO: 1971106 - DNA, 15 bp, Homo sapiens
ccctgcagacctccc

SEQ ID NO: 1971107 - DNA, 15 bp, Homo sapiens
cctgcagacctccct

SEQ ID NO: 1971108 - DNA, 15 bp, Homo sapiens
ctgcagacctccctg

SEQ ID NO: 1971109 - DNA, 15 bp, Homo sapiens
tgcagacctccctgg

SEQ ID NO: 1971110 - DNA, 15 bp, Homo sapiens
gcagacctccctggg

SEQ ID NO: 1971111 - DNA, 15 bp, Homo sapiens
cagacctccctgggg

SEQ ID NO: 1971112 - DNA, 15 bp, Homo sapiens
agacctccctgggga

SEQ ID NO: 1971113 - DNA, 15 bp, Homo sapiens
gacctccctggggag

SEQ ID NO: 1971114 - DNA, 15 bp, Homo sapiens
acctccctggggaga

SEQ ID NO: 1971115 - DNA, 15 bp, Homo sapiens
cctccctggggagat

SEQ ID NO: 1971116 - DNA, 15 bp, Homo sapiens
ccctggggagatgac

SEQ ID NO: 1971117 - DNA, 15 bp, Homo sapiens
cctggggagatgacc

SEQ ID NO: 1971118 - DNA, 15 bp, Homo sapiens
ctggggagatgaccc

SEQ ID NO: 1971119 - DNA, 15 bp, Homo sapiens
tggggagatgaccct

SEQ ID NO: 1971120 - DNA, 15 bp, Homo sapiens
ggggagatgaccctg

SEQ ID NO: 1971121 - DNA, 15 bp, Homo sapiens
gggagatgaccctgc

SEQ ID NO: 1971122 - DNA, 15 bp, Homo sapiens
ggagatgaccctgca

SEQ ID NO: 1971123 - DNA, 15 bp, Homo sapiens
gagatgaccctgcac

SEQ ID NO: 1971124 - DNA, 15 bp, Homo sapiens
agatgaccctgcaca

SEQ ID NO: 1971125 - DNA, 15 bp, Homo sapiens
gatgaccctgcacag

SEQ ID NO: 1971126 - DNA, 15 bp, Homo sapiens
atgaccctgcacaga

SEQ ID NO: 1971127 - DNA, 15 bp, Homo sapiens
tgaccctgcacagac

SEQ ID NO: 1971128 - DNA, 15 bp, Homo sapiens
gaccctgcacagacg

SEQ ID NO: 1971129 - DNA, 15 bp, Homo sapiens
accctgcacagacgg

SEQ ID NO: 1971130 - DNA, 15 bp, Homo sapiens
ccctgcacagacggc

SEQ ID NO: 1971131 - DNA, 15 bp, Homo sapiens
cctgcacagacggcc

SEQ ID NO: 1971132 - DNA, 15 bp, Homo sapiens
ctgcacagacggccg

SEQ ID NO: 1971133 - DNA, 15 bp, Homo sapiens
tgcacagacggccgg

SEQ ID NO: 1971134 - DNA, 15 bp, Homo sapiens
gcacagacggccggg

SEQ ID NO: 1971135 - DNA, 15 bp, Homo sapiens
cacagacggccggga

SEQ ID NO: 1971136 - DNA, 15 bp, Homo sapiens
acagacggccgggaa

SEQ ID NO: 1971137 - DNA, 15 bp, Homo sapiens
cagacggccgggaag

SEQ ID NO: 1971138 - DNA, 15 bp, Homo sapiens
agacggccgggaagc

SEQ ID NO: 1971139 - DNA, 15 bp, Homo sapiens
gacggccgggaagcc

SEQ ID NO: 1971140 - DNA, 15 bp, Homo sapiens
acggccgggaagccc

SEQ ID NO: 1971141 - DNA, 15 bp, Homo sapiens
cggccgggaagcccc

SEQ ID NO: 1971142 - DNA, 15 bp, Homo sapiens
ggccgggaagcccca

SEQ ID NO: 1971143 - DNA, 15 bp, Homo sapiens
gccgggaagccccag

SEQ ID NO: 1971144 - DNA, 15 bp, Homo sapiens
ccgggaagccccagg

SEQ ID NO: 1971145 - DNA, 15 bp, Homo sapiens
cgggaagccccagga

SEQ ID NO: 1971146 - DNA, 15 bp, Homo sapiens
gggaagccccaggag

SEQ ID NO: 1971147 - DNA, 15 bp, Homo sapiens
ggaagccccaggagc

SEQ ID NO: 1971148 - DNA, 15 bp, Homo sapiens
gaagccccaggagct

SEQ ID NO: 1971149 - DNA, 15 bp, Homo sapiens
aagccccaggagctg

SEQ ID NO: 1971150 - DNA, 15 bp, Homo sapiens
agccccaggagctgt

SEQ ID NO: 1971151 - DNA, 15 bp, Homo sapiens
gccccaggagctgtg

SEQ ID NO: 1971152 - DNA, 15 bp, Homo sapiens
ccccaggagctgtgg

SEQ ID NO: 1971153 - DNA, 15 bp, Homo sapiens
cccaggagctgtgga

SEQ ID NO: 1971154 - DNA, 15 bp, Homo sapiens
ccaggagctgtggat

SEQ ID NO: 1971155 - DNA, 15 bp, Homo sapiens
caggagctgtggatg

SEQ ID NO: 1971156 - DNA, 15 bp, Homo sapiens
aggagctgtggatga

SEQ ID NO: 1971157 - DNA, 15 bp, Homo sapiens
ggagctgtggatgag

SEQ ID NO: 1971158 - DNA, 15 bp, Homo sapiens
gagctgtggatgagg

SEQ ID NO: 1971159 - DNA, 15 bp, Homo sapiens
agctgtggatgaggg

SEQ ID NO: 1971160 - DNA, 15 bp, Homo sapiens
gctgtggatgagggg

SEQ ID NO: 1971161 - DNA, 15 bp, Homo sapiens
ctgtggatgagggga

SEQ ID NO: 1971162 - DNA, 15 bp, Homo sapiens
tgtggatgaggggag

SEQ ID NO: 1971163 - DNA, 15 bp, Homo sapiens
gtggatgaggggagt

SEQ ID NO: 1971164 - DNA, 15 bp, Homo sapiens
tggatgaggggagtg

SEQ ID NO: 1971165 - DNA, 15 bp, Homo sapiens
ggatgaggggagtgc

SEQ ID NO: 1971166 - DNA, 15 bp, Homo sapiens
gatgaggggagtgca

SEQ ID NO: 1971167 - DNA, 15 bp, Homo sapiens
atgaggggagtgcag

SEQ ID NO: 1971168 - DNA, 15 bp, Homo sapiens
tgaggggagtgcagc

SEQ ID NO: 1971169 - DNA, 15 bp, Homo sapiens
gaggggagtgcagcc

SEQ ID NO: 1971170 - DNA, 15 bp, Homo sapiens
aggggagtgcagccc

SEQ ID NO: 1971171 - DNA, 15 bp, Homo sapiens
ggggagtgcagccca

SEQ ID NO: 1971172 - DNA, 15 bp, Homo sapiens
gggagtgcagcccag

SEQ ID NO: 1971173 - DNA, 15 bp, Homo sapiens
ggagtgcagcccagt

SEQ ID NO: 1971174 - DNA, 15 bp, Homo sapiens
gagtgcagcccagtc

SEQ ID NO: 1971175 - DNA, 15 bp, Homo sapiens
agtgcagcccagtct

SEQ ID NO: 1971176 - DNA, 15 bp, Homo sapiens
gtgcagcccagtctg

SEQ ID NO: 1971177 - DNA, 15 bp, Homo sapiens
tgcagcccagtctga

SEQ ID NO: 1971178 - DNA, 15 bp, Homo sapiens
gcagcccagtctgag

SEQ ID NO: 1971179 - DNA, 15 bp, Homo sapiens
cagcccagtctgagg

SEQ ID NO: 1971180 - DNA, 15 bp, Homo sapiens
agcccagtctgaggg

SEQ ID NO: 1971181 - DNA, 15 bp, Homo sapiens
gcccagtctgagggg

SEQ ID NO: 1971182 - DNA, 15 bp, Homo sapiens
cccagtctgaggggc

SEQ ID NO: 1971183 - DNA, 15 bp, Homo sapiens
ccagtctgaggggct

SEQ ID NO: 1971184 - DNA, 15 bp, Homo sapiens
cagtctgaggggctg

SEQ ID NO: 1971185 - DNA, 15 bp, Homo sapiens
agtctgaggggctgc

SEQ ID NO: 1971186 - DNA, 15 bp, Homo sapiens
gtctgaggggctgct

SEQ ID NO: 1971187 - DNA, 15 bp, Homo sapiens
tctgaggggctgctc

SEQ ID NO: 1971188 - DNA, 15 bp, Homo sapiens
ctgaggggctgctct

SEQ ID NO: 1971189 - DNA, 15 bp, Homo sapiens
tgaggggctgctcta

SEQ ID NO: 1971190 - DNA, 15 bp, Homo sapiens
gaggggctgctctaa

SEQ ID NO: 1971191 - DNA, 15 bp, Homo sapiens
aggggctgctctaag

SEQ ID NO: 1971192 - DNA, 15 bp, Homo sapiens
ggggctgctctaagg

SEQ ID NO: 1971193 - DNA, 15 bp, Homo sapiens
gggctgctctaaggc

SEQ ID NO: 1971194 - DNA, 15 bp, Homo sapiens
ggctgctctaaggct

SEQ ID NO: 1971195 - DNA, 15 bp, Homo sapiens
ctgctctaaggctgg

SEQ ID NO: 1971196 - DNA, 15 bp, Homo sapiens
tgctctaaggctggg

SEQ ID NO: 1971197 - DNA, 15 bp, Homo sapiens
gctctaaggctgggg

SEQ ID NO: 1971198 - DNA, 15 bp, Homo sapiens
ctctaaggctggggc

SEQ ID NO: 1971199 - DNA, 15 bp, Homo sapiens
tctaaggctggggca

SEQ ID NO: 1971200 - DNA, 15 bp, Homo sapiens
ctaaggctggggcag

SEQ ID NO: 1971201 - DNA, 15 bp, Homo sapiens
taaggctggggcaga

SEQ ID NO: 1971202 - DNA, 15 bp, Homo sapiens
aaggctggggcagag

SEQ ID NO: 1971203 - DNA, 15 bp, Homo sapiens
aggctggggcagagc

SEQ ID NO: 1971204 - DNA, 15 bp, Homo sapiens
ggctggggcagagca

SEQ ID NO: 1971205 - DNA, 15 bp, Homo sapiens
gctggggcagagcag

SEQ ID NO: 1971206 - DNA, 15 bp, Homo sapiens
ctggggcagagcagg

SEQ ID NO: 1971207 - DNA, 15 bp, Homo sapiens
tggggcagagcaggg

SEQ ID NO: 1971208 - DNA, 15 bp, Homo sapiens
ggggcagagcaggga

SEQ ID NO: 1971209 - DNA, 15 bp, Homo sapiens
gggcagagcagggat

SEQ ID NO: 1971210 - DNA, 15 bp, Homo sapiens
ggcagagcagggatg

SEQ ID NO: 1971211 - DNA, 15 bp, Homo sapiens
gcagagcagggatgg

SEQ ID NO: 1971212 - DNA, 15 bp, Homo sapiens
cagagcagggatgga

SEQ ID NO: 1971213 - DNA, 15 bp, Homo sapiens
agagcagggatggac

SEQ ID NO: 1971214 - DNA, 15 bp, Homo sapiens
gagcagggatggacc

SEQ ID NO: 1971215 - DNA, 15 bp, Homo sapiens
agcagggatggacct

SEQ ID NO: 1971216 - DNA, 15 bp, Homo sapiens
gcagggatggacctg

SEQ ID NO: 1971217 - DNA, 15 bp, Homo sapiens
cagggatggacctgg

SEQ ID NO: 1971218 - DNA, 15 bp, Homo sapiens
agggatggacctgga

SEQ ID NO: 1971219 - DNA, 15 bp, Homo sapiens
gggatggacctggag

SEQ ID NO: 1971220 - DNA, 15 bp, Homo sapiens
ggatggacctggagc

SEQ ID NO: 1971221 - DNA, 15 bp, Homo sapiens
gatggacctggagct

SEQ ID NO: 1971222 - DNA, 15 bp, Homo sapiens
atggacctggagctg

SEQ ID NO: 1971223 - DNA, 15 bp, Homo sapiens
tggacctggagctgt

SEQ ID NO: 1971224 - DNA, 15 bp, Homo sapiens
ggacctggagctgtt

SEQ ID NO: 1971225 - DNA, 15 bp, Homo sapiens
gacctggagctgttc

SEQ ID NO: 1971226 - DNA, 15 bp, Homo sapiens
acctggagctgttca

SEQ ID NO: 1971227 - DNA, 15 bp, Homo sapiens
cctggagctgttcag

SEQ ID NO: 1971228 - DNA, 15 bp, Homo sapiens
ctggagctgttcagg

SEQ ID NO: 1971229 - DNA, 15 bp, Homo sapiens
tggagctgttcaggg

SEQ ID NO: 1971230 - DNA, 15 bp, Homo sapiens
ggagctgttcagggc

SEQ ID NO: 1971231 - DNA, 15 bp, Homo sapiens
gagctgttcagggca

SEQ ID NO: 1971232 - DNA, 15 bp, Homo sapiens
agctgttcagggcag

SEQ ID NO: 1971233 - DNA, 15 bp, Homo sapiens
gctgttcagggcaga

SEQ ID NO: 1971234 - DNA, 15 bp, Homo sapiens
ctgttcagggcagat

SEQ ID NO: 1971235 - DNA, 15 bp, Homo sapiens
tgttcagggcagatg

SEQ ID NO: 1971236 - DNA, 15 bp, Homo sapiens
gttcagggcagatgc

SEQ ID NO: 1971237 - DNA, 15 bp, Homo sapiens
ttcagggcagatgca

SEQ ID NO: 1971238 - DNA, 15 bp, Homo sapiens
tcagggcagatgcag

SEQ ID NO: 1971239 - DNA, 15 bp, Homo sapiens
cagggcagatgcaga

SEQ ID NO: 1971240 - DNA, 15 bp, Homo sapiens
agggcagatgcagag

SEQ ID NO: 1971241 - DNA, 15 bp, Homo sapiens
gggcagatgcagagg

SEQ ID NO: 1971242 - DNA, 15 bp, Homo sapiens
ggcagatgcagagga

SEQ ID NO: 1971243 - DNA, 15 bp, Homo sapiens
gcagatgcagaggac

SEQ ID NO: 1971244 - DNA, 15 bp, Homo sapiens
cagatgcagaggaca

SEQ ID NO: 1971245 - DNA, 15 bp, Homo sapiens
agatgcagaggacat

SEQ ID NO: 1971246 - DNA, 15 bp, Homo sapiens
gatgcagaggacatg

SEQ ID NO: 1971247 - DNA, 15 bp, Homo sapiens
atgcagaggacatgg

SEQ ID NO: 1971248 - DNA, 15 bp, Homo sapiens
tgcagaggacatggg

SEQ ID NO: 1971249 - DNA, 15 bp, Homo sapiens
gcagaggacatggga

SEQ ID NO: 1971250 - DNA, 15 bp, Homo sapiens
cagaggacatgggaa

SEQ ID NO: 1971251 - DNA, 15 bp, Homo sapiens
agaggacatgggaac

SEQ ID NO: 1971252 - DNA, 15 bp, Homo sapiens
gaggacatgggaact

SEQ ID NO: 1971253 - DNA, 15 bp, Homo sapiens
aggacatgggaactg

SEQ ID NO: 1971254 - DNA, 15 bp, Homo sapiens
ggacatgggaactga

SEQ ID NO: 1971255 - DNA, 15 bp, Homo sapiens
gacatgggaactgat

SEQ ID NO: 1971256 - DNA, 15 bp, Homo sapiens
acatgggaactgatg

SEQ ID NO: 1971257 - DNA, 15 bp, Homo sapiens
catgggaactgatgg

SEQ ID NO: 1971258 - DNA, 15 bp, Homo sapiens
atgggaactgatggc

SEQ ID NO: 1971259 - DNA, 15 bp, Homo sapiens
tgggaactgatggcc

SEQ ID NO: 1971260 - DNA, 15 bp, Homo sapiens
gggaactgatggcct

SEQ ID NO: 1971261 - DNA, 15 bp, Homo sapiens
ggaactgatggcctg

SEQ ID NO: 1971262 - DNA, 15 bp, Homo sapiens
gaactgatggcctgg

SEQ ID NO: 1971263 - DNA, 15 bp, Homo sapiens
aactgatggcctggg

SEQ ID NO: 1971264 - DNA, 15 bp, Homo sapiens
actgatggcctggga

SEQ ID NO: 1971265 - DNA, 15 bp, Homo sapiens
ctgatggcctgggac

SEQ ID NO: 1971266 - DNA, 15 bp, Homo sapiens
tgatggcctgggacg

SEQ ID NO: 1971267 - DNA, 15 bp, Homo sapiens
gatggcctgggacgg

SEQ ID NO: 1971268 - DNA, 15 bp, Homo sapiens
atggcctgggacggg

SEQ ID NO: 1971269 - DNA, 15 bp, Homo sapiens
tggcctgggacgggg

SEQ ID NO: 1971270 - DNA, 15 bp, Homo sapiens
ggcctgggacgggga

SEQ ID NO: 1971271 - DNA, 15 bp, Homo sapiens
gcctgggacggggag

SEQ ID NO: 1971272 - DNA, 15 bp, Homo sapiens
cctgggacggggagg

SEQ ID NO: 1971273 - DNA, 15 bp, Homo sapiens
ctgggacggggagga

SEQ ID NO: 1971274 - DNA, 15 bp, Homo sapiens
tgggacggggaggag

SEQ ID NO: 1971275 - DNA, 15 bp, Homo sapiens
gggacggggaggaga

SEQ ID NO: 1971276 - DNA, 15 bp, Homo sapiens
ggacggggaggagaa

SEQ ID NO: 1971277 - DNA, 15 bp, Homo sapiens
gacggggaggagaat

SEQ ID NO: 1971278 - DNA, 15 bp, Homo sapiens
acggggaggagaatg

SEQ ID NO: 1971279 - DNA, 15 bp, Homo sapiens
cggggaggagaatgt

SEQ ID NO: 1971280 - DNA, 15 bp, Homo sapiens
ggggaggagaatgtg

SEQ ID NO: 1971281 - DNA, 15 bp, Homo sapiens
gggaggagaatgtga

SEQ ID NO: 1971282 - DNA, 15 bp, Homo sapiens
ggaggagaatgtgag

SEQ ID NO: 1971283 - DNA, 15 bp, Homo sapiens
gaggagaatgtgaga

SEQ ID NO: 1971284 - DNA, 15 bp, Homo sapiens
aggagaatgtgagag

SEQ ID NO: 1971285 - DNA, 15 bp, Homo sapiens
ggagaatgtgagagg

SEQ ID NO: 1971286 - DNA, 15 bp, Homo sapiens
gagaatgtgagaggc

SEQ ID NO: 1971287 - DNA, 15 bp, Homo sapiens
agaatgtgagaggca

SEQ ID NO: 1971288 - DNA, 15 bp, Homo sapiens
gaatgtgagaggcag

SEQ ID NO: 1971289 - DNA, 15 bp, Homo sapiens
aatgtgagaggcagg

SEQ ID NO: 1971290 - DNA, 15 bp, Homo sapiens
atgtgagaggcaggc

SEQ ID NO: 1971291 - DNA, 15 bp, Homo sapiens
tgtgagaggcaggct

SEQ ID NO: 1971292 - DNA, 15 bp, Homo sapiens
gtgagaggcaggctg

SEQ ID NO: 1971293 - DNA, 15 bp, Homo sapiens
tgagaggcaggctgg

SEQ ID NO: 1971294 - DNA, 15 bp, Homo sapiens
gagaggcaggctggc

SEQ ID NO: 1971295 - DNA, 15 bp, Homo sapiens
agaggcaggctggct

SEQ ID NO: 1971296 - DNA, 15 bp, Homo sapiens
gaggcaggctggctc

SEQ ID NO: 1971297 - DNA, 15 bp, Homo sapiens
aggcaggctggctct

SEQ ID NO: 1971298 - DNA, 15 bp, Homo sapiens
ggcaggctggctctc

SEQ ID NO: 1971299 - DNA, 15 bp, Homo sapiens
gcaggctggctctcc

SEQ ID NO: 1971300 - DNA, 15 bp, Homo sapiens
caggctggctctcca

SEQ ID NO: 1971301 - DNA, 15 bp, Homo sapiens
aggctggctctccag

SEQ ID NO: 1971302 - DNA, 15 bp, Homo sapiens
ggctggctctccagc

SEQ ID NO: 1971303 - DNA, 15 bp, Homo sapiens
gctggctctccagct

SEQ ID NO: 1971304 - DNA, 15 bp, Homo sapiens
ctggctctccagctc

SEQ ID NO: 1971305 - DNA, 15 bp, Homo sapiens
tggctctccagctca

SEQ ID NO: 1971306 - DNA, 15 bp, Homo sapiens
ggctctccagctcag

SEQ ID NO: 1971307 - DNA, 15 bp, Homo sapiens
gctctccagctcagc

SEQ ID NO: 1971308 - DNA, 15 bp, Homo sapiens
ctctccagctcagca

SEQ ID NO: 1971309 - DNA, 15 bp, Homo sapiens
tctccagctcagcat

SEQ ID NO: 1971310 - DNA, 15 bp, Homo sapiens
ctccagctcagcatg

SEQ ID NO: 1971311 - DNA, 15 bp, Homo sapiens
tccagctcagcatga

SEQ ID NO: 1971312 - DNA, 15 bp, Homo sapiens
ccagctcagcatgag

SEQ ID NO: 1971313 - DNA, 15 bp, Homo sapiens
cagctcagcatgagc

SEQ ID NO: 1971314 - DNA, 15 bp, Homo sapiens
agctcagcatgagct

SEQ ID NO: 1971315 - DNA, 15 bp, Homo sapiens
gctcagcatgagctg

SEQ ID NO: 1971316 - DNA, 15 bp, Homo sapiens
ctcagcatgagctgc

SEQ ID NO: 1971317 - DNA, 15 bp, Homo sapiens
tcagcatgagctgcc

SEQ ID NO: 1971318 - DNA, 15 bp, Homo sapiens
cagcatgagctgcct

SEQ ID NO: 1971319 - DNA, 15 bp, Homo sapiens
agcatgagctgcctc

SEQ ID NO: 1971320 - DNA, 15 bp, Homo sapiens
gcatgagctgcctct

SEQ ID NO: 1971321 - DNA, 15 bp, Homo sapiens
catgagctgcctctg

SEQ ID NO: 1971322 - DNA, 15 bp, Homo sapiens
atgagctgcctctga

SEQ ID NO: 1971323 - DNA, 15 bp, Homo sapiens
tgagctgcctctgag

SEQ ID NO: 1971324 - DNA, 15 bp, Homo sapiens
gagctgcctctgagg

SEQ ID NO: 1971325 - DNA, 15 bp, Homo sapiens
agctgcctctgaggg

SEQ ID NO: 1971326 - DNA, 15 bp, Homo sapiens
gctgcctctgagggg

SEQ ID NO: 1971327 - DNA, 15 bp, Homo sapiens
ctgcctctgaggggc

SEQ ID NO: 1971328 - DNA, 15 bp, Homo sapiens
tgcctctgaggggcc

SEQ ID NO: 1971329 - DNA, 15 bp, Homo sapiens
gcctctgaggggccc

SEQ ID NO: 1971330 - DNA, 15 bp, Homo sapiens
cctctgaggggccca

SEQ ID NO: 1971331 - DNA, 15 bp, Homo sapiens
ctctgaggggcccag

SEQ ID NO: 1971332 - DNA, 15 bp, Homo sapiens
tctgaggggcccagg

SEQ ID NO: 1971333 - DNA, 15 bp, Homo sapiens
ctgaggggcccaggc

SEQ ID NO: 1971334 - DNA, 15 bp, Homo sapiens
tgaggggcccaggca

SEQ ID NO: 1971335 - DNA, 15 bp, Homo sapiens
gaggggcccaggcag

SEQ ID NO: 1971336 - DNA, 15 bp, Homo sapiens
aggggcccaggcagc

SEQ ID NO: 1971337 - DNA, 15 bp, Homo sapiens
ggggcccaggcagcg

SEQ ID NO: 1971338 - DNA, 15 bp, Homo sapiens
gggcccaggcagcgg

SEQ ID NO: 1971339 - DNA, 15 bp, Homo sapiens
ggcccaggcagcggg

SEQ ID NO: 1971340 - DNA, 15 bp, Homo sapiens
gcccaggcagcggga

SEQ ID NO: 1971341 - DNA, 15 bp, Homo sapiens
cccaggcagcgggag

SEQ ID NO: 1971342 - DNA, 15 bp, Homo sapiens
ccaggcagcgggagg

SEQ ID NO: 1971343 - DNA, 15 bp, Homo sapiens
caggcagcgggagga

SEQ ID NO: 1971344 - DNA, 15 bp, Homo sapiens
aggcagcgggaggac

SEQ ID NO: 1971345 - DNA, 15 bp, Homo sapiens
ggcagcgggaggaca

SEQ ID NO: 1971346 - DNA, 15 bp, Homo sapiens
gcagcgggaggacag

SEQ ID NO: 1971347 - DNA, 15 bp, Homo sapiens
cagcgggaggacagc

SEQ ID NO: 1971348 - DNA, 15 bp, Homo sapiens
agcgggaggacagcc

SEQ ID NO: 1971349 - DNA, 15 bp, Homo sapiens
gcgggaggacagcca

SEQ ID NO: 1971350 - DNA, 15 bp, Homo sapiens
cgggaggacagccat

SEQ ID NO: 1971351 - DNA, 15 bp, Homo sapiens
gggaggacagccatg

SEQ ID NO: 1971352 - DNA, 15 bp, Homo sapiens
ggaggacagccatgg

SEQ ID NO: 1971353 - DNA, 15 bp, Homo sapiens
gaggacagccatggc

SEQ ID NO: 1971354 - DNA, 15 bp, Homo sapiens
aggacagccatggca

SEQ ID NO: 1971355 - DNA, 15 bp, Homo sapiens
ggacagccatggcag

SEQ ID NO: 1971356 - DNA, 15 bp, Homo sapiens
gacagccatggcaga

SEQ ID NO: 1971357 - DNA, 15 bp, Homo sapiens
acagccatggcagac

SEQ ID NO: 1971358 - DNA, 15 bp, Homo sapiens
cagccatggcagact

SEQ ID NO: 1971359 - DNA, 15 bp, Homo sapiens
agccatggcagactt

SEQ ID NO: 1971360 - DNA, 15 bp, Homo sapiens
gccatggcagacttt

SEQ ID NO: 1971361 - DNA, 15 bp, Homo sapiens
ccatggcagactttc

SEQ ID NO: 1971362 - DNA, 15 bp, Homo sapiens
catggcagactttcc

SEQ ID NO: 1971363 - DNA, 15 bp, Homo sapiens
atggcagactttcct

SEQ ID NO: 1971364 - DNA, 15 bp, Homo sapiens
tggcagactttcctc

SEQ ID NO: 1971365 - DNA, 15 bp, Homo sapiens
ggcagactttcctca

SEQ ID NO: 1971366 - DNA, 15 bp, Homo sapiens
gcagactttcctcat

SEQ ID NO: 1971367 - DNA, 15 bp, Homo sapiens
cagactttcctcatc

SEQ ID NO: 1971368 - DNA, 15 bp, Homo sapiens
agactttcctcatcc

SEQ ID NO: 1971369 - DNA, 15 bp, Homo sapiens
gactttcctcatcca

SEQ ID NO: 1971370 - DNA, 15 bp, Homo sapiens
actttcctcatccac

SEQ ID NO: 1971371 - DNA, 15 bp, Homo sapiens
ctttcctcatccaca

SEQ ID NO: 1971372 - DNA, 15 bp, Homo sapiens
tttcctcatccacag

SEQ ID NO: 1971373 - DNA, 15 bp, Homo sapiens
ttcctcatccacagc

SEQ ID NO: 1971374 - DNA, 15 bp, Homo sapiens
tcctcatccacagcg

SEQ ID NO: 1971375 - DNA, 15 bp, Homo sapiens
cctcatccacagcgg

SEQ ID NO: 1971376 - DNA, 15 bp, Homo sapiens
ctcatccacagcggg

SEQ ID NO: 1971377 - DNA, 15 bp, Homo sapiens
tcatccacagcgggc

SEQ ID NO: 1971378 - DNA, 15 bp, Homo sapiens
catccacagcgggct

SEQ ID NO: 1971379 - DNA, 15 bp, Homo sapiens
atccacagcgggctc

SEQ ID NO: 1971380 - DNA, 15 bp, Homo sapiens
tccacagcgggctca

SEQ ID NO: 1971381 - DNA, 15 bp, Homo sapiens
ccacagcgggctcat

SEQ ID NO: 1971382 - DNA, 15 bp, Homo sapiens
cacagcgggctcatg

SEQ ID NO: 1971383 - DNA, 15 bp, Homo sapiens
acagcgggctcatgg

SEQ ID NO: 1971384 - DNA, 15 bp, Homo sapiens
cagcgggctcatggg

SEQ ID NO: 1971385 - DNA, 15 bp, Homo sapiens
agcgggctcatgggt

SEQ ID NO: 1971386 - DNA, 15 bp, Homo sapiens
gcgggctcatgggtc

SEQ ID NO: 1971387 - DNA, 15 bp, Homo sapiens
cgggctcatgggtcc

SEQ ID NO: 1971388 - DNA, 15 bp, Homo sapiens
gggctcatgggtcca

SEQ ID NO: 1971389 - DNA, 15 bp, Homo sapiens
ggctcatgggtccaa

SEQ ID NO: 1971390 - DNA, 15 bp, Homo sapiens
gctcatgggtccaat

SEQ ID NO: 1971391 - DNA, 15 bp, Homo sapiens
ctcatgggtccaatg

SEQ ID NO: 1971392 - DNA, 15 bp, Homo sapiens
tcatgggtccaatgc

SEQ ID NO: 1971393 - DNA, 15 bp, Homo sapiens
catgggtccaatgct

SEQ ID NO: 1971394 - DNA, 15 bp, Homo sapiens
atgggtccaatgctc

SEQ ID NO: 1971395 - DNA, 15 bp, Homo sapiens
tgggtccaatgctca

SEQ ID NO: 1971396 - DNA, 15 bp, Homo sapiens
gggtccaatgctcag

SEQ ID NO: 1971397 - DNA, 15 bp, Homo sapiens
ggtccaatgctcagg

SEQ ID NO: 1971398 - DNA, 15 bp, Homo sapiens
gtccaatgctcagga

SEQ ID NO: 1971399 - DNA, 15 bp, Homo sapiens
tccaatgctcaggag

SEQ ID NO: 1971400 - DNA, 15 bp, Homo sapiens
ccaatgctcaggaga

SEQ ID NO: 1971401 - DNA, 15 bp, Homo sapiens
caatgctcaggagag

SEQ ID NO: 1971402 - DNA, 15 bp, Homo sapiens
aatgctcaggagaga

SEQ ID NO: 1971403 - DNA, 15 bp, Homo sapiens
atgctcaggagagag

SEQ ID NO: 1971404 - DNA, 15 bp, Homo sapiens
tgctcaggagagaga

SEQ ID NO: 1971405 - DNA, 15 bp, Homo sapiens
gctcaggagagagag

SEQ ID NO: 1971406 - DNA, 15 bp, Homo sapiens
ctcaggagagagagg

SEQ ID NO: 1971407 - DNA, 15 bp, Homo sapiens
tcaggagagagaggg

SEQ ID NO: 1971408 - DNA, 15 bp, Homo sapiens
caggagagagagggt

SEQ ID NO: 1971409 - DNA, 15 bp, Homo sapiens
aggagagagagggtg

SEQ ID NO: 1971410 - DNA, 15 bp, Homo sapiens
ggagagagagggtgg

SEQ ID NO: 1971411 - DNA, 15 bp, Homo sapiens
gagagagagggtgga

SEQ ID NO: 1971412 - DNA, 15 bp, Homo sapiens
agagagagggtggag

SEQ ID NO: 1971413 - DNA, 15 bp, Homo sapiens
gagagagggtggagg

SEQ ID NO: 1971414 - DNA, 15 bp, Homo sapiens
agagagggtggaggg

SEQ ID NO: 1971415 - DNA, 15 bp, Homo sapiens
gagagggtggagggg

SEQ ID NO: 1971416 - DNA, 15 bp, Homo sapiens
agagggtggaggggt

SEQ ID NO: 1971417 - DNA, 15 bp, Homo sapiens
gagggtggaggggtc

SEQ ID NO: 1971418 - DNA, 15 bp, Homo sapiens
agggtggaggggtct

SEQ ID NO: 1971419 - DNA, 15 bp, Homo sapiens
gggtggaggggtctc

SEQ ID NO: 1971420 - DNA, 15 bp, Homo sapiens
ggtggaggggtctct

SEQ ID NO: 1971421 - DNA, 15 bp, Homo sapiens
gtggaggggtctctg

SEQ ID NO: 1971422 - DNA, 15 bp, Homo sapiens
tggaggggtctctgg

SEQ ID NO: 1971423 - DNA, 15 bp, Homo sapiens
ggaggggtctctggt

SEQ ID NO: 1971424 - DNA, 15 bp, Homo sapiens
gaggggtctctggtt

SEQ ID NO: 1971425 - DNA, 15 bp, Homo sapiens
aggggtctctggtta

SEQ ID NO: 1971426 - DNA, 15 bp, Homo sapiens
ggggtctctggttag

SEQ ID NO: 1971427 - DNA, 15 bp, Homo sapiens
gggtctctggttagt

SEQ ID NO: 1971428 - DNA, 15 bp, Homo sapiens
ggtctctggttagtg

SEQ ID NO: 1971429 - DNA, 15 bp, Homo sapiens
gtctctggttagtgg

SEQ ID NO: 1971430 - DNA, 15 bp, Homo sapiens
tctctggttagtggc

SEQ ID NO: 1971431 - DNA, 15 bp, Homo sapiens
ctctggttagtggct

SEQ ID NO: 1971432 - DNA, 15 bp, Homo sapiens
tctggttagtggctg

SEQ ID NO: 1971433 - DNA, 15 bp, Homo sapiens
ctggttagtggctgc

SEQ ID NO: 1971434 - DNA, 15 bp, Homo sapiens
tggttagtggctgca

SEQ ID NO: 1971435 - DNA, 15 bp, Homo sapiens
ggttagtggctgcac

SEQ ID NO: 1971436 - DNA, 15 bp, Homo sapiens
gttagtggctgcacc

SEQ ID NO: 1971437 - DNA, 15 bp, Homo sapiens
ttagtggctgcacca

SEQ ID NO: 1971438 - DNA, 15 bp, Homo sapiens
tagtggctgcaccac

SEQ ID NO: 1971439 - DNA, 15 bp, Homo sapiens
agtggctgcaccacg

SEQ ID NO: 1971440 - DNA, 15 bp, Homo sapiens
gtggctgcaccacga

SEQ ID NO: 1971441 - DNA, 15 bp, Homo sapiens
tggctgcaccacgac

SEQ ID NO: 1971442 - DNA, 15 bp, Homo sapiens
ggctgcaccacgact

SEQ ID NO: 1971443 - DNA, 15 bp, Homo sapiens
gctgcaccacgactc

SEQ ID NO: 1971444 - DNA, 15 bp, Homo sapiens
ctgcaccacgactcc

SEQ ID NO: 1971445 - DNA, 15 bp, Homo sapiens
tgcaccacgactccc

SEQ ID NO: 1971446 - DNA, 15 bp, Homo sapiens
gcaccacgactccca

SEQ ID NO: 1971447 - DNA, 15 bp, Homo sapiens
caccacgactcccat

SEQ ID NO: 1971448 - DNA, 15 bp, Homo sapiens
accacgactcccatc

SEQ ID NO: 1971449 - DNA, 15 bp, Homo sapiens
ccacgactcccatct

SEQ ID NO: 1971450 - DNA, 15 bp, Homo sapiens
cacgactcccatctg

SEQ ID NO: 1971451 - DNA, 15 bp, Homo sapiens
acgactcccatctga

SEQ ID NO: 1971452 - DNA, 15 bp, Homo sapiens
cgactcccatctgat

SEQ ID NO: 1971453 - DNA, 15 bp, Homo sapiens
gactcccatctgatc

SEQ ID NO: 1971454 - DNA, 15 bp, Homo sapiens
actcccatctgatcc

SEQ ID NO: 1971455 - DNA, 15 bp, Homo sapiens
ctcccatctgatccc

SEQ ID NO: 1971456 - DNA, 15 bp, Homo sapiens
tcccatctgatcccc

SEQ ID NO: 1971457 - DNA, 15 bp, Homo sapiens
cccatctgatcccct

SEQ ID NO: 1971458 - DNA, 15 bp, Homo sapiens
ccatctgatcccctc

SEQ ID NO: 1971459 - DNA, 15 bp, Homo sapiens
catctgatcccctcc

SEQ ID NO: 1971460 - DNA, 15 bp, Homo sapiens
atctgatcccctcca

SEQ ID NO: 1971461 - DNA, 15 bp, Homo sapiens
tctgatcccctccag

SEQ ID NO: 1971462 - DNA, 15 bp, Homo sapiens
ctgatcccctccaga

SEQ ID NO: 1971463 - DNA, 15 bp, Homo sapiens
tgatcccctccagag

SEQ ID NO: 1971464 - DNA, 15 bp, Homo sapiens
gatcccctccagaga

SEQ ID NO: 1971465 - DNA, 15 bp, Homo sapiens
atcccctccagagaa

SEQ ID NO: 1971466 - DNA, 15 bp, Homo sapiens
tcccctccagagaag

SEQ ID NO: 1971467 - DNA, 15 bp, Homo sapiens
cccctccagagaagg

SEQ ID NO: 1971468 - DNA, 15 bp, Homo sapiens
ccctccagagaaggc

SEQ ID NO: 1971469 - DNA, 15 bp, Homo sapiens
cctccagagaaggca

SEQ ID NO: 1971470 - DNA, 15 bp, Homo sapiens
ctccagagaaggcag

SEQ ID NO: 1971471 - DNA, 15 bp, Homo sapiens
tccagagaaggcaga

SEQ ID NO: 1971472 - DNA, 15 bp, Homo sapiens
ccagagaaggcagag

SEQ ID NO: 1971473 - DNA, 15 bp, Homo sapiens
cagagaaggcagagc

SEQ ID NO: 1971474 - DNA, 15 bp, Homo sapiens
agagaaggcagagcc

SEQ ID NO: 1971475 - DNA, 15 bp, Homo sapiens
gagaaggcagagccc

SEQ ID NO: 1971476 - DNA, 15 bp, Homo sapiens
agaaggcagagccca

SEQ ID NO: 1971477 - DNA, 15 bp, Homo sapiens
gaaggcagagcccat

SEQ ID NO: 1971478 - DNA, 15 bp, Homo sapiens
aaggcagagcccatg

SEQ ID NO: 1971479 - DNA, 15 bp, Homo sapiens
aggcagagcccatgc

SEQ ID NO: 1971480 - DNA, 15 bp, Homo sapiens
ggcagagcccatgct

SEQ ID NO: 1971481 - DNA, 15 bp, Homo sapiens
gcagagcccatgctg

SEQ ID NO: 1971482 - DNA, 15 bp, Homo sapiens
cagagcccatgctgg

SEQ ID NO: 1971483 - DNA, 15 bp, Homo sapiens
agagcccatgctggc

SEQ ID NO: 1971484 - DNA, 15 bp, Homo sapiens
gagcccatgctggcc

SEQ ID NO: 1971485 - DNA, 15 bp, Homo sapiens
agcccatgctggccc

SEQ ID NO: 1971486 - DNA, 15 bp, Homo sapiens
gcccatgctggcccc

SEQ ID NO: 1971487 - DNA, 15 bp, Homo sapiens
cccatgctggcccct

SEQ ID NO: 1971488 - DNA, 15 bp, Homo sapiens
ccatgctggcccctg

SEQ ID NO: 1971489 - DNA, 15 bp, Homo sapiens
catgctggcccctgc

SEQ ID NO: 1971490 - DNA, 15 bp, Homo sapiens
atgctggcccctgcc

SEQ ID NO: 1971491 - DNA, 15 bp, Homo sapiens
tgctggcccctgccc

SEQ ID NO: 1971492 - DNA, 15 bp, Homo sapiens
gctggcccctgcccc

SEQ ID NO: 1971493 - DNA, 15 bp, Homo sapiens
ctggcccctgcccct

SEQ ID NO: 1971494 - DNA, 15 bp, Homo sapiens
tggcccctgcccctg

SEQ ID NO: 1971495 - DNA, 15 bp, Homo sapiens
ggcccctgcccctgc

SEQ ID NO: 1971496 - DNA, 15 bp, Homo sapiens
gcccctgcccctgcc

SEQ ID NO: 1971497 - DNA, 15 bp, Homo sapiens
cccctgcccctgccc

SEQ ID NO: 1971498 - DNA, 15 bp, Homo sapiens
ccctgcccctgcccc

SEQ ID NO: 1971499 - DNA, 15 bp, Homo sapiens
cctgcccctgcccct

SEQ ID NO: 1971500 - DNA, 15 bp, Homo sapiens
ctgcccctgcccctg

SEQ ID NO: 1971501 - DNA, 15 bp, Homo sapiens
tgcccctgcccctgc

SEQ ID NO: 1971502 - DNA, 15 bp, Homo sapiens
gcccctgcccctgct

SEQ ID NO: 1971503 - DNA, 15 bp, Homo sapiens
cccctgcccctgctg

SEQ ID NO: 1971504 - DNA, 15 bp, Homo sapiens
ccctgcccctgctga

SEQ ID NO: 1971505 - DNA, 15 bp, Homo sapiens
cctgcccctgctgag

SEQ ID NO: 1971506 - DNA, 15 bp, Homo sapiens
ctgcccctgctgagg

SEQ ID NO: 1971507 - DNA, 15 bp, Homo sapiens
tgcccctgctgaggc

SEQ ID NO: 1971508 - DNA, 15 bp, Homo sapiens
gcccctgctgaggcc

SEQ ID NO: 1971509 - DNA, 15 bp, Homo sapiens
cccctgctgaggcca

SEQ ID NO: 1971510 - DNA, 15 bp, Homo sapiens
ccctgctgaggccac

SEQ ID NO: 1971511 - DNA, 15 bp, Homo sapiens
cctgctgaggccact

SEQ ID NO: 1971512 - DNA, 15 bp, Homo sapiens
ctgctgaggccactg

SEQ ID NO: 1971513 - DNA, 15 bp, Homo sapiens
tgctgaggccactgg

SEQ ID NO: 1971514 - DNA, 15 bp, Homo sapiens
gctgaggccactgga

SEQ ID NO: 1971515 - DNA, 15 bp, Homo sapiens
ctgaggccactggag

SEQ ID NO: 1971516 - DNA, 15 bp, Homo sapiens
tgaggccactggagc

SEQ ID NO: 1971517 - DNA, 15 bp, Homo sapiens
gaggccactggagcc

SEQ ID NO: 1971518 - DNA, 15 bp, Homo sapiens
aggccactggagccc

SEQ ID NO: 1971519 - DNA, 15 bp, Homo sapiens
ggccactggagcccc

SEQ ID NO: 1971520 - DNA, 15 bp, Homo sapiens
gccactggagcccct

SEQ ID NO: 1971521 - DNA, 15 bp, Homo sapiens
ccactggagcccctg

SEQ ID NO: 1971522 - DNA, 15 bp, Homo sapiens
cactggagcccctgg

SEQ ID NO: 1971523 - DNA, 15 bp, Homo sapiens
actggagcccctgga

SEQ ID NO: 1971524 - DNA, 15 bp, Homo sapiens
ctggagcccctggag

SEQ ID NO: 1971525 - DNA, 15 bp, Homo sapiens
tggagcccctggaga

SEQ ID NO: 1971526 - DNA, 15 bp, Homo sapiens
ggagcccctggagaa

SEQ ID NO: 1971527 - DNA, 15 bp, Homo sapiens
gagcccctggagaag

SEQ ID NO: 1971528 - DNA, 15 bp, Homo sapiens
agcccctggagaagc

SEQ ID NO: 1971529 - DNA, 15 bp, Homo sapiens
gcccctggagaagcc

SEQ ID NO: 1971530 - DNA, 15 bp, Homo sapiens
cccctggagaagccc

SEQ ID NO: 1971531 - DNA, 15 bp, Homo sapiens
ccctggagaagcccc

SEQ ID NO: 1971532 - DNA, 15 bp, Homo sapiens
cctggagaagccccg

SEQ ID NO: 1971533 - DNA, 15 bp, Homo sapiens
ctggagaagccccgg

SEQ ID NO: 1971534 - DNA, 15 bp, Homo sapiens
tggagaagccccggc

SEQ ID NO: 1971535 - DNA, 15 bp, Homo sapiens
ggagaagccccggcc

SEQ ID NO: 1971536 - DNA, 15 bp, Homo sapiens
gagaagccccggccc

SEQ ID NO: 1971537 - DNA, 15 bp, Homo sapiens
agaagccccggcccc

SEQ ID NO: 1971538 - DNA, 15 bp, Homo sapiens
gaagccccggcccca

SEQ ID NO: 1971539 - DNA, 15 bp, Homo sapiens
aagccccggccccag

SEQ ID NO: 1971540 - DNA, 15 bp, Homo sapiens
agccccggccccagc

SEQ ID NO: 1971541 - DNA, 15 bp, Homo sapiens
gccccggccccagcc

SEQ ID NO: 1971542 - DNA, 15 bp, Homo sapiens
ccccggccccagccg

SEQ ID NO: 1971543 - DNA, 15 bp, Homo sapiens
cccggccccagccgc

SEQ ID NO: 1971544 - DNA, 15 bp, Homo sapiens
ccggccccagccgct

SEQ ID NO: 1971545 - DNA, 15 bp, Homo sapiens
cggccccagccgctg

SEQ ID NO: 1971546 - DNA, 15 bp, Homo sapiens
gccccagccgctgag

SEQ ID NO: 1971547 - DNA, 15 bp, Homo sapiens
ccccagccgctgagc

SEQ ID NO: 1971548 - DNA, 15 bp, Homo sapiens
cccagccgctgagct

SEQ ID NO: 1971549 - DNA, 15 bp, Homo sapiens
ccagccgctgagctg

SEQ ID NO: 1971550 - DNA, 15 bp, Homo sapiens
cagccgctgagctgg

SEQ ID NO: 1971551 - DNA, 15 bp, Homo sapiens
agccgctgagctggg

SEQ ID NO: 1971552 - DNA, 15 bp, Homo sapiens
gccgctgagctggga

SEQ ID NO: 1971553 - DNA, 15 bp, Homo sapiens
ccgctgagctgggag

SEQ ID NO: 1971554 - DNA, 15 bp, Homo sapiens
cgctgagctgggaga

SEQ ID NO: 1971555 - DNA, 15 bp, Homo sapiens
gctgagctgggagaa

SEQ ID NO: 1971556 - DNA, 15 bp, Homo sapiens
ctgagctgggagaaa

SEQ ID NO: 1971557 - DNA, 15 bp, Homo sapiens
tgagctgggagaaag

SEQ ID NO: 1971558 - DNA, 15 bp, Homo sapiens
gagctgggagaaagt

SEQ ID NO: 1971559 - DNA, 15 bp, Homo sapiens
agctgggagaaagtg

SEQ ID NO: 1971560 - DNA, 15 bp, Homo sapiens
gctgggagaaagtgc

SEQ ID NO: 1971561 - DNA, 15 bp, Homo sapiens
ctgggagaaagtgcc

SEQ ID NO: 1971562 - DNA, 15 bp, Homo sapiens
tgggagaaagtgccc

SEQ ID NO: 1971563 - DNA, 15 bp, Homo sapiens
gggagaaagtgcccc

SEQ ID NO: 1971564 - DNA, 15 bp, Homo sapiens
ggagaaagtgcccca

SEQ ID NO: 1971565 - DNA, 15 bp, Homo sapiens
gagaaagtgccccaa

SEQ ID NO: 1971566 - DNA, 15 bp, Homo sapiens
agaaagtgccccaag

SEQ ID NO: 1971567 - DNA, 15 bp, Homo sapiens
gaaagtgccccaagt

SEQ ID NO: 1971568 - DNA, 15 bp, Homo sapiens
aaagtgccccaagtc

SEQ ID NO: 1971569 - DNA, 15 bp, Homo sapiens
aagtgccccaagtcc

SEQ ID NO: 1971570 - DNA, 15 bp, Homo sapiens
agtgccccaagtccc

SEQ ID NO: 1971571 - DNA, 15 bp, Homo sapiens
gtgccccaagtccca

SEQ ID NO: 1971572 - DNA, 15 bp, Homo sapiens
tgccccaagtcccaa

SEQ ID NO: 1971573 - DNA, 15 bp, Homo sapiens
gccccaagtcccaaa

SEQ ID NO: 1971574 - DNA, 15 bp, Homo sapiens
ccccaagtcccaaag

SEQ ID NO: 1971575 - DNA, 15 bp, Homo sapiens
cccaagtcccaaagg

SEQ ID NO: 1971576 - DNA, 15 bp, Homo sapiens
ccaagtcccaaaggt

SEQ ID NO: 1971577 - DNA, 15 bp, Homo sapiens
caagtcccaaaggtg

SEQ ID NO: 1971578 - DNA, 15 bp, Homo sapiens
aagtcccaaaggtga

SEQ ID NO: 1971579 - DNA, 15 bp, Homo sapiens
agtcccaaaggtgag

SEQ ID NO: 1971580 - DNA, 15 bp, Homo sapiens
gtcccaaaggtgaga

SEQ ID NO: 1971581 - DNA, 15 bp, Homo sapiens
tcccaaaggtgagag

SEQ ID NO: 1971582 - DNA, 15 bp, Homo sapiens
cccaaaggtgagagg

SEQ ID NO: 1971583 - DNA, 15 bp, Homo sapiens
ccaaaggtgagaggg

SEQ ID NO: 1971584 - DNA, 15 bp, Homo sapiens
caaaggtgagagggg

SEQ ID NO: 1971585 - DNA, 15 bp, Homo sapiens
aaaggtgagaggggc

SEQ ID NO: 1971586 - DNA, 15 bp, Homo sapiens
aaggtgagaggggct

SEQ ID NO: 1971587 - DNA, 15 bp, Homo sapiens
aggtgagaggggctg

SEQ ID NO: 1971588 - DNA, 15 bp, Homo sapiens
ggtgagaggggctgg

SEQ ID NO: 1971589 - DNA, 15 bp, Homo sapiens
gtgagaggggctggg

SEQ ID NO: 1971590 - DNA, 15 bp, Homo sapiens
tgagaggggctgggc

SEQ ID NO: 1971591 - DNA, 15 bp, Homo sapiens
gagaggggctgggca

SEQ ID NO: 1971592 - DNA, 15 bp, Homo sapiens
agaggggctgggcag

SEQ ID NO: 1971593 - DNA, 15 bp, Homo sapiens
gaggggctgggcagg

SEQ ID NO: 1971594 - DNA, 15 bp, Homo sapiens
aggggctgggcaggg

SEQ ID NO: 1971595 - DNA, 15 bp, Homo sapiens
ggggctgggcaggga

SEQ ID NO: 1971596 - DNA, 15 bp, Homo sapiens
gggctgggcagggag

SEQ ID NO: 1971597 - DNA, 15 bp, Homo sapiens
ggctgggcagggagg

SEQ ID NO: 1971598 - DNA, 15 bp, Homo sapiens
ctgggcagggagggg

SEQ ID NO: 1971599 - DNA, 15 bp, Homo sapiens
tgggcagggaggggc

SEQ ID NO: 1971600 - DNA, 15 bp, Homo sapiens
gggcagggaggggca

SEQ ID NO: 1971601 - DNA, 15 bp, Homo sapiens
ggcagggaggggcag

SEQ ID NO: 1971602 - DNA, 15 bp, Homo sapiens
gcagggaggggcagg

SEQ ID NO: 1971603 - DNA, 15 bp, Homo sapiens
cagggaggggcagga

SEQ ID NO: 1971604 - DNA, 15 bp, Homo sapiens
agggaggggcaggat

SEQ ID NO: 1971605 - DNA, 15 bp, Homo sapiens
gggaggggcaggatc

SEQ ID NO: 1971606 - DNA, 15 bp, Homo sapiens
ggaggggcaggatcc

SEQ ID NO: 1971607 - DNA, 15 bp, Homo sapiens
gaggggcaggatccg

SEQ ID NO: 1971608 - DNA, 15 bp, Homo sapiens
aggggcaggatccgt

SEQ ID NO: 1971609 - DNA, 15 bp, Homo sapiens
ggggcaggatccgtg

SEQ ID NO: 1971610 - DNA, 15 bp, Homo sapiens
gggcaggatccgtgg

SEQ ID NO: 1971611 - DNA, 15 bp, Homo sapiens
ggcaggatccgtggg

SEQ ID NO: 1971612 - DNA, 15 bp, Homo sapiens
gcaggatccgtgggt

SEQ ID NO: 1971613 - DNA, 15 bp, Homo sapiens
caggatccgtgggta

SEQ ID NO: 1971614 - DNA, 15 bp, Homo sapiens
aggatccgtgggtag

SEQ ID NO: 1971615 - DNA, 15 bp, Homo sapiens
ggatccgtgggtagg

SEQ ID NO: 1971616 - DNA, 15 bp, Homo sapiens
gatccgtgggtaggg

SEQ ID NO: 1971617 - DNA, 15 bp, Homo sapiens
atccgtgggtagggc

SEQ ID NO: 1971618 - DNA, 15 bp, Homo sapiens
tccgtgggtagggcg

SEQ ID NO: 1971619 - DNA, 15 bp, Homo sapiens
ccgtgggtagggcgt

SEQ ID NO: 1971620 - DNA, 15 bp, Homo sapiens
cgtgggtagggcgtg

SEQ ID NO: 1971621 - DNA, 15 bp, Homo sapiens
gtgggtagggcgtgt

SEQ ID NO: 1971622 - DNA, 15 bp, Homo sapiens
tgggtagggcgtgtc

SEQ ID NO: 1971623 - DNA, 15 bp, Homo sapiens
gggtagggcgtgtcc

SEQ ID NO: 1971624 - DNA, 15 bp, Homo sapiens
ggtagggcgtgtcca

SEQ ID NO: 1971625 - DNA, 15 bp, Homo sapiens
gtagggcgtgtccag

SEQ ID NO: 1971626 - DNA, 15 bp, Homo sapiens
tagggcgtgtccagg

SEQ ID NO: 1971627 - DNA, 15 bp, Homo sapiens
agggcgtgtccaggg

SEQ ID NO: 1971628 - DNA, 15 bp, Homo sapiens
gggcgtgtccagggc

SEQ ID NO: 1971629 - DNA, 15 bp, Homo sapiens
ggcgtgtccagggca

SEQ ID NO: 1971630 - DNA, 15 bp, Homo sapiens
gcgtgtccagggcag

SEQ ID NO: 1971631 - DNA, 15 bp, Homo sapiens
cgtgtccagggcagg

SEQ ID NO: 1971632 - DNA, 15 bp, Homo sapiens
gtgtccagggcaggt

SEQ ID NO: 1971633 - DNA, 15 bp, Homo sapiens
tgtccagggcaggtc

SEQ ID NO: 1971634 - DNA, 15 bp, Homo sapiens
gtccagggcaggtct

SEQ ID NO: 1971635 - DNA, 15 bp, Homo sapiens
tccagggcaggtctc

SEQ ID NO: 1971636 - DNA, 15 bp, Homo sapiens
ccagggcaggtctca

SEQ ID NO: 1971637 - DNA, 15 bp, Homo sapiens
cagggcaggtctcaa

SEQ ID NO: 1971638 - DNA, 15 bp, Homo sapiens
agggcaggtctcaaa

SEQ ID NO: 1971639 - DNA, 15 bp, Homo sapiens
gggcaggtctcaaaa

SEQ ID NO: 1971640 - DNA, 15 bp, Homo sapiens
ggcaggtctcaaaag

SEQ ID NO: 1971641 - DNA, 15 bp, Homo sapiens
gcaggtctcaaaagc

SEQ ID NO: 1971642 - DNA, 15 bp, Homo sapiens
caggtctcaaaagcc

SEQ ID NO: 1971643 - DNA, 15 bp, Homo sapiens
aggtctcaaaagcct

SEQ ID NO: 1971644 - DNA, 15 bp, Homo sapiens
ggtctcaaaagcctt

SEQ ID NO: 1971645 - DNA, 15 bp, Homo sapiens
gtctcaaaagccttt

SEQ ID NO: 1971646 - DNA, 15 bp, Homo sapiens
tctcaaaagcctttg

SEQ ID NO: 1971647 - DNA, 15 bp, Homo sapiens
ctcaaaagcctttgc

SEQ ID NO: 1971648 - DNA, 15 bp, Homo sapiens
tcaaaagcctttgct

SEQ ID NO: 1971649 - DNA, 15 bp, Homo sapiens
caaaagcctttgctg

SEQ ID NO: 1971650 - DNA, 15 bp, Homo sapiens
aaaagcctttgctgg

SEQ ID NO: 1971651 - DNA, 15 bp, Homo sapiens
aaagcctttgctggg

SEQ ID NO: 1971652 - DNA, 15 bp, Homo sapiens
aagcctttgctgggc

SEQ ID NO: 1971653 - DNA, 15 bp, Homo sapiens
agcctttgctgggcc

SEQ ID NO: 1971654 - DNA, 15 bp, Homo sapiens
gcctttgctgggcca

SEQ ID NO: 1971655 - DNA, 15 bp, Homo sapiens
cctttgctgggccag

SEQ ID NO: 1971656 - DNA, 15 bp, Homo sapiens
ctttgctgggccagg

SEQ ID NO: 1971657 - DNA, 15 bp, Homo sapiens
tttgctgggccaggt

SEQ ID NO: 1971658 - DNA, 15 bp, Homo sapiens
ttgctgggccaggtg

SEQ ID NO: 1971659 - DNA, 15 bp, Homo sapiens
tgctgggccaggtgc

SEQ ID NO: 1971660 - DNA, 15 bp, Homo sapiens
gctgggccaggtgcg

SEQ ID NO: 1971661 - DNA, 15 bp, Homo sapiens
ctgggccaggtgcgg

SEQ ID NO: 1971662 - DNA, 15 bp, Homo sapiens
tgggccaggtgcggt

SEQ ID NO: 1971663 - DNA, 15 bp, Homo sapiens
gggccaggtgcggtg

SEQ ID NO: 1971664 - DNA, 15 bp, Homo sapiens
ggccaggtgcggtgg

SEQ ID NO: 1971665 - DNA, 15 bp, Homo sapiens
ggtgcggtggctcag

SEQ ID NO: 1971666 - DNA, 15 bp, Homo sapiens
gtgcggtggctcagg

SEQ ID NO: 1971667 - DNA, 15 bp, Homo sapiens
tgcggtggctcaggc

SEQ ID NO: 1971668 - DNA, 15 bp, Homo sapiens
ggtggctcaggccta

SEQ ID NO: 1971669 - DNA, 15 bp, Homo sapiens
gtggctcaggcctat

SEQ ID NO: 1971670 - DNA, 15 bp, Homo sapiens
tggctcaggcctata

SEQ ID NO: 1971671 - DNA, 15 bp, Homo sapiens
ggctcaggcctataa

SEQ ID NO: 1971672 - DNA, 15 bp, Homo sapiens
gctcaggcctataat

SEQ ID NO: 1971673 - DNA, 15 bp, Homo sapiens
ctcaggcctataatc

SEQ ID NO: 1971674 - DNA, 15 bp, Homo sapiens
tcaggcctataatcc

SEQ ID NO: 1971675 - DNA, 15 bp, Homo sapiens
caggcctataatccc

SEQ ID NO: 1971676 - DNA, 15 bp, Homo sapiens
aggcctataatcccc

SEQ ID NO: 1971677 - DNA, 15 bp, Homo sapiens
ggcctataatcccca

SEQ ID NO: 1971678 - DNA, 15 bp, Homo sapiens
gcctataatccccag

SEQ ID NO: 1971679 - DNA, 15 bp, Homo sapiens
cctataatccccagt

SEQ ID NO: 1971680 - DNA, 15 bp, Homo sapiens
ctataatccccagta

SEQ ID NO: 1971681 - DNA, 15 bp, Homo sapiens
tataatccccagtac

SEQ ID NO: 1971682 - DNA, 15 bp, Homo sapiens
ataatccccagtact

SEQ ID NO: 1971683 - DNA, 15 bp, Homo sapiens
taatccccagtactt

SEQ ID NO: 1971684 - DNA, 15 bp, Homo sapiens
aatccccagtacttt

SEQ ID NO: 1971685 - DNA, 15 bp, Homo sapiens
atccccagtactttg

SEQ ID NO: 1971686 - DNA, 15 bp, Homo sapiens
tccccagtactttgg

SEQ ID NO: 1971687 - DNA, 15 bp, Homo sapiens
ccccagtactttggg

SEQ ID NO: 1971688 - DNA, 15 bp, Homo sapiens
aggccgaggtgggcg

SEQ ID NO: 1971689 - DNA, 15 bp, Homo sapiens
ggccgaggtgggcgg

SEQ ID NO: 1971690 - DNA, 15 bp, Homo sapiens
gccgaggtgggcgga

SEQ ID NO: 1971691 - DNA, 15 bp, Homo sapiens
ccgaggtgggcggat

SEQ ID NO: 1971692 - DNA, 15 bp, Homo sapiens
cgaggtgggcggatc

SEQ ID NO: 1971693 - DNA, 15 bp, Homo sapiens
aggtgggcggatcat

SEQ ID NO: 1971694 - DNA, 15 bp, Homo sapiens
ggtgggcggatcatg

SEQ ID NO: 1971695 - DNA, 15 bp, Homo sapiens
gtgggcggatcatga

SEQ ID NO: 1971696 - DNA, 15 bp, Homo sapiens
tgggcggatcatgag

SEQ ID NO: 1971697 - DNA, 15 bp, Homo sapiens
tgaggtcaggagatt

SEQ ID NO: 1971698 - DNA, 15 bp, Homo sapiens
tcctggctaacatga

SEQ ID NO: 1971699 - DNA, 15 bp, Homo sapiens
cctggctaacatgat

SEQ ID NO: 1971700 - DNA, 15 bp, Homo sapiens
ctggctaacatgatg

SEQ ID NO: 1971701 - DNA, 15 bp, Homo sapiens
tggctaacatgatga

SEQ ID NO: 1971702 - DNA, 15 bp, Homo sapiens
ggctaacatgatgaa

SEQ ID NO: 1971703 - DNA, 15 bp, Homo sapiens
gctaacatgatgaaa

SEQ ID NO: 1971704 - DNA, 15 bp, Homo sapiens
ctaacatgatgaaac

SEQ ID NO: 1971705 - DNA, 15 bp, Homo sapiens
aaaaaaattagccgg

SEQ ID NO: 1971706 - DNA, 15 bp, Homo sapiens
ccgggcgtggtggcg

SEQ ID NO: 1971707 - DNA, 15 bp, Homo sapiens
cgggcgtggtggcgg

SEQ ID NO: 1971708 - DNA, 15 bp, Homo sapiens
gggcgtggtggcggg

SEQ ID NO: 1971709 - DNA, 15 bp, Homo sapiens
ggcgtggtggcgggc

SEQ ID NO: 1971710 - DNA, 15 bp, Homo sapiens
gcgtggtggcgggca

SEQ ID NO: 1971711 - DNA, 15 bp, Homo sapiens
cgtggtggcgggcac

SEQ ID NO: 1971712 - DNA, 15 bp, Homo sapiens
gtggtggcgggcacc

SEQ ID NO: 1971713 - DNA, 15 bp, Homo sapiens
gtggcgggcacctgc

SEQ ID NO: 1971714 - DNA, 15 bp, Homo sapiens
tggcgggcacctgcg

SEQ ID NO: 1971715 - DNA, 15 bp, Homo sapiens
ggcgggcacctgcgg

SEQ ID NO: 1971716 - DNA, 15 bp, Homo sapiens
gcgggcacctgcggt

SEQ ID NO: 1971717 - DNA, 15 bp, Homo sapiens
cgggcacctgcggtc

SEQ ID NO: 1971718 - DNA, 15 bp, Homo sapiens
gggcacctgcggtcc

SEQ ID NO: 1971719 - DNA, 15 bp, Homo sapiens
ggcacctgcggtccc

SEQ ID NO: 1971720 - DNA, 15 bp, Homo sapiens
gcacctgcggtccca

SEQ ID NO: 1971721 - DNA, 15 bp, Homo sapiens
tgcggtcccagctaa

SEQ ID NO: 1971722 - DNA, 15 bp, Homo sapiens
gcggtcccagctaac

SEQ ID NO: 1971723 - DNA, 15 bp, Homo sapiens
cggtcccagctaact

SEQ ID NO: 1971724 - DNA, 15 bp, Homo sapiens
ggtcccagctaactt

SEQ ID NO: 1971725 - DNA, 15 bp, Homo sapiens
gtcccagctaacttg

SEQ ID NO: 1971726 - DNA, 15 bp, Homo sapiens
tcccagctaacttgg

SEQ ID NO: 1971727 - DNA, 15 bp, Homo sapiens
cccagctaacttggg

SEQ ID NO: 1971728 - DNA, 15 bp, Homo sapiens
ccagctaacttggga

SEQ ID NO: 1971729 - DNA, 15 bp, Homo sapiens
cagctaacttgggag

SEQ ID NO: 1971730 - DNA, 15 bp, Homo sapiens
agctaacttgggagg

SEQ ID NO: 1971731 - DNA, 15 bp, Homo sapiens
gctaacttgggaggc

SEQ ID NO: 1971732 - DNA, 15 bp, Homo sapiens
ctaacttgggaggct

SEQ ID NO: 1971733 - DNA, 15 bp, Homo sapiens
taacttgggaggctg

SEQ ID NO: 1971734 - DNA, 15 bp, Homo sapiens
aacttgggaggctga

SEQ ID NO: 1971735 - DNA, 15 bp, Homo sapiens
gaatggtgtgaacct

SEQ ID NO: 1971736 - DNA, 15 bp, Homo sapiens
aatggtgtgaacctg

SEQ ID NO: 1971737 - DNA, 15 bp, Homo sapiens
atggtgtgaacctgg

SEQ ID NO: 1971738 - DNA, 15 bp, Homo sapiens
gccgagattgtgcct

SEQ ID NO: 1971739 - DNA, 15 bp, Homo sapiens
ccgagattgtgcctc

SEQ ID NO: 1971740 - DNA, 15 bp, Homo sapiens
cgagattgtgcctct

SEQ ID NO: 1971741 - DNA, 15 bp, Homo sapiens
gagattgtgcctctg

SEQ ID NO: 1971742 - DNA, 15 bp, Homo sapiens
agattgtgcctctgc

SEQ ID NO: 1971743 - DNA, 15 bp, Homo sapiens
gattgtgcctctgca

SEQ ID NO: 1971744 - DNA, 15 bp, Homo sapiens
attgtgcctctgcac

SEQ ID NO: 1971745 - DNA, 15 bp, Homo sapiens
ttgtgcctctgcact

SEQ ID NO: 1971746 - DNA, 15 bp, Homo sapiens
tgtgcctctgcactc

SEQ ID NO: 1971747 - DNA, 15 bp, Homo sapiens
gtgcctctgcactcc

SEQ ID NO: 1971748 - DNA, 15 bp, Homo sapiens
tgcctctgcactcca

SEQ ID NO: 1971749 - DNA, 15 bp, Homo sapiens
gactccatctcaaac

SEQ ID NO: 1971750 - DNA, 15 bp, Homo sapiens
ctccatctcaaacaa

SEQ ID NO: 1971751 - DNA, 15 bp, Homo sapiens
tccatctcaaacaaa

SEQ ID NO: 1971752 - DNA, 15 bp, Homo sapiens
ccatctcaaacaaac

SEQ ID NO: 1971753 - DNA, 15 bp, Homo sapiens
catctcaaacaaaca

SEQ ID NO: 1971754 - DNA, 15 bp, Homo sapiens
atctcaaacaaacag

SEQ ID NO: 1971755 - DNA, 15 bp, Homo sapiens
tctcaaacaaacaga

SEQ ID NO: 1971756 - DNA, 15 bp, Homo sapiens
ctcaaacaaacagaa

SEQ ID NO: 1971757 - DNA, 15 bp, Homo sapiens
tcaaacaaacagaaa

SEQ ID NO: 1971758 - DNA, 15 bp, Homo sapiens
caaacaaacagaaaa

SEQ ID NO: 1971759 - DNA, 15 bp, Homo sapiens
aaacaaacagaaaaa

SEQ ID NO: 1971760 - DNA, 15 bp, Homo sapiens
aacaaacagaaaaag

SEQ ID NO: 1971761 - DNA, 15 bp, Homo sapiens
acaaacagaaaaagc

SEQ ID NO: 1971762 - DNA, 15 bp, Homo sapiens
caaacagaaaaagcc

SEQ ID NO: 1971763 - DNA, 15 bp, Homo sapiens
aaacagaaaaagcct

SEQ ID NO: 1971764 - DNA, 15 bp, Homo sapiens
aacagaaaaagcctt

SEQ ID NO: 1971765 - DNA, 15 bp, Homo sapiens
acagaaaaagccttt

SEQ ID NO: 1971766 - DNA, 15 bp, Homo sapiens
cagaaaaagcctttg

SEQ ID NO: 1971767 - DNA, 15 bp, Homo sapiens
agaaaaagcctttgc

SEQ ID NO: 1971768 - DNA, 15 bp, Homo sapiens
gaaaaagcctttgct

SEQ ID NO: 1971769 - DNA, 15 bp, Homo sapiens
aaaaagcctttgctc

SEQ ID NO: 1971770 - DNA, 15 bp, Homo sapiens
aaaagcctttgctca

SEQ ID NO: 1971771 - DNA, 15 bp, Homo sapiens
aaagcctttgctcac

SEQ ID NO: 1971772 - DNA, 15 bp, Homo sapiens
aagcctttgctcaca

SEQ ID NO: 1971773 - DNA, 15 bp, Homo sapiens
agcctttgctcacag

SEQ ID NO: 1971774 - DNA, 15 bp, Homo sapiens
gcctttgctcacagg

SEQ ID NO: 1971775 - DNA, 15 bp, Homo sapiens
cctttgctcacaggg

SEQ ID NO: 1971776 - DNA, 15 bp, Homo sapiens
ctttgctcacagggt

SEQ ID NO: 1971777 - DNA, 15 bp, Homo sapiens
tttgctcacagggtc

SEQ ID NO: 1971778 - DNA, 15 bp, Homo sapiens
ttgctcacagggtca

SEQ ID NO: 1971779 - DNA, 15 bp, Homo sapiens
tgctcacagggtcaa

SEQ ID NO: 1971780 - DNA, 15 bp, Homo sapiens
gctcacagggtcaag

SEQ ID NO: 1971781 - DNA, 15 bp, Homo sapiens
ctcacagggtcaagc

SEQ ID NO: 1971782 - DNA, 15 bp, Homo sapiens
tcacagggtcaagct

SEQ ID NO: 1971783 - DNA, 15 bp, Homo sapiens
cacagggtcaagctc

SEQ ID NO: 1971784 - DNA, 15 bp, Homo sapiens
acagggtcaagctca

SEQ ID NO: 1971785 - DNA, 15 bp, Homo sapiens
cagggtcaagctcag

SEQ ID NO: 1971786 - DNA, 15 bp, Homo sapiens
agggtcaagctcagc

SEQ ID NO: 1971787 - DNA, 15 bp, Homo sapiens
gggtcaagctcagca

SEQ ID NO: 1971788 - DNA, 15 bp, Homo sapiens
ggtcaagctcagcag

SEQ ID NO: 1971789 - DNA, 15 bp, Homo sapiens
gtcaagctcagcagc

SEQ ID NO: 1971790 - DNA, 15 bp, Homo sapiens
tcaagctcagcagct

SEQ ID NO: 1971791 - DNA, 15 bp, Homo sapiens
caagctcagcagctc

SEQ ID NO: 1971792 - DNA, 15 bp, Homo sapiens
aagctcagcagctct

SEQ ID NO: 1971793 - DNA, 15 bp, Homo sapiens
agctcagcagctctc

SEQ ID NO: 1971794 - DNA, 15 bp, Homo sapiens
gctcagcagctctca

SEQ ID NO: 1971795 - DNA, 15 bp, Homo sapiens
ctcagcagctctcaa

SEQ ID NO: 1971796 - DNA, 15 bp, Homo sapiens
tcagcagctctcaat

SEQ ID NO: 1971797 - DNA, 15 bp, Homo sapiens
cagcagctctcaatg

SEQ ID NO: 1971798 - DNA, 15 bp, Homo sapiens
agcagctctcaatgg

SEQ ID NO: 1971799 - DNA, 15 bp, Homo sapiens
gcagctctcaatggt

SEQ ID NO: 1971800 - DNA, 15 bp, Homo sapiens
cagctctcaatggtc

SEQ ID NO: 1971801 - DNA, 15 bp, Homo sapiens
agctctcaatggtcc

SEQ ID NO: 1971802 - DNA, 15 bp, Homo sapiens
gctctcaatggtcct

SEQ ID NO: 1971803 - DNA, 15 bp, Homo sapiens
ctctcaatggtccta

SEQ ID NO: 1971804 - DNA, 15 bp, Homo sapiens
tctcaatggtcctac

SEQ ID NO: 1971805 - DNA, 15 bp, Homo sapiens
ctcaatggtcctacc

SEQ ID NO: 1971806 - DNA, 15 bp, Homo sapiens
tcaatggtcctaccc

SEQ ID NO: 1971807 - DNA, 15 bp, Homo sapiens
caatggtcctacccc

SEQ ID NO: 1971808 - DNA, 15 bp, Homo sapiens
aatggtcctacccct

SEQ ID NO: 1971809 - DNA, 15 bp, Homo sapiens
atggtcctacccctg

SEQ ID NO: 1971810 - DNA, 15 bp, Homo sapiens
tggtcctacccctgg

SEQ ID NO: 1971811 - DNA, 15 bp, Homo sapiens
ggtcctacccctgga

SEQ ID NO: 1971812 - DNA, 15 bp, Homo sapiens
gtcctacccctggag

SEQ ID NO: 1971813 - DNA, 15 bp, Homo sapiens
tcctacccctggagc

SEQ ID NO: 1971814 - DNA, 15 bp, Homo sapiens
cctacccctggagcc

SEQ ID NO: 1971815 - DNA, 15 bp, Homo sapiens
ctacccctggagccc

SEQ ID NO: 1971816 - DNA, 15 bp, Homo sapiens
tacccctggagcccc

SEQ ID NO: 1971817 - DNA, 15 bp, Homo sapiens
acccctggagccccc

SEQ ID NO: 1971818 - DNA, 15 bp, Homo sapiens
cccctggagcccccg

SEQ ID NO: 1971819 - DNA, 15 bp, Homo sapiens
ccctggagcccccga

SEQ ID NO: 1971820 - DNA, 15 bp, Homo sapiens
cctggagcccccgat

SEQ ID NO: 1971821 - DNA, 15 bp, Homo sapiens
ctggagcccccgatg

SEQ ID NO: 1971822 - DNA, 15 bp, Homo sapiens
tggagcccccgatga

SEQ ID NO: 1971823 - DNA, 15 bp, Homo sapiens
ggagcccccgatgac

SEQ ID NO: 1971824 - DNA, 15 bp, Homo sapiens
gagcccccgatgacc

SEQ ID NO: 1971825 - DNA, 15 bp, Homo sapiens
agcccccgatgaccc

SEQ ID NO: 1971826 - DNA, 15 bp, Homo sapiens
gcccccgatgacccc

SEQ ID NO: 1971827 - DNA, 15 bp, Homo sapiens
cccccgatgacccca

SEQ ID NO: 1971828 - DNA, 15 bp, Homo sapiens
ccccgatgaccccat

SEQ ID NO: 1971829 - DNA, 15 bp, Homo sapiens
cccgatgaccccatt

SEQ ID NO: 1971830 - DNA, 15 bp, Homo sapiens
ccgatgaccccattg

SEQ ID NO: 1971831 - DNA, 15 bp, Homo sapiens
cgatgaccccattgg

SEQ ID NO: 1971832 - DNA, 15 bp, Homo sapiens
gatgaccccattggc

SEQ ID NO: 1971833 - DNA, 15 bp, Homo sapiens
atgaccccattggcc

SEQ ID NO: 1971834 - DNA, 15 bp, Homo sapiens
tgaccccattggcct

SEQ ID NO: 1971835 - DNA, 15 bp, Homo sapiens
gaccccattggcctc

SEQ ID NO: 1971836 - DNA, 15 bp, Homo sapiens
accccattggcctct

SEQ ID NO: 1971837 - DNA, 15 bp, Homo sapiens
ccccattggcctctt

SEQ ID NO: 1971838 - DNA, 15 bp, Homo sapiens
cccattggcctcttc

SEQ ID NO: 1971839 - DNA, 15 bp, Homo sapiens
ccattggcctcttcg

SEQ ID NO: 1971840 - DNA, 15 bp, Homo sapiens
cattggcctcttcgt

SEQ ID NO: 1971841 - DNA, 15 bp, Homo sapiens
attggcctcttcgtg

SEQ ID NO: 1971842 - DNA, 15 bp, Homo sapiens
ttggcctcttcgtga

SEQ ID NO: 1971843 - DNA, 15 bp, Homo sapiens
tggcctcttcgtgat

SEQ ID NO: 1971844 - DNA, 15 bp, Homo sapiens
ggcctcttcgtgatg

SEQ ID NO: 1971845 - DNA, 15 bp, Homo sapiens
gcctcttcgtgatgc

SEQ ID NO: 1971846 - DNA, 15 bp, Homo sapiens
cctcttcgtgatgcg

SEQ ID NO: 1971847 - DNA, 15 bp, Homo sapiens
ctcttcgtgatgcgg

SEQ ID NO: 1971848 - DNA, 15 bp, Homo sapiens
tcttcgtgatgcggc

SEQ ID NO: 1971849 - DNA, 15 bp, Homo sapiens
cttcgtgatgcggcc

SEQ ID NO: 1971850 - DNA, 15 bp, Homo sapiens
ttcgtgatgcggcca

SEQ ID NO: 1971851 - DNA, 15 bp, Homo sapiens
tcgtgatgcggccac

SEQ ID NO: 1971852 - DNA, 15 bp, Homo sapiens
cgtgatgcggccaca

SEQ ID NO: 1971853 - DNA, 15 bp, Homo sapiens
gtgatgcggccacag

SEQ ID NO: 1971854 - DNA, 15 bp, Homo sapiens
tgatgcggccacagg

SEQ ID NO: 1971855 - DNA, 15 bp, Homo sapiens
gatgcggccacagga

SEQ ID NO: 1971856 - DNA, 15 bp, Homo sapiens
atgcggccacaggat

SEQ ID NO: 1971857 - DNA, 15 bp, Homo sapiens
tgcggccacaggatg

SEQ ID NO: 1971858 - DNA, 15 bp, Homo sapiens
gcggccacaggatgg

SEQ ID NO: 1971859 - DNA, 15 bp, Homo sapiens
cggccacaggatggc

SEQ ID NO: 1971860 - DNA, 15 bp, Homo sapiens
ggccacaggatggcg

SEQ ID NO: 1971861 - DNA, 15 bp, Homo sapiens
gccacaggatggcga

SEQ ID NO: 1971862 - DNA, 15 bp, Homo sapiens
ccacaggatggcgag

SEQ ID NO: 1971863 - DNA, 15 bp, Homo sapiens
cacaggatggcgagg

SEQ ID NO: 1971864 - DNA, 15 bp, Homo sapiens
acaggatggcgaggt

SEQ ID NO: 1971865 - DNA, 15 bp, Homo sapiens
caggatggcgaggtg

SEQ ID NO: 1971866 - DNA, 15 bp, Homo sapiens
aggatggcgaggtga

SEQ ID NO: 1971867 - DNA, 15 bp, Homo sapiens
ggatggcgaggtgac

SEQ ID NO: 1971868 - DNA, 15 bp, Homo sapiens
gatggcgaggtgacc

SEQ ID NO: 1971869 - DNA, 15 bp, Homo sapiens
atggcgaggtgaccg

SEQ ID NO: 1971870 - DNA, 15 bp, Homo sapiens
tggcgaggtgaccgt

SEQ ID NO: 1971871 - DNA, 15 bp, Homo sapiens
ggcgaggtgaccgtg

SEQ ID NO: 1971872 - DNA, 15 bp, Homo sapiens
gcgaggtgaccgtgg

SEQ ID NO: 1971873 - DNA, 15 bp, Homo sapiens
cgaggtgaccgtggg

SEQ ID NO: 1971874 - DNA, 15 bp, Homo sapiens
gaggtgaccgtgggt

SEQ ID NO: 1971875 - DNA, 15 bp, Homo sapiens
aggtgaccgtgggtg

SEQ ID NO: 1971876 - DNA, 15 bp, Homo sapiens
ggtgaccgtgggtga

SEQ ID NO: 1971877 - DNA, 15 bp, Homo sapiens
gtgaccgtgggtgag

SEQ ID NO: 1971878 - DNA, 15 bp, Homo sapiens
tgaccgtgggtgagt

SEQ ID NO: 1971879 - DNA, 15 bp, Homo sapiens
gaccgtgggtgagtg

SEQ ID NO: 1971880 - DNA, 15 bp, Homo sapiens
accgtgggtgagtgt

SEQ ID NO: 1971881 - DNA, 15 bp, Homo sapiens
ccgtgggtgagtgtg

SEQ ID NO: 1971882 - DNA, 15 bp, Homo sapiens
cgtgggtgagtgtga

SEQ ID NO: 1971883 - DNA, 15 bp, Homo sapiens
gtgggtgagtgtgag

SEQ ID NO: 1971884 - DNA, 15 bp, Homo sapiens
tgggtgagtgtgagc

SEQ ID NO: 1971885 - DNA, 15 bp, Homo sapiens
gggtgagtgtgagct

SEQ ID NO: 1971886 - DNA, 15 bp, Homo sapiens
ggtgagtgtgagctg

SEQ ID NO: 1971887 - DNA, 15 bp, Homo sapiens
gtgagtgtgagctgc

SEQ ID NO: 1971888 - DNA, 15 bp, Homo sapiens
tgtgagctgctgtgc

SEQ ID NO: 1971889 - DNA, 15 bp, Homo sapiens
gtgagctgctgtgcc

SEQ ID NO: 1971890 - DNA, 15 bp, Homo sapiens
tgagctgctgtgccc

SEQ ID NO: 1971891 - DNA, 15 bp, Homo sapiens
gagctgctgtgccca

SEQ ID NO: 1971892 - DNA, 15 bp, Homo sapiens
agctgctgtgcccag

SEQ ID NO: 1971893 - DNA, 15 bp, Homo sapiens
gctgctgtgcccagc

SEQ ID NO: 1971894 - DNA, 15 bp, Homo sapiens
ctgctgtgcccagca

SEQ ID NO: 1971895 - DNA, 15 bp, Homo sapiens
tgctgtgcccagcat

SEQ ID NO: 1971896 - DNA, 15 bp, Homo sapiens
gctgtgcccagcatt

SEQ ID NO: 1971897 - DNA, 15 bp, Homo sapiens
ctgtgcccagcattg

SEQ ID NO: 1971898 - DNA, 15 bp, Homo sapiens
tgtgcccagcattgg

SEQ ID NO: 1971899 - DNA, 15 bp, Homo sapiens
gtgcccagcattggg

SEQ ID NO: 1971900 - DNA, 15 bp, Homo sapiens
tgcccagcattgggg

SEQ ID NO: 1971901 - DNA, 15 bp, Homo sapiens
gcccagcattggggt

SEQ ID NO: 1971902 - DNA, 15 bp, Homo sapiens
cccagcattggggtg

SEQ ID NO: 1971903 - DNA, 15 bp, Homo sapiens
ccagcattggggtgg

SEQ ID NO: 1971904 - DNA, 15 bp, Homo sapiens
cagcattggggtggg

SEQ ID NO: 1971905 - DNA, 15 bp, Homo sapiens
agcattggggtggga

SEQ ID NO: 1971906 - DNA, 15 bp, Homo sapiens
gcattggggtgggaa

SEQ ID NO: 1971907 - DNA, 15 bp, Homo sapiens
cattggggtgggaag

SEQ ID NO: 1971908 - DNA, 15 bp, Homo sapiens
attggggtgggaagg

SEQ ID NO: 1971909 - DNA, 15 bp, Homo sapiens
ttggggtgggaaggg

SEQ ID NO: 1971910 - DNA, 15 bp, Homo sapiens
tggggtgggaagggg

SEQ ID NO: 1971911 - DNA, 15 bp, Homo sapiens
ggggtgggaaggggg

SEQ ID NO: 1971912 - DNA, 15 bp, Homo sapiens
gggtgggaagggggg

SEQ ID NO: 1971913 - DNA, 15 bp, Homo sapiens
ggtgggaaggggggg

SEQ ID NO: 1971914 - DNA, 15 bp, Homo sapiens
gtgggaagggggggc

SEQ ID NO: 1971915 - DNA, 15 bp, Homo sapiens
tgggaagggggggca

SEQ ID NO: 1971916 - DNA, 15 bp, Homo sapiens
gggaagggggggcag

SEQ ID NO: 1971917 - DNA, 15 bp, Homo sapiens
ggaagggggggcagc

SEQ ID NO: 1971918 - DNA, 15 bp, Homo sapiens
gaagggggggcagca

SEQ ID NO: 1971919 - DNA, 15 bp, Homo sapiens
aagggggggcagcag

SEQ ID NO: 1971920 - DNA, 15 bp, Homo sapiens
agggggggcagcagg

SEQ ID NO: 1971921 - DNA, 15 bp, Homo sapiens
gggggggcagcagga

SEQ ID NO: 1971922 - DNA, 15 bp, Homo sapiens
ggggggcagcaggac

SEQ ID NO: 1971923 - DNA, 15 bp, Homo sapiens
gggggcagcaggaca

SEQ ID NO: 1971924 - DNA, 15 bp, Homo sapiens
ggggcagcaggacac

SEQ ID NO: 1971925 - DNA, 15 bp, Homo sapiens
gggcagcaggacact

SEQ ID NO: 1971926 - DNA, 15 bp, Homo sapiens
ggcagcaggacactc

SEQ ID NO: 1971927 - DNA, 15 bp, Homo sapiens
gcagcaggacactcc

SEQ ID NO: 1971928 - DNA, 15 bp, Homo sapiens
cagcaggacactccc

SEQ ID NO: 1971929 - DNA, 15 bp, Homo sapiens
agcaggacactcccc

SEQ ID NO: 1971930 - DNA, 15 bp, Homo sapiens
gcaggacactcccca

SEQ ID NO: 1971931 - DNA, 15 bp, Homo sapiens
caggacactccccaa

SEQ ID NO: 1971932 - DNA, 15 bp, Homo sapiens
aggacactccccaag

SEQ ID NO: 1971933 - DNA, 15 bp, Homo sapiens
ggacactccccaagc

SEQ ID NO: 1971934 - DNA, 15 bp, Homo sapiens
gacactccccaagcc

SEQ ID NO: 1971935 - DNA, 15 bp, Homo sapiens
acactccccaagccg

SEQ ID NO: 1971936 - DNA, 15 bp, Homo sapiens
cactccccaagccgg

SEQ ID NO: 1971937 - DNA, 15 bp, Homo sapiens
actccccaagccggg

SEQ ID NO: 1971938 - DNA, 15 bp, Homo sapiens
ctccccaagccgggc

SEQ ID NO: 1971939 - DNA, 15 bp, Homo sapiens
tccccaagccgggcc

SEQ ID NO: 1971940 - DNA, 15 bp, Homo sapiens
ccccaagccgggcct

SEQ ID NO: 1971941 - DNA, 15 bp, Homo sapiens
cccaagccgggcctg

SEQ ID NO: 1971942 - DNA, 15 bp, Homo sapiens
ccaagccgggcctgt

SEQ ID NO: 1971943 - DNA, 15 bp, Homo sapiens
caagccgggcctgtc

SEQ ID NO: 1971944 - DNA, 15 bp, Homo sapiens
aagccgggcctgtcg

SEQ ID NO: 1971945 - DNA, 15 bp, Homo sapiens
agccgggcctgtcgc

SEQ ID NO: 1971946 - DNA, 15 bp, Homo sapiens
gccgggcctgtcgcc

SEQ ID NO: 1971947 - DNA, 15 bp, Homo sapiens
ccgggcctgtcgccc

SEQ ID NO: 1971948 - DNA, 15 bp, Homo sapiens
cgggcctgtcgcccc

SEQ ID NO: 1971949 - DNA, 15 bp, Homo sapiens
gggcctgtcgcccct

SEQ ID NO: 1971950 - DNA, 15 bp, Homo sapiens
ggcctgtcgcccctg

SEQ ID NO: 1971951 - DNA, 15 bp, Homo sapiens
gcctgtcgcccctgc

SEQ ID NO: 1971952 - DNA, 15 bp, Homo sapiens
cctgtcgcccctgcc

SEQ ID NO: 1971953 - DNA, 15 bp, Homo sapiens
ctgtcgcccctgcct

SEQ ID NO: 1971954 - DNA, 15 bp, Homo sapiens
tgtcgcccctgcctt

SEQ ID NO: 1971955 - DNA, 15 bp, Homo sapiens
gtcgcccctgccttt

SEQ ID NO: 1971956 - DNA, 15 bp, Homo sapiens
tcgcccctgcctttg

SEQ ID NO: 1971957 - DNA, 15 bp, Homo sapiens
cgcccctgcctttgc

SEQ ID NO: 1971958 - DNA, 15 bp, Homo sapiens
gcccctgcctttgca

SEQ ID NO: 1971959 - DNA, 15 bp, Homo sapiens
cccctgcctttgcag

SEQ ID NO: 1971960 - DNA, 15 bp, Homo sapiens
ccctgcctttgcagg

SEQ ID NO: 1971961 - DNA, 15 bp, Homo sapiens
cctgcctttgcaggt

SEQ ID NO: 1971962 - DNA, 15 bp, Homo sapiens
ctgcctttgcaggtg

SEQ ID NO: 1971963 - DNA, 15 bp, Homo sapiens
tgcctttgcaggtgg

SEQ ID NO: 1971964 - DNA, 15 bp, Homo sapiens
gcctttgcaggtggc

SEQ ID NO: 1971965 - DNA, 15 bp, Homo sapiens
cctttgcaggtggca

SEQ ID NO: 1971966 - DNA, 15 bp, Homo sapiens
ctttgcaggtggcag

SEQ ID NO: 1971967 - DNA, 15 bp, Homo sapiens
tttgcaggtggcagc

SEQ ID NO: 1971968 - DNA, 15 bp, Homo sapiens
ttgcaggtggcagca

SEQ ID NO: 1971969 - DNA, 15 bp, Homo sapiens
tgcaggtggcagcat

SEQ ID NO: 1971970 - DNA, 15 bp, Homo sapiens
gcaggtggcagcatc

SEQ ID NO: 1971971 - DNA, 15 bp, Homo sapiens
caggtggcagcatca

SEQ ID NO: 1971972 - DNA, 15 bp, Homo sapiens
aggtggcagcatcac

SEQ ID NO: 1971973 - DNA, 15 bp, Homo sapiens
ggtggcagcatcacc

SEQ ID NO: 1971974 - DNA, 15 bp, Homo sapiens
gtggcagcatcacct

SEQ ID NO: 1971975 - DNA, 15 bp, Homo sapiens
tggcagcatcacctt

SEQ ID NO: 1971976 - DNA, 15 bp, Homo sapiens
ggcagcatcaccttc

SEQ ID NO: 1971977 - DNA, 15 bp, Homo sapiens
gcagcatcaccttct

SEQ ID NO: 1971978 - DNA, 15 bp, Homo sapiens
cagcatcaccttctc

SEQ ID NO: 1971979 - DNA, 15 bp, Homo sapiens
agcatcaccttctca

SEQ ID NO: 1971980 - DNA, 15 bp, Homo sapiens
gcatcaccttctcag

SEQ ID NO: 1971981 - DNA, 15 bp, Homo sapiens
catcaccttctcagc

SEQ ID NO: 1971982 - DNA, 15 bp, Homo sapiens
atcaccttctcagcc

SEQ ID NO: 1971983 - DNA, 15 bp, Homo sapiens
tcaccttctcagccc

SEQ ID NO: 1971984 - DNA, 15 bp, Homo sapiens
caccttctcagcccg

SEQ ID NO: 1971985 - DNA, 15 bp, Homo sapiens
accttctcagcccgc

SEQ ID NO: 1971986 - DNA, 15 bp, Homo sapiens
ccttctcagcccgcg

SEQ ID NO: 1971987 - DNA, 15 bp, Homo sapiens
cttctcagcccgcgt

SEQ ID NO: 1971988 - DNA, 15 bp, Homo sapiens
ttctcagcccgcgtg

SEQ ID NO: 1971989 - DNA, 15 bp, Homo sapiens
tctcagcccgcgtgg

SEQ ID NO: 1971990 - DNA, 15 bp, Homo sapiens
ctcagcccgcgtggc

SEQ ID NO: 1971991 - DNA, 15 bp, Homo sapiens
tcagcccgcgtggcc

SEQ ID NO: 1971992 - DNA, 15 bp, Homo sapiens
cagcccgcgtggccg

SEQ ID NO: 1971993 - DNA, 15 bp, Homo sapiens
agcccgcgtggccgg

SEQ ID NO: 1971994 - DNA, 15 bp, Homo sapiens
gcccgcgtggccggc

SEQ ID NO: 1971995 - DNA, 15 bp, Homo sapiens
cccgcgtggccggcg

SEQ ID NO: 1971996 - DNA, 15 bp, Homo sapiens
ccgcgtggccggcgc

SEQ ID NO: 1971997 - DNA, 15 bp, Homo sapiens
cgcgtggccggcgcc

SEQ ID NO: 1971998 - DNA, 15 bp, Homo sapiens
gcgtggccggcgcca

SEQ ID NO: 1971999 - DNA, 15 bp, Homo sapiens
cgtggccggcgccag

SEQ ID NO: 1972000 - DNA, 15 bp, Homo sapiens
gtggccggcgccagc

SEQ ID NO: 1972001 - DNA, 15 bp, Homo sapiens
tggccggcgccagcc

SEQ ID NO: 1972002 - DNA, 15 bp, Homo sapiens
ggccggcgccagcct

SEQ ID NO: 1972003 - DNA, 15 bp, Homo sapiens
gccggcgccagcctc

SEQ ID NO: 1972004 - DNA, 15 bp, Homo sapiens
ccggcgccagcctcc

SEQ ID NO: 1972005 - DNA, 15 bp, Homo sapiens
cggcgccagcctcct

SEQ ID NO: 1972006 - DNA, 15 bp, Homo sapiens
ggcgccagcctcctg

SEQ ID NO: 1972007 - DNA, 15 bp, Homo sapiens
gcgccagcctcctga

SEQ ID NO: 1972008 - DNA, 15 bp, Homo sapiens
cgccagcctcctgaa

SEQ ID NO: 1972009 - DNA, 15 bp, Homo sapiens
gccagcctcctgaag

SEQ ID NO: 1972010 - DNA, 15 bp, Homo sapiens
ccagcctcctgaagc

SEQ ID NO: 1972011 - DNA, 15 bp, Homo sapiens
cagcctcctgaagcc

SEQ ID NO: 1972012 - DNA, 15 bp, Homo sapiens
agcctcctgaagccg

SEQ ID NO: 1972013 - DNA, 15 bp, Homo sapiens
gcctcctgaagccgc

SEQ ID NO: 1972014 - DNA, 15 bp, Homo sapiens
cctcctgaagccgcc

SEQ ID NO: 1972015 - DNA, 15 bp, Homo sapiens
ctcctgaagccgcct

SEQ ID NO: 1972016 - DNA, 15 bp, Homo sapiens
tcctgaagccgcctg

SEQ ID NO: 1972017 - DNA, 15 bp, Homo sapiens
cctgaagccgcctgt

SEQ ID NO: 1972018 - DNA, 15 bp, Homo sapiens
ctgaagccgcctgtg

SEQ ID NO: 1972019 - DNA, 15 bp, Homo sapiens
tgaagccgcctgtgg

SEQ ID NO: 1972020 - DNA, 15 bp, Homo sapiens
gaagccgcctgtggt

SEQ ID NO: 1972021 - DNA, 15 bp, Homo sapiens
aagccgcctgtggtc

SEQ ID NO: 1972022 - DNA, 15 bp, Homo sapiens
agccgcctgtggtca

SEQ ID NO: 1972023 - DNA, 15 bp, Homo sapiens
gccgcctgtggtcaa

SEQ ID NO: 1972024 - DNA, 15 bp, Homo sapiens
ccgcctgtggtcaag

SEQ ID NO: 1972025 - DNA, 15 bp, Homo sapiens
cgcctgtggtcaagt

SEQ ID NO: 1972026 - DNA, 15 bp, Homo sapiens
gcctgtggtcaagtg

SEQ ID NO: 1972027 - DNA, 15 bp, Homo sapiens
cctgtggtcaagtgg

SEQ ID NO: 1972028 - DNA, 15 bp, Homo sapiens
ctgtggtcaagtggt

SEQ ID NO: 1972029 - DNA, 15 bp, Homo sapiens
tgtggtcaagtggtt

SEQ ID NO: 1972030 - DNA, 15 bp, Homo sapiens
gtggtcaagtggttc

SEQ ID NO: 1972031 - DNA, 15 bp, Homo sapiens
tggtcaagtggttca

SEQ ID NO: 1972032 - DNA, 15 bp, Homo sapiens
ggtcaagtggttcaa

SEQ ID NO: 1972033 - DNA, 15 bp, Homo sapiens
gtcaagtggttcaag

SEQ ID NO: 1972034 - DNA, 15 bp, Homo sapiens
tcaagtggttcaagg

SEQ ID NO: 1972035 - DNA, 15 bp, Homo sapiens
caagtggttcaaggg

SEQ ID NO: 1972036 - DNA, 15 bp, Homo sapiens
aagtggttcaagggc

SEQ ID NO: 1972037 - DNA, 15 bp, Homo sapiens
agtggttcaagggca

SEQ ID NO: 1972038 - DNA, 15 bp, Homo sapiens
gtggttcaagggcaa

SEQ ID NO: 1972039 - DNA, 15 bp, Homo sapiens
tggttcaagggcaaa

SEQ ID NO: 1972040 - DNA, 15 bp, Homo sapiens
ggttcaagggcaaat

SEQ ID NO: 1972041 - DNA, 15 bp, Homo sapiens
gttcaagggcaaatg

SEQ ID NO: 1972042 - DNA, 15 bp, Homo sapiens
ttcaagggcaaatgg

SEQ ID NO: 1972043 - DNA, 15 bp, Homo sapiens
tcaagggcaaatggg

SEQ ID NO: 1972044 - DNA, 15 bp, Homo sapiens
caagggcaaatgggt

SEQ ID NO: 1972045 - DNA, 15 bp, Homo sapiens
aagggcaaatgggtg

SEQ ID NO: 1972046 - DNA, 15 bp, Homo sapiens
agggcaaatgggtgg

SEQ ID NO: 1972047 - DNA, 15 bp, Homo sapiens
gggcaaatgggtgga

SEQ ID NO: 1972048 - DNA, 15 bp, Homo sapiens
ggcaaatgggtggac

SEQ ID NO: 1972049 - DNA, 15 bp, Homo sapiens
gcaaatgggtggacc

SEQ ID NO: 1972050 - DNA, 15 bp, Homo sapiens
caaatgggtggacct

SEQ ID NO: 1972051 - DNA, 15 bp, Homo sapiens
aaatgggtggacctg

SEQ ID NO: 1972052 - DNA, 15 bp, Homo sapiens
aatgggtggacctga

SEQ ID NO: 1972053 - DNA, 15 bp, Homo sapiens
atgggtggacctgag

SEQ ID NO: 1972054 - DNA, 15 bp, Homo sapiens
tgggtggacctgagc

SEQ ID NO: 1972055 - DNA, 15 bp, Homo sapiens
gggtggacctgagca

SEQ ID NO: 1972056 - DNA, 15 bp, Homo sapiens
ggtggacctgagcag

SEQ ID NO: 1972057 - DNA, 15 bp, Homo sapiens
gtggacctgagcagc

SEQ ID NO: 1972058 - DNA, 15 bp, Homo sapiens
tggacctgagcagca

SEQ ID NO: 1972059 - DNA, 15 bp, Homo sapiens
ggacctgagcagcaa

SEQ ID NO: 1972060 - DNA, 15 bp, Homo sapiens
gacctgagcagcaag

SEQ ID NO: 1972061 - DNA, 15 bp, Homo sapiens
acctgagcagcaagg

SEQ ID NO: 1972062 - DNA, 15 bp, Homo sapiens
cctgagcagcaaggt

SEQ ID NO: 1972063 - DNA, 15 bp, Homo sapiens
ctgagcagcaaggtg

SEQ ID NO: 1972064 - DNA, 15 bp, Homo sapiens
tgagcagcaaggtgg

SEQ ID NO: 1972065 - DNA, 15 bp, Homo sapiens
gagcagcaaggtggg

SEQ ID NO: 1972066 - DNA, 15 bp, Homo sapiens
gcagcaaggtgggcc

SEQ ID NO: 1972067 - DNA, 15 bp, Homo sapiens
cagcaaggtgggcca

SEQ ID NO: 1972068 - DNA, 15 bp, Homo sapiens
agcaaggtgggccag

SEQ ID NO: 1972069 - DNA, 15 bp, Homo sapiens
gcaaggtgggccagc

SEQ ID NO: 1972070 - DNA, 15 bp, Homo sapiens
caaggtgggccagca

SEQ ID NO: 1972071 - DNA, 15 bp, Homo sapiens
aaggtgggccagcac

SEQ ID NO: 1972072 - DNA, 15 bp, Homo sapiens
aggtgggccagcacc

SEQ ID NO: 1972073 - DNA, 15 bp, Homo sapiens
ggtgggccagcacct

SEQ ID NO: 1972074 - DNA, 15 bp, Homo sapiens
gtgggccagcacctg

SEQ ID NO: 1972075 - DNA, 15 bp, Homo sapiens
tgggccagcacctgc

SEQ ID NO: 1972076 - DNA, 15 bp, Homo sapiens
gggccagcacctgca

SEQ ID NO: 1972077 - DNA, 15 bp, Homo sapiens
ggccagcacctgcag

SEQ ID NO: 1972078 - DNA, 15 bp, Homo sapiens
gccagcacctgcagc

SEQ ID NO: 1972079 - DNA, 15 bp, Homo sapiens
ccagcacctgcagct

SEQ ID NO: 1972080 - DNA, 15 bp, Homo sapiens
cagcacctgcagctg

SEQ ID NO: 1972081 - DNA, 15 bp, Homo sapiens
agcacctgcagctgc

SEQ ID NO: 1972082 - DNA, 15 bp, Homo sapiens
gcacctgcagctgca

SEQ ID NO: 1972083 - DNA, 15 bp, Homo sapiens
cacctgcagctgcac

SEQ ID NO: 1972084 - DNA, 15 bp, Homo sapiens
acctgcagctgcacg

SEQ ID NO: 1972085 - DNA, 15 bp, Homo sapiens
cctgcagctgcacga

SEQ ID NO: 1972086 - DNA, 15 bp, Homo sapiens
ctgcagctgcacgac

SEQ ID NO: 1972087 - DNA, 15 bp, Homo sapiens
tgcagctgcacgaca

SEQ ID NO: 1972088 - DNA, 15 bp, Homo sapiens
gcagctgcacgacag

SEQ ID NO: 1972089 - DNA, 15 bp, Homo sapiens
cagctgcacgacagc

SEQ ID NO: 1972090 - DNA, 15 bp, Homo sapiens
agctgcacgacagct

SEQ ID NO: 1972091 - DNA, 15 bp, Homo sapiens
gctgcacgacagcta

SEQ ID NO: 1972092 - DNA, 15 bp, Homo sapiens
ctgcacgacagctac

SEQ ID NO: 1972093 - DNA, 15 bp, Homo sapiens
tgcacgacagctacg

SEQ ID NO: 1972094 - DNA, 15 bp, Homo sapiens
gcacgacagctacga

SEQ ID NO: 1972095 - DNA, 15 bp, Homo sapiens
cacgacagctacgac

SEQ ID NO: 1972096 - DNA, 15 bp, Homo sapiens
acgacagctacgacc

SEQ ID NO: 1972097 - DNA, 15 bp, Homo sapiens
cgacagctacgaccg

SEQ ID NO: 1972098 - DNA, 15 bp, Homo sapiens
gacagctacgaccgc

SEQ ID NO: 1972099 - DNA, 15 bp, Homo sapiens
acagctacgaccgcg

SEQ ID NO: 1972100 - DNA, 15 bp, Homo sapiens
cagctacgaccgcgc

SEQ ID NO: 1972101 - DNA, 15 bp, Homo sapiens
agctacgaccgcgcc

SEQ ID NO: 1972102 - DNA, 15 bp, Homo sapiens
gctacgaccgcgcca

SEQ ID NO: 1972103 - DNA, 15 bp, Homo sapiens
ctacgaccgcgccag

SEQ ID NO: 1972104 - DNA, 15 bp, Homo sapiens
tacgaccgcgccagc

SEQ ID NO: 1972105 - DNA, 15 bp, Homo sapiens
acgaccgcgccagca

SEQ ID NO: 1972106 - DNA, 15 bp, Homo sapiens
cgaccgcgccagcaa

SEQ ID NO: 1972107 - DNA, 15 bp, Homo sapiens
gaccgcgccagcaag

SEQ ID NO: 1972108 - DNA, 15 bp, Homo sapiens
accgcgccagcaagg

SEQ ID NO: 1972109 - DNA, 15 bp, Homo sapiens
ccgcgccagcaaggt

SEQ ID NO: 1972110 - DNA, 15 bp, Homo sapiens
cgcgccagcaaggtg

SEQ ID NO: 1972111 - DNA, 15 bp, Homo sapiens
gcgccagcaaggtgg

SEQ ID NO: 1972112 - DNA, 15 bp, Homo sapiens
cgccagcaaggtggg

SEQ ID NO: 1972113 - DNA, 15 bp, Homo sapiens
gccagcaaggtgggt

SEQ ID NO: 1972114 - DNA, 15 bp, Homo sapiens
ccagcaaggtgggtc

SEQ ID NO: 1972115 - DNA, 15 bp, Homo sapiens
cagcaaggtgggtcc

SEQ ID NO: 1972116 - DNA, 15 bp, Homo sapiens
agcaaggtgggtcca

SEQ ID NO: 1972117 - DNA, 15 bp, Homo sapiens
gcaaggtgggtccac

SEQ ID NO: 1972118 - DNA, 15 bp, Homo sapiens
caaggtgggtccacc

SEQ ID NO: 1972119 - DNA, 15 bp, Homo sapiens
aaggtgggtccaccg

SEQ ID NO: 1972120 - DNA, 15 bp, Homo sapiens
aggtgggtccaccgg

SEQ ID NO: 1972121 - DNA, 15 bp, Homo sapiens
ggtgggtccaccggg

SEQ ID NO: 1972122 - DNA, 15 bp, Homo sapiens
gtgggtccaccgggg

SEQ ID NO: 1972123 - DNA, 15 bp, Homo sapiens
tgggtccaccggggt

SEQ ID NO: 1972124 - DNA, 15 bp, Homo sapiens
gggtccaccggggtc

SEQ ID NO: 1972125 - DNA, 15 bp, Homo sapiens
ggtccaccggggtcg

SEQ ID NO: 1972126 - DNA, 15 bp, Homo sapiens
gtccaccggggtcgt

SEQ ID NO: 1972127 - DNA, 15 bp, Homo sapiens
tccaccggggtcgtg

SEQ ID NO: 1972128 - DNA, 15 bp, Homo sapiens
ccaccggggtcgtgg

SEQ ID NO: 1972129 - DNA, 15 bp, Homo sapiens
caccggggtcgtgga

SEQ ID NO: 1972130 - DNA, 15 bp, Homo sapiens
accggggtcgtggag

SEQ ID NO: 1972131 - DNA, 15 bp, Homo sapiens
ccggggtcgtggaga

SEQ ID NO: 1972132 - DNA, 15 bp, Homo sapiens
cggggtcgtggagac

SEQ ID NO: 1972133 - DNA, 15 bp, Homo sapiens
ggggtcgtggagaca

SEQ ID NO: 1972134 - DNA, 15 bp, Homo sapiens
gggtcgtggagacac

SEQ ID NO: 1972135 - DNA, 15 bp, Homo sapiens
ggtcgtggagacacg

SEQ ID NO: 1972136 - DNA, 15 bp, Homo sapiens
gtcgtggagacacgg

SEQ ID NO: 1972137 - DNA, 15 bp, Homo sapiens
tcgtggagacacgga

SEQ ID NO: 1972138 - DNA, 15 bp, Homo sapiens
cgtggagacacggag

SEQ ID NO: 1972139 - DNA, 15 bp, Homo sapiens
gtggagacacggaga

SEQ ID NO: 1972140 - DNA, 15 bp, Homo sapiens
tggagacacggagag

SEQ ID NO: 1972141 - DNA, 15 bp, Homo sapiens
ggagacacggagaga

SEQ ID NO: 1972142 - DNA, 15 bp, Homo sapiens
gagacacggagagag

SEQ ID NO: 1972143 - DNA, 15 bp, Homo sapiens
agacacggagagagg

SEQ ID NO: 1972144 - DNA, 15 bp, Homo sapiens
gacacggagagaggg

SEQ ID NO: 1972145 - DNA, 15 bp, Homo sapiens
acacggagagagggg

SEQ ID NO: 1972146 - DNA, 15 bp, Homo sapiens
cacggagagagggga

SEQ ID NO: 1972147 - DNA, 15 bp, Homo sapiens
acggagagaggggac

SEQ ID NO: 1972148 - DNA, 15 bp, Homo sapiens
cggagagaggggaca

SEQ ID NO: 1972149 - DNA, 15 bp, Homo sapiens
ggagagaggggacat

SEQ ID NO: 1972150 - DNA, 15 bp, Homo sapiens
gagagaggggacatg

SEQ ID NO: 1972151 - DNA, 15 bp, Homo sapiens
agagaggggacatgg

SEQ ID NO: 1972152 - DNA, 15 bp, Homo sapiens
gagaggggacatgga

SEQ ID NO: 1972153 - DNA, 15 bp, Homo sapiens
agaggggacatggag

SEQ ID NO: 1972154 - DNA, 15 bp, Homo sapiens
gaggggacatggaga

SEQ ID NO: 1972155 - DNA, 15 bp, Homo sapiens
aggggacatggagag

SEQ ID NO: 1972156 - DNA, 15 bp, Homo sapiens
ggggacatggagagc

SEQ ID NO: 1972157 - DNA, 15 bp, Homo sapiens
gggacatggagagcc

SEQ ID NO: 1972158 - DNA, 15 bp, Homo sapiens
ggacatggagagccc

SEQ ID NO: 1972159 - DNA, 15 bp, Homo sapiens
gacatggagagccct

SEQ ID NO: 1972160 - DNA, 15 bp, Homo sapiens
acatggagagcccta

SEQ ID NO: 1972161 - DNA, 15 bp, Homo sapiens
catggagagccctag

SEQ ID NO: 1972162 - DNA, 15 bp, Homo sapiens
atggagagccctaga

SEQ ID NO: 1972163 - DNA, 15 bp, Homo sapiens
tggagagccctagaa

SEQ ID NO: 1972164 - DNA, 15 bp, Homo sapiens
ggagagccctagaag

SEQ ID NO: 1972165 - DNA, 15 bp, Homo sapiens
gagagccctagaagg

SEQ ID NO: 1972166 - DNA, 15 bp, Homo sapiens
agagccctagaaggc

SEQ ID NO: 1972167 - DNA, 15 bp, Homo sapiens
gagccctagaaggca

SEQ ID NO: 1972168 - DNA, 15 bp, Homo sapiens
agccctagaaggcac

SEQ ID NO: 1972169 - DNA, 15 bp, Homo sapiens
gccctagaaggcaca

SEQ ID NO: 1972170 - DNA, 15 bp, Homo sapiens
ccctagaaggcacaa

SEQ ID NO: 1972171 - DNA, 15 bp, Homo sapiens
cctagaaggcacaag

SEQ ID NO: 1972172 - DNA, 15 bp, Homo sapiens
ctagaaggcacaagg

SEQ ID NO: 1972173 - DNA, 15 bp, Homo sapiens
tagaaggcacaaggc

SEQ ID NO: 1972174 - DNA, 15 bp, Homo sapiens
agaaggcacaaggca

SEQ ID NO: 1972175 - DNA, 15 bp, Homo sapiens
gaaggcacaaggcac

SEQ ID NO: 1972176 - DNA, 15 bp, Homo sapiens
aaggcacaaggcaca

SEQ ID NO: 1972177 - DNA, 15 bp, Homo sapiens
aggcacaaggcacac

SEQ ID NO: 1972178 - DNA, 15 bp, Homo sapiens
ggcacaaggcacaca

SEQ ID NO: 1972179 - DNA, 15 bp, Homo sapiens
gcacaaggcacacag

SEQ ID NO: 1972180 - DNA, 15 bp, Homo sapiens
cacaaggcacacaga

SEQ ID NO: 1972181 - DNA, 15 bp, Homo sapiens
acaaggcacacagag

SEQ ID NO: 1972182 - DNA, 15 bp, Homo sapiens
caaggcacacagagg

SEQ ID NO: 1972183 - DNA, 15 bp, Homo sapiens
aaggcacacagaggg

SEQ ID NO: 1972184 - DNA, 15 bp, Homo sapiens
aggcacacagagggc

SEQ ID NO: 1972185 - DNA, 15 bp, Homo sapiens
ggcacacagagggca

SEQ ID NO: 1972186 - DNA, 15 bp, Homo sapiens
gcacacagagggcac

SEQ ID NO: 1972187 - DNA, 15 bp, Homo sapiens
cacacagagggcacc

SEQ ID NO: 1972188 - DNA, 15 bp, Homo sapiens
acacagagggcacca

SEQ ID NO: 1972189 - DNA, 15 bp, Homo sapiens
cacagagggcaccat

SEQ ID NO: 1972190 - DNA, 15 bp, Homo sapiens
acagagggcaccatg

SEQ ID NO: 1972191 - DNA, 15 bp, Homo sapiens
cagagggcaccatga

SEQ ID NO: 1972192 - DNA, 15 bp, Homo sapiens
agagggcaccatgag

SEQ ID NO: 1972193 - DNA, 15 bp, Homo sapiens
gagggcaccatgaga

SEQ ID NO: 1972194 - DNA, 15 bp, Homo sapiens
agggcaccatgagac

SEQ ID NO: 1972195 - DNA, 15 bp, Homo sapiens
gggcaccatgagacc

SEQ ID NO: 1972196 - DNA, 15 bp, Homo sapiens
ggcaccatgagaccc

SEQ ID NO: 1972197 - DNA, 15 bp, Homo sapiens
gcaccatgagaccca

SEQ ID NO: 1972198 - DNA, 15 bp, Homo sapiens
caccatgagacccag

SEQ ID NO: 1972199 - DNA, 15 bp, Homo sapiens
accatgagacccaga

SEQ ID NO: 1972200 - DNA, 15 bp, Homo sapiens
ccatgagacccagag

SEQ ID NO: 1972201 - DNA, 15 bp, Homo sapiens
catgagacccagagg

SEQ ID NO: 1972202 - DNA, 15 bp, Homo sapiens
atgagacccagaggc

SEQ ID NO: 1972203 - DNA, 15 bp, Homo sapiens
tgagacccagaggca

SEQ ID NO: 1972204 - DNA, 15 bp, Homo sapiens
gagacccagaggcac

SEQ ID NO: 1972205 - DNA, 15 bp, Homo sapiens
agacccagaggcaca

SEQ ID NO: 1972206 - DNA, 15 bp, Homo sapiens
gacccagaggcacac

SEQ ID NO: 1972207 - DNA, 15 bp, Homo sapiens
acccagaggcacaca

SEQ ID NO: 1972208 - DNA, 15 bp, Homo sapiens
cccagaggcacacac

SEQ ID NO: 1972209 - DNA, 15 bp, Homo sapiens
ccagaggcacacacg

SEQ ID NO: 1972210 - DNA, 15 bp, Homo sapiens
cagaggcacacacga

SEQ ID NO: 1972211 - DNA, 15 bp, Homo sapiens
agaggcacacacgag

SEQ ID NO: 1972212 - DNA, 15 bp, Homo sapiens
gaggcacacacgagc

SEQ ID NO: 1972213 - DNA, 15 bp, Homo sapiens
aggcacacacgagct

SEQ ID NO: 1972214 - DNA, 15 bp, Homo sapiens
ggcacacacgagctg

SEQ ID NO: 1972215 - DNA, 15 bp, Homo sapiens
gcacacacgagctgc

SEQ ID NO: 1972216 - DNA, 15 bp, Homo sapiens
cacacacgagctgca

SEQ ID NO: 1972217 - DNA, 15 bp, Homo sapiens
acacacgagctgcaa

SEQ ID NO: 1972218 - DNA, 15 bp, Homo sapiens
cacacgagctgcaag

SEQ ID NO: 1972219 - DNA, 15 bp, Homo sapiens
acacgagctgcaagc

SEQ ID NO: 1972220 - DNA, 15 bp, Homo sapiens
cacgagctgcaagca

SEQ ID NO: 1972221 - DNA, 15 bp, Homo sapiens
acgagctgcaagcaa

SEQ ID NO: 1972222 - DNA, 15 bp, Homo sapiens
cgagctgcaagcaag

SEQ ID NO: 1972223 - DNA, 15 bp, Homo sapiens
gagctgcaagcaagg

SEQ ID NO: 1972224 - DNA, 15 bp, Homo sapiens
agctgcaagcaaggg

SEQ ID NO: 1972225 - DNA, 15 bp, Homo sapiens
gctgcaagcaagggg

SEQ ID NO: 1972226 - DNA, 15 bp, Homo sapiens
ctgcaagcaaggggt

SEQ ID NO: 1972227 - DNA, 15 bp, Homo sapiens
tgcaagcaaggggtg

SEQ ID NO: 1972228 - DNA, 15 bp, Homo sapiens
gcaagcaaggggtgt

SEQ ID NO: 1972229 - DNA, 15 bp, Homo sapiens
caagcaaggggtgtg

SEQ ID NO: 1972230 - DNA, 15 bp, Homo sapiens
aagcaaggggtgtgg

SEQ ID NO: 1972231 - DNA, 15 bp, Homo sapiens
agcaaggggtgtggg

SEQ ID NO: 1972232 - DNA, 15 bp, Homo sapiens
gcaaggggtgtgggg

SEQ ID NO: 1972233 - DNA, 15 bp, Homo sapiens
caaggggtgtgggga

SEQ ID NO: 1972234 - DNA, 15 bp, Homo sapiens
aaggggtgtggggaa

SEQ ID NO: 1972235 - DNA, 15 bp, Homo sapiens
aggggtgtggggaat

SEQ ID NO: 1972236 - DNA, 15 bp, Homo sapiens
ggggtgtggggaatc

SEQ ID NO: 1972237 - DNA, 15 bp, Homo sapiens
gggtgtggggaatct

SEQ ID NO: 1972238 - DNA, 15 bp, Homo sapiens
ggtgtggggaatctg

SEQ ID NO: 1972239 - DNA, 15 bp, Homo sapiens
gtgtggggaatctgg

SEQ ID NO: 1972240 - DNA, 15 bp, Homo sapiens
tgtggggaatctggg

SEQ ID NO: 1972241 - DNA, 15 bp, Homo sapiens
gtggggaatctggga

SEQ ID NO: 1972242 - DNA, 15 bp, Homo sapiens
tggggaatctgggag

SEQ ID NO: 1972243 - DNA, 15 bp, Homo sapiens
ggggaatctgggagg

SEQ ID NO: 1972244 - DNA, 15 bp, Homo sapiens
gggaatctgggaggc

SEQ ID NO: 1972245 - DNA, 15 bp, Homo sapiens
ggaatctgggaggca

SEQ ID NO: 1972246 - DNA, 15 bp, Homo sapiens
aatctgggaggcagg

SEQ ID NO: 1972247 - DNA, 15 bp, Homo sapiens
atctgggaggcaggt

SEQ ID NO: 1972248 - DNA, 15 bp, Homo sapiens
tctgggaggcaggtg

SEQ ID NO: 1972249 - DNA, 15 bp, Homo sapiens
ctgggaggcaggtgg

SEQ ID NO: 1972250 - DNA, 15 bp, Homo sapiens
tgggaggcaggtgga

SEQ ID NO: 1972251 - DNA, 15 bp, Homo sapiens
gggaggcaggtggag

SEQ ID NO: 1972252 - DNA, 15 bp, Homo sapiens
ggaggcaggtggagg

SEQ ID NO: 1972253 - DNA, 15 bp, Homo sapiens
gaggcaggtggaggg

SEQ ID NO: 1972254 - DNA, 15 bp, Homo sapiens
aggcaggtggagggg

SEQ ID NO: 1972255 - DNA, 15 bp, Homo sapiens
ggcaggtggaggggc

SEQ ID NO: 1972256 - DNA, 15 bp, Homo sapiens
gcaggtggaggggcc

SEQ ID NO: 1972257 - DNA, 15 bp, Homo sapiens
caggtggaggggcca

SEQ ID NO: 1972258 - DNA, 15 bp, Homo sapiens
aggtggaggggccag

SEQ ID NO: 1972259 - DNA, 15 bp, Homo sapiens
ggtggaggggccagg

SEQ ID NO: 1972260 - DNA, 15 bp, Homo sapiens
gtggaggggccaggg

SEQ ID NO: 1972261 - DNA, 15 bp, Homo sapiens
tggaggggccagggg

SEQ ID NO: 1972262 - DNA, 15 bp, Homo sapiens
ggaggggccaggggc

SEQ ID NO: 1972263 - DNA, 15 bp, Homo sapiens
gaggggccaggggcc

SEQ ID NO: 1972264 - DNA, 15 bp, Homo sapiens
aggggccaggggccc

SEQ ID NO: 1972265 - DNA, 15 bp, Homo sapiens
ggggccaggggccca

SEQ ID NO: 1972266 - DNA, 15 bp, Homo sapiens
gggccaggggcccac

SEQ ID NO: 1972267 - DNA, 15 bp, Homo sapiens
ggccaggggcccaca

SEQ ID NO: 1972268 - DNA, 15 bp, Homo sapiens
gccaggggcccacag

SEQ ID NO: 1972269 - DNA, 15 bp, Homo sapiens
ccaggggcccacagg

SEQ ID NO: 1972270 - DNA, 15 bp, Homo sapiens
caggggcccacaggg

SEQ ID NO: 1972271 - DNA, 15 bp, Homo sapiens
aggggcccacaggga

SEQ ID NO: 1972272 - DNA, 15 bp, Homo sapiens
ggggcccacagggag

SEQ ID NO: 1972273 - DNA, 15 bp, Homo sapiens
gggcccacagggaga

SEQ ID NO: 1972274 - DNA, 15 bp, Homo sapiens
ggcccacagggagat

SEQ ID NO: 1972275 - DNA, 15 bp, Homo sapiens
gcccacagggagatc

SEQ ID NO: 1972276 - DNA, 15 bp, Homo sapiens
cccacagggagatcc

SEQ ID NO: 1972277 - DNA, 15 bp, Homo sapiens
ccacagggagatccc

SEQ ID NO: 1972278 - DNA, 15 bp, Homo sapiens
cacagggagatcccg

SEQ ID NO: 1972279 - DNA, 15 bp, Homo sapiens
acagggagatcccgg

SEQ ID NO: 1972280 - DNA, 15 bp, Homo sapiens
cagggagatcccgga

SEQ ID NO: 1972281 - DNA, 15 bp, Homo sapiens
agggagatcccggag

SEQ ID NO: 1972282 - DNA, 15 bp, Homo sapiens
gggagatcccggagg

SEQ ID NO: 1972283 - DNA, 15 bp, Homo sapiens
ggagatcccggaggc

SEQ ID NO: 1972284 - DNA, 15 bp, Homo sapiens
gagatcccggaggcc

SEQ ID NO: 1972285 - DNA, 15 bp, Homo sapiens
agatcccggaggcct

SEQ ID NO: 1972286 - DNA, 15 bp, Homo sapiens
gatcccggaggcctg

SEQ ID NO: 1972287 - DNA, 15 bp, Homo sapiens
atcccggaggcctgg

SEQ ID NO: 1972288 - DNA, 15 bp, Homo sapiens
tcccggaggcctggg

SEQ ID NO: 1972289 - DNA, 15 bp, Homo sapiens
cccggaggcctgggg

SEQ ID NO: 1972290 - DNA, 15 bp, Homo sapiens
ccggaggcctggggg

SEQ ID NO: 1972291 - DNA, 15 bp, Homo sapiens
cggaggcctgggggc

SEQ ID NO: 1972292 - DNA, 15 bp, Homo sapiens
ggaggcctgggggcc

SEQ ID NO: 1972293 - DNA, 15 bp, Homo sapiens
gaggcctgggggcca

SEQ ID NO: 1972294 - DNA, 15 bp, Homo sapiens
aggcctgggggccag

SEQ ID NO: 1972295 - DNA, 15 bp, Homo sapiens
ggcctgggggccagg

SEQ ID NO: 1972296 - DNA, 15 bp, Homo sapiens
gcctgggggccaggg

SEQ ID NO: 1972297 - DNA, 15 bp, Homo sapiens
cctgggggccaggga

SEQ ID NO: 1972298 - DNA, 15 bp, Homo sapiens
ctgggggccagggag

SEQ ID NO: 1972299 - DNA, 15 bp, Homo sapiens
tgggggccagggagt

SEQ ID NO: 1972300 - DNA, 15 bp, Homo sapiens
gggggccagggagtg

SEQ ID NO: 1972301 - DNA, 15 bp, Homo sapiens
ggggccagggagtgc

SEQ ID NO: 1972302 - DNA, 15 bp, Homo sapiens
gggccagggagtgcg

SEQ ID NO: 1972303 - DNA, 15 bp, Homo sapiens
ggccagggagtgcga

SEQ ID NO: 1972304 - DNA, 15 bp, Homo sapiens
gccagggagtgcgat

SEQ ID NO: 1972305 - DNA, 15 bp, Homo sapiens
ccagggagtgcgatg

SEQ ID NO: 1972306 - DNA, 15 bp, Homo sapiens
cagggagtgcgatga

SEQ ID NO: 1972307 - DNA, 15 bp, Homo sapiens
agggagtgcgatgag

SEQ ID NO: 1972308 - DNA, 15 bp, Homo sapiens
gggagtgcgatgagg

SEQ ID NO: 1972309 - DNA, 15 bp, Homo sapiens
ggagtgcgatgaggc

SEQ ID NO: 1972310 - DNA, 15 bp, Homo sapiens
gagtgcgatgaggct

SEQ ID NO: 1972311 - DNA, 15 bp, Homo sapiens
agtgcgatgaggctc

SEQ ID NO: 1972312 - DNA, 15 bp, Homo sapiens
gtgcgatgaggctca

SEQ ID NO: 1972313 - DNA, 15 bp, Homo sapiens
tgcgatgaggctcat

SEQ ID NO: 1972314 - DNA, 15 bp, Homo sapiens
gcgatgaggctcatg

SEQ ID NO: 1972315 - DNA, 15 bp, Homo sapiens
cgatgaggctcatgg

SEQ ID NO: 1972316 - DNA, 15 bp, Homo sapiens
gatgaggctcatggg

SEQ ID NO: 1972317 - DNA, 15 bp, Homo sapiens
atgaggctcatggga

SEQ ID NO: 1972318 - DNA, 15 bp, Homo sapiens
tgaggctcatgggag

SEQ ID NO: 1972319 - DNA, 15 bp, Homo sapiens
gaggctcatgggagc

SEQ ID NO: 1972320 - DNA, 15 bp, Homo sapiens
aggctcatgggagca

SEQ ID NO: 1972321 - DNA, 15 bp, Homo sapiens
ggctcatgggagcac

SEQ ID NO: 1972322 - DNA, 15 bp, Homo sapiens
gctcatgggagcact

SEQ ID NO: 1972323 - DNA, 15 bp, Homo sapiens
ctcatgggagcactg

SEQ ID NO: 1972324 - DNA, 15 bp, Homo sapiens
tcatgggagcactgt

SEQ ID NO: 1972325 - DNA, 15 bp, Homo sapiens
catgggagcactgtc

SEQ ID NO: 1972326 - DNA, 15 bp, Homo sapiens
atgggagcactgtcg

SEQ ID NO: 1972327 - DNA, 15 bp, Homo sapiens
tgggagcactgtcgg

SEQ ID NO: 1972328 - DNA, 15 bp, Homo sapiens
gggagcactgtcggg

SEQ ID NO: 1972329 - DNA, 15 bp, Homo sapiens
ggagcactgtcgggg

SEQ ID NO: 1972330 - DNA, 15 bp, Homo sapiens
gagcactgtcgggga

SEQ ID NO: 1972331 - DNA, 15 bp, Homo sapiens
agcactgtcggggac

SEQ ID NO: 1972332 - DNA, 15 bp, Homo sapiens
gcactgtcggggacc

SEQ ID NO: 1972333 - DNA, 15 bp, Homo sapiens
cactgtcggggacct

SEQ ID NO: 1972334 - DNA, 15 bp, Homo sapiens
actgtcggggacctg

SEQ ID NO: 1972335 - DNA, 15 bp, Homo sapiens
ctgtcggggacctgg

SEQ ID NO: 1972336 - DNA, 15 bp, Homo sapiens
tgtcggggacctggg

SEQ ID NO: 1972337 - DNA, 15 bp, Homo sapiens
gtcggggacctggga

SEQ ID NO: 1972338 - DNA, 15 bp, Homo sapiens
tcggggacctgggag

SEQ ID NO: 1972339 - DNA, 15 bp, Homo sapiens
cggggacctgggaga

SEQ ID NO: 1972340 - DNA, 15 bp, Homo sapiens
ggggacctgggagac

SEQ ID NO: 1972341 - DNA, 15 bp, Homo sapiens
gggacctgggagact

SEQ ID NO: 1972342 - DNA, 15 bp, Homo sapiens
ggacctgggagactt

SEQ ID NO: 1972343 - DNA, 15 bp, Homo sapiens
gacctgggagacttg

SEQ ID NO: 1972344 - DNA, 15 bp, Homo sapiens
acctgggagacttgg

SEQ ID NO: 1972345 - DNA, 15 bp, Homo sapiens
cctgggagacttggt

SEQ ID NO: 1972346 - DNA, 15 bp, Homo sapiens
ctgggagacttggtg

SEQ ID NO: 1972347 - DNA, 15 bp, Homo sapiens
tgggagacttggtgg

SEQ ID NO: 1972348 - DNA, 15 bp, Homo sapiens
gggagacttggtgga

SEQ ID NO: 1972349 - DNA, 15 bp, Homo sapiens
ggagacttggtggac

SEQ ID NO: 1972350 - DNA, 15 bp, Homo sapiens
gagacttggtggaca

SEQ ID NO: 1972351 - DNA, 15 bp, Homo sapiens
agacttggtggacat

SEQ ID NO: 1972352 - DNA, 15 bp, Homo sapiens
gacttggtggacatg

SEQ ID NO: 1972353 - DNA, 15 bp, Homo sapiens
acttggtggacatga

SEQ ID NO: 1972354 - DNA, 15 bp, Homo sapiens
cttggtggacatgat

SEQ ID NO: 1972355 - DNA, 15 bp, Homo sapiens
ttggtggacatgatc

SEQ ID NO: 1972356 - DNA, 15 bp, Homo sapiens
tggtggacatgatca

SEQ ID NO: 1972357 - DNA, 15 bp, Homo sapiens
ggtggacatgatcac

SEQ ID NO: 1972358 - DNA, 15 bp, Homo sapiens
gtggacatgatcacc

SEQ ID NO: 1972359 - DNA, 15 bp, Homo sapiens
tggacatgatcacct

SEQ ID NO: 1972360 - DNA, 15 bp, Homo sapiens
ggacatgatcacctc

SEQ ID NO: 1972361 - DNA, 15 bp, Homo sapiens
gacatgatcacctca

SEQ ID NO: 1972362 - DNA, 15 bp, Homo sapiens
acatgatcacctcaa

SEQ ID NO: 1972363 - DNA, 15 bp, Homo sapiens
catgatcacctcaag

SEQ ID NO: 1972364 - DNA, 15 bp, Homo sapiens
atgatcacctcaagg

SEQ ID NO: 1972365 - DNA, 15 bp, Homo sapiens
tgatcacctcaaggg

SEQ ID NO: 1972366 - DNA, 15 bp, Homo sapiens
gatcacctcaagggg

SEQ ID NO: 1972367 - DNA, 15 bp, Homo sapiens
atcacctcaaggggg

SEQ ID NO: 1972368 - DNA, 15 bp, Homo sapiens
tcacctcaagggggc

SEQ ID NO: 1972369 - DNA, 15 bp, Homo sapiens
cacctcaagggggca

SEQ ID NO: 1972370 - DNA, 15 bp, Homo sapiens
acctcaagggggcac

SEQ ID NO: 1972371 - DNA, 15 bp, Homo sapiens
cctcaagggggcacc

SEQ ID NO: 1972372 - DNA, 15 bp, Homo sapiens
ctcaagggggcacct

SEQ ID NO: 1972373 - DNA, 15 bp, Homo sapiens
tcaagggggcaccta

SEQ ID NO: 1972374 - DNA, 15 bp, Homo sapiens
caagggggcacctaa

SEQ ID NO: 1972375 - DNA, 15 bp, Homo sapiens
aagggggcacctaat

SEQ ID NO: 1972376 - DNA, 15 bp, Homo sapiens
agggggcacctaata

SEQ ID NO: 1972377 - DNA, 15 bp, Homo sapiens
gggggcacctaataa

SEQ ID NO: 1972378 - DNA, 15 bp, Homo sapiens
ggggcacctaataag

SEQ ID NO: 1972379 - DNA, 15 bp, Homo sapiens
gggcacctaataagg

SEQ ID NO: 1972380 - DNA, 15 bp, Homo sapiens
ggcacctaataaggt

SEQ ID NO: 1972381 - DNA, 15 bp, Homo sapiens
gcacctaataaggtt

SEQ ID NO: 1972382 - DNA, 15 bp, Homo sapiens
cacctaataaggttt

SEQ ID NO: 1972383 - DNA, 15 bp, Homo sapiens
acctaataaggtttg

SEQ ID NO: 1972384 - DNA, 15 bp, Homo sapiens
cctaataaggtttgg

SEQ ID NO: 1972385 - DNA, 15 bp, Homo sapiens
ctaataaggtttggc

SEQ ID NO: 1972386 - DNA, 15 bp, Homo sapiens
taataaggtttggcc

SEQ ID NO: 1972387 - DNA, 15 bp, Homo sapiens
aataaggtttggccg

SEQ ID NO: 1972388 - DNA, 15 bp, Homo sapiens
ataaggtttggccgg

SEQ ID NO: 1972389 - DNA, 15 bp, Homo sapiens
taaggtttggccggg

SEQ ID NO: 1972390 - DNA, 15 bp, Homo sapiens
aaggtttggccgggg

SEQ ID NO: 1972391 - DNA, 15 bp, Homo sapiens
aggtttggccggggg

SEQ ID NO: 1972392 - DNA, 15 bp, Homo sapiens
ggtttggccgggggt

SEQ ID NO: 1972393 - DNA, 15 bp, Homo sapiens
gtttggccgggggtg

SEQ ID NO: 1972394 - DNA, 15 bp, Homo sapiens
tttggccgggggtgg

SEQ ID NO: 1972395 - DNA, 15 bp, Homo sapiens
ttggccgggggtggg

SEQ ID NO: 1972396 - DNA, 15 bp, Homo sapiens
tggccgggggtgggg

SEQ ID NO: 1972397 - DNA, 15 bp, Homo sapiens
ccgggggtggggggt

SEQ ID NO: 1972398 - DNA, 15 bp, Homo sapiens
cgggggtggggggtc

SEQ ID NO: 1972399 - DNA, 15 bp, Homo sapiens
gggggtggggggtcg

SEQ ID NO: 1972400 - DNA, 15 bp, Homo sapiens
ggggtggggggtcgc

SEQ ID NO: 1972401 - DNA, 15 bp, Homo sapiens
gggtggggggtcgcc

SEQ ID NO: 1972402 - DNA, 15 bp, Homo sapiens
ggtggggggtcgccc

SEQ ID NO: 1972403 - DNA, 15 bp, Homo sapiens
gtggggggtcgccca

SEQ ID NO: 1972404 - DNA, 15 bp, Homo sapiens
tggggggtcgcccag

SEQ ID NO: 1972405 - DNA, 15 bp, Homo sapiens
ggggggtcgcccagg

SEQ ID NO: 1972406 - DNA, 15 bp, Homo sapiens
gggggtcgcccaggg

SEQ ID NO: 1972407 - DNA, 15 bp, Homo sapiens
ggggtcgcccagggt

SEQ ID NO: 1972408 - DNA, 15 bp, Homo sapiens
gggtcgcccagggtg

SEQ ID NO: 1972409 - DNA, 15 bp, Homo sapiens
ggtcgcccagggtgg

SEQ ID NO: 1972410 - DNA, 15 bp, Homo sapiens
gtcgcccagggtggt

SEQ ID NO: 1972411 - DNA, 15 bp, Homo sapiens
tcgcccagggtggtc

SEQ ID NO: 1972412 - DNA, 15 bp, Homo sapiens
cgcccagggtggtca

SEQ ID NO: 1972413 - DNA, 15 bp, Homo sapiens
gcccagggtggtcag

SEQ ID NO: 1972414 - DNA, 15 bp, Homo sapiens
cccagggtggtcagg

SEQ ID NO: 1972415 - DNA, 15 bp, Homo sapiens
ccagggtggtcagga

SEQ ID NO: 1972416 - DNA, 15 bp, Homo sapiens
cagggtggtcaggaa

SEQ ID NO: 1972417 - DNA, 15 bp, Homo sapiens
agggtggtcaggaag

SEQ ID NO: 1972418 - DNA, 15 bp, Homo sapiens
gggtggtcaggaagc

SEQ ID NO: 1972419 - DNA, 15 bp, Homo sapiens
ggtggtcaggaagcc

SEQ ID NO: 1972420 - DNA, 15 bp, Homo sapiens
gtggtcaggaagcct

SEQ ID NO: 1972421 - DNA, 15 bp, Homo sapiens
tggtcaggaagcctg

SEQ ID NO: 1972422 - DNA, 15 bp, Homo sapiens
ggtcaggaagcctgg

SEQ ID NO: 1972423 - DNA, 15 bp, Homo sapiens
gtcaggaagcctgga

SEQ ID NO: 1972424 - DNA, 15 bp, Homo sapiens
tcaggaagcctggag

SEQ ID NO: 1972425 - DNA, 15 bp, Homo sapiens
caggaagcctggagg

SEQ ID NO: 1972426 - DNA, 15 bp, Homo sapiens
aggaagcctggagga

SEQ ID NO: 1972427 - DNA, 15 bp, Homo sapiens
ggaagcctggaggac

SEQ ID NO: 1972428 - DNA, 15 bp, Homo sapiens
gaagcctggaggaca

SEQ ID NO: 1972429 - DNA, 15 bp, Homo sapiens
aagcctggaggacac

SEQ ID NO: 1972430 - DNA, 15 bp, Homo sapiens
agcctggaggacact

SEQ ID NO: 1972431 - DNA, 15 bp, Homo sapiens
gcctggaggacactg

SEQ ID NO: 1972432 - DNA, 15 bp, Homo sapiens
cctggaggacactgt

SEQ ID NO: 1972433 - DNA, 15 bp, Homo sapiens
ctggaggacactgtg

SEQ ID NO: 1972434 - DNA, 15 bp, Homo sapiens
tggaggacactgtga

SEQ ID NO: 1972435 - DNA, 15 bp, Homo sapiens
ggaggacactgtgaa

SEQ ID NO: 1972436 - DNA, 15 bp, Homo sapiens
gaggacactgtgaag

SEQ ID NO: 1972437 - DNA, 15 bp, Homo sapiens
aggacactgtgaagc

SEQ ID NO: 1972438 - DNA, 15 bp, Homo sapiens
ggacactgtgaagca

SEQ ID NO: 1972439 - DNA, 15 bp, Homo sapiens
gacactgtgaagcat

SEQ ID NO: 1972440 - DNA, 15 bp, Homo sapiens
acactgtgaagcatg

SEQ ID NO: 1972441 - DNA, 15 bp, Homo sapiens
cactgtgaagcatgg

SEQ ID NO: 1972442 - DNA, 15 bp, Homo sapiens
actgtgaagcatggg

SEQ ID NO: 1972443 - DNA, 15 bp, Homo sapiens
ctgtgaagcatgggg

SEQ ID NO: 1972444 - DNA, 15 bp, Homo sapiens
tgtgaagcatggggg

SEQ ID NO: 1972445 - DNA, 15 bp, Homo sapiens
gtgaagcatgggggc

SEQ ID NO: 1972446 - DNA, 15 bp, Homo sapiens
tgaagcatgggggca

SEQ ID NO: 1972447 - DNA, 15 bp, Homo sapiens
gaagcatgggggcac

SEQ ID NO: 1972448 - DNA, 15 bp, Homo sapiens
aagcatgggggcacc

SEQ ID NO: 1972449 - DNA, 15 bp, Homo sapiens
agcatgggggcacca

SEQ ID NO: 1972450 - DNA, 15 bp, Homo sapiens
gcatgggggcaccag

SEQ ID NO: 1972451 - DNA, 15 bp, Homo sapiens
catgggggcaccagc

SEQ ID NO: 1972452 - DNA, 15 bp, Homo sapiens
atgggggcaccagct

SEQ ID NO: 1972453 - DNA, 15 bp, Homo sapiens
tgggggcaccagcta

SEQ ID NO: 1972454 - DNA, 15 bp, Homo sapiens
gggggcaccagctag

SEQ ID NO: 1972455 - DNA, 15 bp, Homo sapiens
ggggcaccagctagt

SEQ ID NO: 1972456 - DNA, 15 bp, Homo sapiens
gggcaccagctagtg

SEQ ID NO: 1972457 - DNA, 15 bp, Homo sapiens
ggcaccagctagtgg

SEQ ID NO: 1972458 - DNA, 15 bp, Homo sapiens
gcaccagctagtggg

SEQ ID NO: 1972459 - DNA, 15 bp, Homo sapiens
caccagctagtgggg

SEQ ID NO: 1972460 - DNA, 15 bp, Homo sapiens
accagctagtggggt

SEQ ID NO: 1972461 - DNA, 15 bp, Homo sapiens
ccagctagtggggtt

SEQ ID NO: 1972462 - DNA, 15 bp, Homo sapiens
cagctagtggggttg

SEQ ID NO: 1972463 - DNA, 15 bp, Homo sapiens
agctagtggggttgt

SEQ ID NO: 1972464 - DNA, 15 bp, Homo sapiens
gctagtggggttgta

SEQ ID NO: 1972465 - DNA, 15 bp, Homo sapiens
ctagtggggttgtaa

SEQ ID NO: 1972466 - DNA, 15 bp, Homo sapiens
tagtggggttgtaaa

SEQ ID NO: 1972467 - DNA, 15 bp, Homo sapiens
agtggggttgtaaag

SEQ ID NO: 1972468 - DNA, 15 bp, Homo sapiens
gtggggttgtaaagc

SEQ ID NO: 1972469 - DNA, 15 bp, Homo sapiens
tggggttgtaaagcc

SEQ ID NO: 1972470 - DNA, 15 bp, Homo sapiens
ggggttgtaaagccc

SEQ ID NO: 1972471 - DNA, 15 bp, Homo sapiens
gggttgtaaagcccc

SEQ ID NO: 1972472 - DNA, 15 bp, Homo sapiens
ggttgtaaagcccct

SEQ ID NO: 1972473 - DNA, 15 bp, Homo sapiens
gttgtaaagcccctg

SEQ ID NO: 1972474 - DNA, 15 bp, Homo sapiens
ttgtaaagcccctgg

SEQ ID NO: 1972475 - DNA, 15 bp, Homo sapiens
tgtaaagcccctgga

SEQ ID NO: 1972476 - DNA, 15 bp, Homo sapiens
gtaaagcccctggat

SEQ ID NO: 1972477 - DNA, 15 bp, Homo sapiens
taaagcccctggatg

SEQ ID NO: 1972478 - DNA, 15 bp, Homo sapiens
aaagcccctggatgg

SEQ ID NO: 1972479 - DNA, 15 bp, Homo sapiens
aagcccctggatggg

SEQ ID NO: 1972480 - DNA, 15 bp, Homo sapiens
agcccctggatgggt

SEQ ID NO: 1972481 - DNA, 15 bp, Homo sapiens
gcccctggatgggtg

SEQ ID NO: 1972482 - DNA, 15 bp, Homo sapiens
cccctggatgggtga

SEQ ID NO: 1972483 - DNA, 15 bp, Homo sapiens
ccctggatgggtgag

SEQ ID NO: 1972484 - DNA, 15 bp, Homo sapiens
cctggatgggtgagt

SEQ ID NO: 1972485 - DNA, 15 bp, Homo sapiens
ctggatgggtgagta

SEQ ID NO: 1972486 - DNA, 15 bp, Homo sapiens
tggatgggtgagtat

SEQ ID NO: 1972487 - DNA, 15 bp, Homo sapiens
ggatgggtgagtatc

SEQ ID NO: 1972488 - DNA, 15 bp, Homo sapiens
gatgggtgagtatca

SEQ ID NO: 1972489 - DNA, 15 bp, Homo sapiens
atgggtgagtatcag

SEQ ID NO: 1972490 - DNA, 15 bp, Homo sapiens
tgggtgagtatcagg

SEQ ID NO: 1972491 - DNA, 15 bp, Homo sapiens
gggtgagtatcaggg

SEQ ID NO: 1972492 - DNA, 15 bp, Homo sapiens
ggtgagtatcagggc

SEQ ID NO: 1972493 - DNA, 15 bp, Homo sapiens
gtgagtatcagggct

SEQ ID NO: 1972494 - DNA, 15 bp, Homo sapiens
tgagtatcagggcta

SEQ ID NO: 1972495 - DNA, 15 bp, Homo sapiens
gagtatcagggctaa

SEQ ID NO: 1972496 - DNA, 15 bp, Homo sapiens
agtatcagggctaag

SEQ ID NO: 1972497 - DNA, 15 bp, Homo sapiens
gtatcagggctaagg

SEQ ID NO: 1972498 - DNA, 15 bp, Homo sapiens
tatcagggctaaggg

SEQ ID NO: 1972499 - DNA, 15 bp, Homo sapiens
atcagggctaagggc

SEQ ID NO: 1972500 - DNA, 15 bp, Homo sapiens
tcagggctaagggct

SEQ ID NO: 1972501 - DNA, 15 bp, Homo sapiens
cagggctaagggctc

SEQ ID NO: 1972502 - DNA, 15 bp, Homo sapiens
agggctaagggctca

SEQ ID NO: 1972503 - DNA, 15 bp, Homo sapiens
gggctaagggctcaa

SEQ ID NO: 1972504 - DNA, 15 bp, Homo sapiens
ggctaagggctcaag

SEQ ID NO: 1972505 - DNA, 15 bp, Homo sapiens
gctaagggctcaagg

SEQ ID NO: 1972506 - DNA, 15 bp, Homo sapiens
ctaagggctcaaggg

SEQ ID NO: 1972507 - DNA, 15 bp, Homo sapiens
taagggctcaaggga

SEQ ID NO: 1972508 - DNA, 15 bp, Homo sapiens
aagggctcaagggac

SEQ ID NO: 1972509 - DNA, 15 bp, Homo sapiens
agggctcaagggact

SEQ ID NO: 1972510 - DNA, 15 bp, Homo sapiens
gggctcaagggactc

SEQ ID NO: 1972511 - DNA, 15 bp, Homo sapiens
ggctcaagggactct

SEQ ID NO: 1972512 - DNA, 15 bp, Homo sapiens
gctcaagggactctc

SEQ ID NO: 1972513 - DNA, 15 bp, Homo sapiens
ctcaagggactctca

SEQ ID NO: 1972514 - DNA, 15 bp, Homo sapiens
tcaagggactctcag

SEQ ID NO: 1972515 - DNA, 15 bp, Homo sapiens
caagggactctcagg

SEQ ID NO: 1972516 - DNA, 15 bp, Homo sapiens
aagggactctcaggg

SEQ ID NO: 1972517 - DNA, 15 bp, Homo sapiens
agggactctcaggga

SEQ ID NO: 1972518 - DNA, 15 bp, Homo sapiens
gggactctcagggat

SEQ ID NO: 1972519 - DNA, 15 bp, Homo sapiens
ggactctcagggatt

SEQ ID NO: 1972520 - DNA, 15 bp, Homo sapiens
gactctcagggatta

SEQ ID NO: 1972521 - DNA, 15 bp, Homo sapiens
actctcagggattaa

SEQ ID NO: 1972522 - DNA, 15 bp, Homo sapiens
ctctcagggattaac

SEQ ID NO: 1972523 - DNA, 15 bp, Homo sapiens
tctcagggattaacc

SEQ ID NO: 1972524 - DNA, 15 bp, Homo sapiens
ctcagggattaacca

SEQ ID NO: 1972525 - DNA, 15 bp, Homo sapiens
tcagggattaaccag

SEQ ID NO: 1972526 - DNA, 15 bp, Homo sapiens
cagggattaaccaga

SEQ ID NO: 1972527 - DNA, 15 bp, Homo sapiens
agggattaaccagaa

SEQ ID NO: 1972528 - DNA, 15 bp, Homo sapiens
gggattaaccagaac

SEQ ID NO: 1972529 - DNA, 15 bp, Homo sapiens
ggattaaccagaaca

SEQ ID NO: 1972530 - DNA, 15 bp, Homo sapiens
gattaaccagaacaa

SEQ ID NO: 1972531 - DNA, 15 bp, Homo sapiens
attaaccagaacaat

SEQ ID NO: 1972532 - DNA, 15 bp, Homo sapiens
ttaaccagaacaatt

SEQ ID NO: 1972533 - DNA, 15 bp, Homo sapiens
taaccagaacaattc

SEQ ID NO: 1972534 - DNA, 15 bp, Homo sapiens
aaccagaacaattcc

SEQ ID NO: 1972535 - DNA, 15 bp, Homo sapiens
accagaacaattcct

SEQ ID NO: 1972536 - DNA, 15 bp, Homo sapiens
ccagaacaattcctc

SEQ ID NO: 1972537 - DNA, 15 bp, Homo sapiens
cagaacaattcctca

SEQ ID NO: 1972538 - DNA, 15 bp, Homo sapiens
agaacaattcctcat

SEQ ID NO: 1972539 - DNA, 15 bp, Homo sapiens
gaacaattcctcatt

SEQ ID NO: 1972540 - DNA, 15 bp, Homo sapiens
aacaattcctcatta

SEQ ID NO: 1972541 - DNA, 15 bp, Homo sapiens
acaattcctcattat

SEQ ID NO: 1972542 - DNA, 15 bp, Homo sapiens
caattcctcattata

SEQ ID NO: 1972543 - DNA, 15 bp, Homo sapiens
aattcctcattatac

SEQ ID NO: 1972544 - DNA, 15 bp, Homo sapiens
attcctcattataca

SEQ ID NO: 1972545 - DNA, 15 bp, Homo sapiens
ttcctcattatacag

SEQ ID NO: 1972546 - DNA, 15 bp, Homo sapiens
tcctcattatacaga

SEQ ID NO: 1972547 - DNA, 15 bp, Homo sapiens
cctcattatacagac

SEQ ID NO: 1972548 - DNA, 15 bp, Homo sapiens
ctcattatacagaca

SEQ ID NO: 1972549 - DNA, 15 bp, Homo sapiens
tcattatacagacac

SEQ ID NO: 1972550 - DNA, 15 bp, Homo sapiens
cattatacagacacg

SEQ ID NO: 1972551 - DNA, 15 bp, Homo sapiens
attatacagacacgg

SEQ ID NO: 1972552 - DNA, 15 bp, Homo sapiens
ttatacagacacgga

SEQ ID NO: 1972553 - DNA, 15 bp, Homo sapiens
tatacagacacggaa

SEQ ID NO: 1972554 - DNA, 15 bp, Homo sapiens
atacagacacggaaa

SEQ ID NO: 1972555 - DNA, 15 bp, Homo sapiens
tacagacacggaaac

SEQ ID NO: 1972556 - DNA, 15 bp, Homo sapiens
acagacacggaaacc

SEQ ID NO: 1972557 - DNA, 15 bp, Homo sapiens
cagacacggaaacca

SEQ ID NO: 1972558 - DNA, 15 bp, Homo sapiens
agacacggaaaccaa

SEQ ID NO: 1972559 - DNA, 15 bp, Homo sapiens
gacacggaaaccaaa

SEQ ID NO: 1972560 - DNA, 15 bp, Homo sapiens
acacggaaaccaaag

SEQ ID NO: 1972561 - DNA, 15 bp, Homo sapiens
cacggaaaccaaagc

SEQ ID NO: 1972562 - DNA, 15 bp, Homo sapiens
acggaaaccaaagct

SEQ ID NO: 1972563 - DNA, 15 bp, Homo sapiens
cggaaaccaaagctt

SEQ ID NO: 1972564 - DNA, 15 bp, Homo sapiens
ggaaaccaaagcttg

SEQ ID NO: 1972565 - DNA, 15 bp, Homo sapiens
gaaaccaaagcttga

SEQ ID NO: 1972566 - DNA, 15 bp, Homo sapiens
aaaccaaagcttgag

SEQ ID NO: 1972567 - DNA, 15 bp, Homo sapiens
aaccaaagcttgaga

SEQ ID NO: 1972568 - DNA, 15 bp, Homo sapiens
accaaagcttgagag

SEQ ID NO: 1972569 - DNA, 15 bp, Homo sapiens
ccaaagcttgagagg

SEQ ID NO: 1972570 - DNA, 15 bp, Homo sapiens
caaagcttgagaggt

SEQ ID NO: 1972571 - DNA, 15 bp, Homo sapiens
aaagcttgagaggtt

SEQ ID NO: 1972572 - DNA, 15 bp, Homo sapiens
aagcttgagaggtta

SEQ ID NO: 1972573 - DNA, 15 bp, Homo sapiens
agcttgagaggttaa

SEQ ID NO: 1972574 - DNA, 15 bp, Homo sapiens
gcttgagaggttaag

SEQ ID NO: 1972575 - DNA, 15 bp, Homo sapiens
cttgagaggttaagt

SEQ ID NO: 1972576 - DNA, 15 bp, Homo sapiens
ttgagaggttaagtg

SEQ ID NO: 1972577 - DNA, 15 bp, Homo sapiens
tgagaggttaagtgg

SEQ ID NO: 1972578 - DNA, 15 bp, Homo sapiens
gagaggttaagtggc

SEQ ID NO: 1972579 - DNA, 15 bp, Homo sapiens
agaggttaagtggct

SEQ ID NO: 1972580 - DNA, 15 bp, Homo sapiens
gaggttaagtggctg

SEQ ID NO: 1972581 - DNA, 15 bp, Homo sapiens
aggttaagtggctgc

SEQ ID NO: 1972582 - DNA, 15 bp, Homo sapiens
ggttaagtggctgct

SEQ ID NO: 1972583 - DNA, 15 bp, Homo sapiens
gttaagtggctgctc

SEQ ID NO: 1972584 - DNA, 15 bp, Homo sapiens
ttaagtggctgctcc

SEQ ID NO: 1972585 - DNA, 15 bp, Homo sapiens
taagtggctgctcca

SEQ ID NO: 1972586 - DNA, 15 bp, Homo sapiens
aagtggctgctccaa

SEQ ID NO: 1972587 - DNA, 15 bp, Homo sapiens
agtggctgctccaag

SEQ ID NO: 1972588 - DNA, 15 bp, Homo sapiens
gtggctgctccaagg

SEQ ID NO: 1972589 - DNA, 15 bp, Homo sapiens
tggctgctccaaggt

SEQ ID NO: 1972590 - DNA, 15 bp, Homo sapiens
ggctgctccaaggtc

SEQ ID NO: 1972591 - DNA, 15 bp, Homo sapiens
gctgctccaaggtca

SEQ ID NO: 1972592 - DNA, 15 bp, Homo sapiens
ctgctccaaggtcac

SEQ ID NO: 1972593 - DNA, 15 bp, Homo sapiens
tgctccaaggtcact

SEQ ID NO: 1972594 - DNA, 15 bp, Homo sapiens
gctccaaggtcactt

SEQ ID NO: 1972595 - DNA, 15 bp, Homo sapiens
ctccaaggtcactta

SEQ ID NO: 1972596 - DNA, 15 bp, Homo sapiens
tccaaggtcacttag

SEQ ID NO: 1972597 - DNA, 15 bp, Homo sapiens
ccaaggtcacttaga

SEQ ID NO: 1972598 - DNA, 15 bp, Homo sapiens
caaggtcacttagac

SEQ ID NO: 1972599 - DNA, 15 bp, Homo sapiens
aaggtcacttagaca

SEQ ID NO: 1972600 - DNA, 15 bp, Homo sapiens
aggtcacttagacat

SEQ ID NO: 1972601 - DNA, 15 bp, Homo sapiens
ggtcacttagacata

SEQ ID NO: 1972602 - DNA, 15 bp, Homo sapiens
gtcacttagacatag

SEQ ID NO: 1972603 - DNA, 15 bp, Homo sapiens
tcacttagacatagg

SEQ ID NO: 1972604 - DNA, 15 bp, Homo sapiens
cacttagacataggc

SEQ ID NO: 1972605 - DNA, 15 bp, Homo sapiens
acttagacataggcc

SEQ ID NO: 1972606 - DNA, 15 bp, Homo sapiens
cttagacataggcct

SEQ ID NO: 1972607 - DNA, 15 bp, Homo sapiens
ttagacataggccta

SEQ ID NO: 1972608 - DNA, 15 bp, Homo sapiens
tagacataggcctag

SEQ ID NO: 1972609 - DNA, 15 bp, Homo sapiens
agacataggcctaga

SEQ ID NO: 1972610 - DNA, 15 bp, Homo sapiens
gacataggcctagaa

SEQ ID NO: 1972611 - DNA, 15 bp, Homo sapiens
acataggcctagaac

SEQ ID NO: 1972612 - DNA, 15 bp, Homo sapiens
cataggcctagaacc

SEQ ID NO: 1972613 - DNA, 15 bp, Homo sapiens
ataggcctagaacct

SEQ ID NO: 1972614 - DNA, 15 bp, Homo sapiens
taggcctagaacctt

SEQ ID NO: 1972615 - DNA, 15 bp, Homo sapiens
aggcctagaacctta

SEQ ID NO: 1972616 - DNA, 15 bp, Homo sapiens
ggcctagaaccttaa

SEQ ID NO: 1972617 - DNA, 15 bp, Homo sapiens
gcctagaaccttaag

SEQ ID NO: 1972618 - DNA, 15 bp, Homo sapiens
cctagaaccttaagc

SEQ ID NO: 1972619 - DNA, 15 bp, Homo sapiens
ctagaaccttaagcc

SEQ ID NO: 1972620 - DNA, 15 bp, Homo sapiens
tagaaccttaagcct

SEQ ID NO: 1972621 - DNA, 15 bp, Homo sapiens
agaaccttaagcctt

SEQ ID NO: 1972622 - DNA, 15 bp, Homo sapiens
gaaccttaagccttc

SEQ ID NO: 1972623 - DNA, 15 bp, Homo sapiens
aaccttaagccttcg

SEQ ID NO: 1972624 - DNA, 15 bp, Homo sapiens
accttaagccttcgt

SEQ ID NO: 1972625 - DNA, 15 bp, Homo sapiens
ccttaagccttcgtt

SEQ ID NO: 1972626 - DNA, 15 bp, Homo sapiens
cttaagccttcgttt

SEQ ID NO: 1972627 - DNA, 15 bp, Homo sapiens
ttaagccttcgtttt

SEQ ID NO: 1972628 - DNA, 15 bp, Homo sapiens
taagccttcgttttt

SEQ ID NO: 1972629 - DNA, 15 bp, Homo sapiens
aagccttcgtttttt

SEQ ID NO: 1972630 - DNA, 15 bp, Homo sapiens
agccttcgttttttg

SEQ ID NO: 1972631 - DNA, 15 bp, Homo sapiens
gccttcgttttttgt

SEQ ID NO: 1972632 - DNA, 15 bp, Homo sapiens
ccttcgttttttgtg

SEQ ID NO: 1972633 - DNA, 15 bp, Homo sapiens
cttcgttttttgtgt

SEQ ID NO: 1972634 - DNA, 15 bp, Homo sapiens
ttcgttttttgtgtt

SEQ ID NO: 1972635 - DNA, 15 bp, Homo sapiens
tcgttttttgtgttt

SEQ ID NO: 1972636 - DNA, 15 bp, Homo sapiens
cgttttttgtgtttt

SEQ ID NO: 1972637 - DNA, 15 bp, Homo sapiens
gttttttgtgttttg

SEQ ID NO: 1972638 - DNA, 15 bp, Homo sapiens
ttttttgtgttttgt

SEQ ID NO: 1972639 - DNA, 15 bp, Homo sapiens
tttttgtgttttgtt

SEQ ID NO: 1972640 - DNA, 15 bp, Homo sapiens
ttttgtgttttgttt

SEQ ID NO: 1972641 - DNA, 15 bp, Homo sapiens
gtgttttgttttttt

SEQ ID NO: 1972642 - DNA, 15 bp, Homo sapiens
tgttttgtttttttc

SEQ ID NO: 1972643 - DNA, 15 bp, Homo sapiens
gttttgtttttttcc

SEQ ID NO: 1972644 - DNA, 15 bp, Homo sapiens
ttttgtttttttccg

SEQ ID NO: 1972645 - DNA, 15 bp, Homo sapiens
tttgtttttttccgc

SEQ ID NO: 1972646 - DNA, 15 bp, Homo sapiens
ttgtttttttccgcc

SEQ ID NO: 1972647 - DNA, 15 bp, Homo sapiens
tgtttttttccgccc

SEQ ID NO: 1972648 - DNA, 15 bp, Homo sapiens
gtttttttccgccct

SEQ ID NO: 1972649 - DNA, 15 bp, Homo sapiens
tttttttccgccctg

SEQ ID NO: 1972650 - DNA, 15 bp, Homo sapiens
ttttttccgccctgc

SEQ ID NO: 1972651 - DNA, 15 bp, Homo sapiens
tttttccgccctgcc

SEQ ID NO: 1972652 - DNA, 15 bp, Homo sapiens
ttttccgccctgccc

SEQ ID NO: 1972653 - DNA, 15 bp, Homo sapiens
tttccgccctgccca

SEQ ID NO: 1972654 - DNA, 15 bp, Homo sapiens
ttccgccctgcccac

SEQ ID NO: 1972655 - DNA, 15 bp, Homo sapiens
tccgccctgcccacc

SEQ ID NO: 1972656 - DNA, 15 bp, Homo sapiens
ccgccctgcccacca

SEQ ID NO: 1972657 - DNA, 15 bp, Homo sapiens
cgccctgcccaccag

SEQ ID NO: 1972658 - DNA, 15 bp, Homo sapiens
gccctgcccaccaga

SEQ ID NO: 1972659 - DNA, 15 bp, Homo sapiens
ccctgcccaccagaa

SEQ ID NO: 1972660 - DNA, 15 bp, Homo sapiens
cctgcccaccagaac

SEQ ID NO: 1972661 - DNA, 15 bp, Homo sapiens
ctgcccaccagaacc

SEQ ID NO: 1972662 - DNA, 15 bp, Homo sapiens
tgcccaccagaacct

SEQ ID NO: 1972663 - DNA, 15 bp, Homo sapiens
gcccaccagaacctt

SEQ ID NO: 1972664 - DNA, 15 bp, Homo sapiens
cccaccagaacctta

SEQ ID NO: 1972665 - DNA, 15 bp, Homo sapiens
ccaccagaaccttaa

SEQ ID NO: 1972666 - DNA, 15 bp, Homo sapiens
caccagaaccttaag

SEQ ID NO: 1972667 - DNA, 15 bp, Homo sapiens
accagaaccttaagg

SEQ ID NO: 1972668 - DNA, 15 bp, Homo sapiens
ccagaaccttaaggc

SEQ ID NO: 1972669 - DNA, 15 bp, Homo sapiens
cagaaccttaaggct

SEQ ID NO: 1972670 - DNA, 15 bp, Homo sapiens
agaaccttaaggctt

SEQ ID NO: 1972671 - DNA, 15 bp, Homo sapiens
gaaccttaaggctta

SEQ ID NO: 1972672 - DNA, 15 bp, Homo sapiens
aaccttaaggcttaa

SEQ ID NO: 1972673 - DNA, 15 bp, Homo sapiens
accttaaggcttaag

SEQ ID NO: 1972674 - DNA, 15 bp, Homo sapiens
ccttaaggcttaagt

SEQ ID NO: 1972675 - DNA, 15 bp, Homo sapiens
cttaaggcttaagtc

SEQ ID NO: 1972676 - DNA, 15 bp, Homo sapiens
ttaaggcttaagtcc

SEQ ID NO: 1972677 - DNA, 15 bp, Homo sapiens
taaggcttaagtccc

SEQ ID NO: 1972678 - DNA, 15 bp, Homo sapiens
aaggcttaagtcccc

SEQ ID NO: 1972679 - DNA, 15 bp, Homo sapiens
aggcttaagtcccct

SEQ ID NO: 1972680 - DNA, 15 bp, Homo sapiens
ggcttaagtcccctt

SEQ ID NO: 1972681 - DNA, 15 bp, Homo sapiens
gcttaagtccccttg

SEQ ID NO: 1972682 - DNA, 15 bp, Homo sapiens
cttaagtccccttgt

SEQ ID NO: 1972683 - DNA, 15 bp, Homo sapiens
ttaagtccccttgtt

SEQ ID NO: 1972684 - DNA, 15 bp, Homo sapiens
taagtccccttgttt

SEQ ID NO: 1972685 - DNA, 15 bp, Homo sapiens
aagtccccttgtttg

SEQ ID NO: 1972686 - DNA, 15 bp, Homo sapiens
agtccccttgtttgt

SEQ ID NO: 1972687 - DNA, 15 bp, Homo sapiens
gtccccttgtttgtt

SEQ ID NO: 1972688 - DNA, 15 bp, Homo sapiens
tccccttgtttgttc

SEQ ID NO: 1972689 - DNA, 15 bp, Homo sapiens
ccccttgtttgttca

SEQ ID NO: 1972690 - DNA, 15 bp, Homo sapiens
cccttgtttgttcac

SEQ ID NO: 1972691 - DNA, 15 bp, Homo sapiens
ccttgtttgttcact

SEQ ID NO: 1972692 - DNA, 15 bp, Homo sapiens
cttgtttgttcactc

SEQ ID NO: 1972693 - DNA, 15 bp, Homo sapiens
ttgtttgttcactcc

SEQ ID NO: 1972694 - DNA, 15 bp, Homo sapiens
tgtttgttcactcca

SEQ ID NO: 1972695 - DNA, 15 bp, Homo sapiens
gtttgttcactccaa

SEQ ID NO: 1972696 - DNA, 15 bp, Homo sapiens
tttgttcactccaag

SEQ ID NO: 1972697 - DNA, 15 bp, Homo sapiens
ttgttcactccaagc

SEQ ID NO: 1972698 - DNA, 15 bp, Homo sapiens
tgttcactccaagcc

SEQ ID NO: 1972699 - DNA, 15 bp, Homo sapiens
gttcactccaagcct

SEQ ID NO: 1972700 - DNA, 15 bp, Homo sapiens
ttcactccaagcctc

SEQ ID NO: 1972701 - DNA, 15 bp, Homo sapiens
tcactccaagcctct

SEQ ID NO: 1972702 - DNA, 15 bp, Homo sapiens
cactccaagcctctg

SEQ ID NO: 1972703 - DNA, 15 bp, Homo sapiens
actccaagcctctgc

SEQ ID NO: 1972704 - DNA, 15 bp, Homo sapiens
ctccaagcctctgct

SEQ ID NO: 1972705 - DNA, 15 bp, Homo sapiens
tccaagcctctgctt

SEQ ID NO: 1972706 - DNA, 15 bp, Homo sapiens
ccaagcctctgcttt

SEQ ID NO: 1972707 - DNA, 15 bp, Homo sapiens
caagcctctgctttt

SEQ ID NO: 1972708 - DNA, 15 bp, Homo sapiens
aagcctctgcttttc

SEQ ID NO: 1972709 - DNA, 15 bp, Homo sapiens
agcctctgcttttcc

SEQ ID NO: 1972710 - DNA, 15 bp, Homo sapiens
gcctctgcttttccc

SEQ ID NO: 1972711 - DNA, 15 bp, Homo sapiens
cctctgcttttccca

SEQ ID NO: 1972712 - DNA, 15 bp, Homo sapiens
ctctgcttttcccaa

SEQ ID NO: 1972713 - DNA, 15 bp, Homo sapiens
tctgcttttcccaac

SEQ ID NO: 1972714 - DNA, 15 bp, Homo sapiens
ctgcttttcccaacc

SEQ ID NO: 1972715 - DNA, 15 bp, Homo sapiens
tgcttttcccaacct

SEQ ID NO: 1972716 - DNA, 15 bp, Homo sapiens
gcttttcccaacctt

SEQ ID NO: 1972717 - DNA, 15 bp, Homo sapiens
cttttcccaaccttc

SEQ ID NO: 1972718 - DNA, 15 bp, Homo sapiens
ttttcccaaccttcc

SEQ ID NO: 1972719 - DNA, 15 bp, Homo sapiens
tttcccaaccttccc

SEQ ID NO: 1972720 - DNA, 15 bp, Homo sapiens
ttcccaaccttcccc

SEQ ID NO: 1972721 - DNA, 15 bp, Homo sapiens
tcccaaccttcccca

SEQ ID NO: 1972722 - DNA, 15 bp, Homo sapiens
cccaaccttccccag

SEQ ID NO: 1972723 - DNA, 15 bp, Homo sapiens
ccaaccttccccagt

SEQ ID NO: 1972724 - DNA, 15 bp, Homo sapiens
caaccttccccagtc

SEQ ID NO: 1972725 - DNA, 15 bp, Homo sapiens
aaccttccccagtcc

SEQ ID NO: 1972726 - DNA, 15 bp, Homo sapiens
accttccccagtcct

SEQ ID NO: 1972727 - DNA, 15 bp, Homo sapiens
ccttccccagtcctg

SEQ ID NO: 1972728 - DNA, 15 bp, Homo sapiens
cttccccagtcctgg

SEQ ID NO: 1972729 - DNA, 15 bp, Homo sapiens
ttccccagtcctggg

SEQ ID NO: 1972730 - DNA, 15 bp, Homo sapiens
tccccagtcctgggc

SEQ ID NO: 1972731 - DNA, 15 bp, Homo sapiens
ccccagtcctgggct

SEQ ID NO: 1972732 - DNA, 15 bp, Homo sapiens
cccagtcctgggcta

SEQ ID NO: 1972733 - DNA, 15 bp, Homo sapiens
ccagtcctgggctag

SEQ ID NO: 1972734 - DNA, 15 bp, Homo sapiens
cagtcctgggctagg

SEQ ID NO: 1972735 - DNA, 15 bp, Homo sapiens
agtcctgggctaggc

SEQ ID NO: 1972736 - DNA, 15 bp, Homo sapiens
gtcctgggctaggca

SEQ ID NO: 1972737 - DNA, 15 bp, Homo sapiens
tcctgggctaggcaa

SEQ ID NO: 1972738 - DNA, 15 bp, Homo sapiens
cctgggctaggcaag

SEQ ID NO: 1972739 - DNA, 15 bp, Homo sapiens
ctgggctaggcaagg

SEQ ID NO: 1972740 - DNA, 15 bp, Homo sapiens
tgggctaggcaaggg

SEQ ID NO: 1972741 - DNA, 15 bp, Homo sapiens
gggctaggcaagggg

SEQ ID NO: 1972742 - DNA, 15 bp, Homo sapiens
ggctaggcaaggggg

SEQ ID NO: 1972743 - DNA, 15 bp, Homo sapiens
gctaggcaagggggc

SEQ ID NO: 1972744 - DNA, 15 bp, Homo sapiens
ctaggcaagggggcc

SEQ ID NO: 1972745 - DNA, 15 bp, Homo sapiens
taggcaagggggcct

SEQ ID NO: 1972746 - DNA, 15 bp, Homo sapiens
aggcaagggggcctc

SEQ ID NO: 1972747 - DNA, 15 bp, Homo sapiens
ggcaagggggcctct

SEQ ID NO: 1972748 - DNA, 15 bp, Homo sapiens
gcaagggggcctcta

SEQ ID NO: 1972749 - DNA, 15 bp, Homo sapiens
caagggggcctctag

SEQ ID NO: 1972750 - DNA, 15 bp, Homo sapiens
aagggggcctctagc

SEQ ID NO: 1972751 - DNA, 15 bp, Homo sapiens
agggggcctctagca

SEQ ID NO: 1972752 - DNA, 15 bp, Homo sapiens
gggggcctctagcaa

SEQ ID NO: 1972753 - DNA, 15 bp, Homo sapiens
ggggcctctagcaag

SEQ ID NO: 1972754 - DNA, 15 bp, Homo sapiens
gggcctctagcaaga

SEQ ID NO: 1972755 - DNA, 15 bp, Homo sapiens
ggcctctagcaagag

SEQ ID NO: 1972756 - DNA, 15 bp, Homo sapiens
gcctctagcaagaga

SEQ ID NO: 1972757 - DNA, 15 bp, Homo sapiens
cctctagcaagagag

SEQ ID NO: 1972758 - DNA, 15 bp, Homo sapiens
ctctagcaagagagg

SEQ ID NO: 1972759 - DNA, 15 bp, Homo sapiens
tctagcaagagaggc

SEQ ID NO: 1972760 - DNA, 15 bp, Homo sapiens
ctagcaagagaggcc

SEQ ID NO: 1972761 - DNA, 15 bp, Homo sapiens
tagcaagagaggcca

SEQ ID NO: 1972762 - DNA, 15 bp, Homo sapiens
agcaagagaggccaa

SEQ ID NO: 1972763 - DNA, 15 bp, Homo sapiens
gcaagagaggccaac

SEQ ID NO: 1972764 - DNA, 15 bp, Homo sapiens
caagagaggccaaca

SEQ ID NO: 1972765 - DNA, 15 bp, Homo sapiens
aagagaggccaacat

SEQ ID NO: 1972766 - DNA, 15 bp, Homo sapiens
agagaggccaacatg

SEQ ID NO: 1972767 - DNA, 15 bp, Homo sapiens
gagaggccaacatgt

SEQ ID NO: 1972768 - DNA, 15 bp, Homo sapiens
agaggccaacatgtt

SEQ ID NO: 1972769 - DNA, 15 bp, Homo sapiens
gaggccaacatgttc

SEQ ID NO: 1972770 - DNA, 15 bp, Homo sapiens
aggccaacatgttct

SEQ ID NO: 1972771 - DNA, 15 bp, Homo sapiens
ggccaacatgttctg

SEQ ID NO: 1972772 - DNA, 15 bp, Homo sapiens
gccaacatgttctgc

SEQ ID NO: 1972773 - DNA, 15 bp, Homo sapiens
ccaacatgttctgct

SEQ ID NO: 1972774 - DNA, 15 bp, Homo sapiens
caacatgttctgctg

SEQ ID NO: 1972775 - DNA, 15 bp, Homo sapiens
aacatgttctgctgt

SEQ ID NO: 1972776 - DNA, 15 bp, Homo sapiens
acatgttctgctgtg

SEQ ID NO: 1972777 - DNA, 15 bp, Homo sapiens
catgttctgctgtgc

SEQ ID NO: 1972778 - DNA, 15 bp, Homo sapiens
atgttctgctgtgcg

SEQ ID NO: 1972779 - DNA, 15 bp, Homo sapiens
tgttctgctgtgcgg

SEQ ID NO: 1972780 - DNA, 15 bp, Homo sapiens
gttctgctgtgcggg

SEQ ID NO: 1972781 - DNA, 15 bp, Homo sapiens
ttctgctgtgcgggg

SEQ ID NO: 1972782 - DNA, 15 bp, Homo sapiens
tctgctgtgcggggc

SEQ ID NO: 1972783 - DNA, 15 bp, Homo sapiens
ctgctgtgcggggct

SEQ ID NO: 1972784 - DNA, 15 bp, Homo sapiens
tgctgtgcggggctg

SEQ ID NO: 1972785 - DNA, 15 bp, Homo sapiens
gctgtgcggggctgt

SEQ ID NO: 1972786 - DNA, 15 bp, Homo sapiens
ctgtgcggggctgtg

SEQ ID NO: 1972787 - DNA, 15 bp, Homo sapiens
tgtgcggggctgtgc

SEQ ID NO: 1972788 - DNA, 15 bp, Homo sapiens
gtgcggggctgtgca

SEQ ID NO: 1972789 - DNA, 15 bp, Homo sapiens
tgcggggctgtgcat

SEQ ID NO: 1972790 - DNA, 15 bp, Homo sapiens
gcggggctgtgcatt

SEQ ID NO: 1972791 - DNA, 15 bp, Homo sapiens
cggggctgtgcattg

SEQ ID NO: 1972792 - DNA, 15 bp, Homo sapiens
ggggctgtgcattgc

SEQ ID NO: 1972793 - DNA, 15 bp, Homo sapiens
gggctgtgcattgca

SEQ ID NO: 1972794 - DNA, 15 bp, Homo sapiens
ggctgtgcattgcac

SEQ ID NO: 1972795 - DNA, 15 bp, Homo sapiens
gctgtgcattgcaca

SEQ ID NO: 1972796 - DNA, 15 bp, Homo sapiens
ctgtgcattgcacaa

SEQ ID NO: 1972797 - DNA, 15 bp, Homo sapiens
tgtgcattgcacaaa

SEQ ID NO: 1972798 - DNA, 15 bp, Homo sapiens
gtgcattgcacaaaa

SEQ ID NO: 1972799 - DNA, 15 bp, Homo sapiens
tgcattgcacaaaag

SEQ ID NO: 1972800 - DNA, 15 bp, Homo sapiens
gcattgcacaaaagc

SEQ ID NO: 1972801 - DNA, 15 bp, Homo sapiens
cattgcacaaaagcc

SEQ ID NO: 1972802 - DNA, 15 bp, Homo sapiens
attgcacaaaagcct

SEQ ID NO: 1972803 - DNA, 15 bp, Homo sapiens
ttgcacaaaagcctg

SEQ ID NO: 1972804 - DNA, 15 bp, Homo sapiens
tgcacaaaagcctgt

SEQ ID NO: 1972805 - DNA, 15 bp, Homo sapiens
gcacaaaagcctgta

SEQ ID NO: 1972806 - DNA, 15 bp, Homo sapiens
cacaaaagcctgtat

SEQ ID NO: 1972807 - DNA, 15 bp, Homo sapiens
acaaaagcctgtatt

SEQ ID NO: 1972808 - DNA, 15 bp, Homo sapiens
caaaagcctgtattt

SEQ ID NO: 1972809 - DNA, 15 bp, Homo sapiens
aaaagcctgtatttc

SEQ ID NO: 1972810 - DNA, 15 bp, Homo sapiens
aaagcctgtatttca

SEQ ID NO: 1972811 - DNA, 15 bp, Homo sapiens
aagcctgtatttcac

SEQ ID NO: 1972812 - DNA, 15 bp, Homo sapiens
agcctgtatttcacc

SEQ ID NO: 1972813 - DNA, 15 bp, Homo sapiens
gcctgtatttcacca

SEQ ID NO: 1972814 - DNA, 15 bp, Homo sapiens
cctgtatttcaccac

SEQ ID NO: 1972815 - DNA, 15 bp, Homo sapiens
ctgtatttcaccaca

SEQ ID NO: 1972816 - DNA, 15 bp, Homo sapiens
tgtatttcaccacaa

SEQ ID NO: 1972817 - DNA, 15 bp, Homo sapiens
gtatttcaccacaac

SEQ ID NO: 1972818 - DNA, 15 bp, Homo sapiens
tatttcaccacaacc

SEQ ID NO: 1972819 - DNA, 15 bp, Homo sapiens
atttcaccacaacca

SEQ ID NO: 1972820 - DNA, 15 bp, Homo sapiens
tttcaccacaaccat

SEQ ID NO: 1972821 - DNA, 15 bp, Homo sapiens
ttcaccacaaccatg

SEQ ID NO: 1972822 - DNA, 15 bp, Homo sapiens
tcaccacaaccatgt

SEQ ID NO: 1972823 - DNA, 15 bp, Homo sapiens
caccacaaccatgtg

SEQ ID NO: 1972824 - DNA, 15 bp, Homo sapiens
accacaaccatgtgc

SEQ ID NO: 1972825 - DNA, 15 bp, Homo sapiens
ccacaaccatgtgcc

SEQ ID NO: 1972826 - DNA, 15 bp, Homo sapiens
cacaaccatgtgcca

SEQ ID NO: 1972827 - DNA, 15 bp, Homo sapiens
acaaccatgtgccag

SEQ ID NO: 1972828 - DNA, 15 bp, Homo sapiens
caaccatgtgccagc

SEQ ID NO: 1972829 - DNA, 15 bp, Homo sapiens
aaccatgtgccagca

SEQ ID NO: 1972830 - DNA, 15 bp, Homo sapiens
accatgtgccagcag

SEQ ID NO: 1972831 - DNA, 15 bp, Homo sapiens
ccatgtgccagcaga

SEQ ID NO: 1972832 - DNA, 15 bp, Homo sapiens
catgtgccagcagat

SEQ ID NO: 1972833 - DNA, 15 bp, Homo sapiens
atgtgccagcagatg

SEQ ID NO: 1972834 - DNA, 15 bp, Homo sapiens
tgtgccagcagatgg

SEQ ID NO: 1972835 - DNA, 15 bp, Homo sapiens
gtgccagcagatggc

SEQ ID NO: 1972836 - DNA, 15 bp, Homo sapiens
tgccagcagatggca

SEQ ID NO: 1972837 - DNA, 15 bp, Homo sapiens
gccagcagatggcaa

SEQ ID NO: 1972838 - DNA, 15 bp, Homo sapiens
ccagcagatggcaat

SEQ ID NO: 1972839 - DNA, 15 bp, Homo sapiens
cagcagatggcaatc

SEQ ID NO: 1972840 - DNA, 15 bp, Homo sapiens
agcagatggcaatca

SEQ ID NO: 1972841 - DNA, 15 bp, Homo sapiens
gcagatggcaatcat

SEQ ID NO: 1972842 - DNA, 15 bp, Homo sapiens
cagatggcaatcatg

SEQ ID NO: 1972843 - DNA, 15 bp, Homo sapiens
agatggcaatcatgg

SEQ ID NO: 1972844 - DNA, 15 bp, Homo sapiens
gatggcaatcatggg

SEQ ID NO: 1972845 - DNA, 15 bp, Homo sapiens
atggcaatcatgggt

SEQ ID NO: 1972846 - DNA, 15 bp, Homo sapiens
tggcaatcatgggtt

SEQ ID NO: 1972847 - DNA, 15 bp, Homo sapiens
ggcaatcatgggttt

SEQ ID NO: 1972848 - DNA, 15 bp, Homo sapiens
gcaatcatgggtttc

SEQ ID NO: 1972849 - DNA, 15 bp, Homo sapiens
caatcatgggtttcg

SEQ ID NO: 1972850 - DNA, 15 bp, Homo sapiens
aatcatgggtttcga

SEQ ID NO: 1972851 - DNA, 15 bp, Homo sapiens
atcatgggtttcgag

SEQ ID NO: 1972852 - DNA, 15 bp, Homo sapiens
tcatgggtttcgaga

SEQ ID NO: 1972853 - DNA, 15 bp, Homo sapiens
catgggtttcgagat

SEQ ID NO: 1972854 - DNA, 15 bp, Homo sapiens
atgggtttcgagata

SEQ ID NO: 1972855 - DNA, 15 bp, Homo sapiens
tgggtttcgagatag

SEQ ID NO: 1972856 - DNA, 15 bp, Homo sapiens
gggtttcgagatagt

SEQ ID NO: 1972857 - DNA, 15 bp, Homo sapiens
ggtttcgagatagtc

SEQ ID NO: 1972858 - DNA, 15 bp, Homo sapiens
gtttcgagatagtcc

SEQ ID NO: 1972859 - DNA, 15 bp, Homo sapiens
tttcgagatagtccc

SEQ ID NO: 1972860 - DNA, 15 bp, Homo sapiens
ttcgagatagtcccc

SEQ ID NO: 1972861 - DNA, 15 bp, Homo sapiens
tcgagatagtcccct

SEQ ID NO: 1972862 - DNA, 15 bp, Homo sapiens
cgagatagtcccctt

SEQ ID NO: 1972863 - DNA, 15 bp, Homo sapiens
gagatagtccccttt

SEQ ID NO: 1972864 - DNA, 15 bp, Homo sapiens
agatagtcccctttc

SEQ ID NO: 1972865 - DNA, 15 bp, Homo sapiens
gatagtcccctttct

SEQ ID NO: 1972866 - DNA, 15 bp, Homo sapiens
atagtcccctttctc

SEQ ID NO: 1972867 - DNA, 15 bp, Homo sapiens
tagtcccctttctct

SEQ ID NO: 1972868 - DNA, 15 bp, Homo sapiens
agtcccctttctctg

SEQ ID NO: 1972869 - DNA, 15 bp, Homo sapiens
gtcccctttctctgt

SEQ ID NO: 1972870 - DNA, 15 bp, Homo sapiens
tcccctttctctgta

SEQ ID NO: 1972871 - DNA, 15 bp, Homo sapiens
cccctttctctgtac

SEQ ID NO: 1972872 - DNA, 15 bp, Homo sapiens
ccctttctctgtaca

SEQ ID NO: 1972873 - DNA, 15 bp, Homo sapiens
cctttctctgtacaa

SEQ ID NO: 1972874 - DNA, 15 bp, Homo sapiens
ctttctctgtacaaa

SEQ ID NO: 1972875 - DNA, 15 bp, Homo sapiens
tttctctgtacaaaa

SEQ ID NO: 1972876 - DNA, 15 bp, Homo sapiens
ttctctgtacaaaaa

SEQ ID NO: 1972877 - DNA, 15 bp, Homo sapiens
tctctgtacaaaaac

SEQ ID NO: 1972878 - DNA, 15 bp, Homo sapiens
ctctgtacaaaaact

SEQ ID NO: 1972879 - DNA, 15 bp, Homo sapiens
tctgtacaaaaactc

SEQ ID NO: 1972880 - DNA, 15 bp, Homo sapiens
ctgtacaaaaactct

SEQ ID NO: 1972881 - DNA, 15 bp, Homo sapiens
tgtacaaaaactctg

SEQ ID NO: 1972882 - DNA, 15 bp, Homo sapiens
gtacaaaaactctgt

SEQ ID NO: 1972883 - DNA, 15 bp, Homo sapiens
tacaaaaactctgta

SEQ ID NO: 1972884 - DNA, 15 bp, Homo sapiens
acaaaaactctgtat

SEQ ID NO: 1972885 - DNA, 15 bp, Homo sapiens
caaaaactctgtatg

SEQ ID NO: 1972886 - DNA, 15 bp, Homo sapiens
aaaaactctgtatgg

SEQ ID NO: 1972887 - DNA, 15 bp, Homo sapiens
aaaactctgtatggg

SEQ ID NO: 1972888 - DNA, 15 bp, Homo sapiens
aaactctgtatgggt

SEQ ID NO: 1972889 - DNA, 15 bp, Homo sapiens
aactctgtatgggtt

SEQ ID NO: 1972890 - DNA, 15 bp, Homo sapiens
actctgtatgggtta

SEQ ID NO: 1972891 - DNA, 15 bp, Homo sapiens
ctctgtatgggttaa

SEQ ID NO: 1972892 - DNA, 15 bp, Homo sapiens
tctgtatgggttaac

SEQ ID NO: 1972893 - DNA, 15 bp, Homo sapiens
ctgtatgggttaact

SEQ ID NO: 1972894 - DNA, 15 bp, Homo sapiens
tgtatgggttaacta

SEQ ID NO: 1972895 - DNA, 15 bp, Homo sapiens
gtatgggttaactaa

SEQ ID NO: 1972896 - DNA, 15 bp, Homo sapiens
tatgggttaactaaa

SEQ ID NO: 1972897 - DNA, 15 bp, Homo sapiens
atgggttaactaaag

SEQ ID NO: 1972898 - DNA, 15 bp, Homo sapiens
tgggttaactaaagc

SEQ ID NO: 1972899 - DNA, 15 bp, Homo sapiens
gggttaactaaagcc

SEQ ID NO: 1972900 - DNA, 15 bp, Homo sapiens
ggttaactaaagcct

SEQ ID NO: 1972901 - DNA, 15 bp, Homo sapiens
gttaactaaagcctg

SEQ ID NO: 1972902 - DNA, 15 bp, Homo sapiens
ttaactaaagcctga

SEQ ID NO: 1972903 - DNA, 15 bp, Homo sapiens
taactaaagcctgag

SEQ ID NO: 1972904 - DNA, 15 bp, Homo sapiens
aactaaagcctgagg

SEQ ID NO: 1972905 - DNA, 15 bp, Homo sapiens
actaaagcctgaggg

SEQ ID NO: 1972906 - DNA, 15 bp, Homo sapiens
ctaaagcctgagggt

SEQ ID NO: 1972907 - DNA, 15 bp, Homo sapiens
taaagcctgagggtg

SEQ ID NO: 1972908 - DNA, 15 bp, Homo sapiens
aaagcctgagggtgc

SEQ ID NO: 1972909 - DNA, 15 bp, Homo sapiens
aagcctgagggtgcg

SEQ ID NO: 1972910 - DNA, 15 bp, Homo sapiens
agcctgagggtgcga

SEQ ID NO: 1972911 - DNA, 15 bp, Homo sapiens
gcctgagggtgcgaa

SEQ ID NO: 1972912 - DNA, 15 bp, Homo sapiens
cctgagggtgcgaag

SEQ ID NO: 1972913 - DNA, 15 bp, Homo sapiens
ctgagggtgcgaaga

SEQ ID NO: 1972914 - DNA, 15 bp, Homo sapiens
tgagggtgcgaagat

SEQ ID NO: 1972915 - DNA, 15 bp, Homo sapiens
gagggtgcgaagatc

SEQ ID NO: 1972916 - DNA, 15 bp, Homo sapiens
agggtgcgaagatcg

SEQ ID NO: 1972917 - DNA, 15 bp, Homo sapiens
gggtgcgaagatcga

SEQ ID NO: 1972918 - DNA, 15 bp, Homo sapiens
ggtgcgaagatcgat

SEQ ID NO: 1972919 - DNA, 15 bp, Homo sapiens
gtgcgaagatcgatg

SEQ ID NO: 1972920 - DNA, 15 bp, Homo sapiens
tgcgaagatcgatga

SEQ ID NO: 1972921 - DNA, 15 bp, Homo sapiens
gcgaagatcgatgag

SEQ ID NO: 1972922 - DNA, 15 bp, Homo sapiens
cgaagatcgatgagc

SEQ ID NO: 1972923 - DNA, 15 bp, Homo sapiens
gaagatcgatgagca

SEQ ID NO: 1972924 - DNA, 15 bp, Homo sapiens
aagatcgatgagcat

SEQ ID NO: 1972925 - DNA, 15 bp, Homo sapiens
agatcgatgagcatt

SEQ ID NO: 1972926 - DNA, 15 bp, Homo sapiens
gatcgatgagcattt

SEQ ID NO: 1972927 - DNA, 15 bp, Homo sapiens
atcgatgagcatttg

SEQ ID NO: 1972928 - DNA, 15 bp, Homo sapiens
tcgatgagcatttgt

SEQ ID NO: 1972929 - DNA, 15 bp, Homo sapiens
cgatgagcatttgtc

SEQ ID NO: 1972930 - DNA, 15 bp, Homo sapiens
gatgagcatttgtca

SEQ ID NO: 1972931 - DNA, 15 bp, Homo sapiens
atgagcatttgtcac

SEQ ID NO: 1972932 - DNA, 15 bp, Homo sapiens
tgagcatttgtcact

SEQ ID NO: 1972933 - DNA, 15 bp, Homo sapiens
gagcatttgtcactc

SEQ ID NO: 1972934 - DNA, 15 bp, Homo sapiens
agcatttgtcactcc

SEQ ID NO: 1972935 - DNA, 15 bp, Homo sapiens
gcatttgtcactccc

SEQ ID NO: 1972936 - DNA, 15 bp, Homo sapiens
catttgtcactccca

SEQ ID NO: 1972937 - DNA, 15 bp, Homo sapiens
atttgtcactcccag

SEQ ID NO: 1972938 - DNA, 15 bp, Homo sapiens
tttgtcactcccagc

SEQ ID NO: 1972939 - DNA, 15 bp, Homo sapiens
ttgtcactcccagcc

SEQ ID NO: 1972940 - DNA, 15 bp, Homo sapiens
tgtcactcccagcct

SEQ ID NO: 1972941 - DNA, 15 bp, Homo sapiens
gtcactcccagcctc

SEQ ID NO: 1972942 - DNA, 15 bp, Homo sapiens
tcactcccagcctcc

SEQ ID NO: 1972943 - DNA, 15 bp, Homo sapiens
cactcccagcctcct

SEQ ID NO: 1972944 - DNA, 15 bp, Homo sapiens
actcccagcctcctt

SEQ ID NO: 1972945 - DNA, 15 bp, Homo sapiens
ctcccagcctccttt

SEQ ID NO: 1972946 - DNA, 15 bp, Homo sapiens
tcccagcctccttta

SEQ ID NO: 1972947 - DNA, 15 bp, Homo sapiens
cccagcctcctttaa

SEQ ID NO: 1972948 - DNA, 15 bp, Homo sapiens
ccagcctcctttaaa

SEQ ID NO: 1972949 - DNA, 15 bp, Homo sapiens
cagcctcctttaaat

SEQ ID NO: 1972950 - DNA, 15 bp, Homo sapiens
agcctcctttaaata

SEQ ID NO: 1972951 - DNA, 15 bp, Homo sapiens
gcctcctttaaatat

SEQ ID NO: 1972952 - DNA, 15 bp, Homo sapiens
cctcctttaaatata

SEQ ID NO: 1972953 - DNA, 15 bp, Homo sapiens
ctcctttaaatatat

SEQ ID NO: 1972954 - DNA, 15 bp, Homo sapiens
tcctttaaatatata

SEQ ID NO: 1972955 - DNA, 15 bp, Homo sapiens
cctttaaatatatat

SEQ ID NO: 1972956 - DNA, 15 bp, Homo sapiens
ctttaaatatatata

SEQ ID NO: 1972957 - DNA, 15 bp, Homo sapiens
tttaaatatatatat

SEQ ID NO: 1972958 - DNA, 15 bp, Homo sapiens
ttaaatatatatata

SEQ ID NO: 1972959 - DNA, 15 bp, Homo sapiens
tatatatatatataa

SEQ ID NO: 1972960 - DNA, 15 bp, Homo sapiens
atatatatataattt

SEQ ID NO: 1972961 - DNA, 15 bp, Homo sapiens
tatatatataatttg

SEQ ID NO: 1972962 - DNA, 15 bp, Homo sapiens
atatatataatttga

SEQ ID NO: 1972963 - DNA, 15 bp, Homo sapiens
tatatataatttgag

SEQ ID NO: 1972964 - DNA, 15 bp, Homo sapiens
atatataatttgaga

SEQ ID NO: 1972965 - DNA, 15 bp, Homo sapiens
tatataatttgagac

SEQ ID NO: 1972966 - DNA, 15 bp, Homo sapiens
atataatttgagaca

SEQ ID NO: 1972967 - DNA, 15 bp, Homo sapiens
tataatttgagacag

SEQ ID NO: 1972968 - DNA, 15 bp, Homo sapiens
ataatttgagacagg

SEQ ID NO: 1972969 - DNA, 15 bp, Homo sapiens
taatttgagacaggg

SEQ ID NO: 1972970 - DNA, 15 bp, Homo sapiens
aatttgagacagggt

SEQ ID NO: 1972971 - DNA, 15 bp, Homo sapiens
atttgagacagggtc

SEQ ID NO: 1972972 - DNA, 15 bp, Homo sapiens
tgagacagggtctcg

SEQ ID NO: 1972973 - DNA, 15 bp, Homo sapiens
gagacagggtctcgc

SEQ ID NO: 1972974 - DNA, 15 bp, Homo sapiens
agacagggtctcgct

SEQ ID NO: 1972975 - DNA, 15 bp, Homo sapiens
gacagggtctcgctc

SEQ ID NO: 1972976 - DNA, 15 bp, Homo sapiens
acagggtctcgctct

SEQ ID NO: 1972977 - DNA, 15 bp, Homo sapiens
cagggtctcgctctg

SEQ ID NO: 1972978 - DNA, 15 bp, Homo sapiens
agggtctcgctctgt

SEQ ID NO: 1972979 - DNA, 15 bp, Homo sapiens
gggtctcgctctgtc

SEQ ID NO: 1972980 - DNA, 15 bp, Homo sapiens
ggtctcgctctgtcg

SEQ ID NO: 1972981 - DNA, 15 bp, Homo sapiens
tctcgctctgtcgct

SEQ ID NO: 1972982 - DNA, 15 bp, Homo sapiens
ctcgctctgtcgctc

SEQ ID NO: 1972983 - DNA, 15 bp, Homo sapiens
tcgctctgtcgctca

SEQ ID NO: 1972984 - DNA, 15 bp, Homo sapiens
cgctctgtcgctcag

SEQ ID NO: 1972985 - DNA, 15 bp, Homo sapiens
gctctgtcgctcagg

SEQ ID NO: 1972986 - DNA, 15 bp, Homo sapiens
ctctgtcgctcaggc

SEQ ID NO: 1972987 - DNA, 15 bp, Homo sapiens
tctgtcgctcaggct

SEQ ID NO: 1972988 - DNA, 15 bp, Homo sapiens
ctgtcgctcaggctg

SEQ ID NO: 1972989 - DNA, 15 bp, Homo sapiens
tgtcgctcaggctgg

SEQ ID NO: 1972990 - DNA, 15 bp, Homo sapiens
gtcgctcaggctgga

SEQ ID NO: 1972991 - DNA, 15 bp, Homo sapiens
tcgctcaggctggag

SEQ ID NO: 1972992 - DNA, 15 bp, Homo sapiens
cgctcaggctggagt

SEQ ID NO: 1972993 - DNA, 15 bp, Homo sapiens
gctcaggctggagtg

SEQ ID NO: 1972994 - DNA, 15 bp, Homo sapiens
tggagtgcagtggct

SEQ ID NO: 1972995 - DNA, 15 bp, Homo sapiens
ggagtgcagtggctc

SEQ ID NO: 1972996 - DNA, 15 bp, Homo sapiens
gagtgcagtggctca

SEQ ID NO: 1972997 - DNA, 15 bp, Homo sapiens
agtgcagtggctcaa

SEQ ID NO: 1972998 - DNA, 15 bp, Homo sapiens
gtgcagtggctcaat

SEQ ID NO: 1972999 - DNA, 15 bp, Homo sapiens
tgcagtggctcaatc

SEQ ID NO: 1973000 - DNA, 15 bp, Homo sapiens
gcagtggctcaatct

SEQ ID NO: 1973001 - DNA, 15 bp, Homo sapiens
agtggctcaatctcg

SEQ ID NO: 1973002 - DNA, 15 bp, Homo sapiens
gtggctcaatctcgg

SEQ ID NO: 1973003 - DNA, 15 bp, Homo sapiens
tggctcaatctcggc

SEQ ID NO: 1973004 - DNA, 15 bp, Homo sapiens
ggctcaatctcggct

SEQ ID NO: 1973005 - DNA, 15 bp, Homo sapiens
gctcaatctcggctc

SEQ ID NO: 1973006 - DNA, 15 bp, Homo sapiens
ctcaatctcggctca

SEQ ID NO: 1973007 - DNA, 15 bp, Homo sapiens
tcaatctcggctcac

SEQ ID NO: 1973008 - DNA, 15 bp, Homo sapiens
caagcgattctccca

SEQ ID NO: 1973009 - DNA, 15 bp, Homo sapiens
aagcgattctcccac

SEQ ID NO: 1973010 - DNA, 15 bp, Homo sapiens
agcgattctcccacc

SEQ ID NO: 1973011 - DNA, 15 bp, Homo sapiens
gcgattctcccacct

SEQ ID NO: 1973012 - DNA, 15 bp, Homo sapiens
cgattctcccacctc

SEQ ID NO: 1973013 - DNA, 15 bp, Homo sapiens
cacctcagcctcccg

SEQ ID NO: 1973014 - DNA, 15 bp, Homo sapiens
acctcagcctcccga

SEQ ID NO: 1973015 - DNA, 15 bp, Homo sapiens
tcccgagtagctgaa

SEQ ID NO: 1973016 - DNA, 15 bp, Homo sapiens
cccgagtagctgaaa

SEQ ID NO: 1973017 - DNA, 15 bp, Homo sapiens
ccgagtagctgaaac

SEQ ID NO: 1973018 - DNA, 15 bp, Homo sapiens
cgagtagctgaaact

SEQ ID NO: 1973019 - DNA, 15 bp, Homo sapiens
gagtagctgaaacta

SEQ ID NO: 1973020 - DNA, 15 bp, Homo sapiens
agtagctgaaactag

SEQ ID NO: 1973021 - DNA, 15 bp, Homo sapiens
gtagctgaaactaga

SEQ ID NO: 1973022 - DNA, 15 bp, Homo sapiens
tagctgaaactagag

SEQ ID NO: 1973023 - DNA, 15 bp, Homo sapiens
agctgaaactagagg

SEQ ID NO: 1973024 - DNA, 15 bp, Homo sapiens
gctgaaactagaggt

SEQ ID NO: 1973025 - DNA, 15 bp, Homo sapiens
ctgaaactagaggtg

SEQ ID NO: 1973026 - DNA, 15 bp, Homo sapiens
tgaaactagaggtgt

SEQ ID NO: 1973027 - DNA, 15 bp, Homo sapiens
gaaactagaggtgtg

SEQ ID NO: 1973028 - DNA, 15 bp, Homo sapiens
aaactagaggtgtgc

SEQ ID NO: 1973029 - DNA, 15 bp, Homo sapiens
aactagaggtgtgca

SEQ ID NO: 1973030 - DNA, 15 bp, Homo sapiens
actagaggtgtgcac

SEQ ID NO: 1973031 - DNA, 15 bp, Homo sapiens
ctagaggtgtgcacc

SEQ ID NO: 1973032 - DNA, 15 bp, Homo sapiens
tagaggtgtgcacca

SEQ ID NO: 1973033 - DNA, 15 bp, Homo sapiens
agaggtgtgcaccac

SEQ ID NO: 1973034 - DNA, 15 bp, Homo sapiens
gaggtgtgcaccacc

SEQ ID NO: 1973035 - DNA, 15 bp, Homo sapiens
gtgtgcaccaccata

SEQ ID NO: 1973036 - DNA, 15 bp, Homo sapiens
tgtgcaccaccatac

SEQ ID NO: 1973037 - DNA, 15 bp, Homo sapiens
gtgcaccaccatact

SEQ ID NO: 1973038 - DNA, 15 bp, Homo sapiens
tgcaccaccatactt

SEQ ID NO: 1973039 - DNA, 15 bp, Homo sapiens
gcaccaccatacttg

SEQ ID NO: 1973040 - DNA, 15 bp, Homo sapiens
caccaccatacttgg

SEQ ID NO: 1973041 - DNA, 15 bp, Homo sapiens
accaccatacttggc

SEQ ID NO: 1973042 - DNA, 15 bp, Homo sapiens
ccaccatacttggct

SEQ ID NO: 1973043 - DNA, 15 bp, Homo sapiens
caccatacttggcta

SEQ ID NO: 1973044 - DNA, 15 bp, Homo sapiens
accatacttggctaa

SEQ ID NO: 1973045 - DNA, 15 bp, Homo sapiens
ccatacttggctaat

SEQ ID NO: 1973046 - DNA, 15 bp, Homo sapiens
catacttggctaatt

SEQ ID NO: 1973047 - DNA, 15 bp, Homo sapiens
atacttggctaattt

SEQ ID NO: 1973048 - DNA, 15 bp, Homo sapiens
tacttggctaatttt

SEQ ID NO: 1973049 - DNA, 15 bp, Homo sapiens
acttggctaattttc

SEQ ID NO: 1973050 - DNA, 15 bp, Homo sapiens
cttggctaattttcg

SEQ ID NO: 1973051 - DNA, 15 bp, Homo sapiens
ttggctaattttcgt

SEQ ID NO: 1973052 - DNA, 15 bp, Homo sapiens
tggctaattttcgtt

SEQ ID NO: 1973053 - DNA, 15 bp, Homo sapiens
ggctaattttcgtta

SEQ ID NO: 1973054 - DNA, 15 bp, Homo sapiens
gctaattttcgttat

SEQ ID NO: 1973055 - DNA, 15 bp, Homo sapiens
ctaattttcgttatt

SEQ ID NO: 1973056 - DNA, 15 bp, Homo sapiens
taattttcgttattt

SEQ ID NO: 1973057 - DNA, 15 bp, Homo sapiens
aattttcgttatttt

SEQ ID NO: 1973058 - DNA, 15 bp, Homo sapiens
attttcgttattttt

SEQ ID NO: 1973059 - DNA, 15 bp, Homo sapiens
ttttcgttattttta

SEQ ID NO: 1973060 - DNA, 15 bp, Homo sapiens
tttcgttatttttag

SEQ ID NO: 1973061 - DNA, 15 bp, Homo sapiens
ttcgttatttttagt

SEQ ID NO: 1973062 - DNA, 15 bp, Homo sapiens
tcgttatttttagta

SEQ ID NO: 1973063 - DNA, 15 bp, Homo sapiens
cgttatttttagtag

SEQ ID NO: 1973064 - DNA, 15 bp, Homo sapiens
gttatttttagtaga

SEQ ID NO: 1973065 - DNA, 15 bp, Homo sapiens
ttatttttagtagag

SEQ ID NO: 1973066 - DNA, 15 bp, Homo sapiens
tttagtagagacgga

SEQ ID NO: 1973067 - DNA, 15 bp, Homo sapiens
ttagtagagacggaa

SEQ ID NO: 1973068 - DNA, 15 bp, Homo sapiens
tagtagagacggaat

SEQ ID NO: 1973069 - DNA, 15 bp, Homo sapiens
agtagagacggaatt

SEQ ID NO: 1973070 - DNA, 15 bp, Homo sapiens
gtagagacggaattt

SEQ ID NO: 1973071 - DNA, 15 bp, Homo sapiens
tagagacggaatttc

SEQ ID NO: 1973072 - DNA, 15 bp, Homo sapiens
agagacggaatttca

SEQ ID NO: 1973073 - DNA, 15 bp, Homo sapiens
gagacggaatttcac

SEQ ID NO: 1973074 - DNA, 15 bp, Homo sapiens
agacggaatttcacc

SEQ ID NO: 1973075 - DNA, 15 bp, Homo sapiens
gacggaatttcacca

SEQ ID NO: 1973076 - DNA, 15 bp, Homo sapiens
acggaatttcaccac

SEQ ID NO: 1973077 - DNA, 15 bp, Homo sapiens
cggaatttcaccacg

SEQ ID NO: 1973078 - DNA, 15 bp, Homo sapiens
ggaatttcaccacgt

SEQ ID NO: 1973079 - DNA, 15 bp, Homo sapiens
gaatttcaccacgtt

SEQ ID NO: 1973080 - DNA, 15 bp, Homo sapiens
aatttcaccacgttg

SEQ ID NO: 1973081 - DNA, 15 bp, Homo sapiens
ccacgttggccaggc

SEQ ID NO: 1973082 - DNA, 15 bp, Homo sapiens
cacgttggccaggct

SEQ ID NO: 1973083 - DNA, 15 bp, Homo sapiens
acgttggccaggctg

SEQ ID NO: 1973084 - DNA, 15 bp, Homo sapiens
cgttggccaggctgg

SEQ ID NO: 1973085 - DNA, 15 bp, Homo sapiens
caggctggtctggag

SEQ ID NO: 1973086 - DNA, 15 bp, Homo sapiens
aggctggtctggagc

SEQ ID NO: 1973087 - DNA, 15 bp, Homo sapiens
ggctggtctggagct

SEQ ID NO: 1973088 - DNA, 15 bp, Homo sapiens
gctggtctggagctc

SEQ ID NO: 1973089 - DNA, 15 bp, Homo sapiens
ctggtctggagctcc

SEQ ID NO: 1973090 - DNA, 15 bp, Homo sapiens
tggtctggagctcct

SEQ ID NO: 1973091 - DNA, 15 bp, Homo sapiens
ggtctggagctcctg

SEQ ID NO: 1973092 - DNA, 15 bp, Homo sapiens
gtctggagctcctgg

SEQ ID NO: 1973093 - DNA, 15 bp, Homo sapiens
tctggagctcctggt

SEQ ID NO: 1973094 - DNA, 15 bp, Homo sapiens
ctggagctcctggtc

SEQ ID NO: 1973095 - DNA, 15 bp, Homo sapiens
tggagctcctggtct

SEQ ID NO: 1973096 - DNA, 15 bp, Homo sapiens
ggagctcctggtctt

SEQ ID NO: 1973097 - DNA, 15 bp, Homo sapiens
gagctcctggtctta

SEQ ID NO: 1973098 - DNA, 15 bp, Homo sapiens
agctcctggtcttat

SEQ ID NO: 1973099 - DNA, 15 bp, Homo sapiens
gctcctggtcttatg

SEQ ID NO: 1973100 - DNA, 15 bp, Homo sapiens
ctcctggtcttatgt

SEQ ID NO: 1973101 - DNA, 15 bp, Homo sapiens
tcctggtcttatgtg

SEQ ID NO: 1973102 - DNA, 15 bp, Homo sapiens
cctggtcttatgtga

SEQ ID NO: 1973103 - DNA, 15 bp, Homo sapiens
ctggtcttatgtgat

SEQ ID NO: 1973104 - DNA, 15 bp, Homo sapiens
tggtcttatgtgatc

SEQ ID NO: 1973105 - DNA, 15 bp, Homo sapiens
ggtcttatgtgatcc

SEQ ID NO: 1973106 - DNA, 15 bp, Homo sapiens
gtcttatgtgatccg

SEQ ID NO: 1973107 - DNA, 15 bp, Homo sapiens
tcttatgtgatccgc

SEQ ID NO: 1973108 - DNA, 15 bp, Homo sapiens
cttatgtgatccgcc

SEQ ID NO: 1973109 - DNA, 15 bp, Homo sapiens
ttatgtgatccgccc

SEQ ID NO: 1973110 - DNA, 15 bp, Homo sapiens
tatgtgatccgcccg

SEQ ID NO: 1973111 - DNA, 15 bp, Homo sapiens
atgtgatccgcccgc

SEQ ID NO: 1973112 - DNA, 15 bp, Homo sapiens
gatccgcccgcctca

SEQ ID NO: 1973113 - DNA, 15 bp, Homo sapiens
atccgcccgcctcag

SEQ ID NO: 1973114 - DNA, 15 bp, Homo sapiens
tccgcccgcctcagc

SEQ ID NO: 1973115 - DNA, 15 bp, Homo sapiens
ccgcccgcctcagcc

SEQ ID NO: 1973116 - DNA, 15 bp, Homo sapiens
agcctcccaaagtgg

SEQ ID NO: 1973117 - DNA, 15 bp, Homo sapiens
gcctcccaaagtggg

SEQ ID NO: 1973118 - DNA, 15 bp, Homo sapiens
cctcccaaagtgggg

SEQ ID NO: 1973119 - DNA, 15 bp, Homo sapiens
ctcccaaagtgggga

SEQ ID NO: 1973120 - DNA, 15 bp, Homo sapiens
tcccaaagtggggat

SEQ ID NO: 1973121 - DNA, 15 bp, Homo sapiens
cccaaagtggggatt

SEQ ID NO: 1973122 - DNA, 15 bp, Homo sapiens
ccaaagtggggatta

SEQ ID NO: 1973123 - DNA, 15 bp, Homo sapiens
caaagtggggattac

SEQ ID NO: 1973124 - DNA, 15 bp, Homo sapiens
aaagtggggattaca

SEQ ID NO: 1973125 - DNA, 15 bp, Homo sapiens
aagtggggattacag

SEQ ID NO: 1973126 - DNA, 15 bp, Homo sapiens
agtggggattacagg

SEQ ID NO: 1973127 - DNA, 15 bp, Homo sapiens
gtggggattacaggc

SEQ ID NO: 1973128 - DNA, 15 bp, Homo sapiens
tggggattacaggcc

SEQ ID NO: 1973129 - DNA, 15 bp, Homo sapiens
ggggattacaggcct

SEQ ID NO: 1973130 - DNA, 15 bp, Homo sapiens
aggcctgagccaccg

SEQ ID NO: 1973131 - DNA, 15 bp, Homo sapiens
ggcctgagccaccgc

SEQ ID NO: 1973132 - DNA, 15 bp, Homo sapiens
gcctgagccaccgcg

SEQ ID NO: 1973133 - DNA, 15 bp, Homo sapiens
cctgagccaccgcgc

SEQ ID NO: 1973134 - DNA, 15 bp, Homo sapiens
ctgagccaccgcgcc

SEQ ID NO: 1973135 - DNA, 15 bp, Homo sapiens
accgcgcccggccac

SEQ ID NO: 1973136 - DNA, 15 bp, Homo sapiens
ccgcgcccggccact

SEQ ID NO: 1973137 - DNA, 15 bp, Homo sapiens
cgcgcccggccactc

SEQ ID NO: 1973138 - DNA, 15 bp, Homo sapiens
gcgcccggccactcc

SEQ ID NO: 1973139 - DNA, 15 bp, Homo sapiens
cgcccggccactccc

SEQ ID NO: 1973140 - DNA, 15 bp, Homo sapiens
gcccggccactccca

SEQ ID NO: 1973141 - DNA, 15 bp, Homo sapiens
cccggccactcccag

SEQ ID NO: 1973142 - DNA, 15 bp, Homo sapiens
ccggccactcccagt

SEQ ID NO: 1973143 - DNA, 15 bp, Homo sapiens
cggccactcccagtc

SEQ ID NO: 1973144 - DNA, 15 bp, Homo sapiens
ggccactcccagtct

SEQ ID NO: 1973145 - DNA, 15 bp, Homo sapiens
gccactcccagtctc

SEQ ID NO: 1973146 - DNA, 15 bp, Homo sapiens
ccactcccagtctcc

SEQ ID NO: 1973147 - DNA, 15 bp, Homo sapiens
cactcccagtctcct

SEQ ID NO: 1973148 - DNA, 15 bp, Homo sapiens
actcccagtctcctt

SEQ ID NO: 1973149 - DNA, 15 bp, Homo sapiens
ctcccagtctccttt

SEQ ID NO: 1973150 - DNA, 15 bp, Homo sapiens
tcccagtctccttta

SEQ ID NO: 1973151 - DNA, 15 bp, Homo sapiens
cccagtctcctttaa

SEQ ID NO: 1973152 - DNA, 15 bp, Homo sapiens
ccagtctcctttaag

SEQ ID NO: 1973153 - DNA, 15 bp, Homo sapiens
cagtctcctttaagg

SEQ ID NO: 1973154 - DNA, 15 bp, Homo sapiens
agtctcctttaaggg

SEQ ID NO: 1973155 - DNA, 15 bp, Homo sapiens
gtctcctttaagggt

SEQ ID NO: 1973156 - DNA, 15 bp, Homo sapiens
tctcctttaagggtg

SEQ ID NO: 1973157 - DNA, 15 bp, Homo sapiens
ctcctttaagggtgc

SEQ ID NO: 1973158 - DNA, 15 bp, Homo sapiens
tcctttaagggtgcg

SEQ ID NO: 1973159 - DNA, 15 bp, Homo sapiens
cctttaagggtgcgg

SEQ ID NO: 1973160 - DNA, 15 bp, Homo sapiens
ctttaagggtgcgga

SEQ ID NO: 1973161 - DNA, 15 bp, Homo sapiens
tttaagggtgcggag

SEQ ID NO: 1973162 - DNA, 15 bp, Homo sapiens
ttaagggtgcggagc

SEQ ID NO: 1973163 - DNA, 15 bp, Homo sapiens
taagggtgcggagcc

SEQ ID NO: 1973164 - DNA, 15 bp, Homo sapiens
aagggtgcggagcct

SEQ ID NO: 1973165 - DNA, 15 bp, Homo sapiens
agggtgcggagcctt

SEQ ID NO: 1973166 - DNA, 15 bp, Homo sapiens
gggtgcggagccttg

SEQ ID NO: 1973167 - DNA, 15 bp, Homo sapiens
ggtgcggagccttgt

SEQ ID NO: 1973168 - DNA, 15 bp, Homo sapiens
gtgcggagccttgtc

SEQ ID NO: 1973169 - DNA, 15 bp, Homo sapiens
tgcggagccttgtct

SEQ ID NO: 1973170 - DNA, 15 bp, Homo sapiens
gcggagccttgtctc

SEQ ID NO: 1973171 - DNA, 15 bp, Homo sapiens
cggagccttgtctcc

SEQ ID NO: 1973172 - DNA, 15 bp, Homo sapiens
ggagccttgtctccc

SEQ ID NO: 1973173 - DNA, 15 bp, Homo sapiens
gagccttgtctcccg

SEQ ID NO: 1973174 - DNA, 15 bp, Homo sapiens
agccttgtctcccgg

SEQ ID NO: 1973175 - DNA, 15 bp, Homo sapiens
gccttgtctcccggc

SEQ ID NO: 1973176 - DNA, 15 bp, Homo sapiens
ccttgtctcccggcc

SEQ ID NO: 1973177 - DNA, 15 bp, Homo sapiens
cttgtctcccggccc

SEQ ID NO: 1973178 - DNA, 15 bp, Homo sapiens
ttgtctcccggcccc

SEQ ID NO: 1973179 - DNA, 15 bp, Homo sapiens
tgtctcccggcccct

SEQ ID NO: 1973180 - DNA, 15 bp, Homo sapiens
gtctcccggcccctg

SEQ ID NO: 1973181 - DNA, 15 bp, Homo sapiens
tctcccggcccctgg

SEQ ID NO: 1973182 - DNA, 15 bp, Homo sapiens
ctcccggcccctggt

SEQ ID NO: 1973183 - DNA, 15 bp, Homo sapiens
tcccggcccctggtg

SEQ ID NO: 1973184 - DNA, 15 bp, Homo sapiens
cccggcccctggtgt

SEQ ID NO: 1973185 - DNA, 15 bp, Homo sapiens
ccggcccctggtgtc

SEQ ID NO: 1973186 - DNA, 15 bp, Homo sapiens
cggcccctggtgtcc

SEQ ID NO: 1973187 - DNA, 15 bp, Homo sapiens
ggcccctggtgtccc

SEQ ID NO: 1973188 - DNA, 15 bp, Homo sapiens
gcccctggtgtcccc

SEQ ID NO: 1973189 - DNA, 15 bp, Homo sapiens
cccctggtgtcccct

SEQ ID NO: 1973190 - DNA, 15 bp, Homo sapiens
ccctggtgtcccctg

SEQ ID NO: 1973191 - DNA, 15 bp, Homo sapiens
cctggtgtcccctga

SEQ ID NO: 1973192 - DNA, 15 bp, Homo sapiens
ctggtgtcccctgac

SEQ ID NO: 1973193 - DNA, 15 bp, Homo sapiens
tggtgtcccctgacg

SEQ ID NO: 1973194 - DNA, 15 bp, Homo sapiens
ggtgtcccctgacgc

SEQ ID NO: 1973195 - DNA, 15 bp, Homo sapiens
gtgtcccctgacgcc

SEQ ID NO: 1973196 - DNA, 15 bp, Homo sapiens
tgtcccctgacgccc

SEQ ID NO: 1973197 - DNA, 15 bp, Homo sapiens
gtcccctgacgcccc

SEQ ID NO: 1973198 - DNA, 15 bp, Homo sapiens
tcccctgacgccccg

SEQ ID NO: 1973199 - DNA, 15 bp, Homo sapiens
cccctgacgccccgt

SEQ ID NO: 1973200 - DNA, 15 bp, Homo sapiens
ccctgacgccccgtc

SEQ ID NO: 1973201 - DNA, 15 bp, Homo sapiens
cctgacgccccgtcc

SEQ ID NO: 1973202 - DNA, 15 bp, Homo sapiens
ctgacgccccgtccc

SEQ ID NO: 1973203 - DNA, 15 bp, Homo sapiens
tgacgccccgtccct

SEQ ID NO: 1973204 - DNA, 15 bp, Homo sapiens
gacgccccgtccctc

SEQ ID NO: 1973205 - DNA, 15 bp, Homo sapiens
acgccccgtccctcc

SEQ ID NO: 1973206 - DNA, 15 bp, Homo sapiens
cgccccgtccctcca

SEQ ID NO: 1973207 - DNA, 15 bp, Homo sapiens
gccccgtccctccat

SEQ ID NO: 1973208 - DNA, 15 bp, Homo sapiens
ccccgtccctccatg

SEQ ID NO: 1973209 - DNA, 15 bp, Homo sapiens
cccgtccctccatgc

SEQ ID NO: 1973210 - DNA, 15 bp, Homo sapiens
ccgtccctccatgca

SEQ ID NO: 1973211 - DNA, 15 bp, Homo sapiens
cgtccctccatgcac

SEQ ID NO: 1973212 - DNA, 15 bp, Homo sapiens
gtccctccatgcaca

SEQ ID NO: 1973213 - DNA, 15 bp, Homo sapiens
tccctccatgcacac

SEQ ID NO: 1973214 - DNA, 15 bp, Homo sapiens
ccctccatgcacaca

SEQ ID NO: 1973215 - DNA, 15 bp, Homo sapiens
cctccatgcacacag

SEQ ID NO: 1973216 - DNA, 15 bp, Homo sapiens
ctccatgcacacagg

SEQ ID NO: 1973217 - DNA, 15 bp, Homo sapiens
tccatgcacacaggt

SEQ ID NO: 1973218 - DNA, 15 bp, Homo sapiens
ccatgcacacaggtc

SEQ ID NO: 1973219 - DNA, 15 bp, Homo sapiens
catgcacacaggtct

SEQ ID NO: 1973220 - DNA, 15 bp, Homo sapiens
atgcacacaggtcta

SEQ ID NO: 1973221 - DNA, 15 bp, Homo sapiens
tgcacacaggtctat

SEQ ID NO: 1973222 - DNA, 15 bp, Homo sapiens
gcacacaggtctatc

SEQ ID NO: 1973223 - DNA, 15 bp, Homo sapiens
cacacaggtctatct

SEQ ID NO: 1973224 - DNA, 15 bp, Homo sapiens
acacaggtctatctg

SEQ ID NO: 1973225 - DNA, 15 bp, Homo sapiens
cacaggtctatctgt

SEQ ID NO: 1973226 - DNA, 15 bp, Homo sapiens
acaggtctatctgtt

SEQ ID NO: 1973227 - DNA, 15 bp, Homo sapiens
caggtctatctgttc

SEQ ID NO: 1973228 - DNA, 15 bp, Homo sapiens
aggtctatctgttcg

SEQ ID NO: 1973229 - DNA, 15 bp, Homo sapiens
ggtctatctgttcga

SEQ ID NO: 1973230 - DNA, 15 bp, Homo sapiens
gtctatctgttcgag

SEQ ID NO: 1973231 - DNA, 15 bp, Homo sapiens
tctatctgttcgagc

SEQ ID NO: 1973232 - DNA, 15 bp, Homo sapiens
ctatctgttcgagct

SEQ ID NO: 1973233 - DNA, 15 bp, Homo sapiens
tatctgttcgagctg

SEQ ID NO: 1973234 - DNA, 15 bp, Homo sapiens
atctgttcgagctgc

SEQ ID NO: 1973235 - DNA, 15 bp, Homo sapiens
tctgttcgagctgca

SEQ ID NO: 1973236 - DNA, 15 bp, Homo sapiens
ctgttcgagctgcac

SEQ ID NO: 1973237 - DNA, 15 bp, Homo sapiens
tgttcgagctgcaca

SEQ ID NO: 1973238 - DNA, 15 bp, Homo sapiens
gttcgagctgcacat

SEQ ID NO: 1973239 - DNA, 15 bp, Homo sapiens
ttcgagctgcacatc

SEQ ID NO: 1973240 - DNA, 15 bp, Homo sapiens
tcgagctgcacatca

SEQ ID NO: 1973241 - DNA, 15 bp, Homo sapiens
cgagctgcacatcac

SEQ ID NO: 1973242 - DNA, 15 bp, Homo sapiens
gagctgcacatcacc

SEQ ID NO: 1973243 - DNA, 15 bp, Homo sapiens
agctgcacatcaccg

SEQ ID NO: 1973244 - DNA, 15 bp, Homo sapiens
gctgcacatcaccga

SEQ ID NO: 1973245 - DNA, 15 bp, Homo sapiens
ctgcacatcaccgat

SEQ ID NO: 1973246 - DNA, 15 bp, Homo sapiens
tgcacatcaccgatg

SEQ ID NO: 1973247 - DNA, 15 bp, Homo sapiens
gcacatcaccgatgc

SEQ ID NO: 1973248 - DNA, 15 bp, Homo sapiens
cacatcaccgatgcc

SEQ ID NO: 1973249 - DNA, 15 bp, Homo sapiens
acatcaccgatgccc

SEQ ID NO: 1973250 - DNA, 15 bp, Homo sapiens
catcaccgatgccca

SEQ ID NO: 1973251 - DNA, 15 bp, Homo sapiens
atcaccgatgcccag

SEQ ID NO: 1973252 - DNA, 15 bp, Homo sapiens
tcaccgatgcccagc

SEQ ID NO: 1973253 - DNA, 15 bp, Homo sapiens
caccgatgcccagcc

SEQ ID NO: 1973254 - DNA, 15 bp, Homo sapiens
accgatgcccagcct

SEQ ID NO: 1973255 - DNA, 15 bp, Homo sapiens
ccgatgcccagcctg

SEQ ID NO: 1973256 - DNA, 15 bp, Homo sapiens
cgatgcccagcctgc

SEQ ID NO: 1973257 - DNA, 15 bp, Homo sapiens
gatgcccagcctgcc

SEQ ID NO: 1973258 - DNA, 15 bp, Homo sapiens
atgcccagcctgcct

SEQ ID NO: 1973259 - DNA, 15 bp, Homo sapiens
tgcccagcctgcctt

SEQ ID NO: 1973260 - DNA, 15 bp, Homo sapiens
gcccagcctgccttc

SEQ ID NO: 1973261 - DNA, 15 bp, Homo sapiens
cccagcctgccttca

SEQ ID NO: 1973262 - DNA, 15 bp, Homo sapiens
ccagcctgccttcac

SEQ ID NO: 1973263 - DNA, 15 bp, Homo sapiens
cagcctgccttcact

SEQ ID NO: 1973264 - DNA, 15 bp, Homo sapiens
agcctgccttcactg

SEQ ID NO: 1973265 - DNA, 15 bp, Homo sapiens
gcctgccttcactgg

SEQ ID NO: 1973266 - DNA, 15 bp, Homo sapiens
cctgccttcactggc

SEQ ID NO: 1973267 - DNA, 15 bp, Homo sapiens
ctgccttcactggca

SEQ ID NO: 1973268 - DNA, 15 bp, Homo sapiens
tgccttcactggcag

SEQ ID NO: 1973269 - DNA, 15 bp, Homo sapiens
gccttcactggcagc

SEQ ID NO: 1973270 - DNA, 15 bp, Homo sapiens
ccttcactggcagct

SEQ ID NO: 1973271 - DNA, 15 bp, Homo sapiens
cttcactggcagcta

SEQ ID NO: 1973272 - DNA, 15 bp, Homo sapiens
ttcactggcagctac

SEQ ID NO: 1973273 - DNA, 15 bp, Homo sapiens
tcactggcagctacc

SEQ ID NO: 1973274 - DNA, 15 bp, Homo sapiens
cactggcagctaccg

SEQ ID NO: 1973275 - DNA, 15 bp, Homo sapiens
actggcagctaccgc

SEQ ID NO: 1973276 - DNA, 15 bp, Homo sapiens
ctggcagctaccgct

SEQ ID NO: 1973277 - DNA, 15 bp, Homo sapiens
tggcagctaccgctg

SEQ ID NO: 1973278 - DNA, 15 bp, Homo sapiens
ggcagctaccgctgt

SEQ ID NO: 1973279 - DNA, 15 bp, Homo sapiens
gcagctaccgctgtg

SEQ ID NO: 1973280 - DNA, 15 bp, Homo sapiens
cagctaccgctgtga

SEQ ID NO: 1973281 - DNA, 15 bp, Homo sapiens
agctaccgctgtgag

SEQ ID NO: 1973282 - DNA, 15 bp, Homo sapiens
gctaccgctgtgagg

SEQ ID NO: 1973283 - DNA, 15 bp, Homo sapiens
ctaccgctgtgaggt

SEQ ID NO: 1973284 - DNA, 15 bp, Homo sapiens
taccgctgtgaggtg

SEQ ID NO: 1973285 - DNA, 15 bp, Homo sapiens
accgctgtgaggtgt

SEQ ID NO: 1973286 - DNA, 15 bp, Homo sapiens
ccgctgtgaggtgtc

SEQ ID NO: 1973287 - DNA, 15 bp, Homo sapiens
cgctgtgaggtgtcc

SEQ ID NO: 1973288 - DNA, 15 bp, Homo sapiens
gctgtgaggtgtcca

SEQ ID NO: 1973289 - DNA, 15 bp, Homo sapiens
ctgtgaggtgtccac

SEQ ID NO: 1973290 - DNA, 15 bp, Homo sapiens
tgtgaggtgtccacc

SEQ ID NO: 1973291 - DNA, 15 bp, Homo sapiens
gtgaggtgtccacca

SEQ ID NO: 1973292 - DNA, 15 bp, Homo sapiens
tgaggtgtccaccaa

SEQ ID NO: 1973293 - DNA, 15 bp, Homo sapiens
gaggtgtccaccaag

SEQ ID NO: 1973294 - DNA, 15 bp, Homo sapiens
aggtgtccaccaagg

SEQ ID NO: 1973295 - DNA, 15 bp, Homo sapiens
ggtgtccaccaagga

SEQ ID NO: 1973296 - DNA, 15 bp, Homo sapiens
gtgtccaccaaggac

SEQ ID NO: 1973297 - DNA, 15 bp, Homo sapiens
tgtccaccaaggaca

SEQ ID NO: 1973298 - DNA, 15 bp, Homo sapiens
gtccaccaaggacaa

SEQ ID NO: 1973299 - DNA, 15 bp, Homo sapiens
tccaccaaggacaaa

SEQ ID NO: 1973300 - DNA, 15 bp, Homo sapiens
ccaccaaggacaaat

SEQ ID NO: 1973301 - DNA, 15 bp, Homo sapiens
caccaaggacaaatt

SEQ ID NO: 1973302 - DNA, 15 bp, Homo sapiens
accaaggacaaattt

SEQ ID NO: 1973303 - DNA, 15 bp, Homo sapiens
ccaaggacaaatttg

SEQ ID NO: 1973304 - DNA, 15 bp, Homo sapiens
caaggacaaatttga

SEQ ID NO: 1973305 - DNA, 15 bp, Homo sapiens
aaggacaaatttgac

SEQ ID NO: 1973306 - DNA, 15 bp, Homo sapiens
aggacaaatttgact

SEQ ID NO: 1973307 - DNA, 15 bp, Homo sapiens
ggacaaatttgactg

SEQ ID NO: 1973308 - DNA, 15 bp, Homo sapiens
gacaaatttgactgc

SEQ ID NO: 1973309 - DNA, 15 bp, Homo sapiens
acaaatttgactgct

SEQ ID NO: 1973310 - DNA, 15 bp, Homo sapiens
caaatttgactgctc

SEQ ID NO: 1973311 - DNA, 15 bp, Homo sapiens
aaatttgactgctcc

SEQ ID NO: 1973312 - DNA, 15 bp, Homo sapiens
aatttgactgctcca

SEQ ID NO: 1973313 - DNA, 15 bp, Homo sapiens
atttgactgctccaa

SEQ ID NO: 1973314 - DNA, 15 bp, Homo sapiens
tttgactgctccaac

SEQ ID NO: 1973315 - DNA, 15 bp, Homo sapiens
ttgactgctccaact

SEQ ID NO: 1973316 - DNA, 15 bp, Homo sapiens
tgactgctccaactt

SEQ ID NO: 1973317 - DNA, 15 bp, Homo sapiens
gactgctccaacttc

SEQ ID NO: 1973318 - DNA, 15 bp, Homo sapiens
actgctccaacttca

SEQ ID NO: 1973319 - DNA, 15 bp, Homo sapiens
ctgctccaacttcaa

SEQ ID NO: 1973320 - DNA, 15 bp, Homo sapiens
tgctccaacttcaat

SEQ ID NO: 1973321 - DNA, 15 bp, Homo sapiens
gctccaacttcaatc

SEQ ID NO: 1973322 - DNA, 15 bp, Homo sapiens
ctccaacttcaatct

SEQ ID NO: 1973323 - DNA, 15 bp, Homo sapiens
tccaacttcaatctc

SEQ ID NO: 1973324 - DNA, 15 bp, Homo sapiens
ccaacttcaatctca

SEQ ID NO: 1973325 - DNA, 15 bp, Homo sapiens
caacttcaatctcac

SEQ ID NO: 1973326 - DNA, 15 bp, Homo sapiens
aacttcaatctcact

SEQ ID NO: 1973327 - DNA, 15 bp, Homo sapiens
acttcaatctcactg

SEQ ID NO: 1973328 - DNA, 15 bp, Homo sapiens
cttcaatctcactgt

SEQ ID NO: 1973329 - DNA, 15 bp, Homo sapiens
ttcaatctcactgtc

SEQ ID NO: 1973330 - DNA, 15 bp, Homo sapiens
tcaatctcactgtcc

SEQ ID NO: 1973331 - DNA, 15 bp, Homo sapiens
caatctcactgtcca

SEQ ID NO: 1973332 - DNA, 15 bp, Homo sapiens
aatctcactgtccac

SEQ ID NO: 1973333 - DNA, 15 bp, Homo sapiens
atctcactgtccacg

SEQ ID NO: 1973334 - DNA, 15 bp, Homo sapiens
tctcactgtccacgg

SEQ ID NO: 1973335 - DNA, 15 bp, Homo sapiens
ctcactgtccacggt

SEQ ID NO: 1973336 - DNA, 15 bp, Homo sapiens
tcactgtccacggtg

SEQ ID NO: 1973337 - DNA, 15 bp, Homo sapiens
cactgtccacggtga

SEQ ID NO: 1973338 - DNA, 15 bp, Homo sapiens
actgtccacggtgag

SEQ ID NO: 1973339 - DNA, 15 bp, Homo sapiens
ctgtccacggtgagg

SEQ ID NO: 1973340 - DNA, 15 bp, Homo sapiens
tgtccacggtgaggg

SEQ ID NO: 1973341 - DNA, 15 bp, Homo sapiens
gtccacggtgagggg

SEQ ID NO: 1973342 - DNA, 15 bp, Homo sapiens
tccacggtgaggggg

SEQ ID NO: 1973343 - DNA, 15 bp, Homo sapiens
ccacggtgagggggc

SEQ ID NO: 1973344 - DNA, 15 bp, Homo sapiens
cacggtgagggggcc

SEQ ID NO: 1973345 - DNA, 15 bp, Homo sapiens
acggtgagggggccc

SEQ ID NO: 1973346 - DNA, 15 bp, Homo sapiens
cggtgagggggccct

SEQ ID NO: 1973347 - DNA, 15 bp, Homo sapiens
ggtgagggggccctg

SEQ ID NO: 1973348 - DNA, 15 bp, Homo sapiens
gtgagggggccctgg

SEQ ID NO: 1973349 - DNA, 15 bp, Homo sapiens
tgagggggccctggt

SEQ ID NO: 1973350 - DNA, 15 bp, Homo sapiens
gagggggccctggtg

SEQ ID NO: 1973351 - DNA, 15 bp, Homo sapiens
agggggccctggtgt

SEQ ID NO: 1973352 - DNA, 15 bp, Homo sapiens
gggggccctggtgtc

SEQ ID NO: 1973353 - DNA, 15 bp, Homo sapiens
ggggccctggtgtct

SEQ ID NO: 1973354 - DNA, 15 bp, Homo sapiens
gggccctggtgtctg

SEQ ID NO: 1973355 - DNA, 15 bp, Homo sapiens
ggccctggtgtctgt

SEQ ID NO: 1973356 - DNA, 15 bp, Homo sapiens
gccctggtgtctgtc

SEQ ID NO: 1973357 - DNA, 15 bp, Homo sapiens
ccctggtgtctgtcc

SEQ ID NO: 1973358 - DNA, 15 bp, Homo sapiens
cctggtgtctgtcct

SEQ ID NO: 1973359 - DNA, 15 bp, Homo sapiens
ctggtgtctgtcctg

SEQ ID NO: 1973360 - DNA, 15 bp, Homo sapiens
tggtgtctgtcctgg

SEQ ID NO: 1973361 - DNA, 15 bp, Homo sapiens
ggtgtctgtcctggg

SEQ ID NO: 1973362 - DNA, 15 bp, Homo sapiens
gtgtctgtcctgggc

SEQ ID NO: 1973363 - DNA, 15 bp, Homo sapiens
tgtctgtcctgggct

SEQ ID NO: 1973364 - DNA, 15 bp, Homo sapiens
gtctgtcctgggctc

SEQ ID NO: 1973365 - DNA, 15 bp, Homo sapiens
tctgtcctgggctcg

SEQ ID NO: 1973366 - DNA, 15 bp, Homo sapiens
ctgtcctgggctcgg

SEQ ID NO: 1973367 - DNA, 15 bp, Homo sapiens
tgtcctgggctcggg

SEQ ID NO: 1973368 - DNA, 15 bp, Homo sapiens
gtcctgggctcgggc

SEQ ID NO: 1973369 - DNA, 15 bp, Homo sapiens
tcctgggctcgggct

SEQ ID NO: 1973370 - DNA, 15 bp, Homo sapiens
cctgggctcgggctc

SEQ ID NO: 1973371 - DNA, 15 bp, Homo sapiens
ctgggctcgggctcc

SEQ ID NO: 1973372 - DNA, 15 bp, Homo sapiens
tgggctcgggctccc

SEQ ID NO: 1973373 - DNA, 15 bp, Homo sapiens
gggctcgggctcccc

SEQ ID NO: 1973374 - DNA, 15 bp, Homo sapiens
ggctcgggctcccca

SEQ ID NO: 1973375 - DNA, 15 bp, Homo sapiens
gctcgggctccccat

SEQ ID NO: 1973376 - DNA, 15 bp, Homo sapiens
ctcgggctccccatg

SEQ ID NO: 1973377 - DNA, 15 bp, Homo sapiens
tcgggctccccatgg

SEQ ID NO: 1973378 - DNA, 15 bp, Homo sapiens
cgggctccccatggg

SEQ ID NO: 1973379 - DNA, 15 bp, Homo sapiens
gggctccccatgggt

SEQ ID NO: 1973380 - DNA, 15 bp, Homo sapiens
ggctccccatgggtc

SEQ ID NO: 1973381 - DNA, 15 bp, Homo sapiens
gctccccatgggtcc

SEQ ID NO: 1973382 - DNA, 15 bp, Homo sapiens
ctccccatgggtcct

SEQ ID NO: 1973383 - DNA, 15 bp, Homo sapiens
tccccatgggtcctg

SEQ ID NO: 1973384 - DNA, 15 bp, Homo sapiens
ccccatgggtcctgg

SEQ ID NO: 1973385 - DNA, 15 bp, Homo sapiens
cccatgggtcctggt

SEQ ID NO: 1973386 - DNA, 15 bp, Homo sapiens
ccatgggtcctggtc

SEQ ID NO: 1973387 - DNA, 15 bp, Homo sapiens
catgggtcctggtct

SEQ ID NO: 1973388 - DNA, 15 bp, Homo sapiens
atgggtcctggtctc

SEQ ID NO: 1973389 - DNA, 15 bp, Homo sapiens
tgggtcctggtctcc

SEQ ID NO: 1973390 - DNA, 15 bp, Homo sapiens
gggtcctggtctcct

SEQ ID NO: 1973391 - DNA, 15 bp, Homo sapiens
ggtcctggtctccta

SEQ ID NO: 1973392 - DNA, 15 bp, Homo sapiens
gtcctggtctcctac

SEQ ID NO: 1973393 - DNA, 15 bp, Homo sapiens
tcctggtctcctacc

SEQ ID NO: 1973394 - DNA, 15 bp, Homo sapiens
cctggtctcctacct

SEQ ID NO: 1973395 - DNA, 15 bp, Homo sapiens
ctggtctcctacctc

SEQ ID NO: 1973396 - DNA, 15 bp, Homo sapiens
tggtctcctacctcc

SEQ ID NO: 1973397 - DNA, 15 bp, Homo sapiens
ggtctcctacctcct

SEQ ID NO: 1973398 - DNA, 15 bp, Homo sapiens
gtctcctacctcctt

SEQ ID NO: 1973399 - DNA, 15 bp, Homo sapiens
tctcctacctccttt

SEQ ID NO: 1973400 - DNA, 15 bp, Homo sapiens
ctcctacctcctttt

SEQ ID NO: 1973401 - DNA, 15 bp, Homo sapiens
tcctacctccttttc

SEQ ID NO: 1973402 - DNA, 15 bp, Homo sapiens
cctacctccttttcc

SEQ ID NO: 1973403 - DNA, 15 bp, Homo sapiens
ctacctccttttccc

SEQ ID NO: 1973404 - DNA, 15 bp, Homo sapiens
tacctccttttccca

SEQ ID NO: 1973405 - DNA, 15 bp, Homo sapiens
acctccttttcccaa

SEQ ID NO: 1973406 - DNA, 15 bp, Homo sapiens
cctccttttcccaac

SEQ ID NO: 1973407 - DNA, 15 bp, Homo sapiens
ctccttttcccaaca

SEQ ID NO: 1973408 - DNA, 15 bp, Homo sapiens
tccttttcccaacac

SEQ ID NO: 1973409 - DNA, 15 bp, Homo sapiens
ccttttcccaacact

SEQ ID NO: 1973410 - DNA, 15 bp, Homo sapiens
cttttcccaacacta

SEQ ID NO: 1973411 - DNA, 15 bp, Homo sapiens
ttttcccaacactaa

SEQ ID NO: 1973412 - DNA, 15 bp, Homo sapiens
tttcccaacactaag

SEQ ID NO: 1973413 - DNA, 15 bp, Homo sapiens
ttcccaacactaagg

SEQ ID NO: 1973414 - DNA, 15 bp, Homo sapiens
tcccaacactaagga

SEQ ID NO: 1973415 - DNA, 15 bp, Homo sapiens
cccaacactaaggag

SEQ ID NO: 1973416 - DNA, 15 bp, Homo sapiens
ccaacactaaggagg

SEQ ID NO: 1973417 - DNA, 15 bp, Homo sapiens
caacactaaggagga

SEQ ID NO: 1973418 - DNA, 15 bp, Homo sapiens
aacactaaggaggat

SEQ ID NO: 1973419 - DNA, 15 bp, Homo sapiens
acactaaggaggatg

SEQ ID NO: 1973420 - DNA, 15 bp, Homo sapiens
cactaaggaggatgc

SEQ ID NO: 1973421 - DNA, 15 bp, Homo sapiens
actaaggaggatgcc

SEQ ID NO: 1973422 - DNA, 15 bp, Homo sapiens
ctaaggaggatgcct

SEQ ID NO: 1973423 - DNA, 15 bp, Homo sapiens
taaggaggatgcctc

SEQ ID NO: 1973424 - DNA, 15 bp, Homo sapiens
aaggaggatgcctcg

SEQ ID NO: 1973425 - DNA, 15 bp, Homo sapiens
aggaggatgcctcgt

SEQ ID NO: 1973426 - DNA, 15 bp, Homo sapiens
ggaggatgcctcgtc

SEQ ID NO: 1973427 - DNA, 15 bp, Homo sapiens
gaggatgcctcgtcc

SEQ ID NO: 1973428 - DNA, 15 bp, Homo sapiens
aggatgcctcgtccc

SEQ ID NO: 1973429 - DNA, 15 bp, Homo sapiens
ggatgcctcgtccca

SEQ ID NO: 1973430 - DNA, 15 bp, Homo sapiens
gatgcctcgtcccat

SEQ ID NO: 1973431 - DNA, 15 bp, Homo sapiens
atgcctcgtcccatc

SEQ ID NO: 1973432 - DNA, 15 bp, Homo sapiens
tgcctcgtcccatcc

SEQ ID NO: 1973433 - DNA, 15 bp, Homo sapiens
gcctcgtcccatcca

SEQ ID NO: 1973434 - DNA, 15 bp, Homo sapiens
cctcgtcccatccag

SEQ ID NO: 1973435 - DNA, 15 bp, Homo sapiens
ctcgtcccatccaga

SEQ ID NO: 1973436 - DNA, 15 bp, Homo sapiens
tcgtcccatccagac

SEQ ID NO: 1973437 - DNA, 15 bp, Homo sapiens
cgtcccatccagaca

SEQ ID NO: 1973438 - DNA, 15 bp, Homo sapiens
gtcccatccagacat

SEQ ID NO: 1973439 - DNA, 15 bp, Homo sapiens
tcccatccagacatg

SEQ ID NO: 1973440 - DNA, 15 bp, Homo sapiens
cccatccagacatga

SEQ ID NO: 1973441 - DNA, 15 bp, Homo sapiens
ccatccagacatgag

SEQ ID NO: 1973442 - DNA, 15 bp, Homo sapiens
catccagacatgagt

SEQ ID NO: 1973443 - DNA, 15 bp, Homo sapiens
atccagacatgagtg

SEQ ID NO: 1973444 - DNA, 15 bp, Homo sapiens
tccagacatgagtgc

SEQ ID NO: 1973445 - DNA, 15 bp, Homo sapiens
ccagacatgagtgct

SEQ ID NO: 1973446 - DNA, 15 bp, Homo sapiens
cagacatgagtgctg

SEQ ID NO: 1973447 - DNA, 15 bp, Homo sapiens
agacatgagtgctgg

SEQ ID NO: 1973448 - DNA, 15 bp, Homo sapiens
gacatgagtgctggc

SEQ ID NO: 1973449 - DNA, 15 bp, Homo sapiens
acatgagtgctggcc

SEQ ID NO: 1973450 - DNA, 15 bp, Homo sapiens
catgagtgctggcca

SEQ ID NO: 1973451 - DNA, 15 bp, Homo sapiens
atgagtgctggccac

SEQ ID NO: 1973452 - DNA, 15 bp, Homo sapiens
tgagtgctggccacg

SEQ ID NO: 1973453 - DNA, 15 bp, Homo sapiens
gagtgctggccacgt

SEQ ID NO: 1973454 - DNA, 15 bp, Homo sapiens
agtgctggccacgtg

SEQ ID NO: 1973455 - DNA, 15 bp, Homo sapiens
gtgctggccacgtgc

SEQ ID NO: 1973456 - DNA, 15 bp, Homo sapiens
tgctggccacgtgcc

SEQ ID NO: 1973457 - DNA, 15 bp, Homo sapiens
gctggccacgtgccc

SEQ ID NO: 1973458 - DNA, 15 bp, Homo sapiens
ctggccacgtgccca

SEQ ID NO: 1973459 - DNA, 15 bp, Homo sapiens
tggccacgtgcccag

SEQ ID NO: 1973460 - DNA, 15 bp, Homo sapiens
ggccacgtgcccagt

SEQ ID NO: 1973461 - DNA, 15 bp, Homo sapiens
gccacgtgcccagtg

SEQ ID NO: 1973462 - DNA, 15 bp, Homo sapiens
ccacgtgcccagtgc

SEQ ID NO: 1973463 - DNA, 15 bp, Homo sapiens
cacgtgcccagtgct

SEQ ID NO: 1973464 - DNA, 15 bp, Homo sapiens
acgtgcccagtgctg

SEQ ID NO: 1973465 - DNA, 15 bp, Homo sapiens
cgtgcccagtgctgc

SEQ ID NO: 1973466 - DNA, 15 bp, Homo sapiens
gtgcccagtgctgca

SEQ ID NO: 1973467 - DNA, 15 bp, Homo sapiens
tgcccagtgctgcac

SEQ ID NO: 1973468 - DNA, 15 bp, Homo sapiens
gcccagtgctgcaca

SEQ ID NO: 1973469 - DNA, 15 bp, Homo sapiens
cccagtgctgcacac

SEQ ID NO: 1973470 - DNA, 15 bp, Homo sapiens
ccagtgctgcacaca

SEQ ID NO: 1973471 - DNA, 15 bp, Homo sapiens
cagtgctgcacacac

SEQ ID NO: 1973472 - DNA, 15 bp, Homo sapiens
agtgctgcacacaca

SEQ ID NO: 1973473 - DNA, 15 bp, Homo sapiens
gtgctgcacacacag

SEQ ID NO: 1973474 - DNA, 15 bp, Homo sapiens
tgctgcacacacagg

SEQ ID NO: 1973475 - DNA, 15 bp, Homo sapiens
gctgcacacacaggg

SEQ ID NO: 1973476 - DNA, 15 bp, Homo sapiens
ctgcacacacagggt

SEQ ID NO: 1973477 - DNA, 15 bp, Homo sapiens
tgcacacacagggtg

SEQ ID NO: 1973478 - DNA, 15 bp, Homo sapiens
gcacacacagggtgt

SEQ ID NO: 1973479 - DNA, 15 bp, Homo sapiens
cacacacagggtgtg

SEQ ID NO: 1973480 - DNA, 15 bp, Homo sapiens
acacacagggtgtga

SEQ ID NO: 1973481 - DNA, 15 bp, Homo sapiens
cacacagggtgtgag

SEQ ID NO: 1973482 - DNA, 15 bp, Homo sapiens
acacagggtgtgaga

SEQ ID NO: 1973483 - DNA, 15 bp, Homo sapiens
cacagggtgtgagag

SEQ ID NO: 1973484 - DNA, 15 bp, Homo sapiens
acagggtgtgagaga

SEQ ID NO: 1973485 - DNA, 15 bp, Homo sapiens
cagggtgtgagagaa

SEQ ID NO: 1973486 - DNA, 15 bp, Homo sapiens
agggtgtgagagaaa

SEQ ID NO: 1973487 - DNA, 15 bp, Homo sapiens
gggtgtgagagaaac

SEQ ID NO: 1973488 - DNA, 15 bp, Homo sapiens
ggtgtgagagaaacc

SEQ ID NO: 1973489 - DNA, 15 bp, Homo sapiens
gtgtgagagaaaccc

SEQ ID NO: 1973490 - DNA, 15 bp, Homo sapiens
tgtgagagaaacccc

SEQ ID NO: 1973491 - DNA, 15 bp, Homo sapiens
gtgagagaaacccca

SEQ ID NO: 1973492 - DNA, 15 bp, Homo sapiens
tgagagaaaccccaa

SEQ ID NO: 1973493 - DNA, 15 bp, Homo sapiens
gagagaaaccccaag

SEQ ID NO: 1973494 - DNA, 15 bp, Homo sapiens
agagaaaccccaagg

SEQ ID NO: 1973495 - DNA, 15 bp, Homo sapiens
gagaaaccccaaggc

SEQ ID NO: 1973496 - DNA, 15 bp, Homo sapiens
agaaaccccaaggct

SEQ ID NO: 1973497 - DNA, 15 bp, Homo sapiens
gaaaccccaaggctt

SEQ ID NO: 1973498 - DNA, 15 bp, Homo sapiens
aaaccccaaggcttg

SEQ ID NO: 1973499 - DNA, 15 bp, Homo sapiens
aaccccaaggcttgc

SEQ ID NO: 1973500 - DNA, 15 bp, Homo sapiens
accccaaggcttgca

SEQ ID NO: 1973501 - DNA, 15 bp, Homo sapiens
ccccaaggcttgcag

SEQ ID NO: 1973502 - DNA, 15 bp, Homo sapiens
cccaaggcttgcagg

SEQ ID NO: 1973503 - DNA, 15 bp, Homo sapiens
ccaaggcttgcaggg

SEQ ID NO: 1973504 - DNA, 15 bp, Homo sapiens
caaggcttgcagggt

SEQ ID NO: 1973505 - DNA, 15 bp, Homo sapiens
aaggcttgcagggta

SEQ ID NO: 1973506 - DNA, 15 bp, Homo sapiens
aggcttgcagggtag

SEQ ID NO: 1973507 - DNA, 15 bp, Homo sapiens
ggcttgcagggtagg

SEQ ID NO: 1973508 - DNA, 15 bp, Homo sapiens
gcttgcagggtaggc

SEQ ID NO: 1973509 - DNA, 15 bp, Homo sapiens
cttgcagggtaggcg

SEQ ID NO: 1973510 - DNA, 15 bp, Homo sapiens
ttgcagggtaggcgt

SEQ ID NO: 1973511 - DNA, 15 bp, Homo sapiens
tgcagggtaggcgtg

SEQ ID NO: 1973512 - DNA, 15 bp, Homo sapiens
gcagggtaggcgtgg

SEQ ID NO: 1973513 - DNA, 15 bp, Homo sapiens
cagggtaggcgtggg

SEQ ID NO: 1973514 - DNA, 15 bp, Homo sapiens
agggtaggcgtgggg

SEQ ID NO: 1973515 - DNA, 15 bp, Homo sapiens
gggtaggcgtggggg

SEQ ID NO: 1973516 - DNA, 15 bp, Homo sapiens
ggtaggcgtgggggc

SEQ ID NO: 1973517 - DNA, 15 bp, Homo sapiens
gtaggcgtgggggct

SEQ ID NO: 1973518 - DNA, 15 bp, Homo sapiens
taggcgtgggggctt

SEQ ID NO: 1973519 - DNA, 15 bp, Homo sapiens
aggcgtgggggctta

SEQ ID NO: 1973520 - DNA, 15 bp, Homo sapiens
ggcgtgggggcttag

SEQ ID NO: 1973521 - DNA, 15 bp, Homo sapiens
gcgtgggggcttagg

SEQ ID NO: 1973522 - DNA, 15 bp, Homo sapiens
cgtgggggcttaggg

SEQ ID NO: 1973523 - DNA, 15 bp, Homo sapiens
gtgggggcttagggc

SEQ ID NO: 1973524 - DNA, 15 bp, Homo sapiens
tgggggcttagggct

SEQ ID NO: 1973525 - DNA, 15 bp, Homo sapiens
gggggcttagggctg

SEQ ID NO: 1973526 - DNA, 15 bp, Homo sapiens
ggggcttagggctga

SEQ ID NO: 1973527 - DNA, 15 bp, Homo sapiens
gggcttagggctgag

SEQ ID NO: 1973528 - DNA, 15 bp, Homo sapiens
ggcttagggctgagt

SEQ ID NO: 1973529 - DNA, 15 bp, Homo sapiens
gcttagggctgagtc

SEQ ID NO: 1973530 - DNA, 15 bp, Homo sapiens
cttagggctgagtcc

SEQ ID NO: 1973531 - DNA, 15 bp, Homo sapiens
ttagggctgagtccg

SEQ ID NO: 1973532 - DNA, 15 bp, Homo sapiens
tagggctgagtccgg

SEQ ID NO: 1973533 - DNA, 15 bp, Homo sapiens
agggctgagtccggg

SEQ ID NO: 1973534 - DNA, 15 bp, Homo sapiens
gggctgagtccgggt

SEQ ID NO: 1973535 - DNA, 15 bp, Homo sapiens
ggctgagtccgggtc

SEQ ID NO: 1973536 - DNA, 15 bp, Homo sapiens
gctgagtccgggtct

SEQ ID NO: 1973537 - DNA, 15 bp, Homo sapiens
ctgagtccgggtctc

SEQ ID NO: 1973538 - DNA, 15 bp, Homo sapiens
tgagtccgggtctca

SEQ ID NO: 1973539 - DNA, 15 bp, Homo sapiens
gagtccgggtctcat

SEQ ID NO: 1973540 - DNA, 15 bp, Homo sapiens
agtccgggtctcatc

SEQ ID NO: 1973541 - DNA, 15 bp, Homo sapiens
gtccgggtctcatct

SEQ ID NO: 1973542 - DNA, 15 bp, Homo sapiens
tccgggtctcatctg

SEQ ID NO: 1973543 - DNA, 15 bp, Homo sapiens
ccgggtctcatctgg

SEQ ID NO: 1973544 - DNA, 15 bp, Homo sapiens
cgggtctcatctggg

SEQ ID NO: 1973545 - DNA, 15 bp, Homo sapiens
gggtctcatctgggt

SEQ ID NO: 1973546 - DNA, 15 bp, Homo sapiens
ggtctcatctgggtg

SEQ ID NO: 1973547 - DNA, 15 bp, Homo sapiens
gtctcatctgggtgg

SEQ ID NO: 1973548 - DNA, 15 bp, Homo sapiens
tctcatctgggtggg

SEQ ID NO: 1973549 - DNA, 15 bp, Homo sapiens
ctcatctgggtggga

SEQ ID NO: 1973550 - DNA, 15 bp, Homo sapiens
tcatctgggtgggac

SEQ ID NO: 1973551 - DNA, 15 bp, Homo sapiens
catctgggtgggact

SEQ ID NO: 1973552 - DNA, 15 bp, Homo sapiens
atctgggtgggactc

SEQ ID NO: 1973553 - DNA, 15 bp, Homo sapiens
tctgggtgggactct

SEQ ID NO: 1973554 - DNA, 15 bp, Homo sapiens
ctgggtgggactctg

SEQ ID NO: 1973555 - DNA, 15 bp, Homo sapiens
tgggtgggactctgt

SEQ ID NO: 1973556 - DNA, 15 bp, Homo sapiens
gggtgggactctgtt

SEQ ID NO: 1973557 - DNA, 15 bp, Homo sapiens
ggtgggactctgttt

SEQ ID NO: 1973558 - DNA, 15 bp, Homo sapiens
gtgggactctgtttt

SEQ ID NO: 1973559 - DNA, 15 bp, Homo sapiens
tgggactctgtttta

SEQ ID NO: 1973560 - DNA, 15 bp, Homo sapiens
gggactctgttttat

SEQ ID NO: 1973561 - DNA, 15 bp, Homo sapiens
ggactctgttttatc

SEQ ID NO: 1973562 - DNA, 15 bp, Homo sapiens
gactctgttttatca

SEQ ID NO: 1973563 - DNA, 15 bp, Homo sapiens
actctgttttatcat

SEQ ID NO: 1973564 - DNA, 15 bp, Homo sapiens
ctctgttttatcatc

SEQ ID NO: 1973565 - DNA, 15 bp, Homo sapiens
tctgttttatcatct

SEQ ID NO: 1973566 - DNA, 15 bp, Homo sapiens
ctgttttatcatctt

SEQ ID NO: 1973567 - DNA, 15 bp, Homo sapiens
tgttttatcatcttg

SEQ ID NO: 1973568 - DNA, 15 bp, Homo sapiens
gttttatcatcttgg

SEQ ID NO: 1973569 - DNA, 15 bp, Homo sapiens
ttttatcatcttggt

SEQ ID NO: 1973570 - DNA, 15 bp, Homo sapiens
tttatcatcttggtg

SEQ ID NO: 1973571 - DNA, 15 bp, Homo sapiens
ttatcatcttggtgt

SEQ ID NO: 1973572 - DNA, 15 bp, Homo sapiens
tatcatcttggtgtc

SEQ ID NO: 1973573 - DNA, 15 bp, Homo sapiens
atcatcttggtgtca

SEQ ID NO: 1973574 - DNA, 15 bp, Homo sapiens
tcatcttggtgtcac

SEQ ID NO: 1973575 - DNA, 15 bp, Homo sapiens
catcttggtgtcacg

SEQ ID NO: 1973576 - DNA, 15 bp, Homo sapiens
atcttggtgtcacgg

SEQ ID NO: 1973577 - DNA, 15 bp, Homo sapiens
tcttggtgtcacggc

SEQ ID NO: 1973578 - DNA, 15 bp, Homo sapiens
cttggtgtcacggct

SEQ ID NO: 1973579 - DNA, 15 bp, Homo sapiens
ttggtgtcacggctc

SEQ ID NO: 1973580 - DNA, 15 bp, Homo sapiens
tggtgtcacggctcc

SEQ ID NO: 1973581 - DNA, 15 bp, Homo sapiens
ggtgtcacggctcct

SEQ ID NO: 1973582 - DNA, 15 bp, Homo sapiens
gtgtcacggctcctg

SEQ ID NO: 1973583 - DNA, 15 bp, Homo sapiens
tgtcacggctcctgg

SEQ ID NO: 1973584 - DNA, 15 bp, Homo sapiens
gtcacggctcctggc

SEQ ID NO: 1973585 - DNA, 15 bp, Homo sapiens
tcacggctcctggcc

SEQ ID NO: 1973586 - DNA, 15 bp, Homo sapiens
cacggctcctggccc

SEQ ID NO: 1973587 - DNA, 15 bp, Homo sapiens
acggctcctggccca

SEQ ID NO: 1973588 - DNA, 15 bp, Homo sapiens
cggctcctggcccat

SEQ ID NO: 1973589 - DNA, 15 bp, Homo sapiens
ggctcctggcccatg

SEQ ID NO: 1973590 - DNA, 15 bp, Homo sapiens
gctcctggcccatgg

SEQ ID NO: 1973591 - DNA, 15 bp, Homo sapiens
ctcctggcccatggc

SEQ ID NO: 1973592 - DNA, 15 bp, Homo sapiens
tcctggcccatggcc

SEQ ID NO: 1973593 - DNA, 15 bp, Homo sapiens
cctggcccatggcct

SEQ ID NO: 1973594 - DNA, 15 bp, Homo sapiens
ctggcccatggcctg

SEQ ID NO: 1973595 - DNA, 15 bp, Homo sapiens
tggcccatggcctgg

SEQ ID NO: 1973596 - DNA, 15 bp, Homo sapiens
ggcccatggcctggc

SEQ ID NO: 1973597 - DNA, 15 bp, Homo sapiens
gcccatggcctggca

SEQ ID NO: 1973598 - DNA, 15 bp, Homo sapiens
cccatggcctggcac

SEQ ID NO: 1973599 - DNA, 15 bp, Homo sapiens
ccatggcctggcact

SEQ ID NO: 1973600 - DNA, 15 bp, Homo sapiens
catggcctggcactg

SEQ ID NO: 1973601 - DNA, 15 bp, Homo sapiens
atggcctggcactgt

SEQ ID NO: 1973602 - DNA, 15 bp, Homo sapiens
tggcctggcactgtc

SEQ ID NO: 1973603 - DNA, 15 bp, Homo sapiens
ggcctggcactgtct

SEQ ID NO: 1973604 - DNA, 15 bp, Homo sapiens
gcctggcactgtctg

SEQ ID NO: 1973605 - DNA, 15 bp, Homo sapiens
cctggcactgtctga

SEQ ID NO: 1973606 - DNA, 15 bp, Homo sapiens
ctggcactgtctgaa

SEQ ID NO: 1973607 - DNA, 15 bp, Homo sapiens
tggcactgtctgaat

SEQ ID NO: 1973608 - DNA, 15 bp, Homo sapiens
ggcactgtctgaatg

SEQ ID NO: 1973609 - DNA, 15 bp, Homo sapiens
gcactgtctgaatgt

SEQ ID NO: 1973610 - DNA, 15 bp, Homo sapiens
cactgtctgaatgtt

SEQ ID NO: 1973611 - DNA, 15 bp, Homo sapiens
actgtctgaatgttt

SEQ ID NO: 1973612 - DNA, 15 bp, Homo sapiens
ctgtctgaatgtttg

SEQ ID NO: 1973613 - DNA, 15 bp, Homo sapiens
tgtctgaatgtttgg

SEQ ID NO: 1973614 - DNA, 15 bp, Homo sapiens
gtctgaatgtttggg

SEQ ID NO: 1973615 - DNA, 15 bp, Homo sapiens
tctgaatgtttgggc

SEQ ID NO: 1973616 - DNA, 15 bp, Homo sapiens
ctgaatgtttgggcg

SEQ ID NO: 1973617 - DNA, 15 bp, Homo sapiens
tgaatgtttgggcga

SEQ ID NO: 1973618 - DNA, 15 bp, Homo sapiens
gaatgtttgggcgat

SEQ ID NO: 1973619 - DNA, 15 bp, Homo sapiens
aatgtttgggcgatg

SEQ ID NO: 1973620 - DNA, 15 bp, Homo sapiens
atgtttgggcgatgg

SEQ ID NO: 1973621 - DNA, 15 bp, Homo sapiens
tgtttgggcgatggg

SEQ ID NO: 1973622 - DNA, 15 bp, Homo sapiens
gtttgggcgatgggt

SEQ ID NO: 1973623 - DNA, 15 bp, Homo sapiens
tttgggcgatgggtg

SEQ ID NO: 1973624 - DNA, 15 bp, Homo sapiens
ttgggcgatgggtga

SEQ ID NO: 1973625 - DNA, 15 bp, Homo sapiens
tgggcgatgggtgaa

SEQ ID NO: 1973626 - DNA, 15 bp, Homo sapiens
gggcgatgggtgaag

SEQ ID NO: 1973627 - DNA, 15 bp, Homo sapiens
ggcgatgggtgaagg

SEQ ID NO: 1973628 - DNA, 15 bp, Homo sapiens
gcgatgggtgaaggt

SEQ ID NO: 1973629 - DNA, 15 bp, Homo sapiens
cgatgggtgaaggtg

SEQ ID NO: 1973630 - DNA, 15 bp, Homo sapiens
gatgggtgaaggtga

SEQ ID NO: 1973631 - DNA, 15 bp, Homo sapiens
atgggtgaaggtgag

SEQ ID NO: 1973632 - DNA, 15 bp, Homo sapiens
tgggtgaaggtgagt

SEQ ID NO: 1973633 - DNA, 15 bp, Homo sapiens
gggtgaaggtgagtt

SEQ ID NO: 1973634 - DNA, 15 bp, Homo sapiens
ggtgaaggtgagttg

SEQ ID NO: 1973635 - DNA, 15 bp, Homo sapiens
gtgaaggtgagttga

SEQ ID NO: 1973636 - DNA, 15 bp, Homo sapiens
tgaaggtgagttgag

SEQ ID NO: 1973637 - DNA, 15 bp, Homo sapiens
gaaggtgagttgaga

SEQ ID NO: 1973638 - DNA, 15 bp, Homo sapiens
aaggtgagttgagag

SEQ ID NO: 1973639 - DNA, 15 bp, Homo sapiens
aggtgagttgagaga

SEQ ID NO: 1973640 - DNA, 15 bp, Homo sapiens
ggtgagttgagagat

SEQ ID NO: 1973641 - DNA, 15 bp, Homo sapiens
gtgagttgagagatg

SEQ ID NO: 1973642 - DNA, 15 bp, Homo sapiens
tgagttgagagatgg

SEQ ID NO: 1973643 - DNA, 15 bp, Homo sapiens
gagttgagagatggg

SEQ ID NO: 1973644 - DNA, 15 bp, Homo sapiens
agttgagagatgggt

SEQ ID NO: 1973645 - DNA, 15 bp, Homo sapiens
gttgagagatgggtg

SEQ ID NO: 1973646 - DNA, 15 bp, Homo sapiens
ttgagagatgggtgg

SEQ ID NO: 1973647 - DNA, 15 bp, Homo sapiens
tgagagatgggtggg

SEQ ID NO: 1973648 - DNA, 15 bp, Homo sapiens
gagagatgggtggga

SEQ ID NO: 1973649 - DNA, 15 bp, Homo sapiens
agagatgggtgggaa

SEQ ID NO: 1973650 - DNA, 15 bp, Homo sapiens
gagatgggtgggaat

SEQ ID NO: 1973651 - DNA, 15 bp, Homo sapiens
agatgggtgggaatt

SEQ ID NO: 1973652 - DNA, 15 bp, Homo sapiens
gatgggtgggaattg

SEQ ID NO: 1973653 - DNA, 15 bp, Homo sapiens
atgggtgggaattgg

SEQ ID NO: 1973654 - DNA, 15 bp, Homo sapiens
tgggtgggaattggg

SEQ ID NO: 1973655 - DNA, 15 bp, Homo sapiens
gggtgggaattgggg

SEQ ID NO: 1973656 - DNA, 15 bp, Homo sapiens
ggtgggaattgggga

SEQ ID NO: 1973657 - DNA, 15 bp, Homo sapiens
gtgggaattggggac

SEQ ID NO: 1973658 - DNA, 15 bp, Homo sapiens
tgggaattggggaca

SEQ ID NO: 1973659 - DNA, 15 bp, Homo sapiens
gggaattggggacaa

SEQ ID NO: 1973660 - DNA, 15 bp, Homo sapiens
ggaattggggacaat

SEQ ID NO: 1973661 - DNA, 15 bp, Homo sapiens
gaattggggacaata

SEQ ID NO: 1973662 - DNA, 15 bp, Homo sapiens
aattggggacaataa

SEQ ID NO: 1973663 - DNA, 15 bp, Homo sapiens
attggggacaataaa

SEQ ID NO: 1973664 - DNA, 15 bp, Homo sapiens
ttggggacaataaac

SEQ ID NO: 1973665 - DNA, 15 bp, Homo sapiens
tggggacaataaacc

SEQ ID NO: 1973666 - DNA, 15 bp, Homo sapiens
ggggacaataaaccg

SEQ ID NO: 1973667 - DNA, 15 bp, Homo sapiens
gggacaataaaccgt

SEQ ID NO: 1973668 - DNA, 15 bp, Homo sapiens
ggacaataaaccgtc

SEQ ID NO: 1973669 - DNA, 15 bp, Homo sapiens
gacaataaaccgtcc

SEQ ID NO: 1973670 - DNA, 15 bp, Homo sapiens
acaataaaccgtccc

SEQ ID NO: 1973671 - DNA, 15 bp, Homo sapiens
caataaaccgtccca

SEQ ID NO: 1973672 - DNA, 15 bp, Homo sapiens
aataaaccgtcccac

SEQ ID NO: 1973673 - DNA, 15 bp, Homo sapiens
ataaaccgtcccacc

SEQ ID NO: 1973674 - DNA, 15 bp, Homo sapiens
taaaccgtcccacct

SEQ ID NO: 1973675 - DNA, 15 bp, Homo sapiens
aaaccgtcccacctg

SEQ ID NO: 1973676 - DNA, 15 bp, Homo sapiens
aaccgtcccacctgc

SEQ ID NO: 1973677 - DNA, 15 bp, Homo sapiens
accgtcccacctgcc

SEQ ID NO: 1973678 - DNA, 15 bp, Homo sapiens
ccgtcccacctgcct

SEQ ID NO: 1973679 - DNA, 15 bp, Homo sapiens
cgtcccacctgcctg

SEQ ID NO: 1973680 - DNA, 15 bp, Homo sapiens
gtcccacctgcctgg

SEQ ID NO: 1973681 - DNA, 15 bp, Homo sapiens
tcccacctgcctggt

SEQ ID NO: 1973682 - DNA, 15 bp, Homo sapiens
cccacctgcctggta

SEQ ID NO: 1973683 - DNA, 15 bp, Homo sapiens
ccacctgcctggtac

SEQ ID NO: 1973684 - DNA, 15 bp, Homo sapiens
cacctgcctggtacc

SEQ ID NO: 1973685 - DNA, 15 bp, Homo sapiens
acctgcctggtacct

SEQ ID NO: 1973686 - DNA, 15 bp, Homo sapiens
cctgcctggtacctt

SEQ ID NO: 1973687 - DNA, 15 bp, Homo sapiens
ctgcctggtaccttg

SEQ ID NO: 1973688 - DNA, 15 bp, Homo sapiens
tgcctggtaccttga

SEQ ID NO: 1973689 - DNA, 15 bp, Homo sapiens
gcctggtaccttgac

SEQ ID NO: 1973690 - DNA, 15 bp, Homo sapiens
cctggtaccttgacc

SEQ ID NO: 1973691 - DNA, 15 bp, Homo sapiens
ctggtaccttgaccc

SEQ ID NO: 1973692 - DNA, 15 bp, Homo sapiens
tggtaccttgaccct

SEQ ID NO: 1973693 - DNA, 15 bp, Homo sapiens
ggtaccttgaccctg

SEQ ID NO: 1973694 - DNA, 15 bp, Homo sapiens
gtaccttgaccctgg

SEQ ID NO: 1973695 - DNA, 15 bp, Homo sapiens
taccttgaccctggg

SEQ ID NO: 1973696 - DNA, 15 bp, Homo sapiens
accttgaccctggga

SEQ ID NO: 1973697 - DNA, 15 bp, Homo sapiens
ccttgaccctgggaa

SEQ ID NO: 1973698 - DNA, 15 bp, Homo sapiens
cttgaccctgggaaa

SEQ ID NO: 1973699 - DNA, 15 bp, Homo sapiens
ttgaccctgggaaag

SEQ ID NO: 1973700 - DNA, 15 bp, Homo sapiens
tgaccctgggaaagg

SEQ ID NO: 1973701 - DNA, 15 bp, Homo sapiens
gaccctgggaaaggc

SEQ ID NO: 1973702 - DNA, 15 bp, Homo sapiens
accctgggaaaggct

SEQ ID NO: 1973703 - DNA, 15 bp, Homo sapiens
ccctgggaaaggctg

SEQ ID NO: 1973704 - DNA, 15 bp, Homo sapiens
cctgggaaaggctgg

SEQ ID NO: 1973705 - DNA, 15 bp, Homo sapiens
ctgggaaaggctggg

SEQ ID NO: 1973706 - DNA, 15 bp, Homo sapiens
tgggaaaggctggga

SEQ ID NO: 1973707 - DNA, 15 bp, Homo sapiens
gggaaaggctgggaa

SEQ ID NO: 1973708 - DNA, 15 bp, Homo sapiens
ggaaaggctgggaag

SEQ ID NO: 1973709 - DNA, 15 bp, Homo sapiens
gaaaggctgggaagg

SEQ ID NO: 1973710 - DNA, 15 bp, Homo sapiens
aaaggctgggaaggt

SEQ ID NO: 1973711 - DNA, 15 bp, Homo sapiens
aaggctgggaaggtg

SEQ ID NO: 1973712 - DNA, 15 bp, Homo sapiens
aggctgggaaggtga

SEQ ID NO: 1973713 - DNA, 15 bp, Homo sapiens
ggctgggaaggtgag

SEQ ID NO: 1973714 - DNA, 15 bp, Homo sapiens
gctgggaaggtgaga

SEQ ID NO: 1973715 - DNA, 15 bp, Homo sapiens
ctgggaaggtgagat

SEQ ID NO: 1973716 - DNA, 15 bp, Homo sapiens
tgggaaggtgagatc

SEQ ID NO: 1973717 - DNA, 15 bp, Homo sapiens
gggaaggtgagatcc

SEQ ID NO: 1973718 - DNA, 15 bp, Homo sapiens
ggaaggtgagatcct

SEQ ID NO: 1973719 - DNA, 15 bp, Homo sapiens
gaaggtgagatcctg

SEQ ID NO: 1973720 - DNA, 15 bp, Homo sapiens
aaggtgagatcctgg

SEQ ID NO: 1973721 - DNA, 15 bp, Homo sapiens
aggtgagatcctggg

SEQ ID NO: 1973722 - DNA, 15 bp, Homo sapiens
ggtgagatcctgggg

SEQ ID NO: 1973723 - DNA, 15 bp, Homo sapiens
gtgagatcctggggc

SEQ ID NO: 1973724 - DNA, 15 bp, Homo sapiens
tgagatcctggggca

SEQ ID NO: 1973725 - DNA, 15 bp, Homo sapiens
gagatcctggggcag

SEQ ID NO: 1973726 - DNA, 15 bp, Homo sapiens
agatcctggggcaga

SEQ ID NO: 1973727 - DNA, 15 bp, Homo sapiens
gatcctggggcagat

SEQ ID NO: 1973728 - DNA, 15 bp, Homo sapiens
atcctggggcagatg

SEQ ID NO: 1973729 - DNA, 15 bp, Homo sapiens
tcctggggcagatgc

SEQ ID NO: 1973730 - DNA, 15 bp, Homo sapiens
cctggggcagatgcc

SEQ ID NO: 1973731 - DNA, 15 bp, Homo sapiens
ctggggcagatgccc

SEQ ID NO: 1973732 - DNA, 15 bp, Homo sapiens
tggggcagatgccca

SEQ ID NO: 1973733 - DNA, 15 bp, Homo sapiens
ggggcagatgcccag

SEQ ID NO: 1973734 - DNA, 15 bp, Homo sapiens
gggcagatgcccagc

SEQ ID NO: 1973735 - DNA, 15 bp, Homo sapiens
ggcagatgcccagcc

SEQ ID NO: 1973736 - DNA, 15 bp, Homo sapiens
gcagatgcccagcct

SEQ ID NO: 1973737 - DNA, 15 bp, Homo sapiens
cagatgcccagcctc

SEQ ID NO: 1973738 - DNA, 15 bp, Homo sapiens
agatgcccagcctca

SEQ ID NO: 1973739 - DNA, 15 bp, Homo sapiens
gatgcccagcctcat

SEQ ID NO: 1973740 - DNA, 15 bp, Homo sapiens
atgcccagcctcatg

SEQ ID NO: 1973741 - DNA, 15 bp, Homo sapiens
tgcccagcctcatgg

SEQ ID NO: 1973742 - DNA, 15 bp, Homo sapiens
gcccagcctcatggg

SEQ ID NO: 1973743 - DNA, 15 bp, Homo sapiens
cccagcctcatgggg

SEQ ID NO: 1973744 - DNA, 15 bp, Homo sapiens
ccagcctcatggggt

SEQ ID NO: 1973745 - DNA, 15 bp, Homo sapiens
cagcctcatggggtc

SEQ ID NO: 1973746 - DNA, 15 bp, Homo sapiens
agcctcatggggtca

SEQ ID NO: 1973747 - DNA, 15 bp, Homo sapiens
gcctcatggggtcat

SEQ ID NO: 1973748 - DNA, 15 bp, Homo sapiens
cctcatggggtcatg

SEQ ID NO: 1973749 - DNA, 15 bp, Homo sapiens
ctcatggggtcatga

SEQ ID NO: 1973750 - DNA, 15 bp, Homo sapiens
tcatggggtcatgaa

SEQ ID NO: 1973751 - DNA, 15 bp, Homo sapiens
catggggtcatgaat

SEQ ID NO: 1973752 - DNA, 15 bp, Homo sapiens
atggggtcatgaatg

SEQ ID NO: 1973753 - DNA, 15 bp, Homo sapiens
tggggtcatgaatgg

SEQ ID NO: 1973754 - DNA, 15 bp, Homo sapiens
ggtcatgaatgggca

SEQ ID NO: 1973755 - DNA, 15 bp, Homo sapiens
gtcatgaatgggcaa

SEQ ID NO: 1973756 - DNA, 15 bp, Homo sapiens
tcatgaatgggcaag

SEQ ID NO: 1973757 - DNA, 15 bp, Homo sapiens
catgaatgggcaagt

SEQ ID NO: 1973758 - DNA, 15 bp, Homo sapiens
atgaatgggcaagtc

SEQ ID NO: 1973759 - DNA, 15 bp, Homo sapiens
tgaatgggcaagtct

SEQ ID NO: 1973760 - DNA, 15 bp, Homo sapiens
gaatgggcaagtctg

SEQ ID NO: 1973761 - DNA, 15 bp, Homo sapiens
aatgggcaagtctgt

SEQ ID NO: 1973762 - DNA, 15 bp, Homo sapiens
atgggcaagtctgtg

SEQ ID NO: 1973763 - DNA, 15 bp, Homo sapiens
tgggcaagtctgtga

SEQ ID NO: 1973764 - DNA, 15 bp, Homo sapiens
gggcaagtctgtgaa

SEQ ID NO: 1973765 - DNA, 15 bp, Homo sapiens
ggcaagtctgtgaat

SEQ ID NO: 1973766 - DNA, 15 bp, Homo sapiens
gcaagtctgtgaata

SEQ ID NO: 1973767 - DNA, 15 bp, Homo sapiens
caagtctgtgaatac

SEQ ID NO: 1973768 - DNA, 15 bp, Homo sapiens
aagtctgtgaatact

SEQ ID NO: 1973769 - DNA, 15 bp, Homo sapiens
agtctgtgaatactc

SEQ ID NO: 1973770 - DNA, 15 bp, Homo sapiens
gtctgtgaatactca

SEQ ID NO: 1973771 - DNA, 15 bp, Homo sapiens
tctgtgaatactcag

SEQ ID NO: 1973772 - DNA, 15 bp, Homo sapiens
ctgtgaatactcaga

SEQ ID NO: 1973773 - DNA, 15 bp, Homo sapiens
tgtgaatactcagag

SEQ ID NO: 1973774 - DNA, 15 bp, Homo sapiens
gtgaatactcagagg

SEQ ID NO: 1973775 - DNA, 15 bp, Homo sapiens
tgaatactcagaggc

SEQ ID NO: 1973776 - DNA, 15 bp, Homo sapiens
gaatactcagaggcc

SEQ ID NO: 1973777 - DNA, 15 bp, Homo sapiens
aatactcagaggccg

SEQ ID NO: 1973778 - DNA, 15 bp, Homo sapiens
atactcagaggccgc

SEQ ID NO: 1973779 - DNA, 15 bp, Homo sapiens
tactcagaggccgcc

SEQ ID NO: 1973780 - DNA, 15 bp, Homo sapiens
actcagaggccgccc

SEQ ID NO: 1973781 - DNA, 15 bp, Homo sapiens
ctcagaggccgcccc

SEQ ID NO: 1973782 - DNA, 15 bp, Homo sapiens
tcagaggccgccccc

SEQ ID NO: 1973783 - DNA, 15 bp, Homo sapiens
cagaggccgccccca

SEQ ID NO: 1973784 - DNA, 15 bp, Homo sapiens
agaggccgcccccag

SEQ ID NO: 1973785 - DNA, 15 bp, Homo sapiens
gaggccgcccccagg

SEQ ID NO: 1973786 - DNA, 15 bp, Homo sapiens
aggccgcccccaggg

SEQ ID NO: 1973787 - DNA, 15 bp, Homo sapiens
ggccgcccccagggc

SEQ ID NO: 1973788 - DNA, 15 bp, Homo sapiens
gccgcccccagggca

SEQ ID NO: 1973789 - DNA, 15 bp, Homo sapiens
ccgcccccagggcag

SEQ ID NO: 1973790 - DNA, 15 bp, Homo sapiens
cgcccccagggcagg

SEQ ID NO: 1973791 - DNA, 15 bp, Homo sapiens
gcccccagggcaggg

SEQ ID NO: 1973792 - DNA, 15 bp, Homo sapiens
cccccagggcagggc

SEQ ID NO: 1973793 - DNA, 15 bp, Homo sapiens
ccccagggcagggct

SEQ ID NO: 1973794 - DNA, 15 bp, Homo sapiens
cccagggcagggctt

SEQ ID NO: 1973795 - DNA, 15 bp, Homo sapiens
ccagggcagggcttc

SEQ ID NO: 1973796 - DNA, 15 bp, Homo sapiens
cagggcagggcttct

SEQ ID NO: 1973797 - DNA, 15 bp, Homo sapiens
agggcagggcttctc

SEQ ID NO: 1973798 - DNA, 15 bp, Homo sapiens
gggcagggcttctca

SEQ ID NO: 1973799 - DNA, 15 bp, Homo sapiens
ggcagggcttctcaa

SEQ ID NO: 1973800 - DNA, 15 bp, Homo sapiens
gcagggcttctcaaa

SEQ ID NO: 1973801 - DNA, 15 bp, Homo sapiens
cagggcttctcaaac

SEQ ID NO: 1973802 - DNA, 15 bp, Homo sapiens
agggcttctcaaacg

SEQ ID NO: 1973803 - DNA, 15 bp, Homo sapiens
gggcttctcaaacgg

SEQ ID NO: 1973804 - DNA, 15 bp, Homo sapiens
ggcttctcaaacggc

SEQ ID NO: 1973805 - DNA, 15 bp, Homo sapiens
gcttctcaaacggcc

SEQ ID NO: 1973806 - DNA, 15 bp, Homo sapiens
cttctcaaacggccc

SEQ ID NO: 1973807 - DNA, 15 bp, Homo sapiens
ttctcaaacggcccc

SEQ ID NO: 1973808 - DNA, 15 bp, Homo sapiens
tctcaaacggccccc

SEQ ID NO: 1973809 - DNA, 15 bp, Homo sapiens
ctcaaacggccccct

SEQ ID NO: 1973810 - DNA, 15 bp, Homo sapiens
tcaaacggccccctc

SEQ ID NO: 1973811 - DNA, 15 bp, Homo sapiens
caaacggccccctct

SEQ ID NO: 1973812 - DNA, 15 bp, Homo sapiens
aaacggccccctctg

SEQ ID NO: 1973813 - DNA, 15 bp, Homo sapiens
aacggccccctctga

SEQ ID NO: 1973814 - DNA, 15 bp, Homo sapiens
acggccccctctgaa

SEQ ID NO: 1973815 - DNA, 15 bp, Homo sapiens
cggccccctctgaag

SEQ ID NO: 1973816 - DNA, 15 bp, Homo sapiens
ggccccctctgaagc

SEQ ID NO: 1973817 - DNA, 15 bp, Homo sapiens
gccccctctgaagcc

SEQ ID NO: 1973818 - DNA, 15 bp, Homo sapiens
ccccctctgaagccc

SEQ ID NO: 1973819 - DNA, 15 bp, Homo sapiens
cccctctgaagcccc

SEQ ID NO: 1973820 - DNA, 15 bp, Homo sapiens
ccctctgaagcccct

SEQ ID NO: 1973821 - DNA, 15 bp, Homo sapiens
cctctgaagcccctt

SEQ ID NO: 1973822 - DNA, 15 bp, Homo sapiens
ctctgaagccccttc

SEQ ID NO: 1973823 - DNA, 15 bp, Homo sapiens
tctgaagccccttcc

SEQ ID NO: 1973824 - DNA, 15 bp, Homo sapiens
ctgaagccccttccc

SEQ ID NO: 1973825 - DNA, 15 bp, Homo sapiens
tgaagccccttcccc

SEQ ID NO: 1973826 - DNA, 15 bp, Homo sapiens
gaagccccttccccc

SEQ ID NO: 1973827 - DNA, 15 bp, Homo sapiens
aagccccttccccca

SEQ ID NO: 1973828 - DNA, 15 bp, Homo sapiens
agccccttcccccat

SEQ ID NO: 1973829 - DNA, 15 bp, Homo sapiens
gccccttcccccatc

SEQ ID NO: 1973830 - DNA, 15 bp, Homo sapiens
ccccttcccccatct

SEQ ID NO: 1973831 - DNA, 15 bp, Homo sapiens
cccttcccccatctc

SEQ ID NO: 1973832 - DNA, 15 bp, Homo sapiens
ccttcccccatctct

SEQ ID NO: 1973833 - DNA, 15 bp, Homo sapiens
cttcccccatctctc

SEQ ID NO: 1973834 - DNA, 15 bp, Homo sapiens
ttcccccatctctcc

SEQ ID NO: 1973835 - DNA, 15 bp, Homo sapiens
tcccccatctctcca

SEQ ID NO: 1973836 - DNA, 15 bp, Homo sapiens
cccccatctctccac

SEQ ID NO: 1973837 - DNA, 15 bp, Homo sapiens
ccccatctctccacc

SEQ ID NO: 1973838 - DNA, 15 bp, Homo sapiens
cccatctctccaccc

SEQ ID NO: 1973839 - DNA, 15 bp, Homo sapiens
ccatctctccaccct

SEQ ID NO: 1973840 - DNA, 15 bp, Homo sapiens
catctctccaccctt

SEQ ID NO: 1973841 - DNA, 15 bp, Homo sapiens
atctctccacccttt

SEQ ID NO: 1973842 - DNA, 15 bp, Homo sapiens
tctctccaccctttg

SEQ ID NO: 1973843 - DNA, 15 bp, Homo sapiens
ctctccaccctttga

SEQ ID NO: 1973844 - DNA, 15 bp, Homo sapiens
tctccaccctttgaa

SEQ ID NO: 1973845 - DNA, 15 bp, Homo sapiens
ctccaccctttgaac

SEQ ID NO: 1973846 - DNA, 15 bp, Homo sapiens
tccaccctttgaacc

SEQ ID NO: 1973847 - DNA, 15 bp, Homo sapiens
ccaccctttgaaccc

SEQ ID NO: 1973848 - DNA, 15 bp, Homo sapiens
caccctttgaaccca

SEQ ID NO: 1973849 - DNA, 15 bp, Homo sapiens
accctttgaacccag

SEQ ID NO: 1973850 - DNA, 15 bp, Homo sapiens
ccctttgaacccaga

SEQ ID NO: 1973851 - DNA, 15 bp, Homo sapiens
cctttgaacccagag

SEQ ID NO: 1973852 - DNA, 15 bp, Homo sapiens
ctttgaacccagagg

SEQ ID NO: 1973853 - DNA, 15 bp, Homo sapiens
tttgaacccagaggc

SEQ ID NO: 1973854 - DNA, 15 bp, Homo sapiens
ttgaacccagaggcc

SEQ ID NO: 1973855 - DNA, 15 bp, Homo sapiens
tgaacccagaggcca

SEQ ID NO: 1973856 - DNA, 15 bp, Homo sapiens
gaacccagaggccat

SEQ ID NO: 1973857 - DNA, 15 bp, Homo sapiens
aacccagaggccatg

SEQ ID NO: 1973858 - DNA, 15 bp, Homo sapiens
acccagaggccatgg

SEQ ID NO: 1973859 - DNA, 15 bp, Homo sapiens
cccagaggccatggg

SEQ ID NO: 1973860 - DNA, 15 bp, Homo sapiens
ccagaggccatgggc

SEQ ID NO: 1973861 - DNA, 15 bp, Homo sapiens
cagaggccatgggca

SEQ ID NO: 1973862 - DNA, 15 bp, Homo sapiens
agaggccatgggcac

SEQ ID NO: 1973863 - DNA, 15 bp, Homo sapiens
gaggccatgggcacc

SEQ ID NO: 1973864 - DNA, 15 bp, Homo sapiens
aggccatgggcaccg

SEQ ID NO: 1973865 - DNA, 15 bp, Homo sapiens
ggccatgggcaccgg

SEQ ID NO: 1973866 - DNA, 15 bp, Homo sapiens
gccatgggcaccgga

SEQ ID NO: 1973867 - DNA, 15 bp, Homo sapiens
ccatgggcaccggag

SEQ ID NO: 1973868 - DNA, 15 bp, Homo sapiens
catgggcaccggaga

SEQ ID NO: 1973869 - DNA, 15 bp, Homo sapiens
atgggcaccggagac

SEQ ID NO: 1973870 - DNA, 15 bp, Homo sapiens
tgggcaccggagacc

SEQ ID NO: 1973871 - DNA, 15 bp, Homo sapiens
gggcaccggagacct

SEQ ID NO: 1973872 - DNA, 15 bp, Homo sapiens
ggcaccggagacctg

SEQ ID NO: 1973873 - DNA, 15 bp, Homo sapiens
gcaccggagacctgg

SEQ ID NO: 1973874 - DNA, 15 bp, Homo sapiens
caccggagacctgga

SEQ ID NO: 1973875 - DNA, 15 bp, Homo sapiens
accggagacctggac

SEQ ID NO: 1973876 - DNA, 15 bp, Homo sapiens
ccggagacctggacc

SEQ ID NO: 1973877 - DNA, 15 bp, Homo sapiens
cggagacctggacct

SEQ ID NO: 1973878 - DNA, 15 bp, Homo sapiens
ggagacctggacctc

SEQ ID NO: 1973879 - DNA, 15 bp, Homo sapiens
gagacctggacctcc

SEQ ID NO: 1973880 - DNA, 15 bp, Homo sapiens
agacctggacctcct

SEQ ID NO: 1973881 - DNA, 15 bp, Homo sapiens
gacctggacctccta

SEQ ID NO: 1973882 - DNA, 15 bp, Homo sapiens
acctggacctcctat

SEQ ID NO: 1973883 - DNA, 15 bp, Homo sapiens
cctggacctcctatc

SEQ ID NO: 1973884 - DNA, 15 bp, Homo sapiens
ctggacctcctatca

SEQ ID NO: 1973885 - DNA, 15 bp, Homo sapiens
tggacctcctatcag

SEQ ID NO: 1973886 - DNA, 15 bp, Homo sapiens
ggacctcctatcagc

SEQ ID NO: 1973887 - DNA, 15 bp, Homo sapiens
gacctcctatcagcc

SEQ ID NO: 1973888 - DNA, 15 bp, Homo sapiens
acctcctatcagcct

SEQ ID NO: 1973889 - DNA, 15 bp, Homo sapiens
cctcctatcagcctt

SEQ ID NO: 1973890 - DNA, 15 bp, Homo sapiens
ctcctatcagccttc

SEQ ID NO: 1973891 - DNA, 15 bp, Homo sapiens
tcctatcagccttcc

SEQ ID NO: 1973892 - DNA, 15 bp, Homo sapiens
cctatcagccttccg

SEQ ID NO: 1973893 - DNA, 15 bp, Homo sapiens
ctatcagccttccgc

SEQ ID NO: 1973894 - DNA, 15 bp, Homo sapiens
tatcagccttccgcc

SEQ ID NO: 1973895 - DNA, 15 bp, Homo sapiens
atcagccttccgccg

SEQ ID NO: 1973896 - DNA, 15 bp, Homo sapiens
tcagccttccgccgc

SEQ ID NO: 1973897 - DNA, 15 bp, Homo sapiens
cagccttccgccgca

SEQ ID NO: 1973898 - DNA, 15 bp, Homo sapiens
agccttccgccgcac

SEQ ID NO: 1973899 - DNA, 15 bp, Homo sapiens
gccttccgccgcacg

SEQ ID NO: 1973900 - DNA, 15 bp, Homo sapiens
ccttccgccgcacgt

SEQ ID NO: 1973901 - DNA, 15 bp, Homo sapiens
cttccgccgcacgtg

SEQ ID NO: 1973902 - DNA, 15 bp, Homo sapiens
ttccgccgcacgtga

SEQ ID NO: 1973903 - DNA, 15 bp, Homo sapiens
tccgccgcacgtgag

SEQ ID NO: 1973904 - DNA, 15 bp, Homo sapiens
ccgccgcacgtgagt

SEQ ID NO: 1973905 - DNA, 15 bp, Homo sapiens
cgccgcacgtgagtg

SEQ ID NO: 1973906 - DNA, 15 bp, Homo sapiens
gccgcacgtgagtgg

SEQ ID NO: 1973907 - DNA, 15 bp, Homo sapiens
ccgcacgtgagtggc

SEQ ID NO: 1973908 - DNA, 15 bp, Homo sapiens
cgcacgtgagtggcc

SEQ ID NO: 1973909 - DNA, 15 bp, Homo sapiens
gcacgtgagtggcca

SEQ ID NO: 1973910 - DNA, 15 bp, Homo sapiens
cacgtgagtggccat

SEQ ID NO: 1973911 - DNA, 15 bp, Homo sapiens
acgtgagtggccatc

SEQ ID NO: 1973912 - DNA, 15 bp, Homo sapiens
cgtgagtggccatcc

SEQ ID NO: 1973913 - DNA, 15 bp, Homo sapiens
gtgagtggccatcct

SEQ ID NO: 1973914 - DNA, 15 bp, Homo sapiens
tgagtggccatcctc

SEQ ID NO: 1973915 - DNA, 15 bp, Homo sapiens
gagtggccatcctca

SEQ ID NO: 1973916 - DNA, 15 bp, Homo sapiens
agtggccatcctcag

SEQ ID NO: 1973917 - DNA, 15 bp, Homo sapiens
gtggccatcctcagg

SEQ ID NO: 1973918 - DNA, 15 bp, Homo sapiens
tggccatcctcaggg

SEQ ID NO: 1973919 - DNA, 15 bp, Homo sapiens
ggccatcctcagggc

SEQ ID NO: 1973920 - DNA, 15 bp, Homo sapiens
gccatcctcagggcc

SEQ ID NO: 1973921 - DNA, 15 bp, Homo sapiens
ccatcctcagggcct

SEQ ID NO: 1973922 - DNA, 15 bp, Homo sapiens
catcctcagggcctg

SEQ ID NO: 1973923 - DNA, 15 bp, Homo sapiens
atcctcagggcctgg

SEQ ID NO: 1973924 - DNA, 15 bp, Homo sapiens
cctcagggcctgggg

SEQ ID NO: 1973925 - DNA, 15 bp, Homo sapiens
ctcagggcctggggg

SEQ ID NO: 1973926 - DNA, 15 bp, Homo sapiens
tcagggcctggggga

SEQ ID NO: 1973927 - DNA, 15 bp, Homo sapiens
cagggcctgggggag

SEQ ID NO: 1973928 - DNA, 15 bp, Homo sapiens
agggcctgggggagg

SEQ ID NO: 1973929 - DNA, 15 bp, Homo sapiens
gggcctgggggaggc

SEQ ID NO: 1973930 - DNA, 15 bp, Homo sapiens
ggcctgggggaggcc

SEQ ID NO: 1973931 - DNA, 15 bp, Homo sapiens
gcctgggggaggcca

SEQ ID NO: 1973932 - DNA, 15 bp, Homo sapiens
cctgggggaggccag

SEQ ID NO: 1973933 - DNA, 15 bp, Homo sapiens
ctgggggaggccagt

SEQ ID NO: 1973934 - DNA, 15 bp, Homo sapiens
tgggggaggccagtg

SEQ ID NO: 1973935 - DNA, 15 bp, Homo sapiens
gggggaggccagtgc

SEQ ID NO: 1973936 - DNA, 15 bp, Homo sapiens
ggggaggccagtgct

SEQ ID NO: 1973937 - DNA, 15 bp, Homo sapiens
gggaggccagtgctg

SEQ ID NO: 1973938 - DNA, 15 bp, Homo sapiens
ggaggccagtgctgg

SEQ ID NO: 1973939 - DNA, 15 bp, Homo sapiens
gaggccagtgctgga

SEQ ID NO: 1973940 - DNA, 15 bp, Homo sapiens
aggccagtgctggag

SEQ ID NO: 1973941 - DNA, 15 bp, Homo sapiens
ggccagtgctggagt

SEQ ID NO: 1973942 - DNA, 15 bp, Homo sapiens
gccagtgctggagtc

SEQ ID NO: 1973943 - DNA, 15 bp, Homo sapiens
ccagtgctggagtct

SEQ ID NO: 1973944 - DNA, 15 bp, Homo sapiens
cagtgctggagtctg

SEQ ID NO: 1973945 - DNA, 15 bp, Homo sapiens
agtgctggagtctga

SEQ ID NO: 1973946 - DNA, 15 bp, Homo sapiens
gtgctggagtctgag

SEQ ID NO: 1973947 - DNA, 15 bp, Homo sapiens
tgctggagtctgagg

SEQ ID NO: 1973948 - DNA, 15 bp, Homo sapiens
gctggagtctgaggc

SEQ ID NO: 1973949 - DNA, 15 bp, Homo sapiens
ctggagtctgaggcc

SEQ ID NO: 1973950 - DNA, 15 bp, Homo sapiens
tggagtctgaggccc

SEQ ID NO: 1973951 - DNA, 15 bp, Homo sapiens
ggagtctgaggccct

SEQ ID NO: 1973952 - DNA, 15 bp, Homo sapiens
gagtctgaggccctt

SEQ ID NO: 1973953 - DNA, 15 bp, Homo sapiens
agtctgaggcccttc

SEQ ID NO: 1973954 - DNA, 15 bp, Homo sapiens
gtctgaggcccttca

SEQ ID NO: 1973955 - DNA, 15 bp, Homo sapiens
tctgaggcccttcag

SEQ ID NO: 1973956 - DNA, 15 bp, Homo sapiens
ctgaggcccttcagg

SEQ ID NO: 1973957 - DNA, 15 bp, Homo sapiens
tgaggcccttcaggg

SEQ ID NO: 1973958 - DNA, 15 bp, Homo sapiens
gaggcccttcagggt

SEQ ID NO: 1973959 - DNA, 15 bp, Homo sapiens
aggcccttcagggtc

SEQ ID NO: 1973960 - DNA, 15 bp, Homo sapiens
ggcccttcagggtct

SEQ ID NO: 1973961 - DNA, 15 bp, Homo sapiens
gcccttcagggtctc

SEQ ID NO: 1973962 - DNA, 15 bp, Homo sapiens
cccttcagggtctcg

SEQ ID NO: 1973963 - DNA, 15 bp, Homo sapiens
ccttcagggtctcga

SEQ ID NO: 1973964 - DNA, 15 bp, Homo sapiens
cttcagggtctcgac

SEQ ID NO: 1973965 - DNA, 15 bp, Homo sapiens
ttcagggtctcgact

SEQ ID NO: 1973966 - DNA, 15 bp, Homo sapiens
tcagggtctcgactg

SEQ ID NO: 1973967 - DNA, 15 bp, Homo sapiens
cagggtctcgactgg

SEQ ID NO: 1973968 - DNA, 15 bp, Homo sapiens
agggtctcgactggg

SEQ ID NO: 1973969 - DNA, 15 bp, Homo sapiens
gggtctcgactgggg

SEQ ID NO: 1973970 - DNA, 15 bp, Homo sapiens
ggtctcgactggggg

SEQ ID NO: 1973971 - DNA, 15 bp, Homo sapiens
gtctcgactgggggt

SEQ ID NO: 1973972 - DNA, 15 bp, Homo sapiens
tctcgactgggggtc

SEQ ID NO: 1973973 - DNA, 15 bp, Homo sapiens
ctcgactgggggtca

SEQ ID NO: 1973974 - DNA, 15 bp, Homo sapiens
tcgactgggggtcag

SEQ ID NO: 1973975 - DNA, 15 bp, Homo sapiens
cgactgggggtcagg

SEQ ID NO: 1973976 - DNA, 15 bp, Homo sapiens
gactgggggtcaggg

SEQ ID NO: 1973977 - DNA, 15 bp, Homo sapiens
actgggggtcagggc

SEQ ID NO: 1973978 - DNA, 15 bp, Homo sapiens
ctgggggtcagggct

SEQ ID NO: 1973979 - DNA, 15 bp, Homo sapiens
tgggggtcagggctg

SEQ ID NO: 1973980 - DNA, 15 bp, Homo sapiens
gggggtcagggctgg

SEQ ID NO: 1973981 - DNA, 15 bp, Homo sapiens
ggggtcagggctggg

SEQ ID NO: 1973982 - DNA, 15 bp, Homo sapiens
gggtcagggctgggg

SEQ ID NO: 1973983 - DNA, 15 bp, Homo sapiens
ggtcagggctgggga

SEQ ID NO: 1973984 - DNA, 15 bp, Homo sapiens
gtcagggctggggat

SEQ ID NO: 1973985 - DNA, 15 bp, Homo sapiens
tcagggctggggatg

SEQ ID NO: 1973986 - DNA, 15 bp, Homo sapiens
cagggctggggatga

SEQ ID NO: 1973987 - DNA, 15 bp, Homo sapiens
agggctggggatgat

SEQ ID NO: 1973988 - DNA, 15 bp, Homo sapiens
gggctggggatgatt

SEQ ID NO: 1973989 - DNA, 15 bp, Homo sapiens
ggctggggatgattt

SEQ ID NO: 1973990 - DNA, 15 bp, Homo sapiens
gctggggatgatttg

SEQ ID NO: 1973991 - DNA, 15 bp, Homo sapiens
ctggggatgatttgc

SEQ ID NO: 1973992 - DNA, 15 bp, Homo sapiens
tggggatgatttgcg

SEQ ID NO: 1973993 - DNA, 15 bp, Homo sapiens
ggggatgatttgcgg

SEQ ID NO: 1973994 - DNA, 15 bp, Homo sapiens
gggatgatttgcggg

SEQ ID NO: 1973995 - DNA, 15 bp, Homo sapiens
ggatgatttgcgggg

SEQ ID NO: 1973996 - DNA, 15 bp, Homo sapiens
gatgatttgcggggc

SEQ ID NO: 1973997 - DNA, 15 bp, Homo sapiens
atgatttgcggggcg

SEQ ID NO: 1973998 - DNA, 15 bp, Homo sapiens
tgatttgcggggcgg

SEQ ID NO: 1973999 - DNA, 15 bp, Homo sapiens
gatttgcggggcgga

SEQ ID NO: 1974000 - DNA, 15 bp, Homo sapiens
atttgcggggcggag

SEQ ID NO: 1974001 - DNA, 15 bp, Homo sapiens
tttgcggggcggagc

SEQ ID NO: 1974002 - DNA, 15 bp, Homo sapiens
ttgcggggcggagct

SEQ ID NO: 1974003 - DNA, 15 bp, Homo sapiens
tgcggggcggagctg

SEQ ID NO: 1974004 - DNA, 15 bp, Homo sapiens
gcggggcggagctga

SEQ ID NO: 1974005 - DNA, 15 bp, Homo sapiens
cggggcggagctgaa

SEQ ID NO: 1974006 - DNA, 15 bp, Homo sapiens
ggggcggagctgaag

SEQ ID NO: 1974007 - DNA, 15 bp, Homo sapiens
gggcggagctgaagt

SEQ ID NO: 1974008 - DNA, 15 bp, Homo sapiens
ggcggagctgaagtc

SEQ ID NO: 1974009 - DNA, 15 bp, Homo sapiens
gcggagctgaagtca

SEQ ID NO: 1974010 - DNA, 15 bp, Homo sapiens
cggagctgaagtcag

SEQ ID NO: 1974011 - DNA, 15 bp, Homo sapiens
ggagctgaagtcagt

SEQ ID NO: 1974012 - DNA, 15 bp, Homo sapiens
gagctgaagtcagtg

SEQ ID NO: 1974013 - DNA, 15 bp, Homo sapiens
agctgaagtcagtgg

SEQ ID NO: 1974014 - DNA, 15 bp, Homo sapiens
gctgaagtcagtggg

SEQ ID NO: 1974015 - DNA, 15 bp, Homo sapiens
ctgaagtcagtgggg

SEQ ID NO: 1974016 - DNA, 15 bp, Homo sapiens
tgaagtcagtggggg

SEQ ID NO: 1974017 - DNA, 15 bp, Homo sapiens
gaagtcagtgggggc

SEQ ID NO: 1974018 - DNA, 15 bp, Homo sapiens
aagtcagtgggggct

SEQ ID NO: 1974019 - DNA, 15 bp, Homo sapiens
agtcagtgggggctg

SEQ ID NO: 1974020 - DNA, 15 bp, Homo sapiens
gtcagtgggggctgc

SEQ ID NO: 1974021 - DNA, 15 bp, Homo sapiens
tcagtgggggctgca

SEQ ID NO: 1974022 - DNA, 15 bp, Homo sapiens
cagtgggggctgcag

SEQ ID NO: 1974023 - DNA, 15 bp, Homo sapiens
agtgggggctgcagg

SEQ ID NO: 1974024 - DNA, 15 bp, Homo sapiens
gtgggggctgcaggg

SEQ ID NO: 1974025 - DNA, 15 bp, Homo sapiens
tgggggctgcagggg

SEQ ID NO: 1974026 - DNA, 15 bp, Homo sapiens
gggggctgcagggga

SEQ ID NO: 1974027 - DNA, 15 bp, Homo sapiens
ggggctgcaggggag

SEQ ID NO: 1974028 - DNA, 15 bp, Homo sapiens
gggctgcaggggaga

SEQ ID NO: 1974029 - DNA, 15 bp, Homo sapiens
ggctgcaggggagag

SEQ ID NO: 1974030 - DNA, 15 bp, Homo sapiens
gctgcaggggagagc

SEQ ID NO: 1974031 - DNA, 15 bp, Homo sapiens
ctgcaggggagagca

SEQ ID NO: 1974032 - DNA, 15 bp, Homo sapiens
tgcaggggagagcaa

SEQ ID NO: 1974033 - DNA, 15 bp, Homo sapiens
gcaggggagagcaag

SEQ ID NO: 1974034 - DNA, 15 bp, Homo sapiens
caggggagagcaagc

SEQ ID NO: 1974035 - DNA, 15 bp, Homo sapiens
aggggagagcaagct

SEQ ID NO: 1974036 - DNA, 15 bp, Homo sapiens
ggggagagcaagctt

SEQ ID NO: 1974037 - DNA, 15 bp, Homo sapiens
gggagagcaagcttc

SEQ ID NO: 1974038 - DNA, 15 bp, Homo sapiens
ggagagcaagcttcc

SEQ ID NO: 1974039 - DNA, 15 bp, Homo sapiens
gagagcaagcttccc

SEQ ID NO: 1974040 - DNA, 15 bp, Homo sapiens
agagcaagcttccca

SEQ ID NO: 1974041 - DNA, 15 bp, Homo sapiens
gagcaagcttcccag

SEQ ID NO: 1974042 - DNA, 15 bp, Homo sapiens
agcaagcttcccagg

SEQ ID NO: 1974043 - DNA, 15 bp, Homo sapiens
gcaagcttcccaggc

SEQ ID NO: 1974044 - DNA, 15 bp, Homo sapiens
caagcttcccaggca

SEQ ID NO: 1974045 - DNA, 15 bp, Homo sapiens
aagcttcccaggcag

SEQ ID NO: 1974046 - DNA, 15 bp, Homo sapiens
agcttcccaggcagg

SEQ ID NO: 1974047 - DNA, 15 bp, Homo sapiens
gcttcccaggcaggt

SEQ ID NO: 1974048 - DNA, 15 bp, Homo sapiens
cttcccaggcaggtg

SEQ ID NO: 1974049 - DNA, 15 bp, Homo sapiens
ttcccaggcaggtga

SEQ ID NO: 1974050 - DNA, 15 bp, Homo sapiens
tcccaggcaggtgag

SEQ ID NO: 1974051 - DNA, 15 bp, Homo sapiens
cccaggcaggtgagg

SEQ ID NO: 1974052 - DNA, 15 bp, Homo sapiens
ccaggcaggtgagga

SEQ ID NO: 1974053 - DNA, 15 bp, Homo sapiens
caggcaggtgaggat

SEQ ID NO: 1974054 - DNA, 15 bp, Homo sapiens
aggcaggtgaggata

SEQ ID NO: 1974055 - DNA, 15 bp, Homo sapiens
ggcaggtgaggatac

SEQ ID NO: 1974056 - DNA, 15 bp, Homo sapiens
gcaggtgaggatact

SEQ ID NO: 1974057 - DNA, 15 bp, Homo sapiens
caggtgaggatactg

SEQ ID NO: 1974058 - DNA, 15 bp, Homo sapiens
aggtgaggatactga

SEQ ID NO: 1974059 - DNA, 15 bp, Homo sapiens
ggtgaggatactgag

SEQ ID NO: 1974060 - DNA, 15 bp, Homo sapiens
gtgaggatactgagt

SEQ ID NO: 1974061 - DNA, 15 bp, Homo sapiens
tgaggatactgagtc

SEQ ID NO: 1974062 - DNA, 15 bp, Homo sapiens
gaggatactgagtct

SEQ ID NO: 1974063 - DNA, 15 bp, Homo sapiens
aggatactgagtcta

SEQ ID NO: 1974064 - DNA, 15 bp, Homo sapiens
ggatactgagtctaa

SEQ ID NO: 1974065 - DNA, 15 bp, Homo sapiens
gatactgagtctaac

SEQ ID NO: 1974066 - DNA, 15 bp, Homo sapiens
atactgagtctaacc

SEQ ID NO: 1974067 - DNA, 15 bp, Homo sapiens
tactgagtctaaccc

SEQ ID NO: 1974068 - DNA, 15 bp, Homo sapiens
actgagtctaacccc

SEQ ID NO: 1974069 - DNA, 15 bp, Homo sapiens
ctgagtctaaccccc

SEQ ID NO: 1974070 - DNA, 15 bp, Homo sapiens
tgagtctaaccccca

SEQ ID NO: 1974071 - DNA, 15 bp, Homo sapiens
gagtctaacccccac

SEQ ID NO: 1974072 - DNA, 15 bp, Homo sapiens
agtctaacccccaca

SEQ ID NO: 1974073 - DNA, 15 bp, Homo sapiens
gtctaacccccacag

SEQ ID NO: 1974074 - DNA, 15 bp, Homo sapiens
tctaacccccacagg

SEQ ID NO: 1974075 - DNA, 15 bp, Homo sapiens
ctaacccccacagga

SEQ ID NO: 1974076 - DNA, 15 bp, Homo sapiens
taacccccacaggag

SEQ ID NO: 1974077 - DNA, 15 bp, Homo sapiens
aacccccacaggagc

SEQ ID NO: 1974078 - DNA, 15 bp, Homo sapiens
acccccacaggagcc

SEQ ID NO: 1974079 - DNA, 15 bp, Homo sapiens
cccccacaggagcct

SEQ ID NO: 1974080 - DNA, 15 bp, Homo sapiens
ccccacaggagcctg

SEQ ID NO: 1974081 - DNA, 15 bp, Homo sapiens
cccacaggagcctgg

SEQ ID NO: 1974082 - DNA, 15 bp, Homo sapiens
ccacaggagcctggc

SEQ ID NO: 1974083 - DNA, 15 bp, Homo sapiens
cacaggagcctggct

SEQ ID NO: 1974084 - DNA, 15 bp, Homo sapiens
acaggagcctggctg

SEQ ID NO: 1974085 - DNA, 15 bp, Homo sapiens
caggagcctggctgg

SEQ ID NO: 1974086 - DNA, 15 bp, Homo sapiens
aggagcctggctgga

SEQ ID NO: 1974087 - DNA, 15 bp, Homo sapiens
ggagcctggctggag

SEQ ID NO: 1974088 - DNA, 15 bp, Homo sapiens
gagcctggctggagg

SEQ ID NO: 1974089 - DNA, 15 bp, Homo sapiens
agcctggctggaggt

SEQ ID NO: 1974090 - DNA, 15 bp, Homo sapiens
gcctggctggaggtg

SEQ ID NO: 1974091 - DNA, 15 bp, Homo sapiens
cctggctggaggtgg

SEQ ID NO: 1974092 - DNA, 15 bp, Homo sapiens
ctggctggaggtggt

SEQ ID NO: 1974093 - DNA, 15 bp, Homo sapiens
tggctggaggtggtc

SEQ ID NO: 1974094 - DNA, 15 bp, Homo sapiens
ggctggaggtggtcg

SEQ ID NO: 1974095 - DNA, 15 bp, Homo sapiens
gctggaggtggtcgg

SEQ ID NO: 1974096 - DNA, 15 bp, Homo sapiens
ctggaggtggtcggc

SEQ ID NO: 1974097 - DNA, 15 bp, Homo sapiens
tggaggtggtcggcg

SEQ ID NO: 1974098 - DNA, 15 bp, Homo sapiens
ggaggtggtcggcgg

SEQ ID NO: 1974099 - DNA, 15 bp, Homo sapiens
gaggtggtcggcgga

SEQ ID NO: 1974100 - DNA, 15 bp, Homo sapiens
aggtggtcggcggat

SEQ ID NO: 1974101 - DNA, 15 bp, Homo sapiens
ggtggtcggcggatc

SEQ ID NO: 1974102 - DNA, 15 bp, Homo sapiens
gtggtcggcggatca

SEQ ID NO: 1974103 - DNA, 15 bp, Homo sapiens
tggtcggcggatcag

SEQ ID NO: 1974104 - DNA, 15 bp, Homo sapiens
ggtcggcggatcagg

SEQ ID NO: 1974105 - DNA, 15 bp, Homo sapiens
gtcggcggatcaggt

SEQ ID NO: 1974106 - DNA, 15 bp, Homo sapiens
tcggcggatcaggta

SEQ ID NO: 1974107 - DNA, 15 bp, Homo sapiens
cggcggatcaggtac

SEQ ID NO: 1974108 - DNA, 15 bp, Homo sapiens
ggcggatcaggtacc

SEQ ID NO: 1974109 - DNA, 15 bp, Homo sapiens
gcggatcaggtaccc

SEQ ID NO: 1974110 - DNA, 15 bp, Homo sapiens
cggatcaggtacccc

SEQ ID NO: 1974111 - DNA, 15 bp, Homo sapiens
ggatcaggtacccct

SEQ ID NO: 1974112 - DNA, 15 bp, Homo sapiens
gatcaggtacccctg

SEQ ID NO: 1974113 - DNA, 15 bp, Homo sapiens
atcaggtacccctgc

SEQ ID NO: 1974114 - DNA, 15 bp, Homo sapiens
tcaggtacccctgcc

SEQ ID NO: 1974115 - DNA, 15 bp, Homo sapiens
caggtacccctgccc

SEQ ID NO: 1974116 - DNA, 15 bp, Homo sapiens
aggtacccctgcccc

SEQ ID NO: 1974117 - DNA, 15 bp, Homo sapiens
ggtacccctgcccca

SEQ ID NO: 1974118 - DNA, 15 bp, Homo sapiens
gtacccctgccccag

SEQ ID NO: 1974119 - DNA, 15 bp, Homo sapiens
tacccctgccccagg

SEQ ID NO: 1974120 - DNA, 15 bp, Homo sapiens
acccctgccccaggc

SEQ ID NO: 1974121 - DNA, 15 bp, Homo sapiens
cccctgccccaggcc

SEQ ID NO: 1974122 - DNA, 15 bp, Homo sapiens
ccctgccccaggccc

SEQ ID NO: 1974123 - DNA, 15 bp, Homo sapiens
ctgccccaggcccta

SEQ ID NO: 1974124 - DNA, 15 bp, Homo sapiens
tgccccaggccctac

SEQ ID NO: 1974125 - DNA, 15 bp, Homo sapiens
gccccaggccctacc

SEQ ID NO: 1974126 - DNA, 15 bp, Homo sapiens
ccccaggccctacct

SEQ ID NO: 1974127 - DNA, 15 bp, Homo sapiens
cccaggccctacctg

SEQ ID NO: 1974128 - DNA, 15 bp, Homo sapiens
ccaggccctacctgc

SEQ ID NO: 1974129 - DNA, 15 bp, Homo sapiens
caggccctacctgca

SEQ ID NO: 1974130 - DNA, 15 bp, Homo sapiens
aggccctacctgcac

SEQ ID NO: 1974131 - DNA, 15 bp, Homo sapiens
ggccctacctgcacc

SEQ ID NO: 1974132 - DNA, 15 bp, Homo sapiens
gccctacctgcacca

SEQ ID NO: 1974133 - DNA, 15 bp, Homo sapiens
ccctacctgcaccat

SEQ ID NO: 1974134 - DNA, 15 bp, Homo sapiens
cctacctgcaccatc

SEQ ID NO: 1974135 - DNA, 15 bp, Homo sapiens
ctacctgcaccatcc

SEQ ID NO: 1974136 - DNA, 15 bp, Homo sapiens
tacctgcaccatccg

SEQ ID NO: 1974137 - DNA, 15 bp, Homo sapiens
acctgcaccatccgc

SEQ ID NO: 1974138 - DNA, 15 bp, Homo sapiens
cctgcaccatccgca

SEQ ID NO: 1974139 - DNA, 15 bp, Homo sapiens
ctgcaccatccgcag

SEQ ID NO: 1974140 - DNA, 15 bp, Homo sapiens
tgcaccatccgcaga

SEQ ID NO: 1974141 - DNA, 15 bp, Homo sapiens
gcaccatccgcagac

SEQ ID NO: 1974142 - DNA, 15 bp, Homo sapiens
caccatccgcagacc

SEQ ID NO: 1974143 - DNA, 15 bp, Homo sapiens
accatccgcagaccc

SEQ ID NO: 1974144 - DNA, 15 bp, Homo sapiens
ccatccgcagacccc

SEQ ID NO: 1974145 - DNA, 15 bp, Homo sapiens
catccgcagaccccc

SEQ ID NO: 1974146 - DNA, 15 bp, Homo sapiens
atccgcagaccccca

SEQ ID NO: 1974147 - DNA, 15 bp, Homo sapiens
tccgcagacccccag

SEQ ID NO: 1974148 - DNA, 15 bp, Homo sapiens
ccgcagacccccagg

SEQ ID NO: 1974149 - DNA, 15 bp, Homo sapiens
cgcagacccccaggg

SEQ ID NO: 1974150 - DNA, 15 bp, Homo sapiens
gcagacccccagggg

SEQ ID NO: 1974151 - DNA, 15 bp, Homo sapiens
cagacccccaggggt

SEQ ID NO: 1974152 - DNA, 15 bp, Homo sapiens
agacccccaggggtc

SEQ ID NO: 1974153 - DNA, 15 bp, Homo sapiens
gacccccaggggtct

SEQ ID NO: 1974154 - DNA, 15 bp, Homo sapiens
acccccaggggtctg

SEQ ID NO: 1974155 - DNA, 15 bp, Homo sapiens
cccccaggggtctga

SEQ ID NO: 1974156 - DNA, 15 bp, Homo sapiens
ccccaggggtctgag

SEQ ID NO: 1974157 - DNA, 15 bp, Homo sapiens
cccaggggtctgaga

SEQ ID NO: 1974158 - DNA, 15 bp, Homo sapiens
ccaggggtctgagac

SEQ ID NO: 1974159 - DNA, 15 bp, Homo sapiens
caggggtctgagacg

SEQ ID NO: 1974160 - DNA, 15 bp, Homo sapiens
aggggtctgagacgg

SEQ ID NO: 1974161 - DNA, 15 bp, Homo sapiens
ggggtctgagacggg

SEQ ID NO: 1974162 - DNA, 15 bp, Homo sapiens
gggtctgagacgggt

SEQ ID NO: 1974163 - DNA, 15 bp, Homo sapiens
ggtctgagacgggtg

SEQ ID NO: 1974164 - DNA, 15 bp, Homo sapiens
gtctgagacgggtgg

SEQ ID NO: 1974165 - DNA, 15 bp, Homo sapiens
tctgagacgggtggg

SEQ ID NO: 1974166 - DNA, 15 bp, Homo sapiens
ctgagacgggtggga

SEQ ID NO: 1974167 - DNA, 15 bp, Homo sapiens
tgagacgggtgggag

SEQ ID NO: 1974168 - DNA, 15 bp, Homo sapiens
gagacgggtgggagc

SEQ ID NO: 1974169 - DNA, 15 bp, Homo sapiens
agacgggtgggagcc

SEQ ID NO: 1974170 - DNA, 15 bp, Homo sapiens
gacgggtgggagccc

SEQ ID NO: 1974171 - DNA, 15 bp, Homo sapiens
acgggtgggagccca

SEQ ID NO: 1974172 - DNA, 15 bp, Homo sapiens
cgggtgggagcccaa

SEQ ID NO: 1974173 - DNA, 15 bp, Homo sapiens
gggtgggagcccaat

SEQ ID NO: 1974174 - DNA, 15 bp, Homo sapiens
ggtgggagcccaatc

SEQ ID NO: 1974175 - DNA, 15 bp, Homo sapiens
gtgggagcccaatct

SEQ ID NO: 1974176 - DNA, 15 bp, Homo sapiens
tgggagcccaatctg

SEQ ID NO: 1974177 - DNA, 15 bp, Homo sapiens
gggagcccaatctgg

SEQ ID NO: 1974178 - DNA, 15 bp, Homo sapiens
ggagcccaatctggc

SEQ ID NO: 1974179 - DNA, 15 bp, Homo sapiens
gagcccaatctggct

SEQ ID NO: 1974180 - DNA, 15 bp, Homo sapiens
agcccaatctggcta

SEQ ID NO: 1974181 - DNA, 15 bp, Homo sapiens
gcccaatctggctag

SEQ ID NO: 1974182 - DNA, 15 bp, Homo sapiens
cccaatctggctagt

SEQ ID NO: 1974183 - DNA, 15 bp, Homo sapiens
ccaatctggctagtg

SEQ ID NO: 1974184 - DNA, 15 bp, Homo sapiens
caatctggctagtgt

SEQ ID NO: 1974185 - DNA, 15 bp, Homo sapiens
aatctggctagtgtc

SEQ ID NO: 1974186 - DNA, 15 bp, Homo sapiens
atctggctagtgtcc

SEQ ID NO: 1974187 - DNA, 15 bp, Homo sapiens
tctggctagtgtccc

SEQ ID NO: 1974188 - DNA, 15 bp, Homo sapiens
ctggctagtgtccct

SEQ ID NO: 1974189 - DNA, 15 bp, Homo sapiens
tggctagtgtccctt

SEQ ID NO: 1974190 - DNA, 15 bp, Homo sapiens
ggctagtgtcccttt

SEQ ID NO: 1974191 - DNA, 15 bp, Homo sapiens
gctagtgtccctttc

SEQ ID NO: 1974192 - DNA, 15 bp, Homo sapiens
ctagtgtccctttct

SEQ ID NO: 1974193 - DNA, 15 bp, Homo sapiens
tagtgtccctttctc

SEQ ID NO: 1974194 - DNA, 15 bp, Homo sapiens
agtgtccctttctcc

SEQ ID NO: 1974195 - DNA, 15 bp, Homo sapiens
gtgtccctttctccc

SEQ ID NO: 1974196 - DNA, 15 bp, Homo sapiens
tgtccctttctccct

SEQ ID NO: 1974197 - DNA, 15 bp, Homo sapiens
gtccctttctccctc

SEQ ID NO: 1974198 - DNA, 15 bp, Homo sapiens
ccctttctccctccc

SEQ ID NO: 1974199 - DNA, 15 bp, Homo sapiens
cctttctccctcccc

SEQ ID NO: 1974200 - DNA, 15 bp, Homo sapiens
ctttctccctcccca

SEQ ID NO: 1974201 - DNA, 15 bp, Homo sapiens
tttctccctccccac

SEQ ID NO: 1974202 - DNA, 15 bp, Homo sapiens
ttctccctccccact

SEQ ID NO: 1974203 - DNA, 15 bp, Homo sapiens
tctccctccccactc

SEQ ID NO: 1974204 - DNA, 15 bp, Homo sapiens
ctccctccccactcc

SEQ ID NO: 1974205 - DNA, 15 bp, Homo sapiens
tccctccccactcca

SEQ ID NO: 1974206 - DNA, 15 bp, Homo sapiens
ccctccccactccac

SEQ ID NO: 1974207 - DNA, 15 bp, Homo sapiens
cctccccactccact

SEQ ID NO: 1974208 - DNA, 15 bp, Homo sapiens
ctccccactccactc

SEQ ID NO: 1974209 - DNA, 15 bp, Homo sapiens
tccccactccactcc

SEQ ID NO: 1974210 - DNA, 15 bp, Homo sapiens
ccccactccactccc

SEQ ID NO: 1974211 - DNA, 15 bp, Homo sapiens
cccactccactccca

SEQ ID NO: 1974212 - DNA, 15 bp, Homo sapiens
ccactccactcccat

SEQ ID NO: 1974213 - DNA, 15 bp, Homo sapiens
cactccactcccatc

SEQ ID NO: 1974214 - DNA, 15 bp, Homo sapiens
actccactcccatcc

SEQ ID NO: 1974215 - DNA, 15 bp, Homo sapiens
ctccactcccatcct

SEQ ID NO: 1974216 - DNA, 15 bp, Homo sapiens
tccactcccatcctg

SEQ ID NO: 1974217 - DNA, 15 bp, Homo sapiens
ccactcccatcctgc

SEQ ID NO: 1974218 - DNA, 15 bp, Homo sapiens
cactcccatcctgct

SEQ ID NO: 1974219 - DNA, 15 bp, Homo sapiens
actcccatcctgctc

SEQ ID NO: 1974220 - DNA, 15 bp, Homo sapiens
ctcccatcctgctcc

SEQ ID NO: 1974221 - DNA, 15 bp, Homo sapiens
tcccatcctgctcct

SEQ ID NO: 1974222 - DNA, 15 bp, Homo sapiens
cccatcctgctccta

SEQ ID NO: 1974223 - DNA, 15 bp, Homo sapiens
ccatcctgctcctaa

SEQ ID NO: 1974224 - DNA, 15 bp, Homo sapiens
catcctgctcctaat

SEQ ID NO: 1974225 - DNA, 15 bp, Homo sapiens
atcctgctcctaatc

SEQ ID NO: 1974226 - DNA, 15 bp, Homo sapiens
tcctgctcctaatcc

SEQ ID NO: 1974227 - DNA, 15 bp, Homo sapiens
cctgctcctaatccc

SEQ ID NO: 1974228 - DNA, 15 bp, Homo sapiens
ctgctcctaatccct

SEQ ID NO: 1974229 - DNA, 15 bp, Homo sapiens
tgctcctaatccctt

SEQ ID NO: 1974230 - DNA, 15 bp, Homo sapiens
gctcctaatcccttt

SEQ ID NO: 1974231 - DNA, 15 bp, Homo sapiens
ctcctaatccctttc

SEQ ID NO: 1974232 - DNA, 15 bp, Homo sapiens
tcctaatccctttcc

SEQ ID NO: 1974233 - DNA, 15 bp, Homo sapiens
cctaatccctttcca

SEQ ID NO: 1974234 - DNA, 15 bp, Homo sapiens
ctaatccctttccag

SEQ ID NO: 1974235 - DNA, 15 bp, Homo sapiens
taatccctttccagt

SEQ ID NO: 1974236 - DNA, 15 bp, Homo sapiens
aatccctttccagtc

SEQ ID NO: 1974237 - DNA, 15 bp, Homo sapiens
atccctttccagtcc

SEQ ID NO: 1974238 - DNA, 15 bp, Homo sapiens
tccctttccagtccc

SEQ ID NO: 1974239 - DNA, 15 bp, Homo sapiens
ccctttccagtccct

SEQ ID NO: 1974240 - DNA, 15 bp, Homo sapiens
cctttccagtccctc

SEQ ID NO: 1974241 - DNA, 15 bp, Homo sapiens
ctttccagtccctca

SEQ ID NO: 1974242 - DNA, 15 bp, Homo sapiens
tttccagtccctcac

SEQ ID NO: 1974243 - DNA, 15 bp, Homo sapiens
ttccagtccctcact

SEQ ID NO: 1974244 - DNA, 15 bp, Homo sapiens
tccagtccctcactg

SEQ ID NO: 1974245 - DNA, 15 bp, Homo sapiens
ccagtccctcactgc

SEQ ID NO: 1974246 - DNA, 15 bp, Homo sapiens
cagtccctcactgca

SEQ ID NO: 1974247 - DNA, 15 bp, Homo sapiens
agtccctcactgcag

SEQ ID NO: 1974248 - DNA, 15 bp, Homo sapiens
gtccctcactgcagc

SEQ ID NO: 1974249 - DNA, 15 bp, Homo sapiens
tccctcactgcagcc

SEQ ID NO: 1974250 - DNA, 15 bp, Homo sapiens
ccctcactgcagcct

SEQ ID NO: 1974251 - DNA, 15 bp, Homo sapiens
cctcactgcagcctc

SEQ ID NO: 1974252 - DNA, 15 bp, Homo sapiens
tcactgcagcctcac

SEQ ID NO: 1974253 - DNA, 15 bp, Homo sapiens
cactgcagcctcact

SEQ ID NO: 1974254 - DNA, 15 bp, Homo sapiens
actgcagcctcactg

SEQ ID NO: 1974255 - DNA, 15 bp, Homo sapiens
ctgcagcctcactgg

SEQ ID NO: 1974256 - DNA, 15 bp, Homo sapiens
tgcagcctcactggg

SEQ ID NO: 1974257 - DNA, 15 bp, Homo sapiens
gcagcctcactgggg

SEQ ID NO: 1974258 - DNA, 15 bp, Homo sapiens
cagcctcactggggg

SEQ ID NO: 1974259 - DNA, 15 bp, Homo sapiens
agcctcactgggggt

SEQ ID NO: 1974260 - DNA, 15 bp, Homo sapiens
gcctcactgggggtc

SEQ ID NO: 1974261 - DNA, 15 bp, Homo sapiens
cctcactgggggtcc

SEQ ID NO: 1974262 - DNA, 15 bp, Homo sapiens
ctcactgggggtccc

SEQ ID NO: 1974263 - DNA, 15 bp, Homo sapiens
tcactgggggtccct

SEQ ID NO: 1974264 - DNA, 15 bp, Homo sapiens
cactgggggtccctc

SEQ ID NO: 1974265 - DNA, 15 bp, Homo sapiens
actgggggtccctct

SEQ ID NO: 1974266 - DNA, 15 bp, Homo sapiens
ctgggggtccctctc

SEQ ID NO: 1974267 - DNA, 15 bp, Homo sapiens
tgggggtccctctcc

SEQ ID NO: 1974268 - DNA, 15 bp, Homo sapiens
gggggtccctctcca

SEQ ID NO: 1974269 - DNA, 15 bp, Homo sapiens
ggggtccctctccat

SEQ ID NO: 1974270 - DNA, 15 bp, Homo sapiens
gggtccctctccata

SEQ ID NO: 1974271 - DNA, 15 bp, Homo sapiens
ggtccctctccatag

SEQ ID NO: 1974272 - DNA, 15 bp, Homo sapiens
gtccctctccatagt

SEQ ID NO: 1974273 - DNA, 15 bp, Homo sapiens
tccctctccatagtg

SEQ ID NO: 1974274 - DNA, 15 bp, Homo sapiens
ccctctccatagtga

SEQ ID NO: 1974275 - DNA, 15 bp, Homo sapiens
cctctccatagtgat

SEQ ID NO: 1974276 - DNA, 15 bp, Homo sapiens
ctctccatagtgata

SEQ ID NO: 1974277 - DNA, 15 bp, Homo sapiens
tctccatagtgatag

SEQ ID NO: 1974278 - DNA, 15 bp, Homo sapiens
ctccatagtgatagc

SEQ ID NO: 1974279 - DNA, 15 bp, Homo sapiens
tccatagtgatagcc

SEQ ID NO: 1974280 - DNA, 15 bp, Homo sapiens
ccatagtgatagcca

SEQ ID NO: 1974281 - DNA, 15 bp, Homo sapiens
catagtgatagccat

SEQ ID NO: 1974282 - DNA, 15 bp, Homo sapiens
atagtgatagccatg

SEQ ID NO: 1974283 - DNA, 15 bp, Homo sapiens
tagtgatagccatga

SEQ ID NO: 1974284 - DNA, 15 bp, Homo sapiens
agtgatagccatgag

SEQ ID NO: 1974285 - DNA, 15 bp, Homo sapiens
gtgatagccatgagg

SEQ ID NO: 1974286 - DNA, 15 bp, Homo sapiens
tgatagccatgagga

SEQ ID NO: 1974287 - DNA, 15 bp, Homo sapiens
gatagccatgaggac

SEQ ID NO: 1974288 - DNA, 15 bp, Homo sapiens
atagccatgaggaca

SEQ ID NO: 1974289 - DNA, 15 bp, Homo sapiens
tagccatgaggacac

SEQ ID NO: 1974290 - DNA, 15 bp, Homo sapiens
agccatgaggacact

SEQ ID NO: 1974291 - DNA, 15 bp, Homo sapiens
gccatgaggacactg

SEQ ID NO: 1974292 - DNA, 15 bp, Homo sapiens
ccatgaggacactgg

SEQ ID NO: 1974293 - DNA, 15 bp, Homo sapiens
catgaggacactggg

SEQ ID NO: 1974294 - DNA, 15 bp, Homo sapiens
atgaggacactggga

SEQ ID NO: 1974295 - DNA, 15 bp, Homo sapiens
tgaggacactgggat

SEQ ID NO: 1974296 - DNA, 15 bp, Homo sapiens
gaggacactgggatt

SEQ ID NO: 1974297 - DNA, 15 bp, Homo sapiens
aggacactgggattc

SEQ ID NO: 1974298 - DNA, 15 bp, Homo sapiens
ggacactgggattct

SEQ ID NO: 1974299 - DNA, 15 bp, Homo sapiens
gacactgggattctg

SEQ ID NO: 1974300 - DNA, 15 bp, Homo sapiens
acactgggattctgg

SEQ ID NO: 1974301 - DNA, 15 bp, Homo sapiens
cactgggattctgga

SEQ ID NO: 1974302 - DNA, 15 bp, Homo sapiens
actgggattctggac

SEQ ID NO: 1974303 - DNA, 15 bp, Homo sapiens
ctgggattctggact

SEQ ID NO: 1974304 - DNA, 15 bp, Homo sapiens
tgggattctggactt

SEQ ID NO: 1974305 - DNA, 15 bp, Homo sapiens
gggattctggacttc

SEQ ID NO: 1974306 - DNA, 15 bp, Homo sapiens
ggattctggacttca

SEQ ID NO: 1974307 - DNA, 15 bp, Homo sapiens
gattctggacttcag

SEQ ID NO: 1974308 - DNA, 15 bp, Homo sapiens
attctggacttcagc

SEQ ID NO: 1974309 - DNA, 15 bp, Homo sapiens
ttctggacttcagct

SEQ ID NO: 1974310 - DNA, 15 bp, Homo sapiens
tctggacttcagctc

SEQ ID NO: 1974311 - DNA, 15 bp, Homo sapiens
ctggacttcagctca

SEQ ID NO: 1974312 - DNA, 15 bp, Homo sapiens
tggacttcagctcac

SEQ ID NO: 1974313 - DNA, 15 bp, Homo sapiens
ggacttcagctcact

SEQ ID NO: 1974314 - DNA, 15 bp, Homo sapiens
gacttcagctcactg

SEQ ID NO: 1974315 - DNA, 15 bp, Homo sapiens
acttcagctcactgc

SEQ ID NO: 1974316 - DNA, 15 bp, Homo sapiens
cttcagctcactgct

SEQ ID NO: 1974317 - DNA, 15 bp, Homo sapiens
ttcagctcactgctg

SEQ ID NO: 1974318 - DNA, 15 bp, Homo sapiens
tcagctcactgctga

SEQ ID NO: 1974319 - DNA, 15 bp, Homo sapiens
cagctcactgctgaa

SEQ ID NO: 1974320 - DNA, 15 bp, Homo sapiens
agctcactgctgaaa

SEQ ID NO: 1974321 - DNA, 15 bp, Homo sapiens
gctcactgctgaaaa

SEQ ID NO: 1974322 - DNA, 15 bp, Homo sapiens
ctcactgctgaaaaa

SEQ ID NO: 1974323 - DNA, 15 bp, Homo sapiens
tcactgctgaaaaag

SEQ ID NO: 1974324 - DNA, 15 bp, Homo sapiens
cactgctgaaaaaga

SEQ ID NO: 1974325 - DNA, 15 bp, Homo sapiens
actgctgaaaaagag

SEQ ID NO: 1974326 - DNA, 15 bp, Homo sapiens
ctgctgaaaaagagg

SEQ ID NO: 1974327 - DNA, 15 bp, Homo sapiens
tgctgaaaaagaggt

SEQ ID NO: 1974328 - DNA, 15 bp, Homo sapiens
gctgaaaaagaggtg

SEQ ID NO: 1974329 - DNA, 15 bp, Homo sapiens
ctgaaaaagaggtga

SEQ ID NO: 1974330 - DNA, 15 bp, Homo sapiens
tgaaaaagaggtgag

SEQ ID NO: 1974331 - DNA, 15 bp, Homo sapiens
gaaaaagaggtgagt

SEQ ID NO: 1974332 - DNA, 15 bp, Homo sapiens
aaaaagaggtgagtc

SEQ ID NO: 1974333 - DNA, 15 bp, Homo sapiens
aaaagaggtgagtcc

SEQ ID NO: 1974334 - DNA, 15 bp, Homo sapiens
aaagaggtgagtcct

SEQ ID NO: 1974335 - DNA, 15 bp, Homo sapiens
aagaggtgagtcctg

SEQ ID NO: 1974336 - DNA, 15 bp, Homo sapiens
agaggtgagtcctgg

SEQ ID NO: 1974337 - DNA, 15 bp, Homo sapiens
gaggtgagtcctggg

SEQ ID NO: 1974338 - DNA, 15 bp, Homo sapiens
aggtgagtcctgggt

SEQ ID NO: 1974339 - DNA, 15 bp, Homo sapiens
ggtgagtcctgggtg

SEQ ID NO: 1974340 - DNA, 15 bp, Homo sapiens
gtgagtcctgggtgg

SEQ ID NO: 1974341 - DNA, 15 bp, Homo sapiens
tgagtcctgggtggc

SEQ ID NO: 1974342 - DNA, 15 bp, Homo sapiens
gagtcctgggtggca

SEQ ID NO: 1974343 - DNA, 15 bp, Homo sapiens
agtcctgggtggcag

SEQ ID NO: 1974344 - DNA, 15 bp, Homo sapiens
gtcctgggtggcagt

SEQ ID NO: 1974345 - DNA, 15 bp, Homo sapiens
tcctgggtggcagtt

SEQ ID NO: 1974346 - DNA, 15 bp, Homo sapiens
cctgggtggcagttc

SEQ ID NO: 1974347 - DNA, 15 bp, Homo sapiens
ctgggtggcagttcc

SEQ ID NO: 1974348 - DNA, 15 bp, Homo sapiens
tgggtggcagttcct

SEQ ID NO: 1974349 - DNA, 15 bp, Homo sapiens
gggtggcagttcctg

SEQ ID NO: 1974350 - DNA, 15 bp, Homo sapiens
ggtggcagttcctgg

SEQ ID NO: 1974351 - DNA, 15 bp, Homo sapiens
gtggcagttcctggg

SEQ ID NO: 1974352 - DNA, 15 bp, Homo sapiens
tggcagttcctgggg

SEQ ID NO: 1974353 - DNA, 15 bp, Homo sapiens
ggcagttcctggggc

SEQ ID NO: 1974354 - DNA, 15 bp, Homo sapiens
gcagttcctggggca

SEQ ID NO: 1974355 - DNA, 15 bp, Homo sapiens
cagttcctggggcag

SEQ ID NO: 1974356 - DNA, 15 bp, Homo sapiens
agttcctggggcagc

SEQ ID NO: 1974357 - DNA, 15 bp, Homo sapiens
gttcctggggcagct

SEQ ID NO: 1974358 - DNA, 15 bp, Homo sapiens
ttcctggggcagctg

SEQ ID NO: 1974359 - DNA, 15 bp, Homo sapiens
tcctggggcagctgg

SEQ ID NO: 1974360 - DNA, 15 bp, Homo sapiens
cctggggcagctggt

SEQ ID NO: 1974361 - DNA, 15 bp, Homo sapiens
ctggggcagctggtg

SEQ ID NO: 1974362 - DNA, 15 bp, Homo sapiens
tggggcagctggtga

SEQ ID NO: 1974363 - DNA, 15 bp, Homo sapiens
ggggcagctggtgag

SEQ ID NO: 1974364 - DNA, 15 bp, Homo sapiens
gggcagctggtgagg

SEQ ID NO: 1974365 - DNA, 15 bp, Homo sapiens
ggcagctggtgaggc

SEQ ID NO: 1974366 - DNA, 15 bp, Homo sapiens
gcagctggtgaggcc

SEQ ID NO: 1974367 - DNA, 15 bp, Homo sapiens
cagctggtgaggcct

SEQ ID NO: 1974368 - DNA, 15 bp, Homo sapiens
agctggtgaggcctg

SEQ ID NO: 1974369 - DNA, 15 bp, Homo sapiens
gctggtgaggcctgg

SEQ ID NO: 1974370 - DNA, 15 bp, Homo sapiens
ctggtgaggcctggc

SEQ ID NO: 1974371 - DNA, 15 bp, Homo sapiens
tggtgaggcctggct

SEQ ID NO: 1974372 - DNA, 15 bp, Homo sapiens
ggtgaggcctggctc

SEQ ID NO: 1974373 - DNA, 15 bp, Homo sapiens
gtgaggcctggctcc

SEQ ID NO: 1974374 - DNA, 15 bp, Homo sapiens
tgaggcctggctcca

SEQ ID NO: 1974375 - DNA, 15 bp, Homo sapiens
gaggcctggctccaa

SEQ ID NO: 1974376 - DNA, 15 bp, Homo sapiens
aggcctggctccaaa

SEQ ID NO: 1974377 - DNA, 15 bp, Homo sapiens
ggcctggctccaaat

SEQ ID NO: 1974378 - DNA, 15 bp, Homo sapiens
gcctggctccaaatc

SEQ ID NO: 1974379 - DNA, 15 bp, Homo sapiens
cctggctccaaatcc

SEQ ID NO: 1974380 - DNA, 15 bp, Homo sapiens
ctggctccaaatccc

SEQ ID NO: 1974381 - DNA, 15 bp, Homo sapiens
tggctccaaatccca

SEQ ID NO: 1974382 - DNA, 15 bp, Homo sapiens
ggctccaaatcccag

SEQ ID NO: 1974383 - DNA, 15 bp, Homo sapiens
gctccaaatcccagc

SEQ ID NO: 1974384 - DNA, 15 bp, Homo sapiens
ctccaaatcccagca

SEQ ID NO: 1974385 - DNA, 15 bp, Homo sapiens
tccaaatcccagcac

SEQ ID NO: 1974386 - DNA, 15 bp, Homo sapiens
ccaaatcccagcact

SEQ ID NO: 1974387 - DNA, 15 bp, Homo sapiens
caaatcccagcactg

SEQ ID NO: 1974388 - DNA, 15 bp, Homo sapiens
aaatcccagcactgt

SEQ ID NO: 1974389 - DNA, 15 bp, Homo sapiens
tcccagcactgtggt

SEQ ID NO: 1974390 - DNA, 15 bp, Homo sapiens
cccagcactgtggtt

SEQ ID NO: 1974391 - DNA, 15 bp, Homo sapiens
ccagcactgtggttt

SEQ ID NO: 1974392 - DNA, 15 bp, Homo sapiens
cagcactgtggtttg

SEQ ID NO: 1974393 - DNA, 15 bp, Homo sapiens
agcactgtggtttgc

SEQ ID NO: 1974394 - DNA, 15 bp, Homo sapiens
gcactgtggtttgcc

SEQ ID NO: 1974395 - DNA, 15 bp, Homo sapiens
cactgtggtttgcca

SEQ ID NO: 1974396 - DNA, 15 bp, Homo sapiens
actgtggtttgccag

SEQ ID NO: 1974397 - DNA, 15 bp, Homo sapiens
ctgtggtttgccagc

SEQ ID NO: 1974398 - DNA, 15 bp, Homo sapiens
tgtggtttgccagct

SEQ ID NO: 1974399 - DNA, 15 bp, Homo sapiens
gtggtttgccagctg

SEQ ID NO: 1974400 - DNA, 15 bp, Homo sapiens
tggtttgccagctgt

SEQ ID NO: 1974401 - DNA, 15 bp, Homo sapiens
ggtttgccagctgtg

SEQ ID NO: 1974402 - DNA, 15 bp, Homo sapiens
gtttgccagctgtgt

SEQ ID NO: 1974403 - DNA, 15 bp, Homo sapiens
tttgccagctgtgtg

SEQ ID NO: 1974404 - DNA, 15 bp, Homo sapiens
ttgccagctgtgtga

SEQ ID NO: 1974405 - DNA, 15 bp, Homo sapiens
tgccagctgtgtgac

SEQ ID NO: 1974406 - DNA, 15 bp, Homo sapiens
gccagctgtgtgacc

SEQ ID NO: 1974407 - DNA, 15 bp, Homo sapiens
ccagctgtgtgaccc

SEQ ID NO: 1974408 - DNA, 15 bp, Homo sapiens
cagctgtgtgaccct

SEQ ID NO: 1974409 - DNA, 15 bp, Homo sapiens
agctgtgtgaccctg

SEQ ID NO: 1974410 - DNA, 15 bp, Homo sapiens
gctgtgtgaccctga

SEQ ID NO: 1974411 - DNA, 15 bp, Homo sapiens
ctgtgtgaccctgag

SEQ ID NO: 1974412 - DNA, 15 bp, Homo sapiens
tgtgtgaccctgagc

SEQ ID NO: 1974413 - DNA, 15 bp, Homo sapiens
gtgtgaccctgagca

SEQ ID NO: 1974414 - DNA, 15 bp, Homo sapiens
tgtgaccctgagcac

SEQ ID NO: 1974415 - DNA, 15 bp, Homo sapiens
gtgaccctgagcaca

SEQ ID NO: 1974416 - DNA, 15 bp, Homo sapiens
tgaccctgagcacaa

SEQ ID NO: 1974417 - DNA, 15 bp, Homo sapiens
gaccctgagcacaac

SEQ ID NO: 1974418 - DNA, 15 bp, Homo sapiens
accctgagcacaaca

SEQ ID NO: 1974419 - DNA, 15 bp, Homo sapiens
ccctgagcacaacac

SEQ ID NO: 1974420 - DNA, 15 bp, Homo sapiens
cctgagcacaacact

SEQ ID NO: 1974421 - DNA, 15 bp, Homo sapiens
ctgagcacaacactg

SEQ ID NO: 1974422 - DNA, 15 bp, Homo sapiens
tgagcacaacactgc

SEQ ID NO: 1974423 - DNA, 15 bp, Homo sapiens
gagcacaacactgca

SEQ ID NO: 1974424 - DNA, 15 bp, Homo sapiens
agcacaacactgcac

SEQ ID NO: 1974425 - DNA, 15 bp, Homo sapiens
gcacaacactgcacc

SEQ ID NO: 1974426 - DNA, 15 bp, Homo sapiens
cacaacactgcacct

SEQ ID NO: 1974427 - DNA, 15 bp, Homo sapiens
acaacactgcacctc

SEQ ID NO: 1974428 - DNA, 15 bp, Homo sapiens
caacactgcacctct

SEQ ID NO: 1974429 - DNA, 15 bp, Homo sapiens
aacactgcacctctc

SEQ ID NO: 1974430 - DNA, 15 bp, Homo sapiens
acactgcacctctct

SEQ ID NO: 1974431 - DNA, 15 bp, Homo sapiens
cactgcacctctctg

SEQ ID NO: 1974432 - DNA, 15 bp, Homo sapiens
actgcacctctctga

SEQ ID NO: 1974433 - DNA, 15 bp, Homo sapiens
ctgcacctctctgag

SEQ ID NO: 1974434 - DNA, 15 bp, Homo sapiens
tgcacctctctgagt

SEQ ID NO: 1974435 - DNA, 15 bp, Homo sapiens
gcacctctctgagtt

SEQ ID NO: 1974436 - DNA, 15 bp, Homo sapiens
cacctctctgagttg

SEQ ID NO: 1974437 - DNA, 15 bp, Homo sapiens
acctctctgagttgg

SEQ ID NO: 1974438 - DNA, 15 bp, Homo sapiens
cctctctgagttggt

SEQ ID NO: 1974439 - DNA, 15 bp, Homo sapiens
ctctctgagttggtt

SEQ ID NO: 1974440 - DNA, 15 bp, Homo sapiens
tctctgagttggttt

SEQ ID NO: 1974441 - DNA, 15 bp, Homo sapiens
ctctgagttggtttc

SEQ ID NO: 1974442 - DNA, 15 bp, Homo sapiens
tctgagttggtttcc

SEQ ID NO: 1974443 - DNA, 15 bp, Homo sapiens
ctgagttggtttcct

SEQ ID NO: 1974444 - DNA, 15 bp, Homo sapiens
tgagttggtttcctt

SEQ ID NO: 1974445 - DNA, 15 bp, Homo sapiens
gagttggtttccttg

SEQ ID NO: 1974446 - DNA, 15 bp, Homo sapiens
agttggtttccttgt

SEQ ID NO: 1974447 - DNA, 15 bp, Homo sapiens
gttggtttccttgtc

SEQ ID NO: 1974448 - DNA, 15 bp, Homo sapiens
ttggtttccttgtct

SEQ ID NO: 1974449 - DNA, 15 bp, Homo sapiens
tggtttccttgtctg

SEQ ID NO: 1974450 - DNA, 15 bp, Homo sapiens
ggtttccttgtctgt

SEQ ID NO: 1974451 - DNA, 15 bp, Homo sapiens
gtttccttgtctgtc

SEQ ID NO: 1974452 - DNA, 15 bp, Homo sapiens
tttccttgtctgtcg

SEQ ID NO: 1974453 - DNA, 15 bp, Homo sapiens
ttccttgtctgtcga

SEQ ID NO: 1974454 - DNA, 15 bp, Homo sapiens
tccttgtctgtcgag

SEQ ID NO: 1974455 - DNA, 15 bp, Homo sapiens
ccttgtctgtcgagg

SEQ ID NO: 1974456 - DNA, 15 bp, Homo sapiens
cttgtctgtcgaggg

SEQ ID NO: 1974457 - DNA, 15 bp, Homo sapiens
ttgtctgtcgagggg

SEQ ID NO: 1974458 - DNA, 15 bp, Homo sapiens
tgtctgtcgagggga

SEQ ID NO: 1974459 - DNA, 15 bp, Homo sapiens
gtctgtcgaggggat

SEQ ID NO: 1974460 - DNA, 15 bp, Homo sapiens
tctgtcgaggggatg

SEQ ID NO: 1974461 - DNA, 15 bp, Homo sapiens
ctgtcgaggggatga

SEQ ID NO: 1974462 - DNA, 15 bp, Homo sapiens
tgtcgaggggatgat

SEQ ID NO: 1974463 - DNA, 15 bp, Homo sapiens
gtcgaggggatgatc

SEQ ID NO: 1974464 - DNA, 15 bp, Homo sapiens
tcgaggggatgatcc

SEQ ID NO: 1974465 - DNA, 15 bp, Homo sapiens
cgaggggatgatccc

SEQ ID NO: 1974466 - DNA, 15 bp, Homo sapiens
gaggggatgatccca

SEQ ID NO: 1974467 - DNA, 15 bp, Homo sapiens
aggggatgatcccag

SEQ ID NO: 1974468 - DNA, 15 bp, Homo sapiens
ggggatgatcccagt

SEQ ID NO: 1974469 - DNA, 15 bp, Homo sapiens
gggatgatcccagtg

SEQ ID NO: 1974470 - DNA, 15 bp, Homo sapiens
ggatgatcccagtgt

SEQ ID NO: 1974471 - DNA, 15 bp, Homo sapiens
gatgatcccagtgtg

SEQ ID NO: 1974472 - DNA, 15 bp, Homo sapiens
atgatcccagtgtgg

SEQ ID NO: 1974473 - DNA, 15 bp, Homo sapiens
tgatcccagtgtgga

SEQ ID NO: 1974474 - DNA, 15 bp, Homo sapiens
gatcccagtgtggaa

SEQ ID NO: 1974475 - DNA, 15 bp, Homo sapiens
atcccagtgtggaag

SEQ ID NO: 1974476 - DNA, 15 bp, Homo sapiens
tcccagtgtggaagg

SEQ ID NO: 1974477 - DNA, 15 bp, Homo sapiens
cccagtgtggaagga

SEQ ID NO: 1974478 - DNA, 15 bp, Homo sapiens
ccagtgtggaaggag

SEQ ID NO: 1974479 - DNA, 15 bp, Homo sapiens
cagtgtggaaggagt

SEQ ID NO: 1974480 - DNA, 15 bp, Homo sapiens
agtgtggaaggagtt

SEQ ID NO: 1974481 - DNA, 15 bp, Homo sapiens
gtgtggaaggagtta

SEQ ID NO: 1974482 - DNA, 15 bp, Homo sapiens
tgtggaaggagttaa

SEQ ID NO: 1974483 - DNA, 15 bp, Homo sapiens
gtggaaggagttaaa

SEQ ID NO: 1974484 - DNA, 15 bp, Homo sapiens
tggaaggagttaaag

SEQ ID NO: 1974485 - DNA, 15 bp, Homo sapiens
ggaaggagttaaagg

SEQ ID NO: 1974486 - DNA, 15 bp, Homo sapiens
gaaggagttaaaggg

SEQ ID NO: 1974487 - DNA, 15 bp, Homo sapiens
aaggagttaaagggc

SEQ ID NO: 1974488 - DNA, 15 bp, Homo sapiens
aggagttaaagggct

SEQ ID NO: 1974489 - DNA, 15 bp, Homo sapiens
ggagttaaagggctc

SEQ ID NO: 1974490 - DNA, 15 bp, Homo sapiens
gagttaaagggctct

SEQ ID NO: 1974491 - DNA, 15 bp, Homo sapiens
agttaaagggctctg

SEQ ID NO: 1974492 - DNA, 15 bp, Homo sapiens
gttaaagggctctgc

SEQ ID NO: 1974493 - DNA, 15 bp, Homo sapiens
ttaaagggctctgca

SEQ ID NO: 1974494 - DNA, 15 bp, Homo sapiens
taaagggctctgcag

SEQ ID NO: 1974495 - DNA, 15 bp, Homo sapiens
aaagggctctgcaga

SEQ ID NO: 1974496 - DNA, 15 bp, Homo sapiens
aagggctctgcagac

SEQ ID NO: 1974497 - DNA, 15 bp, Homo sapiens
agggctctgcagaca

SEQ ID NO: 1974498 - DNA, 15 bp, Homo sapiens
gggctctgcagacat

SEQ ID NO: 1974499 - DNA, 15 bp, Homo sapiens
gctctgcagacatta

SEQ ID NO: 1974500 - DNA, 15 bp, Homo sapiens
ctctgcagacattat

SEQ ID NO: 1974501 - DNA, 15 bp, Homo sapiens
tctgcagacattatg

SEQ ID NO: 1974502 - DNA, 15 bp, Homo sapiens
ctgcagacattatgt

SEQ ID NO: 1974503 - DNA, 15 bp, Homo sapiens
tgcagacattatgtc

SEQ ID NO: 1974504 - DNA, 15 bp, Homo sapiens
gcagacattatgtcc

SEQ ID NO: 1974505 - DNA, 15 bp, Homo sapiens
cagacattatgtccc

SEQ ID NO: 1974506 - DNA, 15 bp, Homo sapiens
agacattatgtcccg

SEQ ID NO: 1974507 - DNA, 15 bp, Homo sapiens
gacattatgtcccgt

SEQ ID NO: 1974508 - DNA, 15 bp, Homo sapiens
acattatgtcccgtc

SEQ ID NO: 1974509 - DNA, 15 bp, Homo sapiens
cattatgtcccgtca

SEQ ID NO: 1974510 - DNA, 15 bp, Homo sapiens
attatgtcccgtcaa

SEQ ID NO: 1974511 - DNA, 15 bp, Homo sapiens
ttatgtcccgtcaac

SEQ ID NO: 1974512 - DNA, 15 bp, Homo sapiens
tatgtcccgtcaaca

SEQ ID NO: 1974513 - DNA, 15 bp, Homo sapiens
atgtcccgtcaacag

SEQ ID NO: 1974514 - DNA, 15 bp, Homo sapiens
tgtcccgtcaacagt

SEQ ID NO: 1974515 - DNA, 15 bp, Homo sapiens
gtcccgtcaacagtc

SEQ ID NO: 1974516 - DNA, 15 bp, Homo sapiens
tcccgtcaacagtca

SEQ ID NO: 1974517 - DNA, 15 bp, Homo sapiens
cccgtcaacagtcat

SEQ ID NO: 1974518 - DNA, 15 bp, Homo sapiens
ccgtcaacagtcatc

SEQ ID NO: 1974519 - DNA, 15 bp, Homo sapiens
cgtcaacagtcatcc

SEQ ID NO: 1974520 - DNA, 15 bp, Homo sapiens
gtcaacagtcatcct

SEQ ID NO: 1974521 - DNA, 15 bp, Homo sapiens
tcaacagtcatcctc

SEQ ID NO: 1974522 - DNA, 15 bp, Homo sapiens
caacagtcatcctca

SEQ ID NO: 1974523 - DNA, 15 bp, Homo sapiens
aacagtcatcctcac

SEQ ID NO: 1974524 - DNA, 15 bp, Homo sapiens
acagtcatcctcaca

SEQ ID NO: 1974525 - DNA, 15 bp, Homo sapiens
cagtcatcctcacag

SEQ ID NO: 1974526 - DNA, 15 bp, Homo sapiens
agtcatcctcacagt

SEQ ID NO: 1974527 - DNA, 15 bp, Homo sapiens
gtcatcctcacagtg

SEQ ID NO: 1974528 - DNA, 15 bp, Homo sapiens
tcatcctcacagtgt

SEQ ID NO: 1974529 - DNA, 15 bp, Homo sapiens
catcctcacagtgtc

SEQ ID NO: 1974530 - DNA, 15 bp, Homo sapiens
atcctcacagtgtcc

SEQ ID NO: 1974531 - DNA, 15 bp, Homo sapiens
tcctcacagtgtccc

SEQ ID NO: 1974532 - DNA, 15 bp, Homo sapiens
cctcacagtgtcccc

SEQ ID NO: 1974533 - DNA, 15 bp, Homo sapiens
ctcacagtgtccccc

SEQ ID NO: 1974534 - DNA, 15 bp, Homo sapiens
tcacagtgtccccca

SEQ ID NO: 1974535 - DNA, 15 bp, Homo sapiens
cacagtgtcccccac

SEQ ID NO: 1974536 - DNA, 15 bp, Homo sapiens
acagtgtcccccacg

SEQ ID NO: 1974537 - DNA, 15 bp, Homo sapiens
cagtgtcccccacgg

SEQ ID NO: 1974538 - DNA, 15 bp, Homo sapiens
agtgtcccccacggc

SEQ ID NO: 1974539 - DNA, 15 bp, Homo sapiens
gtgtcccccacggcc

SEQ ID NO: 1974540 - DNA, 15 bp, Homo sapiens
tgtcccccacggcca

SEQ ID NO: 1974541 - DNA, 15 bp, Homo sapiens
gtcccccacggccac

SEQ ID NO: 1974542 - DNA, 15 bp, Homo sapiens
tcccccacggccact

SEQ ID NO: 1974543 - DNA, 15 bp, Homo sapiens
cccccacggccactc

SEQ ID NO: 1974544 - DNA, 15 bp, Homo sapiens
ccccacggccactcc

SEQ ID NO: 1974545 - DNA, 15 bp, Homo sapiens
cccacggccactcca

SEQ ID NO: 1974546 - DNA, 15 bp, Homo sapiens
ccacggccactccac

SEQ ID NO: 1974547 - DNA, 15 bp, Homo sapiens
cacggccactccaca

SEQ ID NO: 1974548 - DNA, 15 bp, Homo sapiens
acggccactccacac

SEQ ID NO: 1974549 - DNA, 15 bp, Homo sapiens
cggccactccacact

SEQ ID NO: 1974550 - DNA, 15 bp, Homo sapiens
ggccactccacactt

SEQ ID NO: 1974551 - DNA, 15 bp, Homo sapiens
gccactccacacttg

SEQ ID NO: 1974552 - DNA, 15 bp, Homo sapiens
ccactccacacttga

SEQ ID NO: 1974553 - DNA, 15 bp, Homo sapiens
cactccacacttgag

SEQ ID NO: 1974554 - DNA, 15 bp, Homo sapiens
actccacacttgagg

SEQ ID NO: 1974555 - DNA, 15 bp, Homo sapiens
ctccacacttgaggc

SEQ ID NO: 1974556 - DNA, 15 bp, Homo sapiens
tccacacttgaggct

SEQ ID NO: 1974557 - DNA, 15 bp, Homo sapiens
ccacacttgaggctg

SEQ ID NO: 1974558 - DNA, 15 bp, Homo sapiens
cacacttgaggctgc

SEQ ID NO: 1974559 - DNA, 15 bp, Homo sapiens
acacttgaggctgca

SEQ ID NO: 1974560 - DNA, 15 bp, Homo sapiens
cacttgaggctgcaa

SEQ ID NO: 1974561 - DNA, 15 bp, Homo sapiens
acttgaggctgcaaa

SEQ ID NO: 1974562 - DNA, 15 bp, Homo sapiens
cttgaggctgcaaaa

SEQ ID NO: 1974563 - DNA, 15 bp, Homo sapiens
ttgaggctgcaaaag

SEQ ID NO: 1974564 - DNA, 15 bp, Homo sapiens
tgaggctgcaaaagc

SEQ ID NO: 1974565 - DNA, 15 bp, Homo sapiens
gaggctgcaaaagct

SEQ ID NO: 1974566 - DNA, 15 bp, Homo sapiens
aggctgcaaaagctc

SEQ ID NO: 1974567 - DNA, 15 bp, Homo sapiens
ggctgcaaaagctcc

SEQ ID NO: 1974568 - DNA, 15 bp, Homo sapiens
gctgcaaaagctccc

SEQ ID NO: 1974569 - DNA, 15 bp, Homo sapiens
ctgcaaaagctccct

SEQ ID NO: 1974570 - DNA, 15 bp, Homo sapiens
tgcaaaagctccctc

SEQ ID NO: 1974571 - DNA, 15 bp, Homo sapiens
gcaaaagctccctcc

SEQ ID NO: 1974572 - DNA, 15 bp, Homo sapiens
caaaagctccctccg

SEQ ID NO: 1974573 - DNA, 15 bp, Homo sapiens
aaaagctccctccgt

SEQ ID NO: 1974574 - DNA, 15 bp, Homo sapiens
aaagctccctccgta

SEQ ID NO: 1974575 - DNA, 15 bp, Homo sapiens
aagctccctccgtaa

SEQ ID NO: 1974576 - DNA, 15 bp, Homo sapiens
agctccctccgtaaa

SEQ ID NO: 1974577 - DNA, 15 bp, Homo sapiens
gctccctccgtaaac

SEQ ID NO: 1974578 - DNA, 15 bp, Homo sapiens
ctccctccgtaaact

SEQ ID NO: 1974579 - DNA, 15 bp, Homo sapiens
tccctccgtaaactc

SEQ ID NO: 1974580 - DNA, 15 bp, Homo sapiens
ccctccgtaaactcc

SEQ ID NO: 1974581 - DNA, 15 bp, Homo sapiens
cctccgtaaactccg

SEQ ID NO: 1974582 - DNA, 15 bp, Homo sapiens
ctccgtaaactccgg

SEQ ID NO: 1974583 - DNA, 15 bp, Homo sapiens
tccgtaaactccggg

SEQ ID NO: 1974584 - DNA, 15 bp, Homo sapiens
ccgtaaactccgggg

SEQ ID NO: 1974585 - DNA, 15 bp, Homo sapiens
cgtaaactccgggga

SEQ ID NO: 1974586 - DNA, 15 bp, Homo sapiens
gtaaactccggggac

SEQ ID NO: 1974587 - DNA, 15 bp, Homo sapiens
taaactccggggacc

SEQ ID NO: 1974588 - DNA, 15 bp, Homo sapiens
aaactccggggaccc

SEQ ID NO: 1974589 - DNA, 15 bp, Homo sapiens
aactccggggaccca

SEQ ID NO: 1974590 - DNA, 15 bp, Homo sapiens
actccggggacccag

SEQ ID NO: 1974591 - DNA, 15 bp, Homo sapiens
ctccggggacccaga

SEQ ID NO: 1974592 - DNA, 15 bp, Homo sapiens
tccggggacccagaa

SEQ ID NO: 1974593 - DNA, 15 bp, Homo sapiens
ccggggacccagaag

SEQ ID NO: 1974594 - DNA, 15 bp, Homo sapiens
cggggacccagaagg

SEQ ID NO: 1974595 - DNA, 15 bp, Homo sapiens
ggggacccagaagga

SEQ ID NO: 1974596 - DNA, 15 bp, Homo sapiens
gggacccagaaggaa

SEQ ID NO: 1974597 - DNA, 15 bp, Homo sapiens
ggacccagaaggaac

SEQ ID NO: 1974598 - DNA, 15 bp, Homo sapiens
gacccagaaggaaca

SEQ ID NO: 1974599 - DNA, 15 bp, Homo sapiens
acccagaaggaacag

SEQ ID NO: 1974600 - DNA, 15 bp, Homo sapiens
cccagaaggaacaga

SEQ ID NO: 1974601 - DNA, 15 bp, Homo sapiens
ccagaaggaacagag

SEQ ID NO: 1974602 - DNA, 15 bp, Homo sapiens
cagaaggaacagaga

SEQ ID NO: 1974603 - DNA, 15 bp, Homo sapiens
agaaggaacagagag

SEQ ID NO: 1974604 - DNA, 15 bp, Homo sapiens
gaaggaacagagaga

SEQ ID NO: 1974605 - DNA, 15 bp, Homo sapiens
aaggaacagagagag

SEQ ID NO: 1974606 - DNA, 15 bp, Homo sapiens
aggaacagagagagg

SEQ ID NO: 1974607 - DNA, 15 bp, Homo sapiens
ggaacagagagaggg

SEQ ID NO: 1974608 - DNA, 15 bp, Homo sapiens
gaacagagagagggt

SEQ ID NO: 1974609 - DNA, 15 bp, Homo sapiens
aacagagagagggtc

SEQ ID NO: 1974610 - DNA, 15 bp, Homo sapiens
acagagagagggtcc

SEQ ID NO: 1974611 - DNA, 15 bp, Homo sapiens
cagagagagggtccc

SEQ ID NO: 1974612 - DNA, 15 bp, Homo sapiens
agagagagggtcccc

SEQ ID NO: 1974613 - DNA, 15 bp, Homo sapiens
gagagagggtcccca

SEQ ID NO: 1974614 - DNA, 15 bp, Homo sapiens
agagagggtccccag

SEQ ID NO: 1974615 - DNA, 15 bp, Homo sapiens
gagagggtccccaga

SEQ ID NO: 1974616 - DNA, 15 bp, Homo sapiens
agagggtccccagag

SEQ ID NO: 1974617 - DNA, 15 bp, Homo sapiens
gagggtccccagagc

SEQ ID NO: 1974618 - DNA, 15 bp, Homo sapiens
agggtccccagagct

SEQ ID NO: 1974619 - DNA, 15 bp, Homo sapiens
gggtccccagagctg

SEQ ID NO: 1974620 - DNA, 15 bp, Homo sapiens
ggtccccagagctgc

SEQ ID NO: 1974621 - DNA, 15 bp, Homo sapiens
gtccccagagctgca

SEQ ID NO: 1974622 - DNA, 15 bp, Homo sapiens
tccccagagctgcag

SEQ ID NO: 1974623 - DNA, 15 bp, Homo sapiens
ccccagagctgcagg

SEQ ID NO: 1974624 - DNA, 15 bp, Homo sapiens
cccagagctgcaggg

SEQ ID NO: 1974625 - DNA, 15 bp, Homo sapiens
ccagagctgcagggt

SEQ ID NO: 1974626 - DNA, 15 bp, Homo sapiens
cagagctgcagggtc

SEQ ID NO: 1974627 - DNA, 15 bp, Homo sapiens
agagctgcagggtct

SEQ ID NO: 1974628 - DNA, 15 bp, Homo sapiens
gagctgcagggtcta

SEQ ID NO: 1974629 - DNA, 15 bp, Homo sapiens
agctgcagggtctac

SEQ ID NO: 1974630 - DNA, 15 bp, Homo sapiens
gctgcagggtctacc

SEQ ID NO: 1974631 - DNA, 15 bp, Homo sapiens
ctgcagggtctacca

SEQ ID NO: 1974632 - DNA, 15 bp, Homo sapiens
tgcagggtctaccag

SEQ ID NO: 1974633 - DNA, 15 bp, Homo sapiens
gcagggtctaccagg

SEQ ID NO: 1974634 - DNA, 15 bp, Homo sapiens
cagggtctaccaggt

SEQ ID NO: 1974635 - DNA, 15 bp, Homo sapiens
agggtctaccaggtc

SEQ ID NO: 1974636 - DNA, 15 bp, Homo sapiens
gggtctaccaggtcg

SEQ ID NO: 1974637 - DNA, 15 bp, Homo sapiens
ggtctaccaggtcgg

SEQ ID NO: 1974638 - DNA, 15 bp, Homo sapiens
gtctaccaggtcggc

SEQ ID NO: 1974639 - DNA, 15 bp, Homo sapiens
tctaccaggtcggcc

SEQ ID NO: 1974640 - DNA, 15 bp, Homo sapiens
ctaccaggtcggccc

SEQ ID NO: 1974641 - DNA, 15 bp, Homo sapiens
taccaggtcggccca

SEQ ID NO: 1974642 - DNA, 15 bp, Homo sapiens
accaggtcggcccaa

SEQ ID NO: 1974643 - DNA, 15 bp, Homo sapiens
ccaggtcggcccaac

SEQ ID NO: 1974644 - DNA, 15 bp, Homo sapiens
caggtcggcccaact

SEQ ID NO: 1974645 - DNA, 15 bp, Homo sapiens
aggtcggcccaactg

SEQ ID NO: 1974646 - DNA, 15 bp, Homo sapiens
ggtcggcccaactga

SEQ ID NO: 1974647 - DNA, 15 bp, Homo sapiens
gtcggcccaactgac

SEQ ID NO: 1974648 - DNA, 15 bp, Homo sapiens
tcggcccaactgact

SEQ ID NO: 1974649 - DNA, 15 bp, Homo sapiens
cggcccaactgactt

SEQ ID NO: 1974650 - DNA, 15 bp, Homo sapiens
ggcccaactgactta

SEQ ID NO: 1974651 - DNA, 15 bp, Homo sapiens
gcccaactgacttat

SEQ ID NO: 1974652 - DNA, 15 bp, Homo sapiens
cccaactgacttatg

SEQ ID NO: 1974653 - DNA, 15 bp, Homo sapiens
ccaactgacttatgt

SEQ ID NO: 1974654 - DNA, 15 bp, Homo sapiens
caactgacttatgtt

SEQ ID NO: 1974655 - DNA, 15 bp, Homo sapiens
aactgacttatgttc

SEQ ID NO: 1974656 - DNA, 15 bp, Homo sapiens
actgacttatgttct

SEQ ID NO: 1974657 - DNA, 15 bp, Homo sapiens
ctgacttatgttctc

SEQ ID NO: 1974658 - DNA, 15 bp, Homo sapiens
tgacttatgttctct

SEQ ID NO: 1974659 - DNA, 15 bp, Homo sapiens
gacttatgttctctc

SEQ ID NO: 1974660 - DNA, 15 bp, Homo sapiens
acttatgttctctct

SEQ ID NO: 1974661 - DNA, 15 bp, Homo sapiens
cttatgttctctctg

SEQ ID NO: 1974662 - DNA, 15 bp, Homo sapiens
ttatgttctctctgc

SEQ ID NO: 1974663 - DNA, 15 bp, Homo sapiens
tatgttctctctgcc

SEQ ID NO: 1974664 - DNA, 15 bp, Homo sapiens
atgttctctctgccc

SEQ ID NO: 1974665 - DNA, 15 bp, Homo sapiens
tgttctctctgccct

SEQ ID NO: 1974666 - DNA, 15 bp, Homo sapiens
gttctctctgccctc

SEQ ID NO: 1974667 - DNA, 15 bp, Homo sapiens
ttctctctgccctct

SEQ ID NO: 1974668 - DNA, 15 bp, Homo sapiens
tctctctgccctctc

SEQ ID NO: 1974669 - DNA, 15 bp, Homo sapiens
ctctctgccctctct

SEQ ID NO: 1974670 - DNA, 15 bp, Homo sapiens
tctctgccctctctc

SEQ ID NO: 1974671 - DNA, 15 bp, Homo sapiens
ctctgccctctctct

SEQ ID NO: 1974672 - DNA, 15 bp, Homo sapiens
tctgccctctctctc

SEQ ID NO: 1974673 - DNA, 15 bp, Homo sapiens
ctgccctctctctcc

SEQ ID NO: 1974674 - DNA, 15 bp, Homo sapiens
tgccctctctctccc

SEQ ID NO: 1974675 - DNA, 15 bp, Homo sapiens
gccctctctctccct

SEQ ID NO: 1974676 - DNA, 15 bp, Homo sapiens
ccctctctctccctc

SEQ ID NO: 1974677 - DNA, 15 bp, Homo sapiens
cctctctctccctct

SEQ ID NO: 1974678 - DNA, 15 bp, Homo sapiens
tctctctccctctcc

SEQ ID NO: 1974679 - DNA, 15 bp, Homo sapiens
tctctccctctcccc

SEQ ID NO: 1974680 - DNA, 15 bp, Homo sapiens
ctctccctctccccc

SEQ ID NO: 1974681 - DNA, 15 bp, Homo sapiens
tctccctctcccccg

SEQ ID NO: 1974682 - DNA, 15 bp, Homo sapiens
ctccctctcccccgg

SEQ ID NO: 1974683 - DNA, 15 bp, Homo sapiens
tccctctcccccggc

SEQ ID NO: 1974684 - DNA, 15 bp, Homo sapiens
ccctctcccccggcc

SEQ ID NO: 1974685 - DNA, 15 bp, Homo sapiens
cctctcccccggccc

SEQ ID NO: 1974686 - DNA, 15 bp, Homo sapiens
ctctcccccggcccc

SEQ ID NO: 1974687 - DNA, 15 bp, Homo sapiens
tctcccccggcccct

SEQ ID NO: 1974688 - DNA, 15 bp, Homo sapiens
ctcccccggcccctc

SEQ ID NO: 1974689 - DNA, 15 bp, Homo sapiens
tcccccggcccctcc

SEQ ID NO: 1974690 - DNA, 15 bp, Homo sapiens
cccccggcccctcca

SEQ ID NO: 1974691 - DNA, 15 bp, Homo sapiens
ccccggcccctccat

SEQ ID NO: 1974692 - DNA, 15 bp, Homo sapiens
cccggcccctccatt

SEQ ID NO: 1974693 - DNA, 15 bp, Homo sapiens
ccggcccctccatta

SEQ ID NO: 1974694 - DNA, 15 bp, Homo sapiens
cggcccctccattat

SEQ ID NO: 1974695 - DNA, 15 bp, Homo sapiens
ggcccctccattatg

SEQ ID NO: 1974696 - DNA, 15 bp, Homo sapiens
gcccctccattatgg

SEQ ID NO: 1974697 - DNA, 15 bp, Homo sapiens
cccctccattatggc

SEQ ID NO: 1974698 - DNA, 15 bp, Homo sapiens
ccctccattatggct

SEQ ID NO: 1974699 - DNA, 15 bp, Homo sapiens
cctccattatggctg

SEQ ID NO: 1974700 - DNA, 15 bp, Homo sapiens
ctccattatggctgc

SEQ ID NO: 1974701 - DNA, 15 bp, Homo sapiens
tccattatggctgct

SEQ ID NO: 1974702 - DNA, 15 bp, Homo sapiens
ccattatggctgctg

SEQ ID NO: 1974703 - DNA, 15 bp, Homo sapiens
cattatggctgctgc

SEQ ID NO: 1974704 - DNA, 15 bp, Homo sapiens
attatggctgctgct

SEQ ID NO: 1974705 - DNA, 15 bp, Homo sapiens
ttatggctgctgctg

SEQ ID NO: 1974706 - DNA, 15 bp, Homo sapiens
tatggctgctgctgc

SEQ ID NO: 1974707 - DNA, 15 bp, Homo sapiens
atggctgctgctgct

SEQ ID NO: 1974708 - DNA, 15 bp, Homo sapiens
tggctgctgctgctg

SEQ ID NO: 1974709 - DNA, 15 bp, Homo sapiens
ggctgctgctgctgt

SEQ ID NO: 1974710 - DNA, 15 bp, Homo sapiens
gctgctgctgctgtg

SEQ ID NO: 1974711 - DNA, 15 bp, Homo sapiens
ctgctgctgctgtgg

SEQ ID NO: 1974712 - DNA, 15 bp, Homo sapiens
tgctgctgctgtggc

SEQ ID NO: 1974713 - DNA, 15 bp, Homo sapiens
gctgctgctgtggcc

SEQ ID NO: 1974714 - DNA, 15 bp, Homo sapiens
ctgctgctgtggccc

SEQ ID NO: 1974715 - DNA, 15 bp, Homo sapiens
tgctgctgtggccca

SEQ ID NO: 1974716 - DNA, 15 bp, Homo sapiens
gctgctgtggcccag

SEQ ID NO: 1974717 - DNA, 15 bp, Homo sapiens
ctgctgtggcccaga

SEQ ID NO: 1974718 - DNA, 15 bp, Homo sapiens
tgctgtggcccagag

SEQ ID NO: 1974719 - DNA, 15 bp, Homo sapiens
gctgtggcccagaga

SEQ ID NO: 1974720 - DNA, 15 bp, Homo sapiens
ctgtggcccagagag

SEQ ID NO: 1974721 - DNA, 15 bp, Homo sapiens
tgtggcccagagagt

SEQ ID NO: 1974722 - DNA, 15 bp, Homo sapiens
gtggcccagagagta

SEQ ID NO: 1974723 - DNA, 15 bp, Homo sapiens
tggcccagagagtaa

SEQ ID NO: 1974724 - DNA, 15 bp, Homo sapiens
ggcccagagagtaag

SEQ ID NO: 1974725 - DNA, 15 bp, Homo sapiens
gcccagagagtaaga

SEQ ID NO: 1974726 - DNA, 15 bp, Homo sapiens
cccagagagtaagaa

SEQ ID NO: 1974727 - DNA, 15 bp, Homo sapiens
ccagagagtaagaat

SEQ ID NO: 1974728 - DNA, 15 bp, Homo sapiens
cagagagtaagaatc

SEQ ID NO: 1974729 - DNA, 15 bp, Homo sapiens
agagagtaagaatcg

SEQ ID NO: 1974730 - DNA, 15 bp, Homo sapiens
gagagtaagaatcgg

SEQ ID NO: 1974731 - DNA, 15 bp, Homo sapiens
agagtaagaatcggg

SEQ ID NO: 1974732 - DNA, 15 bp, Homo sapiens
gagtaagaatcgggg

SEQ ID NO: 1974733 - DNA, 15 bp, Homo sapiens
agtaagaatcggggt

SEQ ID NO: 1974734 - DNA, 15 bp, Homo sapiens
gtaagaatcggggtc

SEQ ID NO: 1974735 - DNA, 15 bp, Homo sapiens
taagaatcggggtct

SEQ ID NO: 1974736 - DNA, 15 bp, Homo sapiens
aagaatcggggtctg

SEQ ID NO: 1974737 - DNA, 15 bp, Homo sapiens
agaatcggggtctgg

SEQ ID NO: 1974738 - DNA, 15 bp, Homo sapiens
gaatcggggtctggg

SEQ ID NO: 1974739 - DNA, 15 bp, Homo sapiens
aatcggggtctgggt

SEQ ID NO: 1974740 - DNA, 15 bp, Homo sapiens
atcggggtctgggtg

SEQ ID NO: 1974741 - DNA, 15 bp, Homo sapiens
tcggggtctgggtgt

SEQ ID NO: 1974742 - DNA, 15 bp, Homo sapiens
cggggtctgggtgtt

SEQ ID NO: 1974743 - DNA, 15 bp, Homo sapiens
ggggtctgggtgttt

SEQ ID NO: 1974744 - DNA, 15 bp, Homo sapiens
ggtctgggtgtttgg

SEQ ID NO: 1974745 - DNA, 15 bp, Homo sapiens
gtctgggtgtttggg

SEQ ID NO: 1974746 - DNA, 15 bp, Homo sapiens
tctgggtgtttgggg

SEQ ID NO: 1974747 - DNA, 15 bp, Homo sapiens
ctgggtgtttggggg

SEQ ID NO: 1974748 - DNA, 15 bp, Homo sapiens
tgggtgtttgggggc

SEQ ID NO: 1974749 - DNA, 15 bp, Homo sapiens
gggtgtttgggggcg

SEQ ID NO: 1974750 - DNA, 15 bp, Homo sapiens
ggtgtttgggggcgg

SEQ ID NO: 1974751 - DNA, 15 bp, Homo sapiens
gtgtttgggggcggc

SEQ ID NO: 1974752 - DNA, 15 bp, Homo sapiens
tgtttgggggcggca

SEQ ID NO: 1974753 - DNA, 15 bp, Homo sapiens
gtttgggggcggcag

SEQ ID NO: 1974754 - DNA, 15 bp, Homo sapiens
tttgggggcggcagg

SEQ ID NO: 1974755 - DNA, 15 bp, Homo sapiens
ttgggggcggcaggg

SEQ ID NO: 1974756 - DNA, 15 bp, Homo sapiens
tgggggcggcagggc

SEQ ID NO: 1974757 - DNA, 15 bp, Homo sapiens
gggggcggcagggcg

SEQ ID NO: 1974758 - DNA, 15 bp, Homo sapiens
ggggcggcagggcgc

SEQ ID NO: 1974759 - DNA, 15 bp, Homo sapiens
gcggcagggcgctgg

SEQ ID NO: 1974760 - DNA, 15 bp, Homo sapiens
cggcagggcgctggt

SEQ ID NO: 1974761 - DNA, 15 bp, Homo sapiens
ggcagggcgctggtg

SEQ ID NO: 1974762 - DNA, 15 bp, Homo sapiens
gcagggcgctggtgg

SEQ ID NO: 1974763 - DNA, 15 bp, Homo sapiens
cagggcgctggtggg

SEQ ID NO: 1974764 - DNA, 15 bp, Homo sapiens
agggcgctggtgggt

SEQ ID NO: 1974765 - DNA, 15 bp, Homo sapiens
gggcgctggtgggtg

SEQ ID NO: 1974766 - DNA, 15 bp, Homo sapiens
ggcgctggtgggtgc

SEQ ID NO: 1974767 - DNA, 15 bp, Homo sapiens
gcgctggtgggtgca

SEQ ID NO: 1974768 - DNA, 15 bp, Homo sapiens
cgctggtgggtgcag

SEQ ID NO: 1974769 - DNA, 15 bp, Homo sapiens
gctggtgggtgcaga

SEQ ID NO: 1974770 - DNA, 15 bp, Homo sapiens
ctggtgggtgcagag

SEQ ID NO: 1974771 - DNA, 15 bp, Homo sapiens
tggtgggtgcagagg

SEQ ID NO: 1974772 - DNA, 15 bp, Homo sapiens
ggtgggtgcagaggg

SEQ ID NO: 1974773 - DNA, 15 bp, Homo sapiens
gtgggtgcagagggg

SEQ ID NO: 1974774 - DNA, 15 bp, Homo sapiens
tgggtgcagagggga

SEQ ID NO: 1974775 - DNA, 15 bp, Homo sapiens
gggtgcagaggggat

SEQ ID NO: 1974776 - DNA, 15 bp, Homo sapiens
ggtgcagaggggatt

SEQ ID NO: 1974777 - DNA, 15 bp, Homo sapiens
gtgcagaggggattc

SEQ ID NO: 1974778 - DNA, 15 bp, Homo sapiens
tgcagaggggattcc

SEQ ID NO: 1974779 - DNA, 15 bp, Homo sapiens
gcagaggggattccc

SEQ ID NO: 1974780 - DNA, 15 bp, Homo sapiens
cagaggggattcccg

SEQ ID NO: 1974781 - DNA, 15 bp, Homo sapiens
agaggggattcccgt

SEQ ID NO: 1974782 - DNA, 15 bp, Homo sapiens
gaggggattcccgtc

SEQ ID NO: 1974783 - DNA, 15 bp, Homo sapiens
aggggattcccgtcc

SEQ ID NO: 1974784 - DNA, 15 bp, Homo sapiens
ggggattcccgtccc

SEQ ID NO: 1974785 - DNA, 15 bp, Homo sapiens
gggattcccgtcccc

SEQ ID NO: 1974786 - DNA, 15 bp, Homo sapiens
ggattcccgtcccct

SEQ ID NO: 1974787 - DNA, 15 bp, Homo sapiens
gattcccgtcccctc

SEQ ID NO: 1974788 - DNA, 15 bp, Homo sapiens
attcccgtcccctct

SEQ ID NO: 1974789 - DNA, 15 bp, Homo sapiens
ttcccgtcccctctc

SEQ ID NO: 1974790 - DNA, 15 bp, Homo sapiens
tcccgtcccctctct

SEQ ID NO: 1974791 - DNA, 15 bp, Homo sapiens
cccgtcccctctctg

SEQ ID NO: 1974792 - DNA, 15 bp, Homo sapiens
ccgtcccctctctga

SEQ ID NO: 1974793 - DNA, 15 bp, Homo sapiens
cgtcccctctctgag

SEQ ID NO: 1974794 - DNA, 15 bp, Homo sapiens
gtcccctctctgaga

SEQ ID NO: 1974795 - DNA, 15 bp, Homo sapiens
tcccctctctgagag

SEQ ID NO: 1974796 - DNA, 15 bp, Homo sapiens
cccctctctgagagg

SEQ ID NO: 1974797 - DNA, 15 bp, Homo sapiens
ccctctctgagaggc

SEQ ID NO: 1974798 - DNA, 15 bp, Homo sapiens
cctctctgagaggct

SEQ ID NO: 1974799 - DNA, 15 bp, Homo sapiens
ctctctgagaggctg

SEQ ID NO: 1974800 - DNA, 15 bp, Homo sapiens
tctctgagaggctgt

SEQ ID NO: 1974801 - DNA, 15 bp, Homo sapiens
ctctgagaggctgtg

SEQ ID NO: 1974802 - DNA, 15 bp, Homo sapiens
tctgagaggctgtgg

SEQ ID NO: 1974803 - DNA, 15 bp, Homo sapiens
ctgagaggctgtggt

SEQ ID NO: 1974804 - DNA, 15 bp, Homo sapiens
tgagaggctgtggtg

SEQ ID NO: 1974805 - DNA, 15 bp, Homo sapiens
gagaggctgtggtga

SEQ ID NO: 1974806 - DNA, 15 bp, Homo sapiens
agaggctgtggtgag

SEQ ID NO: 1974807 - DNA, 15 bp, Homo sapiens
gaggctgtggtgaga

SEQ ID NO: 1974808 - DNA, 15 bp, Homo sapiens
aggctgtggtgagag

SEQ ID NO: 1974809 - DNA, 15 bp, Homo sapiens
ggctgtggtgagaga

SEQ ID NO: 1974810 - DNA, 15 bp, Homo sapiens
gctgtggtgagagac

SEQ ID NO: 1974811 - DNA, 15 bp, Homo sapiens
ctgtggtgagagact

SEQ ID NO: 1974812 - DNA, 15 bp, Homo sapiens
tgtggtgagagactc

SEQ ID NO: 1974813 - DNA, 15 bp, Homo sapiens
gtggtgagagactca

SEQ ID NO: 1974814 - DNA, 15 bp, Homo sapiens
tggtgagagactcag

SEQ ID NO: 1974815 - DNA, 15 bp, Homo sapiens
ggtgagagactcaga

SEQ ID NO: 1974816 - DNA, 15 bp, Homo sapiens
gtgagagactcagag

SEQ ID NO: 1974817 - DNA, 15 bp, Homo sapiens
tgagagactcagagc

SEQ ID NO: 1974818 - DNA, 15 bp, Homo sapiens
gagagactcagagca

SEQ ID NO: 1974819 - DNA, 15 bp, Homo sapiens
agagactcagagcag

SEQ ID NO: 1974820 - DNA, 15 bp, Homo sapiens
gagactcagagcagg

SEQ ID NO: 1974821 - DNA, 15 bp, Homo sapiens
agactcagagcaggg

SEQ ID NO: 1974822 - DNA, 15 bp, Homo sapiens
gactcagagcagggt

SEQ ID NO: 1974823 - DNA, 15 bp, Homo sapiens
actcagagcagggtg

SEQ ID NO: 1974824 - DNA, 15 bp, Homo sapiens
ctcagagcagggtgc

SEQ ID NO: 1974825 - DNA, 15 bp, Homo sapiens
tcagagcagggtgcg

SEQ ID NO: 1974826 - DNA, 15 bp, Homo sapiens
cagagcagggtgcgg

SEQ ID NO: 1974827 - DNA, 15 bp, Homo sapiens
agagcagggtgcggc

SEQ ID NO: 1974828 - DNA, 15 bp, Homo sapiens
gagcagggtgcggct

SEQ ID NO: 1974829 - DNA, 15 bp, Homo sapiens
agcagggtgcggctc

SEQ ID NO: 1974830 - DNA, 15 bp, Homo sapiens
gcagggtgcggctcc

SEQ ID NO: 1974831 - DNA, 15 bp, Homo sapiens
cagggtgcggctccc

SEQ ID NO: 1974832 - DNA, 15 bp, Homo sapiens
agggtgcggctcccc

SEQ ID NO: 1974833 - DNA, 15 bp, Homo sapiens
gggtgcggctcccca

SEQ ID NO: 1974834 - DNA, 15 bp, Homo sapiens
ggtgcggctccccac

SEQ ID NO: 1974835 - DNA, 15 bp, Homo sapiens
gtgcggctccccacg

SEQ ID NO: 1974836 - DNA, 15 bp, Homo sapiens
tgcggctccccacgg

SEQ ID NO: 1974837 - DNA, 15 bp, Homo sapiens
gcggctccccacgga

SEQ ID NO: 1974838 - DNA, 15 bp, Homo sapiens
cggctccccacggac

SEQ ID NO: 1974839 - DNA, 15 bp, Homo sapiens
ggctccccacggaca

SEQ ID NO: 1974840 - DNA, 15 bp, Homo sapiens
gctccccacggacag

SEQ ID NO: 1974841 - DNA, 15 bp, Homo sapiens
ctccccacggacagg

SEQ ID NO: 1974842 - DNA, 15 bp, Homo sapiens
tccccacggacaggg

SEQ ID NO: 1974843 - DNA, 15 bp, Homo sapiens
ccccacggacagggg

SEQ ID NO: 1974844 - DNA, 15 bp, Homo sapiens
cccacggacaggggt

SEQ ID NO: 1974845 - DNA, 15 bp, Homo sapiens
ccacggacaggggtg

SEQ ID NO: 1974846 - DNA, 15 bp, Homo sapiens
cacggacaggggtga

SEQ ID NO: 1974847 - DNA, 15 bp, Homo sapiens
acggacaggggtgag

SEQ ID NO: 1974848 - DNA, 15 bp, Homo sapiens
cggacaggggtgagt

SEQ ID NO: 1974849 - DNA, 15 bp, Homo sapiens
ggacaggggtgagtc

SEQ ID NO: 1974850 - DNA, 15 bp, Homo sapiens
gacaggggtgagtct

SEQ ID NO: 1974851 - DNA, 15 bp, Homo sapiens
acaggggtgagtctc

SEQ ID NO: 1974852 - DNA, 15 bp, Homo sapiens
caggggtgagtctct

SEQ ID NO: 1974853 - DNA, 15 bp, Homo sapiens
aggggtgagtctctg

SEQ ID NO: 1974854 - DNA, 15 bp, Homo sapiens
ggggtgagtctctgt

SEQ ID NO: 1974855 - DNA, 15 bp, Homo sapiens
gggtgagtctctgtg

SEQ ID NO: 1974856 - DNA, 15 bp, Homo sapiens
ggtgagtctctgtgc

SEQ ID NO: 1974857 - DNA, 15 bp, Homo sapiens
gtgagtctctgtgcc

SEQ ID NO: 1974858 - DNA, 15 bp, Homo sapiens
tgagtctctgtgcct

SEQ ID NO: 1974859 - DNA, 15 bp, Homo sapiens
gagtctctgtgcctt

SEQ ID NO: 1974860 - DNA, 15 bp, Homo sapiens
agtctctgtgccttg

SEQ ID NO: 1974861 - DNA, 15 bp, Homo sapiens
gtctctgtgccttgg

SEQ ID NO: 1974862 - DNA, 15 bp, Homo sapiens
tctctgtgccttggg

SEQ ID NO: 1974863 - DNA, 15 bp, Homo sapiens
ctctgtgccttgggc

SEQ ID NO: 1974864 - DNA, 15 bp, Homo sapiens
tctgtgccttgggct

SEQ ID NO: 1974865 - DNA, 15 bp, Homo sapiens
ctgtgccttgggctt

SEQ ID NO: 1974866 - DNA, 15 bp, Homo sapiens
tgtgccttgggcttc

SEQ ID NO: 1974867 - DNA, 15 bp, Homo sapiens
gtgccttgggcttct

SEQ ID NO: 1974868 - DNA, 15 bp, Homo sapiens
tgccttgggcttctc

SEQ ID NO: 1974869 - DNA, 15 bp, Homo sapiens
gccttgggcttctcc

SEQ ID NO: 1974870 - DNA, 15 bp, Homo sapiens
ccttgggcttctcct

SEQ ID NO: 1974871 - DNA, 15 bp, Homo sapiens
cttgggcttctcctg

SEQ ID NO: 1974872 - DNA, 15 bp, Homo sapiens
ttgggcttctcctgc

SEQ ID NO: 1974873 - DNA, 15 bp, Homo sapiens
gcttctcctgccacc

SEQ ID NO: 1974874 - DNA, 15 bp, Homo sapiens
cttctcctgccaccc

SEQ ID NO: 1974875 - DNA, 15 bp, Homo sapiens
ttctcctgccaccca

SEQ ID NO: 1974876 - DNA, 15 bp, Homo sapiens
tctcctgccacccac

SEQ ID NO: 1974877 - DNA, 15 bp, Homo sapiens
ctcctgccacccacc

SEQ ID NO: 1974878 - DNA, 15 bp, Homo sapiens
tcctgccacccacct

SEQ ID NO: 1974879 - DNA, 15 bp, Homo sapiens
cctgccacccaccta

SEQ ID NO: 1974880 - DNA, 15 bp, Homo sapiens
ctgccacccacctat

SEQ ID NO: 1974881 - DNA, 15 bp, Homo sapiens
tgccacccacctatc

SEQ ID NO: 1974882 - DNA, 15 bp, Homo sapiens
gccacccacctatct

SEQ ID NO: 1974883 - DNA, 15 bp, Homo sapiens
ccacccacctatctg

SEQ ID NO: 1974884 - DNA, 15 bp, Homo sapiens
cacccacctatctgt

SEQ ID NO: 1974885 - DNA, 15 bp, Homo sapiens
acccacctatctgtc

SEQ ID NO: 1974886 - DNA, 15 bp, Homo sapiens
cccacctatctgtca

SEQ ID NO: 1974887 - DNA, 15 bp, Homo sapiens
ccacctatctgtcag

SEQ ID NO: 1974888 - DNA, 15 bp, Homo sapiens
cacctatctgtcaga

SEQ ID NO: 1974889 - DNA, 15 bp, Homo sapiens
acctatctgtcagag

SEQ ID NO: 1974890 - DNA, 15 bp, Homo sapiens
cctatctgtcagagc

SEQ ID NO: 1974891 - DNA, 15 bp, Homo sapiens
ctatctgtcagagct

SEQ ID NO: 1974892 - DNA, 15 bp, Homo sapiens
tatctgtcagagctt

SEQ ID NO: 1974893 - DNA, 15 bp, Homo sapiens
atctgtcagagctta

SEQ ID NO: 1974894 - DNA, 15 bp, Homo sapiens
tctgtcagagcttag

SEQ ID NO: 1974895 - DNA, 15 bp, Homo sapiens
ctgtcagagcttagg

SEQ ID NO: 1974896 - DNA, 15 bp, Homo sapiens
tgtcagagcttagga

SEQ ID NO: 1974897 - DNA, 15 bp, Homo sapiens
gtcagagcttaggag

SEQ ID NO: 1974898 - DNA, 15 bp, Homo sapiens
tcagagcttaggagg

SEQ ID NO: 1974899 - DNA, 15 bp, Homo sapiens
cagagcttaggaggg

SEQ ID NO: 1974900 - DNA, 15 bp, Homo sapiens
agagcttaggaggga

SEQ ID NO: 1974901 - DNA, 15 bp, Homo sapiens
gagcttaggagggat

SEQ ID NO: 1974902 - DNA, 15 bp, Homo sapiens
agcttaggagggata

SEQ ID NO: 1974903 - DNA, 15 bp, Homo sapiens
gcttaggagggataa

SEQ ID NO: 1974904 - DNA, 15 bp, Homo sapiens
cttaggagggataag

SEQ ID NO: 1974905 - DNA, 15 bp, Homo sapiens
ttaggagggataaga

SEQ ID NO: 1974906 - DNA, 15 bp, Homo sapiens
taggagggataagaa

SEQ ID NO: 1974907 - DNA, 15 bp, Homo sapiens
aggagggataagaaa

SEQ ID NO: 1974908 - DNA, 15 bp, Homo sapiens
ggagggataagaaaa

SEQ ID NO: 1974909 - DNA, 15 bp, Homo sapiens
gagggataagaaaaa

SEQ ID NO: 1974910 - DNA, 15 bp, Homo sapiens
agggataagaaaaag

SEQ ID NO: 1974911 - DNA, 15 bp, Homo sapiens
gggataagaaaaagt

SEQ ID NO: 1974912 - DNA, 15 bp, Homo sapiens
ggataagaaaaagta

SEQ ID NO: 1974913 - DNA, 15 bp, Homo sapiens
gataagaaaaagtaa

SEQ ID NO: 1974914 - DNA, 15 bp, Homo sapiens
ataagaaaaagtaat

SEQ ID NO: 1974915 - DNA, 15 bp, Homo sapiens
taagaaaaagtaatg

SEQ ID NO: 1974916 - DNA, 15 bp, Homo sapiens
aagaaaaagtaatgc

SEQ ID NO: 1974917 - DNA, 15 bp, Homo sapiens
agaaaaagtaatgca

SEQ ID NO: 1974918 - DNA, 15 bp, Homo sapiens
gaaaaagtaatgcac

SEQ ID NO: 1974919 - DNA, 15 bp, Homo sapiens
aaaaagtaatgcaca

SEQ ID NO: 1974920 - DNA, 15 bp, Homo sapiens
aaaagtaatgcacac

SEQ ID NO: 1974921 - DNA, 15 bp, Homo sapiens
aaagtaatgcacaca

SEQ ID NO: 1974922 - DNA, 15 bp, Homo sapiens
aagtaatgcacacag

SEQ ID NO: 1974923 - DNA, 15 bp, Homo sapiens
agtaatgcacacagg

SEQ ID NO: 1974924 - DNA, 15 bp, Homo sapiens
gtaatgcacacagga

SEQ ID NO: 1974925 - DNA, 15 bp, Homo sapiens
taatgcacacaggag

SEQ ID NO: 1974926 - DNA, 15 bp, Homo sapiens
aatgcacacaggagg

SEQ ID NO: 1974927 - DNA, 15 bp, Homo sapiens
atgcacacaggaggt

SEQ ID NO: 1974928 - DNA, 15 bp, Homo sapiens
tgcacacaggaggtc

SEQ ID NO: 1974929 - DNA, 15 bp, Homo sapiens
gcacacaggaggtcc

SEQ ID NO: 1974930 - DNA, 15 bp, Homo sapiens
cacacaggaggtcct

SEQ ID NO: 1974931 - DNA, 15 bp, Homo sapiens
acacaggaggtcctg

SEQ ID NO: 1974932 - DNA, 15 bp, Homo sapiens
cacaggaggtcctgc

SEQ ID NO: 1974933 - DNA, 15 bp, Homo sapiens
acaggaggtcctgcc

SEQ ID NO: 1974934 - DNA, 15 bp, Homo sapiens
caggaggtcctgcca

SEQ ID NO: 1974935 - DNA, 15 bp, Homo sapiens
aggaggtcctgccag

SEQ ID NO: 1974936 - DNA, 15 bp, Homo sapiens
ggaggtcctgccaga

SEQ ID NO: 1974937 - DNA, 15 bp, Homo sapiens
gaggtcctgccagag

SEQ ID NO: 1974938 - DNA, 15 bp, Homo sapiens
aggtcctgccagagc

SEQ ID NO: 1974939 - DNA, 15 bp, Homo sapiens
ggtcctgccagagcc

SEQ ID NO: 1974940 - DNA, 15 bp, Homo sapiens
gtcctgccagagcct

SEQ ID NO: 1974941 - DNA, 15 bp, Homo sapiens
tcctgccagagcctc

SEQ ID NO: 1974942 - DNA, 15 bp, Homo sapiens
cctgccagagcctcc

SEQ ID NO: 1974943 - DNA, 15 bp, Homo sapiens
ctgccagagcctccg

SEQ ID NO: 1974944 - DNA, 15 bp, Homo sapiens
tgccagagcctccgg

SEQ ID NO: 1974945 - DNA, 15 bp, Homo sapiens
gccagagcctccgga

SEQ ID NO: 1974946 - DNA, 15 bp, Homo sapiens
ccagagcctccggag

SEQ ID NO: 1974947 - DNA, 15 bp, Homo sapiens
cagagcctccggagc

SEQ ID NO: 1974948 - DNA, 15 bp, Homo sapiens
agagcctccggagca

SEQ ID NO: 1974949 - DNA, 15 bp, Homo sapiens
gagcctccggagcag

SEQ ID NO: 1974950 - DNA, 15 bp, Homo sapiens
agcctccggagcagc

SEQ ID NO: 1974951 - DNA, 15 bp, Homo sapiens
gcctccggagcagca

SEQ ID NO: 1974952 - DNA, 15 bp, Homo sapiens
cctccggagcagcat

SEQ ID NO: 1974953 - DNA, 15 bp, Homo sapiens
ctccggagcagcatg

SEQ ID NO: 1974954 - DNA, 15 bp, Homo sapiens
tccggagcagcatgg

SEQ ID NO: 1974955 - DNA, 15 bp, Homo sapiens
ccggagcagcatggg

SEQ ID NO: 1974956 - DNA, 15 bp, Homo sapiens
cggagcagcatgggt

SEQ ID NO: 1974957 - DNA, 15 bp, Homo sapiens
ggagcagcatgggtg

SEQ ID NO: 1974958 - DNA, 15 bp, Homo sapiens
gagcagcatgggtgc

SEQ ID NO: 1974959 - DNA, 15 bp, Homo sapiens
agcagcatgggtgcc

SEQ ID NO: 1974960 - DNA, 15 bp, Homo sapiens
gcagcatgggtgccc

SEQ ID NO: 1974961 - DNA, 15 bp, Homo sapiens
cagcatgggtgcccc

SEQ ID NO: 1974962 - DNA, 15 bp, Homo sapiens
agcatgggtgcccca

SEQ ID NO: 1974963 - DNA, 15 bp, Homo sapiens
gcatgggtgccccac

SEQ ID NO: 1974964 - DNA, 15 bp, Homo sapiens
catgggtgccccaca

SEQ ID NO: 1974965 - DNA, 15 bp, Homo sapiens
atgggtgccccacaa

SEQ ID NO: 1974966 - DNA, 15 bp, Homo sapiens
tgggtgccccacaac

SEQ ID NO: 1974967 - DNA, 15 bp, Homo sapiens
gggtgccccacaaca

SEQ ID NO: 1974968 - DNA, 15 bp, Homo sapiens
ggtgccccacaacac

SEQ ID NO: 1974969 - DNA, 15 bp, Homo sapiens
gtgccccacaacaca

SEQ ID NO: 1974970 - DNA, 15 bp, Homo sapiens
tgccccacaacacag

SEQ ID NO: 1974971 - DNA, 15 bp, Homo sapiens
gccccacaacacagg

SEQ ID NO: 1974972 - DNA, 15 bp, Homo sapiens
ccccacaacacaggg

SEQ ID NO: 1974973 - DNA, 15 bp, Homo sapiens
cccacaacacaggga

SEQ ID NO: 1974974 - DNA, 15 bp, Homo sapiens
ccacaacacagggag

SEQ ID NO: 1974975 - DNA, 15 bp, Homo sapiens
cacaacacagggagt

SEQ ID NO: 1974976 - DNA, 15 bp, Homo sapiens
acaacacagggagtg

SEQ ID NO: 1974977 - DNA, 15 bp, Homo sapiens
caacacagggagtgc

SEQ ID NO: 1974978 - DNA, 15 bp, Homo sapiens
aacacagggagtgca

SEQ ID NO: 1974979 - DNA, 15 bp, Homo sapiens
acacagggagtgcaa

SEQ ID NO: 1974980 - DNA, 15 bp, Homo sapiens
cacagggagtgcaag

SEQ ID NO: 1974981 - DNA, 15 bp, Homo sapiens
acagggagtgcaagt

SEQ ID NO: 1974982 - DNA, 15 bp, Homo sapiens
cagggagtgcaagtg

SEQ ID NO: 1974983 - DNA, 15 bp, Homo sapiens
agggagtgcaagtgc

SEQ ID NO: 1974984 - DNA, 15 bp, Homo sapiens
gggagtgcaagtgcg

SEQ ID NO: 1974985 - DNA, 15 bp, Homo sapiens
ggagtgcaagtgcgg

SEQ ID NO: 1974986 - DNA, 15 bp, Homo sapiens
gagtgcaagtgcgga

SEQ ID NO: 1974987 - DNA, 15 bp, Homo sapiens
agtgcaagtgcggaa

SEQ ID NO: 1974988 - DNA, 15 bp, Homo sapiens
gtgcaagtgcggaaa

SEQ ID NO: 1974989 - DNA, 15 bp, Homo sapiens
tgcaagtgcggaaaa

SEQ ID NO: 1974990 - DNA, 15 bp, Homo sapiens
gcaagtgcggaaaat

SEQ ID NO: 1974991 - DNA, 15 bp, Homo sapiens
caagtgcggaaaata

SEQ ID NO: 1974992 - DNA, 15 bp, Homo sapiens
aagtgcggaaaatag

SEQ ID NO: 1974993 - DNA, 15 bp, Homo sapiens
agtgcggaaaatagg

SEQ ID NO: 1974994 - DNA, 15 bp, Homo sapiens
gtgcggaaaataggg

SEQ ID NO: 1974995 - DNA, 15 bp, Homo sapiens
tgcggaaaataggga

SEQ ID NO: 1974996 - DNA, 15 bp, Homo sapiens
gcggaaaatagggag

SEQ ID NO: 1974997 - DNA, 15 bp, Homo sapiens
cggaaaatagggagg

SEQ ID NO: 1974998 - DNA, 15 bp, Homo sapiens
ggaaaatagggagga

SEQ ID NO: 1974999 - DNA, 15 bp, Homo sapiens
gaaaatagggaggaa

SEQ ID NO: 1975000 - DNA, 15 bp, Homo sapiens
aaaatagggaggaag

SEQ ID NO: 1975001 - DNA, 15 bp, Homo sapiens
aaatagggaggaagt

SEQ ID NO: 1975002 - DNA, 15 bp, Homo sapiens
aatagggaggaagta

SEQ ID NO: 1975003 - DNA, 15 bp, Homo sapiens
atagggaggaagtaa

SEQ ID NO: 1975004 - DNA, 15 bp, Homo sapiens
tagggaggaagtaaa

SEQ ID NO: 1975005 - DNA, 15 bp, Homo sapiens
agggaggaagtaaag

SEQ ID NO: 1975006 - DNA, 15 bp, Homo sapiens
gggaggaagtaaagg

SEQ ID NO: 1975007 - DNA, 15 bp, Homo sapiens
ggaggaagtaaaggc

SEQ ID NO: 1975008 - DNA, 15 bp, Homo sapiens
gaggaagtaaaggcc

SEQ ID NO: 1975009 - DNA, 15 bp, Homo sapiens
aggaagtaaaggccc

SEQ ID NO: 1975010 - DNA, 15 bp, Homo sapiens
ggaagtaaaggccca

SEQ ID NO: 1975011 - DNA, 15 bp, Homo sapiens
gaagtaaaggcccat

SEQ ID NO: 1975012 - DNA, 15 bp, Homo sapiens
aagtaaaggcccatg

SEQ ID NO: 1975013 - DNA, 15 bp, Homo sapiens
agtaaaggcccatgg

SEQ ID NO: 1975014 - DNA, 15 bp, Homo sapiens
gtaaaggcccatggg

SEQ ID NO: 1975015 - DNA, 15 bp, Homo sapiens
taaaggcccatgggt

SEQ ID NO: 1975016 - DNA, 15 bp, Homo sapiens
aaaggcccatgggtg

SEQ ID NO: 1975017 - DNA, 15 bp, Homo sapiens
aaggcccatgggtgg

SEQ ID NO: 1975018 - DNA, 15 bp, Homo sapiens
aggcccatgggtggg

SEQ ID NO: 1975019 - DNA, 15 bp, Homo sapiens
ggcccatgggtgggg

SEQ ID NO: 1975020 - DNA, 15 bp, Homo sapiens
gcccatgggtggggt

SEQ ID NO: 1975021 - DNA, 15 bp, Homo sapiens
cccatgggtggggtc

SEQ ID NO: 1975022 - DNA, 15 bp, Homo sapiens
ccatgggtggggtcc

SEQ ID NO: 1975023 - DNA, 15 bp, Homo sapiens
catgggtggggtcca

SEQ ID NO: 1975024 - DNA, 15 bp, Homo sapiens
atgggtggggtccag

SEQ ID NO: 1975025 - DNA, 15 bp, Homo sapiens
tgggtggggtccagg

SEQ ID NO: 1975026 - DNA, 15 bp, Homo sapiens
gggtggggtccaggt

SEQ ID NO: 1975027 - DNA, 15 bp, Homo sapiens
ggtggggtccaggtc

SEQ ID NO: 1975028 - DNA, 15 bp, Homo sapiens
gtggggtccaggtct

SEQ ID NO: 1975029 - DNA, 15 bp, Homo sapiens
tggggtccaggtctt

SEQ ID NO: 1975030 - DNA, 15 bp, Homo sapiens
ggggtccaggtcttt

SEQ ID NO: 1975031 - DNA, 15 bp, Homo sapiens
gggtccaggtctttg

SEQ ID NO: 1975032 - DNA, 15 bp, Homo sapiens
ggtccaggtctttga

SEQ ID NO: 1975033 - DNA, 15 bp, Homo sapiens
gtccaggtctttgag

SEQ ID NO: 1975034 - DNA, 15 bp, Homo sapiens
tccaggtctttgagg

SEQ ID NO: 1975035 - DNA, 15 bp, Homo sapiens
ccaggtctttgaggg

SEQ ID NO: 1975036 - DNA, 15 bp, Homo sapiens
caggtctttgaggga

SEQ ID NO: 1975037 - DNA, 15 bp, Homo sapiens
aggtctttgagggaa

SEQ ID NO: 1975038 - DNA, 15 bp, Homo sapiens
ggtctttgagggaag

SEQ ID NO: 1975039 - DNA, 15 bp, Homo sapiens
gtctttgagggaagg

SEQ ID NO: 1975040 - DNA, 15 bp, Homo sapiens
tctttgagggaaggt

SEQ ID NO: 1975041 - DNA, 15 bp, Homo sapiens
ctttgagggaaggtg

SEQ ID NO: 1975042 - DNA, 15 bp, Homo sapiens
tttgagggaaggtgg

SEQ ID NO: 1975043 - DNA, 15 bp, Homo sapiens
ttgagggaaggtggc

SEQ ID NO: 1975044 - DNA, 15 bp, Homo sapiens
tgagggaaggtggcc

SEQ ID NO: 1975045 - DNA, 15 bp, Homo sapiens
gagggaaggtggcca

SEQ ID NO: 1975046 - DNA, 15 bp, Homo sapiens
agggaaggtggccat

SEQ ID NO: 1975047 - DNA, 15 bp, Homo sapiens
gggaaggtggccata

SEQ ID NO: 1975048 - DNA, 15 bp, Homo sapiens
ggaaggtggccatac

SEQ ID NO: 1975049 - DNA, 15 bp, Homo sapiens
gaaggtggccatacc

SEQ ID NO: 1975050 - DNA, 15 bp, Homo sapiens
aaggtggccatacct

SEQ ID NO: 1975051 - DNA, 15 bp, Homo sapiens
aggtggccatacctc

SEQ ID NO: 1975052 - DNA, 15 bp, Homo sapiens
ggtggccatacctct

SEQ ID NO: 1975053 - DNA, 15 bp, Homo sapiens
gtggccatacctctc

SEQ ID NO: 1975054 - DNA, 15 bp, Homo sapiens
tggccatacctctca

SEQ ID NO: 1975055 - DNA, 15 bp, Homo sapiens
ggccatacctctcat

SEQ ID NO: 1975056 - DNA, 15 bp, Homo sapiens
gccatacctctcatg

SEQ ID NO: 1975057 - DNA, 15 bp, Homo sapiens
ccatacctctcatgt

SEQ ID NO: 1975058 - DNA, 15 bp, Homo sapiens
catacctctcatgtg

SEQ ID NO: 1975059 - DNA, 15 bp, Homo sapiens
atacctctcatgtgc

SEQ ID NO: 1975060 - DNA, 15 bp, Homo sapiens
tacctctcatgtgcc

SEQ ID NO: 1975061 - DNA, 15 bp, Homo sapiens
acctctcatgtgcca

SEQ ID NO: 1975062 - DNA, 15 bp, Homo sapiens
cctctcatgtgccac

SEQ ID NO: 1975063 - DNA, 15 bp, Homo sapiens
ctctcatgtgccacc

SEQ ID NO: 1975064 - DNA, 15 bp, Homo sapiens
tctcatgtgccacct

SEQ ID NO: 1975065 - DNA, 15 bp, Homo sapiens
ctcatgtgccaccta

SEQ ID NO: 1975066 - DNA, 15 bp, Homo sapiens
tcatgtgccacctac

SEQ ID NO: 1975067 - DNA, 15 bp, Homo sapiens
catgtgccacctacc

SEQ ID NO: 1975068 - DNA, 15 bp, Homo sapiens
atgtgccacctaccc

SEQ ID NO: 1975069 - DNA, 15 bp, Homo sapiens
tgtgccacctaccct

SEQ ID NO: 1975070 - DNA, 15 bp, Homo sapiens
gtgccacctaccctt

SEQ ID NO: 1975071 - DNA, 15 bp, Homo sapiens
tgccacctacccttt

SEQ ID NO: 1975072 - DNA, 15 bp, Homo sapiens
gccacctaccctttc

SEQ ID NO: 1975073 - DNA, 15 bp, Homo sapiens
ccacctaccctttct

SEQ ID NO: 1975074 - DNA, 15 bp, Homo sapiens
cacctaccctttctc

SEQ ID NO: 1975075 - DNA, 15 bp, Homo sapiens
acctaccctttctcc

SEQ ID NO: 1975076 - DNA, 15 bp, Homo sapiens
cctaccctttctccc

SEQ ID NO: 1975077 - DNA, 15 bp, Homo sapiens
ctaccctttctccca

SEQ ID NO: 1975078 - DNA, 15 bp, Homo sapiens
taccctttctcccac

SEQ ID NO: 1975079 - DNA, 15 bp, Homo sapiens
accctttctcccacc

SEQ ID NO: 1975080 - DNA, 15 bp, Homo sapiens
ccctttctcccaccc

SEQ ID NO: 1975081 - DNA, 15 bp, Homo sapiens
cctttctcccacccc

SEQ ID NO: 1975082 - DNA, 15 bp, Homo sapiens
ctttctcccaccccc

SEQ ID NO: 1975083 - DNA, 15 bp, Homo sapiens
tttctcccaccccca

SEQ ID NO: 1975084 - DNA, 15 bp, Homo sapiens
ttctcccacccccac

SEQ ID NO: 1975085 - DNA, 15 bp, Homo sapiens
tctcccacccccacc

SEQ ID NO: 1975086 - DNA, 15 bp, Homo sapiens
tcccacccccacccc

SEQ ID NO: 1975087 - DNA, 15 bp, Homo sapiens
cccacccccacccct

SEQ ID NO: 1975088 - DNA, 15 bp, Homo sapiens
ccacccccacccctg

SEQ ID NO: 1975089 - DNA, 15 bp, Homo sapiens
cacccccacccctgg

SEQ ID NO: 1975090 - DNA, 15 bp, Homo sapiens
acccccacccctgga

SEQ ID NO: 1975091 - DNA, 15 bp, Homo sapiens
cccccacccctggag

SEQ ID NO: 1975092 - DNA, 15 bp, Homo sapiens
ccccacccctggagc

SEQ ID NO: 1975093 - DNA, 15 bp, Homo sapiens
cccacccctggagca

SEQ ID NO: 1975094 - DNA, 15 bp, Homo sapiens
ccacccctggagcag

SEQ ID NO: 1975095 - DNA, 15 bp, Homo sapiens
cacccctggagcagc

SEQ ID NO: 1975096 - DNA, 15 bp, Homo sapiens
acccctggagcagca

SEQ ID NO: 1975097 - DNA, 15 bp, Homo sapiens
cccctggagcagcag

SEQ ID NO: 1975098 - DNA, 15 bp, Homo sapiens
ccctggagcagcagt

SEQ ID NO: 1975099 - DNA, 15 bp, Homo sapiens
cctggagcagcagtt

SEQ ID NO: 1975100 - DNA, 15 bp, Homo sapiens
ctggagcagcagttt

SEQ ID NO: 1975101 - DNA, 15 bp, Homo sapiens
tggagcagcagtttc

SEQ ID NO: 1975102 - DNA, 15 bp, Homo sapiens
ggagcagcagtttcc

SEQ ID NO: 1975103 - DNA, 15 bp, Homo sapiens
gagcagcagtttccg

SEQ ID NO: 1975104 - DNA, 15 bp, Homo sapiens
agcagcagtttccgg

SEQ ID NO: 1975105 - DNA, 15 bp, Homo sapiens
gcagcagtttccgga

SEQ ID NO: 1975106 - DNA, 15 bp, Homo sapiens
cagcagtttccggac

SEQ ID NO: 1975107 - DNA, 15 bp, Homo sapiens
agcagtttccggacc

SEQ ID NO: 1975108 - DNA, 15 bp, Homo sapiens
gcagtttccggaccc

SEQ ID NO: 1975109 - DNA, 15 bp, Homo sapiens
cagtttccggacccc

SEQ ID NO: 1975110 - DNA, 15 bp, Homo sapiens
agtttccggaccccg

SEQ ID NO: 1975111 - DNA, 15 bp, Homo sapiens
gtttccggaccccga

SEQ ID NO: 1975112 - DNA, 15 bp, Homo sapiens
tttccggaccccgag

SEQ ID NO: 1975113 - DNA, 15 bp, Homo sapiens
ttccggaccccgagg

SEQ ID NO: 1975114 - DNA, 15 bp, Homo sapiens
tccggaccccgaggt

SEQ ID NO: 1975115 - DNA, 15 bp, Homo sapiens
ccggaccccgaggtg

SEQ ID NO: 1975116 - DNA, 15 bp, Homo sapiens
cggaccccgaggtga

SEQ ID NO: 1975117 - DNA, 15 bp, Homo sapiens
ggaccccgaggtgag

SEQ ID NO: 1975118 - DNA, 15 bp, Homo sapiens
gaccccgaggtgagt

SEQ ID NO: 1975119 - DNA, 15 bp, Homo sapiens
accccgaggtgagtg

SEQ ID NO: 1975120 - DNA, 15 bp, Homo sapiens
ccccgaggtgagtgc

SEQ ID NO: 1975121 - DNA, 15 bp, Homo sapiens
cccgaggtgagtgcc

SEQ ID NO: 1975122 - DNA, 15 bp, Homo sapiens
ccgaggtgagtgccc

SEQ ID NO: 1975123 - DNA, 15 bp, Homo sapiens
cgaggtgagtgccca

SEQ ID NO: 1975124 - DNA, 15 bp, Homo sapiens
gaggtgagtgcccaa

SEQ ID NO: 1975125 - DNA, 15 bp, Homo sapiens
aggtgagtgcccaac

SEQ ID NO: 1975126 - DNA, 15 bp, Homo sapiens
ggtgagtgcccaaca

SEQ ID NO: 1975127 - DNA, 15 bp, Homo sapiens
gtgagtgcccaacat

SEQ ID NO: 1975128 - DNA, 15 bp, Homo sapiens
tgagtgcccaacata

SEQ ID NO: 1975129 - DNA, 15 bp, Homo sapiens
gagtgcccaacatag

SEQ ID NO: 1975130 - DNA, 15 bp, Homo sapiens
agtgcccaacatagc

SEQ ID NO: 1975131 - DNA, 15 bp, Homo sapiens
gtgcccaacatagca

SEQ ID NO: 1975132 - DNA, 15 bp, Homo sapiens
tgcccaacatagcac

SEQ ID NO: 1975133 - DNA, 15 bp, Homo sapiens
gcccaacatagcaca

SEQ ID NO: 1975134 - DNA, 15 bp, Homo sapiens
cccaacatagcacag

SEQ ID NO: 1975135 - DNA, 15 bp, Homo sapiens
ccaacatagcacagc

SEQ ID NO: 1975136 - DNA, 15 bp, Homo sapiens
caacatagcacagca

SEQ ID NO: 1975137 - DNA, 15 bp, Homo sapiens
aacatagcacagcac

SEQ ID NO: 1975138 - DNA, 15 bp, Homo sapiens
acatagcacagcacc

SEQ ID NO: 1975139 - DNA, 15 bp, Homo sapiens
catagcacagcaccc

SEQ ID NO: 1975140 - DNA, 15 bp, Homo sapiens
atagcacagcaccct

SEQ ID NO: 1975141 - DNA, 15 bp, Homo sapiens
tagcacagcaccctc

SEQ ID NO: 1975142 - DNA, 15 bp, Homo sapiens
agcacagcaccctca

SEQ ID NO: 1975143 - DNA, 15 bp, Homo sapiens
gcacagcaccctcat

SEQ ID NO: 1975144 - DNA, 15 bp, Homo sapiens
cacagcaccctcatc

SEQ ID NO: 1975145 - DNA, 15 bp, Homo sapiens
acagcaccctcatca

SEQ ID NO: 1975146 - DNA, 15 bp, Homo sapiens
cagcaccctcatcac

SEQ ID NO: 1975147 - DNA, 15 bp, Homo sapiens
agcaccctcatcacc

SEQ ID NO: 1975148 - DNA, 15 bp, Homo sapiens
gcaccctcatcaccc

SEQ ID NO: 1975149 - DNA, 15 bp, Homo sapiens
caccctcatcacccc

SEQ ID NO: 1975150 - DNA, 15 bp, Homo sapiens
accctcatcacccct

SEQ ID NO: 1975151 - DNA, 15 bp, Homo sapiens
ccctcatcaccccta

SEQ ID NO: 1975152 - DNA, 15 bp, Homo sapiens
cctcatcacccctaa

SEQ ID NO: 1975153 - DNA, 15 bp, Homo sapiens
ctcatcacccctaat

SEQ ID NO: 1975154 - DNA, 15 bp, Homo sapiens
tcatcacccctaatt

SEQ ID NO: 1975155 - DNA, 15 bp, Homo sapiens
catcacccctaattc

SEQ ID NO: 1975156 - DNA, 15 bp, Homo sapiens
atcacccctaattct

SEQ ID NO: 1975157 - DNA, 15 bp, Homo sapiens
tcacccctaattctg

SEQ ID NO: 1975158 - DNA, 15 bp, Homo sapiens
cacccctaattctgc

SEQ ID NO: 1975159 - DNA, 15 bp, Homo sapiens
acccctaattctgcc

SEQ ID NO: 1975160 - DNA, 15 bp, Homo sapiens
cccctaattctgcca

SEQ ID NO: 1975161 - DNA, 15 bp, Homo sapiens
ccctaattctgccag

SEQ ID NO: 1975162 - DNA, 15 bp, Homo sapiens
cctaattctgccagg

SEQ ID NO: 1975163 - DNA, 15 bp, Homo sapiens
ctaattctgccagga

SEQ ID NO: 1975164 - DNA, 15 bp, Homo sapiens
taattctgccaggag

SEQ ID NO: 1975165 - DNA, 15 bp, Homo sapiens
aattctgccaggagc

SEQ ID NO: 1975166 - DNA, 15 bp, Homo sapiens
attctgccaggagcc

SEQ ID NO: 1975167 - DNA, 15 bp, Homo sapiens
ttctgccaggagccc

SEQ ID NO: 1975168 - DNA, 15 bp, Homo sapiens
tctgccaggagcccc

SEQ ID NO: 1975169 - DNA, 15 bp, Homo sapiens
ctgccaggagcccct

SEQ ID NO: 1975170 - DNA, 15 bp, Homo sapiens
tgccaggagcccctc

SEQ ID NO: 1975171 - DNA, 15 bp, Homo sapiens
gccaggagcccctcc

SEQ ID NO: 1975172 - DNA, 15 bp, Homo sapiens
ccaggagcccctcca

SEQ ID NO: 1975173 - DNA, 15 bp, Homo sapiens
caggagcccctccag

SEQ ID NO: 1975174 - DNA, 15 bp, Homo sapiens
aggagcccctccaga

SEQ ID NO: 1975175 - DNA, 15 bp, Homo sapiens
ggagcccctccagat

SEQ ID NO: 1975176 - DNA, 15 bp, Homo sapiens
gagcccctccagatc

SEQ ID NO: 1975177 - DNA, 15 bp, Homo sapiens
agcccctccagatcc

SEQ ID NO: 1975178 - DNA, 15 bp, Homo sapiens
gcccctccagatccc

SEQ ID NO: 1975179 - DNA, 15 bp, Homo sapiens
cccctccagatcccc

SEQ ID NO: 1975180 - DNA, 15 bp, Homo sapiens
ccctccagatcccca

SEQ ID NO: 1975181 - DNA, 15 bp, Homo sapiens
cctccagatccccag

SEQ ID NO: 1975182 - DNA, 15 bp, Homo sapiens
ctccagatccccagc

SEQ ID NO: 1975183 - DNA, 15 bp, Homo sapiens
agatccccagcccct

SEQ ID NO: 1975184 - DNA, 15 bp, Homo sapiens
gatccccagcccctc

SEQ ID NO: 1975185 - DNA, 15 bp, Homo sapiens
atccccagcccctct

SEQ ID NO: 1975186 - DNA, 15 bp, Homo sapiens
tccccagcccctctt

SEQ ID NO: 1975187 - DNA, 15 bp, Homo sapiens
ccccagcccctcttc

SEQ ID NO: 1975188 - DNA, 15 bp, Homo sapiens
cccagcccctcttca

SEQ ID NO: 1975189 - DNA, 15 bp, Homo sapiens
gcccctcttcagctc

SEQ ID NO: 1975190 - DNA, 15 bp, Homo sapiens
cccctcttcagctcc

SEQ ID NO: 1975191 - DNA, 15 bp, Homo sapiens
ccctcttcagctccc

SEQ ID NO: 1975192 - DNA, 15 bp, Homo sapiens
cctcttcagctccct

SEQ ID NO: 1975193 - DNA, 15 bp, Homo sapiens
ctcttcagctccctt

SEQ ID NO: 1975194 - DNA, 15 bp, Homo sapiens
tcttcagctcccttg

SEQ ID NO: 1975195 - DNA, 15 bp, Homo sapiens
cttcagctcccttgg

SEQ ID NO: 1975196 - DNA, 15 bp, Homo sapiens
ttcagctcccttggc

SEQ ID NO: 1975197 - DNA, 15 bp, Homo sapiens
tcagctcccttggcc

SEQ ID NO: 1975198 - DNA, 15 bp, Homo sapiens
cagctcccttggccc

SEQ ID NO: 1975199 - DNA, 15 bp, Homo sapiens
agctcccttggcccc

SEQ ID NO: 1975200 - DNA, 15 bp, Homo sapiens
gctcccttggccccc

SEQ ID NO: 1975201 - DNA, 15 bp, Homo sapiens
ctcccttggccccca

SEQ ID NO: 1975202 - DNA, 15 bp, Homo sapiens
tcccttggcccccag

SEQ ID NO: 1975203 - DNA, 15 bp, Homo sapiens
cccttggcccccagt

SEQ ID NO: 1975204 - DNA, 15 bp, Homo sapiens
ccttggcccccagtc

SEQ ID NO: 1975205 - DNA, 15 bp, Homo sapiens
cttggcccccagtcc

SEQ ID NO: 1975206 - DNA, 15 bp, Homo sapiens
ttggcccccagtcct

SEQ ID NO: 1975207 - DNA, 15 bp, Homo sapiens
tggcccccagtcctg

SEQ ID NO: 1975208 - DNA, 15 bp, Homo sapiens
ggcccccagtcctgc

SEQ ID NO: 1975209 - DNA, 15 bp, Homo sapiens
gcccccagtcctgcc

SEQ ID NO: 1975210 - DNA, 15 bp, Homo sapiens
cccccagtcctgcct

SEQ ID NO: 1975211 - DNA, 15 bp, Homo sapiens
ccccagtcctgcctg

SEQ ID NO: 1975212 - DNA, 15 bp, Homo sapiens
cccagtcctgcctgg

SEQ ID NO: 1975213 - DNA, 15 bp, Homo sapiens
ccagtcctgcctggc

SEQ ID NO: 1975214 - DNA, 15 bp, Homo sapiens
cagtcctgcctggcc

SEQ ID NO: 1975215 - DNA, 15 bp, Homo sapiens
agtcctgcctggcct

SEQ ID NO: 1975216 - DNA, 15 bp, Homo sapiens
gtcctgcctggcctg

SEQ ID NO: 1975217 - DNA, 15 bp, Homo sapiens
tcctgcctggcctgg

SEQ ID NO: 1975218 - DNA, 15 bp, Homo sapiens
cctgcctggcctggg

SEQ ID NO: 1975219 - DNA, 15 bp, Homo sapiens
ctgcctggcctggga

SEQ ID NO: 1975220 - DNA, 15 bp, Homo sapiens
tgcctggcctgggac

SEQ ID NO: 1975221 - DNA, 15 bp, Homo sapiens
gcctggcctgggacc

SEQ ID NO: 1975222 - DNA, 15 bp, Homo sapiens
cctggcctgggaccc

SEQ ID NO: 1975223 - DNA, 15 bp, Homo sapiens
ctggcctgggaccca

SEQ ID NO: 1975224 - DNA, 15 bp, Homo sapiens
tggcctgggacccag

SEQ ID NO: 1975225 - DNA, 15 bp, Homo sapiens
ggcctgggacccaga

SEQ ID NO: 1975226 - DNA, 15 bp, Homo sapiens
gcctgggacccagag

SEQ ID NO: 1975227 - DNA, 15 bp, Homo sapiens
cctgggacccagagc

SEQ ID NO: 1975228 - DNA, 15 bp, Homo sapiens
ctgggacccagagca

SEQ ID NO: 1975229 - DNA, 15 bp, Homo sapiens
tgggacccagagcag

SEQ ID NO: 1975230 - DNA, 15 bp, Homo sapiens
gggacccagagcagc

SEQ ID NO: 1975231 - DNA, 15 bp, Homo sapiens
ggacccagagcagct

SEQ ID NO: 1975232 - DNA, 15 bp, Homo sapiens
gacccagagcagctc

SEQ ID NO: 1975233 - DNA, 15 bp, Homo sapiens
acccagagcagctcc

SEQ ID NO: 1975234 - DNA, 15 bp, Homo sapiens
cccagagcagctcca

SEQ ID NO: 1975235 - DNA, 15 bp, Homo sapiens
ccagagcagctccag

SEQ ID NO: 1975236 - DNA, 15 bp, Homo sapiens
cagagcagctccagc

SEQ ID NO: 1975237 - DNA, 15 bp, Homo sapiens
agagcagctccagct

SEQ ID NO: 1975238 - DNA, 15 bp, Homo sapiens
gagcagctccagctg

SEQ ID NO: 1975239 - DNA, 15 bp, Homo sapiens
agcagctccagctgc

SEQ ID NO: 1975240 - DNA, 15 bp, Homo sapiens
gcagctccagctgcc

SEQ ID NO: 1975241 - DNA, 15 bp, Homo sapiens
cagctccagctgccc

SEQ ID NO: 1975242 - DNA, 15 bp, Homo sapiens
agctccagctgcccc

SEQ ID NO: 1975243 - DNA, 15 bp, Homo sapiens
gctccagctgcccca

SEQ ID NO: 1975244 - DNA, 15 bp, Homo sapiens
ctccagctgccccac

SEQ ID NO: 1975245 - DNA, 15 bp, Homo sapiens
tccagctgccccacc

SEQ ID NO: 1975246 - DNA, 15 bp, Homo sapiens
ccagctgccccacca

SEQ ID NO: 1975247 - DNA, 15 bp, Homo sapiens
cagctgccccaccag

SEQ ID NO: 1975248 - DNA, 15 bp, Homo sapiens
agctgccccaccaga

SEQ ID NO: 1975249 - DNA, 15 bp, Homo sapiens
gctgccccaccagaa

SEQ ID NO: 1975250 - DNA, 15 bp, Homo sapiens
ctgccccaccagaag

SEQ ID NO: 1975251 - DNA, 15 bp, Homo sapiens
tgccccaccagaagg

SEQ ID NO: 1975252 - DNA, 15 bp, Homo sapiens
gccccaccagaaggg

SEQ ID NO: 1975253 - DNA, 15 bp, Homo sapiens
ccccaccagaaggga

SEQ ID NO: 1975254 - DNA, 15 bp, Homo sapiens
cccaccagaagggaa

SEQ ID NO: 1975255 - DNA, 15 bp, Homo sapiens
ccaccagaagggaag

SEQ ID NO: 1975256 - DNA, 15 bp, Homo sapiens
caccagaagggaagg

SEQ ID NO: 1975257 - DNA, 15 bp, Homo sapiens
accagaagggaaggg

SEQ ID NO: 1975258 - DNA, 15 bp, Homo sapiens
ccagaagggaagggg

SEQ ID NO: 1975259 - DNA, 15 bp, Homo sapiens
cagaagggaaggggc

SEQ ID NO: 1975260 - DNA, 15 bp, Homo sapiens
agaagggaaggggca

SEQ ID NO: 1975261 - DNA, 15 bp, Homo sapiens
gaagggaaggggcag

SEQ ID NO: 1975262 - DNA, 15 bp, Homo sapiens
aagggaaggggcaga

SEQ ID NO: 1975263 - DNA, 15 bp, Homo sapiens
agggaaggggcagag

SEQ ID NO: 1975264 - DNA, 15 bp, Homo sapiens
gggaaggggcagagg

SEQ ID NO: 1975265 - DNA, 15 bp, Homo sapiens
ggaaggggcagaggg

SEQ ID NO: 1975266 - DNA, 15 bp, Homo sapiens
gaaggggcagaggga

SEQ ID NO: 1975267 - DNA, 15 bp, Homo sapiens
aaggggcagagggac

SEQ ID NO: 1975268 - DNA, 15 bp, Homo sapiens
aggggcagagggaca

SEQ ID NO: 1975269 - DNA, 15 bp, Homo sapiens
ggggcagagggacag

SEQ ID NO: 1975270 - DNA, 15 bp, Homo sapiens
gggcagagggacagg

SEQ ID NO: 1975271 - DNA, 15 bp, Homo sapiens
ggcagagggacaggg

SEQ ID NO: 1975272 - DNA, 15 bp, Homo sapiens
gcagagggacagggg

SEQ ID NO: 1975273 - DNA, 15 bp, Homo sapiens
cagagggacaggggt

SEQ ID NO: 1975274 - DNA, 15 bp, Homo sapiens
agagggacaggggtg

SEQ ID NO: 1975275 - DNA, 15 bp, Homo sapiens
gagggacaggggtgg

SEQ ID NO: 1975276 - DNA, 15 bp, Homo sapiens
agggacaggggtggc

SEQ ID NO: 1975277 - DNA, 15 bp, Homo sapiens
gggacaggggtggct

SEQ ID NO: 1975278 - DNA, 15 bp, Homo sapiens
ggacaggggtggcta

SEQ ID NO: 1975279 - DNA, 15 bp, Homo sapiens
gacaggggtggctac

SEQ ID NO: 1975280 - DNA, 15 bp, Homo sapiens
acaggggtggctaca

SEQ ID NO: 1975281 - DNA, 15 bp, Homo sapiens
caggggtggctacag

SEQ ID NO: 1975282 - DNA, 15 bp, Homo sapiens
aggggtggctacagc

SEQ ID NO: 1975283 - DNA, 15 bp, Homo sapiens
ggggtggctacagct

SEQ ID NO: 1975284 - DNA, 15 bp, Homo sapiens
gggtggctacagctc

SEQ ID NO: 1975285 - DNA, 15 bp, Homo sapiens
ggtggctacagctcc

SEQ ID NO: 1975286 - DNA, 15 bp, Homo sapiens
gtggctacagctcct

SEQ ID NO: 1975287 - DNA, 15 bp, Homo sapiens
tggctacagctcctt

SEQ ID NO: 1975288 - DNA, 15 bp, Homo sapiens
ggctacagctccttg

SEQ ID NO: 1975289 - DNA, 15 bp, Homo sapiens
gctacagctccttgg

SEQ ID NO: 1975290 - DNA, 15 bp, Homo sapiens
ctacagctccttggt

SEQ ID NO: 1975291 - DNA, 15 bp, Homo sapiens
tacagctccttggtc

SEQ ID NO: 1975292 - DNA, 15 bp, Homo sapiens
acagctccttggtcc

SEQ ID NO: 1975293 - DNA, 15 bp, Homo sapiens
cagctccttggtcct

SEQ ID NO: 1975294 - DNA, 15 bp, Homo sapiens
agctccttggtcctg

SEQ ID NO: 1975295 - DNA, 15 bp, Homo sapiens
gctccttggtcctgg

SEQ ID NO: 1975296 - DNA, 15 bp, Homo sapiens
ctccttggtcctggg

SEQ ID NO: 1975297 - DNA, 15 bp, Homo sapiens
tccttggtcctgggc

SEQ ID NO: 1975298 - DNA, 15 bp, Homo sapiens
ccttggtcctgggcc

SEQ ID NO: 1975299 - DNA, 15 bp, Homo sapiens
cttggtcctgggccc

SEQ ID NO: 1975300 - DNA, 15 bp, Homo sapiens
ttggtcctgggccca

SEQ ID NO: 1975301 - DNA, 15 bp, Homo sapiens
tggtcctgggcccag

SEQ ID NO: 1975302 - DNA, 15 bp, Homo sapiens
ggtcctgggcccagg

SEQ ID NO: 1975303 - DNA, 15 bp, Homo sapiens
gtcctgggcccagga

SEQ ID NO: 1975304 - DNA, 15 bp, Homo sapiens
tcctgggcccaggaa

SEQ ID NO: 1975305 - DNA, 15 bp, Homo sapiens
cctgggcccaggaag

SEQ ID NO: 1975306 - DNA, 15 bp, Homo sapiens
ctgggcccaggaagc

SEQ ID NO: 1975307 - DNA, 15 bp, Homo sapiens
tgggcccaggaagcc

SEQ ID NO: 1975308 - DNA, 15 bp, Homo sapiens
gggcccaggaagccc

SEQ ID NO: 1975309 - DNA, 15 bp, Homo sapiens
ggcccaggaagcccc

SEQ ID NO: 1975310 - DNA, 15 bp, Homo sapiens
gcccaggaagccccg

SEQ ID NO: 1975311 - DNA, 15 bp, Homo sapiens
cccaggaagccccgc

SEQ ID NO: 1975312 - DNA, 15 bp, Homo sapiens
ccaggaagccccgcc

SEQ ID NO: 1975313 - DNA, 15 bp, Homo sapiens
caggaagccccgccc

SEQ ID NO: 1975314 - DNA, 15 bp, Homo sapiens
aggaagccccgccca

SEQ ID NO: 1975315 - DNA, 15 bp, Homo sapiens
ggaagccccgcccag

SEQ ID NO: 1975316 - DNA, 15 bp, Homo sapiens
gaagccccgcccagg

SEQ ID NO: 1975317 - DNA, 15 bp, Homo sapiens
aagccccgcccaggg

SEQ ID NO: 1975318 - DNA, 15 bp, Homo sapiens
agccccgcccagggg

SEQ ID NO: 1975319 - DNA, 15 bp, Homo sapiens
gccccgcccaggggg

SEQ ID NO: 1975320 - DNA, 15 bp, Homo sapiens
ccccgcccagggggc

SEQ ID NO: 1975321 - DNA, 15 bp, Homo sapiens
cccgcccagggggct

SEQ ID NO: 1975322 - DNA, 15 bp, Homo sapiens
ccgcccagggggctg

SEQ ID NO: 1975323 - DNA, 15 bp, Homo sapiens
cgcccagggggctgc

SEQ ID NO: 1975324 - DNA, 15 bp, Homo sapiens
gcccagggggctgca

SEQ ID NO: 1975325 - DNA, 15 bp, Homo sapiens
cccagggggctgcag

SEQ ID NO: 1975326 - DNA, 15 bp, Homo sapiens
ccagggggctgcagt

SEQ ID NO: 1975327 - DNA, 15 bp, Homo sapiens
cagggggctgcagtc

SEQ ID NO: 1975328 - DNA, 15 bp, Homo sapiens
agggggctgcagtct

SEQ ID NO: 1975329 - DNA, 15 bp, Homo sapiens
gggggctgcagtctt

SEQ ID NO: 1975330 - DNA, 15 bp, Homo sapiens
ggggctgcagtcttg

SEQ ID NO: 1975331 - DNA, 15 bp, Homo sapiens
gggctgcagtcttgc

SEQ ID NO: 1975332 - DNA, 15 bp, Homo sapiens
ggctgcagtcttgcc

SEQ ID NO: 1975333 - DNA, 15 bp, Homo sapiens
gctgcagtcttgccc

SEQ ID NO: 1975334 - DNA, 15 bp, Homo sapiens
ctgcagtcttgcccc

SEQ ID NO: 1975335 - DNA, 15 bp, Homo sapiens
tgcagtcttgccccc

SEQ ID NO: 1975336 - DNA, 15 bp, Homo sapiens
gcagtcttgcccccg

SEQ ID NO: 1975337 - DNA, 15 bp, Homo sapiens
cagtcttgcccccgg

SEQ ID NO: 1975338 - DNA, 15 bp, Homo sapiens
agtcttgcccccggc

SEQ ID NO: 1975339 - DNA, 15 bp, Homo sapiens
gtcttgcccccggcc

SEQ ID NO: 1975340 - DNA, 15 bp, Homo sapiens
tcttgcccccggcca

SEQ ID NO: 1975341 - DNA, 15 bp, Homo sapiens
cttgcccccggccac

SEQ ID NO: 1975342 - DNA, 15 bp, Homo sapiens
ttgcccccggccaca

SEQ ID NO: 1975343 - DNA, 15 bp, Homo sapiens
tgcccccggccacag

SEQ ID NO: 1975344 - DNA, 15 bp, Homo sapiens
gcccccggccacagc

SEQ ID NO: 1975345 - DNA, 15 bp, Homo sapiens
cccccggccacagcc

SEQ ID NO: 1975346 - DNA, 15 bp, Homo sapiens
ccccggccacagcct

SEQ ID NO: 1975347 - DNA, 15 bp, Homo sapiens
cccggccacagccta

SEQ ID NO: 1975348 - DNA, 15 bp, Homo sapiens
ccggccacagcctag

SEQ ID NO: 1975349 - DNA, 15 bp, Homo sapiens
cggccacagcctaga

SEQ ID NO: 1975350 - DNA, 15 bp, Homo sapiens
ggccacagcctagac

SEQ ID NO: 1975351 - DNA, 15 bp, Homo sapiens
gccacagcctagact

SEQ ID NO: 1975352 - DNA, 15 bp, Homo sapiens
ccacagcctagactg

SEQ ID NO: 1975353 - DNA, 15 bp, Homo sapiens
cacagcctagactgc

SEQ ID NO: 1975354 - DNA, 15 bp, Homo sapiens
acagcctagactgcg

SEQ ID NO: 1975355 - DNA, 15 bp, Homo sapiens
cagcctagactgcgg

SEQ ID NO: 1975356 - DNA, 15 bp, Homo sapiens
agcctagactgcggg

SEQ ID NO: 1975357 - DNA, 15 bp, Homo sapiens
gcctagactgcggga

SEQ ID NO: 1975358 - DNA, 15 bp, Homo sapiens
cctagactgcgggac

SEQ ID NO: 1975359 - DNA, 15 bp, Homo sapiens
ctagactgcgggaca

SEQ ID NO: 1975360 - DNA, 15 bp, Homo sapiens
tagactgcgggacac

SEQ ID NO: 1975361 - DNA, 15 bp, Homo sapiens
agactgcgggacaca

SEQ ID NO: 1975362 - DNA, 15 bp, Homo sapiens
gactgcgggacacag

SEQ ID NO: 1975363 - DNA, 15 bp, Homo sapiens
actgcgggacacagg

SEQ ID NO: 1975364 - DNA, 15 bp, Homo sapiens
ctgcgggacacaggg

SEQ ID NO: 1975365 - DNA, 15 bp, Homo sapiens
tgcgggacacaggga

SEQ ID NO: 1975366 - DNA, 15 bp, Homo sapiens
gcgggacacagggac

SEQ ID NO: 1975367 - DNA, 15 bp, Homo sapiens
cgggacacagggact

SEQ ID NO: 1975368 - DNA, 15 bp, Homo sapiens
gggacacagggactc

SEQ ID NO: 1975369 - DNA, 15 bp, Homo sapiens
ggacacagggactcg

SEQ ID NO: 1975370 - DNA, 15 bp, Homo sapiens
gacacagggactcga

SEQ ID NO: 1975371 - DNA, 15 bp, Homo sapiens
acacagggactcgaa

SEQ ID NO: 1975372 - DNA, 15 bp, Homo sapiens
cacagggactcgaag

SEQ ID NO: 1975373 - DNA, 15 bp, Homo sapiens
acagggactcgaagc

SEQ ID NO: 1975374 - DNA, 15 bp, Homo sapiens
cagggactcgaagct

SEQ ID NO: 1975375 - DNA, 15 bp, Homo sapiens
agggactcgaagctg

SEQ ID NO: 1975376 - DNA, 15 bp, Homo sapiens
gggactcgaagctgg

SEQ ID NO: 1975377 - DNA, 15 bp, Homo sapiens
ggactcgaagctgga

SEQ ID NO: 1975378 - DNA, 15 bp, Homo sapiens
gactcgaagctggag

SEQ ID NO: 1975379 - DNA, 15 bp, Homo sapiens
actcgaagctggagg

SEQ ID NO: 1975380 - DNA, 15 bp, Homo sapiens
ctcgaagctggaggc

SEQ ID NO: 1975381 - DNA, 15 bp, Homo sapiens
tcgaagctggaggca

SEQ ID NO: 1975382 - DNA, 15 bp, Homo sapiens
cgaagctggaggcac

SEQ ID NO: 1975383 - DNA, 15 bp, Homo sapiens
gaagctggaggcacc

SEQ ID NO: 1975384 - DNA, 15 bp, Homo sapiens
aagctggaggcacca

SEQ ID NO: 1975385 - DNA, 15 bp, Homo sapiens
agctggaggcaccag

SEQ ID NO: 1975386 - DNA, 15 bp, Homo sapiens
gctggaggcaccagc

SEQ ID NO: 1975387 - DNA, 15 bp, Homo sapiens
ctggaggcaccagca

SEQ ID NO: 1975388 - DNA, 15 bp, Homo sapiens
tggaggcaccagcag

SEQ ID NO: 1975389 - DNA, 15 bp, Homo sapiens
ggaggcaccagcaga

SEQ ID NO: 1975390 - DNA, 15 bp, Homo sapiens
gaggcaccagcagag

SEQ ID NO: 1975391 - DNA, 15 bp, Homo sapiens
aggcaccagcagagg

SEQ ID NO: 1975392 - DNA, 15 bp, Homo sapiens
ggcaccagcagagga

SEQ ID NO: 1975393 - DNA, 15 bp, Homo sapiens
gcaccagcagaggag

SEQ ID NO: 1975394 - DNA, 15 bp, Homo sapiens
caccagcagaggagg

SEQ ID NO: 1975395 - DNA, 15 bp, Homo sapiens
accagcagaggagga

SEQ ID NO: 1975396 - DNA, 15 bp, Homo sapiens
ccagcagaggaggac

SEQ ID NO: 1975397 - DNA, 15 bp, Homo sapiens
cagcagaggaggacg

SEQ ID NO: 1975398 - DNA, 15 bp, Homo sapiens
agcagaggaggacgt

SEQ ID NO: 1975399 - DNA, 15 bp, Homo sapiens
gcagaggaggacgtg

SEQ ID NO: 1975400 - DNA, 15 bp, Homo sapiens
cagaggaggacgtgt

SEQ ID NO: 1975401 - DNA, 15 bp, Homo sapiens
agaggaggacgtgtg

SEQ ID NO: 1975402 - DNA, 15 bp, Homo sapiens
gaggaggacgtgtgg

SEQ ID NO: 1975403 - DNA, 15 bp, Homo sapiens
aggaggacgtgtggg

SEQ ID NO: 1975404 - DNA, 15 bp, Homo sapiens
ggaggacgtgtggga

SEQ ID NO: 1975405 - DNA, 15 bp, Homo sapiens
gaggacgtgtgggag

SEQ ID NO: 1975406 - DNA, 15 bp, Homo sapiens
aggacgtgtgggaga

SEQ ID NO: 1975407 - DNA, 15 bp, Homo sapiens
ggacgtgtgggagat

SEQ ID NO: 1975408 - DNA, 15 bp, Homo sapiens
gacgtgtgggagatc

SEQ ID NO: 1975409 - DNA, 15 bp, Homo sapiens
acgtgtgggagatcc

SEQ ID NO: 1975410 - DNA, 15 bp, Homo sapiens
cgtgtgggagatcct

SEQ ID NO: 1975411 - DNA, 15 bp, Homo sapiens
gtgtgggagatccta

SEQ ID NO: 1975412 - DNA, 15 bp, Homo sapiens
tgtgggagatcctac

SEQ ID NO: 1975413 - DNA, 15 bp, Homo sapiens
gtgggagatcctacg

SEQ ID NO: 1975414 - DNA, 15 bp, Homo sapiens
tgggagatcctacgg

SEQ ID NO: 1975415 - DNA, 15 bp, Homo sapiens
gggagatcctacggc

SEQ ID NO: 1975416 - DNA, 15 bp, Homo sapiens
ggagatcctacggca

SEQ ID NO: 1975417 - DNA, 15 bp, Homo sapiens
gagatcctacggcag

SEQ ID NO: 1975418 - DNA, 15 bp, Homo sapiens
agatcctacggcagg

SEQ ID NO: 1975419 - DNA, 15 bp, Homo sapiens
gatcctacggcaggc

SEQ ID NO: 1975420 - DNA, 15 bp, Homo sapiens
atcctacggcaggca

SEQ ID NO: 1975421 - DNA, 15 bp, Homo sapiens
tcctacggcaggcac

SEQ ID NO: 1975422 - DNA, 15 bp, Homo sapiens
cctacggcaggcacc

SEQ ID NO: 1975423 - DNA, 15 bp, Homo sapiens
ctacggcaggcaccc

SEQ ID NO: 1975424 - DNA, 15 bp, Homo sapiens
tacggcaggcacccc

SEQ ID NO: 1975425 - DNA, 15 bp, Homo sapiens
acggcaggcaccccc

SEQ ID NO: 1975426 - DNA, 15 bp, Homo sapiens
cggcaggcaccccca

SEQ ID NO: 1975427 - DNA, 15 bp, Homo sapiens
ggcaggcacccccat

SEQ ID NO: 1975428 - DNA, 15 bp, Homo sapiens
gcaggcacccccatc

SEQ ID NO: 1975429 - DNA, 15 bp, Homo sapiens
caggcacccccatct

SEQ ID NO: 1975430 - DNA, 15 bp, Homo sapiens
aggcacccccatctg

SEQ ID NO: 1975431 - DNA, 15 bp, Homo sapiens
ggcacccccatctga

SEQ ID NO: 1975432 - DNA, 15 bp, Homo sapiens
gcacccccatctgag

SEQ ID NO: 1975433 - DNA, 15 bp, Homo sapiens
cacccccatctgagt

SEQ ID NO: 1975434 - DNA, 15 bp, Homo sapiens
acccccatctgagta

SEQ ID NO: 1975435 - DNA, 15 bp, Homo sapiens
cccccatctgagtac

SEQ ID NO: 1975436 - DNA, 15 bp, Homo sapiens
ccccatctgagtacg

SEQ ID NO: 1975437 - DNA, 15 bp, Homo sapiens
cccatctgagtacga

SEQ ID NO: 1975438 - DNA, 15 bp, Homo sapiens
ccatctgagtacgag

SEQ ID NO: 1975439 - DNA, 15 bp, Homo sapiens
catctgagtacgagc

SEQ ID NO: 1975440 - DNA, 15 bp, Homo sapiens
atctgagtacgagcg

SEQ ID NO: 1975441 - DNA, 15 bp, Homo sapiens
tctgagtacgagcgc

SEQ ID NO: 1975442 - DNA, 15 bp, Homo sapiens
ctgagtacgagcgca

SEQ ID NO: 1975443 - DNA, 15 bp, Homo sapiens
tgagtacgagcgcat

SEQ ID NO: 1975444 - DNA, 15 bp, Homo sapiens
gagtacgagcgcatc

SEQ ID NO: 1975445 - DNA, 15 bp, Homo sapiens
agtacgagcgcatcg

SEQ ID NO: 1975446 - DNA, 15 bp, Homo sapiens
gtacgagcgcatcgc

SEQ ID NO: 1975447 - DNA, 15 bp, Homo sapiens
tacgagcgcatcgcc

SEQ ID NO: 1975448 - DNA, 15 bp, Homo sapiens
acgagcgcatcgcct

SEQ ID NO: 1975449 - DNA, 15 bp, Homo sapiens
cgagcgcatcgcctt

SEQ ID NO: 1975450 - DNA, 15 bp, Homo sapiens
gagcgcatcgccttc

SEQ ID NO: 1975451 - DNA, 15 bp, Homo sapiens
agcgcatcgccttcc

SEQ ID NO: 1975452 - DNA, 15 bp, Homo sapiens
gcgcatcgccttcca

SEQ ID NO: 1975453 - DNA, 15 bp, Homo sapiens
cgcatcgccttccag

SEQ ID NO: 1975454 - DNA, 15 bp, Homo sapiens
gcatcgccttccagt

SEQ ID NO: 1975455 - DNA, 15 bp, Homo sapiens
catcgccttccagta

SEQ ID NO: 1975456 - DNA, 15 bp, Homo sapiens
atcgccttccagtac

SEQ ID NO: 1975457 - DNA, 15 bp, Homo sapiens
tcgccttccagtacg

SEQ ID NO: 1975458 - DNA, 15 bp, Homo sapiens
cgccttccagtacgg

SEQ ID NO: 1975459 - DNA, 15 bp, Homo sapiens
gccttccagtacggc

SEQ ID NO: 1975460 - DNA, 15 bp, Homo sapiens
ccttccagtacggcg

SEQ ID NO: 1975461 - DNA, 15 bp, Homo sapiens
cttccagtacggcgt

SEQ ID NO: 1975462 - DNA, 15 bp, Homo sapiens
ttccagtacggcgtc

SEQ ID NO: 1975463 - DNA, 15 bp, Homo sapiens
tccagtacggcgtca

SEQ ID NO: 1975464 - DNA, 15 bp, Homo sapiens
ccagtacggcgtcac

SEQ ID NO: 1975465 - DNA, 15 bp, Homo sapiens
cagtacggcgtcact

SEQ ID NO: 1975466 - DNA, 15 bp, Homo sapiens
agtacggcgtcactg

SEQ ID NO: 1975467 - DNA, 15 bp, Homo sapiens
gtacggcgtcactga

SEQ ID NO: 1975468 - DNA, 15 bp, Homo sapiens
tacggcgtcactgac

SEQ ID NO: 1975469 - DNA, 15 bp, Homo sapiens
acggcgtcactgacc

SEQ ID NO: 1975470 - DNA, 15 bp, Homo sapiens
cggcgtcactgacct

SEQ ID NO: 1975471 - DNA, 15 bp, Homo sapiens
ggcgtcactgacctg

SEQ ID NO: 1975472 - DNA, 15 bp, Homo sapiens
gcgtcactgacctgc

SEQ ID NO: 1975473 - DNA, 15 bp, Homo sapiens
cgtcactgacctgcg

SEQ ID NO: 1975474 - DNA, 15 bp, Homo sapiens
gtcactgacctgcgc

SEQ ID NO: 1975475 - DNA, 15 bp, Homo sapiens
tcactgacctgcgcg

SEQ ID NO: 1975476 - DNA, 15 bp, Homo sapiens
cactgacctgcgcgg

SEQ ID NO: 1975477 - DNA, 15 bp, Homo sapiens
actgacctgcgcggc

SEQ ID NO: 1975478 - DNA, 15 bp, Homo sapiens
ctgacctgcgcggca

SEQ ID NO: 1975479 - DNA, 15 bp, Homo sapiens
tgacctgcgcggcat

SEQ ID NO: 1975480 - DNA, 15 bp, Homo sapiens
gacctgcgcggcatg

SEQ ID NO: 1975481 - DNA, 15 bp, Homo sapiens
acctgcgcggcatgc

SEQ ID NO: 1975482 - DNA, 15 bp, Homo sapiens
cctgcgcggcatgct

SEQ ID NO: 1975483 - DNA, 15 bp, Homo sapiens
ctgcgcggcatgcta

SEQ ID NO: 1975484 - DNA, 15 bp, Homo sapiens
tgcgcggcatgctaa

SEQ ID NO: 1975485 - DNA, 15 bp, Homo sapiens
gcgcggcatgctaaa

SEQ ID NO: 1975486 - DNA, 15 bp, Homo sapiens
cgcggcatgctaaag

SEQ ID NO: 1975487 - DNA, 15 bp, Homo sapiens
gcggcatgctaaaga

SEQ ID NO: 1975488 - DNA, 15 bp, Homo sapiens
cggcatgctaaagag

SEQ ID NO: 1975489 - DNA, 15 bp, Homo sapiens
ggcatgctaaagagg

SEQ ID NO: 1975490 - DNA, 15 bp, Homo sapiens
gcatgctaaagaggc

SEQ ID NO: 1975491 - DNA, 15 bp, Homo sapiens
catgctaaagaggct

SEQ ID NO: 1975492 - DNA, 15 bp, Homo sapiens
atgctaaagaggctc

SEQ ID NO: 1975493 - DNA, 15 bp, Homo sapiens
tgctaaagaggctca

SEQ ID NO: 1975494 - DNA, 15 bp, Homo sapiens
gctaaagaggctcaa

SEQ ID NO: 1975495 - DNA, 15 bp, Homo sapiens
ctaaagaggctcaag

SEQ ID NO: 1975496 - DNA, 15 bp, Homo sapiens
taaagaggctcaagg

SEQ ID NO: 1975497 - DNA, 15 bp, Homo sapiens
aaagaggctcaaggg

SEQ ID NO: 1975498 - DNA, 15 bp, Homo sapiens
aagaggctcaagggc

SEQ ID NO: 1975499 - DNA, 15 bp, Homo sapiens
agaggctcaagggca

SEQ ID NO: 1975500 - DNA, 15 bp, Homo sapiens
gaggctcaagggcat

SEQ ID NO: 1975501 - DNA, 15 bp, Homo sapiens
aggctcaagggcatg

SEQ ID NO: 1975502 - DNA, 15 bp, Homo sapiens
ggctcaagggcatga

SEQ ID NO: 1975503 - DNA, 15 bp, Homo sapiens
gctcaagggcatgag

SEQ ID NO: 1975504 - DNA, 15 bp, Homo sapiens
ctcaagggcatgagg

SEQ ID NO: 1975505 - DNA, 15 bp, Homo sapiens
tcaagggcatgaggc

SEQ ID NO: 1975506 - DNA, 15 bp, Homo sapiens
caagggcatgaggcg

SEQ ID NO: 1975507 - DNA, 15 bp, Homo sapiens
aagggcatgaggcgc

SEQ ID NO: 1975508 - DNA, 15 bp, Homo sapiens
agggcatgaggcgcg

SEQ ID NO: 1975509 - DNA, 15 bp, Homo sapiens
gggcatgaggcgcga

SEQ ID NO: 1975510 - DNA, 15 bp, Homo sapiens
ggcatgaggcgcgat

SEQ ID NO: 1975511 - DNA, 15 bp, Homo sapiens
gcatgaggcgcgatg

SEQ ID NO: 1975512 - DNA, 15 bp, Homo sapiens
catgaggcgcgatga

SEQ ID NO: 1975513 - DNA, 15 bp, Homo sapiens
atgaggcgcgatgag

SEQ ID NO: 1975514 - DNA, 15 bp, Homo sapiens
tgaggcgcgatgaga

SEQ ID NO: 1975515 - DNA, 15 bp, Homo sapiens
gaggcgcgatgagaa

SEQ ID NO: 1975516 - DNA, 15 bp, Homo sapiens
aggcgcgatgagaag

SEQ ID NO: 1975517 - DNA, 15 bp, Homo sapiens
ggcgcgatgagaaga

SEQ ID NO: 1975518 - DNA, 15 bp, Homo sapiens
gcgcgatgagaagaa

SEQ ID NO: 1975519 - DNA, 15 bp, Homo sapiens
cgcgatgagaagaag

SEQ ID NO: 1975520 - DNA, 15 bp, Homo sapiens
gcgatgagaagaaga

SEQ ID NO: 1975521 - DNA, 15 bp, Homo sapiens
cgatgagaagaagag

SEQ ID NO: 1975522 - DNA, 15 bp, Homo sapiens
gatgagaagaagagc

SEQ ID NO: 1975523 - DNA, 15 bp, Homo sapiens
atgagaagaagagca

SEQ ID NO: 1975524 - DNA, 15 bp, Homo sapiens
tgagaagaagagcac

SEQ ID NO: 1975525 - DNA, 15 bp, Homo sapiens
gagaagaagagcaca

SEQ ID NO: 1975526 - DNA, 15 bp, Homo sapiens
agaagaagagcacag

SEQ ID NO: 1975527 - DNA, 15 bp, Homo sapiens
gaagaagagcacagg

SEQ ID NO: 1975528 - DNA, 15 bp, Homo sapiens
aagaagagcacaggt

SEQ ID NO: 1975529 - DNA, 15 bp, Homo sapiens
agaagagcacaggtt

SEQ ID NO: 1975530 - DNA, 15 bp, Homo sapiens
gaagagcacaggtta

SEQ ID NO: 1975531 - DNA, 15 bp, Homo sapiens
aagagcacaggttag

SEQ ID NO: 1975532 - DNA, 15 bp, Homo sapiens
agagcacaggttagc

SEQ ID NO: 1975533 - DNA, 15 bp, Homo sapiens
gagcacaggttagcc

SEQ ID NO: 1975534 - DNA, 15 bp, Homo sapiens
agcacaggttagccc

SEQ ID NO: 1975535 - DNA, 15 bp, Homo sapiens
gcacaggttagccct

SEQ ID NO: 1975536 - DNA, 15 bp, Homo sapiens
cacaggttagccctt

SEQ ID NO: 1975537 - DNA, 15 bp, Homo sapiens
acaggttagcccttc

SEQ ID NO: 1975538 - DNA, 15 bp, Homo sapiens
caggttagcccttcc

SEQ ID NO: 1975539 - DNA, 15 bp, Homo sapiens
aggttagcccttcct

SEQ ID NO: 1975540 - DNA, 15 bp, Homo sapiens
ggttagcccttcctc

SEQ ID NO: 1975541 - DNA, 15 bp, Homo sapiens
gttagcccttcctca

SEQ ID NO: 1975542 - DNA, 15 bp, Homo sapiens
ttagcccttcctcag

SEQ ID NO: 1975543 - DNA, 15 bp, Homo sapiens
tagcccttcctcaga

SEQ ID NO: 1975544 - DNA, 15 bp, Homo sapiens
agcccttcctcagag

SEQ ID NO: 1975545 - DNA, 15 bp, Homo sapiens
gcccttcctcagagg

SEQ ID NO: 1975546 - DNA, 15 bp, Homo sapiens
cccttcctcagaggg

SEQ ID NO: 1975547 - DNA, 15 bp, Homo sapiens
ccttcctcagagggg

SEQ ID NO: 1975548 - DNA, 15 bp, Homo sapiens
cttcctcagagggga

SEQ ID NO: 1975549 - DNA, 15 bp, Homo sapiens
ttcctcagaggggag

SEQ ID NO: 1975550 - DNA, 15 bp, Homo sapiens
tcctcagaggggaga

SEQ ID NO: 1975551 - DNA, 15 bp, Homo sapiens
cctcagaggggagag

SEQ ID NO: 1975552 - DNA, 15 bp, Homo sapiens
ctcagaggggagagg

SEQ ID NO: 1975553 - DNA, 15 bp, Homo sapiens
tcagaggggagagga

SEQ ID NO: 1975554 - DNA, 15 bp, Homo sapiens
cagaggggagaggag

SEQ ID NO: 1975555 - DNA, 15 bp, Homo sapiens
agaggggagaggaga

SEQ ID NO: 1975556 - DNA, 15 bp, Homo sapiens
gaggggagaggagag

SEQ ID NO: 1975557 - DNA, 15 bp, Homo sapiens
aggggagaggagagg

SEQ ID NO: 1975558 - DNA, 15 bp, Homo sapiens
ggggagaggagaggg

SEQ ID NO: 1975559 - DNA, 15 bp, Homo sapiens
gggagaggagagggc

SEQ ID NO: 1975560 - DNA, 15 bp, Homo sapiens
ggagaggagagggca

SEQ ID NO: 1975561 - DNA, 15 bp, Homo sapiens
gagaggagagggcac

SEQ ID NO: 1975562 - DNA, 15 bp, Homo sapiens
agaggagagggcaca

SEQ ID NO: 1975563 - DNA, 15 bp, Homo sapiens
gaggagagggcacag

SEQ ID NO: 1975564 - DNA, 15 bp, Homo sapiens
aggagagggcacagg

SEQ ID NO: 1975565 - DNA, 15 bp, Homo sapiens
ggagagggcacaggc

SEQ ID NO: 1975566 - DNA, 15 bp, Homo sapiens
gagagggcacaggct

SEQ ID NO: 1975567 - DNA, 15 bp, Homo sapiens
agagggcacaggcta

SEQ ID NO: 1975568 - DNA, 15 bp, Homo sapiens
gagggcacaggctag

SEQ ID NO: 1975569 - DNA, 15 bp, Homo sapiens
agggcacaggctagc

SEQ ID NO: 1975570 - DNA, 15 bp, Homo sapiens
gggcacaggctagcc

SEQ ID NO: 1975571 - DNA, 15 bp, Homo sapiens
ggcacaggctagccc

SEQ ID NO: 1975572 - DNA, 15 bp, Homo sapiens
gcacaggctagccct

SEQ ID NO: 1975573 - DNA, 15 bp, Homo sapiens
cacaggctagccctt

SEQ ID NO: 1975574 - DNA, 15 bp, Homo sapiens
acaggctagcccttc

SEQ ID NO: 1975575 - DNA, 15 bp, Homo sapiens
caggctagcccttcc

SEQ ID NO: 1975576 - DNA, 15 bp, Homo sapiens
aggctagcccttccc

SEQ ID NO: 1975577 - DNA, 15 bp, Homo sapiens
ggctagcccttccct

SEQ ID NO: 1975578 - DNA, 15 bp, Homo sapiens
gctagcccttcccta

SEQ ID NO: 1975579 - DNA, 15 bp, Homo sapiens
ctagcccttccctac

SEQ ID NO: 1975580 - DNA, 15 bp, Homo sapiens
tagcccttccctaca

SEQ ID NO: 1975581 - DNA, 15 bp, Homo sapiens
agcccttccctacac

SEQ ID NO: 1975582 - DNA, 15 bp, Homo sapiens
gcccttccctacaca

SEQ ID NO: 1975583 - DNA, 15 bp, Homo sapiens
cccttccctacacag

SEQ ID NO: 1975584 - DNA, 15 bp, Homo sapiens
ccttccctacacagg

SEQ ID NO: 1975585 - DNA, 15 bp, Homo sapiens
cttccctacacagga

SEQ ID NO: 1975586 - DNA, 15 bp, Homo sapiens
ttccctacacaggag

SEQ ID NO: 1975587 - DNA, 15 bp, Homo sapiens
tccctacacaggaga

SEQ ID NO: 1975588 - DNA, 15 bp, Homo sapiens
ccctacacaggagag

SEQ ID NO: 1975589 - DNA, 15 bp, Homo sapiens
cctacacaggagagg

SEQ ID NO: 1975590 - DNA, 15 bp, Homo sapiens
ctacacaggagagga

SEQ ID NO: 1975591 - DNA, 15 bp, Homo sapiens
tacacaggagaggag

SEQ ID NO: 1975592 - DNA, 15 bp, Homo sapiens
acacaggagaggaga

SEQ ID NO: 1975593 - DNA, 15 bp, Homo sapiens
cacaggagaggagag

SEQ ID NO: 1975594 - DNA, 15 bp, Homo sapiens
acaggagaggagagg

SEQ ID NO: 1975595 - DNA, 15 bp, Homo sapiens
caggagaggagaggg

SEQ ID NO: 1975596 - DNA, 15 bp, Homo sapiens
aggagaggagagggc

SEQ ID NO: 1975597 - DNA, 15 bp, Homo sapiens
gagaggagagggcat

SEQ ID NO: 1975598 - DNA, 15 bp, Homo sapiens
agaggagagggcata

SEQ ID NO: 1975599 - DNA, 15 bp, Homo sapiens
gaggagagggcatag

SEQ ID NO: 1975600 - DNA, 15 bp, Homo sapiens
aggagagggcatagg

SEQ ID NO: 1975601 - DNA, 15 bp, Homo sapiens
ggagagggcataggt

SEQ ID NO: 1975602 - DNA, 15 bp, Homo sapiens
gagagggcataggtt

SEQ ID NO: 1975603 - DNA, 15 bp, Homo sapiens
agagggcataggtta

SEQ ID NO: 1975604 - DNA, 15 bp, Homo sapiens
gagggcataggttag

SEQ ID NO: 1975605 - DNA, 15 bp, Homo sapiens
agggcataggttagc

SEQ ID NO: 1975606 - DNA, 15 bp, Homo sapiens
gggcataggttagcc

SEQ ID NO: 1975607 - DNA, 15 bp, Homo sapiens
ggcataggttagccc

SEQ ID NO: 1975608 - DNA, 15 bp, Homo sapiens
gcataggttagccct

SEQ ID NO: 1975609 - DNA, 15 bp, Homo sapiens
cataggttagccctt

SEQ ID NO: 1975610 - DNA, 15 bp, Homo sapiens
ataggttagcccttc

SEQ ID NO: 1975611 - DNA, 15 bp, Homo sapiens
taggttagcccttcc

SEQ ID NO: 1975612 - DNA, 15 bp, Homo sapiens
aggttagcccttccc

SEQ ID NO: 1975613 - DNA, 15 bp, Homo sapiens
ggttagcccttcccc

SEQ ID NO: 1975614 - DNA, 15 bp, Homo sapiens
gttagcccttcccca

SEQ ID NO: 1975615 - DNA, 15 bp, Homo sapiens
ttagcccttccccac

SEQ ID NO: 1975616 - DNA, 15 bp, Homo sapiens
tagcccttccccaca

SEQ ID NO: 1975617 - DNA, 15 bp, Homo sapiens
agcccttccccacag

SEQ ID NO: 1975618 - DNA, 15 bp, Homo sapiens
gcccttccccacagg

SEQ ID NO: 1975619 - DNA, 15 bp, Homo sapiens
cccttccccacaggg

SEQ ID NO: 1975620 - DNA, 15 bp, Homo sapiens
ccttccccacagggg

SEQ ID NO: 1975621 - DNA, 15 bp, Homo sapiens
cttccccacagggga

SEQ ID NO: 1975622 - DNA, 15 bp, Homo sapiens
ttccccacaggggag

SEQ ID NO: 1975623 - DNA, 15 bp, Homo sapiens
tccccacaggggaga

SEQ ID NO: 1975624 - DNA, 15 bp, Homo sapiens
ccccacaggggagag

SEQ ID NO: 1975625 - DNA, 15 bp, Homo sapiens
cccacaggggagagg

SEQ ID NO: 1975626 - DNA, 15 bp, Homo sapiens
ccacaggggagagga

SEQ ID NO: 1975627 - DNA, 15 bp, Homo sapiens
cacaggggagaggag

SEQ ID NO: 1975628 - DNA, 15 bp, Homo sapiens
acaggggagaggaga

SEQ ID NO: 1975629 - DNA, 15 bp, Homo sapiens
caggggagaggagag

SEQ ID NO: 1975630 - DNA, 15 bp, Homo sapiens
ggagagggcacaggt

SEQ ID NO: 1975631 - DNA, 15 bp, Homo sapiens
gagagggcacaggtt

SEQ ID NO: 1975632 - DNA, 15 bp, Homo sapiens
agagggcacaggtta

SEQ ID NO: 1975633 - DNA, 15 bp, Homo sapiens
gagggcacaggttag

SEQ ID NO: 1975634 - DNA, 15 bp, Homo sapiens
agggcacaggttagc

SEQ ID NO: 1975635 - DNA, 15 bp, Homo sapiens
gggcacaggttagcc

SEQ ID NO: 1975636 - DNA, 15 bp, Homo sapiens
ggcacaggttagccc

SEQ ID NO: 1975637 - DNA, 15 bp, Homo sapiens
gcacaggttagcccc

SEQ ID NO: 1975638 - DNA, 15 bp, Homo sapiens
cacaggttagccccc

SEQ ID NO: 1975639 - DNA, 15 bp, Homo sapiens
acaggttagcccccc

SEQ ID NO: 1975640 - DNA, 15 bp, Homo sapiens
caggttagcccccca

SEQ ID NO: 1975641 - DNA, 15 bp, Homo sapiens
aggttagccccccac

SEQ ID NO: 1975642 - DNA, 15 bp, Homo sapiens
ggttagccccccacc

SEQ ID NO: 1975643 - DNA, 15 bp, Homo sapiens
gttagccccccacct

SEQ ID NO: 1975644 - DNA, 15 bp, Homo sapiens
ttagccccccacctc

SEQ ID NO: 1975645 - DNA, 15 bp, Homo sapiens
tagccccccacctcg

SEQ ID NO: 1975646 - DNA, 15 bp, Homo sapiens
agccccccacctcgt

SEQ ID NO: 1975647 - DNA, 15 bp, Homo sapiens
gccccccacctcgtc

SEQ ID NO: 1975648 - DNA, 15 bp, Homo sapiens
ccccccacctcgtcc

SEQ ID NO: 1975649 - DNA, 15 bp, Homo sapiens
cccccacctcgtcca

SEQ ID NO: 1975650 - DNA, 15 bp, Homo sapiens
ccccacctcgtccac

SEQ ID NO: 1975651 - DNA, 15 bp, Homo sapiens
cccacctcgtccaca

SEQ ID NO: 1975652 - DNA, 15 bp, Homo sapiens
ccacctcgtccacat

SEQ ID NO: 1975653 - DNA, 15 bp, Homo sapiens
cacctcgtccacata

SEQ ID NO: 1975654 - DNA, 15 bp, Homo sapiens
acctcgtccacatac

SEQ ID NO: 1975655 - DNA, 15 bp, Homo sapiens
cctcgtccacataca

SEQ ID NO: 1975656 - DNA, 15 bp, Homo sapiens
ctcgtccacatacat

SEQ ID NO: 1975657 - DNA, 15 bp, Homo sapiens
tcgtccacatacatg

SEQ ID NO: 1975658 - DNA, 15 bp, Homo sapiens
cgtccacatacatgg

SEQ ID NO: 1975659 - DNA, 15 bp, Homo sapiens
gtccacatacatgga

SEQ ID NO: 1975660 - DNA, 15 bp, Homo sapiens
tccacatacatggaa

SEQ ID NO: 1975661 - DNA, 15 bp, Homo sapiens
ccacatacatggaaa

SEQ ID NO: 1975662 - DNA, 15 bp, Homo sapiens
cacatacatggaaag

SEQ ID NO: 1975663 - DNA, 15 bp, Homo sapiens
acatacatggaaaga

SEQ ID NO: 1975664 - DNA, 15 bp, Homo sapiens
catacatggaaagag

SEQ ID NO: 1975665 - DNA, 15 bp, Homo sapiens
atacatggaaagagc

SEQ ID NO: 1975666 - DNA, 15 bp, Homo sapiens
tacatggaaagagcg

SEQ ID NO: 1975667 - DNA, 15 bp, Homo sapiens
acatggaaagagcgg

SEQ ID NO: 1975668 - DNA, 15 bp, Homo sapiens
catggaaagagcgga

SEQ ID NO: 1975669 - DNA, 15 bp, Homo sapiens
atggaaagagcggag

SEQ ID NO: 1975670 - DNA, 15 bp, Homo sapiens
tggaaagagcggagt

SEQ ID NO: 1975671 - DNA, 15 bp, Homo sapiens
ggaaagagcggagtc

SEQ ID NO: 1975672 - DNA, 15 bp, Homo sapiens
gaaagagcggagtcc

SEQ ID NO: 1975673 - DNA, 15 bp, Homo sapiens
aaagagcggagtccg

SEQ ID NO: 1975674 - DNA, 15 bp, Homo sapiens
aagagcggagtccgg

SEQ ID NO: 1975675 - DNA, 15 bp, Homo sapiens
agagcggagtccggc

SEQ ID NO: 1975676 - DNA, 15 bp, Homo sapiens
gagcggagtccggct

SEQ ID NO: 1975677 - DNA, 15 bp, Homo sapiens
agcggagtccggctt

SEQ ID NO: 1975678 - DNA, 15 bp, Homo sapiens
gcggagtccggctta

SEQ ID NO: 1975679 - DNA, 15 bp, Homo sapiens
cggagtccggcttag

SEQ ID NO: 1975680 - DNA, 15 bp, Homo sapiens
ggagtccggcttagc

SEQ ID NO: 1975681 - DNA, 15 bp, Homo sapiens
gagtccggcttagca

SEQ ID NO: 1975682 - DNA, 15 bp, Homo sapiens
agtccggcttagcac

SEQ ID NO: 1975683 - DNA, 15 bp, Homo sapiens
gtccggcttagcaca

SEQ ID NO: 1975684 - DNA, 15 bp, Homo sapiens
tccggcttagcacag

SEQ ID NO: 1975685 - DNA, 15 bp, Homo sapiens
ccggcttagcacaga

SEQ ID NO: 1975686 - DNA, 15 bp, Homo sapiens
cggcttagcacagag

SEQ ID NO: 1975687 - DNA, 15 bp, Homo sapiens
ggcttagcacagaga

SEQ ID NO: 1975688 - DNA, 15 bp, Homo sapiens
gcttagcacagagac

SEQ ID NO: 1975689 - DNA, 15 bp, Homo sapiens
cttagcacagagact

SEQ ID NO: 1975690 - DNA, 15 bp, Homo sapiens
ttagcacagagactc

SEQ ID NO: 1975691 - DNA, 15 bp, Homo sapiens
tagcacagagactca

SEQ ID NO: 1975692 - DNA, 15 bp, Homo sapiens
agcacagagactcac

SEQ ID NO: 1975693 - DNA, 15 bp, Homo sapiens
gcacagagactcaca

SEQ ID NO: 1975694 - DNA, 15 bp, Homo sapiens
cacagagactcacag

SEQ ID NO: 1975695 - DNA, 15 bp, Homo sapiens
acagagactcacagg

SEQ ID NO: 1975696 - DNA, 15 bp, Homo sapiens
cagagactcacagga

SEQ ID NO: 1975697 - DNA, 15 bp, Homo sapiens
agagactcacaggaa

SEQ ID NO: 1975698 - DNA, 15 bp, Homo sapiens
gagactcacaggaaa

SEQ ID NO: 1975699 - DNA, 15 bp, Homo sapiens
agactcacaggaaag

SEQ ID NO: 1975700 - DNA, 15 bp, Homo sapiens
gactcacaggaaaga

SEQ ID NO: 1975701 - DNA, 15 bp, Homo sapiens
actcacaggaaagaa

SEQ ID NO: 1975702 - DNA, 15 bp, Homo sapiens
ctcacaggaaagaag

SEQ ID NO: 1975703 - DNA, 15 bp, Homo sapiens
tcacaggaaagaaga

SEQ ID NO: 1975704 - DNA, 15 bp, Homo sapiens
cacaggaaagaagag

SEQ ID NO: 1975705 - DNA, 15 bp, Homo sapiens
acaggaaagaagagc

SEQ ID NO: 1975706 - DNA, 15 bp, Homo sapiens
caggaaagaagagcc

SEQ ID NO: 1975707 - DNA, 15 bp, Homo sapiens
aggaaagaagagccc

SEQ ID NO: 1975708 - DNA, 15 bp, Homo sapiens
ggaaagaagagccca

SEQ ID NO: 1975709 - DNA, 15 bp, Homo sapiens
gaaagaagagcccag

SEQ ID NO: 1975710 - DNA, 15 bp, Homo sapiens
aaagaagagcccagg

SEQ ID NO: 1975711 - DNA, 15 bp, Homo sapiens
aagaagagcccaggt

SEQ ID NO: 1975712 - DNA, 15 bp, Homo sapiens
agaagagcccaggtt

SEQ ID NO: 1975713 - DNA, 15 bp, Homo sapiens
gaagagcccaggtta

SEQ ID NO: 1975714 - DNA, 15 bp, Homo sapiens
aagagcccaggttaa

SEQ ID NO: 1975715 - DNA, 15 bp, Homo sapiens
agagcccaggttaac

SEQ ID NO: 1975716 - DNA, 15 bp, Homo sapiens
gagcccaggttaacc

SEQ ID NO: 1975717 - DNA, 15 bp, Homo sapiens
agcccaggttaaccc

SEQ ID NO: 1975718 - DNA, 15 bp, Homo sapiens
gcccaggttaacccc

SEQ ID NO: 1975719 - DNA, 15 bp, Homo sapiens
cccaggttaacccct

SEQ ID NO: 1975720 - DNA, 15 bp, Homo sapiens
ccaggttaacccctc

SEQ ID NO: 1975721 - DNA, 15 bp, Homo sapiens
caggttaacccctcc

SEQ ID NO: 1975722 - DNA, 15 bp, Homo sapiens
aggttaacccctcct

SEQ ID NO: 1975723 - DNA, 15 bp, Homo sapiens
ggttaacccctcctt

SEQ ID NO: 1975724 - DNA, 15 bp, Homo sapiens
gttaacccctccttg

SEQ ID NO: 1975725 - DNA, 15 bp, Homo sapiens
ttaacccctccttgt

SEQ ID NO: 1975726 - DNA, 15 bp, Homo sapiens
taacccctccttgtg

SEQ ID NO: 1975727 - DNA, 15 bp, Homo sapiens
aacccctccttgtgt

SEQ ID NO: 1975728 - DNA, 15 bp, Homo sapiens
acccctccttgtgta

SEQ ID NO: 1975729 - DNA, 15 bp, Homo sapiens
cccctccttgtgtag

SEQ ID NO: 1975730 - DNA, 15 bp, Homo sapiens
ccctccttgtgtaga

SEQ ID NO: 1975731 - DNA, 15 bp, Homo sapiens
cctccttgtgtagaa

SEQ ID NO: 1975732 - DNA, 15 bp, Homo sapiens
ctccttgtgtagaaa

SEQ ID NO: 1975733 - DNA, 15 bp, Homo sapiens
tccttgtgtagaaaa

SEQ ID NO: 1975734 - DNA, 15 bp, Homo sapiens
ccttgtgtagaaaaa

SEQ ID NO: 1975735 - DNA, 15 bp, Homo sapiens
cttgtgtagaaaaag

SEQ ID NO: 1975736 - DNA, 15 bp, Homo sapiens
ttgtgtagaaaaagc

SEQ ID NO: 1975737 - DNA, 15 bp, Homo sapiens
tgtgtagaaaaagcc

SEQ ID NO: 1975738 - DNA, 15 bp, Homo sapiens
gtgtagaaaaagcca

SEQ ID NO: 1975739 - DNA, 15 bp, Homo sapiens
tgtagaaaaagccaa

SEQ ID NO: 1975740 - DNA, 15 bp, Homo sapiens
gtagaaaaagccaag

SEQ ID NO: 1975741 - DNA, 15 bp, Homo sapiens
tagaaaaagccaaga

SEQ ID NO: 1975742 - DNA, 15 bp, Homo sapiens
agaaaaagccaagaa

SEQ ID NO: 1975743 - DNA, 15 bp, Homo sapiens
gaaaaagccaagaat

SEQ ID NO: 1975744 - DNA, 15 bp, Homo sapiens
aaaaagccaagaatg

SEQ ID NO: 1975745 - DNA, 15 bp, Homo sapiens
aaaagccaagaatgc

SEQ ID NO: 1975746 - DNA, 15 bp, Homo sapiens
aaagccaagaatgcc

SEQ ID NO: 1975747 - DNA, 15 bp, Homo sapiens
aagccaagaatgccc

SEQ ID NO: 1975748 - DNA, 15 bp, Homo sapiens
agccaagaatgccca

SEQ ID NO: 1975749 - DNA, 15 bp, Homo sapiens
gccaagaatgcccag

SEQ ID NO: 1975750 - DNA, 15 bp, Homo sapiens
ccaagaatgcccagg

SEQ ID NO: 1975751 - DNA, 15 bp, Homo sapiens
caagaatgcccaggt

SEQ ID NO: 1975752 - DNA, 15 bp, Homo sapiens
aagaatgcccaggtt

SEQ ID NO: 1975753 - DNA, 15 bp, Homo sapiens
agaatgcccaggtta

SEQ ID NO: 1975754 - DNA, 15 bp, Homo sapiens
gaatgcccaggttag

SEQ ID NO: 1975755 - DNA, 15 bp, Homo sapiens
aatgcccaggttagc

SEQ ID NO: 1975756 - DNA, 15 bp, Homo sapiens
atgcccaggttagcc

SEQ ID NO: 1975757 - DNA, 15 bp, Homo sapiens
tgcccaggttagccc

SEQ ID NO: 1975758 - DNA, 15 bp, Homo sapiens
gcccaggttagcccc

SEQ ID NO: 1975759 - DNA, 15 bp, Homo sapiens
cccaggttagcccct

SEQ ID NO: 1975760 - DNA, 15 bp, Homo sapiens
ccaggttagcccctt

SEQ ID NO: 1975761 - DNA, 15 bp, Homo sapiens
caggttagcccctta

SEQ ID NO: 1975762 - DNA, 15 bp, Homo sapiens
aggttagccccttac

SEQ ID NO: 1975763 - DNA, 15 bp, Homo sapiens
ggttagccccttacc

SEQ ID NO: 1975764 - DNA, 15 bp, Homo sapiens
gttagccccttacca

SEQ ID NO: 1975765 - DNA, 15 bp, Homo sapiens
ttagccccttaccac

SEQ ID NO: 1975766 - DNA, 15 bp, Homo sapiens
tagccccttaccaca

SEQ ID NO: 1975767 - DNA, 15 bp, Homo sapiens
agccccttaccacag

SEQ ID NO: 1975768 - DNA, 15 bp, Homo sapiens
gccccttaccacaga

SEQ ID NO: 1975769 - DNA, 15 bp, Homo sapiens
ccccttaccacagag

SEQ ID NO: 1975770 - DNA, 15 bp, Homo sapiens
cccttaccacagaga

SEQ ID NO: 1975771 - DNA, 15 bp, Homo sapiens
ccttaccacagagat

SEQ ID NO: 1975772 - DNA, 15 bp, Homo sapiens
cttaccacagagata

SEQ ID NO: 1975773 - DNA, 15 bp, Homo sapiens
ttaccacagagatag

SEQ ID NO: 1975774 - DNA, 15 bp, Homo sapiens
taccacagagataga

SEQ ID NO: 1975775 - DNA, 15 bp, Homo sapiens
accacagagatagaa

SEQ ID NO: 1975776 - DNA, 15 bp, Homo sapiens
ccacagagatagaag

SEQ ID NO: 1975777 - DNA, 15 bp, Homo sapiens
cacagagatagaaga

SEQ ID NO: 1975778 - DNA, 15 bp, Homo sapiens
acagagatagaagag

SEQ ID NO: 1975779 - DNA, 15 bp, Homo sapiens
cagagatagaagaga

SEQ ID NO: 1975780 - DNA, 15 bp, Homo sapiens
agagatagaagagaa

SEQ ID NO: 1975781 - DNA, 15 bp, Homo sapiens
gagatagaagagaag

SEQ ID NO: 1975782 - DNA, 15 bp, Homo sapiens
agatagaagagaaga

SEQ ID NO: 1975783 - DNA, 15 bp, Homo sapiens
gatagaagagaagag

SEQ ID NO: 1975784 - DNA, 15 bp, Homo sapiens
atagaagagaagagc

SEQ ID NO: 1975785 - DNA, 15 bp, Homo sapiens
tagaagagaagagca

SEQ ID NO: 1975786 - DNA, 15 bp, Homo sapiens
agaagagaagagcaa

SEQ ID NO: 1975787 - DNA, 15 bp, Homo sapiens
gaagagaagagcaaa

SEQ ID NO: 1975788 - DNA, 15 bp, Homo sapiens
aagagaagagcaaaa

SEQ ID NO: 1975789 - DNA, 15 bp, Homo sapiens
agagaagagcaaaag

SEQ ID NO: 1975790 - DNA, 15 bp, Homo sapiens
gagaagagcaaaagt

SEQ ID NO: 1975791 - DNA, 15 bp, Homo sapiens
agaagagcaaaagtt

SEQ ID NO: 1975792 - DNA, 15 bp, Homo sapiens
gaagagcaaaagtta

SEQ ID NO: 1975793 - DNA, 15 bp, Homo sapiens
aagagcaaaagttag

SEQ ID NO: 1975794 - DNA, 15 bp, Homo sapiens
agagcaaaagttagg

SEQ ID NO: 1975795 - DNA, 15 bp, Homo sapiens
gagcaaaagttaggc

SEQ ID NO: 1975796 - DNA, 15 bp, Homo sapiens
agcaaaagttaggcc

SEQ ID NO: 1975797 - DNA, 15 bp, Homo sapiens
gcaaaagttaggcca

SEQ ID NO: 1975798 - DNA, 15 bp, Homo sapiens
caaaagttaggccag

SEQ ID NO: 1975799 - DNA, 15 bp, Homo sapiens
aaaagttaggccagg

SEQ ID NO: 1975800 - DNA, 15 bp, Homo sapiens
aaagttaggccagga

SEQ ID NO: 1975801 - DNA, 15 bp, Homo sapiens
aagttaggccaggac

SEQ ID NO: 1975802 - DNA, 15 bp, Homo sapiens
agttaggccaggaca

SEQ ID NO: 1975803 - DNA, 15 bp, Homo sapiens
gttaggccaggacag

SEQ ID NO: 1975804 - DNA, 15 bp, Homo sapiens
ttaggccaggacagc

SEQ ID NO: 1975805 - DNA, 15 bp, Homo sapiens
taggccaggacagcc

SEQ ID NO: 1975806 - DNA, 15 bp, Homo sapiens
aggccaggacagcca

SEQ ID NO: 1975807 - DNA, 15 bp, Homo sapiens
ggccaggacagccac

SEQ ID NO: 1975808 - DNA, 15 bp, Homo sapiens
gccaggacagccaca

SEQ ID NO: 1975809 - DNA, 15 bp, Homo sapiens
ccaggacagccacaa

SEQ ID NO: 1975810 - DNA, 15 bp, Homo sapiens
caggacagccacaag

SEQ ID NO: 1975811 - DNA, 15 bp, Homo sapiens
aggacagccacaagg

SEQ ID NO: 1975812 - DNA, 15 bp, Homo sapiens
ggacagccacaagga

SEQ ID NO: 1975813 - DNA, 15 bp, Homo sapiens
gacagccacaaggaa

SEQ ID NO: 1975814 - DNA, 15 bp, Homo sapiens
acagccacaaggaaa

SEQ ID NO: 1975815 - DNA, 15 bp, Homo sapiens
cagccacaaggaaaa

SEQ ID NO: 1975816 - DNA, 15 bp, Homo sapiens
agccacaaggaaaag

SEQ ID NO: 1975817 - DNA, 15 bp, Homo sapiens
gccacaaggaaaagg

SEQ ID NO: 1975818 - DNA, 15 bp, Homo sapiens
ccacaaggaaaagga

SEQ ID NO: 1975819 - DNA, 15 bp, Homo sapiens
cacaaggaaaaggac

SEQ ID NO: 1975820 - DNA, 15 bp, Homo sapiens
acaaggaaaaggaca

SEQ ID NO: 1975821 - DNA, 15 bp, Homo sapiens
caaggaaaaggacag

SEQ ID NO: 1975822 - DNA, 15 bp, Homo sapiens
aaggaaaaggacaga

SEQ ID NO: 1975823 - DNA, 15 bp, Homo sapiens
aggaaaaggacagag

SEQ ID NO: 1975824 - DNA, 15 bp, Homo sapiens
ggaaaaggacagagc

SEQ ID NO: 1975825 - DNA, 15 bp, Homo sapiens
gaaaaggacagagct

SEQ ID NO: 1975826 - DNA, 15 bp, Homo sapiens
aaaaggacagagctc

SEQ ID NO: 1975827 - DNA, 15 bp, Homo sapiens
aaaggacagagctca

SEQ ID NO: 1975828 - DNA, 15 bp, Homo sapiens
aaggacagagctcag

SEQ ID NO: 1975829 - DNA, 15 bp, Homo sapiens
aggacagagctcagg

SEQ ID NO: 1975830 - DNA, 15 bp, Homo sapiens
ggacagagctcaggt

SEQ ID NO: 1975831 - DNA, 15 bp, Homo sapiens
gacagagctcaggtt

SEQ ID NO: 1975832 - DNA, 15 bp, Homo sapiens
acagagctcaggtta

SEQ ID NO: 1975833 - DNA, 15 bp, Homo sapiens
cagagctcaggttaa

SEQ ID NO: 1975834 - DNA, 15 bp, Homo sapiens
agagctcaggttaac

SEQ ID NO: 1975835 - DNA, 15 bp, Homo sapiens
gagctcaggttaacc

SEQ ID NO: 1975836 - DNA, 15 bp, Homo sapiens
agctcaggttaaccc

SEQ ID NO: 1975837 - DNA, 15 bp, Homo sapiens
gctcaggttaaccct

SEQ ID NO: 1975838 - DNA, 15 bp, Homo sapiens
ctcaggttaaccctc

SEQ ID NO: 1975839 - DNA, 15 bp, Homo sapiens
tcaggttaaccctcc

SEQ ID NO: 1975840 - DNA, 15 bp, Homo sapiens
caggttaaccctcct

SEQ ID NO: 1975841 - DNA, 15 bp, Homo sapiens
aggttaaccctcctc

SEQ ID NO: 1975842 - DNA, 15 bp, Homo sapiens
ggttaaccctcctca

SEQ ID NO: 1975843 - DNA, 15 bp, Homo sapiens
gttaaccctcctcac

SEQ ID NO: 1975844 - DNA, 15 bp, Homo sapiens
ttaaccctcctcacc

SEQ ID NO: 1975845 - DNA, 15 bp, Homo sapiens
taaccctcctcacca

SEQ ID NO: 1975846 - DNA, 15 bp, Homo sapiens
aaccctcctcaccaa

SEQ ID NO: 1975847 - DNA, 15 bp, Homo sapiens
accctcctcaccaag

SEQ ID NO: 1975848 - DNA, 15 bp, Homo sapiens
ccctcctcaccaagg

SEQ ID NO: 1975849 - DNA, 15 bp, Homo sapiens
cctcctcaccaagga

SEQ ID NO: 1975850 - DNA, 15 bp, Homo sapiens
ctcctcaccaaggaa

SEQ ID NO: 1975851 - DNA, 15 bp, Homo sapiens
tcctcaccaaggaaa

SEQ ID NO: 1975852 - DNA, 15 bp, Homo sapiens
cctcaccaaggaaaa

SEQ ID NO: 1975853 - DNA, 15 bp, Homo sapiens
ctcaccaaggaaaaa

SEQ ID NO: 1975854 - DNA, 15 bp, Homo sapiens
tcaccaaggaaaaat

SEQ ID NO: 1975855 - DNA, 15 bp, Homo sapiens
caccaaggaaaaatc

SEQ ID NO: 1975856 - DNA, 15 bp, Homo sapiens
accaaggaaaaatca

SEQ ID NO: 1975857 - DNA, 15 bp, Homo sapiens
ccaaggaaaaatcag

SEQ ID NO: 1975858 - DNA, 15 bp, Homo sapiens
caaggaaaaatcagg

SEQ ID NO: 1975859 - DNA, 15 bp, Homo sapiens
aaggaaaaatcaggc

SEQ ID NO: 1975860 - DNA, 15 bp, Homo sapiens
aggaaaaatcaggct

SEQ ID NO: 1975861 - DNA, 15 bp, Homo sapiens
ggaaaaatcaggcta

SEQ ID NO: 1975862 - DNA, 15 bp, Homo sapiens
gaaaaatcaggctac

SEQ ID NO: 1975863 - DNA, 15 bp, Homo sapiens
aaaaatcaggctaca

SEQ ID NO: 1975864 - DNA, 15 bp, Homo sapiens
aaaatcaggctacac

SEQ ID NO: 1975865 - DNA, 15 bp, Homo sapiens
aaatcaggctacact

SEQ ID NO: 1975866 - DNA, 15 bp, Homo sapiens
aatcaggctacactt

SEQ ID NO: 1975867 - DNA, 15 bp, Homo sapiens
atcaggctacacttt

SEQ ID NO: 1975868 - DNA, 15 bp, Homo sapiens
tcaggctacactttc

SEQ ID NO: 1975869 - DNA, 15 bp, Homo sapiens
caggctacactttct

SEQ ID NO: 1975870 - DNA, 15 bp, Homo sapiens
aggctacactttctt

SEQ ID NO: 1975871 - DNA, 15 bp, Homo sapiens
ggctacactttcttt

SEQ ID NO: 1975872 - DNA, 15 bp, Homo sapiens
gctacactttctttc

SEQ ID NO: 1975873 - DNA, 15 bp, Homo sapiens
ctacactttctttct

SEQ ID NO: 1975874 - DNA, 15 bp, Homo sapiens
tacactttctttctc

SEQ ID NO: 1975875 - DNA, 15 bp, Homo sapiens
acactttctttctct

SEQ ID NO: 1975876 - DNA, 15 bp, Homo sapiens
cactttctttctcta

SEQ ID NO: 1975877 - DNA, 15 bp, Homo sapiens
actttctttctctac

SEQ ID NO: 1975878 - DNA, 15 bp, Homo sapiens
ctttctttctctacc

SEQ ID NO: 1975879 - DNA, 15 bp, Homo sapiens
tttctttctctaccc

SEQ ID NO: 1975880 - DNA, 15 bp, Homo sapiens
ttctttctctaccct

SEQ ID NO: 1975881 - DNA, 15 bp, Homo sapiens
tctttctctaccctc

SEQ ID NO: 1975882 - DNA, 15 bp, Homo sapiens
ctttctctaccctct

SEQ ID NO: 1975883 - DNA, 15 bp, Homo sapiens
tttctctaccctctt

SEQ ID NO: 1975884 - DNA, 15 bp, Homo sapiens
ttctctaccctcttc

SEQ ID NO: 1975885 - DNA, 15 bp, Homo sapiens
tctctaccctcttct

SEQ ID NO: 1975886 - DNA, 15 bp, Homo sapiens
ctctaccctcttctg

SEQ ID NO: 1975887 - DNA, 15 bp, Homo sapiens
tctaccctcttctga

SEQ ID NO: 1975888 - DNA, 15 bp, Homo sapiens
ctaccctcttctgaa

SEQ ID NO: 1975889 - DNA, 15 bp, Homo sapiens
taccctcttctgaaa

SEQ ID NO: 1975890 - DNA, 15 bp, Homo sapiens
accctcttctgaaaa

SEQ ID NO: 1975891 - DNA, 15 bp, Homo sapiens
ccctcttctgaaaag

SEQ ID NO: 1975892 - DNA, 15 bp, Homo sapiens
cctcttctgaaaaga

SEQ ID NO: 1975893 - DNA, 15 bp, Homo sapiens
ctcttctgaaaagaa

SEQ ID NO: 1975894 - DNA, 15 bp, Homo sapiens
tcttctgaaaagaaa

SEQ ID NO: 1975895 - DNA, 15 bp, Homo sapiens
cttctgaaaagaaat

SEQ ID NO: 1975896 - DNA, 15 bp, Homo sapiens
ttctgaaaagaaatg

SEQ ID NO: 1975897 - DNA, 15 bp, Homo sapiens
tctgaaaagaaatga

SEQ ID NO: 1975898 - DNA, 15 bp, Homo sapiens
ctgaaaagaaatgaa

SEQ ID NO: 1975899 - DNA, 15 bp, Homo sapiens
tgaaaagaaatgaag

SEQ ID NO: 1975900 - DNA, 15 bp, Homo sapiens
gaaaagaaatgaagc

SEQ ID NO: 1975901 - DNA, 15 bp, Homo sapiens
aaaagaaatgaagcc

SEQ ID NO: 1975902 - DNA, 15 bp, Homo sapiens
aaagaaatgaagccc

SEQ ID NO: 1975903 - DNA, 15 bp, Homo sapiens
aagaaatgaagcccg

SEQ ID NO: 1975904 - DNA, 15 bp, Homo sapiens
agaaatgaagcccgg

SEQ ID NO: 1975905 - DNA, 15 bp, Homo sapiens
gaaatgaagcccggt

SEQ ID NO: 1975906 - DNA, 15 bp, Homo sapiens
aaatgaagcccggtt

SEQ ID NO: 1975907 - DNA, 15 bp, Homo sapiens
aatgaagcccggtta

SEQ ID NO: 1975908 - DNA, 15 bp, Homo sapiens
atgaagcccggttaa

SEQ ID NO: 1975909 - DNA, 15 bp, Homo sapiens
tgaagcccggttaac

SEQ ID NO: 1975910 - DNA, 15 bp, Homo sapiens
gaagcccggttaacc

SEQ ID NO: 1975911 - DNA, 15 bp, Homo sapiens
aagcccggttaaccc

SEQ ID NO: 1975912 - DNA, 15 bp, Homo sapiens
agcccggttaaccct

SEQ ID NO: 1975913 - DNA, 15 bp, Homo sapiens
gcccggttaaccctc

SEQ ID NO: 1975914 - DNA, 15 bp, Homo sapiens
cccggttaaccctct

SEQ ID NO: 1975915 - DNA, 15 bp, Homo sapiens
ccggttaaccctctc

SEQ ID NO: 1975916 - DNA, 15 bp, Homo sapiens
cggttaaccctctcc

SEQ ID NO: 1975917 - DNA, 15 bp, Homo sapiens
ggttaaccctctcca

SEQ ID NO: 1975918 - DNA, 15 bp, Homo sapiens
gttaaccctctccac

SEQ ID NO: 1975919 - DNA, 15 bp, Homo sapiens
ttaaccctctccaca

SEQ ID NO: 1975920 - DNA, 15 bp, Homo sapiens
taaccctctccacac

SEQ ID NO: 1975921 - DNA, 15 bp, Homo sapiens
aaccctctccacacc

SEQ ID NO: 1975922 - DNA, 15 bp, Homo sapiens
accctctccacaccc

SEQ ID NO: 1975923 - DNA, 15 bp, Homo sapiens
ccctctccacaccca

SEQ ID NO: 1975924 - DNA, 15 bp, Homo sapiens
cctctccacacccaa

SEQ ID NO: 1975925 - DNA, 15 bp, Homo sapiens
ctctccacacccaaa

SEQ ID NO: 1975926 - DNA, 15 bp, Homo sapiens
tctccacacccaaaa

SEQ ID NO: 1975927 - DNA, 15 bp, Homo sapiens
ctccacacccaaaag

SEQ ID NO: 1975928 - DNA, 15 bp, Homo sapiens
tccacacccaaaaga

SEQ ID NO: 1975929 - DNA, 15 bp, Homo sapiens
ccacacccaaaagaa

SEQ ID NO: 1975930 - DNA, 15 bp, Homo sapiens
cacacccaaaagaaa

SEQ ID NO: 1975931 - DNA, 15 bp, Homo sapiens
acacccaaaagaaaa

SEQ ID NO: 1975932 - DNA, 15 bp, Homo sapiens
cacccaaaagaaaag

SEQ ID NO: 1975933 - DNA, 15 bp, Homo sapiens
acccaaaagaaaagg

SEQ ID NO: 1975934 - DNA, 15 bp, Homo sapiens
cccaaaagaaaaggg

SEQ ID NO: 1975935 - DNA, 15 bp, Homo sapiens
ccaaaagaaaaggga

SEQ ID NO: 1975936 - DNA, 15 bp, Homo sapiens
caaaagaaaagggaa

SEQ ID NO: 1975937 - DNA, 15 bp, Homo sapiens
aaaagaaaagggaag

SEQ ID NO: 1975938 - DNA, 15 bp, Homo sapiens
aaagaaaagggaaga

SEQ ID NO: 1975939 - DNA, 15 bp, Homo sapiens
aagaaaagggaagag

SEQ ID NO: 1975940 - DNA, 15 bp, Homo sapiens
agaaaagggaagagg

SEQ ID NO: 1975941 - DNA, 15 bp, Homo sapiens
gaaaagggaagaggc

SEQ ID NO: 1975942 - DNA, 15 bp, Homo sapiens
aaaagggaagaggcc

SEQ ID NO: 1975943 - DNA, 15 bp, Homo sapiens
aaagggaagaggccc

SEQ ID NO: 1975944 - DNA, 15 bp, Homo sapiens
aagggaagaggcccg

SEQ ID NO: 1975945 - DNA, 15 bp, Homo sapiens
agggaagaggcccgc

SEQ ID NO: 1975946 - DNA, 15 bp, Homo sapiens
gggaagaggcccgct

SEQ ID NO: 1975947 - DNA, 15 bp, Homo sapiens
ggaagaggcccgcta

SEQ ID NO: 1975948 - DNA, 15 bp, Homo sapiens
gaagaggcccgctaa

SEQ ID NO: 1975949 - DNA, 15 bp, Homo sapiens
aagaggcccgctaag

SEQ ID NO: 1975950 - DNA, 15 bp, Homo sapiens
agaggcccgctaagc

SEQ ID NO: 1975951 - DNA, 15 bp, Homo sapiens
gaggcccgctaagcc

SEQ ID NO: 1975952 - DNA, 15 bp, Homo sapiens
aggcccgctaagcct

SEQ ID NO: 1975953 - DNA, 15 bp, Homo sapiens
ggcccgctaagcctg

SEQ ID NO: 1975954 - DNA, 15 bp, Homo sapiens
gcccgctaagcctgg

SEQ ID NO: 1975955 - DNA, 15 bp, Homo sapiens
cccgctaagcctgga

SEQ ID NO: 1975956 - DNA, 15 bp, Homo sapiens
ccgctaagcctggag

SEQ ID NO: 1975957 - DNA, 15 bp, Homo sapiens
cgctaagcctggaga

SEQ ID NO: 1975958 - DNA, 15 bp, Homo sapiens
gctaagcctggagag

SEQ ID NO: 1975959 - DNA, 15 bp, Homo sapiens
ctaagcctggagagc

SEQ ID NO: 1975960 - DNA, 15 bp, Homo sapiens
taagcctggagagcc

SEQ ID NO: 1975961 - DNA, 15 bp, Homo sapiens
aagcctggagagcca

SEQ ID NO: 1975962 - DNA, 15 bp, Homo sapiens
agcctggagagccac

SEQ ID NO: 1975963 - DNA, 15 bp, Homo sapiens
gcctggagagccaca

SEQ ID NO: 1975964 - DNA, 15 bp, Homo sapiens
cctggagagccacac

SEQ ID NO: 1975965 - DNA, 15 bp, Homo sapiens
ctggagagccacaca

SEQ ID NO: 1975966 - DNA, 15 bp, Homo sapiens
tggagagccacacac

SEQ ID NO: 1975967 - DNA, 15 bp, Homo sapiens
ggagagccacacaca

SEQ ID NO: 1975968 - DNA, 15 bp, Homo sapiens
gagagccacacacag

SEQ ID NO: 1975969 - DNA, 15 bp, Homo sapiens
agagccacacacagg

SEQ ID NO: 1975970 - DNA, 15 bp, Homo sapiens
gagccacacacaggc

SEQ ID NO: 1975971 - DNA, 15 bp, Homo sapiens
agccacacacaggca

SEQ ID NO: 1975972 - DNA, 15 bp, Homo sapiens
gccacacacaggcaa

SEQ ID NO: 1975973 - DNA, 15 bp, Homo sapiens
ccacacacaggcaaa

SEQ ID NO: 1975974 - DNA, 15 bp, Homo sapiens
cacacacaggcaaag

SEQ ID NO: 1975975 - DNA, 15 bp, Homo sapiens
acacacaggcaaaga

SEQ ID NO: 1975976 - DNA, 15 bp, Homo sapiens
cacacaggcaaagaa

SEQ ID NO: 1975977 - DNA, 15 bp, Homo sapiens
acacaggcaaagaaa

SEQ ID NO: 1975978 - DNA, 15 bp, Homo sapiens
cacaggcaaagaaaa

SEQ ID NO: 1975979 - DNA, 15 bp, Homo sapiens
acaggcaaagaaaag

SEQ ID NO: 1975980 - DNA, 15 bp, Homo sapiens
caggcaaagaaaaga

SEQ ID NO: 1975981 - DNA, 15 bp, Homo sapiens
aggcaaagaaaagag

SEQ ID NO: 1975982 - DNA, 15 bp, Homo sapiens
ggcaaagaaaagagc

SEQ ID NO: 1975983 - DNA, 15 bp, Homo sapiens
gcaaagaaaagagcc

SEQ ID NO: 1975984 - DNA, 15 bp, Homo sapiens
caaagaaaagagcct

SEQ ID NO: 1975985 - DNA, 15 bp, Homo sapiens
aaagaaaagagcctg

SEQ ID NO: 1975986 - DNA, 15 bp, Homo sapiens
aagaaaagagcctgg

SEQ ID NO: 1975987 - DNA, 15 bp, Homo sapiens
agaaaagagcctggc

SEQ ID NO: 1975988 - DNA, 15 bp, Homo sapiens
gaaaagagcctggct

SEQ ID NO: 1975989 - DNA, 15 bp, Homo sapiens
aaaagagcctggcta

SEQ ID NO: 1975990 - DNA, 15 bp, Homo sapiens
aaagagcctggctaa

SEQ ID NO: 1975991 - DNA, 15 bp, Homo sapiens
aagagcctggctaat

SEQ ID NO: 1975992 - DNA, 15 bp, Homo sapiens
agagcctggctaatc

SEQ ID NO: 1975993 - DNA, 15 bp, Homo sapiens
gagcctggctaatct

SEQ ID NO: 1975994 - DNA, 15 bp, Homo sapiens
agcctggctaatctt

SEQ ID NO: 1975995 - DNA, 15 bp, Homo sapiens
tggctaatctttctc

SEQ ID NO: 1975996 - DNA, 15 bp, Homo sapiens
ggctaatctttctct

SEQ ID NO: 1975997 - DNA, 15 bp, Homo sapiens
gctaatctttctctc

SEQ ID NO: 1975998 - DNA, 15 bp, Homo sapiens
ctaatctttctctca

SEQ ID NO: 1975999 - DNA, 15 bp, Homo sapiens
taatctttctctcag

SEQ ID NO: 1976000 - DNA, 15 bp, Homo sapiens
aatctttctctcagg

SEQ ID NO: 1976001 - DNA, 15 bp, Homo sapiens
atctttctctcaggc

SEQ ID NO: 1976002 - DNA, 15 bp, Homo sapiens
tctttctctcaggca

SEQ ID NO: 1976003 - DNA, 15 bp, Homo sapiens
ctttctctcaggcaa

SEQ ID NO: 1976004 - DNA, 15 bp, Homo sapiens
tttctctcaggcaaa

SEQ ID NO: 1976005 - DNA, 15 bp, Homo sapiens
ttctctcaggcaaac

SEQ ID NO: 1976006 - DNA, 15 bp, Homo sapiens
tctctcaggcaaaca

SEQ ID NO: 1976007 - DNA, 15 bp, Homo sapiens
ctctcaggcaaacaa

SEQ ID NO: 1976008 - DNA, 15 bp, Homo sapiens
tctcaggcaaacaaa

SEQ ID NO: 1976009 - DNA, 15 bp, Homo sapiens
ctcaggcaaacaaag

SEQ ID NO: 1976010 - DNA, 15 bp, Homo sapiens
tcaggcaaacaaagc

SEQ ID NO: 1976011 - DNA, 15 bp, Homo sapiens
caggcaaacaaagca

SEQ ID NO: 1976012 - DNA, 15 bp, Homo sapiens
aggcaaacaaagcag

SEQ ID NO: 1976013 - DNA, 15 bp, Homo sapiens
ggcaaacaaagcagg

SEQ ID NO: 1976014 - DNA, 15 bp, Homo sapiens
gcaaacaaagcagga

SEQ ID NO: 1976015 - DNA, 15 bp, Homo sapiens
caaacaaagcaggag

SEQ ID NO: 1976016 - DNA, 15 bp, Homo sapiens
aaacaaagcaggagg

SEQ ID NO: 1976017 - DNA, 15 bp, Homo sapiens
aacaaagcaggaggg

SEQ ID NO: 1976018 - DNA, 15 bp, Homo sapiens
acaaagcaggagggc

SEQ ID NO: 1976019 - DNA, 15 bp, Homo sapiens
caaagcaggagggct

SEQ ID NO: 1976020 - DNA, 15 bp, Homo sapiens
aaagcaggagggctt

SEQ ID NO: 1976021 - DNA, 15 bp, Homo sapiens
aagcaggagggcttg

SEQ ID NO: 1976022 - DNA, 15 bp, Homo sapiens
agcaggagggcttgg

SEQ ID NO: 1976023 - DNA, 15 bp, Homo sapiens
gcaggagggcttggg

SEQ ID NO: 1976024 - DNA, 15 bp, Homo sapiens
caggagggcttgggt

SEQ ID NO: 1976025 - DNA, 15 bp, Homo sapiens
aggagggcttgggtt

SEQ ID NO: 1976026 - DNA, 15 bp, Homo sapiens
ggagggcttgggtta

SEQ ID NO: 1976027 - DNA, 15 bp, Homo sapiens
gagggcttgggttaa

SEQ ID NO: 1976028 - DNA, 15 bp, Homo sapiens
agggcttgggttaac

SEQ ID NO: 1976029 - DNA, 15 bp, Homo sapiens
gggcttgggttaact

SEQ ID NO: 1976030 - DNA, 15 bp, Homo sapiens
ggcttgggttaacta

SEQ ID NO: 1976031 - DNA, 15 bp, Homo sapiens
gcttgggttaactac

SEQ ID NO: 1976032 - DNA, 15 bp, Homo sapiens
cttgggttaactacc

SEQ ID NO: 1976033 - DNA, 15 bp, Homo sapiens
ttgggttaactaccc

SEQ ID NO: 1976034 - DNA, 15 bp, Homo sapiens
tgggttaactaccct

SEQ ID NO: 1976035 - DNA, 15 bp, Homo sapiens
gggttaactaccctc

SEQ ID NO: 1976036 - DNA, 15 bp, Homo sapiens
ggttaactaccctca

SEQ ID NO: 1976037 - DNA, 15 bp, Homo sapiens
gttaactaccctcac

SEQ ID NO: 1976038 - DNA, 15 bp, Homo sapiens
ttaactaccctcacc

SEQ ID NO: 1976039 - DNA, 15 bp, Homo sapiens
taactaccctcaccc

SEQ ID NO: 1976040 - DNA, 15 bp, Homo sapiens
aactaccctcacccc

SEQ ID NO: 1976041 - DNA, 15 bp, Homo sapiens
actaccctcaccccc

SEQ ID NO: 1976042 - DNA, 15 bp, Homo sapiens
ctaccctcaccccca

SEQ ID NO: 1976043 - DNA, 15 bp, Homo sapiens
taccctcacccccag

SEQ ID NO: 1976044 - DNA, 15 bp, Homo sapiens
accctcacccccagg

SEQ ID NO: 1976045 - DNA, 15 bp, Homo sapiens
ccctcacccccaggc

SEQ ID NO: 1976046 - DNA, 15 bp, Homo sapiens
cctcacccccaggca

SEQ ID NO: 1976047 - DNA, 15 bp, Homo sapiens
ctcacccccaggcag

SEQ ID NO: 1976048 - DNA, 15 bp, Homo sapiens
tcacccccaggcaga

SEQ ID NO: 1976049 - DNA, 15 bp, Homo sapiens
cacccccaggcagat

SEQ ID NO: 1976050 - DNA, 15 bp, Homo sapiens
acccccaggcagatg

SEQ ID NO: 1976051 - DNA, 15 bp, Homo sapiens
cccccaggcagatgg

SEQ ID NO: 1976052 - DNA, 15 bp, Homo sapiens
ccccaggcagatgga

SEQ ID NO: 1976053 - DNA, 15 bp, Homo sapiens
cccaggcagatggaa

SEQ ID NO: 1976054 - DNA, 15 bp, Homo sapiens
ccaggcagatggaaa

SEQ ID NO: 1976055 - DNA, 15 bp, Homo sapiens
caggcagatggaaag

SEQ ID NO: 1976056 - DNA, 15 bp, Homo sapiens
aggcagatggaaaga

SEQ ID NO: 1976057 - DNA, 15 bp, Homo sapiens
ggcagatggaaagag

SEQ ID NO: 1976058 - DNA, 15 bp, Homo sapiens
gcagatggaaagagg

SEQ ID NO: 1976059 - DNA, 15 bp, Homo sapiens
cagatggaaagagga

SEQ ID NO: 1976060 - DNA, 15 bp, Homo sapiens
agatggaaagaggag

SEQ ID NO: 1976061 - DNA, 15 bp, Homo sapiens
gatggaaagaggaga

SEQ ID NO: 1976062 - DNA, 15 bp, Homo sapiens
atggaaagaggagag

SEQ ID NO: 1976063 - DNA, 15 bp, Homo sapiens
tggaaagaggagagc

SEQ ID NO: 1976064 - DNA, 15 bp, Homo sapiens
ggaaagaggagagcc

SEQ ID NO: 1976065 - DNA, 15 bp, Homo sapiens
gaaagaggagagccc

SEQ ID NO: 1976066 - DNA, 15 bp, Homo sapiens
aaagaggagagccca

SEQ ID NO: 1976067 - DNA, 15 bp, Homo sapiens
aagaggagagcccag

SEQ ID NO: 1976068 - DNA, 15 bp, Homo sapiens
agaggagagcccagg

SEQ ID NO: 1976069 - DNA, 15 bp, Homo sapiens
gaggagagcccagga

SEQ ID NO: 1976070 - DNA, 15 bp, Homo sapiens
aggagagcccaggaa

SEQ ID NO: 1976071 - DNA, 15 bp, Homo sapiens
ggagagcccaggaat

SEQ ID NO: 1976072 - DNA, 15 bp, Homo sapiens
gagagcccaggaata

SEQ ID NO: 1976073 - DNA, 15 bp, Homo sapiens
agagcccaggaatag

SEQ ID NO: 1976074 - DNA, 15 bp, Homo sapiens
gagcccaggaatagc

SEQ ID NO: 1976075 - DNA, 15 bp, Homo sapiens
agcccaggaatagcc

SEQ ID NO: 1976076 - DNA, 15 bp, Homo sapiens
gcccaggaatagccc

SEQ ID NO: 1976077 - DNA, 15 bp, Homo sapiens
cccaggaatagccct

SEQ ID NO: 1976078 - DNA, 15 bp, Homo sapiens
ccaggaatagccctt

SEQ ID NO: 1976079 - DNA, 15 bp, Homo sapiens
caggaatagcccttc

SEQ ID NO: 1976080 - DNA, 15 bp, Homo sapiens
aggaatagcccttct

SEQ ID NO: 1976081 - DNA, 15 bp, Homo sapiens
ggaatagcccttctc

SEQ ID NO: 1976082 - DNA, 15 bp, Homo sapiens
gaatagcccttctcc

SEQ ID NO: 1976083 - DNA, 15 bp, Homo sapiens
aatagcccttctcca

SEQ ID NO: 1976084 - DNA, 15 bp, Homo sapiens
atagcccttctccac

SEQ ID NO: 1976085 - DNA, 15 bp, Homo sapiens
tagcccttctccact

SEQ ID NO: 1976086 - DNA, 15 bp, Homo sapiens
agcccttctccactg

SEQ ID NO: 1976087 - DNA, 15 bp, Homo sapiens
gcccttctccactga

SEQ ID NO: 1976088 - DNA, 15 bp, Homo sapiens
cccttctccactgag

SEQ ID NO: 1976089 - DNA, 15 bp, Homo sapiens
ccttctccactgagg

SEQ ID NO: 1976090 - DNA, 15 bp, Homo sapiens
cttctccactgaggg

SEQ ID NO: 1976091 - DNA, 15 bp, Homo sapiens
ttctccactgagggg

SEQ ID NO: 1976092 - DNA, 15 bp, Homo sapiens
tctccactgaggggt

SEQ ID NO: 1976093 - DNA, 15 bp, Homo sapiens
ctccactgaggggtt

SEQ ID NO: 1976094 - DNA, 15 bp, Homo sapiens
tccactgaggggttg

SEQ ID NO: 1976095 - DNA, 15 bp, Homo sapiens
ccactgaggggttga

SEQ ID NO: 1976096 - DNA, 15 bp, Homo sapiens
cactgaggggttgac

SEQ ID NO: 1976097 - DNA, 15 bp, Homo sapiens
actgaggggttgaca

SEQ ID NO: 1976098 - DNA, 15 bp, Homo sapiens
ctgaggggttgacaa

SEQ ID NO: 1976099 - DNA, 15 bp, Homo sapiens
tgaggggttgacaag

SEQ ID NO: 1976100 - DNA, 15 bp, Homo sapiens
gaggggttgacaagg

SEQ ID NO: 1976101 - DNA, 15 bp, Homo sapiens
aggggttgacaaggg

SEQ ID NO: 1976102 - DNA, 15 bp, Homo sapiens
ggggttgacaagggc

SEQ ID NO: 1976103 - DNA, 15 bp, Homo sapiens
gggttgacaagggcg

SEQ ID NO: 1976104 - DNA, 15 bp, Homo sapiens
ggttgacaagggcgg

SEQ ID NO: 1976105 - DNA, 15 bp, Homo sapiens
gttgacaagggcggg

SEQ ID NO: 1976106 - DNA, 15 bp, Homo sapiens
ttgacaagggcgggt

SEQ ID NO: 1976107 - DNA, 15 bp, Homo sapiens
tgacaagggcgggtg

SEQ ID NO: 1976108 - DNA, 15 bp, Homo sapiens
gacaagggcgggtgt

SEQ ID NO: 1976109 - DNA, 15 bp, Homo sapiens
acaagggcgggtgtg

SEQ ID NO: 1976110 - DNA, 15 bp, Homo sapiens
caagggcgggtgtga

SEQ ID NO: 1976111 - DNA, 15 bp, Homo sapiens
aagggcgggtgtgag

SEQ ID NO: 1976112 - DNA, 15 bp, Homo sapiens
agggcgggtgtgagc

SEQ ID NO: 1976113 - DNA, 15 bp, Homo sapiens
gggcgggtgtgagcc

SEQ ID NO: 1976114 - DNA, 15 bp, Homo sapiens
ggcgggtgtgagccg

SEQ ID NO: 1976115 - DNA, 15 bp, Homo sapiens
gcgggtgtgagccgg

SEQ ID NO: 1976116 - DNA, 15 bp, Homo sapiens
cgggtgtgagccggg

SEQ ID NO: 1976117 - DNA, 15 bp, Homo sapiens
gggtgtgagccggga

SEQ ID NO: 1976118 - DNA, 15 bp, Homo sapiens
ggtgtgagccgggaa

SEQ ID NO: 1976119 - DNA, 15 bp, Homo sapiens
gtgtgagccgggaaa

SEQ ID NO: 1976120 - DNA, 15 bp, Homo sapiens
tgtgagccgggaaag

SEQ ID NO: 1976121 - DNA, 15 bp, Homo sapiens
gtgagccgggaaagc

SEQ ID NO: 1976122 - DNA, 15 bp, Homo sapiens
tgagccgggaaagca

SEQ ID NO: 1976123 - DNA, 15 bp, Homo sapiens
gagccgggaaagcag

SEQ ID NO: 1976124 - DNA, 15 bp, Homo sapiens
agccgggaaagcagg

SEQ ID NO: 1976125 - DNA, 15 bp, Homo sapiens
gccgggaaagcaggg

SEQ ID NO: 1976126 - DNA, 15 bp, Homo sapiens
ccgggaaagcagggg

SEQ ID NO: 1976127 - DNA, 15 bp, Homo sapiens
cgggaaagcaggggt

SEQ ID NO: 1976128 - DNA, 15 bp, Homo sapiens
gggaaagcaggggtc

SEQ ID NO: 1976129 - DNA, 15 bp, Homo sapiens
ggaaagcaggggtct

SEQ ID NO: 1976130 - DNA, 15 bp, Homo sapiens
gaaagcaggggtctc

SEQ ID NO: 1976131 - DNA, 15 bp, Homo sapiens
aaagcaggggtctca

SEQ ID NO: 1976132 - DNA, 15 bp, Homo sapiens
aagcaggggtctcac

SEQ ID NO: 1976133 - DNA, 15 bp, Homo sapiens
agcaggggtctcaca

SEQ ID NO: 1976134 - DNA, 15 bp, Homo sapiens
gcaggggtctcacat

SEQ ID NO: 1976135 - DNA, 15 bp, Homo sapiens
caggggtctcacatg

SEQ ID NO: 1976136 - DNA, 15 bp, Homo sapiens
aggggtctcacatgc

SEQ ID NO: 1976137 - DNA, 15 bp, Homo sapiens
ggggtctcacatgcc

SEQ ID NO: 1976138 - DNA, 15 bp, Homo sapiens
gggtctcacatgcct

SEQ ID NO: 1976139 - DNA, 15 bp, Homo sapiens
ggtctcacatgcctt

SEQ ID NO: 1976140 - DNA, 15 bp, Homo sapiens
gtctcacatgccttc

SEQ ID NO: 1976141 - DNA, 15 bp, Homo sapiens
tctcacatgccttct

SEQ ID NO: 1976142 - DNA, 15 bp, Homo sapiens
ctcacatgccttctc

SEQ ID NO: 1976143 - DNA, 15 bp, Homo sapiens
tcacatgccttctcc

SEQ ID NO: 1976144 - DNA, 15 bp, Homo sapiens
cacatgccttctccc

SEQ ID NO: 1976145 - DNA, 15 bp, Homo sapiens
acatgccttctcccc

SEQ ID NO: 1976146 - DNA, 15 bp, Homo sapiens
catgccttctcccca

SEQ ID NO: 1976147 - DNA, 15 bp, Homo sapiens
atgccttctccccac

SEQ ID NO: 1976148 - DNA, 15 bp, Homo sapiens
tgccttctccccacc

SEQ ID NO: 1976149 - DNA, 15 bp, Homo sapiens
gccttctccccacca

SEQ ID NO: 1976150 - DNA, 15 bp, Homo sapiens
ccttctccccaccat

SEQ ID NO: 1976151 - DNA, 15 bp, Homo sapiens
cttctccccaccatg

SEQ ID NO: 1976152 - DNA, 15 bp, Homo sapiens
ttctccccaccatgt

SEQ ID NO: 1976153 - DNA, 15 bp, Homo sapiens
tctccccaccatgtc

SEQ ID NO: 1976154 - DNA, 15 bp, Homo sapiens
ctccccaccatgtct

SEQ ID NO: 1976155 - DNA, 15 bp, Homo sapiens
tccccaccatgtctg

SEQ ID NO: 1976156 - DNA, 15 bp, Homo sapiens
ccccaccatgtctgg

SEQ ID NO: 1976157 - DNA, 15 bp, Homo sapiens
cccaccatgtctggg

SEQ ID NO: 1976158 - DNA, 15 bp, Homo sapiens
ccaccatgtctgggt

SEQ ID NO: 1976159 - DNA, 15 bp, Homo sapiens
caccatgtctgggtc

SEQ ID NO: 1976160 - DNA, 15 bp, Homo sapiens
accatgtctgggtct

SEQ ID NO: 1976161 - DNA, 15 bp, Homo sapiens
ccatgtctgggtcta

SEQ ID NO: 1976162 - DNA, 15 bp, Homo sapiens
catgtctgggtctag

SEQ ID NO: 1976163 - DNA, 15 bp, Homo sapiens
atgtctgggtctagc

SEQ ID NO: 1976164 - DNA, 15 bp, Homo sapiens
tgtctgggtctagca

SEQ ID NO: 1976165 - DNA, 15 bp, Homo sapiens
gtctgggtctagcac

SEQ ID NO: 1976166 - DNA, 15 bp, Homo sapiens
tctgggtctagcaca

SEQ ID NO: 1976167 - DNA, 15 bp, Homo sapiens
ctgggtctagcacag

SEQ ID NO: 1976168 - DNA, 15 bp, Homo sapiens
tgggtctagcacagg

SEQ ID NO: 1976169 - DNA, 15 bp, Homo sapiens
gggtctagcacaggg

SEQ ID NO: 1976170 - DNA, 15 bp, Homo sapiens
ggtctagcacagggc

SEQ ID NO: 1976171 - DNA, 15 bp, Homo sapiens
gtctagcacagggcc

SEQ ID NO: 1976172 - DNA, 15 bp, Homo sapiens
tctagcacagggcct

SEQ ID NO: 1976173 - DNA, 15 bp, Homo sapiens
ctagcacagggcctg

SEQ ID NO: 1976174 - DNA, 15 bp, Homo sapiens
tagcacagggcctgg

SEQ ID NO: 1976175 - DNA, 15 bp, Homo sapiens
acagggcctggcaca

SEQ ID NO: 1976176 - DNA, 15 bp, Homo sapiens
cagggcctggcacac

SEQ ID NO: 1976177 - DNA, 15 bp, Homo sapiens
agggcctggcacaca

SEQ ID NO: 1976178 - DNA, 15 bp, Homo sapiens
gggcctggcacacac

SEQ ID NO: 1976179 - DNA, 15 bp, Homo sapiens
ggcctggcacacacc

SEQ ID NO: 1976180 - DNA, 15 bp, Homo sapiens
gcctggcacacacct

SEQ ID NO: 1976181 - DNA, 15 bp, Homo sapiens
cctggcacacacctc

SEQ ID NO: 1976182 - DNA, 15 bp, Homo sapiens
ctggcacacacctcg

SEQ ID NO: 1976183 - DNA, 15 bp, Homo sapiens
tggcacacacctcga

SEQ ID NO: 1976184 - DNA, 15 bp, Homo sapiens
ggcacacacctcgag

SEQ ID NO: 1976185 - DNA, 15 bp, Homo sapiens
gcacacacctcgagc

SEQ ID NO: 1976186 - DNA, 15 bp, Homo sapiens
cacacacctcgagcg

SEQ ID NO: 1976187 - DNA, 15 bp, Homo sapiens
acacacctcgagcgc

SEQ ID NO: 1976188 - DNA, 15 bp, Homo sapiens
cacacctcgagcgct

SEQ ID NO: 1976189 - DNA, 15 bp, Homo sapiens
acacctcgagcgctc

SEQ ID NO: 1976190 - DNA, 15 bp, Homo sapiens
cacctcgagcgctct

SEQ ID NO: 1976191 - DNA, 15 bp, Homo sapiens
acctcgagcgctcta

SEQ ID NO: 1976192 - DNA, 15 bp, Homo sapiens
cctcgagcgctctat

SEQ ID NO: 1976193 - DNA, 15 bp, Homo sapiens
ctcgagcgctctata

SEQ ID NO: 1976194 - DNA, 15 bp, Homo sapiens
tcgagcgctctataa

SEQ ID NO: 1976195 - DNA, 15 bp, Homo sapiens
cgagcgctctataaa

SEQ ID NO: 1976196 - DNA, 15 bp, Homo sapiens
gagcgctctataaac

SEQ ID NO: 1976197 - DNA, 15 bp, Homo sapiens
agcgctctataaaca

SEQ ID NO: 1976198 - DNA, 15 bp, Homo sapiens
gcgctctataaacac

SEQ ID NO: 1976199 - DNA, 15 bp, Homo sapiens
cgctctataaacacc

SEQ ID NO: 1976200 - DNA, 15 bp, Homo sapiens
gctctataaacaccg

SEQ ID NO: 1976201 - DNA, 15 bp, Homo sapiens
ctctataaacaccga

SEQ ID NO: 1976202 - DNA, 15 bp, Homo sapiens
tctataaacaccgac

SEQ ID NO: 1976203 - DNA, 15 bp, Homo sapiens
ctataaacaccgact

SEQ ID NO: 1976204 - DNA, 15 bp, Homo sapiens
tataaacaccgactg

SEQ ID NO: 1976205 - DNA, 15 bp, Homo sapiens
ataaacaccgactga

SEQ ID NO: 1976206 - DNA, 15 bp, Homo sapiens
taaacaccgactgaa

SEQ ID NO: 1976207 - DNA, 15 bp, Homo sapiens
aaacaccgactgaat

SEQ ID NO: 1976208 - DNA, 15 bp, Homo sapiens
aacaccgactgaatg

SEQ ID NO: 1976209 - DNA, 15 bp, Homo sapiens
acaccgactgaatgg

SEQ ID NO: 1976210 - DNA, 15 bp, Homo sapiens
caccgactgaatgga

SEQ ID NO: 1976211 - DNA, 15 bp, Homo sapiens
accgactgaatggag

SEQ ID NO: 1976212 - DNA, 15 bp, Homo sapiens
ccgactgaatggagg

SEQ ID NO: 1976213 - DNA, 15 bp, Homo sapiens
cgactgaatggaggg

SEQ ID NO: 1976214 - DNA, 15 bp, Homo sapiens
gactgaatggagggg

SEQ ID NO: 1976215 - DNA, 15 bp, Homo sapiens
actgaatggaggggt

SEQ ID NO: 1976216 - DNA, 15 bp, Homo sapiens
ctgaatggaggggtc

SEQ ID NO: 1976217 - DNA, 15 bp, Homo sapiens
tgaatggaggggtca

SEQ ID NO: 1976218 - DNA, 15 bp, Homo sapiens
gaatggaggggtcag

SEQ ID NO: 1976219 - DNA, 15 bp, Homo sapiens
aatggaggggtcagc

SEQ ID NO: 1976220 - DNA, 15 bp, Homo sapiens
atggaggggtcagct

SEQ ID NO: 1976221 - DNA, 15 bp, Homo sapiens
tggaggggtcagctt

SEQ ID NO: 1976222 - DNA, 15 bp, Homo sapiens
ggaggggtcagcttc

SEQ ID NO: 1976223 - DNA, 15 bp, Homo sapiens
gaggggtcagcttcc

SEQ ID NO: 1976224 - DNA, 15 bp, Homo sapiens
aggggtcagcttcca

SEQ ID NO: 1976225 - DNA, 15 bp, Homo sapiens
ggggtcagcttccat

SEQ ID NO: 1976226 - DNA, 15 bp, Homo sapiens
gggtcagcttccatg

SEQ ID NO: 1976227 - DNA, 15 bp, Homo sapiens
ggtcagcttccatgc

SEQ ID NO: 1976228 - DNA, 15 bp, Homo sapiens
gtcagcttccatgca

SEQ ID NO: 1976229 - DNA, 15 bp, Homo sapiens
tcagcttccatgcag

SEQ ID NO: 1976230 - DNA, 15 bp, Homo sapiens
cagcttccatgcagg

SEQ ID NO: 1976231 - DNA, 15 bp, Homo sapiens
agcttccatgcagga

SEQ ID NO: 1976232 - DNA, 15 bp, Homo sapiens
cttccatgcaggata

SEQ ID NO: 1976233 - DNA, 15 bp, Homo sapiens
ttccatgcaggatat

SEQ ID NO: 1976234 - DNA, 15 bp, Homo sapiens
tccatgcaggatatg

SEQ ID NO: 1976235 - DNA, 15 bp, Homo sapiens
ccatgcaggatatgg

SEQ ID NO: 1976236 - DNA, 15 bp, Homo sapiens
catgcaggatatggg

SEQ ID NO: 1976237 - DNA, 15 bp, Homo sapiens
atgcaggatatggga

SEQ ID NO: 1976238 - DNA, 15 bp, Homo sapiens
tgcaggatatgggag

SEQ ID NO: 1976239 - DNA, 15 bp, Homo sapiens
gcaggatatgggaga

SEQ ID NO: 1976240 - DNA, 15 bp, Homo sapiens
caggatatgggagac

SEQ ID NO: 1976241 - DNA, 15 bp, Homo sapiens
aggatatgggagaca

SEQ ID NO: 1976242 - DNA, 15 bp, Homo sapiens
ggatatgggagacaa

SEQ ID NO: 1976243 - DNA, 15 bp, Homo sapiens
gatatgggagacaag

SEQ ID NO: 1976244 - DNA, 15 bp, Homo sapiens
atatgggagacaagc

SEQ ID NO: 1976245 - DNA, 15 bp, Homo sapiens
tatgggagacaagcc

SEQ ID NO: 1976246 - DNA, 15 bp, Homo sapiens
atgggagacaagccc

SEQ ID NO: 1976247 - DNA, 15 bp, Homo sapiens
tgggagacaagcccc

SEQ ID NO: 1976248 - DNA, 15 bp, Homo sapiens
gggagacaagcccct

SEQ ID NO: 1976249 - DNA, 15 bp, Homo sapiens
ggagacaagcccctc

SEQ ID NO: 1976250 - DNA, 15 bp, Homo sapiens
gagacaagcccctcc

SEQ ID NO: 1976251 - DNA, 15 bp, Homo sapiens
agacaagcccctccc

SEQ ID NO: 1976252 - DNA, 15 bp, Homo sapiens
gacaagcccctccca

SEQ ID NO: 1976253 - DNA, 15 bp, Homo sapiens
acaagcccctcccaa

SEQ ID NO: 1976254 - DNA, 15 bp, Homo sapiens
caagcccctcccaaa

SEQ ID NO: 1976255 - DNA, 15 bp, Homo sapiens
aagcccctcccaaag

SEQ ID NO: 1976256 - DNA, 15 bp, Homo sapiens
agcccctcccaaagc

SEQ ID NO: 1976257 - DNA, 15 bp, Homo sapiens
gcccctcccaaagca

SEQ ID NO: 1976258 - DNA, 15 bp, Homo sapiens
cccctcccaaagcac

SEQ ID NO: 1976259 - DNA, 15 bp, Homo sapiens
ccctcccaaagcaca

SEQ ID NO: 1976260 - DNA, 15 bp, Homo sapiens
cctcccaaagcacac

SEQ ID NO: 1976261 - DNA, 15 bp, Homo sapiens
ctcccaaagcacaca

SEQ ID NO: 1976262 - DNA, 15 bp, Homo sapiens
tcccaaagcacacac

SEQ ID NO: 1976263 - DNA, 15 bp, Homo sapiens
cccaaagcacacaca

SEQ ID NO: 1976264 - DNA, 15 bp, Homo sapiens
ccaaagcacacacac

SEQ ID NO: 1976265 - DNA, 15 bp, Homo sapiens
caaagcacacacaca

SEQ ID NO: 1976266 - DNA, 15 bp, Homo sapiens
aaagcacacacacaa

SEQ ID NO: 1976267 - DNA, 15 bp, Homo sapiens
aagcacacacacaaa

SEQ ID NO: 1976268 - DNA, 15 bp, Homo sapiens
agcacacacacaaaa

SEQ ID NO: 1976269 - DNA, 15 bp, Homo sapiens
gcacacacacaaaac

SEQ ID NO: 1976270 - DNA, 15 bp, Homo sapiens
cacacacacaaaaca

SEQ ID NO: 1976271 - DNA, 15 bp, Homo sapiens
acacacacaaaacac

SEQ ID NO: 1976272 - DNA, 15 bp, Homo sapiens
cacacacaaaacaca

SEQ ID NO: 1976273 - DNA, 15 bp, Homo sapiens
acacacaaaacacac

SEQ ID NO: 1976274 - DNA, 15 bp, Homo sapiens
cacacaaaacacaca

SEQ ID NO: 1976275 - DNA, 15 bp, Homo sapiens
acacaaaacacacac

SEQ ID NO: 1976276 - DNA, 15 bp, Homo sapiens
cacaaaacacacacg

SEQ ID NO: 1976277 - DNA, 15 bp, Homo sapiens
acaaaacacacacga

SEQ ID NO: 1976278 - DNA, 15 bp, Homo sapiens
caaaacacacacgat

SEQ ID NO: 1976279 - DNA, 15 bp, Homo sapiens
aaaacacacacgatc

SEQ ID NO: 1976280 - DNA, 15 bp, Homo sapiens
aaacacacacgatca

SEQ ID NO: 1976281 - DNA, 15 bp, Homo sapiens
aacacacacgatcat

SEQ ID NO: 1976282 - DNA, 15 bp, Homo sapiens
acacacacgatcatg

SEQ ID NO: 1976283 - DNA, 15 bp, Homo sapiens
cacacacgatcatgg

SEQ ID NO: 1976284 - DNA, 15 bp, Homo sapiens
acacacgatcatggg

SEQ ID NO: 1976285 - DNA, 15 bp, Homo sapiens
cacacgatcatgggg

SEQ ID NO: 1976286 - DNA, 15 bp, Homo sapiens
acacgatcatgggga

SEQ ID NO: 1976287 - DNA, 15 bp, Homo sapiens
cacgatcatggggac

SEQ ID NO: 1976288 - DNA, 15 bp, Homo sapiens
acgatcatggggacg

SEQ ID NO: 1976289 - DNA, 15 bp, Homo sapiens
cgatcatggggacgg

SEQ ID NO: 1976290 - DNA, 15 bp, Homo sapiens
gatcatggggacggg

SEQ ID NO: 1976291 - DNA, 15 bp, Homo sapiens
atcatggggacgggg

SEQ ID NO: 1976292 - DNA, 15 bp, Homo sapiens
tcatggggacgggga

SEQ ID NO: 1976293 - DNA, 15 bp, Homo sapiens
catggggacggggag

SEQ ID NO: 1976294 - DNA, 15 bp, Homo sapiens
atggggacggggaga

SEQ ID NO: 1976295 - DNA, 15 bp, Homo sapiens
tggggacggggagag

SEQ ID NO: 1976296 - DNA, 15 bp, Homo sapiens
ggggacggggagagg

SEQ ID NO: 1976297 - DNA, 15 bp, Homo sapiens
gggacggggagagga

SEQ ID NO: 1976298 - DNA, 15 bp, Homo sapiens
ggacggggagaggag

SEQ ID NO: 1976299 - DNA, 15 bp, Homo sapiens
gacggggagaggagc

SEQ ID NO: 1976300 - DNA, 15 bp, Homo sapiens
acggggagaggagct

SEQ ID NO: 1976301 - DNA, 15 bp, Homo sapiens
cggggagaggagctg

SEQ ID NO: 1976302 - DNA, 15 bp, Homo sapiens
ggggagaggagctgg

SEQ ID NO: 1976303 - DNA, 15 bp, Homo sapiens
gggagaggagctggt

SEQ ID NO: 1976304 - DNA, 15 bp, Homo sapiens
ggagaggagctggtt

SEQ ID NO: 1976305 - DNA, 15 bp, Homo sapiens
gagaggagctggtta

SEQ ID NO: 1976306 - DNA, 15 bp, Homo sapiens
agaggagctggttag

SEQ ID NO: 1976307 - DNA, 15 bp, Homo sapiens
gaggagctggttagt

SEQ ID NO: 1976308 - DNA, 15 bp, Homo sapiens
aggagctggttagtc

SEQ ID NO: 1976309 - DNA, 15 bp, Homo sapiens
ggagctggttagtcc

SEQ ID NO: 1976310 - DNA, 15 bp, Homo sapiens
gagctggttagtccc

SEQ ID NO: 1976311 - DNA, 15 bp, Homo sapiens
agctggttagtccct

SEQ ID NO: 1976312 - DNA, 15 bp, Homo sapiens
gctggttagtccctc

SEQ ID NO: 1976313 - DNA, 15 bp, Homo sapiens
ctggttagtccctcc

SEQ ID NO: 1976314 - DNA, 15 bp, Homo sapiens
tggttagtccctccc

SEQ ID NO: 1976315 - DNA, 15 bp, Homo sapiens
ggttagtccctccct

SEQ ID NO: 1976316 - DNA, 15 bp, Homo sapiens
gttagtccctccctg

SEQ ID NO: 1976317 - DNA, 15 bp, Homo sapiens
ttagtccctccctgc

SEQ ID NO: 1976318 - DNA, 15 bp, Homo sapiens
tagtccctccctgct

SEQ ID NO: 1976319 - DNA, 15 bp, Homo sapiens
agtccctccctgctg

SEQ ID NO: 1976320 - DNA, 15 bp, Homo sapiens
gtccctccctgctga

SEQ ID NO: 1976321 - DNA, 15 bp, Homo sapiens
tccctccctgctgac

SEQ ID NO: 1976322 - DNA, 15 bp, Homo sapiens
ccctccctgctgacc

SEQ ID NO: 1976323 - DNA, 15 bp, Homo sapiens
cctccctgctgacct

SEQ ID NO: 1976324 - DNA, 15 bp, Homo sapiens
ctccctgctgacctc

SEQ ID NO: 1976325 - DNA, 15 bp, Homo sapiens
tccctgctgacctcc

SEQ ID NO: 1976326 - DNA, 15 bp, Homo sapiens
ccctgctgacctccc

SEQ ID NO: 1976327 - DNA, 15 bp, Homo sapiens
cctgctgacctcccc

SEQ ID NO: 1976328 - DNA, 15 bp, Homo sapiens
ctgctgacctccccc

SEQ ID NO: 1976329 - DNA, 15 bp, Homo sapiens
tgctgacctccccca

SEQ ID NO: 1976330 - DNA, 15 bp, Homo sapiens
gctgacctcccccag

SEQ ID NO: 1976331 - DNA, 15 bp, Homo sapiens
ctgacctcccccagg

SEQ ID NO: 1976332 - DNA, 15 bp, Homo sapiens
tgacctcccccaggc

SEQ ID NO: 1976333 - DNA, 15 bp, Homo sapiens
gacctcccccaggcc

SEQ ID NO: 1976334 - DNA, 15 bp, Homo sapiens
acctcccccaggccc

SEQ ID NO: 1976335 - DNA, 15 bp, Homo sapiens
cctcccccaggcccc

SEQ ID NO: 1976336 - DNA, 15 bp, Homo sapiens
ctcccccaggcccct

SEQ ID NO: 1976337 - DNA, 15 bp, Homo sapiens
tcccccaggcccctt

SEQ ID NO: 1976338 - DNA, 15 bp, Homo sapiens
cccccaggcccctta

SEQ ID NO: 1976339 - DNA, 15 bp, Homo sapiens
ccccaggccccttat

SEQ ID NO: 1976340 - DNA, 15 bp, Homo sapiens
cccaggccccttatc

SEQ ID NO: 1976341 - DNA, 15 bp, Homo sapiens
ccaggccccttatcc

SEQ ID NO: 1976342 - DNA, 15 bp, Homo sapiens
caggccccttatccc

SEQ ID NO: 1976343 - DNA, 15 bp, Homo sapiens
aggccccttatccct

SEQ ID NO: 1976344 - DNA, 15 bp, Homo sapiens
ggccccttatccctc

SEQ ID NO: 1976345 - DNA, 15 bp, Homo sapiens
gccccttatccctct

SEQ ID NO: 1976346 - DNA, 15 bp, Homo sapiens
ccccttatccctctg

SEQ ID NO: 1976347 - DNA, 15 bp, Homo sapiens
cccttatccctctgc

SEQ ID NO: 1976348 - DNA, 15 bp, Homo sapiens
ccttatccctctgcc

SEQ ID NO: 1976349 - DNA, 15 bp, Homo sapiens
cttatccctctgccc

SEQ ID NO: 1976350 - DNA, 15 bp, Homo sapiens
ttatccctctgccct

SEQ ID NO: 1976351 - DNA, 15 bp, Homo sapiens
tatccctctgccctg

SEQ ID NO: 1976352 - DNA, 15 bp, Homo sapiens
atccctctgccctgc

SEQ ID NO: 1976353 - DNA, 15 bp, Homo sapiens
ccctctgccctgcct

SEQ ID NO: 1976354 - DNA, 15 bp, Homo sapiens
cctctgccctgcctc

SEQ ID NO: 1976355 - DNA, 15 bp, Homo sapiens
ctctgccctgcctcc

SEQ ID NO: 1976356 - DNA, 15 bp, Homo sapiens
tctgccctgcctccc

SEQ ID NO: 1976357 - DNA, 15 bp, Homo sapiens
ctgccctgcctccct

SEQ ID NO: 1976358 - DNA, 15 bp, Homo sapiens
tgccctgcctccctg

SEQ ID NO: 1976359 - DNA, 15 bp, Homo sapiens
gccctgcctccctgt

SEQ ID NO: 1976360 - DNA, 15 bp, Homo sapiens
ccctgcctccctgtt

SEQ ID NO: 1976361 - DNA, 15 bp, Homo sapiens
cctgcctccctgttg

SEQ ID NO: 1976362 - DNA, 15 bp, Homo sapiens
ctgcctccctgttgt

SEQ ID NO: 1976363 - DNA, 15 bp, Homo sapiens
tgcctccctgttgtc

SEQ ID NO: 1976364 - DNA, 15 bp, Homo sapiens
gcctccctgttgtct

SEQ ID NO: 1976365 - DNA, 15 bp, Homo sapiens
cctccctgttgtctc

SEQ ID NO: 1976366 - DNA, 15 bp, Homo sapiens
tccctgttgtctcag

SEQ ID NO: 1976367 - DNA, 15 bp, Homo sapiens
ccctgttgtctcagc

SEQ ID NO: 1976368 - DNA, 15 bp, Homo sapiens
cctgttgtctcagcc

SEQ ID NO: 1976369 - DNA, 15 bp, Homo sapiens
ctgttgtctcagcct

SEQ ID NO: 1976370 - DNA, 15 bp, Homo sapiens
tgttgtctcagcctc

SEQ ID NO: 1976371 - DNA, 15 bp, Homo sapiens
gttgtctcagcctca

SEQ ID NO: 1976372 - DNA, 15 bp, Homo sapiens
ttgtctcagcctcac

SEQ ID NO: 1976373 - DNA, 15 bp, Homo sapiens
tgtctcagcctcact

SEQ ID NO: 1976374 - DNA, 15 bp, Homo sapiens
gtctcagcctcactg

SEQ ID NO: 1976375 - DNA, 15 bp, Homo sapiens
tctcagcctcactgg

SEQ ID NO: 1976376 - DNA, 15 bp, Homo sapiens
ctcagcctcactggg

SEQ ID NO: 1976377 - DNA, 15 bp, Homo sapiens
tcagcctcactgggt

SEQ ID NO: 1976378 - DNA, 15 bp, Homo sapiens
cagcctcactgggtt

SEQ ID NO: 1976379 - DNA, 15 bp, Homo sapiens
agcctcactgggttt

SEQ ID NO: 1976380 - DNA, 15 bp, Homo sapiens
gcctcactgggtttc

SEQ ID NO: 1976381 - DNA, 15 bp, Homo sapiens
cctcactgggtttcc

SEQ ID NO: 1976382 - DNA, 15 bp, Homo sapiens
ctcactgggtttccc

SEQ ID NO: 1976383 - DNA, 15 bp, Homo sapiens
tcactgggtttccca

SEQ ID NO: 1976384 - DNA, 15 bp, Homo sapiens
cactgggtttcccat

SEQ ID NO: 1976385 - DNA, 15 bp, Homo sapiens
actgggtttcccatc

SEQ ID NO: 1976386 - DNA, 15 bp, Homo sapiens
ctgggtttcccatca

SEQ ID NO: 1976387 - DNA, 15 bp, Homo sapiens
tgggtttcccatcac

SEQ ID NO: 1976388 - DNA, 15 bp, Homo sapiens
gggtttcccatcacc

SEQ ID NO: 1976389 - DNA, 15 bp, Homo sapiens
ggtttcccatcaccc

SEQ ID NO: 1976390 - DNA, 15 bp, Homo sapiens
gtttcccatcacccc

SEQ ID NO: 1976391 - DNA, 15 bp, Homo sapiens
tttcccatcacccca

SEQ ID NO: 1976392 - DNA, 15 bp, Homo sapiens
ttcccatcaccccat

SEQ ID NO: 1976393 - DNA, 15 bp, Homo sapiens
tcccatcaccccatc

SEQ ID NO: 1976394 - DNA, 15 bp, Homo sapiens
cccatcaccccatcg

SEQ ID NO: 1976395 - DNA, 15 bp, Homo sapiens
ccatcaccccatcgc

SEQ ID NO: 1976396 - DNA, 15 bp, Homo sapiens
catcaccccatcgct

SEQ ID NO: 1976397 - DNA, 15 bp, Homo sapiens
atcaccccatcgcta

SEQ ID NO: 1976398 - DNA, 15 bp, Homo sapiens
tcaccccatcgctag

SEQ ID NO: 1976399 - DNA, 15 bp, Homo sapiens
caccccatcgctagg

SEQ ID NO: 1976400 - DNA, 15 bp, Homo sapiens
accccatcgctaggt

SEQ ID NO: 1976401 - DNA, 15 bp, Homo sapiens
ccccatcgctaggtg

SEQ ID NO: 1976402 - DNA, 15 bp, Homo sapiens
cccatcgctaggtgg

SEQ ID NO: 1976403 - DNA, 15 bp, Homo sapiens
ccatcgctaggtggc

SEQ ID NO: 1976404 - DNA, 15 bp, Homo sapiens
catcgctaggtggcc

SEQ ID NO: 1976405 - DNA, 15 bp, Homo sapiens
atcgctaggtggcct

SEQ ID NO: 1976406 - DNA, 15 bp, Homo sapiens
tcgctaggtggcctg

SEQ ID NO: 1976407 - DNA, 15 bp, Homo sapiens
cgctaggtggcctgg

SEQ ID NO: 1976408 - DNA, 15 bp, Homo sapiens
gctaggtggcctggc

SEQ ID NO: 1976409 - DNA, 15 bp, Homo sapiens
ctaggtggcctggcc

SEQ ID NO: 1976410 - DNA, 15 bp, Homo sapiens
taggtggcctggccc

SEQ ID NO: 1976411 - DNA, 15 bp, Homo sapiens
aggtggcctggccct

SEQ ID NO: 1976412 - DNA, 15 bp, Homo sapiens
ggtggcctggccctt

SEQ ID NO: 1976413 - DNA, 15 bp, Homo sapiens
gtggcctggccctta

SEQ ID NO: 1976414 - DNA, 15 bp, Homo sapiens
tggcctggcccttac

SEQ ID NO: 1976415 - DNA, 15 bp, Homo sapiens
ggcctggcccttacc

SEQ ID NO: 1976416 - DNA, 15 bp, Homo sapiens
gcctggcccttaccg

SEQ ID NO: 1976417 - DNA, 15 bp, Homo sapiens
cctggcccttaccgg

SEQ ID NO: 1976418 - DNA, 15 bp, Homo sapiens
ctggcccttaccggc

SEQ ID NO: 1976419 - DNA, 15 bp, Homo sapiens
tggcccttaccggca

SEQ ID NO: 1976420 - DNA, 15 bp, Homo sapiens
ggcccttaccggcac

SEQ ID NO: 1976421 - DNA, 15 bp, Homo sapiens
gcccttaccggcacc

SEQ ID NO: 1976422 - DNA, 15 bp, Homo sapiens
cccttaccggcaccg

SEQ ID NO: 1976423 - DNA, 15 bp, Homo sapiens
ccttaccggcaccgt

SEQ ID NO: 1976424 - DNA, 15 bp, Homo sapiens
cttaccggcaccgtg

SEQ ID NO: 1976425 - DNA, 15 bp, Homo sapiens
ttaccggcaccgtgg

SEQ ID NO: 1976426 - DNA, 15 bp, Homo sapiens
taccggcaccgtggc

SEQ ID NO: 1976427 - DNA, 15 bp, Homo sapiens
accggcaccgtggcc

SEQ ID NO: 1976428 - DNA, 15 bp, Homo sapiens
ccggcaccgtggccc

SEQ ID NO: 1976429 - DNA, 15 bp, Homo sapiens
cggcaccgtggcccc

SEQ ID NO: 1976430 - DNA, 15 bp, Homo sapiens
ggcaccgtggcccca

SEQ ID NO: 1976431 - DNA, 15 bp, Homo sapiens
gcaccgtggccccat

SEQ ID NO: 1976432 - DNA, 15 bp, Homo sapiens
caccgtggccccatt

SEQ ID NO: 1976433 - DNA, 15 bp, Homo sapiens
accgtggccccattt

SEQ ID NO: 1976434 - DNA, 15 bp, Homo sapiens
ccgtggccccattta

SEQ ID NO: 1976435 - DNA, 15 bp, Homo sapiens
cgtggccccatttaa

SEQ ID NO: 1976436 - DNA, 15 bp, Homo sapiens
gtggccccatttaag

SEQ ID NO: 1976437 - DNA, 15 bp, Homo sapiens
tggccccatttaagc

SEQ ID NO: 1976438 - DNA, 15 bp, Homo sapiens
ggccccatttaagcc

SEQ ID NO: 1976439 - DNA, 15 bp, Homo sapiens
gccccatttaagcca

SEQ ID NO: 1976440 - DNA, 15 bp, Homo sapiens
ccccatttaagccag

SEQ ID NO: 1976441 - DNA, 15 bp, Homo sapiens
cccatttaagccagg

SEQ ID NO: 1976442 - DNA, 15 bp, Homo sapiens
ccatttaagccaggg

SEQ ID NO: 1976443 - DNA, 15 bp, Homo sapiens
catttaagccaggga

SEQ ID NO: 1976444 - DNA, 15 bp, Homo sapiens
atttaagccagggat

SEQ ID NO: 1976445 - DNA, 15 bp, Homo sapiens
tttaagccagggatc

SEQ ID NO: 1976446 - DNA, 15 bp, Homo sapiens
ttaagccagggatcc

SEQ ID NO: 1976447 - DNA, 15 bp, Homo sapiens
taagccagggatccc

SEQ ID NO: 1976448 - DNA, 15 bp, Homo sapiens
aagccagggatcccc

SEQ ID NO: 1976449 - DNA, 15 bp, Homo sapiens
agccagggatcccct

SEQ ID NO: 1976450 - DNA, 15 bp, Homo sapiens
gccagggatcccctg

SEQ ID NO: 1976451 - DNA, 15 bp, Homo sapiens
ccagggatcccctga

SEQ ID NO: 1976452 - DNA, 15 bp, Homo sapiens
cagggatcccctgaa

SEQ ID NO: 1976453 - DNA, 15 bp, Homo sapiens
agggatcccctgaat

SEQ ID NO: 1976454 - DNA, 15 bp, Homo sapiens
gggatcccctgaatg

SEQ ID NO: 1976455 - DNA, 15 bp, Homo sapiens
ggatcccctgaatgc

SEQ ID NO: 1976456 - DNA, 15 bp, Homo sapiens
gatcccctgaatgcc

SEQ ID NO: 1976457 - DNA, 15 bp, Homo sapiens
atcccctgaatgcca

SEQ ID NO: 1976458 - DNA, 15 bp, Homo sapiens
tcccctgaatgccac

SEQ ID NO: 1976459 - DNA, 15 bp, Homo sapiens
cccctgaatgccacc

SEQ ID NO: 1976460 - DNA, 15 bp, Homo sapiens
ccctgaatgccacca

SEQ ID NO: 1976461 - DNA, 15 bp, Homo sapiens
cctgaatgccaccaa

SEQ ID NO: 1976462 - DNA, 15 bp, Homo sapiens
ctgaatgccaccaat

SEQ ID NO: 1976463 - DNA, 15 bp, Homo sapiens
tgaatgccaccaatg

SEQ ID NO: 1976464 - DNA, 15 bp, Homo sapiens
gaatgccaccaatgt

SEQ ID NO: 1976465 - DNA, 15 bp, Homo sapiens
aatgccaccaatgtt

SEQ ID NO: 1976466 - DNA, 15 bp, Homo sapiens
atgccaccaatgttc

SEQ ID NO: 1976467 - DNA, 15 bp, Homo sapiens
tgccaccaatgttcc

SEQ ID NO: 1976468 - DNA, 15 bp, Homo sapiens
gccaccaatgttcct

SEQ ID NO: 1976469 - DNA, 15 bp, Homo sapiens
ccaccaatgttcctc

SEQ ID NO: 1976470 - DNA, 15 bp, Homo sapiens
caccaatgttcctct

SEQ ID NO: 1976471 - DNA, 15 bp, Homo sapiens
accaatgttcctctg

SEQ ID NO: 1976472 - DNA, 15 bp, Homo sapiens
ccaatgttcctctgg

SEQ ID NO: 1976473 - DNA, 15 bp, Homo sapiens
caatgttcctctggg

SEQ ID NO: 1976474 - DNA, 15 bp, Homo sapiens
aatgttcctctgggt

SEQ ID NO: 1976475 - DNA, 15 bp, Homo sapiens
atgttcctctgggtt

SEQ ID NO: 1976476 - DNA, 15 bp, Homo sapiens
tgttcctctgggtta

SEQ ID NO: 1976477 - DNA, 15 bp, Homo sapiens
gttcctctgggttaa

SEQ ID NO: 1976478 - DNA, 15 bp, Homo sapiens
ttcctctgggttaac

SEQ ID NO: 1976479 - DNA, 15 bp, Homo sapiens
tcctctgggttaact

SEQ ID NO: 1976480 - DNA, 15 bp, Homo sapiens
cctctgggttaactc

SEQ ID NO: 1976481 - DNA, 15 bp, Homo sapiens
ctctgggttaactcc

SEQ ID NO: 1976482 - DNA, 15 bp, Homo sapiens
tctgggttaactcct

SEQ ID NO: 1976483 - DNA, 15 bp, Homo sapiens
ctgggttaactcctg

SEQ ID NO: 1976484 - DNA, 15 bp, Homo sapiens
tgggttaactcctga

SEQ ID NO: 1976485 - DNA, 15 bp, Homo sapiens
gggttaactcctgaa

SEQ ID NO: 1976486 - DNA, 15 bp, Homo sapiens
ggttaactcctgaac

SEQ ID NO: 1976487 - DNA, 15 bp, Homo sapiens
gttaactcctgaact

SEQ ID NO: 1976488 - DNA, 15 bp, Homo sapiens
ttaactcctgaactg

SEQ ID NO: 1976489 - DNA, 15 bp, Homo sapiens
taactcctgaactgc

SEQ ID NO: 1976490 - DNA, 15 bp, Homo sapiens
aactcctgaactgct

SEQ ID NO: 1976491 - DNA, 15 bp, Homo sapiens
actcctgaactgctg

SEQ ID NO: 1976492 - DNA, 15 bp, Homo sapiens
ctcctgaactgctga

SEQ ID NO: 1976493 - DNA, 15 bp, Homo sapiens
tcctgaactgctgag

SEQ ID NO: 1976494 - DNA, 15 bp, Homo sapiens
cctgaactgctgagc

SEQ ID NO: 1976495 - DNA, 15 bp, Homo sapiens
ctgaactgctgagcc

SEQ ID NO: 1976496 - DNA, 15 bp, Homo sapiens
tgaactgctgagccc

SEQ ID NO: 1976497 - DNA, 15 bp, Homo sapiens
gaactgctgagccca

SEQ ID NO: 1976498 - DNA, 15 bp, Homo sapiens
aactgctgagcccag

SEQ ID NO: 1976499 - DNA, 15 bp, Homo sapiens
actgctgagcccaga

SEQ ID NO: 1976500 - DNA, 15 bp, Homo sapiens
ctgctgagcccagag

SEQ ID NO: 1976501 - DNA, 15 bp, Homo sapiens
tgctgagcccagagg

SEQ ID NO: 1976502 - DNA, 15 bp, Homo sapiens
gctgagcccagaggg

SEQ ID NO: 1976503 - DNA, 15 bp, Homo sapiens
ctgagcccagagggc

SEQ ID NO: 1976504 - DNA, 15 bp, Homo sapiens
tgagcccagagggca

SEQ ID NO: 1976505 - DNA, 15 bp, Homo sapiens
gagcccagagggcac

SEQ ID NO: 1976506 - DNA, 15 bp, Homo sapiens
agcccagagggcacc

SEQ ID NO: 1976507 - DNA, 15 bp, Homo sapiens
gcccagagggcacca

SEQ ID NO: 1976508 - DNA, 15 bp, Homo sapiens
cccagagggcaccaa

SEQ ID NO: 1976509 - DNA, 15 bp, Homo sapiens
ccagagggcaccaag

SEQ ID NO: 1976510 - DNA, 15 bp, Homo sapiens
cagagggcaccaagc

SEQ ID NO: 1976511 - DNA, 15 bp, Homo sapiens
agagggcaccaagca

SEQ ID NO: 1976512 - DNA, 15 bp, Homo sapiens
gagggcaccaagcaa

SEQ ID NO: 1976513 - DNA, 15 bp, Homo sapiens
agggcaccaagcaaa

SEQ ID NO: 1976514 - DNA, 15 bp, Homo sapiens
gggcaccaagcaaag

SEQ ID NO: 1976515 - DNA, 15 bp, Homo sapiens
ggcaccaagcaaagg

SEQ ID NO: 1976516 - DNA, 15 bp, Homo sapiens
gcaccaagcaaagga

SEQ ID NO: 1976517 - DNA, 15 bp, Homo sapiens
caccaagcaaaggac

SEQ ID NO: 1976518 - DNA, 15 bp, Homo sapiens
accaagcaaaggact

SEQ ID NO: 1976519 - DNA, 15 bp, Homo sapiens
ccaagcaaaggactg

SEQ ID NO: 1976520 - DNA, 15 bp, Homo sapiens
caagcaaaggactgt

SEQ ID NO: 1976521 - DNA, 15 bp, Homo sapiens
aagcaaaggactgta

SEQ ID NO: 1976522 - DNA, 15 bp, Homo sapiens
agcaaaggactgtag

SEQ ID NO: 1976523 - DNA, 15 bp, Homo sapiens
gcaaaggactgtagg

SEQ ID NO: 1976524 - DNA, 15 bp, Homo sapiens
caaaggactgtaggt

SEQ ID NO: 1976525 - DNA, 15 bp, Homo sapiens
aaaggactgtaggtg

SEQ ID NO: 1976526 - DNA, 15 bp, Homo sapiens
aaggactgtaggtgc

SEQ ID NO: 1976527 - DNA, 15 bp, Homo sapiens
aggactgtaggtgcc

SEQ ID NO: 1976528 - DNA, 15 bp, Homo sapiens
ggactgtaggtgccc

SEQ ID NO: 1976529 - DNA, 15 bp, Homo sapiens
gactgtaggtgccca

SEQ ID NO: 1976530 - DNA, 15 bp, Homo sapiens
actgtaggtgcccaa

SEQ ID NO: 1976531 - DNA, 15 bp, Homo sapiens
ctgtaggtgcccaag

SEQ ID NO: 1976532 - DNA, 15 bp, Homo sapiens
tgtaggtgcccaagg

SEQ ID NO: 1976533 - DNA, 15 bp, Homo sapiens
gtaggtgcccaagga

SEQ ID NO: 1976534 - DNA, 15 bp, Homo sapiens
taggtgcccaaggag

SEQ ID NO: 1976535 - DNA, 15 bp, Homo sapiens
aggtgcccaaggagg

SEQ ID NO: 1976536 - DNA, 15 bp, Homo sapiens
ggtgcccaaggagga

SEQ ID NO: 1976537 - DNA, 15 bp, Homo sapiens
gtgcccaaggaggaa

SEQ ID NO: 1976538 - DNA, 15 bp, Homo sapiens
tgcccaaggaggaaa

SEQ ID NO: 1976539 - DNA, 15 bp, Homo sapiens
gcccaaggaggaaaa

SEQ ID NO: 1976540 - DNA, 15 bp, Homo sapiens
cccaaggaggaaaag

SEQ ID NO: 1976541 - DNA, 15 bp, Homo sapiens
ccaaggaggaaaaga

SEQ ID NO: 1976542 - DNA, 15 bp, Homo sapiens
caaggaggaaaagat

SEQ ID NO: 1976543 - DNA, 15 bp, Homo sapiens
aaggaggaaaagatg

SEQ ID NO: 1976544 - DNA, 15 bp, Homo sapiens
aggaggaaaagatgg

SEQ ID NO: 1976545 - DNA, 15 bp, Homo sapiens
ggaggaaaagatgga

SEQ ID NO: 1976546 - DNA, 15 bp, Homo sapiens
gaggaaaagatggag

SEQ ID NO: 1976547 - DNA, 15 bp, Homo sapiens
aggaaaagatggagg

SEQ ID NO: 1976548 - DNA, 15 bp, Homo sapiens
ggaaaagatggaggc

SEQ ID NO: 1976549 - DNA, 15 bp, Homo sapiens
gaaaagatggaggct

SEQ ID NO: 1976550 - DNA, 15 bp, Homo sapiens
aaaagatggaggctg

SEQ ID NO: 1976551 - DNA, 15 bp, Homo sapiens
aaagatggaggctgg

SEQ ID NO: 1976552 - DNA, 15 bp, Homo sapiens
aagatggaggctggc

SEQ ID NO: 1976553 - DNA, 15 bp, Homo sapiens
agatggaggctggca

SEQ ID NO: 1976554 - DNA, 15 bp, Homo sapiens
gatggaggctggcaa

SEQ ID NO: 1976555 - DNA, 15 bp, Homo sapiens
atggaggctggcaag

SEQ ID NO: 1976556 - DNA, 15 bp, Homo sapiens
tggaggctggcaagg

SEQ ID NO: 1976557 - DNA, 15 bp, Homo sapiens
ggaggctggcaaggc

SEQ ID NO: 1976558 - DNA, 15 bp, Homo sapiens
gaggctggcaaggca

SEQ ID NO: 1976559 - DNA, 15 bp, Homo sapiens
ggctggcaaggcaga

SEQ ID NO: 1976560 - DNA, 15 bp, Homo sapiens
gctggcaaggcagat

SEQ ID NO: 1976561 - DNA, 15 bp, Homo sapiens
ctggcaaggcagatg

SEQ ID NO: 1976562 - DNA, 15 bp, Homo sapiens
tggcaaggcagatgg

SEQ ID NO: 1976563 - DNA, 15 bp, Homo sapiens
ggcaaggcagatggg

SEQ ID NO: 1976564 - DNA, 15 bp, Homo sapiens
gcaaggcagatgggg

SEQ ID NO: 1976565 - DNA, 15 bp, Homo sapiens
caaggcagatgggga

SEQ ID NO: 1976566 - DNA, 15 bp, Homo sapiens
aaggcagatggggac

SEQ ID NO: 1976567 - DNA, 15 bp, Homo sapiens
aggcagatggggacc

SEQ ID NO: 1976568 - DNA, 15 bp, Homo sapiens
ggcagatggggacct

SEQ ID NO: 1976569 - DNA, 15 bp, Homo sapiens
gcagatggggacctc

SEQ ID NO: 1976570 - DNA, 15 bp, Homo sapiens
cagatggggacctcc

SEQ ID NO: 1976571 - DNA, 15 bp, Homo sapiens
agatggggacctccg

SEQ ID NO: 1976572 - DNA, 15 bp, Homo sapiens
gatggggacctccga

SEQ ID NO: 1976573 - DNA, 15 bp, Homo sapiens
atggggacctccgag

SEQ ID NO: 1976574 - DNA, 15 bp, Homo sapiens
tggggacctccgagg

SEQ ID NO: 1976575 - DNA, 15 bp, Homo sapiens
ggggacctccgaggg

SEQ ID NO: 1976576 - DNA, 15 bp, Homo sapiens
gggacctccgagggt

SEQ ID NO: 1976577 - DNA, 15 bp, Homo sapiens
ggacctccgagggta

SEQ ID NO: 1976578 - DNA, 15 bp, Homo sapiens
gacctccgagggtag

SEQ ID NO: 1976579 - DNA, 15 bp, Homo sapiens
acctccgagggtagg

SEQ ID NO: 1976580 - DNA, 15 bp, Homo sapiens
cctccgagggtaggg

SEQ ID NO: 1976581 - DNA, 15 bp, Homo sapiens
ctccgagggtagggg

SEQ ID NO: 1976582 - DNA, 15 bp, Homo sapiens
tccgagggtaggggt

SEQ ID NO: 1976583 - DNA, 15 bp, Homo sapiens
ccgagggtaggggtg

SEQ ID NO: 1976584 - DNA, 15 bp, Homo sapiens
cgagggtaggggtgt

SEQ ID NO: 1976585 - DNA, 15 bp, Homo sapiens
gagggtaggggtgtc

SEQ ID NO: 1976586 - DNA, 15 bp, Homo sapiens
agggtaggggtgtct

SEQ ID NO: 1976587 - DNA, 15 bp, Homo sapiens
gggtaggggtgtctt

SEQ ID NO: 1976588 - DNA, 15 bp, Homo sapiens
ggtaggggtgtcttc

SEQ ID NO: 1976589 - DNA, 15 bp, Homo sapiens
gtaggggtgtcttcc

SEQ ID NO: 1976590 - DNA, 15 bp, Homo sapiens
taggggtgtcttcca

SEQ ID NO: 1976591 - DNA, 15 bp, Homo sapiens
aggggtgtcttccag

SEQ ID NO: 1976592 - DNA, 15 bp, Homo sapiens
ggggtgtcttccagg

SEQ ID NO: 1976593 - DNA, 15 bp, Homo sapiens
gggtgtcttccagga

SEQ ID NO: 1976594 - DNA, 15 bp, Homo sapiens
ggtgtcttccaggaa

SEQ ID NO: 1976595 - DNA, 15 bp, Homo sapiens
gtgtcttccaggaat

SEQ ID NO: 1976596 - DNA, 15 bp, Homo sapiens
tgtcttccaggaata

SEQ ID NO: 1976597 - DNA, 15 bp, Homo sapiens
gtcttccaggaatag

SEQ ID NO: 1976598 - DNA, 15 bp, Homo sapiens
tcttccaggaatagc

SEQ ID NO: 1976599 - DNA, 15 bp, Homo sapiens
cttccaggaatagca

SEQ ID NO: 1976600 - DNA, 15 bp, Homo sapiens
ttccaggaatagcaa

SEQ ID NO: 1976601 - DNA, 15 bp, Homo sapiens
tccaggaatagcaac

SEQ ID NO: 1976602 - DNA, 15 bp, Homo sapiens
ccaggaatagcaaca

SEQ ID NO: 1976603 - DNA, 15 bp, Homo sapiens
caggaatagcaacaa

SEQ ID NO: 1976604 - DNA, 15 bp, Homo sapiens
aggaatagcaacaac

SEQ ID NO: 1976605 - DNA, 15 bp, Homo sapiens
ggaatagcaacaaca

SEQ ID NO: 1976606 - DNA, 15 bp, Homo sapiens
gaatagcaacaacag

SEQ ID NO: 1976607 - DNA, 15 bp, Homo sapiens
aatagcaacaacagt

SEQ ID NO: 1976608 - DNA, 15 bp, Homo sapiens
atagcaacaacagta

SEQ ID NO: 1976609 - DNA, 15 bp, Homo sapiens
tagcaacaacagtaa

SEQ ID NO: 1976610 - DNA, 15 bp, Homo sapiens
agcaacaacagtaaa

SEQ ID NO: 1976611 - DNA, 15 bp, Homo sapiens
gcaacaacagtaaaa

SEQ ID NO: 1976612 - DNA, 15 bp, Homo sapiens
caacaacagtaaaaa

SEQ ID NO: 1976613 - DNA, 15 bp, Homo sapiens
aacaacagtaaaaag

SEQ ID NO: 1976614 - DNA, 15 bp, Homo sapiens
acaacagtaaaaaga

SEQ ID NO: 1976615 - DNA, 15 bp, Homo sapiens
caacagtaaaaagag

SEQ ID NO: 1976616 - DNA, 15 bp, Homo sapiens
aacagtaaaaagagc

SEQ ID NO: 1976617 - DNA, 15 bp, Homo sapiens
acagtaaaaagagca

SEQ ID NO: 1976618 - DNA, 15 bp, Homo sapiens
cagtaaaaagagcaa

SEQ ID NO: 1976619 - DNA, 15 bp, Homo sapiens
agtaaaaagagcaaa

SEQ ID NO: 1976620 - DNA, 15 bp, Homo sapiens
gtaaaaagagcaaat

SEQ ID NO: 1976621 - DNA, 15 bp, Homo sapiens
taaaaagagcaaatt

SEQ ID NO: 1976622 - DNA, 15 bp, Homo sapiens
aaaaagagcaaattg

SEQ ID NO: 1976623 - DNA, 15 bp, Homo sapiens
aaaagagcaaattgc

SEQ ID NO: 1976624 - DNA, 15 bp, Homo sapiens
aaagagcaaattgct

SEQ ID NO: 1976625 - DNA, 15 bp, Homo sapiens
aagagcaaattgctg

SEQ ID NO: 1976626 - DNA, 15 bp, Homo sapiens
agagcaaattgctgg

SEQ ID NO: 1976627 - DNA, 15 bp, Homo sapiens
gagcaaattgctggc

SEQ ID NO: 1976628 - DNA, 15 bp, Homo sapiens
agcaaattgctggcc

SEQ ID NO: 1976629 - DNA, 15 bp, Homo sapiens
gcaaattgctggcca

SEQ ID NO: 1976630 - DNA, 15 bp, Homo sapiens
caaattgctggccag

SEQ ID NO: 1976631 - DNA, 15 bp, Homo sapiens
aaattgctggccagg

SEQ ID NO: 1976632 - DNA, 15 bp, Homo sapiens
aattgctggccaggt

SEQ ID NO: 1976633 - DNA, 15 bp, Homo sapiens
attgctggccaggtg

SEQ ID NO: 1976634 - DNA, 15 bp, Homo sapiens
ttgctggccaggtgc

SEQ ID NO: 1976635 - DNA, 15 bp, Homo sapiens
tgctggccaggtgca

SEQ ID NO: 1976636 - DNA, 15 bp, Homo sapiens
gctggccaggtgcag

SEQ ID NO: 1976637 - DNA, 15 bp, Homo sapiens
ctggccaggtgcagt

SEQ ID NO: 1976638 - DNA, 15 bp, Homo sapiens
tggccaggtgcagtg

SEQ ID NO: 1976639 - DNA, 15 bp, Homo sapiens
caggtgcagtggctc

SEQ ID NO: 1976640 - DNA, 15 bp, Homo sapiens
gaggccgaggcaggt

SEQ ID NO: 1976641 - DNA, 15 bp, Homo sapiens
cacctgaggttaggc

SEQ ID NO: 1976642 - DNA, 15 bp, Homo sapiens
acctgaggttaggcg

SEQ ID NO: 1976643 - DNA, 15 bp, Homo sapiens
cctgaggttaggcgt

SEQ ID NO: 1976644 - DNA, 15 bp, Homo sapiens
ctgaggttaggcgtt

SEQ ID NO: 1976645 - DNA, 15 bp, Homo sapiens
tgaggttaggcgttc

SEQ ID NO: 1976646 - DNA, 15 bp, Homo sapiens
gaggttaggcgttca

SEQ ID NO: 1976647 - DNA, 15 bp, Homo sapiens
aggttaggcgttcaa

SEQ ID NO: 1976648 - DNA, 15 bp, Homo sapiens
ggttaggcgttcaag

SEQ ID NO: 1976649 - DNA, 15 bp, Homo sapiens
gttaggcgttcaaga

SEQ ID NO: 1976650 - DNA, 15 bp, Homo sapiens
ttaggcgttcaagac

SEQ ID NO: 1976651 - DNA, 15 bp, Homo sapiens
taggcgttcaagacc

SEQ ID NO: 1976652 - DNA, 15 bp, Homo sapiens
aggcgttcaagacca

SEQ ID NO: 1976653 - DNA, 15 bp, Homo sapiens
ggcgttcaagaccag

SEQ ID NO: 1976654 - DNA, 15 bp, Homo sapiens
gcgttcaagaccagc

SEQ ID NO: 1976655 - DNA, 15 bp, Homo sapiens
cgttcaagaccagcc

SEQ ID NO: 1976656 - DNA, 15 bp, Homo sapiens
aaaatacaaaattac

SEQ ID NO: 1976657 - DNA, 15 bp, Homo sapiens
aaatacaaaattacc

SEQ ID NO: 1976658 - DNA, 15 bp, Homo sapiens
aatacaaaattacct

SEQ ID NO: 1976659 - DNA, 15 bp, Homo sapiens
atacaaaattacctg

SEQ ID NO: 1976660 - DNA, 15 bp, Homo sapiens
tacaaaattacctgg

SEQ ID NO: 1976661 - DNA, 15 bp, Homo sapiens
acaaaattacctggg

SEQ ID NO: 1976662 - DNA, 15 bp, Homo sapiens
caaaattacctgggc

SEQ ID NO: 1976663 - DNA, 15 bp, Homo sapiens
cctgggcatggtggc

SEQ ID NO: 1976664 - DNA, 15 bp, Homo sapiens
gcatggtggcaggcg

SEQ ID NO: 1976665 - DNA, 15 bp, Homo sapiens
catggtggcaggcgc

SEQ ID NO: 1976666 - DNA, 15 bp, Homo sapiens
atggtggcaggcgcc

SEQ ID NO: 1976667 - DNA, 15 bp, Homo sapiens
atcccagctactccg

SEQ ID NO: 1976668 - DNA, 15 bp, Homo sapiens
tcccagctactccgg

SEQ ID NO: 1976669 - DNA, 15 bp, Homo sapiens
cccagctactccgga

SEQ ID NO: 1976670 - DNA, 15 bp, Homo sapiens
ccagctactccggag

SEQ ID NO: 1976671 - DNA, 15 bp, Homo sapiens
cagctactccggagg

SEQ ID NO: 1976672 - DNA, 15 bp, Homo sapiens
agctactccggaggc

SEQ ID NO: 1976673 - DNA, 15 bp, Homo sapiens
gctactccggaggct

SEQ ID NO: 1976674 - DNA, 15 bp, Homo sapiens
cccgggaggcagagg

SEQ ID NO: 1976675 - DNA, 15 bp, Homo sapiens
ccgggaggcagaggt

SEQ ID NO: 1976676 - DNA, 15 bp, Homo sapiens
gttgcagtgagtcag

SEQ ID NO: 1976677 - DNA, 15 bp, Homo sapiens
ttgcagtgagtcagg

SEQ ID NO: 1976678 - DNA, 15 bp, Homo sapiens
tgcagtgagtcagga

SEQ ID NO: 1976679 - DNA, 15 bp, Homo sapiens
gcagtgagtcaggat

SEQ ID NO: 1976680 - DNA, 15 bp, Homo sapiens
cagtgagtcaggatt

SEQ ID NO: 1976681 - DNA, 15 bp, Homo sapiens
agtgagtcaggattg

SEQ ID NO: 1976682 - DNA, 15 bp, Homo sapiens
gtgagtcaggattgt

SEQ ID NO: 1976683 - DNA, 15 bp, Homo sapiens
tgagtcaggattgtg

SEQ ID NO: 1976684 - DNA, 15 bp, Homo sapiens
gagtcaggattgtgc

SEQ ID NO: 1976685 - DNA, 15 bp, Homo sapiens
agtcaggattgtgcc

SEQ ID NO: 1976686 - DNA, 15 bp, Homo sapiens
gtcaggattgtgcca

SEQ ID NO: 1976687 - DNA, 15 bp, Homo sapiens
tcaggattgtgccat

SEQ ID NO: 1976688 - DNA, 15 bp, Homo sapiens
caggattgtgccatt

SEQ ID NO: 1976689 - DNA, 15 bp, Homo sapiens
aggattgtgccattg

SEQ ID NO: 1976690 - DNA, 15 bp, Homo sapiens
ggattgtgccattgc

SEQ ID NO: 1976691 - DNA, 15 bp, Homo sapiens
gattgtgccattgca

SEQ ID NO: 1976692 - DNA, 15 bp, Homo sapiens
attgtgccattgcac

SEQ ID NO: 1976693 - DNA, 15 bp, Homo sapiens
ttgtgccattgcact

SEQ ID NO: 1976694 - DNA, 15 bp, Homo sapiens
tgtgccattgcactc

SEQ ID NO: 1976695 - DNA, 15 bp, Homo sapiens
gccattgcactccaa

SEQ ID NO: 1976696 - DNA, 15 bp, Homo sapiens
ccattgcactccaac

SEQ ID NO: 1976697 - DNA, 15 bp, Homo sapiens
cattgcactccaacc

SEQ ID NO: 1976698 - DNA, 15 bp, Homo sapiens
attgcactccaacct

SEQ ID NO: 1976699 - DNA, 15 bp, Homo sapiens
ttgcactccaacctg

SEQ ID NO: 1976700 - DNA, 15 bp, Homo sapiens
tgcactccaacctgg

SEQ ID NO: 1976701 - DNA, 15 bp, Homo sapiens
gcactccaacctggg

SEQ ID NO: 1976702 - DNA, 15 bp, Homo sapiens
cactccaacctgggt

SEQ ID NO: 1976703 - DNA, 15 bp, Homo sapiens
actccaacctgggtg

SEQ ID NO: 1976704 - DNA, 15 bp, Homo sapiens
ctccaacctgggtga

SEQ ID NO: 1976705 - DNA, 15 bp, Homo sapiens
tccaacctgggtgac

SEQ ID NO: 1976706 - DNA, 15 bp, Homo sapiens
ccaacctgggtgaca

SEQ ID NO: 1976707 - DNA, 15 bp, Homo sapiens
caacctgggtgacag

SEQ ID NO: 1976708 - DNA, 15 bp, Homo sapiens
aacctgggtgacaga

SEQ ID NO: 1976709 - DNA, 15 bp, Homo sapiens
acctgggtgacagaa

SEQ ID NO: 1976710 - DNA, 15 bp, Homo sapiens
ccatctcaaaaaaag

SEQ ID NO: 1976711 - DNA, 15 bp, Homo sapiens
catctcaaaaaaagt

SEQ ID NO: 1976712 - DNA, 15 bp, Homo sapiens
atctcaaaaaaagtg

SEQ ID NO: 1976713 - DNA, 15 bp, Homo sapiens
tctcaaaaaaagtga

SEQ ID NO: 1976714 - DNA, 15 bp, Homo sapiens
ctcaaaaaaagtgag

SEQ ID NO: 1976715 - DNA, 15 bp, Homo sapiens
tcaaaaaaagtgagt

SEQ ID NO: 1976716 - DNA, 15 bp, Homo sapiens
caaaaaaagtgagtg

SEQ ID NO: 1976717 - DNA, 15 bp, Homo sapiens
aaaaaaagtgagtga

SEQ ID NO: 1976718 - DNA, 15 bp, Homo sapiens
aaaaaagtgagtgag

SEQ ID NO: 1976719 - DNA, 15 bp, Homo sapiens
aaaaagtgagtgagt

SEQ ID NO: 1976720 - DNA, 15 bp, Homo sapiens
aaaagtgagtgagtt

SEQ ID NO: 1976721 - DNA, 15 bp, Homo sapiens
aaagtgagtgagttc

SEQ ID NO: 1976722 - DNA, 15 bp, Homo sapiens
aagtgagtgagttcc

SEQ ID NO: 1976723 - DNA, 15 bp, Homo sapiens
agtgagtgagttcct

SEQ ID NO: 1976724 - DNA, 15 bp, Homo sapiens
gtgagtgagttcctt

SEQ ID NO: 1976725 - DNA, 15 bp, Homo sapiens
tgagtgagttccttc

SEQ ID NO: 1976726 - DNA, 15 bp, Homo sapiens
gagtgagttccttcc

SEQ ID NO: 1976727 - DNA, 15 bp, Homo sapiens
agtgagttccttcct

SEQ ID NO: 1976728 - DNA, 15 bp, Homo sapiens
gtgagttccttccta

SEQ ID NO: 1976729 - DNA, 15 bp, Homo sapiens
tgagttccttcctaa

SEQ ID NO: 1976730 - DNA, 15 bp, Homo sapiens
gagttccttcctaag

SEQ ID NO: 1976731 - DNA, 15 bp, Homo sapiens
agttccttcctaagc

SEQ ID NO: 1976732 - DNA, 15 bp, Homo sapiens
gttccttcctaagcc

SEQ ID NO: 1976733 - DNA, 15 bp, Homo sapiens
ttccttcctaagcca

SEQ ID NO: 1976734 - DNA, 15 bp, Homo sapiens
tccttcctaagccag

SEQ ID NO: 1976735 - DNA, 15 bp, Homo sapiens
ccttcctaagccagc

SEQ ID NO: 1976736 - DNA, 15 bp, Homo sapiens
cttcctaagccagcc

SEQ ID NO: 1976737 - DNA, 15 bp, Homo sapiens
ttcctaagccagcca

SEQ ID NO: 1976738 - DNA, 15 bp, Homo sapiens
tcctaagccagccac

SEQ ID NO: 1976739 - DNA, 15 bp, Homo sapiens
cctaagccagccact

SEQ ID NO: 1976740 - DNA, 15 bp, Homo sapiens
ctaagccagccacta

SEQ ID NO: 1976741 - DNA, 15 bp, Homo sapiens
taagccagccactag

SEQ ID NO: 1976742 - DNA, 15 bp, Homo sapiens
aagccagccactagg

SEQ ID NO: 1976743 - DNA, 15 bp, Homo sapiens
agccagccactaggt

SEQ ID NO: 1976744 - DNA, 15 bp, Homo sapiens
gccagccactaggtg

SEQ ID NO: 1976745 - DNA, 15 bp, Homo sapiens
ccagccactaggtgc

SEQ ID NO: 1976746 - DNA, 15 bp, Homo sapiens
cagccactaggtgct

SEQ ID NO: 1976747 - DNA, 15 bp, Homo sapiens
agccactaggtgctt

SEQ ID NO: 1976748 - DNA, 15 bp, Homo sapiens
gccactaggtgcttt

SEQ ID NO: 1976749 - DNA, 15 bp, Homo sapiens
ccactaggtgcttta

SEQ ID NO: 1976750 - DNA, 15 bp, Homo sapiens
cactaggtgctttat

SEQ ID NO: 1976751 - DNA, 15 bp, Homo sapiens
actaggtgctttatg

SEQ ID NO: 1976752 - DNA, 15 bp, Homo sapiens
ctaggtgctttatgt

SEQ ID NO: 1976753 - DNA, 15 bp, Homo sapiens
taggtgctttatgta

SEQ ID NO: 1976754 - DNA, 15 bp, Homo sapiens
aggtgctttatgtaa

SEQ ID NO: 1976755 - DNA, 15 bp, Homo sapiens
ggtgctttatgtaat

SEQ ID NO: 1976756 - DNA, 15 bp, Homo sapiens
gtgctttatgtaatt

SEQ ID NO: 1976757 - DNA, 15 bp, Homo sapiens
tgctttatgtaatta

SEQ ID NO: 1976758 - DNA, 15 bp, Homo sapiens
gctttatgtaattat

SEQ ID NO: 1976759 - DNA, 15 bp, Homo sapiens
ctttatgtaattatc

SEQ ID NO: 1976760 - DNA, 15 bp, Homo sapiens
tttatgtaattatct

SEQ ID NO: 1976761 - DNA, 15 bp, Homo sapiens
ttatgtaattatctc

SEQ ID NO: 1976762 - DNA, 15 bp, Homo sapiens
tatgtaattatctca

SEQ ID NO: 1976763 - DNA, 15 bp, Homo sapiens
atgtaattatctcat

SEQ ID NO: 1976764 - DNA, 15 bp, Homo sapiens
tgtaattatctcatt

SEQ ID NO: 1976765 - DNA, 15 bp, Homo sapiens
gtaattatctcattt

SEQ ID NO: 1976766 - DNA, 15 bp, Homo sapiens
taattatctcattta

SEQ ID NO: 1976767 - DNA, 15 bp, Homo sapiens
aattatctcatttaa

SEQ ID NO: 1976768 - DNA, 15 bp, Homo sapiens
attatctcatttaat

SEQ ID NO: 1976769 - DNA, 15 bp, Homo sapiens
ttatctcatttaatt

SEQ ID NO: 1976770 - DNA, 15 bp, Homo sapiens
tatctcatttaattc

SEQ ID NO: 1976771 - DNA, 15 bp, Homo sapiens
atctcatttaattct

SEQ ID NO: 1976772 - DNA, 15 bp, Homo sapiens
tctcatttaattctc

SEQ ID NO: 1976773 - DNA, 15 bp, Homo sapiens
ctcatttaattctcg

SEQ ID NO: 1976774 - DNA, 15 bp, Homo sapiens
tcatttaattctcga

SEQ ID NO: 1976775 - DNA, 15 bp, Homo sapiens
catttaattctcgaa

SEQ ID NO: 1976776 - DNA, 15 bp, Homo sapiens
atttaattctcgaaa

SEQ ID NO: 1976777 - DNA, 15 bp, Homo sapiens
tttaattctcgaaac

SEQ ID NO: 1976778 - DNA, 15 bp, Homo sapiens
ttaattctcgaaaca

SEQ ID NO: 1976779 - DNA, 15 bp, Homo sapiens
taattctcgaaacaa

SEQ ID NO: 1976780 - DNA, 15 bp, Homo sapiens
aattctcgaaacaac

SEQ ID NO: 1976781 - DNA, 15 bp, Homo sapiens
attctcgaaacaaca

SEQ ID NO: 1976782 - DNA, 15 bp, Homo sapiens
ttctcgaaacaacac

SEQ ID NO: 1976783 - DNA, 15 bp, Homo sapiens
tctcgaaacaacact

SEQ ID NO: 1976784 - DNA, 15 bp, Homo sapiens
ctcgaaacaacacta

SEQ ID NO: 1976785 - DNA, 15 bp, Homo sapiens
tcgaaacaacactat

SEQ ID NO: 1976786 - DNA, 15 bp, Homo sapiens
cgaaacaacactatg

SEQ ID NO: 1976787 - DNA, 15 bp, Homo sapiens
gaaacaacactatga

SEQ ID NO: 1976788 - DNA, 15 bp, Homo sapiens
aaacaacactatgat

SEQ ID NO: 1976789 - DNA, 15 bp, Homo sapiens
aacaacactatgatg

SEQ ID NO: 1976790 - DNA, 15 bp, Homo sapiens
acaacactatgatgg

SEQ ID NO: 1976791 - DNA, 15 bp, Homo sapiens
caacactatgatgga

SEQ ID NO: 1976792 - DNA, 15 bp, Homo sapiens
aacactatgatggaa

SEQ ID NO: 1976793 - DNA, 15 bp, Homo sapiens
acactatgatggaag

SEQ ID NO: 1976794 - DNA, 15 bp, Homo sapiens
cactatgatggaagg

SEQ ID NO: 1976795 - DNA, 15 bp, Homo sapiens
actatgatggaagga

SEQ ID NO: 1976796 - DNA, 15 bp, Homo sapiens
ctatgatggaaggac

SEQ ID NO: 1976797 - DNA, 15 bp, Homo sapiens
tatgatggaaggact

SEQ ID NO: 1976798 - DNA, 15 bp, Homo sapiens
atgatggaaggacta

SEQ ID NO: 1976799 - DNA, 15 bp, Homo sapiens
tgatggaaggactat

SEQ ID NO: 1976800 - DNA, 15 bp, Homo sapiens
gatggaaggactatt

SEQ ID NO: 1976801 - DNA, 15 bp, Homo sapiens
atggaaggactatta

SEQ ID NO: 1976802 - DNA, 15 bp, Homo sapiens
tggaaggactattac

SEQ ID NO: 1976803 - DNA, 15 bp, Homo sapiens
ggaaggactattacc

SEQ ID NO: 1976804 - DNA, 15 bp, Homo sapiens
gaaggactattacca

SEQ ID NO: 1976805 - DNA, 15 bp, Homo sapiens
aaggactattaccat

SEQ ID NO: 1976806 - DNA, 15 bp, Homo sapiens
aggactattaccatt

SEQ ID NO: 1976807 - DNA, 15 bp, Homo sapiens
ggactattaccattt

SEQ ID NO: 1976808 - DNA, 15 bp, Homo sapiens
gactattaccatttc

SEQ ID NO: 1976809 - DNA, 15 bp, Homo sapiens
actattaccatttcc

SEQ ID NO: 1976810 - DNA, 15 bp, Homo sapiens
ctattaccatttcca

SEQ ID NO: 1976811 - DNA, 15 bp, Homo sapiens
tattaccatttccat

SEQ ID NO: 1976812 - DNA, 15 bp, Homo sapiens
attaccatttccatg

SEQ ID NO: 1976813 - DNA, 15 bp, Homo sapiens
ttaccatttccatgt

SEQ ID NO: 1976814 - DNA, 15 bp, Homo sapiens
taccatttccatgtt

SEQ ID NO: 1976815 - DNA, 15 bp, Homo sapiens
accatttccatgtta

SEQ ID NO: 1976816 - DNA, 15 bp, Homo sapiens
ccatttccatgttac

SEQ ID NO: 1976817 - DNA, 15 bp, Homo sapiens
catttccatgttact

SEQ ID NO: 1976818 - DNA, 15 bp, Homo sapiens
atttccatgttactg

SEQ ID NO: 1976819 - DNA, 15 bp, Homo sapiens
tttccatgttactga

SEQ ID NO: 1976820 - DNA, 15 bp, Homo sapiens
ttccatgttactgag

SEQ ID NO: 1976821 - DNA, 15 bp, Homo sapiens
tccatgttactgagg

SEQ ID NO: 1976822 - DNA, 15 bp, Homo sapiens
ccatgttactgagga

SEQ ID NO: 1976823 - DNA, 15 bp, Homo sapiens
catgttactgaggaa

SEQ ID NO: 1976824 - DNA, 15 bp, Homo sapiens
atgttactgaggaaa

SEQ ID NO: 1976825 - DNA, 15 bp, Homo sapiens
tgttactgaggaaac

SEQ ID NO: 1976826 - DNA, 15 bp, Homo sapiens
gttactgaggaaacc

SEQ ID NO: 1976827 - DNA, 15 bp, Homo sapiens
ttactgaggaaaccg

SEQ ID NO: 1976828 - DNA, 15 bp, Homo sapiens
tactgaggaaaccga

SEQ ID NO: 1976829 - DNA, 15 bp, Homo sapiens
actgaggaaaccgag

SEQ ID NO: 1976830 - DNA, 15 bp, Homo sapiens
ctgaggaaaccgagg

SEQ ID NO: 1976831 - DNA, 15 bp, Homo sapiens
tgaggaaaccgaggc

SEQ ID NO: 1976832 - DNA, 15 bp, Homo sapiens
gaggaaaccgaggca

SEQ ID NO: 1976833 - DNA, 15 bp, Homo sapiens
aggaaaccgaggcac

SEQ ID NO: 1976834 - DNA, 15 bp, Homo sapiens
ggaaaccgaggcaca

SEQ ID NO: 1976835 - DNA, 15 bp, Homo sapiens
gaaaccgaggcacag

SEQ ID NO: 1976836 - DNA, 15 bp, Homo sapiens
aaaccgaggcacaga

SEQ ID NO: 1976837 - DNA, 15 bp, Homo sapiens
accgaggcacagagg

SEQ ID NO: 1976838 - DNA, 15 bp, Homo sapiens
ccgaggcacagaggg

SEQ ID NO: 1976839 - DNA, 15 bp, Homo sapiens
cgaggcacagagggt

SEQ ID NO: 1976840 - DNA, 15 bp, Homo sapiens
gaggcacagagggtt

SEQ ID NO: 1976841 - DNA, 15 bp, Homo sapiens
aggcacagagggttt

SEQ ID NO: 1976842 - DNA, 15 bp, Homo sapiens
ggcacagagggttta

SEQ ID NO: 1976843 - DNA, 15 bp, Homo sapiens
gcacagagggtttaa

SEQ ID NO: 1976844 - DNA, 15 bp, Homo sapiens
cacagagggtttaag

SEQ ID NO: 1976845 - DNA, 15 bp, Homo sapiens
acagagggtttaagg

SEQ ID NO: 1976846 - DNA, 15 bp, Homo sapiens
cagagggtttaagga

SEQ ID NO: 1976847 - DNA, 15 bp, Homo sapiens
agagggtttaaggaa

SEQ ID NO: 1976848 - DNA, 15 bp, Homo sapiens
gagggtttaaggaac

SEQ ID NO: 1976849 - DNA, 15 bp, Homo sapiens
agggtttaaggaact

SEQ ID NO: 1976850 - DNA, 15 bp, Homo sapiens
gggtttaaggaacta

SEQ ID NO: 1976851 - DNA, 15 bp, Homo sapiens
ggtttaaggaactag

SEQ ID NO: 1976852 - DNA, 15 bp, Homo sapiens
gtttaaggaactagc

SEQ ID NO: 1976853 - DNA, 15 bp, Homo sapiens
tttaaggaactagcg

SEQ ID NO: 1976854 - DNA, 15 bp, Homo sapiens
ttaaggaactagcgc

SEQ ID NO: 1976855 - DNA, 15 bp, Homo sapiens
taaggaactagcgca

SEQ ID NO: 1976856 - DNA, 15 bp, Homo sapiens
aaggaactagcgcaa

SEQ ID NO: 1976857 - DNA, 15 bp, Homo sapiens
aggaactagcgcaag

SEQ ID NO: 1976858 - DNA, 15 bp, Homo sapiens
ggaactagcgcaagg

SEQ ID NO: 1976859 - DNA, 15 bp, Homo sapiens
gaactagcgcaaggt

SEQ ID NO: 1976860 - DNA, 15 bp, Homo sapiens
aactagcgcaaggtc

SEQ ID NO: 1976861 - DNA, 15 bp, Homo sapiens
actagcgcaaggtca

SEQ ID NO: 1976862 - DNA, 15 bp, Homo sapiens
ctagcgcaaggtcac

SEQ ID NO: 1976863 - DNA, 15 bp, Homo sapiens
tagcgcaaggtcaca

SEQ ID NO: 1976864 - DNA, 15 bp, Homo sapiens
agcgcaaggtcacag

SEQ ID NO: 1976865 - DNA, 15 bp, Homo sapiens
gcgcaaggtcacaga

SEQ ID NO: 1976866 - DNA, 15 bp, Homo sapiens
cgcaaggtcacagag

SEQ ID NO: 1976867 - DNA, 15 bp, Homo sapiens
gcaaggtcacagagc

SEQ ID NO: 1976868 - DNA, 15 bp, Homo sapiens
caaggtcacagagca

SEQ ID NO: 1976869 - DNA, 15 bp, Homo sapiens
aaggtcacagagcac

SEQ ID NO: 1976870 - DNA, 15 bp, Homo sapiens
aggtcacagagcacc

SEQ ID NO: 1976871 - DNA, 15 bp, Homo sapiens
ggtcacagagcaccc

SEQ ID NO: 1976872 - DNA, 15 bp, Homo sapiens
gtcacagagcaccca

SEQ ID NO: 1976873 - DNA, 15 bp, Homo sapiens
tcacagagcacccag

SEQ ID NO: 1976874 - DNA, 15 bp, Homo sapiens
cacagagcacccagc

SEQ ID NO: 1976875 - DNA, 15 bp, Homo sapiens
acagagcacccagca

SEQ ID NO: 1976876 - DNA, 15 bp, Homo sapiens
cagagcacccagcag

SEQ ID NO: 1976877 - DNA, 15 bp, Homo sapiens
agagcacccagcagt

SEQ ID NO: 1976878 - DNA, 15 bp, Homo sapiens
gagcacccagcagta

SEQ ID NO: 1976879 - DNA, 15 bp, Homo sapiens
agcacccagcagtag

SEQ ID NO: 1976880 - DNA, 15 bp, Homo sapiens
gcacccagcagtaga

SEQ ID NO: 1976881 - DNA, 15 bp, Homo sapiens
cacccagcagtagat

SEQ ID NO: 1976882 - DNA, 15 bp, Homo sapiens
acccagcagtagatc

SEQ ID NO: 1976883 - DNA, 15 bp, Homo sapiens
cccagcagtagatct

SEQ ID NO: 1976884 - DNA, 15 bp, Homo sapiens
ccagcagtagatctc

SEQ ID NO: 1976885 - DNA, 15 bp, Homo sapiens
cagcagtagatctct

SEQ ID NO: 1976886 - DNA, 15 bp, Homo sapiens
agcagtagatctctg

SEQ ID NO: 1976887 - DNA, 15 bp, Homo sapiens
gcagtagatctctgc

SEQ ID NO: 1976888 - DNA, 15 bp, Homo sapiens
cagtagatctctgcc

SEQ ID NO: 1976889 - DNA, 15 bp, Homo sapiens
agtagatctctgccc

SEQ ID NO: 1976890 - DNA, 15 bp, Homo sapiens
gtagatctctgcccc

SEQ ID NO: 1976891 - DNA, 15 bp, Homo sapiens
tagatctctgcccct

SEQ ID NO: 1976892 - DNA, 15 bp, Homo sapiens
agatctctgcccctc

SEQ ID NO: 1976893 - DNA, 15 bp, Homo sapiens
gatctctgcccctcc

SEQ ID NO: 1976894 - DNA, 15 bp, Homo sapiens
atctctgcccctccg

SEQ ID NO: 1976895 - DNA, 15 bp, Homo sapiens
tctctgcccctccgc

SEQ ID NO: 1976896 - DNA, 15 bp, Homo sapiens
ctctgcccctccgca

SEQ ID NO: 1976897 - DNA, 15 bp, Homo sapiens
tctgcccctccgcag

SEQ ID NO: 1976898 - DNA, 15 bp, Homo sapiens
ctgcccctccgcagc

SEQ ID NO: 1976899 - DNA, 15 bp, Homo sapiens
tgcccctccgcagct

SEQ ID NO: 1976900 - DNA, 15 bp, Homo sapiens
gcccctccgcagctg

SEQ ID NO: 1976901 - DNA, 15 bp, Homo sapiens
cccctccgcagctga

SEQ ID NO: 1976902 - DNA, 15 bp, Homo sapiens
ccctccgcagctgac

SEQ ID NO: 1976903 - DNA, 15 bp, Homo sapiens
cctccgcagctgact

SEQ ID NO: 1976904 - DNA, 15 bp, Homo sapiens
ctccgcagctgactc

SEQ ID NO: 1976905 - DNA, 15 bp, Homo sapiens
tccgcagctgactcc

SEQ ID NO: 1976906 - DNA, 15 bp, Homo sapiens
ccgcagctgactcca

SEQ ID NO: 1976907 - DNA, 15 bp, Homo sapiens
cgcagctgactccag

SEQ ID NO: 1976908 - DNA, 15 bp, Homo sapiens
gcagctgactccagg

SEQ ID NO: 1976909 - DNA, 15 bp, Homo sapiens
cagctgactccaggc

SEQ ID NO: 1976910 - DNA, 15 bp, Homo sapiens
agctgactccaggcc

SEQ ID NO: 1976911 - DNA, 15 bp, Homo sapiens
gctgactccaggccc

SEQ ID NO: 1976912 - DNA, 15 bp, Homo sapiens
ctgactccaggccca

SEQ ID NO: 1976913 - DNA, 15 bp, Homo sapiens
tgactccaggcccag

SEQ ID NO: 1976914 - DNA, 15 bp, Homo sapiens
gactccaggcccagc

SEQ ID NO: 1976915 - DNA, 15 bp, Homo sapiens
actccaggcccagcc

SEQ ID NO: 1976916 - DNA, 15 bp, Homo sapiens
ctccaggcccagcca

SEQ ID NO: 1976917 - DNA, 15 bp, Homo sapiens
tccaggcccagccag

SEQ ID NO: 1976918 - DNA, 15 bp, Homo sapiens
ccaggcccagccaga

SEQ ID NO: 1976919 - DNA, 15 bp, Homo sapiens
caggcccagccagag

SEQ ID NO: 1976920 - DNA, 15 bp, Homo sapiens
aggcccagccagagt

SEQ ID NO: 1976921 - DNA, 15 bp, Homo sapiens
ggcccagccagagta

SEQ ID NO: 1976922 - DNA, 15 bp, Homo sapiens
gcccagccagagtat

SEQ ID NO: 1976923 - DNA, 15 bp, Homo sapiens
cccagccagagtatt

SEQ ID NO: 1976924 - DNA, 15 bp, Homo sapiens
ccagccagagtattt

SEQ ID NO: 1976925 - DNA, 15 bp, Homo sapiens
cagccagagtatttg

SEQ ID NO: 1976926 - DNA, 15 bp, Homo sapiens
agccagagtatttga

SEQ ID NO: 1976927 - DNA, 15 bp, Homo sapiens
gccagagtatttgag

SEQ ID NO: 1976928 - DNA, 15 bp, Homo sapiens
ccagagtatttgagg

SEQ ID NO: 1976929 - DNA, 15 bp, Homo sapiens
cagagtatttgagga

SEQ ID NO: 1976930 - DNA, 15 bp, Homo sapiens
agagtatttgaggac

SEQ ID NO: 1976931 - DNA, 15 bp, Homo sapiens
gagtatttgaggact

SEQ ID NO: 1976932 - DNA, 15 bp, Homo sapiens
agtatttgaggactc

SEQ ID NO: 1976933 - DNA, 15 bp, Homo sapiens
gtatttgaggactca

SEQ ID NO: 1976934 - DNA, 15 bp, Homo sapiens
tatttgaggactcag

SEQ ID NO: 1976935 - DNA, 15 bp, Homo sapiens
atttgaggactcagg

SEQ ID NO: 1976936 - DNA, 15 bp, Homo sapiens
tttgaggactcaggg

SEQ ID NO: 1976937 - DNA, 15 bp, Homo sapiens
ttgaggactcagggg

SEQ ID NO: 1976938 - DNA, 15 bp, Homo sapiens
tgaggactcaggggt

SEQ ID NO: 1976939 - DNA, 15 bp, Homo sapiens
gaggactcaggggtc

SEQ ID NO: 1976940 - DNA, 15 bp, Homo sapiens
aggactcaggggtcc

SEQ ID NO: 1976941 - DNA, 15 bp, Homo sapiens
ggactcaggggtcct

SEQ ID NO: 1976942 - DNA, 15 bp, Homo sapiens
gactcaggggtcctt

SEQ ID NO: 1976943 - DNA, 15 bp, Homo sapiens
actcaggggtccttc

SEQ ID NO: 1976944 - DNA, 15 bp, Homo sapiens
ctcaggggtccttct

SEQ ID NO: 1976945 - DNA, 15 bp, Homo sapiens
tcaggggtccttctc

SEQ ID NO: 1976946 - DNA, 15 bp, Homo sapiens
caggggtccttctct

SEQ ID NO: 1976947 - DNA, 15 bp, Homo sapiens
aggggtccttctctg

SEQ ID NO: 1976948 - DNA, 15 bp, Homo sapiens
ggggtccttctctgc

SEQ ID NO: 1976949 - DNA, 15 bp, Homo sapiens
gggtccttctctgct

SEQ ID NO: 1976950 - DNA, 15 bp, Homo sapiens
ggtccttctctgctc

SEQ ID NO: 1976951 - DNA, 15 bp, Homo sapiens
gtccttctctgctcg

SEQ ID NO: 1976952 - DNA, 15 bp, Homo sapiens
tccttctctgctcgg

SEQ ID NO: 1976953 - DNA, 15 bp, Homo sapiens
ccttctctgctcggt

SEQ ID NO: 1976954 - DNA, 15 bp, Homo sapiens
cttctctgctcggtg

SEQ ID NO: 1976955 - DNA, 15 bp, Homo sapiens
ttctctgctcggtgg

SEQ ID NO: 1976956 - DNA, 15 bp, Homo sapiens
tctctgctcggtgga

SEQ ID NO: 1976957 - DNA, 15 bp, Homo sapiens
ctctgctcggtggat

SEQ ID NO: 1976958 - DNA, 15 bp, Homo sapiens
tctgctcggtggatg

SEQ ID NO: 1976959 - DNA, 15 bp, Homo sapiens
ctgctcggtggatgg

SEQ ID NO: 1976960 - DNA, 15 bp, Homo sapiens
tgctcggtggatgga

SEQ ID NO: 1976961 - DNA, 15 bp, Homo sapiens
gctcggtggatggag

SEQ ID NO: 1976962 - DNA, 15 bp, Homo sapiens
ctcggtggatggagc

SEQ ID NO: 1976963 - DNA, 15 bp, Homo sapiens
tcggtggatggagcc

SEQ ID NO: 1976964 - DNA, 15 bp, Homo sapiens
cggtggatggagccc

SEQ ID NO: 1976965 - DNA, 15 bp, Homo sapiens
ggtggatggagcccc

SEQ ID NO: 1976966 - DNA, 15 bp, Homo sapiens
gtggatggagccccc

SEQ ID NO: 1976967 - DNA, 15 bp, Homo sapiens
tggatggagccccca

SEQ ID NO: 1976968 - DNA, 15 bp, Homo sapiens
ggatggagcccccac

SEQ ID NO: 1976969 - DNA, 15 bp, Homo sapiens
gatggagcccccact

SEQ ID NO: 1976970 - DNA, 15 bp, Homo sapiens
atggagcccccactt

SEQ ID NO: 1976971 - DNA, 15 bp, Homo sapiens
tggagcccccacttc

SEQ ID NO: 1976972 - DNA, 15 bp, Homo sapiens
ggagcccccacttcc

SEQ ID NO: 1976973 - DNA, 15 bp, Homo sapiens
gagcccccacttcct

SEQ ID NO: 1976974 - DNA, 15 bp, Homo sapiens
agcccccacttcctc

SEQ ID NO: 1976975 - DNA, 15 bp, Homo sapiens
gcccccacttcctcc

SEQ ID NO: 1976976 - DNA, 15 bp, Homo sapiens
cccccacttcctccc

SEQ ID NO: 1976977 - DNA, 15 bp, Homo sapiens
ccccacttcctccct

SEQ ID NO: 1976978 - DNA, 15 bp, Homo sapiens
cccacttcctccctg

SEQ ID NO: 1976979 - DNA, 15 bp, Homo sapiens
ccacttcctccctgg

SEQ ID NO: 1976980 - DNA, 15 bp, Homo sapiens
cacttcctccctggg

SEQ ID NO: 1976981 - DNA, 15 bp, Homo sapiens
acttcctccctgggc

SEQ ID NO: 1976982 - DNA, 15 bp, Homo sapiens
cttcctccctgggct

SEQ ID NO: 1976983 - DNA, 15 bp, Homo sapiens
ttcctccctgggctc

SEQ ID NO: 1976984 - DNA, 15 bp, Homo sapiens
tcctccctgggctca

SEQ ID NO: 1976985 - DNA, 15 bp, Homo sapiens
cctccctgggctcag

SEQ ID NO: 1976986 - DNA, 15 bp, Homo sapiens
ctccctgggctcagc

SEQ ID NO: 1976987 - DNA, 15 bp, Homo sapiens
tccctgggctcagca

SEQ ID NO: 1976988 - DNA, 15 bp, Homo sapiens
ccctgggctcagcag

SEQ ID NO: 1976989 - DNA, 15 bp, Homo sapiens
cctgggctcagcagc

SEQ ID NO: 1976990 - DNA, 15 bp, Homo sapiens
ctgggctcagcagca

SEQ ID NO: 1976991 - DNA, 15 bp, Homo sapiens
tgggctcagcagcag

SEQ ID NO: 1976992 - DNA, 15 bp, Homo sapiens
gggctcagcagcagc

SEQ ID NO: 1976993 - DNA, 15 bp, Homo sapiens
ggctcagcagcagca

SEQ ID NO: 1976994 - DNA, 15 bp, Homo sapiens
gctcagcagcagcaa

SEQ ID NO: 1976995 - DNA, 15 bp, Homo sapiens
ctcagcagcagcaac

SEQ ID NO: 1976996 - DNA, 15 bp, Homo sapiens
tcagcagcagcaaca

SEQ ID NO: 1976997 - DNA, 15 bp, Homo sapiens
cagcagcagcaacat

SEQ ID NO: 1976998 - DNA, 15 bp, Homo sapiens
agcagcagcaacatg

SEQ ID NO: 1976999 - DNA, 15 bp, Homo sapiens
gcagcagcaacatgg

SEQ ID NO: 1977000 - DNA, 15 bp, Homo sapiens
cagcagcaacatggg

SEQ ID NO: 1977001 - DNA, 15 bp, Homo sapiens
agcagcaacatgggc

SEQ ID NO: 1977002 - DNA, 15 bp, Homo sapiens
gcagcaacatgggct

SEQ ID NO: 1977003 - DNA, 15 bp, Homo sapiens
cagcaacatgggctt

SEQ ID NO: 1977004 - DNA, 15 bp, Homo sapiens
agcaacatgggcttt

SEQ ID NO: 1977005 - DNA, 15 bp, Homo sapiens
gcaacatgggctttt

SEQ ID NO: 1977006 - DNA, 15 bp, Homo sapiens
caacatgggctttta

SEQ ID NO: 1977007 - DNA, 15 bp, Homo sapiens
aacatgggcttttac

SEQ ID NO: 1977008 - DNA, 15 bp, Homo sapiens
acatgggcttttaca

SEQ ID NO: 1977009 - DNA, 15 bp, Homo sapiens
catgggcttttacaa

SEQ ID NO: 1977010 - DNA, 15 bp, Homo sapiens
atgggcttttacaaa

SEQ ID NO: 1977011 - DNA, 15 bp, Homo sapiens
tgggcttttacaaac

SEQ ID NO: 1977012 - DNA, 15 bp, Homo sapiens
gggcttttacaaaca

SEQ ID NO: 1977013 - DNA, 15 bp, Homo sapiens
ggcttttacaaacac

SEQ ID NO: 1977014 - DNA, 15 bp, Homo sapiens
gcttttacaaacacg

SEQ ID NO: 1977015 - DNA, 15 bp, Homo sapiens
cttttacaaacacgg

SEQ ID NO: 1977016 - DNA, 15 bp, Homo sapiens
ttttacaaacacggc

SEQ ID NO: 1977017 - DNA, 15 bp, Homo sapiens
tttacaaacacggcc

SEQ ID NO: 1977018 - DNA, 15 bp, Homo sapiens
ttacaaacacggccg

SEQ ID NO: 1977019 - DNA, 15 bp, Homo sapiens
tacaaacacggccgc

SEQ ID NO: 1977020 - DNA, 15 bp, Homo sapiens
acaaacacggccgca

SEQ ID NO: 1977021 - DNA, 15 bp, Homo sapiens
caaacacggccgcaa

SEQ ID NO: 1977022 - DNA, 15 bp, Homo sapiens
aaacacggccgcaag

SEQ ID NO: 1977023 - DNA, 15 bp, Homo sapiens
aacacggccgcaaga

SEQ ID NO: 1977024 - DNA, 15 bp, Homo sapiens
acacggccgcaagag

SEQ ID NO: 1977025 - DNA, 15 bp, Homo sapiens
cacggccgcaagagg

SEQ ID NO: 1977026 - DNA, 15 bp, Homo sapiens
acggccgcaagagga

SEQ ID NO: 1977027 - DNA, 15 bp, Homo sapiens
cggccgcaagaggag

SEQ ID NO: 1977028 - DNA, 15 bp, Homo sapiens
ggccgcaagaggagg

SEQ ID NO: 1977029 - DNA, 15 bp, Homo sapiens
gccgcaagaggaggc

SEQ ID NO: 1977030 - DNA, 15 bp, Homo sapiens
ccgcaagaggaggca

SEQ ID NO: 1977031 - DNA, 15 bp, Homo sapiens
cgcaagaggaggcat

SEQ ID NO: 1977032 - DNA, 15 bp, Homo sapiens
gcaagaggaggcatt

SEQ ID NO: 1977033 - DNA, 15 bp, Homo sapiens
caagaggaggcattg

SEQ ID NO: 1977034 - DNA, 15 bp, Homo sapiens
aagaggaggcattgt

SEQ ID NO: 1977035 - DNA, 15 bp, Homo sapiens
agaggaggcattgtt

SEQ ID NO: 1977036 - DNA, 15 bp, Homo sapiens
gaggaggcattgttg

SEQ ID NO: 1977037 - DNA, 15 bp, Homo sapiens
aggaggcattgttgt

SEQ ID NO: 1977038 - DNA, 15 bp, Homo sapiens
ggaggcattgttgtg

SEQ ID NO: 1977039 - DNA, 15 bp, Homo sapiens
gaggcattgttgtgg

SEQ ID NO: 1977040 - DNA, 15 bp, Homo sapiens
aggcattgttgtgga

SEQ ID NO: 1977041 - DNA, 15 bp, Homo sapiens
ggcattgttgtggag

SEQ ID NO: 1977042 - DNA, 15 bp, Homo sapiens
gcattgttgtggagc

SEQ ID NO: 1977043 - DNA, 15 bp, Homo sapiens
cattgttgtggagca

SEQ ID NO: 1977044 - DNA, 15 bp, Homo sapiens
attgttgtggagcag

SEQ ID NO: 1977045 - DNA, 15 bp, Homo sapiens
ttgttgtggagcagg

SEQ ID NO: 1977046 - DNA, 15 bp, Homo sapiens
tgttgtggagcaggg

SEQ ID NO: 1977047 - DNA, 15 bp, Homo sapiens
gttgtggagcagggc

SEQ ID NO: 1977048 - DNA, 15 bp, Homo sapiens
ttgtggagcagggct

SEQ ID NO: 1977049 - DNA, 15 bp, Homo sapiens
tgtggagcagggctg

SEQ ID NO: 1977050 - DNA, 15 bp, Homo sapiens
gtggagcagggctgg

SEQ ID NO: 1977051 - DNA, 15 bp, Homo sapiens
tggagcagggctggg

SEQ ID NO: 1977052 - DNA, 15 bp, Homo sapiens
ggagcagggctgggc

SEQ ID NO: 1977053 - DNA, 15 bp, Homo sapiens
gagcagggctgggct

SEQ ID NO: 1977054 - DNA, 15 bp, Homo sapiens
agcagggctgggctc

SEQ ID NO: 1977055 - DNA, 15 bp, Homo sapiens
gcagggctgggctca

SEQ ID NO: 1977056 - DNA, 15 bp, Homo sapiens
cagggctgggctcaa

SEQ ID NO: 1977057 - DNA, 15 bp, Homo sapiens
agggctgggctcaag

SEQ ID NO: 1977058 - DNA, 15 bp, Homo sapiens
gggctgggctcaaga

SEQ ID NO: 1977059 - DNA, 15 bp, Homo sapiens
ggctgggctcaagac

SEQ ID NO: 1977060 - DNA, 15 bp, Homo sapiens
gctgggctcaagacc

SEQ ID NO: 1977061 - DNA, 15 bp, Homo sapiens
ctgggctcaagaccc

SEQ ID NO: 1977062 - DNA, 15 bp, Homo sapiens
tgggctcaagaccca

SEQ ID NO: 1977063 - DNA, 15 bp, Homo sapiens
gggctcaagacccag

SEQ ID NO: 1977064 - DNA, 15 bp, Homo sapiens
ggctcaagacccagc

SEQ ID NO: 1977065 - DNA, 15 bp, Homo sapiens
gctcaagacccagct

SEQ ID NO: 1977066 - DNA, 15 bp, Homo sapiens
ctcaagacccagctc

SEQ ID NO: 1977067 - DNA, 15 bp, Homo sapiens
tcaagacccagctct

SEQ ID NO: 1977068 - DNA, 15 bp, Homo sapiens
caagacccagctctg

SEQ ID NO: 1977069 - DNA, 15 bp, Homo sapiens
aagacccagctctgc

SEQ ID NO: 1977070 - DNA, 15 bp, Homo sapiens
agacccagctctgcc

SEQ ID NO: 1977071 - DNA, 15 bp, Homo sapiens
gacccagctctgcca

SEQ ID NO: 1977072 - DNA, 15 bp, Homo sapiens
acccagctctgccac

SEQ ID NO: 1977073 - DNA, 15 bp, Homo sapiens
cccagctctgccaca

SEQ ID NO: 1977074 - DNA, 15 bp, Homo sapiens
ccagctctgccacac

SEQ ID NO: 1977075 - DNA, 15 bp, Homo sapiens
cagctctgccacaca

SEQ ID NO: 1977076 - DNA, 15 bp, Homo sapiens
agctctgccacacac

SEQ ID NO: 1977077 - DNA, 15 bp, Homo sapiens
gctctgccacacacc

SEQ ID NO: 1977078 - DNA, 15 bp, Homo sapiens
ctctgccacacacct

SEQ ID NO: 1977079 - DNA, 15 bp, Homo sapiens
tctgccacacacctg

SEQ ID NO: 1977080 - DNA, 15 bp, Homo sapiens
ctgccacacacctgc

SEQ ID NO: 1977081 - DNA, 15 bp, Homo sapiens
tgccacacacctgct

SEQ ID NO: 1977082 - DNA, 15 bp, Homo sapiens
gccacacacctgctg

SEQ ID NO: 1977083 - DNA, 15 bp, Homo sapiens
ccacacacctgctgg

SEQ ID NO: 1977084 - DNA, 15 bp, Homo sapiens
cacacacctgctggg

SEQ ID NO: 1977085 - DNA, 15 bp, Homo sapiens
acacacctgctgggc

SEQ ID NO: 1977086 - DNA, 15 bp, Homo sapiens
cacacctgctgggct

SEQ ID NO: 1977087 - DNA, 15 bp, Homo sapiens
acacctgctgggctg

SEQ ID NO: 1977088 - DNA, 15 bp, Homo sapiens
cacctgctgggctgg

SEQ ID NO: 1977089 - DNA, 15 bp, Homo sapiens
acctgctgggctggt

SEQ ID NO: 1977090 - DNA, 15 bp, Homo sapiens
cctgctgggctggtg

SEQ ID NO: 1977091 - DNA, 15 bp, Homo sapiens
ctgctgggctggtgg

SEQ ID NO: 1977092 - DNA, 15 bp, Homo sapiens
tgctgggctggtggc

SEQ ID NO: 1977093 - DNA, 15 bp, Homo sapiens
gctgggctggtggca

SEQ ID NO: 1977094 - DNA, 15 bp, Homo sapiens
ctgggctggtggcat

SEQ ID NO: 1977095 - DNA, 15 bp, Homo sapiens
tgggctggtggcatt

SEQ ID NO: 1977096 - DNA, 15 bp, Homo sapiens
gggctggtggcattg

SEQ ID NO: 1977097 - DNA, 15 bp, Homo sapiens
ggctggtggcattgg

SEQ ID NO: 1977098 - DNA, 15 bp, Homo sapiens
gctggtggcattggg

SEQ ID NO: 1977099 - DNA, 15 bp, Homo sapiens
ctggtggcattgggc

SEQ ID NO: 1977100 - DNA, 15 bp, Homo sapiens
tggtggcattgggcc

SEQ ID NO: 1977101 - DNA, 15 bp, Homo sapiens
ggtggcattgggcca

SEQ ID NO: 1977102 - DNA, 15 bp, Homo sapiens
gtggcattgggccag

SEQ ID NO: 1977103 - DNA, 15 bp, Homo sapiens
tggcattgggccagt

SEQ ID NO: 1977104 - DNA, 15 bp, Homo sapiens
ggcattgggccagtc

SEQ ID NO: 1977105 - DNA, 15 bp, Homo sapiens
gcattgggccagtcg

SEQ ID NO: 1977106 - DNA, 15 bp, Homo sapiens
cattgggccagtcgc

SEQ ID NO: 1977107 - DNA, 15 bp, Homo sapiens
attgggccagtcgcc

SEQ ID NO: 1977108 - DNA, 15 bp, Homo sapiens
ttgggccagtcgcct

SEQ ID NO: 1977109 - DNA, 15 bp, Homo sapiens
tgggccagtcgcctc

SEQ ID NO: 1977110 - DNA, 15 bp, Homo sapiens
gggccagtcgcctct

SEQ ID NO: 1977111 - DNA, 15 bp, Homo sapiens
ggccagtcgcctctc

SEQ ID NO: 1977112 - DNA, 15 bp, Homo sapiens
gccagtcgcctctct

SEQ ID NO: 1977113 - DNA, 15 bp, Homo sapiens
ccagtcgcctctctg

SEQ ID NO: 1977114 - DNA, 15 bp, Homo sapiens
cagtcgcctctctga

SEQ ID NO: 1977115 - DNA, 15 bp, Homo sapiens
agtcgcctctctgag

SEQ ID NO: 1977116 - DNA, 15 bp, Homo sapiens
gtcgcctctctgagc

SEQ ID NO: 1977117 - DNA, 15 bp, Homo sapiens
tcgcctctctgagcc

SEQ ID NO: 1977118 - DNA, 15 bp, Homo sapiens
cgcctctctgagccc

SEQ ID NO: 1977119 - DNA, 15 bp, Homo sapiens
gcctctctgagccct

SEQ ID NO: 1977120 - DNA, 15 bp, Homo sapiens
cctctctgagcccta

SEQ ID NO: 1977121 - DNA, 15 bp, Homo sapiens
ctctctgagccctat

SEQ ID NO: 1977122 - DNA, 15 bp, Homo sapiens
tctctgagccctatt

SEQ ID NO: 1977123 - DNA, 15 bp, Homo sapiens
ctctgagccctattt

SEQ ID NO: 1977124 - DNA, 15 bp, Homo sapiens
tctgagccctatttc

SEQ ID NO: 1977125 - DNA, 15 bp, Homo sapiens
ctgagccctatttcc

SEQ ID NO: 1977126 - DNA, 15 bp, Homo sapiens
tgagccctatttccc

SEQ ID NO: 1977127 - DNA, 15 bp, Homo sapiens
gagccctatttcccc

SEQ ID NO: 1977128 - DNA, 15 bp, Homo sapiens
agccctatttccccc

SEQ ID NO: 1977129 - DNA, 15 bp, Homo sapiens
gccctatttccccca

SEQ ID NO: 1977130 - DNA, 15 bp, Homo sapiens
ccctatttcccccac

SEQ ID NO: 1977131 - DNA, 15 bp, Homo sapiens
cctatttcccccact

SEQ ID NO: 1977132 - DNA, 15 bp, Homo sapiens
ctatttcccccactg

SEQ ID NO: 1977133 - DNA, 15 bp, Homo sapiens
tatttcccccactgc

SEQ ID NO: 1977134 - DNA, 15 bp, Homo sapiens
atttcccccactgca

SEQ ID NO: 1977135 - DNA, 15 bp, Homo sapiens
tttcccccactgcag

SEQ ID NO: 1977136 - DNA, 15 bp, Homo sapiens
ttcccccactgcagc

SEQ ID NO: 1977137 - DNA, 15 bp, Homo sapiens
tcccccactgcagca

SEQ ID NO: 1977138 - DNA, 15 bp, Homo sapiens
cccccactgcagcag

SEQ ID NO: 1977139 - DNA, 15 bp, Homo sapiens
ccccactgcagcagc

SEQ ID NO: 1977140 - DNA, 15 bp, Homo sapiens
cccactgcagcagca

SEQ ID NO: 1977141 - DNA, 15 bp, Homo sapiens
ccactgcagcagcat

SEQ ID NO: 1977142 - DNA, 15 bp, Homo sapiens
cactgcagcagcatg

SEQ ID NO: 1977143 - DNA, 15 bp, Homo sapiens
actgcagcagcatgg

SEQ ID NO: 1977144 - DNA, 15 bp, Homo sapiens
ctgcagcagcatggg

SEQ ID NO: 1977145 - DNA, 15 bp, Homo sapiens
tgcagcagcatgggg

SEQ ID NO: 1977146 - DNA, 15 bp, Homo sapiens
gcagcagcatgggga

SEQ ID NO: 1977147 - DNA, 15 bp, Homo sapiens
cagcagcatggggac

SEQ ID NO: 1977148 - DNA, 15 bp, Homo sapiens
agcagcatggggacc

SEQ ID NO: 1977149 - DNA, 15 bp, Homo sapiens
gcagcatggggacca

SEQ ID NO: 1977150 - DNA, 15 bp, Homo sapiens
cagcatggggaccac

SEQ ID NO: 1977151 - DNA, 15 bp, Homo sapiens
agcatggggaccacc

SEQ ID NO: 1977152 - DNA, 15 bp, Homo sapiens
gcatggggaccaccg

SEQ ID NO: 1977153 - DNA, 15 bp, Homo sapiens
catggggaccaccgc

SEQ ID NO: 1977154 - DNA, 15 bp, Homo sapiens
atggggaccaccgca

SEQ ID NO: 1977155 - DNA, 15 bp, Homo sapiens
tggggaccaccgcac

SEQ ID NO: 1977156 - DNA, 15 bp, Homo sapiens
ggggaccaccgcact

SEQ ID NO: 1977157 - DNA, 15 bp, Homo sapiens
gggaccaccgcactg

SEQ ID NO: 1977158 - DNA, 15 bp, Homo sapiens
ggaccaccgcactgg

SEQ ID NO: 1977159 - DNA, 15 bp, Homo sapiens
gaccaccgcactggc

SEQ ID NO: 1977160 - DNA, 15 bp, Homo sapiens
accaccgcactggcc

SEQ ID NO: 1977161 - DNA, 15 bp, Homo sapiens
ccaccgcactggccc

SEQ ID NO: 1977162 - DNA, 15 bp, Homo sapiens
caccgcactggccct

SEQ ID NO: 1977163 - DNA, 15 bp, Homo sapiens
accgcactggccctg

SEQ ID NO: 1977164 - DNA, 15 bp, Homo sapiens
ccgcactggccctgg

SEQ ID NO: 1977165 - DNA, 15 bp, Homo sapiens
cgcactggccctggg

SEQ ID NO: 1977166 - DNA, 15 bp, Homo sapiens
gcactggccctgggg

SEQ ID NO: 1977167 - DNA, 15 bp, Homo sapiens
cactggccctggggg

SEQ ID NO: 1977168 - DNA, 15 bp, Homo sapiens
actggccctgggggc

SEQ ID NO: 1977169 - DNA, 15 bp, Homo sapiens
ctggccctgggggct

SEQ ID NO: 1977170 - DNA, 15 bp, Homo sapiens
tggccctgggggctg

SEQ ID NO: 1977171 - DNA, 15 bp, Homo sapiens
ggccctgggggctga

SEQ ID NO: 1977172 - DNA, 15 bp, Homo sapiens
gccctgggggctgag

SEQ ID NO: 1977173 - DNA, 15 bp, Homo sapiens
ccctgggggctgaga

SEQ ID NO: 1977174 - DNA, 15 bp, Homo sapiens
cctgggggctgagat

SEQ ID NO: 1977175 - DNA, 15 bp, Homo sapiens
ctgggggctgagatg

SEQ ID NO: 1977176 - DNA, 15 bp, Homo sapiens
tgggggctgagatgg

SEQ ID NO: 1977177 - DNA, 15 bp, Homo sapiens
gggggctgagatggg

SEQ ID NO: 1977178 - DNA, 15 bp, Homo sapiens
ggggctgagatggga

SEQ ID NO: 1977179 - DNA, 15 bp, Homo sapiens
gggctgagatgggag

SEQ ID NO: 1977180 - DNA, 15 bp, Homo sapiens
ggctgagatgggagt

SEQ ID NO: 1977181 - DNA, 15 bp, Homo sapiens
gctgagatgggagtg

SEQ ID NO: 1977182 - DNA, 15 bp, Homo sapiens
ctgagatgggagtga

SEQ ID NO: 1977183 - DNA, 15 bp, Homo sapiens
tgagatgggagtgag

SEQ ID NO: 1977184 - DNA, 15 bp, Homo sapiens
gagatgggagtgaga

SEQ ID NO: 1977185 - DNA, 15 bp, Homo sapiens
agatgggagtgagag

SEQ ID NO: 1977186 - DNA, 15 bp, Homo sapiens
gatgggagtgagagt

SEQ ID NO: 1977187 - DNA, 15 bp, Homo sapiens
atgggagtgagagtg

SEQ ID NO: 1977188 - DNA, 15 bp, Homo sapiens
tgggagtgagagtgc

SEQ ID NO: 1977189 - DNA, 15 bp, Homo sapiens
gggagtgagagtgct

SEQ ID NO: 1977190 - DNA, 15 bp, Homo sapiens
ggagtgagagtgctg

SEQ ID NO: 1977191 - DNA, 15 bp, Homo sapiens
gagtgagagtgctgg

SEQ ID NO: 1977192 - DNA, 15 bp, Homo sapiens
agtgagagtgctggg

SEQ ID NO: 1977193 - DNA, 15 bp, Homo sapiens
gtgagagtgctgggc

SEQ ID NO: 1977194 - DNA, 15 bp, Homo sapiens
tgagagtgctgggca

SEQ ID NO: 1977195 - DNA, 15 bp, Homo sapiens
gagagtgctgggcac

SEQ ID NO: 1977196 - DNA, 15 bp, Homo sapiens
agagtgctgggcaca

SEQ ID NO: 1977197 - DNA, 15 bp, Homo sapiens
gagtgctgggcacag

SEQ ID NO: 1977198 - DNA, 15 bp, Homo sapiens
agtgctgggcacaga

SEQ ID NO: 1977199 - DNA, 15 bp, Homo sapiens
gtgctgggcacagag

SEQ ID NO: 1977200 - DNA, 15 bp, Homo sapiens
tgctgggcacagagg

SEQ ID NO: 1977201 - DNA, 15 bp, Homo sapiens
gctgggcacagaggg

SEQ ID NO: 1977202 - DNA, 15 bp, Homo sapiens
ctgggcacagagggc

SEQ ID NO: 1977203 - DNA, 15 bp, Homo sapiens
tgggcacagagggct

SEQ ID NO: 1977204 - DNA, 15 bp, Homo sapiens
gggcacagagggctg

SEQ ID NO: 1977205 - DNA, 15 bp, Homo sapiens
ggcacagagggctgc

SEQ ID NO: 1977206 - DNA, 15 bp, Homo sapiens
gcacagagggctgct

SEQ ID NO: 1977207 - DNA, 15 bp, Homo sapiens
cacagagggctgcta

SEQ ID NO: 1977208 - DNA, 15 bp, Homo sapiens
acagagggctgctag

SEQ ID NO: 1977209 - DNA, 15 bp, Homo sapiens
cagagggctgctagg

SEQ ID NO: 1977210 - DNA, 15 bp, Homo sapiens
agagggctgctaggt

SEQ ID NO: 1977211 - DNA, 15 bp, Homo sapiens
gagggctgctaggtg

SEQ ID NO: 1977212 - DNA, 15 bp, Homo sapiens
agggctgctaggtgg

SEQ ID NO: 1977213 - DNA, 15 bp, Homo sapiens
gggctgctaggtggg

SEQ ID NO: 1977214 - DNA, 15 bp, Homo sapiens
ggctgctaggtggga

SEQ ID NO: 1977215 - DNA, 15 bp, Homo sapiens
gctgctaggtgggag

SEQ ID NO: 1977216 - DNA, 15 bp, Homo sapiens
ctgctaggtgggagc

SEQ ID NO: 1977217 - DNA, 15 bp, Homo sapiens
tgctaggtgggagcg

SEQ ID NO: 1977218 - DNA, 15 bp, Homo sapiens
gctaggtgggagcgc

SEQ ID NO: 1977219 - DNA, 15 bp, Homo sapiens
ctaggtgggagcgcc

SEQ ID NO: 1977220 - DNA, 15 bp, Homo sapiens
taggtgggagcgcct

SEQ ID NO: 1977221 - DNA, 15 bp, Homo sapiens
aggtgggagcgcctg

SEQ ID NO: 1977222 - DNA, 15 bp, Homo sapiens
ggtgggagcgcctgg

SEQ ID NO: 1977223 - DNA, 15 bp, Homo sapiens
gtgggagcgcctggg

SEQ ID NO: 1977224 - DNA, 15 bp, Homo sapiens
tgggagcgcctggga

SEQ ID NO: 1977225 - DNA, 15 bp, Homo sapiens
gggagcgcctgggaa

SEQ ID NO: 1977226 - DNA, 15 bp, Homo sapiens
ggagcgcctgggaag

SEQ ID NO: 1977227 - DNA, 15 bp, Homo sapiens
gagcgcctgggaaga

SEQ ID NO: 1977228 - DNA, 15 bp, Homo sapiens
agcgcctgggaagag

SEQ ID NO: 1977229 - DNA, 15 bp, Homo sapiens
gcgcctgggaagagt

SEQ ID NO: 1977230 - DNA, 15 bp, Homo sapiens
cgcctgggaagagta

SEQ ID NO: 1977231 - DNA, 15 bp, Homo sapiens
gcctgggaagagtac

SEQ ID NO: 1977232 - DNA, 15 bp, Homo sapiens
cctgggaagagtaca

SEQ ID NO: 1977233 - DNA, 15 bp, Homo sapiens
ctgggaagagtacac

SEQ ID NO: 1977234 - DNA, 15 bp, Homo sapiens
tgggaagagtacaca

SEQ ID NO: 1977235 - DNA, 15 bp, Homo sapiens
gggaagagtacacaa

SEQ ID NO: 1977236 - DNA, 15 bp, Homo sapiens
ggaagagtacacaac

SEQ ID NO: 1977237 - DNA, 15 bp, Homo sapiens
gaagagtacacaact

SEQ ID NO: 1977238 - DNA, 15 bp, Homo sapiens
aagagtacacaactc

SEQ ID NO: 1977239 - DNA, 15 bp, Homo sapiens
agagtacacaactca

SEQ ID NO: 1977240 - DNA, 15 bp, Homo sapiens
gagtacacaactcag

SEQ ID NO: 1977241 - DNA, 15 bp, Homo sapiens
agtacacaactcagg

SEQ ID NO: 1977242 - DNA, 15 bp, Homo sapiens
gtacacaactcaggg

SEQ ID NO: 1977243 - DNA, 15 bp, Homo sapiens
tacacaactcagggg

SEQ ID NO: 1977244 - DNA, 15 bp, Homo sapiens
acacaactcaggggt

SEQ ID NO: 1977245 - DNA, 15 bp, Homo sapiens
cacaactcaggggtt

SEQ ID NO: 1977246 - DNA, 15 bp, Homo sapiens
acaactcaggggttg

SEQ ID NO: 1977247 - DNA, 15 bp, Homo sapiens
caactcaggggttgc

SEQ ID NO: 1977248 - DNA, 15 bp, Homo sapiens
aactcaggggttgct

SEQ ID NO: 1977249 - DNA, 15 bp, Homo sapiens
actcaggggttgctg

SEQ ID NO: 1977250 - DNA, 15 bp, Homo sapiens
ctcaggggttgctga

SEQ ID NO: 1977251 - DNA, 15 bp, Homo sapiens
tcaggggttgctgag

SEQ ID NO: 1977252 - DNA, 15 bp, Homo sapiens
caggggttgctgaga

SEQ ID NO: 1977253 - DNA, 15 bp, Homo sapiens
aggggttgctgagag

SEQ ID NO: 1977254 - DNA, 15 bp, Homo sapiens
ggggttgctgagaga

SEQ ID NO: 1977255 - DNA, 15 bp, Homo sapiens
gggttgctgagagaa

SEQ ID NO: 1977256 - DNA, 15 bp, Homo sapiens
ggttgctgagagaag

SEQ ID NO: 1977257 - DNA, 15 bp, Homo sapiens
gttgctgagagaaga

SEQ ID NO: 1977258 - DNA, 15 bp, Homo sapiens
ttgctgagagaagag

SEQ ID NO: 1977259 - DNA, 15 bp, Homo sapiens
tgctgagagaagaga

SEQ ID NO: 1977260 - DNA, 15 bp, Homo sapiens
gctgagagaagagaa

SEQ ID NO: 1977261 - DNA, 15 bp, Homo sapiens
ctgagagaagagaag

SEQ ID NO: 1977262 - DNA, 15 bp, Homo sapiens
tgagagaagagaagg

SEQ ID NO: 1977263 - DNA, 15 bp, Homo sapiens
gagagaagagaaggc

SEQ ID NO: 1977264 - DNA, 15 bp, Homo sapiens
agagaagagaaggca

SEQ ID NO: 1977265 - DNA, 15 bp, Homo sapiens
gagaagagaaggcac

SEQ ID NO: 1977266 - DNA, 15 bp, Homo sapiens
agaagagaaggcaca

SEQ ID NO: 1977267 - DNA, 15 bp, Homo sapiens
gaagagaaggcacag

SEQ ID NO: 1977268 - DNA, 15 bp, Homo sapiens
aagagaaggcacagc

SEQ ID NO: 1977269 - DNA, 15 bp, Homo sapiens
agagaaggcacagct

SEQ ID NO: 1977270 - DNA, 15 bp, Homo sapiens
gagaaggcacagctg

SEQ ID NO: 1977271 - DNA, 15 bp, Homo sapiens
agaaggcacagctgt

SEQ ID NO: 1977272 - DNA, 15 bp, Homo sapiens
gaaggcacagctgtc

SEQ ID NO: 1977273 - DNA, 15 bp, Homo sapiens
aaggcacagctgtcc

SEQ ID NO: 1977274 - DNA, 15 bp, Homo sapiens
aggcacagctgtccc

SEQ ID NO: 1977275 - DNA, 15 bp, Homo sapiens
ggcacagctgtccca

SEQ ID NO: 1977276 - DNA, 15 bp, Homo sapiens
gcacagctgtcccag

SEQ ID NO: 1977277 - DNA, 15 bp, Homo sapiens
cacagctgtcccagc

SEQ ID NO: 1977278 - DNA, 15 bp, Homo sapiens
acagctgtcccagcc

SEQ ID NO: 1977279 - DNA, 15 bp, Homo sapiens
cagctgtcccagccc

SEQ ID NO: 1977280 - DNA, 15 bp, Homo sapiens
agctgtcccagcccc

SEQ ID NO: 1977281 - DNA, 15 bp, Homo sapiens
gctgtcccagcccca

SEQ ID NO: 1977282 - DNA, 15 bp, Homo sapiens
ctgtcccagccccag

SEQ ID NO: 1977283 - DNA, 15 bp, Homo sapiens
tgtcccagccccagt

SEQ ID NO: 1977284 - DNA, 15 bp, Homo sapiens
gtcccagccccagtt

SEQ ID NO: 1977285 - DNA, 15 bp, Homo sapiens
tcccagccccagttc

SEQ ID NO: 1977286 - DNA, 15 bp, Homo sapiens
cccagccccagttct

SEQ ID NO: 1977287 - DNA, 15 bp, Homo sapiens
ccagccccagttctc

SEQ ID NO: 1977288 - DNA, 15 bp, Homo sapiens
cagccccagttctcc

SEQ ID NO: 1977289 - DNA, 15 bp, Homo sapiens
agccccagttctcct

SEQ ID NO: 1977290 - DNA, 15 bp, Homo sapiens
gccccagttctcctg

SEQ ID NO: 1977291 - DNA, 15 bp, Homo sapiens
ccccagttctcctga

SEQ ID NO: 1977292 - DNA, 15 bp, Homo sapiens
cccagttctcctgac

SEQ ID NO: 1977293 - DNA, 15 bp, Homo sapiens
ccagttctcctgaca

SEQ ID NO: 1977294 - DNA, 15 bp, Homo sapiens
cagttctcctgacaa

SEQ ID NO: 1977295 - DNA, 15 bp, Homo sapiens
agttctcctgacaag

SEQ ID NO: 1977296 - DNA, 15 bp, Homo sapiens
gttctcctgacaagc

SEQ ID NO: 1977297 - DNA, 15 bp, Homo sapiens
ttctcctgacaagct

SEQ ID NO: 1977298 - DNA, 15 bp, Homo sapiens
tctcctgacaagctt

SEQ ID NO: 1977299 - DNA, 15 bp, Homo sapiens
ctcctgacaagcttc

SEQ ID NO: 1977300 - DNA, 15 bp, Homo sapiens
tcctgacaagcttct

SEQ ID NO: 1977301 - DNA, 15 bp, Homo sapiens
cctgacaagcttctg

SEQ ID NO: 1977302 - DNA, 15 bp, Homo sapiens
ctgacaagcttctgt

SEQ ID NO: 1977303 - DNA, 15 bp, Homo sapiens
tgacaagcttctgtc

SEQ ID NO: 1977304 - DNA, 15 bp, Homo sapiens
gacaagcttctgtct

SEQ ID NO: 1977305 - DNA, 15 bp, Homo sapiens
acaagcttctgtctt

SEQ ID NO: 1977306 - DNA, 15 bp, Homo sapiens
caagcttctgtcttt

SEQ ID NO: 1977307 - DNA, 15 bp, Homo sapiens
aagcttctgtctttc

SEQ ID NO: 1977308 - DNA, 15 bp, Homo sapiens
agcttctgtctttct

SEQ ID NO: 1977309 - DNA, 15 bp, Homo sapiens
gcttctgtctttctg

SEQ ID NO: 1977310 - DNA, 15 bp, Homo sapiens
cttctgtctttctgg

SEQ ID NO: 1977311 - DNA, 15 bp, Homo sapiens
ttctgtctttctgga

SEQ ID NO: 1977312 - DNA, 15 bp, Homo sapiens
tctgtctttctggaa

SEQ ID NO: 1977313 - DNA, 15 bp, Homo sapiens
ctgtctttctggaag

SEQ ID NO: 1977314 - DNA, 15 bp, Homo sapiens
tgtctttctggaagc

SEQ ID NO: 1977315 - DNA, 15 bp, Homo sapiens
gtctttctggaagcc

SEQ ID NO: 1977316 - DNA, 15 bp, Homo sapiens
tctttctggaagccc

SEQ ID NO: 1977317 - DNA, 15 bp, Homo sapiens
ctttctggaagcccc

SEQ ID NO: 1977318 - DNA, 15 bp, Homo sapiens
tttctggaagcccct

SEQ ID NO: 1977319 - DNA, 15 bp, Homo sapiens
ttctggaagccccta

SEQ ID NO: 1977320 - DNA, 15 bp, Homo sapiens
tctggaagcccctaa

SEQ ID NO: 1977321 - DNA, 15 bp, Homo sapiens
ctggaagcccctaac

SEQ ID NO: 1977322 - DNA, 15 bp, Homo sapiens
tggaagcccctaacc

SEQ ID NO: 1977323 - DNA, 15 bp, Homo sapiens
ggaagcccctaaccc

SEQ ID NO: 1977324 - DNA, 15 bp, Homo sapiens
gaagcccctaaccca

SEQ ID NO: 1977325 - DNA, 15 bp, Homo sapiens
aagcccctaacccaa

SEQ ID NO: 1977326 - DNA, 15 bp, Homo sapiens
agcccctaacccaat

SEQ ID NO: 1977327 - DNA, 15 bp, Homo sapiens
gcccctaacccaatc

SEQ ID NO: 1977328 - DNA, 15 bp, Homo sapiens
cccctaacccaatcc

SEQ ID NO: 1977329 - DNA, 15 bp, Homo sapiens
ccctaacccaatccc

SEQ ID NO: 1977330 - DNA, 15 bp, Homo sapiens
cctaacccaatccct

SEQ ID NO: 1977331 - DNA, 15 bp, Homo sapiens
ctaacccaatccctg

SEQ ID NO: 1977332 - DNA, 15 bp, Homo sapiens
taacccaatccctga

SEQ ID NO: 1977333 - DNA, 15 bp, Homo sapiens
aacccaatccctgag

SEQ ID NO: 1977334 - DNA, 15 bp, Homo sapiens
acccaatccctgagc

SEQ ID NO: 1977335 - DNA, 15 bp, Homo sapiens
cccaatccctgagct

SEQ ID NO: 1977336 - DNA, 15 bp, Homo sapiens
ccaatccctgagctg

SEQ ID NO: 1977337 - DNA, 15 bp, Homo sapiens
caatccctgagctga

SEQ ID NO: 1977338 - DNA, 15 bp, Homo sapiens
aatccctgagctgag

SEQ ID NO: 1977339 - DNA, 15 bp, Homo sapiens
atccctgagctgagc

SEQ ID NO: 1977340 - DNA, 15 bp, Homo sapiens
tccctgagctgagca

SEQ ID NO: 1977341 - DNA, 15 bp, Homo sapiens
ccctgagctgagcag

SEQ ID NO: 1977342 - DNA, 15 bp, Homo sapiens
cctgagctgagcagg

SEQ ID NO: 1977343 - DNA, 15 bp, Homo sapiens
ctgagctgagcaggt

SEQ ID NO: 1977344 - DNA, 15 bp, Homo sapiens
tgagctgagcaggtg

SEQ ID NO: 1977345 - DNA, 15 bp, Homo sapiens
gagctgagcaggtgg

SEQ ID NO: 1977346 - DNA, 15 bp, Homo sapiens
gctgagcaggtggag

SEQ ID NO: 1977347 - DNA, 15 bp, Homo sapiens
ctgagcaggtggaga

SEQ ID NO: 1977348 - DNA, 15 bp, Homo sapiens
tgagcaggtggagag

SEQ ID NO: 1977349 - DNA, 15 bp, Homo sapiens
gagcaggtggagagg

SEQ ID NO: 1977350 - DNA, 15 bp, Homo sapiens
agcaggtggagagga

SEQ ID NO: 1977351 - DNA, 15 bp, Homo sapiens
gcaggtggagaggac

SEQ ID NO: 1977352 - DNA, 15 bp, Homo sapiens
caggtggagaggacc

SEQ ID NO: 1977353 - DNA, 15 bp, Homo sapiens
aggtggagaggaccc

SEQ ID NO: 1977354 - DNA, 15 bp, Homo sapiens
ggtggagaggacccc

SEQ ID NO: 1977355 - DNA, 15 bp, Homo sapiens
gtggagaggacccca

SEQ ID NO: 1977356 - DNA, 15 bp, Homo sapiens
tggagaggaccccaa

SEQ ID NO: 1977357 - DNA, 15 bp, Homo sapiens
ggagaggaccccaag

SEQ ID NO: 1977358 - DNA, 15 bp, Homo sapiens
gagaggaccccaagg

SEQ ID NO: 1977359 - DNA, 15 bp, Homo sapiens
agaggaccccaagga

SEQ ID NO: 1977360 - DNA, 15 bp, Homo sapiens
gaggaccccaaggaa

SEQ ID NO: 1977361 - DNA, 15 bp, Homo sapiens
aggaccccaaggaag

SEQ ID NO: 1977362 - DNA, 15 bp, Homo sapiens
ggaccccaaggaaga

SEQ ID NO: 1977363 - DNA, 15 bp, Homo sapiens
gaccccaaggaagac

SEQ ID NO: 1977364 - DNA, 15 bp, Homo sapiens
accccaaggaagaca

SEQ ID NO: 1977365 - DNA, 15 bp, Homo sapiens
ccccaaggaagacag

SEQ ID NO: 1977366 - DNA, 15 bp, Homo sapiens
cccaaggaagacaga

SEQ ID NO: 1977367 - DNA, 15 bp, Homo sapiens
ccaaggaagacagaa

SEQ ID NO: 1977368 - DNA, 15 bp, Homo sapiens
caaggaagacagaag

SEQ ID NO: 1977369 - DNA, 15 bp, Homo sapiens
aaggaagacagaagg

SEQ ID NO: 1977370 - DNA, 15 bp, Homo sapiens
aggaagacagaagga

SEQ ID NO: 1977371 - DNA, 15 bp, Homo sapiens
ggaagacagaaggac

SEQ ID NO: 1977372 - DNA, 15 bp, Homo sapiens
gaagacagaaggaca

SEQ ID NO: 1977373 - DNA, 15 bp, Homo sapiens
aagacagaaggacaa

SEQ ID NO: 1977374 - DNA, 15 bp, Homo sapiens
agacagaaggacaag

SEQ ID NO: 1977375 - DNA, 15 bp, Homo sapiens
gacagaaggacaagg

SEQ ID NO: 1977376 - DNA, 15 bp, Homo sapiens
acagaaggacaaggt

SEQ ID NO: 1977377 - DNA, 15 bp, Homo sapiens
cagaaggacaaggtc

SEQ ID NO: 1977378 - DNA, 15 bp, Homo sapiens
agaaggacaaggtca

SEQ ID NO: 1977379 - DNA, 15 bp, Homo sapiens
gaaggacaaggtcag

SEQ ID NO: 1977380 - DNA, 15 bp, Homo sapiens
aaggacaaggtcaga

SEQ ID NO: 1977381 - DNA, 15 bp, Homo sapiens
aggacaaggtcagac

SEQ ID NO: 1977382 - DNA, 15 bp, Homo sapiens
ggacaaggtcagaca

SEQ ID NO: 1977383 - DNA, 15 bp, Homo sapiens
gacaaggtcagacag

SEQ ID NO: 1977384 - DNA, 15 bp, Homo sapiens
acaaggtcagacaga

SEQ ID NO: 1977385 - DNA, 15 bp, Homo sapiens
caaggtcagacagac

SEQ ID NO: 1977386 - DNA, 15 bp, Homo sapiens
aaggtcagacagaca

SEQ ID NO: 1977387 - DNA, 15 bp, Homo sapiens
aggtcagacagacag

SEQ ID NO: 1977388 - DNA, 15 bp, Homo sapiens
ggtcagacagacaga

SEQ ID NO: 1977389 - DNA, 15 bp, Homo sapiens
gtcagacagacagag

SEQ ID NO: 1977390 - DNA, 15 bp, Homo sapiens
tcagacagacagaga

SEQ ID NO: 1977391 - DNA, 15 bp, Homo sapiens
cagacagacagagac

SEQ ID NO: 1977392 - DNA, 15 bp, Homo sapiens
agacagacagagaca

SEQ ID NO: 1977393 - DNA, 15 bp, Homo sapiens
gacagacagagacaa

SEQ ID NO: 1977394 - DNA, 15 bp, Homo sapiens
acagacagagacaag

SEQ ID NO: 1977395 - DNA, 15 bp, Homo sapiens
cagacagagacaagg

SEQ ID NO: 1977396 - DNA, 15 bp, Homo sapiens
agacagagacaagga

SEQ ID NO: 1977397 - DNA, 15 bp, Homo sapiens
gacagagacaaggag

SEQ ID NO: 1977398 - DNA, 15 bp, Homo sapiens
acagagacaaggagg

SEQ ID NO: 1977399 - DNA, 15 bp, Homo sapiens
cagagacaaggaggt

SEQ ID NO: 1977400 - DNA, 15 bp, Homo sapiens
agagacaaggaggtg

SEQ ID NO: 1977401 - DNA, 15 bp, Homo sapiens
gagacaaggaggtgg

SEQ ID NO: 1977402 - DNA, 15 bp, Homo sapiens
agacaaggaggtggg

SEQ ID NO: 1977403 - DNA, 15 bp, Homo sapiens
gacaaggaggtgggt

SEQ ID NO: 1977404 - DNA, 15 bp, Homo sapiens
acaaggaggtgggtt

SEQ ID NO: 1977405 - DNA, 15 bp, Homo sapiens
caaggaggtgggttg

SEQ ID NO: 1977406 - DNA, 15 bp, Homo sapiens
aaggaggtgggttga

SEQ ID NO: 1977407 - DNA, 15 bp, Homo sapiens
aggaggtgggttgac

SEQ ID NO: 1977408 - DNA, 15 bp, Homo sapiens
ggaggtgggttgaca

SEQ ID NO: 1977409 - DNA, 15 bp, Homo sapiens
gaggtgggttgacac

SEQ ID NO: 1977410 - DNA, 15 bp, Homo sapiens
aggtgggttgacaca

SEQ ID NO: 1977411 - DNA, 15 bp, Homo sapiens
ggtgggttgacacat

SEQ ID NO: 1977412 - DNA, 15 bp, Homo sapiens
gtgggttgacacata

SEQ ID NO: 1977413 - DNA, 15 bp, Homo sapiens
tgggttgacacatag

SEQ ID NO: 1977414 - DNA, 15 bp, Homo sapiens
gggttgacacataga

SEQ ID NO: 1977415 - DNA, 15 bp, Homo sapiens
ggttgacacatagac

SEQ ID NO: 1977416 - DNA, 15 bp, Homo sapiens
gttgacacatagaca

SEQ ID NO: 1977417 - DNA, 15 bp, Homo sapiens
ttgacacatagacac

SEQ ID NO: 1977418 - DNA, 15 bp, Homo sapiens
tgacacatagacaca

SEQ ID NO: 1977419 - DNA, 15 bp, Homo sapiens
gacacatagacacag

SEQ ID NO: 1977420 - DNA, 15 bp, Homo sapiens
acacatagacacaga

SEQ ID NO: 1977421 - DNA, 15 bp, Homo sapiens
cacatagacacagat

SEQ ID NO: 1977422 - DNA, 15 bp, Homo sapiens
acatagacacagata

SEQ ID NO: 1977423 - DNA, 15 bp, Homo sapiens
catagacacagataa

SEQ ID NO: 1977424 - DNA, 15 bp, Homo sapiens
atagacacagataaa

SEQ ID NO: 1977425 - DNA, 15 bp, Homo sapiens
tagacacagataaag

SEQ ID NO: 1977426 - DNA, 15 bp, Homo sapiens
agacacagataaaga

SEQ ID NO: 1977427 - DNA, 15 bp, Homo sapiens
gacacagataaagaa

SEQ ID NO: 1977428 - DNA, 15 bp, Homo sapiens
acacagataaagaaa

SEQ ID NO: 1977429 - DNA, 15 bp, Homo sapiens
cacagataaagaaat

SEQ ID NO: 1977430 - DNA, 15 bp, Homo sapiens
acagataaagaaatg

SEQ ID NO: 1977431 - DNA, 15 bp, Homo sapiens
cagataaagaaatga

SEQ ID NO: 1977432 - DNA, 15 bp, Homo sapiens
agataaagaaatgaa

SEQ ID NO: 1977433 - DNA, 15 bp, Homo sapiens
gataaagaaatgaag

SEQ ID NO: 1977434 - DNA, 15 bp, Homo sapiens
ataaagaaatgaaga

SEQ ID NO: 1977435 - DNA, 15 bp, Homo sapiens
taaagaaatgaagac

SEQ ID NO: 1977436 - DNA, 15 bp, Homo sapiens
aaagaaatgaagaca

SEQ ID NO: 1977437 - DNA, 15 bp, Homo sapiens
aagaaatgaagacac

SEQ ID NO: 1977438 - DNA, 15 bp, Homo sapiens
agaaatgaagacacc

SEQ ID NO: 1977439 - DNA, 15 bp, Homo sapiens
gaaatgaagacacca

SEQ ID NO: 1977440 - DNA, 15 bp, Homo sapiens
aaatgaagacaccat

SEQ ID NO: 1977441 - DNA, 15 bp, Homo sapiens
aatgaagacaccatg

SEQ ID NO: 1977442 - DNA, 15 bp, Homo sapiens
atgaagacaccatgc

SEQ ID NO: 1977443 - DNA, 15 bp, Homo sapiens
tgaagacaccatgcc

SEQ ID NO: 1977444 - DNA, 15 bp, Homo sapiens
gaagacaccatgcct

SEQ ID NO: 1977445 - DNA, 15 bp, Homo sapiens
aagacaccatgcctg

SEQ ID NO: 1977446 - DNA, 15 bp, Homo sapiens
agacaccatgcctgt

SEQ ID NO: 1977447 - DNA, 15 bp, Homo sapiens
gacaccatgcctgta

SEQ ID NO: 1977448 - DNA, 15 bp, Homo sapiens
acaccatgcctgtaa

SEQ ID NO: 1977449 - DNA, 15 bp, Homo sapiens
caccatgcctgtaat

SEQ ID NO: 1977450 - DNA, 15 bp, Homo sapiens
accatgcctgtaatc

SEQ ID NO: 1977451 - DNA, 15 bp, Homo sapiens
ccatgcctgtaatcc

SEQ ID NO: 1977452 - DNA, 15 bp, Homo sapiens
ggctgaggcgggcgc

SEQ ID NO: 1977453 - DNA, 15 bp, Homo sapiens
gctgaggcgggcgca

SEQ ID NO: 1977454 - DNA, 15 bp, Homo sapiens
ctgaggcgggcgcat

SEQ ID NO: 1977455 - DNA, 15 bp, Homo sapiens
tgaggcgggcgcatc

SEQ ID NO: 1977456 - DNA, 15 bp, Homo sapiens
gaggcgggcgcatca

SEQ ID NO: 1977457 - DNA, 15 bp, Homo sapiens
aggcgggcgcatcac

SEQ ID NO: 1977458 - DNA, 15 bp, Homo sapiens
ggcgggcgcatcacc

SEQ ID NO: 1977459 - DNA, 15 bp, Homo sapiens
gcgggcgcatcacct

SEQ ID NO: 1977460 - DNA, 15 bp, Homo sapiens
cgggcgcatcacctg

SEQ ID NO: 1977461 - DNA, 15 bp, Homo sapiens
gggcgcatcacctga

SEQ ID NO: 1977462 - DNA, 15 bp, Homo sapiens
ggcgcatcacctgag

SEQ ID NO: 1977463 - DNA, 15 bp, Homo sapiens
gcgcatcacctgagg

SEQ ID NO: 1977464 - DNA, 15 bp, Homo sapiens
cgcatcacctgaggt

SEQ ID NO: 1977465 - DNA, 15 bp, Homo sapiens
gcatcacctgaggtc

SEQ ID NO: 1977466 - DNA, 15 bp, Homo sapiens
catcacctgaggtca

SEQ ID NO: 1977467 - DNA, 15 bp, Homo sapiens
acctgaggtcaggat

SEQ ID NO: 1977468 - DNA, 15 bp, Homo sapiens
cctgaggtcaggatt

SEQ ID NO: 1977469 - DNA, 15 bp, Homo sapiens
ctgaggtcaggattt

SEQ ID NO: 1977470 - DNA, 15 bp, Homo sapiens
tgaggtcaggatttc

SEQ ID NO: 1977471 - DNA, 15 bp, Homo sapiens
gaggtcaggatttca

SEQ ID NO: 1977472 - DNA, 15 bp, Homo sapiens
aggtcaggatttcaa

SEQ ID NO: 1977473 - DNA, 15 bp, Homo sapiens
ggtcaggatttcaag

SEQ ID NO: 1977474 - DNA, 15 bp, Homo sapiens
gtcaggatttcaaga

SEQ ID NO: 1977475 - DNA, 15 bp, Homo sapiens
tcaggatttcaagac

SEQ ID NO: 1977476 - DNA, 15 bp, Homo sapiens
caggatttcaagacc

SEQ ID NO: 1977477 - DNA, 15 bp, Homo sapiens
aggatttcaagacca

SEQ ID NO: 1977478 - DNA, 15 bp, Homo sapiens
ggatttcaagaccag

SEQ ID NO: 1977479 - DNA, 15 bp, Homo sapiens
gatttcaagaccagc

SEQ ID NO: 1977480 - DNA, 15 bp, Homo sapiens
atttcaagaccagcc

SEQ ID NO: 1977481 - DNA, 15 bp, Homo sapiens
tttcaagaccagccc

SEQ ID NO: 1977482 - DNA, 15 bp, Homo sapiens
caagaccagcccggc

SEQ ID NO: 1977483 - DNA, 15 bp, Homo sapiens
aagaccagcccggcc

SEQ ID NO: 1977484 - DNA, 15 bp, Homo sapiens
agaccagcccggcca

SEQ ID NO: 1977485 - DNA, 15 bp, Homo sapiens
gaccagcccggccaa

SEQ ID NO: 1977486 - DNA, 15 bp, Homo sapiens
accagcccggccaac

SEQ ID NO: 1977487 - DNA, 15 bp, Homo sapiens
ccagcccggccaaca

SEQ ID NO: 1977488 - DNA, 15 bp, Homo sapiens
cagcccggccaacat

SEQ ID NO: 1977489 - DNA, 15 bp, Homo sapiens
agcccggccaacatg

SEQ ID NO: 1977490 - DNA, 15 bp, Homo sapiens
gcccggccaacatgg

SEQ ID NO: 1977491 - DNA, 15 bp, Homo sapiens
cccggccaacatggt

SEQ ID NO: 1977492 - DNA, 15 bp, Homo sapiens
ccggccaacatggta

SEQ ID NO: 1977493 - DNA, 15 bp, Homo sapiens
cggccaacatggtaa

SEQ ID NO: 1977494 - DNA, 15 bp, Homo sapiens
atggtaaaaccccgt

SEQ ID NO: 1977495 - DNA, 15 bp, Homo sapiens
tggtaaaaccccgtc

SEQ ID NO: 1977496 - DNA, 15 bp, Homo sapiens
ggtaaaaccccgtct

SEQ ID NO: 1977497 - DNA, 15 bp, Homo sapiens
gtaaaaccccgtctc

SEQ ID NO: 1977498 - DNA, 15 bp, Homo sapiens
taaaaccccgtctct

SEQ ID NO: 1977499 - DNA, 15 bp, Homo sapiens
gtggcacatgcctgt

SEQ ID NO: 1977500 - DNA, 15 bp, Homo sapiens
tggcacatgcctgta

SEQ ID NO: 1977501 - DNA, 15 bp, Homo sapiens
ggcacatgcctgtaa

SEQ ID NO: 1977502 - DNA, 15 bp, Homo sapiens
gcacatgcctgtaat

SEQ ID NO: 1977503 - DNA, 15 bp, Homo sapiens
cacatgcctgtaatc

SEQ ID NO: 1977504 - DNA, 15 bp, Homo sapiens
gctactcgggaggcc

SEQ ID NO: 1977505 - DNA, 15 bp, Homo sapiens
ctactcgggaggccg

SEQ ID NO: 1977506 - DNA, 15 bp, Homo sapiens
tactcgggaggccga

SEQ ID NO: 1977507 - DNA, 15 bp, Homo sapiens
actcgggaggccgag

SEQ ID NO: 1977508 - DNA, 15 bp, Homo sapiens
ctcgggaggccgagg

SEQ ID NO: 1977509 - DNA, 15 bp, Homo sapiens
gaggccgaggcagga

SEQ ID NO: 1977510 - DNA, 15 bp, Homo sapiens
aggccgaggcaggag

SEQ ID NO: 1977511 - DNA, 15 bp, Homo sapiens
ggccgaggcaggaga

SEQ ID NO: 1977512 - DNA, 15 bp, Homo sapiens
gccgaggcaggagaa

SEQ ID NO: 1977513 - DNA, 15 bp, Homo sapiens
ccgaggcaggagaat

SEQ ID NO: 1977514 - DNA, 15 bp, Homo sapiens
cgaggcaggagaatc

SEQ ID NO: 1977515 - DNA, 15 bp, Homo sapiens
tgagccaagatggcg

SEQ ID NO: 1977516 - DNA, 15 bp, Homo sapiens
gagccaagatggcgc

SEQ ID NO: 1977517 - DNA, 15 bp, Homo sapiens
agccaagatggcgcc

SEQ ID NO: 1977518 - DNA, 15 bp, Homo sapiens
gccaagatggcgcca

SEQ ID NO: 1977519 - DNA, 15 bp, Homo sapiens
ccaagatggcgccat

SEQ ID NO: 1977520 - DNA, 15 bp, Homo sapiens
agatggcgccattgc

SEQ ID NO: 1977521 - DNA, 15 bp, Homo sapiens
gatggcgccattgca

SEQ ID NO: 1977522 - DNA, 15 bp, Homo sapiens
atggcgccattgcac

SEQ ID NO: 1977523 - DNA, 15 bp, Homo sapiens
tggcgccattgcact

SEQ ID NO: 1977524 - DNA, 15 bp, Homo sapiens
ggcgccattgcactc

SEQ ID NO: 1977525 - DNA, 15 bp, Homo sapiens
gcgccattgcactcc

SEQ ID NO: 1977526 - DNA, 15 bp, Homo sapiens
cgccattgcactcca

SEQ ID NO: 1977527 - DNA, 15 bp, Homo sapiens
cactccagcctggcc

SEQ ID NO: 1977528 - DNA, 15 bp, Homo sapiens
actccagcctggcca

SEQ ID NO: 1977529 - DNA, 15 bp, Homo sapiens
ctccagcctggccaa

SEQ ID NO: 1977530 - DNA, 15 bp, Homo sapiens
tccagcctggccaac

SEQ ID NO: 1977531 - DNA, 15 bp, Homo sapiens
cagcctggccaacag

SEQ ID NO: 1977532 - DNA, 15 bp, Homo sapiens
agcctggccaacaga

SEQ ID NO: 1977533 - DNA, 15 bp, Homo sapiens
gcctggccaacagag

SEQ ID NO: 1977534 - DNA, 15 bp, Homo sapiens
cctggccaacagagc

SEQ ID NO: 1977535 - DNA, 15 bp, Homo sapiens
ctggccaacagagca

SEQ ID NO: 1977536 - DNA, 15 bp, Homo sapiens
tggccaacagagcaa

SEQ ID NO: 1977537 - DNA, 15 bp, Homo sapiens
ggccaacagagcaag

SEQ ID NO: 1977538 - DNA, 15 bp, Homo sapiens
gccaacagagcaaga

SEQ ID NO: 1977539 - DNA, 15 bp, Homo sapiens
ccaacagagcaagac

SEQ ID NO: 1977540 - DNA, 15 bp, Homo sapiens
agcaagactctgtcc

SEQ ID NO: 1977541 - DNA, 15 bp, Homo sapiens
gcaagactctgtcca

SEQ ID NO: 1977542 - DNA, 15 bp, Homo sapiens
caagactctgtccaa

SEQ ID NO: 1977543 - DNA, 15 bp, Homo sapiens
aagactctgtccaaa

SEQ ID NO: 1977544 - DNA, 15 bp, Homo sapiens
agactctgtccaaaa

SEQ ID NO: 1977545 - DNA, 15 bp, Homo sapiens
gactctgtccaaaaa

SEQ ID NO: 1977546 - DNA, 15 bp, Homo sapiens
actctgtccaaaaaa

SEQ ID NO: 1977547 - DNA, 15 bp, Homo sapiens
ctctgtccaaaaaac

SEQ ID NO: 1977548 - DNA, 15 bp, Homo sapiens
tctgtccaaaaaaca

SEQ ID NO: 1977549 - DNA, 15 bp, Homo sapiens
ctgtccaaaaaacaa

SEQ ID NO: 1977550 - DNA, 15 bp, Homo sapiens
tgtccaaaaaacaaa

SEQ ID NO: 1977551 - DNA, 15 bp, Homo sapiens
gtccaaaaaacaaac

SEQ ID NO: 1977552 - DNA, 15 bp, Homo sapiens
tccaaaaaacaaaca

SEQ ID NO: 1977553 - DNA, 15 bp, Homo sapiens
ccaaaaaacaaacaa

SEQ ID NO: 1977554 - DNA, 15 bp, Homo sapiens
caaaaaacaaacaaa

SEQ ID NO: 1977555 - DNA, 15 bp, Homo sapiens
aaaacaaacaaacag

SEQ ID NO: 1977556 - DNA, 15 bp, Homo sapiens
aaacaaacaaacaga

SEQ ID NO: 1977557 - DNA, 15 bp, Homo sapiens
aacaaacaaacagac

SEQ ID NO: 1977558 - DNA, 15 bp, Homo sapiens
acaaacaaacagaca

SEQ ID NO: 1977559 - DNA, 15 bp, Homo sapiens
caaacaaacagacaa

SEQ ID NO: 1977560 - DNA, 15 bp, Homo sapiens
aaacaaacagacaaa

SEQ ID NO: 1977561 - DNA, 15 bp, Homo sapiens
aacaaacagacaaac

SEQ ID NO: 1977562 - DNA, 15 bp, Homo sapiens
acaaacagacaaaca

SEQ ID NO: 1977563 - DNA, 15 bp, Homo sapiens
caaacagacaaacaa

SEQ ID NO: 1977564 - DNA, 15 bp, Homo sapiens
aaacagacaaacaaa

SEQ ID NO: 1977565 - DNA, 15 bp, Homo sapiens
aacagacaaacaaac

SEQ ID NO: 1977566 - DNA, 15 bp, Homo sapiens
acagacaaacaaaca

SEQ ID NO: 1977567 - DNA, 15 bp, Homo sapiens
cagacaaacaaacaa

SEQ ID NO: 1977568 - DNA, 15 bp, Homo sapiens
agacaaacaaacaaa

SEQ ID NO: 1977569 - DNA, 15 bp, Homo sapiens
gacaaacaaacaaaa

SEQ ID NO: 1977570 - DNA, 15 bp, Homo sapiens
acaaacaaacaaaac

SEQ ID NO: 1977571 - DNA, 15 bp, Homo sapiens
caaacaaacaaaaca

SEQ ID NO: 1977572 - DNA, 15 bp, Homo sapiens
aaacaaacaaaacaa

SEQ ID NO: 1977573 - DNA, 15 bp, Homo sapiens
aacaaacaaaacaaa

SEQ ID NO: 1977574 - DNA, 15 bp, Homo sapiens
acaaacaaaacaaaa

SEQ ID NO: 1977575 - DNA, 15 bp, Homo sapiens
aaaacaaaaagaaat

SEQ ID NO: 1977576 - DNA, 15 bp, Homo sapiens
aaacaaaaagaaata

SEQ ID NO: 1977577 - DNA, 15 bp, Homo sapiens
aacaaaaagaaatag

SEQ ID NO: 1977578 - DNA, 15 bp, Homo sapiens
acaaaaagaaataga

SEQ ID NO: 1977579 - DNA, 15 bp, Homo sapiens
caaaaagaaatagag

SEQ ID NO: 1977580 - DNA, 15 bp, Homo sapiens
aaaaagaaatagaga

SEQ ID NO: 1977581 - DNA, 15 bp, Homo sapiens
aaaagaaatagagac

SEQ ID NO: 1977582 - DNA, 15 bp, Homo sapiens
aaagaaatagagaca

SEQ ID NO: 1977583 - DNA, 15 bp, Homo sapiens
aagaaatagagacac

SEQ ID NO: 1977584 - DNA, 15 bp, Homo sapiens
agaaatagagacaca

SEQ ID NO: 1977585 - DNA, 15 bp, Homo sapiens
gaaatagagacacag

SEQ ID NO: 1977586 - DNA, 15 bp, Homo sapiens
aaatagagacacaga

SEQ ID NO: 1977587 - DNA, 15 bp, Homo sapiens
tagagacacagagaa

SEQ ID NO: 1977588 - DNA, 15 bp, Homo sapiens
agagacacagagaag

SEQ ID NO: 1977589 - DNA, 15 bp, Homo sapiens
gagacacagagaagt

SEQ ID NO: 1977590 - DNA, 15 bp, Homo sapiens
agacacagagaagtg

SEQ ID NO: 1977591 - DNA, 15 bp, Homo sapiens
gacacagagaagtgg

SEQ ID NO: 1977592 - DNA, 15 bp, Homo sapiens
acacagagaagtgga

SEQ ID NO: 1977593 - DNA, 15 bp, Homo sapiens
cacagagaagtggaa

SEQ ID NO: 1977594 - DNA, 15 bp, Homo sapiens
acagagaagtggaag

SEQ ID NO: 1977595 - DNA, 15 bp, Homo sapiens
cagagaagtggaagc

SEQ ID NO: 1977596 - DNA, 15 bp, Homo sapiens
agagaagtggaagcg

SEQ ID NO: 1977597 - DNA, 15 bp, Homo sapiens
gagaagtggaagcgg

SEQ ID NO: 1977598 - DNA, 15 bp, Homo sapiens
agaagtggaagcggg

SEQ ID NO: 1977599 - DNA, 15 bp, Homo sapiens
gaagtggaagcgggg

SEQ ID NO: 1977600 - DNA, 15 bp, Homo sapiens
aagtggaagcggggc

SEQ ID NO: 1977601 - DNA, 15 bp, Homo sapiens
agtggaagcggggcg

SEQ ID NO: 1977602 - DNA, 15 bp, Homo sapiens
gtggaagcggggcgg

SEQ ID NO: 1977603 - DNA, 15 bp, Homo sapiens
tggaagcggggcggc

SEQ ID NO: 1977604 - DNA, 15 bp, Homo sapiens
ggaagcggggcggca

SEQ ID NO: 1977605 - DNA, 15 bp, Homo sapiens
gaagcggggcggcac

SEQ ID NO: 1977606 - DNA, 15 bp, Homo sapiens
aagcggggcggcaca

SEQ ID NO: 1977607 - DNA, 15 bp, Homo sapiens
agcggggcggcacag

SEQ ID NO: 1977608 - DNA, 15 bp, Homo sapiens
gcggggcggcacaga

SEQ ID NO: 1977609 - DNA, 15 bp, Homo sapiens
cggggcggcacagag

SEQ ID NO: 1977610 - DNA, 15 bp, Homo sapiens
ggggcggcacagagg

SEQ ID NO: 1977611 - DNA, 15 bp, Homo sapiens
gggcggcacagaggg

SEQ ID NO: 1977612 - DNA, 15 bp, Homo sapiens
ggcggcacagagggg

SEQ ID NO: 1977613 - DNA, 15 bp, Homo sapiens
gcggcacagagggga

SEQ ID NO: 1977614 - DNA, 15 bp, Homo sapiens
cggcacagaggggat

SEQ ID NO: 1977615 - DNA, 15 bp, Homo sapiens
ggcacagaggggatt

SEQ ID NO: 1977616 - DNA, 15 bp, Homo sapiens
gcacagaggggattg

SEQ ID NO: 1977617 - DNA, 15 bp, Homo sapiens
cacagaggggattgg

SEQ ID NO: 1977618 - DNA, 15 bp, Homo sapiens
acagaggggattgga

SEQ ID NO: 1977619 - DNA, 15 bp, Homo sapiens
cagaggggattggag

SEQ ID NO: 1977620 - DNA, 15 bp, Homo sapiens
agaggggattggagg

SEQ ID NO: 1977621 - DNA, 15 bp, Homo sapiens
gaggggattggaggg

SEQ ID NO: 1977622 - DNA, 15 bp, Homo sapiens
aggggattggagggg

SEQ ID NO: 1977623 - DNA, 15 bp, Homo sapiens
ggggattggaggggg

SEQ ID NO: 1977624 - DNA, 15 bp, Homo sapiens
gggattggagggggg

SEQ ID NO: 1977625 - DNA, 15 bp, Homo sapiens
ggattggaggggggg

SEQ ID NO: 1977626 - DNA, 15 bp, Homo sapiens
gattggaggggggga

SEQ ID NO: 1977627 - DNA, 15 bp, Homo sapiens
attggagggggggac

SEQ ID NO: 1977628 - DNA, 15 bp, Homo sapiens
ttggagggggggacc

SEQ ID NO: 1977629 - DNA, 15 bp, Homo sapiens
tggagggggggacct

SEQ ID NO: 1977630 - DNA, 15 bp, Homo sapiens
ggagggggggacctg

SEQ ID NO: 1977631 - DNA, 15 bp, Homo sapiens
gagggggggacctgg

SEQ ID NO: 1977632 - DNA, 15 bp, Homo sapiens
agggggggacctggg

SEQ ID NO: 1977633 - DNA, 15 bp, Homo sapiens
gggggggacctgggc

SEQ ID NO: 1977634 - DNA, 15 bp, Homo sapiens
ggggggacctgggcc

SEQ ID NO: 1977635 - DNA, 15 bp, Homo sapiens
gggggacctgggccc

SEQ ID NO: 1977636 - DNA, 15 bp, Homo sapiens
ggggacctgggcccc

SEQ ID NO: 1977637 - DNA, 15 bp, Homo sapiens
gggacctgggcccca

SEQ ID NO: 1977638 - DNA, 15 bp, Homo sapiens
ggacctgggccccag

SEQ ID NO: 1977639 - DNA, 15 bp, Homo sapiens
gacctgggccccagc

SEQ ID NO: 1977640 - DNA, 15 bp, Homo sapiens
acctgggccccagcc

SEQ ID NO: 1977641 - DNA, 15 bp, Homo sapiens
cctgggccccagcca

SEQ ID NO: 1977642 - DNA, 15 bp, Homo sapiens
ctgggccccagccac

SEQ ID NO: 1977643 - DNA, 15 bp, Homo sapiens
tgggccccagccaca

SEQ ID NO: 1977644 - DNA, 15 bp, Homo sapiens
gggccccagccacag

SEQ ID NO: 1977645 - DNA, 15 bp, Homo sapiens
ggccccagccacagc

SEQ ID NO: 1977646 - DNA, 15 bp, Homo sapiens
gccccagccacagcc

SEQ ID NO: 1977647 - DNA, 15 bp, Homo sapiens
ccccagccacagcca

SEQ ID NO: 1977648 - DNA, 15 bp, Homo sapiens
cccagccacagccac

SEQ ID NO: 1977649 - DNA, 15 bp, Homo sapiens
ccagccacagccaca

SEQ ID NO: 1977650 - DNA, 15 bp, Homo sapiens
cagccacagccacag

SEQ ID NO: 1977651 - DNA, 15 bp, Homo sapiens
agccacagccacagt

SEQ ID NO: 1977652 - DNA, 15 bp, Homo sapiens
gccacagccacagta

SEQ ID NO: 1977653 - DNA, 15 bp, Homo sapiens
ccacagccacagtag

SEQ ID NO: 1977654 - DNA, 15 bp, Homo sapiens
cacagccacagtagc

SEQ ID NO: 1977655 - DNA, 15 bp, Homo sapiens
acagccacagtagct

SEQ ID NO: 1977656 - DNA, 15 bp, Homo sapiens
cagccacagtagctt

SEQ ID NO: 1977657 - DNA, 15 bp, Homo sapiens
agccacagtagcttg

SEQ ID NO: 1977658 - DNA, 15 bp, Homo sapiens
gccacagtagcttgg

SEQ ID NO: 1977659 - DNA, 15 bp, Homo sapiens
ccacagtagcttggc

SEQ ID NO: 1977660 - DNA, 15 bp, Homo sapiens
cacagtagcttggcc

SEQ ID NO: 1977661 - DNA, 15 bp, Homo sapiens
acagtagcttggcct

SEQ ID NO: 1977662 - DNA, 15 bp, Homo sapiens
cagtagcttggcctg

SEQ ID NO: 1977663 - DNA, 15 bp, Homo sapiens
agtagcttggcctgg

SEQ ID NO: 1977664 - DNA, 15 bp, Homo sapiens
gtagcttggcctggg

SEQ ID NO: 1977665 - DNA, 15 bp, Homo sapiens
tagcttggcctgggg

SEQ ID NO: 1977666 - DNA, 15 bp, Homo sapiens
agcttggcctggggg

SEQ ID NO: 1977667 - DNA, 15 bp, Homo sapiens
gcttggcctggggga

SEQ ID NO: 1977668 - DNA, 15 bp, Homo sapiens
cttggcctgggggag

SEQ ID NO: 1977669 - DNA, 15 bp, Homo sapiens
ttggcctgggggagc

SEQ ID NO: 1977670 - DNA, 15 bp, Homo sapiens
tggcctgggggagca

SEQ ID NO: 1977671 - DNA, 15 bp, Homo sapiens
ggcctgggggagcag

SEQ ID NO: 1977672 - DNA, 15 bp, Homo sapiens
gcctgggggagcagg

SEQ ID NO: 1977673 - DNA, 15 bp, Homo sapiens
cctgggggagcaggg

SEQ ID NO: 1977674 - DNA, 15 bp, Homo sapiens
ctgggggagcagggt

SEQ ID NO: 1977675 - DNA, 15 bp, Homo sapiens
tgggggagcagggtg

SEQ ID NO: 1977676 - DNA, 15 bp, Homo sapiens
gggggagcagggtgc

SEQ ID NO: 1977677 - DNA, 15 bp, Homo sapiens
ggggagcagggtgcg

SEQ ID NO: 1977678 - DNA, 15 bp, Homo sapiens
gggagcagggtgcgg

SEQ ID NO: 1977679 - DNA, 15 bp, Homo sapiens
ggagcagggtgcggg

SEQ ID NO: 1977680 - DNA, 15 bp, Homo sapiens
gagcagggtgcgggc

SEQ ID NO: 1977681 - DNA, 15 bp, Homo sapiens
agcagggtgcgggcg

SEQ ID NO: 1977682 - DNA, 15 bp, Homo sapiens
gcagggtgcgggcgg

SEQ ID NO: 1977683 - DNA, 15 bp, Homo sapiens
cagggtgcgggcggt

SEQ ID NO: 1977684 - DNA, 15 bp, Homo sapiens
agggtgcgggcggtg

SEQ ID NO: 1977685 - DNA, 15 bp, Homo sapiens
gggtgcgggcggtgg

SEQ ID NO: 1977686 - DNA, 15 bp, Homo sapiens
ggtgcgggcggtggg

SEQ ID NO: 1977687 - DNA, 15 bp, Homo sapiens
gtgcgggcggtgggg

SEQ ID NO: 1977688 - DNA, 15 bp, Homo sapiens
tgcgggcggtggggt

SEQ ID NO: 1977689 - DNA, 15 bp, Homo sapiens
gcgggcggtggggtg

SEQ ID NO: 1977690 - DNA, 15 bp, Homo sapiens
cgggcggtggggtgg

SEQ ID NO: 1977691 - DNA, 15 bp, Homo sapiens
gggcggtggggtggc

SEQ ID NO: 1977692 - DNA, 15 bp, Homo sapiens
ggcggtggggtggcc

SEQ ID NO: 1977693 - DNA, 15 bp, Homo sapiens
gcggtggggtggccg

SEQ ID NO: 1977694 - DNA, 15 bp, Homo sapiens
cggtggggtggccgg

SEQ ID NO: 1977695 - DNA, 15 bp, Homo sapiens
ggtggggtggccggg

SEQ ID NO: 1977696 - DNA, 15 bp, Homo sapiens
gtggggtggccgggg

SEQ ID NO: 1977697 - DNA, 15 bp, Homo sapiens
tggggtggccggggc

SEQ ID NO: 1977698 - DNA, 15 bp, Homo sapiens
ggggtggccggggct

SEQ ID NO: 1977699 - DNA, 15 bp, Homo sapiens
gggtggccggggctg

SEQ ID NO: 1977700 - DNA, 15 bp, Homo sapiens
ggtggccggggctga

SEQ ID NO: 1977701 - DNA, 15 bp, Homo sapiens
gtggccggggctgag

SEQ ID NO: 1977702 - DNA, 15 bp, Homo sapiens
tggccggggctgagg

SEQ ID NO: 1977703 - DNA, 15 bp, Homo sapiens
ggccggggctgaggg

SEQ ID NO: 1977704 - DNA, 15 bp, Homo sapiens
gccggggctgagggg

SEQ ID NO: 1977705 - DNA, 15 bp, Homo sapiens
ccggggctgaggggt

SEQ ID NO: 1977706 - DNA, 15 bp, Homo sapiens
cggggctgaggggtg

SEQ ID NO: 1977707 - DNA, 15 bp, Homo sapiens
ggggctgaggggtgg

SEQ ID NO: 1977708 - DNA, 15 bp, Homo sapiens
gggctgaggggtggt

SEQ ID NO: 1977709 - DNA, 15 bp, Homo sapiens
ggctgaggggtggtg

SEQ ID NO: 1977710 - DNA, 15 bp, Homo sapiens
gctgaggggtggtgc

SEQ ID NO: 1977711 - DNA, 15 bp, Homo sapiens
ctgaggggtggtgct

SEQ ID NO: 1977712 - DNA, 15 bp, Homo sapiens
tgaggggtggtgctc

SEQ ID NO: 1977713 - DNA, 15 bp, Homo sapiens
gaggggtggtgctca

SEQ ID NO: 1977714 - DNA, 15 bp, Homo sapiens
aggggtggtgctcag

SEQ ID NO: 1977715 - DNA, 15 bp, Homo sapiens
ggggtggtgctcagc

SEQ ID NO: 1977716 - DNA, 15 bp, Homo sapiens
gggtggtgctcagcc

SEQ ID NO: 1977717 - DNA, 15 bp, Homo sapiens
ggtggtgctcagcct

SEQ ID NO: 1977718 - DNA, 15 bp, Homo sapiens
gtggtgctcagcctt

SEQ ID NO: 1977719 - DNA, 15 bp, Homo sapiens
tggtgctcagccttt

SEQ ID NO: 1977720 - DNA, 15 bp, Homo sapiens
ggtgctcagcctttc

SEQ ID NO: 1977721 - DNA, 15 bp, Homo sapiens
gtgctcagcctttca

SEQ ID NO: 1977722 - DNA, 15 bp, Homo sapiens
tgctcagcctttcag

SEQ ID NO: 1977723 - DNA, 15 bp, Homo sapiens
gctcagcctttcaga

SEQ ID NO: 1977724 - DNA, 15 bp, Homo sapiens
ctcagcctttcagaa

SEQ ID NO: 1977725 - DNA, 15 bp, Homo sapiens
tcagcctttcagaag

SEQ ID NO: 1977726 - DNA, 15 bp, Homo sapiens
cagcctttcagaaga

SEQ ID NO: 1977727 - DNA, 15 bp, Homo sapiens
agcctttcagaagaa

SEQ ID NO: 1977728 - DNA, 15 bp, Homo sapiens
gcctttcagaagaag

SEQ ID NO: 1977729 - DNA, 15 bp, Homo sapiens
cctttcagaagaagc

SEQ ID NO: 1977730 - DNA, 15 bp, Homo sapiens
ctttcagaagaagct

SEQ ID NO: 1977731 - DNA, 15 bp, Homo sapiens
tttcagaagaagctg

SEQ ID NO: 1977732 - DNA, 15 bp, Homo sapiens
ttcagaagaagctgg

SEQ ID NO: 1977733 - DNA, 15 bp, Homo sapiens
tcagaagaagctgga

SEQ ID NO: 1977734 - DNA, 15 bp, Homo sapiens
cagaagaagctggag

SEQ ID NO: 1977735 - DNA, 15 bp, Homo sapiens
agaagaagctggagc

SEQ ID NO: 1977736 - DNA, 15 bp, Homo sapiens
gaagaagctggagcc

SEQ ID NO: 1977737 - DNA, 15 bp, Homo sapiens
aagaagctggagccg

SEQ ID NO: 1977738 - DNA, 15 bp, Homo sapiens
agaagctggagccgg

SEQ ID NO: 1977739 - DNA, 15 bp, Homo sapiens
gaagctggagccggc

SEQ ID NO: 1977740 - DNA, 15 bp, Homo sapiens
aagctggagccggcc

SEQ ID NO: 1977741 - DNA, 15 bp, Homo sapiens
agctggagccggcct

SEQ ID NO: 1977742 - DNA, 15 bp, Homo sapiens
gctggagccggccta

SEQ ID NO: 1977743 - DNA, 15 bp, Homo sapiens
ctggagccggcctac

SEQ ID NO: 1977744 - DNA, 15 bp, Homo sapiens
tggagccggcctacc

SEQ ID NO: 1977745 - DNA, 15 bp, Homo sapiens
ggagccggcctacca

SEQ ID NO: 1977746 - DNA, 15 bp, Homo sapiens
gagccggcctaccag

SEQ ID NO: 1977747 - DNA, 15 bp, Homo sapiens
agccggcctaccagg

SEQ ID NO: 1977748 - DNA, 15 bp, Homo sapiens
gccggcctaccaggt

SEQ ID NO: 1977749 - DNA, 15 bp, Homo sapiens
ccggcctaccaggtg

SEQ ID NO: 1977750 - DNA, 15 bp, Homo sapiens
cggcctaccaggtga

SEQ ID NO: 1977751 - DNA, 15 bp, Homo sapiens
ggcctaccaggtgag

SEQ ID NO: 1977752 - DNA, 15 bp, Homo sapiens
gcctaccaggtgagc

SEQ ID NO: 1977753 - DNA, 15 bp, Homo sapiens
cctaccaggtgagca

SEQ ID NO: 1977754 - DNA, 15 bp, Homo sapiens
ctaccaggtgagcaa

SEQ ID NO: 1977755 - DNA, 15 bp, Homo sapiens
taccaggtgagcaaa

SEQ ID NO: 1977756 - DNA, 15 bp, Homo sapiens
accaggtgagcaaag

SEQ ID NO: 1977757 - DNA, 15 bp, Homo sapiens
ccaggtgagcaaagg

SEQ ID NO: 1977758 - DNA, 15 bp, Homo sapiens
caggtgagcaaaggc

SEQ ID NO: 1977759 - DNA, 15 bp, Homo sapiens
aggtgagcaaaggcc

SEQ ID NO: 1977760 - DNA, 15 bp, Homo sapiens
ggtgagcaaaggcca

SEQ ID NO: 1977761 - DNA, 15 bp, Homo sapiens
gtgagcaaaggccac

SEQ ID NO: 1977762 - DNA, 15 bp, Homo sapiens
tgagcaaaggccaca

SEQ ID NO: 1977763 - DNA, 15 bp, Homo sapiens
gagcaaaggccacaa

SEQ ID NO: 1977764 - DNA, 15 bp, Homo sapiens
gcaaaggccacaaga

SEQ ID NO: 1977765 - DNA, 15 bp, Homo sapiens
caaaggccacaagat

SEQ ID NO: 1977766 - DNA, 15 bp, Homo sapiens
aaaggccacaagatc

SEQ ID NO: 1977767 - DNA, 15 bp, Homo sapiens
aaggccacaagatcc

SEQ ID NO: 1977768 - DNA, 15 bp, Homo sapiens
aggccacaagatccg

SEQ ID NO: 1977769 - DNA, 15 bp, Homo sapiens
ggccacaagatccgg

SEQ ID NO: 1977770 - DNA, 15 bp, Homo sapiens
gccacaagatccggc

SEQ ID NO: 1977771 - DNA, 15 bp, Homo sapiens
ccacaagatccggct

SEQ ID NO: 1977772 - DNA, 15 bp, Homo sapiens
cacaagatccggctg

SEQ ID NO: 1977773 - DNA, 15 bp, Homo sapiens
acaagatccggctga

SEQ ID NO: 1977774 - DNA, 15 bp, Homo sapiens
caagatccggctgac

SEQ ID NO: 1977775 - DNA, 15 bp, Homo sapiens
aagatccggctgacc

SEQ ID NO: 1977776 - DNA, 15 bp, Homo sapiens
agatccggctgaccg

SEQ ID NO: 1977777 - DNA, 15 bp, Homo sapiens
gatccggctgaccgt

SEQ ID NO: 1977778 - DNA, 15 bp, Homo sapiens
atccggctgaccgtg

SEQ ID NO: 1977779 - DNA, 15 bp, Homo sapiens
tccggctgaccgtgg

SEQ ID NO: 1977780 - DNA, 15 bp, Homo sapiens
ccggctgaccgtgga

SEQ ID NO: 1977781 - DNA, 15 bp, Homo sapiens
cggctgaccgtggaa

SEQ ID NO: 1977782 - DNA, 15 bp, Homo sapiens
ggctgaccgtggaac

SEQ ID NO: 1977783 - DNA, 15 bp, Homo sapiens
gctgaccgtggaact

SEQ ID NO: 1977784 - DNA, 15 bp, Homo sapiens
ctgaccgtggaactg

SEQ ID NO: 1977785 - DNA, 15 bp, Homo sapiens
tgaccgtggaactgg

SEQ ID NO: 1977786 - DNA, 15 bp, Homo sapiens
gaccgtggaactggc

SEQ ID NO: 1977787 - DNA, 15 bp, Homo sapiens
accgtggaactggct

SEQ ID NO: 1977788 - DNA, 15 bp, Homo sapiens
ccgtggaactggctg

SEQ ID NO: 1977789 - DNA, 15 bp, Homo sapiens
cgtggaactggctga

SEQ ID NO: 1977790 - DNA, 15 bp, Homo sapiens
gtggaactggctgac

SEQ ID NO: 1977791 - DNA, 15 bp, Homo sapiens
tggaactggctgacc

SEQ ID NO: 1977792 - DNA, 15 bp, Homo sapiens
ggaactggctgacca

SEQ ID NO: 1977793 - DNA, 15 bp, Homo sapiens
gaactggctgaccat

SEQ ID NO: 1977794 - DNA, 15 bp, Homo sapiens
aactggctgaccatg

SEQ ID NO: 1977795 - DNA, 15 bp, Homo sapiens
actggctgaccatga

SEQ ID NO: 1977796 - DNA, 15 bp, Homo sapiens
ctggctgaccatgac

SEQ ID NO: 1977797 - DNA, 15 bp, Homo sapiens
tggctgaccatgacg

SEQ ID NO: 1977798 - DNA, 15 bp, Homo sapiens
ggctgaccatgacgc

SEQ ID NO: 1977799 - DNA, 15 bp, Homo sapiens
gctgaccatgacgct

SEQ ID NO: 1977800 - DNA, 15 bp, Homo sapiens
ctgaccatgacgctg

SEQ ID NO: 1977801 - DNA, 15 bp, Homo sapiens
tgaccatgacgctga

SEQ ID NO: 1977802 - DNA, 15 bp, Homo sapiens
gaccatgacgctgag

SEQ ID NO: 1977803 - DNA, 15 bp, Homo sapiens
accatgacgctgagg

SEQ ID NO: 1977804 - DNA, 15 bp, Homo sapiens
ccatgacgctgaggt

SEQ ID NO: 1977805 - DNA, 15 bp, Homo sapiens
catgacgctgaggtc

SEQ ID NO: 1977806 - DNA, 15 bp, Homo sapiens
atgacgctgaggtca

SEQ ID NO: 1977807 - DNA, 15 bp, Homo sapiens
tgacgctgaggtcaa

SEQ ID NO: 1977808 - DNA, 15 bp, Homo sapiens
gacgctgaggtcaaa

SEQ ID NO: 1977809 - DNA, 15 bp, Homo sapiens
acgctgaggtcaaat

SEQ ID NO: 1977810 - DNA, 15 bp, Homo sapiens
cgctgaggtcaaatg

SEQ ID NO: 1977811 - DNA, 15 bp, Homo sapiens
gctgaggtcaaatgg

SEQ ID NO: 1977812 - DNA, 15 bp, Homo sapiens
ctgaggtcaaatggc

SEQ ID NO: 1977813 - DNA, 15 bp, Homo sapiens
gaggtcaaatggctc

SEQ ID NO: 1977814 - DNA, 15 bp, Homo sapiens
aggtcaaatggctca

SEQ ID NO: 1977815 - DNA, 15 bp, Homo sapiens
ggtcaaatggctcaa

SEQ ID NO: 1977816 - DNA, 15 bp, Homo sapiens
gtcaaatggctcaag

SEQ ID NO: 1977817 - DNA, 15 bp, Homo sapiens
tcaaatggctcaaga

SEQ ID NO: 1977818 - DNA, 15 bp, Homo sapiens
caaatggctcaagaa

SEQ ID NO: 1977819 - DNA, 15 bp, Homo sapiens
aaatggctcaagaat

SEQ ID NO: 1977820 - DNA, 15 bp, Homo sapiens
aatggctcaagaatg

SEQ ID NO: 1977821 - DNA, 15 bp, Homo sapiens
atggctcaagaatgg

SEQ ID NO: 1977822 - DNA, 15 bp, Homo sapiens
tggctcaagaatggc

SEQ ID NO: 1977823 - DNA, 15 bp, Homo sapiens
ggctcaagaatggcc

SEQ ID NO: 1977824 - DNA, 15 bp, Homo sapiens
gctcaagaatggcca

SEQ ID NO: 1977825 - DNA, 15 bp, Homo sapiens
ctcaagaatggccag

SEQ ID NO: 1977826 - DNA, 15 bp, Homo sapiens
tcaagaatggccagg

SEQ ID NO: 1977827 - DNA, 15 bp, Homo sapiens
caagaatggccagga

SEQ ID NO: 1977828 - DNA, 15 bp, Homo sapiens
aagaatggccaggag

SEQ ID NO: 1977829 - DNA, 15 bp, Homo sapiens
agaatggccaggaga

SEQ ID NO: 1977830 - DNA, 15 bp, Homo sapiens
gaatggccaggagat

SEQ ID NO: 1977831 - DNA, 15 bp, Homo sapiens
aatggccaggagatc

SEQ ID NO: 1977832 - DNA, 15 bp, Homo sapiens
atggccaggagatcc

SEQ ID NO: 1977833 - DNA, 15 bp, Homo sapiens
tggccaggagatcca

SEQ ID NO: 1977834 - DNA, 15 bp, Homo sapiens
ggccaggagatccag

SEQ ID NO: 1977835 - DNA, 15 bp, Homo sapiens
gccaggagatccaga

SEQ ID NO: 1977836 - DNA, 15 bp, Homo sapiens
ccaggagatccagat

SEQ ID NO: 1977837 - DNA, 15 bp, Homo sapiens
caggagatccagatg

SEQ ID NO: 1977838 - DNA, 15 bp, Homo sapiens
aggagatccagatga

SEQ ID NO: 1977839 - DNA, 15 bp, Homo sapiens
ggagatccagatgag

SEQ ID NO: 1977840 - DNA, 15 bp, Homo sapiens
gagatccagatgagc

SEQ ID NO: 1977841 - DNA, 15 bp, Homo sapiens
agatccagatgagcg

SEQ ID NO: 1977842 - DNA, 15 bp, Homo sapiens
gatccagatgagcgg

SEQ ID NO: 1977843 - DNA, 15 bp, Homo sapiens
atccagatgagcggc

SEQ ID NO: 1977844 - DNA, 15 bp, Homo sapiens
tccagatgagcggca

SEQ ID NO: 1977845 - DNA, 15 bp, Homo sapiens
ccagatgagcggcag

SEQ ID NO: 1977846 - DNA, 15 bp, Homo sapiens
cagatgagcggcagg

SEQ ID NO: 1977847 - DNA, 15 bp, Homo sapiens
agatgagcggcaggt

SEQ ID NO: 1977848 - DNA, 15 bp, Homo sapiens
gatgagcggcaggtg

SEQ ID NO: 1977849 - DNA, 15 bp, Homo sapiens
atgagcggcaggtgc

SEQ ID NO: 1977850 - DNA, 15 bp, Homo sapiens
tgagcggcaggtgca

SEQ ID NO: 1977851 - DNA, 15 bp, Homo sapiens
gagcggcaggtgcag

SEQ ID NO: 1977852 - DNA, 15 bp, Homo sapiens
agcggcaggtgcagc

SEQ ID NO: 1977853 - DNA, 15 bp, Homo sapiens
gcggcaggtgcagcc

SEQ ID NO: 1977854 - DNA, 15 bp, Homo sapiens
cggcaggtgcagcct

SEQ ID NO: 1977855 - DNA, 15 bp, Homo sapiens
ggcaggtgcagcctg

SEQ ID NO: 1977856 - DNA, 15 bp, Homo sapiens
caggtgcagcctggg

SEQ ID NO: 1977857 - DNA, 15 bp, Homo sapiens
aggtgcagcctgggg

SEQ ID NO: 1977858 - DNA, 15 bp, Homo sapiens
ggtgcagcctggggt

SEQ ID NO: 1977859 - DNA, 15 bp, Homo sapiens
gtgcagcctggggtg

SEQ ID NO: 1977860 - DNA, 15 bp, Homo sapiens
tgcagcctggggtgg

SEQ ID NO: 1977861 - DNA, 15 bp, Homo sapiens
gcagcctggggtggg

SEQ ID NO: 1977862 - DNA, 15 bp, Homo sapiens
cagcctggggtgggg

SEQ ID NO: 1977863 - DNA, 15 bp, Homo sapiens
agcctggggtgggga

SEQ ID NO: 1977864 - DNA, 15 bp, Homo sapiens
gcctggggtggggag

SEQ ID NO: 1977865 - DNA, 15 bp, Homo sapiens
cctggggtggggagg

SEQ ID NO: 1977866 - DNA, 15 bp, Homo sapiens
ctggggtggggaggg

SEQ ID NO: 1977867 - DNA, 15 bp, Homo sapiens
tggggtggggagggg

SEQ ID NO: 1977868 - DNA, 15 bp, Homo sapiens
ggggtggggaggggg

SEQ ID NO: 1977869 - DNA, 15 bp, Homo sapiens
gggtggggagggggg

SEQ ID NO: 1977870 - DNA, 15 bp, Homo sapiens
ggtggggaggggggc

SEQ ID NO: 1977871 - DNA, 15 bp, Homo sapiens
gtggggaggggggct

SEQ ID NO: 1977872 - DNA, 15 bp, Homo sapiens
tggggaggggggctc

SEQ ID NO: 1977873 - DNA, 15 bp, Homo sapiens
ggggaggggggctcg

SEQ ID NO: 1977874 - DNA, 15 bp, Homo sapiens
gggaggggggctcgg

SEQ ID NO: 1977875 - DNA, 15 bp, Homo sapiens
ggaggggggctcggg

SEQ ID NO: 1977876 - DNA, 15 bp, Homo sapiens
gaggggggctcgggt

SEQ ID NO: 1977877 - DNA, 15 bp, Homo sapiens
aggggggctcgggtg

SEQ ID NO: 1977878 - DNA, 15 bp, Homo sapiens
ggggggctcgggtgg

SEQ ID NO: 1977879 - DNA, 15 bp, Homo sapiens
gggggctcgggtgga

SEQ ID NO: 1977880 - DNA, 15 bp, Homo sapiens
ggggctcgggtggag

SEQ ID NO: 1977881 - DNA, 15 bp, Homo sapiens
gggctcgggtggagg

SEQ ID NO: 1977882 - DNA, 15 bp, Homo sapiens
ggctcgggtggaggt

SEQ ID NO: 1977883 - DNA, 15 bp, Homo sapiens
gctcgggtggaggtg

SEQ ID NO: 1977884 - DNA, 15 bp, Homo sapiens
ctcgggtggaggtgg

SEQ ID NO: 1977885 - DNA, 15 bp, Homo sapiens
tcgggtggaggtggg

SEQ ID NO: 1977886 - DNA, 15 bp, Homo sapiens
cgggtggaggtgggg

SEQ ID NO: 1977887 - DNA, 15 bp, Homo sapiens
gggtggaggtgggga

SEQ ID NO: 1977888 - DNA, 15 bp, Homo sapiens
ggtggaggtggggac

SEQ ID NO: 1977889 - DNA, 15 bp, Homo sapiens
gtggaggtggggacc

SEQ ID NO: 1977890 - DNA, 15 bp, Homo sapiens
tggaggtggggaccc

SEQ ID NO: 1977891 - DNA, 15 bp, Homo sapiens
ggaggtggggacccc

SEQ ID NO: 1977892 - DNA, 15 bp, Homo sapiens
gaggtggggaccccc

SEQ ID NO: 1977893 - DNA, 15 bp, Homo sapiens
aggtggggaccccca

SEQ ID NO: 1977894 - DNA, 15 bp, Homo sapiens
ggtggggacccccat

SEQ ID NO: 1977895 - DNA, 15 bp, Homo sapiens
gtggggacccccata

SEQ ID NO: 1977896 - DNA, 15 bp, Homo sapiens
tggggacccccatag

SEQ ID NO: 1977897 - DNA, 15 bp, Homo sapiens
ggggacccccatagc

SEQ ID NO: 1977898 - DNA, 15 bp, Homo sapiens
gggacccccatagcc

SEQ ID NO: 1977899 - DNA, 15 bp, Homo sapiens
ggacccccatagcct

SEQ ID NO: 1977900 - DNA, 15 bp, Homo sapiens
gacccccatagcctt

SEQ ID NO: 1977901 - DNA, 15 bp, Homo sapiens
acccccatagccttg

SEQ ID NO: 1977902 - DNA, 15 bp, Homo sapiens
cccccatagccttgc

SEQ ID NO: 1977903 - DNA, 15 bp, Homo sapiens
ccccatagccttgcc

SEQ ID NO: 1977904 - DNA, 15 bp, Homo sapiens
cccatagccttgcct

SEQ ID NO: 1977905 - DNA, 15 bp, Homo sapiens
ccatagccttgcctc

SEQ ID NO: 1977906 - DNA, 15 bp, Homo sapiens
catagccttgcctcc

SEQ ID NO: 1977907 - DNA, 15 bp, Homo sapiens
atagccttgcctcct

SEQ ID NO: 1977908 - DNA, 15 bp, Homo sapiens
tagccttgcctcctg

SEQ ID NO: 1977909 - DNA, 15 bp, Homo sapiens
agccttgcctcctgc

SEQ ID NO: 1977910 - DNA, 15 bp, Homo sapiens
gccttgcctcctgcc

SEQ ID NO: 1977911 - DNA, 15 bp, Homo sapiens
ccttgcctcctgccc

SEQ ID NO: 1977912 - DNA, 15 bp, Homo sapiens
cttgcctcctgcccc

SEQ ID NO: 1977913 - DNA, 15 bp, Homo sapiens
ttgcctcctgcccct

SEQ ID NO: 1977914 - DNA, 15 bp, Homo sapiens
tgcctcctgcccctc

SEQ ID NO: 1977915 - DNA, 15 bp, Homo sapiens
gcctcctgcccctct

SEQ ID NO: 1977916 - DNA, 15 bp, Homo sapiens
cctcctgcccctctc

SEQ ID NO: 1977917 - DNA, 15 bp, Homo sapiens
ctcctgcccctctcc

SEQ ID NO: 1977918 - DNA, 15 bp, Homo sapiens
tcctgcccctctcca

SEQ ID NO: 1977919 - DNA, 15 bp, Homo sapiens
cctgcccctctccac

SEQ ID NO: 1977920 - DNA, 15 bp, Homo sapiens
ctgcccctctccaca

SEQ ID NO: 1977921 - DNA, 15 bp, Homo sapiens
tgcccctctccacat

SEQ ID NO: 1977922 - DNA, 15 bp, Homo sapiens
gcccctctccacatg

SEQ ID NO: 1977923 - DNA, 15 bp, Homo sapiens
cccctctccacatgc

SEQ ID NO: 1977924 - DNA, 15 bp, Homo sapiens
ccctctccacatgcg

SEQ ID NO: 1977925 - DNA, 15 bp, Homo sapiens
cctctccacatgcgt

SEQ ID NO: 1977926 - DNA, 15 bp, Homo sapiens
ctctccacatgcgta

SEQ ID NO: 1977927 - DNA, 15 bp, Homo sapiens
tctccacatgcgtat

SEQ ID NO: 1977928 - DNA, 15 bp, Homo sapiens
ctccacatgcgtatc

SEQ ID NO: 1977929 - DNA, 15 bp, Homo sapiens
tccacatgcgtatct

SEQ ID NO: 1977930 - DNA, 15 bp, Homo sapiens
ccacatgcgtatctc

SEQ ID NO: 1977931 - DNA, 15 bp, Homo sapiens
cacatgcgtatctct

SEQ ID NO: 1977932 - DNA, 15 bp, Homo sapiens
acatgcgtatctctg

SEQ ID NO: 1977933 - DNA, 15 bp, Homo sapiens
catgcgtatctctga

SEQ ID NO: 1977934 - DNA, 15 bp, Homo sapiens
atgcgtatctctgac

SEQ ID NO: 1977935 - DNA, 15 bp, Homo sapiens
tgcgtatctctgact

SEQ ID NO: 1977936 - DNA, 15 bp, Homo sapiens
gcgtatctctgactc

SEQ ID NO: 1977937 - DNA, 15 bp, Homo sapiens
cgtatctctgactcg

SEQ ID NO: 1977938 - DNA, 15 bp, Homo sapiens
gtatctctgactcgg

SEQ ID NO: 1977939 - DNA, 15 bp, Homo sapiens
tatctctgactcggt

SEQ ID NO: 1977940 - DNA, 15 bp, Homo sapiens
atctctgactcggtg

SEQ ID NO: 1977941 - DNA, 15 bp, Homo sapiens
tctctgactcggtgt

SEQ ID NO: 1977942 - DNA, 15 bp, Homo sapiens
ctctgactcggtgtg

SEQ ID NO: 1977943 - DNA, 15 bp, Homo sapiens
tctgactcggtgtgg

SEQ ID NO: 1977944 - DNA, 15 bp, Homo sapiens
ctgactcggtgtggc

SEQ ID NO: 1977945 - DNA, 15 bp, Homo sapiens
tgactcggtgtggct

SEQ ID NO: 1977946 - DNA, 15 bp, Homo sapiens
gactcggtgtggctc

SEQ ID NO: 1977947 - DNA, 15 bp, Homo sapiens
actcggtgtggctct

SEQ ID NO: 1977948 - DNA, 15 bp, Homo sapiens
ctcggtgtggctctc

SEQ ID NO: 1977949 - DNA, 15 bp, Homo sapiens
tcggtgtggctctca

SEQ ID NO: 1977950 - DNA, 15 bp, Homo sapiens
cggtgtggctctcag

SEQ ID NO: 1977951 - DNA, 15 bp, Homo sapiens
ggtgtggctctcagc

SEQ ID NO: 1977952 - DNA, 15 bp, Homo sapiens
gtgtggctctcagcc

SEQ ID NO: 1977953 - DNA, 15 bp, Homo sapiens
tgtggctctcagccc

SEQ ID NO: 1977954 - DNA, 15 bp, Homo sapiens
gtggctctcagcccc

SEQ ID NO: 1977955 - DNA, 15 bp, Homo sapiens
tggctctcagcccca

SEQ ID NO: 1977956 - DNA, 15 bp, Homo sapiens
ggctctcagccccat

SEQ ID NO: 1977957 - DNA, 15 bp, Homo sapiens
gctctcagccccatc

SEQ ID NO: 1977958 - DNA, 15 bp, Homo sapiens
ctctcagccccatct

SEQ ID NO: 1977959 - DNA, 15 bp, Homo sapiens
tctcagccccatctc

SEQ ID NO: 1977960 - DNA, 15 bp, Homo sapiens
ctcagccccatctct

SEQ ID NO: 1977961 - DNA, 15 bp, Homo sapiens
tcagccccatctctc

SEQ ID NO: 1977962 - DNA, 15 bp, Homo sapiens
cagccccatctctct

SEQ ID NO: 1977963 - DNA, 15 bp, Homo sapiens
agccccatctctctg

SEQ ID NO: 1977964 - DNA, 15 bp, Homo sapiens
gccccatctctctgg

SEQ ID NO: 1977965 - DNA, 15 bp, Homo sapiens
ccccatctctctggg

SEQ ID NO: 1977966 - DNA, 15 bp, Homo sapiens
cccatctctctgggc

SEQ ID NO: 1977967 - DNA, 15 bp, Homo sapiens
ccatctctctgggcc

SEQ ID NO: 1977968 - DNA, 15 bp, Homo sapiens
catctctctgggcct

SEQ ID NO: 1977969 - DNA, 15 bp, Homo sapiens
atctctctgggccta

SEQ ID NO: 1977970 - DNA, 15 bp, Homo sapiens
tctctctgggcctaa

SEQ ID NO: 1977971 - DNA, 15 bp, Homo sapiens
ctctctgggcctaat

SEQ ID NO: 1977972 - DNA, 15 bp, Homo sapiens
tctctgggcctaatt

SEQ ID NO: 1977973 - DNA, 15 bp, Homo sapiens
ctctgggcctaattt

SEQ ID NO: 1977974 - DNA, 15 bp, Homo sapiens
tctgggcctaatttc

SEQ ID NO: 1977975 - DNA, 15 bp, Homo sapiens
ctgggcctaatttcc

SEQ ID NO: 1977976 - DNA, 15 bp, Homo sapiens
tgggcctaatttccc

SEQ ID NO: 1977977 - DNA, 15 bp, Homo sapiens
gggcctaatttccca

SEQ ID NO: 1977978 - DNA, 15 bp, Homo sapiens
ggcctaatttcccat

SEQ ID NO: 1977979 - DNA, 15 bp, Homo sapiens
gcctaatttcccatc

SEQ ID NO: 1977980 - DNA, 15 bp, Homo sapiens
cctaatttcccatcc

SEQ ID NO: 1977981 - DNA, 15 bp, Homo sapiens
ctaatttcccatcct

SEQ ID NO: 1977982 - DNA, 15 bp, Homo sapiens
taatttcccatcctt

SEQ ID NO: 1977983 - DNA, 15 bp, Homo sapiens
aatttcccatccttt

SEQ ID NO: 1977984 - DNA, 15 bp, Homo sapiens
atttcccatcctttt

SEQ ID NO: 1977985 - DNA, 15 bp, Homo sapiens
tttcccatccttttg

SEQ ID NO: 1977986 - DNA, 15 bp, Homo sapiens
ttcccatccttttgc

SEQ ID NO: 1977987 - DNA, 15 bp, Homo sapiens
tcccatccttttgct

SEQ ID NO: 1977988 - DNA, 15 bp, Homo sapiens
cccatccttttgctc

SEQ ID NO: 1977989 - DNA, 15 bp, Homo sapiens
ccatccttttgctcc

SEQ ID NO: 1977990 - DNA, 15 bp, Homo sapiens
catccttttgctcct

SEQ ID NO: 1977991 - DNA, 15 bp, Homo sapiens
atccttttgctcctg

SEQ ID NO: 1977992 - DNA, 15 bp, Homo sapiens
tccttttgctcctgc

SEQ ID NO: 1977993 - DNA, 15 bp, Homo sapiens
ccttttgctcctgcc

SEQ ID NO: 1977994 - DNA, 15 bp, Homo sapiens
cttttgctcctgccg

SEQ ID NO: 1977995 - DNA, 15 bp, Homo sapiens
ttttgctcctgccgg

SEQ ID NO: 1977996 - DNA, 15 bp, Homo sapiens
tttgctcctgccggt

SEQ ID NO: 1977997 - DNA, 15 bp, Homo sapiens
ttgctcctgccggtc

SEQ ID NO: 1977998 - DNA, 15 bp, Homo sapiens
tgctcctgccggtcc

SEQ ID NO: 1977999 - DNA, 15 bp, Homo sapiens
gctcctgccggtccc

SEQ ID NO: 1978000 - DNA, 15 bp, Homo sapiens
ctcctgccggtccct

SEQ ID NO: 1978001 - DNA, 15 bp, Homo sapiens
tcctgccggtccctc

SEQ ID NO: 1978002 - DNA, 15 bp, Homo sapiens
cctgccggtccctct

SEQ ID NO: 1978003 - DNA, 15 bp, Homo sapiens
ctgccggtccctctc

SEQ ID NO: 1978004 - DNA, 15 bp, Homo sapiens
tgccggtccctctct

SEQ ID NO: 1978005 - DNA, 15 bp, Homo sapiens
gccggtccctctctc

SEQ ID NO: 1978006 - DNA, 15 bp, Homo sapiens
ccggtccctctctct

SEQ ID NO: 1978007 - DNA, 15 bp, Homo sapiens
cggtccctctctctc

SEQ ID NO: 1978008 - DNA, 15 bp, Homo sapiens
ggtccctctctctct

SEQ ID NO: 1978009 - DNA, 15 bp, Homo sapiens
gtccctctctctctc

SEQ ID NO: 1978010 - DNA, 15 bp, Homo sapiens
tccctctctctctct

SEQ ID NO: 1978011 - DNA, 15 bp, Homo sapiens
ccctctctctctctc

SEQ ID NO: 1978012 - DNA, 15 bp, Homo sapiens
cctctctctctctcc

SEQ ID NO: 1978013 - DNA, 15 bp, Homo sapiens
ctctctctccttttg

SEQ ID NO: 1978014 - DNA, 15 bp, Homo sapiens
tctctctccttttgt

SEQ ID NO: 1978015 - DNA, 15 bp, Homo sapiens
ctctctccttttgtc

SEQ ID NO: 1978016 - DNA, 15 bp, Homo sapiens
tctctccttttgtct

SEQ ID NO: 1978017 - DNA, 15 bp, Homo sapiens
ctctccttttgtctc

SEQ ID NO: 1978018 - DNA, 15 bp, Homo sapiens
tctccttttgtctcg

SEQ ID NO: 1978019 - DNA, 15 bp, Homo sapiens
ctccttttgtctcgg

SEQ ID NO: 1978020 - DNA, 15 bp, Homo sapiens
tccttttgtctcggg

SEQ ID NO: 1978021 - DNA, 15 bp, Homo sapiens
ccttttgtctcgggc

SEQ ID NO: 1978022 - DNA, 15 bp, Homo sapiens
cttttgtctcgggct

SEQ ID NO: 1978023 - DNA, 15 bp, Homo sapiens
ttttgtctcgggctc

SEQ ID NO: 1978024 - DNA, 15 bp, Homo sapiens
tttgtctcgggctca

SEQ ID NO: 1978025 - DNA, 15 bp, Homo sapiens
ttgtctcgggctcac

SEQ ID NO: 1978026 - DNA, 15 bp, Homo sapiens
tgtctcgggctcact

SEQ ID NO: 1978027 - DNA, 15 bp, Homo sapiens
gtctcgggctcactt

SEQ ID NO: 1978028 - DNA, 15 bp, Homo sapiens
tctcgggctcacttc

SEQ ID NO: 1978029 - DNA, 15 bp, Homo sapiens
ctcgggctcacttcc

SEQ ID NO: 1978030 - DNA, 15 bp, Homo sapiens
tcgggctcacttcct

SEQ ID NO: 1978031 - DNA, 15 bp, Homo sapiens
cgggctcacttcctc

SEQ ID NO: 1978032 - DNA, 15 bp, Homo sapiens
gggctcacttcctcc

SEQ ID NO: 1978033 - DNA, 15 bp, Homo sapiens
ggctcacttcctccc

SEQ ID NO: 1978034 - DNA, 15 bp, Homo sapiens
gctcacttcctcccg

SEQ ID NO: 1978035 - DNA, 15 bp, Homo sapiens
ctcacttcctcccgt

SEQ ID NO: 1978036 - DNA, 15 bp, Homo sapiens
tcacttcctcccgtc

SEQ ID NO: 1978037 - DNA, 15 bp, Homo sapiens
cacttcctcccgtcg

SEQ ID NO: 1978038 - DNA, 15 bp, Homo sapiens
acttcctcccgtcgg

SEQ ID NO: 1978039 - DNA, 15 bp, Homo sapiens
cttcctcccgtcggg

SEQ ID NO: 1978040 - DNA, 15 bp, Homo sapiens
ttcctcccgtcggga

SEQ ID NO: 1978041 - DNA, 15 bp, Homo sapiens
tcctcccgtcgggaa

SEQ ID NO: 1978042 - DNA, 15 bp, Homo sapiens
cctcccgtcgggaac

SEQ ID NO: 1978043 - DNA, 15 bp, Homo sapiens
ctcccgtcgggaaca

SEQ ID NO: 1978044 - DNA, 15 bp, Homo sapiens
tcccgtcgggaacac

SEQ ID NO: 1978045 - DNA, 15 bp, Homo sapiens
cccgtcgggaacact

SEQ ID NO: 1978046 - DNA, 15 bp, Homo sapiens
ccgtcgggaacactt

SEQ ID NO: 1978047 - DNA, 15 bp, Homo sapiens
cgtcgggaacacttc

SEQ ID NO: 1978048 - DNA, 15 bp, Homo sapiens
gtcgggaacacttca

SEQ ID NO: 1978049 - DNA, 15 bp, Homo sapiens
tcgggaacacttcaa

SEQ ID NO: 1978050 - DNA, 15 bp, Homo sapiens
cgggaacacttcaac

SEQ ID NO: 1978051 - DNA, 15 bp, Homo sapiens
gggaacacttcaacg

SEQ ID NO: 1978052 - DNA, 15 bp, Homo sapiens
ggaacacttcaacgg

SEQ ID NO: 1978053 - DNA, 15 bp, Homo sapiens
gaacacttcaacggc

SEQ ID NO: 1978054 - DNA, 15 bp, Homo sapiens
aacacttcaacggcc

SEQ ID NO: 1978055 - DNA, 15 bp, Homo sapiens
acacttcaacggccc

SEQ ID NO: 1978056 - DNA, 15 bp, Homo sapiens
cacttcaacggcccc

SEQ ID NO: 1978057 - DNA, 15 bp, Homo sapiens
acttcaacggcccct

SEQ ID NO: 1978058 - DNA, 15 bp, Homo sapiens
cttcaacggcccctt

SEQ ID NO: 1978059 - DNA, 15 bp, Homo sapiens
ttcaacggccccttc

SEQ ID NO: 1978060 - DNA, 15 bp, Homo sapiens
tcaacggccccttct

SEQ ID NO: 1978061 - DNA, 15 bp, Homo sapiens
caacggccccttctg

SEQ ID NO: 1978062 - DNA, 15 bp, Homo sapiens
aacggccccttctgt

SEQ ID NO: 1978063 - DNA, 15 bp, Homo sapiens
acggccccttctgtt

SEQ ID NO: 1978064 - DNA, 15 bp, Homo sapiens
cggccccttctgttc

SEQ ID NO: 1978065 - DNA, 15 bp, Homo sapiens
ggccccttctgttct

SEQ ID NO: 1978066 - DNA, 15 bp, Homo sapiens
gccccttctgttcta

SEQ ID NO: 1978067 - DNA, 15 bp, Homo sapiens
ccccttctgttctac

SEQ ID NO: 1978068 - DNA, 15 bp, Homo sapiens
cccttctgttctaca

SEQ ID NO: 1978069 - DNA, 15 bp, Homo sapiens
ccttctgttctacag

SEQ ID NO: 1978070 - DNA, 15 bp, Homo sapiens
cttctgttctacagc

SEQ ID NO: 1978071 - DNA, 15 bp, Homo sapiens
ttctgttctacagca

SEQ ID NO: 1978072 - DNA, 15 bp, Homo sapiens
tctgttctacagcaa

SEQ ID NO: 1978073 - DNA, 15 bp, Homo sapiens
ctgttctacagcaag

SEQ ID NO: 1978074 - DNA, 15 bp, Homo sapiens
tgttctacagcaagt

SEQ ID NO: 1978075 - DNA, 15 bp, Homo sapiens
gttctacagcaagta

SEQ ID NO: 1978076 - DNA, 15 bp, Homo sapiens
ttctacagcaagtaa

SEQ ID NO: 1978077 - DNA, 15 bp, Homo sapiens
tctacagcaagtaag

SEQ ID NO: 1978078 - DNA, 15 bp, Homo sapiens
ctacagcaagtaagt

SEQ ID NO: 1978079 - DNA, 15 bp, Homo sapiens
tacagcaagtaagtt

SEQ ID NO: 1978080 - DNA, 15 bp, Homo sapiens
acagcaagtaagttc

SEQ ID NO: 1978081 - DNA, 15 bp, Homo sapiens
cagcaagtaagttcc

SEQ ID NO: 1978082 - DNA, 15 bp, Homo sapiens
agcaagtaagttccc

SEQ ID NO: 1978083 - DNA, 15 bp, Homo sapiens
gcaagtaagttcccc

SEQ ID NO: 1978084 - DNA, 15 bp, Homo sapiens
caagtaagttcccct

SEQ ID NO: 1978085 - DNA, 15 bp, Homo sapiens
aagtaagttcccctc

SEQ ID NO: 1978086 - DNA, 15 bp, Homo sapiens
agtaagttcccctct

SEQ ID NO: 1978087 - DNA, 15 bp, Homo sapiens
gtaagttcccctctg

SEQ ID NO: 1978088 - DNA, 15 bp, Homo sapiens
taagttcccctctgg

SEQ ID NO: 1978089 - DNA, 15 bp, Homo sapiens
aagttcccctctgga

SEQ ID NO: 1978090 - DNA, 15 bp, Homo sapiens
agttcccctctggat

SEQ ID NO: 1978091 - DNA, 15 bp, Homo sapiens
gttcccctctggatg

SEQ ID NO: 1978092 - DNA, 15 bp, Homo sapiens
ttcccctctggatgg

SEQ ID NO: 1978093 - DNA, 15 bp, Homo sapiens
tcccctctggatggc

SEQ ID NO: 1978094 - DNA, 15 bp, Homo sapiens
cccctctggatggct

SEQ ID NO: 1978095 - DNA, 15 bp, Homo sapiens
ccctctggatggctt

SEQ ID NO: 1978096 - DNA, 15 bp, Homo sapiens
cctctggatggcttg

SEQ ID NO: 1978097 - DNA, 15 bp, Homo sapiens
ctctggatggcttgg

SEQ ID NO: 1978098 - DNA, 15 bp, Homo sapiens
tctggatggcttggg

SEQ ID NO: 1978099 - DNA, 15 bp, Homo sapiens
ctggatggcttgggg

SEQ ID NO: 1978100 - DNA, 15 bp, Homo sapiens
tggatggcttggggt

SEQ ID NO: 1978101 - DNA, 15 bp, Homo sapiens
ggatggcttggggtg

SEQ ID NO: 1978102 - DNA, 15 bp, Homo sapiens
gatggcttggggtgg

SEQ ID NO: 1978103 - DNA, 15 bp, Homo sapiens
atggcttggggtggg

SEQ ID NO: 1978104 - DNA, 15 bp, Homo sapiens
tggcttggggtgggg

SEQ ID NO: 1978105 - DNA, 15 bp, Homo sapiens
ggcttggggtggggg

SEQ ID NO: 1978106 - DNA, 15 bp, Homo sapiens
gcttggggtgggggg

SEQ ID NO: 1978107 - DNA, 15 bp, Homo sapiens
cttggggtggggggc

SEQ ID NO: 1978108 - DNA, 15 bp, Homo sapiens
ttggggtggggggca

SEQ ID NO: 1978109 - DNA, 15 bp, Homo sapiens
tggggtggggggcac

SEQ ID NO: 1978110 - DNA, 15 bp, Homo sapiens
ggggtggggggcaca

SEQ ID NO: 1978111 - DNA, 15 bp, Homo sapiens
gggtggggggcacag

SEQ ID NO: 1978112 - DNA, 15 bp, Homo sapiens
ggtggggggcacagg

SEQ ID NO: 1978113 - DNA, 15 bp, Homo sapiens
gtggggggcacaggg

SEQ ID NO: 1978114 - DNA, 15 bp, Homo sapiens
tggggggcacaggga

SEQ ID NO: 1978115 - DNA, 15 bp, Homo sapiens
ggggggcacagggat

SEQ ID NO: 1978116 - DNA, 15 bp, Homo sapiens
gggggcacagggatt

SEQ ID NO: 1978117 - DNA, 15 bp, Homo sapiens
ggggcacagggatta

SEQ ID NO: 1978118 - DNA, 15 bp, Homo sapiens
gggcacagggattat

SEQ ID NO: 1978119 - DNA, 15 bp, Homo sapiens
ggcacagggattatc

SEQ ID NO: 1978120 - DNA, 15 bp, Homo sapiens
gcacagggattatca

SEQ ID NO: 1978121 - DNA, 15 bp, Homo sapiens
cacagggattatcat

SEQ ID NO: 1978122 - DNA, 15 bp, Homo sapiens
acagggattatcatg

SEQ ID NO: 1978123 - DNA, 15 bp, Homo sapiens
cagggattatcatgg

SEQ ID NO: 1978124 - DNA, 15 bp, Homo sapiens
agggattatcatggg

SEQ ID NO: 1978125 - DNA, 15 bp, Homo sapiens
gggattatcatgggg

SEQ ID NO: 1978126 - DNA, 15 bp, Homo sapiens
ggattatcatggggc

SEQ ID NO: 1978127 - DNA, 15 bp, Homo sapiens
gattatcatggggcg

SEQ ID NO: 1978128 - DNA, 15 bp, Homo sapiens
attatcatggggcgc

SEQ ID NO: 1978129 - DNA, 15 bp, Homo sapiens
ttatcatggggcgca

SEQ ID NO: 1978130 - DNA, 15 bp, Homo sapiens
tatcatggggcgcac

SEQ ID NO: 1978131 - DNA, 15 bp, Homo sapiens
atcatggggcgcact

SEQ ID NO: 1978132 - DNA, 15 bp, Homo sapiens
tcatggggcgcactg

SEQ ID NO: 1978133 - DNA, 15 bp, Homo sapiens
catggggcgcactgg

SEQ ID NO: 1978134 - DNA, 15 bp, Homo sapiens
atggggcgcactggg

SEQ ID NO: 1978135 - DNA, 15 bp, Homo sapiens
tggggcgcactgggc

SEQ ID NO: 1978136 - DNA, 15 bp, Homo sapiens
ggggcgcactgggcc

SEQ ID NO: 1978137 - DNA, 15 bp, Homo sapiens
gggcgcactgggccc

SEQ ID NO: 1978138 - DNA, 15 bp, Homo sapiens
ggcgcactgggcccg

SEQ ID NO: 1978139 - DNA, 15 bp, Homo sapiens
gcgcactgggcccgg

SEQ ID NO: 1978140 - DNA, 15 bp, Homo sapiens
cgcactgggcccgga

SEQ ID NO: 1978141 - DNA, 15 bp, Homo sapiens
gcactgggcccggag

SEQ ID NO: 1978142 - DNA, 15 bp, Homo sapiens
cactgggcccggagg

SEQ ID NO: 1978143 - DNA, 15 bp, Homo sapiens
actgggcccggaggg

SEQ ID NO: 1978144 - DNA, 15 bp, Homo sapiens
ctgggcccggagggg

SEQ ID NO: 1978145 - DNA, 15 bp, Homo sapiens
tgggcccggaggggt

SEQ ID NO: 1978146 - DNA, 15 bp, Homo sapiens
gggcccggaggggtg

SEQ ID NO: 1978147 - DNA, 15 bp, Homo sapiens
ggcccggaggggtgt

SEQ ID NO: 1978148 - DNA, 15 bp, Homo sapiens
gcccggaggggtgtc

SEQ ID NO: 1978149 - DNA, 15 bp, Homo sapiens
cccggaggggtgtcc

SEQ ID NO: 1978150 - DNA, 15 bp, Homo sapiens
ccggaggggtgtccg

SEQ ID NO: 1978151 - DNA, 15 bp, Homo sapiens
cggaggggtgtccgc

SEQ ID NO: 1978152 - DNA, 15 bp, Homo sapiens
ggaggggtgtccgca

SEQ ID NO: 1978153 - DNA, 15 bp, Homo sapiens
gaggggtgtccgcag

SEQ ID NO: 1978154 - DNA, 15 bp, Homo sapiens
aggggtgtccgcagc

SEQ ID NO: 1978155 - DNA, 15 bp, Homo sapiens
ggggtgtccgcagct

SEQ ID NO: 1978156 - DNA, 15 bp, Homo sapiens
gggtgtccgcagctt

SEQ ID NO: 1978157 - DNA, 15 bp, Homo sapiens
ggtgtccgcagcttt

SEQ ID NO: 1978158 - DNA, 15 bp, Homo sapiens
gtgtccgcagctttc

SEQ ID NO: 1978159 - DNA, 15 bp, Homo sapiens
tgtccgcagctttcc

SEQ ID NO: 1978160 - DNA, 15 bp, Homo sapiens
gtccgcagctttcct

SEQ ID NO: 1978161 - DNA, 15 bp, Homo sapiens
tccgcagctttcctg

SEQ ID NO: 1978162 - DNA, 15 bp, Homo sapiens
ccgcagctttcctgc

SEQ ID NO: 1978163 - DNA, 15 bp, Homo sapiens
cgcagctttcctgcc

SEQ ID NO: 1978164 - DNA, 15 bp, Homo sapiens
gcagctttcctgcca

SEQ ID NO: 1978165 - DNA, 15 bp, Homo sapiens
cagctttcctgccac

SEQ ID NO: 1978166 - DNA, 15 bp, Homo sapiens
agctttcctgccact

SEQ ID NO: 1978167 - DNA, 15 bp, Homo sapiens
gctttcctgccactt

SEQ ID NO: 1978168 - DNA, 15 bp, Homo sapiens
ctttcctgccacttc

SEQ ID NO: 1978169 - DNA, 15 bp, Homo sapiens
tttcctgccacttcc

SEQ ID NO: 1978170 - DNA, 15 bp, Homo sapiens
ttcctgccacttccc

SEQ ID NO: 1978171 - DNA, 15 bp, Homo sapiens
tcctgccacttccct

SEQ ID NO: 1978172 - DNA, 15 bp, Homo sapiens
cctgccacttccctg

SEQ ID NO: 1978173 - DNA, 15 bp, Homo sapiens
ctgccacttccctgc

SEQ ID NO: 1978174 - DNA, 15 bp, Homo sapiens
tgccacttccctgcg

SEQ ID NO: 1978175 - DNA, 15 bp, Homo sapiens
gccacttccctgcgg

SEQ ID NO: 1978176 - DNA, 15 bp, Homo sapiens
ccacttccctgcggc

SEQ ID NO: 1978177 - DNA, 15 bp, Homo sapiens
cacttccctgcggcc

SEQ ID NO: 1978178 - DNA, 15 bp, Homo sapiens
acttccctgcggccc

SEQ ID NO: 1978179 - DNA, 15 bp, Homo sapiens
cttccctgcggcccc

SEQ ID NO: 1978180 - DNA, 15 bp, Homo sapiens
ttccctgcggccccc

SEQ ID NO: 1978181 - DNA, 15 bp, Homo sapiens
tccctgcggccccca

SEQ ID NO: 1978182 - DNA, 15 bp, Homo sapiens
ccctgcggcccccac

SEQ ID NO: 1978183 - DNA, 15 bp, Homo sapiens
cctgcggcccccacc

SEQ ID NO: 1978184 - DNA, 15 bp, Homo sapiens
ctgcggcccccaccc

SEQ ID NO: 1978185 - DNA, 15 bp, Homo sapiens
tgcggcccccaccca

SEQ ID NO: 1978186 - DNA, 15 bp, Homo sapiens
gcggcccccacccag

SEQ ID NO: 1978187 - DNA, 15 bp, Homo sapiens
cggcccccacccagg

SEQ ID NO: 1978188 - DNA, 15 bp, Homo sapiens
ggcccccacccaggt

SEQ ID NO: 1978189 - DNA, 15 bp, Homo sapiens
gcccccacccaggta

SEQ ID NO: 1978190 - DNA, 15 bp, Homo sapiens
cccccacccaggtac

SEQ ID NO: 1978191 - DNA, 15 bp, Homo sapiens
ccccacccaggtaca

SEQ ID NO: 1978192 - DNA, 15 bp, Homo sapiens
cccacccaggtacat

SEQ ID NO: 1978193 - DNA, 15 bp, Homo sapiens
ccacccaggtacatc

SEQ ID NO: 1978194 - DNA, 15 bp, Homo sapiens
cacccaggtacatct

SEQ ID NO: 1978195 - DNA, 15 bp, Homo sapiens
acccaggtacatctt

SEQ ID NO: 1978196 - DNA, 15 bp, Homo sapiens
cccaggtacatcttt

SEQ ID NO: 1978197 - DNA, 15 bp, Homo sapiens
ccaggtacatctttg

SEQ ID NO: 1978198 - DNA, 15 bp, Homo sapiens
caggtacatctttga

SEQ ID NO: 1978199 - DNA, 15 bp, Homo sapiens
aggtacatctttgag

SEQ ID NO: 1978200 - DNA, 15 bp, Homo sapiens
ggtacatctttgagt

SEQ ID NO: 1978201 - DNA, 15 bp, Homo sapiens
gtacatctttgagtc

SEQ ID NO: 1978202 - DNA, 15 bp, Homo sapiens
tacatctttgagtcc

SEQ ID NO: 1978203 - DNA, 15 bp, Homo sapiens
acatctttgagtcca

SEQ ID NO: 1978204 - DNA, 15 bp, Homo sapiens
catctttgagtccat

SEQ ID NO: 1978205 - DNA, 15 bp, Homo sapiens
atctttgagtccatc

SEQ ID NO: 1978206 - DNA, 15 bp, Homo sapiens
tctttgagtccatcg

SEQ ID NO: 1978207 - DNA, 15 bp, Homo sapiens
ctttgagtccatcgg

SEQ ID NO: 1978208 - DNA, 15 bp, Homo sapiens
tttgagtccatcggt

SEQ ID NO: 1978209 - DNA, 15 bp, Homo sapiens
ttgagtccatcggtg

SEQ ID NO: 1978210 - DNA, 15 bp, Homo sapiens
tgagtccatcggtgc

SEQ ID NO: 1978211 - DNA, 15 bp, Homo sapiens
gagtccatcggtgcc

SEQ ID NO: 1978212 - DNA, 15 bp, Homo sapiens
agtccatcggtgcca

SEQ ID NO: 1978213 - DNA, 15 bp, Homo sapiens
gtccatcggtgccaa

SEQ ID NO: 1978214 - DNA, 15 bp, Homo sapiens
tccatcggtgccaag

SEQ ID NO: 1978215 - DNA, 15 bp, Homo sapiens
ccatcggtgccaagc

SEQ ID NO: 1978216 - DNA, 15 bp, Homo sapiens
catcggtgccaagcg

SEQ ID NO: 1978217 - DNA, 15 bp, Homo sapiens
atcggtgccaagcgt

SEQ ID NO: 1978218 - DNA, 15 bp, Homo sapiens
tcggtgccaagcgta

SEQ ID NO: 1978219 - DNA, 15 bp, Homo sapiens
cggtgccaagcgtac

SEQ ID NO: 1978220 - DNA, 15 bp, Homo sapiens
ggtgccaagcgtacc

SEQ ID NO: 1978221 - DNA, 15 bp, Homo sapiens
gtgccaagcgtaccc

SEQ ID NO: 1978222 - DNA, 15 bp, Homo sapiens
tgccaagcgtaccct

SEQ ID NO: 1978223 - DNA, 15 bp, Homo sapiens
gccaagcgtaccctg

SEQ ID NO: 1978224 - DNA, 15 bp, Homo sapiens
ccaagcgtaccctga

SEQ ID NO: 1978225 - DNA, 15 bp, Homo sapiens
caagcgtaccctgac

SEQ ID NO: 1978226 - DNA, 15 bp, Homo sapiens
aagcgtaccctgacc

SEQ ID NO: 1978227 - DNA, 15 bp, Homo sapiens
agcgtaccctgacca

SEQ ID NO: 1978228 - DNA, 15 bp, Homo sapiens
gcgtaccctgaccat

SEQ ID NO: 1978229 - DNA, 15 bp, Homo sapiens
cgtaccctgaccatc

SEQ ID NO: 1978230 - DNA, 15 bp, Homo sapiens
gtaccctgaccatca

SEQ ID NO: 1978231 - DNA, 15 bp, Homo sapiens
taccctgaccatcag

SEQ ID NO: 1978232 - DNA, 15 bp, Homo sapiens
accctgaccatcagc

SEQ ID NO: 1978233 - DNA, 15 bp, Homo sapiens
ccctgaccatcagcc

SEQ ID NO: 1978234 - DNA, 15 bp, Homo sapiens
cctgaccatcagcca

SEQ ID NO: 1978235 - DNA, 15 bp, Homo sapiens
ctgaccatcagccag

SEQ ID NO: 1978236 - DNA, 15 bp, Homo sapiens
tgaccatcagccagt

SEQ ID NO: 1978237 - DNA, 15 bp, Homo sapiens
gaccatcagccagtg

SEQ ID NO: 1978238 - DNA, 15 bp, Homo sapiens
accatcagccagtgc

SEQ ID NO: 1978239 - DNA, 15 bp, Homo sapiens
ccatcagccagtgct

SEQ ID NO: 1978240 - DNA, 15 bp, Homo sapiens
catcagccagtgctc

SEQ ID NO: 1978241 - DNA, 15 bp, Homo sapiens
atcagccagtgctca

SEQ ID NO: 1978242 - DNA, 15 bp, Homo sapiens
tcagccagtgctcat

SEQ ID NO: 1978243 - DNA, 15 bp, Homo sapiens
cagccagtgctcatt

SEQ ID NO: 1978244 - DNA, 15 bp, Homo sapiens
agccagtgctcattg

SEQ ID NO: 1978245 - DNA, 15 bp, Homo sapiens
gccagtgctcattgg

SEQ ID NO: 1978246 - DNA, 15 bp, Homo sapiens
ccagtgctcattggc

SEQ ID NO: 1978247 - DNA, 15 bp, Homo sapiens
cagtgctcattggcg

SEQ ID NO: 1978248 - DNA, 15 bp, Homo sapiens
agtgctcattggcgg

SEQ ID NO: 1978249 - DNA, 15 bp, Homo sapiens
gtgctcattggcgga

SEQ ID NO: 1978250 - DNA, 15 bp, Homo sapiens
tgctcattggcggac

SEQ ID NO: 1978251 - DNA, 15 bp, Homo sapiens
gctcattggcggacg

SEQ ID NO: 1978252 - DNA, 15 bp, Homo sapiens
ctcattggcggacga

SEQ ID NO: 1978253 - DNA, 15 bp, Homo sapiens
tcattggcggacgac

SEQ ID NO: 1978254 - DNA, 15 bp, Homo sapiens
cattggcggacgacg

SEQ ID NO: 1978255 - DNA, 15 bp, Homo sapiens
attggcggacgacgc

SEQ ID NO: 1978256 - DNA, 15 bp, Homo sapiens
ttggcggacgacgca

SEQ ID NO: 1978257 - DNA, 15 bp, Homo sapiens
tggcggacgacgcag

SEQ ID NO: 1978258 - DNA, 15 bp, Homo sapiens
ggcggacgacgcagc

SEQ ID NO: 1978259 - DNA, 15 bp, Homo sapiens
gcggacgacgcagcc

SEQ ID NO: 1978260 - DNA, 15 bp, Homo sapiens
cggacgacgcagcct

SEQ ID NO: 1978261 - DNA, 15 bp, Homo sapiens
ggacgacgcagccta

SEQ ID NO: 1978262 - DNA, 15 bp, Homo sapiens
gacgacgcagcctac

SEQ ID NO: 1978263 - DNA, 15 bp, Homo sapiens
acgacgcagcctacc

SEQ ID NO: 1978264 - DNA, 15 bp, Homo sapiens
cgacgcagcctacca

SEQ ID NO: 1978265 - DNA, 15 bp, Homo sapiens
gacgcagcctaccag

SEQ ID NO: 1978266 - DNA, 15 bp, Homo sapiens
acgcagcctaccagt

SEQ ID NO: 1978267 - DNA, 15 bp, Homo sapiens
cgcagcctaccagtg

SEQ ID NO: 1978268 - DNA, 15 bp, Homo sapiens
gcagcctaccagtgc

SEQ ID NO: 1978269 - DNA, 15 bp, Homo sapiens
cagcctaccagtgcg

SEQ ID NO: 1978270 - DNA, 15 bp, Homo sapiens
agcctaccagtgcgt

SEQ ID NO: 1978271 - DNA, 15 bp, Homo sapiens
gcctaccagtgcgtg

SEQ ID NO: 1978272 - DNA, 15 bp, Homo sapiens
cctaccagtgcgtgg

SEQ ID NO: 1978273 - DNA, 15 bp, Homo sapiens
ctaccagtgcgtggt

SEQ ID NO: 1978274 - DNA, 15 bp, Homo sapiens
taccagtgcgtggtg

SEQ ID NO: 1978275 - DNA, 15 bp, Homo sapiens
accagtgcgtggtgg

SEQ ID NO: 1978276 - DNA, 15 bp, Homo sapiens
ccagtgcgtggtggg

SEQ ID NO: 1978277 - DNA, 15 bp, Homo sapiens
cagtgcgtggtgggt

SEQ ID NO: 1978278 - DNA, 15 bp, Homo sapiens
agtgcgtggtgggtg

SEQ ID NO: 1978279 - DNA, 15 bp, Homo sapiens
gtgcgtggtgggtgg

SEQ ID NO: 1978280 - DNA, 15 bp, Homo sapiens
tgcgtggtgggtggc

SEQ ID NO: 1978281 - DNA, 15 bp, Homo sapiens
gcgtggtgggtggcg

SEQ ID NO: 1978282 - DNA, 15 bp, Homo sapiens
cgtggtgggtggcga

SEQ ID NO: 1978283 - DNA, 15 bp, Homo sapiens
gtggtgggtggcgag

SEQ ID NO: 1978284 - DNA, 15 bp, Homo sapiens
tggtgggtggcgaga

SEQ ID NO: 1978285 - DNA, 15 bp, Homo sapiens
ggtgggtggcgagaa

SEQ ID NO: 1978286 - DNA, 15 bp, Homo sapiens
gtgggtggcgagaag

SEQ ID NO: 1978287 - DNA, 15 bp, Homo sapiens
tgggtggcgagaagt

SEQ ID NO: 1978288 - DNA, 15 bp, Homo sapiens
gggtggcgagaagtg

SEQ ID NO: 1978289 - DNA, 15 bp, Homo sapiens
ggtggcgagaagtgt

SEQ ID NO: 1978290 - DNA, 15 bp, Homo sapiens
gtggcgagaagtgta

SEQ ID NO: 1978291 - DNA, 15 bp, Homo sapiens
tggcgagaagtgtag

SEQ ID NO: 1978292 - DNA, 15 bp, Homo sapiens
ggcgagaagtgtagc

SEQ ID NO: 1978293 - DNA, 15 bp, Homo sapiens
gcgagaagtgtagca

SEQ ID NO: 1978294 - DNA, 15 bp, Homo sapiens
cgagaagtgtagcac

SEQ ID NO: 1978295 - DNA, 15 bp, Homo sapiens
gagaagtgtagcacg

SEQ ID NO: 1978296 - DNA, 15 bp, Homo sapiens
agaagtgtagcacgg

SEQ ID NO: 1978297 - DNA, 15 bp, Homo sapiens
gaagtgtagcacgga

SEQ ID NO: 1978298 - DNA, 15 bp, Homo sapiens
aagtgtagcacggag

SEQ ID NO: 1978299 - DNA, 15 bp, Homo sapiens
agtgtagcacggagc

SEQ ID NO: 1978300 - DNA, 15 bp, Homo sapiens
gtgtagcacggagct

SEQ ID NO: 1978301 - DNA, 15 bp, Homo sapiens
tgtagcacggagctc

SEQ ID NO: 1978302 - DNA, 15 bp, Homo sapiens
gtagcacggagctct

SEQ ID NO: 1978303 - DNA, 15 bp, Homo sapiens
tagcacggagctctt

SEQ ID NO: 1978304 - DNA, 15 bp, Homo sapiens
agcacggagctcttt

SEQ ID NO: 1978305 - DNA, 15 bp, Homo sapiens
gcacggagctctttg

SEQ ID NO: 1978306 - DNA, 15 bp, Homo sapiens
cacggagctctttgt

SEQ ID NO: 1978307 - DNA, 15 bp, Homo sapiens
acggagctctttgtg

SEQ ID NO: 1978308 - DNA, 15 bp, Homo sapiens
cggagctctttgtga

SEQ ID NO: 1978309 - DNA, 15 bp, Homo sapiens
ggagctctttgtgaa

SEQ ID NO: 1978310 - DNA, 15 bp, Homo sapiens
gagctctttgtgaaa

SEQ ID NO: 1978311 - DNA, 15 bp, Homo sapiens
agctctttgtgaaag

SEQ ID NO: 1978312 - DNA, 15 bp, Homo sapiens
gctctttgtgaaagg

SEQ ID NO: 1978313 - DNA, 15 bp, Homo sapiens
ctctttgtgaaaggt

SEQ ID NO: 1978314 - DNA, 15 bp, Homo sapiens
tctttgtgaaaggtg

SEQ ID NO: 1978315 - DNA, 15 bp, Homo sapiens
ctttgtgaaaggtgg

SEQ ID NO: 1978316 - DNA, 15 bp, Homo sapiens
tttgtgaaaggtggg

SEQ ID NO: 1978317 - DNA, 15 bp, Homo sapiens
ttgtgaaaggtgggc

SEQ ID NO: 1978318 - DNA, 15 bp, Homo sapiens
tgtgaaaggtgggcc

SEQ ID NO: 1978319 - DNA, 15 bp, Homo sapiens
gtgaaaggtgggcct

SEQ ID NO: 1978320 - DNA, 15 bp, Homo sapiens
tgaaaggtgggcctg

SEQ ID NO: 1978321 - DNA, 15 bp, Homo sapiens
gaaaggtgggcctgg

SEQ ID NO: 1978322 - DNA, 15 bp, Homo sapiens
aaaggtgggcctggg

SEQ ID NO: 1978323 - DNA, 15 bp, Homo sapiens
aaggtgggcctggga

SEQ ID NO: 1978324 - DNA, 15 bp, Homo sapiens
aggtgggcctgggac

SEQ ID NO: 1978325 - DNA, 15 bp, Homo sapiens
ggtgggcctgggacc

SEQ ID NO: 1978326 - DNA, 15 bp, Homo sapiens
gtgggcctgggacct

SEQ ID NO: 1978327 - DNA, 15 bp, Homo sapiens
tgggcctgggacctg

SEQ ID NO: 1978328 - DNA, 15 bp, Homo sapiens
gggcctgggacctga

SEQ ID NO: 1978329 - DNA, 15 bp, Homo sapiens
ggcctgggacctgag

SEQ ID NO: 1978330 - DNA, 15 bp, Homo sapiens
gcctgggacctgagg

SEQ ID NO: 1978331 - DNA, 15 bp, Homo sapiens
cctgggacctgagga

SEQ ID NO: 1978332 - DNA, 15 bp, Homo sapiens
ctgggacctgaggat

SEQ ID NO: 1978333 - DNA, 15 bp, Homo sapiens
tgggacctgaggatg

SEQ ID NO: 1978334 - DNA, 15 bp, Homo sapiens
gggacctgaggatgt

SEQ ID NO: 1978335 - DNA, 15 bp, Homo sapiens
ggacctgaggatgtg

SEQ ID NO: 1978336 - DNA, 15 bp, Homo sapiens
gacctgaggatgtgg

SEQ ID NO: 1978337 - DNA, 15 bp, Homo sapiens
acctgaggatgtggg

SEQ ID NO: 1978338 - DNA, 15 bp, Homo sapiens
cctgaggatgtggga

SEQ ID NO: 1978339 - DNA, 15 bp, Homo sapiens
ctgaggatgtgggaa

SEQ ID NO: 1978340 - DNA, 15 bp, Homo sapiens
tgaggatgtgggaac

SEQ ID NO: 1978341 - DNA, 15 bp, Homo sapiens
gaggatgtgggaacc

SEQ ID NO: 1978342 - DNA, 15 bp, Homo sapiens
aggatgtgggaacct

SEQ ID NO: 1978343 - DNA, 15 bp, Homo sapiens
ggatgtgggaacctg

SEQ ID NO: 1978344 - DNA, 15 bp, Homo sapiens
gatgtgggaacctgg

SEQ ID NO: 1978345 - DNA, 15 bp, Homo sapiens
atgtgggaacctggg

SEQ ID NO: 1978346 - DNA, 15 bp, Homo sapiens
tgtgggaacctgggg

SEQ ID NO: 1978347 - DNA, 15 bp, Homo sapiens
gtgggaacctgggga

SEQ ID NO: 1978348 - DNA, 15 bp, Homo sapiens
tgggaacctggggag

SEQ ID NO: 1978349 - DNA, 15 bp, Homo sapiens
gggaacctggggagg

SEQ ID NO: 1978350 - DNA, 15 bp, Homo sapiens
ggaacctggggagga

SEQ ID NO: 1978351 - DNA, 15 bp, Homo sapiens
gaacctggggaggag

SEQ ID NO: 1978352 - DNA, 15 bp, Homo sapiens
aacctggggaggaga

SEQ ID NO: 1978353 - DNA, 15 bp, Homo sapiens
acctggggaggagat

SEQ ID NO: 1978354 - DNA, 15 bp, Homo sapiens
cctggggaggagatg

SEQ ID NO: 1978355 - DNA, 15 bp, Homo sapiens
ctggggaggagatgg

SEQ ID NO: 1978356 - DNA, 15 bp, Homo sapiens
tggggaggagatggc

SEQ ID NO: 1978357 - DNA, 15 bp, Homo sapiens
ggggaggagatggcc

SEQ ID NO: 1978358 - DNA, 15 bp, Homo sapiens
gggaggagatggcct

SEQ ID NO: 1978359 - DNA, 15 bp, Homo sapiens
ggaggagatggcctc

SEQ ID NO: 1978360 - DNA, 15 bp, Homo sapiens
gaggagatggcctca

SEQ ID NO: 1978361 - DNA, 15 bp, Homo sapiens
aggagatggcctcag

SEQ ID NO: 1978362 - DNA, 15 bp, Homo sapiens
ggagatggcctcagg

SEQ ID NO: 1978363 - DNA, 15 bp, Homo sapiens
gagatggcctcaggg

SEQ ID NO: 1978364 - DNA, 15 bp, Homo sapiens
agatggcctcagggg

SEQ ID NO: 1978365 - DNA, 15 bp, Homo sapiens
gatggcctcagggga

SEQ ID NO: 1978366 - DNA, 15 bp, Homo sapiens
atggcctcaggggag

SEQ ID NO: 1978367 - DNA, 15 bp, Homo sapiens
tggcctcaggggagc

SEQ ID NO: 1978368 - DNA, 15 bp, Homo sapiens
ggcctcaggggagcc

SEQ ID NO: 1978369 - DNA, 15 bp, Homo sapiens
gcctcaggggagcca

SEQ ID NO: 1978370 - DNA, 15 bp, Homo sapiens
cctcaggggagccaa

SEQ ID NO: 1978371 - DNA, 15 bp, Homo sapiens
ctcaggggagccaac

SEQ ID NO: 1978372 - DNA, 15 bp, Homo sapiens
tcaggggagccaacc

SEQ ID NO: 1978373 - DNA, 15 bp, Homo sapiens
caggggagccaaccc

SEQ ID NO: 1978374 - DNA, 15 bp, Homo sapiens
aggggagccaaccct

SEQ ID NO: 1978375 - DNA, 15 bp, Homo sapiens
ggggagccaaccctc

SEQ ID NO: 1978376 - DNA, 15 bp, Homo sapiens
gggagccaaccctca

SEQ ID NO: 1978377 - DNA, 15 bp, Homo sapiens
ggagccaaccctcat

SEQ ID NO: 1978378 - DNA, 15 bp, Homo sapiens
gagccaaccctcatg

SEQ ID NO: 1978379 - DNA, 15 bp, Homo sapiens
agccaaccctcatgc

SEQ ID NO: 1978380 - DNA, 15 bp, Homo sapiens
gccaaccctcatgct

SEQ ID NO: 1978381 - DNA, 15 bp, Homo sapiens
ccaaccctcatgctc

SEQ ID NO: 1978382 - DNA, 15 bp, Homo sapiens
caaccctcatgctca

SEQ ID NO: 1978383 - DNA, 15 bp, Homo sapiens
aaccctcatgctcac

SEQ ID NO: 1978384 - DNA, 15 bp, Homo sapiens
accctcatgctcacc

SEQ ID NO: 1978385 - DNA, 15 bp, Homo sapiens
ccctcatgctcaccc

SEQ ID NO: 1978386 - DNA, 15 bp, Homo sapiens
cctcatgctcaccct

SEQ ID NO: 1978387 - DNA, 15 bp, Homo sapiens
ctcatgctcaccctg

SEQ ID NO: 1978388 - DNA, 15 bp, Homo sapiens
tcatgctcaccctgc

SEQ ID NO: 1978389 - DNA, 15 bp, Homo sapiens
catgctcaccctgcc

SEQ ID NO: 1978390 - DNA, 15 bp, Homo sapiens
atgctcaccctgcct

SEQ ID NO: 1978391 - DNA, 15 bp, Homo sapiens
tgctcaccctgcctg

SEQ ID NO: 1978392 - DNA, 15 bp, Homo sapiens
gctcaccctgcctgg

SEQ ID NO: 1978393 - DNA, 15 bp, Homo sapiens
ctcaccctgcctgga

SEQ ID NO: 1978394 - DNA, 15 bp, Homo sapiens
tcaccctgcctggac

SEQ ID NO: 1978395 - DNA, 15 bp, Homo sapiens
caccctgcctggaca

SEQ ID NO: 1978396 - DNA, 15 bp, Homo sapiens
accctgcctggacag

SEQ ID NO: 1978397 - DNA, 15 bp, Homo sapiens
ccctgcctggacaga

SEQ ID NO: 1978398 - DNA, 15 bp, Homo sapiens
cctgcctggacagag

SEQ ID NO: 1978399 - DNA, 15 bp, Homo sapiens
ctgcctggacagagc

SEQ ID NO: 1978400 - DNA, 15 bp, Homo sapiens
tgcctggacagagcc

SEQ ID NO: 1978401 - DNA, 15 bp, Homo sapiens
gcctggacagagccc

SEQ ID NO: 1978402 - DNA, 15 bp, Homo sapiens
cctggacagagcccc

SEQ ID NO: 1978403 - DNA, 15 bp, Homo sapiens
ctggacagagccccc

SEQ ID NO: 1978404 - DNA, 15 bp, Homo sapiens
tggacagagccccct

SEQ ID NO: 1978405 - DNA, 15 bp, Homo sapiens
ggacagagccccctg

SEQ ID NO: 1978406 - DNA, 15 bp, Homo sapiens
gacagagccccctgt

SEQ ID NO: 1978407 - DNA, 15 bp, Homo sapiens
acagagccccctgtg

SEQ ID NO: 1978408 - DNA, 15 bp, Homo sapiens
cagagccccctgtgc

SEQ ID NO: 1978409 - DNA, 15 bp, Homo sapiens
agagccccctgtgct

SEQ ID NO: 1978410 - DNA, 15 bp, Homo sapiens
gagccccctgtgctc

SEQ ID NO: 1978411 - DNA, 15 bp, Homo sapiens
agccccctgtgctca

SEQ ID NO: 1978412 - DNA, 15 bp, Homo sapiens
gccccctgtgctcat

SEQ ID NO: 1978413 - DNA, 15 bp, Homo sapiens
ccccctgtgctcatc

SEQ ID NO: 1978414 - DNA, 15 bp, Homo sapiens
cccctgtgctcatca

SEQ ID NO: 1978415 - DNA, 15 bp, Homo sapiens
ccctgtgctcatcac

SEQ ID NO: 1978416 - DNA, 15 bp, Homo sapiens
cctgtgctcatcacg

SEQ ID NO: 1978417 - DNA, 15 bp, Homo sapiens
ctgtgctcatcacgc

SEQ ID NO: 1978418 - DNA, 15 bp, Homo sapiens
tgtgctcatcacgcg

SEQ ID NO: 1978419 - DNA, 15 bp, Homo sapiens
gtgctcatcacgcgc

SEQ ID NO: 1978420 - DNA, 15 bp, Homo sapiens
tgctcatcacgcgcc

SEQ ID NO: 1978421 - DNA, 15 bp, Homo sapiens
gctcatcacgcgccc

SEQ ID NO: 1978422 - DNA, 15 bp, Homo sapiens
ctcatcacgcgcccc

SEQ ID NO: 1978423 - DNA, 15 bp, Homo sapiens
tcatcacgcgcccct

SEQ ID NO: 1978424 - DNA, 15 bp, Homo sapiens
catcacgcgcccctt

SEQ ID NO: 1978425 - DNA, 15 bp, Homo sapiens
atcacgcgccccttg

SEQ ID NO: 1978426 - DNA, 15 bp, Homo sapiens
tcacgcgccccttgg

SEQ ID NO: 1978427 - DNA, 15 bp, Homo sapiens
cacgcgccccttgga

SEQ ID NO: 1978428 - DNA, 15 bp, Homo sapiens
acgcgccccttggag

SEQ ID NO: 1978429 - DNA, 15 bp, Homo sapiens
cgcgccccttggagg

SEQ ID NO: 1978430 - DNA, 15 bp, Homo sapiens
gcgccccttggagga

SEQ ID NO: 1978431 - DNA, 15 bp, Homo sapiens
cgccccttggaggac

SEQ ID NO: 1978432 - DNA, 15 bp, Homo sapiens
gccccttggaggacc

SEQ ID NO: 1978433 - DNA, 15 bp, Homo sapiens
ccccttggaggacca

SEQ ID NO: 1978434 - DNA, 15 bp, Homo sapiens
cccttggaggaccag

SEQ ID NO: 1978435 - DNA, 15 bp, Homo sapiens
ccttggaggaccagc

SEQ ID NO: 1978436 - DNA, 15 bp, Homo sapiens
cttggaggaccagct

SEQ ID NO: 1978437 - DNA, 15 bp, Homo sapiens
ttggaggaccagctg

SEQ ID NO: 1978438 - DNA, 15 bp, Homo sapiens
tggaggaccagctgg

SEQ ID NO: 1978439 - DNA, 15 bp, Homo sapiens
ggaggaccagctggt

SEQ ID NO: 1978440 - DNA, 15 bp, Homo sapiens
gaggaccagctggtg

SEQ ID NO: 1978441 - DNA, 15 bp, Homo sapiens
aggaccagctggtga

SEQ ID NO: 1978442 - DNA, 15 bp, Homo sapiens
ggaccagctggtgat

SEQ ID NO: 1978443 - DNA, 15 bp, Homo sapiens
gaccagctggtgatg

SEQ ID NO: 1978444 - DNA, 15 bp, Homo sapiens
accagctggtgatgg

SEQ ID NO: 1978445 - DNA, 15 bp, Homo sapiens
ccagctggtgatggt

SEQ ID NO: 1978446 - DNA, 15 bp, Homo sapiens
cagctggtgatggtg

SEQ ID NO: 1978447 - DNA, 15 bp, Homo sapiens
agctggtgatggtgg

SEQ ID NO: 1978448 - DNA, 15 bp, Homo sapiens
gctggtgatggtggg

SEQ ID NO: 1978449 - DNA, 15 bp, Homo sapiens
ctggtgatggtgggg

SEQ ID NO: 1978450 - DNA, 15 bp, Homo sapiens
tggtgatggtggggc

SEQ ID NO: 1978451 - DNA, 15 bp, Homo sapiens
ggtgatggtggggca

SEQ ID NO: 1978452 - DNA, 15 bp, Homo sapiens
gtgatggtggggcag

SEQ ID NO: 1978453 - DNA, 15 bp, Homo sapiens
tgatggtggggcagc

SEQ ID NO: 1978454 - DNA, 15 bp, Homo sapiens
gatggtggggcagcg

SEQ ID NO: 1978455 - DNA, 15 bp, Homo sapiens
atggtggggcagcgg

SEQ ID NO: 1978456 - DNA, 15 bp, Homo sapiens
tggtggggcagcggg

SEQ ID NO: 1978457 - DNA, 15 bp, Homo sapiens
ggtggggcagcgggt

SEQ ID NO: 1978458 - DNA, 15 bp, Homo sapiens
gtggggcagcgggtg

SEQ ID NO: 1978459 - DNA, 15 bp, Homo sapiens
tggggcagcgggtgg

SEQ ID NO: 1978460 - DNA, 15 bp, Homo sapiens
ggggcagcgggtgga

SEQ ID NO: 1978461 - DNA, 15 bp, Homo sapiens
gggcagcgggtggag

SEQ ID NO: 1978462 - DNA, 15 bp, Homo sapiens
ggcagcgggtggagt

SEQ ID NO: 1978463 - DNA, 15 bp, Homo sapiens
gcagcgggtggagtt

SEQ ID NO: 1978464 - DNA, 15 bp, Homo sapiens
cagcgggtggagttt

SEQ ID NO: 1978465 - DNA, 15 bp, Homo sapiens
agcgggtggagtttg

SEQ ID NO: 1978466 - DNA, 15 bp, Homo sapiens
gcgggtggagtttga

SEQ ID NO: 1978467 - DNA, 15 bp, Homo sapiens
cgggtggagtttgag

SEQ ID NO: 1978468 - DNA, 15 bp, Homo sapiens
gggtggagtttgagt

SEQ ID NO: 1978469 - DNA, 15 bp, Homo sapiens
ggtggagtttgagtg

SEQ ID NO: 1978470 - DNA, 15 bp, Homo sapiens
gtggagtttgagtgt

SEQ ID NO: 1978471 - DNA, 15 bp, Homo sapiens
tggagtttgagtgtg

SEQ ID NO: 1978472 - DNA, 15 bp, Homo sapiens
ggagtttgagtgtga

SEQ ID NO: 1978473 - DNA, 15 bp, Homo sapiens
gagtttgagtgtgaa

SEQ ID NO: 1978474 - DNA, 15 bp, Homo sapiens
agtttgagtgtgaag

SEQ ID NO: 1978475 - DNA, 15 bp, Homo sapiens
gtttgagtgtgaagt

SEQ ID NO: 1978476 - DNA, 15 bp, Homo sapiens
tttgagtgtgaagta

SEQ ID NO: 1978477 - DNA, 15 bp, Homo sapiens
ttgagtgtgaagtat

SEQ ID NO: 1978478 - DNA, 15 bp, Homo sapiens
tgagtgtgaagtatc

SEQ ID NO: 1978479 - DNA, 15 bp, Homo sapiens
gagtgtgaagtatcg

SEQ ID NO: 1978480 - DNA, 15 bp, Homo sapiens
agtgtgaagtatcgg

SEQ ID NO: 1978481 - DNA, 15 bp, Homo sapiens
gtgtgaagtatcgga

SEQ ID NO: 1978482 - DNA, 15 bp, Homo sapiens
tgtgaagtatcggag

SEQ ID NO: 1978483 - DNA, 15 bp, Homo sapiens
gtgaagtatcggagg

SEQ ID NO: 1978484 - DNA, 15 bp, Homo sapiens
tgaagtatcggagga

SEQ ID NO: 1978485 - DNA, 15 bp, Homo sapiens
gaagtatcggaggag

SEQ ID NO: 1978486 - DNA, 15 bp, Homo sapiens
aagtatcggaggagg

SEQ ID NO: 1978487 - DNA, 15 bp, Homo sapiens
agtatcggaggaggg

SEQ ID NO: 1978488 - DNA, 15 bp, Homo sapiens
gtatcggaggagggg

SEQ ID NO: 1978489 - DNA, 15 bp, Homo sapiens
tatcggaggaggggg

SEQ ID NO: 1978490 - DNA, 15 bp, Homo sapiens
atcggaggagggggc

SEQ ID NO: 1978491 - DNA, 15 bp, Homo sapiens
tcggaggagggggcg

SEQ ID NO: 1978492 - DNA, 15 bp, Homo sapiens
cggaggagggggcgc

SEQ ID NO: 1978493 - DNA, 15 bp, Homo sapiens
ggaggagggggcgca

SEQ ID NO: 1978494 - DNA, 15 bp, Homo sapiens
gaggagggggcgcaa

SEQ ID NO: 1978495 - DNA, 15 bp, Homo sapiens
aggagggggcgcaag

SEQ ID NO: 1978496 - DNA, 15 bp, Homo sapiens
ggagggggcgcaagt

SEQ ID NO: 1978497 - DNA, 15 bp, Homo sapiens
gagggggcgcaagtc

SEQ ID NO: 1978498 - DNA, 15 bp, Homo sapiens
agggggcgcaagtca

SEQ ID NO: 1978499 - DNA, 15 bp, Homo sapiens
gggggcgcaagtcaa

SEQ ID NO: 1978500 - DNA, 15 bp, Homo sapiens
ggggcgcaagtcaaa

SEQ ID NO: 1978501 - DNA, 15 bp, Homo sapiens
gggcgcaagtcaaat

SEQ ID NO: 1978502 - DNA, 15 bp, Homo sapiens
ggcgcaagtcaaatg

SEQ ID NO: 1978503 - DNA, 15 bp, Homo sapiens
gcgcaagtcaaatgg

SEQ ID NO: 1978504 - DNA, 15 bp, Homo sapiens
cgcaagtcaaatggt

SEQ ID NO: 1978505 - DNA, 15 bp, Homo sapiens
gcaagtcaaatggtg

SEQ ID NO: 1978506 - DNA, 15 bp, Homo sapiens
caagtcaaatggtga

SEQ ID NO: 1978507 - DNA, 15 bp, Homo sapiens
aagtcaaatggtgag

SEQ ID NO: 1978508 - DNA, 15 bp, Homo sapiens
agtcaaatggtgagt

SEQ ID NO: 1978509 - DNA, 15 bp, Homo sapiens
gtcaaatggtgagtt

SEQ ID NO: 1978510 - DNA, 15 bp, Homo sapiens
tcaaatggtgagttc

SEQ ID NO: 1978511 - DNA, 15 bp, Homo sapiens
caaatggtgagttcc

SEQ ID NO: 1978512 - DNA, 15 bp, Homo sapiens
aaatggtgagttcca

SEQ ID NO: 1978513 - DNA, 15 bp, Homo sapiens
aatggtgagttccag

SEQ ID NO: 1978514 - DNA, 15 bp, Homo sapiens
atggtgagttccaga

SEQ ID NO: 1978515 - DNA, 15 bp, Homo sapiens
tggtgagttccagaa

SEQ ID NO: 1978516 - DNA, 15 bp, Homo sapiens
ggtgagttccagaag

SEQ ID NO: 1978517 - DNA, 15 bp, Homo sapiens
gtgagttccagaagc

SEQ ID NO: 1978518 - DNA, 15 bp, Homo sapiens
tgagttccagaagca

SEQ ID NO: 1978519 - DNA, 15 bp, Homo sapiens
gagttccagaagcac

SEQ ID NO: 1978520 - DNA, 15 bp, Homo sapiens
agttccagaagcacg

SEQ ID NO: 1978521 - DNA, 15 bp, Homo sapiens
gttccagaagcacgg

SEQ ID NO: 1978522 - DNA, 15 bp, Homo sapiens
ttccagaagcacggg

SEQ ID NO: 1978523 - DNA, 15 bp, Homo sapiens
tccagaagcacgggg

SEQ ID NO: 1978524 - DNA, 15 bp, Homo sapiens
ccagaagcacggggc

SEQ ID NO: 1978525 - DNA, 15 bp, Homo sapiens
cagaagcacggggca

SEQ ID NO: 1978526 - DNA, 15 bp, Homo sapiens
agaagcacggggcat

SEQ ID NO: 1978527 - DNA, 15 bp, Homo sapiens
gaagcacggggcatg

SEQ ID NO: 1978528 - DNA, 15 bp, Homo sapiens
aagcacggggcatgg

SEQ ID NO: 1978529 - DNA, 15 bp, Homo sapiens
agcacggggcatggg

SEQ ID NO: 1978530 - DNA, 15 bp, Homo sapiens
gcacggggcatgggt

SEQ ID NO: 1978531 - DNA, 15 bp, Homo sapiens
cacggggcatgggtg

SEQ ID NO: 1978532 - DNA, 15 bp, Homo sapiens
acggggcatgggtgt

SEQ ID NO: 1978533 - DNA, 15 bp, Homo sapiens
cggggcatgggtgtt

SEQ ID NO: 1978534 - DNA, 15 bp, Homo sapiens
ggggcatgggtgttg

SEQ ID NO: 1978535 - DNA, 15 bp, Homo sapiens
gggcatgggtgttgg

SEQ ID NO: 1978536 - DNA, 15 bp, Homo sapiens
ggcatgggtgttggg

SEQ ID NO: 1978537 - DNA, 15 bp, Homo sapiens
gcatgggtgttgggg

SEQ ID NO: 1978538 - DNA, 15 bp, Homo sapiens
catgggtgttggggg

SEQ ID NO: 1978539 - DNA, 15 bp, Homo sapiens
atgggtgttgggggc

SEQ ID NO: 1978540 - DNA, 15 bp, Homo sapiens
tgggtgttgggggca

SEQ ID NO: 1978541 - DNA, 15 bp, Homo sapiens
gggtgttgggggcat

SEQ ID NO: 1978542 - DNA, 15 bp, Homo sapiens
ggtgttgggggcatc

SEQ ID NO: 1978543 - DNA, 15 bp, Homo sapiens
gtgttgggggcatct

SEQ ID NO: 1978544 - DNA, 15 bp, Homo sapiens
tgttgggggcatctg

SEQ ID NO: 1978545 - DNA, 15 bp, Homo sapiens
gttgggggcatctgc

SEQ ID NO: 1978546 - DNA, 15 bp, Homo sapiens
ttgggggcatctgcc

SEQ ID NO: 1978547 - DNA, 15 bp, Homo sapiens
tgggggcatctgccc

SEQ ID NO: 1978548 - DNA, 15 bp, Homo sapiens
gggggcatctgccca

SEQ ID NO: 1978549 - DNA, 15 bp, Homo sapiens
ggggcatctgcccag

SEQ ID NO: 1978550 - DNA, 15 bp, Homo sapiens
gggcatctgcccaga

SEQ ID NO: 1978551 - DNA, 15 bp, Homo sapiens
ggcatctgcccagaa

SEQ ID NO: 1978552 - DNA, 15 bp, Homo sapiens
gcatctgcccagaag

SEQ ID NO: 1978553 - DNA, 15 bp, Homo sapiens
catctgcccagaaga

SEQ ID NO: 1978554 - DNA, 15 bp, Homo sapiens
atctgcccagaagag

SEQ ID NO: 1978555 - DNA, 15 bp, Homo sapiens
tctgcccagaagagg

SEQ ID NO: 1978556 - DNA, 15 bp, Homo sapiens
ctgcccagaagaggc

SEQ ID NO: 1978557 - DNA, 15 bp, Homo sapiens
tgcccagaagaggcc

SEQ ID NO: 1978558 - DNA, 15 bp, Homo sapiens
gcccagaagaggcca

SEQ ID NO: 1978559 - DNA, 15 bp, Homo sapiens
cccagaagaggccac

SEQ ID NO: 1978560 - DNA, 15 bp, Homo sapiens
ccagaagaggccaca

SEQ ID NO: 1978561 - DNA, 15 bp, Homo sapiens
cagaagaggccacag

SEQ ID NO: 1978562 - DNA, 15 bp, Homo sapiens
agaagaggccacagc

SEQ ID NO: 1978563 - DNA, 15 bp, Homo sapiens
gaagaggccacagca

SEQ ID NO: 1978564 - DNA, 15 bp, Homo sapiens
aagaggccacagcac

SEQ ID NO: 1978565 - DNA, 15 bp, Homo sapiens
agaggccacagcact

SEQ ID NO: 1978566 - DNA, 15 bp, Homo sapiens
gaggccacagcactt

SEQ ID NO: 1978567 - DNA, 15 bp, Homo sapiens
aggccacagcacttg

SEQ ID NO: 1978568 - DNA, 15 bp, Homo sapiens
ggccacagcacttgc

SEQ ID NO: 1978569 - DNA, 15 bp, Homo sapiens
gccacagcacttgcc

SEQ ID NO: 1978570 - DNA, 15 bp, Homo sapiens
ccacagcacttgcca

SEQ ID NO: 1978571 - DNA, 15 bp, Homo sapiens
cacagcacttgccac

SEQ ID NO: 1978572 - DNA, 15 bp, Homo sapiens
acagcacttgccacc

SEQ ID NO: 1978573 - DNA, 15 bp, Homo sapiens
cagcacttgccaccc

SEQ ID NO: 1978574 - DNA, 15 bp, Homo sapiens
agcacttgccaccca

SEQ ID NO: 1978575 - DNA, 15 bp, Homo sapiens
gcacttgccacccac

SEQ ID NO: 1978576 - DNA, 15 bp, Homo sapiens
cacttgccacccacc

SEQ ID NO: 1978577 - DNA, 15 bp, Homo sapiens
acttgccacccaccc

SEQ ID NO: 1978578 - DNA, 15 bp, Homo sapiens
cttgccacccaccca

SEQ ID NO: 1978579 - DNA, 15 bp, Homo sapiens
ttgccacccacccac

SEQ ID NO: 1978580 - DNA, 15 bp, Homo sapiens
tgccacccacccacc

SEQ ID NO: 1978581 - DNA, 15 bp, Homo sapiens
gccacccacccaccc

SEQ ID NO: 1978582 - DNA, 15 bp, Homo sapiens
ccacccacccacccg

SEQ ID NO: 1978583 - DNA, 15 bp, Homo sapiens
cacccacccacccgg

SEQ ID NO: 1978584 - DNA, 15 bp, Homo sapiens
acccacccacccggc

SEQ ID NO: 1978585 - DNA, 15 bp, Homo sapiens
cccacccacccggct

SEQ ID NO: 1978586 - DNA, 15 bp, Homo sapiens
ccacccacccggcta

SEQ ID NO: 1978587 - DNA, 15 bp, Homo sapiens
cacccacccggctag

SEQ ID NO: 1978588 - DNA, 15 bp, Homo sapiens
acccacccggctagg

SEQ ID NO: 1978589 - DNA, 15 bp, Homo sapiens
cccacccggctaggc

SEQ ID NO: 1978590 - DNA, 15 bp, Homo sapiens
ccacccggctaggct

SEQ ID NO: 1978591 - DNA, 15 bp, Homo sapiens
cacccggctaggctg

SEQ ID NO: 1978592 - DNA, 15 bp, Homo sapiens
acccggctaggctga

SEQ ID NO: 1978593 - DNA, 15 bp, Homo sapiens
cccggctaggctgaa

SEQ ID NO: 1978594 - DNA, 15 bp, Homo sapiens
ccggctaggctgaag

SEQ ID NO: 1978595 - DNA, 15 bp, Homo sapiens
cggctaggctgaagg

SEQ ID NO: 1978596 - DNA, 15 bp, Homo sapiens
ggctaggctgaagga

SEQ ID NO: 1978597 - DNA, 15 bp, Homo sapiens
gctaggctgaaggac

SEQ ID NO: 1978598 - DNA, 15 bp, Homo sapiens
ctaggctgaaggacg

SEQ ID NO: 1978599 - DNA, 15 bp, Homo sapiens
taggctgaaggacgg

SEQ ID NO: 1978600 - DNA, 15 bp, Homo sapiens
aggctgaaggacggg

SEQ ID NO: 1978601 - DNA, 15 bp, Homo sapiens
ggctgaaggacgggg

SEQ ID NO: 1978602 - DNA, 15 bp, Homo sapiens
gctgaaggacggggt

SEQ ID NO: 1978603 - DNA, 15 bp, Homo sapiens
ctgaaggacggggtg

SEQ ID NO: 1978604 - DNA, 15 bp, Homo sapiens
tgaaggacggggtgg

SEQ ID NO: 1978605 - DNA, 15 bp, Homo sapiens
gaaggacggggtgga

SEQ ID NO: 1978606 - DNA, 15 bp, Homo sapiens
aaggacggggtggag

SEQ ID NO: 1978607 - DNA, 15 bp, Homo sapiens
aggacggggtggagc

SEQ ID NO: 1978608 - DNA, 15 bp, Homo sapiens
ggacggggtggagct

SEQ ID NO: 1978609 - DNA, 15 bp, Homo sapiens
gacggggtggagctg

SEQ ID NO: 1978610 - DNA, 15 bp, Homo sapiens
acggggtggagctga

SEQ ID NO: 1978611 - DNA, 15 bp, Homo sapiens
cggggtggagctgac

SEQ ID NO: 1978612 - DNA, 15 bp, Homo sapiens
ggggtggagctgacc

SEQ ID NO: 1978613 - DNA, 15 bp, Homo sapiens
gggtggagctgaccc

SEQ ID NO: 1978614 - DNA, 15 bp, Homo sapiens
ggtggagctgacccg

SEQ ID NO: 1978615 - DNA, 15 bp, Homo sapiens
gtggagctgacccgg

SEQ ID NO: 1978616 - DNA, 15 bp, Homo sapiens
tggagctgacccggg

SEQ ID NO: 1978617 - DNA, 15 bp, Homo sapiens
ggagctgacccggga

SEQ ID NO: 1978618 - DNA, 15 bp, Homo sapiens
gagctgacccgggag

SEQ ID NO: 1978619 - DNA, 15 bp, Homo sapiens
agctgacccgggagg

SEQ ID NO: 1978620 - DNA, 15 bp, Homo sapiens
gctgacccgggagga

SEQ ID NO: 1978621 - DNA, 15 bp, Homo sapiens
ctgacccgggaggag

SEQ ID NO: 1978622 - DNA, 15 bp, Homo sapiens
tgacccgggaggaga

SEQ ID NO: 1978623 - DNA, 15 bp, Homo sapiens
gacccgggaggagac

SEQ ID NO: 1978624 - DNA, 15 bp, Homo sapiens
acccgggaggagacc

SEQ ID NO: 1978625 - DNA, 15 bp, Homo sapiens
cccgggaggagacct

SEQ ID NO: 1978626 - DNA, 15 bp, Homo sapiens
ccgggaggagacctt

SEQ ID NO: 1978627 - DNA, 15 bp, Homo sapiens
cgggaggagaccttc

SEQ ID NO: 1978628 - DNA, 15 bp, Homo sapiens
gggaggagaccttca

SEQ ID NO: 1978629 - DNA, 15 bp, Homo sapiens
ggaggagaccttcaa

SEQ ID NO: 1978630 - DNA, 15 bp, Homo sapiens
gaggagaccttcaaa

SEQ ID NO: 1978631 - DNA, 15 bp, Homo sapiens
aggagaccttcaaat

SEQ ID NO: 1978632 - DNA, 15 bp, Homo sapiens
ggagaccttcaaata

SEQ ID NO: 1978633 - DNA, 15 bp, Homo sapiens
gagaccttcaaatac

SEQ ID NO: 1978634 - DNA, 15 bp, Homo sapiens
agaccttcaaatacc

SEQ ID NO: 1978635 - DNA, 15 bp, Homo sapiens
gaccttcaaataccg

SEQ ID NO: 1978636 - DNA, 15 bp, Homo sapiens
accttcaaataccgg

SEQ ID NO: 1978637 - DNA, 15 bp, Homo sapiens
ccttcaaataccggt

SEQ ID NO: 1978638 - DNA, 15 bp, Homo sapiens
cttcaaataccggtt

SEQ ID NO: 1978639 - DNA, 15 bp, Homo sapiens
ttcaaataccggttc

SEQ ID NO: 1978640 - DNA, 15 bp, Homo sapiens
tcaaataccggttca

SEQ ID NO: 1978641 - DNA, 15 bp, Homo sapiens
caaataccggttcaa

SEQ ID NO: 1978642 - DNA, 15 bp, Homo sapiens
aaataccggttcaag

SEQ ID NO: 1978643 - DNA, 15 bp, Homo sapiens
aataccggttcaaga

SEQ ID NO: 1978644 - DNA, 15 bp, Homo sapiens
ataccggttcaagaa

SEQ ID NO: 1978645 - DNA, 15 bp, Homo sapiens
taccggttcaagaag

SEQ ID NO: 1978646 - DNA, 15 bp, Homo sapiens
accggttcaagaagg

SEQ ID NO: 1978647 - DNA, 15 bp, Homo sapiens
ccggttcaagaagga

SEQ ID NO: 1978648 - DNA, 15 bp, Homo sapiens
cggttcaagaaggac

SEQ ID NO: 1978649 - DNA, 15 bp, Homo sapiens
ggttcaagaaggacg

SEQ ID NO: 1978650 - DNA, 15 bp, Homo sapiens
gttcaagaaggacgg

SEQ ID NO: 1978651 - DNA, 15 bp, Homo sapiens
ttcaagaaggacggg

SEQ ID NO: 1978652 - DNA, 15 bp, Homo sapiens
tcaagaaggacgggc

SEQ ID NO: 1978653 - DNA, 15 bp, Homo sapiens
caagaaggacgggca

SEQ ID NO: 1978654 - DNA, 15 bp, Homo sapiens
aagaaggacgggcag

SEQ ID NO: 1978655 - DNA, 15 bp, Homo sapiens
agaaggacgggcaga

SEQ ID NO: 1978656 - DNA, 15 bp, Homo sapiens
gaaggacgggcagag

SEQ ID NO: 1978657 - DNA, 15 bp, Homo sapiens
aaggacgggcagaga

SEQ ID NO: 1978658 - DNA, 15 bp, Homo sapiens
aggacgggcagagac

SEQ ID NO: 1978659 - DNA, 15 bp, Homo sapiens
ggacgggcagagaca

SEQ ID NO: 1978660 - DNA, 15 bp, Homo sapiens
gacgggcagagacac

SEQ ID NO: 1978661 - DNA, 15 bp, Homo sapiens
acgggcagagacacc

SEQ ID NO: 1978662 - DNA, 15 bp, Homo sapiens
cgggcagagacacca

SEQ ID NO: 1978663 - DNA, 15 bp, Homo sapiens
gggcagagacaccac

SEQ ID NO: 1978664 - DNA, 15 bp, Homo sapiens
ggcagagacaccacc

SEQ ID NO: 1978665 - DNA, 15 bp, Homo sapiens
gcagagacaccacct

SEQ ID NO: 1978666 - DNA, 15 bp, Homo sapiens
cagagacaccacctg

SEQ ID NO: 1978667 - DNA, 15 bp, Homo sapiens
agagacaccacctga

SEQ ID NO: 1978668 - DNA, 15 bp, Homo sapiens
agacaccacctgatc

SEQ ID NO: 1978669 - DNA, 15 bp, Homo sapiens
gacaccacctgatca

SEQ ID NO: 1978670 - DNA, 15 bp, Homo sapiens
acaccacctgatcat

SEQ ID NO: 1978671 - DNA, 15 bp, Homo sapiens
caccacctgatcatc

SEQ ID NO: 1978672 - DNA, 15 bp, Homo sapiens
accacctgatcatca

SEQ ID NO: 1978673 - DNA, 15 bp, Homo sapiens
ccacctgatcatcaa

SEQ ID NO: 1978674 - DNA, 15 bp, Homo sapiens
cacctgatcatcaac

SEQ ID NO: 1978675 - DNA, 15 bp, Homo sapiens
acctgatcatcaacg

SEQ ID NO: 1978676 - DNA, 15 bp, Homo sapiens
cctgatcatcaacga

SEQ ID NO: 1978677 - DNA, 15 bp, Homo sapiens
ctgatcatcaacgag

SEQ ID NO: 1978678 - DNA, 15 bp, Homo sapiens
tgatcatcaacgagg

SEQ ID NO: 1978679 - DNA, 15 bp, Homo sapiens
gatcatcaacgaggc

SEQ ID NO: 1978680 - DNA, 15 bp, Homo sapiens
atcatcaacgaggcc

SEQ ID NO: 1978681 - DNA, 15 bp, Homo sapiens
tcatcaacgaggcca

SEQ ID NO: 1978682 - DNA, 15 bp, Homo sapiens
catcaacgaggccat

SEQ ID NO: 1978683 - DNA, 15 bp, Homo sapiens
atcaacgaggccatg

SEQ ID NO: 1978684 - DNA, 15 bp, Homo sapiens
tcaacgaggccatgc

SEQ ID NO: 1978685 - DNA, 15 bp, Homo sapiens
caacgaggccatgct

SEQ ID NO: 1978686 - DNA, 15 bp, Homo sapiens
aacgaggccatgctg

SEQ ID NO: 1978687 - DNA, 15 bp, Homo sapiens
acgaggccatgctgg

SEQ ID NO: 1978688 - DNA, 15 bp, Homo sapiens
cgaggccatgctgga

SEQ ID NO: 1978689 - DNA, 15 bp, Homo sapiens
gaggccatgctggag

SEQ ID NO: 1978690 - DNA, 15 bp, Homo sapiens
aggccatgctggagg

SEQ ID NO: 1978691 - DNA, 15 bp, Homo sapiens
ggccatgctggagga

SEQ ID NO: 1978692 - DNA, 15 bp, Homo sapiens
gccatgctggaggac

SEQ ID NO: 1978693 - DNA, 15 bp, Homo sapiens
ccatgctggaggacg

SEQ ID NO: 1978694 - DNA, 15 bp, Homo sapiens
catgctggaggacgc

SEQ ID NO: 1978695 - DNA, 15 bp, Homo sapiens
atgctggaggacgcg

SEQ ID NO: 1978696 - DNA, 15 bp, Homo sapiens
tgctggaggacgcgg

SEQ ID NO: 1978697 - DNA, 15 bp, Homo sapiens
gctggaggacgcggg

SEQ ID NO: 1978698 - DNA, 15 bp, Homo sapiens
ctggaggacgcgggg

SEQ ID NO: 1978699 - DNA, 15 bp, Homo sapiens
tggaggacgcggggc

SEQ ID NO: 1978700 - DNA, 15 bp, Homo sapiens
ggaggacgcggggca

SEQ ID NO: 1978701 - DNA, 15 bp, Homo sapiens
gaggacgcggggcac

SEQ ID NO: 1978702 - DNA, 15 bp, Homo sapiens
aggacgcggggcact

SEQ ID NO: 1978703 - DNA, 15 bp, Homo sapiens
ggacgcggggcacta

SEQ ID NO: 1978704 - DNA, 15 bp, Homo sapiens
gacgcggggcactat

SEQ ID NO: 1978705 - DNA, 15 bp, Homo sapiens
acgcggggcactatg

SEQ ID NO: 1978706 - DNA, 15 bp, Homo sapiens
cgcggggcactatgc

SEQ ID NO: 1978707 - DNA, 15 bp, Homo sapiens
gcggggcactatgca

SEQ ID NO: 1978708 - DNA, 15 bp, Homo sapiens
cggggcactatgcac

SEQ ID NO: 1978709 - DNA, 15 bp, Homo sapiens
ggggcactatgcact

SEQ ID NO: 1978710 - DNA, 15 bp, Homo sapiens
gggcactatgcactg

SEQ ID NO: 1978711 - DNA, 15 bp, Homo sapiens
ggcactatgcactgt

SEQ ID NO: 1978712 - DNA, 15 bp, Homo sapiens
gcactatgcactgtg

SEQ ID NO: 1978713 - DNA, 15 bp, Homo sapiens
cactatgcactgtgc

SEQ ID NO: 1978714 - DNA, 15 bp, Homo sapiens
actatgcactgtgca

SEQ ID NO: 1978715 - DNA, 15 bp, Homo sapiens
ctatgcactgtgcac

SEQ ID NO: 1978716 - DNA, 15 bp, Homo sapiens
tatgcactgtgcact

SEQ ID NO: 1978717 - DNA, 15 bp, Homo sapiens
atgcactgtgcacta

SEQ ID NO: 1978718 - DNA, 15 bp, Homo sapiens
tgcactgtgcactag

SEQ ID NO: 1978719 - DNA, 15 bp, Homo sapiens
gcactgtgcactagc

SEQ ID NO: 1978720 - DNA, 15 bp, Homo sapiens
cactgtgcactagcg

SEQ ID NO: 1978721 - DNA, 15 bp, Homo sapiens
actgtgcactagcgg

SEQ ID NO: 1978722 - DNA, 15 bp, Homo sapiens
ctgtgcactagcggg

SEQ ID NO: 1978723 - DNA, 15 bp, Homo sapiens
tgtgcactagcgggg

SEQ ID NO: 1978724 - DNA, 15 bp, Homo sapiens
gtgcactagcggggg

SEQ ID NO: 1978725 - DNA, 15 bp, Homo sapiens
tgcactagcgggggc

SEQ ID NO: 1978726 - DNA, 15 bp, Homo sapiens
gcactagcgggggcc

SEQ ID NO: 1978727 - DNA, 15 bp, Homo sapiens
cactagcgggggcca

SEQ ID NO: 1978728 - DNA, 15 bp, Homo sapiens
actagcgggggccag

SEQ ID NO: 1978729 - DNA, 15 bp, Homo sapiens
ctagcgggggccagg

SEQ ID NO: 1978730 - DNA, 15 bp, Homo sapiens
tagcgggggccaggc

SEQ ID NO: 1978731 - DNA, 15 bp, Homo sapiens
agcgggggccaggcg

SEQ ID NO: 1978732 - DNA, 15 bp, Homo sapiens
gcgggggccaggcgc

SEQ ID NO: 1978733 - DNA, 15 bp, Homo sapiens
cgggggccaggcgct

SEQ ID NO: 1978734 - DNA, 15 bp, Homo sapiens
gggggccaggcgctg

SEQ ID NO: 1978735 - DNA, 15 bp, Homo sapiens
ggggccaggcgctgg

SEQ ID NO: 1978736 - DNA, 15 bp, Homo sapiens
gggccaggcgctggc

SEQ ID NO: 1978737 - DNA, 15 bp, Homo sapiens
ggccaggcgctggct

SEQ ID NO: 1978738 - DNA, 15 bp, Homo sapiens
gccaggcgctggctg

SEQ ID NO: 1978739 - DNA, 15 bp, Homo sapiens
ccaggcgctggctga

SEQ ID NO: 1978740 - DNA, 15 bp, Homo sapiens
caggcgctggctgag

SEQ ID NO: 1978741 - DNA, 15 bp, Homo sapiens
aggcgctggctgagc

SEQ ID NO: 1978742 - DNA, 15 bp, Homo sapiens
ggcgctggctgagct

SEQ ID NO: 1978743 - DNA, 15 bp, Homo sapiens
gcgctggctgagctc

SEQ ID NO: 1978744 - DNA, 15 bp, Homo sapiens
cgctggctgagctca

SEQ ID NO: 1978745 - DNA, 15 bp, Homo sapiens
gctggctgagctcat

SEQ ID NO: 1978746 - DNA, 15 bp, Homo sapiens
ctggctgagctcatt

SEQ ID NO: 1978747 - DNA, 15 bp, Homo sapiens
tggctgagctcattg

SEQ ID NO: 1978748 - DNA, 15 bp, Homo sapiens
ggctgagctcattgt

SEQ ID NO: 1978749 - DNA, 15 bp, Homo sapiens
gctgagctcattgtg

SEQ ID NO: 1978750 - DNA, 15 bp, Homo sapiens
ctgagctcattgtgc

SEQ ID NO: 1978751 - DNA, 15 bp, Homo sapiens
tgagctcattgtgca

SEQ ID NO: 1978752 - DNA, 15 bp, Homo sapiens
gagctcattgtgcag

SEQ ID NO: 1978753 - DNA, 15 bp, Homo sapiens
agctcattgtgcagg

SEQ ID NO: 1978754 - DNA, 15 bp, Homo sapiens
gctcattgtgcaggg

SEQ ID NO: 1978755 - DNA, 15 bp, Homo sapiens
ctcattgtgcagggt

SEQ ID NO: 1978756 - DNA, 15 bp, Homo sapiens
tcattgtgcagggtg

SEQ ID NO: 1978757 - DNA, 15 bp, Homo sapiens
cattgtgcagggtga

SEQ ID NO: 1978758 - DNA, 15 bp, Homo sapiens
attgtgcagggtgag

SEQ ID NO: 1978759 - DNA, 15 bp, Homo sapiens
ttgtgcagggtgagc

SEQ ID NO: 1978760 - DNA, 15 bp, Homo sapiens
tgtgcagggtgagcc

SEQ ID NO: 1978761 - DNA, 15 bp, Homo sapiens
gtgcagggtgagcct

SEQ ID NO: 1978762 - DNA, 15 bp, Homo sapiens
tgcagggtgagcctg

SEQ ID NO: 1978763 - DNA, 15 bp, Homo sapiens
gcagggtgagcctgg

SEQ ID NO: 1978764 - DNA, 15 bp, Homo sapiens
cagggtgagcctggc

SEQ ID NO: 1978765 - DNA, 15 bp, Homo sapiens
agggtgagcctggct

SEQ ID NO: 1978766 - DNA, 15 bp, Homo sapiens
gggtgagcctggctg

SEQ ID NO: 1978767 - DNA, 15 bp, Homo sapiens
ggtgagcctggctgg

SEQ ID NO: 1978768 - DNA, 15 bp, Homo sapiens
gtgagcctggctggg

SEQ ID NO: 1978769 - DNA, 15 bp, Homo sapiens
tgagcctggctgggg

SEQ ID NO: 1978770 - DNA, 15 bp, Homo sapiens
gagcctggctggggg

SEQ ID NO: 1978771 - DNA, 15 bp, Homo sapiens
agcctggctgggggg

SEQ ID NO: 1978772 - DNA, 15 bp, Homo sapiens
gcctggctggggggg

SEQ ID NO: 1978773 - DNA, 15 bp, Homo sapiens
cctggctgggggggc

SEQ ID NO: 1978774 - DNA, 15 bp, Homo sapiens
ctggctgggggggca

SEQ ID NO: 1978775 - DNA, 15 bp, Homo sapiens
tggctgggggggcac

SEQ ID NO: 1978776 - DNA, 15 bp, Homo sapiens
ggctgggggggcaca

SEQ ID NO: 1978777 - DNA, 15 bp, Homo sapiens
gctgggggggcacat

SEQ ID NO: 1978778 - DNA, 15 bp, Homo sapiens
ctgggggggcacatg

SEQ ID NO: 1978779 - DNA, 15 bp, Homo sapiens
tgggggggcacatga

SEQ ID NO: 1978780 - DNA, 15 bp, Homo sapiens
gggggggcacatgag

SEQ ID NO: 1978781 - DNA, 15 bp, Homo sapiens
ggggggcacatgagg

SEQ ID NO: 1978782 - DNA, 15 bp, Homo sapiens
gggggcacatgaggc

SEQ ID NO: 1978783 - DNA, 15 bp, Homo sapiens
ggggcacatgaggct

SEQ ID NO: 1978784 - DNA, 15 bp, Homo sapiens
gggcacatgaggctt

SEQ ID NO: 1978785 - DNA, 15 bp, Homo sapiens
ggcacatgaggcttt

SEQ ID NO: 1978786 - DNA, 15 bp, Homo sapiens
gcacatgaggcttta

SEQ ID NO: 1978787 - DNA, 15 bp, Homo sapiens
cacatgaggctttag

SEQ ID NO: 1978788 - DNA, 15 bp, Homo sapiens
acatgaggctttagg

SEQ ID NO: 1978789 - DNA, 15 bp, Homo sapiens
catgaggctttaggg

SEQ ID NO: 1978790 - DNA, 15 bp, Homo sapiens
atgaggctttagggc

SEQ ID NO: 1978791 - DNA, 15 bp, Homo sapiens
tgaggctttagggct

SEQ ID NO: 1978792 - DNA, 15 bp, Homo sapiens
gaggctttagggctt

SEQ ID NO: 1978793 - DNA, 15 bp, Homo sapiens
aggctttagggcttg

SEQ ID NO: 1978794 - DNA, 15 bp, Homo sapiens
ggctttagggcttgg

SEQ ID NO: 1978795 - DNA, 15 bp, Homo sapiens
gctttagggcttgga

SEQ ID NO: 1978796 - DNA, 15 bp, Homo sapiens
ttagggcttggaccc

SEQ ID NO: 1978797 - DNA, 15 bp, Homo sapiens
tagggcttggacccc

SEQ ID NO: 1978798 - DNA, 15 bp, Homo sapiens
agggcttggacccct

SEQ ID NO: 1978799 - DNA, 15 bp, Homo sapiens
gggcttggacccctc

SEQ ID NO: 1978800 - DNA, 15 bp, Homo sapiens
ggcttggacccctca

SEQ ID NO: 1978801 - DNA, 15 bp, Homo sapiens
gcttggacccctcag

SEQ ID NO: 1978802 - DNA, 15 bp, Homo sapiens
cttggacccctcagc

SEQ ID NO: 1978803 - DNA, 15 bp, Homo sapiens
ttggacccctcagcc

SEQ ID NO: 1978804 - DNA, 15 bp, Homo sapiens
tggacccctcagccc

SEQ ID NO: 1978805 - DNA, 15 bp, Homo sapiens
ggacccctcagcccc

SEQ ID NO: 1978806 - DNA, 15 bp, Homo sapiens
gacccctcagccccc

SEQ ID NO: 1978807 - DNA, 15 bp, Homo sapiens
acccctcagccccca

SEQ ID NO: 1978808 - DNA, 15 bp, Homo sapiens
cccctcagcccccac

SEQ ID NO: 1978809 - DNA, 15 bp, Homo sapiens
ccctcagcccccacc

SEQ ID NO: 1978810 - DNA, 15 bp, Homo sapiens
cctcagcccccaccc

SEQ ID NO: 1978811 - DNA, 15 bp, Homo sapiens
ctcagcccccacccc

SEQ ID NO: 1978812 - DNA, 15 bp, Homo sapiens
tcagcccccacccca

SEQ ID NO: 1978813 - DNA, 15 bp, Homo sapiens
cagcccccaccccac

SEQ ID NO: 1978814 - DNA, 15 bp, Homo sapiens
agcccccaccccacc

SEQ ID NO: 1978815 - DNA, 15 bp, Homo sapiens
gcccccaccccacct

SEQ ID NO: 1978816 - DNA, 15 bp, Homo sapiens
cccccaccccaccta

SEQ ID NO: 1978817 - DNA, 15 bp, Homo sapiens
ccccaccccacctag

SEQ ID NO: 1978818 - DNA, 15 bp, Homo sapiens
cccaccccacctagc

SEQ ID NO: 1978819 - DNA, 15 bp, Homo sapiens
ccaccccacctagcc

SEQ ID NO: 1978820 - DNA, 15 bp, Homo sapiens
caccccacctagccc

SEQ ID NO: 1978821 - DNA, 15 bp, Homo sapiens
accccacctagccct

SEQ ID NO: 1978822 - DNA, 15 bp, Homo sapiens
ccccacctagccctg

SEQ ID NO: 1978823 - DNA, 15 bp, Homo sapiens
cccacctagccctgt

SEQ ID NO: 1978824 - DNA, 15 bp, Homo sapiens
ccacctagccctgta

SEQ ID NO: 1978825 - DNA, 15 bp, Homo sapiens
cacctagccctgtag

SEQ ID NO: 1978826 - DNA, 15 bp, Homo sapiens
acctagccctgtagg

SEQ ID NO: 1978827 - DNA, 15 bp, Homo sapiens
cctagccctgtaggg

SEQ ID NO: 1978828 - DNA, 15 bp, Homo sapiens
ctagccctgtagggg

SEQ ID NO: 1978829 - DNA, 15 bp, Homo sapiens
tagccctgtagggga

SEQ ID NO: 1978830 - DNA, 15 bp, Homo sapiens
agccctgtaggggag

SEQ ID NO: 1978831 - DNA, 15 bp, Homo sapiens
gccctgtaggggagc

SEQ ID NO: 1978832 - DNA, 15 bp, Homo sapiens
ccctgtaggggagca

SEQ ID NO: 1978833 - DNA, 15 bp, Homo sapiens
cctgtaggggagcag

SEQ ID NO: 1978834 - DNA, 15 bp, Homo sapiens
ctgtaggggagcagg

SEQ ID NO: 1978835 - DNA, 15 bp, Homo sapiens
tgtaggggagcaggc

SEQ ID NO: 1978836 - DNA, 15 bp, Homo sapiens
gtaggggagcaggca

SEQ ID NO: 1978837 - DNA, 15 bp, Homo sapiens
taggggagcaggcaa

SEQ ID NO: 1978838 - DNA, 15 bp, Homo sapiens
aggggagcaggcaaa

SEQ ID NO: 1978839 - DNA, 15 bp, Homo sapiens
ggggagcaggcaaac

SEQ ID NO: 1978840 - DNA, 15 bp, Homo sapiens
gggagcaggcaaacc

SEQ ID NO: 1978841 - DNA, 15 bp, Homo sapiens
ggagcaggcaaacct

SEQ ID NO: 1978842 - DNA, 15 bp, Homo sapiens
gagcaggcaaacctg

SEQ ID NO: 1978843 - DNA, 15 bp, Homo sapiens
agcaggcaaacctgg

SEQ ID NO: 1978844 - DNA, 15 bp, Homo sapiens
gcaggcaaacctggg

SEQ ID NO: 1978845 - DNA, 15 bp, Homo sapiens
caggcaaacctgggc

SEQ ID NO: 1978846 - DNA, 15 bp, Homo sapiens
aggcaaacctgggct

SEQ ID NO: 1978847 - DNA, 15 bp, Homo sapiens
ggcaaacctgggctc

SEQ ID NO: 1978848 - DNA, 15 bp, Homo sapiens
gcaaacctgggctca

SEQ ID NO: 1978849 - DNA, 15 bp, Homo sapiens
caaacctgggctcaa

SEQ ID NO: 1978850 - DNA, 15 bp, Homo sapiens
aaacctgggctcaag

SEQ ID NO: 1978851 - DNA, 15 bp, Homo sapiens
aacctgggctcaagg

SEQ ID NO: 1978852 - DNA, 15 bp, Homo sapiens
acctgggctcaaggc

SEQ ID NO: 1978853 - DNA, 15 bp, Homo sapiens
cctgggctcaaggcc

SEQ ID NO: 1978854 - DNA, 15 bp, Homo sapiens
ctgggctcaaggcct

SEQ ID NO: 1978855 - DNA, 15 bp, Homo sapiens
tgggctcaaggcctc

SEQ ID NO: 1978856 - DNA, 15 bp, Homo sapiens
gggctcaaggcctct

SEQ ID NO: 1978857 - DNA, 15 bp, Homo sapiens
ggctcaaggcctctg

SEQ ID NO: 1978858 - DNA, 15 bp, Homo sapiens
gctcaaggcctctgt

SEQ ID NO: 1978859 - DNA, 15 bp, Homo sapiens
ctcaaggcctctgtg

SEQ ID NO: 1978860 - DNA, 15 bp, Homo sapiens
tcaaggcctctgtga

SEQ ID NO: 1978861 - DNA, 15 bp, Homo sapiens
caaggcctctgtgac

SEQ ID NO: 1978862 - DNA, 15 bp, Homo sapiens
aaggcctctgtgacc

SEQ ID NO: 1978863 - DNA, 15 bp, Homo sapiens
aggcctctgtgacct

SEQ ID NO: 1978864 - DNA, 15 bp, Homo sapiens
ggcctctgtgacctt

SEQ ID NO: 1978865 - DNA, 15 bp, Homo sapiens
gcctctgtgaccttg

SEQ ID NO: 1978866 - DNA, 15 bp, Homo sapiens
cctctgtgaccttgg

SEQ ID NO: 1978867 - DNA, 15 bp, Homo sapiens
ctctgtgaccttggg

SEQ ID NO: 1978868 - DNA, 15 bp, Homo sapiens
tctgtgaccttgggc

SEQ ID NO: 1978869 - DNA, 15 bp, Homo sapiens
ctgtgaccttgggcc

SEQ ID NO: 1978870 - DNA, 15 bp, Homo sapiens
tgtgaccttgggcct

SEQ ID NO: 1978871 - DNA, 15 bp, Homo sapiens
gtgaccttgggcctt

SEQ ID NO: 1978872 - DNA, 15 bp, Homo sapiens
tgaccttgggccttt

SEQ ID NO: 1978873 - DNA, 15 bp, Homo sapiens
gaccttgggcctttg

SEQ ID NO: 1978874 - DNA, 15 bp, Homo sapiens
accttgggcctttga

SEQ ID NO: 1978875 - DNA, 15 bp, Homo sapiens
ccttgggcctttgac

SEQ ID NO: 1978876 - DNA, 15 bp, Homo sapiens
cttgggcctttgaca

SEQ ID NO: 1978877 - DNA, 15 bp, Homo sapiens
ttgggcctttgacag

SEQ ID NO: 1978878 - DNA, 15 bp, Homo sapiens
tgggcctttgacagc

SEQ ID NO: 1978879 - DNA, 15 bp, Homo sapiens
gggcctttgacagcc

SEQ ID NO: 1978880 - DNA, 15 bp, Homo sapiens
ggcctttgacagcct

SEQ ID NO: 1978881 - DNA, 15 bp, Homo sapiens
gcctttgacagccta

SEQ ID NO: 1978882 - DNA, 15 bp, Homo sapiens
cctttgacagcctaa

SEQ ID NO: 1978883 - DNA, 15 bp, Homo sapiens
ctttgacagcctaaa

SEQ ID NO: 1978884 - DNA, 15 bp, Homo sapiens
tttgacagcctaaac

SEQ ID NO: 1978885 - DNA, 15 bp, Homo sapiens
ttgacagcctaaacc

SEQ ID NO: 1978886 - DNA, 15 bp, Homo sapiens
tgacagcctaaacct

SEQ ID NO: 1978887 - DNA, 15 bp, Homo sapiens
gacagcctaaacctc

SEQ ID NO: 1978888 - DNA, 15 bp, Homo sapiens
acagcctaaacctca

SEQ ID NO: 1978889 - DNA, 15 bp, Homo sapiens
cagcctaaacctcat

SEQ ID NO: 1978890 - DNA, 15 bp, Homo sapiens
agcctaaacctcatc

SEQ ID NO: 1978891 - DNA, 15 bp, Homo sapiens
gcctaaacctcatcc

SEQ ID NO: 1978892 - DNA, 15 bp, Homo sapiens
cctaaacctcatcct

SEQ ID NO: 1978893 - DNA, 15 bp, Homo sapiens
ctaaacctcatcctt

SEQ ID NO: 1978894 - DNA, 15 bp, Homo sapiens
taaacctcatccttc

SEQ ID NO: 1978895 - DNA, 15 bp, Homo sapiens
aaacctcatccttct

SEQ ID NO: 1978896 - DNA, 15 bp, Homo sapiens
aacctcatccttctc

SEQ ID NO: 1978897 - DNA, 15 bp, Homo sapiens
acctcatccttctca

SEQ ID NO: 1978898 - DNA, 15 bp, Homo sapiens
cctcatccttctcat

SEQ ID NO: 1978899 - DNA, 15 bp, Homo sapiens
ctcatccttctcatc

SEQ ID NO: 1978900 - DNA, 15 bp, Homo sapiens
tcatccttctcatct

SEQ ID NO: 1978901 - DNA, 15 bp, Homo sapiens
catccttctcatctc

SEQ ID NO: 1978902 - DNA, 15 bp, Homo sapiens
atccttctcatctct

SEQ ID NO: 1978903 - DNA, 15 bp, Homo sapiens
tccttctcatctcta

SEQ ID NO: 1978904 - DNA, 15 bp, Homo sapiens
ccttctcatctctaa

SEQ ID NO: 1978905 - DNA, 15 bp, Homo sapiens
cttctcatctctaaa

SEQ ID NO: 1978906 - DNA, 15 bp, Homo sapiens
ttctcatctctaaaa

SEQ ID NO: 1978907 - DNA, 15 bp, Homo sapiens
tctcatctctaaaat

SEQ ID NO: 1978908 - DNA, 15 bp, Homo sapiens
ctcatctctaaaatg

SEQ ID NO: 1978909 - DNA, 15 bp, Homo sapiens
tcatctctaaaatga

SEQ ID NO: 1978910 - DNA, 15 bp, Homo sapiens
catctctaaaatgac

SEQ ID NO: 1978911 - DNA, 15 bp, Homo sapiens
atctctaaaatgacg

SEQ ID NO: 1978912 - DNA, 15 bp, Homo sapiens
tctctaaaatgacga

SEQ ID NO: 1978913 - DNA, 15 bp, Homo sapiens
ctctaaaatgacgat

SEQ ID NO: 1978914 - DNA, 15 bp, Homo sapiens
tctaaaatgacgatg

SEQ ID NO: 1978915 - DNA, 15 bp, Homo sapiens
ctaaaatgacgatgc

SEQ ID NO: 1978916 - DNA, 15 bp, Homo sapiens
taaaatgacgatgct

SEQ ID NO: 1978917 - DNA, 15 bp, Homo sapiens
aaaatgacgatgctg

SEQ ID NO: 1978918 - DNA, 15 bp, Homo sapiens
aaatgacgatgctga

SEQ ID NO: 1978919 - DNA, 15 bp, Homo sapiens
aatgacgatgctgag

SEQ ID NO: 1978920 - DNA, 15 bp, Homo sapiens
atgacgatgctgagg

SEQ ID NO: 1978921 - DNA, 15 bp, Homo sapiens
tgacgatgctgaggt

SEQ ID NO: 1978922 - DNA, 15 bp, Homo sapiens
gacgatgctgaggtg

SEQ ID NO: 1978923 - DNA, 15 bp, Homo sapiens
acgatgctgaggtga

SEQ ID NO: 1978924 - DNA, 15 bp, Homo sapiens
cgatgctgaggtgac

SEQ ID NO: 1978925 - DNA, 15 bp, Homo sapiens
gatgctgaggtgacc

SEQ ID NO: 1978926 - DNA, 15 bp, Homo sapiens
atgctgaggtgaccg

SEQ ID NO: 1978927 - DNA, 15 bp, Homo sapiens
tgctgaggtgaccgc

SEQ ID NO: 1978928 - DNA, 15 bp, Homo sapiens
gctgaggtgaccgct

SEQ ID NO: 1978929 - DNA, 15 bp, Homo sapiens
ctgaggtgaccgctc

SEQ ID NO: 1978930 - DNA, 15 bp, Homo sapiens
tgaggtgaccgctcc

SEQ ID NO: 1978931 - DNA, 15 bp, Homo sapiens
gaggtgaccgctcca

SEQ ID NO: 1978932 - DNA, 15 bp, Homo sapiens
aggtgaccgctccag

SEQ ID NO: 1978933 - DNA, 15 bp, Homo sapiens
ggtgaccgctccaga

SEQ ID NO: 1978934 - DNA, 15 bp, Homo sapiens
gtgaccgctccagag

SEQ ID NO: 1978935 - DNA, 15 bp, Homo sapiens
tgaccgctccagagg

SEQ ID NO: 1978936 - DNA, 15 bp, Homo sapiens
gaccgctccagaggg

SEQ ID NO: 1978937 - DNA, 15 bp, Homo sapiens
accgctccagagggt

SEQ ID NO: 1978938 - DNA, 15 bp, Homo sapiens
ccgctccagagggta

SEQ ID NO: 1978939 - DNA, 15 bp, Homo sapiens
cgctccagagggtac

SEQ ID NO: 1978940 - DNA, 15 bp, Homo sapiens
gctccagagggtact

SEQ ID NO: 1978941 - DNA, 15 bp, Homo sapiens
ctccagagggtactg

SEQ ID NO: 1978942 - DNA, 15 bp, Homo sapiens
tccagagggtactga

SEQ ID NO: 1978943 - DNA, 15 bp, Homo sapiens
ccagagggtactgag

SEQ ID NO: 1978944 - DNA, 15 bp, Homo sapiens
cagagggtactgaga

SEQ ID NO: 1978945 - DNA, 15 bp, Homo sapiens
agagggtactgagag

SEQ ID NO: 1978946 - DNA, 15 bp, Homo sapiens
gagggtactgagagg

SEQ ID NO: 1978947 - DNA, 15 bp, Homo sapiens
agggtactgagaggg

SEQ ID NO: 1978948 - DNA, 15 bp, Homo sapiens
gggtactgagagggt

SEQ ID NO: 1978949 - DNA, 15 bp, Homo sapiens
ggtactgagagggtc

SEQ ID NO: 1978950 - DNA, 15 bp, Homo sapiens
gtactgagagggtca

SEQ ID NO: 1978951 - DNA, 15 bp, Homo sapiens
tactgagagggtcat

SEQ ID NO: 1978952 - DNA, 15 bp, Homo sapiens
actgagagggtcata

SEQ ID NO: 1978953 - DNA, 15 bp, Homo sapiens
ctgagagggtcatac

SEQ ID NO: 1978954 - DNA, 15 bp, Homo sapiens
tgagagggtcatacg

SEQ ID NO: 1978955 - DNA, 15 bp, Homo sapiens
gagagggtcatacgg

SEQ ID NO: 1978956 - DNA, 15 bp, Homo sapiens
agagggtcatacggg

SEQ ID NO: 1978957 - DNA, 15 bp, Homo sapiens
gagggtcatacgggc

SEQ ID NO: 1978958 - DNA, 15 bp, Homo sapiens
agggtcatacgggcc

SEQ ID NO: 1978959 - DNA, 15 bp, Homo sapiens
gggtcatacgggcct

SEQ ID NO: 1978960 - DNA, 15 bp, Homo sapiens
ggtcatacgggcctg

SEQ ID NO: 1978961 - DNA, 15 bp, Homo sapiens
gtcatacgggcctgg

SEQ ID NO: 1978962 - DNA, 15 bp, Homo sapiens
tcatacgggcctggt

SEQ ID NO: 1978963 - DNA, 15 bp, Homo sapiens
catacgggcctggtg

SEQ ID NO: 1978964 - DNA, 15 bp, Homo sapiens
atacgggcctggtga

SEQ ID NO: 1978965 - DNA, 15 bp, Homo sapiens
tacgggcctggtgag

SEQ ID NO: 1978966 - DNA, 15 bp, Homo sapiens
acgggcctggtgagc

SEQ ID NO: 1978967 - DNA, 15 bp, Homo sapiens
cgggcctggtgagca

SEQ ID NO: 1978968 - DNA, 15 bp, Homo sapiens
gggcctggtgagcat

SEQ ID NO: 1978969 - DNA, 15 bp, Homo sapiens
ggcctggtgagcatc

SEQ ID NO: 1978970 - DNA, 15 bp, Homo sapiens
gcctggtgagcatca

SEQ ID NO: 1978971 - DNA, 15 bp, Homo sapiens
cctggtgagcatcac

SEQ ID NO: 1978972 - DNA, 15 bp, Homo sapiens
ctggtgagcatcacc

SEQ ID NO: 1978973 - DNA, 15 bp, Homo sapiens
tggtgagcatcacca

SEQ ID NO: 1978974 - DNA, 15 bp, Homo sapiens
ggtgagcatcaccac

SEQ ID NO: 1978975 - DNA, 15 bp, Homo sapiens
gtgagcatcaccacc

SEQ ID NO: 1978976 - DNA, 15 bp, Homo sapiens
tgagcatcaccaccc

SEQ ID NO: 1978977 - DNA, 15 bp, Homo sapiens
gagcatcaccacccc

SEQ ID NO: 1978978 - DNA, 15 bp, Homo sapiens
agcatcaccacccct

SEQ ID NO: 1978979 - DNA, 15 bp, Homo sapiens
gcatcaccacccctc

SEQ ID NO: 1978980 - DNA, 15 bp, Homo sapiens
catcaccacccctca

SEQ ID NO: 1978981 - DNA, 15 bp, Homo sapiens
atcaccacccctcag

SEQ ID NO: 1978982 - DNA, 15 bp, Homo sapiens
tcaccacccctcaga

SEQ ID NO: 1978983 - DNA, 15 bp, Homo sapiens
caccacccctcagac

SEQ ID NO: 1978984 - DNA, 15 bp, Homo sapiens
accacccctcagaca

SEQ ID NO: 1978985 - DNA, 15 bp, Homo sapiens
ccacccctcagacac

SEQ ID NO: 1978986 - DNA, 15 bp, Homo sapiens
cacccctcagacact

SEQ ID NO: 1978987 - DNA, 15 bp, Homo sapiens
acccctcagacactt

SEQ ID NO: 1978988 - DNA, 15 bp, Homo sapiens
cccctcagacacttg

SEQ ID NO: 1978989 - DNA, 15 bp, Homo sapiens
ccctcagacacttga

SEQ ID NO: 1978990 - DNA, 15 bp, Homo sapiens
cctcagacacttgag

SEQ ID NO: 1978991 - DNA, 15 bp, Homo sapiens
ctcagacacttgagg

SEQ ID NO: 1978992 - DNA, 15 bp, Homo sapiens
tcagacacttgaggt

SEQ ID NO: 1978993 - DNA, 15 bp, Homo sapiens
cagacacttgaggtt

SEQ ID NO: 1978994 - DNA, 15 bp, Homo sapiens
agacacttgaggttc

SEQ ID NO: 1978995 - DNA, 15 bp, Homo sapiens
gacacttgaggttcc

SEQ ID NO: 1978996 - DNA, 15 bp, Homo sapiens
acacttgaggttcct

SEQ ID NO: 1978997 - DNA, 15 bp, Homo sapiens
cacttgaggttcctt

SEQ ID NO: 1978998 - DNA, 15 bp, Homo sapiens
acttgaggttcctta

SEQ ID NO: 1978999 - DNA, 15 bp, Homo sapiens
cttgaggttccttat

SEQ ID NO: 1979000 - DNA, 15 bp, Homo sapiens
ttgaggttccttatg

SEQ ID NO: 1979001 - DNA, 15 bp, Homo sapiens
tgaggttccttatgt

SEQ ID NO: 1979002 - DNA, 15 bp, Homo sapiens
gaggttccttatgtg

SEQ ID NO: 1979003 - DNA, 15 bp, Homo sapiens
aggttccttatgtgc

SEQ ID NO: 1979004 - DNA, 15 bp, Homo sapiens
ggttccttatgtgca

SEQ ID NO: 1979005 - DNA, 15 bp, Homo sapiens
gttccttatgtgcac

SEQ ID NO: 1979006 - DNA, 15 bp, Homo sapiens
ttccttatgtgcact

SEQ ID NO: 1979007 - DNA, 15 bp, Homo sapiens
tccttatgtgcactg

SEQ ID NO: 1979008 - DNA, 15 bp, Homo sapiens
ccttatgtgcactgc

SEQ ID NO: 1979009 - DNA, 15 bp, Homo sapiens
cttatgtgcactgca

SEQ ID NO: 1979010 - DNA, 15 bp, Homo sapiens
ttatgtgcactgcac

SEQ ID NO: 1979011 - DNA, 15 bp, Homo sapiens
tatgtgcactgcacc

SEQ ID NO: 1979012 - DNA, 15 bp, Homo sapiens
atgtgcactgcacca

SEQ ID NO: 1979013 - DNA, 15 bp, Homo sapiens
tgtgcactgcaccat

SEQ ID NO: 1979014 - DNA, 15 bp, Homo sapiens
gtgcactgcaccatc

SEQ ID NO: 1979015 - DNA, 15 bp, Homo sapiens
tgcactgcaccatca

SEQ ID NO: 1979016 - DNA, 15 bp, Homo sapiens
gcactgcaccatcac

SEQ ID NO: 1979017 - DNA, 15 bp, Homo sapiens
cactgcaccatcaca

SEQ ID NO: 1979018 - DNA, 15 bp, Homo sapiens
actgcaccatcacag

SEQ ID NO: 1979019 - DNA, 15 bp, Homo sapiens
ctgcaccatcacagg

SEQ ID NO: 1979020 - DNA, 15 bp, Homo sapiens
tgcaccatcacaggc

SEQ ID NO: 1979021 - DNA, 15 bp, Homo sapiens
gcaccatcacaggca

SEQ ID NO: 1979022 - DNA, 15 bp, Homo sapiens
caccatcacaggcaa

SEQ ID NO: 1979023 - DNA, 15 bp, Homo sapiens
accatcacaggcaaa

SEQ ID NO: 1979024 - DNA, 15 bp, Homo sapiens
ccatcacaggcaaac

SEQ ID NO: 1979025 - DNA, 15 bp, Homo sapiens
catcacaggcaaaca

SEQ ID NO: 1979026 - DNA, 15 bp, Homo sapiens
atcacaggcaaacat

SEQ ID NO: 1979027 - DNA, 15 bp, Homo sapiens
tcacaggcaaacatg

SEQ ID NO: 1979028 - DNA, 15 bp, Homo sapiens
cacaggcaaacatgg

SEQ ID NO: 1979029 - DNA, 15 bp, Homo sapiens
acaggcaaacatggc

SEQ ID NO: 1979030 - DNA, 15 bp, Homo sapiens
caggcaaacatggca

SEQ ID NO: 1979031 - DNA, 15 bp, Homo sapiens
aggcaaacatggcac

SEQ ID NO: 1979032 - DNA, 15 bp, Homo sapiens
ggcaaacatggcaca

SEQ ID NO: 1979033 - DNA, 15 bp, Homo sapiens
gcaaacatggcacac

SEQ ID NO: 1979034 - DNA, 15 bp, Homo sapiens
caaacatggcacaca

SEQ ID NO: 1979035 - DNA, 15 bp, Homo sapiens
aaacatggcacacac

SEQ ID NO: 1979036 - DNA, 15 bp, Homo sapiens
aacatggcacacaca

SEQ ID NO: 1979037 - DNA, 15 bp, Homo sapiens
acatggcacacacag

SEQ ID NO: 1979038 - DNA, 15 bp, Homo sapiens
catggcacacacagg

SEQ ID NO: 1979039 - DNA, 15 bp, Homo sapiens
atggcacacacaggc

SEQ ID NO: 1979040 - DNA, 15 bp, Homo sapiens
tggcacacacaggca

SEQ ID NO: 1979041 - DNA, 15 bp, Homo sapiens
ggcacacacaggcac

SEQ ID NO: 1979042 - DNA, 15 bp, Homo sapiens
gcacacacaggcaca

SEQ ID NO: 1979043 - DNA, 15 bp, Homo sapiens
cacacacaggcacac

SEQ ID NO: 1979044 - DNA, 15 bp, Homo sapiens
acacacaggcacacg

SEQ ID NO: 1979045 - DNA, 15 bp, Homo sapiens
cacacaggcacacgt

SEQ ID NO: 1979046 - DNA, 15 bp, Homo sapiens
acacaggcacacgtg

SEQ ID NO: 1979047 - DNA, 15 bp, Homo sapiens
cacaggcacacgtgt

SEQ ID NO: 1979048 - DNA, 15 bp, Homo sapiens
acaggcacacgtgtt

SEQ ID NO: 1979049 - DNA, 15 bp, Homo sapiens
caggcacacgtgttt

SEQ ID NO: 1979050 - DNA, 15 bp, Homo sapiens
aggcacacgtgtttt

SEQ ID NO: 1979051 - DNA, 15 bp, Homo sapiens
ggcacacgtgttttc

SEQ ID NO: 1979052 - DNA, 15 bp, Homo sapiens
gcacacgtgttttca

SEQ ID NO: 1979053 - DNA, 15 bp, Homo sapiens
cacacgtgttttcac

SEQ ID NO: 1979054 - DNA, 15 bp, Homo sapiens
acacgtgttttcaca

SEQ ID NO: 1979055 - DNA, 15 bp, Homo sapiens
cacgtgttttcacat

SEQ ID NO: 1979056 - DNA, 15 bp, Homo sapiens
acgtgttttcacatg

SEQ ID NO: 1979057 - DNA, 15 bp, Homo sapiens
cgtgttttcacatgc

SEQ ID NO: 1979058 - DNA, 15 bp, Homo sapiens
gtgttttcacatgcc

SEQ ID NO: 1979059 - DNA, 15 bp, Homo sapiens
tgttttcacatgccc

SEQ ID NO: 1979060 - DNA, 15 bp, Homo sapiens
gttttcacatgccca

SEQ ID NO: 1979061 - DNA, 15 bp, Homo sapiens
ttttcacatgcccac

SEQ ID NO: 1979062 - DNA, 15 bp, Homo sapiens
tttcacatgcccaca

SEQ ID NO: 1979063 - DNA, 15 bp, Homo sapiens
ttcacatgcccacat

SEQ ID NO: 1979064 - DNA, 15 bp, Homo sapiens
tcacatgcccacatg

SEQ ID NO: 1979065 - DNA, 15 bp, Homo sapiens
cacatgcccacatgc

SEQ ID NO: 1979066 - DNA, 15 bp, Homo sapiens
acatgcccacatgca

SEQ ID NO: 1979067 - DNA, 15 bp, Homo sapiens
catgcccacatgcac

SEQ ID NO: 1979068 - DNA, 15 bp, Homo sapiens
atgcccacatgcacc

SEQ ID NO: 1979069 - DNA, 15 bp, Homo sapiens
tgcccacatgcaccc

SEQ ID NO: 1979070 - DNA, 15 bp, Homo sapiens
gcccacatgcaccca

SEQ ID NO: 1979071 - DNA, 15 bp, Homo sapiens
cccacatgcacccag

SEQ ID NO: 1979072 - DNA, 15 bp, Homo sapiens
ccacatgcacccaga

SEQ ID NO: 1979073 - DNA, 15 bp, Homo sapiens
cacatgcacccagac

SEQ ID NO: 1979074 - DNA, 15 bp, Homo sapiens
acatgcacccagaca

SEQ ID NO: 1979075 - DNA, 15 bp, Homo sapiens
catgcacccagacac

SEQ ID NO: 1979076 - DNA, 15 bp, Homo sapiens
atgcacccagacacg

SEQ ID NO: 1979077 - DNA, 15 bp, Homo sapiens
tgcacccagacacgt

SEQ ID NO: 1979078 - DNA, 15 bp, Homo sapiens
gcacccagacacgtg

SEQ ID NO: 1979079 - DNA, 15 bp, Homo sapiens
cacccagacacgtgc

SEQ ID NO: 1979080 - DNA, 15 bp, Homo sapiens
acccagacacgtgcg

SEQ ID NO: 1979081 - DNA, 15 bp, Homo sapiens
cccagacacgtgcgc

SEQ ID NO: 1979082 - DNA, 15 bp, Homo sapiens
ccagacacgtgcgca

SEQ ID NO: 1979083 - DNA, 15 bp, Homo sapiens
cagacacgtgcgcac

SEQ ID NO: 1979084 - DNA, 15 bp, Homo sapiens
agacacgtgcgcacc

SEQ ID NO: 1979085 - DNA, 15 bp, Homo sapiens
gacacgtgcgcacca

SEQ ID NO: 1979086 - DNA, 15 bp, Homo sapiens
acacgtgcgcaccag

SEQ ID NO: 1979087 - DNA, 15 bp, Homo sapiens
cacgtgcgcaccagc

SEQ ID NO: 1979088 - DNA, 15 bp, Homo sapiens
acgtgcgcaccagcg

SEQ ID NO: 1979089 - DNA, 15 bp, Homo sapiens
cgtgcgcaccagcgc

SEQ ID NO: 1979090 - DNA, 15 bp, Homo sapiens
gtgcgcaccagcgcc

SEQ ID NO: 1979091 - DNA, 15 bp, Homo sapiens
tgcgcaccagcgccc

SEQ ID NO: 1979092 - DNA, 15 bp, Homo sapiens
gcgcaccagcgccca

SEQ ID NO: 1979093 - DNA, 15 bp, Homo sapiens
cgcaccagcgcccat

SEQ ID NO: 1979094 - DNA, 15 bp, Homo sapiens
gcaccagcgcccatg

SEQ ID NO: 1979095 - DNA, 15 bp, Homo sapiens
caccagcgcccatgg

SEQ ID NO: 1979096 - DNA, 15 bp, Homo sapiens
accagcgcccatggg

SEQ ID NO: 1979097 - DNA, 15 bp, Homo sapiens
ccagcgcccatgggc

SEQ ID NO: 1979098 - DNA, 15 bp, Homo sapiens
cagcgcccatgggcc

SEQ ID NO: 1979099 - DNA, 15 bp, Homo sapiens
agcgcccatgggccc

SEQ ID NO: 1979100 - DNA, 15 bp, Homo sapiens
gcgcccatgggccca

SEQ ID NO: 1979101 - DNA, 15 bp, Homo sapiens
cgcccatgggcccac

SEQ ID NO: 1979102 - DNA, 15 bp, Homo sapiens
gcccatgggcccaca

SEQ ID NO: 1979103 - DNA, 15 bp, Homo sapiens
cccatgggcccacac

SEQ ID NO: 1979104 - DNA, 15 bp, Homo sapiens
ccatgggcccacacg

SEQ ID NO: 1979105 - DNA, 15 bp, Homo sapiens
catgggcccacacgc

SEQ ID NO: 1979106 - DNA, 15 bp, Homo sapiens
atgggcccacacgcc

SEQ ID NO: 1979107 - DNA, 15 bp, Homo sapiens
tgggcccacacgccc

SEQ ID NO: 1979108 - DNA, 15 bp, Homo sapiens
gggcccacacgccct

SEQ ID NO: 1979109 - DNA, 15 bp, Homo sapiens
ggcccacacgccctc

SEQ ID NO: 1979110 - DNA, 15 bp, Homo sapiens
gcccacacgccctcc

SEQ ID NO: 1979111 - DNA, 15 bp, Homo sapiens
cccacacgccctcca

SEQ ID NO: 1979112 - DNA, 15 bp, Homo sapiens
ccacacgccctccac

SEQ ID NO: 1979113 - DNA, 15 bp, Homo sapiens
cacacgccctccaca

SEQ ID NO: 1979114 - DNA, 15 bp, Homo sapiens
acacgccctccacag

SEQ ID NO: 1979115 - DNA, 15 bp, Homo sapiens
cacgccctccacagg

SEQ ID NO: 1979116 - DNA, 15 bp, Homo sapiens
acgccctccacaggg

SEQ ID NO: 1979117 - DNA, 15 bp, Homo sapiens
cgccctccacaggga

SEQ ID NO: 1979118 - DNA, 15 bp, Homo sapiens
gccctccacagggat

SEQ ID NO: 1979119 - DNA, 15 bp, Homo sapiens
ccctccacagggatt

SEQ ID NO: 1979120 - DNA, 15 bp, Homo sapiens
cctccacagggattc

SEQ ID NO: 1979121 - DNA, 15 bp, Homo sapiens
ctccacagggattca

SEQ ID NO: 1979122 - DNA, 15 bp, Homo sapiens
tccacagggattcac

SEQ ID NO: 1979123 - DNA, 15 bp, Homo sapiens
ccacagggattcacg

SEQ ID NO: 1979124 - DNA, 15 bp, Homo sapiens
cacagggattcacgc

SEQ ID NO: 1979125 - DNA, 15 bp, Homo sapiens
acagggattcacgcc

SEQ ID NO: 1979126 - DNA, 15 bp, Homo sapiens
cagggattcacgcca

SEQ ID NO: 1979127 - DNA, 15 bp, Homo sapiens
agggattcacgccac

SEQ ID NO: 1979128 - DNA, 15 bp, Homo sapiens
gggattcacgccaca

SEQ ID NO: 1979129 - DNA, 15 bp, Homo sapiens
ggattcacgccacac

SEQ ID NO: 1979130 - DNA, 15 bp, Homo sapiens
gattcacgccacacc

SEQ ID NO: 1979131 - DNA, 15 bp, Homo sapiens
attcacgccacaccc

SEQ ID NO: 1979132 - DNA, 15 bp, Homo sapiens
ttcacgccacaccca

SEQ ID NO: 1979133 - DNA, 15 bp, Homo sapiens
tcacgccacacccac

SEQ ID NO: 1979134 - DNA, 15 bp, Homo sapiens
cacgccacacccaca

SEQ ID NO: 1979135 - DNA, 15 bp, Homo sapiens
acgccacacccacac

SEQ ID NO: 1979136 - DNA, 15 bp, Homo sapiens
cgccacacccacaca

SEQ ID NO: 1979137 - DNA, 15 bp, Homo sapiens
gccacacccacacac

SEQ ID NO: 1979138 - DNA, 15 bp, Homo sapiens
ccacacccacacacc

SEQ ID NO: 1979139 - DNA, 15 bp, Homo sapiens
cacacccacacaccc

SEQ ID NO: 1979140 - DNA, 15 bp, Homo sapiens
acacccacacaccct

SEQ ID NO: 1979141 - DNA, 15 bp, Homo sapiens
cacccacacaccctc

SEQ ID NO: 1979142 - DNA, 15 bp, Homo sapiens
acccacacaccctcc

SEQ ID NO: 1979143 - DNA, 15 bp, Homo sapiens
cccacacaccctccc

SEQ ID NO: 1979144 - DNA, 15 bp, Homo sapiens
ccacacaccctcccg

SEQ ID NO: 1979145 - DNA, 15 bp, Homo sapiens
cacacaccctcccga

SEQ ID NO: 1979146 - DNA, 15 bp, Homo sapiens
acacaccctcccgag

SEQ ID NO: 1979147 - DNA, 15 bp, Homo sapiens
cacaccctcccgagc

SEQ ID NO: 1979148 - DNA, 15 bp, Homo sapiens
acaccctcccgagct

SEQ ID NO: 1979149 - DNA, 15 bp, Homo sapiens
caccctcccgagctc

SEQ ID NO: 1979150 - DNA, 15 bp, Homo sapiens
accctcccgagctca

SEQ ID NO: 1979151 - DNA, 15 bp, Homo sapiens
ccctcccgagctcaa

SEQ ID NO: 1979152 - DNA, 15 bp, Homo sapiens
cctcccgagctcaat

SEQ ID NO: 1979153 - DNA, 15 bp, Homo sapiens
ctcccgagctcaatg

SEQ ID NO: 1979154 - DNA, 15 bp, Homo sapiens
tcccgagctcaatgg

SEQ ID NO: 1979155 - DNA, 15 bp, Homo sapiens
cccgagctcaatggc

SEQ ID NO: 1979156 - DNA, 15 bp, Homo sapiens
ccgagctcaatggct

SEQ ID NO: 1979157 - DNA, 15 bp, Homo sapiens
cgagctcaatggctc

SEQ ID NO: 1979158 - DNA, 15 bp, Homo sapiens
gagctcaatggctct

SEQ ID NO: 1979159 - DNA, 15 bp, Homo sapiens
agctcaatggctctg

SEQ ID NO: 1979160 - DNA, 15 bp, Homo sapiens
gctcaatggctctgc

SEQ ID NO: 1979161 - DNA, 15 bp, Homo sapiens
ctcaatggctctgcc

SEQ ID NO: 1979162 - DNA, 15 bp, Homo sapiens
tcaatggctctgccc

SEQ ID NO: 1979163 - DNA, 15 bp, Homo sapiens
caatggctctgccct

SEQ ID NO: 1979164 - DNA, 15 bp, Homo sapiens
aatggctctgccctg

SEQ ID NO: 1979165 - DNA, 15 bp, Homo sapiens
atggctctgccctgc

SEQ ID NO: 1979166 - DNA, 15 bp, Homo sapiens
tggctctgccctgcc

SEQ ID NO: 1979167 - DNA, 15 bp, Homo sapiens
ggctctgccctgccc

SEQ ID NO: 1979168 - DNA, 15 bp, Homo sapiens
gctctgccctgccct

SEQ ID NO: 1979169 - DNA, 15 bp, Homo sapiens
ctctgccctgccctg

SEQ ID NO: 1979170 - DNA, 15 bp, Homo sapiens
tctgccctgccctgc

SEQ ID NO: 1979171 - DNA, 15 bp, Homo sapiens
ctgccctgccctgca

SEQ ID NO: 1979172 - DNA, 15 bp, Homo sapiens
tgccctgccctgcag

SEQ ID NO: 1979173 - DNA, 15 bp, Homo sapiens
gccctgccctgcaga

SEQ ID NO: 1979174 - DNA, 15 bp, Homo sapiens
ccctgccctgcagaa

SEQ ID NO: 1979175 - DNA, 15 bp, Homo sapiens
cctgccctgcagaaa

SEQ ID NO: 1979176 - DNA, 15 bp, Homo sapiens
ctgccctgcagaaaa

SEQ ID NO: 1979177 - DNA, 15 bp, Homo sapiens
tgccctgcagaaaag

SEQ ID NO: 1979178 - DNA, 15 bp, Homo sapiens
gccctgcagaaaaga

SEQ ID NO: 1979179 - DNA, 15 bp, Homo sapiens
ccctgcagaaaagaa

SEQ ID NO: 1979180 - DNA, 15 bp, Homo sapiens
cctgcagaaaagaag

SEQ ID NO: 1979181 - DNA, 15 bp, Homo sapiens
ctgcagaaaagaagc

SEQ ID NO: 1979182 - DNA, 15 bp, Homo sapiens
tgcagaaaagaagct

SEQ ID NO: 1979183 - DNA, 15 bp, Homo sapiens
gcagaaaagaagctg

SEQ ID NO: 1979184 - DNA, 15 bp, Homo sapiens
cagaaaagaagctgg

SEQ ID NO: 1979185 - DNA, 15 bp, Homo sapiens
agaaaagaagctgga

SEQ ID NO: 1979186 - DNA, 15 bp, Homo sapiens
gaaaagaagctggag

SEQ ID NO: 1979187 - DNA, 15 bp, Homo sapiens
aaaagaagctggagg

SEQ ID NO: 1979188 - DNA, 15 bp, Homo sapiens
aaagaagctggaggt

SEQ ID NO: 1979189 - DNA, 15 bp, Homo sapiens
aagaagctggaggtg

SEQ ID NO: 1979190 - DNA, 15 bp, Homo sapiens
agaagctggaggtgt

SEQ ID NO: 1979191 - DNA, 15 bp, Homo sapiens
gaagctggaggtgta

SEQ ID NO: 1979192 - DNA, 15 bp, Homo sapiens
aagctggaggtgtac

SEQ ID NO: 1979193 - DNA, 15 bp, Homo sapiens
agctggaggtgtacc

SEQ ID NO: 1979194 - DNA, 15 bp, Homo sapiens
gctggaggtgtacca

SEQ ID NO: 1979195 - DNA, 15 bp, Homo sapiens
ctggaggtgtaccag

SEQ ID NO: 1979196 - DNA, 15 bp, Homo sapiens
tggaggtgtaccaga

SEQ ID NO: 1979197 - DNA, 15 bp, Homo sapiens
ggaggtgtaccagag

SEQ ID NO: 1979198 - DNA, 15 bp, Homo sapiens
gaggtgtaccagagc

SEQ ID NO: 1979199 - DNA, 15 bp, Homo sapiens
aggtgtaccagagca

SEQ ID NO: 1979200 - DNA, 15 bp, Homo sapiens
ggtgtaccagagcat

SEQ ID NO: 1979201 - DNA, 15 bp, Homo sapiens
gtgtaccagagcatc

SEQ ID NO: 1979202 - DNA, 15 bp, Homo sapiens
tgtaccagagcatcg

SEQ ID NO: 1979203 - DNA, 15 bp, Homo sapiens
gtaccagagcatcgc

SEQ ID NO: 1979204 - DNA, 15 bp, Homo sapiens
taccagagcatcgca

SEQ ID NO: 1979205 - DNA, 15 bp, Homo sapiens
accagagcatcgcag

SEQ ID NO: 1979206 - DNA, 15 bp, Homo sapiens
ccagagcatcgcaga

SEQ ID NO: 1979207 - DNA, 15 bp, Homo sapiens
cagagcatcgcagac

SEQ ID NO: 1979208 - DNA, 15 bp, Homo sapiens
agagcatcgcagacc

SEQ ID NO: 1979209 - DNA, 15 bp, Homo sapiens
gagcatcgcagacct

SEQ ID NO: 1979210 - DNA, 15 bp, Homo sapiens
agcatcgcagacctg

SEQ ID NO: 1979211 - DNA, 15 bp, Homo sapiens
gcatcgcagacctga

SEQ ID NO: 1979212 - DNA, 15 bp, Homo sapiens
catcgcagacctgat

SEQ ID NO: 1979213 - DNA, 15 bp, Homo sapiens
atcgcagacctgatg

SEQ ID NO: 1979214 - DNA, 15 bp, Homo sapiens
tcgcagacctgatgg

SEQ ID NO: 1979215 - DNA, 15 bp, Homo sapiens
cgcagacctgatggt

SEQ ID NO: 1979216 - DNA, 15 bp, Homo sapiens
gcagacctgatggtg

SEQ ID NO: 1979217 - DNA, 15 bp, Homo sapiens
cagacctgatggtgg

SEQ ID NO: 1979218 - DNA, 15 bp, Homo sapiens
agacctgatggtggg

SEQ ID NO: 1979219 - DNA, 15 bp, Homo sapiens
gacctgatggtgggc

SEQ ID NO: 1979220 - DNA, 15 bp, Homo sapiens
acctgatggtgggcg

SEQ ID NO: 1979221 - DNA, 15 bp, Homo sapiens
cctgatggtgggcgc

SEQ ID NO: 1979222 - DNA, 15 bp, Homo sapiens
ctgatggtgggcgca

SEQ ID NO: 1979223 - DNA, 15 bp, Homo sapiens
tgatggtgggcgcaa

SEQ ID NO: 1979224 - DNA, 15 bp, Homo sapiens
gatggtgggcgcaaa

SEQ ID NO: 1979225 - DNA, 15 bp, Homo sapiens
atggtgggcgcaaag

SEQ ID NO: 1979226 - DNA, 15 bp, Homo sapiens
tggtgggcgcaaagg

SEQ ID NO: 1979227 - DNA, 15 bp, Homo sapiens
ggtgggcgcaaagga

SEQ ID NO: 1979228 - DNA, 15 bp, Homo sapiens
gtgggcgcaaaggac

SEQ ID NO: 1979229 - DNA, 15 bp, Homo sapiens
tgggcgcaaaggacc

SEQ ID NO: 1979230 - DNA, 15 bp, Homo sapiens
gggcgcaaaggacca

SEQ ID NO: 1979231 - DNA, 15 bp, Homo sapiens
ggcgcaaaggaccag

SEQ ID NO: 1979232 - DNA, 15 bp, Homo sapiens
gcgcaaaggaccagg

SEQ ID NO: 1979233 - DNA, 15 bp, Homo sapiens
cgcaaaggaccaggc

SEQ ID NO: 1979234 - DNA, 15 bp, Homo sapiens
gcaaaggaccaggcg

SEQ ID NO: 1979235 - DNA, 15 bp, Homo sapiens
caaaggaccaggcgg

SEQ ID NO: 1979236 - DNA, 15 bp, Homo sapiens
aaaggaccaggcggt

SEQ ID NO: 1979237 - DNA, 15 bp, Homo sapiens
aaggaccaggcggtg

SEQ ID NO: 1979238 - DNA, 15 bp, Homo sapiens
aggaccaggcggtgt

SEQ ID NO: 1979239 - DNA, 15 bp, Homo sapiens
ggaccaggcggtgtt

SEQ ID NO: 1979240 - DNA, 15 bp, Homo sapiens
gaccaggcggtgttc

SEQ ID NO: 1979241 - DNA, 15 bp, Homo sapiens
accaggcggtgttca

SEQ ID NO: 1979242 - DNA, 15 bp, Homo sapiens
ccaggcggtgttcaa

SEQ ID NO: 1979243 - DNA, 15 bp, Homo sapiens
caggcggtgttcaaa

SEQ ID NO: 1979244 - DNA, 15 bp, Homo sapiens
aggcggtgttcaaat

SEQ ID NO: 1979245 - DNA, 15 bp, Homo sapiens
ggcggtgttcaaatg

SEQ ID NO: 1979246 - DNA, 15 bp, Homo sapiens
gcggtgttcaaatgt

SEQ ID NO: 1979247 - DNA, 15 bp, Homo sapiens
cggtgttcaaatgtg

SEQ ID NO: 1979248 - DNA, 15 bp, Homo sapiens
ggtgttcaaatgtga

SEQ ID NO: 1979249 - DNA, 15 bp, Homo sapiens
gtgttcaaatgtgag

SEQ ID NO: 1979250 - DNA, 15 bp, Homo sapiens
tgttcaaatgtgagg

SEQ ID NO: 1979251 - DNA, 15 bp, Homo sapiens
gttcaaatgtgaggt

SEQ ID NO: 1979252 - DNA, 15 bp, Homo sapiens
ttcaaatgtgaggtc

SEQ ID NO: 1979253 - DNA, 15 bp, Homo sapiens
tcaaatgtgaggtct

SEQ ID NO: 1979254 - DNA, 15 bp, Homo sapiens
caaatgtgaggtctc

SEQ ID NO: 1979255 - DNA, 15 bp, Homo sapiens
aaatgtgaggtctca

SEQ ID NO: 1979256 - DNA, 15 bp, Homo sapiens
aatgtgaggtctcag

SEQ ID NO: 1979257 - DNA, 15 bp, Homo sapiens
atgtgaggtctcaga

SEQ ID NO: 1979258 - DNA, 15 bp, Homo sapiens
tgtgaggtctcagat

SEQ ID NO: 1979259 - DNA, 15 bp, Homo sapiens
gtgaggtctcagatg

SEQ ID NO: 1979260 - DNA, 15 bp, Homo sapiens
tgaggtctcagatga

SEQ ID NO: 1979261 - DNA, 15 bp, Homo sapiens
gaggtctcagatgag

SEQ ID NO: 1979262 - DNA, 15 bp, Homo sapiens
aggtctcagatgaga

SEQ ID NO: 1979263 - DNA, 15 bp, Homo sapiens
ggtctcagatgagaa

SEQ ID NO: 1979264 - DNA, 15 bp, Homo sapiens
gtctcagatgagaat

SEQ ID NO: 1979265 - DNA, 15 bp, Homo sapiens
tctcagatgagaatg

SEQ ID NO: 1979266 - DNA, 15 bp, Homo sapiens
ctcagatgagaatgt

SEQ ID NO: 1979267 - DNA, 15 bp, Homo sapiens
tcagatgagaatgtt

SEQ ID NO: 1979268 - DNA, 15 bp, Homo sapiens
cagatgagaatgttc

SEQ ID NO: 1979269 - DNA, 15 bp, Homo sapiens
agatgagaatgttcg

SEQ ID NO: 1979270 - DNA, 15 bp, Homo sapiens
gatgagaatgttcgg

SEQ ID NO: 1979271 - DNA, 15 bp, Homo sapiens
atgagaatgttcggg

SEQ ID NO: 1979272 - DNA, 15 bp, Homo sapiens
tgagaatgttcgggg

SEQ ID NO: 1979273 - DNA, 15 bp, Homo sapiens
gagaatgttcggggt

SEQ ID NO: 1979274 - DNA, 15 bp, Homo sapiens
agaatgttcggggtg

SEQ ID NO: 1979275 - DNA, 15 bp, Homo sapiens
gaatgttcggggtgt

SEQ ID NO: 1979276 - DNA, 15 bp, Homo sapiens
aatgttcggggtgtg

SEQ ID NO: 1979277 - DNA, 15 bp, Homo sapiens
atgttcggggtgtgt

SEQ ID NO: 1979278 - DNA, 15 bp, Homo sapiens
tgttcggggtgtgtg

SEQ ID NO: 1979279 - DNA, 15 bp, Homo sapiens
gttcggggtgtgtgg

SEQ ID NO: 1979280 - DNA, 15 bp, Homo sapiens
ttcggggtgtgtggc

SEQ ID NO: 1979281 - DNA, 15 bp, Homo sapiens
tcggggtgtgtggct

SEQ ID NO: 1979282 - DNA, 15 bp, Homo sapiens
cggggtgtgtggctg

SEQ ID NO: 1979283 - DNA, 15 bp, Homo sapiens
ggggtgtgtggctga

SEQ ID NO: 1979284 - DNA, 15 bp, Homo sapiens
gggtgtgtggctgaa

SEQ ID NO: 1979285 - DNA, 15 bp, Homo sapiens
ggtgtgtggctgaag

SEQ ID NO: 1979286 - DNA, 15 bp, Homo sapiens
gtgtgtggctgaaga

SEQ ID NO: 1979287 - DNA, 15 bp, Homo sapiens
tgtgtggctgaagaa

SEQ ID NO: 1979288 - DNA, 15 bp, Homo sapiens
gtgtggctgaagaat

SEQ ID NO: 1979289 - DNA, 15 bp, Homo sapiens
tgtggctgaagaatg

SEQ ID NO: 1979290 - DNA, 15 bp, Homo sapiens
gtggctgaagaatgg

SEQ ID NO: 1979291 - DNA, 15 bp, Homo sapiens
tggctgaagaatggg

SEQ ID NO: 1979292 - DNA, 15 bp, Homo sapiens
ggctgaagaatggga

SEQ ID NO: 1979293 - DNA, 15 bp, Homo sapiens
gctgaagaatgggaa

SEQ ID NO: 1979294 - DNA, 15 bp, Homo sapiens
ctgaagaatgggaag

SEQ ID NO: 1979295 - DNA, 15 bp, Homo sapiens
tgaagaatgggaagg

SEQ ID NO: 1979296 - DNA, 15 bp, Homo sapiens
gaagaatgggaagga

SEQ ID NO: 1979297 - DNA, 15 bp, Homo sapiens
aagaatgggaaggag

SEQ ID NO: 1979298 - DNA, 15 bp, Homo sapiens
agaatgggaaggagc

SEQ ID NO: 1979299 - DNA, 15 bp, Homo sapiens
gaatgggaaggagct

SEQ ID NO: 1979300 - DNA, 15 bp, Homo sapiens
aatgggaaggagctg

SEQ ID NO: 1979301 - DNA, 15 bp, Homo sapiens
atgggaaggagctgg

SEQ ID NO: 1979302 - DNA, 15 bp, Homo sapiens
tgggaaggagctggt

SEQ ID NO: 1979303 - DNA, 15 bp, Homo sapiens
gggaaggagctggtg

SEQ ID NO: 1979304 - DNA, 15 bp, Homo sapiens
ggaaggagctggtgc

SEQ ID NO: 1979305 - DNA, 15 bp, Homo sapiens
gaaggagctggtgcc

SEQ ID NO: 1979306 - DNA, 15 bp, Homo sapiens
aaggagctggtgccc

SEQ ID NO: 1979307 - DNA, 15 bp, Homo sapiens
aggagctggtgcccg

SEQ ID NO: 1979308 - DNA, 15 bp, Homo sapiens
ggagctggtgcccga

SEQ ID NO: 1979309 - DNA, 15 bp, Homo sapiens
gagctggtgcccgac

SEQ ID NO: 1979310 - DNA, 15 bp, Homo sapiens
agctggtgcccgaca

SEQ ID NO: 1979311 - DNA, 15 bp, Homo sapiens
gctggtgcccgacag

SEQ ID NO: 1979312 - DNA, 15 bp, Homo sapiens
ctggtgcccgacagc

SEQ ID NO: 1979313 - DNA, 15 bp, Homo sapiens
tggtgcccgacagcc

SEQ ID NO: 1979314 - DNA, 15 bp, Homo sapiens
ggtgcccgacagccg

SEQ ID NO: 1979315 - DNA, 15 bp, Homo sapiens
gtgcccgacagccgc

SEQ ID NO: 1979316 - DNA, 15 bp, Homo sapiens
tgcccgacagccgca

SEQ ID NO: 1979317 - DNA, 15 bp, Homo sapiens
gcccgacagccgcat

SEQ ID NO: 1979318 - DNA, 15 bp, Homo sapiens
cccgacagccgcata

SEQ ID NO: 1979319 - DNA, 15 bp, Homo sapiens
ccgacagccgcataa

SEQ ID NO: 1979320 - DNA, 15 bp, Homo sapiens
cgacagccgcataaa

SEQ ID NO: 1979321 - DNA, 15 bp, Homo sapiens
gacagccgcataaag

SEQ ID NO: 1979322 - DNA, 15 bp, Homo sapiens
acagccgcataaagg

SEQ ID NO: 1979323 - DNA, 15 bp, Homo sapiens
cagccgcataaaggt

SEQ ID NO: 1979324 - DNA, 15 bp, Homo sapiens
agccgcataaaggtg

SEQ ID NO: 1979325 - DNA, 15 bp, Homo sapiens
gccgcataaaggtgt

SEQ ID NO: 1979326 - DNA, 15 bp, Homo sapiens
ccgcataaaggtgtc

SEQ ID NO: 1979327 - DNA, 15 bp, Homo sapiens
cgcataaaggtgtcc

SEQ ID NO: 1979328 - DNA, 15 bp, Homo sapiens
gcataaaggtgtccc

SEQ ID NO: 1979329 - DNA, 15 bp, Homo sapiens
cataaaggtgtccca

SEQ ID NO: 1979330 - DNA, 15 bp, Homo sapiens
ataaaggtgtcccac

SEQ ID NO: 1979331 - DNA, 15 bp, Homo sapiens
taaaggtgtcccaca

SEQ ID NO: 1979332 - DNA, 15 bp, Homo sapiens
aaaggtgtcccacat

SEQ ID NO: 1979333 - DNA, 15 bp, Homo sapiens
aaggtgtcccacatc

SEQ ID NO: 1979334 - DNA, 15 bp, Homo sapiens
aggtgtcccacatcg

SEQ ID NO: 1979335 - DNA, 15 bp, Homo sapiens
ggtgtcccacatcgg

SEQ ID NO: 1979336 - DNA, 15 bp, Homo sapiens
gtgtcccacatcggg

SEQ ID NO: 1979337 - DNA, 15 bp, Homo sapiens
tgtcccacatcgggc

SEQ ID NO: 1979338 - DNA, 15 bp, Homo sapiens
gtcccacatcgggcg

SEQ ID NO: 1979339 - DNA, 15 bp, Homo sapiens
tcccacatcgggcgg

SEQ ID NO: 1979340 - DNA, 15 bp, Homo sapiens
cccacatcgggcggt

SEQ ID NO: 1979341 - DNA, 15 bp, Homo sapiens
ccacatcgggcggtg

SEQ ID NO: 1979342 - DNA, 15 bp, Homo sapiens
cacatcgggcggtga

SEQ ID NO: 1979343 - DNA, 15 bp, Homo sapiens
acatcgggcggtgag

SEQ ID NO: 1979344 - DNA, 15 bp, Homo sapiens
catcgggcggtgagt

SEQ ID NO: 1979345 - DNA, 15 bp, Homo sapiens
atcgggcggtgagtg

SEQ ID NO: 1979346 - DNA, 15 bp, Homo sapiens
tcgggcggtgagtgt

SEQ ID NO: 1979347 - DNA, 15 bp, Homo sapiens
cgggcggtgagtgtg

SEQ ID NO: 1979348 - DNA, 15 bp, Homo sapiens
gggcggtgagtgtgc

SEQ ID NO: 1979349 - DNA, 15 bp, Homo sapiens
ggcggtgagtgtgca

SEQ ID NO: 1979350 - DNA, 15 bp, Homo sapiens
gcggtgagtgtgcag

SEQ ID NO: 1979351 - DNA, 15 bp, Homo sapiens
cggtgagtgtgcagg

SEQ ID NO: 1979352 - DNA, 15 bp, Homo sapiens
ggtgagtgtgcaggg

SEQ ID NO: 1979353 - DNA, 15 bp, Homo sapiens
gtgagtgtgcagggc

SEQ ID NO: 1979354 - DNA, 15 bp, Homo sapiens
tgagtgtgcagggca

SEQ ID NO: 1979355 - DNA, 15 bp, Homo sapiens
gagtgtgcagggcag

SEQ ID NO: 1979356 - DNA, 15 bp, Homo sapiens
agtgtgcagggcagg

SEQ ID NO: 1979357 - DNA, 15 bp, Homo sapiens
tgtgcagggcaggtg

SEQ ID NO: 1979358 - DNA, 15 bp, Homo sapiens
gtgcagggcaggtgg

SEQ ID NO: 1979359 - DNA, 15 bp, Homo sapiens
tgcagggcaggtgga

SEQ ID NO: 1979360 - DNA, 15 bp, Homo sapiens
gcagggcaggtggat

SEQ ID NO: 1979361 - DNA, 15 bp, Homo sapiens
cagggcaggtggatg

SEQ ID NO: 1979362 - DNA, 15 bp, Homo sapiens
agggcaggtggatgg

SEQ ID NO: 1979363 - DNA, 15 bp, Homo sapiens
gggcaggtggatggg

SEQ ID NO: 1979364 - DNA, 15 bp, Homo sapiens
ggcaggtggatggga

SEQ ID NO: 1979365 - DNA, 15 bp, Homo sapiens
gcaggtggatgggac

SEQ ID NO: 1979366 - DNA, 15 bp, Homo sapiens
caggtggatgggaca

SEQ ID NO: 1979367 - DNA, 15 bp, Homo sapiens
aggtggatgggacag

SEQ ID NO: 1979368 - DNA, 15 bp, Homo sapiens
ggtggatgggacagg

SEQ ID NO: 1979369 - DNA, 15 bp, Homo sapiens
gtggatgggacaggt

SEQ ID NO: 1979370 - DNA, 15 bp, Homo sapiens
tggatgggacaggtg

SEQ ID NO: 1979371 - DNA, 15 bp, Homo sapiens
ggatgggacaggtgg

SEQ ID NO: 1979372 - DNA, 15 bp, Homo sapiens
gatgggacaggtgga

SEQ ID NO: 1979373 - DNA, 15 bp, Homo sapiens
atgggacaggtggag

SEQ ID NO: 1979374 - DNA, 15 bp, Homo sapiens
tgggacaggtggaga

SEQ ID NO: 1979375 - DNA, 15 bp, Homo sapiens
gggacaggtggagac

SEQ ID NO: 1979376 - DNA, 15 bp, Homo sapiens
ggacaggtggagact

SEQ ID NO: 1979377 - DNA, 15 bp, Homo sapiens
gacaggtggagactg

SEQ ID NO: 1979378 - DNA, 15 bp, Homo sapiens
acaggtggagactga

SEQ ID NO: 1979379 - DNA, 15 bp, Homo sapiens
caggtggagactgag

SEQ ID NO: 1979380 - DNA, 15 bp, Homo sapiens
aggtggagactgaga

SEQ ID NO: 1979381 - DNA, 15 bp, Homo sapiens
ggtggagactgagat

SEQ ID NO: 1979382 - DNA, 15 bp, Homo sapiens
gtggagactgagatg

SEQ ID NO: 1979383 - DNA, 15 bp, Homo sapiens
tggagactgagatgg

SEQ ID NO: 1979384 - DNA, 15 bp, Homo sapiens
ggagactgagatgga

SEQ ID NO: 1979385 - DNA, 15 bp, Homo sapiens
gagactgagatggag

SEQ ID NO: 1979386 - DNA, 15 bp, Homo sapiens
agactgagatggaga

SEQ ID NO: 1979387 - DNA, 15 bp, Homo sapiens
gactgagatggagac

SEQ ID NO: 1979388 - DNA, 15 bp, Homo sapiens
actgagatggagaca

SEQ ID NO: 1979389 - DNA, 15 bp, Homo sapiens
ctgagatggagacag

SEQ ID NO: 1979390 - DNA, 15 bp, Homo sapiens
tgagatggagacaga

SEQ ID NO: 1979391 - DNA, 15 bp, Homo sapiens
gagatggagacagag

SEQ ID NO: 1979392 - DNA, 15 bp, Homo sapiens
agatggagacagaga

SEQ ID NO: 1979393 - DNA, 15 bp, Homo sapiens
gatggagacagagag

SEQ ID NO: 1979394 - DNA, 15 bp, Homo sapiens
atggagacagagaga

SEQ ID NO: 1979395 - DNA, 15 bp, Homo sapiens
tggagacagagagag

SEQ ID NO: 1979396 - DNA, 15 bp, Homo sapiens
ggagacagagagaga

SEQ ID NO: 1979397 - DNA, 15 bp, Homo sapiens
gagacagagagagac

SEQ ID NO: 1979398 - DNA, 15 bp, Homo sapiens
agacagagagagaca

SEQ ID NO: 1979399 - DNA, 15 bp, Homo sapiens
gacagagagagacac

SEQ ID NO: 1979400 - DNA, 15 bp, Homo sapiens
acagagagagacaca

SEQ ID NO: 1979401 - DNA, 15 bp, Homo sapiens
cagagagagacacag

SEQ ID NO: 1979402 - DNA, 15 bp, Homo sapiens
agagagagacacagg

SEQ ID NO: 1979403 - DNA, 15 bp, Homo sapiens
gagagagacacaggg

SEQ ID NO: 1979404 - DNA, 15 bp, Homo sapiens
agagagacacaggga

SEQ ID NO: 1979405 - DNA, 15 bp, Homo sapiens
gagagacacagggag

SEQ ID NO: 1979406 - DNA, 15 bp, Homo sapiens
agagacacagggaga

SEQ ID NO: 1979407 - DNA, 15 bp, Homo sapiens
gagacacagggagaa

SEQ ID NO: 1979408 - DNA, 15 bp, Homo sapiens
agacacagggagaaa

SEQ ID NO: 1979409 - DNA, 15 bp, Homo sapiens
gacacagggagaaac

SEQ ID NO: 1979410 - DNA, 15 bp, Homo sapiens
acacagggagaaaca

SEQ ID NO: 1979411 - DNA, 15 bp, Homo sapiens
cacagggagaaacag

SEQ ID NO: 1979412 - DNA, 15 bp, Homo sapiens
acagggagaaacaga

SEQ ID NO: 1979413 - DNA, 15 bp, Homo sapiens
cagggagaaacagag

SEQ ID NO: 1979414 - DNA, 15 bp, Homo sapiens
agggagaaacagaga

SEQ ID NO: 1979415 - DNA, 15 bp, Homo sapiens
gggagaaacagagag

SEQ ID NO: 1979416 - DNA, 15 bp, Homo sapiens
ggagaaacagagaga

SEQ ID NO: 1979417 - DNA, 15 bp, Homo sapiens
gagaaacagagagag

SEQ ID NO: 1979418 - DNA, 15 bp, Homo sapiens
agaaacagagagaga

SEQ ID NO: 1979419 - DNA, 15 bp, Homo sapiens
gaaacagagagagag

SEQ ID NO: 1979420 - DNA, 15 bp, Homo sapiens
aaacagagagagaga

SEQ ID NO: 1979421 - DNA, 15 bp, Homo sapiens
aacagagagagagag

SEQ ID NO: 1979422 - DNA, 15 bp, Homo sapiens
acagagagagagaga

SEQ ID NO: 1979423 - DNA, 15 bp, Homo sapiens
cagagagagagagat

SEQ ID NO: 1979424 - DNA, 15 bp, Homo sapiens
agagagagagagata

SEQ ID NO: 1979425 - DNA, 15 bp, Homo sapiens
gagagagagagataa

SEQ ID NO: 1979426 - DNA, 15 bp, Homo sapiens
agagagagagataaa

SEQ ID NO: 1979427 - DNA, 15 bp, Homo sapiens
gagagagagataaag

SEQ ID NO: 1979428 - DNA, 15 bp, Homo sapiens
agagagagataaaga

SEQ ID NO: 1979429 - DNA, 15 bp, Homo sapiens
gagagagataaagac

SEQ ID NO: 1979430 - DNA, 15 bp, Homo sapiens
agagagataaagaca

SEQ ID NO: 1979431 - DNA, 15 bp, Homo sapiens
gagagataaagacag

SEQ ID NO: 1979432 - DNA, 15 bp, Homo sapiens
agagataaagacagg

SEQ ID NO: 1979433 - DNA, 15 bp, Homo sapiens
gagataaagacaggt

SEQ ID NO: 1979434 - DNA, 15 bp, Homo sapiens
agataaagacaggtg

SEQ ID NO: 1979435 - DNA, 15 bp, Homo sapiens
gataaagacaggtgg

SEQ ID NO: 1979436 - DNA, 15 bp, Homo sapiens
ataaagacaggtgga

SEQ ID NO: 1979437 - DNA, 15 bp, Homo sapiens
taaagacaggtggac

SEQ ID NO: 1979438 - DNA, 15 bp, Homo sapiens
aaagacaggtggaca

SEQ ID NO: 1979439 - DNA, 15 bp, Homo sapiens
aagacaggtggacag

SEQ ID NO: 1979440 - DNA, 15 bp, Homo sapiens
agacaggtggacaga

SEQ ID NO: 1979441 - DNA, 15 bp, Homo sapiens
gacaggtggacagag

SEQ ID NO: 1979442 - DNA, 15 bp, Homo sapiens
acaggtggacagaga

SEQ ID NO: 1979443 - DNA, 15 bp, Homo sapiens
caggtggacagagag

SEQ ID NO: 1979444 - DNA, 15 bp, Homo sapiens
aggtggacagagagg

SEQ ID NO: 1979445 - DNA, 15 bp, Homo sapiens
ggtggacagagaggc

SEQ ID NO: 1979446 - DNA, 15 bp, Homo sapiens
gtggacagagaggca

SEQ ID NO: 1979447 - DNA, 15 bp, Homo sapiens
tggacagagaggcag

SEQ ID NO: 1979448 - DNA, 15 bp, Homo sapiens
ggacagagaggcaga

SEQ ID NO: 1979449 - DNA, 15 bp, Homo sapiens
gacagagaggcagat

SEQ ID NO: 1979450 - DNA, 15 bp, Homo sapiens
acagagaggcagatg

SEQ ID NO: 1979451 - DNA, 15 bp, Homo sapiens
cagagaggcagatgc

SEQ ID NO: 1979452 - DNA, 15 bp, Homo sapiens
agagaggcagatgca

SEQ ID NO: 1979453 - DNA, 15 bp, Homo sapiens
gagaggcagatgcac

SEQ ID NO: 1979454 - DNA, 15 bp, Homo sapiens
agaggcagatgcaca

SEQ ID NO: 1979455 - DNA, 15 bp, Homo sapiens
gaggcagatgcacag

SEQ ID NO: 1979456 - DNA, 15 bp, Homo sapiens
aggcagatgcacaga

SEQ ID NO: 1979457 - DNA, 15 bp, Homo sapiens
ggcagatgcacagag

SEQ ID NO: 1979458 - DNA, 15 bp, Homo sapiens
gcagatgcacagaga

SEQ ID NO: 1979459 - DNA, 15 bp, Homo sapiens
cagatgcacagagac

SEQ ID NO: 1979460 - DNA, 15 bp, Homo sapiens
agatgcacagagaca

SEQ ID NO: 1979461 - DNA, 15 bp, Homo sapiens
gatgcacagagacag

SEQ ID NO: 1979462 - DNA, 15 bp, Homo sapiens
atgcacagagacagg

SEQ ID NO: 1979463 - DNA, 15 bp, Homo sapiens
tgcacagagacagga

SEQ ID NO: 1979464 - DNA, 15 bp, Homo sapiens
gcacagagacaggac

SEQ ID NO: 1979465 - DNA, 15 bp, Homo sapiens
cacagagacaggaca

SEQ ID NO: 1979466 - DNA, 15 bp, Homo sapiens
acagagacaggacag

SEQ ID NO: 1979467 - DNA, 15 bp, Homo sapiens
cagagacaggacaga

SEQ ID NO: 1979468 - DNA, 15 bp, Homo sapiens
agagacaggacagag

SEQ ID NO: 1979469 - DNA, 15 bp, Homo sapiens
gagacaggacagaga

SEQ ID NO: 1979470 - DNA, 15 bp, Homo sapiens
agacaggacagagac

SEQ ID NO: 1979471 - DNA, 15 bp, Homo sapiens
gacaggacagagact

SEQ ID NO: 1979472 - DNA, 15 bp, Homo sapiens
acaggacagagactg

SEQ ID NO: 1979473 - DNA, 15 bp, Homo sapiens
caggacagagactga

SEQ ID NO: 1979474 - DNA, 15 bp, Homo sapiens
aggacagagactgag

SEQ ID NO: 1979475 - DNA, 15 bp, Homo sapiens
ggacagagactgaga

SEQ ID NO: 1979476 - DNA, 15 bp, Homo sapiens
acagagactgagaca

SEQ ID NO: 1979477 - DNA, 15 bp, Homo sapiens
cagagactgagacag

SEQ ID NO: 1979478 - DNA, 15 bp, Homo sapiens
agagactgagacaga

SEQ ID NO: 1979479 - DNA, 15 bp, Homo sapiens
gagactgagacagag

SEQ ID NO: 1979480 - DNA, 15 bp, Homo sapiens
agactgagacagaga

SEQ ID NO: 1979481 - DNA, 15 bp, Homo sapiens
gactgagacagagac

SEQ ID NO: 1979482 - DNA, 15 bp, Homo sapiens
actgagacagagacc

SEQ ID NO: 1979483 - DNA, 15 bp, Homo sapiens
ctgagacagagaccc

SEQ ID NO: 1979484 - DNA, 15 bp, Homo sapiens
tgagacagagaccca

SEQ ID NO: 1979485 - DNA, 15 bp, Homo sapiens
gagacagagacccac

SEQ ID NO: 1979486 - DNA, 15 bp, Homo sapiens
agacagagacccaca

SEQ ID NO: 1979487 - DNA, 15 bp, Homo sapiens
gacagagacccacag

SEQ ID NO: 1979488 - DNA, 15 bp, Homo sapiens
acagagacccacaga

SEQ ID NO: 1979489 - DNA, 15 bp, Homo sapiens
cagagacccacagag

SEQ ID NO: 1979490 - DNA, 15 bp, Homo sapiens
agagacccacagaga

SEQ ID NO: 1979491 - DNA, 15 bp, Homo sapiens
gagacccacagagag

SEQ ID NO: 1979492 - DNA, 15 bp, Homo sapiens
agacccacagagagg

SEQ ID NO: 1979493 - DNA, 15 bp, Homo sapiens
gacccacagagaggg

SEQ ID NO: 1979494 - DNA, 15 bp, Homo sapiens
acccacagagaggga

SEQ ID NO: 1979495 - DNA, 15 bp, Homo sapiens
cccacagagagggag

SEQ ID NO: 1979496 - DNA, 15 bp, Homo sapiens
ccacagagagggaga

SEQ ID NO: 1979497 - DNA, 15 bp, Homo sapiens
cacagagagggagaa

SEQ ID NO: 1979498 - DNA, 15 bp, Homo sapiens
acagagagggagaaa

SEQ ID NO: 1979499 - DNA, 15 bp, Homo sapiens
cagagagggagaaac

SEQ ID NO: 1979500 - DNA, 15 bp, Homo sapiens
agagagggagaaaca

SEQ ID NO: 1979501 - DNA, 15 bp, Homo sapiens
gagagggagaaacag

SEQ ID NO: 1979502 - DNA, 15 bp, Homo sapiens
agagggagaaacaga

SEQ ID NO: 1979503 - DNA, 15 bp, Homo sapiens
gagggagaaacagac

SEQ ID NO: 1979504 - DNA, 15 bp, Homo sapiens
agggagaaacagaca

SEQ ID NO: 1979505 - DNA, 15 bp, Homo sapiens
gggagaaacagacag

SEQ ID NO: 1979506 - DNA, 15 bp, Homo sapiens
ggagaaacagacaga

SEQ ID NO: 1979507 - DNA, 15 bp, Homo sapiens
gagaaacagacagac

SEQ ID NO: 1979508 - DNA, 15 bp, Homo sapiens
agaaacagacagacc

SEQ ID NO: 1979509 - DNA, 15 bp, Homo sapiens
gaaacagacagaccc

SEQ ID NO: 1979510 - DNA, 15 bp, Homo sapiens
aaacagacagaccca

SEQ ID NO: 1979511 - DNA, 15 bp, Homo sapiens
aacagacagacccaa

SEQ ID NO: 1979512 - DNA, 15 bp, Homo sapiens
acagacagacccaaa

SEQ ID NO: 1979513 - DNA, 15 bp, Homo sapiens
cagacagacccaaaa

SEQ ID NO: 1979514 - DNA, 15 bp, Homo sapiens
agacagacccaaaaa

SEQ ID NO: 1979515 - DNA, 15 bp, Homo sapiens
gacagacccaaaaag

SEQ ID NO: 1979516 - DNA, 15 bp, Homo sapiens
acagacccaaaaaga

SEQ ID NO: 1979517 - DNA, 15 bp, Homo sapiens
cagacccaaaaagac

SEQ ID NO: 1979518 - DNA, 15 bp, Homo sapiens
agacccaaaaagaca

SEQ ID NO: 1979519 - DNA, 15 bp, Homo sapiens
gacccaaaaagacaa

SEQ ID NO: 1979520 - DNA, 15 bp, Homo sapiens
acccaaaaagacaaa

SEQ ID NO: 1979521 - DNA, 15 bp, Homo sapiens
cccaaaaagacaaag

SEQ ID NO: 1979522 - DNA, 15 bp, Homo sapiens
ccaaaaagacaaaga

SEQ ID NO: 1979523 - DNA, 15 bp, Homo sapiens
caaaaagacaaagag

SEQ ID NO: 1979524 - DNA, 15 bp, Homo sapiens
aaaaagacaaagaga

SEQ ID NO: 1979525 - DNA, 15 bp, Homo sapiens
aaaagacaaagagac

SEQ ID NO: 1979526 - DNA, 15 bp, Homo sapiens
aaagacaaagagaca

SEQ ID NO: 1979527 - DNA, 15 bp, Homo sapiens
aagacaaagagacag

SEQ ID NO: 1979528 - DNA, 15 bp, Homo sapiens
agacaaagagacaga

SEQ ID NO: 1979529 - DNA, 15 bp, Homo sapiens
gacaaagagacagaa

SEQ ID NO: 1979530 - DNA, 15 bp, Homo sapiens
acaaagagacagaaa

SEQ ID NO: 1979531 - DNA, 15 bp, Homo sapiens
caaagagacagaaag

SEQ ID NO: 1979532 - DNA, 15 bp, Homo sapiens
aaagagacagaaaga

SEQ ID NO: 1979533 - DNA, 15 bp, Homo sapiens
aagagacagaaagac

SEQ ID NO: 1979534 - DNA, 15 bp, Homo sapiens
agagacagaaagaca

SEQ ID NO: 1979535 - DNA, 15 bp, Homo sapiens
gagacagaaagacag

SEQ ID NO: 1979536 - DNA, 15 bp, Homo sapiens
agacagaaagacaga

SEQ ID NO: 1979537 - DNA, 15 bp, Homo sapiens
gacagaaagacagaa

SEQ ID NO: 1979538 - DNA, 15 bp, Homo sapiens
acagaaagacagaaa

SEQ ID NO: 1979539 - DNA, 15 bp, Homo sapiens
cagaaagacagaaat

SEQ ID NO: 1979540 - DNA, 15 bp, Homo sapiens
agaaagacagaaata

SEQ ID NO: 1979541 - DNA, 15 bp, Homo sapiens
gaaagacagaaatag

SEQ ID NO: 1979542 - DNA, 15 bp, Homo sapiens
aaagacagaaatagt

SEQ ID NO: 1979543 - DNA, 15 bp, Homo sapiens
aagacagaaatagtt

SEQ ID NO: 1979544 - DNA, 15 bp, Homo sapiens
agacagaaatagttc

SEQ ID NO: 1979545 - DNA, 15 bp, Homo sapiens
gacagaaatagttct

SEQ ID NO: 1979546 - DNA, 15 bp, Homo sapiens
acagaaatagttcta

SEQ ID NO: 1979547 - DNA, 15 bp, Homo sapiens
cagaaatagttctat

SEQ ID NO: 1979548 - DNA, 15 bp, Homo sapiens
agaaatagttctata

SEQ ID NO: 1979549 - DNA, 15 bp, Homo sapiens
gaaatagttctatag

SEQ ID NO: 1979550 - DNA, 15 bp, Homo sapiens
aaatagttctataga

SEQ ID NO: 1979551 - DNA, 15 bp, Homo sapiens
aatagttctatagag

SEQ ID NO: 1979552 - DNA, 15 bp, Homo sapiens
atagttctatagaga

SEQ ID NO: 1979553 - DNA, 15 bp, Homo sapiens
tagttctatagagac

SEQ ID NO: 1979554 - DNA, 15 bp, Homo sapiens
agttctatagagaca

SEQ ID NO: 1979555 - DNA, 15 bp, Homo sapiens
gttctatagagacag

SEQ ID NO: 1979556 - DNA, 15 bp, Homo sapiens
ttctatagagacaga

SEQ ID NO: 1979557 - DNA, 15 bp, Homo sapiens
tctatagagacagaa

SEQ ID NO: 1979558 - DNA, 15 bp, Homo sapiens
ctatagagacagaaa

SEQ ID NO: 1979559 - DNA, 15 bp, Homo sapiens
tatagagacagaaag

SEQ ID NO: 1979560 - DNA, 15 bp, Homo sapiens
atagagacagaaaga

SEQ ID NO: 1979561 - DNA, 15 bp, Homo sapiens
tagagacagaaagat

SEQ ID NO: 1979562 - DNA, 15 bp, Homo sapiens
agagacagaaagata

SEQ ID NO: 1979563 - DNA, 15 bp, Homo sapiens
gagacagaaagatat

SEQ ID NO: 1979564 - DNA, 15 bp, Homo sapiens
agacagaaagatatg

SEQ ID NO: 1979565 - DNA, 15 bp, Homo sapiens
gacagaaagatatgc

SEQ ID NO: 1979566 - DNA, 15 bp, Homo sapiens
acagaaagatatgca

SEQ ID NO: 1979567 - DNA, 15 bp, Homo sapiens
cagaaagatatgcac

SEQ ID NO: 1979568 - DNA, 15 bp, Homo sapiens
agaaagatatgcaca

SEQ ID NO: 1979569 - DNA, 15 bp, Homo sapiens
gaaagatatgcacag

SEQ ID NO: 1979570 - DNA, 15 bp, Homo sapiens
aaagatatgcacagg

SEQ ID NO: 1979571 - DNA, 15 bp, Homo sapiens
aagatatgcacaggg

SEQ ID NO: 1979572 - DNA, 15 bp, Homo sapiens
agatatgcacaggga

SEQ ID NO: 1979573 - DNA, 15 bp, Homo sapiens
gatatgcacagggag

SEQ ID NO: 1979574 - DNA, 15 bp, Homo sapiens
atatgcacagggagg

SEQ ID NO: 1979575 - DNA, 15 bp, Homo sapiens
tatgcacagggaggc

SEQ ID NO: 1979576 - DNA, 15 bp, Homo sapiens
atgcacagggaggca

SEQ ID NO: 1979577 - DNA, 15 bp, Homo sapiens
tgcacagggaggcac

SEQ ID NO: 1979578 - DNA, 15 bp, Homo sapiens
gcacagggaggcaca

SEQ ID NO: 1979579 - DNA, 15 bp, Homo sapiens
cacagggaggcacac

SEQ ID NO: 1979580 - DNA, 15 bp, Homo sapiens
acagggaggcacaca

SEQ ID NO: 1979581 - DNA, 15 bp, Homo sapiens
cagggaggcacacac

SEQ ID NO: 1979582 - DNA, 15 bp, Homo sapiens
agggaggcacacaca

SEQ ID NO: 1979583 - DNA, 15 bp, Homo sapiens
gggaggcacacacat

SEQ ID NO: 1979584 - DNA, 15 bp, Homo sapiens
ggaggcacacacata

SEQ ID NO: 1979585 - DNA, 15 bp, Homo sapiens
gaggcacacacatag

SEQ ID NO: 1979586 - DNA, 15 bp, Homo sapiens
aggcacacacatagg

SEQ ID NO: 1979587 - DNA, 15 bp, Homo sapiens
ggcacacacatagga

SEQ ID NO: 1979588 - DNA, 15 bp, Homo sapiens
gcacacacataggag

SEQ ID NO: 1979589 - DNA, 15 bp, Homo sapiens
cacacacataggaga

SEQ ID NO: 1979590 - DNA, 15 bp, Homo sapiens
acacacataggagag

SEQ ID NO: 1979591 - DNA, 15 bp, Homo sapiens
cacacataggagagt

SEQ ID NO: 1979592 - DNA, 15 bp, Homo sapiens
acacataggagagtt

SEQ ID NO: 1979593 - DNA, 15 bp, Homo sapiens
cacataggagagttc

SEQ ID NO: 1979594 - DNA, 15 bp, Homo sapiens
acataggagagttcg

SEQ ID NO: 1979595 - DNA, 15 bp, Homo sapiens
cataggagagttcgt

SEQ ID NO: 1979596 - DNA, 15 bp, Homo sapiens
ataggagagttcgtc

SEQ ID NO: 1979597 - DNA, 15 bp, Homo sapiens
taggagagttcgtca

SEQ ID NO: 1979598 - DNA, 15 bp, Homo sapiens
aggagagttcgtcag

SEQ ID NO: 1979599 - DNA, 15 bp, Homo sapiens
ggagagttcgtcaga

SEQ ID NO: 1979600 - DNA, 15 bp, Homo sapiens
gagagttcgtcagag

SEQ ID NO: 1979601 - DNA, 15 bp, Homo sapiens
agagttcgtcagaga

SEQ ID NO: 1979602 - DNA, 15 bp, Homo sapiens
gagttcgtcagagac

SEQ ID NO: 1979603 - DNA, 15 bp, Homo sapiens
agttcgtcagagaca

SEQ ID NO: 1979604 - DNA, 15 bp, Homo sapiens
gttcgtcagagacag

SEQ ID NO: 1979605 - DNA, 15 bp, Homo sapiens
ttcgtcagagacaga

SEQ ID NO: 1979606 - DNA, 15 bp, Homo sapiens
tcgtcagagacagag

SEQ ID NO: 1979607 - DNA, 15 bp, Homo sapiens
cgtcagagacagaga

SEQ ID NO: 1979608 - DNA, 15 bp, Homo sapiens
gtcagagacagagaa

SEQ ID NO: 1979609 - DNA, 15 bp, Homo sapiens
tcagagacagagaag

SEQ ID NO: 1979610 - DNA, 15 bp, Homo sapiens
cagagacagagaaga

SEQ ID NO: 1979611 - DNA, 15 bp, Homo sapiens
agagacagagaagaa

SEQ ID NO: 1979612 - DNA, 15 bp, Homo sapiens
gagacagagaagaac

SEQ ID NO: 1979613 - DNA, 15 bp, Homo sapiens
agacagagaagaaca

SEQ ID NO: 1979614 - DNA, 15 bp, Homo sapiens
gacagagaagaacag

SEQ ID NO: 1979615 - DNA, 15 bp, Homo sapiens
acagagaagaacaga

SEQ ID NO: 1979616 - DNA, 15 bp, Homo sapiens
cagagaagaacagag

SEQ ID NO: 1979617 - DNA, 15 bp, Homo sapiens
agagaagaacagagg

SEQ ID NO: 1979618 - DNA, 15 bp, Homo sapiens
gagaagaacagaggg

SEQ ID NO: 1979619 - DNA, 15 bp, Homo sapiens
agaagaacagaggga

SEQ ID NO: 1979620 - DNA, 15 bp, Homo sapiens
gaagaacagagggac

SEQ ID NO: 1979621 - DNA, 15 bp, Homo sapiens
aagaacagagggaca

SEQ ID NO: 1979622 - DNA, 15 bp, Homo sapiens
agaacagagggacag

SEQ ID NO: 1979623 - DNA, 15 bp, Homo sapiens
gaacagagggacaga

SEQ ID NO: 1979624 - DNA, 15 bp, Homo sapiens
aacagagggacagag

SEQ ID NO: 1979625 - DNA, 15 bp, Homo sapiens
cagagggacagagac

SEQ ID NO: 1979626 - DNA, 15 bp, Homo sapiens
agagggacagagaca

SEQ ID NO: 1979627 - DNA, 15 bp, Homo sapiens
gagggacagagacaa

SEQ ID NO: 1979628 - DNA, 15 bp, Homo sapiens
agggacagagacaaa

SEQ ID NO: 1979629 - DNA, 15 bp, Homo sapiens
gggacagagacaaag

SEQ ID NO: 1979630 - DNA, 15 bp, Homo sapiens
ggacagagacaaaga

SEQ ID NO: 1979631 - DNA, 15 bp, Homo sapiens
gacagagacaaagag

SEQ ID NO: 1979632 - DNA, 15 bp, Homo sapiens
acagagacaaagagg

SEQ ID NO: 1979633 - DNA, 15 bp, Homo sapiens
cagagacaaagaggc

SEQ ID NO: 1979634 - DNA, 15 bp, Homo sapiens
agagacaaagaggca

SEQ ID NO: 1979635 - DNA, 15 bp, Homo sapiens
gagacaaagaggcag

SEQ ID NO: 1979636 - DNA, 15 bp, Homo sapiens
agacaaagaggcagc

SEQ ID NO: 1979637 - DNA, 15 bp, Homo sapiens
gacaaagaggcagca

SEQ ID NO: 1979638 - DNA, 15 bp, Homo sapiens
acaaagaggcagcag

SEQ ID NO: 1979639 - DNA, 15 bp, Homo sapiens
caaagaggcagcagg

SEQ ID NO: 1979640 - DNA, 15 bp, Homo sapiens
aaagaggcagcaggg

SEQ ID NO: 1979641 - DNA, 15 bp, Homo sapiens
aagaggcagcaggga

SEQ ID NO: 1979642 - DNA, 15 bp, Homo sapiens
agaggcagcagggag

SEQ ID NO: 1979643 - DNA, 15 bp, Homo sapiens
gaggcagcagggaga

SEQ ID NO: 1979644 - DNA, 15 bp, Homo sapiens
aggcagcagggagag

SEQ ID NO: 1979645 - DNA, 15 bp, Homo sapiens
ggcagcagggagaga

SEQ ID NO: 1979646 - DNA, 15 bp, Homo sapiens
gcagcagggagagac

SEQ ID NO: 1979647 - DNA, 15 bp, Homo sapiens
cagcagggagagaca

SEQ ID NO: 1979648 - DNA, 15 bp, Homo sapiens
agcagggagagacac

SEQ ID NO: 1979649 - DNA, 15 bp, Homo sapiens
gcagggagagacacg

SEQ ID NO: 1979650 - DNA, 15 bp, Homo sapiens
cagggagagacacgg

SEQ ID NO: 1979651 - DNA, 15 bp, Homo sapiens
agggagagacacgga

SEQ ID NO: 1979652 - DNA, 15 bp, Homo sapiens
gggagagacacggac

SEQ ID NO: 1979653 - DNA, 15 bp, Homo sapiens
ggagagacacggacg

SEQ ID NO: 1979654 - DNA, 15 bp, Homo sapiens
gagagacacggacgg

SEQ ID NO: 1979655 - DNA, 15 bp, Homo sapiens
agagacacggacggg

SEQ ID NO: 1979656 - DNA, 15 bp, Homo sapiens
gagacacggacgggg

SEQ ID NO: 1979657 - DNA, 15 bp, Homo sapiens
agacacggacggggt

SEQ ID NO: 1979658 - DNA, 15 bp, Homo sapiens
gacacggacggggtc

SEQ ID NO: 1979659 - DNA, 15 bp, Homo sapiens
acacggacggggtcg

SEQ ID NO: 1979660 - DNA, 15 bp, Homo sapiens
cacggacggggtcga

SEQ ID NO: 1979661 - DNA, 15 bp, Homo sapiens
acggacggggtcgag

SEQ ID NO: 1979662 - DNA, 15 bp, Homo sapiens
cggacggggtcgagc

SEQ ID NO: 1979663 - DNA, 15 bp, Homo sapiens
ggacggggtcgagcg

SEQ ID NO: 1979664 - DNA, 15 bp, Homo sapiens
gacggggtcgagcgc

SEQ ID NO: 1979665 - DNA, 15 bp, Homo sapiens
acggggtcgagcgct

SEQ ID NO: 1979666 - DNA, 15 bp, Homo sapiens
cggggtcgagcgctc

SEQ ID NO: 1979667 - DNA, 15 bp, Homo sapiens
ggggtcgagcgctcc

SEQ ID NO: 1979668 - DNA, 15 bp, Homo sapiens
gggtcgagcgctccc

SEQ ID NO: 1979669 - DNA, 15 bp, Homo sapiens
ggtcgagcgctcccc

SEQ ID NO: 1979670 - DNA, 15 bp, Homo sapiens
gtcgagcgctcccca

SEQ ID NO: 1979671 - DNA, 15 bp, Homo sapiens
tcgagcgctccccag

SEQ ID NO: 1979672 - DNA, 15 bp, Homo sapiens
cgagcgctccccagc

SEQ ID NO: 1979673 - DNA, 15 bp, Homo sapiens
gagcgctccccagca

SEQ ID NO: 1979674 - DNA, 15 bp, Homo sapiens
agcgctccccagcac

SEQ ID NO: 1979675 - DNA, 15 bp, Homo sapiens
gcgctccccagcacc

SEQ ID NO: 1979676 - DNA, 15 bp, Homo sapiens
cgctccccagcaccc

SEQ ID NO: 1979677 - DNA, 15 bp, Homo sapiens
gctccccagcaccct

SEQ ID NO: 1979678 - DNA, 15 bp, Homo sapiens
ctccccagcaccctc

SEQ ID NO: 1979679 - DNA, 15 bp, Homo sapiens
tccccagcaccctcc

SEQ ID NO: 1979680 - DNA, 15 bp, Homo sapiens
ccccagcaccctccc

SEQ ID NO: 1979681 - DNA, 15 bp, Homo sapiens
cccagcaccctcccc

SEQ ID NO: 1979682 - DNA, 15 bp, Homo sapiens
ccagcaccctccccc

SEQ ID NO: 1979683 - DNA, 15 bp, Homo sapiens
cagcaccctccccca

SEQ ID NO: 1979684 - DNA, 15 bp, Homo sapiens
agcaccctcccccag

SEQ ID NO: 1979685 - DNA, 15 bp, Homo sapiens
gcaccctcccccagc

SEQ ID NO: 1979686 - DNA, 15 bp, Homo sapiens
caccctcccccagct

SEQ ID NO: 1979687 - DNA, 15 bp, Homo sapiens
accctcccccagctt

SEQ ID NO: 1979688 - DNA, 15 bp, Homo sapiens
ccctcccccagcttg

SEQ ID NO: 1979689 - DNA, 15 bp, Homo sapiens
cctcccccagcttgt

SEQ ID NO: 1979690 - DNA, 15 bp, Homo sapiens
ctcccccagcttgtg

SEQ ID NO: 1979691 - DNA, 15 bp, Homo sapiens
tcccccagcttgtga

SEQ ID NO: 1979692 - DNA, 15 bp, Homo sapiens
cccccagcttgtgac

SEQ ID NO: 1979693 - DNA, 15 bp, Homo sapiens
ccccagcttgtgacc

SEQ ID NO: 1979694 - DNA, 15 bp, Homo sapiens
cccagcttgtgacca

SEQ ID NO: 1979695 - DNA, 15 bp, Homo sapiens
ccagcttgtgaccag

SEQ ID NO: 1979696 - DNA, 15 bp, Homo sapiens
cagcttgtgaccagg

SEQ ID NO: 1979697 - DNA, 15 bp, Homo sapiens
agcttgtgaccaggg

SEQ ID NO: 1979698 - DNA, 15 bp, Homo sapiens
gcttgtgaccagggc

SEQ ID NO: 1979699 - DNA, 15 bp, Homo sapiens
cttgtgaccagggca

SEQ ID NO: 1979700 - DNA, 15 bp, Homo sapiens
ttgtgaccagggcag

SEQ ID NO: 1979701 - DNA, 15 bp, Homo sapiens
tgtgaccagggcagg

SEQ ID NO: 1979702 - DNA, 15 bp, Homo sapiens
gtgaccagggcaggg

SEQ ID NO: 1979703 - DNA, 15 bp, Homo sapiens
tgaccagggcagggc

SEQ ID NO: 1979704 - DNA, 15 bp, Homo sapiens
gaccagggcagggca

SEQ ID NO: 1979705 - DNA, 15 bp, Homo sapiens
accagggcagggcag

SEQ ID NO: 1979706 - DNA, 15 bp, Homo sapiens
ccagggcagggcagg

SEQ ID NO: 1979707 - DNA, 15 bp, Homo sapiens
cagggcagggcagga

SEQ ID NO: 1979708 - DNA, 15 bp, Homo sapiens
agggcagggcaggag

SEQ ID NO: 1979709 - DNA, 15 bp, Homo sapiens
gggcagggcaggagg

SEQ ID NO: 1979710 - DNA, 15 bp, Homo sapiens
ggcagggcaggaggc

SEQ ID NO: 1979711 - DNA, 15 bp, Homo sapiens
gcagggcaggaggcc

SEQ ID NO: 1979712 - DNA, 15 bp, Homo sapiens
cagggcaggaggcca

SEQ ID NO: 1979713 - DNA, 15 bp, Homo sapiens
agggcaggaggccac

SEQ ID NO: 1979714 - DNA, 15 bp, Homo sapiens
gggcaggaggccacc

SEQ ID NO: 1979715 - DNA, 15 bp, Homo sapiens
ggcaggaggccacca

SEQ ID NO: 1979716 - DNA, 15 bp, Homo sapiens
gcaggaggccaccaa

SEQ ID NO: 1979717 - DNA, 15 bp, Homo sapiens
caggaggccaccaag

SEQ ID NO: 1979718 - DNA, 15 bp, Homo sapiens
aggaggccaccaagg

SEQ ID NO: 1979719 - DNA, 15 bp, Homo sapiens
ggaggccaccaagga

SEQ ID NO: 1979720 - DNA, 15 bp, Homo sapiens
gaggccaccaaggag

SEQ ID NO: 1979721 - DNA, 15 bp, Homo sapiens
aggccaccaaggagg

SEQ ID NO: 1979722 - DNA, 15 bp, Homo sapiens
ggccaccaaggaggc

SEQ ID NO: 1979723 - DNA, 15 bp, Homo sapiens
gccaccaaggaggcc

SEQ ID NO: 1979724 - DNA, 15 bp, Homo sapiens
ccaccaaggaggccg

SEQ ID NO: 1979725 - DNA, 15 bp, Homo sapiens
caccaaggaggccgg

SEQ ID NO: 1979726 - DNA, 15 bp, Homo sapiens
accaaggaggccggc

SEQ ID NO: 1979727 - DNA, 15 bp, Homo sapiens
ccaaggaggccggct

SEQ ID NO: 1979728 - DNA, 15 bp, Homo sapiens
caaggaggccggctc

SEQ ID NO: 1979729 - DNA, 15 bp, Homo sapiens
aaggaggccggctct

SEQ ID NO: 1979730 - DNA, 15 bp, Homo sapiens
aggaggccggctctg

SEQ ID NO: 1979731 - DNA, 15 bp, Homo sapiens
ggaggccggctctgg

SEQ ID NO: 1979732 - DNA, 15 bp, Homo sapiens
gaggccggctctggc

SEQ ID NO: 1979733 - DNA, 15 bp, Homo sapiens
aggccggctctggcc

SEQ ID NO: 1979734 - DNA, 15 bp, Homo sapiens
ggccggctctggcca

SEQ ID NO: 1979735 - DNA, 15 bp, Homo sapiens
gccggctctggccag

SEQ ID NO: 1979736 - DNA, 15 bp, Homo sapiens
ccggctctggccaga

SEQ ID NO: 1979737 - DNA, 15 bp, Homo sapiens
cggctctggccagag

SEQ ID NO: 1979738 - DNA, 15 bp, Homo sapiens
ggctctggccagagg

SEQ ID NO: 1979739 - DNA, 15 bp, Homo sapiens
gctctggccagaggc

SEQ ID NO: 1979740 - DNA, 15 bp, Homo sapiens
ctctggccagaggcc

SEQ ID NO: 1979741 - DNA, 15 bp, Homo sapiens
tctggccagaggccc

SEQ ID NO: 1979742 - DNA, 15 bp, Homo sapiens
ctggccagaggccct

SEQ ID NO: 1979743 - DNA, 15 bp, Homo sapiens
tggccagaggccctc

SEQ ID NO: 1979744 - DNA, 15 bp, Homo sapiens
ggccagaggccctca

SEQ ID NO: 1979745 - DNA, 15 bp, Homo sapiens
gccagaggccctcac

SEQ ID NO: 1979746 - DNA, 15 bp, Homo sapiens
ccagaggccctcact

SEQ ID NO: 1979747 - DNA, 15 bp, Homo sapiens
cagaggccctcactg

SEQ ID NO: 1979748 - DNA, 15 bp, Homo sapiens
agaggccctcactgc

SEQ ID NO: 1979749 - DNA, 15 bp, Homo sapiens
gaggccctcactgcc

SEQ ID NO: 1979750 - DNA, 15 bp, Homo sapiens
aggccctcactgcct

SEQ ID NO: 1979751 - DNA, 15 bp, Homo sapiens
ggccctcactgcctc

SEQ ID NO: 1979752 - DNA, 15 bp, Homo sapiens
gccctcactgcctct

SEQ ID NO: 1979753 - DNA, 15 bp, Homo sapiens
ccctcactgcctctc

SEQ ID NO: 1979754 - DNA, 15 bp, Homo sapiens
cctcactgcctctcc

SEQ ID NO: 1979755 - DNA, 15 bp, Homo sapiens
ctcactgcctctccc

SEQ ID NO: 1979756 - DNA, 15 bp, Homo sapiens
tcactgcctctcccg

SEQ ID NO: 1979757 - DNA, 15 bp, Homo sapiens
cactgcctctcccgc

SEQ ID NO: 1979758 - DNA, 15 bp, Homo sapiens
actgcctctcccgcc

SEQ ID NO: 1979759 - DNA, 15 bp, Homo sapiens
ctgcctctcccgccc

SEQ ID NO: 1979760 - DNA, 15 bp, Homo sapiens
tgcctctcccgccct

SEQ ID NO: 1979761 - DNA, 15 bp, Homo sapiens
gcctctcccgccctc

SEQ ID NO: 1979762 - DNA, 15 bp, Homo sapiens
cctctcccgccctct

SEQ ID NO: 1979763 - DNA, 15 bp, Homo sapiens
ctctcccgccctctt

SEQ ID NO: 1979764 - DNA, 15 bp, Homo sapiens
tctcccgccctcttg

SEQ ID NO: 1979765 - DNA, 15 bp, Homo sapiens
ctcccgccctcttgc

SEQ ID NO: 1979766 - DNA, 15 bp, Homo sapiens
tcccgccctcttgct

SEQ ID NO: 1979767 - DNA, 15 bp, Homo sapiens
cccgccctcttgctc

SEQ ID NO: 1979768 - DNA, 15 bp, Homo sapiens
ccgccctcttgctca

SEQ ID NO: 1979769 - DNA, 15 bp, Homo sapiens
cgccctcttgctcat

SEQ ID NO: 1979770 - DNA, 15 bp, Homo sapiens
gccctcttgctcatc

SEQ ID NO: 1979771 - DNA, 15 bp, Homo sapiens
ccctcttgctcatcc

SEQ ID NO: 1979772 - DNA, 15 bp, Homo sapiens
cctcttgctcatccc

SEQ ID NO: 1979773 - DNA, 15 bp, Homo sapiens
ctcttgctcatccct

SEQ ID NO: 1979774 - DNA, 15 bp, Homo sapiens
tcttgctcatccctg

SEQ ID NO: 1979775 - DNA, 15 bp, Homo sapiens
cttgctcatccctgg

SEQ ID NO: 1979776 - DNA, 15 bp, Homo sapiens
ttgctcatccctgga

SEQ ID NO: 1979777 - DNA, 15 bp, Homo sapiens
tgctcatccctggag

SEQ ID NO: 1979778 - DNA, 15 bp, Homo sapiens
gctcatccctggagc

SEQ ID NO: 1979779 - DNA, 15 bp, Homo sapiens
ctcatccctggagca

SEQ ID NO: 1979780 - DNA, 15 bp, Homo sapiens
tcatccctggagcaa

SEQ ID NO: 1979781 - DNA, 15 bp, Homo sapiens
catccctggagcaac

SEQ ID NO: 1979782 - DNA, 15 bp, Homo sapiens
atccctggagcaact

SEQ ID NO: 1979783 - DNA, 15 bp, Homo sapiens
tccctggagcaactg

SEQ ID NO: 1979784 - DNA, 15 bp, Homo sapiens
ccctggagcaactgg

SEQ ID NO: 1979785 - DNA, 15 bp, Homo sapiens
cctggagcaactggg

SEQ ID NO: 1979786 - DNA, 15 bp, Homo sapiens
ctggagcaactgggc

SEQ ID NO: 1979787 - DNA, 15 bp, Homo sapiens
tggagcaactgggct

SEQ ID NO: 1979788 - DNA, 15 bp, Homo sapiens
ggagcaactgggctg

SEQ ID NO: 1979789 - DNA, 15 bp, Homo sapiens
gagcaactgggctgg

SEQ ID NO: 1979790 - DNA, 15 bp, Homo sapiens
agcaactgggctggc

SEQ ID NO: 1979791 - DNA, 15 bp, Homo sapiens
gcaactgggctggcc

SEQ ID NO: 1979792 - DNA, 15 bp, Homo sapiens
caactgggctggccg

SEQ ID NO: 1979793 - DNA, 15 bp, Homo sapiens
aactgggctggccgt

SEQ ID NO: 1979794 - DNA, 15 bp, Homo sapiens
actgggctggccgtg

SEQ ID NO: 1979795 - DNA, 15 bp, Homo sapiens
ctgggctggccgtgc

SEQ ID NO: 1979796 - DNA, 15 bp, Homo sapiens
tgggctggccgtgct

SEQ ID NO: 1979797 - DNA, 15 bp, Homo sapiens
gggctggccgtgctg

SEQ ID NO: 1979798 - DNA, 15 bp, Homo sapiens
ggctggccgtgctgg

SEQ ID NO: 1979799 - DNA, 15 bp, Homo sapiens
gctggccgtgctggg

SEQ ID NO: 1979800 - DNA, 15 bp, Homo sapiens
ctggccgtgctgggc

SEQ ID NO: 1979801 - DNA, 15 bp, Homo sapiens
tggccgtgctgggcc

SEQ ID NO: 1979802 - DNA, 15 bp, Homo sapiens
ggccgtgctgggccc

SEQ ID NO: 1979803 - DNA, 15 bp, Homo sapiens
gccgtgctgggccca

SEQ ID NO: 1979804 - DNA, 15 bp, Homo sapiens
ccgtgctgggcccaa

SEQ ID NO: 1979805 - DNA, 15 bp, Homo sapiens
cgtgctgggcccaag

SEQ ID NO: 1979806 - DNA, 15 bp, Homo sapiens
gtgctgggcccaagt

SEQ ID NO: 1979807 - DNA, 15 bp, Homo sapiens
tgctgggcccaagtt

SEQ ID NO: 1979808 - DNA, 15 bp, Homo sapiens
gctgggcccaagttc

SEQ ID NO: 1979809 - DNA, 15 bp, Homo sapiens
ctgggcccaagttca

SEQ ID NO: 1979810 - DNA, 15 bp, Homo sapiens
tgggcccaagttcac

SEQ ID NO: 1979811 - DNA, 15 bp, Homo sapiens
gggcccaagttcaca

SEQ ID NO: 1979812 - DNA, 15 bp, Homo sapiens
ggcccaagttcacag

SEQ ID NO: 1979813 - DNA, 15 bp, Homo sapiens
gcccaagttcacaga

SEQ ID NO: 1979814 - DNA, 15 bp, Homo sapiens
cccaagttcacagag

SEQ ID NO: 1979815 - DNA, 15 bp, Homo sapiens
ccaagttcacagaga

SEQ ID NO: 1979816 - DNA, 15 bp, Homo sapiens
caagttcacagagat

SEQ ID NO: 1979817 - DNA, 15 bp, Homo sapiens
aagttcacagagatt

SEQ ID NO: 1979818 - DNA, 15 bp, Homo sapiens
agttcacagagatta

SEQ ID NO: 1979819 - DNA, 15 bp, Homo sapiens
gttcacagagattaa

SEQ ID NO: 1979820 - DNA, 15 bp, Homo sapiens
ttcacagagattaat

SEQ ID NO: 1979821 - DNA, 15 bp, Homo sapiens
tcacagagattaatg

SEQ ID NO: 1979822 - DNA, 15 bp, Homo sapiens
cacagagattaatga

SEQ ID NO: 1979823 - DNA, 15 bp, Homo sapiens
acagagattaatgag

SEQ ID NO: 1979824 - DNA, 15 bp, Homo sapiens
cagagattaatgaga

SEQ ID NO: 1979825 - DNA, 15 bp, Homo sapiens
agagattaatgagac

SEQ ID NO: 1979826 - DNA, 15 bp, Homo sapiens
gagattaatgagacc

SEQ ID NO: 1979827 - DNA, 15 bp, Homo sapiens
agattaatgagaccc

SEQ ID NO: 1979828 - DNA, 15 bp, Homo sapiens
gattaatgagaccca

SEQ ID NO: 1979829 - DNA, 15 bp, Homo sapiens
attaatgagacccag

SEQ ID NO: 1979830 - DNA, 15 bp, Homo sapiens
ttaatgagacccagc

SEQ ID NO: 1979831 - DNA, 15 bp, Homo sapiens
taatgagacccagcc

SEQ ID NO: 1979832 - DNA, 15 bp, Homo sapiens
aatgagacccagccc

SEQ ID NO: 1979833 - DNA, 15 bp, Homo sapiens
atgagacccagcccc

SEQ ID NO: 1979834 - DNA, 15 bp, Homo sapiens
tgagacccagcccct

SEQ ID NO: 1979835 - DNA, 15 bp, Homo sapiens
gagacccagcccctg

SEQ ID NO: 1979836 - DNA, 15 bp, Homo sapiens
agacccagcccctgc

SEQ ID NO: 1979837 - DNA, 15 bp, Homo sapiens
gacccagcccctgcc

SEQ ID NO: 1979838 - DNA, 15 bp, Homo sapiens
acccagcccctgccc

SEQ ID NO: 1979839 - DNA, 15 bp, Homo sapiens
cccagcccctgccca

SEQ ID NO: 1979840 - DNA, 15 bp, Homo sapiens
ccagcccctgcccag

SEQ ID NO: 1979841 - DNA, 15 bp, Homo sapiens
cagcccctgcccagt

SEQ ID NO: 1979842 - DNA, 15 bp, Homo sapiens
agcccctgcccagtc

SEQ ID NO: 1979843 - DNA, 15 bp, Homo sapiens
gcccctgcccagtct

SEQ ID NO: 1979844 - DNA, 15 bp, Homo sapiens
cccctgcccagtctc

SEQ ID NO: 1979845 - DNA, 15 bp, Homo sapiens
ccctgcccagtctcc

SEQ ID NO: 1979846 - DNA, 15 bp, Homo sapiens
cctgcccagtctcca

SEQ ID NO: 1979847 - DNA, 15 bp, Homo sapiens
ctgcccagtctccaa

SEQ ID NO: 1979848 - DNA, 15 bp, Homo sapiens
tgcccagtctccaag

SEQ ID NO: 1979849 - DNA, 15 bp, Homo sapiens
gcccagtctccaagg

SEQ ID NO: 1979850 - DNA, 15 bp, Homo sapiens
cccagtctccaaggg

SEQ ID NO: 1979851 - DNA, 15 bp, Homo sapiens
ccagtctccaagggc

SEQ ID NO: 1979852 - DNA, 15 bp, Homo sapiens
cagtctccaagggcc

SEQ ID NO: 1979853 - DNA, 15 bp, Homo sapiens
agtctccaagggccc

SEQ ID NO: 1979854 - DNA, 15 bp, Homo sapiens
gtctccaagggccca

SEQ ID NO: 1979855 - DNA, 15 bp, Homo sapiens
tctccaagggcccag

SEQ ID NO: 1979856 - DNA, 15 bp, Homo sapiens
ctccaagggcccagc

SEQ ID NO: 1979857 - DNA, 15 bp, Homo sapiens
tccaagggcccagcc

SEQ ID NO: 1979858 - DNA, 15 bp, Homo sapiens
ccaagggcccagcca

SEQ ID NO: 1979859 - DNA, 15 bp, Homo sapiens
caagggcccagccaa

SEQ ID NO: 1979860 - DNA, 15 bp, Homo sapiens
aagggcccagccaag

SEQ ID NO: 1979861 - DNA, 15 bp, Homo sapiens
agggcccagccaagg

SEQ ID NO: 1979862 - DNA, 15 bp, Homo sapiens
gggcccagccaagga

SEQ ID NO: 1979863 - DNA, 15 bp, Homo sapiens
ggcccagccaaggag

SEQ ID NO: 1979864 - DNA, 15 bp, Homo sapiens
gcccagccaaggaga

SEQ ID NO: 1979865 - DNA, 15 bp, Homo sapiens
cccagccaaggagat

SEQ ID NO: 1979866 - DNA, 15 bp, Homo sapiens
ccagccaaggagatg

SEQ ID NO: 1979867 - DNA, 15 bp, Homo sapiens
cagccaaggagatgc

SEQ ID NO: 1979868 - DNA, 15 bp, Homo sapiens
agccaaggagatgct

SEQ ID NO: 1979869 - DNA, 15 bp, Homo sapiens
gccaaggagatgctt

SEQ ID NO: 1979870 - DNA, 15 bp, Homo sapiens
ccaaggagatgcttt

SEQ ID NO: 1979871 - DNA, 15 bp, Homo sapiens
caaggagatgctttg

SEQ ID NO: 1979872 - DNA, 15 bp, Homo sapiens
aaggagatgctttga

SEQ ID NO: 1979873 - DNA, 15 bp, Homo sapiens
aggagatgctttgat

SEQ ID NO: 1979874 - DNA, 15 bp, Homo sapiens
ggagatgctttgatg

SEQ ID NO: 1979875 - DNA, 15 bp, Homo sapiens
gagatgctttgatgt

SEQ ID NO: 1979876 - DNA, 15 bp, Homo sapiens
agatgctttgatgta

SEQ ID NO: 1979877 - DNA, 15 bp, Homo sapiens
gatgctttgatgtag

SEQ ID NO: 1979878 - DNA, 15 bp, Homo sapiens
atgctttgatgtaga

SEQ ID NO: 1979879 - DNA, 15 bp, Homo sapiens
tgctttgatgtagaa

SEQ ID NO: 1979880 - DNA, 15 bp, Homo sapiens
gctttgatgtagaaa

SEQ ID NO: 1979881 - DNA, 15 bp, Homo sapiens
ctttgatgtagaaat

SEQ ID NO: 1979882 - DNA, 15 bp, Homo sapiens
tttgatgtagaaatc

SEQ ID NO: 1979883 - DNA, 15 bp, Homo sapiens
ttgatgtagaaatca

SEQ ID NO: 1979884 - DNA, 15 bp, Homo sapiens
tgatgtagaaatcac

SEQ ID NO: 1979885 - DNA, 15 bp, Homo sapiens
gatgtagaaatcact

SEQ ID NO: 1979886 - DNA, 15 bp, Homo sapiens
atgtagaaatcactt

SEQ ID NO: 1979887 - DNA, 15 bp, Homo sapiens
tgtagaaatcacttt

SEQ ID NO: 1979888 - DNA, 15 bp, Homo sapiens
gtagaaatcactttt

SEQ ID NO: 1979889 - DNA, 15 bp, Homo sapiens
tagaaatcactttta

SEQ ID NO: 1979890 - DNA, 15 bp, Homo sapiens
agaaatcacttttac

SEQ ID NO: 1979891 - DNA, 15 bp, Homo sapiens
gaaatcacttttacg

SEQ ID NO: 1979892 - DNA, 15 bp, Homo sapiens
aaatcacttttacgc

SEQ ID NO: 1979893 - DNA, 15 bp, Homo sapiens
aatcacttttacgct

SEQ ID NO: 1979894 - DNA, 15 bp, Homo sapiens
atcacttttacgctg

SEQ ID NO: 1979895 - DNA, 15 bp, Homo sapiens
tcacttttacgctgc

SEQ ID NO: 1979896 - DNA, 15 bp, Homo sapiens
cacttttacgctgcc

SEQ ID NO: 1979897 - DNA, 15 bp, Homo sapiens
acttttacgctgcct

SEQ ID NO: 1979898 - DNA, 15 bp, Homo sapiens
cttttacgctgccta

SEQ ID NO: 1979899 - DNA, 15 bp, Homo sapiens
ttttacgctgcctac

SEQ ID NO: 1979900 - DNA, 15 bp, Homo sapiens
tttacgctgcctacc

SEQ ID NO: 1979901 - DNA, 15 bp, Homo sapiens
ttacgctgcctacct

SEQ ID NO: 1979902 - DNA, 15 bp, Homo sapiens
tacgctgcctacctc

SEQ ID NO: 1979903 - DNA, 15 bp, Homo sapiens
acgctgcctacctct

SEQ ID NO: 1979904 - DNA, 15 bp, Homo sapiens
cgctgcctacctctg

SEQ ID NO: 1979905 - DNA, 15 bp, Homo sapiens
gctgcctacctctga

SEQ ID NO: 1979906 - DNA, 15 bp, Homo sapiens
ctgcctacctctgaa

SEQ ID NO: 1979907 - DNA, 15 bp, Homo sapiens
tgcctacctctgaag

SEQ ID NO: 1979908 - DNA, 15 bp, Homo sapiens
gcctacctctgaagg

SEQ ID NO: 1979909 - DNA, 15 bp, Homo sapiens
cctacctctgaaggc

SEQ ID NO: 1979910 - DNA, 15 bp, Homo sapiens
ctacctctgaaggca

SEQ ID NO: 1979911 - DNA, 15 bp, Homo sapiens
tacctctgaaggcac

SEQ ID NO: 1979912 - DNA, 15 bp, Homo sapiens
acctctgaaggcaca

SEQ ID NO: 1979913 - DNA, 15 bp, Homo sapiens
cctctgaaggcacat

SEQ ID NO: 1979914 - DNA, 15 bp, Homo sapiens
ctctgaaggcacatt

SEQ ID NO: 1979915 - DNA, 15 bp, Homo sapiens
tctgaaggcacatta

SEQ ID NO: 1979916 - DNA, 15 bp, Homo sapiens
ctgaaggcacattaa

SEQ ID NO: 1979917 - DNA, 15 bp, Homo sapiens
tgaaggcacattaaa

SEQ ID NO: 1979918 - DNA, 15 bp, Homo sapiens
gaaggcacattaaaa

SEQ ID NO: 1979919 - DNA, 15 bp, Homo sapiens
aaggcacattaaaaa

SEQ ID NO: 1979920 - DNA, 15 bp, Homo sapiens
aggcacattaaaaag

SEQ ID NO: 1979921 - DNA, 15 bp, Homo sapiens
ggcacattaaaaagc

SEQ ID NO: 1979922 - DNA, 15 bp, Homo sapiens
gcacattaaaaagct

SEQ ID NO: 1979923 - DNA, 15 bp, Homo sapiens
cacattaaaaagctg

SEQ ID NO: 1979924 - DNA, 15 bp, Homo sapiens
acattaaaaagctgg

SEQ ID NO: 1979925 - DNA, 15 bp, Homo sapiens
cattaaaaagctgga

SEQ ID NO: 1979926 - DNA, 15 bp, Homo sapiens
attaaaaagctggaa

SEQ ID NO: 1979927 - DNA, 15 bp, Homo sapiens
ttaaaaagctggaaa

SEQ ID NO: 1979928 - DNA, 15 bp, Homo sapiens
taaaaagctggaaaa

SEQ ID NO: 1979929 - DNA, 15 bp, Homo sapiens
aaaaagctggaaaat

SEQ ID NO: 1979930 - DNA, 15 bp, Homo sapiens
aaaagctggaaaatt

SEQ ID NO: 1979931 - DNA, 15 bp, Homo sapiens
aaagctggaaaatta

SEQ ID NO: 1979932 - DNA, 15 bp, Homo sapiens
aagctggaaaattag

SEQ ID NO: 1979933 - DNA, 15 bp, Homo sapiens
agctggaaaattaga

SEQ ID NO: 1979934 - DNA, 15 bp, Homo sapiens
gctggaaaattagat

SEQ ID NO: 1979935 - DNA, 15 bp, Homo sapiens
ctggaaaattagata

SEQ ID NO: 1979936 - DNA, 15 bp, Homo sapiens
tggaaaattagataa

SEQ ID NO: 1979937 - DNA, 15 bp, Homo sapiens
ggaaaattagataat

SEQ ID NO: 1979938 - DNA, 15 bp, Homo sapiens
gaaaattagataata

SEQ ID NO: 1979939 - DNA, 15 bp, Homo sapiens
aaaattagataatat

SEQ ID NO: 1979940 - DNA, 15 bp, Homo sapiens
aaattagataatata

SEQ ID NO: 1979941 - DNA, 15 bp, Homo sapiens
aattagataatatag

SEQ ID NO: 1979942 - DNA, 15 bp, Homo sapiens
attagataatataga

SEQ ID NO: 1979943 - DNA, 15 bp, Homo sapiens
ttagataatatagaa

SEQ ID NO: 1979944 - DNA, 15 bp, Homo sapiens
tagataatatagaaa

SEQ ID NO: 1979945 - DNA, 15 bp, Homo sapiens
agataatatagaaaa

SEQ ID NO: 1979946 - DNA, 15 bp, Homo sapiens
gataatatagaaaaa

SEQ ID NO: 1979947 - DNA, 15 bp, Homo sapiens
ataatatagaaaaaa

SEQ ID NO: 1979948 - DNA, 15 bp, Homo sapiens
taatatagaaaaaaa

SEQ ID NO: 1979949 - DNA, 15 bp, Homo sapiens
aatatagaaaaaaaa

SEQ ID NO: 1979950 - DNA, 15 bp, Homo sapiens
atatagaaaaaaaaa

SEQ ID NO: 1979951 - DNA, 15 bp, Homo sapiens
tatagaaaaaaaaag

SEQ ID NO: 1979952 - DNA, 15 bp, Homo sapiens
atagaaaaaaaaagg

SEQ ID NO: 1979953 - DNA, 15 bp, Homo sapiens
tagaaaaaaaaaggc

SEQ ID NO: 1979954 - DNA, 15 bp, Homo sapiens
agaaaaaaaaaggca

SEQ ID NO: 1979955 - DNA, 15 bp, Homo sapiens
gaaaaaaaaaggcat

SEQ ID NO: 1979956 - DNA, 15 bp, Homo sapiens
aaaaaaaaaggcatt

SEQ ID NO: 1979957 - DNA, 15 bp, Homo sapiens
aaaaaaaaggcattt

SEQ ID NO: 1979958 - DNA, 15 bp, Homo sapiens
aaaaaaaggcatttt

SEQ ID NO: 1979959 - DNA, 15 bp, Homo sapiens
aaaaaaggcattttt

SEQ ID NO: 1979960 - DNA, 15 bp, Homo sapiens
aaaaaggcattttta

SEQ ID NO: 1979961 - DNA, 15 bp, Homo sapiens
aaaaggcatttttaa

SEQ ID NO: 1979962 - DNA, 15 bp, Homo sapiens
aaaggcatttttaaa

SEQ ID NO: 1979963 - DNA, 15 bp, Homo sapiens
aaggcatttttaaaa

SEQ ID NO: 1979964 - DNA, 15 bp, Homo sapiens
aggcatttttaaaaa

SEQ ID NO: 1979965 - DNA, 15 bp, Homo sapiens
ggcatttttaaaaat

SEQ ID NO: 1979966 - DNA, 15 bp, Homo sapiens
gcatttttaaaaatc

SEQ ID NO: 1979967 - DNA, 15 bp, Homo sapiens
catttttaaaaatca

SEQ ID NO: 1979968 - DNA, 15 bp, Homo sapiens
atttttaaaaatcag

SEQ ID NO: 1979969 - DNA, 15 bp, Homo sapiens
tttttaaaaatcaga

SEQ ID NO: 1979970 - DNA, 15 bp, Homo sapiens
ttttaaaaatcagaa

SEQ ID NO: 1979971 - DNA, 15 bp, Homo sapiens
tttaaaaatcagaat

SEQ ID NO: 1979972 - DNA, 15 bp, Homo sapiens
ttaaaaatcagaata

SEQ ID NO: 1979973 - DNA, 15 bp, Homo sapiens
taaaaatcagaatac

SEQ ID NO: 1979974 - DNA, 15 bp, Homo sapiens
aaaaatcagaatacc

SEQ ID NO: 1979975 - DNA, 15 bp, Homo sapiens
aaaatcagaatacca

SEQ ID NO: 1979976 - DNA, 15 bp, Homo sapiens
aaatcagaataccaa

SEQ ID NO: 1979977 - DNA, 15 bp, Homo sapiens
aatcagaataccaac

SEQ ID NO: 1979978 - DNA, 15 bp, Homo sapiens
atcagaataccaaca

SEQ ID NO: 1979979 - DNA, 15 bp, Homo sapiens
tcagaataccaacaa

SEQ ID NO: 1979980 - DNA, 15 bp, Homo sapiens
cagaataccaacaag

SEQ ID NO: 1979981 - DNA, 15 bp, Homo sapiens
agaataccaacaagc

SEQ ID NO: 1979982 - DNA, 15 bp, Homo sapiens
gaataccaacaagcc

SEQ ID NO: 1979983 - DNA, 15 bp, Homo sapiens
aataccaacaagcca

SEQ ID NO: 1979984 - DNA, 15 bp, Homo sapiens
ataccaacaagccag

SEQ ID NO: 1979985 - DNA, 15 bp, Homo sapiens
taccaacaagccagg

SEQ ID NO: 1979986 - DNA, 15 bp, Homo sapiens
accaacaagccagga

SEQ ID NO: 1979987 - DNA, 15 bp, Homo sapiens
ccaacaagccaggac

SEQ ID NO: 1979988 - DNA, 15 bp, Homo sapiens
caacaagccaggaca

SEQ ID NO: 1979989 - DNA, 15 bp, Homo sapiens
aacaagccaggacaa

SEQ ID NO: 1979990 - DNA, 15 bp, Homo sapiens
acaagccaggacaag

SEQ ID NO: 1979991 - DNA, 15 bp, Homo sapiens
caagccaggacaagg

SEQ ID NO: 1979992 - DNA, 15 bp, Homo sapiens
aagccaggacaaggt

SEQ ID NO: 1979993 - DNA, 15 bp, Homo sapiens
agccaggacaaggtg

SEQ ID NO: 1979994 - DNA, 15 bp, Homo sapiens
gccaggacaaggtga

SEQ ID NO: 1979995 - DNA, 15 bp, Homo sapiens
ccaggacaaggtgag

SEQ ID NO: 1979996 - DNA, 15 bp, Homo sapiens
caggacaaggtgagg

SEQ ID NO: 1979997 - DNA, 15 bp, Homo sapiens
aggacaaggtgaggg

SEQ ID NO: 1979998 - DNA, 15 bp, Homo sapiens
ggacaaggtgagggc

SEQ ID NO: 1979999 - DNA, 15 bp, Homo sapiens
gacaaggtgagggcc

SEQ ID NO: 1980000 - DNA, 15 bp, Homo sapiens
acaaggtgagggcct

SEQ ID NO: 1980001 - DNA, 15 bp, Homo sapiens
caaggtgagggcctc

SEQ ID NO: 1980002 - DNA, 15 bp, Homo sapiens
aaggtgagggcctcc

SEQ ID NO: 1980003 - DNA, 15 bp, Homo sapiens
aggtgagggcctcct

SEQ ID NO: 1980004 - DNA, 15 bp, Homo sapiens
ggtgagggcctcctg

SEQ ID NO: 1980005 - DNA, 15 bp, Homo sapiens
gtgagggcctcctgg

SEQ ID NO: 1980006 - DNA, 15 bp, Homo sapiens
tgagggcctcctggg

SEQ ID NO: 1980007 - DNA, 15 bp, Homo sapiens
gagggcctcctggga

SEQ ID NO: 1980008 - DNA, 15 bp, Homo sapiens
agggcctcctgggac

SEQ ID NO: 1980009 - DNA, 15 bp, Homo sapiens
gggcctcctgggacc

SEQ ID NO: 1980010 - DNA, 15 bp, Homo sapiens
ggcctcctgggaccc

SEQ ID NO: 1980011 - DNA, 15 bp, Homo sapiens
gcctcctgggaccct

SEQ ID NO: 1980012 - DNA, 15 bp, Homo sapiens
cctcctgggaccctg

SEQ ID NO: 1980013 - DNA, 15 bp, Homo sapiens
ctcctgggaccctgg

SEQ ID NO: 1980014 - DNA, 15 bp, Homo sapiens
tcctgggaccctggc

SEQ ID NO: 1980015 - DNA, 15 bp, Homo sapiens
cctgggaccctggct

SEQ ID NO: 1980016 - DNA, 15 bp, Homo sapiens
ctgggaccctggctg

SEQ ID NO: 1980017 - DNA, 15 bp, Homo sapiens
tgggaccctggctgg

SEQ ID NO: 1980018 - DNA, 15 bp, Homo sapiens
gggaccctggctggg

SEQ ID NO: 1980019 - DNA, 15 bp, Homo sapiens
ggaccctggctgggg

SEQ ID NO: 1980020 - DNA, 15 bp, Homo sapiens
gaccctggctggggt

SEQ ID NO: 1980021 - DNA, 15 bp, Homo sapiens
accctggctggggta

SEQ ID NO: 1980022 - DNA, 15 bp, Homo sapiens
ccctggctggggtat

SEQ ID NO: 1980023 - DNA, 15 bp, Homo sapiens
cctggctggggtatc

SEQ ID NO: 1980024 - DNA, 15 bp, Homo sapiens
ctggctggggtatct

SEQ ID NO: 1980025 - DNA, 15 bp, Homo sapiens
tggctggggtatctg

SEQ ID NO: 1980026 - DNA, 15 bp, Homo sapiens
ggctggggtatctgg

SEQ ID NO: 1980027 - DNA, 15 bp, Homo sapiens
gctggggtatctggc

SEQ ID NO: 1980028 - DNA, 15 bp, Homo sapiens
ctggggtatctggca

SEQ ID NO: 1980029 - DNA, 15 bp, Homo sapiens
tggggtatctggcaa

SEQ ID NO: 1980030 - DNA, 15 bp, Homo sapiens
ggggtatctggcaag

SEQ ID NO: 1980031 - DNA, 15 bp, Homo sapiens
gggtatctggcaagg

SEQ ID NO: 1980032 - DNA, 15 bp, Homo sapiens
ggtatctggcaaggc

SEQ ID NO: 1980033 - DNA, 15 bp, Homo sapiens
gtatctggcaaggcc

SEQ ID NO: 1980034 - DNA, 15 bp, Homo sapiens
tatctggcaaggcca

SEQ ID NO: 1980035 - DNA, 15 bp, Homo sapiens
atctggcaaggccag

SEQ ID NO: 1980036 - DNA, 15 bp, Homo sapiens
tctggcaaggccagg

SEQ ID NO: 1980037 - DNA, 15 bp, Homo sapiens
ctggcaaggccaggg

SEQ ID NO: 1980038 - DNA, 15 bp, Homo sapiens
tggcaaggccagggg

SEQ ID NO: 1980039 - DNA, 15 bp, Homo sapiens
ggcaaggccaggggt

SEQ ID NO: 1980040 - DNA, 15 bp, Homo sapiens
gcaaggccaggggtg

SEQ ID NO: 1980041 - DNA, 15 bp, Homo sapiens
caaggccaggggtgt

SEQ ID NO: 1980042 - DNA, 15 bp, Homo sapiens
aaggccaggggtgtg

SEQ ID NO: 1980043 - DNA, 15 bp, Homo sapiens
aggccaggggtgtgt

SEQ ID NO: 1980044 - DNA, 15 bp, Homo sapiens
ggccaggggtgtgtg

SEQ ID NO: 1980045 - DNA, 15 bp, Homo sapiens
gccaggggtgtgtgg

SEQ ID NO: 1980046 - DNA, 15 bp, Homo sapiens
ccaggggtgtgtggc

SEQ ID NO: 1980047 - DNA, 15 bp, Homo sapiens
caggggtgtgtggcc

SEQ ID NO: 1980048 - DNA, 15 bp, Homo sapiens
aggggtgtgtggccc

SEQ ID NO: 1980049 - DNA, 15 bp, Homo sapiens
ggggtgtgtggccca

SEQ ID NO: 1980050 - DNA, 15 bp, Homo sapiens
gggtgtgtggcccag

SEQ ID NO: 1980051 - DNA, 15 bp, Homo sapiens
ggtgtgtggcccagt

SEQ ID NO: 1980052 - DNA, 15 bp, Homo sapiens
gtgtgtggcccagtg

SEQ ID NO: 1980053 - DNA, 15 bp, Homo sapiens
tgtgtggcccagtgg

SEQ ID NO: 1980054 - DNA, 15 bp, Homo sapiens
gtgtggcccagtggg

SEQ ID NO: 1980055 - DNA, 15 bp, Homo sapiens
tgtggcccagtgggg

SEQ ID NO: 1980056 - DNA, 15 bp, Homo sapiens
gtggcccagtggggt

SEQ ID NO: 1980057 - DNA, 15 bp, Homo sapiens
tggcccagtggggtc

SEQ ID NO: 1980058 - DNA, 15 bp, Homo sapiens
ggcccagtggggtcc

SEQ ID NO: 1980059 - DNA, 15 bp, Homo sapiens
gcccagtggggtccc

SEQ ID NO: 1980060 - DNA, 15 bp, Homo sapiens
cccagtggggtcccc

SEQ ID NO: 1980061 - DNA, 15 bp, Homo sapiens
ccagtggggtcccct

SEQ ID NO: 1980062 - DNA, 15 bp, Homo sapiens
cagtggggtcccctg

SEQ ID NO: 1980063 - DNA, 15 bp, Homo sapiens
agtggggtcccctga

SEQ ID NO: 1980064 - DNA, 15 bp, Homo sapiens
gtggggtcccctgag

SEQ ID NO: 1980065 - DNA, 15 bp, Homo sapiens
tggggtcccctgagc

SEQ ID NO: 1980066 - DNA, 15 bp, Homo sapiens
ggggtcccctgagcc

SEQ ID NO: 1980067 - DNA, 15 bp, Homo sapiens
gggtcccctgagcca

SEQ ID NO: 1980068 - DNA, 15 bp, Homo sapiens
ggtcccctgagccac

SEQ ID NO: 1980069 - DNA, 15 bp, Homo sapiens
gtcccctgagccact

SEQ ID NO: 1980070 - DNA, 15 bp, Homo sapiens
tcccctgagccactg

SEQ ID NO: 1980071 - DNA, 15 bp, Homo sapiens
cccctgagccactgc

SEQ ID NO: 1980072 - DNA, 15 bp, Homo sapiens
ccctgagccactgct

SEQ ID NO: 1980073 - DNA, 15 bp, Homo sapiens
cctgagccactgctc

SEQ ID NO: 1980074 - DNA, 15 bp, Homo sapiens
ctgagccactgctcc

SEQ ID NO: 1980075 - DNA, 15 bp, Homo sapiens
gagccactgctcccc

SEQ ID NO: 1980076 - DNA, 15 bp, Homo sapiens
gccactgctcccctg

SEQ ID NO: 1980077 - DNA, 15 bp, Homo sapiens
ccactgctcccctgc

SEQ ID NO: 1980078 - DNA, 15 bp, Homo sapiens
cactgctcccctgca

SEQ ID NO: 1980079 - DNA, 15 bp, Homo sapiens
actgctcccctgcag

SEQ ID NO: 1980080 - DNA, 15 bp, Homo sapiens
ctgctcccctgcagg

SEQ ID NO: 1980081 - DNA, 15 bp, Homo sapiens
tgctcccctgcaggg

SEQ ID NO: 1980082 - DNA, 15 bp, Homo sapiens
gctcccctgcagggt

SEQ ID NO: 1980083 - DNA, 15 bp, Homo sapiens
ctcccctgcagggtc

SEQ ID NO: 1980084 - DNA, 15 bp, Homo sapiens
tcccctgcagggtcc

SEQ ID NO: 1980085 - DNA, 15 bp, Homo sapiens
cccctgcagggtcca

SEQ ID NO: 1980086 - DNA, 15 bp, Homo sapiens
ccctgcagggtccac

SEQ ID NO: 1980087 - DNA, 15 bp, Homo sapiens
cctgcagggtccaca

SEQ ID NO: 1980088 - DNA, 15 bp, Homo sapiens
ctgcagggtccacaa

SEQ ID NO: 1980089 - DNA, 15 bp, Homo sapiens
tgcagggtccacaaa

SEQ ID NO: 1980090 - DNA, 15 bp, Homo sapiens
gcagggtccacaaac

SEQ ID NO: 1980091 - DNA, 15 bp, Homo sapiens
cagggtccacaaact

SEQ ID NO: 1980092 - DNA, 15 bp, Homo sapiens
agggtccacaaactg

SEQ ID NO: 1980093 - DNA, 15 bp, Homo sapiens
gggtccacaaactga

SEQ ID NO: 1980094 - DNA, 15 bp, Homo sapiens
ggtccacaaactgac

SEQ ID NO: 1980095 - DNA, 15 bp, Homo sapiens
gtccacaaactgacc

SEQ ID NO: 1980096 - DNA, 15 bp, Homo sapiens
tccacaaactgacca

SEQ ID NO: 1980097 - DNA, 15 bp, Homo sapiens
ccacaaactgaccat

SEQ ID NO: 1980098 - DNA, 15 bp, Homo sapiens
cacaaactgaccatt

SEQ ID NO: 1980099 - DNA, 15 bp, Homo sapiens
acaaactgaccattg

SEQ ID NO: 1980100 - DNA, 15 bp, Homo sapiens
caaactgaccattga

SEQ ID NO: 1980101 - DNA, 15 bp, Homo sapiens
aaactgaccattgac

SEQ ID NO: 1980102 - DNA, 15 bp, Homo sapiens
aactgaccattgacg

SEQ ID NO: 1980103 - DNA, 15 bp, Homo sapiens
actgaccattgacga

SEQ ID NO: 1980104 - DNA, 15 bp, Homo sapiens
ctgaccattgacgac

SEQ ID NO: 1980105 - DNA, 15 bp, Homo sapiens
tgaccattgacgacg

SEQ ID NO: 1980106 - DNA, 15 bp, Homo sapiens
gaccattgacgacgt

SEQ ID NO: 1980107 - DNA, 15 bp, Homo sapiens
accattgacgacgtc

SEQ ID NO: 1980108 - DNA, 15 bp, Homo sapiens
ccattgacgacgtca

SEQ ID NO: 1980109 - DNA, 15 bp, Homo sapiens
cattgacgacgtcac

SEQ ID NO: 1980110 - DNA, 15 bp, Homo sapiens
attgacgacgtcaca

SEQ ID NO: 1980111 - DNA, 15 bp, Homo sapiens
ttgacgacgtcacac

SEQ ID NO: 1980112 - DNA, 15 bp, Homo sapiens
tgacgacgtcacacc

SEQ ID NO: 1980113 - DNA, 15 bp, Homo sapiens
gacgacgtcacacct

SEQ ID NO: 1980114 - DNA, 15 bp, Homo sapiens
acgacgtcacacctg

SEQ ID NO: 1980115 - DNA, 15 bp, Homo sapiens
cgacgtcacacctgc

SEQ ID NO: 1980116 - DNA, 15 bp, Homo sapiens
gacgtcacacctgcc

SEQ ID NO: 1980117 - DNA, 15 bp, Homo sapiens
acgtcacacctgccg

SEQ ID NO: 1980118 - DNA, 15 bp, Homo sapiens
cgtcacacctgccga

SEQ ID NO: 1980119 - DNA, 15 bp, Homo sapiens
gtcacacctgccgac

SEQ ID NO: 1980120 - DNA, 15 bp, Homo sapiens
tcacacctgccgacg

SEQ ID NO: 1980121 - DNA, 15 bp, Homo sapiens
cacacctgccgacga

SEQ ID NO: 1980122 - DNA, 15 bp, Homo sapiens
acacctgccgacgag

SEQ ID NO: 1980123 - DNA, 15 bp, Homo sapiens
cacctgccgacgagg

SEQ ID NO: 1980124 - DNA, 15 bp, Homo sapiens
acctgccgacgaggc

SEQ ID NO: 1980125 - DNA, 15 bp, Homo sapiens
cctgccgacgaggct

SEQ ID NO: 1980126 - DNA, 15 bp, Homo sapiens
ctgccgacgaggctg

SEQ ID NO: 1980127 - DNA, 15 bp, Homo sapiens
tgccgacgaggctga

SEQ ID NO: 1980128 - DNA, 15 bp, Homo sapiens
gccgacgaggctgac

SEQ ID NO: 1980129 - DNA, 15 bp, Homo sapiens
ccgacgaggctgact

SEQ ID NO: 1980130 - DNA, 15 bp, Homo sapiens
cgacgaggctgacta

SEQ ID NO: 1980131 - DNA, 15 bp, Homo sapiens
gacgaggctgactac

SEQ ID NO: 1980132 - DNA, 15 bp, Homo sapiens
acgaggctgactaca

SEQ ID NO: 1980133 - DNA, 15 bp, Homo sapiens
cgaggctgactacag

SEQ ID NO: 1980134 - DNA, 15 bp, Homo sapiens
gaggctgactacagc

SEQ ID NO: 1980135 - DNA, 15 bp, Homo sapiens
aggctgactacagct

SEQ ID NO: 1980136 - DNA, 15 bp, Homo sapiens
ggctgactacagctt

SEQ ID NO: 1980137 - DNA, 15 bp, Homo sapiens
gctgactacagcttt

SEQ ID NO: 1980138 - DNA, 15 bp, Homo sapiens
ctgactacagctttg

SEQ ID NO: 1980139 - DNA, 15 bp, Homo sapiens
tgactacagctttgt

SEQ ID NO: 1980140 - DNA, 15 bp, Homo sapiens
gactacagctttgtg

SEQ ID NO: 1980141 - DNA, 15 bp, Homo sapiens
actacagctttgtgc

SEQ ID NO: 1980142 - DNA, 15 bp, Homo sapiens
ctacagctttgtgcc

SEQ ID NO: 1980143 - DNA, 15 bp, Homo sapiens
tacagctttgtgccc

SEQ ID NO: 1980144 - DNA, 15 bp, Homo sapiens
acagctttgtgcccg

SEQ ID NO: 1980145 - DNA, 15 bp, Homo sapiens
cagctttgtgcccga

SEQ ID NO: 1980146 - DNA, 15 bp, Homo sapiens
agctttgtgcccgag

SEQ ID NO: 1980147 - DNA, 15 bp, Homo sapiens
gctttgtgcccgagg

SEQ ID NO: 1980148 - DNA, 15 bp, Homo sapiens
ctttgtgcccgaggg

SEQ ID NO: 1980149 - DNA, 15 bp, Homo sapiens
tttgtgcccgagggc

SEQ ID NO: 1980150 - DNA, 15 bp, Homo sapiens
ttgtgcccgagggct

SEQ ID NO: 1980151 - DNA, 15 bp, Homo sapiens
tgtgcccgagggctt

SEQ ID NO: 1980152 - DNA, 15 bp, Homo sapiens
gtgcccgagggcttc

SEQ ID NO: 1980153 - DNA, 15 bp, Homo sapiens
tgcccgagggcttcg

SEQ ID NO: 1980154 - DNA, 15 bp, Homo sapiens
gcccgagggcttcgc

SEQ ID NO: 1980155 - DNA, 15 bp, Homo sapiens
cccgagggcttcgcc

SEQ ID NO: 1980156 - DNA, 15 bp, Homo sapiens
ccgagggcttcgcct

SEQ ID NO: 1980157 - DNA, 15 bp, Homo sapiens
cgagggcttcgcctg

SEQ ID NO: 1980158 - DNA, 15 bp, Homo sapiens
gagggcttcgcctgc

SEQ ID NO: 1980159 - DNA, 15 bp, Homo sapiens
agggcttcgcctgca

SEQ ID NO: 1980160 - DNA, 15 bp, Homo sapiens
gggcttcgcctgcaa

SEQ ID NO: 1980161 - DNA, 15 bp, Homo sapiens
ggcttcgcctgcaac

SEQ ID NO: 1980162 - DNA, 15 bp, Homo sapiens
gcttcgcctgcaacc

SEQ ID NO: 1980163 - DNA, 15 bp, Homo sapiens
cttcgcctgcaacct

SEQ ID NO: 1980164 - DNA, 15 bp, Homo sapiens
ttcgcctgcaacctg

SEQ ID NO: 1980165 - DNA, 15 bp, Homo sapiens
tcgcctgcaacctgt

SEQ ID NO: 1980166 - DNA, 15 bp, Homo sapiens
cgcctgcaacctgtc

SEQ ID NO: 1980167 - DNA, 15 bp, Homo sapiens
gcctgcaacctgtca

SEQ ID NO: 1980168 - DNA, 15 bp, Homo sapiens
cctgcaacctgtcag

SEQ ID NO: 1980169 - DNA, 15 bp, Homo sapiens
ctgcaacctgtcagc

SEQ ID NO: 1980170 - DNA, 15 bp, Homo sapiens
tgcaacctgtcagcc

SEQ ID NO: 1980171 - DNA, 15 bp, Homo sapiens
gcaacctgtcagcca

SEQ ID NO: 1980172 - DNA, 15 bp, Homo sapiens
caacctgtcagccaa

SEQ ID NO: 1980173 - DNA, 15 bp, Homo sapiens
aacctgtcagccaag

SEQ ID NO: 1980174 - DNA, 15 bp, Homo sapiens
acctgtcagccaagc

SEQ ID NO: 1980175 - DNA, 15 bp, Homo sapiens
cctgtcagccaagct

SEQ ID NO: 1980176 - DNA, 15 bp, Homo sapiens
ctgtcagccaagctc

SEQ ID NO: 1980177 - DNA, 15 bp, Homo sapiens
tgtcagccaagctcc

SEQ ID NO: 1980178 - DNA, 15 bp, Homo sapiens
gtcagccaagctcca

SEQ ID NO: 1980179 - DNA, 15 bp, Homo sapiens
tcagccaagctccac

SEQ ID NO: 1980180 - DNA, 15 bp, Homo sapiens
cagccaagctccact

SEQ ID NO: 1980181 - DNA, 15 bp, Homo sapiens
agccaagctccactt

SEQ ID NO: 1980182 - DNA, 15 bp, Homo sapiens
gccaagctccacttc

SEQ ID NO: 1980183 - DNA, 15 bp, Homo sapiens
ccaagctccacttca

SEQ ID NO: 1980184 - DNA, 15 bp, Homo sapiens
caagctccacttcat

SEQ ID NO: 1980185 - DNA, 15 bp, Homo sapiens
aagctccacttcatg

SEQ ID NO: 1980186 - DNA, 15 bp, Homo sapiens
agctccacttcatgg

SEQ ID NO: 1980187 - DNA, 15 bp, Homo sapiens
gctccacttcatggg

SEQ ID NO: 1980188 - DNA, 15 bp, Homo sapiens
ctccacttcatgggt

SEQ ID NO: 1980189 - DNA, 15 bp, Homo sapiens
tccacttcatgggtg

SEQ ID NO: 1980190 - DNA, 15 bp, Homo sapiens
ccacttcatgggtga

SEQ ID NO: 1980191 - DNA, 15 bp, Homo sapiens
cacttcatgggtgag

SEQ ID NO: 1980192 - DNA, 15 bp, Homo sapiens
acttcatgggtgagc

SEQ ID NO: 1980193 - DNA, 15 bp, Homo sapiens
cttcatgggtgagcc

SEQ ID NO: 1980194 - DNA, 15 bp, Homo sapiens
ttcatgggtgagcct

SEQ ID NO: 1980195 - DNA, 15 bp, Homo sapiens
tcatgggtgagcctg

SEQ ID NO: 1980196 - DNA, 15 bp, Homo sapiens
catgggtgagcctgc

SEQ ID NO: 1980197 - DNA, 15 bp, Homo sapiens
atgggtgagcctgct

SEQ ID NO: 1980198 - DNA, 15 bp, Homo sapiens
tgggtgagcctgctc

SEQ ID NO: 1980199 - DNA, 15 bp, Homo sapiens
gggtgagcctgctcc

SEQ ID NO: 1980200 - DNA, 15 bp, Homo sapiens
ggtgagcctgctcca

SEQ ID NO: 1980201 - DNA, 15 bp, Homo sapiens
gtgagcctgctccag

SEQ ID NO: 1980202 - DNA, 15 bp, Homo sapiens
tgagcctgctccagg

SEQ ID NO: 1980203 - DNA, 15 bp, Homo sapiens
gagcctgctccaggg

SEQ ID NO: 1980204 - DNA, 15 bp, Homo sapiens
agcctgctccagggt

SEQ ID NO: 1980205 - DNA, 15 bp, Homo sapiens
gcctgctccagggta

SEQ ID NO: 1980206 - DNA, 15 bp, Homo sapiens
cctgctccagggtag

SEQ ID NO: 1980207 - DNA, 15 bp, Homo sapiens
ctgctccagggtagg

SEQ ID NO: 1980208 - DNA, 15 bp, Homo sapiens
tgctccagggtaggg

SEQ ID NO: 1980209 - DNA, 15 bp, Homo sapiens
gctccagggtagggt

SEQ ID NO: 1980210 - DNA, 15 bp, Homo sapiens
ctccagggtagggtg

SEQ ID NO: 1980211 - DNA, 15 bp, Homo sapiens
tccagggtagggtgg

SEQ ID NO: 1980212 - DNA, 15 bp, Homo sapiens
ccagggtagggtggg

SEQ ID NO: 1980213 - DNA, 15 bp, Homo sapiens
cagggtagggtgggt

SEQ ID NO: 1980214 - DNA, 15 bp, Homo sapiens
agggtagggtgggtc

SEQ ID NO: 1980215 - DNA, 15 bp, Homo sapiens
gggtagggtgggtcg

SEQ ID NO: 1980216 - DNA, 15 bp, Homo sapiens
ggtagggtgggtcgg

SEQ ID NO: 1980217 - DNA, 15 bp, Homo sapiens
gtagggtgggtcggg

SEQ ID NO: 1980218 - DNA, 15 bp, Homo sapiens
tagggtgggtcgggg

SEQ ID NO: 1980219 - DNA, 15 bp, Homo sapiens
agggtgggtcggggc

SEQ ID NO: 1980220 - DNA, 15 bp, Homo sapiens
gggtgggtcggggca

SEQ ID NO: 1980221 - DNA, 15 bp, Homo sapiens
ggtgggtcggggcag

SEQ ID NO: 1980222 - DNA, 15 bp, Homo sapiens
gtgggtcggggcagt

SEQ ID NO: 1980223 - DNA, 15 bp, Homo sapiens
tgggtcggggcagtg

SEQ ID NO: 1980224 - DNA, 15 bp, Homo sapiens
gggtcggggcagtgg

SEQ ID NO: 1980225 - DNA, 15 bp, Homo sapiens
ggtcggggcagtggg

SEQ ID NO: 1980226 - DNA, 15 bp, Homo sapiens
gtcggggcagtgggg

SEQ ID NO: 1980227 - DNA, 15 bp, Homo sapiens
tcggggcagtggggc

SEQ ID NO: 1980228 - DNA, 15 bp, Homo sapiens
cggggcagtggggcc

SEQ ID NO: 1980229 - DNA, 15 bp, Homo sapiens
ggggcagtggggcca

SEQ ID NO: 1980230 - DNA, 15 bp, Homo sapiens
gggcagtggggccag

SEQ ID NO: 1980231 - DNA, 15 bp, Homo sapiens
ggcagtggggccagg

SEQ ID NO: 1980232 - DNA, 15 bp, Homo sapiens
gcagtggggccagga

SEQ ID NO: 1980233 - DNA, 15 bp, Homo sapiens
cagtggggccaggag

SEQ ID NO: 1980234 - DNA, 15 bp, Homo sapiens
agtggggccaggagc

SEQ ID NO: 1980235 - DNA, 15 bp, Homo sapiens
gtggggccaggagcc

SEQ ID NO: 1980236 - DNA, 15 bp, Homo sapiens
tggggccaggagccc

SEQ ID NO: 1980237 - DNA, 15 bp, Homo sapiens
ggggccaggagcccc

SEQ ID NO: 1980238 - DNA, 15 bp, Homo sapiens
gggccaggagcccct

SEQ ID NO: 1980239 - DNA, 15 bp, Homo sapiens
ggccaggagcccctg

SEQ ID NO: 1980240 - DNA, 15 bp, Homo sapiens
gccaggagcccctgt

SEQ ID NO: 1980241 - DNA, 15 bp, Homo sapiens
ccaggagcccctgtc

SEQ ID NO: 1980242 - DNA, 15 bp, Homo sapiens
caggagcccctgtca

SEQ ID NO: 1980243 - DNA, 15 bp, Homo sapiens
aggagcccctgtcac

SEQ ID NO: 1980244 - DNA, 15 bp, Homo sapiens
ggagcccctgtcact

SEQ ID NO: 1980245 - DNA, 15 bp, Homo sapiens
gagcccctgtcactg

SEQ ID NO: 1980246 - DNA, 15 bp, Homo sapiens
agcccctgtcactgg

SEQ ID NO: 1980247 - DNA, 15 bp, Homo sapiens
gcccctgtcactggg

SEQ ID NO: 1980248 - DNA, 15 bp, Homo sapiens
cccctgtcactgggc

SEQ ID NO: 1980249 - DNA, 15 bp, Homo sapiens
ccctgtcactgggcc

SEQ ID NO: 1980250 - DNA, 15 bp, Homo sapiens
cctgtcactgggccc

SEQ ID NO: 1980251 - DNA, 15 bp, Homo sapiens
ctgtcactgggccct

SEQ ID NO: 1980252 - DNA, 15 bp, Homo sapiens
tgtcactgggccctg

SEQ ID NO: 1980253 - DNA, 15 bp, Homo sapiens
gtcactgggccctgc

SEQ ID NO: 1980254 - DNA, 15 bp, Homo sapiens
tcactgggccctgcc

SEQ ID NO: 1980255 - DNA, 15 bp, Homo sapiens
cactgggccctgcct

SEQ ID NO: 1980256 - DNA, 15 bp, Homo sapiens
actgggccctgcctt

SEQ ID NO: 1980257 - DNA, 15 bp, Homo sapiens
ctgggccctgccttt

SEQ ID NO: 1980258 - DNA, 15 bp, Homo sapiens
tgggccctgcctttg

SEQ ID NO: 1980259 - DNA, 15 bp, Homo sapiens
gggccctgcctttgc

SEQ ID NO: 1980260 - DNA, 15 bp, Homo sapiens
ggccctgcctttgcc

SEQ ID NO: 1980261 - DNA, 15 bp, Homo sapiens
gccctgcctttgccc

SEQ ID NO: 1980262 - DNA, 15 bp, Homo sapiens
ccctgcctttgcccc

SEQ ID NO: 1980263 - DNA, 15 bp, Homo sapiens
cctgcctttgccccc

SEQ ID NO: 1980264 - DNA, 15 bp, Homo sapiens
ctgcctttgcccccg

SEQ ID NO: 1980265 - DNA, 15 bp, Homo sapiens
tgcctttgcccccgt

SEQ ID NO: 1980266 - DNA, 15 bp, Homo sapiens
gcctttgcccccgtg

SEQ ID NO: 1980267 - DNA, 15 bp, Homo sapiens
cctttgcccccgtgc

SEQ ID NO: 1980268 - DNA, 15 bp, Homo sapiens
ctttgcccccgtgct

SEQ ID NO: 1980269 - DNA, 15 bp, Homo sapiens
tttgcccccgtgcta

SEQ ID NO: 1980270 - DNA, 15 bp, Homo sapiens
ttgcccccgtgctac

SEQ ID NO: 1980271 - DNA, 15 bp, Homo sapiens
tgcccccgtgctact

SEQ ID NO: 1980272 - DNA, 15 bp, Homo sapiens
gcccccgtgctactt

SEQ ID NO: 1980273 - DNA, 15 bp, Homo sapiens
cccccgtgctacttg

SEQ ID NO: 1980274 - DNA, 15 bp, Homo sapiens
ccccgtgctacttgc

SEQ ID NO: 1980275 - DNA, 15 bp, Homo sapiens
cccgtgctacttgct

SEQ ID NO: 1980276 - DNA, 15 bp, Homo sapiens
ccgtgctacttgctc

SEQ ID NO: 1980277 - DNA, 15 bp, Homo sapiens
cgtgctacttgctct

SEQ ID NO: 1980278 - DNA, 15 bp, Homo sapiens
gtgctacttgctctt

SEQ ID NO: 1980279 - DNA, 15 bp, Homo sapiens
tgctacttgctcttc

SEQ ID NO: 1980280 - DNA, 15 bp, Homo sapiens
gctacttgctcttcc

SEQ ID NO: 1980281 - DNA, 15 bp, Homo sapiens
ctacttgctcttcct

SEQ ID NO: 1980282 - DNA, 15 bp, Homo sapiens
tacttgctcttcctt

SEQ ID NO: 1980283 - DNA, 15 bp, Homo sapiens
ttgctcttccttctc

SEQ ID NO: 1980284 - DNA, 15 bp, Homo sapiens
tgctcttccttctct

SEQ ID NO: 1980285 - DNA, 15 bp, Homo sapiens
gctcttccttctctt

SEQ ID NO: 1980286 - DNA, 15 bp, Homo sapiens
ctcttccttctcttg

SEQ ID NO: 1980287 - DNA, 15 bp, Homo sapiens
tcttccttctcttgc

SEQ ID NO: 1980288 - DNA, 15 bp, Homo sapiens
cttccttctcttgca

SEQ ID NO: 1980289 - DNA, 15 bp, Homo sapiens
ttccttctcttgcag

SEQ ID NO: 1980290 - DNA, 15 bp, Homo sapiens
tccttctcttgcaga

SEQ ID NO: 1980291 - DNA, 15 bp, Homo sapiens
ccttctcttgcagag

SEQ ID NO: 1980292 - DNA, 15 bp, Homo sapiens
cttctcttgcagagg

SEQ ID NO: 1980293 - DNA, 15 bp, Homo sapiens
ttctcttgcagaggt

SEQ ID NO: 1980294 - DNA, 15 bp, Homo sapiens
tctcttgcagaggtc

SEQ ID NO: 1980295 - DNA, 15 bp, Homo sapiens
ctcttgcagaggtca

SEQ ID NO: 1980296 - DNA, 15 bp, Homo sapiens
tcttgcagaggtcaa

SEQ ID NO: 1980297 - DNA, 15 bp, Homo sapiens
cttgcagaggtcaag

SEQ ID NO: 1980298 - DNA, 15 bp, Homo sapiens
ttgcagaggtcaaga

SEQ ID NO: 1980299 - DNA, 15 bp, Homo sapiens
tgcagaggtcaagat

SEQ ID NO: 1980300 - DNA, 15 bp, Homo sapiens
gcagaggtcaagatt

SEQ ID NO: 1980301 - DNA, 15 bp, Homo sapiens
cagaggtcaagattg

SEQ ID NO: 1980302 - DNA, 15 bp, Homo sapiens
agaggtcaagattga

SEQ ID NO: 1980303 - DNA, 15 bp, Homo sapiens
gaggtcaagattgac

SEQ ID NO: 1980304 - DNA, 15 bp, Homo sapiens
aggtcaagattgact

SEQ ID NO: 1980305 - DNA, 15 bp, Homo sapiens
ggtcaagattgactt

SEQ ID NO: 1980306 - DNA, 15 bp, Homo sapiens
gtcaagattgacttc

SEQ ID NO: 1980307 - DNA, 15 bp, Homo sapiens
tcaagattgacttcg

SEQ ID NO: 1980308 - DNA, 15 bp, Homo sapiens
caagattgacttcgt

SEQ ID NO: 1980309 - DNA, 15 bp, Homo sapiens
aagattgacttcgta

SEQ ID NO: 1980310 - DNA, 15 bp, Homo sapiens
agattgacttcgtac

SEQ ID NO: 1980311 - DNA, 15 bp, Homo sapiens
gattgacttcgtacc

SEQ ID NO: 1980312 - DNA, 15 bp, Homo sapiens
attgacttcgtaccc

SEQ ID NO: 1980313 - DNA, 15 bp, Homo sapiens
ttgacttcgtaccca

SEQ ID NO: 1980314 - DNA, 15 bp, Homo sapiens
tgacttcgtacccag

SEQ ID NO: 1980315 - DNA, 15 bp, Homo sapiens
gacttcgtacccagg

SEQ ID NO: 1980316 - DNA, 15 bp, Homo sapiens
acttcgtacccaggc

SEQ ID NO: 1980317 - DNA, 15 bp, Homo sapiens
cttcgtacccaggca

SEQ ID NO: 1980318 - DNA, 15 bp, Homo sapiens
ttcgtacccaggcag

SEQ ID NO: 1980319 - DNA, 15 bp, Homo sapiens
tcgtacccaggcagg

SEQ ID NO: 1980320 - DNA, 15 bp, Homo sapiens
cgtacccaggcaggg

SEQ ID NO: 1980321 - DNA, 15 bp, Homo sapiens
gtacccaggcagggt

SEQ ID NO: 1980322 - DNA, 15 bp, Homo sapiens
tacccaggcagggta

SEQ ID NO: 1980323 - DNA, 15 bp, Homo sapiens
acccaggcagggtaa

SEQ ID NO: 1980324 - DNA, 15 bp, Homo sapiens
cccaggcagggtaag

SEQ ID NO: 1980325 - DNA, 15 bp, Homo sapiens
ccaggcagggtaagt

SEQ ID NO: 1980326 - DNA, 15 bp, Homo sapiens
caggcagggtaagtc

SEQ ID NO: 1980327 - DNA, 15 bp, Homo sapiens
aggcagggtaagtct

SEQ ID NO: 1980328 - DNA, 15 bp, Homo sapiens
ggcagggtaagtctt

SEQ ID NO: 1980329 - DNA, 15 bp, Homo sapiens
gcagggtaagtcttg

SEQ ID NO: 1980330 - DNA, 15 bp, Homo sapiens
cagggtaagtcttgg

SEQ ID NO: 1980331 - DNA, 15 bp, Homo sapiens
agggtaagtcttggg

SEQ ID NO: 1980332 - DNA, 15 bp, Homo sapiens
gggtaagtcttgggg

SEQ ID NO: 1980333 - DNA, 15 bp, Homo sapiens
ggtaagtcttggggc

SEQ ID NO: 1980334 - DNA, 15 bp, Homo sapiens
gtaagtcttggggcc

SEQ ID NO: 1980335 - DNA, 15 bp, Homo sapiens
taagtcttggggccc

SEQ ID NO: 1980336 - DNA, 15 bp, Homo sapiens
aagtcttggggcccc

SEQ ID NO: 1980337 - DNA, 15 bp, Homo sapiens
agtcttggggcccct

SEQ ID NO: 1980338 - DNA, 15 bp, Homo sapiens
gtcttggggcccctg

SEQ ID NO: 1980339 - DNA, 15 bp, Homo sapiens
tcttggggcccctga

SEQ ID NO: 1980340 - DNA, 15 bp, Homo sapiens
cttggggcccctgag

SEQ ID NO: 1980341 - DNA, 15 bp, Homo sapiens
ttggggcccctgagt

SEQ ID NO: 1980342 - DNA, 15 bp, Homo sapiens
tggggcccctgagtc

SEQ ID NO: 1980343 - DNA, 15 bp, Homo sapiens
ggggcccctgagtct

SEQ ID NO: 1980344 - DNA, 15 bp, Homo sapiens
gggcccctgagtctt

SEQ ID NO: 1980345 - DNA, 15 bp, Homo sapiens
ggcccctgagtcttg

SEQ ID NO: 1980346 - DNA, 15 bp, Homo sapiens
gcccctgagtcttgg

SEQ ID NO: 1980347 - DNA, 15 bp, Homo sapiens
cccctgagtcttggt

SEQ ID NO: 1980348 - DNA, 15 bp, Homo sapiens
ccctgagtcttggtt

SEQ ID NO: 1980349 - DNA, 15 bp, Homo sapiens
cctgagtcttggttc

SEQ ID NO: 1980350 - DNA, 15 bp, Homo sapiens
ctgagtcttggttct

SEQ ID NO: 1980351 - DNA, 15 bp, Homo sapiens
tgagtcttggttctg

SEQ ID NO: 1980352 - DNA, 15 bp, Homo sapiens
gagtcttggttctgc

SEQ ID NO: 1980353 - DNA, 15 bp, Homo sapiens
agtcttggttctgct

SEQ ID NO: 1980354 - DNA, 15 bp, Homo sapiens
gtcttggttctgctc

SEQ ID NO: 1980355 - DNA, 15 bp, Homo sapiens
tcttggttctgctca

SEQ ID NO: 1980356 - DNA, 15 bp, Homo sapiens
cttggttctgctcac

SEQ ID NO: 1980357 - DNA, 15 bp, Homo sapiens
ttggttctgctcact

SEQ ID NO: 1980358 - DNA, 15 bp, Homo sapiens
tggttctgctcactt

SEQ ID NO: 1980359 - DNA, 15 bp, Homo sapiens
ggttctgctcacttt

SEQ ID NO: 1980360 - DNA, 15 bp, Homo sapiens
gttctgctcactttc

SEQ ID NO: 1980361 - DNA, 15 bp, Homo sapiens
ttctgctcactttcc

SEQ ID NO: 1980362 - DNA, 15 bp, Homo sapiens
tctgctcactttccc

SEQ ID NO: 1980363 - DNA, 15 bp, Homo sapiens
ctgctcactttcccg

SEQ ID NO: 1980364 - DNA, 15 bp, Homo sapiens
tgctcactttcccgc

SEQ ID NO: 1980365 - DNA, 15 bp, Homo sapiens
gctcactttcccgca

SEQ ID NO: 1980366 - DNA, 15 bp, Homo sapiens
ctcactttcccgcaa

SEQ ID NO: 1980367 - DNA, 15 bp, Homo sapiens
tcactttcccgcaac

SEQ ID NO: 1980368 - DNA, 15 bp, Homo sapiens
cactttcccgcaacc

SEQ ID NO: 1980369 - DNA, 15 bp, Homo sapiens
actttcccgcaaccc

SEQ ID NO: 1980370 - DNA, 15 bp, Homo sapiens
ctttcccgcaaccca

SEQ ID NO: 1980371 - DNA, 15 bp, Homo sapiens
tttcccgcaacccac

SEQ ID NO: 1980372 - DNA, 15 bp, Homo sapiens
ttcccgcaacccacc

SEQ ID NO: 1980373 - DNA, 15 bp, Homo sapiens
tcccgcaacccaccc

SEQ ID NO: 1980374 - DNA, 15 bp, Homo sapiens
cccgcaacccaccca

SEQ ID NO: 1980375 - DNA, 15 bp, Homo sapiens
ccgcaacccacccac

SEQ ID NO: 1980376 - DNA, 15 bp, Homo sapiens
cgcaacccacccacg

SEQ ID NO: 1980377 - DNA, 15 bp, Homo sapiens
gcaacccacccacgc

SEQ ID NO: 1980378 - DNA, 15 bp, Homo sapiens
caacccacccacgca

SEQ ID NO: 1980379 - DNA, 15 bp, Homo sapiens
aacccacccacgcag

SEQ ID NO: 1980380 - DNA, 15 bp, Homo sapiens
acccacccacgcagg

SEQ ID NO: 1980381 - DNA, 15 bp, Homo sapiens
cccacccacgcaggc

SEQ ID NO: 1980382 - DNA, 15 bp, Homo sapiens
ccacccacgcaggcc

SEQ ID NO: 1980383 - DNA, 15 bp, Homo sapiens
cacccacgcaggcct

SEQ ID NO: 1980384 - DNA, 15 bp, Homo sapiens
acccacgcaggcctc

SEQ ID NO: 1980385 - DNA, 15 bp, Homo sapiens
cccacgcaggcctcc

SEQ ID NO: 1980386 - DNA, 15 bp, Homo sapiens
ccacgcaggcctccc

SEQ ID NO: 1980387 - DNA, 15 bp, Homo sapiens
cacgcaggcctcccc

SEQ ID NO: 1980388 - DNA, 15 bp, Homo sapiens
acgcaggcctcccct

SEQ ID NO: 1980389 - DNA, 15 bp, Homo sapiens
cgcaggcctcccctc

SEQ ID NO: 1980390 - DNA, 15 bp, Homo sapiens
gcaggcctcccctcc

SEQ ID NO: 1980391 - DNA, 15 bp, Homo sapiens
caggcctcccctcca

SEQ ID NO: 1980392 - DNA, 15 bp, Homo sapiens
aggcctcccctccac

SEQ ID NO: 1980393 - DNA, 15 bp, Homo sapiens
ggcctcccctccact

SEQ ID NO: 1980394 - DNA, 15 bp, Homo sapiens
gcctcccctccactc

SEQ ID NO: 1980395 - DNA, 15 bp, Homo sapiens
cctcccctccactca

SEQ ID NO: 1980396 - DNA, 15 bp, Homo sapiens
ctcccctccactcac

SEQ ID NO: 1980397 - DNA, 15 bp, Homo sapiens
tcccctccactcaca

SEQ ID NO: 1980398 - DNA, 15 bp, Homo sapiens
cccctccactcacag

SEQ ID NO: 1980399 - DNA, 15 bp, Homo sapiens
ccctccactcacaga

SEQ ID NO: 1980400 - DNA, 15 bp, Homo sapiens
cctccactcacagag

SEQ ID NO: 1980401 - DNA, 15 bp, Homo sapiens
ctccactcacagagg

SEQ ID NO: 1980402 - DNA, 15 bp, Homo sapiens
tccactcacagaggg

SEQ ID NO: 1980403 - DNA, 15 bp, Homo sapiens
ccactcacagaggga

SEQ ID NO: 1980404 - DNA, 15 bp, Homo sapiens
cactcacagagggaa

SEQ ID NO: 1980405 - DNA, 15 bp, Homo sapiens
actcacagagggaag

SEQ ID NO: 1980406 - DNA, 15 bp, Homo sapiens
ctcacagagggaaga

SEQ ID NO: 1980407 - DNA, 15 bp, Homo sapiens
tcacagagggaagag

SEQ ID NO: 1980408 - DNA, 15 bp, Homo sapiens
cacagagggaagagc

SEQ ID NO: 1980409 - DNA, 15 bp, Homo sapiens
acagagggaagagca

SEQ ID NO: 1980410 - DNA, 15 bp, Homo sapiens
cagagggaagagcaa

SEQ ID NO: 1980411 - DNA, 15 bp, Homo sapiens
agagggaagagcaag

SEQ ID NO: 1980412 - DNA, 15 bp, Homo sapiens
gagggaagagcaagg

SEQ ID NO: 1980413 - DNA, 15 bp, Homo sapiens
agggaagagcaagga

SEQ ID NO: 1980414 - DNA, 15 bp, Homo sapiens
gggaagagcaaggat

SEQ ID NO: 1980415 - DNA, 15 bp, Homo sapiens
ggaagagcaaggatc

SEQ ID NO: 1980416 - DNA, 15 bp, Homo sapiens
gaagagcaaggatca

SEQ ID NO: 1980417 - DNA, 15 bp, Homo sapiens
aagagcaaggatcaa

SEQ ID NO: 1980418 - DNA, 15 bp, Homo sapiens
agagcaaggatcaaa

SEQ ID NO: 1980419 - DNA, 15 bp, Homo sapiens
gagcaaggatcaaaa

SEQ ID NO: 1980420 - DNA, 15 bp, Homo sapiens
agcaaggatcaaaag

SEQ ID NO: 1980421 - DNA, 15 bp, Homo sapiens
gcaaggatcaaaagt

SEQ ID NO: 1980422 - DNA, 15 bp, Homo sapiens
caaggatcaaaagtg

SEQ ID NO: 1980423 - DNA, 15 bp, Homo sapiens
aaggatcaaaagtgg

SEQ ID NO: 1980424 - DNA, 15 bp, Homo sapiens
ggatcaaaagtgggg

SEQ ID NO: 1980425 - DNA, 15 bp, Homo sapiens
gatcaaaagtggggg

SEQ ID NO: 1980426 - DNA, 15 bp, Homo sapiens
atcaaaagtgggggt

SEQ ID NO: 1980427 - DNA, 15 bp, Homo sapiens
tcaaaagtgggggtc

SEQ ID NO: 1980428 - DNA, 15 bp, Homo sapiens
caaaagtgggggtcc

SEQ ID NO: 1980429 - DNA, 15 bp, Homo sapiens
aaaagtgggggtcct

SEQ ID NO: 1980430 - DNA, 15 bp, Homo sapiens
aaagtgggggtcctg

SEQ ID NO: 1980431 - DNA, 15 bp, Homo sapiens
aagtgggggtcctgg

SEQ ID NO: 1980432 - DNA, 15 bp, Homo sapiens
agtgggggtcctggg

SEQ ID NO: 1980433 - DNA, 15 bp, Homo sapiens
gtgggggtcctgggg

SEQ ID NO: 1980434 - DNA, 15 bp, Homo sapiens
tgggggtcctggggc

SEQ ID NO: 1980435 - DNA, 15 bp, Homo sapiens
gggggtcctggggcc

SEQ ID NO: 1980436 - DNA, 15 bp, Homo sapiens
ggggtcctggggccc

SEQ ID NO: 1980437 - DNA, 15 bp, Homo sapiens
gggtcctggggccca

SEQ ID NO: 1980438 - DNA, 15 bp, Homo sapiens
ggtcctggggcccag

SEQ ID NO: 1980439 - DNA, 15 bp, Homo sapiens
gtcctggggcccagc

SEQ ID NO: 1980440 - DNA, 15 bp, Homo sapiens
tcctggggcccagct

SEQ ID NO: 1980441 - DNA, 15 bp, Homo sapiens
cctggggcccagctt

SEQ ID NO: 1980442 - DNA, 15 bp, Homo sapiens
ctggggcccagcttc

SEQ ID NO: 1980443 - DNA, 15 bp, Homo sapiens
tggggcccagcttca

SEQ ID NO: 1980444 - DNA, 15 bp, Homo sapiens
ggggcccagcttcag

SEQ ID NO: 1980445 - DNA, 15 bp, Homo sapiens
gggcccagcttcagc

SEQ ID NO: 1980446 - DNA, 15 bp, Homo sapiens
ggcccagcttcagct

SEQ ID NO: 1980447 - DNA, 15 bp, Homo sapiens
gcccagcttcagctt

SEQ ID NO: 1980448 - DNA, 15 bp, Homo sapiens
cccagcttcagcttt

SEQ ID NO: 1980449 - DNA, 15 bp, Homo sapiens
ccagcttcagctttg

SEQ ID NO: 1980450 - DNA, 15 bp, Homo sapiens
cagcttcagctttgc

SEQ ID NO: 1980451 - DNA, 15 bp, Homo sapiens
agcttcagctttgcc

SEQ ID NO: 1980452 - DNA, 15 bp, Homo sapiens
gcttcagctttgcca

SEQ ID NO: 1980453 - DNA, 15 bp, Homo sapiens
cttcagctttgccac

SEQ ID NO: 1980454 - DNA, 15 bp, Homo sapiens
ttcagctttgccact

SEQ ID NO: 1980455 - DNA, 15 bp, Homo sapiens
tcagctttgccactc

SEQ ID NO: 1980456 - DNA, 15 bp, Homo sapiens
cagctttgccactca

SEQ ID NO: 1980457 - DNA, 15 bp, Homo sapiens
agctttgccactcat

SEQ ID NO: 1980458 - DNA, 15 bp, Homo sapiens
gctttgccactcatg

SEQ ID NO: 1980459 - DNA, 15 bp, Homo sapiens
ctttgccactcatga

SEQ ID NO: 1980460 - DNA, 15 bp, Homo sapiens
tttgccactcatgac

SEQ ID NO: 1980461 - DNA, 15 bp, Homo sapiens
ttgccactcatgacc

SEQ ID NO: 1980462 - DNA, 15 bp, Homo sapiens
tgccactcatgacca

SEQ ID NO: 1980463 - DNA, 15 bp, Homo sapiens
gccactcatgaccat

SEQ ID NO: 1980464 - DNA, 15 bp, Homo sapiens
ccactcatgaccatg

SEQ ID NO: 1980465 - DNA, 15 bp, Homo sapiens
cactcatgaccatgg

SEQ ID NO: 1980466 - DNA, 15 bp, Homo sapiens
actcatgaccatggg

SEQ ID NO: 1980467 - DNA, 15 bp, Homo sapiens
ctcatgaccatgggt

SEQ ID NO: 1980468 - DNA, 15 bp, Homo sapiens
tcatgaccatgggtc

SEQ ID NO: 1980469 - DNA, 15 bp, Homo sapiens
catgaccatgggtca

SEQ ID NO: 1980470 - DNA, 15 bp, Homo sapiens
atgaccatgggtcaa

SEQ ID NO: 1980471 - DNA, 15 bp, Homo sapiens
tgaccatgggtcaat

SEQ ID NO: 1980472 - DNA, 15 bp, Homo sapiens
gaccatgggtcaatt

SEQ ID NO: 1980473 - DNA, 15 bp, Homo sapiens
accatgggtcaatta

SEQ ID NO: 1980474 - DNA, 15 bp, Homo sapiens
ccatgggtcaattat

SEQ ID NO: 1980475 - DNA, 15 bp, Homo sapiens
catgggtcaattata

SEQ ID NO: 1980476 - DNA, 15 bp, Homo sapiens
atgggtcaattataa

SEQ ID NO: 1980477 - DNA, 15 bp, Homo sapiens
tgggtcaattataat

SEQ ID NO: 1980478 - DNA, 15 bp, Homo sapiens
gggtcaattataatc

SEQ ID NO: 1980479 - DNA, 15 bp, Homo sapiens
ggtcaattataatct

SEQ ID NO: 1980480 - DNA, 15 bp, Homo sapiens
gtcaattataatctc

SEQ ID NO: 1980481 - DNA, 15 bp, Homo sapiens
tcaattataatctct

SEQ ID NO: 1980482 - DNA, 15 bp, Homo sapiens
caattataatctctg

SEQ ID NO: 1980483 - DNA, 15 bp, Homo sapiens
aattataatctctgt

SEQ ID NO: 1980484 - DNA, 15 bp, Homo sapiens
attataatctctgtg

SEQ ID NO: 1980485 - DNA, 15 bp, Homo sapiens
ttataatctctgtga

SEQ ID NO: 1980486 - DNA, 15 bp, Homo sapiens
tataatctctgtgag

SEQ ID NO: 1980487 - DNA, 15 bp, Homo sapiens
ataatctctgtgagc

SEQ ID NO: 1980488 - DNA, 15 bp, Homo sapiens
taatctctgtgagcc

SEQ ID NO: 1980489 - DNA, 15 bp, Homo sapiens
aatctctgtgagcct

SEQ ID NO: 1980490 - DNA, 15 bp, Homo sapiens
atctctgtgagcctc

SEQ ID NO: 1980491 - DNA, 15 bp, Homo sapiens
tctctgtgagcctca

SEQ ID NO: 1980492 - DNA, 15 bp, Homo sapiens
ctctgtgagcctcag

SEQ ID NO: 1980493 - DNA, 15 bp, Homo sapiens
tctgtgagcctcagt

SEQ ID NO: 1980494 - DNA, 15 bp, Homo sapiens
ctgtgagcctcagtt

SEQ ID NO: 1980495 - DNA, 15 bp, Homo sapiens
tgtgagcctcagttt

SEQ ID NO: 1980496 - DNA, 15 bp, Homo sapiens
gtgagcctcagtttc

SEQ ID NO: 1980497 - DNA, 15 bp, Homo sapiens
tgagcctcagtttcc

SEQ ID NO: 1980498 - DNA, 15 bp, Homo sapiens
gagcctcagtttcct

SEQ ID NO: 1980499 - DNA, 15 bp, Homo sapiens
agcctcagtttcctc

SEQ ID NO: 1980500 - DNA, 15 bp, Homo sapiens
gcctcagtttcctct

SEQ ID NO: 1980501 - DNA, 15 bp, Homo sapiens
cctcagtttcctctt

SEQ ID NO: 1980502 - DNA, 15 bp, Homo sapiens
tcagtttcctcttct

SEQ ID NO: 1980503 - DNA, 15 bp, Homo sapiens
cagtttcctcttctc

SEQ ID NO: 1980504 - DNA, 15 bp, Homo sapiens
agtttcctcttctct

SEQ ID NO: 1980505 - DNA, 15 bp, Homo sapiens
gtttcctcttctcta

SEQ ID NO: 1980506 - DNA, 15 bp, Homo sapiens
tttcctcttctctaa

SEQ ID NO: 1980507 - DNA, 15 bp, Homo sapiens
ttcctcttctctaaa

SEQ ID NO: 1980508 - DNA, 15 bp, Homo sapiens
tcctcttctctaaaa

SEQ ID NO: 1980509 - DNA, 15 bp, Homo sapiens
cctcttctctaaaat

SEQ ID NO: 1980510 - DNA, 15 bp, Homo sapiens
ctcttctctaaaatg

SEQ ID NO: 1980511 - DNA, 15 bp, Homo sapiens
tcttctctaaaatgg

SEQ ID NO: 1980512 - DNA, 15 bp, Homo sapiens
cttctctaaaatggg

SEQ ID NO: 1980513 - DNA, 15 bp, Homo sapiens
ttctctaaaatggga

SEQ ID NO: 1980514 - DNA, 15 bp, Homo sapiens
tctctaaaatgggaa

SEQ ID NO: 1980515 - DNA, 15 bp, Homo sapiens
ctctaaaatgggaac

SEQ ID NO: 1980516 - DNA, 15 bp, Homo sapiens
tctaaaatgggaacc

SEQ ID NO: 1980517 - DNA, 15 bp, Homo sapiens
ctaaaatgggaaccc

SEQ ID NO: 1980518 - DNA, 15 bp, Homo sapiens
taaaatgggaaccct

SEQ ID NO: 1980519 - DNA, 15 bp, Homo sapiens
aaaatgggaaccctg

SEQ ID NO: 1980520 - DNA, 15 bp, Homo sapiens
aaatgggaaccctga

SEQ ID NO: 1980521 - DNA, 15 bp, Homo sapiens
aatgggaaccctgat

SEQ ID NO: 1980522 - DNA, 15 bp, Homo sapiens
atgggaaccctgata

SEQ ID NO: 1980523 - DNA, 15 bp, Homo sapiens
tgggaaccctgatag

SEQ ID NO: 1980524 - DNA, 15 bp, Homo sapiens
gggaaccctgatagt

SEQ ID NO: 1980525 - DNA, 15 bp, Homo sapiens
ggaaccctgatagtg

SEQ ID NO: 1980526 - DNA, 15 bp, Homo sapiens
gaaccctgatagtgc

SEQ ID NO: 1980527 - DNA, 15 bp, Homo sapiens
aaccctgatagtgcc

SEQ ID NO: 1980528 - DNA, 15 bp, Homo sapiens
accctgatagtgcca

SEQ ID NO: 1980529 - DNA, 15 bp, Homo sapiens
ccctgatagtgccac

SEQ ID NO: 1980530 - DNA, 15 bp, Homo sapiens
cctgatagtgccacc

SEQ ID NO: 1980531 - DNA, 15 bp, Homo sapiens
ctgatagtgccacct

SEQ ID NO: 1980532 - DNA, 15 bp, Homo sapiens
tgatagtgccacctc

SEQ ID NO: 1980533 - DNA, 15 bp, Homo sapiens
gatagtgccacctca

SEQ ID NO: 1980534 - DNA, 15 bp, Homo sapiens
atagtgccacctcat

SEQ ID NO: 1980535 - DNA, 15 bp, Homo sapiens
tagtgccacctcata

SEQ ID NO: 1980536 - DNA, 15 bp, Homo sapiens
agtgccacctcatag

SEQ ID NO: 1980537 - DNA, 15 bp, Homo sapiens
gtgccacctcatagg

SEQ ID NO: 1980538 - DNA, 15 bp, Homo sapiens
tgccacctcatagga

SEQ ID NO: 1980539 - DNA, 15 bp, Homo sapiens
gccacctcataggat

SEQ ID NO: 1980540 - DNA, 15 bp, Homo sapiens
ccacctcataggata

SEQ ID NO: 1980541 - DNA, 15 bp, Homo sapiens
cacctcataggatag

SEQ ID NO: 1980542 - DNA, 15 bp, Homo sapiens
acctcataggatagt

SEQ ID NO: 1980543 - DNA, 15 bp, Homo sapiens
cctcataggatagtt

SEQ ID NO: 1980544 - DNA, 15 bp, Homo sapiens
ctcataggatagtta

SEQ ID NO: 1980545 - DNA, 15 bp, Homo sapiens
tcataggatagttat

SEQ ID NO: 1980546 - DNA, 15 bp, Homo sapiens
cataggatagttata

SEQ ID NO: 1980547 - DNA, 15 bp, Homo sapiens
ataggatagttataa

SEQ ID NO: 1980548 - DNA, 15 bp, Homo sapiens
taggatagttataaa

SEQ ID NO: 1980549 - DNA, 15 bp, Homo sapiens
aggatagttataaag

SEQ ID NO: 1980550 - DNA, 15 bp, Homo sapiens
ggatagttataaaga

SEQ ID NO: 1980551 - DNA, 15 bp, Homo sapiens
gatagttataaagat

SEQ ID NO: 1980552 - DNA, 15 bp, Homo sapiens
atagttataaagatg

SEQ ID NO: 1980553 - DNA, 15 bp, Homo sapiens
tagttataaagatga

SEQ ID NO: 1980554 - DNA, 15 bp, Homo sapiens
agttataaagatgag

SEQ ID NO: 1980555 - DNA, 15 bp, Homo sapiens
gttataaagatgagg

SEQ ID NO: 1980556 - DNA, 15 bp, Homo sapiens
ttataaagatgaggt

SEQ ID NO: 1980557 - DNA, 15 bp, Homo sapiens
tataaagatgaggtg

SEQ ID NO: 1980558 - DNA, 15 bp, Homo sapiens
ataaagatgaggtga

SEQ ID NO: 1980559 - DNA, 15 bp, Homo sapiens
taaagatgaggtgac

SEQ ID NO: 1980560 - DNA, 15 bp, Homo sapiens
aaagatgaggtgaca

SEQ ID NO: 1980561 - DNA, 15 bp, Homo sapiens
aagatgaggtgacat

SEQ ID NO: 1980562 - DNA, 15 bp, Homo sapiens
agatgaggtgacatg

SEQ ID NO: 1980563 - DNA, 15 bp, Homo sapiens
gatgaggtgacatga

SEQ ID NO: 1980564 - DNA, 15 bp, Homo sapiens
atgaggtgacatgat

SEQ ID NO: 1980565 - DNA, 15 bp, Homo sapiens
tgaggtgacatgatg

SEQ ID NO: 1980566 - DNA, 15 bp, Homo sapiens
gaggtgacatgatgt

SEQ ID NO: 1980567 - DNA, 15 bp, Homo sapiens
aggtgacatgatgta

SEQ ID NO: 1980568 - DNA, 15 bp, Homo sapiens
ggtgacatgatgtat

SEQ ID NO: 1980569 - DNA, 15 bp, Homo sapiens
gtgacatgatgtatc

SEQ ID NO: 1980570 - DNA, 15 bp, Homo sapiens
tgacatgatgtatca

SEQ ID NO: 1980571 - DNA, 15 bp, Homo sapiens
gacatgatgtatcag

SEQ ID NO: 1980572 - DNA, 15 bp, Homo sapiens
acatgatgtatcaga

SEQ ID NO: 1980573 - DNA, 15 bp, Homo sapiens
catgatgtatcagac

SEQ ID NO: 1980574 - DNA, 15 bp, Homo sapiens
atgatgtatcagacc

SEQ ID NO: 1980575 - DNA, 15 bp, Homo sapiens
tgatgtatcagacct

SEQ ID NO: 1980576 - DNA, 15 bp, Homo sapiens
gatgtatcagacctg

SEQ ID NO: 1980577 - DNA, 15 bp, Homo sapiens
atgtatcagacctgt

SEQ ID NO: 1980578 - DNA, 15 bp, Homo sapiens
tgtatcagacctgtc

SEQ ID NO: 1980579 - DNA, 15 bp, Homo sapiens
gtatcagacctgtca

SEQ ID NO: 1980580 - DNA, 15 bp, Homo sapiens
tatcagacctgtcaa

SEQ ID NO: 1980581 - DNA, 15 bp, Homo sapiens
atcagacctgtcaag

SEQ ID NO: 1980582 - DNA, 15 bp, Homo sapiens
tcagacctgtcaagt

SEQ ID NO: 1980583 - DNA, 15 bp, Homo sapiens
cagacctgtcaagtg

SEQ ID NO: 1980584 - DNA, 15 bp, Homo sapiens
agacctgtcaagtgc

SEQ ID NO: 1980585 - DNA, 15 bp, Homo sapiens
gacctgtcaagtgct

SEQ ID NO: 1980586 - DNA, 15 bp, Homo sapiens
acctgtcaagtgctg

SEQ ID NO: 1980587 - DNA, 15 bp, Homo sapiens
cctgtcaagtgctgt

SEQ ID NO: 1980588 - DNA, 15 bp, Homo sapiens
ctgtcaagtgctgtc

SEQ ID NO: 1980589 - DNA, 15 bp, Homo sapiens
tgtcaagtgctgtca

SEQ ID NO: 1980590 - DNA, 15 bp, Homo sapiens
gtcaagtgctgtcac

SEQ ID NO: 1980591 - DNA, 15 bp, Homo sapiens
tcaagtgctgtcaca

SEQ ID NO: 1980592 - DNA, 15 bp, Homo sapiens
caagtgctgtcacat

SEQ ID NO: 1980593 - DNA, 15 bp, Homo sapiens
aagtgctgtcacatg

SEQ ID NO: 1980594 - DNA, 15 bp, Homo sapiens
agtgctgtcacatgt

SEQ ID NO: 1980595 - DNA, 15 bp, Homo sapiens
gtgctgtcacatgtg

SEQ ID NO: 1980596 - DNA, 15 bp, Homo sapiens
tgctgtcacatgtgt

SEQ ID NO: 1980597 - DNA, 15 bp, Homo sapiens
gctgtcacatgtgtg

SEQ ID NO: 1980598 - DNA, 15 bp, Homo sapiens
ctgtcacatgtgtga

SEQ ID NO: 1980599 - DNA, 15 bp, Homo sapiens
tgtcacatgtgtgac

SEQ ID NO: 1980600 - DNA, 15 bp, Homo sapiens
gtcacatgtgtgact

SEQ ID NO: 1980601 - DNA, 15 bp, Homo sapiens
tcacatgtgtgactg

SEQ ID NO: 1980602 - DNA, 15 bp, Homo sapiens
cacatgtgtgactgt

SEQ ID NO: 1980603 - DNA, 15 bp, Homo sapiens
acatgtgtgactgtt

SEQ ID NO: 1980604 - DNA, 15 bp, Homo sapiens
catgtgtgactgtta

SEQ ID NO: 1980605 - DNA, 15 bp, Homo sapiens
atgtgtgactgttat

SEQ ID NO: 1980606 - DNA, 15 bp, Homo sapiens
tgtgtgactgttatt

SEQ ID NO: 1980607 - DNA, 15 bp, Homo sapiens
gtgtgactgttatta

SEQ ID NO: 1980608 - DNA, 15 bp, Homo sapiens
tgtgactgttattat

SEQ ID NO: 1980609 - DNA, 15 bp, Homo sapiens
gtgactgttattatt

SEQ ID NO: 1980610 - DNA, 15 bp, Homo sapiens
tgactgttattatta

SEQ ID NO: 1980611 - DNA, 15 bp, Homo sapiens
gactgttattattac

SEQ ID NO: 1980612 - DNA, 15 bp, Homo sapiens
ctgttattattacat

SEQ ID NO: 1980613 - DNA, 15 bp, Homo sapiens
tgttattattacatc

SEQ ID NO: 1980614 - DNA, 15 bp, Homo sapiens
gttattattacatct

SEQ ID NO: 1980615 - DNA, 15 bp, Homo sapiens
ttattattacatctt

SEQ ID NO: 1980616 - DNA, 15 bp, Homo sapiens
tattattacatcttt

SEQ ID NO: 1980617 - DNA, 15 bp, Homo sapiens
attattacatctttt

SEQ ID NO: 1980618 - DNA, 15 bp, Homo sapiens
ttattacatcttttc

SEQ ID NO: 1980619 - DNA, 15 bp, Homo sapiens
tattacatcttttct

SEQ ID NO: 1980620 - DNA, 15 bp, Homo sapiens
attacatcttttctt

SEQ ID NO: 1980621 - DNA, 15 bp, Homo sapiens
ttacatcttttcttc

SEQ ID NO: 1980622 - DNA, 15 bp, Homo sapiens
tacatcttttcttct

SEQ ID NO: 1980623 - DNA, 15 bp, Homo sapiens
acatcttttcttctt

SEQ ID NO: 1980624 - DNA, 15 bp, Homo sapiens
catcttttcttcttc

SEQ ID NO: 1980625 - DNA, 15 bp, Homo sapiens
atcttttcttcttct

SEQ ID NO: 1980626 - DNA, 15 bp, Homo sapiens
tcttttcttcttctt

SEQ ID NO: 1980627 - DNA, 15 bp, Homo sapiens
cttttcttcttcttc

SEQ ID NO: 1980628 - DNA, 15 bp, Homo sapiens
ttttcttcttcttcc

SEQ ID NO: 1980629 - DNA, 15 bp, Homo sapiens
tttcttcttcttcct

SEQ ID NO: 1980630 - DNA, 15 bp, Homo sapiens
ttcttcttcttcctt

SEQ ID NO: 1980631 - DNA, 15 bp, Homo sapiens
tcttcttcttccttt

SEQ ID NO: 1980632 - DNA, 15 bp, Homo sapiens
cttcttcttcctttt

SEQ ID NO: 1980633 - DNA, 15 bp, Homo sapiens
tcttcttcctttttt

SEQ ID NO: 1980634 - DNA, 15 bp, Homo sapiens
cttcttccttttttt

SEQ ID NO: 1980635 - DNA, 15 bp, Homo sapiens
ttcttcctttttttt

SEQ ID NO: 1980636 - DNA, 15 bp, Homo sapiens
tcttccttttttttt

SEQ ID NO: 1980637 - DNA, 15 bp, Homo sapiens
cttccttttttttta

SEQ ID NO: 1980638 - DNA, 15 bp, Homo sapiens
ttcctttttttttat

SEQ ID NO: 1980639 - DNA, 15 bp, Homo sapiens
tcctttttttttatt

SEQ ID NO: 1980640 - DNA, 15 bp, Homo sapiens
cctttttttttattt

SEQ ID NO: 1980641 - DNA, 15 bp, Homo sapiens
ctttttttttatttt

SEQ ID NO: 1980642 - DNA, 15 bp, Homo sapiens
ttttttttattttta

SEQ ID NO: 1980643 - DNA, 15 bp, Homo sapiens
tttttttatttttat

SEQ ID NO: 1980644 - DNA, 15 bp, Homo sapiens
tttttattttttttg

SEQ ID NO: 1980645 - DNA, 15 bp, Homo sapiens
ttattttttttgaga

SEQ ID NO: 1980646 - DNA, 15 bp, Homo sapiens
tattttttttgagac

SEQ ID NO: 1980647 - DNA, 15 bp, Homo sapiens
attttttttgagacg

SEQ ID NO: 1980648 - DNA, 15 bp, Homo sapiens
tgagacggagtctcc

SEQ ID NO: 1980649 - DNA, 15 bp, Homo sapiens
gagacggagtctccc

SEQ ID NO: 1980650 - DNA, 15 bp, Homo sapiens
agacggagtctccct

SEQ ID NO: 1980651 - DNA, 15 bp, Homo sapiens
gacggagtctccctc

SEQ ID NO: 1980652 - DNA, 15 bp, Homo sapiens
acggagtctccctct

SEQ ID NO: 1980653 - DNA, 15 bp, Homo sapiens
cggagtctccctctg

SEQ ID NO: 1980654 - DNA, 15 bp, Homo sapiens
ggagtctccctctgt

SEQ ID NO: 1980655 - DNA, 15 bp, Homo sapiens
gagtctccctctgtc

SEQ ID NO: 1980656 - DNA, 15 bp, Homo sapiens
agtctccctctgtcg

SEQ ID NO: 1980657 - DNA, 15 bp, Homo sapiens
ccctctgtcgcccac

SEQ ID NO: 1980658 - DNA, 15 bp, Homo sapiens
cctctgtcgcccacg

SEQ ID NO: 1980659 - DNA, 15 bp, Homo sapiens
ctctgtcgcccacgc

SEQ ID NO: 1980660 - DNA, 15 bp, Homo sapiens
tctgtcgcccacgct

SEQ ID NO: 1980661 - DNA, 15 bp, Homo sapiens
ctgtcgcccacgctg
